(19) United States
(12) Patent Application Publication
(10) Pub. No.: US 2020/0093870 A1
(43) Pub. Date: Mar. 26, 2020

(54) COMPOSITIONS AND METHODS FOR DECOLONIZING ANTIBIOTIC-RESISTANT BACTERIA IN THE GUT

(71) Applicant: Finch Therapeutics, Inc., Somerville, MA (US)

(72) Inventors: Marina SANTIAGO, Somerville, MA (US); Kevin ROELOFS, Somerville, MA (US)

(21) Appl. No.: 16/707,277

(22) Filed: Dec. 9, 2019

Related U.S. Application Data
(63) Continuation of application No. PCT/US2018/045592, filed on Aug. 7, 2018.
(60) Provisional application No. 62/542,033, filed on Aug. 7, 2017.

(51) Int. Cl. A61K 35/741; A61P 31/04; A61P 1/00

(52) U.S. Cl. CPC A61K 35/741; A61P 1/00; A61P 31/04

(57) ABSTRACT

The present invention relates to, in part, compositions and methods for delivery of novel mixtures of bacterial strains for the decolonization and/or eradication of various pathogenic bacteria and, particularly, antibiotic-resistant bacteria (ARB).

### PRIORITY

[0001] This application claims the benefit of and priority to U.S. 62/542,033, filed Aug. 7, 2017, the contents of which are hereby incorporated by reference in their entirety.

### FIELD OF THE INVENTION

[0002] The present invention relates to, in part, compositions and methods for the delivery of novel mixtures of bacterial strains useful for decolonizing and/or eradicating infectious pathogens, e.g., antibiotic-resistant bacteria.

### DESCRIPTION OF THE TEXT FILE SUBMITTED ELECTRONICALLY

[0003] The contents of the text file submitted electronically herewith are incorporated herein by reference in their entirety: A computer readable format copy of the Sequence Listing (filename: FIN-003PC_ST25; date recorded: Aug. 7, 2018; file size: 6.07 MB).

### BACKGROUND

[0004] Antibiotic-Resistant Bacteria (ARB) are a major health care challenge in the US and around the world. Currently, the Centers for Disease Control and Prevention (CDC) estimates that more than two million people in the US develop antibiotic-resistant infections every year, resulting in more than 23,000 deaths. The economic burden of healthcare institution-acquired infections alone in the US is more than $28 billion.

[0005] Many ARBs infect and/or colonize the human gastrointestinal (GI) tract. In fact, gut colonization may be central to the problem of ARB infections. In particular, patients who spend time in healthcare institutions are at a high risk for GI colonization by ARB, especially if they are immunocompromised and/or are being treated with antibiotics and/or treated with an anti-cancer therapy. Such treatments disrupt the gut ecosystem's natural and critical ability to resist infection and colonization by infectious agents, thereby creating an optimal environment for ARB infection, growth, and colonization. These can result in ARB domination of the gut ecosystem. GI colonization by an ARB may be asymptomatic, but colonized patients may shed the ARB into the environment, thereby transmitting the ARB to other patients and to healthcare workers. Moreover, a patients whose gut is colonized and/or dominated by antibiotic-resistant pathogens is him/herself at a higher risk for developing life-threatening bloodstream infections (BSIs) should the ARB translocate across the gut epithelia into the bloodstream; s/he is also at high risk for developing catheter or intravascular-line infections (e.g., central-line infections), for developing chronic inflammatory diseases, for developing meningitis, for developing pneumonia, e.g., ventilator-associated pneumonia, for developing skin and soft tissue infections, for developing surgical-site infections, for developing urinary tract infections (e.g., antibiotic-resistant urinary tract infections and catheter-associated urinary tract infections), for developing wound infections, and for developing other well-known infections: antibiotic-resistant infections and antibiotic-sensitive infections.

[0006] Some healthcare institutions perform active surveillance, including testing patients for ARB infection or colonization upon admission and throughout a patient's stay, however, such active surveillance can be costly; thus, few institutions can or have implemented such surveillance. ARB-colonized or infected patients must be put under contact precautions or isolation to prevent transmission of the ARB to other patients and to healthcare workers. Yet, isolation of ARB-colonized or infected patients does nothing to reduce the patient's risk for BSI and other related infections (as known in the art and/or as described herein), and studies have shown isolated patients receive worse care than non-isolated patients; additionally, isolation itself causes emotional distress and is deleterious to the patient's outcome. Unfortunately, there are currently no therapies for decolonizing and/or eradicating ARB from GI-colonized patients.

[0007] Accordingly, there remains an unmet need for effective therapies that decolonize and/or eradicate and/or reduce the load of ARB from GI colonized patients.

### SUMMARY OF THE INVENTION

[0008] The present invention is based, in part, on the discovery that certain mixtures of commensal bacterial strains can decolonize and/or eradicate and/or reduce the load of antibiotic-resistant enteric pathogens in the gut. Thus, the present invention decreases the economic burden of antibiotic resistance through reduced patient isolation, minimizes a patient's length of stay at a medical treatment center, reduces the number of antibiotic-resistant infections, and lessens the need for antibiotic prescriptions. Additionally, the present invention diminishes the likelihood of transmission of antibiotic-resistant bacteria to other patients and diminishes the risk of bloodstream infection in the original patient, which is a condition with a high mortality rate. Additionally, the present invention improves antimicrobial stewardship by decreasing emergence and prevalence of antibiotic-resistant infections.

[0009] In various aspects, the present invention relates to a pharmaceutical composition comprising a bacterial mixture. The bacterial mixture includes at least one bacterial strain comprising a 16S rRNA sequence that is greater than about 97% identical (e.g., about 98%, 99%, 99.5%, and 100% identical) to the 16S rRNA sequence of any one of the operational taxonomic units (OTUs) recited in Table 5 and/or to the 16S rRNA sequence of any one OTU of a genus recited in Table 6.

[0010] In various embodiments, the bacterial mixture includes at least two bacterial strains (e.g., at least about five, ten, twenty, thirty, forty, fifty, and one-hundred bacterial strains), wherein a plurality of the bacterial strains comprises a 16S rRNA sequence that is greater than about 97% identical (e.g., about 98%, 99%, 99.5%, and 100% identical) to the 16S rRNA sequence of any one of the OTUs recited in Table 5 and/or to the 16S rRNA sequence of any one OTU of a genus recited in Table 6. In embodiments, the bacterial mixture includes at least two bacterial strains e.g., at least about five, ten, twenty, thirty, forty, fifty, and one-hundred bacterial strains), wherein each bacterial strain comprises a 16S rRNA sequence that is greater than about 97% identical (e.g., about 98%, 99%, 99.5%, and 100% identical) to the 16S rRNA sequence of one of the OTUs recited in Table 5 and/or to the 16S rRNA sequence of any one OTU of a genus recited in Table 6.

[0011] In various embodiments, the bacterial mixture includes between about five and one hundred bacterial strains (e.g., between about ten and about seventy-five, between about fifteen and about fifty, between about twenty and about forty-five, between about twenty-five and about forty bacterial, and between about thirty and about thirty-five bacterial strains), wherein a plurality of the bacterial strains comprise a 16S rRNA sequence that is greater than about 97% identical (e.g., about 98%, 99%, 99.5%, and 100% identical) to the 16S rRNA sequence of any one of the OTUs recited in Table 5 and/or to the 16S rRNA sequence of any one OTU of a genus recited in Table 6. In embodiments, the bacterial mixture includes between about five and about one hundred bacterial strains (e.g., between about ten and about seventy-five, between about fifteen and about fifty, between about twenty and about forty-five, between about twenty-five and about forty bacterial, and between about thirty and about thirty-five bacterial strains), wherein each bacterial strain comprises a 16S rRNA sequence that is greater than about 97% identical (e.g., about 98%, 99%, 99.5%, and 100% identical) to the 16S rRNA sequence of one of the OTUs recited in Table 5 and/or to the 16S rRNA sequence of any one OTU of a genus recited in Table 6.

[0012] In various embodiments, the bacterial mixture comprises a fecal microbiota preparation that comprises a donor's entire or substantially complete microbiota. In one aspect, a fecal microbiota preparation comprises a non-selected fecal microbiota. In another aspect, a fecal microbiota preparation comprises an isolated or purified population of live non-pathogenic fecal bacteria. In a further aspect, a fecal microbiota preparation comprises a non-selected and substantially complete fecal microbiota preparation from a single donor. In such embodiments, the bacterial mixture includes at least one bacterial strain comprising a 16S rRNA sequence that is greater than about 97% identical (e.g., about 98%, 99%, 99.5%, and 100% identical) to the 16S rRNA sequence of any one of the operational taxonomic units (OTUs) recited in Table 5 and/or to the 16S rRNA sequence of any one OTU of a genus recited in Table 6.

[0013] In various embodiments, at least one bacterial strain in a bacterial mixture is a commensal bacterial strain.

[0014] In various embodiments, at least one bacterial strain in a bacterial mixture is obtained from one or more human beings, e.g., a human being who is healthy and/or satisfies at least one selection criterion.

[0015] In various embodiments, at least one bacterial strain in a bacterial mixture is obtained from a laboratory stock or bacterial cell bank.

[0016] In various embodiments, at least one bacterial strain in a bacterial mixture is isolated, cultured, and/or purified from its source material prior to forming the bacterial mixture. In various embodiments, at least one bacterial strain in a bacterial mixture is not isolated, cultured, and/or purified from its source material prior to forming the bacterial mixture.

[0017] In various embodiments, at least one bacterial strain is included in a bacterial mixture due to its ability to directly inhibit an antibiotic-resistant bacterium (ARB), for example through production of a secreted product and/or its capability to directly compete with the ARB for a niche and/or for nutrients.

[0018] In various embodiments, a pharmaceutical composition further includes a pharmaceutically acceptable excipient. In various embodiments, a pharmaceutical composition is formulated for oral administration and/or for delivery of the bacterial mixture to an intestine, e.g., the small intestine and/or the large intestine (e.g., including the cecum). In various embodiments, delivery of a pharmaceutical composition is substantially completed prior to the rectum. In various embodiments, a pharmaceutical composition is formulated as a capsule, e.g., a capsule including a delayed-release coating.

[0019] In various embodiments, a pharmaceutical composition is formulated for vaginal administration and/or for delivery of the bacterial mixture to the female reproductive system.

[0020] In various embodiments, a pharmaceutical composition includes a plurality of the bacterial strains that are live, vegetative cells, and/or lyophilized cells. A plurality of the bacterial strains in the bacterial mixture can be spores and/or spore-forming. In various embodiments, a plurality of the bacterial strains (e.g., all the bacterial strains) in the bacterial mixture can be non-pathogenic bacteria.

[0021] In various embodiments, a pharmaceutical composition is capable of decolonizing and/or eradicating a pathogen (e.g., an antibiotic-resistant bacterium (ARB)) in the gastrointestinal (GI) tract of a subject, in the genitourinary tract of the subject, and/or in the bloodstream of the subject, e.g., a human subject.

[0022] In various aspects, the present invention relates to a method for treating an infection by one or more pathogens. The method includes administering to a subject (e.g., a human subject) in need thereof an effective amount of a pharmaceutical composition of any herein-disclosed aspect or embodiment.

[0023] In various embodiments, the one or more pathogens has infected and/or colonized the GI tract of the subject, the genitourinary tract of the subject, and/or the bloodstream of the subject. In various embodiments, administering an effective amount of the pharmaceutical composition decolonizes the one or more pathogens and/or eradicates the one or more pathogens. In various embodiments, the one or more pathogens treated by the method includes one or more of Aeromonas hydrophila, Bacillus, e.g., Bacillus cereus, Bifidobacterium, Bordetella, Borrelia, Brucella, Burkholderia, C. difficile, Campylobacter, e.g., Campylobacter fetus and Campylobacter jejuni, Chlamydia, Chlamydophila, Clostridium, e.g., Clostridium botulinum, Clostridium difficile, and Clostridium perfringens, Corynebacterium, Coxiella, Ehrlichia, Enterobacteriaceae, e.g., Carbapenem-resistent Enterobacteriaceae (CRE) and Extended Spectrum Beta-Lactamase producing Enterobacteriaceae (ESBL-E), fluoroquinolone-resistant Enterobacteriaceae, Enterococcus, e.g., vancomycin-resistant enterococcus spp., extended spectrum beta-lactam resistant Enterococci (ESBL), and vancomycin-resistant Enterococci (VRE), Escherichia, e.g., enteroaggregative Escherichia coli, enterohemorrhagic Escherichia coli, enteroinvasive Escherichia coli, enteropathogenic E. coli, enterotoxigenic Escherichia coli (such as but not limited to LT and/or ST), Escherichia coli 0157:H7, and multi-drug resistant bacteria E. coli, Francisella, Haemophilus, Helicobacter, e.g., Helicobacter pylori, Klebsiella, e.g., Klebsiellia pneumonia and multi-drug resistant bacteria Klebsiella, Legionella, Leptospira, Listeria, e.g., Lysteria monocytogenes, Morganella, Mycobacterium, Mycoplasma, Neisseria, Orientia, Plesiomonas shigelloides, Antibiotic-resistant Proteobacteria, Proteus, Pseudomonas, Rickettsia, Salmonella, e.g., Salmonella paratyphi, Salmonella spp., and Salmonella typhi, Shigella, e.g., Shigella spp., Staphylococcus, e.g., Staphylococcus aureus and Staphylococcus spp., Streptococcus, Treponema, Vibrio, e.g., Vibrio cholerae, Vibrio parahaemolyticus, Vibrio spp., and Vibrio vulnificus, and Yersinia, e.g., Yersinia enterocolitica. At least one of the one or more pathogens can be an antibiotic-resistant bacterium (ARB), e.g., Antibiotic-resistant Proteobacteria, Vancomycin Resistant Enterococcus (VRE), Carbapenem Resistant Enterobacteriaceae (CRE), fluoroquinolone-resistant Enterobacteriaceae, or Extended Spectrum Beta-Lactamase producing Enterobacteriaceae (ESBL-E).

[0024] In various aspects, the present invention relates to a method for preventing an infection by one or more pathogens. The method includes administering to a subject (e.g., a human subject) in need thereof an effective amount of a pharmaceutical composition of any herein-disclosed aspect or embodiment.

[0025] In various embodiments, the one or more pathogens have not yet infected and/or colonized the GI tract of the subject, the genitourinary tract of the subject, and/or the bloodstream of the subject. In various embodiments, administering an effective amount of the pharmaceutical composition prevents infection and/or colonization. In various embodiments, the one or more pathogens have infected and/or colonized the GI tract of the subject and have not infected and/or colonized the genitourinary tract of the subject and/or the bloodstream of the subject. In various embodiments, administering an effective amount of the pharmaceutical composition prevents infection and/or colonization of the genitourinary tract of the subject and/or the bloodstream of the subject.

[0026] In various embodiments, the subject has been directly or indirectly in contact with a subject having an infection or colonization by the one or more pathogens.

[0027] In various embodiments, the one or more pathogens includes one or more of Aeromonas hydrophila, Bacillus, e.g., Bacillus cereus, Bifidobacterium, Bordetella, Borrelia, Brucella, Burkholderia, C. difficile, Campylobacter, e.g., Campylobacter fetus and Campylobacter jejuni, Chlamydia, Chlamydophila, Clostridium, e.g., Clostridium botulinum, Clostridium difficile, and Clostridium perfringens, Corynebacterium, Coxiella, Ehrlichia, Enterobacteriaceae, e.g., Carbapenem-resistent Enterobacteriaceae (CRE), fluoroquinolone-resistant Enterobacteriaceae, and Extended Spectrum Beta-Lactamase producing Enterobacteriaceae (ESBL-E), Enterococcus, e.g., vancomycin-resistant enterococcus spp., extended spectrum beta-lactam resistant Enterococci (ESBL), and vancomycin-resistant Enterococci (VRE), Escherichia, e.g., enteroaggregative Escherichia coli, enterohemorrhagic Escherichia coli, enteroinvasive Escherichia coli, enteropathogenic E. coli, enterotoxigenic Escherichia coli (such as but not limited to LT and/or ST), Escherichia coli O157:H7, and multi-drug resistant bacteria E. coli, Francisella, Haemophilus, Helicobacter, e.g., Helicobacter pylori, Klebsiella, e.g., Klebsiellia pneumonia and multi-drug resistant bacteria Klebsiella, Legionella, Leptospira, Listeria, e.g., Lysteria monocytogenes, Morganella, Mycobacterium, Mycoplasma, Neisseria, Orientia, Plesiomonas shigelloides, Antibiotic-resistant Proteobacteria, Proteus, Pseudomonas, Rickettsia, Salmonella, e.g., Salmonella paratyphi, Salmonella spp., and Salmonella typhi, Shigella, e.g., Shigella spp., Staphylococcus, e.g., Staphylococcus aureus and Staphylococcus spp., Streptococcus, Treponema, Vibrio, e.g., Vibrio cholerae, Vibrio parahaemolyticus, Vibrio spp., and Vibrio vulnificus, and Yersinia, e.g., Yersinia enterocolitica. At least one of the one or more pathogens can be an antibiotic-resistant bacterium (ARB), e.g., Antibiotic-resistant Proteobacteria, Vancomycin Resistant Enterococcus (VRE), Carbapenem Resistant Enterobacteriaceae (CRE), fluoroquinolone-resistant Enterobacteriaceae, or Extended Spectrum Beta-Lactamase producing Enterobacteriaceae (ESBL-E).

[0028] In various embodiments, a subject in need thereof has chronic kidney disease, cancer, and/or received an organ transplant.

[0029] In various embodiments, a subject in need thereof has received, is receiving, or will receive an anti-cancer therapeutic agent and/or an anti-cancer therapy. Thus, the pharmaceutical compositions find use in reducing, treating, or preventing a side effect of an anti-cancer therapeutic agent and/or a side effect of an anti-cancer therapy and/or in increasing efficacy of an anti-cancer therapeutic agent and/or anti-cancer therapy. The anti-cancer therapy may be surgery, radiation therapy, chemotherapy (including hormonal therapy) and/or targeted therapy (including an immunotherapy). In embodiments, the subject in need thereof is suffering from a side effect of the anti-cancer therapy caused by or related to gut dysbiosis.

[0030] An aspect of the present invention provides methods for increasing efficacy of an anti-cancer therapeutic agent and/or anti-cancer therapy. The method comprises administering to a subject in need thereof an effective amount of a pharmaceutical composition comprising a bacterial mixture as disclosed herein. The pharmaceutical composition is administered before, after, and/or contemporaneously with the anti-cancer therapeutic agent and/or anti-cancer therapy.

[0031] The subject in need thereof can be in an outpatient setting, hospitalized and/or in a long-term care facility.

[0032] In various embodiments, a subject in need thereof has or is at risk for a bloodstream infection (BSI), catheter or intravascular-line infections (e.g., central-line infections), chronic inflammatory diseases, meningitis, pneumonia, e.g., ventilator-associated pneumonia, skin and soft tissue infections, surgical-site infections, urinary tract infections (e.g., antibiotic-resistant urinary tract infections and catheter-associated urinary tract infections), wound infections, and/or other well-known infections: antibiotic-resistant infections and antibiotic-sensitive infections.

[0033] Any aspect or embodiment disclosed herein can be combined with any other aspect or embodiment as disclosed herein.

### BRIEF DESCRIPTION OF THE FIGURES

[0034] FIG. 1 is a pie chart showing percentages of all operational taxonomic units (OTUs) in the GreenGenes database that are not found in the healthy human gut, that are found in a healthy human gut but not included in Table 5, and that are found in a healthy human gut and are included in Table 5.

### DETAILED DESCRIPTION

[0035] The present invention is based, in part, on the discovery that certain mixtures of commensal bacterial strains, including non-selected or substantially complete fecal microbiota preparations, can decolonize and/or eradicate antibiotic-resistant enteric pathogens, e.g., caused by inappropriate broad-spectrum antibiotic use, by a nosocomial infection, or by a previous or current anti-cancer therapy. Thus, instead of developing new antibiotics for decolonization, the present invention includes novel therapeutics that treat gut dysbiosis, in part, by restoring ARB-colonization resistance which is naturally provided by the human microbiome. Thus, the present invention is a more effective long-term strategy for combating antibiotic resistance than a search for and use of new antibiotics. Moreover, the bacterial mixtures can increase efficacy of an anti-cancer therapy, e.g., by simulating an immune response against a cancer cell, and can decrease the severity of a side effect or eliminate the side effect of an anti-cancer therapy, e.g., by promoting the decolonization and/or eradicating various pathogenic bacteria and/or repairing/repopulating his/her gut microbiome after receiving the anti-cancer therapy. Thus, the bacterial mixtures of the present invention are also useful in cancer-related applications.

[0036] Mixtures of Bacterial Strains

[0037] The present invention relates to pharmaceutical compositions of mixtures of bacterial strains that are introduced into the gut and promote the decolonization and/or eradication of various pathogenic bacteria; in particular antibiotic-resistant colonizing pathogens including but not limited to: Antibiotic-resistant Proteobacteria, Vancomycin Resistant Enterococcus (VRE), Carbapenem Resistant Enterobacteriaceae (CRE), fluoroquinolone-resistant Enterobacteriaceae, and Extended Spectrum Beta-Lactamase producing Enterobacteriaceae (ESBL-E).

[0038] In embodiments, and without wishing to be bound by theory, the mixture of bacterial strains of the present invention acts to protect patients through one or more mechanisms. For example, a first mechanism is direct inhibition of the pathogenic bacteria through production of secreted products and a second mechanism is through competition for nutrients in the gut.

[0039] The present invention is also useful in patient populations such as chronic kidney disease on hemodialysis, oncology, and solid organ transplant patients that are at a high risk for ARB colonization and BSI. The present invention is also useful for patients who are in an outpatient setting, hospitalized, and/or in long-term care facilities.

[0040] The mixture of bacterial strains of the present invention can be delivered to patients in a variety of ways including orally (e.g., in a capsule), via ND/NG tube, intravaginally (e.g., as vaginal suppository), or colonoscopically. The mixture can also be formulated in a multitude of formulations including pure and/or isolated cultures, both lyophilized bacteria and aqueous solutions, spores, and as part of a broader community or mixture of bacteria (e.g., a mixture of natural communities, including bacteria contained in a source material, and including a substantially complete fecal microbiota of a single healthy stool donor).

[0041] In embodiments, the present mixtures of bacterial strains are substantially complete fecal microbiota preparations (e.g., from a single healthy donor). A substantially complete fecal microbiota preparation generally comprises a full complement of functional microorganisms found in feces of one or more healthy humans.

[0042] In embodiments, a present mixture of bacterial strains comprises a full complement of functional microorganisms found in feces of one healthy human or in feces of more than one healthy human donor. In embodiments, a present mixture of bacterial strains comprises a full complement of functional microorganisms found in feces of one healthy human or in feces of more than one healthy human donor and further comprises at least one bacterial strain comprising a 16S rRNA sequence that is greater than about 97% identical (e.g., about 98%, 99%, 99.5%, and 100% identical) to the 16S rRNA sequence of any one of the operational taxonomic units (OTUs) recited in Table 5 and/or to the 16S rRNA sequence of any one OTU of a genus recited in Table 6. In other words, a bacterial mixture comprising at least one bacterial strain in the bacterial mixture which comprises a 16S rRNA sequence that is greater than about 97% identical to the 16S rRNA sequence of any one OTU recited in Table 5 or any one OTU of a genus recited in Table 6 could further include a full complement of functional microorganisms, as disclosed herein.

[0043] In embodiments, a present mixture of bacterial strains comprises “less than the full complement” of functional microorganisms found in feces of one healthy human or in feces of more than one healthy human donor; here, at least one functional microorganism has been omitted from the full complement. In embodiments, a present mixture of bacterial strains comprises less than the full complement of functional microorganisms found in feces of one healthy human or in feces of more than one healthy human donor and further comprises at least one bacterial strain comprising a 16S rRNA sequence that is greater than about 97% identical (e.g., about 98%, 99%, 99.5%, and 100% identical) to the 16S rRNA sequence of any one of the operational taxonomic units (OTUs) recited in Table 5 and/or to the 16S rRNA sequence of any one OTU of a genus recited in Table 6. In other words, a bacterial mixture comprising at least one bacterial strain in the bacterial mixture which comprises a 16S rRNA sequence that is greater than about 97% identical to the 16S rRNA sequence of any one OTU recited in Table 5 or any one OTU of a genus recited in Table 6 could further include less than the full complement of functional microorganisms, as disclosed herein.

[0044] In various embodiments, the bacterial strains of the invention comprise bacteria isolated or purified from one or more humans. In various embodiments, the present mixtures of bacterial strains are isolated or purified from one or more humans. For instance, the isolation or purification may be from feces of the one or more humans. Further, the isolation or purification may be from aspirates of the fluid in the GI tract or mucosal biopsies from a site in the GI tract.

[0045] In various embodiments, the bacterial strains of the invention are isolated or purified from its source material, i.e., separated from at least some of the components with which they were associated when initially produced (e.g., when isolated from nature, such as from feces, the bacterial strains can be isolated from fiber and rough particulate matter; in other embodiments, when the bacterial strains are isolated in an experimental setting (e.g., from a laboratory stock, the bacteria can be isolated from associated media and minerals) and/or produced, prepared, purified, and/or manufactured by man. Bacterial strains may be separated from at least about 10%, or about 20%, or about 30%, or about 40%, or about 50%, or about 60%, or about 70%, or about 80%, or about 90%, or more of the other components with which they were initially associated. In some embodiments, bacterial strains are more than about 80%, or about 85%, or about 90%, or about 91%, or about 92%, or about 93%, or about 94%, or about 95%, or about 96%, or about 97%, or about 98%, or about 99%, or more than about 99% pure.

[0046] In embodiments, bacterial strains for a bacterial mixture are directly obtained from human feces. In these embodiments, fecal matter is collected from one or more humans and processed ultimately until a formulation suitable for oral delivery and/or delivery into the GI tract is prepared.

[0047] In various embodiments, fecal matter is collected from one or more humans and processed ultimately until a formulation suitable for vaginal delivery is prepared. An example of such formulation is a vaginal suppository.

[0048] In other embodiments, bacterial strains for a bacterial mixture are indirectly obtained from human feces and/or are obtained independent of human feces (e.g., from a bacterial cell bank or from a laboratory stock). When indirectly obtained, bacterial strains from human feces are cultured and the bacteria are expanded and then isolated and/or purified. The isolated/purified bacteria can be introduced into a bacterial mixture comprising bacterial strains directly obtained from human feces. Alternately, a plurality of isolated/purified bacteria can be combined into a defined bacterial mixture comprising only bacterial strains indirectly obtained from human feces or obtained independent of human feces.

[0049] In various embodiments, human feces are obtained from screened, qualified donors.

[0050] In embodiments, a qualified donor provides feces having a full complement of functional microorganisms found in feces of one or more healthy humans, as disclosed herein.

[0051] In embodiments, a qualified donor provides feces having at least one bacterial strain (e.g., a plurality of bacterial strains) comprising a 16S rRNA sequence that is greater than about 97% identical (e.g., about 98%, 99%, 99.5%, and 100% identical) to the 16S rRNA sequence of any one of the operational taxonomic units (OTUs) recited in Table 5 and/or to the 16S rRNA sequence of any one OTU of a genus recited in Table 6. Moreover, the qualified donor provides feces substantially lacking bacterial strains known to be associated with infectious diseases, as disclosed elsewhere herein.

[0052] In embodiments of the present invention, potential donors are screened via: (1) Initial Preliminary Screen. Prior to enrollment, potential donors (e.g., aged about 18 to about 50) undergo a preliminary screen comprising a subset of questions selected from a Donor Health Questionnaire (DHQ) to assess eligibility and/or (2) In-Person Donor Interview. If the potential donor passes the initial preliminary screen, he/she conducts in-person interview and clinical assessment with a healthcare professional. As part of this interview the potential donor completes informed consent and a donor affidavit attesting to provide true, accurate, and complete information. The DHQ, in-person interview, and clinical assessment determine the potential donor's eligibility as a donor.

[0053] The DHQ and clinical assessment identify relevant criteria which would preclude one from being a donor (e.g., temporarily and permanently). Three categories of criteria covered by a DHQ include: (1) Infectious risk factors, e.g., risk for factors for multi-drug resistance organisms (MDROs); high-risk sexual behaviors; social history, including illicit drug use; high-risk travel history (including a 12-month exclusion if a potential donor has traveled to a high-risk or very high-risk area, as defined by current International SOS (ISOS) guidelines); (2) potential microbiome-mediated conditions and general health status, e.g., gastrointestinal comorbidities; metabolic comorbidities; neurological comorbidities; psychiatric comorbidities; chronic pain syndromes; infectious diseases; autoimmune diseases; atopy, asthma and allergies (food and other); malignancy; surgeries/other medical history; current symptoms (including stool habits); medications including antimicrobial therapy; diet; and family history; and (3) pregnancy and breastfeeding status, for potential female donors. In embodiments, the clinical assessment includes, as examples, determination of vital signs including temperature, blood pressure, heart rate, respiratory rate, waist circumference, and body mass index (BMI).

[0054] In embodiments, the DHQ is analogous to that used by the Red Cross for screening potential blood donors (with fewer or additional questions, if desired).

[0055] Potential donors who are eligible to be donors based upon their DHQ, in-person interview results, and clinical assessment then undergo a series of serological, stool, and nasal swab screens/tests. Serological, stool, and nasal swab testing/screening are performed in conjunction with a diagnostic laboratory, e.g., a Clinical Laboratory Improvement Amendments (CLIA)-certified diagnostic laboratory.

[0056] Table 1 provides an overview of exemplary serological, stool, and nasal swab screens/tests conducted as part of the donor screening process of various embodiments. Screening/testing is performed under conditions well-known in the art, such as, by way of a non-limiting example: Hepatitis C may be detected by an immunoassay (IA), Shiga may be detected by enzyme immunoassay (EIA), and Clostridium difficile may be detected by real-time polymerase chain reaction (RT-PCR).

TABLE 1
Exemplary Serological, Stool, and Nasal Swab Screens/Tests

Pathogen

| Serological | HIV 1/2 | |
|---|---|---|
| Testing | Hepatitis A | |
| | Hepatitis B | |
| | Hepatitis C | |
| | Treponema pallidum | |
| | Strongyloides | |
| Stool | Multi-Drug Resistant | VRE |
| Testing | Organisms | CRE |
| | | FRE |
| | | ESBL |
| | Salmonella spp | |
| | Shigella spp | |
| | Campylobacter spp | |
| | Vibrio spp | |
| | Rotavirus A | |
| | Cryptosporidium spp | |
| | Shiga | |
| | Giardia lamblia | |
| | Adenovirus | |
| | Norovirus | |
| | Clostridium difficile (e.g., a producer of Toxin B) | |
| | Cryptosporidium spp | |
| | Helicobacter pylori | |
| | Ova and parasites | |
| | Cyclospora and Isospora | |
| | Microsporidia | |
| | Bristol Stool Type assessment | |
| Nasal Swab | Multi-Drug Resistant | VRE |
| | Organisms | CRE |
| | | FRE |
| | | MRSA |
| | | ESBL |

VRE = Vancomycin-resistant enterococci; CRE = carbapenem-resistant Enterobacteriaceae; ESBL = Extended-spectrum beta-lactamases; FRE = fluoroquinolone-resistant Enterobacteriaceae.

[0057] In some embodiments, a potential donor is excluded if he/she has a positive result in a test/screen for an infectious disease, e.g., caused by one of the pathogens listed in Table 1. In some embodiments, a potential donor who tests positive for HIV-1/2, Hepatitis B, or Hepatitis C is indefinitely excluded from donating.

[0058] In some embodiments, a potential donor who tests positive for Hepatitis A, Treponema pallidum, or Strongyloides is deferred from donating until eight weeks after a successful treatment has been completed, symptoms have resolved, and no recurrence of symptoms have occurred.

[0059] In some embodiments, a potential donor who tests positive for Adenovirus, Campylobacter spp, Clostridium difficile toxin B, Cryptosporidium spp, Cyclospora and Isospora, Giardia lamblia, Proteus, Morganella, Helicobacter pylori, Microsporidia, Norovirus, Ova and parasites, Salmonella spp, Shiga, Shigella spp, or Vibrio spp, is immediately placed on hold and deferred for eight weeks from symptom resolution, completion of treatment, and no recurrence. Screened donors deferred for eight weeks from symptom resolution, completion of treatment, and no recurrence due to any of the above may undergo a full repeat screen to evaluate for inclusion.

[0060] In some embodiments, a potential donor who tests positive for rotavirus is placed immediately on donation hold and undergoes repeat confirmatory testing. If confirmed positive, these donors are ineligible for donation for eight weeks. Screened donors deferred for eight weeks due to rotavirus may undergo a full repeat screen to evaluate for inclusion.

[0061] In some embodiments, a potential donor who tests positive for a Multi-Drug Resistant Organism (MDROs), e.g., Vancomycin-resistant Enterococcus (VRE), Carbapenem-resistant enterobacteriaceae (CRE), fluoroquinolone-resistant Enterobacteriaceae (FRE), and Extended-spectrum beta-lactamase (ESBL) is immediately placed on hold and deferred for eight weeks after successful treatment/decolonization with no symptoms or recurrence. Screened donors deferred for eight weeks after successful treatment/decolonization with no symptoms or recurrence due to any of the above may undergo a full repeat screen to evaluate for inclusion.

[0062] In some embodiments, a potential donor who tests positive for Methicillin-resistant Staphylococcus aureus (MRSA) is immediately placed on hold and deferred for eight weeks after successful treatment/decolonization with no symptoms or recurrence. Screened donors deferred for eight weeks after successful treatment/decolonization with no symptoms or recurrence due to any of the above may undergo a full repeat screen to evaluate for inclusion.

[0063] In some embodiments, potential donors may submit samples for additional screening which may include assays for Liver Function Panel, Alanine Aminotransferase (ALT), Aspartate Aminotransferase (AST), Alkaline Phosphatase (ALP), Albumin, Bilirubin (Total, direct, or indirect), and Complete Blood Count (CBC) with Differential. Donors whose results from these Additional Screening assays are outside the bounds of normal (see, e.g., Table 2) are ineligible to donate stool.

TABLE 2
Exemplary Low and High limit for Complete Blood
Count (CBC) and Hepatic Function Panel (HFP)

| Test | Category | Low | High | Units |
|---|---|---|---|---|
| CBC | WBC | 3.8 | 10.8 | ×10³/μL |
| CBC | RBC | 4.20 | 5.80 | ×10⁶/μL |
| CBC | Hemoglobin | 13.2 | 17.1 | g/dL |
| CBC | Hematocrit | 38.5 | 50.0 | % |
| CBC | MCV | 80 | 100 | fL |
| CBC | MCH | 27.0 | 33.0 | pg |
| CBC | MCHC | 32.0 | 36.0 | g/dL |
| CBC | RDW | 11 | 15 | % |
| CBC | Platelets | 140 | 400 | ×10³/μL |
| CBC | MPV | 7.5 | 11.5 | fL |
| CBC | Absolute Neutrophils | 1500 | 7800 | cells/μL |
| CBC | Absolute Lymphocytes | 850 | 3900 | cells/μL |
| CBC | Absolute Monocytes | 200 | 950 | cells/μL |
| CBC | Absolute Eosinophils | 15 | 500 | cells/μL |
| CBC | Absolute Basophils | 0 | 200 | cells/μL |
| HFP | Protein, Total, Serum | 6.1 | 8.1 | g/dL |
| HFP | Albumin, Serum | 3.6 | 5.1 | g/dL |
| HFP | Bilirubin, Total | 0.2 | 1.2 | mg/dL |
| HFP | Bilirubin, Direct | 0.00 | 0.20 | mg/dL |
| HFP | Bilirubin, Indirect | 0.2 | 1.2 | mg/dL |
| HFP | Alkaline Phosphatase, Serum | 40 | 115 | U/L |
| HFP | AST (SGOT) | 10 | 40 | U/L |
| HFP | ALT (SGPT) | 9 | 46 | U/L |

[0064] If the cause of abnormal assay results is found to be either infectious or may otherwise compromise the health of the donor or an FMT recipient, that donor may be excluded from donating stool for clinical use. If the cause of the abnormal reading is determined to be not clinically significant and to pose no threat to an FMT recipient, as examples, the result is an incidental artifact or due to Gilbert's syndrome, then the donor may be considered for enrollment/re-enrollment.

[0065] Other screens or tests may also be used to exclude or include potential donors.

[0066] In some embodiments, a potential donor may be positive for one or both of Cytomegalovirus (CMV) and Epstein-Barr Virus (EBV). There have not been any reported cases of CMV or EBV infection among those who have received FMT from adult donors (Wang et al. 2016), including a large series of immunocompromised patients (Kelly et al. 2014) and solid organ transplant patients (Fischer et al. 2017).

[0067] In some embodiments, a potential donor may be positive for Listeria monocytogenes. In embodiments, donated material and/or serological samples are not tested for L. monocytogenes unless the donor is symptomatic for a L. monocytogenes infection.

[0068] In some embodiments, before or after a stool donation event, the pre-screened donor again completes a DHQ. A donor's eligibility will be further evaluated should he/she have any positive responses in this questionnaire. If the donor's responses indicate any changes in health status that involve an exclusion criterion, the donated material is discarded. When the donor's DHQ results do not indicate exclusion, the container and the stool material contained therein is processed.

[0069] In some embodiments, a donor may complete an in-person clinical health check around the time of a stool donation to ensure the donor's health. If the donor does not have good/optimal health, the donated material may be discarded.

[0070] In some embodiments, a donor is generally of good health and has microbiota consistent with such good health. Often, the donor has not been administered an antibiotic compound within a certain period prior to a stool donation.

[0071] In some embodiments, the donor does not have irritable bowel disease (e.g., Crohn's disease and ulcerative colitis), irritable bowel syndrome, celiac disease, colorectal cancer, or a family history of these diseases.

[0072] In some embodiments, a donor is selected for the presence of certain genera and/or species that provide increased efficacy of therapeutic compositions containing these genera or species. In some embodiments, a preferred donor donates stool material having a relatively high concentration of spores. In some embodiments, a preferred donor donates stool material comprising spores having increased efficacy.

[0073] In some embodiments, a sample of a donated stool material or a donated stool may be used for Additional Screening. Additional Screening may include assays for Liver Function Panel, Alanine Aminotransferase (ALT), Aspartate Aminotransferase (AST), Alkaline Phosphatase (ALP), Albumin, Bilirubin (Total, direct, indirect), and Complete Blood Count (CBC) with Differential. Donors whose results from these Additional Screening assays are outside the bounds of normal (see, e.g., Table 2) the donated material may be discarded.

[0074] Other screens or tests may also be used to temporarily or permanently exclude donors.

[0075] In some embodiments, a donor who tests positive for Hepatitis A, Treponema pallidum, or Strongyloides is deferred from donating until eight weeks after a successful treatment has been completed, symptoms have resolved, and no recurrence of symptoms have occurred. Impacted donated material will be destroyed. Screened donors deferred for eight weeks from symptom resolution, completion of treatment, and no recurrence due to any of the above may undergo a full repeat screen to evaluate his/her return as a donor.

[0076] In some embodiments, a donor who tests positive for Adenovirus, Campylobacter spp, Clostridium difficile toxin B, Cryptosporidium spp, Cyclospora and Isospora, Giardia lamblia, Proteus, Morganella, Helicobacter pylori, Microsporidia, Norovirus, Ova and parasites, Salmonella spp, Shiga, Shigella spp, or Vibrio spp, is immediately placed on hold and deferred for eight weeks from symptom resolution, completion of treatment, and no recurrence. Impacted donated material will be discarded. Screened donors deferred for eight weeks from symptom resolution, completion of treatment, and no recurrence due to any of the above may undergo a full repeat screen to evaluate his/her return as a donor.

[0077] In some embodiments, a donor who tests positive for rotavirus will be placed immediately on donation hold and have repeat confirmatory testing performed. If confirmed positive, these donors will have their donated material discarded and will be ineligible for donation for eight weeks. Screened donors deferred for eight weeks due to rotavirus may undergo a full repeat screen to evaluate his/her return as a donor.

[0078] A donor who tests positive for a Multi-Drug Resistant Organism (MDROs), e.g., Vancomycin-resistant Enterococcus (VRE), Carbapenem-resistant enterobacteriaceae (CRE), fluoroquinolone-resistant Enterobacteriaceae (FRE) and Extended-spectrum beta-lactamase (ESBL) is immediately placed on hold and deferred for eight weeks after successful treatment/decolonization with no symptoms or recurrence. Impacted donated material will be discarded. Screened donors deferred for eight weeks after successful treatment/decolonization with no symptoms or recurrence due to any of the above may undergo a full repeat screen to evaluate his/her return as a donor.

[0079] In some embodiments, a donor who tests positive for Methicillin-resistant Staphylococcus aureus (MRSA) is immediately placed on hold and deferred for eight weeks after successful treatment/decolonization with no symptoms or recurrence. Impacted donated material will be discarded. Screened donors deferred for eight weeks after successful treatment/decolonization with no symptoms or recurrence due to any of the above may undergo a full repeat screen to evaluate his/her return as a donor.

[0080] In some embodiments, a donor may be positive for one or both of Cytomegalovirus (CMV) and Epstein-Barr Virus (EBV). There have not been any reported cases of CMV or EBV infection among those who have received FMT from adult donors (Wang et al., 2016), including a large series of immunocompromised patients (Kelly et al., 2014) and solid organ transplant patients (Fischer et al., 2017).

[0081] In some embodiments, a donor undergoes a blood test about twenty-one days, e.g., two weeks to a month, or longer, after his/her last donation to account for HIV seroconversion.

[0082] In some embodiments, a donor may be positive for Listeria monocytogenes. In embodiments, donated material and/or serological samples are not tested for L. monocytogenes unless the donor is symptomatic for a L. monocytogenes infection.

[0083] In embodiments, processing of a donated material begins within six hours of passage of stool material. Elapsed time prior to stool processing may be noted.

[0084] In some embodiments, donated material will be assessed using the Bristol stool scale and/or for hematochezia, melena, mucus, and/or steatorrhea. Collection of samples from the donated material may occur within the biosafety cabinet.

[0085] Stool below Bristol Type 3 and stool above Bristol Type 5 is discarded.

[0086] Stool exhibiting signs of hematochezia, melena, mucus, and/or steatorrhea is discarded.

[0087] In some embodiments, donated material is quarantined (i.e., not included in a drug substance and/or not included in a drug product) for a “collection window” of about sixty days, e.g., thirty to ninety days, and until the donor has passed a second DHQ, a second in-person clinical assessment, and/or a second set of serological, stool, and/or nasal swab tests (as described above). See, Table 3.

TABLE 3
Donor Screening/Testing

| | | Testing Time Points | |
|---|---|---|---|
| | | Start of | End of |
| | | collection | collection |
| Parameter | Acceptance Criteria | window | window |
| Questionnaire & Interview | Pass | x | x |
| Serological | Negative for a panel of Infectious Diseases | x | x |
| Stool | Negative for a panel of Viruses, Enteric | x | x |
| | Pathogens, Parasites, etc. | | |
| MDRO | Negative for a panel of Multi-Drug | x | x |
| | Resistant Organisms | | |
| Additional Screening | “Normal” for a Liver Function panel and | x | x |
| | Complete Blood Count & Differential ^{b} | | |
| Donor Health Questionnaire | No issues noted that involve Exclusion | x | x |
| (DHQ) completed at Delivery ^{a} | Criteria | | |

^{a} In addition to the DHQ, if a donor experiences any abnormal symptoms, including a change in bowel habits or change in other relevant clinical factors (e.g., medicines and medical history) donors should notify to the donation facility immediately. A full health assessment is conducted and if symptoms would lead to stool that may impact the health of an FMT recipient, donation is suspended until an examination of the underlying symptoms is initiated by clinical assessment and/or diagnostic tests on stool and/or blood. The impacted material may be discarded. In the event of transient, self-limiting, mild symptoms, donors may be eligible when symptoms resolve.
^{b} See, Table 2

TABLE 4
Physical Testing Conducted on Donated Material

| Parameter | Acceptance Criteria | Justification |
|---|---|---|
| Bristol | Bristol Stool Type | Bristol Stool Type of 2, 3, 4, and 5 are considered |
| Stool Type | must be | healthy. Types above that range (i.e. Type 6 and 7) |
| | Type 3, 4, or 5 | indicate diarrhea; these Stool Types are not |
| | | processed. |
| | | Stool with a Bristol Stool Type 1 or 2, which indicates |
| | | constipation, may be too rigid or dense for readily |
| | | processing; these Stool Types are not processed. |
| Screening | Hematochezia Visually | The presence of fresh blood in stool indicates |
| of Stool for | Absent | lower gastrointestinal pathology (e.g., |
| Hematochezia | | diverticulosis and inflammatory bowel disease) or, |
| | | less commonly, a brisk upper gastrointestinal |
| | | bleed. Stool with hematochezia is not processed. |
| Screening | Melena Visually Absent | The presence of melena in stool indicates upper |
| of Stool for | | gastrointestinal bleeding (e.g., peptic ulcer |
| Melena | | disease, gastritis, and esophageal varices). Stool |
| | | with melena is not processed. |
| Screening | Mucus Visually Absent | Although small amounts of mucus are normal, the |
| of Stool for | | presence of mucus in stool potentially indicates |
| Mucus | | gastrointestinal pathology (e.g., inflammatory |
| | | bowel disease and malignancy). Stool with |
| | | mucus is processed. |
| Screening | Steatorrhea Visually | The presence of steatorrhea in stool indicates fat |
| of Stool for | Absent | malabsorption (e.g., pancreatic insufficiency). Stool |
| Steatorrhea | | with steatorrhea is not processed. |

[0088] In some embodiments, the viability of the microbiota of the donated stool may be confirmed by culturing a sample of the donated stool, an otherwise purified form of the donated stool, a filtrate, a homogenized product, a thawed-frozen intermediate, a pooled material, and/or a drug substance. Methods for culturing microbiota from stool or from stool-derived products are well-known in the art. In some embodiments, microbiota are cultured using the Center for Disease Control (CDC) plate, commonly referred to as “CDC Anaerobe 5% Sheep Blood Agar plate, which allows for the isolation and cultivation of fastidious and slow-growing obligatory anaerobic bacteria, the Bacteroides Bile Esculin Agar (BBE) plate, which is a specific indicator species media for Bacteroides, or GIFU Anaerobic Medium Agar (GM). In some embodiments, the number of viable, culturable cells within the stool or stool-derived products may be confirmed by the presence of a colony forming unit (CFU) counts, e.g., by the Drop Plate CFU Assay. The diversity of the living microbes in the stool or from stool-derived products may be assayed. The mix of microbes present, or diversity of microbes, is a further measure of the quality of the donated stool and the drug substance.

[0089] In some embodiments, the viability of the microbiota of the donated stool may be confirmed by PMAseq; Chu et al., “Using Propodium Monoazide Sequencing (PMA-Seq) to Develop Data-Driven Best Practices in Fecal Microbiota Transplantations.” Open Forum Infect Dis. Oxford University Press; 2015)]. Briefly, this approach provides a high-throughput, culture-independent measure of cell viability.

[0090] In some embodiments, the bacteria are live, vegetative cells. In some embodiments, the bacteria are capable of forming spores. In some embodiments, the bacteria are in the form of spores, e.g., viable spores. In some embodiments, the mixtures of bacterial strains as described herein comprise live, vegetative cells and spores. In some embodiments, the mixture of bacterial strains as described herein is substantially free of live, vegetative cells. In some embodiments, the mixture of bacterial strains as described herein is substantially free of spores. In some embodiments, the bacterial strains are in the form of live, vegetative cells. In some embodiments, the bacterial strains are in the form of spores. In some embodiments, the bacterial strains are in the form of lyophilized cells. In some embodiments, the bacterial mixture comprises one or more of live, vegetative cells; spores; and lyophilized cells.

[0091] In some embodiments, the bacterial strains are non-pathogenic. For instance, in some embodiments, the bacterial strains are substantially free of organisms or entities which are capable of causing or affecting a disease, disorder or condition of a host organism containing the organism or entity. Illustrative pathogenic bacteria are provided elsewhere herein.

[0092] In various embodiments, the mixture of bacterial strains includes one or more non-pathogenic bacterial strains that are able to engraft in a patient's GI tract. In some embodiments, the mixture of bacterial strains includes one or more non-pathogenic bacterial strains that are able to colonize a patient's mucosal barrier. In some embodiments, the mixture of bacterial strains includes one or more bacterial strains that preserve and/or enhance mucosal barrier integrity and function in a patient. In various embodiments, the mixture of bacterial strains includes one or more bacterial strains that decolonize pathogenic infectious agents. In some embodiments, the mixture of bacterial strains includes one or more bacterial strains that compete with pathogenic infectious agents for resources (e.g., niche and/or nutrients). In another embodiment, the mixture of bacterial strains includes one or more bacterial strains that enhance production of one or more of butyrate, acetate, and propionate in the gut. In various embodiments, the mixture of bacterial strains includes one or more bacterial strains that supplement SOFA production in the gut. In various embodiments, the mixture of bacterial strains induces proliferation and/or accumulation of Foxp3⁺ cells, e.g., regulatory T cells (T_{regs}) in the mucosal lining of the gut. In various embodiments, the mixture of bacterial strains induces proliferation and/or accumulation of interleukin-10 (IL-10) in the gut. In various embodiments, the mixture of bacterial strains reduces proliferation and/or accumulation of interleukin-12 (IL-12), interleukin-4 (IL-4), and/or and gamma interferon (IFN γ) in the gut.

[0093] Without wishing to be bound by theory, treatment of the gut microbiome with antibiotics can result in a reduction of butyrate levels in the gut. Butyrate serves as the primary energy source of colonocytes and with decreased butyrate levels, colonocytes switch to anaerobic/fermentative growth. Because this growth does not utilize oxygen, the gut barrier becomes increasingly oxygenated. Butyrate also normally inhibits nitric oxide synthase, so in the absence of normal butyrate levels, the concentration of host-derived nitrate in the gut increases. Enterobacteriaceae are often opportunistic pathogens, and blooms of these bacteria are a sign of dysbiosis and inflammation. Members of Enterobacteriaceae can use both nitrate and oxygen as electron acceptors during respiration. Therefore, antibiotic treatment can result in decreased butyrate production, leading to increased oxygen and nitrate content in the gut, which gives potentially pathogen facultative anaerobes like Enterobacteriaceae a growth advantage, resulting in an Enterobacteriaceae bloom.

[0094] In various embodiments, the present mixture of bacterial strains provides both systemic anti-inflammatory and immunoregulatory effects.

[0095] In various embodiments, the present mixture of bacterial strains includes one or more isolated or purified bacterial strains that individually or when together in a mixture have a cytotoxic or cytostatic effect on a pathogenic bacterium, as described elsewhere herein, e.g., can eradicate and/or decolonize pathogenic infectious bacteria. In various embodiments, the present mixture of bacterial strains exerts an inhibitory effect on a pathogenic bacterium present in or entering into the GI tract of a patient. In various embodiments, the present mixture of bacterial strains augments growth of at least one type of bacteria not detectably present in a patient's GI tract prior to administration. In various embodiments, the present mixture of bacterial strains includes one or more isolated or purified bacterial strains that interact synergistically to have a cytotoxic or cytostatic effect on a pathogenic bacterium.

[0096] Illustrative pathogenic bacteria include C. difficile, Salmonella spp., enteropathogenic E. coli, multi-drug resistant bacteria such as Klebsiella, and E. coli, Carbapenem-resistent Enterobacteriaceae (CRE), extended spectrum beta-lactam resistant Enterococci (ESBL), fluoroquinolone-resistant Enterobacteriaceae, and vancomycin-resistant Enterococci (VRE). Further illustrative bacteria include Yersinia, Vibrio, Treponema, Streptococcus, Staphylococcus, Shigella, Salmonella, Rickettsia, Orientia, Pseudomonas, Neisseria, Mycoplasma, Mycobacterium, Listeria, Leptospira, Legionella, Klebsiella, Helicobacter, Haemophilus, Francisella, Escherichia, Ehrlichia, Enterococcus, Coxiella, Corynebacterium, Clostridium, Chlamydia, Chlamydophila, Campylobacter, Burkholderia, Brucella, Borrelia, Bordetella, Bifidobacterium, Bacillus, Proteus, Morganella, multi-drug resistant bacteria, extended spectrum beta-lactam resistant Enterococci (ESBL), Carbapenem-resistent Enterobacteriaceae (CRE), fluoroquinolone-resistant Enterobacteriaceae, and vancomycin-resistant Enterococci (VRE). Illustrative pathogenic bacteria include Aeromonas hydrophila, Campylobacter fetus, Plesiomonas shigelloides, Bacillus cereus, Campylobacter jejuni, Clostridium botulinum, Clostridium difficile, Clostridium perfringens, enteroaggregative Escherichia coli, enterohemorrhagic Escherichia coli, enteroinvasive Escherichia coli, enterotoxigenic Escherichia coli (such as, but not limited to, LT and/or ST), Escherichia coli O157:H7, Helicobacter pylori, Klebsiellia pneumonia, Lysteria monocytogenes, Plesiomonas shigelloides, Salmonella spp., Salmonella typhi, Salmonella paratyphi, Shigella spp., Staphylococcus spp., Staphylococcus aureus, vancomycin-resistant enterococcus spp., Vibrio spp., Vibrio cholerae, Vibrio parahaemolyticus, Vibrio vulnificus, and Yersinia enterocolitica. Specifically-relevant pathogenic bacteria include Antibiotic-resistant Proteobacteria, Vancomycin Resistant Enterococcus (VRE), Carbapenem Resistant Enterobacteriaceae (CRE), fluoroquinolone-resistant Enterobacteriaceae, and Extended Spectrum Beta-Lactamase producing Enterobacteriaceae (ESBL-E).

[0097] In various embodiments, a bacterial strain is included in the pharmaceutical composition of the invention based upon its 16S rRNA sequence identity. In an embodiment, the pharmaceutical composition of the invention comprises one or more bacterial strains having a 16S rRNA sequence that is at least about 80% identical to the 16S rRNA sequence of any one of the operational taxonomic units (OTUs) provided in Table 5 or Table 6. For example, the pharmaceutical composition may comprise one or more bacterial strains having a 16S rRNA sequence that is at least about 80%, about 81%, about 82%, about 83%, about 84%, about 85%, about 86%, about 87%, about 88%, about 89%, about 90%, about 91%, about 92%, about 93%, about 94%, about 95%, about 96%, about 97%, about 98%, about 99%, or about 100% identical with the 16S rRNA sequence of any one of the operational taxonomic units provided in Table 5 or Table 6. In an embodiment, the pharmaceutical composition may comprise one or more bacterial strains having a 16S rRNA sequence that is at least about 97%, at least about 98%, at least about 99%, or about 100% identical with the 16S rRNA sequence of any one of the operational taxonomic units provided in Table 5 or Table 6.

[0098] In various embodiments, the pharmaceutical composition of the invention comprises a bacterial mixture of at least about 50 different bacterial strains, or at least about 49 different bacterial strains, or at least about 48 different bacterial strains, or at least about 47 different bacterial strains, or at least about 46 different bacterial strains, or at least about 45 different bacterial strains, or at least about 44 different bacterial strains, or at least about 43 different bacterial strains, or at least about 42 different bacterial strains, or at least about 41 different bacterial strains, or at least about 40 different bacterial strains, or at least about 39 bacterial strains, or at least about 38 bacterial strains, or at least about 37 bacterial strains, or at least about 36 bacterial strains, or at least about 35 bacterial strains, or at least about 34 bacterial strains, or at least about 33 bacterial strains, or at least about 32 bacterial strains, or at least about 31 bacterial strains, or at least about 30 bacterial strains, or at least about 29 bacterial strains, or at least about 28 bacterial strains, or at least about 27 bacterial strains, or at least about 26 bacterial strains, or at least about 25 bacterial strains, or at least about 24 bacterial strains, or at least about 23 bacterial strains, or at least about 22 bacterial strains, or at least about 21 bacterial strains, or at least about 20 bacterial strains, or at least about 19 bacterial strains, or at least about 18 bacterial strains, or at least about 17 bacterial strains, or at least about 16 bacterial strains, or at least about 15 bacterial strains, or at least about 14 bacterial strains, or at least about 13 bacterial strains, or at least about 12 bacterial strains, or at least about 11 bacterial strains, or at least about 10 bacterial strains, or at least about 9 bacterial strains, or at least about 8 bacterial strains, or at least about 7 bacterial strains, or at least about 6 bacterial strains, or at least about 5 bacterial strains, or at least about 4 bacterial strains, or at least about 3 bacterial strains, or at least about 2 bacterial strains, or about 1 bacterial strain with reference to Table 5 or Table 6, e.g., as listed in Table 5 or Table 6 or having a 16S rRNA sequence that is, as examples, at least about 95%, at least about 96%, at least about 97%, at least about 98%, at least about 99%, or about 100% identical with the 16S rRNA sequence of any one of the strains listed in Table 5 or Table 6.

[0099] In various embodiments, the pharmaceutical composition of the invention comprises a bacterial mixture of about 50 or fewer different bacterial strains as described herein (e.g., with reference to Table 5 or Table 6).

[0100] In some embodiments, the pharmaceutical composition of the invention comprises greater than about 2, greater than about 5, or greater than about 10, or greater than about 15, or greater than about 20, or greater than about 25, or greater than about 30, or greater than about 35, or greater than about 40, or greater than about 45, or greater than about 50, greater than about 75, or greater than about 100 different bacterial strains as described herein (e.g., with reference to Table 5 or Table 6).

[0101] In some embodiments, the pharmaceutical composition of the invention comprises less than about 5, or less than about 10, or less than about 15, or less than about 20, or less than about 25, or less than about 30, or less than about 35, or less than about 40, or less than about 45, or less than about 50 different bacterial strains as described herein (e.g., with reference to Table 5 or Table 6).

[0102] In some embodiments, the pharmaceutical composition of the invention comprises about 10 to about 50 different bacterial strains as described herein (e.g., with reference to Table 5 or Table 6), including about 10 to about 45, or about 10 to about 40, or about 10 to about 30, or about 10 to about 20, or about 10 to about 15 different bacterial strains.

[0103] In some embodiments, the pharmaceutical composition of the invention comprises about 10 to about 20 different bacterial strains as described herein (e.g., with reference to Table 5 or Table 6).

[0104] In various embodiments, the mixtures of bacterial strains are selected from any of the bacterial strains listed in Table 5 or Table 6 below or the bacterial strains having a 16S rRNA sequence that is, as examples, at least about 95%, at least about 96%, at least about 97%, at least about 98%, at least about 99%, or about 100% identical with the 16S rRNA sequence of any one of the strains listed in Table 5 or Table 6 below.

[0105] In embodiments, the mixtures of bacterial strains are substantially complete or non-selected fecal microbiota preparations (e.g., from a single healthy stool donor), which generally comprises a full complement of functional microorganisms found in feces of one or more healthy humans. Such mixtures of bacterial strains may further comprise one or more strains listed in Table 5 or Table 6 below and/or one or more strains having a 16S rRNA sequence that is at least about 95% identical with the 16S rRNA sequence of any one of the strains listed in Table 5 or Table 6 below.

[0106] Table 5 lists OTUs by their GreenGenes identification number and the Latin taxonomic name associated with each OTU.
[0107] Columns:
   [0108] A—GreenGenes ID for OTU
   [0109] B—The number of stool donors that OTU is present in
   [0110] C—The fraction of all stool donors that OTU is present in
   [0111] D—Taxonomy for that OTU
   [0112] E—SEQ ID NO associated with the OTU

TABLE 5
Exemplary OTUs Useful in the Present Invention

| A¹ | B | C | D² | E |
|---|---|---|---|---|
| 9710 | 6 | 0.095238095 | k: Bacteria; p: Proteobacteria; c: Gammaproteobacteria; o: Enterobacteriales; | 1 |
| | | | f: Enterobacteriaceae; g:; s: | |
| 14157 | 1 | 0.015873016 | k: Bacteria; p: Firmicutes; c: Clostridia; o: Clostridiales; f: [Mogibacteriaceae]; | 2 |
| | | | g:; s: | |
| 14159 | 3 | 0.047619048 | k: Bacteria; p: Firmicutes; c: Clostridia; o: Clostridiales; f: [Mogibacteriaceae]; | 3 |
| | | | g:; s: | |
| 15286 | 1 | 0.015873016 | k: Bacteria; p: Firmicutes; c: Bacilli; o: Lactobacillales; f: Enterococcaceae; | 4 |
| | | | g: Enterococcus; s: | |
| 16036 | 1 | 0.015873016 | k: Bacteria; p: Firmicutes; c: Clostridia; o: Clostridiales; f: Ruminococcaceae; | 5 |
| | | | g: Ruminococcus; s: flavefaciens | |
| 16054 | 33 | 0.523809524 | k: Bacteria; p: Firmicutes; c: Clostridia; o: Clostridiales; f: Ruminococcaceae; | 6 |
| | | | g: Ruminococcus; s: callidus | |
| 17311 | 9 | 0.142857143 | k: Bacteria; p: Firmicutes; c: Clostridia; o: Clostridiales; f: Christensenellaceae; | 7 |
| | | | g:; s: | |
| 20321 | 5 | 0.079365079 | k: Bacteria; p: Proteobacteria; c: Gammaproteobacteria; o: Enterobacteriales; | 8 |
| | | | f: Enterobacteriaceae; g: Erwinia; s: | |
| 31319 | 4 | 0.063492063 | k: Bacteria; p: Firmicutes; c: Clostridia; o: Clostridiales; f: Clostridiaceae; | 9 |
| | | | g: Clostridium; s: subterminale | |
| 34789 | 1 | 0.015873016 | k: Bacteria; p: Firmicutes; c: Clostridia; o: Clostridiales; f: Christensenellaceae; | 10 |
| | | | g:; s: | |
| 35260 | 3 | 0.047619048 | k: Bacteria; p: Firmicutes; c: Clostridia; o: Clostridiales; f: Christensenellaceae; | 11 |
| | | | g:; s: | |
| 36792 | 1 | 0.015873016 | k: Bacteria; p: Firmicutes; c: Clostridia; o: Clostridiales; f: [Mogibacteriaceae]; | 12 |
| | | | g:; s: | |
| 41229 | 2 | 0.031746032 | k: Bacteria; p: Proteobacteria; c: Betaproteobacteria; o: Burkholderiales; | 13 |
| | | | f: Alcaligenaceae; g: Sutterella; s: | |
| 42839 | 51 | 0.80952381 | k: Bacteria; p: Firmicutes; c: Clostridia; o: Clostridiales; f: Ruminococcaceae; | 14 |
| | | | g: Ruminococcus; s: | |
| 43950 | 6 | 0.095238095 | k: Bacteria; p: Firmicutes; c: Clostridia; o: Clostridiales; f: Ruminococcaceae; | 15 |
| | | | g: Oscillospira; s: | |
| 44827 | 7 | 0.111111111 | k: Bacteria; p: Firmicutes; c: Clostridia; o: Clostridiales; f: Ruminococcaceae; | 16 |
| | | | g: Ruminococcus; s: flavefaciens | |
| 45074 | 1 | 0.015873016 | k: Bacteria; p: Firmicutes; c: Clostridia; o: Clostridiales; f: Clostridiaceae; | 17 |
| | | | g: Clostridium; s: | |
| 45363 | 44 | 0.698412698 | k: Bacteria; p: Firmicutes; c: Erysipelotrichi; o: Erysipelotrichales; | 18 |
| | | | f: Erysipelotrichaceae; g: Clostridium; s: cocleatum | |
| 48444 | 1 | 0.015873016 | k: Bacteria; p: Firmicutes; c: Clostridia; o: Clostridiales; f: Ruminococcaceae; | 19 |
| | | | g: Ruminococcus; s: | |
| 66188 | 1 | 0.015873016 | k: Bacteria; p: Firmicutes; c: Clostridia; o: Clostridiales; f: Ruminococcaceae; | 20 |
| | | | g: Oscillospira; s: | |
| 68841 | 10 | 0.158730159 | k: Bacteria; p: Firmicutes; c: Clostridia; o: Clostridiales; f: Lachnospiraceae; | 21 |
| | | | g: Lachnospira; s: | |
| 72481 | 2 | 0.031746032 | k: Bacteria; p: Firmicutes; c: Clostridia; o: Clostridiales; f: Lachnospiraceae; | 22 |
| | | | g: Coprococcus; s: | |
| 73753 | 52 | 0.825396825 | k: Bacteria; p: Bacteroidetes; c: Bacteroidia; o: Bacteroidales; | 23 |
| | | | f: [Odoribacteraceae]; g: Odoribacter; s: | |
| 91359 | 1 | 0.015873016 | k: Bacteria; p: Firmicutes; c: Clostridia; o: Clostridiales; f: Lachnospiraceae; | 24 |
| | | | g: Lachnospira; s: | |
| 91557 | 1 | 0.015873016 | k: Bacteria; p: Proteobacteria; c: Gammaproteobacteria; o: Enterobacteriales; | 25 |
| | | | f: Enterobacteriaceae; g:; s: | |
| 91962 | 4 | 0.063492063 | k: Bacteria; p: Proteobacteria; c: Gammaproteobacteria; o: Enterobacteriales; | 26 |
| | | | f: Enterobacteriaceae; g:; s: | |
| 100506 | 1 | 0.015873016 | k: Bacteria; p: Firmicutes; c: Clostridia; o: Clostridiales; f: Lachnospiraceae; | 27 |
| | | | g: Coprococcus; s: | |
| 105538 | 3 | 0.047619048 | k: Bacteria; p: Firmicutes; c: Clostridia; o: Clostridiales; f: Clostridiaceae; | 28 |
| | | | g: Clostridium; s: | |
| 105964 | 1 | 0.015873016 | k: Bacteria; p: Firmicutes; c: Clostridia; o: Clostridiales; f: Ruminococcaceae; | 29 |
| | | | g: Ruminococcus; s: flavefaciens | |
| 107044 | 16 | 0.253968254 | k: Bacteria; p: Bacteroidetes; c: Bacteroidia; o: Bacteroidales; f: Rikenellaceae; | 30 |
| | | | g: Alistipes; s: massiliensis | |
| 110192 | 2 | 0.031746032 | k: Bacteria; p: Firmicutes; c: Clostridia; o: Clostridiales; f: Ruminococcaceae; | 31 |
| | | | g: Oscillospira; s: | |
| 110458 | 2 | 0.031746032 | k: Bacteria; p: Firmicutes; c: Clostridia; o: Clostridiales; f: Christensenellaceae; | 32 |
| | | | g:; s: | |
| 110562 | 14 | 0.222222222 | k: Bacteria; p: Firmicutes; c: Clostridia; o: Clostridiales; f: Ruminococcaceae; | 33 |
| | | | g: Ruminococcus; s: | |
| 112720 | 1 | 0.015873016 | k: Bacteria; p: Bacteroidetes; c: Bacteroidia; o: Bacteroidales; f: Rikenellaceae; | 34 |
| | | | g:; s: | |
| 112891 | 2 | 0.031746032 | k: Bacteria; p: Proteobacteria; c: Betaproteobacteria; o: Burkholderiales; | 35 |
| | | | f: Alcaligenaceae; g: Sutterella; s: | |
| 113003 | 13 | 0.206349206 | k: Bacteria; p: Firmicutes; c: Clostridia; o: Clostridiales; f: Ruminococcaceae; | 36 |
| | | | g: Ruminococcus; s: | |
| 114462 | 1 | 0.015873016 | k: Bacteria; p: Proteobacteria; c: Gammaproteobacteria; o: Enterobacteriales; | 37 |
| | | | f: Enterobacteriaceae; g:; s: | |
| 115035 | 2 | 0.031746032 | k: Bacteria; p: Firmicutes; c: Clostridia; o: Clostridiales; f: Ruminococcaceae; | 38 |
| | | | g: Oscillospira; s: | |
| 119010 | 6 | 0.095238095 | k: Bacteria; p: Proteobacteria; c: Gammaproteobacteria; o: Enterobacteriales; | 39 |
| | | | f: Enterobacteriaceae; g: Xenorhabdus; s: bovienii | |
| 122656 | 7 | 0.111111111 | k: Bacteria; p: Firmicutes; c: Clostridia; o: Clostridiales; f: Christensenellaceae; | 40 |
| | | | g:; s: | |
| 129401 | 7 | 0.111111111 | k: Bacteria; p: Firmicutes; c: Clostridia; o: Clostridiales; f: Ruminococcaceae; | 41 |
| | | | g: Oscillospira; s: | |
| 132784 | 1 | 0.015873016 | k: Bacteria; p: Firmicutes; c: Clostridia; o: Clostridiales; f: Veillonellaceae; | 42 |
| | | | g: Phascolarctobacterium; s: | |
| 132991 | 45 | 0.714285714 | k: Bacteria; p: Firmicutes; c: Clostridia; o: Clostridiales; f: Ruminococcaceae; | 43 |
| | | | g: Faecalibacterium; s: prausnitzii | |
| 136127 | 9 | 0.142857143 | k: Bacteria; p: Actinobacteria; c: Coriobacteriia; o: Coriobacteriales; | 44 |
| | | | f: Coriobacteriaceae; g:; s: | |
| 136789 | 1 | 0.015873016 | k: Bacteria; p: Firmicutes; c: Clostridia; o: Clostridiales; f: Ruminococcaceae; | 45 |
| | | | g: Ruminococcus; s: | |
| 137353 | 13 | 0.206349206 | k: Bacteria; p: Firmicutes; c: Clostridia; o: Clostridiales; f: Lachnospiraceae; | 46 |
| | | | g: Coprococcus; s: | |
| 141145 | 2 | 0.031746032 | k: Bacteria; p: Proteobacteria; c: Gammaproteobacteria; o: Enterobacteriales; | 47 |
| | | | f: Enterobacteriaceae; g:; s: | |
| 145236 | 5 | 0.079365079 | k: Bacteria; p: Firmicutes; c: Clostridia; o: Clostridiales; f: Christensenellaceae; | 48 |
| | | | g:; s: | |
| 145856 | 7 | 0.111111111 | k: Bacteria; p: Firmicutes; c: Clostridia; o: Clostridiales; f: [Mogibacteriaceae]; | 49 |
| | | | g:; s: | |
| 145887 | 1 | 0.015873016 | k: Bacteria; p: Firmicutes; c: Clostridia; o: Clostridiales; f: [Mogibacteriaceae]; | 50 |
| | | | g:; s: | |
| 147071 | 54 | 0.857142857 | k: Bacteria; p: Actinobacteria; c: Coriobacteriia; o: Coriobacteriales; | 51 |
| | | | f: Coriobacteriaceae; g: Collinsella; s: | |
| 147195 | 10 | 0.158730159 | k: Bacteria; p: Firmicutes; c: Clostridia; o: Clostridiales; f: Lachnospiraceae; | 52 |
| | | | g: Coprococcus; s: | |
| 147484 | 7 | 0.111111111 | k: Bacteria; p: Firmicutes; c: Clostridia; o: Clostridiales; f: [Mogibacteriaceae]; | 53 |
| | | | g:; s: | |
| 148620 | 48 | 0.761904762 | k: Bacteria; p: Proteobacteria; c: Gammaproteobacteria; o: Enterobacteriales; | 54 |
| | | | f: Enterobacteriaceae; g: Erwinia; s: | |
| 148925 | 5 | 0.079365079 | k: Bacteria; p: Firmicutes; c: Clostridia; o: Clostridiales; f: Ruminococcaceae; | 55 |
| | | | g: Ruminococcus; s: | |
| 149588 | 16 | 0.253968254 | k: Bacteria; p: Proteobacteria; c: Gammaproteobacteria; o: Enterobacteriales; | 56 |
| | | | f: Enterobacteriaceae; g: Erwinia; s: | |
| 157162 | 1 | 0.015873016 | k: Bacteria; p: Firmicutes; c: Clostridia; o: Clostridiales; f: Ruminococcaceae; | 57 |
| | | | g: Oscillospira; s: | |
| 157224 | 11 | 0.174603175 | k: Bacteria; p: Firmicutes; c: Clostridia; o: Clostridiales; f: Ruminococcaceae; | 58 |
| | | | g: Faecalibacterium; s: prausnitzii | |
| 157573 | 1 | 0.015873016 | k: Bacteria; p: Bacteroidetes; c: Bacteroidia; o: Bacteroidales; f: Rikenellaceae; | 59 |
| | | | g:; s: | |
| 157772 | 22 | 0.349206349 | k: Bacteria; p: Firmicutes; c: Clostridia; o: Clostridiales; f: Ruminococcaceae; | 60 |
| | | | g: Oscillospira; s: | |
| 158045 | 33 | 0.523809524 | k: Bacteria; p: Firmicutes; c: Clostridia; o: Clostridiales; f: Ruminococcaceae; | 61 |
| | | | g: Faecalibacterium; s: prausnitzii | |
| 158113 | 3 | 0.047619048 | k: Bacteria; p: Proteobacteria; c: Betaproteobacteria; o: Burkholderiales; | 62 |
| | | | f: Alcaligenaceae; g: Sutterella; s: | |
| 158183 | 5 | 0.079365079 | k: Bacteria; p: Firmicutes; c: Clostridia; o: Clostridiales; f: Ruminococcaceae; | 63 |
| | | | g: Oscillospira; s: | |
| 158297 | 1 | 0.015873016 | k: Bacteria; p: Firmicutes; c: Clostridia; o: Clostridiales; f: Ruminococcaceae; | 64 |
| | | | g: Ruminococcus; s: | |
| 158722 | 11 | 0.174603175 | k: Bacteria; p: Firmicutes; c: Clostridia; o: Clostridiales; f: Ruminococcaceae; | 65 |
| | | | g: Oscillospira; s: | |
| 160750 | 1 | 0.015873016 | k: Bacteria; p: Firmicutes; c: Clostridia; o: Clostridiales; f: Lachnospiraceae; | 66 |
| | | | g: Coprococcus; s: | |
| 161762 | 2 | 0.031746032 | k: Bacteria; p: Firmicutes; c: Clostridia; o: Clostridiales; f: Ruminococcaceae; | 67 |
| | | | g: Ruminococcus; s: | |
| 162215 | 1 | 0.015873016 | k: Bacteria; p: Proteobacteria; c: Gammaproteobacteria; o: Enterobacteriales; | 68 |
| | | | f: Enterobacteriaceae; g:; s: | |
| 162660 | 20 | 0.317460317 | k: Bacteria; p: Firmicutes; c: Clostridia; o: Clostridiales; f: Ruminococcaceae; | 69 |
| | | | g: Ruminococcus; s: | |
| 163243 | 10 | 0.158730159 | k: Bacteria; p: Firmicutes; c: Clostridia; o: Clostridiales; f: Ruminococcaceae; | 70 |
| | | | g: Ruminococcus; s: | |
| 163421 | 1 | 0.015873016 | k: Bacteria; p: Proteobacteria; c: Gammaproteobacteria; o: Enterobacteriales; | 71 |
| | | | f: Enterobacteriaceae; g: Citrobacter; s: | |
| 165046 | 3 | 0.047619048 | k: Bacteria; p: Firmicutes; c: Clostridia; o: Clostridiales; f: Ruminococcaceae; | 72 |
| | | | g: Oscillospira; s: | |
| 165924 | 55 | 0.873015873 | k: Bacteria; p: Firmicutes; c: Clostridia; o: Clostridiales; f: Ruminococcaceae; | 73 |
| | | | g: Faecalibacterium; s: prausnitzii | |
| 166156 | 3 | 0.047619048 | k: Bacteria; p: Firmicutes; c: Clostridia; o: Clostridiales; f: Lachnospiraceae; | 74 |
| | | | g: Coprococcus; s: | |
| 166164 | 4 | 0.063492063 | k: Bacteria; p: Firmicutes; c: Clostridia; o: Clostridiales; f: Ruminococcaceae; | 75 |
| | | | g: Ruminococcus; s: | |
| 166226 | 4 | 0.063492063 | k: Bacteria; p: Firmicutes; c: Clostridia; o: Clostridiales; f: Ruminococcaceae; | 76 |
| | | | g: Oscillospira; s: | |
| 166908 | 59 | 0.936507937 | k: Bacteria; p: Proteobacteria; c: Gammaproteobacteria; o: Enterobacteriales; | 77 |
| | | | f: Enterobacteriaceae; g:; s: | |
| 166913 | 43 | 0.682539683 | k: Bacteria; p: Firmicutes; c: Clostridia; o: Clostridiales; f: Clostridiaceae; g:; s: | 78 |
| 169031 | 1 | 0.015873016 | k: Bacteria; p: Firmicutes; c: Clostridia; o: Clostridiales; f: Veillonellaceae; | 79 |
| | | | g: Phascolarctobacterium; s: | |
| 169182 | 3 | 0.047619048 | k: Bacteria; p: Proteobacteria; c: Gammaproteobacteria; o: Enterobacteriales; | 80 |
| | | | f: Enterobacteriaceae; g:; s: | |
| 171184 | 1 | 0.015873016 | k: Bacteria; p: Firmicutes; c: Clostridia; o: Clostridiales; f: Clostridiaceae; g:; s: | 81 |
| 171437 | 2 | 0.031746032 | k: Bacteria; p: Firmicutes; c: Clostridia; o: Clostridiales; f: Clostridiaceae; g:; s: | 82 |
| 171772 | 12 | 0.19047619 | k: Bacteria; p: Bacteroidetes; c: Bacteroidia; o: Bacteroidales; f: Rikenellaceae; g:; s: | 83 |
| 173103 | 7 | 0.111111111 | k: Bacteria; p: Firmicutes; c: Clostridia; o: Clostridiales; f: Clostridiaceae; g:; s: | 84 |
| 173135 | 13 | 0.206349206 | k: Bacteria; p: Firmicutes; c: Clostridia; o: Clostridiales; f: Ruminococcaceae; | 85 |
| | | | g: Faecalibacterium; s: prausnitzii | |
| 173654 | 1 | 0.015873016 | k: Bacteria; p: Proteobacteria; c: Gammaproteobacteria; o: Enterobacteriales; | 86 |
| | | | f: Enterobacteriaceae; g:; s: | |
| 173726 | 28 | 0.444444444 | k: Bacteria; p: Proteobacteria; c: Betaproteobacteria; o: Burkholderiales; | 87 |
| | | | f: Alcaligenaceae; g: Sutterella; s: | |
| 173792 | 3 | 0.047619048 | k: Bacteria; p: Firmicutes; c: Clostridia; o: Clostridiales; f: Ruminococcaceae; | 88 |
| | | | g: Ruminococcus; s: | |
| 173969 | 1 | 0.015873016 | k: Bacteria; p: Firmicutes; c: Clostridia; o: Clostridiales; f: Lachnospiraceae; | 89 |
| | | | g: Coprococcus; s: | |
| 173986 | 9 | 0.142857143 | k: Bacteria; p: Firmicutes; c: Clostridia; o: Clostridiales; f: Ruminococcaceae; | 90 |
| | | | g: Faecalibacterium; s: prausnitzii | |
| 174045 | 42 | 0.666666667 | k: Bacteria; p: Firmicutes; c: Clostridia; o: Clostridiales; f: Lachnospiraceae; | 91 |
| | | | g: Coprococcus; s: | |
| 174142 | 3 | 0.047619048 | k: Bacteria; p: Actinobacteria; c: Coriobacteriia; o: Coriobacteriales; | 92 |
| | | | f: Coriobacteriaceae; g:; s: | |
| 174233 | 1 | 0.015873016 | k: Bacteria; p: Firmicutes; c: Clostridia; o: Clostridiales; f: Clostridiaceae; g:; s: | 93 |
| 174403 | 2 | 0.031746032 | k: Bacteria; p: Firmicutes; c: Clostridia; o: Clostridiales; f: Ruminococcaceae; | 94 |
| | | | g: Faecalibacterium; s: prausnitzii | |
| 174439 | 43 | 0.682539683 | k: Bacteria; p: Firmicutes; c: Clostridia; o: Clostridiales; f: Ruminococcaceae; | 95 |
| | | | g: Faecalibacterium; s: prausnitzii | |
| 174497 | 9 | 0.142857143 | k: Bacteria; p: Firmicutes; c: Clostridia; o: Clostridiales; f: Clostridiaceae; | 96 |
| | | | g: Clostridium; s: | |
| 174516 | 7 | 0.111111111 | k: Bacteria; p: Firmicutes; c: Clostridia; o: Clostridiales; f: Clostridiaceae; | 97 |
| | | | g: Clostridium; s: | |
| 174607 | 1 | 0.015873016 | k: Bacteria; p: Firmicutes; c: Clostridia; o: Clostridiales; f: Ruminococcaceae; | 98 |
| | | | g: Ruminococcus; s: | |
| 174614 | 48 | 0.761904762 | k: Bacteria; p: Firmicutes; c: Clostridia; o: Clostridiales; f: Ruminococcaceae; | 99 |
| | | | g: Ruminococcus; s: | |
| 174625 | 9 | 0.142857143 | k: Bacteria; p: Firmicutes; c: Clostridia; o: Clostridiales; f: Lachnospiraceae; | 100 |
| | | | g: Coprococcus; s: | |
| 174654 | 1 | 0.015873016 | k: Bacteria; p: Firmicutes; c: Clostridia; o: Clostridiales; f: Ruminococcaceae; | 101 |
| | | | g: Ruminococcus; s: bromii | |
| 174688 | 2 | 0.031746032 | k: Bacteria; p: Firmicutes; c: Clostridia; o: Clostridiales; f: Clostridiaceae; | 102 |
| | | | g: Clostridium; s: | |
| 174712 | 6 | 0.095238095 | k: Bacteria; p: Firmicutes; c: Clostridia; o: Clostridiales; f: Ruminococcaceae; | 103 |
| | | | g: Ruminococcus; s: | |
| 174755 | 12 | 0.19047619 | k: Bacteria; p: Actinobacteria; c: Coriobacteriia; o: Coriobacteriales; | 104 |
| | | | f: Coriobacteriaceae; g: Collinsella; s: aerofaciens | |
| 174960 | 7 | 0.111111111 | k: Bacteria; p: Firmicutes; c: Clostridia; o: Clostridiales; f: Clostridiaceae; g:; s: | 105 |
| 174974 | 12 | 0.19047619 | k: Bacteria; p: Firmicutes; c: Clostridia; o: Clostridiales; f: Lachnospiraceae; | 106 |
| | | | g: Lachnospira; s: | |
| 175037 | 3 | 0.047619048 | k: Bacteria; p: Firmicutes; c: Clostridia; o: Clostridiales; f: Christensenellaceae; | 107 |
| | | | g:; s: | |
| 175375 | 2 | 0.031746032 | k: Bacteria; p: Bacteroidetes; c: Bacteroidia; o: Bacteroidales; f: Rikenellaceae; | 108 |
| | | | g:; s: | |
| 175397 | 59 | 0.936507937 | k: Bacteria; p: Firmicutes; c: Clostridia; o: Clostridiales; f: Lachnospiraceae; | 109 |
| | | | g: Coprococcus; s: | |
| 175438 | 2 | 0.031746032 | k: Bacteria; p: Firmicutes; c: Clostridia; o: Clostridiales; f: Lachnospiraceae; | 110 |
| | | | g: Coprococcus; s: | |
| 175508 | 46 | 0.73015873 | k: Bacteria; p: Actinobacteria; c: Coriobacteriia; o: Coriobacteriales; | 111 |
| | | | f: Coriobacteriaceae; g:; s: | |
| 175560 | 63 | 1 | k: Bacteria; p: Firmicutes; c: Clostridia; o: Clostridiales; f: Ruminococcaceae; | 112 |
| | | | g: Faecalibacterium; s: prausnitzii | |
| 175846 | 3 | 0.047619048 | k: Bacteria; p: Firmicutes; c: Clostridia; o: Clostridiales; f: Lachnospiraceae; | 113 |
| | | | g: Coprococcus; s: | |
| 175883 | 6 | 0.095238095 | k: Bacteria; p: Firmicutes; c: Clostridia; o: Clostridiales; f: Lachnospiraceae; | 114 |
| | | | g: Coprococcus; s: | |
| 175898 | 3 | 0.047619048 | k: Bacteria; p: Firmicutes; c: Clostridia; o: Clostridiales; f: Ruminococcaceae; | 115 |
| | | | g: Oscillospira; s: | |
| 175922 | 4 | 0.063492063 | k: Bacteria; p: Firmicutes; c: Clostridia; o: Clostridiales; f: Ruminococcaceae; | 116 |
| | | | g: Oscillospira; s: | |
| 176094 | 2 | 0.031746032 | k: Bacteria; p: Firmicutes; c: Clostridia; o: Clostridiales; f: Ruminococcaceae; | 117 |
| | | | g: Ruminococcus; s: | |
| 176104 | 23 | 0.365079365 | k: Bacteria; p: Firmicutes; c: Clostridia; o: Clostridiales; f: Ruminococcaceae; | 118 |
| | | | g: Oscillospira; s: | |
| 176108 | 9 | 0.142857143 | k: Bacteria; p: Bacteroidetes; c: Bacteroidia; o: Bacteroidales; f: Rikenellaceae; | 119 |
| | | | g:; s: | |
| 176115 | 45 | 0.714285714 | k: Bacteria; p: Firmicutes; c: Clostridia; o: Clostridiales; f: Ruminococcaceae; | 120 |
| | | | g: Faecalibacterium; s: prausnitzii | |
| 176167 | 14 | 0.222222222 | k: Bacteria; p: Firmicutes; c: Clostridia; o: Clostridiales; f: Ruminococcaceae; | 121 |
| | | | g: Ruminococcus; s: | |
| 176201 | 30 | 0.476190476 | k: Bacteria; p: Firmicutes; c: Clostridia; o: Clostridiales; f: Lachnospiraceae; | 122 |
| | | | g: Coprococcus; s: | |
| 176300 | 4 | 0.063492063 | k: Bacteria; p: Firmicutes; c: Clostridia; o: Clostridiales; f: Lachnospiraceae; | 123 |
| | | | g: Coprococcus; s: | |
| 176518 | 10 | 0.158730159 | k: Bacteria; p: Firmicutes; c: Clostridia; o: Clostridiales; f: Lachnospiraceae; | 124 |
| | | | g: Coprococcus; s: eutactus | |
| 176566 | 1 | 0.015873016 | k: Bacteria; p: Firmicutes; c: Clostridia; o: Clostridiales; f: Ruminococcaceae; | 125 |
| | | | g: Oscillospira; s: | |
| 176705 | 4 | 0.063492063 | k: Bacteria; p: Firmicutes; c: Clostridia; o: Clostridiales; f: Veillonellaceae; | 126 |
| | | | g: Phascolarctobacterium; s: | |
| 176775 | 47 | 0.746031746 | k: Bacteria; p: Firmicutes; c: Clostridia; o: Clostridiales; f: Veillonellaceae; | 127 |
| | | | g: Phascolarctobacterium; s: | |
| 177058 | 5 | 0.079365079 | k: Bacteria; p: Firmicutes; c: Clostridia; o: Clostridiales; f: Lachnospiraceae; | 128 |
| | | | g: Coprococcus; s: | |
| 177109 | 1 | 0.015873016 | k: Bacteria; p: Firmicutes; c: Clostridia; o: Clostridiales; f: Ruminococcaceae; | 129 |
| | | | g: Oscillospira; s: | |
| 177111 | 39 | 0.619047619 | k: Bacteria; p: Firmicutes; c: Clostridia; o: Clostridiales; f: Lachnospiraceae; | 130 |
| | | | g: Coprococcus; s: | |
| 177161 | 35 | 0.555555556 | k: Bacteria; p: Firmicutes; c: Clostridia; o: Clostridiales; f: Clostridiaceae; | 131 |
| | | | g: Clostridium; s: | |
| 177172 | 57 | 0.904761905 | k: Bacteria; p: Firmicutes; c: Clostridia; o: Clostridiales; f: Lachnospiraceae; | 132 |
| | | | g: Coprococcus; s: | |
| 177217 | 1 | 0.015873016 | k: Bacteria; p: Firmicutes; c: Clostridia; o: Clostridiales; f: Ruminococcaceae; | 133 |
| | | | g: Faecalibacterium; s: prausnitzii | |
| 177228 | 2 | 0.031746032 | k: Bacteria; p: Firmicutes; c: Clostridia; o: Clostridiales; f: Clostridiaceae; g:; s: | 134 |
| 177301 | 2 | 0.031746032 | k: Bacteria; p: Firmicutes; c: Clostridia; o: Clostridiales; f: Lachnospiraceae; | 135 |
| | | | g: Coprococcus; s: | |
| 177403 | 1 | 0.015873016 | k: Bacteria; p: Firmicutes; c: Clostridia; o: Clostridiales; f: Ruminococcaceae; | 136 |
| | | | g: Ruminococcus; s: | |
| 177463 | 8 | 0.126984127 | k: Bacteria; p: Firmicutes; c: Clostridia; o: Clostridiales; f: Lachnospiraceae; | 137 |
| | | | g: Coprococcus; s: | |
| 177478 | 38 | 0.603174603 | k: Bacteria; p: Actinobacteria; c: Coriobacteriia; o: Coriobacteriales; | 138 |
| | | | f: Coriobacteriaceae; g:; s: | |
| 177493 | 2 | 0.031746032 | k: Bacteria; p: Firmicutes; c: Clostridia; o: Clostridiales; f: Lachnospiraceae; | 139 |
| | | | g: Coprococcus; s: | |
| 177518 | 12 | 0.19047619 | k: Bacteria; p: Firmicutes; c: Clostridia; o: Clostridiales; f: Lachnospiraceae; | 140 |
| | | | g: Coprococcus; s: | |
| 177586 | 6 | 0.095238095 | k: Bacteria; p: Firmicutes; c: Clostridia; o: Clostridiales; f: Lachnospiraceae; | 141 |
| | | | g: Coprococcus; s: | |
| 177593 | 13 | 0.206349206 | k: Bacteria; p: Firmicutes; c: Clostridia; o: Clostridiales; f: Ruminococcaceae; | 142 |
| | | | g: Ruminococcus; s: | |
| 177600 | 3 | 0.047619048 | k: Bacteria; p: Firmicutes; c: Clostridia; o: Clostridiales; f: Christensenellaceae; | 143 |
| | | | g:; s: | |
| 177623 | 5 | 0.079365079 | k: Bacteria; p: Firmicutes; c: Clostridia; o: Clostridiales; f: Ruminococcaceae; | 144 |
| | | | g: Ruminococcus; s: | |
| 177727 | 1 | 0.015873016 | k: Bacteria; p: Firmicutes; c: Clostridia; o: Clostridiales; f: Ruminococcaceae; | 145 |
| | | | g: Ruminococcus; s: | |
| 177754 | 11 | 0.174603175 | k: Bacteria; p: Firmicutes; c: Clostridia; o: Clostridiales; f: Lachnospiraceae; | 146 |
| | | | g: Coprococcus; s: | |
| 177775 | 1 | 0.015873016 | k: Bacteria; p: Firmicutes; c: Clostridia; o: Clostridiales; f: Ruminococcaceae; | 147 |
| | | | g: Faecalibacterium; s: prausnitzii | |
| 177800 | 20 | 0.317460317 | k: Bacteria; p: Firmicutes; c: Clostridia; o: Clostridiales; f: Ruminococcaceae; | 148 |
| | | | g: Ruminococcus; s: | |
| 177933 | 1 | 0.015873016 | k: Bacteria; p: Firmicutes; c: Clostridia; o: Clostridiales; f: Lachnospiraceae; | 149 |
| | | | g: Coprococcus; s: | |
| 177987 | 52 | 0.825396825 | k: Bacteria; p: Firmicutes; c: Clostridia; o: Clostridiales; f: Lachnospiraceae; | 150 |
| | | | g: Lachnospira; s: | |
| 178001 | 21 | 0.333333333 | k: Bacteria; p: Firmicutes; c: Clostridia; o: Clostridiales; f: Lachnospiraceae; | 151 |
| | | | g: Lachnospira; s: | |
| 178082 | 13 | 0.206349206 | k: Bacteria; p: Firmicutes; c: Clostridia; o: Clostridiales; f: Lachnospiraceae; | 152 |
| | | | g: Lachnospira; s: | |
| 178117 | 9 | 0.142857143 | k: Bacteria; p: Firmicutes; c: Clostridia; o: Clostridiales; f: Ruminococcaceae; | 153 |
| | | | g: Ruminococcus; s: | |
| 178146 | 1 | 0.015873016 | k: Bacteria; p: Firmicutes; c: Clostridia; o: Clostridiales; f: Lachnospiraceae; | 154 |
| | | | g: Coprococcus; s: | |
| 178151 | 10 | 0.158730159 | k: Bacteria; p: Firmicutes; c: Clostridia; o: Clostridiales; f: Ruminococcaceae; | 155 |
| | | | g: Ruminococcus; s: | |
| 178183 | 39 | 0.619047619 | k: Bacteria; p: Firmicutes; c: Clostridia; o: Clostridiales; f: Clostridiaceae; g:; s: | 156 |
| 178205 | 18 | 0.285714286 | k: Bacteria; p: Firmicutes; c: Clostridia; o: Clostridiales; f: Lachnospiraceae; | 157 |
| | | | g: Coprococcus; s: | |
| 178238 | 59 | 0.936507937 | k: Bacteria; p: Firmicutes; c: Clostridia; o: Clostridiales; f: Lachnospiraceae; | 158 |
| | | | g: Coprococcus; s: | |
| 178370 | 3 | 0.047619048 | k: Bacteria; p: Firmicutes; c: Clostridia; o: Clostridiales; f: Clostridiaceae; | 159 |
| | | | g: Clostridium; s: | |
| 178385 | 13 | 0.206349206 | k: Bacteria; p: Firmicutes; c: Clostridia; o: Clostridiales; f: Ruminococcaceae; | 160 |
| | | | g: Faecalibacterium; s: prausnitzii | |
| 178557 | 6 | 0.095238095 | k: Bacteria; p: Firmicutes; c: Clostridia; o: Clostridiales; f: Lachnospiraceae; | 161 |
| | | | g: Coprococcus; s: | |
| 178559 | 1 | 0.015873016 | k: Bacteria; p: Firmicutes; c: Clostridia; o: Clostridiales; f: Lachnospiraceae; | 162 |
| | | | g: Coprococcus; s: | |
| 178584 | 47 | 0.746031746 | k: Bacteria; p: Firmicutes; c: Clostridia; o: Clostridiales; f: Clostridiaceae; | 163 |
| | | | g: Clostridium; s: | |
| 178629 | 45 | 0.714285714 | k: Bacteria; p: Firmicutes; c: Clostridia; o: Clostridiales; f: Lachnospiraceae; | 164 |
| | | | g: Coprococcus; s: | |
| 178738 | 25 | 0.396825397 | k: Bacteria; p: Firmicutes; c: Clostridia; o: Clostridiales; f: Clostridiaceae; g:; s: | 165 |
| 178839 | 5 | 0.079365079 | k: Bacteria; p: Firmicutes; c: Clostridia; o: Clostridiales; f: [Mogibacteriaceae]; | 166 |
| | | | g:; s: | |
| 178852 | 31 | 0.492063492 | k: Bacteria; p: Firmicutes; c: Clostridia; o: Clostridiales; f: Ruminococcaceae; | 167 |
| | | | g: Oscillospira; s: | |
| 178882 | 1 | 0.015873016 | k: Bacteria; p: Firmicutes; c: Clostridia; o: Clostridiales; f: Lachnospiraceae; | 168 |
| | | | g: Coprococcus; s: | |
| 178961 | 18 | 0.285714286 | k: Bacteria; p: Firmicutes; c: Clostridia; o: Clostridiales; f: Lachnospiraceae; | 169 |
| | | | g: Coprococcus; s: | |
| 178984 | 1 | 0.015873016 | k: Bacteria; p: Firmicutes; c: Clostridia; o: Clostridiales; f: Lachnospiraceae; | 170 |
| | | | g: Coprococcus; s: | |
| 179116 | 1 | 0.015873016 | k: Bacteria; p: Firmicutes; c: Clostridia; o: Clostridiales; f: Ruminococcaceae; | 171 |
| | | | g: Oscillospira; s: | |
| 179137 | 1 | 0.015873016 | k: Bacteria; p: Firmicutes; c: Clostridia; o: Clostridiales; f: Lachnospiraceae; | 172 |
| | | | g: Coprococcus; s: | |
| 179267 | 25 | 0.396825397 | k: Bacteria; p: Firmicutes; c: Clostridia; o: Clostridiales; f: Lachnospiraceae; | 173 |
| | | | g: Coprococcus; s: | |
| 179291 | 2 | 0.031746032 | k: Bacteria; p: Firmicutes; c: Clostridia; o: Clostridiales; f: Ruminococcaceae; | 174 |
| | | | g: Faecalibacterium; s: prausnitzii | |
| 179423 | 3 | 0.047619048 | k: Bacteria; p: Firmicutes; c: Clostridia; o: Clostridiales; f: Clostridiaceae; g:; s: | 175 |
| 179536 | 2 | 0.031746032 | k: Bacteria; p: Firmicutes; c: Clostridia; o: Clostridiales; f: Clostridiaceae; g:; s: | 176 |
| 179572 | 15 | 0.238095238 | k: Bacteria; p: Firmicutes; c: Clostridia; o: Clostridiales; f: Ruminococcaceae; | 177 |
| | | | g: Ruminococcus; s: | |
| 179573 | 7 | 0.111111111 | k: Bacteria; p: Firmicutes; c: Clostridia; o: Clostridiales; f: Ruminococcaceae; | 178 |
| | | | g: Ruminococcus; s: | |
| 179608 | 2 | 0.031746032 | k: Bacteria; p: Firmicutes; c: Clostridia; o: Clostridiales; f: Christensenellaceae; | 179 |
| | | | g:; s: | |
| 179644 | 1 | 0.015873016 | k: Bacteria; p: Firmicutes; c: Clostridia; o: Clostridiales; f: Ruminococcaceae; | 180 |
| | | | g: Faecalibacterium; s: prausnitzii | |
| 179647 | 29 | 0.46031746 | k: Bacteria; p: Firmicutes; c: Clostridia; o: Clostridiales; f: Ruminococcaceae; | 181 |
| | | | g: Ruminococcus; s: | |
| 179649 | 2 | 0.031746032 | k: Bacteria; p: Firmicutes; c: Clostridia; o: Clostridiales; f: Ruminococcaceae; | 182 |
| | | | g: Faecalibacterium; s: prausnitzii | |
| 179677 | 33 | 0.523809524 | k: Bacteria; p: Firmicutes; c: Clostridia; o: Clostridiales; f: Lachnospiraceae; | 183 |
| | | | g: Coprococcus; s: | |
| 179834 | 1 | 0.015873016 | k: Bacteria; p: Firmicutes; c: Clostridia; o: Clostridiales; f: Ruminococcaceae; | 184 |
| | | | g: Ruminococcus; s: | |
| 179911 | 3 | 0.047619048 | k: Bacteria; p: Firmicutes; c: Clostridia; o: Clostridiales; f: Lachnospiraceae; | 185 |
| | | | g: Coprococcus; s: | |
| 179946 | 2 | 0.031746032 | k: Bacteria; p: Firmicutes; c: Clostridia; o: Clostridiales; f: Lachnospiraceae; | 186 |
| | | | g: Coprococcus; s: | |
| 180107 | 8 | 0.126984127 | k: Bacteria; p: Firmicutes; c: Clostridia; o: Clostridiales; f: Ruminococcaceae; | 187 |
| | | | g: Ruminococcus; s: | |
| 180130 | 15 | 0.238095238 | k: Bacteria; p: Firmicutes; c: Clostridia; o: Clostridiales; f: Ruminococcaceae; | 188 |
| | | | g: Ruminococcus; s: | |
| 180133 | 1 | 0.015873016 | k: Bacteria; p: Bacteroidetes; c: Bacteroidia; o: Bacteroidales; | 189 |
| | | | f: [Barnesiellaceae]; g:; s: | |
| 180136 | 4 | 0.063492063 | k: Bacteria; p: Firmicutes; c: Clostridia; o: Clostridiales; f: Ruminococcaceae; | 190 |
| | | | g: Oscillospira; s: | |
| 180381 | 7 | 0.111111111 | k: Bacteria; p: Firmicutes; c: Clostridia; o: Clostridiales; f: Ruminococcaceae; | 191 |
| | | | g: Ruminococcus; s: | |
| 180402 | 47 | 0.746031746 | k: Bacteria; p: Firmicutes; c: Clostridia; o: Clostridiales; f: [Mogibacteriaceae]; | 192 |
| | | | g:; s: | |
| 180468 | 11 | 0.174603175 | k: Bacteria; p: Firmicutes; c: Clostridia; o: Clostridiales; f: Ruminococcaceae; | 193 |
| | | | g: Oscillospira; s: | |
| 180509 | 34 | 0.53968254 | k: Bacteria; p: Firmicutes; c: Clostridia; o: Clostridiales; f: Ruminococcaceae; | 194 |
| | | | g: Ruminococcus; s: | |
| 180572 | 1 | 0.015873016 | k: Bacteria; p: Firmicutes; c: Clostridia; o: Clostridiales; f: Ruminococcaceae; | 195 |
| | | | g: Faecalibacterium; s: prausnitzii | |
| 180659 | 22 | 0.349206349 | k: Bacteria; p: Firmicutes; c: Clostridia; o: Clostridiales; f: Ruminococcaceae; | 196 |
| | | | g: Oscillospira; s: | |
| 180665 | 4 | 0.063492063 | k: Bacteria; p: Firmicutes; c: Clostridia; o: Clostridiales; f: Ruminococcaceae; | 197 |
| | | | g: Faecalibacterium; s: prausnitzii | |
| 180738 | 13 | 0.206349206 | k: Bacteria; p: Firmicutes; c: Clostridia; o: Clostridiales; f: Ruminococcaceae; | 198 |
| | | | g: Ruminococcus; s: | |
| 180826 | 28 | 0.444444444 | k: Bacteria; p: Firmicutes; c: Clostridia; o: Clostridiales; f: Ruminococcaceae; | 199 |
| | | | g: Ruminococcus; s: | |
| 180857 | 1 | 0.015873016 | k: Bacteria; p: Firmicutes; c: Clostridia; o: Clostridiales; f: Ruminococcaceae; | 200 |
| | | | g: Ruminococcus; s: | |
| 180975 | 3 | 0.047619048 | k: Bacteria; p: Firmicutes; c: Clostridia; o: Clostridiales; f: Ruminococcaceae; | 201 |
| | | | g: Oscillospira; s: | |
| 181016 | 3 | 0.047619048 | k: Bacteria; p: Firmicutes; c: Clostridia; o: Clostridiales; f: Ruminococcaceae; | 202 |
| | | | g: Ruminococcus; s: | |
| 181025 | 40 | 0.634920635 | k: Bacteria; p: Firmicutes; c: Clostridia; o: Clostridiales; f: Lachnospiraceae; | 203 |
| | | | g: Coprococcus; s: | |
| 181047 | 23 | 0.365079365 | k: Bacteria; p: Firmicutes; c: Clostridia; o: Clostridiales; f: Lachnospiraceae; | 204 |
| | | | g: Coprococcus; s: | |
| 181056 | 1 | 0.015873016 | k: Bacteria; p: Firmicutes; c: Clostridia; o: Clostridiales; f: Ruminococcaceae; | 205 |
| | | | g: Faecalibacterium; s: prausnitzii | |
| 181062 | 2 | 0.031746032 | k: Bacteria; p: Firmicutes; c: Clostridia; o: Clostridiales; f: Ruminococcaceae; | 206 |
| | | | g: Oscillospira; s: | |
| 181139 | 7 | 0.111111111 | k: Bacteria; p: Firmicutes; c: Clostridia; o: Clostridiales; f: Ruminococcaceae; | 207 |
| | | | g: Faecalibacterium; s: prausnitzii | |
| 181160 | 31 | 0.492063492 | k: Bacteria; p: Firmicutes; c: Clostridia; o: Clostridiales; f: Clostridiaceae; | 208 |
| | | | g: Clostridium; s: | |
| 181176 | 25 | 0.396825397 | k: Bacteria; p: Firmicutes; c: Clostridia; o: Clostridiales; f: Lachnospiraceae; | 209 |
| | | | g: Coprococcus; s: | |
| 181269 | 14 | 0.222222222 | k: Bacteria; p: Firmicutes; c: Clostridia; o: Clostridiales; f: Lachnospiraceae; | 210 |
| | | | g: Coprococcus; s: | |
| 181422 | 1 | 0.015873016 | k: Bacteria; p: Firmicutes; c: Clostridia; o: Clostridiales; f: Ruminococcaceae; | 211 |
| | | | g: Faecalibacterium; s: prausnitzii | |
| 181466 | 1 | 0.015873016 | k: Bacteria; p: Firmicutes; c: Clostridia; o: Clostridiales; f: Clostridiaceae; g:; s: | 212 |
| 181467 | 5 | 0.079365079 | k: Bacteria; p: Firmicutes; c: Clostridia; o: Clostridiales; f: Clostridiaceae; g:; s: | 213 |
| 181560 | 2 | 0.031746032 | k: Bacteria; p: Firmicutes; c: Clostridia; o: Clostridiales; f: Lachnospiraceae; | 214 |
| | | | g: Coprococcus; s: | |
| 181672 | 1 | 0.015873016 | k: Bacteria; p: Firmicutes; c: Clostridia; o: Clostridiales; f: Lachnospiraceae; | 215 |
| | | | g: Coprococcus; s: | |
| 181853 | 4 | 0.063492063 | k: Bacteria; p: Firmicutes; c: Clostridia; o: Clostridiales; f: Lachnospiraceae; | 216 |
| | | | g: Coprococcus; s: | |
| 181918 | 56 | 0.888888889 | k: Bacteria; p: Firmicutes; c: Clostridia; o: Clostridiales; f: Lachnospiraceae; | 217 |
| | | | g: Coprococcus; s: | |
| 181969 | 4 | 0.063492063 | k: Bacteria; p: Firmicutes; c: Clostridia; o: Clostridiales; f: Ruminococcaceae; | 218 |
| | | | g: Ruminococcus; s: | |
| 182054 | 58 | 0.920634921 | k: Bacteria; p: Firmicutes; c: Clostridia; o: Clostridiales; f: Lachnospiraceae; | 219 |
| | | | g: Coprococcus; s: | |
| 182149 | 10 | 0.158730159 | k: Bacteria; p: Firmicutes; c: Clostridia; o: Clostridiales; f: Ruminococcaceae; | 220 |
| | | | g: Faecalibacterium; s: prausnitzii | |
| 182456 | 1 | 0.015873016 | k: Bacteria; p: Firmicutes; c: Clostridia; o: Clostridiales; f: Lachnospiraceae; | 221 |
| | | | g: Lachnospira; s: | |
| 182538 | 15 | 0.238095238 | k: Bacteria; p: Firmicutes; c: Clostridia; o: Clostridiales; f: Lachnospiraceae; | 222 |
| | | | g: Coprococcus; s: | |
| 182588 | 8 | 0.126984127 | k: Bacteria; p: Firmicutes; c: Clostridia; o: Clostridiales; f: Ruminococcaceae; | 223 |
| | | | g: Ruminococcus; s: | |
| 182600 | 1 | 0.015873016 | k: Bacteria; p: Firmicutes; c: Clostridia; o: Clostridiales; f: Ruminococcaceae; | 224 |
| | | | g: Oscillospira; s: | |
| 182643 | 2 | 0.031746032 | k: Bacteria; p: Firmicutes; c: Clostridia; o: Clostridiales; f: Clostridiaceae; g:; s: | 225 |
| 182799 | 56 | 0.888888889 | k: Bacteria; p: Firmicutes; c: Clostridia; o: Clostridiales; f: Lachnospiraceae; | 226 |
| | | | g: Lachnospira; s: | |
| 182891 | 1 | 0.015873016 | k: Bacteria; p: Firmicutes; c: Clostridia; o: Clostridiales; f: Clostridiaceae; g:; s: | 227 |
| 182986 | 10 | 0.158730159 | k: Bacteria; p: Firmicutes; c: Clostridia; o: Clostridiales; f: Ruminococcaceae; | 228 |
| | | | g: Faecalibacterium; s: prausnitzii | |
| 183049 | 41 | 0.650793651 | k: Bacteria; p: Firmicutes; c: Clostridia; o: Clostridiales; f: Ruminococcaceae; | 229 |
| | | | g: Faecalibacterium; s: prausnitzii | |
| 183089 | 22 | 0.349206349 | k: Bacteria; p: Firmicutes; c: Clostridia; o: Clostridiales; f: Clostridiaceae; g:; s: | 230 |
| 183104 | 6 | 0.095238095 | k: Bacteria; p: Actinobacteria; c: Coriobacteriia; o: Coriobacteriales; | 231 |
| | | | f: Coriobacteriaceae; g:; s: | |
| 183157 | 5 | 0.079365079 | k: Bacteria; p: Firmicutes; c: Clostridia; o: Clostridiales; f: Ruminococcaceae; | 232 |
| | | | g: Faecalibacterium; s: prausnitzii | |
| 183162 | 7 | 0.111111111 | k: Bacteria; p: Firmicutes; c: Clostridia; o: Clostridiales; f: Ruminococcaceae; | 233 |
| | | | g: Oscillospira; s: | |
| 183245 | 3 | 0.047619048 | k: Bacteria; p: Firmicutes; c: Clostridia; o: Clostridiales; f: Ruminococcaceae; | 234 |
| | | | g: Ruminococcus; s: | |
| 183395 | 2 | 0.031746032 | k: Bacteria; p: Bacteroidetes; c: Bacteroidia; o: Bacteroidales; | 235 |
| | | | f: [Barnesiellaceae]; g:; s: | |
| 183680 | 2 | 0.031746032 | k: Bacteria; p: Firmicutes; c: Clostridia; o: Clostridiales; f: Lachnospiraceae; | 236 |
| | | | g: Coprococcus; s: | |
| 183748 | 14 | 0.222222222 | k: Bacteria; p: Firmicutes; c: Clostridia; o: Clostridiales; f: Christensenellaceae; | 237 |
| | | | g:; s: | |
| 183780 | 4 | 0.063492063 | k: Bacteria; p: Firmicutes; c: Clostridia; o: Clostridiales; f: Ruminococcaceae; | 238 |
| | | | g: Faecalibacterium; s: prausnitzii | |
| 184000 | 47 | 0.746031746 | k: Bacteria; p: Firmicutes; c: Clostridia; o: Clostridiales; f: Ruminococcaceae; | 239 |
| | | | g: Faecalibacterium; s: prausnitzii | |
| 184009 | 19 | 0.301587302 | k: Bacteria; p: Firmicutes; c: Clostridia; o: Clostridiales; f: Clostridiaceae; g:; s: | 240 |
| 184013 | 8 | 0.126984127 | k: Bacteria; p: Firmicutes; c: Clostridia; o: Clostridiales; f: Lachnospiraceae; | 241 |
| | | | g: Coprococcus; s: | |
| 184025 | 4 | 0.063492063 | k: Bacteria; p: Firmicutes; c: Clostridia; o: Clostridiales; f: Lachnospiraceae; | 242 |
| | | | g: Coprococcus; s: | |
| 184511 | 10 | 0.158730159 | k: Bacteria; p: Firmicutes; c: Clostridia; o: Clostridiales; f: Ruminococcaceae; | 243 |
| | | | g: Faecalibacterium; s: prausnitzii | |
| 184525 | 8 | 0.126984127 | k: Bacteria; p: Firmicutes; c: Clostridia; o: Clostridiales; f: Lachnospiraceae; | 244 |
| | | | g: Coprococcus; s: | |
| 184678 | 39 | 0.619047619 | k: Bacteria; p: Firmicutes; c: Clostridia; o: Clostridiales; f: Ruminococcaceae; | 245 |
| | | | g: Faecalibacterium; s: prausnitzii | |
| 184725 | 4 | 0.063492063 | k: Bacteria; p: Bacteroidetes; c: Bacteroidia; o: Bacteroidales; f: Rikenellaceae; | 246 |
| | | | g:; s: | |
| 184770 | 56 | 0.888888889 | k: Bacteria; p: Firmicutes; c: Clostridia; o: Clostridiales; f: Lachnospiraceae; | 247 |
| | | | g: Coprococcus; s: | |
| 184821 | 1 | 0.015873016 | k: Bacteria; p: Firmicutes; c: Clostridia; o: Clostridiales; f: Lachnospiraceae; | 248 |
| | | | g: Coprococcus; s: | |
| 184845 | 4 | 0.063492063 | k: Bacteria; p: Firmicutes; c: Clostridia; o: Clostridiales; f: Ruminococcaceae; | 249 |
| | | | g: Ruminococcus; s: | |
| 184876 | 7 | 0.111111111 | k: Bacteria; p: Firmicutes; c: Clostridia; o: Clostridiales; f: Lachnospiraceae; | 250 |
| | | | g: Lachnospira; s: | |
| 184897 | 47 | 0.746031746 | k: Bacteria; p: Firmicutes; c: Clostridia; o: Clostridiales; f: Ruminococcaceae; | 251 |
| | | | g: Faecalibacterium; s: prausnitzii | |
| 184905 | 1 | 0.015873016 | k: Bacteria; p: Firmicutes; c: Clostridia; o: Clostridiales; f: Lachnospiraceae; | 252 |
| | | | g: Coprococcus; s: | |
| 184940 | 5 | 0.079365079 | k: Bacteria; p: Firmicutes; c: Clostridia; o: Clostridiales; f: Christensenellaceae; | 253 |
| | | | g:; s: | |
| 184996 | 1 | 0.015873016 | k: Bacteria; p: Firmicutes; c: Clostridia; o: Clostridiales; f: Ruminococcaceae; | 254 |
| | | | g: Faecalibacterium; s: prausnitzii | |
| 185042 | 2 | 0.031746032 | k: Bacteria; p: Firmicutes; c: Clostridia; o: Clostridiales; f: Ruminococcaceae; | 255 |
| | | | g: Oscillospira; s: | |
| 185159 | 4 | 0.063492063 | k: Bacteria; p: Firmicutes; c: Clostridia; o: Clostridiales; f: Clostridiaceae; g:; s: | 256 |
| 185175 | 3 | 0.047619048 | k: Bacteria; p: Firmicutes; c: Clostridia; o: Clostridiales; f: Ruminococcaceae; | 257 |
| | | | g: Ruminococcus; s: | |
| 185222 | 1 | 0.015873016 | k: Bacteria; p: Firmicutes; c: Clostridia; o: Clostridiales; f: Clostridiaceae; g:; s: | 258 |
| 185235 | 14 | 0.222222222 | k: Bacteria; p: Firmicutes; c: Clostridia; o: Clostridiales; f: Lachnospiraceae; | 259 |
| | | | g: Coprococcus; s: | |
| 185324 | 5 | 0.079365079 | k: Bacteria; p: Firmicutes; c: Clostridia; o: Clostridiales; f: Ruminococcaceae; | 260 |
| | | | g: Faecalibacterium; s: prausnitzii | |
| 185392 | 1 | 0.015873016 | k: Bacteria; p: Firmicutes; c: Clostridia; o: Clostridiales; f: Ruminococcaceae; | 261 |
| | | | g: Ruminococcus; s: | |
| 185667 | 8 | 0.126984127 | k: Bacteria; p: Firmicutes; c: Clostridia; o: Clostridiales; f: Lachnospiraceae; | 262 |
| | | | g: Coprococcus; s: | |
| 185715 | 18 | 0.285714286 | k: Bacteria; p: Firmicutes; c: Clostridia; o: Clostridiales; f: Lachnospiraceae; | 263 |
| | | | g: Coprococcus; s: | |
| 185769 | 3 | 0.047619048 | k: Bacteria; p: Firmicutes; c: Clostridia; o: Clostridiales; f: Ruminococcaceae; | 264 |
| | | | g: Faecalibacterium; s: prausnitzii | |
| 185821 | 12 | 0.19047619 | k: Bacteria; p: Firmicutes; c: Clostridia; o: Clostridiales; f: Lachnospiraceae; | 265 |
| | | | g: Coprococcus; s: eutactus | |
| 185861 | 23 | 0.365079365 | k: Bacteria; p: Firmicutes; c: Clostridia; o: Clostridiales; f: Lachnospiraceae; | 266 |
| | | | g: Coprococcus; s: | |
| 186090 | 39 | 0.619047619 | k: Bacteria; p: Firmicutes; c: Clostridia; o: Clostridiales; f: Ruminococcaceae; | 267 |
| | | | g: Ruminococcus; s: | |
| 186092 | 17 | 0.26984127 | k: Bacteria; p: Firmicutes; c: Clostridia; o: Clostridiales; f: Clostridiaceae; g:; s: | 268 |
| 186133 | 15 | 0.238095238 | k: Bacteria; p: Firmicutes; c: Clostridia; o: Clostridiales; f: Ruminococcaceae; | 269 |
| | | | g: Ruminococcus; s: | |
| 186289 | 2 | 0.031746032 | k: Bacteria; p: Firmicutes; c: Clostridia; o: Clostridiales; f: Clostridiaceae; | 270 |
| | | | g: Clostridium; s: | |
| 186319 | 3 | 0.047619048 | k: Bacteria; p: Firmicutes; c: Clostridia; o: Clostridiales; f: Lachnospiraceae; | 271 |
| | | | g: Coprococcus; s: | |
| 186328 | 2 | 0.031746032 | k: Bacteria; p: Firmicutes; c: Clostridia; o: Clostridiales; f: Ruminococcaceae; | 272 |
| | | | g: Faecalibacterium; s: prausnitzii | |
| 186350 | 1 | 0.015873016 | k: Bacteria; p: Firmicutes; c: Clostridia; o: Clostridiales; f: Ruminococcaceae; | 273 |
| | | | g: Ruminococcus; s: | |
| 186389 | 1 | 0.015873016 | k: Bacteria; p: Firmicutes; c: Clostridia; o: Clostridiales; f: Clostridiaceae; | 274 |
| | | | g: Clostridium; s: | |
| 186392 | 29 | 0.46031746 | k: Bacteria; p: Firmicutes; c: Clostridia; o: Clostridiales; f: Ruminococcaceae; | 275 |
| | | | g: Faecalibacterium; s: prausnitzii | |
| 186554 | 1 | 0.015873016 | k: Bacteria; p: Firmicutes; c: Clostridia; o: Clostridiales; f: Ruminococcaceae; | 276 |
| | | | g: Ruminococcus; s: | |
| 186563 | 3 | 0.047619048 | k: Bacteria; p: Firmicutes; c: Clostridia; o: Clostridiales; f: Ruminococcaceae; | 277 |
| | | | g: Ruminococcus; s: callidus | |
| 186592 | 1 | 0.015873016 | k: Bacteria; p: Firmicutes; c: Clostridia; o: Clostridiales; f: Lachnospiraceae; | 278 |
| | | | g: Coprococcus; s: | |
| 186614 | 60 | 0.952380952 | k: Bacteria; p: Firmicutes; c: Clostridia; o: Clostridiales; f: Lachnospiraceae; | 279 |
| | | | g: Coprococcus; s: | |
| 186703 | 15 | 0.238095238 | k: Bacteria; p: Actinobacteria; c: Coriobacteriia; o: Coriobacteriales; | 280 |
| | | | f: Coriobacteriaceae; g: Collinsella; s: aerofaciens | |
| 186731 | 7 | 0.111111111 | k: Bacteria; p: Firmicutes; c: Clostridia; o: Clostridiales; f: Lachnospiraceae; | 281 |
| | | | g: Coprococcus; s: | |
| 186780 | 6 | 0.095238095 | k: Bacteria; p: Firmicutes; c: Clostridia; o: Clostridiales; f: Lachnospiraceae; | 282 |
| | | | g: Coprococcus; s: | |
| 186921 | 2 | 0.031746032 | k: Bacteria; p: Firmicutes; c: Clostridia; o: Clostridiales; f: Lachnospiraceae; | 283 |
| | | | g: Coprococcus; s: | |
| 186969 | 15 | 0.238095238 | k: Bacteria; p: Firmicutes; c: Clostridia; o: Clostridiales; f: Lachnospiraceae; | 284 |
| | | | g: Coprococcus; s: | |
| 186981 | 22 | 0.349206349 | k: Bacteria; p: Bacteroidetes; c: Bacteroidia; o: Bacteroidales; | 285 |
| | | | f: [Barnesiellaceae]; g:; s: | |
| 187056 | 38 | 0.603174603 | k: Bacteria; p: Firmicutes; c: Clostridia; o: Clostridiales; f: Ruminococcaceae; | 286 |
| | | | g: Ruminococcus; s: | |
| 187181 | 9 | 0.142857143 | k: Bacteria; p: Firmicutes; c: Clostridia; o: Clostridiales; f: Ruminococcaceae; | 287 |
| | | | g: Ruminococcus; s: | |
| 187267 | 20 | 0.317460317 | k: Bacteria; p: Firmicutes; c: Clostridia; o: Clostridiales; f: Ruminococcaceae; | 288 |
| | | | g: Oscillospira; s: | |
| 187321 | 7 | 0.111111111 | k: Bacteria; p: Firmicutes; c: Clostridia; o: Clostridiales; f: Ruminococcaceae; | 289 |
| | | | g: Ruminococcus; s: | |
| 187356 | 60 | 0.952380952 | k: Bacteria; p: Firmicutes; c: Clostridia; o: Clostridiales; f: Lachnospiraceae; | 290 |
| | | | g: Coprococcus; s: | |
| 187409 | 1 | 0.015873016 | k: Bacteria; p: Firmicutes; c: Clostridia; o: Clostridiales; f: Ruminococcaceae; | 291 |
| | | | g: Oscillospira; s: | |
| 187466 | 5 | 0.079365079 | k: Bacteria; p: Firmicutes; c: Clostridia; o: Clostridiales; f: Clostridiaceae; g:; s: | 292 |
| 187470 | 2 | 0.031746032 | k: Bacteria; p: Firmicutes; c: Clostridia; o: Clostridiales; f: Lachnospiraceae; | 293 |
| | | | g: Coprococcus; s: | |
| 187490 | 49 | 0.777777778 | k: Bacteria; p: Actinobacteria; c: Coriobacteriia; o: Coriobacteriales; | 294 |
| | | | f: Coriobacteriaceae; g: Collinsella; s: | |
| 187569 | 61 | 0.968253968 | k: Bacteria; p: Firmicutes; c: Clostridia; o: Clostridiales; f: Lachnospiraceae; | 295 |
| | | | g: Coprococcus; s: | |
| 187668 | 50 | 0.793650794 | k: Bacteria; p: Firmicutes; c: Clostridia; o: Clostridiales; f: Clostridiaceae; | 296 |
| | | | g: Clostridium; s: | |
| 187709 | 1 | 0.015873016 | k: Bacteria; p: Firmicutes; c: Clostridia; o: Clostridiales; f: Ruminococcaceae; | 297 |
| | | | g: Oscillospira; s: | |
| 187868 | 34 | 0.53968254 | k: Bacteria; p: Firmicutes; c: Clostridia; o: Clostridiales; f: Lachnospiraceae; | 298 |
| | | | g: Coprococcus; s: | |
| 187956 | 26 | 0.412698413 | k: Bacteria; p: Firmicutes; c: Clostridia; o: Clostridiales; f: Clostridiaceae; g:; s: | 299 |
| 188001 | 5 | 0.079365079 | k: Bacteria; p: Firmicutes; c: Clostridia; o: Clostridiales; f: Ruminococcaceae; | 300 |
| | | | g: Ruminococcus; s: | |
| 188047 | 62 | 0.984126984 | k: Bacteria; p: Firmicutes; c: Clostridia; o: Clostridiales; f: Lachnospiraceae; | 301 |
| | | | g: Coprococcus; s: | |
| 188079 | 36 | 0.571428571 | k: Bacteria; p: Firmicutes; c: Clostridia; o: Clostridiales; f: Lachnospiraceae; | 302 |
| | | | g: Coprococcus; s: | |
| 188126 | 1 | 0.015873016 | k: Bacteria; p: Firmicutes; c: Clostridia; o: Clostridiales; f: Ruminococcaceae; | 303 |
| | | | g: Faecalibacterium; s: prausnitzii | |
| 188276 | 7 | 0.111111111 | k: Bacteria; p: Firmicutes; c: Clostridia; o: Clostridiales; f: Ruminococcaceae; | 304 |
| | | | g: Ruminococcus; s: | |
| 188316 | 8 | 0.126984127 | k: Bacteria; p: Firmicutes; c: Clostridia; o: Clostridiales; f: Ruminococcaceae; | 305 |
| | | | g: Oscillospira; s: | |
| 188329 | 3 | 0.047619048 | k: Bacteria; p: Firmicutes; c: Clostridia; o: Clostridiales; f: Ruminococcaceae; | 306 |
| | | | g: Faecalibacterium; s: prausnitzii | |
| 188484 | 1 | 0.015873016 | k: Bacteria; p: Firmicutes; c: Clostridia; o: Clostridiales; f: Ruminococcaceae; | 307 |
| | | | g: Ruminococcus; s: | |
| 188625 | 19 | 0.301587302 | k: Bacteria; p: Firmicutes; c: Clostridia; o: Clostridiales; f: Lachnospiraceae; | 308 |
| | | | g: Coprococcus; s: | |
| 188789 | 1 | 0.015873016 | k: Bacteria; p: Firmicutes; c: Clostridia; o: Clostridiales; f: Christensenellaceae; | 309 |
| | | | g:; s: | |
| 188881 | 9 | 0.142857143 | k: Bacteria; p: Firmicutes; c: Clostridia; o: Clostridiales; f: Christensenellaceae; | 310 |
| | | | g:; s: | |
| 188918 | 30 | 0.476190476 | k: Bacteria; p: Firmicutes; c: Clostridia; o: Clostridiales; f: Lachnospiraceae; | 311 |
| | | | g: Coprococcus; s: | |
| 188966 | 39 | 0.619047619 | k: Bacteria; p: Actinobacteria; c: Coriobacteriia; o: Coriobacteriales; | 312 |
| | | | f: Coriobacteriaceae; g:; s: | |
| 188974 | 6 | 0.095238095 | k: Bacteria; p: Firmicutes; c: Clostridia; o: Clostridiales; f: Lachnospiraceae; | 313 |
| | | | g: Coprococcus; s: | |
| 189011 | 6 | 0.095238095 | k: Bacteria; p: Firmicutes; c: Clostridia; o: Clostridiales; f: Ruminococcaceae; | 314 |
| | | | g: Ruminococcus; s: | |
| 189035 | 22 | 0.349206349 | k: Bacteria; p: Firmicutes; c: Clostridia; o: Clostridiales; f: Ruminococcaceae; | 315 |
| | | | g: Ruminococcus; s: | |
| 189064 | 46 | 0.73015873 | k: Bacteria; p: Firmicutes; c: Clostridia; o: Clostridiales; f: Ruminococcaceae; | 316 |
| | | | g: Faecalibacterium; s: prausnitzii | |
| 189092 | 4 | 0.063492063 | k: Bacteria; p: Firmicutes; c: Clostridia; o: Clostridiales; f: Ruminococcaceae; | 317 |
| | | | g: Faecalibacterium; s: prausnitzii | |
| 189110 | 14 | 0.222222222 | k: Bacteria; p: Firmicutes; c: Clostridia; o: Clostridiales; f: Ruminococcaceae; | 318 |
| | | | g: Ruminococcus; s: | |
| 189116 | 2 | 0.031746032 | k: Bacteria; p: Firmicutes; c: Clostridia; o: Clostridiales; f: Ruminococcaceae; | 319 |
| | | | g: Ruminococcus; s: | |
| 189147 | 6 | 0.095238095 | k: Bacteria; p: Firmicutes; c: Clostridia; o: Clostridiales; f: Ruminococcaceae; | 320 |
| | | | g: Ruminococcus; s: | |
| 189150 | 31 | 0.492063492 | k: Bacteria; p: Firmicutes; c: Clostridia; o: Clostridiales; f: Ruminococcaceae; | 321 |
| | | | g: Ruminococcus; s: | |
| 189152 | 1 | 0.015873016 | k: Bacteria; p: Firmicutes; c: Clostridia; o: Clostridiales; f: Lachnospiraceae; | 322 |
| | | | g: Coprococcus; s: | |
| 189282 | 1 | 0.015873016 | k: Bacteria; p: Firmicutes; c: Clostridia; o: Clostridiales; f: Ruminococcaceae; | 323 |
| | | | g: Faecalibacterium; s: prausnitzii | |
| 189294 | 43 | 0.682539683 | k: Bacteria; p: Actinobacteria; c: Coriobacteriia; o: Coriobacteriales; | 324 |
| | | | f: Coriobacteriaceae; g: Collinsella; s: aerofaciens | |
| 189407 | 6 | 0.095238095 | k: Bacteria; p: Firmicutes; c: Clostridia; o: Clostridiales; f: [Mogibacteriaceae]; | 325 |
| | | | g:; s: | |
| 189459 | 12 | 0.19047619 | k: Bacteria; p: Firmicutes; c: Clostridia; o: Clostridiales; f: Lachnospiraceae; | 326 |
| | | | g: Coprococcus; s: | |
| 189478 | 1 | 0.015873016 | k: Bacteria; p: Firmicutes; c: Clostridia; o: Clostridiales; f: Lachnospiraceae; | 327 |
| | | | g: Coprococcus; s: | |
| 189503 | 2 | 0.031746032 | k: Bacteria; p: Firmicutes; c: Clostridia; o: Clostridiales; f: Clostridiaceae; g:; s: | 328 |
| 189626 | 1 | 0.015873016 | k: Bacteria; p: Firmicutes; c: Clostridia; o: Clostridiales; f: Lachnospiraceae; | 329 |
| | | | g: Coprococcus; s: | |
| 189677 | 37 | 0.587301587 | k: Bacteria; p: Firmicutes; c: Clostridia; o: Clostridiales; f: Lachnospiraceae; | 330 |
| | | | g: Coprococcus; s: | |
| 189708 | 2 | 0.031746032 | k: Bacteria; p: Firmicutes; c: Clostridia; o: Clostridiales; f: Ruminococcaceae; | 331 |
| | | | g: Faecalibacterium; s: prausnitzii | |
| 189820 | 5 | 0.079365079 | k: Bacteria; p: Firmicutes; c: Clostridia; o: Clostridiales; f: Ruminococcaceae; | 332 |
| | | | g: Ruminococcus; s: | |
| 189936 | 4 | 0.063492063 | k: Bacteria; p: Firmicutes; c: Clostridia; o: Clostridiales; f: [Mogibacteriaceae]; | 333 |
| | | | g:; s: | |
| 189937 | 1 | 0.015873016 | k: Bacteria; p: Firmicutes; c: Clostridia; o: Clostridiales; f: Ruminococcaceae; | 334 |
| | | | g: Faecalibacterium; s: prausnitzii | |
| 189960 | 6 | 0.095238095 | k: Bacteria; p: Bacteroidetes; c: Bacteroidia; o: Bacteroidales; | 335 |
| | | | f: [Barnesiellaceae]; g:; s: | |
| 189975 | 3 | 0.047619048 | k: Bacteria; p: Firmicutes; c: Clostridia; o: Clostridiales; f: Christensenellaceae; | 336 |
| | | | g:; s: | |
| 189997 | 49 | 0.777777778 | k: Bacteria; p: Actinobacteria; c: Coriobacteriia; o: Coriobacteriales; | 337 |
| | | | f: Coriobacteriaceae; g: Collinsella; s: | |
| 190299 | 2 | 0.031746032 | k: Bacteria; p: Firmicutes; c: Clostridia; o: Clostridiales; f: Lachnospiraceae; | 338 |
| | | | g: Lachnospira; s: | |
| 190534 | 2 | 0.031746032 | k: Bacteria; p: Firmicutes; c: Clostridia; o: Clostridiales; f: Lachnospiraceae; | 339 |
| | | | g: Coprococcus; s: | |
| 190599 | 13 | 0.206349206 | k: Bacteria; p: Firmicutes; c: Clostridia; o: Clostridiales; f: Lachnospiraceae; | 340 |
| | | | g: Coprococcus; s: | |
| 190679 | 12 | 0.19047619 | k: Bacteria; p: Firmicutes; c: Clostridia; o: Clostridiales; f: Lachnospiraceae; | 341 |
| | | | g: Coprococcus; s: eutactus | |
| 190766 | 1 | 0.015873016 | k: Bacteria; p: Firmicutes; c: Clostridia; o: Clostridiales; f: Clostridiaceae; | 342 |
| | | | g: Clostridium; s: | |
| 190844 | 1 | 0.015873016 | k: Bacteria; p: Bacteroidetes; c: Bacteroidia; o: Bacteroidales; f: Rikenellaceae; | 343 |
| | | | g:; s: | |
| 190931 | 4 | 0.063492063 | k: Bacteria; p: Firmicutes; c: Clostridia; o: Clostridiales; f: Ruminococcaceae; | 344 |
| | | | g: Ruminococcus; s: | |
| 190975 | 1 | 0.015873016 | k: Bacteria; p: Bacteroidetes; c: Bacteroidia; o: Bacteroidales; | 345 |
| | | | f: [Barnesiellaceae]; g:; s: | |
| 191238 | 7 | 0.111111111 | k: Bacteria; p: Firmicutes; c: Clostridia; o: Clostridiales; f: Lachnospiraceae; | 346 |
| | | | g: Coprococcus; s: | |
| 191270 | 46 | 0.73015873 | k: Bacteria; p: Firmicutes; c: Clostridia; o: Clostridiales; f: Ruminococcaceae; | 347 |
| | | | g: Oscillospira; s: | |
| 191389 | 7 | 0.111111111 | k: Bacteria; p: Firmicutes; c: Clostridia; o: Clostridiales; f: [Mogibacteriaceae]; | 348 |
| | | | g:; s: | |
| 191547 | 1 | 0.015873016 | k: Bacteria; p: Firmicutes; c: Clostridia; o: Clostridiales; f: Ruminococcaceae; | 349 |
| | | | g: Faecalibacterium; s: prausnitzii | |
| 191595 | 17 | 0.26984127 | k: Bacteria; p: Actinobacteria; c: Coriobacteriia; o: Coriobacteriales; | 350 |
| | | | f: Coriobacteriaceae; g: Collinsella; s: aerofaciens | |
| 191615 | 5 | 0.079365079 | k: Bacteria; p: Firmicutes; c: Clostridia; o: Clostridiales; f: Ruminococcaceae; | 351 |
| | | | g: Ruminococcus; s: | |
| 191660 | 3 | 0.047619048 | k: Bacteria; p: Firmicutes; c: Clostridia; o: Clostridiales; f: Ruminococcaceae; | 352 |
| | | | g: Faecalibacterium; s: prausnitzii | |
| 191803 | 5 | 0.079365079 | k: Bacteria; p: Firmicutes; c: Clostridia; o: Clostridiales; f: Clostridiaceae; g:; s: | 353 |
| 191874 | 8 | 0.126984127 | k: Bacteria; p: Firmicutes; c: Clostridia; o: Clostridiales; f: Ruminococcaceae; | 354 |
| | | | g: Ruminococcus; s: | |
| 192048 | 4 | 0.063492063 | k: Bacteria; p: Firmicutes; c: Clostridia; o: Clostridiales; f: Ruminococcaceae; | 355 |
| | | | g: Faecalibacterium; s: prausnitzii | |
| 192058 | 46 | 0.73015873 | k: Bacteria; p: Firmicutes; c: Clostridia; o: Clostridiales; f: Ruminococcaceae; | 356 |
| | | | g: Oscillospira; s: | |
| 192066 | 39 | 0.619047619 | k: Bacteria; p: Firmicutes; c: Clostridia; o: Clostridiales; f: Lachnospiraceae; | 357 |
| | | | g: Coprococcus; s: | |
| 192079 | 1 | 0.015873016 | k: Bacteria; p: Firmicutes; c: Clostridia; o: Clostridiales; f: Ruminococcaceae; | 358 |
| | | | g: Ruminococcus; s: | |
| 192218 | 12 | 0.19047619 | k: Bacteria; p: Firmicutes; c: Clostridia; o: Clostridiales; f: Lachnospiraceae; | 359 |
| | | | g: Coprococcus; s: | |
| 192231 | 1 | 0.015873016 | k: Bacteria; p: Firmicutes; c: Clostridia; o: Clostridiales; f: Ruminococcaceae; | 360 |
| | | | g: Faecalibacterium; s: prausnitzii | |
| 192263 | 19 | 0.301587302 | k: Bacteria; p: Firmicutes; c: Clostridia; o: Clostridiales; f: Lachnospiraceae; | 361 |
| | | | g: Coprococcus; s: | |
| 192385 | 2 | 0.031746032 | k: Bacteria; p: Firmicutes; c: Clostridia; o: Clostridiales; f: Christensenellaceae; | 362 |
| | | | g:; s: | |
| 192515 | 4 | 0.063492063 | k: Bacteria; p: Firmicutes; c: Clostridia; o: Clostridiales; f: Ruminococcaceae; | 363 |
| | | | g: Ruminococcus; s: bromii | |
| 192566 | 25 | 0.396825397 | k: Bacteria; p: Firmicutes; c: Clostridia; o: Clostridiales; f: Ruminococcaceae; | 364 |
| | | | g: Faecalibacterium; s: prausnitzii | |
| 192654 | 3 | 0.047619048 | k: Bacteria; p: Firmicutes; c: Clostridia; o: Clostridiales; f: Ruminococcaceae; | 365 |
| | | | g: Ruminococcus; s: | |
| 192893 | 2 | 0.031746032 | k: Bacteria; p: Firmicutes; c: Clostridia; o: Clostridiales; f: Clostridiaceae; | 366 |
| | | | g: Clostridium; s: | |
| 192958 | 19 | 0.301587302 | k: Bacteria; p: Firmicutes; c: Clostridia; o: Clostridiales; f: Lachnospiraceae; | 367 |
| | | | g: Coprococcus; s: | |
| 193160 | 25 | 0.396825397 | k: Bacteria; p: Firmicutes; c: Clostridia; o: Clostridiales; f: Lachnospiraceae; | 368 |
| | | | g: Coprococcus; s: eutactus | |
| 193191 | 7 | 0.111111111 | k: Bacteria; p: Firmicutes; c: Clostridia; o: Clostridiales; f: Lachnospiraceae; | 369 |
| | | | g: Lachnospira; s: | |
| 193336 | 5 | 0.079365079 | k: Bacteria; p: Firmicutes; c: Clostridia; o: Clostridiales; f: Ruminococcaceae; | 370 |
| | | | g: Ruminococcus; s: | |
| 193436 | 9 | 0.142857143 | k: Bacteria; p: Actinobacteria; c: Coriobacteriia; o: Coriobacteriales; | 371 |
| | | | f: Coriobacteriaceae; g: Collinsella; s: | |
| 193551 | 13 | 0.206349206 | k: Bacteria; p: Firmicutes; c: Clostridia; o: Clostridiales; f: Lachnospiraceae; | 372 |
| | | | g: Coprococcus; s: | |
| 193575 | 39 | 0.619047619 | k: Bacteria; p: Actinobacteria; c: Coriobacteriia; o: Coriobacteriales; | 373 |
| | | | f: Coriobacteriaceae; g: Collinsella; s: aerofaciens | |
| 193621 | 21 | 0.333333333 | k: Bacteria; p: Firmicutes; c: Clostridia; o: Clostridiales; f: Lachnospiraceae; | 374 |
| | | | g: Coprococcus; s: | |
| 193831 | 13 | 0.206349206 | k: Bacteria; p: Firmicutes; c: Clostridia; o: Clostridiales; f: Clostridiaceae; | 375 |
| | | | g: Clostridium; s: | |
| 193969 | 14 | 0.222222222 | k: Bacteria; p: Firmicutes; c: Clostridia; o: Clostridiales; f: Lachnospiraceae; | 376 |
| | | | g: Coprococcus; s: | |
| 194001 | 10 | 0.158730159 | k: Bacteria; p: Firmicutes; c: Clostridia; o: Clostridiales; f: Lachnospiraceae; | 377 |
| | | | g: Coprococcus; s: | |
| 194008 | 59 | 0.936507937 | k: Bacteria; p: Firmicutes; c: Clostridia; o: Clostridiales; f: Lachnospiraceae; | 378 |
| | | | g: Coprococcus; s: | |
| 194104 | 45 | 0.714285714 | k: Bacteria; p: Firmicutes; c: Clostridia; o: Clostridiales; f: Lachnospiraceae; | 379 |
| | | | g: Coprococcus; s: | |
| 194110 | 24 | 0.380952381 | k: Bacteria; p: Firmicutes; c: Clostridia; o: Clostridiales; f: Lachnospiraceae; | 380 |
| | | | g: Lachnospira; s: | |
| 194123 | 8 | 0.126984127 | k: Bacteria; p: Firmicutes; c: Clostridia; o: Clostridiales; f: Lachnospiraceae; | 381 |
| | | | g: Coprococcus; s: | |
| 194223 | 55 | 0.873015873 | k: Bacteria; p: Firmicutes; c: Clostridia; o: Clostridiales; f: Ruminococcaceae; | 382 |
| | | | g: Ruminococcus; s: | |
| 194258 | 6 | 0.095238095 | k: Bacteria; p: Firmicutes; c: Clostridia; o: Clostridiales; f: Ruminococcaceae; | 383 |
| | | | g: Faecalibacterium; s: prausnitzii | |
| 194297 | 12 | 0.19047619 | k: Bacteria; p: Firmicutes; c: Clostridia; o: Clostridiales; f: Ruminococcaceae; | 384 |
| | | | g: Ruminococcus; s: | |
| 194359 | 2 | 0.031746032 | k: Bacteria; p: Firmicutes; c: Clostridia; o: Clostridiales; f: Lachnospiraceae; | 385 |
| | | | g: Coprococcus; s: | |
| 194360 | 10 | 0.158730159 | k: Bacteria; p: Proteobacteria; c: Betaproteobacteria; o: Burkholderiales; | 386 |
| | | | f: Alcaligenaceae; g: Sutterella; s: | |
| 194383 | 3 | 0.047619048 | k: Bacteria; p: Firmicutes; c: Clostridia; o: Clostridiales; f: Ruminococcaceae; | 387 |
| | | | g: Faecalibacterium; s: prausnitzii | |
| 194417 | 1 | 0.015873016 | k: Bacteria; p: Firmicutes; c: Clostridia; o: Clostridiales; f: Lachnospiraceae; | 388 |
| | | | g: Coprococcus; s: | |
| 194557 | 16 | 0.253968254 | k: Bacteria; p: Firmicutes; c: Clostridia; o: Clostridiales; f: Lachnospiraceae; | 389 |
| | | | g: Coprococcus; s: | |
| 194646 | 2 | 0.031746032 | k: Bacteria; p: Bacteroidetes; c: Bacteroidia; o: Bacteroidales; | 390 |
| | | | f: [Odoribacteraceae]; g: Odoribacter; s: | |
| 194659 | 8 | 0.126984127 | k: Bacteria; p: Firmicutes; c: Clostridia; o: Clostridiales; f: Clostridiaceae; g:; s: | 391 |
| 194692 | 2 | 0.031746032 | k: Bacteria; p: Firmicutes; c: Clostridia; o: Clostridiales; f: Ruminococcaceae; | 392 |
| | | | g: Oscillospira; s: | |
| 194707 | 6 | 0.095238095 | k: Bacteria; p: Firmicutes; c: Clostridia; o: Clostridiales; f: Lachnospiraceae; | 393 |
| | | | g: Lachnospira; s: | |
| 194727 | 33 | 0.523809524 | k: Bacteria; p: Firmicutes; c: Clostridia; o: Clostridiales; f: Lachnospiraceae; | 394 |
| | | | g: Lachnospira; s: | |
| 194734 | 7 | 0.111111111 | k: Bacteria; p: Firmicutes; c: Clostridia; o: Clostridiales; f: Lachnospiraceae; | 395 |
| | | | g: Coprococcus; s: | |
| 194816 | 14 | 0.222222222 | k: Bacteria; p: Firmicutes; c: Clostridia; o: Clostridiales; f: Ruminococcaceae; | 396 |
| | | | g: Ruminococcus; s: | |
| 194868 | 25 | 0.396825397 | k: Bacteria; p: Firmicutes; c: Clostridia; o: Clostridiales; f: Ruminococcaceae; | 397 |
| | | | g: Ruminococcus; s: | |
| 194933 | 4 | 0.063492063 | k: Bacteria; p: Firmicutes; c: Clostridia; o: Clostridiales; f: Ruminococcaceae; | 398 |
| | | | g: Faecalibacterium; s: prausnitzii | |
| 194947 | 3 | 0.047619048 | k: Bacteria; p: Firmicutes; c: Clostridia; o: Clostridiales; f: Ruminococcaceae; | 399 |
| | | | g: Ruminococcus; s: | |
| 195015 | 15 | 0.238095238 | k: Bacteria; p: Firmicutes; c: Clostridia; o: Clostridiales; f: Lachnospiraceae; | 400 |
| | | | g: Lachnospira; s: | |
| 195532 | 43 | 0.682539683 | k: Bacteria; p: Firmicutes; c: Clostridia; o: Clostridiales; f: Lachnospiraceae; | 401 |
| | | | g: Coprococcus; s: | |
| 195628 | 61 | 0.968253968 | k: Bacteria; p: Firmicutes; c: Clostridia; o: Clostridiales; f: Lachnospiraceae; | 402 |
| | | | g: Coprococcus; s: | |
| 195716 | 5 | 0.079365079 | k: Bacteria; p: Firmicutes; c: Clostridia; o: Clostridiales; f: Lachnospiraceae; | 403 |
| | | | g: Coprococcus; s: | |
| 195728 | 1 | 0.015873016 | k: Bacteria; p: Firmicutes; c: Clostridia; o: Clostridiales; f: Lachnospiraceae; | 404 |
| | | | g: Coprococcus; s: | |
| 195752 | 28 | 0.444444444 | k: Bacteria; p: Firmicutes; c: Clostridia; o: Clostridiales; f: Lachnospiraceae; | 405 |
| | | | g: Lachnospira; s: | |
| 195801 | 18 | 0.285714286 | k: Bacteria; p: Firmicutes; c: Clostridia; o: Clostridiales; f: Ruminococcaceae; | 406 |
| | | | g: Faecalibacterium; s: prausnitzii | |
| 195855 | 1 | 0.015873016 | k: Bacteria; p: Firmicutes; c: Clostridia; o: Clostridiales; f: Ruminococcaceae; | 407 |
| | | | g: Faecalibacterium; s: prausnitzii | |
| 195876 | 14 | 0.222222222 | k: Bacteria; p: Firmicutes; c: Clostridia; o: Clostridiales; f: Lachnospiraceae; | 408 |
| | | | g: Coprococcus; s: | |
| 195929 | 18 | 0.285714286 | k: Bacteria; p: Firmicutes; c: Clostridia; o: Clostridiales; f: Lachnospiraceae; | 409 |
| | | | g: Coprococcus; s: | |
| 195933 | 11 | 0.174603175 | k: Bacteria; p: Firmicutes; c: Clostridia; o: Clostridiales; f: Ruminococcaceae; | 410 |
| | | | g: Oscillospira; s: | |
| 195947 | 7 | 0.111111111 | k: Bacteria; p: Firmicutes; c: Clostridia; o: Clostridiales; f: Ruminococcaceae; | 411 |
| | | | g: Ruminococcus; s: | |
| 196061 | 10 | 0.158730159 | k: Bacteria; p: Firmicutes; c: Clostridia; o: Clostridiales; f: Ruminococcaceae; | 412 |
| | | | g: Ruminococcus; s: | |
| 196112 | 5 | 0.079365079 | k: Bacteria; p: Firmicutes; c: Clostridia; o: Clostridiales; f: Ruminococcaceae; | 413 |
| | | | g: Ruminococcus; s: | |
| 196125 | 4 | 0.063492063 | k: Bacteria; p: Firmicutes; c: Clostridia; o: Clostridiales; f: Ruminococcaceae; | 414 |
| | | | g: Faecalibacterium; s: prausnitzii | |
| 196131 | 1 | 0.015873016 | k: Bacteria; p: Bacteroidetes; c: Bacteroidia; o: Bacteroidales; | 415 |
| | | | f: [Odoribacteraceae]; g: Odoribacter; s: | |
| 196191 | 1 | 0.015873016 | k: Bacteria; p: Firmicutes; c: Clostridia; o: Clostridiales; f: Ruminococcaceae; | 416 |
| | | | g: Oscillospira; s: | |
| 196246 | 50 | 0.793650794 | k: Bacteria; p: Firmicutes; c: Clostridia; o: Clostridiales; f: Ruminococcaceae; | 417 |
| | | | g: Faecalibacterium; s: prausnitzii | |
| 196386 | 3 | 0.047619048 | k: Bacteria; p: Bacteroidetes; c: Bacteroidia; o: Bacteroidales; f: Rikenellaceae; | 418 |
| | | | g:; s: | |
| 196462 | 13 | 0.206349206 | k: Bacteria; p: Firmicutes; c: Clostridia; o: Clostridiales; f: Christensenellaceae; | 419 |
| | | | g:; s: | |
| 196553 | 31 | 0.492063492 | k: Bacteria; p: Firmicutes; c: Clostridia; o: Clostridiales; f: Ruminococcaceae; | 420 |
| | | | g: Oscillospira; s: | |
| 196951 | 1 | 0.015873016 | k: Bacteria; p: Firmicutes; c: Clostridia; o: Clostridiales; f: Ruminococcaceae; | 421 |
| | | | g: Ruminococcus; s: | |
| 196991 | 8 | 0.126984127 | k: Bacteria; p: Firmicutes; c: Clostridia; o: Clostridiales; f: Ruminococcaceae; | 422 |
| | | | g: Oscillospira; s: | |
| 197003 | 14 | 0.222222222 | k: Bacteria; p: Firmicutes; c: Clostridia; o: Clostridiales; f: Lachnospiraceae; | 423 |
| | | | g: Coprococcus; s: | |
| 197022 | 23 | 0.365079365 | k: Bacteria; p: Firmicutes; c: Clostridia; o: Clostridiales; f: Lachnospiraceae; | 424 |
| | | | g: Coprococcus; s: | |
| 197099 | 16 | 0.253968254 | k: Bacteria; p: Firmicutes; c: Clostridia; o: Clostridiales; f: Ruminococcaceae; | 425 |
| | | | g: Oscillospira; s: | |
| 197107 | 1 | 0.015873016 | k: Bacteria; p: Firmicutes; c: Clostridia; o: Clostridiales; f: Lachnospiraceae; | 426 |
| | | | g: Lachnospira; s: | |
| 197112 | 1 | 0.015873016 | k: Bacteria; p: Firmicutes; c: Clostridia; o: Clostridiales; f: Lachnospiraceae; | 427 |
| | | | g: Coprococcus; s: | |
| 197341 | 7 | 0.111111111 | k: Bacteria; p: Firmicutes; c: Clostridia; o: Clostridiales; f: Lachnospiraceae; | 428 |
| | | | g: Lachnospira; s: | |
| 197517 | 2 | 0.031746032 | k: Bacteria; p: Bacteroidetes; c: Bacteroidia; o: Bacteroidales; | 429 |
| | | | f: [Barnesiellaceae]; g:; s: | |
| 197581 | 29 | 0.46031746 | k: Bacteria; p: Firmicutes; c: Clostridia; o: Clostridiales; f: Lachnospiraceae; | 430 |
| | | | g: Lachnospira; s: | |
| 197603 | 3 | 0.047619048 | k: Bacteria; p: Firmicutes; c: Clostridia; o: Clostridiales; f: Lachnospiraceae; | 431 |
| | | | g: Coprococcus; s: | |
| 197649 | 7 | 0.111111111 | k: Bacteria; p: Firmicutes; c: Clostridia; o: Clostridiales; f: Lachnospiraceae; | 432 |
| | | | g: Lachnospira; s: | |
| 197675 | 4 | 0.063492063 | k: Bacteria; p: Firmicutes; c: Clostridia; o: Clostridiales; f: Lachnospiraceae; | 433 |
| | | | g: Coprococcus; s: | |
| 197708 | 33 | 0.523809524 | k: Bacteria; p: Firmicutes; c: Clostridia; o: Clostridiales; f: Ruminococcaceae; | 434 |
| | | | g: Faecalibacterium; s: prausnitzii | |
| 197757 | 34 | 0.53968254 | k: Bacteria; p: Firmicutes; c: Clostridia; o: Clostridiales; f: Ruminococcaceae; | 435 |
| | | | g: Faecalibacterium; s: prausnitzii | |
| 197807 | 8 | 0.126984127 | k: Bacteria; p: Firmicutes; c: Clostridia; o: Clostridiales; f: Clostridiaceae; | 436 |
| | | | g: Clostridium; s: | |
| 197890 | 4 | 0.063492063 | k: Bacteria; p: Firmicutes; c: Clostridia; o: Clostridiales; f: Ruminococcaceae; | 437 |
| | | | g: Oscillospira; s: | |
| 197897 | 4 | 0.063492063 | k: Bacteria; p: Firmicutes; c: Clostridia; o: Clostridiales; f: Lachnospiraceae; | 438 |
| | | | g: Coprococcus; s: | |
| 197943 | 4 | 0.063492063 | k: Bacteria; p: Firmicutes; c: Clostridia; o: Clostridiales; f: Ruminococcaceae; | 439 |
| | | | g: Ruminococcus; s: | |
| 198034 | 2 | 0.031746032 | k: Bacteria; p: Firmicutes; c: Clostridia; o: Clostridiales; f: Lachnospiraceae; | 440 |
| | | | g: Lachnospira; s: | |
| 198085 | 4 | 0.063492063 | k: Bacteria; p: Firmicutes; c: Clostridia; o: Clostridiales; f: Ruminococcaceae; | 441 |
| | | | g: Faecalibacterium; s: prausnitzii | |
| 198194 | 23 | 0.365079365 | k: Bacteria; p: Firmicutes; c: Clostridia; o: Clostridiales; f: Ruminococcaceae; | 442 |
| | | | g: Oscillospira; s: | |
| 198210 | 10 | 0.158730159 | k: Bacteria; p: Firmicutes; c: Clostridia; o: Clostridiales; f: Ruminococcaceae; | 443 |
| | | | g: Ruminococcus; s: | |
| 198555 | 12 | 0.19047619 | k: Bacteria; p: Firmicutes; c: Clostridia; o: Clostridiales; f: Lachnospiraceae; | 444 |
| | | | g: Coprococcus; s: | |
| 198909 | 26 | 0.412698413 | k: Bacteria; p: Firmicutes; c: Clostridia; o: Clostridiales; f: Lachnospiraceae; | 445 |
| | | | g: Lachnospira; s: | |
| 198980 | 23 | 0.365079365 | k: Bacteria; p: Firmicutes; c: Clostridia; o: Clostridiales; f: Ruminococcaceae; | 446 |
| | | | g: Ruminococcus; s: | |
| 199034 | 32 | 0.507936508 | k: Bacteria; p: Firmicutes; c: Clostridia; o: Clostridiales; f: Clostridiaceae; | 447 |
| | | | g: Clostridium; s: | |
| 199077 | 7 | 0.111111111 | k: Bacteria; p: Firmicutes; c: Clostridia; o: Clostridiales; f: Lachnospiraceae; | 448 |
| | | | g: Coprococcus; s: | |
| 199081 | 12 | 0.19047619 | k: Bacteria; p: Firmicutes; c: Clostridia; o: Clostridiales; f: Lachnospiraceae; | 449 |
| | | | g: Coprococcus; s: | |
| 199145 | 11 | 0.174603175 | k: Bacteria; p: Firmicutes; c: Clostridia; o: Clostridiales; f: Ruminococcaceae; | 450 |
| | | | g: Faecalibacterium; s: prausnitzii | |
| 199228 | 1 | 0.015873016 | k: Bacteria; p: Firmicutes; c: Clostridia; o: Clostridiales; f: Lachnospiraceae; | 451 |
| | | | g: Coprococcus; s: | |
| 199268 | 8 | 0.126984127 | k: Bacteria; p: Firmicutes; c: Clostridia; o: Clostridiales; f: Clostridiaceae; g:; s: | 452 |
| 199300 | 20 | 0.317460317 | k: Bacteria; p: Firmicutes; c: Clostridia; o: Clostridiales; f: Lachnospiraceae; | 453 |
| | | | g: Coprococcus; s: | |
| 199313 | 5 | 0.079365079 | k: Bacteria; p: Firmicutes; c: Clostridia; o: Clostridiales; f: Lachnospiraceae; | 454 |
| | | | g: Coprococcus; s: | |
| 199337 | 6 | 0.095238095 | k: Bacteria; p: Firmicutes; c: Clostridia; o: Clostridiales; f: Ruminococcaceae; | 455 |
| | | | g: Oscillospira; s: | |
| 199354 | 27 | 0.428571429 | k: Bacteria; p: Bacteroidetes; c: Bacteroidia; o: Bacteroidales; | 456 |
| | | | f: [Barnesiellaceae]; g:; s: | |
| 199388 | 20 | 0.317460317 | k: Bacteria; p: Firmicutes; c: Clostridia; o: Clostridiales; f: Clostridiaceae; | 457 |
| | | | g: Clostridium; s: | |
| 199421 | 33 | 0.523809524 | k: Bacteria; p: Firmicutes; c: Clostridia; o: Clostridiales; f: Lachnospiraceae; | 458 |
| | | | g: Lachnospira; s: | |
| 199430 | 1 | 0.015873016 | k: Bacteria; p: Firmicutes; c: Clostridia; o: Clostridiales; f: Ruminococcaceae; | 459 |
| | | | g: Faecalibacterium; s: prausnitzii | |
| 199491 | 11 | 0.174603175 | k: Bacteria; p: Firmicutes; c: Clostridia; o: Clostridiales; f: Lachnospiraceae; | 460 |
| | | | g: Coprococcus; s: | |
| 199534 | 52 | 0.825396825 | k: Bacteria; p: Bacteroidetes; c: Bacteroidia; o: Bacteroidales; f: Rikenellaceae; | 461 |
| | | | g:; s: | |
| 199543 | 2 | 0.031746032 | k: Bacteria; p: Firmicutes; c: Clostridia; o: Clostridiales; f: Ruminococcaceae; | 462 |
| | | | g: Ruminococcus; s: | |
| 199568 | 18 | 0.285714286 | k: Bacteria; p: Firmicutes; c: Clostridia; o: Clostridiales; f: Clostridiaceae; | 463 |
| | | | g: Clostridium; s: | |
| 199686 | 7 | 0.111111111 | k: Bacteria; p: Actinobacteria; c: Coriobacteriia; o: Coriobacteriales; | 464 |
| | | | f: Coriobacteriaceae; g:; s: | |
| 199694 | 53 | 0.841269841 | k: Bacteria; p: Firmicutes; c: Clostridia; o: Clostridiales; f: Clostridiaceae; | 465 |
| | | | g: Clostridium; s: | |
| 199702 | 1 | 0.015873016 | k: Bacteria; p: Firmicutes; c: Clostridia; o: Clostridiales; f: Ruminococcaceae; | 466 |
| | | | g: Faecalibacterium; s: prausnitzii | |
| 202162 | 48 | 0.761904762 | k: Bacteria; p: Firmicutes; c: Clostridia; o: Clostridiales; f: Ruminococcaceae; | 467 |
| | | | g: Ruminococcus; s: | |
| 204126 | 10 | 0.158730159 | k: Bacteria; p: Firmicutes; c: Clostridia; o: Clostridiales; f: Ruminococcaceae; | 468 |
| | | | g: Oscillospira; s: | |
| 204352 | 6 | 0.095238095 | k: Bacteria; p: Firmicutes; c: Clostridia; o: Clostridiales; f: Ruminococcaceae; | 469 |
| | | | g: Ruminococcus; s: | |
| 205613 | 4 | 0.063492063 | k: Bacteria; p: Firmicutes; c: Clostridia; o: Clostridiales; f: Lachnospiraceae; | 470 |
| | | | g: Coprococcus; s: | |
| 206513 | 23 | 0.365079365 | k: Bacteria; p: Firmicutes; c: Clostridia; o: Clostridiales; f: Ruminococcaceae; | 471 |
| | | | g: Oscillospira; s: | |
| 207252 | 17 | 0.26984127 | k: Bacteria; p: Firmicutes; c: Clostridia; o: Clostridiales; f: Ruminococcaceae; | 472 |
| | | | g: Oscillospira; s: | |
| 207340 | 3 | 0.047619048 | k: Bacteria; p: Firmicutes; c: Clostridia; o: Clostridiales; f: [Mogibacteriaceae]; | 473 |
| | | | g:; s: | |
| 207487 | 33 | 0.523809524 | k: Bacteria; p: Firmicutes; c: Clostridia; o: Clostridiales; f: Lachnospiraceae; | 474 |
| | | | g: Lachnospira; s: | |
| 207994 | 19 | 0.301587302 | k: Bacteria; p: Firmicutes; c: Clostridia; o: Clostridiales; f: Ruminococcaceae; | 475 |
| | | | g: Ruminococcus; s: | |
| 208539 | 1 | 0.015873016 | k: Bacteria; p: Firmicutes; c: Clostridia; o: Clostridiales; f: [Mogibacteriaceae]; | 476 |
| | | | g:; s: | |
| 208739 | 60 | 0.952380952 | k: Bacteria; p: Firmicutes; c: Clostridia; o: Clostridiales; f: Ruminococcaceae; | 477 |
| | | | g: Faecalibacterium; s: prausnitzii | |
| 208843 | 2 | 0.031746032 | k: Bacteria; p: Bacteroidetes; c: Bacteroidia; o: Bacteroidales; | 478 |
| | | | f: [Odoribacteraceae]; g: Odoribacter; s: | |
| 208901 | 10 | 0.158730159 | k: Bacteria; p: Firmicutes; c: Clostridia; o: Clostridiales; f: Lachnospiraceae; | 479 |
| | | | g: Coprococcus; s: | |
| 209327 | 1 | 0.015873016 | k: Bacteria; p: Firmicutes; c: Clostridia; o: Clostridiales; f: Ruminococcaceae; | 480 |
| | | | g: Oscillospira; s: | |
| 209760 | 1 | 0.015873016 | k: Bacteria; p: Firmicutes; c: Clostridia; o: Clostridiales; f: Ruminococcaceae; | 481 |
| | | | g: Faecalibacterium; s: prausnitzii | |
| 210095 | 14 | 0.222222222 | k: Bacteria; p: Firmicutes; c: Clostridia; o: Clostridiales; f: Ruminococcaceae; | 482 |
| | | | g: Ruminococcus; s: | |
| 210292 | 5 | 0.079365079 | k: Bacteria; p: Firmicutes; c: Clostridia; o: Clostridiales; f: Ruminococcaceae; | 483 |
| | | | g: Oscillospira; s: | |
| 210542 | 2 | 0.031746032 | k: Bacteria; p: Firmicutes; c: Clostridia; o: Clostridiales; f: Lachnospiraceae; | 484 |
| | | | g: Lachnospira; s: | |
| 210647 | 22 | 0.349206349 | k: Bacteria; p: Firmicutes; c: Clostridia; o: Clostridiales; f: Ruminococcaceae; | 485 |
| | | | g: Ruminococcus; s: | |
| 212686 | 6 | 0.095238095 | k: Bacteria; p: Firmicutes; c: Clostridia; o: Clostridiales; f: Ruminococcaceae; | 486 |
| | | | g: Oscillospira; s: | |
| 213394 | 16 | 0.253968254 | k: Bacteria; p: Firmicutes; c: Clostridia; o: Clostridiales; f: Lachnospiraceae; | 487 |
| | | | g: Lachnospira; s: | |
| 213671 | 1 | 0.015873016 | k: Bacteria; p: Bacteroidetes; c: Bacteroidia; o: Bacteroidales; f: Rikenellaceae; | 488 |
| | | | g:; s: | |
| 214031 | 14 | 0.222222222 | k: Bacteria; p: Bacteroidetes; c: Bacteroidia; o: Bacteroidales; f: Rikenellaceae; | 489 |
| | | | g:; s: | |
| 214036 | 44 | 0.698412698 | k: Bacteria; p: Firmicutes; c: Clostridia; o: Clostridiales; f: [Mogibacteriaceae]; | 490 |
| | | | g:; s: | |
| 215097 | 9 | 0.142857143 | k: Bacteria; p: Proteobacteria; c: Betaproteobacteria; o: Burkholderiales; | 491 |
| | | | f: Alcaligenaceae; g: Sutterella; s: | |
| 215963 | 1 | 0.015873016 | k: Bacteria; p: Firmicutes; c: Clostridia; o: Clostridiales; f: Clostridiaceae; | 492 |
| | | | g: Clostridium; s: | |
| 216010 | 21 | 0.333333333 | k: Bacteria; p: Firmicutes; c: Clostridia; o: Clostridiales; f: [Mogibacteriaceae]; | 493 |
| | | | g:; s: | |
| 216550 | 2 | 0.031746032 | k: Bacteria; p: Bacteroidetes; c: Bacteroidia; o: Bacteroidales; f: Rikenellaceae; | 494 |
| | | | g:; s: | |
| 216599 | 27 | 0.428571429 | k: Bacteria; p: Bacteroidetes; c: Bacteroidia; o: Bacteroidales; f: Rikenellaceae; | 495 |
| | | | g:; s: | |
| 217109 | 8 | 0.126984127 | k: Bacteria; p: Firmicutes; c: Clostridia; o: Clostridiales; f: Christensenellaceae; | 496 |
| | | | g:; s: | |
| 221361 | 15 | 0.238095238 | k: Bacteria; p: Proteobacteria; c: Gammaproteobacteria; o: Enterobacteriales; | 497 |
| | | | f: Enterobacteriaceae; g:; s: | |
| 221454 | 4 | 0.063492063 | k: Bacteria; p: Firmicutes; c: Clostridia; o: Clostridiales; f: Ruminococcaceae; | 498 |
| | | | g: Ruminococcus; s: | |
| 223059 | 1 | 0.015873016 | k: Bacteria; p: Firmicutes; c: Clostridia; o: Clostridiales; f: Ruminococcaceae; | 499 |
| | | | g: Ruminococcus; s: | |
| 227697 | 7 | 0.111111111 | k: Bacteria; p: Firmicutes; c: Clostridia; o: Clostridiales; f: Ruminococcaceae; | 500 |
| | | | g: Ruminococcus; s: | |
| 227819 | 15 | 0.238095238 | k: Bacteria; p: Actinobacteria; c: Coriobacteriia; o: Coriobacteriales; | 501 |
| | | | f: Coriobacteriaceae; g:; s: | |
| 228199 | 4 | 0.063492063 | k: Bacteria; p: Firmicutes; c: Clostridia; o: Clostridiales; f: Ruminococcaceae; | 502 |
| | | | g: Ruminococcus; s: | |
| 228748 | 5 | 0.079365079 | k: Bacteria; p: Firmicutes; c: Clostridia; o: Clostridiales; f: Christensenellaceae; | 503 |
| | | | g:; s: | |
| 229455 | 2 | 0.031746032 | k: Bacteria; p: Firmicutes; c: Clostridia; o: Clostridiales; f: Ruminococcaceae; | 504 |
| | | | g: Ruminococcus; s: | |
| 229905 | 1 | 0.015873016 | k: Bacteria; p: Firmicutes; c: Clostridia; o: Clostridiales; f: [Mogibacteriaceae]; | 505 |
| | | | g:; s: | |
| 230578 | 6 | 0.095238095 | k: Bacteria; p: Actinobacteria; c: Coriobacteriia; o: Coriobacteriales; | 506 |
| | | | f: Coriobacteriaceae; g:; s: | |
| 231787 | 2 | 0.031746032 | k: Bacteria; p: Proteobacteria; c: Gammaproteobacteria; o: Enterobacteriales; | 507 |
| | | | f: Enterobacteriaceae; g:; s: | |
| 232417 | 11 | 0.174603175 | k: Bacteria; p: Firmicutes; c: Clostridia; o: Clostridiales; f: Ruminococcaceae; | 508 |
| | | | g: Ruminococcus; s: | |
| 232900 | 7 | 0.111111111 | k: Bacteria; p: Actinobacteria; c: Coriobacteriia; o: Coriobacteriales; | 509 |
| | | | f: Coriobacteriaceae; g:; s: | |
| 232975 | 41 | 0.650793651 | k: Bacteria; p: Firmicutes; c: Clostridia; o: Clostridiales; f: Ruminococcaceae; | 510 |
| | | | g: Oscillospira; s: | |
| 233052 | 10 | 0.158730159 | k: Bacteria; p: Firmicutes; c: Clostridia; o: Clostridiales; f: Christensenellaceae; | 511 |
| | | | g:; s: | |
| 233648 | 2 | 0.031746032 | k: Bacteria; p: Firmicutes; c: Clostridia; o: Clostridiales; f: Lachnospiraceae; | 512 |
| | | | g: Coprococcus; s: | |
| 234443 | 2 | 0.031746032 | k: Bacteria; p: Bacteroidetes; c: Bacteroidia; o: Bacteroidales; f: Rikenellaceae; | 513 |
| | | | g:; s: | |
| 234447 | 1 | 0.015873016 | k: Bacteria; p: Firmicutes; c: Clostridia; o: Clostridiales; f: Christensenellaceae; | 514 |
| | | | g:; s: | |
| 234912 | 1 | 0.015873016 | k: Bacteria; p: Firmicutes; c: Clostridia; o: Clostridiales; f: Clostridiaceae; | 515 |
| | | | g: Clostridium; s: | |
| 235127 | 2 | 0.031746032 | k: Bacteria; p: Actinobacteria; c: Coriobacteriia; o: Coriobacteriales; | 516 |
| | | | f: Coriobacteriaceae; g:; s: | |
| 236811 | 2 | 0.031746032 | k: Bacteria; p: Proteobacteria; c: Gammaproteobacteria; o: Enterobacteriales; | 517 |
| | | | f: Enterobacteriaceae; g: Enterobacter; s: | |
| 240271 | 8 | 0.126984127 | k: Bacteria; p: Firmicutes; c: Clostridia; o: Clostridiales; f: Ruminococcaceae; | 518 |
| | | | g: Oscillospira; s: | |
| 243150 | 4 | 0.063492063 | k: Bacteria; p: Bacteroidetes; c: Bacteroidia; o: Bacteroidales; f: Rikenellaceae; | 519 |
| | | | g:; s: | |
| 245625 | 35 | 0.555555556 | k: Bacteria; p: Firmicutes; c: Clostridia; o: Clostridiales; f: Clostridiaceae; | 520 |
| | | | g: Clostridium; s: | |
| 246330 | 1 | 0.015873016 | k: Bacteria; p: Proteobacteria; c: Gammaproteobacteria; o: Enterobacteriales; | 521 |
| | | | f: Enterobacteriaceae; g:; s: | |
| 251456 | 7 | 0.111111111 | k: Bacteria; p: Firmicutes; c: Clostridia; o: Clostridiales; f: Ruminococcaceae; | 522 |
| | | | g: Ruminococcus; s: flavefaciens | |
| 259212 | 2 | 0.031746032 | k: Bacteria; p: Firmicutes; c: Clostridia; o: Clostridiales; f: Clostridiaceae; g:; s: | 523 |
| 259772 | 12 | 0.19047619 | k: Bacteria; p: Firmicutes; c: Clostridia; o: Clostridiales; f: Lachnospiraceae; | 524 |
| | | | g: Coprococcus; s: | |
| 260559 | 11 | 0.174603175 | k: Bacteria; p: Firmicutes; c: Clostridia; o: Clostridiales; f: Ruminococcaceae; | 525 |
| | | | g: Ruminococcus; s: | |
| 260842 | 1 | 0.015873016 | k: Bacteria; p: Firmicutes; c: Clostridia; o: Clostridiales; f: Ruminococcaceae; | 526 |
| | | | g: Oscillospira; s: | |
| 261572 | 1 | 0.015873016 | k: Bacteria; p: Firmicutes; c: Clostridia; o: Clostridiales; f: [Mogibacteriaceae]; | 527 |
| | | | g:; s: | |
| 262024 | 2 | 0.031746032 | k: Bacteria; p: Firmicutes; c: Clostridia; o: Clostridiales; f: Ruminococcaceae; | 528 |
| | | | g: Oscillospira; s: | |
| 262060 | 11 | 0.174603175 | k: Bacteria; p: Firmicutes; c: Clostridia; o: Clostridiales; f: Clostridiaceae; g:; s: | 529 |
| 262355 | 1 | 0.015873016 | k: Bacteria; p: Firmicutes; c: Clostridia; o: Clostridiales; f: Clostridiaceae; g:; s: | 530 |
| 262668 | 19 | 0.301587302 | k: Bacteria; p: Firmicutes; c: Clostridia; o: Clostridiales; f: Ruminococcaceae; | 531 |
| | | | g: Ruminococcus; s: | |
| 263074 | 3 | 0.047619048 | k: Bacteria; p: Firmicutes; c: Clostridia; o: Clostridiales; f: Lachnospiraceae; | 532 |
| | | | g: Coprococcus; s: | |
| 263337 | 1 | 0.015873016 | k: Bacteria; p: Firmicutes; c: Clostridia; o: Clostridiales; f: Ruminococcaceae; | 533 |
| | | | g: Oscillospira; s: | |
| 264325 | 2 | 0.031746032 | k: Bacteria; p: Bacteroidetes; c: Bacteroidia; o: Bacteroidales; f: Rikenellaceae; | 534 |
| | | | g:; s: | |
| 265363 | 1 | 0.015873016 | k: Bacteria; p: Firmicutes; c: Clostridia; o: Clostridiales; f: Clostridiaceae; g:; s: | 535 |
| 266726 | 1 | 0.015873016 | k: Bacteria; p: Firmicutes; c: Clostridia; o: Clostridiales; f: Lachnospiraceae; | 536 |
| | | | g: Coprococcus; s: | |
| 267042 | 2 | 0.031746032 | k: Bacteria; p: Firmicutes; c: Clostridia; o: Clostridiales; f: Ruminococcaceae; | 537 |
| | | | g: Ruminococcus; s: | |
| 267514 | 1 | 0.015873016 | k: Bacteria; p: Firmicutes; c: Clostridia; o: Clostridiales; f: Lachnospiraceae; | 538 |
| | | | g: Coprococcus; s: | |
| 268074 | 2 | 0.031746032 | k: Bacteria; p: Firmicutes; c: Clostridia; o: Clostridiales; f: Clostridiaceae; g:; s: | 539 |
| 268733 | 2 | 0.031746032 | k: Bacteria; p: Firmicutes; c: Clostridia; o: Clostridiales; f: Clostridiaceae; g:; s: | 540 |
| 269019 | 1 | 0.015873016 | k: Bacteria; p: Firmicutes; c: Clostridia; o: Clostridiales; f: Ruminococcaceae; | 541 |
| | | | g: Oscillospira; s: | |
| 269145 | 32 | 0.507936508 | k: Bacteria; p: Firmicutes; c: Clostridia; o: Clostridiales; f: Ruminococcaceae; | 542 |
| | | | g: Oscillospira; s: | |
| 269833 | 6 | 0.095238095 | k: Bacteria; p: Firmicutes; c: Clostridia; o: Clostridiales; f: Ruminococcaceae; | 543 |
| | | | g: Ruminococcus; s: flavefaciens | |
| 270059 | 11 | 0.174603175 | k: Bacteria; p: Firmicutes; c: Clostridia; o: Clostridiales; f: Ruminococcaceae; | 544 |
| | | | g: Oscillospira; s: | |
| 270162 | 6 | 0.095238095 | k: Bacteria; p: Firmicutes; c: Clostridia; o: Clostridiales; f: Veillonellaceae; | 545 |
| | | | g: Phascolarctobacterium; s: | |
| 270200 | 3 | 0.047619048 | k: Bacteria; p: Firmicutes; c: Clostridia; o: Clostridiales; f: Clostridiaceae; g:; s: | 546 |
| 270519 | 1 | 0.015873016 | k: Bacteria; p: Firmicutes; c: Clostridia; o: Clostridiales; f: Ruminococcaceae; | 547 |
| | | | g: Oscillospira; s: | |
| 271430 | 6 | 0.095238095 | k: Bacteria; p: Firmicutes; c: Clostridia; o: Clostridiales; f: Ruminococcaceae; | 548 |
| | | | g: Ruminococcus; s: | |
| 271563 | 11 | 0.174603175 | k: Bacteria; p: Firmicutes; c: Clostridia; o: Clostridiales; f: Ruminococcaceae; | 549 |
| | | | g: Oscillospira; s: | |
| 274083 | 17 | 0.26984127 | k: Bacteria; p: Firmicutes; c: Clostridia; o: Clostridiales; f: Ruminococcaceae; | 550 |
| | | | g: Oscillospira; s: | |
| 274569 | 3 | 0.047619048 | k: Bacteria; p: Firmicutes; c: Clostridia; o: Clostridiales; f: Ruminococcaceae; | 551 |
| | | | g: Ruminococcus; s: | |
| 275097 | 3 | 0.047619048 | k: Bacteria; p: Proteobacteria; c: Gammaproteobacteria; o: Enterobacteriales; | 552 |
| | | | f: Enterobacteriaceae; g:; s: | |
| 275237 | 1 | 0.015873016 | k: Bacteria; p: Firmicutes; c: Clostridia; o: Clostridiales; f: Veillonellaceae; | 553 |
| | | | g: Phascolarctobacterium; s: | |
| 275288 | 3 | 0.047619048 | k: Bacteria; p: Firmicutes; c: Clostridia; o: Clostridiales; f: Ruminococcaceae; | 554 |
| | | | g: Oscillospira; s: | |
| 275592 | 1 | 0.015873016 | k: Bacteria; p: Firmicutes; c: Clostridia; o: Clostridiales; f: Clostridiaceae; g:; s: | 555 |
| 276650 | 2 | 0.031746032 | k: Bacteria; p: Actinobacteria; c: Coriobacteriia; o: Coriobacteriales; | 556 |
| | | | f: Coriobacteriaceae; g:; s: | |
| 278098 | 2 | 0.031746032 | k: Bacteria; p: Firmicutes; c: Clostridia; o: Clostridiales; f: Ruminococcaceae; | 557 |
| | | | g: Ruminococcus; s: | |
| 278506 | 9 | 0.142857143 | k: Bacteria; p: Firmicutes; c: Clostridia; o: Clostridiales; f: Ruminococcaceae; | 558 |
| | | | g: Ruminococcus; s: | |
| 278609 | 1 | 0.015873016 | k: Bacteria; p: Firmicutes; c: Clostridia; o: Clostridiales; f: Ruminococcaceae; | 559 |
| | | | g: Oscillospira; s: | |
| 278758 | 3 | 0.047619048 | k: Bacteria; p: Firmicutes; c: Clostridia; o: Clostridiales; f: Ruminococcaceae; | 560 |
| | | | g: Oscillospira; s: | |
| 281015 | 8 | 0.126984127 | k: Bacteria; p: Proteobacteria; c: Gammaproteobacteria; o: Enterobacteriales; | 561 |
| | | | f: Enterobacteriaceae; g:; s: | |
| 284014 | 1 | 0.015873016 | k: Bacteria; p: Proteobacteria; c: Gammaproteobacteria; o: Enterobacteriales; | 562 |
| | | | f: Enterobacteriaceae; g:; s: | |
| 287514 | 38 | 0.603174603 | k: Bacteria; p: Actinobacteria; c: Coriobacteriia; o: Coriobacteriales; | 563 |
| | | | f: Coriobacteriaceae; g: Collinsella; s: aerofaciens | |
| 287608 | 1 | 0.015873016 | k: Bacteria; p: Firmicutes; c: Clostridia; o: Clostridiales; f: Ruminococcaceae; | 564 |
| | | | g: Ruminococcus; s: | |
| 289110 | 5 | 0.079365079 | k: Bacteria; p: Firmicutes; c: Clostridia; o: Clostridiales; f: Veillonellaceae; | 565 |
| | | | g: Phascolarctobacterium; s: | |
| 289306 | 49 | 0.777777778 | k: Bacteria; p: Firmicutes; c: Clostridia; o: Clostridiales; f: Ruminococcaceae; | 566 |
| | | | g: Oscillospira; s: | |
| 289709 | 1 | 0.015873016 | k: Bacteria; p: Proteobacteria; c: Gammaproteobacteria; o: Enterobacteriales; | 567 |
| | | | f: Enterobacteriaceae; g:; s: | |
| 289752 | 6 | 0.095238095 | k: Bacteria; p: Firmicutes; c: Clostridia; o: Clostridiales; f: Veillonellaceae; | 568 |
| | | | g: Phascolarctobacterium; s: | |
| 290253 | 3 | 0.047619048 | k: Bacteria; p: Firmicutes; c: Clostridia; o: Clostridiales; f: Ruminococcaceae; | 569 |
| | | | g: Oscillospira; s: | |
| 290420 | 1 | 0.015873016 | k: Bacteria; p: Firmicutes; c: Clostridia; o: Clostridiales; f: Ruminococcaceae; | 570 |
| | | | g: Ruminococcus; s: | |
| 290442 | 8 | 0.126984127 | k: Bacteria; p: Firmicutes; c: Clostridia; o: Clostridiales; f: Ruminococcaceae; | 571 |
| | | | g: Ruminococcus; s: | |
| 291315 | 1 | 0.015873016 | k: Bacteria; p: Firmicutes; c: Clostridia; o: Clostridiales; f: Veillonellaceae; | 572 |
| | | | g: Phascolarctobacterium; s: | |
| 291512 | 19 | 0.301587302 | k: Bacteria; p: Firmicutes; c: Clostridia; o: Clostridiales; f: Lachnospiraceae; | 573 |
| | | | g: Coprococcus; s: | |
| 291644 | 14 | 0.222222222 | k: Bacteria; p: Firmicutes; c: Clostridia; o: Clostridiales; f: Ruminococcaceae; | 574 |
| | | | g: Ruminococcus; s: | |
| 291902 | 2 | 0.031746032 | k: Bacteria; p: Firmicutes; c: Clostridia; o: Clostridiales; f: Ruminococcaceae; | 575 |
| | | | g: Ruminococcus; s: | |
| 292091 | 5 | 0.079365079 | k: Bacteria; p: Firmicutes; c: Clostridia; o: Clostridiales; f: Clostridiaceae; g:; s: | 576 |
| 292289 | 1 | 0.015873016 | k: Bacteria; p: Proteobacteria; c: Gammaproteobacteria; o: Enterobacteriales; | 577 |
| | | | f: Enterobacteriaceae; g:; s: | |
| 292537 | 12 | 0.19047619 | k: Bacteria; p: Firmicutes; c: Clostridia; o: Clostridiales; f: Ruminococcaceae; | 578 |
| | | | g: Faecalibacterium; s: prausnitzii | |
| 293508 | 1 | 0.015873016 | k: Bacteria; p: Firmicutes; c: Clostridia; o: Clostridiales; f: Lachnospiraceae; | 579 |
| | | | g: Coprococcus; s: | |
| 293883 | 6 | 0.095238095 | k: Bacteria; p: Firmicutes; c: Clostridia; o: Clostridiales; f: Veillonellaceae; | 580 |
| | | | g: Phascolarctobacterium; s: | |
| 294289 | 1 | 0.015873016 | k: Bacteria; p: Firmicutes; c: Clostridia; o: Clostridiales; f: Ruminococcaceae; | 581 |
| | | | g: Ruminococcus; s: | |
| 294791 | 6 | 0.095238095 | k: Bacteria; p: Firmicutes; c: Clostridia; o: Clostridiales; f: Lachnospiraceae; | 582 |
| | | | g: Coprococcus; s: | |
| 294909 | 1 | 0.015873016 | k: Bacteria; p: Bacteroidetes; c: Bacteroidia; o: Bacteroidales; | 583 |
| | | | f: [Barnesiellaceae]; g:; s: | |
| 294922 | 1 | 0.015873016 | k: Bacteria; p: Firmicutes; c: Clostridia; o: Clostridiales; f: Ruminococcaceae; | 584 |
| | | | g: Faecalibacterium; s: prausnitzii | |
| 295344 | 3 | 0.047619048 | k: Bacteria; p: Firmicutes; c: Clostridia; o: Clostridiales; f: Ruminococcaceae; | 585 |
| | | | g: Oscillospira; s: | |
| 295485 | 6 | 0.095238095 | k: Bacteria; p: Firmicutes; c: Clostridia; o: Clostridiales; f: Ruminococcaceae; | 586 |
| | | | g: Faecalibacterium; s: prausnitzii | |
| 295629 | 4 | 0.063492063 | k: Bacteria; p: Firmicutes; c: Clostridia; o: Clostridiales; f: Lachnospiraceae; | 587 |
| | | | g: Coprococcus; s: | |
| 295974 | 1 | 0.015873016 | k: Bacteria; p: Firmicutes; c: Clostridia; o: Clostridiales; f: Clostridiaceae; | 588 |
| | | | g: Clostridium; s: perfringens | |
| 296420 | 5 | 0.079365079 | k: Bacteria; p: Firmicutes; c: Clostridia; o: Clostridiales; f: Clostridiaceae; | 589 |
| | | | g: Clostridium; s: | |
| 296837 | 1 | 0.015873016 | k: Bacteria; p: Firmicutes; c: Clostridia; o: Clostridiales; f: Clostridiaceae; | 590 |
| | | | g: Clostridium; s: | |
| 296945 | 25 | 0.396825397 | k: Bacteria; p: Proteobacteria; c: Betaproteobacteria; o: Burkholderiales; | 591 |
| | | | f: Alcaligenaceae; g: Sutterella; s: | |
| 296960 | 5 | 0.079365079 | k: Bacteria; p: Firmicutes; c: Clostridia; o: Clostridiales; f: Lachnospiraceae; | 592 |
| | | | g: Coprococcus; s: | |
| 297038 | 1 | 0.015873016 | k: Bacteria; p: Firmicutes; c: Clostridia; o: Clostridiales; f: Ruminococcaceae; | 593 |
| | | | g: Ruminococcus; s: | |
| 297160 | 1 | 0.015873016 | k: Bacteria; p: Firmicutes; c: Clostridia; o: Clostridiales; f: Ruminococcaceae; | 594 |
| | | | g: Ruminococcus; s: | |
| 297266 | 4 | 0.063492063 | k: Bacteria; p: Bacteroidetes; c: Bacteroidia; o: Bacteroidales; f: Rikenellaceae; | 595 |
| | | | g:; s: | |
| 297385 | 2 | 0.031746032 | k: Bacteria; p: Firmicutes; c: Clostridia; o: Clostridiales; f: Ruminococcaceae; | 596 |
| | | | g: Oscillospira; s: | |
| 298325 | 13 | 0.206349206 | k: Bacteria; p: Firmicutes; c: Clostridia; o: Clostridiales; f: Ruminococcaceae; | 597 |
| | | | g: Ruminococcus; s: | |
| 298427 | 1 | 0.015873016 | k: Bacteria; p: Firmicutes; c: Bacilli; o: Lactobacillales; f: Enterococcaceae; | 598 |
| | | | g: Enterococcus; s: | |
| 299267 | 1 | 0.015873016 | k: Bacteria; p: Proteobacteria; c: Gammaproteobacteria; o: Enterobacteriales; | 599 |
| | | | f: Enterobacteriaceae; g:; s: | |
| 299474 | 10 | 0.158730159 | k: Bacteria; p: Firmicutes; c: Clostridia; o: Clostridiales; f: Clostridiaceae; g:; s: | 600 |
| 299820 | 31 | 0.492063492 | k: Bacteria; p: Firmicutes; c: Clostridia; o: Clostridiales; f: Ruminococcaceae; | 601 |
| | | | g: Oscillospira; s: | |
| 299837 | 4 | 0.063492063 | k: Bacteria; p: Firmicutes; c: Clostridia; o: Clostridiales; f: Ruminococcaceae; | 602 |
| | | | g: Faecalibacterium; s: prausnitzii | |
| 300297 | 14 | 0.222222222 | k: Bacteria; p: Firmicutes; c: Clostridia; o: Clostridiales; f: Lachnospiraceae; | 603 |
| | | | g: Coprococcus; s: | |
| 300374 | 2 | 0.031746032 | k: Bacteria; p: Firmicutes; c: Clostridia; o: Clostridiales; f: Ruminococcaceae; | 604 |
| | | | g: Oscillospira; s: | |
| 300378 | 2 | 0.031746032 | k: Bacteria; p: Firmicutes; c: Clostridia; o: Clostridiales; f: Clostridiaceae; g:; s: | 605 |
| 300491 | 8 | 0.126984127 | k: Bacteria; p: Firmicutes; c: Clostridia; o: Clostridiales; f: Ruminococcaceae; | 606 |
| | | | g: Oscillospira; s: | |
| 300582 | 4 | 0.063492063 | k: Bacteria; p: Firmicutes; c: Clostridia; o: Clostridiales; f: Clostridiaceae; g:; s: | 607 |
| 300829 | 5 | 0.079365079 | k: Bacteria; p: Firmicutes; c: Clostridia; o: Clostridiales; f: Clostridiaceae; | 608 |
| | | | g: Clostridium; s: | |
| 300851 | 1 | 0.015873016 | k: Bacteria; p: Firmicutes; c: Clostridia; o: Clostridiales; f: Ruminococcaceae; | 609 |
| | | | g: Oscillospira; s: | |
| 300855 | 34 | 0.53968254 | k: Bacteria; p: Firmicutes; c: Clostridia; o: Clostridiales; f: Clostridiaceae; g:; s: | 610 |
| 300952 | 25 | 0.396825397 | k: Bacteria; p: Firmicutes; c: Clostridia; o: Clostridiales; f: Lachnospiraceae; | 611 |
| | | | g: Coprococcus; s: | |
| 301184 | 1 | 0.015873016 | k: Bacteria; p: Proteobacteria; c: Gammaproteobacteria; o: Enterobacteriales; | 612 |
| | | | f: Enterobacteriaceae; g:; s: | |
| 301449 | 1 | 0.015873016 | k: Bacteria; p: Firmicutes; c: Clostridia; o: Clostridiales; f: Clostridiaceae; | 613 |
| | | | g: Clostridium; s: | |
| 301910 | 10 | 0.158730159 | k: Bacteria; p: Firmicutes; c: Clostridia; o: Clostridiales; f: Lachnospiraceae; | 614 |
| | | | g: Coprococcus; s: | |
| 302545 | 1 | 0.015873016 | k: Bacteria; p: Actinobacteria; c: Coriobacteriia; o: Coriobacteriales; | 615 |
| | | | f: Coriobacteriaceae; g:; s: | |
| 302617 | 9 | 0.142857143 | k: Bacteria; p: Firmicutes; c: Clostridia; o: Clostridiales; f: Lachnospiraceae; | 616 |
| | | | g: Lachnospira; s: | |
| 302932 | 31 | 0.492063492 | k: Bacteria; p: Firmicutes; c: Clostridia; o: Clostridiales; f: Clostridiaceae; g:; s: | 617 |
| 303379 | 1 | 0.015873016 | k: Bacteria; p: Firmicutes; c: Clostridia; o: Clostridiales; f: Clostridiaceae; g:; s: | 618 |
| 303844 | 6 | 0.095238095 | k: Bacteria; p: Firmicutes; c: Clostridia; o: Clostridiales; f: Lachnospiraceae; | 619 |
| | | | g: Coprococcus; s: | |
| 303864 | 5 | 0.079365079 | k: Bacteria; p: Firmicutes; c: Clostridia; o: Clostridiales; f: Lachnospiraceae; | 620 |
| | | | g: Lachnospira; s: | |
| 304131 | 1 | 0.015873016 | k: Bacteria; p: Firmicutes; c: Clostridia; o: Clostridiales; f: Ruminococcaceae; | 621 |
| | | | g: Oscillospira; s: | |
| 304427 | 19 | 0.301587302 | k: Bacteria; p: Firmicutes; c: Clostridia; o: Clostridiales; f: Ruminococcaceae; | 622 |
| | | | g: Oscillospira; s: | |
| 304641 | 1 | 0.015873016 | k: Bacteria; p: Proteobacteria; c: Gammaproteobacteria; o: Enterobacteriales; | 623 |
| | | | f: Enterobacteriaceae; g:; s: | |
| 304777 | 6 | 0.095238095 | k: Bacteria; p: Firmicutes; c: Clostridia; o: Clostridiales; f: Ruminococcaceae; | 624 |
| | | | g: Oscillospira; s: | |
| 304779 | 9 | 0.142857143 | k: Bacteria; p: Firmicutes; c: Clostridia; o: Clostridiales; f: Clostridiaceae; | 625 |
| | | | g: Clostridium; s: perfringens | |
| 305016 | 1 | 0.015873016 | k: Bacteria; p: Firmicutes; c: Clostridia; o: Clostridiales; f: Lachnospiraceae; | 626 |
| | | | g: Lachnospira; s: | |
| 305141 | 6 | 0.095238095 | k: Bacteria; p: Actinobacteria; c: Coriobacteriia; o: Coriobacteriales; | 627 |
| | | | f: Coriobacteriaceae; g:; s: | |
| 305288 | 5 | 0.079365079 | k: Bacteria; p: Firmicutes; c: Clostridia; o: Clostridiales; f: Clostridiaceae; | 628 |
| | | | g: Clostridium; s: | |
| 305608 | 4 | 0.063492063 | k: Bacteria; p: Firmicutes; c: Clostridia; o: Clostridiales; f: Veillonellaceae; | 629 |
| | | | g: Phascolarctobacterium; s: | |
| 306315 | 4 | 0.063492063 | k: Bacteria; p: Firmicutes; c: Clostridia; o: Clostridiales; f: Ruminococcaceae; | 630 |
| | | | g: Oscillospira; s: | |
| 306413 | 8 | 0.126984127 | k: Bacteria; p: Firmicutes; c: Clostridia; o: Clostridiales; f: Clostridiaceae; | 631 |
| | | | g: Clostridium; s: | |
| 306704 | 1 | 0.015873016 | k: Bacteria; p: Firmicutes; c: Clostridia; o: Clostridiales; f: Clostridiaceae; g:; s: | 632 |
| 307127 | 5 | 0.079365079 | k: Bacteria; p: Firmicutes; c: Clostridia; o: Clostridiales; f: Lachnospiraceae; | 633 |
| | | | g: Lachnospira; s: | |
| 307238 | 18 | 0.285714286 | k: Bacteria; p: Firmicutes; c: Clostridia; o: Clostridiales; f: Ruminococcaceae; | 634 |
| | | | g: Oscillospira; s: | |
| 308912 | 1 | 0.015873016 | k: Bacteria; p: Firmicutes; c: Clostridia; o: Clostridiales; f: Christensenellaceae; | 635 |
| | | | g:; s: | |
| 308957 | 1 | 0.015873016 | k: Bacteria; p: Bacteroidetes; c: Bacteroidia; o: Bacteroidales; f: Rikenellaceae; | 636 |
| | | | g:; s: | |
| 309127 | 1 | 0.015873016 | k: Bacteria; p: Firmicutes; c: Clostridia; o: Clostridiales; f: Clostridiaceae; g:; s: | 637 |
| 309433 | 3 | 0.047619048 | k: Bacteria; p: Firmicutes; c: Clostridia; o: Clostridiales; f: Lachnospiraceae; | 638 |
| | | | g: Lachnospira; s: | |
| 309658 | 2 | 0.031746032 | k: Bacteria; p: Firmicutes; c: Clostridia; o: Clostridiales; f: Clostridiaceae; | 639 |
| | | | g: Clostridium; s: | |
| 309929 | 1 | 0.015873016 | k: Bacteria; p: Firmicutes; c: Clostridia; o: Clostridiales; f: Ruminococcaceae; | 640 |
| | | | g: Ruminococcus; s: | |
| 310301 | 1 | 0.015873016 | k: Bacteria; p: Firmicutes; c: Clostridia; o: Clostridiales; f: Ruminococcaceae; | 641 |
| | | | g: Faecalibacterium; s: prausnitzii | |
| 310945 | 1 | 0.015873016 | k: Bacteria; p: Firmicutes; c: Clostridia; o: Clostridiales; f: Ruminococcaceae; | 642 |
| | | | g: Oscillospira; s: | |
| 312070 | 14 | 0.222222222 | k: Bacteria; p: Firmicutes; c: Clostridia; o: Clostridiales; f: [Mogibacteriaceae]; | 643 |
| | | | g:; s: | |
| 312515 | 1 | 0.015873016 | k: Bacteria; p: Firmicutes; c: Clostridia; o: Clostridiales; f: Ruminococcaceae; | 644 |
| | | | g: Oscillospira; s: | |
| 313387 | 1 | 0.015873016 | k: Bacteria; p: Firmicutes; c: Clostridia; o: Clostridiales; f: Lachnospiraceae; | 645 |
| | | | g: Coprococcus; s: | |
| 313672 | 2 | 0.031746032 | k: Bacteria; p: Firmicutes; c: Clostridia; o: Clostridiales; f: Lachnospiraceae; | 646 |
| | | | g: Lachnospira; s: | |
| 314053 | 6 | 0.095238095 | k: Bacteria; p: Firmicutes; c: Clostridia; o: Clostridiales; f: Clostridiaceae; | 647 |
| | | | g: Clostridium; s: | |
| 314582 | 2 | 0.031746032 | k: Bacteria; p: Firmicutes; c: Clostridia; o: Clostridiales; f: Ruminococcaceae; | 648 |
| | | | g: Oscillospira; s: | |
| 315200 | 3 | 0.047619048 | k: Bacteria; p: Firmicutes; c: Clostridia; o: Clostridiales; f: Ruminococcaceae; | 649 |
| | | | g: Ruminococcus; s: | |
| 315382 | 3 | 0.047619048 | k: Bacteria; p: Firmicutes; c: Clostridia; o: Clostridiales; f: Clostridiaceae; | 650 |
| | | | g: Clostridium; s: | |
| 315391 | 20 | 0.317460317 | k: Bacteria; p: Firmicutes; c: Clostridia; o: Clostridiales; f: Ruminococcaceae; | 651 |
| | | | g: Faecalibacterium; s: prausnitzii | |
| 315831 | 2 | 0.031746032 | k: Bacteria; p: Firmicutes; c: Clostridia; o: Clostridiales; f: [Mogibacteriaceae]; | 652 |
| | | | g:; s: | |
| 315846 | 9 | 0.142857143 | k: Bacteria; p: Bacteroidetes; c: Bacteroidia; o: Bacteroidales; | 653 |
| | | | f: [Barnesiellaceae]; g:; s: | |
| 316378 | 3 | 0.047619048 | k: Bacteria; p: Firmicutes; c: Clostridia; o: Clostridiales; f: Clostridiaceae; g:; s: | 654 |
| 316732 | 27 | 0.428571429 | k: Bacteria; p: Firmicutes; c: Clostridia; o: Clostridiales; f: Lachnospiraceae; | 655 |
| | | | g: Lachnospira; s: | |
| 317948 | 1 | 0.015873016 | k: Bacteria; p: Firmicutes; c: Clostridia; o: Clostridiales; f: Ruminococcaceae; | 656 |
| | | | g: Ruminococcus; s: | |
| 318777 | 13 | 0.206349206 | k: Bacteria; p: Firmicutes; c: Clostridia; o: Clostridiales; f: Veillonellaceae; | 657 |
| | | | g: Phascolarctobacterium; s: | |
| 318865 | 4 | 0.063492063 | k: Bacteria; p: Firmicutes; c: Clostridia; o: Clostridiales; f: Lachnospiraceae; | 658 |
| | | | g: Lachnospira; s: | |
| 318928 | 14 | 0.222222222 | k: Bacteria; p: Firmicutes; c: Clostridia; o: Clostridiales; f: Ruminococcaceae; | 659 |
| | | | g: Ruminococcus; s: | |
| 319260 | 3 | 0.047619048 | k: Bacteria; p: Firmicutes; c: Clostridia; o: Clostridiales; f: [Mogibacteriaceae]; | 660 |
| | | | g:; s: | |
| 319275 | 51 | 0.80952381 | k: Bacteria; p: Firmicutes; c: Clostridia; o: Clostridiales; f: Ruminococcaceae; | 661 |
| | | | g: Faecalibacterium; s: prausnitzii | |
| 319455 | 20 | 0.317460317 | k: Bacteria; p: Firmicutes; c: Clostridia; o: Clostridiales; f: Christensenellaceae; | 662 |
| | | | g:; s: | |
| 320224 | 6 | 0.095238095 | k: Bacteria; p: Firmicutes; c: Clostridia; o: Clostridiales; f: Ruminococcaceae; | 663 |
| | | | g: Ruminococcus; s: | |
| 320322 | 29 | 0.46031746 | k: Bacteria; p: Firmicutes; c: Clostridia; o: Clostridiales; f: Lachnospiraceae; | 664 |
| | | | g: Lachnospira; s: | |
| 321096 | 1 | 0.015873016 | k: Bacteria; p: Firmicutes; c: Clostridia; o: Clostridiales; f: Clostridiaceae; g:; s: | 665 |
| 321517 | 5 | 0.079365079 | k: Bacteria; p: Firmicutes; c: Clostridia; o: Clostridiales; f: Ruminococcaceae; | 666 |
| | | | g: Ruminococcus; s: | |
| 321774 | 16 | 0.253968254 | k: Bacteria; p: Firmicutes; c: Clostridia; o: Clostridiales; f: Lachnospiraceae; | 667 |
| | | | g: Coprococcus; s: | |
| 321907 | 4 | 0.063492063 | k: Bacteria; p: Firmicutes; c: Clostridia; o: Clostridiales; f: Lachnospiraceae; | 668 |
| | | | g: Coprococcus; s: | |
| 322223 | 2 | 0.031746032 | k: Bacteria; p: Bacteroidetes; c: Bacteroidia; o: Bacteroidales; f: Rikenellaceae; | 669 |
| | | | g:; s: | |
| 322258 | 6 | 0.095238095 | k: Bacteria; p: Firmicutes; c: Clostridia; o: Clostridiales; f: Ruminococcaceae; | 670 |
| | | | g: Oscillospira; s: | |
| 322367 | 2 | 0.031746032 | k: Bacteria; p: Firmicutes; c: Clostridia; o: Clostridiales; f: Clostridiaceae; g:; s: | 671 |
| 322835 | 15 | 0.238095238 | k: Bacteria; p: Firmicutes; c: Clostridia; o: Clostridiales; f: Lachnospiraceae; | 672 |
| | | | g: Lachnospira; s: | |
| 322962 | 1 | 0.015873016 | k: Bacteria; p: Firmicutes; c: Clostridia; o: Clostridiales; f: Christensenellaceae; | 673 |
| | | | g:; s: | |
| 323135 | 10 | 0.158730159 | k: Bacteria; p: Firmicutes; c: Clostridia; o: Clostridiales; f: Ruminococcaceae; | 674 |
| | | | g: Ruminococcus; s: | |
| 323403 | 1 | 0.015873016 | k: Bacteria; p: Firmicutes; c: Clostridia; o: Clostridiales; f: Ruminococcaceae; | 675 |
| | | | g: Oscillospira; s: | |
| 324214 | 7 | 0.111111111 | k: Bacteria; p: Firmicutes; c: Clostridia; o: Clostridiales; f: Ruminococcaceae; | 676 |
| | | | g: Oscillospira; s: | |
| 324315 | 1 | 0.015873016 | k: Bacteria; p: Firmicutes; c: Clostridia; o: Clostridiales; f: Clostridiaceae; | 677 |
| | | | g: Clostridium; s: | |
| 324882 | 3 | 0.047619048 | k: Bacteria; p: Firmicutes; c: Clostridia; o: Clostridiales; f: [Mogibacteriaceae]; | 678 |
| | | | g:; s: | |
| 325599 | 4 | 0.063492063 | k: Bacteria; p: Firmicutes; c: Clostridia; o: Clostridiales; f: Lachnospiraceae; | 679 |
| | | | g: Lachnospira; s: | |
| 326991 | 27 | 0.428571429 | k: Bacteria; p: Firmicutes; c: Clostridia; o: Clostridiales; f: Clostridiaceae; | 680 |
| | | | g: Clostridium; s: | |
| 327298 | 3 | 0.047619048 | k: Bacteria; p: Firmicutes; c: Clostridia; o: Clostridiales; f: Clostridiaceae; | 681 |
| | | | g: Clostridium; s: | |
| 327598 | 8 | 0.126984127 | k: Bacteria; p: Firmicutes; c: Clostridia; o: Clostridiales; f: Christensenellaceae; | 682 |
| | | | g:; s: | |
| 328059 | 1 | 0.015873016 | k: Bacteria; p: Firmicutes; c: Clostridia; o: Clostridiales; f: Clostridiaceae; g:; s: | 683 |
| 328905 | 57 | 0.904761905 | k: Bacteria; p: Firmicutes; c: Clostridia; o: Clostridiales; f: Ruminococcaceae; | 684 |
| | | | g: Oscillospira; s: | |
| 328993 | 1 | 0.015873016 | k: Bacteria; p: Firmicutes; c: Clostridia; o: Clostridiales; f: Lachnospiraceae; | 685 |
| | | | g: Coprococcus; s: | |
| 329096 | 2 | 0.031746032 | k: Bacteria; p: Proteobacteria; c: Gammaproteobacteria; o: Enterobacteriales; | 686 |
| | | | f: Enterobacteriaceae; g:; s: | |
| 329688 | 10 | 0.158730159 | k: Bacteria; p: Actinobacteria; c: Coriobacteriia; o: Coriobacteriales; | 687 |
| | | | f: Coriobacteriaceae; g: Collinsella; s: stercoris | |
| 329798 | 6 | 0.095238095 | k: Bacteria; p: Firmicutes; c: Clostridia; o: Clostridiales; f: Clostridiaceae; g:; s: | 688 |
| 330714 | 2 | 0.031746032 | k: Bacteria; p: Firmicutes; c: Clostridia; o: Clostridiales; f: Clostridiaceae; | 689 |
| | | | g: Clostridium; s: | |
| 331881 | 21 | 0.333333333 | k: Bacteria; p: Firmicutes; c: Clostridia; o: Clostridiales; f: Clostridiaceae; g:; s: | 690 |
| 332027 | 7 | 0.111111111 | k: Bacteria; p: Firmicutes; c: Clostridia; o: Clostridiales; f: Christensenellaceae; | 691 |
| | | | g:; s: | |
| 332163 | 14 | 0.222222222 | k: Bacteria; p: Firmicutes; c: Clostridia; o: Clostridiales; f: Lachnospiraceae; | 692 |
| | | | g: Lachnospira; s: | |
| 332450 | 3 | 0.047619048 | k: Bacteria; p: Firmicutes; c: Clostridia; o: Clostridiales; f: Lachnospiraceae; | 693 |
| | | | g: Coprococcus; s: eutactus | |
| 333096 | 1 | 0.015873016 | k: Bacteria; p: Firmicutes; c: Clostridia; o: Clostridiales; f: Ruminococcaceae; | 694 |
| | | | g: Ruminococcus; s: | |
| 333189 | 2 | 0.031746032 | k: Bacteria; p: Firmicutes; c: Clostridia; o: Clostridiales; f: Ruminococcaceae; | 695 |
| | | | g: Oscillospira; s: | |
| 333380 | 4 | 0.063492063 | k: Bacteria; p: Proteobacteria; c: Betaproteobacteria; o: Burkholderiales; | 696 |
| | | | f: Alcaligenaceae; g: Sutterella; s: | |
| 333768 | 7 | 0.111111111 | k: Bacteria; p: Firmicutes; c: Clostridia; o: Clostridiales; f: Ruminococcaceae; | 697 |
| | | | g: Oscillospira; s: | |
| 334215 | 4 | 0.063492063 | k: Bacteria; p: Firmicutes; c: Clostridia; o: Clostridiales; f: Ruminococcaceae; | 698 |
| | | | g: Oscillospira; s: | |
| 334935 | 1 | 0.015873016 | k: Bacteria; p: Firmicutes; c: Clostridia; o: Clostridiales; f: Ruminococcaceae; | 699 |
| | | | g: Oscillospira; s: | |
| 335910 | 22 | 0.349206349 | k: Bacteria; p: Firmicutes; c: Clostridia; o: Clostridiales; f: Lachnospiraceae; | 700 |
| | | | g: Coprococcus; s: | |
| 336205 | 7 | 0.111111111 | k: Bacteria; p: Firmicutes; c: Clostridia; o: Clostridiales; f: Lachnospiraceae; | 701 |
| | | | g: Coprococcus; s: | |
| 336338 | 2 | 0.031746032 | k: Bacteria; p: Firmicutes; c: Clostridia; o: Clostridiales; f: Clostridiaceae; g:; s: | 702 |
| 337048 | 8 | 0.126984127 | k: Bacteria; p: Firmicutes; c: Clostridia; o: Clostridiales; f: Clostridiaceae; g:; s: | 703 |
| 337511 | 14 | 0.222222222 | k: Bacteria; p: Firmicutes; c: Clostridia; o: Clostridiales; f: Clostridiaceae; g:; s: | 704 |
| 338195 | 3 | 0.047619048 | k: Bacteria; p: Firmicutes; c: Clostridia; o: Clostridiales; f: Christensenellaceae; | 705 |
| | | | g:; s: | |
| 339087 | 2 | 0.031746032 | k: Bacteria; p: Firmicutes; c: Clostridia; o: Clostridiales; f: Ruminococcaceae; | 706 |
| | | | g: Faecalibacterium; s: prausnitzii | |
| 339494 | 50 | 0.793650794 | k: Bacteria; p: Firmicutes; c: Clostridia; o: Clostridiales; f: Ruminococcaceae; | 707 |
| | | | g: Faecalibacterium; s: prausnitzii | |
| 339712 | 2 | 0.031746032 | k: Bacteria; p: Firmicutes; c: Clostridia; o: Clostridiales; f: Clostridiaceae; g:; s: | 708 |
| 340170 | 11 | 0.174603175 | k: Bacteria; p: Firmicutes; c: Clostridia; o: Clostridiales; f: Ruminococcaceae; | 709 |
| | | | g: Ruminococcus; s: | |
| 340219 | 1 | 0.015873016 | k: Bacteria; p: Firmicutes; c: Clostridia; o: Clostridiales; f: Ruminococcaceae; | 710 |
| | | | g: Faecalibacterium; s: prausnitzii | |
| 340794 | 2 | 0.031746032 | k: Bacteria; p: Firmicutes; c: Clostridia; o: Clostridiales; f: Ruminococcaceae; | 711 |
| | | | g: Ruminococcus; s: | |
| 341004 | 4 | 0.063492063 | k: Bacteria; p: Firmicutes; c: Clostridia; o: Clostridiales; f: Ruminococcaceae; | 712 |
| | | | g: Oscillospira; s: | |
| 341489 | 5 | 0.079365079 | k: Bacteria; p: Firmicutes; c: Clostridia; o: Clostridiales; f: Ruminococcaceae; | 713 |
| | | | g: Ruminococcus; s: | |
| 341885 | 9 | 0.142857143 | k: Bacteria; p: Firmicutes; c: Clostridia; o: Clostridiales; f: Clostridiaceae; g:; s: | 714 |
| 341920 | 21 | 0.333333333 | k: Bacteria; p: Firmicutes; c: Clostridia; o: Clostridiales; f: Ruminococcaceae; | 715 |
| | | | g: Faecalibacterium; s: prausnitzii | |
| 342268 | 1 | 0.015873016 | k: Bacteria; p: Firmicutes; c: Clostridia; o: Clostridiales; | 716 |
| | | | f: Peptostreptococcaceae; g: Clostridium; s: metallolevans | |
| 342375 | 3 | 0.047619048 | k: Bacteria; p: Firmicutes; c: Clostridia; o: Clostridiales; f: Lachnospiraceae; | 717 |
| | | | g: Lachnospira; s: | |
| 342504 | 5 | 0.079365079 | k: Bacteria; p: Firmicutes; c: Clostridia; o: Clostridiales; f: Clostridiaceae; g:; s: | 718 |
| 342666 | 2 | 0.031746032 | k: Bacteria; p: Firmicutes; c: Clostridia; o: Clostridiales; f: Clostridiaceae; g:; s: | 719 |
| 343090 | 6 | 0.095238095 | k: Bacteria; p: Firmicutes; c: Clostridia; o: Clostridiales; f: Clostridiaceae; g:; s: | 720 |
| 343104 | 3 | 0.047619048 | k: Bacteria; p: Firmicutes; c: Clostridia; o: Clostridiales; f: Clostridiaceae; g:; s: | 721 |
| 344798 | 1 | 0.015873016 | k: Bacteria; p: Firmicutes; c: Clostridia; o: Clostridiales; f: Clostridiaceae; g:; s: | 722 |
| 345362 | 2 | 0.031746032 | k: Bacteria; p: Proteobacteria; c: Gammaproteobacteria; o: Enterobacteriales; | 723 |
| | | | f: Enterobacteriaceae; g:; s: | |
| 345540 | 10 | 0.158730159 | k: Bacteria; p: Proteobacteria; c: Gammaproteobacteria; o: Enterobacteriales; | 724 |
| | | | f: Enterobacteriaceae; g:; s: | |
| 346302 | 3 | 0.047619048 | k: Bacteria; p: Firmicutes; c: Clostridia; o: Clostridiales; f: Lachnospiraceae; | 725 |
| | | | g: Lachnospira; s: | |
| 346793 | 2 | 0.031746032 | k: Bacteria; p: Firmicutes; c: Clostridia; o: Clostridiales; f: Veillonellaceae; | 726 |
| | | | g: Phascolarctobacterium; s: | |
| 347690 | 32 | 0.507936508 | k: Bacteria; p: Firmicutes; c: Clostridia; o: Clostridiales; f: Ruminococcaceae; | 727 |
| | | | g: Oscillospira; s: | |
| 348009 | 2 | 0.031746032 | k: Bacteria; p: Firmicutes; c: Clostridia; o: Clostridiales; f: Ruminococcaceae; | 728 |
| | | | g: Oscillospira; s: | |
| 349257 | 27 | 0.428571429 | k: Bacteria; p: Firmicutes; c: Clostridia; o: Clostridiales; f: Lachnospiraceae; | 729 |
| | | | g: Lachnospira; s: | |
| 349431 | 18 | 0.285714286 | k: Bacteria; p: Firmicutes; c: Clostridia; o: Clostridiales; f: Ruminococcaceae; | 730 |
| | | | g: Ruminococcus; s: | |
| 349798 | 1 | 0.015873016 | k: Bacteria; p: Firmicutes; c: Clostridia; o: Clostridiales; f: Ruminococcaceae; | 731 |
| | | | g: Oscillospira; s: | |
| 349884 | 1 | 0.015873016 | k: Bacteria; p: Firmicutes; c: Clostridia; o: Clostridiales; f: Ruminococcaceae; | 732 |
| | | | g: Ruminococcus; s: | |
| 350224 | 1 | 0.015873016 | k: Bacteria; p: Firmicutes; c: Clostridia; o: Clostridiales; f: Ruminococcaceae; | 733 |
| | | | g: Ruminococcus; s: flavefaciens | |
| 350865 | 18 | 0.285714286 | k: Bacteria; p: Firmicutes; c: Clostridia; o: Clostridiales; f: Lachnospiraceae; | 734 |
| | | | g: Lachnospira; s: | |
| 351357 | 6 | 0.095238095 | k: Bacteria; p: Firmicutes; c: Clostridia; o: Clostridiales; f: Clostridiaceae; g:; s: | 735 |
| 352747 | 39 | 0.619047619 | k: Bacteria; p: Firmicutes; c: Clostridia; o: Clostridiales; f: Lachnospiraceae; | 736 |
| | | | g: Coprococcus; s: | |
| 353632 | 2 | 0.031746032 | k: Bacteria; p: Firmicutes; c: Clostridia; o: Clostridiales; f: Ruminococcaceae; | 737 |
| | | | g: Ruminococcus; s: | |
| 355298 | 1 | 0.015873016 | k: Bacteria; p: Firmicutes; c: Clostridia; o: Clostridiales; f: Clostridiaceae; g:; s: | 738 |
| 355450 | 27 | 0.428571429 | k: Bacteria; p: Firmicutes; c: Clostridia; o: Clostridiales; f: Ruminococcaceae; | 739 |
| | | | g: Oscillospira; s: | |
| 355975 | 3 | 0.047619048 | k: Bacteria; p: Firmicutes; c: Clostridia; o: Clostridiales; f: Lachnospiraceae; | 740 |
| | | | g: Lachnospira; s: | |
| 356644 | 8 | 0.126984127 | k: Bacteria; p: Firmicutes; c: Clostridia; o: Clostridiales; f: Lachnospiraceae; | 741 |
| | | | g: Lachnospira; s: | |
| 356745 | 40 | 0.634920635 | k: Bacteria; p: Firmicutes; c: Clostridia; o: Clostridiales; f: Ruminococcaceae; | 742 |
| | | | g: Ruminococcus; s: | |
| 357046 | 59 | 0.936507937 | k: Bacteria; p: Bacteroidetes; c: Bacteroidia; o: Bacteroidales; f: Rikenellaceae; | 743 |
| | | | g:; s: | |
| 357261 | 40 | 0.634920635 | k: Bacteria; p: Firmicutes; c: Clostridia; o: Clostridiales; f: Ruminococcaceae; | 744 |
| | | | g: Ruminococcus; s: | |
| 357449 | 1 | 0.015873016 | k: Bacteria; p: Firmicutes; c: Clostridia; o: Clostridiales; f: Lachnospiraceae; | 745 |
| | | | g: Coprococcus; s: | |
| 357529 | 21 | 0.333333333 | k: Bacteria; p: Firmicutes; c: Clostridia; o: Clostridiales; f: Clostridiaceae; | 746 |
| | | | g: Clostridium; s: | |
| 357724 | 48 | 0.761904762 | k: Bacteria; p: Firmicutes; c: Clostridia; o: Clostridiales; f: Ruminococcaceae; | 747 |
| | | | g: Ruminococcus; s: bromii | |
| 357849 | 45 | 0.714285714 | k: Bacteria; p: Actinobacteria; c: Coriobacteriia; o: Coriobacteriales; | 748 |
| | | | f: Coriobacteriaceae; g: Collinsella; s: aerofaciens | |
| 358008 | 2 | 0.031746032 | k: Bacteria; p: Firmicutes; c: Clostridia; o: Clostridiales; f: Ruminococcaceae; | 749 |
| | | | g: Faecalibacterium; s: prausnitzii | |
| 358834 | 16 | 0.253968254 | k: Bacteria; p: Firmicutes; c: Clostridia; o: Clostridiales; f: Lachnospiraceae; | 750 |
| | | | g: Coprococcus; s: | |
| 359563 | 4 | 0.063492063 | k: Bacteria; p: Firmicutes; c: Clostridia; o: Clostridiales; f: Ruminococcaceae; | 751 |
| | | | g: Oscillospira; s: | |
| 359950 | 4 | 0.063492063 | k: Bacteria; p: Firmicutes; c: Clostridia; o: Clostridiales; f: Ruminococcaceae; | 752 |
| | | | g: Ruminococcus; s: | |
| 359993 | 12 | 0.19047619 | k: Bacteria; p: Firmicutes; c: Clostridia; o: Clostridiales; f: Lachnospiraceae; | 753 |
| | | | g: Coprococcus; s: eutactus | |
| 360147 | 1 | 0.015873016 | k: Bacteria; p: Firmicutes; c: Clostridia; o: Clostridiales; f: Lachnospiraceae; | 754 |
| | | | g: Coprococcus; s: | |
| 361581 | 1 | 0.015873016 | k: Bacteria; p: Firmicutes; c: Clostridia; o: Clostridiales; f: Ruminococcaceae; | 755 |
| | | | g: Faecalibacterium; s: prausnitzii | |
| 361702 | 55 | 0.873015873 | k: Bacteria; p: Firmicutes; c: Clostridia; o: Clostridiales; f: Ruminococcaceae; | 756 |
| | | | g: Ruminococcus; s: | |
| 361966 | 1 | 0.015873016 | k: Bacteria; p: Firmicutes; c: Clostridia; o: Clostridiales; f: Ruminococcaceae; | 757 |
| | | | g: Faecalibacterium; s: prausnitzii | |
| 362094 | 2 | 0.031746032 | k: Bacteria; p: Firmicutes; c: Clostridia; o: Clostridiales; f: Ruminococcaceae; | 758 |
| | | | g: Faecalibacterium; s: prausnitzii | |
| 362327 | 1 | 0.015873016 | k: Bacteria; p: Firmicutes; c: Clostridia; o: Clostridiales; f: Ruminococcaceae; | 759 |
| | | | g: Faecalibacterium; s: prausnitzii | |
| 362342 | 1 | 0.015873016 | k: Bacteria; p: Firmicutes; c: Clostridia; o: Clostridiales; f: Ruminococcaceae; | 760 |
| | | | g: Ruminococcus; s: | |
| 362501 | 2 | 0.031746032 | k: Bacteria; p: Firmicutes; c: Clostridia; o: Clostridiales; f: Lachnospiraceae; | 761 |
| | | | g: Coprococcus; s: eutactus | |
| 362765 | 4 | 0.063492063 | k: Bacteria; p: Firmicutes; c: Clostridia; o: Clostridiales; f: Ruminococcaceae; | 762 |
| | | | g: Ruminococcus; s: | |
| 362793 | 3 | 0.047619048 | k: Bacteria; p: Firmicutes; c: Clostridia; o: Clostridiales; f: Ruminococcaceae; | 763 |
| | | | g: Oscillospira; s: | |
| 362991 | 14 | 0.222222222 | k: Bacteria; p: Firmicutes; c: Clostridia; o: Clostridiales; f: Ruminococcaceae; | 764 |
| | | | g: Ruminococcus; s: | |
| 363358 | 23 | 0.365079365 | k: Bacteria; p: Firmicutes; c: Clostridia; o: Clostridiales; f: Ruminococcaceae; | 765 |
| | | | g: Faecalibacterium; s: prausnitzii | |
| 363389 | 16 | 0.253968254 | k: Bacteria; p: Firmicutes; c: Clostridia; o: Clostridiales; f: Clostridiaceae; | 766 |
| | | | g: Clostridium; s: | |
| 363442 | 3 | 0.047619048 | k: Bacteria; p: Firmicutes; c: Clostridia; o: Clostridiales; f: Ruminococcaceae; | 767 |
| | | | g: Faecalibacterium; s: prausnitzii | |
| 363519 | 21 | 0.333333333 | k: Bacteria; p: Firmicutes; c: Clostridia; o: Clostridiales; f: Christensenellaceae; | 768 |
| | | | g:; s: | |
| 363646 | 2 | 0.031746032 | k: Bacteria; p: Firmicutes; c: Clostridia; o: Clostridiales; f: Ruminococcaceae; | 769 |
| | | | g: Ruminococcus; s: | |
| 363794 | 22 | 0.349206349 | k: Bacteria; p: Actinobacteria; c: Coriobacteriia; o: Coriobacteriales; | 770 |
| | | | f: Coriobacteriaceae; g: Collinsella; s: aerofaciens | |
| 364341 | 15 | 0.238095238 | k: Bacteria; p: Firmicutes; c: Clostridia; o: Clostridiales; f: Ruminococcaceae; | 771 |
| | | | g: Oscillospira; s: | |
| 364563 | 6 | 0.095238095 | k: Bacteria; p: Firmicutes; c: Clostridia; o: Clostridiales; f: Ruminococcaceae; | 772 |
| | | | g: Faecalibacterium; s: prausnitzii | |
| 365118 | 6 | 0.095238095 | k: Bacteria; p: Firmicutes; c: Clostridia; o: Clostridiales; f: Lachnospiraceae; | 773 |
| | | | g: Coprococcus; s: | |
| 365181 | 12 | 0.19047619 | k: Bacteria; p: Actinobacteria; c: Coriobacteriia; o: Coriobacteriales; | 774 |
| | | | f: Coriobacteriaceae; g: Collinsella; s: aerofaciens | |
| 365628 | 24 | 0.380952381 | k: Bacteria; p: Firmicutes; c: Clostridia; o: Clostridiales; f: Veillonellaceae; | 775 |
| | | | g: Phascolarctobacterium; s: | |
| 365717 | 23 | 0.365079365 | k: Bacteria; p: Firmicutes; c: Clostridia; o: Clostridiales; f: Ruminococcaceae; | 776 |
| | | | g: Faecalibacterium; s: prausnitzii | |
| 365842 | 1 | 0.015873016 | k: Bacteria; p: Firmicutes; c: Clostridia; o: Clostridiales; f: Ruminococcaceae; | 777 |
| | | | g: Faecalibacterium; s: prausnitzii | |
| 365965 | 10 | 0.158730159 | k: Bacteria; p: Firmicutes; c: Clostridia; o: Clostridiales; f: Ruminococcaceae; | 778 |
| | | | g: Ruminococcus; s: | |
| 366068 | 3 | 0.047619048 | k: Bacteria; p: Firmicutes; c: Clostridia; o: Clostridiales; f: Ruminococcaceae; | 779 |
| | | | g: Faecalibacterium; s: prausnitzii | |
| 366195 | 13 | 0.206349206 | k: Bacteria; p: Firmicutes; c: Clostridia; o: Clostridiales; f: Ruminococcaceae; | 780 |
| | | | g: Ruminococcus; s: bromii | |
| 366451 | 1 | 0.015873016 | k: Bacteria; p: Proteobacteria; c: Gammaproteobacteria; o: Enterobacteriales; | 781 |
| | | | f: Enterobacteriaceae; g:; s: | |
| 366781 | 3 | 0.047619048 | k: Bacteria; p: Firmicutes; c: Clostridia; o: Clostridiales; f: Clostridiaceae; | 782 |
| | | | g: Clostridium; s: | |
| 367176 | 20 | 0.317460317 | k: Bacteria; p: Firmicutes; c: Clostridia; o: Clostridiales; f: Ruminococcaceae; | 783 |
| | | | g: Oscillospira; s: | |
| 367232 | 39 | 0.619047619 | k: Bacteria; p: Firmicutes; c: Clostridia; o: Clostridiales; f: Ruminococcaceae; | 784 |
| | | | g: Faecalibacterium; s: prausnitzii | |
| 367453 | 18 | 0.285714286 | k: Bacteria; p: Firmicutes; c: Clostridia; o: Clostridiales; f: Lachnospiraceae; | 785 |
| | | | g: Coprococcus; s: | |
| 367688 | 56 | 0.888888889 | k: Bacteria; p: Firmicutes; c: Clostridia; o: Clostridiales; f: Lachnospiraceae; | 786 |
| | | | g: Coprococcus; s: | |
| 367889 | 52 | 0.825396825 | k: Bacteria; p: Firmicutes; c: Clostridia; o: Clostridiales; f: Lachnospiraceae; | 787 |
| | | | g: Coprococcus; s: | |
| 368127 | 3 | 0.047619048 | k: Bacteria; p: Firmicutes; c: Clostridia; o: Clostridiales; f: Ruminococcaceae; | 788 |
| | | | g: Faecalibacterium; s: prausnitzii | |
| 368175 | 4 | 0.063492063 | k: Bacteria; p: Actinobacteria; c: Coriobacteriia; o: Coriobacteriales; | 789 |
| | | | f: Coriobacteriaceae; g: Collinsella; s: aerofaciens | |
| 368219 | 52 | 0.825396825 | k: Bacteria; p: Firmicutes; c: Clostridia; o: Clostridiales; f: Ruminococcaceae; | 790 |
| | | | g: Faecalibacterium; s: prausnitzii | |
| 368711 | 10 | 0.158730159 | k: Bacteria; p: Firmicutes; c: Clostridia; o: Clostridiales; f: Christensenellaceae; | 791 |
| | | | g:; s: | |
| 369354 | 1 | 0.015873016 | k: Bacteria; p: Actinobacteria; c: Coriobacteriia; o: Coriobacteriales; | 792 |
| | | | f: Coriobacteriaceae; g:; s: | |
| 369486 | 53 | 0.841269841 | k: Bacteria; p: Firmicutes; c: Clostridia; o: Clostridiales; f: Lachnospiraceae; | 793 |
| | | | g: Lachnospira; s: | |
| 369555 | 6 | 0.095238095 | k: Bacteria; p: Firmicutes; c: Clostridia; o: Clostridiales; f: Ruminococcaceae; | 794 |
| | | | g: Ruminococcus; s: | |
| 369602 | 1 | 0.015873016 | k: Bacteria; p: Firmicutes; c: Clostridia; o: Clostridiales; f: Ruminococcaceae; | 795 |
| | | | g: Ruminococcus; s: bromii | |
| 369797 | 1 | 0.015873016 | k: Bacteria; p: Firmicutes; c: Clostridia; o: Clostridiales; f: Ruminococcaceae; | 796 |
| | | | g: Ruminococcus; s: | |
| 369996 | 2 | 0.031746032 | k: Bacteria; p: Firmicutes; c: Clostridia; o: Clostridiales; f: Ruminococcaceae; | 797 |
| | | | g: Faecalibacterium; s: prausnitzii | |
| 370075 | 4 | 0.063492063 | k: Bacteria; p: Firmicutes; c: Clostridia; o: Clostridiales; f: [Mogibacteriaceae]; | 798 |
| | | | g:; s: | |
| 370098 | 22 | 0.349206349 | k: Bacteria; p: Firmicutes; c: Clostridia; o: Clostridiales; f: Lachnospiraceae; | 799 |
| | | | g: Lachnospira; s: | |
| 370287 | 20 | 0.317460317 | k: Bacteria; p: Firmicutes; c: Clostridia; o: Clostridiales; f: Ruminococcaceae; | 800 |
| | | | g: Faecalibacterium; s: prausnitzii | |
| 372146 | 4 | 0.063492063 | k: Bacteria; p: Firmicutes; c: Clostridia; o: Clostridiales; f: Ruminococcaceae; | 801 |
| | | | g: Oscillospira; s: | |
| 372348 | 3 | 0.047619048 | k: Bacteria; p: Firmicutes; c: Clostridia; o: Clostridiales; f: Ruminococcaceae; | 802 |
| | | | g: Ruminococcus; s: | |
| 405780 | 2 | 0.031746032 | k: Bacteria; p: Firmicutes; c: Clostridia; o: Clostridiales; f: Ruminococcaceae; | 803 |
| | | | g: Ruminococcus; s: | |
| 414949 | 4 | 0.063492063 | k: Bacteria; p: Actinobacteria; c: Coriobacteriia; o: Coriobacteriales; | 804 |
| | | | f: Coriobacteriaceae; g: Collinsella; s: | |
| 415315 | 1 | 0.015873016 | k: Bacteria; p: Actinobacteria; c: Coriobacteriia; o: Coriobacteriales; | 805 |
| | | | f: Coriobacteriaceae; g: Collinsella; s: | |
| 422283 | 1 | 0.015873016 | k: Bacteria; p: Firmicutes; c: Clostridia; o: Clostridiales; f: Ruminococcaceae; | 806 |
| | | | g: Oscillospira; s: | |
| 437137 | 6 | 0.095238095 | k: Bacteria; p: Proteobacteria; c: Betaproteobacteria; o: Burkholderiales; | 807 |
| | | | f: Alcaligenaceae; g: Sutterella; s: | |
| 465433 | 1 | 0.015873016 | k: Bacteria; p: Bacteroidetes; c: Bacteroidia; o: Bacteroidales; f: Rikenellaceae; | 808 |
| | | | g:; s: | |
| 470117 | 17 | 0.26984127 | k: Bacteria; p: Firmicutes; c: Clostridia; o: Clostridiales; f: Ruminococcaceae; | 809 |
| | | | g: Clostridium; s: methylpentosum | |
| 508897 | 2 | 0.031746032 | k: Bacteria; p: Firmicutes; c: Clostridia; o: Clostridiales; f: Lachnospiraceae; | 810 |
| | | | g: Coprococcus; s: | |
| 509516 | 1 | 0.015873016 | k: Bacteria; p: Firmicutes; c: Bacilli; o: Lactobacillales; f: Enterococcaceae; | 811 |
| | | | g: Enterococcus; s: | |
| 512494 | 1 | 0.015873016 | k: Bacteria; p: Firmicutes; c: Clostridia; o: Clostridiales; f: Veillonellaceae; | 812 |
| | | | g: Phascolarctobacterium; s: | |
| 514523 | 50 | 0.793650794 | k: Bacteria; p: Firmicutes; c: Clostridia; o: Clostridiales; f: Ruminococcaceae; | 813 |
| | | | g: Faecalibacterium; s: prausnitzii | |
| 515575 | 3 | 0.047619048 | k: Bacteria; p: Firmicutes; c: Clostridia; o: Clostridiales; f: Ruminococcaceae; | 814 |
| | | | g: Faecalibacterium; s: prausnitzii | |
| 518002 | 2 | 0.031746032 | k: Bacteria; p: Proteobacteria; c: Gammaproteobacteria; o: Enterobacteriales; | 815 |
| | | | f: Enterobacteriaceae; g:; s: | |
| 518460 | 9 | 0.142857143 | k: Bacteria; p: Firmicutes; c: Clostridia; o: Clostridiales; f: Lachnospiraceae; | 816 |
| | | | g: Coprococcus; s: | |
| 520413 | 2 | 0.031746032 | k: Bacteria; p: Firmicutes; c: Clostridia; o: Clostridiales; f: Ruminococcaceae; | 817 |
| | | | g: Faecalibacterium; s: prausnitzii | |
| 521982 | 1 | 0.015873016 | k: Bacteria; p: Bacteroidetes; c: Bacteroidia; o: Bacteroidales; f: Rikenellaceae; | 818 |
| | | | g:; s: | |
| 523140 | 16 | 0.253968254 | k: Bacteria; p: Firmicutes; c: Clostridia; o: Clostridiales; f: Ruminococcaceae; | 819 |
| | | | g: Ruminococcus; s: | |
| 525215 | 2 | 0.031746032 | k: Bacteria; p: Firmicutes; c: Clostridia; o: Clostridiales; f: Ruminococcaceae; | 820 |
| | | | g: Faecalibacterium; s: prausnitzii | |
| 525698 | 39 | 0.619047619 | k: Bacteria; p: Firmicutes; c: Clostridia; o: Clostridiales; f: Ruminococcaceae; | 821 |
| | | | g: Faecalibacterium; s: prausnitzii | |
| 526665 | 1 | 0.015873016 | k: Bacteria; p: Firmicutes; c: Clostridia; o: Clostridiales; f: Ruminococcaceae; | 822 |
| | | | g: Oscillospira; s: | |
| 528652 | 1 | 0.015873016 | k: Bacteria; p: Firmicutes; c: Clostridia; o: Clostridiales; f: Ruminococcaceae; | 823 |
| | | | g: Faecalibacterium; s: prausnitzii | |
| 529652 | 3 | 0.047619048 | k: Bacteria; p: Proteobacteria; c: Betaproteobacteria; o: Burkholderiales; | 824 |
| | | | f: Alcaligenaceae; g: Sutterella; s: | |
| 529789 | 4 | 0.063492063 | k: Bacteria; p: Firmicutes; c: Clostridia; o: Clostridiales; f: Ruminococcaceae; | 825 |
| | | | g: Ruminococcus; s: | |
| 533847 | 2 | 0.031746032 | k: Bacteria; p: Firmicutes; c: Clostridia; o: Clostridiales; f: Ruminococcaceae; | 826 |
| | | | g: Oscillospira; s: | |
| 534965 | 1 | 0.015873016 | k: Bacteria; p: Proteobacteria; c: Gammaproteobacteria; o: Enterobacteriales; | 827 |
| | | | f: Enterobacteriaceae; g:; s: | |
| 535399 | 2 | 0.031746032 | k: Bacteria; p: Firmicutes; c: Clostridia; o: Clostridiales; f: Ruminococcaceae; | 828 |
| | | | g: Oscillospira; s: | |
| 536584 | 2 | 0.031746032 | k: Bacteria; p: Firmicutes; c: Clostridia; o: Clostridiales; f: Christensenellaceae; | 829 |
| | | | g:; s: | |
| 539820 | 2 | 0.031746032 | k: Bacteria; p: Firmicutes; c: Clostridia; o: Clostridiales; f: Ruminococcaceae; | 830 |
| | | | g: Oscillospira; s: | |
| 540402 | 1 | 0.015873016 | k: Bacteria; p: Proteobacteria; c: Gammaproteobacteria; o: Enterobacteriales; | 831 |
| | | | f: Enterobacteriaceae; g:; s: | |
| 541119 | 2 | 0.031746032 | k: Bacteria; p: Proteobacteria; c: Gammaproteobacteria; o: Enterobacteriales; | 832 |
| | | | f: Enterobacteriaceae; g:; s: | |
| 543824 | 2 | 0.031746032 | k: Bacteria; p: Firmicutes; c: Bacilli; o: Lactobacillales; f: Enterococcaceae; | 833 |
| | | | g: Enterococcus; s: | |
| 544996 | 1 | 0.015873016 | k: Bacteria; p: Firmicutes; c: Clostridia; o: Clostridiales; f: Ruminococcaceae; | 834 |
| | | | g: Oscillospira; s: | |
| 548032 | 52 | 0.825396825 | k: Bacteria; p: Firmicutes; c: Clostridia; o: Clostridiales; f: Ruminococcaceae; | 835 |
| | | | g: Oscillospira; s: | |
| 551822 | 1 | 0.015873016 | k: Bacteria; p: Firmicutes; c: Clostridia; o: Clostridiales; f: Clostridiaceae; g:; s: | 836 |
| 553150 | 15 | 0.238095238 | k: Bacteria; p: Firmicutes; c: Clostridia; o: Clostridiales; f: Lachnospiraceae; | 837 |
| | | | g: Coprococcus; s: | |
| 555547 | 17 | 0.26984127 | k: Bacteria; p: Firmicutes; c: Clostridia; o: Clostridiales; f: Christensenellaceae; | 838 |
| | | | g:; s: | |
| 556240 | 5 | 0.079365079 | k: Bacteria; p: Firmicutes; c: Clostridia; o: Clostridiales; f: Lachnospiraceae; | 839 |
| | | | g: Coprococcus; s: | |
| 556835 | 13 | 0.206349206 | k: Bacteria; p: Firmicutes; c: Clostridia; o: Clostridiales; f: Veillonellaceae; | 840 |
| | | | g: Phascolarctobacterium; s: | |
| 559204 | 2 | 0.031746032 | k: Bacteria; p: Proteobacteria; c: Gammaproteobacteria; o: Enterobacteriales; | 841 |
| | | | f: Enterobacteriaceae; g:; s: | |
| 562244 | 4 | 0.063492063 | k: Bacteria; p: Proteobacteria; c: Betaproteobacteria; o: Burkholderiales; | 842 |
| | | | f: Alcaligenaceae; g: Sutterella; s: | |
| 562410 | 8 | 0.126984127 | k: Bacteria; p: Firmicutes; c: Clostridia; o: Clostridiales; f: Christensenellaceae; | 843 |
| | | | g:; s: | |
| 564334 | 1 | 0.015873016 | k: Bacteria; p: Firmicutes; c: Clostridia; o: Clostridiales; f: Ruminococcaceae; | 844 |
| | | | g: Oscillospira; s: | |
| 566976 | 23 | 0.365079365 | k: Bacteria; p: Proteobacteria; c: Gammaproteobacteria; o: Enterobacteriales; | 845 |
| | | | f: Enterobacteriaceae; g:; s: | |
| 571242 | 5 | 0.079365079 | k: Bacteria; p: Firmicutes; c: Clostridia; o: Clostridiales; f: Ruminococcaceae; | 846 |
| | | | g: Ruminococcus; s: | |
| 574122 | 5 | 0.079365079 | k: Bacteria; p: Firmicutes; c: Clostridia; o: Clostridiales; f: Ruminococcaceae; | 847 |
| | | | g: Oscillospira; s: | |
| 575041 | 6 | 0.095238095 | k: Bacteria; p: Bacteroidetes; c: Bacteroidia; o: Bacteroidales; f: Rikenellaceae; | 848 |
| | | | g:; s: | |
| 578511 | 3 | 0.047619048 | k: Bacteria; p: Firmicutes; c: Clostridia; o: Clostridiales; f: Lachnospiraceae; | 849 |
| | | | g: Coprococcus; s: | |
| 579244 | 3 | 0.047619048 | k: Bacteria; p: Firmicutes; c: Clostridia; o: Clostridiales; f: Ruminococcaceae; | 850 |
| | | | g: Oscillospira; s: | |
| 581265 | 1 | 0.015873016 | k: Bacteria; p: Firmicutes; c: Clostridia; o: Clostridiales; f: Ruminococcaceae; | 851 |
| | | | g: Oscillospira; s: | |
| 584978 | 19 | 0.301587302 | k: Bacteria; p: Firmicutes; c: Clostridia; o: Clostridiales; f: Ruminococcaceae; | 852 |
| | | | g: Ruminococcus; s: | |
| 585227 | 1 | 0.015873016 | k: Bacteria; p: Firmicutes; c: Clostridia; o: Clostridiales; f: Ruminococcaceae; | 853 |
| | | | g: Oscillospira; s: | |
| 585989 | 4 | 0.063492063 | k: Bacteria; p: Firmicutes; c: Clostridia; o: Clostridiales; f: Veillonellaceae; | 854 |
| | | | g: Phascolarctobacterium; s: | |
| 586453 | 19 | 0.301587302 | k: Bacteria; p: Firmicutes; c: Clostridia; o: Clostridiales; f: Christensenellaceae; | 855 |
| | | | g:; s: | |
| 589076 | 4 | 0.063492063 | k: Bacteria; p: Firmicutes; c: Clostridia; o: Clostridiales; f: Ruminococcaceae; | 856 |
| | | | g: Oscillospira; s: | |
| 591439 | 10 | 0.158730159 | k: Bacteria; p: Firmicutes; c: Clostridia; o: Clostridiales; f: [Mogibacteriaceae]; | 857 |
| | | | g:; s: | |
| 591540 | 7 | 0.111111111 | k: Bacteria; p: Firmicutes; c: Clostridia; o: Clostridiales; f: Lachnospiraceae; | 858 |
| | | | g: Coprococcus; s: | |
| 593686 | 3 | 0.047619048 | k: Bacteria; p: Firmicutes; c: Clostridia; o: Clostridiales; f: Lachnospiraceae; | 859 |
| | | | g: Coprococcus; s: | |
| 608244 | 5 | 0.079365079 | k: Bacteria; p: Firmicutes; c: Clostridia; o: Clostridiales; f: Ruminococcaceae; | 860 |
| | | | g: Ruminococcus; s: | |
| 622303 | 2 | 0.031746032 | k: Bacteria; p: Firmicutes; c: Clostridia; o: Clostridiales; f: Clostridiaceae; | 861 |
| | | | g: Clostridium; s: | |
| 644244 | 3 | 0.047619048 | k: Bacteria; p: Firmicutes; c: Clostridia; o: Clostridiales; f: Christensenellaceae; | 862 |
| | | | g:; s: | |
| 663500 | 2 | 0.031746032 | k: Bacteria; p: Firmicutes; c: Clostridia; o: Clostridiales; f: Veillonellaceae; | 863 |
| | | | g: Phascolarctobacterium; s: | |
| 681779 | 2 | 0.031746032 | k: Bacteria; p: Proteobacteria; c: Gammaproteobacteria; o: Enterobacteriales; | 864 |
| | | | f: Enterobacteriaceae; g:; s: | |
| 686711 | 3 | 0.047619048 | k: Bacteria; p: Firmicutes; c: Clostridia; o: Clostridiales; f: Christensenellaceae; | 865 |
| | | | g:; s: | |
| 686972 | 1 | 0.015873016 | k: Bacteria; p: Proteobacteria; c: Gammaproteobacteria; o: Enterobacteriales; | 866 |
| | | | f: Enterobacteriaceae; g:; s: | |
| 687940 | 1 | 0.015873016 | k: Bacteria; p: Proteobacteria; c: Gammaproteobacteria; o: Enterobacteriales; | 867 |
| | | | f: Enterobacteriaceae; g: Enterobacter; s: arachidis | |
| 691423 | 1 | 0.015873016 | k: Bacteria; p: Proteobacteria; c: Gammaproteobacteria; o: Enterobacteriales; | 868 |
| | | | f: Enterobacteriaceae; g:; s: | |
| 708285 | 20 | 0.317460317 | k: Bacteria; p: Firmicutes; c: Clostridia; o: Clostridiales; f: Clostridiaceae; g:; s: | 869 |
| 731422 | 3 | 0.047619048 | k: Bacteria; p: Firmicutes; c: Clostridia; o: Clostridiales; f: Veillonellaceae; | 870 |
| | | | g: Phascolarctobacterium; s: | |
| 740158 | 3 | 0.047619048 | k: Bacteria; p: Firmicutes; c: Clostridia; o: Clostridiales; f: Veillonellaceae; | 871 |
| | | | g: Phascolarctobacterium; s: | |
| 742358 | 1 | 0.015873016 | k: Bacteria; p: Actinobacteria; c: Coriobacteriia; o: Coriobacteriales; | 872 |
| | | | f: Coriobacteriaceae; g:; s: | |
| 743082 | 2 | 0.031746032 | k: Bacteria; p: Firmicutes; c: Clostridia; o: Clostridiales; f: Clostridiaceae; g:; s: | 873 |
| 760594 | 3 | 0.047619048 | k: Bacteria; p: Firmicutes; c: Clostridia; o: Clostridiales; f: Ruminococcaceae; | 874 |
| | | | g: Ruminococcus; s: | |
| 766768 | 1 | 0.015873016 | k: Bacteria; p: Firmicutes; c: Bacilli; o: Lactobacillales; f: Enterococcaceae; | 875 |
| | | | g: Enterococcus; s: | |
| 772282 | 3 | 0.047619048 | k: Bacteria; p: Bacteroidetes; c: Bacteroidia; o: Bacteroidales; f: Rikenellaceae; | 876 |
| | | | g:; s: | |
| 786708 | 3 | 0.047619048 | k: Bacteria; p: Proteobacteria; c: Gammaproteobacteria; o: Enterobacteriales; | 877 |
| | | | f: Enterobacteriaceae; g:; s: | |
| 790466 | 1 | 0.015873016 | k: Bacteria; p: Firmicutes; c: Clostridia; o: Clostridiales; f: [Mogibacteriaceae]; | 878 |
| | | | g:; s: | |
| 797229 | 1 | 0.015873016 | k: Bacteria; p: Proteobacteria; c: Gammaproteobacteria; o: Enterobacteriales; | 879 |
| | | | f: Enterobacteriaceae; g:; s: | |
| 798581 | 3 | 0.047619048 | k: Bacteria; p: Firmicutes; c: Clostridia; o: Clostridiales; f: Ruminococcaceae; | 880 |
| | | | g: Ruminococcus; s: bromii | |
| 801210 | 1 | 0.015873016 | k: Bacteria; p: Proteobacteria; c: Betaproteobacteria; o: Burkholderiales; | 881 |
| | | | f: Alcaligenaceae; g: Sutterella; s: | |
| 808609 | 1 | 0.015873016 | k: Bacteria; p: Firmicutes; c: Clostridia; o: Clostridiales; f: Ruminococcaceae; | 882 |
| | | | g: Ruminococcus; s: | |
| 811453 | 2 | 0.031746032 | k: Bacteria; p: Firmicutes; c: Clostridia; o: Clostridiales; f: Ruminococcaceae; | 883 |
| | | | g: Oscillospira; s: | |
| 816299 | 1 | 0.015873016 | k: Bacteria; p: Actinobacteria; c: Coriobacteriia; o: Coriobacteriales; | 884 |
| | | | f: Coriobacteriaceae; g:; s: | |
| 818516 | 1 | 0.015873016 | k: Bacteria; p: Firmicutes; c: Clostridia; o: Clostridiales; f: Clostridiaceae; | 885 |
| | | | g: Clostridium; s: botulinum | |
| 823634 | 6 | 0.095238095 | k: Bacteria; p: Firmicutes; c: Clostridia; o: Clostridiales; f: Ruminococcaceae; | 886 |
| | | | g: Ruminococcus; s: | |
| 828776 | 1 | 0.015873016 | k: Bacteria; p: Firmicutes; c: Clostridia; o: Clostridiales; f: Lachnospiraceae; | 887 |
| | | | g: Coprococcus; s: | |
| 832089 | 10 | 0.158730159 | k: Bacteria; p: Firmicutes; c: Clostridia; o: Clostridiales; f: [Mogibacteriaceae]; | 888 |
| | | | g:; s: | |
| 835346 | 1 | 0.015873016 | k: Bacteria; p: Proteobacteria; c: Gammaproteobacteria; o: Enterobacteriales; | 889 |
| | | | f: Enterobacteriaceae; g: Erwinia; s: | |
| 835771 | 5 | 0.079365079 | k: Bacteria; p: Proteobacteria; c: Gammaproteobacteria; o: Enterobacteriales; | 890 |
| | | | f: Enterobacteriaceae; g: Plesiomonas; s: shigelloides | |
| 839964 | 2 | 0.031746032 | k: Bacteria; p: Firmicutes; c: Clostridia; o: Clostridiales; f: Ruminococcaceae; | 891 |
| | | | g: Oscillospira; s: | |
| 840279 | 1 | 0.015873016 | k: Bacteria; p: Bacteroidetes; c: Bacteroidia; o: Bacteroidales; | 892 |
| | | | f: [Barnesiellaceae]; g:; s: | |
| 841635 | 20 | 0.317460317 | k: Bacteria; p: Proteobacteria; c: Betaproteobacteria; o: Burkholderiales; | 893 |
| | | | f: Alcaligenaceae; g: Sutterella; s: | |
| 842596 | 45 | 0.714285714 | k: Bacteria; p: Firmicutes; c: Clostridia; o: Clostridiales; f: Lachnospiraceae; | 894 |
| | | | g: Coprococcus; s: | |
| 843553 | 4 | 0.063492063 | k: Bacteria; p: Firmicutes; c: Clostridia; o: Clostridiales; f: Lachnospiraceae; | 895 |
| | | | g: Lachnospira; s: | |
| 846798 | 8 | 0.126984127 | k: Bacteria; p: Bacteroidetes; c: Bacteroidia; o: Bacteroidales; | 896 |
| | | | f: [Barnesiellaceae]; g:; s: | |
| 847427 | 1 | 0.015873016 | k: Bacteria; p: Bacteroidetes; c: Bacteroidia; o: Bacteroidales; | 897 |
| | | | f: [Odoribacteraceae]; g: Odoribacter; s: | |
| 847670 | 15 | 0.238095238 | k: Bacteria; p: Firmicutes; c: Clostridia; o: Clostridiales; f: Clostridiaceae; g:; s: | 898 |
| 847711 | 1 | 0.015873016 | k: Bacteria; p: Firmicutes; c: Clostridia; o: Clostridiales; f: Christensenellaceae; | 899 |
| | | | g:; s: | |
| 847728 | 1 | 0.015873016 | k: Bacteria; p: Firmicutes; c: Clostridia; o: Clostridiales; f: Ruminococcaceae; | 900 |
| | | | g: Ruminococcus; s: | |
| 848669 | 11 | 0.174603175 | k: Bacteria; p: Proteobacteria; c: Betaproteobacteria; o: Burkholderiales; | 901 |
| | | | f: Alcaligenaceae; g: Sutterella; s: | |
| 848915 | 2 | 0.031746032 | k: Bacteria; p: Firmicutes; c: Clostridia; o: Clostridiales; f: Ruminococcaceae; | 902 |
| | | | g: Oscillospira; s: | |
| 916143 | 2 | 0.031746032 | k: Bacteria; p: Firmicutes; c: Clostridia; o: Clostridiales; f: Veillonellaceae; | 903 |
| | | | g: Phascolarctobacterium; s: | |
| 953855 | 18 | 0.285714286 | k: Bacteria; p: Bacteroidetes; c: Bacteroidia; o: Bacteroidales; f: Rikenellaceae; | 904 |
| | | | g:; s: | |
| 1010876 | 1 | 0.015873016 | k: Bacteria; p: Firmicutes; c: Clostridia; o: Clostridiales; f: Ruminococcaceae; | 905 |
| | | | g: Oscillospira; s: | |
| 1026524 | 1 | 0.015873016 | k: Bacteria; p: Firmicutes; c: Clostridia; o: Clostridiales; f: Ruminococcaceae; | 906 |
| | | | g: Oscillospira; s: | |
| 1029949 | 18 | 0.285714286 | k: Bacteria; p: Firmicutes; c: Clostridia; o: Clostridiales; f: Lachnospiraceae; | 907 |
| | | | g: Lachnospira; s: | |
| 1034960 | 2 | 0.031746032 | k: Bacteria; p: Actinobacteria; c: Coriobacteriia; o: Coriobacteriales; | 908 |
| | | | f: Coriobacteriaceae; g:; s: | |
| 1068836 | 2 | 0.031746032 | k: Bacteria; p: Firmicutes; c: Clostridia; o: Clostridiales; f: Ruminococcaceae; | 909 |
| | | | g: Ruminococcus; s: | |
| 1105343 | 6 | 0.095238095 | k: Bacteria; p: Firmicutes; c: Clostridia; o: Clostridiales; f: Clostridiaceae; | 910 |
| | | | g: Clostridium; s: | |
| 1105376 | 2 | 0.031746032 | k: Bacteria; p: Proteobacteria; c: Betaproteobacteria; o: Burkholderiales; | 911 |
| | | | f: Alcaligenaceae; g: Sutterella; s: | |
| 1106006 | 1 | 0.015873016 | k: Bacteria; p: Firmicutes; c: Clostridia; o: Clostridiales; f: Ruminococcaceae; | 912 |
| | | | g: Ruminococcus; s: | |
| 1106362 | 1 | 0.015873016 | k: Bacteria; p: Firmicutes; c: Clostridia; o: Clostridiales; f: Clostridiaceae; | 913 |
| | | | g: Clostridium; s: | |
| 1108470 | 2 | 0.031746032 | k: Bacteria; p: Firmicutes; c: Clostridia; o: Clostridiales; f: Ruminococcaceae; | 914 |
| | | | g: Ruminococcus; s: | |
| 1108656 | 2 | 0.031746032 | k: Bacteria; p: Proteobacteria; c: Gammaproteobacteria; o: Enterobacteriales; | 915 |
| | | | f: Enterobacteriaceae; g:; s: | |
| 1108745 | 3 | 0.047619048 | k: Bacteria; p: Firmicutes; c: Clostridia; o: Clostridiales; f: [Mogibacteriaceae]; | 916 |
| | | | g:; s: | |
| 1112762 | 2 | 0.031746032 | k: Bacteria; p: Firmicutes; c: Clostridia; o: Clostridiales; f: Ruminococcaceae; | 917 |
| | | | g: Oscillospira; s: | |
| 1123070 | 1 | 0.015873016 | k: Bacteria; p: Firmicutes; c: Clostridia; o: Clostridiales; f: Ruminococcaceae; | 918 |
| | | | g: Ruminococcus; s: | |
| 1128398 | 2 | 0.031746032 | k: Bacteria; p: Proteobacteria; c: Gammaproteobacteria; o: Enterobacteriales; | 919 |
| | | | f: Enterobacteriaceae; g:; s: | |
| 1129461 | 1 | 0.015873016 | k: Bacteria; p: Firmicutes; c: Bacilli; o: Lactobacillales; f: Enterococcaceae; | 920 |
| | | | g: Enterococcus; s: haemoperoxidus | |
| 1135616 | 2 | 0.031746032 | k: Bacteria; p: Firmicutes; c: Bacilli; o: Lactobacillales; f: Enterococcaceae; | 921 |
| | | | g: Enterococcus; s: | |
| 1145098 | 4 | 0.063492063 | k: Bacteria; p: Firmicutes; c: Clostridia; o: Clostridiales; f: Lachnospiraceae; | 922 |
| | | | g: Ruminococcus; s: gauvreauii | |
| 1503693 | 1 | 0.015873016 | k: Bacteria; p: Firmicutes; c: Clostridia; o: Clostridiales; f: Clostridiaceae; g:; s: | 923 |
| 1584173 | 3 | 0.047619048 | k: Bacteria; p: Bacteroidetes; c: Bacteroidia; o: Bacteroidales; | 924 |
| | | | f: [Barnesiellaceae]; g:; s: | |
| 1602307 | 17 | 0.26984127 | k: Bacteria; p: Proteobacteria; c: Betaproteobacteria; o: Burkholderiales; | 925 |
| | | | f: Alcaligenaceae; g: Sutterella; s: | |
| 1624383 | 24 | 0.380952381 | k: Bacteria; p: Firmicutes; c: Clostridia; o: Clostridiales; f: Lachnospiraceae; | 926 |
| | | | g: Lachnospira; s: | |
| 1646183 | 1 | 0.015873016 | k: Bacteria; p: Actinobacteria; c: Coriobacteriia; o: Coriobacteriales; | 927 |
| | | | f: Coriobacteriaceae; g:; s: | |
| 1657484 | 1 | 0.015873016 | k: Bacteria; p: Firmicutes; c: Clostridia; o: Clostridiales; f: Ruminococcaceae; | 928 |
| | | | g: Ruminococcus; s: | |
| 1663575 | 6 | 0.095238095 | k: Bacteria; p: Proteobacteria; c: Gammaproteobacteria; o: Enterobacteriales; | 929 |
| | | | f: Enterobacteriaceae; g:; s: | |
| 1719314 | 1 | 0.015873016 | k: Bacteria; p: Firmicutes; c: Clostridia; o: Clostridiales; f: Ruminococcaceae; | 930 |
| | | | g: Faecalibacterium; s: prausnitzii | |
| 1726426 | 1 | 0.015873016 | k: Bacteria; p: Proteobacteria; c: Gammaproteobacteria; o: Enterobacteriales; | 931 |
| | | | f: Enterobacteriaceae; g: Serratia; s: | |
| 1756274 | 1 | 0.015873016 | k: Bacteria; p: Firmicutes; c: Bacilli; o: Lactobacillales; f: Enterococcaceae; | 932 |
| | | | g: Enterococcus; s: | |
| 1808742 | 2 | 0.031746032 | k: Bacteria; p: Firmicutes; c: Clostridia; o: Clostridiales; f: Ruminococcaceae; | 933 |
| | | | g: Faecalibacterium; s: prausnitzii | |
| 1811927 | 51 | 0.80952381 | k: Bacteria; p: Actinobacteria; c: Coriobacteriia; o: Coriobacteriales; | 934 |
| | | | f: Coriobacteriaceae; g: Collinsella; s: aerofaciens | |
| 1820513 | 9 | 0.142857143 | k: Bacteria; p: Proteobacteria; c: Betaproteobacteria; o: Burkholderiales; | 935 |
| | | | f: Alcaligenaceae; g: Sutterella; s: | |
| 1855954 | 1 | 0.015873016 | k: Bacteria; p: Firmicutes; c: Clostridia; o: Clostridiales; f: Clostridiaceae; | 936 |
| | | | g: Clostridium; s: | |
| 1910658 | 24 | 0.380952381 | k: Bacteria; p: Bacteroidetes; c: Bacteroidia; o: Bacteroidales; | 937 |
| | | | f: [Barnesiellaceae]; g:; s: | |
| 1943669 | 3 | 0.047619048 | k: Bacteria; p: Firmicutes; c: Clostridia; o: Clostridiales; f: Ruminococcaceae; | 938 |
| | | | g: Faecalibacterium; s: prausnitzii | |
| 1974536 | 2 | 0.031746032 | k: Bacteria; p: Proteobacteria; c: Betaproteobacteria; o: Burkholderiales; | 939 |
| | | | f: Alcaligenaceae; g: Sutterella; s: | |
| 2065341 | 2 | 0.031746032 | k: Bacteria; p: Firmicutes; c: Clostridia; o: Clostridiales; f: Lachnospiraceae; | 940 |
| | | | g: Coprococcus; s: | |
| 2127939 | 2 | 0.031746032 | k: Bacteria; p: Actinobacteria; c: Coriobacteriia; o: Coriobacteriales; | 941 |
| | | | f: Coriobacteriaceae; g:; s: | |
| 2196877 | 2 | 0.031746032 | k: Bacteria; p: Firmicutes; c: Clostridia; o: Clostridiales; f: Ruminococcaceae; | 942 |
| | | | g: Oscillospira; s: | |
| 2201995 | 28 | 0.444444444 | k: Bacteria; p: Proteobacteria; c: Betaproteobacteria; o: Burkholderiales; | 943 |
| | | | f: Alcaligenaceae; g: Sutterella; s: | |
| 2203165 | 4 | 0.063492063 | k: Bacteria; p: Firmicutes; c: Clostridia; o: Clostridiales; f: Ruminococcaceae; | 944 |
| | | | g: Oscillospira; s: | |
| 2250345 | 9 | 0.142857143 | k: Bacteria; p: Firmicutes; c: Clostridia; o: Clostridiales; f: Lachnospiraceae; | 945 |
| | | | g: Clostridium; s: hathewayi | |
| 2256425 | 12 | 0.19047619 | k: Bacteria; p: Firmicutes; c: Clostridia; o: Clostridiales; f: Christensenellaceae; | 946 |
| | | | g:; s: | |
| 2307779 | 47 | 0.746031746 | k: Bacteria; p: Firmicutes; c: Clostridia; o: Clostridiales; f: Ruminococcaceae; | 947 |
| | | | g: Oscillospira; s: | |
| 2313540 | 23 | 0.365079365 | k: Bacteria; p: Firmicutes; c: Clostridia; o: Clostridiales; f: Lachnospiraceae; | 948 |
| | | | g: Lachnospira; s: | |
| 2318202 | 7 | 0.111111111 | k: Bacteria; p: Firmicutes; c: Clostridia; o: Clostridiales; f: Ruminococcaceae; | 949 |
| | | | g: Oscillospira; s: | |
| 2365690 | 38 | 0.603174603 | k: Bacteria; p: Firmicutes; c: Clostridia; o: Clostridiales; f: Ruminococcaceae; | 950 |
| | | | g: Faecalibacterium; s: prausnitzii | |
| 2423305 | 7 | 0.111111111 | k: Bacteria; p: Actinobacteria; c: Coriobacteriia; o: Coriobacteriales; | 951 |
| | | | f: Coriobacteriaceae; g:; s: | |
| 2442706 | 40 | 0.634920635 | k: Bacteria; p: Firmicutes; c: Clostridia; o: Clostridiales; f: Christensenellaceae; | 952 |
| | | | g:; s: | |
| 2496050 | 2 | 0.031746032 | k: Bacteria; p: Firmicutes; c: Clostridia; o: Clostridiales; f: Ruminococcaceae; | 953 |
| | | | g: Ruminococcus; s: | |
| 2532909 | 4 | 0.063492063 | k: Bacteria; p: Firmicutes; c: Clostridia; o: Clostridiales; f: Clostridiaceae; g:; s: | 954 |
| 2544615 | 63 | 1 | k: Bacteria; p: Firmicutes; c: Clostridia; o: Clostridiales; f: Ruminococcaceae; | 955 |
| | | | g: Faecalibacterium; s: prausnitzii | |
| 2582263 | 1 | 0.015873016 | k: Bacteria; p: Proteobacteria; c: Gammaproteobacteria; o: Enterobacteriales; | 956 |
| | | | f: Enterobacteriaceae; g:; s: | |
| 2617854 | 38 | 0.603174603 | k: Bacteria; p: Bacteroidetes; c: Bacteroidia; o: Bacteroidales; f: Rikenellaceae; | 957 |
| | | | g:; s: | |
| 2642538 | 5 | 0.079365079 | k: Bacteria; p: Bacteroidetes; c: Bacteroidia; o: Bacteroidales; | 958 |
| | | | f: [Odoribacteraceae]; g: Odoribacter; s: | |
| 2710761 | 1 | 0.015873016 | k: Bacteria; p: Firmicutes; c: Clostridia; o: Clostridiales; f: Veillonellaceae; | 959 |
| | | | g: Phascolarctobacterium; s: | |
| 2740950 | 1 | 0.015873016 | k: Bacteria; p: Firmicutes; c: Clostridia; o: Clostridiales; f: Lachnospiraceae; | 960 |
| | | | g: Coprococcus; s: | |
| 2749126 | 2 | 0.031746032 | k: Bacteria; p: Proteobacteria; c: Gammaproteobacteria; o: Enterobacteriales; | 961 |
| | | | f: Enterobacteriaceae; g:; s: | |
| 2781880 | 8 | 0.126984127 | k: Bacteria; p: Firmicutes; c: Clostridia; o: Clostridiales; f: Ruminococcaceae; | 962 |
| | | | g: Oscillospira; s: | |
| 2801994 | 1 | 0.015873016 | k: Bacteria; p: Firmicutes; c: Clostridia; o: Clostridiales; f: Veillonellaceae; | 963 |
| | | | g: Phascolarctobacterium; s: | |
| 2840201 | 35 | 0.555555556 | k: Bacteria; p: Firmicutes; c: Clostridia; o: Clostridiales; f: Clostridiaceae; | 964 |
| | | | g: Clostridium; s: | |
| 2943548 | 1 | 0.015873016 | k: Bacteria; p: Firmicutes; c: Clostridia; o: Clostridiales; f: Ruminococcaceae; | 965 |
| | | | g: Ruminococcus; s: | |
| 2949920 | 2 | 0.031746032 | k: Bacteria; p: Firmicutes; c: Clostridia; o: Clostridiales; f: Clostridiaceae; g:; s: | 966 |
| 2963287 | 3 | 0.047619048 | k: Bacteria; p: Firmicutes; c: Clostridia; o: Clostridiales; f: Christensenellaceae; | 967 |
| | | | g:; s: | |
| 2978122 | 8 | 0.126984127 | k: Bacteria; p: Firmicutes; c: Clostridia; o: Clostridiales; f: Ruminococcaceae; | 968 |
| | | | g: Oscillospira; s: | |
| 2979308 | 43 | 0.682539683 | k: Bacteria; p: Firmicutes; c: Clostridia; o: Clostridiales; f: Ruminococcaceae; | 969 |
| | | | g: Ruminococcus; s: | |
| 2985051 | 2 | 0.031746032 | k: Bacteria; p: Actinobacteria; c: Coriobacteriia; o: Coriobacteriales; | 970 |
| | | | f: Coriobacteriaceae; g:; s: | |
| 3015509 | 14 | 0.222222222 | k: Bacteria; p: Firmicutes; c: Clostridia; o: Clostridiales; f: Ruminococcaceae; | 971 |
| | | | g: Ruminococcus; s: | |
| 3016478 | 6 | 0.095238095 | k: Bacteria; p: Firmicutes; c: Clostridia; o: Clostridiales; f: Ruminococcaceae; | 972 |
| | | | g: Ruminococcus; s: | |
| 3023610 | 21 | 0.333333333 | k: Bacteria; p: Firmicutes; c: Clostridia; o: Clostridiales; f: Lachnospiraceae; | 973 |
| | | | g: Lachnospira; s: | |
| 3028318 | 7 | 0.111111111 | k: Bacteria; p: Bacteroidetes; c: Bacteroidia; o: Bacteroidales; f: Rikenellaceae; | 974 |
| | | | g:; s: | |
| 3090117 | 2 | 0.031746032 | k: Bacteria; p: Bacteroidetes; c: Bacteroidia; o: Bacteroidales; | 975 |
| | | | f: [Barnesiellaceae]; g:; s: | |
| 3123133 | 4 | 0.063492063 | k: Bacteria; p: Proteobacteria; c: Betaproteobacteria; o: Burkholderiales; | 976 |
| | | | f: Alcaligenaceae; g: Sutterella; s: | |
| 3138798 | 24 | 0.380952381 | k: Bacteria; p: Firmicutes; c: Clostridia; o: Clostridiales; f: Veillonellaceae; | 977 |
| | | | g: Phascolarctobacterium; s: | |
| 3141342 | 2 | 0.031746032 | k: Bacteria; p: Firmicutes; c: Clostridia; o: Clostridiales; f: Lachnospiraceae; | 978 |
| | | | g: Coprococcus; s: | |
| 3160267 | 8 | 0.126984127 | k: Bacteria; p: Bacteroidetes; c: Bacteroidia; o: Bacteroidales; | 979 |
| | | | f: [Barnesiellaceae]; g:; s: | |
| 3190479 | 2 | 0.031746032 | k: Bacteria; p: Firmicutes; c: Clostridia; o: Clostridiales; f: Christensenellaceae; | 980 |
| | | | g:; s: | |
| 3235048 | 7 | 0.111111111 | k: Bacteria; p: Firmicutes; c: Clostridia; o: Clostridiales; f: Ruminococcaceae; | 981 |
| | | | g: Ruminococcus; s: | |
| 3257594 | 1 | 0.015873016 | k: Bacteria; p: Firmicutes; c: Clostridia; o: Clostridiales; f: Ruminococcaceae; | 982 |
| | | | g: Oscillospira; s: | |
| 3302039 | 1 | 0.015873016 | k: Bacteria; p: Firmicutes; c: Clostridia; o: Clostridiales; f: Ruminococcaceae; | 983 |
| | | | g: Oscillospira; s: | |
| 3325984 | 34 | 0.53968254 | k: Bacteria; p: Firmicutes; c: Clostridia; o: Clostridiales; f: Lachnospiraceae; | 984 |
| | | | g: Coprococcus; s: | |
| 3369303 | 2 | 0.031746032 | k: Bacteria; p: Firmicutes; c: Clostridia; o: Clostridiales; f: [Mogibacteriaceae]; | 985 |
| | | | g:; s: | |
| 3424188 | 1 | 0.015873016 | k: Bacteria; p: Firmicutes; c: Clostridia; o: Clostridiales; f: Lachnospiraceae; | 986 |
| | | | g: Lachnospira; s: | |
| 3430935 | 6 | 0.095238095 | k: Bacteria; p: Firmicutes; c: Clostridia; o: Clostridiales; f: Ruminococcaceae; | 987 |
| | | | g: Faecalibacterium; s: prausnitzii | |
| 3443092 | 13 | 0.206349206 | k: Bacteria; p: Firmicutes; c: Clostridia; o: Clostridiales; f: Ruminococcaceae; | 988 |
| | | | g: Faecalibacterium; s: prausnitzii | |
| 3505877 | 2 | 0.031746032 | k: Bacteria; p: Firmicutes; c: Clostridia; o: Clostridiales; f: Ruminococcaceae; | 989 |
| | | | g: Faecalibacterium; s: prausnitzii | |
| 3507351 | 6 | 0.095238095 | k: Bacteria; p: Firmicutes; c: Clostridia; o: Clostridiales; f: Veillonellaceae; | 990 |
| | | | g: Phascolarctobacterium; s: | |
| 3522002 | 3 | 0.047619048 | k: Bacteria; p: Firmicutes; c: Clostridia; o: Clostridiales; f: [Mogibacteriaceae]; | 991 |
| | | | g:; s: | |
| 3568684 | 2 | 0.031746032 | k: Bacteria; p: Firmicutes; c: Clostridia; o: Clostridiales; f: Ruminococcaceae; | 992 |
| | | | g: Oscillospira; s: | |
| 3589845 | 3 | 0.047619048 | k: Bacteria; p: Firmicutes; c: Clostridia; o: Clostridiales; f: Ruminococcaceae; | 993 |
| | | | g: Ruminococcus; s: | |
| 3613745 | 7 | 0.111111111 | k: Bacteria; p: Firmicutes; c: Clostridia; o: Clostridiales; f: Lachnospiraceae; | 994 |
| | | | g: Lachnospira; s: | |
| 3648884 | 2 | 0.031746032 | k: Bacteria; p: Firmicutes; c: Clostridia; o: Clostridiales; f: Lachnospiraceae; | 995 |
| | | | g: Coprococcus; s: | |
| 3734841 | 1 | 0.015873016 | k: Bacteria; p: Firmicutes; c: Clostridia; o: Clostridiales; f: Clostridiaceae; g:; s: | 996 |
| 3805726 | 4 | 0.063492063 | k: Bacteria; p: Firmicutes; c: Clostridia; o: Clostridiales; f: [Mogibacteriaceae]; | 997 |
| | | | g:; s: | |
| 3903651 | 54 | 0.857142857 | k: Bacteria; p: Firmicutes; c: Clostridia; o: Clostridiales; f: Ruminococcaceae; | 998 |
| | | | g: Oscillospira; s: | |
| 3931537 | 41 | 0.650793651 | k: Bacteria; p: Firmicutes; c: Clostridia; o: Clostridiales; f: Clostridiaceae; | 999 |
| | | | g: Clostridium; s: | |
| 3991008 | 3 | 0.047619048 | k: Bacteria; p: Firmicutes; c: Clostridia; o: Clostridiales; f: Ruminococcaceae; | 1000 |
| | | | g: Faecalibacterium; s: prausnitzii | |
| 4035247 | 23 | 0.365079365 | k: Bacteria; p: Bacteroidetes; c: Bacteroidia; o: Bacteroidales; f: Rikenellaceae; | 1001 |
| | | | g:; s: | |
| 4039230 | 25 | 0.396825397 | k: Bacteria; p: Firmicutes; c: Clostridia; o: Clostridiales; f: Lachnospiraceae; | 1002 |
| | | | g: Lachnospira; s: | |
| 4060645 | 7 | 0.111111111 | k: Bacteria; p: Firmicutes; c: Clostridia; o: Clostridiales; f: Lachnospiraceae; | 1003 |
| | | | g: Lachnospira; s: | |
| 4093791 | 1 | 0.015873016 | k: Bacteria; p: Firmicutes; c: Clostridia; o: Clostridiales; f: [Mogibacteriaceae]; | 1004 |
| | | | g:; s: | |
| 4095596 | 56 | 0.888888889 | k: Bacteria; p: Proteobacteria; c: Betaproteobacteria; o: Burkholderiales; | 1005 |
| | | | f: Alcaligenaceae; g: Sutterella; s: | |
| 4111715 | 7 | 0.111111111 | k: Bacteria; p: Proteobacteria; c: Gammaproteobacteria; o: Enterobacteriales; | 1006 |
| | | | f: Enterobacteriaceae; g:; s: | |
| 4120404 | 7 | 0.111111111 | k: Bacteria; p: Proteobacteria; c: Betaproteobacteria; o: Burkholderiales; | 1007 |
| | | | f: Alcaligenaceae; g: Sutterella; s: | |
| 4142052 | 1 | 0.015873016 | k: Bacteria; p: Proteobacteria; c: Betaproteobacteria; o: Burkholderiales; | 1008 |
| | | | f: Alcaligenaceae; g: Sutterella; s: | |
| 4194837 | 13 | 0.206349206 | k: Bacteria; p: Firmicutes; c: Clostridia; o: Clostridiales; f: Lachnospiraceae; | 1009 |
| | | | g: Coprococcus; s: | |
| 4217226 | 1 | 0.015873016 | k: Bacteria; p: Proteobacteria; c: Betaproteobacteria; o: Burkholderiales; | 1010 |
| | | | f: Alcaligenaceae; g: Sutterella; s: | |
| 4238179 | 1 | 0.015873016 | k: Bacteria; p: Firmicutes; c: Clostridia; o: Clostridiales; f: Clostridiaceae; g:; s: | 1011 |
| 4282363 | 1 | 0.015873016 | k: Bacteria; p: Firmicutes; c: Clostridia; o: Clostridiales; f: Ruminococcaceae; | 1012 |
| | | | g: Faecalibacterium; s: prausnitzii | |
| 4289858 | 1 | 0.015873016 | k: Bacteria; p: Firmicutes; c: Clostridia; o: Clostridiales; f: Clostridiaceae; g:; s: | 1013 |
| 4290144 | 1 | 0.015873016 | k: Bacteria; p: Firmicutes; c: Bacilli; o: Lactobacillales; f: Enterococcaceae; | 1014 |
| | | | g: Enterococcus; s: | |
| 4296216 | 26 | 0.412698413 | k: Bacteria; p: Firmicutes; c: Clostridia; o: Clostridiales; f: Ruminococcaceae; | 1015 |
| | | | g: Ruminococcus; s: | |
| 4296764 | 3 | 0.047619048 | k: Bacteria; p: Firmicutes; c: Clostridia; o: Clostridiales; f: Christensenellaceae; | 1016 |
| | | | g:; s: | |
| 4296772 | 1 | 0.015873016 | k: Bacteria; p: Firmicutes; c: Clostridia; o: Clostridiales; f: Lachnospiraceae; | 1017 |
| | | | g: Coprococcus; s: | |
| 4303851 | 2 | 0.031746032 | k: Bacteria; p: Firmicutes; c: Clostridia; o: Clostridiales; f: Ruminococcaceae; | 1018 |
| | | | g: Ruminococcus; s: | |
| 4303855 | 1 | 0.015873016 | k: Bacteria; p: Firmicutes; c: Clostridia; o: Clostridiales; f: Ruminococcaceae; | 1019 |
| | | | g: Ruminococcus; s: | |
| 4304843 | 6 | 0.095238095 | k: Bacteria; p: Actinobacteria; c: Coriobacteriia; o: Coriobacteriales; | 1020 |
| | | | f: Coriobacteriaceae; g:; s: | |
| 4305261 | 2 | 0.031746032 | k: Bacteria; p: Firmicutes; c: Clostridia; o: Clostridiales; f: [Mogibacteriaceae]; | 1021 |
| | | | g:; s: | |
| 4308811 | 1 | 0.015873016 | k: Bacteria; p: Actinobacteria; c: Coriobacteriia; o: Coriobacteriales; | 1022 |
| | | | f: Coriobacteriaceae; g:; s: | |
| 4311621 | 7 | 0.111111111 | k: Bacteria; p: Firmicutes; c: Clostridia; o: Clostridiales; f: Veillonellaceae; | 1023 |
| | | | g: Phascolarctobacterium; s: | |
| 4315688 | 1 | 0.015873016 | k: Bacteria; p: Firmicutes; c: Clostridia; o: Clostridiales; f: Clostridiaceae; | 1024 |
| | | | g: Clostridium; s: celatum | |
| 4317896 | 1 | 0.015873016 | k: Bacteria; p: Firmicutes; c: Clostridia; o: Clostridiales; f: Ruminococcaceae; | 1025 |
| | | | g: Oscillospira; s: | |
| 4321292 | 2 | 0.031746032 | k: Bacteria; p: Proteobacteria; c: Gammaproteobacteria; o: Enterobacteriales; | 1026 |
| | | | f: Enterobacteriaceae; g: Proteus; s: | |
| 4325533 | 15 | 0.238095238 | k: Bacteria; p: Bacteroidetes; c: Bacteroidia; o: Bacteroidales; f: Rikenellaceae; | 1027 |
| | | | g:; s: | |
| 4325836 | 2 | 0.031746032 | k: Bacteria; p: Firmicutes; c: Clostridia; o: Clostridiales; f: Clostridiaceae; g:; s: | 1028 |
| 4326080 | 32 | 0.507936508 | k: Bacteria; p: Firmicutes; c: Clostridia; o: Clostridiales; f: Clostridiaceae; | 1029 |
| | | | g: Clostridium; s: | |
| 4326869 | 19 | 0.301587302 | k: Bacteria; p: Firmicutes; c: Clostridia; o: Clostridiales; f: Ruminococcaceae; | 1030 |
| | | | g: Ruminococcus; s: | |
| 4328189 | 3 | 0.047619048 | k: Bacteria; p: Proteobacteria; c: Gammaproteobacteria; o: Enterobacteriales; | 1031 |
| | | | f: Enterobacteriaceae; g: Serratia; s: | |
| 4331723 | 32 | 0.507936508 | k: Bacteria; p: Firmicutes; c: Clostridia; o: Clostridiales; f: Ruminococcaceae; | 1032 |
| | | | g: Ruminococcus; s: | |
| 4331760 | 16 | 0.253968254 | k: Bacteria; p: Bacteroidetes; c: Bacteroidia; o: Bacteroidales; f: Rikenellaceae; | 1033 |
| | | | g: Alistipes; s: indistinctus | |
| 4332078 | 11 | 0.174603175 | k: Bacteria; p: Firmicutes; c: Clostridia; o: Clostridiales; f: Clostridiaceae; g:; s: | 1034 |
| 4333020 | 1 | 0.015873016 | k: Bacteria; p: Proteobacteria; c: Gammaproteobacteria; o: Enterobacteriales; | 1035 |
| | | | f: Enterobacteriaceae; g:; s: | |
| 4335402 | 1 | 0.015873016 | k: Bacteria; p: Firmicutes; c: Clostridia; o: Clostridiales; f: Lachnospiraceae; | 1036 |
| | | | g: Coprococcus; s: | |
| 4336423 | 3 | 0.047619048 | k: Bacteria; p: Firmicutes; c: Clostridia; o: Clostridiales; f: Ruminococcaceae; | 1037 |
| | | | g: Faecalibacterium; s: prausnitzii | |
| 4336943 | 8 | 0.126984127 | k: Bacteria; p: Bacteroidetes; c: Bacteroidia; o: Bacteroidales; f: Rikenellaceae; | 1038 |
| | | | g:; s: | |
| 4337970 | 3 | 0.047619048 | k: Bacteria; p: Bacteroidetes; c: Bacteroidia; o: Bacteroidales; | 1039 |
| | | | f: [Barnesiellaceae]; g:; s: | |
| 4338624 | 7 | 0.111111111 | k: Bacteria; p: Proteobacteria; c: Betaproteobacteria; o: Burkholderiales; | 1040 |
| | | | f: Alcaligenaceae; g: Sutterella; s: | |
| 4339145 | 1 | 0.015873016 | k: Bacteria; p: Actinobacteria; c: Coriobacteriia; o: Coriobacteriales; | 1041 |
| | | | f: Coriobacteriaceae; g:; s: | |
| 4341497 | 1 | 0.015873016 | k: Bacteria; p: Proteobacteria; c: Betaproteobacteria; o: Burkholderiales; | 1042 |
| | | | f: Alcaligenaceae; g: Sutterella; s: | |
| 4349517 | 2 | 0.031746032 | k: Bacteria; p: Firmicutes; c: Clostridia; o: Clostridiales; f: Clostridiaceae; g:; s: | 1043 |
| 4353658 | 2 | 0.031746032 | k: Bacteria; p: Firmicutes; c: Clostridia; o: Clostridiales; f: Veillonellaceae; | 1044 |
| | | | g: Phascolarctobacterium; s: | |
| 4354477 | 33 | 0.523809524 | k: Bacteria; p: Proteobacteria; c: Gammaproteobacteria; o: Enterobacteriales; | 1045 |
| | | | f: Enterobacteriaceae; g:; s: | |
| 4356080 | 13 | 0.206349206 | k: Bacteria; p: Bacteroidetes; c: Bacteroidia; o: Bacteroidales; | 1046 |
| | | | f: [Barnesiellaceae]; g:; s: | |
| 4357223 | 2 | 0.031746032 | k: Bacteria; p: Firmicutes; c: Clostridia; o: Clostridiales; f: Ruminococcaceae; | 1047 |
| | | | g: Ruminococcus; s: | |
| 4359216 | 5 | 0.079365079 | k: Bacteria; p: Firmicutes; c: Clostridia; o: Clostridiales; f: Ruminococcaceae; | 1048 |
| | | | g: Faecalibacterium; s: prausnitzii | |
| 4361768 | 1 | 0.015873016 | k: Bacteria; p: Actinobacteria; c: Coriobacteriia; o: Coriobacteriales; | 1049 |
| | | | f: Coriobacteriaceae; g:; s: | |
| 4362724 | 21 | 0.333333333 | k: Bacteria; p: Firmicutes; c: Clostridia; o: Clostridiales; f: Ruminococcaceae; | 1050 |
| | | | g: Oscillospira; s: | |
| 4364469 | 2 | 0.031746032 | k: Bacteria; p: Proteobacteria; c: Gammaproteobacteria; o: Enterobacteriales; | 1051 |
| | | | f: Enterobacteriaceae; g: Brenneria; s: alni | |
| 4364747 | 38 | 0.603174603 | k: Bacteria; p: Firmicutes; c: Clostridia; o: Clostridiales; f: Clostridiaceae; g:; s: | 1052 |
| 4366089 | 1 | 0.015873016 | k: Bacteria; p: Firmicutes; c: Clostridia; o: Clostridiales; f: Ruminococcaceae; | 1053 |
| | | | g: Oscillospira; s: | |
| 4366834 | 1 | 0.015873016 | k: Bacteria; p: Proteobacteria; c: Betaproteobacteria; o: Burkholderiales; | 1054 |
| | | | f: Alcaligenaceae; g: Sutterella; s: | |
| 4370657 | 1 | 0.015873016 | k: Bacteria; p: Firmicutes; c: Clostridia; o: Clostridiales; f: Clostridiaceae; | 1055 |
| | | | g: Clostridium; s: perfringens | |
| 4371341 | 6 | 0.095238095 | k: Bacteria; p: Firmicutes; c: Clostridia; o: Clostridiales; f: Veillonellaceae; | 1056 |
| | | | g: Phascolarctobacterium; s: | |
| 4371724 | 1 | 0.015873016 | k: Bacteria; p: Firmicutes; c: Clostridia; o: Clostridiales; f: Ruminococcaceae; | 1057 |
| | | | g: Ruminococcus; s: | |
| 4371786 | 2 | 0.031746032 | k: Bacteria; p: Bacteroidetes; c: Bacteroidia; o: Bacteroidales; | 1058 |
| | | | f: [Barnesiellaceae]; g:; s: | |
| 4375000 | 2 | 0.031746032 | k: Bacteria; p: Proteobacteria; c: Gammaproteobacteria; o: Enterobacteriales; | 1059 |
| | | | f: Enterobacteriaceae; g:; s: | |
| 4379449 | 1 | 0.015873016 | k: Bacteria; p: Firmicutes; c: Erysipelotrichi; o: Erysipelotrichales; | 1060 |
| | | | f: Erysipelotrichaceae; g: Clostridium; s: saccharogumia | |
| 4381430 | 1 | 0.015873016 | k: Bacteria; p: Firmicutes; c: Clostridia; o: Clostridiales; f: Ruminococcaceae; | 1061 |
| | | | g: Faecalibacterium; s: prausnitzii | |
| 4381639 | 4 | 0.063492063 | k: Bacteria; p: Firmicutes; c: Clostridia; o: Clostridiales; f: Ruminococcaceae; | 1062 |
| | | | g: Ruminococcus; s: | |
| 4385756 | 1 | 0.015873016 | k: Bacteria; p: Firmicutes; c: Clostridia; o: Clostridiales; f: Clostridiaceae; g:; s: | 1063 |
| 4387208 | 1 | 0.015873016 | k: Bacteria; p: Firmicutes; c: Bacilli; o: Lactobacillales; f: Enterococcaceae; | 1064 |
| | | | g: Enterococcus; s: | |
| 4387344 | 6 | 0.095238095 | k: Bacteria; p: Firmicutes; c: Clostridia; o: Clostridiales; f: Ruminococcaceae; | 1065 |
| | | | g: Faecalibacterium; s: prausnitzii | |
| 4391009 | 2 | 0.031746032 | k: Bacteria; p: Proteobacteria; c: Betaproteobacteria; o: Burkholderiales; | 1066 |
| | | | f: Alcaligenaceae; g: Sutterella; s: | |
| 4391738 | 1 | 0.015873016 | k: Bacteria; p: Firmicutes; c: Bacilli; o: Lactobacillales; f: Enterococcaceae; | 1067 |
| | | | g: Enterococcus; s: | |
| 4393396 | 8 | 0.126984127 | k: Bacteria; p: Bacteroidetes; c: Bacteroidia; o: Bacteroidales; | 1068 |
| | | | f: [Barnesiellaceae]; g:; s: | |
| 4397092 | 2 | 0.031746032 | k: Bacteria; p: Actinobacteria; c: Coriobacteriia; o: Coriobacteriales; | 1069 |
| | | | f: Coriobacteriaceae; g:; s: | |
| 4400482 | 1 | 0.015873016 | k: Bacteria; p: Firmicutes; c: Clostridia; o: Clostridiales; f: Clostridiaceae; | 1070 |
| | | | g: Clostridium; s: butyricum | |
| 4401045 | 2 | 0.031746032 | k: Bacteria; p: Firmicutes; c: Clostridia; o: Clostridiales; f: Clostridiaceae; | 1071 |
| | | | g: Clostridium; s: | |
| 4402537 | 11 | 0.174603175 | k: Bacteria; p: Actinobacteria; c: Coriobacteriia; o: Coriobacteriales; | 1072 |
| | | | f: Coriobacteriaceae; g:; s: | |
| 4402605 | 1 | 0.015873016 | k: Bacteria; p: Firmicutes; c: Clostridia; o: Clostridiales; f: Christensenellaceae; | 1073 |
| | | | g:; s: | |
| 4403113 | 33 | 0.523809524 | k: Bacteria; p: Firmicutes; c: Clostridia; o: Clostridiales; f: Ruminococcaceae; | 1074 |
| | | | g: Faecalibacterium; s: prausnitzii | |
| 4403259 | 6 | 0.095238095 | k: Bacteria; p: Actinobacteria; c: Coriobacteriia; o: Coriobacteriales; | 1075 |
| | | | f: Coriobacteriaceae; g:; s: | |
| 4403632 | 53 | 0.841269841 | k: Bacteria; p: Firmicutes; c: Clostridia; o: Clostridiales; f: Lachnospiraceae; | 1076 |
| | | | g: Coprococcus; s: | |
| 4407939 | 5 | 0.079365079 | k: Bacteria; p: Proteobacteria; c: Gammaproteobacteria; o: Enterobacteriales; | 1077 |
| | | | f: Enterobacteriaceae; g:; s: | |
| 4410097 | 1 | 0.015873016 | k: Bacteria; p: Firmicutes; c: Clostridia; o: Clostridiales; f: Christensenellaceae; | 1078 |
| | | | g:; s: | |
| 4414821 | 1 | 0.015873016 | k: Bacteria; p: Firmicutes; c: Clostridia; o: Clostridiales; f: Ruminococcaceae; | 1079 |
| | | | g: Ruminococcus; s: | |
| 4416113 | 1 | 0.015873016 | k: Bacteria; p: Proteobacteria; c: Gammaproteobacteria; o: Enterobacteriales; | 1080 |
| | | | f: Enterobacteriaceae; g:; s: | |
| 4416646 | 29 | 0.46031746 | k: Bacteria; p: Firmicutes; c: Clostridia; o: Clostridiales; f: Ruminococcaceae; | 1081 |
| | | | g: Ruminococcus; s: | |
| 4416951 | 7 | 0.111111111 | k: Bacteria; p: Firmicutes; c: Clostridia; o: Clostridiales; f: Ruminococcaceae; | 1082 |
| | | | g: Ruminococcus; s: | |
| 4419621 | 1 | 0.015873016 | k: Bacteria; p: Proteobacteria; c: Betaproteobacteria; o: Burkholderiales; | 1083 |
| | | | f: Alcaligenaceae; g: Sutterella; s: | |
| 4419650 | 47 | 0.746031746 | k: Bacteria; p: Firmicutes; c: Clostridia; o: Clostridiales; f: Lachnospiraceae; | 1084 |
| | | | g: Coprococcus; s: | |
| 4421273 | 17 | 0.26984127 | k: Bacteria; p: Firmicutes; c: Clostridia; o: Clostridiales; f: Ruminococcaceae; | 1085 |
| | | | g: Oscillospira; s: | |
| 4424598 | 6 | 0.095238095 | k: Bacteria; p: Firmicutes; c: Clostridia; o: Clostridiales; f: Lachnospiraceae; | 1086 |
| | | | g: Lachnospira; s: | |
| 4425571 | 12 | 0.19047619 | k: Bacteria; p: Proteobacteria; c: Gammaproteobacteria; o: Enterobacteriales; | 1087 |
| | | | f: Enterobacteriaceae; g:; s: | |
| 4425669 | 5 | 0.079365079 | k: Bacteria; p: Firmicutes; c: Clostridia; o: Clostridiales; f: Lachnospiraceae; | 1088 |
| | | | g: Coprococcus; s: | |
| 4426249 | 1 | 0.015873016 | k: Bacteria; p: Firmicutes; c: Clostridia; o: Clostridiales; f: Ruminococcaceae; | 1089 |
| | | | g: Oscillospira; s: | |
| 4427459 | 12 | 0.19047619 | k: Bacteria; p: Firmicutes; c: Clostridia; o: Clostridiales; f: Ruminococcaceae; | 1090 |
| | | | g: Ruminococcus; s: | |
| 4428676 | 4 | 0.063492063 | k: Bacteria; p: Firmicutes; c: Clostridia; o: Clostridiales; f: Lachnospiraceae; | 1091 |
| | | | g: Coprococcus; s: | |
| 4429986 | 1 | 0.015873016 | k: Bacteria; p: Proteobacteria; c: Betaproteobacteria; o: Burkholderiales; | 1092 |
| | | | f: Alcaligenaceae; g: Sutterella; s: | |
| 4433274 | 1 | 0.015873016 | k: Bacteria; p: Proteobacteria; c: Gammaproteobacteria; o: Enterobacteriales; | 1093 |
| | | | f: Enterobacteriaceae; g:; s: | |
| 4434334 | 57 | 0.904761905 | k: Bacteria; p: Firmicutes; c: Clostridia; o: Clostridiales; f: Clostridiaceae; g:; s: | 1094 |
| 4437359 | 2 | 0.031746032 | k: Bacteria; p: Firmicutes; c: Clostridia; o: Clostridiales; f: Ruminococcaceae; | 1095 |
| | | | g: Oscillospira; s: | |
| 4439530 | 3 | 0.047619048 | k: Bacteria; p: Firmicutes; c: Clostridia; o: Clostridiales; f: Clostridiaceae; g:; s: | 1096 |
| 4440335 | 1 | 0.015873016 | k: Bacteria; p: Firmicutes; c: Clostridia; o: Clostridiales; f: Christensenellaceae; | 1097 |
| | | | g:; s: | |
| 4441081 | 2 | 0.031746032 | k: Bacteria; p: Actinobacteria; c: Coriobacteriia; o: Coriobacteriales; | 1098 |
| | | | f: Coriobacteriaceae; g:; s: | |
| 4443143 | 7 | 0.111111111 | k: Bacteria; p: Firmicutes; c: Clostridia; o: Clostridiales; f: Ruminococcaceae; | 1099 |
| | | | g: Ruminococcus; s: | |
| 4444277 | 2 | 0.031746032 | k: Bacteria; p: Bacteroidetes; c: Bacteroidia; o: Bacteroidales; | 1100 |
| | | | f: [Odoribacteraceae]; g: Odoribacter; s: | |
| 4444529 | 1 | 0.015873016 | k: Bacteria; p: Bacteroidetes; c: Bacteroidia; o: Bacteroidales; f: Rikenellaceae; | 1101 |
| | | | g:; s: | |
| 4444790 | 6 | 0.095238095 | k: Bacteria; p: Firmicutes; c: Clostridia; o: Clostridiales; f: Veillonellaceae; | 1102 |
| | | | g: Phascolarctobacterium; s: | |
| 4445226 | 1 | 0.015873016 | k: Bacteria; p: Bacteroidetes; c: Bacteroidia; o: Bacteroidales; | 1103 |
| | | | f: [Barnesiellaceae]; g:; s: | |
| 4446320 | 25 | 0.396825397 | k: Bacteria; p: Firmicutes; c: Clostridia; o: Clostridiales; f: Clostridiaceae; g:; s: | 1104 |
| 4449236 | 1 | 0.015873016 | k: Bacteria; p: Proteobacteria; c: Betaproteobacteria; o: Burkholderiales; | 1105 |
| | | | f: Alcaligenaceae; g: Sutterella; s: | |
| 4451901 | 1 | 0.015873016 | k: Bacteria; p: Firmicutes; c: Clostridia; o: Clostridiales; f: [Mogibacteriaceae]; | 1106 |
| | | | g:; s: | |
| 4452633 | 1 | 0.015873016 | k: Bacteria; p: Firmicutes; c: Clostridia; o: Clostridiales; f: Clostridiaceae; g:; s: | 1107 |
| 4453060 | 3 | 0.047619048 | k: Bacteria; p: Firmicutes; c: Bacilli; o: Lactobacillales; f: Enterococcaceae; | 1108 |
| | | | g: Enterococcus; s: | |
| 4454586 | 53 | 0.841269841 | k: Bacteria; p: Bacteroidetes; c: Bacteroidia; o: Bacteroidales; | 1109 |
| | | | f: [Odoribacteraceae]; g: Odoribacter; s: | |
| 4455005 | 1 | 0.015873016 | k: Bacteria; p: Firmicutes; c: Clostridia; o: Clostridiales; f: [Mogibacteriaceae]; | 1110 |
| | | | g:; s: | |
| 4456702 | 2 | 0.031746032 | k: Bacteria; p: Firmicutes; c: Clostridia; o: Clostridiales; f: Ruminococcaceae; | 1111 |
| | | | g: Ruminococcus; s: | |
| 4457064 | 1 | 0.015873016 | k: Bacteria; p: Bacteroidetes; c: Bacteroidia; o: Bacteroidales; f: Rikenellaceae; | 1112 |
| | | | g:; s: | |
| 4457427 | 44 | 0.698412698 | k: Bacteria; p: Firmicutes; c: Clostridia; o: Clostridiales; f: Lachnospiraceae; | 1113 |
| | | | g: Lachnospira; s: | |
| 4459196 | 3 | 0.047619048 | k: Bacteria; p: Firmicutes; c: Clostridia; o: Clostridiales; f: Lachnospiraceae; | 1114 |
| | | | g: Lachnospira; s: | |
| 4460847 | 32 | 0.507936508 | k: Bacteria; p: Firmicutes; c: Clostridia; o: Clostridiales; f: Ruminococcaceae; | 1115 |
| | | | g: Ruminococcus; s: | |
| 4463709 | 45 | 0.714285714 | k: Bacteria; p: Firmicutes; c: Clostridia; o: Clostridiales; f: Lachnospiraceae; | 1116 |
| | | | g: Coprococcus; s: | |
| 4466707 | 1 | 0.015873016 | k: Bacteria; p: Firmicutes; c: Clostridia; o: Clostridiales; f: Lachnospiraceae; | 1117 |
| | | | g: Coprococcus; s: | |
| 4468461 | 1 | 0.015873016 | k: Bacteria; p: Firmicutes; c: Clostridia; o: Clostridiales; f: Clostridiaceae; g:; s: | 1118 |
| 4470582 | 1 | 0.015873016 | k: Bacteria; p: Firmicutes; c: Clostridia; o: Clostridiales; f: Ruminococcaceae; | 1119 |
| | | | g: Faecalibacterium; s: prausnitzii | |
| 4470870 | 2 | 0.031746032 | k: Bacteria; p: Bacteroidetes; c: Bacteroidia; o: Bacteroidales; | 1120 |
| | | | f: [Barnesiellaceae]; g:; s: | |
| 4471854 | 3 | 0.047619048 | k: Bacteria; p: Firmicutes; c: Clostridia; o: Clostridiales; f: Lachnospiraceae; | 1121 |
| | | | g: Coprococcus; s: | |
| 4472091 | 45 | 0.714285714 | k: Bacteria; p: Firmicutes; c: Clostridia; o: Clostridiales; f: Ruminococcaceae; | 1122 |
| | | | g: Ruminococcus; s: | |
| 4472721 | 47 | 0.746031746 | k: Bacteria; p: Bacteroidetes; c: Bacteroidia; o: Bacteroidales; | 1123 |
| | | | f: [Odoribacteraceae]; g: Odoribacter; s: | |
| 4473506 | 5 | 0.079365079 | k: Bacteria; p: Proteobacteria; c: Betaproteobacteria; o: Burkholderiales; | 1124 |
| | | | f: Alcaligenaceae; g: Sutterella; s: | |
| 4474255 | 1 | 0.015873016 | k: Bacteria; p: Proteobacteria; c: Betaproteobacteria; o: Burkholderiales; | 1125 |
| | | | f: Alcaligenaceae; g: Sutterella; s: | |
| 4476561 | 12 | 0.19047619 | k: Bacteria; p: Bacteroidetes; c: Bacteroidia; o: Bacteroidales; | 1126 |
| | | | f: [Barnesiellaceae]; g:; s: | |
| 4476780 | 20 | 0.317460317 | k: Bacteria; p: Bacteroidetes; c: Bacteroidia; o: Bacteroidales; f: Rikenellaceae; | 1127 |
| | | | g:; s: | |
| 4476877 | 4 | 0.063492063 | k: Bacteria; p: Bacteroidetes; c: Bacteroidia; o: Bacteroidales; | 1128 |
| | | | f: [Odoribacteraceae]; g: Odoribacter; s: | |
| 4478840 | 1 | 0.015873016 | k: Bacteria; p: Firmicutes; c: Clostridia; o: Clostridiales; f: Clostridiaceae; g:; s: | 1129 |
| 4481131 | 62 | 0.984126984 | k: Bacteria; p: Firmicutes; c: Clostridia; o: Clostridiales; f: Ruminococcaceae; | 1130 |
| | | | g: Faecalibacterium; s: prausnitzii | |
| 4481613 | 2 | 0.031746032 | k: Bacteria; p: Actinobacteria; c: Coriobacteriia; o: Coriobacteriales; | 1131 |
| | | | f: Coriobacteriaceae; g: Collinsella; s: aerofaciens | |
| 4481624 | 2 | 0.031746032 | k: Bacteria; p: Firmicutes; c: Clostridia; o: Clostridiales; f: Clostridiaceae; g:; s: | 1132 |
| 4483570 | 1 | 0.015873016 | k: Bacteria; p: Bacteroidetes; c: Bacteroidia; o: Bacteroidales; f: Rikenellaceae; | 1133 |
| | | | g:; s: | |

¹Operational taxonomic units (OTUs) which cluster bacteria based on 16S rRNA sequence identity.
²In this column, letters refer to phylogenetic classifications (e.g., “k:” refers to “kingdom,” “p:” refers to phylum, and so on).

[0113] Table 6 lists exemplary bacterial genera and the number of OTUs identified in GreenGenes database (and recited in Table 5).
[0114] Columns:
   [0115] A—Taxonomy for that genus
   [0116] B—Number of OTUs that are found in healthy stool donors that belong to this genus
   [0117] C—SEQ ID NOs associated with OTUs

TABLE 6
Exemplary Genera Useful in the Present Invention

| A³ | B | C |
|---|---|---|
| k_Bacteria; p_Proteobacteria; c_Gammaproteobacteria; o_Enterobacteriales; | 8 | 1134 to 1141 |
| f_Enterobacteriaceae; g_Proteus | | |
| k_Bacteria; p_Bacteroidetes; c_Bacteroidia; o_Bacteroidales; f_Rikenellaceae; g_{—} | 34 | 1142 to 1175 |
| k_Bacteria; p_Firmicutes; c_Clostridia; o_Clostridiales; f_Ruminococcaceae; | 1 | 1176 |
| g_Clostridium | | |
| k_Bacteria; p_Firmicutes; c_Clostridia; o_Clostridiales; f_Lachnospiraceae; | 2 | 1177 to 1178 |
| g_Clostridium | | |
| k_Bacteria; p_Proteobacteria; c_Gammaproteobacteria; o_Enterobacteriales; | 291 | 1179 to 1469 |
| f_Enterobacteriaceae; g_{—} | | |
| k_Bacteria; p_Firmicutes; c_Clostridia; o_Clostridiales; f_Lachnospiraceae; | 248 | 1470 to 1717 |
| g_Coprococcus | | |
| k_Bacteria; p_Firmicutes; c_Clostridia; o_Clostridiales; f_Veillonellaceae; | 28 | 1718 to 1745 |
| g_Phascolarctobacterium | | |
| k_Bacteria; p_Firmicutes; c_Clostridia; o_Clostridiales; f_Lachnospiraceae; | 1 | 1746 |
| g_Ruminococcus | | |
| k_Bacteria; p_Proteobacteria; c_Gammaproteobacteria; o_Enterobacteriales; | 11 | 1747 to 1757 |
| f_Enterobacteriaceae; g_Serratia | | |
| k_Bacteria; p_Bacteroidetes; c_Bacteroidia; o_Bacteroidales; f_Odoribacteraceae; | 14 | 1758 to 1771 |
| g_Odoribacter | | |
| k_Bacteria; p_Firmicutes; c_Clostridia; o_Clostridiales; f_Clostridiaceae; g_{—} | 322 | 1772 to 2093 |
| k_Bacteria; p_Firmicutes; c_Clostridia; o_Clostridiales; f_Clostridiaceae; | 113 | 2094 to 2206 |
| g_Clostridium | | |
| k_Bacteria; p_Firmicutes; c_Clostridia; o_Clostridiales; f_Mogibacteriaceae; g_{—} | 47 | 2207 to 2253 |
| k_Bacteria; p_Bacteroidetes; c_Bacteroidia; o_Bacteroidales; f_Rikenellaceae; | 2 | 2254 to 2255 |
| g_Alistipes | | |
| k_Bacteria; p_Firmicutes; c_Clostridia; o_Clostridiales; f_Ruminococcaceae; | 188 | 2256 to 2443 |
| g_Oscillospira | | |
| k_Bacteria; p_Firmicutes; c_Erysipelotrichi; o_Erysipelotrichales; | 2 | 2444 to 2445 |
| f_Erysipelotrichaceae; g_Clostridium | | |
| k_Bacteria; p_Proteobacteria; c_Gammaproteobacteria; o_Enterobacteriales; | 6 | 2446 to 2451 |
| f_Enterobacteriaceae; g_Plesiomonas | | |
| k_Bacteria; p_Firmicutes; c_Bacilli; o_Lactobacillales; f_Enterococcaceae; | 41 | 2452 to 2492 |
| g_Enterococcus | | |
| k_Bacteria; p_Firmicutes; c_Clostridia; o_Clostridiales; f_Lachnospiraceae; | 63 | 2493 to 2555 |
| g_Lachnospira | | |
| k_Bacteria; p_Actinobacteria; c_Coriobacteriia; o_Coriobacteriales; | 83 | 2556 to 2638 |
| f_Coriobacteriaceae; g_{—} | | |
| k_Bacteria; p_Bacteroidetes; c_Bacteroidia; o_Bacteroidales; f_Barnesiellaceae; g_{—} | 31 | 2639 to 2669 |
| k_Bacteria; p_Firmicutes; c_Clostridia; o_Clostridiales; f_Ruminococcaceae; | 214 | 2670 to 2883 |
| g_Ruminococcus | | |
| k_Bacteria; p_Proteobacteria; c_Gammaproteobacteria; o_Enterobacteriales; | 28 | 2884 to 2911 |
| f_Enterobacteriaceae; g_Erwinia | | |
| k_Bacteria; p_Proteobacteria; c_Betaproteobacteria; o_Burkholderiales; | 37 | 2912 to 2948 |
| f_Alcaligenaceae; g_Sutterella | | |
| k_Bacteria; p_Proteobacteria; c_Gammaproteobacteria; o_Enterobacteriales; | 10 | 2950 to 2958 |
| f_Enterobacteriaceae; g_Enterobacter | | |
| k_Bacteria; p_Proteobacteria; c_Gammaproteobacteria; o_Enterobacteriales; | 12 | 2959 to 2970 |
| f_Enterobacteriaceae; g_Citrobacter | | |
| k_Bacteria; p_Firmicutes; c_Clostridia; o_Clostridiales; f_Christensenellaceae; g_{—} | 52 | 2971 to 3022 |
| k_Bacteria; p_Proteobacteria; c_Gammaproteobacteria; o_Enterobacteriales; | 1 | 3023 |
| f_Enterobacteriaceae; g_Xenorhabdus | | |
| k_Bacteria; p_Proteobacteria; c_Gammaproteobacteria; o_Enterobacteriales; | 2 | 3024 to 3025 |
| f_Enterobacteriaceae; g_Brenneria | | |
| k_Bacteria; p_Firmicutes; c_Clostridia; o_Clostridiales; f_Peptostreptococcaceae; | 3 | 3026 to 3028 |
| g_Clostridium | | |
| k_Bacteria; p_Firmicutes; c_Clostridia; o_Clostridiales; f_Ruminococcaceae; | 131 | 3029 to 3159 |
| g_Faecalibacterium | | |
| k_Bacteria; p_Actinobacteria; c_Coriobacteriia; o_Coriobacteriales; | 26 | 3160 to 3185 |
| f_Coriobacteriaceae; g_Collinsella | | |

³In this column, letters refer to phylogenetic classifications (e.g., “k” refers to “kingdom,” “p” refers to phylum, and so on).

[0118] In an embodiment, a bacterial strain is included in the pharmaceutical composition of the invention based on its abundance in donors whose stool was used for successful or unsuccessful fecal microbiota transplants (FMTs) in a patient suffering from a gut dysbiosis disorder, e.g., caused by a previous or current anti-cancer therapy.

[0119] In an embodiment, a bacterial strain is included in the pharmaceutical composition of the invention based on its presence in the stool samples of donors whose stool was used for FMTs which provided a therapeutically effective result in a GI disorder patient.

[0120] In an embodiment, a bacterial strain is included in the pharmaceutical composition of the invention based on its ability to engraft in a recipient. For example, the recipient may be a FMT recipient who received stool transplant from a donor. The bacterial strain is considered to successfully engraft if the strain is abundant in donors and also increased in recipient patients. In some embodiments, the selected bacterial strain exhibits enhanced ability to colonize the mucosa, i.e., is a good mucosal colonizer.

[0121] In various embodiments, a bacterial strain may be selected for inclusion in the bacterial mixture based on its ability to directly inhibit a bacterium (e.g., pathogenic bacterium) through production of a secreted product. In some embodiments, a bacterial strain may be selected for inclusion in the bacterial mixture based on its ability to directly compete with the pathogenic bacteria for a niche and/or for nutrients. In embodiments, a bacterial strain may be selected for inclusion in the bacterial mixture based on its ability to decolonize a pathogenic bacterium. In embodiments, a bacterial strain may be selected for inclusion in the bacterial mixture based on its ability to eradicate a pathogenic bacterium.

[0122] In an embodiment, a bacterial strain may be selected for inclusion in a bacterial mixture based on its ability to enhance production of SCFAs, which increases the thickness of the mucus layer, maintains the health of colonocytes, increases butyrate levels in the gut, inhibits nitric oxide synthase activity, reduces the concentration of host-derived nitrate levels in the gut, and/or induces IgA production. As used herein, SCFAs refer to fatty acids with an aliphatic tail of less than six carbon atoms. Illustrative SCFAs include, but are not limited to, formic acid, acetic acid, propionic acid, butyric acid, isobutyric acid, valeric acid, and isovaleric acid. Without wishing to be bound by theory, SCFAs are involved in mediation of GI inflammation, and SOFA-producing bacteria are associated with sustained clinical remission in UC. Accordingly, in some embodiments, a bacterial strain is selected based on its ability to produce increased levels of SCFAs. Additionally, in some embodiments, a bacterial strain is selected for its ability to complement the capacity of a functionally deficient microbial community (e.g., the microbial community of a patient infected and/or colonized by a pathogenic bacteria) to produce levels of SCFAs comparable to healthy individuals.

[0123] In an embodiment, a bacterial strain may be selected for inclusion in a bacterial mixture based on its ability to promote restoration of mucosal barrier functions. For example, in some embodiments, a bacterial strain may be selected based on its ability to enable mucosal healing, improve mucosal barrier function, and/or to reduce inflammation. Without wishing to be bound by theory, it is believed that inclusion of such bacterial strains reinforces both the structural and chemical barrier functions of the mucosa by displacing pathogenic mucus degrading microorganisms and support mucosal repair. In an embodiment, the inclusion of such bacterial strain impacts numerous inflammatory pathways linked to inappropriate microbial exposure.

[0124] Accordingly, in some embodiments, the pharmaceutical composition of the invention includes a bacterial strain that prevents and/or reduces the loss of mucus thickness associated with various GI disorders. In some embodiments, the pharmaceutical composition of the invention includes a bacterial strain that results in a reduction of bacterial penetration or bacterial load in the mucus. In some embodiments, the pharmaceutical composition of the invention includes a bacterial strain that reduces sulfate-reducing bacteria (SRB) in a subject.

[0125] Additional criteria that may be utilized for selecting a bacterial strain for inclusion in the pharmaceutical composition of the invention include, but are not limited to, the ability of the bacterial strain to inhibit IgA-degrading bacteria, the ability of the bacterial strain to inhibit serotonin-producing and serotonin-inducing bacteria, the ability of the bacterial strain to enhance tryptophan availability, the ability of the bacterial strain to produce anti-inflammatory zwitterionic polysaccharides, modification of signaling molecules interacting with the Aryl Hydrocarbon Receptor, and/or the ability of the bacterial strain to block the vitamin D receptor (VCD) or vitamin D signaling.

[0126] In various embodiments, individual bacterial strains are initially selected from Table 5 or Table 6 and subsequently pooled to form a mixture of bacterial strains. For example, in an embodiment, a mixture of bacterial strains may be formed by including one or more strains that has a 16S rRNA sequence that is at least about 97% identical with the 16S rRNA sequence of any one of the operational taxonomic units provided in Table 5 or Table 6, one or more bacterial strains that directly inhibit a pathogenic bacterium through production of a secreted product, one or more strains that directly compete with the pathogenic bacteria for a niche and/or for nutrients, one or more bacterial strains that decolonize a pathogenic bacterium, and/or one or more bacterial strains that eradicate a pathogenic bacterium.

[0127] In some embodiments, the mixtures of bacterial strains treat or prevent an autoimmune disorder including, but not limited to, acute disseminated encephalomyelitis (ADEM), acute necrotizing hemorrhagic leukoencephalitis, Addison's disease, agammaglobulinemia, alopecia areata, amyloidosis, ankylosing spondylitis, anti-GBM/anti-TBM nephritis, antiphospholipid syndrome (APS), autoimmune angioedema, autoimmune aplastic anemia, autoimmune dysautonomia, autoimmune hemolytic anemia, autoimmune hepatitis, autoimmune hyperlipidemia, autoimmune immunodeficiency, autoimmune inner ear disease (AIED), autoimmune myocarditis, autoimmune oophoritis, autoimmune pancreatitis, autoimmune retinopathy, autoimmune thrombocytopenic purpura (ATP), autoimmune thyroid disease, autoimmune urticarial, axonal & neuronal neuropathies, Balo disease, Behcet's disease, bullous pemphigoid, cardiomyopathy, Castleman disease, celiac disease, Chagas disease, chronic inflammatory demyelinating polyneuropathy (CIDP), chronic recurrent multifocal ostomyelitis (CRMO), Churg-Strauss syndrome, cicatricial pemphigoid/benign mucosal pemphigoid, Crohn's disease, Cogan's syndrome, cold agglutinin disease, congenital heart block, Coxsackie myocarditis, CREST disease, essential mixed cryoglobulinemia, demyelinating neuropathies, dermatitis herpetiformis, dermatomyositis, Devic's disease (neuromyelitis optica), discoid lupus, Dressler's syndrome, endometriosis, eosinophilic esophagitis, eosinophilic fasciitis, erythema nodosum, experimental allergic encephalomyelitis, Evans syndrome, fibrosing alveolitis, giant cell arteritis (temporal arteritis), giant cell myocarditis, glomerulonephritis, Goodpasture's syndrome, granulomatosis with polyangiitis (GPA), Graves' disease, Guillain-Barre syndrome, Hashimoto's encephalitis, Hashimoto's thyroiditis, hemolytic anemia, Henoch-Schonlein purpura, herpes gestationis, hypogammaglobulinemia, idiopathic thrombocytopenic purpura (ITP), IgA nephropathy, IgG4-related sclerosing disease, immunoregulatory lipoproteins, inclusion body myositis, interstitial cystitis, juvenile arthritis, juvenile idiopathic arthritis, juvenile myositis, Kawasaki syndrome, Lambert-Eaton syndrome, leukocytoclastic vasculitis, lichen planus, lichen sclerosus, ligneous conjunctivitis, linear IgA disease (LAD), lupus (systemic lupus erythematosus), chronic Lyme disease, Meniere's disease, microscopic polyangiitis, mixed connective tissue disease (MCTD), Mooren's ulcer, Mucha-Habermann disease, multiple sclerosis, myasthenia gravis, myositis, narcolepsy, neuromyelitis optica (Devic's), neutropenia, ocular cicatricial pemphigoid, optic neuritis, palindromic rheumatism, PANDAS (Pediatric Autoimmune Neuropsychiatric Disorders Associated with Streptococcus), paraneoplastic cerebellar degeneration, paroxysmal nocturnal hemoglobinuria (PNH), Parry Romberg syndrome, Parsonnage-Turner syndrome, pars planitis (peripheral uveitis), pemphigus, peripheral neuropathy, perivenous encephalomyelitis, pernicious anemia, POEMS syndrome, polyarteritis nodosa, type I, II, & Ill autoimmune polyglandular syndromes, polymyalgia rheumatic, polymyositis, postmyocardial infarction syndrome, postpericardiotomy syndrome, progesterone dermatitis, primary biliary cirrhosis, primary sclerosing cholangitis, psoriasis, psoriatic arthritis, idiopathic pulmonary fibrosis, pyoderma gangrenosum, pure red cell aplasia, Raynaud's phenomenon, reactive arthritis, reflex sympathetic dystrophy, Reiter's syndrome, relapsing polychondritis, restless legs syndrome, retroperitoneal fibrosis, rheumatic fever, rheumatoid arthritis, sarcoidosis, Schmidt syndrome, scleritis, scleroderma, Sjogren's syndrome, sperm and testicular autoimmunity, stiff person syndrome, subacute bacterial endocarditis (SBE), Susac's syndrome, sympathetic ophthalmia, Takayasu's arteritis, temporal arteritis/giant cell arteritis, thrombocytopenic purpura (TTP), Tolosa-Hunt syndrome, transverse myelitis, type 1 diabetes, asthma, ulcerative colitis, undifferentiated connective tissue disease (UCTD), uveitis, vasculitis, vesiculobullous dermatosis, vitiligo, and Wegener's granulomatosis.

[0128] In embodiments, the mixtures of bacterial strains treat or prevent diseases or disorders relating to the “gut-brain axis”, including neurodegenerative, neurodevelopmental and neurocognitive disorders, such as anorexia, anxiety, autism-spectrum disorder, depression, Parkinson's, and Schizophrenia.

[0129] In embodiments, the mixtures of bacterial strains treat, prevent, or reduce a side effect of an anti-cancer therapy and/or increase efficacy of an anti-cancer therapeutic agent and/or anti-cancer therapy.

[0130] In embodiments, the anti-cancer therapy is surgery, radiation therapy, chemotherapy (including hormonal therapy) and/or targeted therapy (including an immunotherapy). Illustrative chemotherapeutics agents are provided elsewhere herein. In embodiments, the immunotherapy binds to and/or recognizes a tumor-cell antigen and/or a cancer-cell antigen, e.g., CTLA-4, PD-1, PD-L1, or PD-L2. In embodiments, the immunotherapy comprises administration of Keytruda (Pembrolizumab), Opdivo (Nivolumab), Yervoy (Ipilimumab), Tecentriq (atezolizumab), Bavencio (avelumab), and Imfinzi (durvalumab).

[0131] In embodiments, the subject, e.g., a human, is refractory and/or non-responsive to an anti-cancer therapy (as described herein). In embodiments, the pharmaceutical composition treats a subject that presents a non-curative response, a limited response, or no response to the anti-cancer therapy, or even progress, after 12 weeks or so of receiving the anti-cancer therapy. Thus, a pharmaceutical composition of the present invention can rescue subjects that are refractory and/or non-responsive to the anti-cancer therapy. In embodiments, the subject is refractory and/or non-responsive to a treatment directed to a checkpoint molecule, e.g., CTLA-4, PD-1, PD-L1, and/or PD-L2. In embodiments, the treatment directed to a checkpoint molecule comprises administration of Keytruda (Pembrolizumab), Opdivo (Nivolumab), Yervoy (Ipilimumab), Tecentriq (atezolizumab), Bavencio (avelumab), or lmfinzi (durvalumab).

[0132] Cancers or tumors refer to an uncontrolled growth of cells and/or abnormal increased cell survival and/or inhibition of apoptosis which interferes with the normal functioning of the bodily organs and systems. Included are benign and malignant cancers, polyps, hyperplasia, as well as dormant tumors or micrometastases. Also, included are cells having abnormal proliferation that is not impeded by the immune system (e.g., virus infected cells). The cancer may be a primary cancer or a metastatic cancer. The primary cancer may be an area of cancer cells at an originating site that becomes clinically detectable, and may be a primary tumor. In contrast, the metastatic cancer may be the spread of a disease from one organ or part to another non-adjacent organ or part. The metastatic cancer may be caused by a cancer cell that acquires the ability to penetrate and infiltrate surrounding normal tissues in a local area, forming a new tumor, which may be a local metastasis. The cancer may also be caused by a cancer cell that acquires the ability to penetrate the walls of lymphatic and/or blood vessels, after which the cancer cell is able to circulate through the bloodstream (thereby being a circulating tumor cell) to other sites and tissues in the body. The cancer may be due to a process such as lymphatic or hematogeneous spread. The cancer may also be caused by a tumor cell that comes to rest at another site, re-penetrates through the vessel or walls, continues to multiply, and eventually forms another clinically detectable tumor. The cancer may be this new tumor, which may be a metastatic (or secondary) tumor.

[0133] The cancer may be caused by tumor cells that have metastasized, which may be a secondary or metastatic tumor. The cells of the tumor may be like those in the original tumor. As an example, if a breast cancer or colon cancer metastasizes to the liver, the secondary tumor, while present in the liver, is made up of abnormal breast or colon cells, not of abnormal liver cells. The tumor in the liver may thus be a metastatic breast cancer or a metastatic colon cancer, not liver cancer.

[0134] The cancer may have an origin from any tissue. The cancer may originate from melanoma, colon, breast, or prostate, and thus may be made up of cells that were originally skin, colon, breast, or prostate, respectively. The cancer may also be a hematological malignancy, which may be leukemia or lymphoma. The cancer may invade a tissue such as liver, lung, bladder, or intestinal.

[0135] Representative cancers and/or tumors of the present invention include, but are not limited to, a basal cell carcinoma, biliary tract cancer; bladder cancer; bone cancer; brain and central nervous system cancer; breast cancer (including Triple-Negative Breast Cancer); cancer of the peritoneum; cervical cancer; choriocarcinoma; colon and rectum cancer; connective tissue cancer; cancer of the digestive system; endometrial cancer; esophageal cancer; eye cancer; cancer of the head and neck; gastric cancer (including gastrointestinal cancer); glioblastoma; hepatic carcinoma; hepatoma; intra-epithelial neoplasm; kidney or renal cancer; larynx cancer; leukemia; liver cancer; lung cancer (e.g., small-cell lung cancer, non-small cell lung cancer, adenocarcinoma of the lung, and squamous carcinoma of the lung); melanoma; myeloma; neuroblastoma; oral cavity cancer (lip, tongue, mouth, and pharynx); ovarian cancer; pancreatic cancer; prostate cancer; retinoblastoma; rhabdomyosarcoma; rectal cancer; cancer of the respiratory system; salivary gland carcinoma; sarcoma; skin cancer; squamous cell cancer; stomach cancer; testicular cancer; thyroid cancer; uterine or endometrial cancer; cancer of the urinary system; urothelial carcinoma, vulval cancer; lymphoma including Hodgkin's and non-Hodgkin's lymphoma, as well as B-cell lymphoma (including low grade/follicular non-Hodgkin's lymphoma (NHL); small lymphocytic (SL) NHL; intermediate grade/follicular NHL; intermediate grade diffuse NHL; high grade immunoblastic NHL; high grade lymphoblastic NHL; high grade small non-cleaved cell NHL; bulky disease NHL; mantle cell lymphoma; AIDS-related lymphoma; and Waldenstrom's Macroglobulinemia; chronic lymphocytic leukemia (CLL); acute lymphoblastic leukemia (ALL); Hairy cell leukemia; chronic myeloblastic leukemia; as well as other carcinomas and sarcomas; and post-transplant lymphoproliferative disorder (PTLD), as well as abnormal vascular proliferation associated with phakomatoses, edema (such as that associated with brain tumors), and Meigs' syndrome.

[0136] In various embodiments, the mixtures of bacterial strains may stimulate and/or activate Toll-like receptor activity (e.g., TLR1, and/or TLR2, and/or TLR3, and/or TLR4, and/or TLR5, and/or TLR6, and/or TLR7, and/or TLR8, and/or TLR9, and/or TLR10, and/or TLR11, and/or TLR12, and/or TLR13).

[0137] In some embodiments, the mixtures of bacterial strains treat or prevent a diarrheal disease including, but not limited to, acute bloody diarrhea (e.g., dysentery), acute watery diarrhea (e.g., cholera), checkpoint inhibitor-associated colitis, diarrhea due to food poisoning, persistent diarrhea, and traveler's diarrhea.

[0138] In some embodiments, the mixtures of bacterial strains treat or prevent an IBD or related disease including, but not limited to, Behcet's disease, collagenous colitis, Crohn's disease, diversion colitis, fulminant colitis, intermediate colitis, left-sided colitis, lymphocytic colitis, pancolitis, pouchitis, proctosigmoiditis, short bowel syndrome, ulcerative colitis, and ulcerative proctitis.

[0139] In some embodiments, the mixtures of bacterial strains treat or prevent the various GI disorders disclosed herein and/or as known in the art to be a result of gut dysbiosis.

[0140] In some embodiments the mixtures of bacterial strains reduce GI immunoactivation and inflammation.

[0141] In various embodiments, the mixtures of bacterial strains treat or prevent various bloodstream infections (BSI).

[0142] In some embodiments, the mixtures of bacterial strains treat or prevent catheter or intravascular-line infections (e.g., central-line infections).

[0143] In some embodiments, the mixtures of bacterial strains treat or prevent chronic inflammatory diseases.

[0144] In some embodiments, the mixtures of bacterial strains treat or prevent meningitis.

[0145] In some embodiments, the mixtures of bacterial strains treat or prevent pneumonia, e.g., ventilator-associated pneumonia.

[0146] In some embodiments, the mixtures of bacterial strains treat or prevent skin and soft tissue infections.

[0147] In some embodiments, the mixtures of bacterial strains treat or prevent surgical-site infections.

[0148] In some embodiments, the mixtures of bacterial strains treat or prevent urinary tract infections (e.g., antibiotic-resistant urinary tract infections and catheter-associated urinary tract infections).

[0149] In some embodiments, the mixtures of bacterial strains treat or prevent wound infections

[0150] In embodiments, the mixtures of bacterial strains treat or prevent other well-known infections: antibiotic-resistant infections and antibiotic-sensitive infections.

[0151] In various embodiments, the mixture of bacterial strains includes one or more bacterial strains that interact synergistically for treating or preventing a herein-described disorder, disease, or disorder.

[0152] In some embodiments, the mixtures of bacterial strains reduce, ameliorate, or eliminate one or more symptom(s) associated with a herein-described disease, disorder, or condition. Exemplary symptoms include, but are not limited to, diarrhea, bloody stool, mouth sores, perianal disease, abdominal pain, abdominal cramping, fever, fatigue, weight loss, iron deficiency, anemia, appetite loss, weight loss, anorexia, delayed growth, delayed pubertal development, and inflammation of the skin, eyes, joints, liver, and bile ducts.

[0153] In some embodiments, the pharmaceutical composition of the invention comprises a bacterial strain derived from any one of the phylum, class, order, family, genus, and/or species listed in Table 5 or Table 6. In exemplary embodiments, the pharmaceutical composition of the invention comprises a bacterial strain belonging to the phylum Bacteroidetes or Firmicutes. In exemplary embodiments, the pharmaceutical composition of the invention comprises a bacterial strain belonging to the class Clostridia, Bacteroidia, or Bacilli. In exemplary embodiments, the pharmaceutical composition of the invention comprises a bacterial strain belonging to the order Bacteroidales, Clostridiales, or Lactobacillales. In exemplary embodiments, the pharmaceutical composition of the invention comprises a bacterial strain belonging to the family Bacteroidaceae, Ruminococcaceae, Lachnospiraceae, or Streptococcacea. In exemplary embodiments, the pharmaceutical composition of the invention comprises a bacterial strain belonging to the genus Bacteroides, Blautia, Faecalibacterium, Coprococcus, Roseburia, Dorea, Clostridium, Eubacterium or Streptococcus. In exemplary embodiments, the pharmaceutical composition of the invention comprises a bacterial strain belonging to the species uniformis, prausnitzii, or faecis.

[0154] Pharmaceutical Compositions, Formulations, and Administration

[0155] The present invention provides pharmaceutical compositions comprising the novel mixtures of bacterial strains (and/or additional therapeutic agents) in various formulations. Any pharmaceutical composition (and/or additional therapeutic agents) described herein can take the form of tablets, pills, pellets, capsules, capsules containing liquids, capsules containing multiparticulates, powders, solutions, emulsion, drops, suppositories, emulsions, aerosols, sprays, suspensions, delayed-release formulations, sustained-release formulations, controlled-release formulations, or any other form suitable for use.

[0156] The formulations comprising the pharmaceutical compositions (and/or additional therapeutic agents) may conveniently be presented in unit dosage forms. For example, the dosage forms may be prepared by methods which include the step of bringing the therapeutic agents into association with a carrier, which constitutes one or more accessory ingredients. For example, the formulations are prepared by uniformly and intimately bringing the therapeutic agent into association with a liquid carrier, a finely divided solid carrier, or both, and then, if necessary, shaping the product into dosage forms of the desired formulation (e.g., wet or dry granulation, powder blends, etc., followed by press tableting).

[0157] In one embodiment, the pharmaceutical compositions comprising the novel mixtures of bacterial strains (and/or additional therapeutic agents) described herein are formulated as a composition adapted for a mode of administration described herein.

[0158] In various embodiments, the administration of the pharmaceutical compositions (and/or additional therapeutic agents) is any one of oral, intravenous, intraperitoneal, and parenteral. For example, routes of administration include, but are not limited to, oral, intraperitoneal, intravenous, intramuscular, or rectally. In various embodiments, the administration of the pharmaceutical compositions (and/or additional therapeutic agents) is oral, naso-gastric, anterograde gastrointestinal, retrograde gastrointestinal, endoscopic, or enemic.

[0159] In one embodiment, the pharmaceutical compositions (and/or additional therapeutic agents) described herein are formulated as a composition adapted for oral administration. Compositions for oral delivery can be in the form of tablets, aqueous or oily suspensions, granules, powders, sprinkles, emulsions, or capsules as examples. Orally administered compositions can comprise one or more agents, for example, sweetening agents such as fructose, aspartame or saccharin; flavoring agents such as peppermint, oil of wintergreen, or cherry; coloring agents; perfuming agents, to mask an odor of a bacterial mixture; and preserving agents, to provide a pharmaceutically palatable preparation. Moreover, when in capsule, tablet, or pill form, the compositions can be coated to delay disintegration to provide a sustained action over an extended period of time. Selectively permeable membranes surrounding an osmotically active agent driving any microbial strain (and/or additional therapeutic agents) described herein are also suitable for orally administered compositions. In these latter platforms, fluid from the environment surrounding the capsule is imbibed by the driving compound, which swells to displace the agent or agent composition through an aperture. These delivery platforms can provide an essentially zero order delivery profile as opposed to the spiked profiles of immediate release formulations. A time-delay material such as glycerol monostearate or glycerol stearate can also be useful. Oral compositions can include standard excipients such as mannitol, lactose, starch, magnesium stearate, sodium saccharin, cellulose, ethacrylic acid and derivative polymers thereof, and magnesium carbonate. In one embodiment, the excipients are of pharmaceutical grade. Suspensions, in addition to the active compounds, may contain suspending agents such as, for example, ethoxylated isostearyl alcohols, polyoxyethylene sorbitol and sorbitan esters, microcrystalline cellulose, aluminum metahydroxide, bentonite, agar-agar, tragacanth, etc., and mixtures thereof.

[0160] Oral administration of the pharmaceutical compositions comprising bacterial mixtures, e.g., via a capsule, is preferable since this route is simpler and more convenient than more conventional, invasive techniques like enema, nasogastric tube, or colonoscopy.

[0161] In various embodiments, the pharmaceutical compositions (and/or additional therapeutic agent) are formulated as solid dosage forms such as tablets, dispersible powders, granules, and capsules. In one embodiment, the pharmaceutical compositions (and/or additional therapeutic agent) are formulated as a capsule. In another embodiment, the pharmaceutical compositions (and/or additional therapeutic agent) are formulated as a capsule or tablet. In yet another embodiment, the pharmaceutical compositions (and/or additional therapeutic agent) are formulated as a soft-gel capsule. In a further embodiment, the pharmaceutical compositions (and/or additional therapeutic agent) are formulated as a gelatin capsule.

[0162] Dosage forms suitable for parenteral administration (e.g., intravenous, intramuscular, or intraperitoneal injection and infusion) include, for example, solutions, suspensions, dispersions, emulsions, and the like. They may also be manufactured in the form of sterile solid compositions (e.g., lyophilized composition), which can be dissolved or suspended in sterile injectable medium immediately before use. They may contain, for example, suspending or dispersing agents.

[0163] In various embodiments, the formulations of the invention may additionally comprise a pharmaceutically acceptable carrier or excipient. As one skilled in the art will recognize, the formulations can be in any suitable form appropriate for the desired use and route of administration.

[0164] In some dosage forms, the agents described herein can be mixed with at least one inert, pharmaceutically acceptable excipient or carrier such as sodium citrate, dicalcium phosphate, and/or (a) fillers or extenders such as starches, lactose, sucrose, glucose, mannitol, silicic acid, microcrystalline cellulose, and Bakers Special Sugar, (b) binders such as, for example, carboxymethylcellulose, alginates, gelatin, polyvinylpyrrolidone, sucrose, acacia, polyvinyl alcohol, polyvinylpyrrolidone, methylcellulose, hydroxypropyl cellulose (HPC), and hydroxymethyl cellulose etc., (c) humectants such as glycerol, (d) disintegrating agents such as agar-agar, calcium carbonate, potato or tapioca starch, alginic acid, certain silicates, sodium carbonate, cross-linked polymers such as crospovidone (cross-linked polyvinyl pyrrolidone), croscarmellose sodium (cross-linked sodium carboxymethylcellulose), sodium starch glycolate, (e) solution retarding agents such as paraffin, (f) absorption accelerators such as quaternary ammonium compounds, (g) wetting agents such as, for example, cetyl alcohol and glycerol monostearate, (h) absorbents such as kaolin and bentonite clay, and (i) lubricants such as talc, calcium stearate, magnesium stearate, solid polyethylene glycols, sodium lauryl sulfate, glyceryl behenate, and mixtures of such excipients. One of skill in the art will recognize that particular excipients may have two or more functions in the oral dosage form. In the case of an oral dosage form, for example, a capsule or a tablet, the dosage form may also comprise buffering agents.

[0165] The formulation can additionally include a surface active agent. Surface active agents suitable for use in the present invention include, but are not limited to, any pharmaceutically acceptable, non-toxic surfactant. Classes of surfactants suitable for use in the compositions of the invention include, but are not limited to polyethoxylated fatty acids, PEG-fatty acid diesters, PEG-fatty acid mono- and di-ester mixtures, polyethylene glycol glycerol fatty acid esters, alcohol-oil transesterification products, polyglycerized fatty acids, propylene glycol fatty acid esters, mixtures of propylene glycol esters-glycerol esters, mono- and diglycerides, sterol and sterol derivatives, polyethylene glycol sorbitan fatty acid esters, polyethylene glycol alkyl ethers, sugar esters, polyethylene glycol alkyl phenols, polyoxyethylene-olyoxypropylene block copolymers, sorbitan fatty acid esters, lower alcohol fatty acid esters, ionic surfactants, and mixtures thereof. In some embodiments, compositions of the invention may comprise one or more surfactants including, but not limited to, sodium lauryl sulfate, polysorbate 20, polysorbate 40, polysorbate 60, polysorbate 80, and triethyl citrate.

[0166] The formulation can also contain pharmaceutically acceptable plasticizers to obtain the desired mechanical properties such as flexibility and hardness. Such plasticizers include, but are not limited to, triacetin, citric acid esters, triethyl citrate, phthalic acid esters, dibutyl sebacate, cetyl alcohol, polyethylene glycols, polysorbates or other plasticizers.

[0167] The formulation can also include one or more application solvents. Some of the more common solvents that can be used to apply, for example, a delayed-release coating composition include isopropyl alcohol, acetone, methylene chloride and the like.

[0168] The formulation can also include one or more alkaline materials. Alkaline material suitable for use in compositions of the invention include, but are not limited to, sodium, potassium, calcium, magnesium and aluminum salts of acids such as phosphoric acid, carbonic acid, citric acid and other aluminum/magnesium compounds. In addition, the alkaline material may be selected from antacid materials such as aluminum hydroxides, calcium hydroxides, magnesium hydroxides and magnesium oxide.

[0169] In various embodiments, the pharmaceutical compositions (and/or additional therapeutic agents) are formulated for systemic or local delivery. In an embodiment, administration is systemic. In another embodiment, it may be desirable to administer locally to the area in need of treatment.

[0170] Various methods may be used to formulate and/or deliver the agents described herein to a location of interest. For example, the pharmaceutical compositions (and/or additional therapeutic agents) described herein may be formulated for delivery to the GI tract. The GI tract includes organs of the digestive system such as mouth, esophagus, stomach, duodenum, small intestine, large intestine (also referred here to as the “colon”) and rectum and includes all subsections thereof (e.g., the small intestine may include the duodenum, jejunum and ileum; the large intestine may include the colon transversum, colon descendens, colon ascendens, colon sigmoidenum and cecum). For example, the bacterial strains and/or pharmaceutical compositions (and/or additional therapeutic agents) described herein may be formulated for delivery to one or more of the stomach, small intestine, large intestine and rectum and includes all subsections thereof (e.g., duodenum, jejunum and ileum, colon transversum, colon descendens, colon ascendens, colon sigmoidenum and cecum). In some embodiments, the compositions described herein may be formulated to deliver to the upper or lower GI tract. In an embodiment, the bacterial strains and/or pharmaceutical compositions (and/or additional therapeutic agents) may be administered to a subject, by, for example, directly or indirectly contacting the mucosal tissues of the GI tract.

[0171] In various embodiments, the administration the pharmaceutical compositions (and/or additional therapeutic agents) is into the GI tract via, for example, oral delivery, nasogastric tube, intestinal intubation (e.g., an enteral tube or feeding tube such as, for example, a jejunal tube or gastro-jejunal tube, etc.), direct infusion (e.g., duodenal infusion), endoscopy, colonoscopy, or enema.

[0172] In various embodiments, the administration the pharmaceutical compositions (and/or additional therapeutic agents) is into the female reproductive system, for example by vaginal delivery, e.g., as vaginal suppository.

[0173] For example, in various embodiments, the present invention provides modified-release formulations comprising the novel mixtures of bacterial strains (and/or additional therapeutic agents), wherein the formulation releases a substantial amount of the bacterial strains (and/or additional therapeutic agents) into one or more regions of the GI tract. For example, the formulation may release at least about 60% of the bacterial strains after the stomach and into one or more regions of the GI tract.

[0174] In various embodiments, the modified-release formulation of the present invention releases at least 60% of the bacterial strains (or additional therapeutic agents) after the stomach into one or more regions of the intestine. For example, the modified-release formulation releases at least 60%, at least 61%, at least 62%, at least 63%, at least 64%, at least 65%, at least 66%, at least 67%, at least 68%, at least 69%, at least 70%, at least 71%, at least 72%, at least 73%, at least 74%, at least 75%, at least 76%, at least 77%, at least 78%, at least 79%, at least 80%, at least 81%, at least 82%, at least 83%, at least 84%, at least 85%, at least 86%, at least 87%, at least 88%, at least 89%, at least 90%, at least 91%, at least 92%, at least 93%, at least 94%, at least 95%, at least 96%, at least 97%, at least 98%, at least 99%, or 100% of the bacterial strains (or additional therapeutic agents) in the intestines.

[0175] In various embodiments, the modified-release formulation of the present invention releases at least 60% of the bacterial strains (or additional therapeutic agents) in the small intestine. For example, the modified-release formulation releases at least 60%, at least 61%, at least 62%, at least 63%, at least 64%, at least 65%, at least 66%, at least 67%, at least 68%, at least 69%, at least 70%, at least 71%, at least 72%, at least 73%, at least 74%, at least 75%, at least 76%, at least 77%, at least 78%, at least 79%, at least 80%, at least 81%, at least 82%, at least 83%, at least 84%, at least 85%, at least 86%, at least 87%, at least 88%, at least 89%, at least 90%, at least 91%, at least 92%, at least 93%, at least 94%, at least 95%, at least 96%, at least 97%, at least 98%, at least 99%, or 100% of the bacterial strains (or additional therapeutic agents) in the small intestine (e.g., one or more of duodenum, jejunum, ileum, and ileocecal junction).

[0176] In various embodiments, the modified-release formulation of the present invention releases at least 60% of the bacterial strains (or additional therapeutic agents) in the large intestine. For example, the modified-release formulation releases at least 60%, at least 61%, at least 62%, at least 63%, at least 64%, at least 65%, at least 66%, at least 67%, at least 68%, at least 69%, at least 70%, at least 71%, at least 72%, at least 73%, at least 74%, at least 75%, at least 76%, at least 77%, at least 78%, at least 79%, at least 80%, at least 81%, at least 82%, at least 83%, at least 84%, at least 85%, at least 86%, at least 87%, at least 88%, at least 89%, at least 90%, at least 91%, at least 92%, at least 93%, at least 94%, at least 95%, at least 96%, at least 97%, at least 98%, at least 99%, or 100% of the bacterial strains (or additional therapeutic agents) in the large intestine (e.g., one or more of cecum, ascending, transverse, descending or sigmoid portions of the colon, and rectum).

[0177] In various embodiments, the pharmaceutical composition is formulated for substantially complete delivery prior to the rectum.

[0178] In some embodiments, the pharmaceutical composition is formulated for release in the stomach (e.g., so-called reverse enteric formulations). In other embodiments, the pharmaceutical composition is formulated so as to not substantially release the bacterial strains in the stomach.

[0179] In certain embodiments, the modified-release formulation releases the bacterial strains (or additional therapeutic agents) at a specific pH. For example, in some embodiments, the modified-release formulation is substantially stable in an acidic environment and substantially unstable (e.g., dissolves rapidly or is physically unstable) in a near neutral to alkaline environment. In some embodiments, stability is indicative of not substantially releasing while instability is indicative of substantially releasing. For example, in some embodiments, the modified-release formulation is substantially stable at a pH of about 7.0 or less, or about 6.5 or less, or about 6.0 or less, or about 5.5 or less, or about 5.0 or less, or about 4.5 or less, or about 4.0 or less, or about 3.5 or less, or about 3.0 or less, or about 2.5 or less, or about 2.0 or less, or about 1.5 or less, or about 1.0 or less. In some embodiments, the present formulations are stable in lower pH areas and therefore do not substantially release in, for example, the stomach. In some embodiments, modified-release formulation is substantially stable at a pH of about 1 to about 4 or lower and substantially unstable at pH values that are greater. In these embodiments, the modified-release formulation does not substantially release in the stomach. In these embodiments, the modified-release formulation substantially releases in the small intestine (e.g., one or more of the duodenum, jejunum, and ileum) and/or large intestine (e.g., one or more of the cecum, ascending colon, transverse colon, descending colon, and sigmoid colon). In some embodiments, modified-release formulation is substantially stable at a pH of about 4 to about 5 or lower and consequentially is substantially unstable at pH values that are greater and therefore is not substantially released in the stomach and/or small intestine (e.g., one or more of the duodenum, jejunum, and ileum). In these embodiments, the modified-release formulation substantially releases in the large intestine (e.g., one or more of the cecum, ascending colon, transverse colon, descending colon, and sigmoid colon). In various embodiments, the pH values recited herein may be adjusted as known in the art to account for the state of the subject, e.g., whether in a fasting or postprandial state.

[0180] In some embodiments, the modified-release formulation is substantially stable in gastric fluid and substantially unstable in intestinal fluid and, accordingly, is substantially released in the small intestine (e.g., one or more of the duodenum, jejunum, and ileum) and/or large intestine (e.g., one or more of the cecum, ascending colon, transverse colon, descending colon, and sigmoid colon).

[0181] In some embodiments, the modified-release formulation is stable in gastric fluid or stable in acidic environments. These modified-release formulations release about 30% or less by weight of the bacterial strains and/or additional therapeutic agent in the modified-release formulation in gastric fluid with a pH of about 4 to about 5 or less, or simulated gastric fluid with a pH of about 4 to about 5 or less, in about 15, or about 30, or about 45, or about 60, or about 90 minutes. Modified-release formulations of the of the invention may release from about 0% to about 30%, from about 0% to about 25%, from about 0% to about 20%, from about 0% to about 15%, from about 0% to about 10%, about 5% to about 30%, from about 5% to about 25%, from about 5% to about 20%, from about 5% to about 15%, from about 5% to about 10% by weight of the bacterial strains and/or additional therapeutic agent in the modified-release formulation in gastric fluid with a pH of 4-5, or less or simulated gastric fluid with a pH of 4-5 or less, in about 15, or about 30, or about 45, or about 60, or about 90 minutes. Modified-release formulations of the invention may release about 1%, about 2%, about 3%, about 4%, about 5%, about 6%, about 7%, about 8%, about 9%, or about 10% by weight of the total bacterial strains and/or additional therapeutic agent in the modified-release formulation in gastric fluid with a pH of 5 or less, or simulated gastric fluid with a pH of 5 or less, in about 15, or about 30, or about 45, or about 60, or about 90 minutes.

[0182] In some embodiments, the modified-release formulation is unstable in intestinal fluid. These modified-release formulations release about 70% or more by weight of the bacterial strains and/or additional therapeutic agent in the modified-release formulation in intestinal fluid or simulated intestinal fluid in about 15, or about 30, or about 45, or about 60, or about 90 minutes. In some embodiments, the modified-release formulation is unstable in near neutral to alkaline environments. These modified-release formulations release about 70% or more by weight of the bacterial strains and/or additional therapeutic agent in the modified-release formulation in intestinal fluid with a pH of about 4-5 or greater, or simulated intestinal fluid with a pH of about 4-5 or greater, in about 15, or about 30, or about 45, or about 60, or about 90 minutes. A modified-release formulation that is unstable in near neutral or alkaline environments may release 70% or more by weight of bacterial strains and/or additional therapeutic agent in the modified-release formulation in a fluid having a pH greater than about 5 (e.g., a fluid having a pH of from about 5 to about 14, from about 6 to about 14, from about 7 to about 14, from about 8 to about 14, from about 9 to about 14, from about 10 to about 14, or from about 11 to about 14) in from about 5 minutes to about 90 minutes, or from about 10 minutes to about 90 minutes, or from about 15 minutes to about 90 minutes, or from about 20 minutes to about 90 minutes, or from about 25 minutes to about 90 minutes, or from about 30 minutes to about 90 minutes, or from about 5 minutes to about 60 minutes, or from about 10 minutes to about 60 minutes, or from about 15 minutes to about 60 minutes, or from about 20 minutes to about 60 minutes, or from about 25 minutes to about 90 minutes, or from about 30 minutes to about 60 minutes.

[0183] Examples of simulated gastric fluid and simulated intestinal fluid include, but are not limited to, those disclosed in the 2005 Pharmacopeia 23NF/28USP in Test Solutions at page 2858 and/or other simulated gastric fluids and simulated intestinal fluids known to those of skill in the art, for example, simulated gastric fluid and/or intestinal fluid prepared without enzymes.

[0184] In various embodiments, the modified-release formulation of the invention is substantially stable in chyme. For example, there is, in some embodiments, a loss of less about 50% or about 40%, or about 30%, or about 20%, or about 10% of bacterial strains activity in about 10, or 9, or 8, or 7, or 6, or 5, or 4, or 3, or 2, or 1 hour from administration.

[0185] In various embodiments, the modified-release formulations of the present invention are designed for immediate release (e.g., upon ingestion). In various embodiments, the modified-release formulations may have sustained-release profiles, i.e., slow release of the active ingredient(s) in the body (e.g., GI tract) over an extended period of time. In various embodiments, the modified-release formulations may have a delayed-release profile, i.e., not immediately release the active ingredient(s) upon ingestion; rather, postponement of the release of the active ingredient(s) until the composition is lower in the GI tract; for example, for release in the small intestine (e.g., one or more of duodenum, jejunum, ileum) or the large intestine (e.g., one or more of cecum, ascending, transverse, descending or sigmoid portions of the colon, and rectum). For example, a composition can be enteric coated to delay release of the active ingredient(s) until it reaches the small intestine or large intestine.

[0186] In various embodiments, the modified-release formulation of the present invention may utilize one or more modified-release coatings such as delayed-release coatings to provide for effective, delayed yet substantial delivery of the bacterial strains to the GI tract together with, optionally, additional therapeutic agents.

[0187] In one embodiment, the delayed-release coating includes an enteric agent that is substantially stable in acidic environments and substantially unstable in near neutral to alkaline environments. In an embodiment, the delayed-release coating contains an enteric agent that is substantially stable in gastric fluid. The enteric agent can be selected from, for example, solutions or dispersions of methacrylic acid copolymers, cellulose acetate phthalate (CAP), hydroxypropylmethyl cellulose phthalate, polyvinyl acetate phthalate, carboxymethylethylcellulose, and EUDRAGIT®-type polymer (poly(methacrylic acid, methylmethacrylate), hydroxypropyl methylcellulose acetate succinate, cellulose acetate trimellitate, hypromellose (INN) hydroxypropyl methylcellulose (HPMC), shellac or other suitable enteric coating polymers. Similar polymers include Kollicoat® MAE 30 DP and Kollicoat® MAE 100 P. In various embodiments, the enteric agent may be a combination of the foregoing solutions or dispersions. In embodiments, the enteric agent comprises any EUDRAGIT®-type polymer, derivatives thereof, and copolymers thereof. EUDRAGIT® polymers are available from Evonik Industries AG (Essen, Germany).

[0188] In certain embodiments, one or more coating system additives are used with the enteric agent. For example, one or more PlasACRYL™ additives may be used as an anti-tacking agent coating additive. Illustrative PlasACRYL™ additives include, but are not limited to PlasACRYL™ HTP20 and PlasACRYL™ T20.

[0189] In another embodiment, the delayed-release coating may degrade as a function of time when in aqueous solution without regard to the pH and/or presence of enzymes in the solution. Such a coating may comprise a water insoluble polymer. Its solubility in aqueous solution is therefore independent of the pH. The term “pH independent” as used herein means that the water permeability of the polymer and its ability to release pharmaceutical ingredients is not a function of pH and/or is only very slightly dependent on pH. Such coatings may be used to prepare, for example, sustained release formulations. Suitable water insoluble polymers include pharmaceutically acceptable non-toxic polymers that are substantially insoluble in aqueous media, e.g., water, independent of the pH of the solution. Suitable polymers include, but are not limited to, cellulose ethers, cellulose esters, or cellulose ether-esters, i.e., a cellulose derivative in which some of the hydroxy groups on the cellulose skeleton are substituted with alkyl groups and some are modified with alkanoyl groups. Examples include ethyl cellulose, acetyl cellulose, nitrocellulose, and the like. Other examples of insoluble polymers include, but are not limited to, lacquer, and acrylic and/or methacrylic ester polymers, polymers or copolymers of acrylate or methacrylate having a low quaternary ammonium content, or mixture thereof and the like. Other examples of insoluble polymers include EUDRAGIT RS®, EUDRAGIT RL®, and EUDRAGIT NE®. Insoluble polymers useful in the present invention include polyvinyl esters, polyvinyl acetals, polyacrylic acid esters, butadiene styrene copolymers, and the like. In one embodiment, colonic delivery is achieved by use of a slowly-eroding wax plug (e.g., various PEGS, including for example, PEG6000).

[0190] In some embodiments, an enteric (interior or exterior) coating comprises a polymeric material. Non-limiting examples of suitable polymeric materials include polymethylmethacrylate, poly(N,N-dimethylacrylamide), polyoxamer, polyethylene glycol, polypropylene glycol, polysaccharides (e.g., sucrose, trehalose, glucose, starches such as tapioca and arrowroot, chitosan, alginate, guar gum), polyacrylate, polymethacrylate, polyvinyl alcohol, polyalkylene glycols, polyacrylamide, polyvinylpyrrolidone, polyurethane, polylactide, lactide/glycolide copolymer, polycaprolactone, polydioxanones, polyanhydride, polyhydroxybutyrate, polysiloxane, polytrimethylene carbonate, polyalkylene glycol, and combinations and/or copolymers thereof.

[0191] In a further embodiment, the delayed-release coating may be degraded by a microbial enzyme present in the gut flora. In one embodiment, the delayed-release coating may be degraded by a bacteria present in the small intestine. In another embodiment, the delayed-release coating may be degraded by a bacteria present in the large intestine.

[0192] Such a coating may comprise a mixture of a first material which is susceptible to attack by colonic bacteria and a second material which has a solubility threshold at about pH 5 or above. The first material may comprise a polysaccharide selected from starch, amylose, amylopectin, chitosan, chondroitin sulfate, cyclodextrin, dextran, pullulan, carrageenan, scleroglucan, chitin, curdulan, and levan. The second material may dissolve in a pH-dependent manner such that it has a “pH threshold” which is the pH below which it is insoluble and at or above which it is soluble. The pH of the surrounding medium triggers dissolution of the second material; thus, little of the second material dissolves below the pH threshold. Once the pH of the surrounding medium reaches (or exceeds) the pH threshold, the second material becomes soluble. In embodiments, the surrounding medium means the medium in the GI tract, such as the gastric juice or intestinal juice or the in vitro equivalent of the medium in the GI tract. The second material may be a film-forming polymeric material such as an acrylate polymer, a cellulose polymer or a polyvinyl-based polymer. Examples of suitable cellulose polymers include cellulose acetate phthalate (“CAP”), cellulose acetate trimellitate (“CAT”), and hydropropylmethylcellulose acetate succinate. Examples of suitable polyvinyl-based polymers include polyvinyl acetate phthalate (“PVAP”). The second material may be a co-polymer of a (meth)acrylic acid and a (meth)acrylic acid C1-4 alkyl ester, for instance, a copolymer of methacrylic acid and methacrylic acid methyl ester. Such a polymer is known as a poly(methacrylic acid/methyl methacrylate) co-polymer. Examples of such co-polymers are usually anionic and not sustained release polymethacrylates. Examples of anionic poly(methacrylic acid/methyl methacrylate) co-polymers include Eudragit® L, Eudragit® S, and Eudragit® FS. The coating may have an additional layer either between the bacterial mixture core and the layer comprising the delayed release composition described above and/or an outer layer coating the delayed release composition layer as described above.

[0193] In embodiments, a capsule comprises an interior enteric coating which has hydrophobic properties which prevents or retards the contact of an aqueous phase (e.g., a drug substance of the present disclosure) with the capsule (or capsule material). In embodiments, the interior enteric coating comprises a hydrophobic coating. The hydrophobic coating may comprise a material selected from the group consisting of shellac, zein, polysaccharides, silk, polycaprolactone, oil, pectin, wax, polymers, shellac, and derivatives thereof, and combinations thereof. Non-limiting examples of suitable polysaccharides include alginate, hyaluronic acid, and chitosan. Non-limiting examples of suitable oils include avocado oil, vegetable oil, castor oil, olive oil, jojoba oil, cocoa butter, coconut oil. Non-limiting examples of suitable waxes include beeswax, carnauba wax, and paraffin wax. In some embodiments, the hydrophobic coating is shellac.

[0194] An interior enteric coating may be selected and designed such that it protects the capsule (or capsule material) from an aqueous phase. For example, in some embodiments, the interior enteric coating prevents the aqueous phase (e.g., a mixture of bacterial strains of the present disclosure) from contacting the capsule and/or such that the capsule material is not degraded and/or dissolved by the aqueous phase. In some embodiments, the interior enteric coating protects the capsule from the aqueous phase for greater than or equal to 1 day, greater than or equal to 2 days, greater than or equal to 3 days, greater than or equal to 7 days, greater than or equal to 14 days, greater than or equal to 30 days, greater than or equal to 90 days, or greater than or equal to 180 days at room temperature under ambient conditions. In certain embodiments, the interior enteric coating protects the capsule from the aqueous phase for less than or equal to 365 days, less than or equal to 180 days, less than or equal to 90 days, less than or equal to 30 days, less than or equal to 14 days, less than or equal to 7 days, less than or equal to 3 days, or less than or equal to 2 days at room temperature under ambient conditions. Combinations of the above-referenced ranges are possible (e.g., greater than or equal to 1 day and less than or equal to 365 days). Other ranges are also possible. As such, in some embodiments, the capsule is stable at room temperature under ambient conditions for the times listed above (e.g., greater than or equal to 1 day).

[0195] In certain embodiments, the interior enteric coating protects the capsule from the aqueous phase (e.g., the interior enteric coating prevents the aqueous phase from contacting the capsule and/or such that the capsule material is not degraded and/or dissolved by the aqueous phase) for greater than or equal to 1 hour, greater than or equal to 2 hours, greater than or equal to 3 hours, greater than or equal to 6 hours, greater than or equal to 12 hours, greater than or equal to 18 hours, greater than or equal to 24 hours, greater than or equal to 48 hours, or greater than or equal to 96 hours at 37° C. In certain embodiments, the interior enteric coating protects the capsule from the aqueous phase for less than or equal to 168 hours, less than or equal to 96 hours, less than or equal to 48 hours, less than or equal to 24 hours, less than or equal to 18 hours, less than or equal to 12 hours, less than or equal to 6 hours, less than or equal to 3 hours, or less than or equal to 2 hours at 37° C. under ambient conditions. Combinations of the above-referenced ranges are possible (e.g., greater than or equal to 1 hour and less than or equal to 168 hours). As such, in certain embodiments, the capsule is stable at 37° C. under ambient conditions for the times listed above (e.g., greater than or equal to 1 hour).

[0196] In various embodiments, the modified release formulation is designed for release in the colon. Various colon-specific delivery approaches may be utilized. For example, the modified release formulation may be formulated using a colon-specific drug delivery system (CODES) as described for example, in Li et al., AAPS PharmSciTech (2002), 3(4): 1-9, the entire contents of which are incorporated herein by reference. Drug release in such a system is triggered by colonic microflora coupled with pH-sensitive polymer coatings. For example, the formulation may be designed as a core tablet with three layers of polymer. The first coating is an acid-soluble polymer (e.g., EUDRAGIT E), the outer coating is enteric, along with a hydroxypropyl methylcellulose barrier layer interposed in between. In another embodiment, colon delivery may be achieved by formulating the bacterial strains (and/or additional therapeutic agent) with specific polymers that degrade in the colon such as, for example, pectin. The pectin may be further gelled or crosslinked with a cation such as a zinc cation. In an embodiment, the formulation is in the form of ionically crosslinked pectin beads which are further coated with a polymer (e.g., EUDRAGIT polymer). Additional colon specific formulations include, but are not limited to, pressure-controlled drug delivery systems (prepared with, for example, ethylcellulose) and osmotic controlled drug delivery systems (i.e., ORDS-CT).

[0197] In some embodiments, an enteric (interior or exterior) coating comprises an enteric elastomer. In some embodiments, the enteric elastomer comprises a mixture of two or more polymers with carboxyl functionality such that the two or more polymers form hydrogen bonds with one another and has both enteric and elastic properties. In certain embodiments, the enteric elastomer comprises a first polymer comprising a structure as in Formula (I):

[chemical structure]

or a pharmaceutically acceptable salt thereof, wherein each R¹ is the same or different and is selected from the group consisting of optionally substituted alkylene, optionally substituted heteroalkylene, optionally substituted arylene, and optionally substituted heteroarylene, each R² is the same or different and is selected from the group consisting of hydrogen, optionally substituted alkyl, and optionally substituted heteroalkyl, each R³ is the same or different and is selected from the group consisting of optionally substituted alkylene and optionally substituted heteroalkylene, n is an integer between 25 and 250,000, and a second polymer comprising a structure as in Formula (II) hydrogen bonded to the first polymer:

[chemical structure]

or a pharmaceutically acceptable salt thereof, wherein each R⁴ is the same or different and is selected from the group consisting of optionally substituted alkylene and optionally substituted heteroalkylene, each R⁵ is the same or different and is selected from the group consisting of optionally substituted alkylene and optionally substituted heteroalkylene, each R⁶ is the same or different and is selected from the group consisting of hydrogen, optionally substituted alkyl, and optionally substituted heteroalkyl, each R⁷ is the same or different and is selected from the group consisting of hydrogen, optionally substituted alkyl, and optionally substituted heteroalkyl, each R⁸ is the same or different and is optionally substituted alkyl, p is an integer between 1 and 10, q is an integer between 1 and 10, and z is an integer between 1 and 150,000, provided that (p+q)*z is greater than or equal to 20. Suitable enteric elastomers and methods for making such enteric elastomers are described in more detail in International Patent Publication No. WO2015191922, which is incorporated herein by reference in its entirety for all purposes.

[0198] In some embodiments, a capsule comprises a polymeric material. Non-limiting examples of suitable polymeric materials include gelatin, polymethylmethacrylate, poly(N,N-dimethylacrylamide), polyoxamer, polyethylene glycol, polypropylene glycol, polysaccharides (e.g., sucrose, trehalose, glucose, starches such as tapioca and arrowroot, chitosan, alginate, guar gum), polyacrylate, polymethacrylate, polyvinyl alcohol, polyalkylene glycols, polyacrylamide, polyvinylpyrrolidone, polyurethane, polylactide, lactide/glycolide copolymer, polycaprolactone, polydioxanones, polyanhydride, polyhydroxybutyrate, polysiloxane, polytrimethylene carbonate, polyalkylene glycol, and combinations and/or copolymers thereof. In embodiments, the capsule comprises gelatin.

[0199] In certain embodiments, the capsule may comprise a bioadherent polymer such as mucin.

[0200] Embodiments of dual-coated coated capsules are disclosed in WO2018057747, the contents of which are incorporated by reference in their entirety.

[0201] In certain embodiments, the capsule has a particular shape or size. For example, in some cases, the capsule has a shape or size as described in the USP including, but not limited to, #000 capsule, #00 capsule, #0 capsule, #1 capsule, #2 capsule, #3 capsule, #4 capsule, or #5 capsule. Other capsule shapes and/or sizes are also possible.

[0202] Formulations for colon specific delivery of the bacterial strains (and/or additional therapeutic agents), as described herein, may be evaluated using, for example, in vitro dissolution tests. For example, parallel dissolution studies in different buffers may be undertaken to characterize the behavior of the formulations at different pH levels. Alternatively, in vitro enzymatic tests may be carried out. For example, the formulations may be incubated in fermenters containing suitable medium for bacteria, and the amount of drug released at different time intervals is determined. Drug release studies can also be done in buffer medium containing enzymes or rat or guinea pig or rabbit cecal contents and the amount of drug released in a particular time is determined. In a further embodiment, in vivo evaluations may be carried out using animal models such as dogs, guinea pigs, rats, and pigs. Further, clinical evaluation of colon specific drug delivery formulations may be evaluated by calculating drug delivery index (DDI) which considers the relative ratio of RCE (relative colonic tissue exposure to the drug) to RSC (relative amount of drug in blood i.e., that is relative systemic exposure to the drug). Higher drug DDI indicates better colon drug delivery. Absorption of drugs from the colon may be monitored by colonoscopy and intubation.

[0203] In various embodiments, the present formulation provides for substantial uniform dissolution of the bacterial strains (and/or additional therapeutic agent) in the area of release in the GI tract. In an embodiment, the present formulation minimizes patchy or heterogeneous release of the bacterial strains.

[0204] In various embodiments, the present formulations provide for release of multiple doses of the bacterial strains along the GI tract. For example, the composition and/or formulation can release multiple doses of the bacterial strains at different locations along the intestines, at different times, and/or at different pH. The overall release profile of such a formulation may be adjusted using, for example, multiple particle types or multiple layers. For example, in one embodiment, the first dose of the bacterial strains may be formulated for release in, for example, the small intestine (e.g., one or more of duodenum, jejunum, ileum), whereas the second dose is formulated for delayed release in, for example, the large intestines (e.g., one or more of cecum, ascending, transverse, descending or sigmoid portions of the colon, and rectum). In another example, the first dose of the bacterial strains may be formulated for release in, for example, the small intestine (e.g., one or more of duodenum, jejunum, ileum), whereas the second dose is formulated for delayed release in, for example, another part of the small intestine (e.g., one or more of duodenum, jejunum, ileum). In another embodiment, the first dose of the bacterial strains may be formulated for release in, for example, the large intestine (e.g., one or more of cecum, ascending, transverse, descending or sigmoid portions of the colon, and rectum), whereas the second dose is formulated for delayed release in, for example, another part of the large intestine (e.g., one or more of cecum, ascending, transverse, descending or sigmoid portions of the colon, and rectum). In various embodiments, the composition and/or formulation may release at least one dose, at least two doses, at least three doses, at least four doses, or at least five doses of the bacterial strains at different locations along the intestines, at different times, and/or at different pH.

[0205] In some embodiments, the bacterial strains described herein are in the form of live, vegetative cells. In some embodiments, the bacterial strains described herein are in the form of spores. In some embodiments, the bacterial strains described herewith are lyophilized. As used herein, “lyophilization” or “freeze drying” refers to the process of drying a material by first freezing it and then encouraging the ice within it to sublimate in a vacuum environment.

[0206] By way of non-limiting example, lyophilization can be via methods known in the art, including those described in U.S. Pat. No. 7,799,328, the contents of which are hereby incorporated by reference in their entirety. In some embodiments, lyophilized bacterial strains described herein are placed in an enterically coated soft gel or capsule.

[0207] In one aspect, a pharmaceutical composition comprises a lyophilized formulation further comprising a reducing agent. In certain embodiments, the reducing agent comprises cysteine selected from the group consisting of D-cysteine and L-cysteine. In another aspect, cysteine is at a concentration of at least about 0.025%. In one aspect, cysteine is at a concentration of about 0.025%. In another aspect, cysteine is at a concentration of 0.025%. In another aspect, another reducing agent other than cysteine is used in lieu of, or in combination with cysteine. In an aspect, another reducing agent is selected from the group comprising ascorbic acid, sodium ascorbate, thioglycolic acid, sodium sulfite, sodium bisulfite, sodium metabisulfite, potassium metabisulfite, Glutathione, Methionine, thioglycerol, and alpha tocopherol.

[0208] In one aspect, cysteine is at a concentration of at least about 0.005%, at least about 0.01%, at least about 0.015%, at least about 0.02%, at least about 0.025%, at least about 0.03%, at least about 0.035%, at least about 0.04%, at least about 0.045%, at least about 0.05%, at least about 0.055%, at least about 0.06%, at least about 0.065%, at least about 0.07%, at least about 0.075%, at least about 0.08%, at least about 0.085%, at least about 0.09%, at least about 0.095%, at least about 0.1%, at least about 0.12%, at least about 0.14%, at least about 0.16%, at least about 0.18%, at least about 0.2%, at least about 0.25%, at least about 0.3%, at least about 0.4%, at least about 0.5%, at least about 0.6%, at least about 0.7%, at least about 0.8%, at least about 0.9%, at least about 1%, at least about 2%, at least about 4%, at least about 6%, at least about 8%, at least about 10%, at least about 12%, at least about 14%, at least about 16%, at least about 18%, at least about 20%, at least about 22%, at least about 24%, or at least about 26%.

[0209] In one aspect, a therapeutic composition comprises a cryoprotectant. As used herein, a “cryoprotectant” refers to a substance that is added to a formulation in order to protect an active ingredient during freezing. In an aspect, a cryoprotectant comprises, consists essentially of, or consists of polyethylene glycol, skim milk, erythritol, arabitol, sorbitol, glucose, fructose, alanine, glycine, proline, sucrose, lactose, ribose, trehalose, dimethyl sulfoxide (DMSO), glycerol, or a combination thereof. In an aspect of the present disclosure, a cryoprotectant can be selected from the group comprising 5% Sucrose; 10% Sucrose; 10% Skim milk; 10% Trehalose with 2.5% sucrose; 5% Trehalose with 2.5% sucrose; 5% Mannitol; 5% Mannitol with 0.1% Polysorbate 80; 10% Mannitol; 10% Mannitol with 0.1% Polysorbate 80; 5% Trehalose; 5% Trehalose with 0.1% Polysorbate 80; 10% Trehalose; and 10% Trehaolse with 0.1% Polysorbate 80.

[0210] In another aspect, a therapeutic composition comprises a lyoprotectant. As used herein, a “lyoprotectant” refers to a substance that is added to a formulation in order to protect an active ingredient during the drying stage of a lyophilization (also known as freeze-drying) process. In one aspect, the same substance or the same substance combination is used as both a cryoprotectant and a lyoprotectant. Exemplary lyoprotectants include sugars such as sucrose or trehalose; an amino acid such as monosodium glutamate or histidine; a methylamine such as betaine; a lyotropic salt such as magnesium sulfate; a polyol such as trihydric or higher sugar alcohols, e.g. glycerin, erythritol, glycerol, arabitol, xylitol, sorbitol, and mannitol; propylene glycol; polyethylene glycol; Pluronics; and combinations thereof. In one aspect, a lyoprotectant is a non-reducing sugar, such as trehalose or sucrose. In one aspect, a cryoprotectant or a lyoprotectant consists essentially of, or consists of, one or more substances mentioned in this paragraph and the paragraph above.

[0211] In one aspect, a cryoprotectant or a lyoprotectant comprise an intracellular agent, e.g., DMSO, Glycerol, or PEG, which penetrates inside the cell preventing the formation of ice crystals that could result in membrane rupture. In another aspect, a cryoprotectant or a lyoprotectant comprise an extracellular agent, e.g., sucrose, trehalose, or dextrose, which does not penetrate into the cell membrane but acts to improve the osmotic imbalance that occurs during freezing.

[0212] In one aspect, the present disclosure provides a pharmaceutical composition comprising a lyophilized fecal microbe preparation comprising a lyophilization formulation comprising at least about 12.5% trehalose.

[0213] In one aspect, a lyophilization formulation comprises at least about 5%, at least about 7.5%, at least about 10%, at least about 12.5%, at least about 13%, at least about 13.5%, at least about 14%, at least about 14.5%, at least about 15%, at least about 15.5%, at least about 16%, at least about 16.5%, at least about 17%, at least about 17.5%, at least about 18%, at least about 18.5%, at least about 19%, at least about 19.5%, at least about 20%, at least about 22.5%, at least about 25%, at least about 27.5%, at least about 30%, at least about 32.5%, at least about 35%, at least about 37.5%, at least about 40%, at least about 42.5%, at least about 45%, at least about 47.5%, at least about 50%, at least about 52.5%, at least about 55%, at least about 57.5%, or at least about 60% of trehalose.

[0214] In various embodiments, the formulations of the present invention take the form of those as described in one or more of U.S. Pat. Nos. 8,535,713 and 8,9117,77 and US Patent Publication Nos. 20120141585, 20120141531, 2006/001896, 2007/0292523, 2008/0020018, 2008/0113031, 2010/0203120, 2010/0255087, 2010/0297221, 2011/0052645, 2013/0243873, 2013/0330411, 2014/0017313, and 2014/0234418, the contents of which are hereby incorporated by reference in their entirety.

[0215] In various embodiments, the formulations of the present invention take the form of those as described in International Patent Publication No. WO 2008/135090, the contents of which are hereby incorporated by reference in their entirety.

[0216] In various embodiments, the formulations of the present invention take the form of those described in one or more of U.S. Pat. Nos. 4,196,564; 4,196,565; 4,247,006; 4,250,997; 4,268,265; 5,317,849; 6,572,892; 7,712,634; 8,074,835; 8,398,912; 8,440,224; 8,557,294; 8,646,591; 8,739,812; 8,810,259; 8,852,631; and 8,911,788 and US Patent Publication Nos. 2014/0302132; 2014/0227357; 20140088202; 20130287842; 2013/0295188; 2013/0307962; and 20130184290, the contents of which are hereby incorporated by reference in their entirety.

[0217] Administration and Dosage

[0218] It will be appreciated that the actual dose of the bacterial strains (and/or additional therapeutic agents) to be administered according to the present invention will vary according to, for example, the particular dosage form and the mode of administration. Many factors that may modify the action of the bacterial strains (e.g., body weight, gender, diet, time of administration, route of administration, rate of excretion, condition of the subject, drug combinations, genetic disposition and reaction sensitivities) can be taken into account by those skilled in the art. Administration can be carried out continuously or in one or more discrete doses within the maximum tolerated dose. Optimal administration rates for a given set of conditions can be ascertained by those skilled in the art using conventional dosage administration tests.

[0219] In various embodiments, the dose of the bacterial strains is effective to modulate a patient's microbiome to favor an ecological balance, i.e., treating or preventing a GI disorder described herein.

[0220] In various embodiments, the dose of the bacterial strains comprises at least 1×10⁴, 1×10⁵, 1×10⁶, 1×10⁷, 1×10⁸, 1×10⁹, 1×10¹⁰, 1×10¹¹ or greater than 1×10¹¹ colony forming units (CFUs) or bacteria (e.g., germinable bacterial spores).

[0221] Individual doses of the bacterial strains (and/or additional therapeutic agents) can be administered in unit dosage forms (e.g., tablets or capsules) containing, for example, from about 0.01 mg to about 5,000 mg, from about 0.01 mg to about 4,000 mg, from about 0.01 mg to about 3,000 mg, from about 0.01 mg to about 2,000 mg, from about 0.01 mg to about 1,000 mg, from about 0.01 mg to about 950 mg, from about 0.01 mg to about 900 mg, from about 0.01 mg to about 850 mg, from about 0.01 mg to about 800 mg, from about 0.01 mg to about 750 mg, from about 0.01 mg to about 700 mg, from about 0.01 mg to about 650 mg, from about 0.01 mg to about 600 mg, from about 0.01 mg to about 550 mg, from about 0.01 mg to about 500 mg, from about 0.01 mg to about 450 mg, from about 0.01 mg to about 400 mg, from about 0.01 mg to about 350 mg, from about 0.01 mg to about 300 mg, from about 0.01 mg to about 250 mg, from about 0.01 mg to about 200 mg, from about 0.01 mg to about 150 mg, from about 0.01 mg to about 100 mg, from about 0.1 mg to about 90 mg, from about 0.1 mg to about 80 mg, from about 0.1 mg to about 70 mg, from about 0.1 mg to about 60 mg, from about 0.1 mg to about 50 mg, from about 0.1 mg to about 40 mg, from about 0.1 mg to about 30 mg, from about 0.1 mg to about 20 mg, from about 0.1 mg to about 10 mg, from about 0.1 mg to about 5 mg, from about 0.1 mg to about 3 mg, from about 0.1 mg to about 1 mg of the active ingredient per unit dosage form, or from about 5 mg to about 80 mg per unit dosage form. For example, a unit dosage form can include about 0.01 mg, about 0.02 mg, about 0.03 mg, about 0.04 mg, about 0.05 mg, about 0.06 mg, about 0.07 mg, about 0.08 mg, about 0.09 mg, about 0.1 mg, about 0.2 mg, about 0.3 mg, about 0.4 mg, about 0.5 mg, about 0.6 mg, about 0.7 mg, about 0.8 mg, about 0.9 mg, about 1 mg, about 2 mg, about 3 mg, about 4 mg, about 5 mg, about 6 mg, about 7 mg, about 8 mg, about 9 mg about 10 mg, about 15 mg, about 20 mg, about 25 mg, about 30 mg, about 35 mg, about 40 mg, about 45 mg, about 50 mg, about 55 mg, about 60 mg, about 65 mg, about 70 mg, about 75 mg, about 80 mg, about 85 mg, about 90 mg, about 95 mg, about 100 mg, about 150 mg, about 200 mg, about 250 mg, about 300 mg, about 350 mg, about 400 mg, about 450 mg, about 500 mg, about 550 mg, about 600 mg, about 650 mg, about 700 mg, about 750 mg, about 800 mg, about 850 mg, about 900 mg, about 950 mg, about 1,000 mg, about 2,000 mg, about 3,000 mg, about 4,000 mg, or about 5,000 mg of the active ingredient, inclusive of all values and ranges therebetween.

[0222] In one embodiment, the bacterial strains (and/or additional therapeutic agents) is administered at an amount of from about 0.01 mg to about 100 mg daily, an amount of from about 0.01 mg to about 5,000 mg daily, about 0.01 mg to about 4,000 mg daily, about 0.01 mg to about 3,000 mg daily, about 0.01 mg to about 2,000 mg daily, about 0.01 mg to about 1,000 mg daily, from about 0.01 mg to about 950 mg daily, from about 0.01 mg to about 900 mg daily, from about 0.01 mg to about 850 mg daily, from about 0.01 mg to about 800 mg daily, from about 0.01 mg to about 750 mg daily, from about 0.01 mg to about 700 mg daily, from about 0.01 mg to about 650 mg daily, from about 0.01 mg to about 600 mg daily, from about 0.01 mg to about 550 mg daily, from about 0.01 mg to about 500 mg daily, from about 0.01 mg to about 450 mg daily, from about 0.01 mg to about 400 mg daily, from about 0.01 mg to about 350 mg daily, from about 0.01 mg to about 300 mg daily, from about 0.01 mg to about 250 mg daily, from about 0.01 mg to about 200 mg daily, from about 0.01 mg to about 150 mg daily, from about 0.1 mg to about 100 mg daily, from about 0.1 mg to about 95 mg daily, from about 0.1 mg to about 90 mg daily, from about 0.1 mg to about 85 mg daily, from about 0.1 mg to about 80 mg daily, from about 0.1 mg to about 75 mg daily, from about 0.1 mg to about 70 mg daily, from about 0.1 mg to about 65 mg daily, from about 0.1 mg to about 60 mg daily, from about 0.1 mg to about 55 mg daily, from about 0.1 mg to about 50 mg daily, from about 0.1 mg to about 45 mg daily, from about 0.1 mg to about 40 mg daily, from about 0.1 mg to about 35 mg daily, from about 0.1 mg to about 30 mg daily, from about 0.1 mg to about 25 mg daily, from about 0.1 mg to about 20 mg daily, from about 0.1 mg to about 15 mg daily, from about 0.1 mg to about 10 mg daily, from about 0.1 mg to about 5 mg daily, from about 0.1 mg to about 3 mg daily, from about 0.1 mg to about 1 mg daily, or from about 5 mg to about 80 mg daily. In various embodiments, the bacterial strains (and/or additional therapeutic agents) is administered at a daily dose of about 0.01 mg, about 0.02 mg, about 0.03 mg, about 0.04 mg, about 0.05 mg, about 0.06 mg, about 0.07 mg, about 0.08 mg, about 0.09 mg, about 0.1 mg, about 0.2 mg, about 0.3 mg, about 0.4 mg, about 0.5 mg, about 0.6 mg, about 0.7 mg, about 0.8 mg, about 0.9 mg, about 1 mg, about 2 mg, about 3 mg, about 4 mg, about 5 mg, about 6 mg, about 7 mg, about 8 mg, about 9 mg about 10 mg, about 15 mg, about 20 mg, about 25 mg, about 30 mg, about 35 mg, about 40 mg, about 45 mg, about 50 mg, about 55 mg, about 60 mg, about 65 mg, about 70 mg, about 75 mg, about 80 mg, about 85 mg, about 90 mg, about 95 mg, about 100 mg, about 150 mg, about 200 mg, about 250 mg, about 300 mg, about 350 mg, about 400 mg, about 450 mg, about 500 mg, about 550 mg, about 600 mg, about 650 mg, about 700 mg, about 750 mg, about 800 mg, about 850 mg, about 900 mg, about 950 mg, about 1,000 mg, about 2,000 mg, about 3,000 mg, about 4,000 mg, or about 5,000 mg inclusive of all values and ranges therebetween.

[0223] In some embodiments, a suitable dosage of the bacterial strains (and/or additional therapeutic agents) is in a range of about 0.01 mg/kg to about 100 mg/kg of body weight of the subject, for example, about 0.01 mg/kg, about 0.02 mg/kg, about 0.03 mg/kg, about 0.04 mg/kg, about 0.05 mg/kg, about 0.06 mg/kg, about 0.07 mg/kg, about 0.08 mg/kg, about 0.09 mg/kg, about 0.1 mg/kg, about 0.2 mg/kg, about 0.3 mg/kg, about 0.4 mg/kg, about 0.5 mg/kg, about 0.6 mg/kg, about 0.7 mg/kg, about 0.8 mg/kg, about 0.9 mg/kg, about 1 mg/kg, about 1.1 mg/kg, about 1.2 mg/kg, about 1.3 mg/kg, about 1.4 mg/kg, about 1.5 mg/kg, about 1.6 mg/kg, about 1.7 mg/kg, about 1.8 mg/kg, 1.9 mg/kg, about 2 mg/kg, about 3 mg/kg, about 4 mg/kg, about 5 mg/kg, about 6 mg/kg, about 7 mg/kg, about 8 mg/kg, about 9 mg/kg, about 10 mg/kg body weight, about 20 mg/kg body weight, about 30 mg/kg body weight, about 40 mg/kg body weight, about 50 mg/kg body weight, about 60 mg/kg body weight, about 70 mg/kg body weight, about 80 mg/kg body weight, about 90 mg/kg body weight, or about 100 mg/kg body weight, inclusive of all values and ranges therebetween. In other embodiments, a suitable dosage of the bacterial strains (and/or additional therapeutic agents) in a range of about 0.01 mg/kg to about 100 mg/kg of body weight, in a range of about 0.01 mg/kg to about 90 mg/kg of body weight, in a range of about 0.01 mg/kg to about 80 mg/kg of body weight, in a range of about 0.01 mg/kg to about 70 mg/kg of body weight, in a range of about 0.01 mg/kg to about 60 mg/kg of body weight, in a range of about 0.01 mg/kg to about 50 mg/kg of body weight, in a range of about 0.01 mg/kg to about 40 mg/kg of body weight, in a range of about 0.01 mg/kg to about 30 mg/kg of body weight, in a range of about 0.01 mg/kg to about 20 mg/kg of body weight, in a range of about 0.01 mg/kg to about 10 mg/kg of body weight, in a range of about 0.01 mg/kg to about 9 mg/kg of body weight, in a range of about 0.01 mg/kg to about 8 mg/kg of body weight, in a range of about 0.01 mg/kg to about 7 mg/kg of body weight, in a range of 0.01 mg/kg to about 6 mg/kg of body weight, in a range of about 0.05 mg/kg to about 5 mg/kg of body weight, in a range of about 0.05 mg/kg to about 4 mg/kg of body weight, in a range of about 0.05 mg/kg to about 3 mg/kg of body weight, in a range of about 0.05 mg/kg to about 2 mg/kg of body weight, in a range of about 0.05 mg/kg to about 1.5 mg/kg of body weight, or in a range of about 0.05 mg/kg to about 1 mg/kg of body weight.

[0224] In an aspect, a therapeutic composition provided here comprises a fecal microbiota comprising a Shannon Diversity Index of greater than or equal to 0.3, greater than or equal to 0.4, greater than or equal to 0.5, greater than or equal to 0.6, greater than or equal to 0.7, greater than or equal to 0.8, greater than or equal to 0.9, greater than or equal to 1.0, greater than or equal to 1.1, greater than or equal to 1.2, greater than or equal to 1.3, greater than or equal to 1.4, greater than or equal to 1.5, greater than or equal to 1.6, greater than or equal to 1.7, greater than or equal to 1.8, greater than or equal to 1.9, greater than or equal to 2.0, greater than or equal to 2.1, greater than or equal to 2.2, greater than or equal to 2.3, greater than or equal to 2.4, greater than or equal to 2.5, greater than or equal to 3.0, greater than or equal to 3.1, greater than or equal to 3.2, greater than or equal to 3.3, greater than or equal to 3.4, greater than or equal to 3.5, greater than or equal to 3.6, greater than or equal to 3.7, greater than or equal to 3.8, greater than or equal to 3.9, greater than or equal to 4.0, greater than or equal to 4.1, greater than or equal to 4.2, greater than or equal to 4.3, greater than or equal to 4.4, greater than or equal to 4.5, or greater than or equal to 5.0. In another aspect, a therapeutic composition comprises fecal microbiota comprising a Shannon Diversity Index of between 0.1 and 3.0, between 0.1 and 2.5, between 0.1 and 2.4, between 0.1 and 2.3, between 0.1 and 2.2, between 0.1 and 2.1, between 0.1 and 2.0, between 0.4 and 2.5, between 0.4 and 3.0, between 0.5 and 5.0, between 0.7 and 5.0, between 0.9 and 5.0, between 1.1 and 5.0, between 1.3 and 5.0, between 1.5 and 5.0, between 1.7 and 5.0, between 1.9 and 5.0, between 2.1 and 5.0, between 2.3 and 5.0, between 2.5 and 5.0, between 2.7 and 5.0, between 2.9 and 5.0, between 3.1 and 5.0, between 3.3 and 5.0, between 3.5 and 5.0, between 3.7 and 5.0, between 31.9 and 5.0, or between 4.1 and 5.0. In one aspect, a Shannon Diversity Index is calculated at the phylum level. In another aspect, a Shannon Diversity Index is calculated at the family level. In one aspect, a Shannon Diversity Index is calculated at the genus level. In another aspect, a Shannon Diversity Index is calculated at the species level. In a further aspect, a therapeutic composition comprises a preparation of flora in proportional content that resembles a normal healthy human fecal flora.

[0225] As used herein, “Shannon Diversity Index” refers to a diversity index that accounts for abundance and evenness of species present in a given community using the formula:

$$H = - {\sum }_{i = 1}^{R} ( {p}_{i} ) ( ln ( {p}_{i} ) )$$

where H is Shannon Diversity Index, R is the total number of species in the community, and pi is the proportion of R made up of the ith species. Higher values indicate diverse and equally distributed communities, and a value of 0 indicates only one species is present in a given community. For further reference, see Shannon and Weaver, (1949) The mathematical theory of communication. The University of Illinois Press, Urbana. 117pp.

[0226] In accordance with certain embodiments of the invention, the bacterial strains may be administered, for example, more than once daily, about once per day, about every other day, about every third day, about once a week, about once every two weeks, about once every month, about once every two months, about once every three months, about once every six months, or about once every year.

[0227] In one aspect, the present disclosure provides a method for treating a disorder in a subject in need thereof, where the method comprises administering to the subject a pharmaceutically active dose of a therapeutic composition described herein. In one aspect, the present disclosure provides a method for treating a disorder in a subject in need thereof, where the method comprises administering daily to the subject a pharmaceutically active dose of a therapeutic composition described herein. In one aspect, a therapeutic composition is administered to a patient in need thereof at least once daily for at least two consecutive days. In one aspect, a therapeutic composition is administered at least once daily for at least 3, 4, 5, 6, 7, 8, 9, 10, 11, 12, 13, 14, or 15 consecutive days. In another aspect, a therapeutic composition is administered at least once daily for at least 1, 2, 3, 4, 5, 6, 7, 8, 9, 10, 11, or 12 consecutive weeks. In another aspect, a therapeutic composition is administered at least twice, three times, four times, or five times per week for at least 1, 2, 3, 4, 5, 6, 7, 8, 9, 10, 11, or 12 consecutive weeks. In one aspect, a therapeutic composition is administered at least once daily for at most 4, 5, 6, 7, 8, 9, 10, 11, 12, 13, 14, 15, 16, 17, 18, 19, or 20 consecutive days or weeks. In another aspect, a therapeutic composition is administered at least once daily for at most 1, 2, 3, 4, 5, 6, 7, 8, 9, 10, 11, or 12 consecutive weeks or months. In a further aspect, a therapeutic composition is administered at least once for at least 1, 2, 3, 4, 5, 6, 7, 8, 9, 10, 11, or 12 consecutive months or years, chronically for a subject's entire life span, or an indefinite period of time.

[0228] In one aspect, a therapeutic composition is administered to a patient in need thereof at least twice daily for at least two consecutive days. In one aspect, a therapeutic composition is administered at least twice daily for at least 3, 4, 5, 6, 7, 8, 9, 10, 11, 12, 13, 14, or 15 consecutive days. In another aspect, a therapeutic composition is administered at least twice daily for at least 1, 2, 3, 4, 5, 6, 7, 8, 9, 10, 11, or 12 consecutive weeks. In one aspect, a therapeutic composition is administered at least twice daily for at most 4, 5, 6, 7, 8, 9, 10, 11, 12, 13, 14, 15, 16, 17, 18, 19, or 20 consecutive days or week. In another aspect, a therapeutic composition is administered at least twice daily for at most 1, 2, 3, 4, 5, 6, 7, 8, 9, 10, 11, or 12 consecutive weeks or months. In a further aspect, a therapeutic composition is administered at least twice for at least 1, 2, 3, 4, 5, 6, 7, 8, 9, 10, 11, or 12 consecutive months or years, chronically for a subject's entire life span, or an indefinite period of time.

[0229] In one aspect, a therapeutic composition is administered to a patient in need thereof at least three times daily for at least two consecutive days. In one aspect, a therapeutic composition is administered at least three times daily for at least 3, 4, 5, 6, 7, 8, 9, 10, 11, 12, 13, 14, or 15 consecutive days. In another aspect, a therapeutic composition is administered at least three times daily for at least 1, 2, 3, 4, 5, 6, 7, 8, 9, 10, 11, or 12 consecutive weeks. In one aspect, a therapeutic composition is administered at least three times daily for at most 4, 5, 6, 7, 8, 9, 10, 11, 12, 13, 14, 15, 16, 17, 18, 19, or 20 consecutive days or weeks. In another aspect, a therapeutic composition is administered at least three times daily for at most 1, 2, 3, 4, 5, 6, 7, 8, 9, 10, 11, or 12 consecutive weeks or months. In a further aspect, a therapeutic composition is administered at least three times for at least 1, 2, 3, 4, 5, 6, 7, 8, 9, 10, 11, or 12 consecutive months or years, chronically for a subject's entire life span, or an indefinite period of time.

[0230] In one aspect, the present disclosure provides a method for treating a disorder in a subject in need thereof, where the method comprises administering orally to the subject a pharmaceutically active dose of a therapeutic composition comprising live, non-pathogenic, synthetic bacterial mixture or live, non-pathogenic, purified or extracted, fecal microbiota in a lyophilized formulation described herein, where the dose is administered at a dosing schedule of at least once or twice daily for at least three consecutive days or weeks. In another aspect, a dose is administered at least once, twice, or three times daily for a period between 1 and 12 weeks, between 2 and 12 weeks, between 3 and 12 weeks, between 4 and 12 weeks, between 5 and 12 weeks, between 6 and 12 weeks, between 7 and 12 weeks, between 8 and 12 weeks, between 9 and 12 weeks, between 10 and 12 weeks, between 1 and 2 weeks, between 2 and 3 weeks, between 3 and 4 weeks, between 4 and 5 weeks, between 5 and 6 weeks, between 6 and 7 weeks, between 7 and 8 weeks, between 8 and 9 weeks, between 9 and 10 weeks, or between 10 and 11 weeks.

[0231] In one aspect, the present disclosure provides a method for treating a disorder in a subject in need thereof by administering a pharmaceutical composition described herein, where the method comprises a first dosing schedule followed by a second dosing schedule. In one aspect, a first dosing schedule comprises a treatment or induction dose. In one aspect, a first dosing schedule comprises a continuous dosing schedule. In another aspect, a second dosing schedule comprises a maintenance dose lower than or equal to a pharmaceutically active dose of a first dosing schedule. In another aspect, a second dosing schedule lasts for at least about 2, 4, 6, 8, 10, 12, 18, 24, 36, 48, 72, or 96 months. In one aspect, a second dosing schedule lasts permanently, for a treated subject's entire life span, or an indefinite period of time. In one aspect, a second dosing schedule is a continuous dosing schedule. In another aspect, a second dosing schedule is an intermittent dosing schedule. In a further aspect, a second dosing schedule is an intermittent dosing schedule comprising a treatment period of at least 1, 2, 3, 4, 5, 6, 7, 8, 9, 10, 11, 12, 13, or 14 days followed by a resting period of at least 1, 2, 3, 4, 5, 6, 7, 8, 9, 10, 11, 12, 13, or 14 days. In another aspect, a second dosing schedule comprises administering a second dose (e.g., a maintenance dose) every other day, every two days, or every 3, 4, 5, 6, 7, 8 days. In another aspect, a maintenance dose is administered for an extended period of time with or without titration (or otherwise changing the dosage or dosing schedule). In one aspect, the interval between a first and a second dosing schedule is at least about 1, 2, 3, 4, 5, 6, 7, 8, 9, 10, 11, or 12 weeks. In another aspect, a second dosing schedule (e.g., a maintenance dose) comprises a dosage about 2, 5, 10, 50, 100, 200, 400, 800, 1000, 5000 or more fold lower than the dosage used in a first dosing schedule (e.g., an initial treatment dose). In another aspect, a second dosing schedule (e.g., a maintenance dosing schedule) has an equal or lower dosing frequency than a first dosing schedule (e.g., an initial treatment dosing schedule). In another aspect, a second dosing schedule (e.g., a maintenance dosing schedule) has a higher dosing interval than a first dosing schedule (e.g., an initial treatment dosing schedule).

[0232] In one aspect, a first or second dosing schedule used in a method can be once-a-week, twice-a-week, or thrice-a-week. The term “once-a-week” means that a dose is administered once in a week, preferably on the same day of each week. “Twice-a-week” means that a dose is administered two times in a week, preferably on the same two days of each weekly period. “Thrice-a-week” means that a dose is administered three times in a week, preferably on the same three days of each weekly period.

[0233] Additional Therapeutic Agents and Combination Therapy or Co-Formulation

[0234] Administration of the present formulations may be combined with additional therapeutic agents. Co-administration of the additional therapeutic agent and the present formulations may be simultaneous or sequential. Further; the present formulations may comprise an additional therapeutic agent (e.g., via co-formulation). For example, the additional therapeutic agent and the bacterial strains may be combined into a single formulation.

[0235] In one embodiment, the additional therapeutic agent and the bacterial strains are administered to a subject simultaneously. The term “simultaneously” as used herein, means that the additional therapeutic agent and the bacterial strains are administered with a time separation of no more than about 60 minutes, such as no more than about 30 minutes, no more than about 20 minutes, no more than about 10 minutes, no more than about 5 minutes, or no more than about 1 minute. Administration of the additional therapeutic agent and the bacterial strains can be by simultaneous administration of a single formulation (e.g., a formulation comprising the additional therapeutic agent and the bacterial strains) or of separate formulations (e.g., a first formulation including the additional therapeutic agent and a second formulation including the bacterial strains).

[0236] Co-administration does not require the additional therapeutic agents to be administered simultaneously, if the timing of their administration is such that the pharmacological activities of the additional therapeutic agent and the bacterial strains overlap in time. For example, the additional therapeutic agent and the bacterial strains can be administered sequentially. The term “sequentially” as used herein means that the additional therapeutic agent and the bacterial strains are administered with a time separation of more than about 60 minutes. For example, the time between the sequential administration of the additional therapeutic agent and the bacterial strains can be more than about 60 minutes, more than about 2 hours, more than about 5 hours, more than about 10 hours, more than about 1 day, more than about 2 days, more than about 3 days, or more than about 1 week apart. The optimal administration times will depend on the rates of metabolism, excretion, and/or the pharmacodynamic activity of the additional therapeutic agent and the bacterial strains being administered. Either the additional therapeutic agent or the bacterial strains may be administered first.

[0237] In a further embodiment, the additional therapeutic agent and the bacterial strains are administered to a subject simultaneously but the release of additional therapeutic agent and the bacterial strains from their respective dosage forms (or single unit dosage form if co-formulated) in the GI tract occurs sequentially.

[0238] Co-administration also does not require the additional therapeutic agents to be administered to the subject by the same route of administration. Rather, each additional therapeutic agent can be administered by any appropriate route, for example, parentally or non-parentally.

[0239] In some embodiments, the additional therapeutic agent is an agent used in the current standard-of-care induction therapies for the pathogenic bacteria that the subject is currently infected with and/or is at risk for being infected with, e.g., one or more anti-inflammatory agents, probiotic agents, prebiotic agents, antidiarrheal agents, analgesics, and antibiotic agents.

[0240] In some embodiments, the additional therapeutic agent is an anti-inflammatory agent such as steroidal anti-inflammatory agents or non-steroidal anti-inflammatory agents (NSAIDS). Steroids, particularly the adrenal corticosteroids and their synthetic analogues, are well known in the art. Examples of corticosteroids useful in the present invention include, without limitation, hydroxyltriamcinolone, alpha-methyl dexamethasone, beta-methyl betamethasone, beclomethasone dipropionate, betamethasone benzoate, betamethasone dipropionate, betamethasone valerate, clobetasol valerate, desonide, desoxymethasone, dexamethasone, diflorasone diacetate, diflucortolone valerate, fluadrenolone, fluclorolone acetonide, flumethasone pivalate, fluosinolone acetonide, fluocinonide, flucortine butylester, fluocortolone, fluprednidene (fluprednylidene) acetate, flurandrenolone, halcinonide, hydrocortisone acetate, hydrocortisone butyrate, methylprednisolone, triamcinolone acetonide, cortisone, cortodoxone, flucetonide, fludrocortisone, difluorosone diacetate, fluradrenolone acetonide, medrysone, amcinafel, amcinafide, betamethasone and the balance of its esters, chloroprednisone, clocortelone, clescinolone, dichlorisone, difluprednate, flucloronide, flunisolide, fluoromethalone, fluperolone, fluprednisolone, hydrocortisone, meprednisone, paramethasone, prednisolone, prednisone, beclomethasone dipropionate. (NSAIDS) that may be used in the present invention, include but are not limited to, salicylic acid, acetyl salicylic acid, methyl salicylate, glycol salicylate, salicylmides, benzyl-2,5-diacetoxybenzoic acid, ibuprofen, fulindac, naproxen, ketoprofen, etofenamate, phenylbutazone, and indomethacin. Additional anti-inflammatory agents are described, for example, in U.S. Pat. No. 4,537,776, the entire contents of which are incorporated by reference herein.

[0241] In some embodiments, the additional therapeutic agent is a probiotic. Probiotics suitable for use in the present invention include, but are not limited to, Saccharomyces boulardii; Lactobacillus rhamnosus GG; Lactobacillus plantarum 299v; Clostridium butyricum M588; Clostridium difficile VP20621 (non-toxigenic C. difficile strain); combination of Lactobacillus casei, Lactobacillus acidophilus (Bio-K+CL1285); combination of Lactobacillus casei, Lactobacillus bulgaricus, Streptococcus thermophilus (Actimel); combination of Lactobacillus acidophilus, Bifidobacterium bifidum (Florajen3); combination of Lactobacillus acidophilus, Lactobacillus bulgaricus delbrueckii subsp. bulgaricus, Lactobacillus bulgaricus casei, Lactobacillus bulgaricus plantarum, Bifidobacterium longum, Bifidobacterium infantis, Bifidobacterium breve, and Streptococcus salivarius subsp. thermophilus (VSL #3)).

[0242] The compositions and methods of the present invention may further comprise one or more prebiotics.

[0243] A prebiotic is a substrate that is selectively used by a host microorganism to produce a health benefit in a subject/patient. Without wishing to be bound by theory, prebiotics are added to nutritionally supplement bacteria in the microbiome and/or in a microbial composition, e.g., to stimulate the growth or activity of one or more strains of beneficial bacteria. Additionally, the prebiotics may be added to prevent “shock” to bacterial strains subsequent to their isolation or purification, freezing, freeze-drying, spray-drying, reconstitution in solution and the like.

[0244] Examples of prebiotics include amino acids, ammonium nitrate, amylose, barley mulch, biotin, carbonate, cellulose, chitin, choline, fructooligosaccharides (FOSs), fructose, galactooligosaccharides (GOSs), glucose, glycerol, heteropolysaccharide, histidine, homopolysaccharide, hydroxyapatite, inulin, isomaltulose, lactose, lactulose, maltodextrins, maltose, mannooligosaccharides, tagatose, nitrogen, oligodextrose, oligofructoses, oligofructose-enriched inulin, oligosaccharides, pectin, phosphate salts, phosphorus, polydextroses, polyols, potash, potassium, sodium nitrate, starch, sucrose, sulfur, sun fiber, tagatose, thiamine, trans-galactooligosaccharides, trehalose, vitamins, a water-soluble carbohydrate, and/or xylooligosaccharides (XOSs).

[0245] In embodiments, a prebiotic can be added (e.g., in dry or liquid forms) to a microbial composition of the present invention.

[0246] Alternately, or additionally, a prebiotic can be included (e.g., in dry or liquid forms) in a distinct pharmaceutical composition which lacks a microbial composition of the present invention.

[0247] A prebiotic may be provided to a subject before, contemporaneously with, and/or after a pharmaceutical composition comprising a microbial composition of the present invention is administered, either in a pharmaceutical composition comprising the microbial composition or in a pharmaceutical composition lacking a microbial composition.

[0248] A prebiotic may be provided in a single dose or in multiple doses. When provided as a single composition, the single composition may comprise a single prebiotic or a mixture of prebiotics. When provided in multiple compositions, each composition may comprise a single prebiotic or a mixture of prebiotics.

[0249] As examples, when multiple doses are provided, a first composition comprising a prebiotic may include one specific prebiotic, e.g., inulin, and a second composition may include a second specific prebiotic, e.g., pectin. Alternately, a first composition may include a mixture of prebiotics, e.g., inulin and pectin and a second composition may include different mixture of prebiotics, e.g., inulin and a FOS. A first composition may include a mixture of prebiotics and a second composition may include one specific prebiotic.

[0250] The amount of prebiotic provided to a subject/patient and/or included in a composition depends on the specific prebiotic, the specific bacterial strain of beneficial bacteria, and/or the disease state of the subject/patient. In some embodiments, the additional therapeutic agent is an antidiarrheal agent. Antidiarrheal agents suitable for use in the present invention include, but are not limited to, DPP-IV inhibitors, natural opioids, such as tincture of opium, paregoric, and codeine, synthetic opioids, such as diphenoxylate, difenoxin and loperamide, bismuth subsalicylate, lanreotide, vapreotide and octreotide, motiln antagonists, COX2 inhibitors like celecoxib, glutamine, thalidomide and traditional antidiarrheal remedies, such as kaolin, pectin, berberine and muscarinic agents.

[0251] In some embodiments, the additional therapeutic agent may be an analgesic. Analgesics useful in the compositions and methods of the present invention include, without limitation, morphine, codeine, heroine, methadone and related compounds, thebaine, orpiavine, and their derivatives, buprenorphine, the piperidines, morphinans, benzomorphans, tetrahydroisoquinolines, thiambutanes, benzylamines, tilidine, viminol, nefopam, capsaicin (8-methyl-N-vanillyl-6E-nonenamide), “synthetic” capsaicin (N-vanillylnonamide), and related compounds.

[0252] In some embodiments, the additional therapeutic agent is an antibacterial agent, which includes, but is not limited to, cephalosporin antibiotics (cephalexin, cefuroxime, cefadroxil, cefazolin, cephalothin, cefaclor, cefamandole, cefoxitin, cefprozil, and ceftobiprole); fluoroquinolone antibiotics (cipro, Levaquin, floxin, tequin, avelox, and norflox); tetracycline antibiotics (tetracycline, minocycline, oxytetracycline, and doxycycline); penicillin antibiotics (amoxicillin, ampicillin, penicillin V, dicloxacillin, carbenicillin, vancomycin, and methicillin); monobactam antibiotics (aztreonam); and carbapenem antibiotics (ertapenem, doripenem, imipenem/cilastatin, and meropenem). In some embodiments, the anti-bacterial agent may be any of the penicillin, cephalosporin, monobactam, and carbapenem antibiotics.

[0253] In some embodiments, the additional therapeutic agent includes, but is not limited to, short-chain fatty acids, butyrate, propionate, acetate, IL-2, IL-22, superoxide dismutase (SOD), GLP-2 and analogs, GLP-1, IL-10, IL-27, TGF-β1, TGF-β2, N-acylphosphatidylethanolamines (NAPEs), elafin (also called peptidase inhibitor 3 and SKALP), trefoil factor, melatonin, tryptophan, PGD2, and kynurenic acid, indole metabolites, and other tryptophan metabolites.

[0254] Aspects of the present invention relate to pharmaceutical compositions comprising a bacterial mixture and an anti-cancer therapeutic agent. The anti-cancer therapeutic agent may be a chemotherapeutic agent. In a pharmaceutical composition of the present invention, a chemotherapeutic agent that can be formulated for oral administration and the bacterial mixture may be combined and encapsulated together in a capsule. Alternately, the chemotherapeutic agent may be included in a layer coating a capsule which encapsulates the bacterial mixture. In embodiments, the chemotherapeutic agent and the pharmaceutical composition comprising the bacterial mixture are in separate dosage forms. In embodiments, a subject in need thereof has received, is receiving, or will receive chemotherapeutic agent, either with or separate from a bacterial mixture.

[0255] In embodiments, any chemotherapeutic agent that can be formulated for oral administration may be used in con. Examples of such chemotherapeutic agents include Afinitor (everolimus), Alecensa (alectinib), Alkeran (melphalan), Alunbrig (brigatinib), Arimidex (anastrozole), Aromasin (exemestane), Bosulif (bosutinib), Cabometyx (cabozantinib), Caprelsa (vandetanib), Casodex (bicalutamide), Cometriq (cabozantinib), Cotellic (cobimetinib), Cyclophosphamide (cyclophosphamide caps), Cytoxan (Cyclophosphamide), Droxia (hydroxyurea), Emcyt (estramustine), Erivedge (vismodegib), etoposide, Fareston (toremifene citrate), Farydak (panobinostat), Femara (letrozole), flutamide, Gilotrif (afatinib), Gleevec (imatinib), Gleostine (lomustine), Hexalen (altretamine), Hycamtin (topotecan), Hydrea (hydroxyurea), Ibrance (palbociclib), Iclusig (ponatinib), Idamycin (Idarubicin), Idhifa (enasidenib), Imbruvica (ibrutinib), Inlyta (axitinib), Iressa (gefitinib), Jakafi (ruxolitinib), Kisqali (ribociclib), Kisqali Femara Co-Pack (ribociclib and letrozole), Lenvima (lenvatinib), leucovorin, Leukeran (chlorambucil), Lonsurf (trifluridine/tipiracil), Lynparza (olaparib), Lysodren (mitotane), Matulane (procarbazine), Megace (megestrol acetate), Mekinist (trametinib), mercaptopurine, Mesnex (mesna), methotrexate, Myleran (busulfan), Navelbine (Vinorelbine), Nerlynx (neratinib), Nexavar (sorafenib), Nilandron (nilutamide), Ninlaro (ixazomib), Odomzo (sonidegib), Pomalyst (pomalidomide), Purixan (mercaptopurine susp), Revlimid (lenalidomide), Rubraca (rucaparib), Rydapt (midostaurin), Soltamox (tamoxifen citrate), Sprycel (dasatinib), Stivarga (regorafenib), Sutent (sunitinib), Tabloid (thioguanine), Tafinlar (dabrafenib), Tagrisso (osimertinib), tamoxifen, Tarceva (erlotinib), Targretin (bexarotene), Tasigna (nilotinib), Temodar (temozolomide), Thalomid (thalidomide), Toposar (Etoposide), tretinoin, Trexall (methotrexate), Tykerb (lapatinib), Venclexta (venetoclax), Votrient (pazopanib), Xalkori (crizotinib), Xatmep (methotrexate soln), Xeloda (capecitabinea), Xtandi (enzalutamide), Zejula (niraparib), Zelboraf (vemurafenib), Zolinza (vorinostat), Zydelig (idelalisib), Zykadia (ceritinib), or Zytiga (abiraterone), and a combination thereof.

[0256] In embodiments, a pharmaceutical composition can be in the form of a capsule, tablet, or pill. In embodiments, the capsule, tablet, or pill can be coated or otherwise compounded to provide a dosage form affording the advantage of prolonged action. For example, the capsule, tablet, or pill can comprise an inner dosage (e.g., a bacterial mixture) and an outer dosage component (e.g., a chemotherapeutic agent and/or additional therapeutic agent), the latter being in the form of an envelope over the former. The two components can be separated by an enteric layer which serves to resist disintegration in the stomach and permits the inner component to pass into the duodenum or colon and/or to be delayed in release. A variety of materials can be used for such enteric layers or coatings (as described herein). Exemplary materials include a number of polymeric acids and mixtures of polymeric acids with such materials as shellac, cetyl alcohol, and cellulose acetate.

[0257] For all additional therapeutic agent compositions and methods, targeting to various parts of the GI tract may be employed as described herein.

[0258] In various embodiments, the patient of the present methods is undergoing treatment with one or more additional therapeutic agents and, by way of non-limitation, such additional therapeutic agents may disrupt the microbiome.

[0259] Methods of Treatment

[0260] In various embodiments, the present invention provides methods of modulating a patient's microbiome to provide or restore an ecological balance. For instance, in various embodiments, herein are provided methods for diminishing or inhibiting one or more pathogenic bacteria as described elsewhere herein. In various embodiments, the present mixtures of bacterial strains augment growth of at least one type of bacteria not detectably present in a patient's GI tract prior to administration and, in various embodiments, which are non-pathogenic.

[0261] In various embodiments, the present invention provides methods of restoring or enhancing ecological control over gut or genitourinary pathogens or pathobionts in a patient.

[0262] In various embodiments, the present invention provides methods of treating or preventing a disease or condition associated with GI dysbiosis, comprising administering an effective amount of a pharmaceutical composition described herein to a subject or a patient need thereof.

[0263] In various embodiments, the present invention provides methods of treating or preventing a disease or condition associated with genitourinary dysbiosis, comprising administering an effective amount of a pharmaceutical composition disclosed herein to a subject or a patient need thereof.

[0264] Without wishing to be bound by theory, decolonization and eradication of pathogenic bacteria relevant to the present invention likely occurs through, one or more mechanisms. These mechanisms are: (1) Direct inhibition of ARB growth through the production of secreted soluble factors (see, below references 35 to 37 and 70 to 73); (2) Competition for the relevant niche/preferred nutrients (see, below references 8, 38, 39, 74, and 75); (3) Immune activation through host recognition of specific pathogen-associated molecular patterns (PAMPs) (see, below references 40 and 41); and (4) Production of Short Chain Fatty Acid (SCFA) by bacterial strains which enhance the colonic barrier and can induce IgA production (see, below references 40 and 41), and (5) activation of Toll-Like Receptors (TLRs), which modulate the production of antimicrobial peptides, which target many human bacterial pathogens.

[0265] In the third and fifth mechanism, various bacterial products stimulate the immune system through the TLR-MyD88 mediated pathway. Stimulation of this pathway results in the upregulation of antimicrobial proteins. Antimicrobial proteins and peptides (AMPs) (e.g., the defensins or cathelicidins) are an important part of the innate immune system and are expressed throughout the body. In the gut, they are produced by the intestinal epithelial cells and Paneth cells to defend against undesired bacterial species (both commensal and pathogenic). AMP produced may be induced by a wide variety of stimuli including but not limited to vitamin D, cytokines, and microbial products. These stimulatory microbial products can include but are not limited to lipopolysaccharide (LPS), peptidoglycan, and flagellin. For example, flagellin is a TLRS agonist that induces the production of the C-type lectin, Reglllgamma. Reglllgamma has roles in killing Gram-positive pathogens, including vancomycin resistant Enterococcus (VRE). There is also evidence that anti-infective AMPs play a role in attenuating host inflammatory responses through downregulation of cytokine production. Induction of AMPs assists the host with a properly modulated immune response to pathogens that accelerates healing of the gut epithelia while eradicating the colonizing pathogen.

[0266] In embodiments, the mixture of bacterial strains of the present invention acts to protect patients through one or more mechanisms: A first mechanism is direct inhibition of the pathogenic bacteria through production of secreted products and a second mechanism is through competition for nutrients in the gut.

[0267] In various embodiments, the methods of the invention comprise treating or preventing a microbiome-mediated disorder. Illustrative microbiome-mediated disorder includes, but are not limited to, for example, those found in Table 3 of WO 2014/121298, the entire contents of which are incorporated herein by reference.

[0268] In various embodiments, the present invention provides methods of treating a patient suffering from a disease or condition associated with GI dysbiosis. In some embodiments, the patient has inflammatory bowel diseases (IBD), for example, Crohn's disease, colitis (e.g., UC or microscopic colitis), or pouchitis. IBD is a group of inflammatory conditions of the large intestine and, in some cases, the small intestine. The main forms of IBD that may be treated by the prevent invention include, but are not limited to, Crohn's disease, UC, pouchitis, collagenous colitis, lymphocytic colitis, ischemic colitis, diversion colitis, Behcet's syndrome, infective colitis, and indeterminate colitis. In an embodiment, the present invention provides methods of treating UC. In another embodiment, the present invention provides methods of treating CD. In a further embodiment, the present invention provides methods of treating pouchitis.

[0269] In various embodiments, methods of the invention are utilized for the treatment of UC. UC is one form of IBD. It is a chronic disease of the colon, in which the lining of the colon becomes inflamed and develops tiny open sores, or ulcers, that produce pus and mucous. In some embodiments, methods of the invention ameliorate, reduce, or eliminate the inflammation and/or ulceration associated with UC. In some embodiments, methods of the invention ameliorate, reduce, or eliminate one or more symptoms associated with UC including but not limited to, abdominal discomfort or pain, frequent emptying of the colon, lose and urgent bowel movements, persistent diarrhea, bloody stool, loss of appetite, and weight loss. In some embodiments, methods of the invention may reduce or prevent the delay in growth and development in children afflicted with UC.

[0270] In some embodiments, the present invention provides methods of treating IBS. IBS is a common disorder that affects the colon and can cause cramping, abdominal pain, bloating, gas, diarrhea and constipation. IBS is classified based on the predominant symptom of diarrhea (IBS with predominant diarrhea, IBS-D), constipation (IBS with predominant constipation, IBS-C) or mixed symptoms (IBS with alternating constipation and diarrhea, IBS-A). Methods of the invention are effective in treating one or more of IBS-D, IBS-C, and/or IBS-A. In some embodiments, methods of the invention ameliorate, reduce, or eliminate one or more symptoms associated with one or more of IBS-D, IBS-C, and/or IBS-A.

[0271] In some embodiments, the present invention provides for compositions and methods for treating or preventing infections (including colonization) by pathogenic bacteria and/or inhibiting the growth or decrease the number of pathogenic bacteria in the GI tract. In an embodiment, the pathogenic bacteria are enterobacteria such as Salmonella. In various embodiments, the present invention provides for compositions and methods that mitigate or prevent the overgrowth of various coliforms in a patient's gut (including coliforms that are virulent and/or antibiotic resistant). Illustrative coliforms include Citrobacter, Enterobacer, Hafnia, Kelbsiella, and Escherichia. In some embodiments, the methods and compositions described herein prevent or diminish secondary infections with resistant organisms.

[0272] In still other embodiments, the present invention provides methods of treating a patient with an infectious disease of the intestines, for example, CDI and/or a CDAD, nosocomial infection, secondary emergent infection, amebiasis, intestinal tuberculosis, or parasitic disorder. In some embodiments, the present invention provides methods for treating or preventing a CDI and/or a CDAD, comprising administering an effective amount of a composition described herein to a subject or a patient need thereof. In various embodiments, the CDI or CDAD comprises one or more of: C. difficile diarrhea (CDD), C. difficile intestinal inflammatory disease, colitis, pseudomembranous colitis, fever, abdominal pain, dehydration and disturbances in electrolytes, megacolon, peritonitis, and perforation and/or rupture of the colon.

[0273] In various embodiments, the disease or condition associated with GI dysbiosis is treated or prevented in the context of initial onset or relapse/recurrence (e.g., due to continued or restarted antibiotic therapy). For example, in a patient that has previously suffered from a GI dysbiosis, the present composition or formulation may be administered upon the first symptoms of recurrence in the patient. By way of non-limiting example, symptoms of recurrence include, in a mild case, about 5 to about 10 watery bowel movements per day, no significant fever, and only mild abdominal cramps while blood tests may show a mild rise in the white blood cell count up to about 15,000 (normal levels are up to about 10,000), and, in a severe case, more than about 12 watery stools per day, nausea, vomiting, high fever (e.g., about 102-104° F.), rectal bleeding, severe abdominal pain (e.g., with tenderness), abdominal distention, and a high white blood count (e.g., of about 15,000 to about 40,000).

[0274] In some embodiments, the methods of the present invention are used to treat a subject or patient who is suffering from, or is susceptible to, a disease or condition associated with GI dysbiosis. For example, the patient may be undergoing or has undergone an initial and/or adjunctive therapy that renders the patient susceptible to a disease or condition associated with GI dysbiosis. In some embodiments, the patient is undergoing treatment, or has undergone treatment, with an antibiotic. For example, the patient may have taken an antibiotic during the past about 30 or so days and/or have an immune system that is weak (e.g., from a chronic illness). In another example, the patient may have recently been in the hospital, including in an intensive care unit. Accordingly, in some embodiments, the methods and uses of the present invention treat or prevent a nosocomial infection and/or a secondary emergent infection and/or a hospital acquired infection (HAI).

[0275] In various embodiments, the present invention provides methods for treating antibiotic-induced adverse effects in the GI tract, comprising administering an effective amount of a mixture of bacterial strains described herein (and/or additional therapeutic agents) to a subject in need thereof. In another embodiment, the present invention provides methods for preventing an antibiotic-induced adverse effect in the GI tract, comprising administering an effective amount of a mixture of bacterial strains described herein (and/or additional therapeutic agents) to a subject in need thereof.

[0276] In various embodiments, the mixtures of bacterial strains as described herein protect the intestinal microbiome from antibiotics-induced damage. In some embodiments, the methods of the invention treat or prevent an antibiotics-associated adverse effect including but not limited to diarrhea, nausea, vomiting, dysgeusia, colitis, and pseudomembranous colitis disease and/or symptoms. In an embodiment, methods of the invention can be used to treat or prevent antibiotic-associated diarrhea (MD).

[0277] Methods for measuring change and/or improvement in GI tract function can include, but are not limited to: endoscopy for direct examination of epithelium and mucosa; histological evaluation and/or tissue procurement for direct evaluation of structural changes and/or immune biomarkers; urine tests for assessment of permeability with non-absorbable sugars and LPS levels; stool tests for assessment of inflammation and/or microbiota changes (for example by PCR); and/or blood tests for assessment of specific markers, including CD4+ cell counts, Th17 cell counts, and/or LPS levels.

[0278] In some embodiments, the methods of the present invention treat or prevent a diarrheal disease including, but not limited to, acute bloody diarrhea (e.g., dysentery), acute watery diarrhea (e.g., cholera), checkpoint inhibitor-associated colitis, diarrhea due to food poisoning, persistent diarrhea, and traveler's diarrhea.

[0279] In various embodiments, the methods of the present invention treat or prevent an IBD or related disease including, but not limited to, Crohn's disease, ulcerative colitis, collagenous colitis, lymphocytic colitis, diversion colitis, Behcet's disease, intermediate colitis, short bowel syndrome, ulcerative proctitis, proctosigmoiditis, left-sided colitis, pancolitis, and fulminant colitis.

[0280] In various embodiments, the methods of the present invention treat or prevent an autoimmune disorder including, but not limited to, acute disseminated encephalomyelitis (ADEM), acute necrotizing hemorrhagic leukoencephalitis, Addison's disease, agammaglobulinemia, alopecia areata, amyloidosis, ankylosing spondylitis, anti-GBM/anti-TBM nephritis, antiphospholipid syndrome (APS), autoimmune angioedema, autoimmune aplastic anemia, autoimmune dysautonomia, autoimmune hemolytic anemia, autoimmune hepatitis, autoimmune hyperlipidemia, autoimmune immunodeficiency, autoimmune inner ear disease (AIED), autoimmune myocarditis, autoimmune oophoritis, autoimmune pancreatitis, autoimmune retinopathy, autoimmune thrombocytopenic purpura (ATP), autoimmune thyroid disease, autoimmune urticarial, axonal & neuronal neuropathies, Balo disease, Behcet's disease, bullous pemphigoid, cardiomyopathy, Castleman disease, celiac disease, Chagas disease, chronic inflammatory demyelinating polyneuropathy (CIDP), chronic recurrent multifocal ostomyelitis (CRMO), Churg-Strauss syndrome, cicatricial pemphigoid/benign mucosal pemphigoid, Crohn's disease, Cogan's syndrome, cold agglutinin disease, congenital heart block, Coxsackie myocarditis, CREST disease, essential mixed cryoglobulinemia, demyelinating neuropathies, dermatitis herpetiformis, dermatomyositis, Devic's disease (neuromyelitis optica), discoid lupus, Dressler's syndrome, endometriosis, eosinophilic esophagitis, eosinophilic fasciitis, erythema nodosum, experimental allergic encephalomyelitis, Evans syndrome, fibrosing alveolitis, giant cell arteritis (temporal arteritis), giant cell myocarditis, glomerulonephritis, Goodpasture's syndrome, granulomatosis with polyangiitis (GPA), Graves' disease, Guillain-Barre syndrome, Hashimoto's encephalitis, Hashimoto's thyroiditis, hemolytic anemia, Henoch-Schonlein purpura, herpes gestationis, hypogammaglobulinemia, idiopathic thrombocytopenic purpura (ITP), IgA nephropathy, IgG4-related sclerosing disease, immunoregulatory lipoproteins, inclusion body myositis, interstitial cystitis, juvenile arthritis, juvenile idiopathic arthritis, juvenile myositis, Kawasaki syndrome, Lambert-Eaton syndrome, leukocytoclastic vasculitis, lichen planus, lichen sclerosus, ligneous conjunctivitis, linear IgA disease (LAD), lupus (systemic lupus erythematosus), chronic Lyme disease, Meniere's disease, microscopic polyangiitis, mixed connective tissue disease (MCTD), Mooren's ulcer, Mucha-Habermann disease, multiple sclerosis, myasthenia gravis, myositis, narcolepsy, neuromyelitis optica (Devic's), neutropenia, ocular cicatricial pemphigoid, optic neuritis, palindromic rheumatism, PANDAS (Pediatric Autoimmune Neuropsychiatric Disorders Associated with Streptococcus), paraneoplastic cerebellar degeneration, paroxysmal nocturnal hemoglobinuria (PNH), Parry Romberg syndrome, Parsonnage-Turner syndrome, pars planitis (peripheral uveitis), pemphigus, peripheral neuropathy, perivenous encephalomyelitis, pernicious anemia, POEMS syndrome, polyarteritis nodosa, type I, II, & Ill autoimmune polyglandular syndromes, polymyalgia rheumatic, polymyositis, postmyocardial infarction syndrome, postpericardiotomy syndrome, progesterone dermatitis, primary biliary cirrhosis, primary sclerosing cholangitis, psoriasis, psoriatic arthritis, idiopathic pulmonary fibrosis, pyoderma gangrenosum, pure red cell aplasia, Raynaud's phenomenon, reactive arthritis, reflex sympathetic dystrophy, Reiter's syndrome, relapsing polychondritis, restless legs syndrome, retroperitoneal fibrosis, rheumatic fever, rheumatoid arthritis, sarcoidosis, Schmidt syndrome, scleritis, scleroderma, Sjogren's syndrome, sperm & testicular autoimmunity, stiff person syndrome, subacute bacterial endocarditis (SBE), Susac's syndrome, sympathetic ophthalmia, Takayasu's arteritis, temporal arteritis/giant cell arteritis, thrombocytopenic purpura (TTP), Tolosa-Hunt syndrome, transverse myelitis, type 1 diabetes, asthma, ulcerative colitis, undifferentiated connective tissue disease (UCTD), uveitis, vasculitis, vesiculobullous dermatosis, vitiligo, and Wegener's granulomatosis.

[0281] In various embodiments, the methods of the present invention treat or prevent or reduce a side effect associated with an anti-cancer treatment. It is well known in the art that many anti-cancer treatments can affect the gut biosis. For example, chemotherapy can weaken the gut mucosa or change the mucosal-associated microbiota, including reduced diversity in the gut microbiome. Thus; such gut dysbiosis can lead to blood-stream infections. Additionally, the anti-cancer therapy can promote infection of and colonization of antibiotic resistant bacteria. See, e.g., Papanicolas et al., “Not Just Antibiotics: Is Cancer Chemotherapy Driving Antimicrobial Resistance?” Trends Microbiol. 2018 May; 26(5):393-400. Accordingly, bacterial mixtures of the present invention are useful in cancer-related applications, at least in decreasing the severity of a side effect and up to eliminating the side effect, e.g., in part, by promoting the decolonization and/or eradicating various pathogenic bacteria and/or repairing/repopulating his/her gut microbiome after receiving the anti-cancer therapeutic agent and/or anti-cancer therapy.

[0282] Moreover, the bacterial mixtures of the present invention are useful in cancer-related applications by increasing efficacy of an anti-cancer therapeutic agent and/or anti-cancer therapy by, at least, promoting the beneficial and desired effects of an anti-cancer therapeutic agent and/or anti-cancer therapy, i.e., killing cancer cells, reducing tumor size, and/or simulating an immune response against a cancer cell or tumor.

[0283] In aspects and embodiments, and without wishing to be bound by theory, the bacterial mixtures of the present invention may exert beneficial effects in oncology by maintaining responsiveness of a tumor, allowing an increased treatment dose (of the anti-cancer therapy) than otherwise possible, permitting administration of more frequent treatment doses (e.g., patient would not have to miss a session due to side effects), and/or boosting the immune system (e.g., for checkpoint inhibitor therapy).

[0284] In various embodiments, a subject in need thereof has received, is receiving, or will receive an anti-cancer therapeutic agent and/or an anti-cancer therapy.

[0285] Aspects of the present invention relate to methods for preventing or treating a cancer comprising administering a pharmaceutical composition comprising a microbial composition (with or without a chemotherapeutic agent that can be formulated for oral administration, as described herein) and administering an anti-cancer therapy.

[0286] In embodiments, a pharmaceutical composition is administered simultaneously (as described herein) with the anti-cancer therapy.

[0287] Alternately, the pharmaceutical composition and the anti-cancer therapy are administered sequentially. The term “sequentially” as used herein means that the anti-cancer therapy and the pharmaceutical composition are administered with a time separation of more than about 60 minutes. For example, the time between the sequential administration of the anti-cancer therapy and the pharmaceutical composition can be more than about 60 minutes, more than about 2 hours, more than about 5 hours, more than about 10 hours, more than about 1 day, more than about 2 days, more than about 3 days, more than about 1 week apart, more than 1 month apart, or longer. The optimal administration time will depend on the specific anti-cancer therapy and the pharmaceutical composition being administered. Either the anti-cancer therapy or the pharmaceutical composition may be administered first. In embodiments, the subject is administered pharmaceutical composition prior to the anti-cancer therapy, thereby helping ensure that the subject has a healthy gut biome prior to receiving the anti-cancer therapy. Alternately, the subject is administered pharmaceutical composition after the anti-cancer therapy, thereby helping the subject repair/repopulate his/her gut biome after receiving the anti-cancer therapy.

[0288] In embodiments, a bacterial mixture is administered enterally, e.g., orally, and the anti-cancer therapy is a chemotherapy or a targeted therapy which is administered parentally.

[0289] In aspects and embodiments, the anti-cancer therapy is a radiation therapy.

[0290] In aspects and embodiments, the anti-cancer therapy is a surgery, i.e., to excise a tumor or an organ/tissue comprising cancerous cells.

[0291] In aspects and embodiments, the anti-cancer therapy comprises a chemotherapy. Examples of chemotherapeutic agents include 5-FU (Fluorouracil), Abemaciclib, Abiraterone Acetate, Abitrexate (Methotrexate), Abraxane (Paclitaxel Albumin-stabilized Nanoparticle Formulation), ABVD, ABVE, ABVE-PC, AC, Acalabrutinib, AC-T, ADE, Adriamycin (Doxorubicin), Afatinib Dimaleate, Afinitor (Everolimus), Afinitor Difsperz (Everolimus), Akynzeo (Netupitant and Palonosetron), Aldara (Imiquimod), Aldesleukin, Alecensa (Alectinib), Alectinib, Alimta (PEMETREXED), Aliqopa (Copanlisib Hydrochloride), Alkeran (Melphalan), Aloxi (Palonosetron Hydrochloride), Alunbrig (Brigatinib), Ambochlorin (Chlorambucil), Amboclorin (Chlorambucil), Amifostine, Aminolevulinic Acid, Anastrozole, Aprepitant, Aredia (Pamidronate), Arimidex (Anastrozole), Aromasin (Exemestane), Arranon (Nelarabine), Arsenic Trioxide, Asparaginase Erwinia chrysanthemi, Axicabtagene Ciloleucel, Axitinib, Azacitidine, BEACOPP, Becenum (Carmustine), Beleodaq (Belinostat), Belinostat, Bendamustine Hydrochloride, BEP, Bexarotene, Bicalutamide, BiCNU (Carmustine), Blenoxane (Bleomycin), Bortezomib, Bosulif (Bosutinib), Bosutinib, Brigatinib, BuMel, Busulfan, Busulfex (Busulfan)C, Cabazitaxel, Cabometyx (Cabozantinib), Cabozantinib-S-Malate, CAF, Calquence (Acalabrutinib), Camptosar (Irinotecan Hydrochloride), Capecitabine, CAPDX, Caprelsa (Vandetanib), Carac (Fluorouracil—Topical), Carboplatin, CARBOPLATIN-TAXOL, Carfilzomib, Carmubris (Carmustine), Carmustine, Casodex (Bicalutamide), CeeNU (Lomustine), CEM, Ceritinib, Cerubidine (Daunorubicin), Cervarix (Recombinant HPV Bivalent Vaccine), CEV, Chlorambucil, CHLORAMBUCIL-PREDNISONE, CHOP, Cisplatin, Cladribine, Clafen (Cyclophosphamide), Clofarabine, Clofarex (Clofarabine), Clolar (Clofarabine), CMF, Cobimetinib, Cometriq (Cabozantinib), Copanlisib Hydrochloride, COPDAC, COPP, COPP-ABV, Cosmegen (Dactinomycin), Cotellic (Cobimetinib), Crizotinib, CVP, Cyclophosphamide, Cyfos (Ifosfamide), Cytarabine, Cytarabine Liposome, Cytosar-U (Cytarabine), Cytoxan (Cyclophosphamide), Cytoxan (Cytoxan), Dabrafenib, Dacarbazine, Dacogen (Decitabine), Dactinomycin, Dasatinib, Daunorubicin Hydrochloride, Daunorubicin Hydrochloride and Cytarabine Liposome, DaunoXome (Daunorubicin Lipid Complex), Decadron (Dexamethasone), Decitabine, Defibrotide Sodium, Defitelio (Defibrotide Sodium), Degarelix, Denileukin Diftitox, DepoCyt (Cytarabine Liposome), Dexamethasone, Dexamethasone Intensol (Dexamethasone), Dexpak Taperpak (Dexamethasone), Dexrazoxane Hydrochloride, Docefrez (Docetaxel), Docetaxel, Doxil (Doxorubicin Hydrochloride Liposome), Doxorubicin Hydrochloride, Doxorubicin Hydrochloride Liposome, Dox-SL (Doxorubicin Hydrochloride Liposome), Droxia (Hydroxyurea), DTIC (Decarbazine), DTIC-Dome (Dacarbazine), Efudex (Fluorouracil—Topical), Eligard (Leuprolide), Elitek (Rasburicase), Ellence (Ellence (epirubicin)), Eloxatin (Oxaliplatin), Elspar (Asparaginase), Eltrombopag Olamine, Emcyt (Estramustine), Emend (Aprepitant), Enasidenib Mesylate, Enzalutamide, Epirubicin Hydrochloride, EPOCH, Eribulin Mesylate, Erivedge (Vismodegib), Erlotinib Hydrochloride, Erwinaze (Asparaginase Erwinia chrysanthemi), Ethyol (Amifostine), Etopophos (Etoposide Phosphate), Etoposide, Etoposide Phosphate, Eulexin (Flutamide), Evacet (Doxorubicin Hydrochloride Liposome), Everolimus, Evista (Raloxifene Hydrochloride), Evomela (Melphalan Hydrochloride), Exemestane, Fareston (Toremifene), Farydak (Panobinostat), Faslodex (Fulvestrant), FEC, Femara (Letrozole), Filgrastim, Firmagon (Degarelix), FloPred (Prednisolone), Fludara (Fludarabine), Fludarabine Phosphate, Fluoroplex (Fluorouracil), Fluorouracil, Flutamide, Folex (Methotrexate), Folex PFS (Methotrexate), FOLFIRI, FOLFIRINOX, FOLFOX, Folotyn (Pralatrexate), FUDR (FUDR (floxuridine)), FU-LV, Fulvestrant, Gardasil (Recombinant HPV Quadrivalent Vaccine), Gardasil 9 (Recombinant HPV Nonavalent Vaccine), Gefitinib, Gemcitabine Hydrochloride, GEMCITABINE-CISPLATIN, GEMCITABINE-OMLIPLATIN, Gemzar (Gemcitabine), Gilotrif (Afatinib Dimaleate), Gilotrif (Afatinib), Gleevec (Imatinib Mesylate), Gliadel (Carmustine), Glucarpidase, Goserelin Acetate, Halaven (Eribulin Mesylate), Hemangeol (Propranolol Hydrochloride), Hexalen (Altretamine), HPV Bivalent Vaccine, Recombinant, HPV Nonavalent Vaccine, Recombinant, HPV Quadrivalent Vaccine, Recombinant, Hycamtin (Topotecan Hydrochloride), Hycamtin (Topotecan), Hydrea (Hydroxyurea), Hydroxyurea, Hyper-CVAD, Ibrance (Palbociclib), Ibrutinib, ICE, Iclusig (Ponatinib), Idamycin PFS (Idarubicin), Idarubicin Hydrochloride, Idelalisib, Idhifa (Enasidenib), Ifex (Ifosfamide), Ifosfamide, Ifosfamidum (Ifosfamide), Imatinib Mesylate, Imbruvica (Ibrutinib), Imiquimod, Imlygic (Talimogene Laherparepvec), Inlyta (Axitinib), Iressa (Gefitinib), Irinotecan Hydrochloride, Irinotecan Hydrochloride Liposome, Istodax (Romidepsin), Ixabepilone, Ixazomib Citrate, Ixempra (Ixabepilone), Jakafi (Ruxolitinib Phosphate), Jakafi (Ruxolitinib), JEB, Jevtana (Cabazitaxel), Keoxifene (Raloxifene Hydrochloride), Kepivance (Palifermin), Kisqali (Ribociclib), Kyprolis (Carfilzomib), Lanreotide Acetate, Lanvima (Lenvatinib), Lapatinib Ditosylate, Lenalidomide, Lenvatinib Mesylate, Lenvima (Lenvatinib Mesylate), Letrozole, Leucovorin Calcium, Leukeran (Chlorambucil), Leukine (Sargramostim), Leuprolide Acetate, Leustatin (Cladribine), Levulan (Aminolevulinic Acid), Linfolizin (Chlorambucil), LipoDox (Doxorubicin Hydrochloride Liposome), Lomustine, Lonsurf (Trifluridine and Tipiracil), Lupron (Leuprolide), Lynparza (Olaparib), Lysodren (Mitotane), Marqibo (Vincristine Sulfate Liposome), Marqibo Kit (Vincristine Lipid Complex), Matulane (Procarbazine), Mechlorethamine Hydrochloride, Megace (Megestrol), Megestrol Acetate, Mekinist (Trametinib), Melphalan, Melphalan Hydrochloride, Mercaptopurine, Mesnex (Mesna), Metastron (Strontium-89 Chloride), Methazolastone (Temozolomide), Methotrexate, Methotrexate LPF (Methotrexate), Methylnaltrexone Bromide, Mexate (Methotrexate), Mexate-AQ (Methotrexate), Midostaurin, Mitomycin C, Mitoxantrone Hydrochloride, Mitozytrex (Mitomycin C), MOPP, Mostarina (Prednimustine), Mozobil (Plerixafor), Mustargen (Mechlorethamine), Mutamycin (Mitomycin), Myleran (Busulfan), Mylosar (Azacitidine), Nanoparticle Paclitaxel (Paclitaxel Albumin-stabilized Nanoparticle Formulation), Navelbine (Vinorelbine), Nelarabine, Neosar (Cyclophosphamide), Neratinib Maleate, Nerlynx (Neratinib), Netupitant and Palonosetron Hydrochloride, Neulasta (filgrastim), Neulasta (pegfilgrastim), Neupogen (filgrastim), Nexavar (Sorafenib), Nilandron (Nilutamide), Nilotinib, Nilutamide, Ninlaro (Ixazomib), Nipent (Pentostatin), Niraparib Tosylate Monohydrate, Nolvadex (Tamoxifen), Novantrone (Mitoxantrone), N plate (Romiplostim), Odomzo (Sonidegib), OEPA, OFF, Olaparib, Omacetaxine Mepesuccinate, Oncaspar (Pegaspargase), Oncovin (Vincristine), Ondansetron Hydrochloride, Onivyde (Irinotecan Hydrochloride Liposome), Ontak (Denileukin Diftitox), Onxol (Paclitaxel), OPPA, Orapred (Prednisolone), Osimertinib, Oxaliplatin, Paclitaxel, Paclitaxel Albumin-stabilized Nanoparticle Formulation, PAD, Palbociclib, Palifermin, Palonosetron Hydrochloride, Palonosetron Hydrochloride and Netupitant, Pamidronate Disodium, Panobinostat, Panretin (Alitretinoin), Paraplat (Carboplatin), Pazopanib Hydrochloride, PCV, PEB, Pediapred (Prednisolone), Pegaspargase, Pegfilgrastim, Pemetrexed Disodium, Platinol (Cisplatin), PlatinolAQ (Cisplatin), Plerixafor, Pomalyst (Pomalidomide), Ponatinib Hydrochloride, Pralatrexate, Prednisone, Procarbazine Hydrochloride, Proleukin (Aldesleukin), Promacta (Eltrombopag Olamine), Propranolol Hydrochloride, Purinethol (Mercaptopurine), Purixan (Mercaptopurine), Radium 223 Dichloride, Raloxifene Hydrochloride, Rasburicase, R—CHOP, R—CVP, Reclast (Zoledronic acid), Recombinant Human Papillomavirus (HPV) Bivalent Vaccine, Recombinant Human Papillomavirus (HPV) Nonavalent Vaccine, Recombinant Human Papillomavirus (HPV) Quadrivalent Vaccine, Regorafenib, Relistor (Methylnaltrexone Bromide), R-EPOCH, Revlimid (Lenalidomide), Rheumatrex (Methotrexate), Ribociclib, R-ICE, Rolapitant Hydrochloride, Romidepsin, Romiplostim, Rubex (Doxorubicin), Rubidomycin (Daunorubicin Hydrochloride), Rubraca (Rucaparib), Rucaparib Camsylate, Ruxolitinib Phosphate, Rydapt (Midostaurin), Sandostatin (Octreotide), Sandostatin LAR Depot (Octreotide), Sclerosol Intrapleural Aerosol (Talc), Soltamox (Tamoxifen), Somatuline Depot (Lanreotide Acetate), Sonidegib, Sorafenib Tosylate, Sprycel (Dasatinib), STANFORD V, Sterapred (Prednisone), Sterapred DS (Prednisone), Sterile Talc Powder (Talc), Steritalc (Talc), Sterecyst (Prednimustine), Stivarga (Regorafenib), Sunitinib Malate, Supprelin LA (Histrelin), Sutent (Sunitinib Malate), Sutent (Sunitinib), Synribo (Omacetaxine Mepesuccinate), Tabloid (Thioguanine), TAC, Tafinlar (Dabrafenib), Tagrisso (Osimertinib), Talc, Talimogene Laherparepvec, Tamoxifen Citrate, Tarabine PFS (Cytarabine), Tarceva (Erlotinib), Targretin (Bexarotene), Tasigna (Decarbazine), Tasigna (Nilotinib), Taxol (Paclitaxel), Taxotere (Docetaxel), Temodar (Temozolomide), Temozolomide, Temsirolimus, Tepadina (Thiotepa), Thalidomide, Thalomid (Thalidomide), TheraCys BCG (BCG), Thioguanine, Thioplex (Thiotepa), Thiotepa, TICE BCG (BCG), Tisagenlecleucel, Tolak (Fluorouracil—Topical), Toposar (Etoposide), Topotecan Hydrochloride, Toremifene, Torisel (Temsirolimus), Totect (Dexrazoxane Hydrochloride), TPF, Trabectedin, Trametinib, Treanda (Bendamustine hydrochloride), Trelstar (Triptorelin), Trexall (Methotrexate), Trifluridine and Tipiracil Hydrochloride, Trisenox (Arsenic trioxide), Tykerb (lapatinib), Uridine Triacetate, VAC, Valrubicin, Valstar (Valrubicin Intravesical), Valstar (Valrubicin), VAMP, Vandetanib, Vantas (Histrelin), Varubi (Rolapitant), VeIP, Velban (Vinblastine), Velcade (Bortezomib), Velsar (Vinblastine Sulfate), Vemurafenib, Venclexta (Venetoclax), Vepesid (Etoposide), Verzenio (Abemaciclib), Vesanoid (Tretinoin), Viadur (Leuprolide Acetate), Vidaza (Azacitidine), Vinblastine Sulfate, Vincasar PFS (Vincristine), Vincrex (Vincristine), Vincristine Sulfate, Vincristine Sulfate Liposome, Vinorelbine Tartrate, VIP, Vismodegib, Vistogard (Uridine Triacetate), Voraxaze (Glucarpidase), Vorinostat, Votrient (Pazopanib), Vumon (Teniposide), Vyxeos (Daunorubicin Hydrochloride and Cytarabine Liposome), W, Wellcovorin (Leucovorin Calcium), Wellcovorin IV (Leucovorin), Xalkori (Crizotinib), XELIRI, Xeloda (Capecitabine), XELOX, Xofigo (Radium 223 Dichloride), Xtandi (Enzalutamide), Yescarta (Axicabtagene Ciloleucel), Yondelis (Trabectedin), Zaltrap (Ziv-Aflibercept), Zanosar (Streptozocin), Zarxio (Filgrastim), Zejula (Niraparib), Zelboraf (Vemurafenib), Zinecard (Dexrazoxane Hydrochloride), Ziv-Aflibercept, Zofran (Ondansetron Hydrochloride), Zoladex (Goserelin), Zoledronic Acid, Zolinza (Vorinostat), Zometa (Zoledronic acid), Zortress (Everolimus), Zydelig (Idelalisib), Zykadia (Ceritinib), Zytiga (Abiraterone Acetate), and Zytiga (Abiraterone).

[0292] In embodiments, the chemotherapy is a hormonal therapy. Illustrative hormone therapeutics include aromatase inhibitors, e.g., Letrozole, anastrozole, exemestane, aminoglutethimide; gonadotropin-releasing hormone (GnRH) analogues, e.g., leuprorelin and goserelin; hormone receptor antagonists, e.g., selective estrogen receptor modulators (as examples, tamoxifen, raloxifene, toremifene and fulvestrant) and antiandrogens, e.g., flutamide and bicalutamide; and hormone supplementation, e.g., megestrol acetate, medroxyprogesterone acetate, fluoxymesterone, diethylstilbestrol, estrace, polyestradiol phosphate, and octreotide.

[0293] In aspects and embodiments, the anti-cancer therapy is an immuno-oncology therapy. An immuno-oncology therapy comprises at least one molecule capable of binding and/or recognizing a tumor-cell antigen and/or a cancer-cell antigen. Examples, tumor-cell antigens and/or a cancer-cell antigens include but are not limited to, carbonic anhydrase IX (CAIX), 5T4, CD19, CD20, CD22, CD30, CD33, CD38, CD47, CS1, CD138, Lewis-Y, L1-CAM, MUC16, ROR-1, IL13Rα2, gp100, prostate stem cell antigen (PSCA), prostate-specific membrane antigen (PSMA), B-cell maturation antigen (BCMA), human papillomavirus type 16 E6 (HPV-16 E6), CD171, folate receptor alpha (FR-α), GD2, human epidermal growth factor receptor 2 (HER2), mesothelin, EGFRvlll, fibroblast activation protein (FAP), carcinoembryonic antigen (CEA), and vascular endothelial growth factor receptor 2 (VEGF-R2), as well as other tumor antigens well known in the art. Additional illustrative tumor antigens include, but are not limited to MART-1/Melan-A, gp100, Dipeptidyl peptidase IV (DPPIV), adenosine deaminase-binding protein (ADAbp), cyclophilin b, Colorectal associated antigen (CRC)-0017-1A/GA733, Carcinoembryonic Antigen (CEA) and its immunogenic epitopes CAP-1 and CAP-2, etv6, aml1, Prostate Specific Antigen (PSA) and its immunogenic epitopes PSA-1, PSA-2, and PSA-3, T-cell receptor/CD3-zeta chain, MAGE-family of tumor antigens (e.g., MAGE-A1, MAGE-A2, MAGE-A3, MAGE-A4, MAGE-A5, MAGE-A6, MAGE-A7, MAGE-A8, MAGE-A9, MAGE-A10, MAGE-A11, MAGE-A12, MAGE-Xp2 (MAGE-B2), MAGE-Xp3 (MAGE-B3), MAGE-Xp4 (MAGE-B4), MAGE-C1, MAGE-C2, MAGE-C3, MAGE-C4, MAGE-05), GAGE-family of tumor antigens (e.g., GAGE-1, GAGE-2, GAGE-3, GAGE-4, GAGE-5, GAGE-6, GAGE-7, GAGE-8, GAGE-9), BAGE, RAGE, LAGE-1, NAG, GnT-V, MUM-1, CDK4, tyrosinase, p53, MUC family, HER2/neu, p21ras, RCAS1, α-fetoprotein, E-cadherin, α-catenin, β-catenin and γ-catenin, p120ctn, gp100 Pmel117, PRAME, NY-ESO-1, cdc27, adenomatous polyposis coli protein (APC), fodrin, Connexin 37, Ig-idiotype, p15, gp75, GM2 and GD2 gangliosides, viral products such as human papilloma virus proteins, Smad family of tumor antigens, Imp-1, NA, EBV-encoded nuclear antigen (EBNA)-1, brain glycogen phosphorylase, SSX-1, SSX-2 (HOM-MEL-40), SSX-1, SSX-4, SSX-5, SCP-1 CT-7, c-erbB-2, CD19, CD37, CD56, CD70, CD74, CD138, AGS16, MUC1, GPNMB, Ep-CAM, PD-L1, and PD-L2.

[0294] In embodiments, the tumor-cell antigen and/or a cancer-cell antigen is a checkpoint molecule. The checkpoint molecule may be a stimulatory checkpoint molecule, e.g., CD27, CD28, CD40, CD122, CD137, OX40, GITR, and ICOS. The checkpoint molecule may be an inhibitory checkpoint molecule, e.g., 2B4, A2AR, B-7 family ligands (including, but are not limited to, B7-1, B7-2, B7-DC, B7-H1, B7-H2, B7-H3, B7-H4, B7-H5, B7-H6 and B7-H7), BTLA, CD115, CD160/By55, CD172a/SIRPα, CD200, CD223, CD244, CEACAM, CHK 1 and CHK2 kinases, CTLA-4, GAL9, HVEM, IDO, KIR, LAG3, PD-1, PD-L1, PD-L2, TIGIT, TIM-3, TMIGD2, and VISTANSIG8.

[0295] In embodiments, the immuno-oncology therapy is protein-based, e.g., antibody, fusion protein, and/or cytokine.

[0296] In embodiments, the antibody is Adcetris (Brentuximab Vedotin), Ado-Trastuzumab Emtansine, Alemtuzumab, Arzerra (Ofatumumab), Atezolizumab, Avastin (Bevacizumab), Avelumab, Bavencio (Avelumab), Besponsa (Inotuzumab Ozogamicin), Bevacizumab, Bexxar (Tositumomab), Blinatumomab, Blincyto (Blinatumomab), BMS 936559, Brentuximab Vedotin, Campath (Alemtuzumab), Cetuximab, Cinqair (Reslizumab), Cyramza (Ramucirumab), Daratumumab, Darzalex (Daratumumab), Denosumab, Dinutuximab, Durvalumab, Elotuzumab, Empliciti (Elotuzumab), Erbitux (Cetuximab), Folfiri-Bevacizumab, Folfiri-Cetuximab, Gazyva (Obinutuzumab), Gemtuzumab Ozogamicin, Herceptin (Trastuzumab), Ibritumomab Tiuxetan, lmfinzi (Durvalumab), Inotuzumab Ozogamicin, Ipilimumab, Kadcyla (Ado-trastuzumab Emtansine), Keytruda (Pembrolizumab), Lartruvo (Olaratumab), MK-3475, MPDL328OA, Mylotarg (Gemtuzumab Ozogamicin), Necitumumab, Nivolumab, Obinutuzumab, Ofatumumab, Olaratumab, Opdivo (Nivolumab), Panitumumab, Perjeta (Pertuzumab), Pertuzumab, Pembrolizumab, Pidilizumab, Portrazza (Necitumumab), Prolia (Denosumab), Ramucirumab, Rituxan (Rituximab), Rituximab and Hyaluronidase Human, Siltuximab, Sylvant (Siltuximab), Tecentriq (Atezolizumab), Trastuzumab, Unituxin (Dinutuximab), Vectibix (Panitumumab), Xgeva (Denosumab), Yervoy (Ipilimumab), and Zevalin (Ibritumomab Tiuxetan).

[0297] In embodiments, the immuno-oncology therapy includes an engineered protein or a fusion protein. In embodiments, the engineered protein or fusion protein binds to one or more tumor-cell antigens and/or cancer-cell antigens. In embodiments, the fusion protein binds to one or more tumor-cell antigens and/or cancer-cell antigens and is conjugated to a chemotherapeutic agent (as described herein).

[0298] In embodiments, the immuno-oncology therapy includes a cytokine, e.g., which binds to one or more tumor-cell antigens and/or cancer-cell antigens. In embodiments, the cytokine is Interferon Alfa-2b, Interleukin-2 (Aldesleukin), Intron A alfab (Interferon alfa-2a), Peginterferon Alfa-2b, PEG-Intron (Peginterferon Alfa-2b), Recombinant Interferon Alfa-2b, RoferonA alfaa (Interferon alfa-2a), and Sylatron (Peginterferon Alfa-2b).

[0299] In embodiments, binding and/or recognizing a tumor-cell antigen and/or a cancer-cell antigen blocks and/or prevents downstream signaling of the tumor-cell antigen and/or cancer-cell antigen. Alternately, binding and/or recognizing a tumor-cell antigen and/or a cancer-cell antigen activates and/or stimulates downstream signaling of the tumor-cell antigen and/or cancer-cell antigen.

[0300] In embodiments, the immuno-oncology therapy is a cell-based immuno-oncology therapy, e.g., relating to adoptive cell transfer (ACT). The ACT may be autologous or allogenic.

[0301] In embodiments, the cell-based immuno-oncology therapy comprises use of Chimeric Antigen Receptor (CAR) T-cell. Exemplary CAR T-cell therapy include, but are not limited to, JCAR014 (Juno Therapeutics), JCAR015 (Juno Therapeutics), JCAR017 (Juno Therapeutics), JCAR018 (Juno Therapeutics), JCAR020 (Juno Therapeutics), JCAR023 (Juno Therapeutics), JCAR024 (Juno Therapeutics), CTL019 (Novartis), Kymriah (or tisagenlecleucel; Novartis), KTE-C19 (Kite Pharma), BPX-401 (Bellicum Pharmaceuticals), BPX-501 (Bellicum Pharmaceuticals), BPX-601 (Bellicum Pharmaceuticals), bb2121 (Bluebird Bio), CD-19 Sleeping Beauty cells (Ziopharm Oncology), UCART19 (Cellectis), UCART123 (Cellectis), UCART38 (Cellectis), UCARTCS1 (Cellectis), OXB-302 (Oxford BioMedica, MB-101 (Mustang Bio), and CAR T-cells developed by Innovative Cellular Therapeutics.

[0302] In embodiments, the cell-based immuno-oncology therapy comprises use of an antigen-presenting cell (APC). In embodiments, the APC-related therapy comprises use of dendritic cells or other APCs that express tumor-cell antigens or cancer-cell antigens (as described herein). In one example, the APC is Sipuleucel-T (APC8015, trade name Provenge; Dendreon Corporation).

[0303] In embodiments, the cell-based immuno-oncology therapy comprises use of engineered T Cell Receptors (TCR) which recognize tumor-cell antigens or cancer-cell antigens (as described herein).

[0304] In embodiments, the cell-based immuno-oncology therapy comprises use of tumor infiltrating lymphocytes (TIL), e.g., adoptive transfer of TILs, which recognize tumor-cell antigens or cancer-cell antigens (as described herein).

[0305] In various embodiments, the mixtures of bacterial strains may stimulate and/or activate Toll-like receptor activity (e.g., TLR1, and/or TLR2, and/or TLR3, and/or TLR4, and/or TLR5, and/or TLR6, and/or TLR7, and/or TLR8, and/or TLR9, and/or TLR10, and/or TLR11, and/or TLR12, and/or TLR13).

[0306] In various embodiments, the methods of the present invention treat or prevent various bloodstream infections (BSI), catheter or intravascular-line infections (e.g., central-line infections), chronic inflammatory diseases, meningitis, pneumonia, e.g., ventilator-associated pneumonia, skin and soft tissue infections, surgical-site infections, urinary tract infections (e.g., antibiotic-resistant urinary tract infections and catheter-associated urinary tract infections), wound infections, and/or other well-known infections: antibiotic-resistant infections and antibiotic-sensitive infections.

[0307] In various embodiments, the methods of the present invention treat or prevent various GI disorders disclosed herein and/or as known in the art to be a result of gut dysbiosis.

[0308] In various embodiments, the methods of the present invention reduce GI immunoactivation and inflammation.

[0309] In various embodiments, the methods of the present invention reduce, ameliorate, or eliminate one or more symptom(s) associated with a herein-described disease, disorder, or condition. Exemplary symptoms include, but are not limited to, diarrhea, bloody stool, mouth sores, perianal disease, abdominal pain, abdominal cramping, fever, fatigue, weight loss, iron deficiency, anemia, appetite loss, weight loss, anorexia, delayed growth, delayed pubertal development, and inflammation of the skin, eyes, joints, liver, and bile ducts.

[0310] In one aspect, a method comprises administering a therapeutic composition orally, by enema, or via rectal suppository. In one aspect, a pharmaceutical composition is formulated as a geltab, pill, microcapsule, capsule, or tablet. In one aspect, a therapeutic composition is formulated as an enteric coated capsule or microcapsule, acid-resistant capsule or microcapsule, or formulated as part of or administered together with a food, a food additive, a dairy-based product, a soy-based product or a derivative thereof, a jelly, or a yogurt. In another aspect, a therapeutic composition is formulated as an acid-resistant enteric coated capsule. A therapeutic composition can be provided as a powder for sale in combination with a food or drink. A food or drink can be a dairy-based product or a soy-based product. In another aspect, a food or food supplement contains enteric-coated and/or acid-resistant microcapsules containing a therapeutic composition.

[0311] Any aspect or embodiment disclosed herein can be combined with any other aspect or embodiment as disclosed herein.

### Definitions

[0312] As used herein, “isolated” or “purified” refers to a bacterium or other entity or substance that has been (1) separated from at least some of the components with which it was associated when initially produced (whether in nature or in an experimental setting), and/or (2) produced, prepared, purified, and/or manufactured by the hand of man. Isolated or purified bacteria can be separated from at least about 10%, about 20%, about 30%, about 40%, about 50%, about 60%, about 70%, about 80%, about 90%, or more of the other components with which they were initially associated.

[0313] As used herein, “microbiota,” and “flora” refer to a community of microbes that live in or on a subject's body, both sustainably and transiently, including eukaryotes, archaea, bacteria, and viruses (including bacterial viruses (i.e., phage)). A non-selected fecal microbiota refers to a community or mixture of fecal microbes derived from a donor's fecal sample without selection and substantially resembling microbial constituents and population structure found in such fecal sample.

[0314] As used herein, “gut dysbiosis” refers to an imbalance, maladaptation, and/or reduced diversity in the microbiota in a subject's digestive system. For example, a part of the gut flora is unbalanced, with normally dominating species, i.e., beneficial bacteria, becoming underrepresented (and/or less metabolically active) and outcompeted by contained species, e.g., pathogenic and/or antibiotic-resistant bacteria, which proliferate to fill the void.

[0315] As used herein, examples of a “side effect of an anti-cancer therapeutic agent” and a “side effect of an anti-cancer therapy” include abdominal pain, anemia and low blood counts, appetite loss, autoimmune effects, bleeding and bruising (thrombocytopenia), cancer, changes in mood or thinking, colonization by pathogenic bacteria, constipation, cough, dehydration, delirium, diabetes-related symptoms, diarrhea, dry mouth or xerostomia, eating problems, edema, falling, fatigue, fertility issues, fever, flu-like symptoms, fluid in the abdomen or ascites, gastrointestinal (GI) mucositis, gut dysbiosis, hair loss (alopecia), hand-foot syndrome or palmar-plantar erythrodysesthesia, headache, hearing problems, high or low blood pressure, hormone changes, hiccups, hypercalcemia, infection and neutropenia, infection by pathogenic bacteria, inflammatory bowel disease, irritable bowel syndrome, leg cramps, lymphedema, memory or concentration problems, mouth and throat problems, nausea and vomiting, nerve problems (peripheral neuropathy), obesity, osteoporosis, ostomies, pain, seizures, sexual health issues, shortness of breath, sinus congestion, skin and nail changes, sleep problems, stool or urine changes, sweating, swelling, ulcerative colitis, urinary and bladder problems, weight gain from retaining fluid, and/or weakness. In embodiments, a side effect of the anti-cancer therapeutic agent and/or anti-cancer therapy is caused by gut dysbiosis; it has been reported that chemotherapy, for example, is associated with reduced diversity in the gut microbiome. Thus, “treating or preventing or reducing a side effect” refers to decreasing the severity of a side effect and up to eliminating the side effect, e.g., in part, by repairing/repopulating his/her gut microbiome after receiving the anti-cancer therapeutic agent and/or anti-cancer therapy.

[0316] As used herein, “increase[ing] efficacy of an anti-cancer therapeutic agent and/or anti-cancer therapy” refers to the ability of a microbial composition or method using same to promote the beneficial and desired effects of an anti-cancer therapeutic agent and/or anti-cancer therapy, i.e., killing cancer cells, reducing tumor size, and/or simulating an immune response against a cancer cell or tumor.

[0317] As used herein, “spore” or a population of “spores” includes bacteria (or other single-celled organisms) that are generally viable, more resistant to environmental influences such as heat and bactericidal agents than vegetative forms of the same bacteria, and typically capable of germination and out-growth. “Spore-formers” or bacteria “capable of forming spores” are those bacteria containing the genes and other necessary abilities to produce spores under suitable environmental conditions.

[0318] In embodiments, the subject, e.g., a human, is refractory and/or non-responsive to a treatment directed to a checkpoint molecule. In embodiments, the treatment directed to a checkpoint molecule comprises administration of Keytruda (Pembrolizumab), Opdivo (Nivolumab), Yervoy (Ipilimumab), Tecentriq (atezolizumab), Bavencio (avelumab), or lmfinzi (durvalumab).

[0319] As used herein, the term “treating” refers to (i) completely or partially inhibiting a disease, disorder or condition, for example, arresting its development; (ii) completely or partially relieving a disease, disorder or condition, for example, causing regression of the disease, disorder and/or condition; or (iii) completely or partially preventing a disease, disorder or condition from occurring in a patient that may be predisposed to the disease, disorder and/or condition, but has not yet been diagnosed as having it. Similarly, “treatment” refers to both therapeutic treatment and prophylactic or preventative measures.

[0320] As used herein, the term “substantially”, when used to modify a quality, generally allows certain degree of variation without that quality being lost. For example, in certain aspects such degree of variation can be less than 0.1%, about 0.1%, about 0.2%, about 0.3%, about 0.4%, about 0.5%, about 0.6%, about 0.7%, about 0.8%, about 0.9%, about 1%, between 1-2%, between 2-3%, between 3-4%, between 4-5%, or greater than 5%.

[0321] In some embodiments, the terms “patient” and “subject” are used interchangeably. In some embodiments, the subject and/or animal is a mammal, e.g., a human, mouse, rat, guinea pig, dog, cat, horse, cow, pig, rabbit, sheep, or non-human primate, such as a monkey, chimpanzee, or baboon. In other embodiments, the subject and/or animal is a non-mammal, such, for example, a zebrafish.

[0322] In various embodiments, methods of the invention are useful in treatment a human subject. In some embodiments, the human is a pediatric human. In other embodiments, the human is an adult human. In other embodiments, the human is a geriatric human. In other embodiments, the human may be referred to as a patient. In some embodiments, the human is a female. In some embodiments, the human is a male.

[0323] In certain embodiments, the human has an age in a range of from about 1 to about 18 months old, from about 18 to about 36 months old, from about 1 to about 5 years old, from about 5 to about 10 years old, from about 10 to about 15 years old, from about 15 to about 20 years old, from about 20 to about 25 years old, from about 25 to about 30 years old, from about 30 to about 35 years old, from about 35 to about 40 years old, from about 40 to about 45 years old, from about 45 to about 50 years old, from about 50 to about 55 years old, from about 55 to about 60 years old, from about 60 to about 65 years old, from about 65 to about 70 years old, from about 70 to about 75 years old, from about 75 to about 80 years old, from about 80 to about 85 years old, from about 85 to about 90 years old, from about 90 to about 95 years old or from about 95 to about 100 years old.

[0324] As used in this Specification and the appended claims, the singular forms “a,” “an” and “the” include plural referents unless the context clearly dictates otherwise.

[0325] Unless specifically stated or obvious from context, as used herein, the term “or” is understood to be inclusive and covers both “or” and “and”.

[0326] Unless specifically stated or obvious from context, as used herein, the term “about” is understood as within a range of normal tolerance in the art, for example within (plus or minus) 10%, 9%, 8%, 7%, 6%, 5%, 4%, 3%, 2%, 1%, 0.5%, 0.1%, 0.05%, or 0.01% of the stated value. Unless otherwise clear from the context, all numerical values provided herein are modified by the term “about.”

[0327] The terms “one or more”, “at least one”, and the like are understood to include but not be limited to at least 1, 2, 3, 4, 5, 6, 7, 8, 9, 10, 11, 12, 13, 14, 15, 16, 17, 18, 19 20, 21, 22, 23, 24, 25, 26, 27, 28, 29, 30, 31, 32, 33, 34, 35, 36, 37, 38, 39, 40, 41, 42, 43, 44, 45, 46, 47, 48, 49, 50, 51, 52, 53, 54, 55, 56, 57, 58, 59, 60, 61, 62, 63, 64, 65, 66, 67, 68, 69, 70, 71, 72, 73, 74, 75, 76, 77, 78, 79, 80, 81, 82, 83, 84, 85, 86, 87, 88, 89, 90, 91, 92, 93, 94, 95, 96, 97, 98, 99, 100, 101, 102, 103, 104, 105, 106, 107, 108, 109, 110, 111, 112, 113, 114, 115, 116, 117, 118, 119, 120, 121, 122, 123, 124, 125, 126, 127, 128, 129, 130, 131, 132, 133, 134, 135, 136, 137, 138, 139, 140, 141, 142, 143, 144, 145, 146, 147, 148, 149 or 150, 200, 300, 400, 500, 600, 700, 800, 900, 1000, 2000, 3000, 4000, 5000 or more and any number in between.

[0328] Conversely, the term “no more than” includes each value less than the stated value.

[0329] The terms “plurality”, “at least two”, “two or more”, “at least second”, and the like, are understood to include but not limited to at least 2, 3, 4, 5, 6, 7, 8, 9, 10, 11, 12, 13, 14, 15, 16, 17, 18, 19 20, 21, 22, 23, 24, 25, 26, 27, 28, 29, 30, 31, 32, 33, 34, 35, 36, 37, 38, 39, 40, 41, 42, 43, 44, 45, 46, 47, 48, 49, 50, 51, 52, 53, 54, 55, 56, 57, 58, 59, 60, 61, 62, 63, 64, 65, 66, 67, 68, 69, 70, 71, 72, 73, 74, 75, 76, 77, 78, 79, 80, 81, 82, 83, 84, 85, 86, 87, 88, 89, 90, 91, 92, 93, 94, 95, 96, 97, 98, 99, 100, 101, 102, 103, 104, 105, 106, 107, 108, 109, 110, 111, 112, 113, 114, 115, 116, 117, 118, 119, 120, 121, 122, 123, 124, 125, 126, 127, 128, 129, 130, 131, 132, 133, 134, 135, 136, 137, 138, 139, 140, 141, 142, 143, 144, 145, 146, 147, 148, 149 or 150, 200, 300, 400, 500, 600, 700, 800, 900, 1000, 2000, 3000, 4000, 5000 or more and any number in between.

[0330] The term “greater than” and the like, is understood to include values greater than the stated by at least 1, 2, 3, 4, 5, 6, 7, 8, 9, 10, 11, 12, 13, 14, 15, 16, 17, 18, 19 20, 21, 22, 23, 24, 25, 26, 27, 28, 29, 30, 31, 32, 33, 34, 35, 36, 37, 38, 39, 40, 41, 42, 43, 44, 45, 46, 47, 48, 49, 50, 51, 52, 53, 54, 55, 56, 57, 58, 59, 60, 61, 62, 63, 64, 65, 66, 67, 68, 69, 70, 71, 72, 73, 74, 75, 76, 77, 78, 79, 80, 81, 82, 83, 84, 85, 86, 87, 88, 89, 90, 91, 92, 93, 94, 95, 96, 97, 98, 99, 100, 101, 102, 103, 104, 105, 106, 107, 108, 109, 110, 111, 112, 113, 114, 115, 116, 117, 118, 119, 120, 121, 122, 123, 124, 125, 126, 127, 128, 129, 130, 131, 132, 133, 134, 135, 136, 137, 138, 139, 140, 141, 142, 143, 144, 145, 146, 147, 148, 149 or 150, 200, 300, 400, 500, 600, 700, 800, 900, 1000, 2000, 3000, 4000, 5000 or more and any number in between.

[0331] A stated range is understood to be any value between and at the limits of the stated range. As examples, a range between 1 and 5 includes 1, 2, 3, 4, and 5; a range between 1 and 10 includes 1, 2, 3, 4, 5, 6, 7, 8, 9, and 10; and a range between 1 and 100 includes 1, 2, 3, 4, 5, 6, 7, 8, 9, 10, 11, 12, 13, 14, 15, 16, 17, 18, 19 20, 21, 22, 23, 24, 25, 26, 27, 28, 29, 30, 31, 32, 33, 34, 35, 36, 37, 38, 39, 40, 41, 42, 43, 44, 45, 46, 47, 48, 49, 50, 51, 52, 53, 54, 55, 56, 57, 58, 59, 60, 61, 62, 63, 64, 65, 66, 67, 68, 69, 70, 71, 72, 73, 74, 75, 76, 77, 78, 79, 80, 81, 82, 83, 84, 85, 86, 87, 88, 89, 90, 91, 92, 93, 94, 95, 96, 97, 98, 99, 100.

[0332] Unless defined otherwise, all technical and scientific terms used herein have the same meaning as commonly understood by one of ordinary skill in the art to which the invention pertains. Although other probes, compositions, methods, and kits similar, or equivalent, to those described herein can be used in the practice of the present invention, the preferred materials and methods are described herein. It is to be understood that the terminology used herein is for the purpose of describing particular embodiments only, and is not intended to be limiting.

### EXAMPLES

### Example 1: Determination of Useful Bacteria in a Bacterial Mixture of the Present Invention

[0333] Tables 5 and 6 (above) were created based upon analyses using 16S rRNA sequencing data from public and private sources to identify drivers of ARB decolonization.

[0334] Some of the operational taxonomic units (OTUs) were identified because they are present in healthy stool donors and the family or genus they belong to was at least five-fold enriched in stool donors compared to patients pre-FMT, and in a receiver operator curve (ROC) plot, the area under the curve (AUC) was greater than or equal to 0.6, showing that the presence/absence of these families and genera can predict whether a sample is from a donor or from a patient pre-FMT. Some of the OTUs were identified because they are present in healthy stool donors and the family or genus they belong to was enriched in patients who did not become dominated with Enterococcus or pathogenic Gram-negative bacteria compared to those who became dominated, and in a ROC plot, the AUC was greater than or equal to 0.6, showing that the presence/absence of these families and genera can predict whether a patient's gut will become dominated by enteric pathogens. Patients had received or were undergoing stem cell transplantation as part of a treatment for leukemia, lymphoma, multiple myeloma or myelodysplastic syndrome.

[0335] Other OTUs were identified because they are present in healthy stool donors and the family or genus they belong to was enriched in people with a C. difficile infection who were not colonized with Extended Spectrum Beta-Lactamase producing Enterobacteriaceae (ESBL-E) compared to those who became colonized, and in a ROC plot, the AUC was greater than or equal to 0.6, showing that the presence/absence of these families and genera can predict whether a patient will become colonized with ESBL-E.

[0336] Four datasets were used in these analyses: (1) Taur Y, Xavier J, Lipuma L, Caries Ubeda, Goldberg J, Gobourne A, Lee Y, Dubin K, Socci N, Viale A, Perales M-A, Jenq R, Brink M, Pamer E. Intestinal Domination and the Risk of Bacteremia in Patients Undergoing Allogeneic Hematopoietic Stem Cell Transplantation. Clin Infect Dis. 2012; 55(7):905-914. PMCID: PMC3657523; (2) Gosalbes M J, Vazquez-Castellanos J F, Angebault C, Woerther P-L, Ruppé E, Ferrús M L, Latorre A, Andremont A, Moya A. Carriage of Enterobacteria Producing Extended-Spectrum β-Lactamases and Composition of the Gut Microbiota in an Amerindian Community. Antimicrob Agents Chemother. 2015 Dec. 31; 60(1):507-514. PMCID: PMC4704183; (3) Multicenter retrospective study assessing efficacy of FMT for VRE decolonization in patients with rCDI who were also colonized with VRE; and (4) 16S sequencing was performed on samples from 63 healthy and extensively-screened stool donors.

[0337] FIG. 1 is a pie chart showing percentage of all OTUs in GreenGenes database that are found in a healthy human gut and that are included in Table 5. The GreenGenes database contains sequence data corresponding to almost 100,000 unique 16S sequences from different bacterial strains that have been sequenced. See, the World Wide Web (www) at greengenes.lbl.gov. FIG. 1 shows the fraction of all OTUs found in the GreenGenes database that are found in the human gut and that are relevant to the present invention. As shown in FIG. 1, 94.6% of of all OTUs in the GreenGenes database are not found in the healthy human gut; 4.3% of all OTUs in the GreenGenes database are found in the healthy human gut; and 1.2% of all OTUs in the GreenGenes database that are listed in Table 5.

### Example 2. Development of Bacterial Mixtures

[0338] A product candidate is being developed which includes a novel mixture of commensal bacterial strains that can decolonize and/or eradicate and/or reduce the load of antibiotic-resistant enteric pathogens in the gut.

[0339] Bacterial strains may be included in a mixture based on their abundance in donors whose stool was used for successful fecal microbiota transplants (FMTs) in a patient suffering from a gut dysbiosis disorder, e.g., caused by a previous or current anti-cancer therapy. Additionally, bacterial strains may be included in a mixture due to their ability to colonize the mucosa, to complement the capacity of a functionally deficient microbial community (e.g., the microbial community of a patient infected and/or colonized by a pathogenic bacteria), to produce levels of SCFAs comparable to healthy individuals, to decolonize a pathogenic bacterium, to directly compete with the ARB for a niche and/or for nutrients, to directly compete with the pathogenic bacteria for a niche and/or for nutrients, to directly inhibit a pathogenic bacterium through production of a secreted product, to directly inhibit an antibiotic-resistant bacterium (ARB) through production of a secreted product, to enable mucosal healing, improve mucosal barrier function, and/or to reduce inflammation, to enhance production of SCFAs, to eradicate a pathogenic bacterium, to improve mucosal barrier function, and/or, to promote restoration of mucosal barrier functions, and/or to reduce inflammation.

[0340] Certain bacterial strains are included in a mixture based upon their 16S rRNA sequence identity. For example, the mixture includes one or more bacterial strains having a 16S rRNA sequence that is at least about 80% identical to the 16S rRNA sequence of any one of the operational taxonomic units (OTUs) provided in Table 5 or Table 6. For example, the mixture may include one or more bacterial strains having a 16S rRNA sequence that is at least about 80%, about 81%, about 82%, about 83%, about 84%, about 85%, about 86%, about 87%, about 88%, about 89%, about 90%, about 91%, about 92%, about 93%, about 94%, about 95%, about 96%, about 97%, about 98%, about 99%, or about 100% identical with the 16S rRNA sequence of any one of the operational taxonomic units (OTUs) provided in Table 5 or Table 6.

[0341] Certain mixtures of bacterial strains are substantially complete or non-selected fecal microbiota preparations (e.g., from a single donor), which generally comprises a full complement of functional microorganisms found in feces of one or more healthy humans. Such mixtures of bacterial strains may be supplemented with one or more strains listed in Table 5 or Table 6 and/or one or more strains having a 16S rRNA sequence that is at least about 95% identical with the 16S rRNA sequence of any one of the strains listed in Table 5 or Table 6.

[0342] Other mixtures of bacterial strains comprise “less than the full complement” of functional microorganisms found in feces of one healthy human or in feces of more than one healthy human donor. These bacterial mixtures omit at least one bacterial strain from the full complement. Such mixtures of bacterial strains may be supplemented with one or more strains listed in Table 5 or Table 6 and/or one or more strains having a 16S rRNA sequence that is at least about 95% identical with the 16S rRNA sequence of any one of the strains listed in Table 5 or Table 6.

[0343] Some bacterial strains in a mixture are directly obtained from human feces (i.e., from a suitable and healthy donor); Some of those strains may isolated or purified from its source material, i.e., separated from at least some of the components with which they were associated when initially produced (e.g., nature (from feces))

[0344] Some bacterial strains in a mixture are indirectly obtained from human feces and/or are obtained independent of human feces (e.g., from a bacterial cell bank or from a laboratory stock).

### Example 3: Production of a Pharmaceutical Composition

[0345] Strains selected in Example 1 and/or Example 2 may be independently cultured and mixed together before administration. Cultured strains are independently grown in supportive media, e.g. at 37° C., pH 7, in a GMM or other animal-products-free medium, pre-reduced with 1 g/L cysteine.HCl. After each strain reaches a sufficient biomass, it is optionally preserved for banking by adding 15% glycerol and then frozen at −80° C. in 1 ml cryotubes.

[0346] Each strain may then be cultivated to a concentration of about 10¹⁰ CFU/mL, then concentrated 20-fold by tangential flow microfiltration; the spent medium is exchanged by diafiltering with a preservative medium consisting of 2% gelatin, 100 mM trehalose, and 10 mM sodium phosphate buffer, or other suitable preservative medium. The suspension is freeze-dried to a powder and titrated.

[0347] After drying, the powder is blended with microcrystalline cellulose and magnesium stearate and formulated into a 250 mg gelatin capsule containing 10 mg of lyophilized powder (10⁸ to 10¹¹ bacteria), 160 mg microcrystalline cellulose, 77.5 mg gelatin, and 2.5 mg magnesium stearate.

### Example 4: Methods of Treatment

[0348] A subject having gut dysbiosis is administered a pharmaceutical composition comprising a bacterial mixture of the present invention to treat the gut dysbiosis.

[0349] For subjects who have gut dysbiosis as a side effect of an anti-cancer therapeutic agent and/or a side effect of an anti-cancer therapy, the pharmaceutical composition helps reduce or treating the side effect.

[0350] For subjects who have undergone or are undergoing an anti-cancer therapeutic agent and/or a side effect of an anti-cancer therapy, the pharmaceutical composition increases the efficacy of the anti-cancer therapeutic agent and/or anti-cancer therapy.

### Example 5: Methods of Prevention

[0351] A subject at risk for gut dysbiosis is administered a pharmaceutical composition comprising a bacterial mixture of the present invention to prevent gut dysbiosis.

[0352] For subjects who are at risk for gut dysbiosis as a side effect of an anti-cancer therapeutic agent and/or a side effect of an anti-cancer therapy, the pharmaceutical composition helps prevents the likelihood of getting the side effect.

### EQUIVALENTS

[0353] While the invention has been described in connection with specific embodiments thereof, it will be understood that it is capable of further modifications and this application is intended to cover any variations, uses, or adaptations of the invention following, in general, the principles of the invention and including such departures from the present disclosure as come within known or customary practice within the art to which the invention pertains and as may be applied to the essential features hereinbefore set forth and as follows in the scope of the appended claims.

[0354] Those skilled in the art will recognize, or be able to ascertain, using no more than routine experimentation, numerous equivalents to the specific embodiments described specifically herein. Such equivalents are intended to be encompassed in the scope of the following claims.

### REFERENCES

[0355] 1. Antibiotic Resistance Threats in the United States, 2013 [Internet]. US Department of Health and Human Services, Centers for Disease Control and Prevention; 2013. Available from: the World Wide Web (www) at cdc.gov/drugresistance/pdf/ar-threats-2013-508.pdf
[0356] 2. Stone P W. Economic burden of healthcare-associated infections: an American perspective. Expert Rev Pharmacoecon Outcomes Res. 2009 October; 9(5):417-422. PMCID: PMC2827870
[0357] 3. Pamer E G. Resurrecting the intestinal microbiota to combat antibiotic-resistant pathogens. Science. 2016; 352(6285):535-8. PMCID: PMC4984266
[0358] 4. Abt M, Pamer E. Commensal bacteria mediated defenses against pathogens. Curr Opin Immunol. 2014; 29:16-22. PMCID: PMC4132187
[0359] 5. Becattini S, Taur Y, Pamer E G. Antibiotic-Induced Changes in the Intestinal Microbiota and Disease. Trends Mol Med. 2016; 22(6):458-78. PMCID: PMC4885777
[0360] 6. Carlet J. The gut is the epicentre of antibiotic resistance. Antimicrob Resist Infect Control. 2012; 1:39.
[0361] 7. Buffie C, Pamer E. Microbiota-mediated colonization resistance against intestinal pathogens. Nat Rev Immunol. 2013; 13(14790-801. PMCID: PMC4194195
[0362] 8. Martina S-C, Raffatellu M. No Vacancy: How Beneficial Microbes Cooperate with Immunity To Provide Colonization Resistance to Pathogens. J Immunol. 2015; 194(9):4081-4087. PMCID: PMC4402713
[0363] 9. Ubeda C, Taur Y, Jenq R, Equinda M, Son T, Samstein M, Viale A, Socci N, Brink M, Kamboj M, Pamer E. Vancomycin-resistant Enterococcus domination of intestinal microbiota is enabled by antibiotic treatment in mice and precedes bloodstream invasion in humans. J Clin Invest. 2010; 120(12):4332-4341. PMCID: PMC2993598
[0364] 10. Ziakas P D, Thapa R, Rice L B, Mylonakis E. Trends and significance of VRE colonization in the ICU: a meta-analysis of published studies. PloS One. 2013; 8(9):e75658. PMCID: PMC3785502
[0365] 11. Hendrix C W, Hammond J M, Swoboda S M, Merz W G, Harrington S M, Perl T M, Dick J D, Borschel D M, Halczenko P W, Pelz R K, Rocco L E, Conway J E, Brower R G, Lipsett P A. Surveillance strategies and impact of vancomycin-resistant enterococcal colonization and infection in critically ill patients. Ann Surg. 2001 February; 233(2):259-265. PMCID: PMC1421209
[0366] 12. Horwitz D, McCue T, Mapes A C, Ajami N J, Petrosino J F, Ramig R F, Trautner B W. Decreased microbiota diversity associated with urinary tract infection in a trial of bacterial interference. J Infect. 2015 September; 71(3):358-367. PMCID: PMC4529357
[0367] 13. Safdar N, Sengupta S, Musuuza J S, Juthani-Mehta M, Drees M, Abbo L M, Milstone A M, Furuno J P, Varman M, Anderson D J, Morgan D J, Miller L G, Snyder G M, and the SHEA Research Committee. Status of the Prevention of Multidrug-Resistant Organisms in International Settings: A Survey of the Society for Healthcare Epidemiology of America Research Network. Infect Control Hosp Epidemiol. 2016 Nov. 7; 1-8. PMID: 27817759
[0368] 14. Abad C, Fearday A, Safdar N. Adverse effects of isolation in hospitalised patients: a systematic review. J Hosp Infect. 2010; 76(2):97-102. PMID: 20619929
[0369] 15. Bowling J E, Taylor B S. Isolation Precautions for Hospitalized Patients: The Challenges of Identifying

[0370] Unintended Individual Consequences and Measuring the Prevention of Community Harm. J Gen Intern Med. 2016 Nov. 18; 1-3.
[0371] 16. Guilley-Lerondeau B, Bourigault C, Buttes A-C G des, Birgand G, Lepelletier D. Adverse effects of isolation: a prospective matched cohort study including 90 direct interviews of hospitalized patients in a French University Hospital. Eur J Clin Microbiol Infect Dis. 2017 Jan. 1; 36(1):75-80.
[0372] 17. Kassam Z, Lee C H, Yuan Y, Hunt R H. Fecal microbiota transplantation for Clostridium difficile infection: systematic review and meta-analysis. Am J Gastroenterol. 2013 April; 108(4):500-508. PMID: 23511459
[0373] 18. Fischer M, Sipe B, Cheng Y-W, Phelps E, Rogers N, Sagi S, Bohm M, Xu H, Kassam Z. Fecal microbiota transplant in severe and severe-complicated Clostridium difficile: A promising treatment approach. Gut Microbes. 2016 Dec. 21; 1-14. P M I D: 28001467
[0374] 19. Singh R, Nood E, Nieuwdorp M, Dam B, Berge I, Geerlings S, Bemelman F. Donor feces infusion for eradication of Extended Spectrum beta-Lactamase producing Escherichia coli in a patient with end stage renal disease. Clin Microbiol Infec. 2014; 20(11):0977-0978. PMID: 24845223
[0375] 20. Garcia-Fernández S, Morosini M-I, Cobo M, Foruny J R, López-Sanromán A, Cobo J, Romero J, Cantón R, Del Campo R. Gut eradication of VIM-1 producing ST9 Klebsiella oxytoca after fecal microbiota transplantation for diarrhea caused by a Clostridium difficile hypervirulent R027 strain. Diagn Microbiol Infect Dis. 2016 December; 86(4):470-471. PMID: 27712927
[0376] 21. Millan B, Park H, Hotte N, Mathieu O, Burguiere P, Tompkins T, Kao D, Madsen K. Fecal Microbial Transplants Reduce Antibiotic-resistant Genes in Patients With Recurrent Clostridium difficile Infection. Clin Infect Dis. 2016; 62(12):1479-1486. PMID: 27025836
[0377] 22. Lagier J, Million M, Fournier P, Brouqui P, Raoult D. Faecal microbiota transplantation for stool decolonization of OXA-48 carbapenemase-producing Klebsiella pneumoniae. J Hosp Infect. 2015; 90(2):173-4. PMID: 25913649
[0378] 23. Biliński J, Grzesiowski P, Muszyński J, Wróblewska M, Mądry K, Robak K, Dzieciątkowski T, Wieslaw W-J, Basak G. Fecal Microbiota Transplantation Inhibits Multidrug-Resistant Gut Pathogens: Preliminary Report Performed in an Immunocompromised Host. Arch Immunol Ther Ex. 2016; 64(3):255-258. PMID: 26960790
[0379] 24. Bilinski J, Grzesiowski P, Sorensen N, Madry K, Muszynski J, Robak K, Wroblewska M, Dzieciatkowski T, Dulny G, Dwilewicz-Trojaczek J, Wiktor-Jedrzejczak W, Basak G W. Fecal Microbiota Transplantation in Patients with Blood Disorders Inhibits Gut Colonization with Antibiotic-Resistant Bacteria: Results of a Prospective, Single-Center Study. Clin Infect Dis Off Publ Infect Dis Soc Am. 2017 Mar. 24; PMID: 28369341
[0380] 25. Freedman A. Use of Stool Transplant to Clear Fecal Colonization with Carbapenem-Resistant Enterobacteraciae (CRE): Proof of Concept. Idsa; 2014 [cited 2017 Mar. 30]. Available from: https://idsa.confex.com/idsa/2014/webprogram/Paper47124.html
[0381] 26. Davido B, Batista R, Michelon H, Lepainteur M, Bouchand F, Lepeule R, Salomon J, Vittecoq D, Duran C, Escaut L, Sobhani I, Paul M, Lawrence C, Perronne C, Chast F, Dinh A. Is faecal microbiota transplantation an option to eradicate highly drug-resistant enteric bacteria carriage? J Hosp Infect. 2017 Apr. 1; 95(4):433-437. PMID: 28237504
[0382] 27. Sohn K M, Cheon S, Kim Y-S. Can Fecal Microbiota Transplantation (FMT) Eradicate Fecal Colonization With Vancomycin-Resistant Enterococci (VRE)? Infect Control Amp Hosp Epidemiol. 2016 January; 1-2.
[0383] 28. Jouhten H, Mattila E, Arkkila P, Satokari R. Reduction of Antibiotic Resistance Genes in Intestinal Microbiota of Patients With Recurrent Clostridium difficile Infection After Fecal Microbiota Transplantation. Clin Infect Dis. 2016; 63(5):710-1. PMID: 27317794
[0384] 29. Dubberke E R, Mullane K M, Gerding D N, Lee C H, Louie T J, Guthertz H, Jones C. Clearance of Vancomycin-Resistant Enterococcus Concomitant With Administration of a Microbiota-Based Drug Targeted at Recurrent Clostridium difficile Infection. Open Forum Infect Dis. 2016; 3(3):ofw133.
[0385] 30. Smith M. Clearance of Vancomycin-Resistant Enterococcus Colonization with Fecal Microbiota Transplantation among Patients with Recurrent Clostridium difficile Infection. Idsa; 2016 [cited 2016 Oct. 21]. Available from: https://idsa.confex.com/idsa/2016/webprogram/Paper59960.html
[0386] 31. Khanna S, Pardi D S, Kelly C R, Kraft C S, Dhere T, Henn M R, Lombardo M-J J, Vulic M, Ohsumi T, Winkler J, Pindar C, H M Barbara, Pomerantz R J, Aunins J G, Cook D N, Hohmann E L. A Novel Microbiome Therapeutic Increases Gut Microbial Diversity and Prevents Recurrent Clostridium difficile Infection. J Infect Dis. 2016; 214(2):173-81. PMID: 26908752
[0387] 32. Jang M-O, An J, Jung S-I, Park K-H. Refractory Clostridium difficile Infection Cured With Fecal Microbiota Transplantation in Vancomycin-Resistant Enterococcus Colonized Patient. Intest Res. 2014; 13(1):80-84. PMCID: PMC4316227
[0388] 33. Nancy C-C, Sullivan E, Gonzalo B-L. Fecal Microbiota Transplantation and Successful Resolution of Multidrug-Resistant-Organism Colonization. J Clin Microbiol. 2015; 53(6):1986-1989. PMID: 25878340
[0389] 34. Stripling J, Kumar R, Baddley J W, Nellore A, Dixon P, Howard D, Ptacek T, Lefkowitz E J, Tallaj J A, Benjamin W H, Morrow C D, Rodriguez J. Loss of Vancomycin-Resistant Enterococcus Fecal Dominance in an Organ Transplant Patient With Clostridium difficile Colitis After Fecal Microbiota Transplant. Open Forum Infect Dis. 2015; 2(2):ofv078. PMCID: PMC4498259
[0390] 35. Gilmore M, Rauch M, Ramsey M, Himes P, Varahan S, Manson J, Lebreton F, Hancock L. Pheromone killing of multidrug-resistant Enterococcus faecalis V583 by native commensal strains. P Natl Acad Sci Usa. 2015; 112(23):7273-8. PMCID: PMC4466700
[0391] 36. Gaca A, Gilmore M. Killing of VRE Enterococcus faecalis by commensal strains: Evidence for evolution and accumulation of mobile elements in the absence of competition. Gut Microbes. 2016; 7(1):90-96. PMCID: PMC4856443
[0392] 37. Sassone-Corsi M, Nuccio S-P, Liu H, Hernandez D, Vu C T, Takahashi A A, Edwards R A, Raffatellu M. Microcins mediate competition among Enterobacteriaceae in the inflamed gut. Nature. 2016 Dec. 8; 540(7632):280-283.
[0393] 38. Hecht A L, Casterline B W, Earley Z M, Goo Y A, Goodlett D R, Bubeck Wardenburg J. Strain competition restricts colonization of an enteric pathogen and prevents colitis. EMBO Rep. 2016; 17(9):1281-91. PMCID: PMC5007561
[0394] 39. McKenney E S, Kendall M M. Microbiota and pathogen “pas de deux”: setting up and breaking down barriers to intestinal infection. Pathog Dis. 2016; 74(5). PMID: 27252177
[0395] 40. Ubeda C, Bucci V, Caballero S, Djukovic A, Toussaint N, Equinda M, Lipuma L, Ling L, Gobourne A, No D, Taur Y, Jenq R, Brink M, Xavier J, Pamer E. Intestinal Microbiota Containing Barnesiella Species Cures Vancomycin-Resistant Enterococcus faecium Colonization. Infect Immun. 2013; 81(3):965-973. PMCID: PMC3584866
[0396] 41. Kinnebrew M, Ubeda C, Zenewicz L, Smith N, Flavell R, Pamer E. Bacterial flagellin stimulates Toll-like receptor 5-dependent defense against vancomycin-resistant Enterococcus infection. J Infect Dis. 2010; 201(4):534-43. PMCID: PMC2811237
[0397] 42. Desai M S, Seekatz A M, Koropatkin N M, Kamada N, Hickey C A, Wolter M, Pudlo N A, Kitamoto S, Terrapon N, Muller A, Young V B, Henrissat B, Wilmes P, Stappenbeck T S, Nunez G, Martens E C. A Dietary Fiber-Deprived Gut Microbiota Degrades the Colonic Mucus Barrier and Enhances Pathogen Susceptibility. Cell. 2016 Nov. 17; 167(5):1339-1353.e21.
[0398] 43. Earle K A, Billings G, Sigal M, Lichtman J S, Hansson G C, Elias J E, Amieva M R, Huang K C, Sonnenburg J L. Quantitative Imaging of Gut Microbiota Spatial Organization. Cell Host Microbe. 2015 Oct. 14; 18(4):478-488. PMID: 26439864
[0399] 44. Goverse G, Molenaar R, Macia L, Tan J, Erkelens M N, Konijn T, Knippenberg M, Cook ECL, Hanekamp D, Veldhoen M, Hartog A, Roeselers G, Mackay C R, Mebius R E. Diet-Derived Short Chain Fatty Acids Stimulate Intestinal Epithelial Cells To Induce Mucosal Tolerogenic Dendritic Cells. J Immunol. 2017 Jan. 18; 1600165. PMID: 28100682
[0400] 45. Wu W, Sun M, Chen F, Cao A T, Liu H, Zhao Y, Huang X, Xiao Y, Yao S, Zhao Q, Liu Z, Cong Y. Microbiota metabolite short-chain fatty acid acetate promotes intestinal IgA response to microbiota which is mediated by GPR43. Mucosal Immunol [Internet]. 2016 Dec. 14 [cited 2017 Jan. 24]; Available from: the World Wide Web (www) at nature.com/doifinder/10.1038/mi.2016.114
[0401] 46. Olsan E E et al. Colonization resistance: the deconvolution of a complex trait. 2017. Journal of Biological Chemistry 292(21): 8577-8581.
[0402] 47. Meynell G G. Antibacterial mechanisms of the mouse gut. II. The role of Eh and volative fatty acids in the normal gut. 1963. British journal of experimental pathology 44: 209-219.
[0403] 48. Winter S E et al. The dynamics of gut-associated microbial communities during inflammation. 2013. EMPO

[0404] Rep 14: 319-327.
[0405] 49. Winter S E et al. Host-derived nitrate boosts growth of E. coli in the inflamed gut. 2013. Science 339: 708-711.
[0406] 50. Spees A M et al. Streptomycin-induced inflammation enhances Escherichia coli gut colonization through nitrate respiration. 2013. MBio 4: e00430
[0407] 51. Garner C D et al. Perturbation of the small intestine microbial ecology by streptomycin alters pathology in a Salmonella enterica serovar typhimurium murine model of infection. 2009. Infection and Immunity 77: 2691-2702.
[0408] 52. Smith P M et al. The microbial metabolites, short-chain fatty acids, regulate colonic Treg cell homeostasis. 2013. Science 341: 569-573.
[0409] 53. Rivera-Chavez F et al. Depletion of butyrate-producing Clostridia from the gut microbiota drives an aerobic luminal expansion of Salmonella. 2016. Cell Host and Microbe 19: 443-454.
[0410] 54. Itoh K and Freter R. Control of Escherichia coli populations by a combination of indigenous Clostridia and Lactobacilli in gnotobiotic mice and continuous-flow cultures. 1989. Infection and Immunity 57: 559-565.
[0411] 55. Donohoe D R et al. Microbial regulation of glucose metabolism and cell-cycle progression in mammalian colonocytes. 2012. PLoS One 7: e46589.
[0412] 56. Kelly C J et al. Crosstalk between microbiota-derived short-chain fatty acids and intestinal epithelial HIF augments tissue barrier function. 2015. Cell Host and Microbe 17: 662-671.
[0413] 57. Jones S A et al. Anaerobic respiration of Escherichia coli in the mouse intestine. 2011. Infection and Immunity 79: 4218-4226.
[0414] 58. Kinnebrew M et al. Bacterial flagellin stimulates TLRS-dependent defense against vancomycin-resistant Enterococcus infection. 2010. Journal of Infectious Disease 201(4): 534-543.
[0415] 59. Artis D. Epithelial-cell recognition of commensal bacteria and maintenance of immune homeostasis in the gut. 2008. Nature Reviews Immunology 8:411-420.
[0416] 60. Vaishnava S et al. Paneth cells directly sense gut commensals and maintain homeostasis at the intestinal host-microbial interface. 2008. PNAS.
[0417] 61. Macpherson A J et al. Interactions between commensal intestinal bacteria and the immune system. 2004.

[0418] Nature Reviews Immunology 4: 478-485.
[0419] 62. Rakoff-Nahoum S et al. Recognition of commensal microflora by toll-like receptors is required for intestinal homeostasis. 2004. Cell 118:229-241.
[0420] 63. Pamer E G. Immune responses to commensal and environmental microbes. 2007. Nature Immunology 8:1173-1178.
[0421] 64. Cash H L et al. Symbiotic bacteria direct expression of an intestinal bactericidal lectin. 2006. Science 313: 1126-1130.
[0422] 65. Ayabe T et al. Secretion of microbicidal alpha-defensins by intestinal Paneth cells in response to bacteria. 2000. Nature Immunology 1:113-118.
[0423] 66. Vora P et al. Beta-defensin-2 expression is regulated by TLR signaling in intestinal epithelial cells. 2004. Journal of Immunology 173:5398-5405.
[0424] 67. Kolls J K et al. Cytokine-mediated regulation of antimicrobial proteins. 2008. Nature Reviews Immunology 8: 829-835.
[0425] 68. Brandi K et al. MyD88-mediated signals induce the bactericidal lectin Reglllgamma and protect mice against intestinal Listeria monocytogenes infection. 2007. Journal of Experimental Medicine 204: 1891-1900.
[0426] 69. Brandi K et al. Vancomycin-resistant enterococci exploit antibiotic-induced innate immune deficits 2008. Nature 455: 804-807.
[0427] 70. Charlier C, Cretenet M, Even S, Le Loir Y (2009) Interactions between Staphylococcus aureus and lactic acid bacteria: an old story with new perspectives. Int J Food Microbiol 131:30-39
[0428] 71. Reid G, Kim S O, Ko″hler G A (2006) Selecting, testing and understanding probiotic microorganisms. FEMS Immunol Med Microbiol 46:149-157
[0429] 72. Matu M N, Orinda G O, Njagi ENM, Cohen C R, Bukusi E A (2010) In vitro inhibitory activity of human vaginal lactobacilli against pathogenic bacteria associated with bacterial vaginosis in Kenyan women. Anaerobe 16:210-215
[0430] 73. Karaoglu S, A, Aydin F, Kilic, S S, Kilic, A O (2002) Antimicrobial activity and characteristics of bacteriocins produced by vaginal lactobacilli. Turk J Med Sci 33:7-13
[0431] 74. Zarate G, Nader-Macias M E (2006) Influence of probiotic vaginal lactobacilli on in vitro adhesion of urogenital pathogens to vaginal epithelial cells. Lett Appl Microbiol 43:174-180
[0432] 75. Boris S, Suarez J E, Vazquez F, Barbes C (1998) Adherence of human vaginal lactobacilli to vaginal epithelial cells and interaction with uropathogens. Infect Immun 66:1985-1989

### INCORPORATION BY REFERENCE

[0433] All patents and publications referenced herein are hereby incorporated by reference in their entireties.

[0434] The publications discussed herein are provided solely for their disclosure prior to the filing date of the present application. Nothing herein is to be construed as an admission that the present invention is not entitled to antedate such publication by virtue of prior invention.

[0435] As used herein, all headings are simply for organization and are not intended to limit the disclosure in any manner. The content of any individual section may be equally applicable to all sections.

The application's sequence listing, which the Patent Office published only in electronic form, follows.

SEQUENCE LISTING (3185 sequences)

SEQ ID NO: 1 - DNA, 1541 bp, Artificial Sequence
  Synthetic polymer
aaattgaagagtttgatcatggctcagattgaacgctggcggcaggcctaacacatgcaagtcgaacggtaacaggaagcagcttgctctttgctgacgagtggcggacgggtgagtaatgtctgggaaactgcctgatggagggggataactactggaaacggtggctaataccgcataacgtcgcaagaccaaagagggggaccttcgggcctcttgccatcggatgtgcccagatgggattagctagttggtagggtaacggctcaccaaggcgacgatccctagctggtctgagaggatgaccagccacactggaactgaagcacggtccagactcctacgggaggcagcagtggggaatattgcacaatgggcgcaagcctgatgcagccatgccgcgtgtatgaagaaggccttcgggttgtaaagtactttcagcggggtggaaggtgttgtggttaataaccgcagcaattgacgttacccgcagaagaagcaccggctaactccgtgccagcagccgcggtaatacggagggtgcaagcgttaatcggaattactgggcgtaaagcgcacgcaggcggtttgttaagtcagatgtgaaatccccgggctcaacctgggaactgcatctgatactggcaagcttgagtctcgtagaggggggtagaattccaggtgtagcggtgaaatgcgtagagatctggaggaataccggtggcgaaggcggccccctggacgaagactgacgctcaggtgcgaaagcgtggggagcaaacaggattagataccctggtagtccacgccgtaaacgatctctacttggaggttgtgcccttgagccgtggcttccggagctaacgcgttaagtagagtgctaggggagtacggccgcaaggttaaaactcaaatgaattgaccggggcccgcacaagcggtggagcatgtggtttaattcgatgcaacgcgaagaaccttacctggtcttgacatccacggaacttttcagagatgagaatgtgccttcgggaaccgtgagacaggtgctgcatggctgtcgtcagctcgtgttgtgaaatgttgggttaagtcccgcaacgagcgcaacccttatcctttgttgccagcggtccggccgggaactcaaaggagactgccagtgataaactggaggaaggtggggatgacgtcaagtcatcatggcccttacgaccagggctacacacgtgctacaatggcgcatacaaagagaagcgacctcgcgagagcaagcggacctcataaagtgcgtcgtagtccggattggagtctgcaactcgactccatgaagtcggaatcgctagtaatcgtggatcagaatgccacggtgaatacgttgccgggccttgtacacaccgcccgtcacaccatgggagtgggttgcaaaagaagtaggtagcttaaccttcgggagggcgcttaccactttgtgattcatgagtggggtgaagtcgtaacaaggtaaccgtaggggaacctgcggttggatcacctcctta

SEQ ID NO: 2 - DNA, 1481 bp, Artificial Sequence
  Synthetic polymer
agagtttgatcctggctcaggatgaacgctggcggcgtgcttaacacatgcaagtcgagcgagaagttttgaaaagattcttcggatgaaatttaaaatggaaagcggcggacgggtgagtaacgcgtaggcaaccatacaaagggatagcatttggaaacgaatattaataccttatgaaacttaactagtgcatgctaggtaggtcaaagatttatcggtatgggatgggcctgcgtctgactgcccttagctagttggtgaggtaacggctcaccaaggcgacgatcagtagccgacctgagagggtgaacggccacattggaactgagacacggtccaaactcctacgggaggcagcagtggggaatattgcacaatgggggaaaccctgatgcagcaacgccgcgtgaacgatgaaggcctttgggtcgtaaagttctgttctaggtgatgaaaactgacagtaacctaggagaaagccccggctaactccgtgccagcagccgcggtaatactggagggggcaagcgttatccggaattattgggcgtaaagggtacgtaggtggccttttaagcgtagggtataaggcaatggctcaaccattgttcgccctatgaactggaaggcttgagtgcaggagaggaaagcggaattcctagtgtagcggtggaatgcatagatattaggaggaacatcagcggcgaaggcggctttctggactgcaactgacactgaggtacgaaagcgtggggagcaaacaggattagataccctggtagtccacgccgtaaacgatgagcactaggtgtcggggtcgtaaggcttcggtgccgtagttaacgcattaagtgctccgcctggggagtacgcacgcaagtgtgaaactcaaaggaattgacggggacccgcacaagcagcggagcatgtggtttaattcgaagcaacgcgagaaccttaccaggacttgacatccttctgaccggtctttaataggacctttcttttgacagaagagacaggtggtgcatggttgtcgtcagctcgtgtcgtgagatgttgggttaagtcccgcaacgagcgcaacccttgtcattagttgccatcattaagttgggcactctagtgagactgccggggacaactcggaggaaggtggggatgacgtcaaatcatcatgccccttatgttctgggctacacacgtgctacaatggctggtacaaagagaagcaagaccgcaaggtggagcaaagctcaaaaaccagccccagttcggattgtaggctgaaactcgcctacatgaagtcggagttgctagtaatcgcagatcagaatgctgcggtgaatgcgttcccgggtcttgtacacaccgcccgtcacaccatggaagttgggggcgcccaaagttggcagataaatatgctacctaaggtgaaaccaatgactggggtgaagtcgtaacaaggtacccgtagg

SEQ ID NO: 3 - DNA, 1476 bp, Artificial Sequence
  Synthetic polymer
agagtttgatcctggctcaggatgaacgctggcggcgtgcctaacacatgcaagtcgagcgagaagtaaagaaatgaagcttcggtagattttcattatggaaagcggcggacgggtgagtaacgcgtaggcaacctgccctgtacagggggatagctacccgaaaaggtgattaataccccatgatgcaacaagagatacacatgtatcacttgtcaaagatttatcggtatgggatgggcctgcgtctgattagctagttggtaggttaacggcttaccaaggcaccgatcagtagccgacctgagagggtgatcggccacattggaactgagacacggtccaaactctacgggaggcagcagtggggaatattgcacaatggggctaaccctgatgcagcaacgccgcgtgaaggaagaaggcttcgggttgtaaacttctgtcctaggggaagaaacaaatgacattacccttggaggaagccccggctaactacgtgccagcagccgcggtaatacgtagggggcgaacgttatccggaattattgggcgtaaagagtgcgtaggtggcatcttaagcgcagggtttaaggcaatggctcaaccattgttcgccttgcgaactggggtgcttgagtgcaggaggggaaagtggaattcctagtgtagcggtgaaatgcgtagatattaggaggaacaccagtggcgaaggcgactttctggactgttactgacactgaggcacgaaagcgtggggagcaaacaggattagataccctggtagtccacgccgtaaacgatgagcactaggtgtcggggtcgcaagacttcggtgccgcagttaacgcattaaagtctccgcctggggagtacgcacgcaagtgtaaactcaaaggaattgacggggacccgcacaagcagcggagcatgtggtttaattcgaagcaatgcgaagaaccttaccaggacttgacatcctcttgacagatccttaatcggattcttcttcggacaagagagacaggtggtgcatggttgtcgtcagctcgtgtcgtgagatgttgggttaagtcccgcaacgagcgcaacccttgtcgttagttgccatcattcagttgtggcactctagcgagactgccgaggacaactcggaggaaggtggggatgacgtcaaatcatcatgccccttatgttttgggctacacacgtgctacaatggtcggtacaatgagatgcaatactgcgaagtggagcgaaacaccaaaaccgatcccagttcggattgtaggctgcaactcgcctacatgaagtcggagttgctagtaatcgcagatcagaatgctgcggtgaatgcgttcccgggtcttgtacacaccgcccgtcacaccatggaagttgggggtgcccaaagtcggttaattaatctatcgcctaaggcaaaaccaatgactggggtgaagtggtaacaaggta

SEQ ID NO: 4 - DNA, 1523 bp, Artificial Sequence
  Synthetic polymer
agagtttgatcctggctcagagacgaacgctgccgccgtgcctaatatatgcaagtcgaacgcttctttttccaccggagcttgctccaccggaaaaagagaagtggcgaacgggtgagtaacacgtgggtaacctgcccatcagaaggggataacacttggaaacaggtgctaatacccgtataacaatcgaaaccgcatggttttgatttgaaaggcgctttcgggtgtcgctgatggatggacccgcggtgcattagctagttggtgaggtaacggctcaccaaggccacgatgcatagccgacctgagagggtgatcggccacattggactagagacacgggccaaaaactcctacgggaggcagcagtgaggggaatctgcgcgcaagtggacgaagctgacgcgagcaacgcgcgtgagtgaagaagggtttcggacgtaaaactctgttgttagagaagaacaaggatgagagtaactgttcatcccttgacggtatctaaccagaaagccacggctacctacgtgccagcagccgcggtaatacgtaggtggcaaccgttgtccggatttattggccgtaaagcgagcgcaggcggtttcttaagtctgatgtgaaagcccccggctcaaccggggagggtcattggaaactgggagacttgagtgcagaagaggagagtggaattccatgtgtagcggtgaaatgcgtagatatatggaggaacaccagtggcgaaggcggctctctggtctgtaactgacgctgaggctcgaaagcgtggggagcaaacaggattagataccctggtagtccacgccgtaaacgatgagtgctaagtgttggagggtttccgcccttcagtgctgcagctaacgcattaagcactccgcctggggagtacgaccgcaagttgaaactcaaaggaattgacgggggcccgcacaagcggtggagcatgtggtttaattcgaagcaacgcgaaagaaccttaccaggtcttgacatcctttgaccactctagagatagagcttccccttcgggggcaaagtgacaggtggtgcatggttgtcgtcagctcgtgtcgtgagatgttgggttaagtcccgcaacgagcgcaacccttattgttagttgccatcattcagttgggcactctagcaagacttccggtgacaaaccggaggaaggtggggatgacgtcaaatcatcatgccccttatgacctgggctacacacgtgctacaatgggaagtacaacgagttgcgaagtcgcgaggctaagctaatctcttaaagcttctctcagttcggattgcaggctgcaactcgcctgcatgaagccggaatcgctagtaatcgcggatcagcacgccgcggtgaatacgttcccgggccttgtacacaccgccgtcacaccacgagagtttgtaacacccgaagtcggtaggtaaccttttggagccaccgcctaaggtgggatagatgattggggtgaagtcgtaacaaggtaacc

SEQ ID NO: 5 - DNA, 1414 bp, Artificial Sequence
  Synthetic polymer
atgcaagtcgaacggagatatttgagtttacttagatatcttagtggcggacgggtgagtaacacgtgagcaacctacctctgagagtgggatagcttctggaaacggatggtaataccgcataacatatactttagacatctttagtatatcaaagatttatcgctcagagatgggctcgcgtctgattagctggttggtgaggtaacggcccaccaaggcgacgatcagtagccggactgagaggttgaacggccacattgggactgagacacggcccagactcctacgggaggcagcagtggggaatattgcacaatgggggaaaccctgatgcagcgatgccgcgtggaggaagaaggttttcggattgtaaactcctgtcttaaaggacgataatgacggtactttaggaggaagctccggctaactacgtgccagcagccgcggtaatacgtagggagcgagcgttgtccggaattactgggtgtaaagggagcgtaggcgggattgcaagtcagatgtgaaaggcgggagctcaactcccgagctgcatttgaaactgtagttcttgagtgaagtagaggtaagcggaattcctggtgtagcggtgaaatgcgtagatatcaggaggaacaccggtggcgaaggcggcttactgggcttttactgacgctgaggctcgaaagcgtggggagcaaacaggattagataccctggtagtccacgctgtaaacgatgattactaggtgtggggggactgaccccttccgtgccgcagttaacacaataagtaatccacctggggagtacggccgcaaggttgaaactcaaaggaattgacgggggcccgcacaagcagtggagtatgtggtttaattcgaagcaacgcgaagaaccttaccaggtcttgacatcgtatgcataacttagagataagtgaaatccttcggggacatatagacaggtggtgcatggttgtcgtcagctcgtgtcgtgagatgttgggttaagtcccgcaacgagcgcaacccttacctttagttcgtacgcaagagcactctaaggggactgccgttgacaaaacggaggaaggtggggatgacgtcaaatcatcatgccccttatgacctgggctacacacgtactacaatggcaatcaacaaagagaagcaagacagtgatgtggagcgaatctcaaaaaattgtcccagttcagattgcaggctgcaactcgcctgcatgaagtcggaattgctagtaatcgcggatcagcatgccgcggtgaatacgttcccgggccttgtacacaccgcccgtcacaccatgggagtcggtaacacccgaagcctgtagtctaaccgcaaggaggacgcagtcgaaggtgggattgatgactggggtgaagtcgtaa

SEQ ID NO: 6 - DNA, 1458 bp, Artificial Sequence
  Synthetic polymer
ggcggcacgcttaacacatgcaagtcgaacggagaacattgagcttgcttaatgttcttagtggcggacgggtgagtaacacgtgagtaacctgcctctgagagtgggatagcttctggaaacggatggtaataccgcataacatcatggattcgcatgtttctgtgatcaaagatttatcgcttagagatggactcgcgtctgattagctagttggtaaggtaacggcttaccaaggcgacgatcagtagccggactgagaggttgatcggccacattgggactgagacacggcccagactcctacgggaggcagcagtggggaatattgcacaatgggggaaaccctgatgcagcgatgccgcgtggaggaagaaggttttcggattgtaaactcctgttgaagaggacgataatgacggtactcttttagaaagctccggctaactacgtgccagcagccgcggtaatacgtagggagcgagcgttgtccggaattactgggtgtaaagggagcgtaggcgggatggcaagtcagatgtgaaaactatgggctcaacccatagactgcatttgaaactgttgttcttgagtgaggtagaggtaagcggaattcctggtgtagcggtgaaatgcgtagagatcaggaggaacatcggtggcgaaggcggcttactgggcctttactgacgctgaggctcgaaagcgtggggagcaaacaggattagataccctggtagtccacgccgtaaacgatgattactaggtgtggggggactgaccccttccgtgccgcagttaacacaataagtaatccacctggggagtacggccgcaaggttgaaactcaaaggaattgacgggggcccgcacaagcagtggagtatgtggtttaattcgaagcaacgcgaagaaccttaccaggtcttgacatcgagtgacgtacctagagataggtattttcttcggaacacaaagacaggtggtgcatggttgtcgtcagctcgtgtcgtgagatgttgggttaagtcccgcaacgagcgcaacccttaccattagttgctacgcaagagcactctaatgggactgccgttgacaaaacggaggaaggtggggatgacgtcaaatcatcatgccccttatgacctgggctacacacgtactacaatggcaatataacagagggaagcaatacagcgatgtggagcaaatccccaaaaattgtcccagttcagattgcaggctgcaactcgcctgcatgaagtcggaattgctagtaatcgcagatcagcatgctgcggtgaatacgttcccgggccttgtacacaccgcccgtcacaccatgggagtcggtaacacccaaagccggtcgtctaaccttcgggaggatgccgtctaaggtgggattgatgactggggtgaagtcgtaacaaggtagccgtatcggaaggtgcggct

SEQ ID NO: 7 - DNA, 1457 bp, Artificial Sequence
  Synthetic polymer
agagtttgatccttggtcaggacgaaccgctggcggcgtgcctaacacatgcaagtcgaacggggttacattgaggaagttttcggatggaattgatgtaatctagtggcgaacgggtgagtaacgcgtgagtaacctgcctcgaagagggggataacaacgagaaatcgttgctaataccgcataagaccacagggccgcatggtccaggggtcaaaactccggtgctttgagatggactcgcgtcccattaggtagttggtgaggtaacggcccaccaagccgacgatgggtagccgagctgagaggctgatcggccacactgggactgagacacggcccagactcctacgggaggcagcagtggggaatattgggcaatgggcgcaagcctgacccagcaacgccgcgtgaaggatgaaggttttcggattgtaaacttctgtcctcagggacgaaaggaatgacggtacctgaggaggaagccccggctaactacgtgccagcagccgcggtaatacgtagggggcgagcgttgtccggaattacttgggcgtaaagggagcgtaggcggccaattaagtcagatgtgaaattcccgggcttaacctgggcagtgcatctgaaactggatggcttgagtgcgggagaggaaagtggaattcctagtgtagcggtgaaatgcgtagatattaggaggaacaccagtggcgaaggcgactttctggaccgtaactgacgctgaggctcgaaagcgtggggagcaaacaggattagataccctggtagtccacgccgtaaacgatgaatactaggtgtagggggtatcaactccctctgtgccgcagcaaacgcaataagtattccgcctggggagtacggccgcaaggttgaaactcaaaggaattgacgggggcccgcacaagcagcggagcatgtggtttaattcgaagcaacgcgaagaaccttaccaaggcttgacatccacttaaagccatagaaatatggtgtctcttcggaggaagtgagacaggtggtgcatggttgtcgtcagctcgtgtcgtgagatgttgggttaagtcccgcaacgagcgcaacccctattgccagttaccagcgattcggtcgggaactctggtgagaccgccggggacaactcggaggaaggtggggacgacgtcaaatcatcatgccccttatgtcttgggctacacacgtgctacaatggcagttacagagggaagcgaagccgcaaggcggagcaaatcccaaaaaagctgtcccagttcggattgtgggctgcaacccgcccacatgaagtcggagttgctagtaatcgcggatcagcatgccgcggtgaatacgttcccgggccttgtacacaccgcccgtcacaccatgggagttgggagcgcccgaagtcagtatcctaaccgcaaggggggagctgccgaagg

SEQ ID NO: 8 - DNA, 1498 bp, Artificial Sequence
  Synthetic polymer
gagtttgatcatggctcagattgaacgctggcggcaggcctaacacatgcaagtcgaacggtagcacagagagcttgctcttgggtgacgagtggcggacgggtgagtaatgtctgggaaactgcccgatggagggggataactactggaaacggtagctaataccgcataacgtctacggaccaaagtgggggaccttcgggcctcacaccatcggatgtgcccagatgggattagctggtaggtgaggtaatggctcacctaggcgacgatccctagctggtctgagaggatgaccagccacactggaactgagacacggtccagactctacgggaggcagcagtggggaatattgcacaatgggcgcaagcctgatgcagccatgccgcgtgtatgaagaaggccttcgggttgtaaagtactttcagcgggaggagggtgagaggttaataacctatgcattgacgttaccgcagaagaagcaccggctaactccgtgccagcagccagataatacggagggtgcaagcgttaatcggaattactgggcgtaaagcgcacgcaggcggtctgtcaagtcggacgagaaatccccgggcttaacctgggaactgcattcgaaactggcaggctagagtctcgtagaggggggtagaattccaggtgtagcggtgaaatgcgtagagatctggaggaataccggtggcgaaggcggccccctggacgaagactgacgctcaggtgcgaaagcgtggggagcaaacaggattagataccctggtagtccacgctgtaaacgaatgtcgaacttggaggttgttcccttgaggagtggtcttccggagctaacgcgttaagtcgaccgcctggggagtacggccgcaaggttaaaactcaaatgaattgacgggggcccgcacaagcggtggagcatgtggtttaattcgatgcaacgcgaagaaccttacctggccttgacatccacggaattctgcagagatgcggaagtgcttcgggaaccgtgagacaggtgctgcatggctgtcgtcagctcgtgttgtgaaatgttgggttaagtcccgcaacgagcgcaacccttatcctttgttgccagcgattcggtcgggaactcaaaggagactgccggtgataaaccggaggaaggtggggatgacgtcaagtcatcatggcccttacgagtagggctacacacgtgctacaatggcgcatacaaagagaagcgacctcgcgagagcaagcggacctcataaagtgcgtcgtagtccggatcggagtctgcaactcgactccgtgaagtcggaatcgctagtaatcgtagatcagaatgctacggtgaatacgttcccgggccttgtacacaccgcccgtcacaccatgggagtgggttgcaaaagaagtaggtagcttaaccttcgggagggcgcttaccactttgtgattcatgactggggtgaagtcgtaacaaggtaaccgt

SEQ ID NO: 9 - DNA, 1500 bp, Artificial Sequence
  Synthetic polymer
tagaggttgatcatggctcaggacgaacgctggcggcgtgcctaacacatgcaagtcgagcgatgaagctccttcgggagtggattagcggcggacgggtgagtaacacgtgggtaacctgcctcatagaggggaatagcctcccgaaagggagattaataccgcataatgtatgagaatcgcatgatttttgtaccaaaggagcaatccgctatgagatggacccgcggcgcattagctagttggtgaggtaaaggctcaccaaggcgacgatgcgtagccgacctgagagggtgatcggccacattggaactgagacacggtccagactcctacgggaggcagcagtggggaatattgcgcaatgggggaaaccctgacgcagcaacgccgcgtgaatgaagaaggccttagggttgtaaagttctgtcatatgggaagataatgacggtaccatatgaggaagccacggctaactacgtgccagcagccgcggtaatacgtaggtggcaagcgttgtccggatttactgggcgtaaaggatgcgtaggcggacatttaagtcagatgtgaaatacccgggctcaacttgggtgctgcatttgaaactgggtgtctagagtgcaggagaggaaagcggaattcctagtgtagcggtgaaatgcgtagagattaggaagaacaccagtggcgaaggcggctttctggactgtaactgacgctgaggcatgaaagcgtggggagcaaacaggattagataccctggtagtccacgccgtaaacgatgaatactaggtgtaggaggtatcgaccccttctgtgccgcagttaacacaataagtattccgcctggggagtacgatcgcaagattaaaactcaaaggaattgacgggggcccgcacaagcagcggagcatgtggtttaattcgaagcaacgcgaagaaccttacctagacttgacatcccctgaattacctgtaatgagggaagcccttcggggcagggagacaggtggtgcatggttgtcgtcagctcgtgtcgtgagatgttgggttaagtcccgcaacgagcgcaacccttatcattagttgctaccattaagttgagcactctagtgagactgcccgggttaaccgggaggaaggtggggatgacgtcaaatcatcatgccccttatgtctagggctacacacgtgctacaatggttggtacaataagatgcaataccgcgaggtggagctaaacttataaaaccaatcccagttcggattgtaggctgaaactcgcctacatgaagccggagttgctagtaatcgcgaatcagcatgtcgcggtgaatacgttcccgggccttgtacacaccgcccgtcacaccatgagagctggtaacacccgaagtccgtgaggtaaccgtaaggagccagcggccgaaggtgggattagtgattggggtgaagtcgtaacaaggtagccgtaggagaacctgcggttggatcacc

SEQ ID NO: 10 - DNA, 1426 bp, Artificial Sequence
  Synthetic polymer
agagtttgatcatggctcaggacgaacgctggcggcgcgcttaacacatgcaagtcgaacggagcgaacgggatgaagccttcgggcggaattccgtgagcttagtggcgaacgggtgagtaacgcgtgagcaactggtcccaaagagggggacaactttgagaaatcaaggctaataccgcgtaagaccacactgccgcatggcagaggggtcaaaggagaaatccgctttggggagggctcgcgtctgattaggtagttggtgaggtaacggctcaccaagccgacgatcagtagccgtgctgagaggcaggccggccacactggaactgagacacggtccagactcctacgggaggcagcagtggggaatcttgggcaatgggggaaaccctgacccagcgacgccgcgtgagggaagaaggtcttcggattgtaaacctttgtgacaggggacgaaggaagtgacggtaccctgtgaggaagccccggctaactacgtgccagcagccgcggtaatacgtagggggcgagcgttgtccggaattactgggcgtaaagggcgcgtaggcggttgaataagtctgttgtgaaattccaaggcttaactttggcagtgcaatggaaactgttcgacttgagtacggcagaggcaagtggaattcccagtgtagcggtgaaatgcacagagattgggaggaacaccagtggcgaaggcgacttgctgggccgaaactgacgctgaggcgcgaaagcgtggggagcaaacaggattagataccctggtagtccacgccgtaaacgatgaatactaggtgtaggtggtatagaagccatctgtgccgcagcgaacgcattaagtattccgcctggggagtacggccgcaaggttgaaactcaaaggaattgacgggggcccgcacaagcagcggagcatgtggtttaattcgaagcaacgcgaagaaccttaccaggtcttgacatccaactaaaggcatagagatatgctgttccttcgggagagattgagacaggtggtgcatggttgtcgtcagctcgtgtcgtgagatgttgggttaagtcccgcaacgagcgcaacccctacaaacagttgccagtgcgtaaaggcaggcactctgttaggactgccgtggacaacacggaggaaggtggggacgacgtcaaatcatcatgccccttatgacctgggctacacacgtgctacaatggctgttacaaagagaagcgaagccgtaaggcggagcggatctcaaaaaggcagtcccagttcggattgtgggctgcaacccgcccacatgaagttggagttgctagtaatcgcgaatcagaatgtcgcggtgaatgcgttcccgggccttgtacacaccgcccgtcacaccatgggagttgggggcgcccgaagccg

SEQ ID NO: 11 - DNA, 1410 bp, Artificial Sequence
  Synthetic polymer
  misc_feature (12)..(12): n is a, c, g, or t
agagtttgatcntggctcaggacgaacgctggcggcgtgctttaacacatgcaagtcgaacgggcttattttgggagtaatcccggggtaagctagtggcggacgggtgcgtaacgcgtgagcaatctgtcctcaagagggggataacaactggaaacagttgctaataccgcatgagaccacaagttcacatggacaaggggttaaaggagaaatccgcttgagggtgagctcgcgtcccattagatagttggtgaggtaacggcccaccaagtcgacgatgggtagccgatctgagaggatgaccggccacattggaactgagaaacggtccagactcctacgggaggcagcagtggggaatattgggcaatgggcgcaagcctgacccagcaacgccgcgtgagggaagaaggttttcggatcgtaaacctctgttgcaggggacgagcagtagacggtaccctgcgaggaagctccggctaactacgtgccagcagccgcggtaatacgtagggagcaagcgttgtccggaatgactgggcgtaaagggcgcgtaggtggttttgtaagtctggagtgaaacccccgttttcaaggcggggcctgctttggagactgtaggacttgagtgatggagaggatagcggaattcccggtgtagcggtgaaatgcgtagagatcgggaggaacaccagtggcgaaggcggctatctggacatagactgacactgaggcgcgaaagcgtggggagcaaacaggattagataccctggtagtccacgctgtaaacgatggatgctaggtgtaggaggtatcgaccccttctgtgccggagtaaacacaataagcatcccgcctggggagtacggccgcaaggttgaaactcaaaggaattgacgggggcccgcacaagcagcggagcatgtggtttaattcgacgcaacgcgaagaaccttaccaggtcttgacatccagttaaagcatatgaaagtatgtgtctcttcggaggaactgagacaggtggtgcatggttgtcgtcagctcgtgtcgtgagatgttgggttaagtcccgcaacgagcgcaacccttgcgattggttgctaacaggtaaagctgagaactccaataggactgccggggacaactcggaggaaggtggggacgacgtcaaatcatcatgccccttatgacctgggctacacacgtgctacaatggccactacaaagaggagcgaatccgtaaggaggagcagatctgagaaaagtggtcccagttcagattgtgggctgcaacccgcccacatgaagtcggagttgctagtaatcgcggatcagcatgccgcggtgaatacgttcccgggccttgtacacaccgcccgtcacaccatgggagttgggagcacccga

SEQ ID NO: 12 - DNA, 1438 bp, Artificial Sequence
  Synthetic polymer
tcaggatgaacgctggcggcgtgcctaacacatgcaagtcgagcgagaagccttaagaagaagcttcggcggaattttaaggcggaaagcggcggacgggtgagtaacgcgtaggcaacctgcccctagcagagggatagcctcgggaaaccgtgattaaaacctcataaagccgagacagcacatgctgaagcggccaaagatttatcggcaagggatgggcctgcgtctgattagctagtaggtggggtaacggcccacctaggcgacgatcagtagccgacctgagagggtgatcggccacattggaactgagacacggtccaaactcctacgggaggcagcagtggggaatattgcacaatgggggaaaccctgatgcagcaacgccgcgtgaaggaagaaggcctttgggtcgtaaacttctgtccttggggaagataatgacggtacccttggaggaagccccggctaactacgtgccagcagccgcggtaatacgtagggggcaagcgttatccggaattattgggcgtaaagggtacgtaggcggtttcttaagcgcagggtttaaggcaatggctcaaccattgttcgccctgtgaactgggagacttgagtgcaggagaggaaagcggaattcctagtgtagcggtgaaatgcgtagatattaggaggaacaccagtggcgaaggcggctttctggactgtaactgacgctgaggtacgaaagtgtggggagcaaacaggattagataccctggtagtccacaccgtaaacgatgagcactaggtgtcgggaccgcaaggtttcggtgccgcagttaacgcattaagtgctccgcctggggagtacgtacgcaagtatgaaactcaaaggaattgacggggacccgcacaagcagcggagcatgtggtttaattcgaagcaacgcgaagaaccttaccaggacttgacatctccctgacagtcccttaaccgggatcttctacggacagggaagacaggtggtgcatggttgtcgtcagctcgtgtcgtgagatgttgggttaagtcccgcaacgagcgcaacccttgtcattagttgccatcattaagttgggcaactctagtgagactgccggggacaactcggaggaaggtggggatgacgtcaaatcatcatgccccttatgttctgggctacacacgtgctacaatggctggtacaaaaggcagcgaaaccgtgaggtggagcgaatcccaaaaaccagtcccagttcggattgcaggctgcaactcgcctgcatgaagttggagttgctagtaatcgcagatcagaatgctgcggtgaatgcgttcccgggtcttgtacacaccgcccgtcacaccatggaagtcgggggcgcccgaagtcggttagcaaatagactgcctaaggcgaaatcgatgactggg

SEQ ID NO: 13 - DNA, 1488 bp, Artificial Sequence
  Synthetic polymer
ttgatcctggctcagattgaacgctggcggcatgccttacacatgcaagtcgaacggcagcatggagagcttgctctctgatggcgagtggcgaacgggtgagtaatacatcggaacgtgtccgtttgtgggggacaaccgtccgaaaggatggctaataccgcatgagacctgagggtgaaagccggggaccgcaaggcccggcgcagacggagcggccgatgattgattagctagttggggaggtaaaggctcaccaaggcgacgatcaatagctggtctgagaggacgaccagccacactggaactgagacacggtccagactcctacgggaggcagcagtggggaattttggacaatgggggcaaccctgatccagccatgccgcgtgcgggaagaaggccttcgggttgtaaaccgcttttgtcagggacgaaaagctccggagtaatatgccggagtgctgacggtacctgaagaataagcaccggctaactacgtgccagcggccgcggtaatacgtagggtgcgagcgttaatcggaattactgggcgtaaagcgtgcgcaggcggttgggtaagacagatgtgaaatccccaggcttaacctgggaactgcatttgtgactgtccgactggagtacgtcagaggggggtggaattccacgtgtagcagtgaaatgcgtagatatgtggatgaacaccgatggcgaaggcagccccctgggacgcaactgacgctcatgcacgaaagcgtggggagcaaacaggattagataccctggtagtccacgccctaaacgatgtctgctggttgttgggaatttaattctcagtaacgaagccaacgcgtgaagcagaccgcctggggagtacgggcgcaagattaaaactcaaaggaattgacggggacccgcacaagcgggggatgatgtggattaattcgatgcaacgcgaaaaaccttacccagccttgacatgtcaggaatgcctcggagatgaggcggtgcccgcaagggaacctgagcacaggtgctgcatggctgtcgtcagctcgtgtcgtgagatgttgggttaagtcccgcaacgagcgcaacccttgtcatcagttgctacgaaagggcactctgatgagactgccggtgacaaaccggaggaaggtggggatgacgtcaagtcctcatggcccttatggctggggcctcacacgtcatacaatggtcggaacagagggtagcgaagccgcgaggtgaagccaatcccagaaaaccgatcgtagtccggattgcagctctgcaactcgactgcatgaagtcggaatcgctagtaatcgcggatcagcatgccgcggtgaatacgttcccgggtcttgtacacaccgcccgtcacaccatgggagtggggttcaccagaagacgtttgcccaaccgcaaggaaggcggcgcccacggtgggtttcatgactggggtgaagtcgtaacaaggta

SEQ ID NO: 14 - DNA, 1452 bp, Artificial Sequence
  Synthetic polymer
agagtttgatcatggctcaggacgaacgctggcggcgtgcctaacacatgcaagtcgaacggaactgcttcgaaggatttcttcggaatgacattgattcagtttagtggcggacgggtgagtaacgcgtgagtaacctgccttcaagagggggataacattctgaaaagaatgctaataccgcatgacatatgattgtcgcatggcagacatatcaaagatttatcgcttgaagatggactcgcgtccgattagttagttggtgaggtaacggcccaccaagaccgcgatcggtagccggactgagaggttgaacggccacattgggactgagacacggcccagactcctacgggaggcagcagtgggggatattgcgcaatgggggcaaccctgacgcagcaacgccgcgtgaaggatgaaggttttcggattgtaaacttcttttattaaggacgaataatgacggtacttaatgaataagctccggctaactacgtgccagcagccgcggtaatacgtagggagcaagcgttgtccggatttactgggtgtaaagggtgcgtaggcggctaagcaagtcagatgtgaaatctatgggctcaacccataaactgcatttgaaactgcatagcttgagtggagtagaggcaggcggaattccccgtgtagcggtgaaatgcgtagagatggggaggaacaccagtggcgaaggcggcctgctgggctttaactgacgctgaggcacgaaagcgtgggtagcaaacaggattagataccctggtagtccacgctgtaaacgatgattactaggtgtggggggtctgaccccttccgtgccggagttaacacaataagtaatccacctggggagtacggccgcaaggttgaaactcaaaggaattgacgggggcccgcacaagcagtggagtatgtggtttaattcgaagcaacgcgaagaaccttaccaggtcttgacatccaactaacgagatagagatatgttaggtgcccttcggggaaagttgagacaggtggtgcatggttgtcgtcagctcgtgtcgtgagatgttgggttaagtcccgcaacgagcgcaacccttgctattagttgctacgcaagagcactctaataggactgccgttgacaaaacggaggaaggtggggacgacgtcaaatcatcatgccccttatgacctgggctacacacgtactacaatgggcgttaacagagggaagcaaaatagcgatatggagcaaacccctaaaaacgttctcagttcagattgcaggctgcaacccgcctgcatgaagtcggaattgctagtaatcgcggatcagcatgccgcggtgaatacgttcccgggccttgtacacaccgcccgtcacaccatgggagccggtaatacccgaagtcagtagttcaaccgcaaggagagcgctgccgaagg

SEQ ID NO: 15 - DNA, 1455 bp, Artificial Sequence
  Synthetic polymer
tttgatcctggctcaggatgaacgctggcggcgtgcttaacacatgcaagtcgaacggagaacttttgacagaggattcgtccaattgataaagtttcttagtggcggacgggtgagtaacgcgtgaggaacctgccttggagtggggaataacacagagaaatttgtgctaataccgcataatgcattttagctgcatggctgagatgccaaagatttatcgctctgagatggcctcgcgtctgattagatagttggcggggtaacggcccaccaagtcgacgatcagtagccggactgagaggttgaccggccacattgggactgagacacggcccagactcctacgggaggcagcagtggggaatattgggcaatgggcgcaagcctgacccagcaacgccgcgtgaaggaagaaggctttcgggttgtaaacttcttttatcagggacgataatgacggtacctgatgaataagccacggctaactacgtgccagcagccgcggtaatacgtaggtggcaagcgttatccggatttactgggtgtaaagggcgtgtaggcgggattgcaagtcagatgtgaaaattatgggctcaacccataacctgcatttgaaactgtagttcttgagtgttggagaggcaagcggaattccgtgtgtagcggtgaaatgcgtagatatacggaggaacaccagtggcgaaggcggcttgctggacaataactgacgctgaggcgcgaaagcgtggggagcaaacaggattagataccctggtagtccacgctgtaaacgatggatactaggtgtggggggtctgaccccctccgtgccgcagttaacacaataagtatcccacctggggagtacgatcgcaaggttgaaactcaaaggaattgacgggggcccgcacaagcggtggagtatgtggtttaattcgaagcaacgcgaagaaccttaccagggcttgacatcccgaggcccggtgtagagatacacccttctcttcggagacctcggtgacaggtggtgcatggttgtcgtcagctcgtgtcgtgagatgttgggttaagtcccgcaacgagcgcaacccctattgttagttgctacgcaagagcactctagcgagactgccgttgacaaaacggaggaaggtggggacgacgtcaaatcatcatgccccttatgtcctgggctacacacgtactacaatggtggtcaacagagggaggcaaagccgcgaggcagagcaaacccctaaaagccatcccagttcggattgcaggctgaaacccgcctgtatgaagttggaatcgctagtaatcgcggatcagcatgccgcggtgaatacgttcccgggccttgtacacaccgcccgtcacaccatgggagtcggtaacacccgaagtcagtagtctaaccgcaagggggacgctgccgaaggtgggattgat

SEQ ID NO: 16 - DNA, 1427 bp, Artificial Sequence
  Synthetic polymer
cgctggcggcacgcctaacacatgcaagtcgaacggagaacttttggtttaactgagagttcttagtggcggacgggtgagtaacacgtgagcaacctgcctctgagagagggatagcttctggaaacggatggtaatacctcataacatagctttaaggcattctagagctatcaaagatttatcactcagagatgggctcgcgtctgattagatagttggtgaggtaacggctcaccaagtcgacgatcagtagccggactgagaggttgaacggccacattgggactgagacacggcccagactcctacgggaggcagcagtggggaatattgcacaatgggggaaaccctgatgcagcgatgccgcgtggaggaagaaggttttcggattgtaaactcctgtcttaaaggacgaaaaatgacggtactttaggaggaagctccggctaactacgtgccagcagccgcggtaatacgtagggagcgagcgttgtccgggaattactgggtgtaaagggagcgtaggcgggattgcaagtcagatgtgaaaactatgggcttaacccatagactgcatttgaaactgtagttcttgagtgaagtagaggtaagcggaattcctggtgtagcggtgaaatgcgtagatatcaggaggaacatcggtggcgaaggcggcttactgggcttttactgacgctgaggctcgaaagcgtggggagcaaacaggattagataccctggtagtccacgccgtaaacgatgattactaggtgtggggggactgaccccttccgtgccgcagttaacacaataagtaatccacctggggagtacggccgcaaggttgaaactcaaaggaattgacgggggcccgcacaagcagtggagtatgtggtttaattcgaagcaacgcgaagaaccttaccaggtcttgacatcgtatgcataacatagagatatgtgaaatcccttcggggacatatagacaggtggtgcatggttgtcgtcagctcgtgtcgtgagatgttgggttaagtcccgcaacgagcgcaacccttaccattagttgctacgcaagagcactctaatgggactgccgttgacaaaacggaggaaggtggggatgacgtcaaatcatcatgccccttatgacctgggctacacacgtactacaatggcaatcaacaaagagaagcaagacagtgatgtggagcgaatctcaaaaaattgtcccagttcggattgcaggctgcaactcgcctgcatgaagtcggaattgctagtaatcgcagatcagaatgctgcggtgaatacgttcccgggccttgtacacaccgcccgtcacaccatgggagtcggtaacacccgaagccggtagtctaacagcaatgaggacgccgtcgaaggtgggattgatgactggg

SEQ ID NO: 17 - DNA, 1413 bp, Artificial Sequence
  Synthetic polymer
tggctcaggacgaacgctgcggcgtgcctaacacatgcaagtcgaacgagaatcttttagaggaattcttcggaatgaatttaagagaggaaagtggcggacgggcgagtaacgcgtgagtaacctgcccataagagggggataatccatggaaacgtggactaataccgcatattgagtattaaccgcatgattgatacttgaaagattttatcgcttatggatggactcgcgtcagattagatagttggagaggtaacggctcaccaagtcgacgatctgtagccgaactgagaggttgatcggccgcattgggactgagacacggcccagactcctacgggaggcagcagtggggaatattgcgcaatgggggcaaccctgacgcagcaacgccgcgtgatggaagaaggtcttcggattgtaaacatctgtctttagggaagaaaaaaatgacggtacctaaggaggaagccacggctaactacgtgccagcagccgcggtaatacgtaggtggcaagcgttgtccggatttactgggtgtaaagggcgcgtaggcgggatagcaagtcagtcgtgaaataccggggcttaactccggggctgcgattgaaactgttattcttgagtatcggagaggaaagcggaattcccagtgtagcggtgaaatgcgtagatattgggaggaacaccagtggcgaaggcggctttctggacgacaactgacgctgaggcgcgaaagtgtggggagcaaacaggattagataccctggtagtccacaccgtaaacgatggatactaggtgtaggaggtatcgaccccttctgtgccgcagttaacacaataagtatcccacctggggagtacgaccgcaaggttgaaactcaaaggaattgacgggggcccgcacaagcagtggagtatgtggtttaattcgaagcaacgcgaagaaccttacctggtcttgacatcccggtgaccggtgtagagatacacctttccttcgggacagcggtgacaggtggtgcatggttgtcgtcagctcgtgtcgtgagatgttgggttaagtcccgcaacgagcgcaacccctattgtcagttgccatcattaagttgggcactctggcgagactgccggtgacaaatcggaggaaggtggggacgacgtcaaatcatcatgccccttatgaccagggctacacacgtactacaatggccgacaacaaagtgcagcaaagccgtgaggtggagcgaatcacaaaactcggtctcagttcagattgcaggctgcaactcgcctacatgaagtcggaatcgctagtaatcgcggatcagcacgccgcggtgaatacgttcccgggccttgtacacaccgcccgtcacaccacgagagtttgtaacacccgaagtcgg

SEQ ID NO: 18 - DNA, 1489 bp, Artificial Sequence
  Synthetic polymer
ctcaggatgaacgctggcggcgtgcctaatacatgcaagtcgaacgcgggcacttgtgcccgagtggcgaacgggtgagtaatacataagtaacctggcctttacagggggataactgctggaaacggtagctaagaccgcataggtagggacactgcatggtgaccgtattaaaagtgctgcaaggcactggtagaggatggacttatggcgcattagctggttggtgaggtaacggctcaccaaggcgacgatgcgtagccgacctgagagggtgaccggccacactgggactgagacacggcccagactcctacgggaggcagcagtagggaattttcggcaatggggggaaccctgaccgagcaacgccgcgtgaaggaagaaggaattcgttctgtaaacttctgttataaaggaagaaaggcggatggaggaaatgacatccgagtgacggtactttatgagaaagccacggctaactacgtgccagcagccgcggtaatacgtaggtggcaagcgttatccggaattattgggcgtaaagagggagcaggcggcagcaaaggtctgtggtgaaagactgaagcttaacttcagtaagccatagaaaccaggcagctagagtgcaggagaggatcgtggaattccatgtgtagcggtgaaatgcgtagatatatggaggaacaccagtggcgaaggcgacgatctggcctgtaactgacgctcagtcccgaaagcgtggggagcaaataggattagataccctagtagtccacgccgtaaacgatgagtactaagtgttggaagtcaaatttcagtgctgcagttaacgcagtaagtactccgcctgagtagtagcttcgcaagaatgaaactcaaaggaattgacgggggcccgcacaagcggtggagcatgtggtttaattcgaagcaacgcgaagaaccttaccaggtcttgacatactcataaaggatccagagatggatagatagttatatgagatacaggtggtgcatggttgtcgtcagctcgtgtcgtgagatgttgggttaagtcccgcaacgagcgcaacccttatcgttagttaccatcattaagttggggactctagcgagactgccagtgacaagctggaggaaggcggggatgacgtcaaatcatcatgccccttatgacctgggctacacacgtgctacaatggatggtgcagagggaagcgaagccgcgaggcgaagcaaaacccataaaaccattctcagttcggattgtagtctgcaactcgactacatgaagttggaatcgctagtaatcgcgaatcagcatgtcgcggtgaatacgttctcgggccttgtacacaccgcccgtcacaccatgagagttgataacacccgaagccggtggcctaaccgaaaggaaggagctgtctaaggtgggattgatgattggggtgaagtcgtaacaaggtatccctacgggaacgtgggg

SEQ ID NO: 19 - DNA, 1528 bp, Artificial Sequence
  Synthetic polymer
  misc_feature (1118)..(1118): n is a, c, g, or t
agagtttgatcctggctcaggacgaacgctggcggcgtgcttaacacatgcaagtcgaacggagttaagcgctgaattgaaggtagcttgctactggattttcttgcttaacttagtggcggacgggtgagtaacgcgtgagtaacctgcctctcagtggggaataacgccctgaaaagagcgctaataccgcataatatatttttgccgcatgacaggaatatcaaagatttatcgctgagagatggactcgcgtccgattagctagttggcggggtaacggcccaccaaggcgacgatcggtagccggactgagaggttgaacggccacattgggactgagacacggcccagactcctacgggaggcagcagtgggggatattgcgcaatgggggaaaccctgacgcagcaacgccgcgtggaggatgacggttttcggattgtaaactccttttataagggacgaactaagacggtaccttatgaataagctccggctaactacgtgccagcagccgcggtaatacgtagggagcaagcgttgtccggatttactgggtgtaaagggtgcgtaggcggcttggtaagtcagatgtgaaatgtatgggctcaacccatgaactgcatttgaaactatcgagcttgagtgatgtagaggcaggcggaattccctgtgtagcggtgaaatgcgtagagatagggaggaacaccagtggcgaaggcggcctgctgggcattaactgacgctgaggcacgaaagcgtgggtagcaaacaggattagataccctggtagtccacgctgtaaacgatgattactaggtgtgggtggactgaccccatccgtgccgcagttaacacaataagtaatccacctggggagtacggccgcaaggttgaaactcaaaggaattgacgggggcccgcacaagcagtggagtatgtggtttaattcgaagcaacgcgaagaaccttaccaggtcttgacatcgagtgacgtacctagagataggtatttccttcgggacacgaagacaggtggtgcatggttgtcgtcagctcgtgtcgtgagatgttgggttaagtcccgcaacgagcgcaacccttgctattagttntacgcaagagcactctaataggactgccgttgacaaaacggaggaaggtggggacgacgtcaaatcatcatgccccttatgacctgggctacacacgtactacaatggccgttaacagagggaagcaatacagcgatgtggagcaaacccctaaaaacggtcccagttcagattgcaggctgcaacccgcctgcatgaagtcggaattgctagtaatcgcggatcagcatgccgcggtgaatacgttcccgggccttgtacacaccgcccgtcacaccatgggagccggtaatacccgaagtcagtagttcaaccgcaaggagagcgctgccgaaggtaggattggcgactggggtgaagtcgtaacaaggtagccgtatcggaaggtgcggctggatcacctcctttct

SEQ ID NO: 20 - DNA, 1520 bp, Artificial Sequence
  Synthetic polymer
agagtttgatcatggctcaggatgaacgctggcggcgtgcttaacacatgcaagtcgaacggagagcttctaacagagggttcgtccaatgaaggaagtttcttagtggcggacgggtgagtaacgcgtgagtaacctgccttggagtggggaataacacagggaaacttgtgctaataccgcataaagcagttgggtcgcatgactctgactgccaaagatttatcgctctgagatggactcgcgtctgattagctagttggtggggtaatggcccaccaaggcgacgatcagtagccggactgagaggttggccggccacattgggactgagatacggcccagactcctacgggaggcagcagtggggaatattgggcaatgggcgcaagcctgacccagcaacgccgcgtgaaggaagaaggctttcgggttgtaaacttcttttgtcagggacgaaaaaaatgacggtacctgacgaataagccacggctaactacgtgccagcagccgcggtaatacgtaggtggcaagcgttatccggatttactgggtgtaaagggcgtgtaggcgggaaagcaggtcagatgtgaaaactatgggctcaacccatagcctgcatttgaaactgtttttcttgagtgtcggagaggtaatcggaattccgtgtgtagcggtgaaatgcgtagatatacggaggaacaccagtggcgaaggcggattactggacgataactgacgctgaggcgcgaaagcgtggggagcaaacaggattagataccctggtagtccacgccgtaaacgatggatactaggtgtggggggtctgaccccctccgtgccgcagttaacacaataagtatcccacctggggagtacgatcgcaaggttgaaactcaaaggaattgacgggggcccgcacaagcggtggagtatgtggtttaattcgaagcaacgcgaagaaccttaccagggcttgacatggagacgaccggactagagatagtccttccttcggggcgtctcacacaggtggtgcatggttgtcgtcagctcgtgtcgtgagatgttgggttaagtcccgcaacgagcgcaacccttattgttagttgctacgcaagagcactctagcgagactgccgttgacaaaacggaggaaggtggggacgacgtcaaatcatcatgccccttatgtcctgggccacacacgtactacaatggtggtaaacagagggaagcaagaccgcgaggtggagcaaacccctaaaagccatcccagttcggatcgcaggctgaaacccgcctgcgtgaagttggaatcgctagtaatcgcggaccagcatgccgcggtgaatacgttcccgggccttgtacacaccgcccgtcacaccatgagagtcgggaacacccgaagtccgtagcctaaccgcaaggggggcgcggccgaaggtgggttcgataattggggtgaagtcgtaacaaggtagccgtatcggaaggtgcggctggatcacctcctt

SEQ ID NO: 21 - DNA, 1453 bp, Artificial Sequence
  Synthetic polymer
agagtttgatcatggctcaggatgaacgctggcggcgtgcttaacacatgcaagtcgaacgaagcatttaagacggatttcttcggaatgaagacttttatgactgagtggcggacgggtgagtaacgcgtgggcaacctgcctcacacagggggatagcagctggaaacggctggtaataccgcataagcgcacagtaccgcatggtacagtgtgaaaaactccggtggtgtgagatggacccgcgtctgattaggtagttggtgaggcaacggctcaccaagccgacgatcagtagccgacctgagagggtgaccggccacattgggactgagacacggcccagactcctacgggaggcagcagtggggaatattgcacaatggaggaaactctgatgcagcgacgccgcgtgagtgaagaagtatttcggtatgtaaagctctatcagcagggaagacagtgacggtacctgactaagaagctccggctaaatacgtgccagcagccgcggtaatacgtatggagcaagcgttatccggatttactgggtgtaaagggagtgtaggtggcatcacaagtcagaagtgaaagcccggggctcaaccccgggactgcttttgaaactgtggagctggagtgcaggagaggcaagtggaattcctagtgtagcggtgaaatgcgtagatattaggaggaacaccagtggcgaaggcggcttgctggactgtaactgacactgaggctcgaaagcgtggggagcaaacaggattagataccctggtagtccacgccgtaaacgatgaatactaggtgtcggggcacataagtgcttcggtgccgcagcaaacgcaataagtattccacctggggagtacgttcgcaagaatgaaactcaaaggaattgacggggacccgcacaagcggtggagcatgtggtttaattcgaagcaacgcgaagaaccttaccaagtcttgacatcccactgaccggacagtaatgtgtccttctcttcggagcagtggagacaggtggtgcatggttgtcgtcagctcgtgtcgtgagatgttgggttaagtcccgcaacgagcgcaacccctgtccttagtagccagcatttaaggtgggcactctagggagactgccggggataacccggaggaaggcggggatgacgtcaaatcatcatgccccttatgacttgggctacacacgtgctacaatggcgtaaacaaagtgaagcgagagtgtgagcttaagcaaatcacaaaaataacgtctcagttcggattgtagtctgcaactcgactacatgaagctggaatcgctagtaatcgcgaatcagaatgtcgcggtgaatacgttcccgggtcttgtacacaccgcccgtcacaccatgggagtcggaaatgcccgaagtcggtgacctaacgaaaggaggagccgccgaag

SEQ ID NO: 22 - DNA, 1437 bp, Artificial Sequence
  Synthetic polymer
tgatcctggctcaggatgaacgctggcggcgtgcttaacacatgcaagctgaacgaaacaccttatttgattttsttcggaactgaagatttggtgattgagtggcggacgggtgagtaacgcgtgggtaacctgccctgtacagggggataacagtcagaaatgactgctaataccgcataagaccacagcaccgcatggtgcaggggtaaaaactccggtggtacaggatggacccgcgtctgattagctggttggtgaggtaacggctcaccaaggtgacgatcagtagccggcttgagagagtgaacggccacattgggactgagacacggcccaaactcctacgggaggcagcagtggggaatattgcacaatgggggaaaccctgatgcagcgacgccgcgtgagtgaagaagtatctcggtatgtaaagctctatcagcagggaagataatgacggtacctgactaagaagccccggctaactacgtgccagcagccgcggtaatacgtagggggcaagcgttatccggaattactgggtgtaaagggtgcgtaggtggtatggcaagacagaagtgaaaacccagggcttaactcggggactgcttttgaaactgtcagactagagtgcaggagaggtaagcggaattcctagtgtagcggtgaaatgcgtagatattaggaggaacatcagtggcgaaggcggcttactggactgaaactgacactaaggcacgaaagcgtggggagcaaacaggattagataccctggtagtccacgccgtaaacgatgaatactaggtgtcggggccgtagaggcttcggtgccgcagccaacgcagtaagtattccacctggggagtacgttcgcaagaatgaaactcaaaggaatcgacggggacccgcacaagcggtggagcatgtggtttaattcgaagcaacgcgaagaaccttacctggtcttgacatcctactgaccggtccttaaccggacctttccttcgggacagtggagacaggtggtgcatggttgtcgtcagctcgtgtcgtgagatgttgggttaagtcccgcaacgagcgcaacccctatccttagtagccagcagtaagatgggcactctagagagactgccagggataacctggaggaaggtggggaggacgtcaaatcatcatgccccttatgacttgggctacacacgtgctacaatggcgtaaacaaagkgaagcgaagtcgtgaggcgaagcaaatcacaaaaataacgtctcagttcggattgtagtctgcaactcgacttcatgaagctggaatcgctagtaatcgcagatcagaatgctgcggtgaatacgttcccgggtcttgtacacaccgcccgtcacaccatgggagtcgaaaatgcccgaagtcagtgacccaaccgtaaggaggga

SEQ ID NO: 23 - DNA, 1358 bp, Artificial Sequence
  Synthetic polymer
  misc_feature (21)..(21): n is a, c, g, or t
  misc_feature (36)..(36): n is a, c, g, or t
taacgcgtatgcaacttgccngataccggggtatancccatggaaaygtggattaacaccccttagtacttttstcstgcatgggatgtgagttaaatgttcaaggtatggatgggcatgcgtcctattagttagttggcggggtaacagcccaccaagacgatgataggtaggggttctgagaggaaggtcccccacattggaactgagacacggtccaaactcctacgggaggcagcagtgaggaatattggtcaatggacgtaagtctgaaccagccaagtcgcgtgagggaagactgccctatgggttgtaaacctcttttataagggaagaataagttttacgtgtagaatgatgcctgtaccttatgaataagcatcggctaactccgtgccagcagccgcggtkatacggaggatgcgagcgttatccggatttattgggtttaaagggtgcgtaggcggtttattaagcttagtggttaaatatgtgagctcaactcaattgtgccattaatactggttacctggagtacagacgaggtaggcggaattagttaagtagcggtgaaatgcatagatataacttagaactccgatagcgaaggcagcttaccagactgtaactgacgctgatgcacgagagcgtgggtagcgaacaggattagataccctggtagtccacgccgtaaacgatgctcactggttctgtgtgatatattgtacgggattaagcgaaagtattaagtgtgccacctggggagtacgtcggcaacgatgaaactcaaaggaattgacgggggcccgcacaagcggaggaacatgtggtttaattcgatgatacgcgaggaaccttacctgggtttaaatgggaaatgccgtatttggaaacagatattctcatcgggagcgtttgtcaaggtgctgcatggttgtcgtcagctcgtgccgtgaggtgtcgggttaagtcccataacgagcgcaacccttaccgttagttgctagcatgtaatgatgagcactctaacgggactgccaccgtaaggtgagaggaaggcggggatgacgtcaaatcagcacggcccttacatccagggctacacacgtgttacaatggccggtacagagggacgctaccaggtgactggattccaatctcaaaagccggtcgtagttcggattggagtctgtaacccgactccatgaagttggattcgctagtaatcgcgcatcagccatggcgcggtgaatacgttcccgggccttgtacacaccgcccgtcaagccatggaagccgggggtgcctgaagtccgtaaccgcgaagatcggcctagggcaaaactggtaactggggc

SEQ ID NO: 24 - DNA, 1492 bp, Artificial Sequence
  Synthetic polymer
agagtttgattatggctcaggatgaacgctggckgcgtgcttaacacatgcaagtcgaacgaagcactttatttgattttcttcgggaatgattatttagtgactgadtggcggacgggtgartaacgcgtgggtaacctgcctcatacagggggatagcagttggaaacgactggtaataccgcataagcgcacaggaccgcatggtcgggtgtgaaaaactccggtggtatgagatggacccgcgtctgattagctagttggtggggtaacggcctaccaaggcgacgatcagtagccggcctgagagggtgaacggccacattgggactgagacacggcccagactcctacgggaggcagcagtggggaatattgcacaatggaggaaactctgatgcagcgacgccgcgtgagtgaagaagtaattcgttatgtaaagctctatcagcagggaagatagtgacggtacctgactaagaagctccggctaaatacgtgccagcagccgcggtaatacgtatggagcaagcgttatccggatttactgggtgtaaagggagtgtaggtggccatacaagtcagaagtgaaagcccggggctcaaccccsggactgcttttgaaactgtaaggcttgagtgcaggaggggtgagtggaattcctagtgtagcggtgaaatgcgtagatattaggaggaacaccagtggcgaaggcggctcactggactgtaactgacactgaggctcgaaagcgtggggagcaaacaggattagataccctggtagtccacgccgtaaacgatgaatactaggtgtcggggcccaaaagggcttcggtgccgcagcaaacgcaataagtattccacctggggagtacgttcgcaagaatgaaactcaaaggaattgacggggacccgcacaagcggtggagcatgtggtttaattcgaagcaacgcgaagaaccttaccaagtcttgacatcctcttgaccggtcagtaatgtgacctttccttcgggacaagagagacaggtggtgcatggttgtcgtcagctcgtgtcgtgagatgttgggttaagtcccgcaacgagcgcaacccctattactagtagccagcatttagttgggcactctagtgagactgccagggataacctggaggaaggtggggatgacgtcaaatcatcatgccccttatgacttgggctacacacgtgctacaatggcgtaaacaaagagaagcaaaaccgtgaggtcaagcaaatcccaaaaataacgtctcagttcggactgtagtctgcaacccgactacacgaagctggaatcgctagtaatcgcagatcagcatgctgcggtgaatacgttcccgggtcttgtacacaccgcccgtcacaccatgggagttggtaatgcccgaaatcagtgatccaaaaacggaagctgctgaaggcaggactaataactggggtgaagtcgtaacaaggtaaccgta

SEQ ID NO: 25 - DNA, 1503 bp, Artificial Sequence
  Synthetic polymer
agagtttgatcctggctcagattgaacgctggcggcaggcctaacacatgcaagtcgagcggtagcacagagagcttgctctcgggtgacgagcggcggacgggtgagtaatgtctgggaaactgcctgatggagggggataactactggaaacggtagctaataccgcataacgtcgcaagaccaaagagggggaccttcgggcctcttgccatcagatgtgcccagatgggattagctagtaggtggggtaacggctcacctaggcgacgatccctagctggtctgagaggatgaccagccacactggaactgagacacggtccagactcctacgggaggcagcagtggggaatattgcacaatgggcgcaagcctgatgcagccatgccgcgtgtatgaagaaggccttcgggttgtaaagtactttcagcggggaggaaggtgttgaggttaataacctcagcaattgacgttacccgcagaagaagcaccggctaactccgtgccagcagccgcggtaatacggagggtgcaagcgttaatcggaattactgggcgtaaagcgcacgcaggcggtctgtcaagtcggatgtgaaatccccgggctcaacctgggaactgcattcgaaactggcaggctagagtcttgtagaggggggtagaattccaggtgtagcggtgaaatgcgtagagatctggaggaataccggtggcgaaggcggccccctggacaaagactgacgctcaggtgcgaaagcgtggggagcaaacaggattagataccctggtagtccacgccgtaaacgatgtcgacttggaggttgtgcccttgaggcgtggcttccggagctaacgcgttaagtcgaccggctggggagtacggccccgcagggataaatctaatgagtagacgggggcgcccgcacccgggggggcgtatggtgtattactatacgccacgcgaagccccttacatacttttcacatccagagcactctccagagatggattggtgccttcgggaactctgagacaggtgctgcatggctgtcgtcagctcgtgttgtgaaatgttgggttaagtcccgcaacgagcgcaacccttatcctttgttgccagcggtccggccgggaactcaaaggagactgccagtgataaactggaggaaggtggggatgacgtcaagtcatcatggcccttacgagtagggctacacacgtgctacaatggcgcatacaaagagaagcgacctcgcgagagcaagcggacctcataaagtgcgtcgtagtccggattggagtctgcaactcgactccatgaagtcggaatcgctagtaatcgtagatcagaatgctacggtgaatacgttcccgggccttgtacacaccgcccgtcacaccatgggagtgggttacaaaagaagtaggtagcttaaccttcgggagggcgcttaccactttgtgattcatgactggggtgaagtcgtaacaaggtaacc

SEQ ID NO: 26 - DNA, 1502 bp, Artificial Sequence
  Synthetic polymer
agagtttgatcctggctcagattgaacgctggcggcaggcctaacacatgcaagtcgaacggtaacaggaagcagcttgctgcttcgctgacgagtggcggacgggtgagtaatgtctgggaaactgcctgatggagggggataactactggaaacggtagctaataccgcataacgtcgcaagaccaaagagggggaccttcgggcctcttgccatcggatgtgcccagatgggattagctagttggtggggtaaaggcctaccaaggcgacgatctgtagcgggtctgagaggatgatccgccacactgggactgagacacggcccagactcctacgggaggcagcagtggggaatattggacaatggggggaaccctgatccagccatgccgcgtgtgtgaagaaggccttatggttgtaaagcactttaagcgaggaggaggctcttttggttaatacccaggatgagtggacgttactcgcagaataagcaccggctaactctgtgccagcagccgcggtatacagagggtgcaagcgttaatcggaattactgggcgtaaagcgcacgcaggcggtctgtcaagtcggatgtgaaatccccgggctcaacctgggaactgcattcgaaactggcaggctagagtcttgtagaggggggtagaattccaggtgtagcggtgaaatgcgtagagatctggaggaataccggtggcgaaggcggccccctggacaaagactgacgctcaggtgcgaaagcgtggggagcaaacaggattagataccctggtagtccacgccgtaaacgatgtcgacttggaggttgtgcccttcgaggcgtggcttccggagctaacgcgttaagtcgaccgcctggggagtacggccgcaaggttaaaactcaaatgaattgacgggggcccgcacaagcggtggagcatgtggtttaattcgatgcaaccgaaagaccttacctactcttgacatccagagaactttccagaatgattggtgcgttcgggaactttgagacaggtgctgcatggctgtcgtcagctcgtgttgtgaatgttgggttaagtcccgcaacgagcgcaacccttgatcctttgttgccagcggttaggccgggaactcaaaggagactgccagtgataaactggaggaaggtggggatgacgtcaagtcatcatggcccttacgagtagggctacacacgtgctacaatggcgcatacaaagagaagcgacctcgcgagagcaagcggacctcataaagtgcgtcgtagtccggattggagtctgcaactcgactccatgaagtcggaatcgctagtaatcgtagatcagaatgctacggtgaatacgttcccgggccttgtacacaccgcccgtcacaccatgggagtgggttgcaaaagaagtaggtagcttaaccttcgggagggcgcttaccactttgtgattcatgactggggtgaagtcgtaaccaaggtaacc

SEQ ID NO: 27 - DNA, 1505 bp, Artificial Sequence
  Synthetic polymer
atcctggctcagratgaacgctggcggcgtgcttaacacatgcaagttgaacgaagagcttcgagtgcttgcacttgatgctactgagtggcggacgggtgagtaacgcgtgggtaacctgcctcacacagggggataacagttggaaacgactgctaataccgcataagcgcacagtatcgcatgatacagtgtgaaaaactccggtggtgtgagatggacccgcgtctgattagctagttggtgaggtaacggcccaccaaggcgacgatcagtagccggcctgagagggtgaacggccacattgggactgagacacggcccaaactcctacgggaggcagcagtggggaatattgcacaatgggggaaaccctgatgcagcgacgccgcgtgaacgaagaagtatttcggtatgtaaagttctatcagcagggaagataatgacggtacctgactaagaagcaccggctaaatacgtgccagcagccgcggtaatacgtatggtgcaagcgttatccggatttactgggtgtaaagggtgcgtaggtggtatggcaagtcagaagtgaaaggttggggctcaaccccagaactgcttttgaaactgtcagactagagtgcaggagaggaaagcggaattcctagtgtagcggtgaaatgcgtagatattaggaggaacaccagtggcgaaggcggctttctggactgtaactgacactgaggcacgaaagcgtggggagcaaacaggattagataccctggtagtccacgccgtaaacgatgaatactaggtgtcgggtagcaaagctattcggtgccgcagctaacgcattaagtattccacctggggagtacgttcgcaagaatgaaactcaaaggaattgacggggacccgcacaagcggtggagcatgtggtttaattcgaagcaacgcgaagaaccttaccaggtcttgacatcccgatgaccgttccttaatcggaacttctcttcggagcatcggagacaggtggtgcatggttgtcgtcagctcgtgtcgtgagatgttgggttaagtcccgcaacgagcgcaacccctatattcagtagccagcattaaggatgggcactctggatagactgccagggataaccgggaggaaggcggggatgacgtcaaatcatcatgccccttatgatctgggctacacacgtgctacaatggctgttacagagagaagcaaccccgcgagggtgagcaaacctcaaaaaggcagtctcagttcggattgtagtctgcaactcgactacatgaagctggaatcgctagtaatcgcgaatcagaatgtcgcggtgaatacgttcccgggtcttgtacacaccgcccgtcacaccatgggagttggaaatgcccgaagtcagtgacccaaccgtaaggagggagctgccgaaggcaggttcgatgactggggtgaagtcgtaacaaggtaaccgtatcggaaggtgcggctggatcacctcctt

SEQ ID NO: 28 - DNA, 1477 bp, Artificial Sequence
  Synthetic polymer
agagtttgatcctggctcaggacgaacgctggcggcgtgcctaacacatgcaagtcgagcgatgaagcttccttcgggaagtggattagcggcggacgggtgagtaacacgtgggtaacctgcctcaaagaaggggatagccctccgaaaggaggattaataccgtataacattggatcttcgcatgaaggaccaatcaaaggagtaatccgctttgagatggacccgcggcccattagctagttggtgaggtaacagctcaccaaggccacgatgggtagccgacctgagagggtgatcggccacattggaactgagacacggtccagactcctacgggaggcagcagtggggaatattgcgcaatgggggaaaccctgacgcagcaacgccgcgtgggtgatgaaggtcttcggattgtaaaaccctgttttctgggacgataatgacggtaccagaggaggaagccacggctaactacgtgccagcagccgcggtaatacgtaggtggcgagcgttgtccggatttactgggcgtaaagggtgcgtaggcggacttttaagtgagatgtgaaatacccgggcttaacttgggtgctgcatttcaaactggaagtctagagtgcaggagaggaaagtggaattcctagtgtagcggtgaaatgcgtagagattaggaagaacaccagtggcgaaggcgactttctggactgtaactgacgctgaggcacgaaagcatgggtagcaaacaggattagataccctggtagtccatgccgtaaacgatgaatactaggtgtagggggtgtccagccttctgtgccgcagttaacacaataagtattccgcctggggagtacgatcgcaagattaaaactcaaaggaattgacgggggcccgcacaagcagcggagcatgtggtttaattcgaagcaacgcgaagaaccttacctagacttgacatctcctgaattactcgtaatagaggaagtccttcggggacaggaagacaggtggtgcatggttgtcgtcagctcgtgtcgtgagatgttgggttaagtcccgcaacgagcgcaaccccttttattagttgctaccattaagttgagcactctagtgagactgcccgggttaaccgggaggaaggtggggatgacgtcaaatcatcatgccccttatgtctagggctacacacgtgctacaatggctagtacaaagagacgcaaacccgtgagggggagcaaatctcaaaaactagtcccagttcggattgtaggctgaaactcgcctacatgaagccggagttgctagtaatcgcgaatcagaatgtcgcggtgaatacgttcccgggccttgtacacaccgcccgtcacaccatgagagttggcaacacccgaagtccgtgaggtaaccgtaaggagccagcggccgaaggtggggttaatgattggggtgaagtcgtaacaaggtaaccgta

SEQ ID NO: 29 - DNA, 1509 bp, Artificial Sequence
  Synthetic polymer
agagtttgatcctggctcaggacgaacgctggcggcacgcttaacacatgcaagtcgaacggagatattttgagtttacttaggatatcttagtggcggacgggtgagtaacacgtgagcaacctaccttagagagagggatagcttctggaaacggatggtaatacctcataacatagttggaaggcatcttttgactatcaaagatttatcactctgagatgggctcgcgtctgattagatagttggtgaggtaacggctcaccaagtcgacgatcagtagccggactgagaggttgaacggccacattgggactgagacacggcccagactcctacgggaggcagcagtggggaatattgcacaatgggggaaaccctgatgcagcgatgccgcgtggaggaagaaggttttcggattgtaaactcctgtcttaaaggacgataatgacggtactttaggaggaagctccggctaactacgtgccagcagccgcggtaatacgtagggagcgagcgttgtccggaattactgggtgtaaagggagcgtaggcgggattgcaagtcagatgtgaaatgcaggggctcaacccctgagctgcatttgaaactgtagttcttgagtgaagtagaggtaagcggaattcctggtgtagcggtgaaatgcgtagatatcaggaggaacaccggtggcgaaggcggcttactgggcttttactgacgctgaggctcgaaagcgtgggggagcaaacaggattagataccctggtagtccacgctgtaaacgatgattactaggtgtggggggactgaccccttccgtgccgcagttaacacaataagtaatccacctggggagtacggccgcaaggttgaaactcaaaggaattgacgggggcccgcacaagcagtggagtatgtggtttaattcgaagcaacgcgaagaaccttaccaggtcttgacatcgtatgcatagtctagagatagatgaaacctcttcggaggcatatagacaggtggtgcatggttgtcgtcagctcgtgtcgtgagatgttgggttaagtcccgcaacgagcgcaacccttacctttagttgctacgcaagagcactctaaagggactgccgttgacaaaacggaggaaggtggggatgacgtcaaatcatcatgccccttatgacctgggctacacacgtactacaatggcaattaacaaagagaagcaagacggtgacgtggagcgaatctcaaaaaattgtcccagttcagattgcaggctgcaactcgcctgcatgaagtcggaattgctagtaatcgcggatcagcatgccgcggtgaatacgttcccgggccttgtacacaccgcccgtcacaccatgggagtcggtaacacccgaagtcggtagtctaacagcaatgaggacgccgccgaaggtgggattgatgactggggtgaagtcgtaacaaggtagccgtatcggaaggtgcggctggatcacctcctttct

SEQ ID NO: 30 - DNA, 1464 bp, Artificial Sequence
  Synthetic polymer
gatgaacgctagcggcaggcttaacacatgcaagtcgaggggcagcattcgggtagcaatacctgagatggcgaccggcgcacgggtgcgtaacgcgtatgcaacctacccataacaggggcataacactgagaaattggtactaattccccataacattcgaagaggcatcttttcgggttgaaaactccggtggttatggatgggcatgcgttgtattagctggttggtgaggtaacggctcaccaaggcgacgatacatagggggactgagaggttaaccccccacattggtactgagacacggaccaaactcctacgggaggcagcagtgaggaatattggtcaatggacgcaagtctgaaccagccatgccgcgtgcaggaagacggctctatgagttgtaaactgcttttgtacgagggtaaactcagatacgtgtatctgactgaaagtatcgtacgaataaggatcggctaactccgtgccagcagccgcggtaatacggaggattcaagcgttatccggatttattgggtttaaagggtgcgtaggcggtctgataagttagaggtgaaatcccggggcttaactccggaattgcctctgatactgttgggctagagagtagttgcggtaggcggaatgtatggtgtagcggtgaaatgcttagagatcatacagaacaccgattgcgaaggcagcttaccaaactatatctgacgttgaggcacgaaagcgtggggagcaaacaggattagataccctggtagtccacgcagtaaacgatgataactcgctgtcggcgatacacagtcggtggctaagcgaaagcgataagttatccacctggggagtacgttcgcaagaatgaaactcaaaggaattgacgggggcccgcacaagcggaggaacatgtggtttaattcgatgatacgcgaggaaccttacccgggcttgaaagttagcgacgattctggaaacaggatttcccttcggggcgcgaaactaggtgctgcatggttgtcgtcagctcgtgccgtgaggtgtcgggttaagtcccataacgagcgcaacccctaccgttagttgccatcaggtcaagctgggcactctggcgggactgccggtgtaagccgagaggaaggtggggatgacgtcaaatcagcacggcccttacgtccggggctacacacgtgttacaatggtaggtacagagggcagctaccctgcgaagggatgcgaatctcgaaagcctatctcagttcggattggaggctgaaacccgcctccatgaagttggattcgctagtaatcgcgcatcagccatggcgcggtgaatacgttcccgggccttgtacacaccgcccgtcaagccatggaagctgggggtgcctgaagttcgtgaccgcaaggagcgacctagggcaaaaccggtgactggggctaagtcgtaacaaggta

SEQ ID NO: 31 - DNA, 1523 bp, Artificial Sequence
  Synthetic polymer
agtttgatcctggctcaggatgaacgctggcggcgtgcttaacacatgcaagtcgaacggagtgctcttgattgaggattcgtccaaatgatagagttacttagtggcggacgggtgagtaacgcgtgagtaacctgccttggagtggggaataacacagtgaaaattgtgctaataccgcatgatatatcggtaccgcatggtagtgatatcaaagatttatcgctctgagatggactcgcgtctgattagctggttggcggggtaacggcccaccaaggcgacgatcagtagccggactgagaggttgaccggccacattgggactgagacacggcccagactcctacgggaggcagcagtggggaatattgggcaatgggcgcaagcctgacccagcaacgccgcgtgaaggaagaaggctttcgggttgtaaacttcttttaagagggacgaaagaaatgacggtacctcttgaataagccacggctaactacgtgccagcagccgcggtaatacgtaggtggcaagcgttatccggatttactgggtgtaaagggcgtgtaggcggggctgcaagtcagatgtgaaaactatgagctcaactcatagcctgcatttgaaactgtagttcttgagtgctggagaggcaatcggaattccgtgtgtagcggtgaaatgcgtagatatacggaggaacaccagtggcgaaggcggattgctggacagtaactgacgctgaggcgcgaaagcgtggggagcaaacaggattagataccctggtagtccacgccgtaaacgatggatactaggtgtggggggtctgaccccctccgtgccgcagctaacgcaataagtatcccacctggggagtacgatcgcaaggttgaaactcaaaggaattgacgggggcccgcacaagcggtggagtatgtggtttaattcgaagcaacgcgaagaaccttaccagggcttgacatcctactaacgaagcagagatgcattaggtgcccttcggggaaagtagagacaggtggtgcatggttgtcgtcagctcgtgtcgtgagatgttgggttaagtcccgcaacgagcgcaacccttattgttagttgctacgcaagagcactctagcgagactgccgttgacaaaacggaggaaggtggggacgacgtcaaatcatcatgccccttatgtcctgggccacacacgtactacaatggcggtaaacagagggaagcaataccgcgaggtggagcaaatccctaaaagccgtcccagttcggattgcaggctgaaacccgcctgtatgaagttggaatcgctagtaatcgcggatcagcatgccgcggtgaatacgttcccgggccttgtacacaccgcccgtcacaccatgagagtcgggaacacctgaagtccgtagcctaactagcaatagggggcgcggccgaaggtgggttcgataattggggtgaagtcgtaacaaggtagccgtatcggaaggtgcggctggatcacctcctt

SEQ ID NO: 32 - DNA, 1504 bp, Artificial Sequence
  Synthetic polymer
gagtttgatcctggctcaggacgaacgctggcggcgtgcctaacacatgcaagtcgaacggacgagtcccttcgggggcgagttagtggcgaacgggtgagtaacgcgtgaacaacctgccttcctgagggggataacacctggaaacagatgctaataccgcataagaccacagtgccgcatgacacaggggtcaaaggagcaatccgcaggaagaggggttcgcgtcccattagctggttggcggggcaacggcccaccaaggcgacgatgggtagccgagctgagaggctgatcggccacactggaactgagacacggtccagactcctacgggaggcagcagtggggaatattgggcaatgggcgcaagcctgacccagcaacgccgcgtgagggatgaaggccttcgggttgtaaacctctgtccttggtgacgaaacaaatgacggtagccaaggaggaagccccggctaactacgtgccagcagccgcggtaatacgtaggggscgagcgttgtccggaattactgggtgtaaagggagcgcaggcggagaagcaagtcagtggtgaaaacgatgggcttaactcatcgactgccattgaaactgtttcccttgagtgaagtagaggcaggcggaattccgagtgtagcggtgaaatgcgtagatattcggaggaacaccagtggcgaaggcggcctgctgggctttaactgacgctgaggctcgaaagtgtggggagcaaacaggattagataccctggtagtccacactgtaaacgatgattgctaggtgtggggggtctgaccccttccgtgccggagttaacgcaataagcaatccacctggggagtacggccgcaaggttgaaactcaaaggaattgacgggggcccgcacaagcagtggattatgtggtttaattcgacgcaacgcgaagaaccttaccaggtcttgacatccaacgaatccttaagagattagggagtgcctttcggggaacgttgagacaggtggtgcatggttgtcgtcagctcgtgtcgtgagatgttgggttaagtcccgcaacgagcgcaacccctgccattagttgctacgcaagagcactctaatgggaccgctaccgacaaggtggaggaaggtggggacgacgtcaaatcatcatgccccttatgacctgggctacacacgtaatacaatggccgttaacaacgggaggcaaaaccgcgaggtggagcaaaaccctaaaaacggtcccagttcggatcgcaggctgcaacccgcctgcgtgaagttggaattgctagtaatcgcggatcagcatgccgcggtgaatacgttcccgggccttgtacacaccgcccgtcacaccatgggagtttgtaacacccgaagtcagtagtctaaccgcaagggggacgctgccgaaggtgggataagcgactggggtgaagtcgtaacaaggtagccgtatcggaaggtgcggctggatcacctcctt

SEQ ID NO: 33 - DNA, 1478 bp, Artificial Sequence
  Synthetic polymer
ggcggcgtgcctaacacatgcaagtcgaacggacgaggaggagcttgcttctccaagtcagtggcggacgggtgagtaacgcgtgagtaacctgcccttcagagggggataacgtctggaaacggacgctaataccgcatgacatatttccatcgcatggtggagatatcaaaggagcaatccgctgaaggatggactcgcgtccgattagatagttggcggggtaacggcccaccaagtcgacgatcggtagccggactgagaggttgaacggccacattgggactgagacacggcccagactcctacgggaggcagcagtgggggatattgcacaatgggcgaaagcctgatgcagcaacgccgcgtgagggaagacggttttcggattgtaaacctctgttctaagtgacgaacaaatgacggtagcttaggagaaagccccggctaactacgtgccagcagccgcggtaatacgtagggggcaagcgttgtccggaattactgggtgtaaagggagcgcaggcggagaagcaagtcagtggtgaaaacgatgggcttaactcatcgactgccattgaaactgtttcccttgagtgaagtagaggcaggcggaattccgagtgtagcggtgaaatgcgtagatattcggaggaacaccagtggcgaaggcggcctgctgggctctaactgacgctgaggctcgaaagtgtggggagcaaacaggattagataccctggtagtccacactgtaaacgatgattgctaggtgtggggggtctgaccccttccgtgccggagttaacgcaataagcaatccacctggggagtacggccgcaaggttgaaactcaaaggaattgacgggggcccgcacaagcagtggattatgtggtttaattcgacgcaacgcgaagaaccttaccaggtcttgacatccaacgaatccttaagagattagggagtgcctttcggggaacgttgagacgggtggtgcatggttgtcgtcagctcgtgtcgtgagatgttgggttaagtcccgcaacgagcgcaacccctgccattagttgctacgcaagagcactctaatgggaccgctaccgacaaggtggaggaaggtggggacgacgtcaaatcatcatgccccttatgacctgggctacacacgtgctacaatggccactacaaagaggagcgaaatcgtaaggtagagcgaatctcataaaagtggtcccagttcagattgtgggctgcaacccgcccacatgaagtcggagttgctagtaatcgcagatcagcatgccgcggtgaatacgttcccgggccttgtacacaccgcccgtcacaccatgggagttgggagcacccgaagcgggtgagatagccgaaaggggtcagccttcgaaggtgagaccaatgactggggtgaagtcgtaacaaggtagccgtatcggaaggtgcggctggatcacctcctt

SEQ ID NO: 34 - DNA, 1359 bp, Artificial Sequence
  Synthetic polymer
gatgaacgctagcggcaggcttaacacatgcaagtcgaggggcagcatagagatgtagcaatacattttggtggcgaccggcgcacgggtgcgtaacgcgtatgcaacctacctttaacagggggataacactgataaattggtactaataccccataatatcacggaaggcatcttctgtggttgaaaactccggtggttagagatgggcatgcgttgtattagctagttggtgaggtaacggctcaccaaggcgacgatacatagggggactgagaggttaaccccccacactggtactgagacacggaccagactcctacgggaggcagcagtgaggaatattggtcaatggacgcaagtctgaaccagccatgccgcgtgcaggatgacggctctatgagttgtaaactgcttttgtactagggtaaactcagatacgtgtatctgactgaaagtatagtacgaataaggatcggctaactccgtgccagcagccgcggtaatacggaggatccaagcgttatccggatttattgggtttaaagggtgcgtaggcggtttgatgagttagaggtgaaatgttagggcttaaccctgaaactgcctctaatactgttgggctagagagtagttgcggtaggcggaatgtatggtgtagcggtgaaatgcttagagatcatacagaacaccgattgcgaaggcagcttaccaaactatatctgacgttgaggcacgaaagcgtgggtagcaaacaggattagataccctggtagtccacgcagtaaacgatgataactcgttgtcggcgatacacagtcggtgaccaagcgaaagcgataagttatccacctggggagtacgttcgcaagaatgaaactcaaaggaattgacgggggcccgcacaagcggaggaacatgtggtttaattcgatgatacgcgaggaaccttacccgggcttgaaagttagcgacgattctggaaacaggatttcccttcggggcgcgaaactaggtgctgcatggttgtcgtcagctcgtgccgtgaggtgtcgggttaagtcccataacgagcgcaacccctactgttagttgccatcaggtaaagctgggcactctagcgggactgccggtgtaagccgagaggaaggtggggatgacgtcaaatcagcacggcccttacgtccggggctacacacgtgttacaatggtaggtacagagggcagctaccctgcgaagggatgcgaatctcgaaagcctatctcagttcggattggaggctgaaacccgcctccatgaagttggattcgctagtaatcgcgcatcagccatggcgcggtgaatacgttcccgggcct

SEQ ID NO: 35 - DNA, 1363 bp, Artificial Sequence
  Synthetic polymer
attgaacgctggcggaacgctttacacatgcaagtcgaacggtaacgcggagggaagcttgcttctctccggcgacgagtggcgaacgggtgagtaatacatcggaacgtgtccgctcgtgggggacaaccagccgaaaggttggctaataccgcatgagttctacggaagaaagagggggacccgcaagggcctctcgcgagcggagcggccgatgactgattagccggttggtgaggtaacggctcaccaaagcaacgatcagtagctggtctgagaggacgaccagccacactgggactgagacacggcccagactcctacgggaggcagcagtggggaattttggacaatgggcgcaagcctgatccagctattccgcgtgtgggatgaaggccctcgggttgtaaaccacttttgtagagaacgaaaagacaccttttaataaagggtgttgctgacggtactctaagaataagcaccggctaactacgtgccagcagccgcggtaatacgtagggtgcgagcgttaatcggaattactgggcgtaaagggtgcgcaggcggttgagtaagacagatgtgaaatccccgagcttaactcgggaatggcatatgtgactgctcgactagagtgtgtcagagggaggtggaattccacgtgtagcagtgaaatgcgtagatatgtggaagaacaccgatggcgaaggcagcctcctgggacataactgacgctcaggcacgaaagcgtggggagcaaacaggattagataccctggtagtccacgccctaaacgatgttaactagttgttgggaagtaatattctcagtaacgcagccaacgcgagaagttaaccgcctgggaagtacggtcgcaagactaaaactcaaaggaattgacggggacccgcacaagcggtggatgatgtggattaattcgatgcaacgcgaaaaaccttacctacccttgacatgtcaggaagctcttgtaatgagagcgtgcccgcaagggagcctgaacacaggtgctgcatggctgtcgtcagctcgtgtcgtgagatgttgggttaagtcccgcaacgagcgcaacccttgtcactagttgctacgaaagggcactctagtgagactgccggtgacaaaccggaggaaggtggggatgacgtcaagtcctcatggcccttatgggtagggcttcacacgtcatacaatggtcggaacagagggcagcgaagtcgcgaggtggagcgaaccccaaaaacccgatctcagttcggatcgcaggctgcaacccgcctgcgtgaagtcggaatcgctagtaatcgcaggtcagcatactgcggtgaatacgttcccgggcct

SEQ ID NO: 36 - DNA, 1351 bp, Artificial Sequence
  Synthetic polymer
gacgaacgctggcggcgtgcctaacacatgcaagtcgaacggagatgcactggtgaagttttcggatggaaccggggtattcttagtggcggacgggtgagtaacgcgtgagtaacctgcctttcagagggggataacgttttgaaaagaacgctaataccgcatgacatattgaggctgcatggctttgatatcaaaggagcaatccgctgaaagatggactcgcgtccgattagccagttggcggggtaaaggcccaccaaagcgacgatcggtagccggactgagaggttgaacggccacattgggactgagacacggcccagactcctacggggggcagcagtgggggatattgcacaatggaggaaactctgatgcagcaacgccgcgtgagggaagaaggttttcggattgtaaacctctgtccttagggacgataatgacggtacctaaggaggaagctccggctaactacgtgccagcagccgcggtaatacgtagggagcaagcgttgtccggatttactgggtgtaaagggtgcgtaggcggatctgcaagtcaggcgtgaaatccatgggcttaacccatgaactgcgcttgaaactgtgggtcttgagtgaagtagaggtaggcggaattcccggtgtagcggtgaaatgcgtagagatcgggaggaacaccagtggcgaaggcggcctactgggctttaactgacgctgaggcacgaaagtgtgggtagcaaacaggattagataccctggtagtccacaccgtaaacgatgattactaggtgtggggggtctgaccccctccgtgccggagttaacacaataagtaatccacctggggagtacggccgcaaggttgaaactcaaaggaattgacgggggcccgcacaagcagtggagtatgtggtttaattcgaagcaacgcgaagaaccttaccaggtcttgacatccaactaacgagatagagatatgttaggtgcccttcggggaaagttgagacaggtggtgcatggttgtcgtcagctcgtgtcgtgagatgttgggttaagtcccgcaacgagcgcaacccttgtgattagttgctacgcaagagcactctaatcagactgccgttgacaaaacggaggaaggtggggacgacgtcaaatcatcatgccctttatgacctgggctacacacgtactacaatggccgtaaacaaagagaagcaagaccgcgaggtggagcaaaactcaaaaagcggtcccagttcggattgtaggctgcaacccgcctacatgaagttggaattgctagtaatcgcggatcagcatgccgcggtgaatacgttcccgggcct

SEQ ID NO: 37 - DNA, 1504 bp, Artificial Sequence
  Synthetic polymer
agagtttgatcatggctcagattgaacgctggcggcaggcctaacacatgcaagtcgaacggtaacaggaagcagcttgctgcttcgctgacgagtggcggacgggtgagtaatgtctgggaaactgcctgatggagggggataactactggaaacggtagctaataccgcataacgtcgcaagacataagagggggactttcgggctctttgccatcggatgtgcccagatgggattagctagtaggtggggtaacggctcacctaggcgacgatccctagctggtctgagaggatgaccagccacactggaactgagacacggtccagactcctacgggaggcagcagtggggaatattgcacaatgggcgccctggaattgcagccatccgcgtgtatgaagaaggccttcgggttgtaaagtactttcagcggggaggaaggcgataaggttaataaccttgtcgactgacgttacccgagaagaaggcaccggctaactccgtgccagcagccgcgtaatacggagggtgcaagcgttaatcggaattactgggcgtaaagcgcacgcaggcggtctgtcaagtcggatgtgaaatccccgggctcaacctgggaactgcattcgaaactggcaggctagagtcttgtagaggggggtagaattccaggtgtagcggtgaaatgcgtagagatctggaggaataccggtggcgaaggcggccccctggacaaagactgacgctcaggtgcgaaagcgtggggagcaaacaggattagataccctggtagtccacgccgtaaacgatgtcgacttggaggttgtgcccttgaggcgtggcttccggagctaacgcgttaagtcgaccgcctggggagtacggccgcaaggttaaaactcaaatgaattgacgggggcccgcacaagcggtggagcatgtggtttaattcgatgcaacgcgaagaaccttacctactcttgacatccagagaacttagcagagatgctttggtgccttcgggaactctgagacaggtgctgcatggctgtcgtcagctcgtgttgtgaaatgttgggttaagtcccgcaacgagcgcaacccttatcctttgttgccagcggtccggccgggaactcaaaggagactgccagtgataaactggaggaaggtggggatgacgtcaagtcatcatggcccttacgagtagggctacacacgtgctacaatggcgcatacaaagagaagcgacctcgcgagagcaagcggacctcataaagtgcgtcgtagtccggattggagtctgcaactcgactccatgaagtcggaatcgctagtaatcgtgggtcagaatgccacggtgaatacgttcccgggccttgtacacaccgcccgtcacaccatgggagtgggttgcaaaagaagtaggtagcttaaccttcgggagggcgcttaccactttgtgattcatgactggggtgaagtcgtaacaaggtaaccgta

SEQ ID NO: 38 - DNA, 1413 bp, Artificial Sequence
  Synthetic polymer
gcttaacacatgcaagtcgaacggagtattcacaaaagaggtttcggccaatggagtgaattacttagtggcggactggtgagtaacgcgtgaggaacctgcctttcagtgggggacaacagttggaaacgactgctaataccgcataacacatttgggggacatcccttgaatgtcaaagatttattgctgaaagatggcctcgcgtctgattagctagttggtgaggtaacggcccaccaaggcgacgatcagtagccggactgagaggttgaccggccacattgggactgagatacggcccagactcctacgggaggcagcagtggggaatattgggcaatggacgaaagtctgacccagcaacgccgcgtgaaggaagaaggctttcgggttgtaaacttcttttaagggggaagagtagaagacggtaccccttgaataagccacggctaactacgtgccagcagccgcggtaatacgtaggtggcaagcgttgtccggatttactgggtgtaaagggcgtgcagccgggaaggcaagtcagatgtgaaatctgggggctcaacctccaaactgcatttgaaactgcttttcttgagtatcggagaggtaatcggaattccttgtgtagcggtgaaatgcgtagatataaggaagaacaccagtggcgaaggcggattactggacgacaactgacggtgaggcgcgaaagcgtggggagcaaacaggattagataccctggtagtccacgctgtaaacgatcaatactaggtgtgcggggactgaccccctgcgtgccgcagttaacacaataagtattgcacctggggagtacgatcgcaaggttgaaactcaaaggaattgacgggggcccgcacaagcggtggattatgtggtttaattcgaagcaacgcgaagaaccttaccaggacttgacatcctactaacgaggtagagatacgtcaggtgcccttcggggaaagtagagacaggtggtgcatggttgtcgtcagctcgtgtcgtgagatgttgggttaagtcccgcaacgagcgcaacccctattgttagttgctacgcaagagcactctagcgagactgccgttgacaaaacggaggaaggtggggacgacgtcaaatcatcatgccccttatgtcctgggctacacacgtaatacaatggcggtcaacagagggatgcaaagccgtgaggtggagcgaacccctaaaagccgtctcagttcggatcgtaggctgcaactcgcctgcgtgaagtcggaatcgctagtaatcgcggatcagcatgccgcggtgaatacgttcccgggccttgtacacaccgcccgtcacaccatgagagtcgggaacacccgaagtccgtagcctaacagcaatgagggcgcggccgaag

SEQ ID NO: 39 - DNA, 1462 bp, Artificial Sequence
  Synthetic polymer
gcggcatgcctaacacatgcaagtcgagcggtaacaggggaagcttgcttcccgctgacgagcggcggacgggtgagtaatgtatggggatctgcccgatagagggggataactactggaaacggtagctaataccgcataatctctaaggagcaaagcaggggaacttcggtccttgcgctatcggatgaacccatatgggattagctagtaggtgaggtaatggctcacctaggcgacgatccctagctggtctgagaggatgatcagccacactgggactgagacacggcccagactcctacgggaggcagcagtggggaatattgcacaatgggcgcaagcctgatgcagccatgccgcgtgtatgaagaaggccctagggtttgtaaagtactttcagtcgggaggaaggcgttgatgcttaatatcatctacgattgacgttaccgacagaataagcaccggctaactccgtgccagcagccgcggtaatacggagggtgcaagcgttaatcggaattactgggcgtaaagcgcacgcaggcggtctgtcaagtcggatgtgaaatccccgggctcaacctgggaactgcattcgaaactggcaggctagagtcttgtagaggggggtagaattccaggtgtagcggtgaaatgcgtagagatctggaggaataccggtggcgaaggcggccccctggacaaagactgacgctcaggtgcgaaagcgtggggagcaaacaggattagataccctggtagtccacgctgtaaacgatgtcgactttggaaggttgtgcccttgaggcgtggcttccggagctaacgcgttaatcgaccgcctgggagtacggccgcaggttaaactcaatgaattgacggggccccgcacaagcggtggagcatgtggtttaattcgatgcaacgcgaagaaccttacctggtcttgacatccacagaactttccagagatggattggtgccttcgggaactgtgagacaggtgctgcatggctgtcgtcagctcgtgttgtgaaatgttgggttaagtcccgcaacgagcgcaacccttatcctttgttgccagcgattcggtcgggaactcaaaggagactgccggtgataaaccggaggaaggtggggatgacgtcaagtcatcatggcccttacgagtagggctacacacgtgctacaatggcgtatacaaagagaagcgacctcgcgaggcaagcggaactcataaagtacgtcgtagtccggattggagtctgcaactcgactccatgaagtcggaatcgctagtaatcgtagatcagaatgctacggtgaatacgttcccgggccttgtacacaccgcccgtcacaccatgggagtgggttgcaaaagaagtaggtagcttaaccttcgggagggcgcttaccactttgtgattcatgactggggtgaagtcgtaacaag

SEQ ID NO: 40 - DNA, 1350 bp, Artificial Sequence
  Synthetic polymer
acgaacgctggcggcgtgcctaaacacatgcaagtcgaagcggagaataaagaatttcggtttttatcttagcggcgcacgggtcgagtaacacgtgaaataaacctcgaacccaaagagggggataacacctcggaaaacaggtcgctaataccgcataagaaccacaatgtcgcatgacgaaggggtcaaagaaaatcgctttgggaggggttcgcgtcccattaggtagtaggcggggtaacggcccacctagccgactatgggtagccgagctgagaggctgatcggccacactggaactgagacacggtccagactcctacgggaggcagcagtggggaatattgggcaatgggcgcaagcctgacccagcaacgccgcgtgagggaagaaggttttcggattgtaaacctctgtcgcagaagacgaaggaagtgacggtattctgtgaggaagccccggctaactacgtgccagcagccgcggtaatacgtagggggcgagcgttgtccggaattactgggcgtaaagggagcgtaggcggtctgataagttggatgtgaaatacccgggcttaacttggggggtgcatccaatactgttggactagagtacaggagaggaaagcggaattcctagtgtagcggtgaaatgcatagatattaggtggaacatcggtggcgaaggcggctttctggactgcaactgacgctgaggctcgaaagcgtggggagcaaacaggattagataccctggtagtccacgctgtaaacgatgaatactaggtgtagggggtataaactccctctgtgccgcagcaaacgcaataagtattccgcctggggagtacggccgcaaggttgaaactcaaaggaattgacgggggcccgcacaagcagcggagcatgtggtttaattcgacgcaacgcgaagaaccttaccaaggcttgacatccacttaaagttatggaaacataatgtcccttcgggggaagtgagacaggtggtgcatggttgtcgtcagctcgtgtcgtgagatgttgggttaagtcccgcaacgagcgcaacccctgttgccagttgccagcaagtaaagttggggactctggtgagactgccggggacaactcggaggaaggtggggatgacgtcaaatcatcatgccccttatgtcttgggctacacacgtgctacaatggctgtaacaaagggaagcgaccttgtaagaggaagcggatctcagaaaagcagtcccagttcggattgtgggctgcaacccgcccacatgaagtcggagttgctagtaatcgcggatcagcatgccgcggtgaatacgttcccgggcct

SEQ ID NO: 41 - DNA, 1394 bp, Artificial Sequence
  Synthetic polymer
gatgaacgctggcggcgkgcttaacacatgcaagtcgaacggagaacccctgatagaggattcgtccaattgaagggaattcttagtggcggacgggtgagtaacgcgtgaggaacctgccttggagtggggaataacagtccgaaaggactgctaataccgcataatgcagctgggtcgcatgactctggctgccaaagatttatcgctctgagatggcctcgcgtctgattagctagtaggcggggtaacggcccacctaggcgacgatcagtagccggactgagaggttgaccggccacattgggactgagacacggcccagactcctacgggaggcagcagtggggaatattgggcaatgggcgcaagcctgacccagcaacgccgcgtgaaggaagaaggccctcgggttgtaaacttcttttgacagggacgaagaaaatgacggtacctgtcgaataagccacggctaactacgtgccagcagccgcggtaatacgtaggtggcaagcgttatccggatttactgggtgtaaagggcgtgtaggcgggctggcaagtcagatgtgaaaaccatgggctcaacccatggcctgcatttgaaactgttggtcttgagtgctggagaggcaatcggaattccgtgtgtagcggtgaaatgcgtagatatacggaggaacaccagtggcgaaggcggattgctggacagtaactgacgctgaggcgcgaaagcgtggggagcaaacaggattagataccctggtagttcacgccgtaaacgatggatactaggtgtggggggactgaccccctccgtgccgcagctaacgcaataagtatcccacctggggagtacgatcgcaaggttgaaactcaaaggaattgacgggggcccgcacaagcggtggagtatgtggtttaattcgaagcaacgcgaagaaccttaccagggcttgacatcctgctaacgaagtagagatacattaggtgcccttcggggaaagcagagacaggtggtgcatggttgtcgtcagctcgtgtcgtgagatgttgggttaagtcccgcaacgagcgcaacccttattgttagttgctacgcaagagcactctagcgagactgccgttgacaaaacggaggaaggtggggacgacgtcaaatcatcatgccccttatgtcctgggccacacacgtactacaatggcggttaacagagggaagcaatatcgcgagatggagcaaatccctaaaagccgtcccagttcggattgcaggctgaaacccgcctgtatgaagttggaatcgctagtaatcgcggatcagcatgccgcggtgaatacgttcccgggccttgtacacaccgcccgtcacaccatgagagtcgggaacaccc

SEQ ID NO: 42 - DNA, 1493 bp, Artificial Sequence
  Synthetic polymer
gagtttgatcctggctcaggacgaacgctggcggcatgcctaacacatgcaagtcgaacggagattacttcggtaatcttagtggcgaacgggtgagtaacgcgtaggcaacctgcccttcagatggggacaacatcccgaaaggggtgctaataccgaatgtgatcacaacctcgcatgaggatgtgatgaaagatggcctctatttataagctatcgctgaaggatgggcctgcgtctgattagctagttggtaaggtaacggcttaccaaggcgatgatcagtagccggtctgagaggatgaacggccacattgggactgagacacggcccagactcctacgggaggcagcagtggggaatcttccgcaatgggcgaaagcctgacggagcaatgccgcgtgagtgatgaagggattcgtcccgtaaagctctgttgtctatgacgaatgtgcatgttgtgaacaatgacgtgtaatgacggtagtagacgaggaagccacggctaactacgtgccagcagccgcggtaatacgtaggtggcgagcgttgtccggaattattgggcgtaaagagcatgtaggcggttttttaagtctggagtgaaaatgcggggctcaaccccgtatggctctggatactggaagacttgagtgcaggagaggaaaggggaattcccagtgtagcggtgaaatgcgtagatattgggaggaacaccagtggcgaaggcgcctttctggactgtgtctgacgctgagatgcgaaagccagggtagcgaacgggattagataccccggtagtcctggccgtaaacgatgggtactaggtgtaggaggtatcgaccccttctgtgccggagttaacgcaataagtaccccgcctggggagtacgtccgcaaggatgaaactcaaaggaattgacgggggcccgcacaagcggtggagtatgtggtttaattcgacgcaacgcgaagaaccttaccaaggcttgacattgaatgaccatcttagagataagatttcttcttcggaagcatgaaaacaggtggtgcatggctgtcgtcagctcgtgtcgtgagatgttgggttaagtcccgcaacgagcgcaacccctatcctatgttaccagcacgtaaaggtggggactcataggagactgccaaggacaacttggaggaaggcggggatgacgtcaagtcatcatgccccttatgtcttgggctacacacgtactacaatggtcgacaacagagggaagcgaagccgcgaggcagagcaaaccccagaaactcgatctcagttcggattgcaggctgcaactcgcctgcatgaagtcggaatcgctagtaatcgcaggtcagcatactgcggtgaatacgttcccgggccttgtacacaccgcccgtcacaccacgaaagttggtaacacccgaagccggtggggtaaccgaaaggagccagccgtctaaggtggggccgatgattggggtg

SEQ ID NO: 43 - DNA, 1368 bp, Artificial Sequence
  Synthetic polymer
tctagtggcgaacgggtgagtaacgcgtgaggaacctgcctcaaagagggggacaacagttggaaacgactgctaataccgcataagcccacgagaccgcatggtcttgagggaaaaggagcaatccgctttgagatggcctcgcgtccgattagctagttggtgaggtaacggcccaccaaggcgacgatcggtagccggactgagaggttgaacggccacattgggactgagacacggcccagactcctacgggaggcagcagtggggaatattgcacaatggaggaaactctgatgcagcgacgccgcgtggaggaagaaggtcttcggattgtaaactcctgttgttgaggacgataatgacggtactcaacaaggaagtgacggctaactacgtgccagcagccgcggtaaaacgtaggtcacaagcgttgtccggaattactgggtgtaaagggagcgcaggcgggaatgcaagttgggagtgaaatctacgggctcaacccgtaaactgctctcaaaactgtatttcttgagtagtgcagaggtaggcggaattcccggtgtagcggtggaatgcgtagatatcgggaggaacaccagtggcgaaggcggcctactgggcaccaactgacgctgaggctcgaaagtgtgggtagcaaacaggattagataccctggtagtccacaccgtaaacgatgattactaggtgttgggagattgaccctctcagtgccgcagttaacacaataagtaatccacctggggagtacgaccgcaaggttgaaactcaaaggaattgacgggggcccgcacaagcagtggagtatgtggtttaattcgacgcaacgcgaagaaccttaccaagtcttgacatcctgcgacgagtgcagaaatgtacttttccttcgggacgcagagacaggtggtgcatggttgtcgtcagctcgtgtcgtgagatgttgggttaagtcccgcaacgagcgcaacccttatggatagttactacgcaagaggactctattcagactgccgttgacaaaacggaggaaggtggggatgacgtcaaatcatcatgccctttatgacttgggctacacacgtactacaatggcgttaaacaaagagaagcaagaccgcgaggtggagcaaaactcaaaaacaacgtcccagttcagactgcaggctgcaactcgcctgcacgaagtcggaattgctagtaatcgcagatcagcatgctgcggtgaatacgttcccgggccttgtacacaccgcccgtcacaccatgagagccggggggacccgaagtcggtagtctaaccgcaaggaggacgccgcccgaaggtaaaactggtgattggggtg

SEQ ID NO: 44 - DNA, 1407 bp, Artificial Sequence
  Synthetic polymer
  misc_feature (52)..(53): n is a, c, g, or t
tggcggcgtgcctaacacatgcaagtcgaacgattaaggcgccttcgggcgnnaatagagtggcgaacgggtgagtaacacgtgaccaacctcccccctccccgggataacgcgaggaaacccgcgctaataccggatactccgcccctccgcatggaggggcgggaaagccccgacggagggggatggggtcgcggcccattaggtagacggcggggcaacggcccaccgtgcctgcgatgggtagccgggttgagagaccgaccggccacattgggactgagatacggcccagactcctacgggaggcagcagtggggaattttgcgcaatggggggaaccctgacgcagcaacgccgcgtgcgggacgaaggccttcgggttgtaaaccgctttcagcagggaagaagttgacggtacctgcagaagaagccccggctaactacgtgccagcagccgcggtaatacgtagggagcgagcgttatccggattcattgggcgtaaagcgcgcgtaggcgggcttctcaagcggaacctctaacccgagggctcaacccccggccgggttccgaactggaagcctcgagtctggtagaggaagatggaattcccggtgtagcggtggaatgcgcagatatcgggaagaacaccgatggcgaaggcagtcttctgggccgcgactgacgctgaggtcgcgaaaagctgggggagcgaacaggattagataccctggtagtcccagccgtaaacgatgggcgctaggtgtggggggatcatccctccgtgccgcagccaacgcattaagcgccccgcctggggagtacggccgcaaggctaaaactcaaaggaattgacgggggcccgcacaagcagcggagcatgtggcttaattcgaagcaacgcgaagaaccttaccagggcttgacatgctggtgaagccggggaaacccggtggccgagaggagccagcgcaggtggtgcatggctgtcgtcagctcgtgtcgtgagatgttgggttaagtcccgcaacgagcgcaacccctgccatatgttgccagcattcagttggggactcatatgggactgccggcgtcaagccggaggaaggtggggacgacgtcaagtcatcatgccctttatgccctgggctgcacacgtgctacaatggccggtacagagggggccgcgacctggcgacaggagcgaatccctcaaagccggccccagttcggacaggaggctgcaacccgcctcctgtaagtcggagttgctagtaatcgcggatcagcatgccgcggtgaatacgttcccgggccttgtacacaccgcccgtcacaccacccgagtcgtctgcacccgaagccgccggccgaacccgcaaggggcggaggcgtcgaaggtgtgg

SEQ ID NO: 45 - DNA, 1378 bp, Artificial Sequence
  Synthetic polymer
  misc_feature (250)..(250): n is a, c, g, or t
  misc_feature (811)..(811): n is a, c, g, or t
tagtggcggacgggtgagtaacgcgtgagcaacctgcctttcagagggggataacgtcttgaaaaggacgctaataccgcatgagactacagcctcgcatggggaagtggtcaaaggagcaatccgctgaaagatgggctcgcgtccgattaggtagttggcggggtagaggcccaccaagccgacgatcggtagccggactgagaggttgaacggccacattgggactgagacacggcccagactcctnacgggaggcagcagtgagggatattggtcaatgggggaaawccctgaaccagcaacgccgcgtgagggaagacggttttcggactgtaaacctctgtcctctgtgaaaataatgatggtagcagaggaggaagctccggctaactacgtgccagcagccgcggtaatacgtagggagcgagcgttgtccggaattactgggtgtaaagggtgcgtaggcggtttggtaagtcagaagtgaaatccatgggcttaacccacgaactgcttttgaaactatcggactcgagtgaagtagaggtaggcggaattcccggtgtagcggtggaatgcgtagagatcgggaggaacaccagtggcgaaggcggcctacctgggctttaayctgacgctgaggcacgaaagcatgggtagcaaacagggattagataccctggtagtccatgccgtaaacgatgattactaggtgtggggggactgaccccctccgtgccggagttaacacaataagtaatccacctggggagtacggccgccagggctgaaactcaaaggaattgancgggggcccgcacaagcagtggagtattgttgattaattcgatgcaacgcgaagaaccttaccaggtcttgacatccagctaacgaagcagagatgcactaggtgcccttcggggaaagcttgagacaggtggtgcatggttgtcgtcagctcgtgtcatgagatgttgggttaagtcccgcaacgagcgcaacccttactgttagttgctacgcaagagcactctagcaggaccgccgttgacaaaacggaggaaggtggggatgatgtcaaatcatcatgccccttatgacctgggcttcaaacgtactacaatggccgtcaacagagggaagcaaagccgcgaggcagagcaaaaccctaagagcggtcccagttcggattgtaggctgcaacccgcctgcatgaagttggaattgctagtaatcgcggatcagcatgccgcggtgaatacgttcccgggccttgtacacaccgcccgtcacaccatgggagtcggtaatacccgaagtcagtagtctaaccgcaaggagggcgctgccgaaggtaggattggcgactggggtg

SEQ ID NO: 46 - DNA, 1498 bp, Artificial Sequence
  Synthetic polymer
agagtttgattctggctccggatgaacgctggcggcgtgcttaacacatgcaagtcgaacgaagcacctgaagttgatttcttcggaatgattcttctggtgactgagtggcggacgggtgagtaacgcgtgggtaacctgcctcatacagggggataacagttagaaatgactgctaataccgcataagcgcacagtaccgcatggtacggtgtgaaaaactccggtggtatgagatggacccgcgtctgattagcttgttggcagggtaacggcctaccaaggcgacgatcagtagccgacctgagagggtgaccggccacattgggactgagacacggcccaaactcctacgggaggcagcagtggggaatattgcacaatgggggaaaccctgatgcagcaacgccgcgtgaaggacgacgtatttcggtatgtaaacttctatcagcaaggaagatgatgacggtacttgactaagaagccccggctaactacgtgccagcagccgcggtaatacgtagggggcaagcgttatccggatttactgggtgtaaagggagcgtaggcggccatgcaagtcagaagtgaaagcccggggctcaaccccgggactgcttttgaaactgtaaggctagattgccggagaggtaagcggaattcctagtgtagcggtgaaatgcgtagatattaggaggaacaccagtggcgaaggcggcttactggacggtcaatgacgctgaggctcgaaagcgtggggagcaaacaggattagataccctggtagtccacgccgtaaacgatgaatactaggtgtcggggcccaaaagggcttcggtgccgcagcaaacgcaataagtattccacctggggagtacgttcgcaagaatgaaactcaaaggaattgacggggacccgcacaagcggtggagcatgtggtttaattcgaagcaacgcgaagaaccttaccaggtcttgacatcctgatgaccggagagtaacgtctcctttccctcgggacatcagtgacaggtggtgcatggttgtcgtcagctcgtgtcgtgagatgttgggttaagtcccgcaacgagcgcaacccctattttcagtagccagcggtttggccgggcactctggagagactgccagggataacctggaggaaggtggggatgacgtcaaatcatcatgccccttatgatctgggctacacacgtgctacaatggtggtaacaaagtgaggcgaacccgtgagggggagcgaatcacagaaaagccatctcagttcggattgtagtctgcaactcgactacatgaagctggaatcgctagtaatcgcgaatcagcatgtcgcggtgaatacgttcccgggtcttgtacacaccgcccgtcacaccatgggagttggatatgcccgaagtcagtgacccagccgtaaggagggagctgccgaaggtggagccgatgactggggtgaagtcgtaacaaggtagccgta

SEQ ID NO: 47 - DNA, 1534 bp, Artificial Sequence
  Synthetic polymer
tagagtttgatcctggctcagattgaacgctggcggcaggcttaacacatgcaagtcgagcggaaacgatgggagcttgctcccaggcgtcgagcggcggacgggtgagtaacgcgtaggaatctacccagtagagggggatagcccggggaaactcggattaataccgcatacgccccacgggggaaaggccgggatcttcggaccggtcgctattggatgagcctgcgttggattagctagttggtggggtaaaggcctaccaaggcgacgatccatagctggtctgagaggatgatcagccacactggaactgagacacggtccagactcctacgggaggcagcagtggggaatattggacaatgggcgcaagcctgatccagccatgccgcgtgtgtgaagaaggctctagggttgtaaagcactttcagtagggaggaaggccagagtgttaatagcactttggattgacgttacctacagaagcagcaccggctaactccgtgccagcagccgcggtaatacggagggtgcaagcgttaatcggaattactgggcgtaaagcgcacgcaggcggtttgttaagtcagatgtgaaatccccgggctcaacctgggaactgcatctgatactggcaagcttgagtctcgtagaggggggtagaattccaggtgtagcggtgaaatgcgtagagatctggaggaataccggtggcgaaggcggccccctggacgaagactgacgctcatgtgcgaaagcgtggggagcaaacaggattagataccctggtagtccacgccgtaaacgatgtcgacttggaggttgtgcccttgaggcgtggcttccggagctaacgcgttaagtcgaccgcctggggagtacggccgcaaggttaaaactcaaatgaattgacgggggcccgcacaagcggtggagcatgtggtttaattcgatgcaacgcgaagaaccttacctggtcttgacatccacggaagttttcagagatgagaatgtgccttcgggaaccgtgagacaggtgctgcatggctgtcgtcagctcgtgttgtgaaatgttgggttaagtcccgcaacgagcgcaacccttatcctttgttgccagcggtccggccgggaactcaaaggagactgccagtgataaactggaggaaggtggggatgacgtcaagtcatcatggcccttacgaccagggctacacacgtgctacaatggcgcatacaaagagaagcgacctcgcgagagcaagcggacctcataaagtgcgtcgtagtccggatcggagtctgcaactcgactccgtgaagtcggaatcgctagtaatcgcggatcagaatgccgcggtgaatacgttcccgggccttgtacacaccgcccgtcacaccatgggagtgggctgcaccagaagtagatagcttaaccttcgggagggcgtttaccacggcgtggttcatgactggggtgaagtcgtaacaaggtagccgtaggggaacctgcggctggatcacctcctta

SEQ ID NO: 48 - DNA, 1343 bp, Artificial Sequence
  Synthetic polymer
gacgaacgctggcggcgtgcttaatacatgcaagtcgaacgagaggaaggaaagcttgcttttctgaatctagtggcgaacgggtgagtaacgcgtgaataacctgactcaaagagggggataacaacgggaaactgttgctaataccgcataggtagcagacaagcatttgactgctattaaagtggccttggctttgagaggggttcgcgtcccattaggtagttggaggggtaacggcccaccaagccaacgatgggtagccgagctgagaggctgatcggccacactggaactgagacacggtccagactcctacgggaggcagcagtagggaatattgggcaatgggcgcaagcctgacccagcaacgccgcgtgagggaagaaggttttcggattgtaaacctctgtcctatgtgacgaaggaagtgacggtagcataggaggaagccccggctaactacgtgccagcagccgcggtaatacgtagggggcgagcgttgtccggaattactgggcgtaaagggtgcgtaggcggtttggtaagttggatgtgaaatacccgggcttaacttgggggctgcatccaatactgtcggacttgagtacaggagaggaaagcggaattcctagtgtagcggtgaaatgcgtagatattaggaggaacaccggtggcgaaggcggctttctggactgtaactgacgctgaggcacgaaagcgtggggagcaaacaggattagataccctggtagtccacgccgtaaacgatgaatactaggtgtagggggtatagactccctctgtgccgcagcaaacgcaataagtattccgcctggggagtacggccgcaaggttgaaactcaaaggaattgacgggggcccgcacaagcagcggagcatgtggtttaattcgacgcaacgcgaaaaaccttaccaagacttgacatcctactaaactcatggaaacatgaggtgacttcggtcgagtagagacaggtggtgcatggttgtcgtcagctcgtgtcgtgagatgttgggttaagtcccgcaacgagcgcaacccctgttgccggttaccagcgagtaaagtcggggactccggtgagactgccgaggacaactcggaggaaggtggggacgacgtcaaatcatcatgccccttacgtcttgggctacacacgtgctacaatggctgtaacaaagggaagcgacagcgtaagctgaagcggatctcgaaaaggcagtcccagttcggattgtgggctgcaacccgcccacatgaagtcggagttgctagtaatcgcggatcagcatgccgcggtgaatacgttcccgggcct

SEQ ID NO: 49 - DNA, 1438 bp, Artificial Sequence
  Synthetic polymer
gatgaacgctggcggcgtgcctaacacatgcaagtcgagcgagaagctgatgattgacacttcggttgagagaatcagtggaaagcggcggacgggagagtaacgcgtaggcaacctgccctttgcagagggatagcctcgggaaaccgggattaaaacctcatgatgctgtatgtccgcatgggcagacggtcaaagatttatcggcagaggatgggcctgcgtctgattagttagttggtggggtaacggcctaccaaggcaacgatcagtagccgacctgagagggtgatcggccacattggaactgagacacggtccaaactcctacgggaggcagcagtggggaatattgcacaatgggggaaaccctgatgcagcaacgccgcgtgagcgaagaaggcctttgggtcgtaaagctctgtccttggggaagaaaaaatgacggtacccaaggaggaagccccggctaactacgtgccagcagccgcggtaatacgtagggggcaagcgttatccggaattattgggcgtaaagagtatgtaggtggtttcttaagcgcagggtataaggcaatggcttaaccattgttcgccccgtgaactgagagacttgagtgctggagaggaaagcggaattcctagtgtagcggtgaaatgcgtagatattaggaggaacaccagtggcgaaggcggctttctggacagtaactgacactgagatacgaaagcgtggggagcaaacaggattagataccctggtagtccacgccgtaaacgatgagcactaggtgtcgggctcgcaagagttcggtgccggagttaacgcattaagtgctccgcctggggagtacgcacgcaagtgtaaaactcaaaggaattgacggggacccgcacaagcagcggagcatgtggtttaattcgaagcaacgcgaagaaccttaccagggcttgacatccctccgaccggtccttaatcggacctttctacggacgggggagacaggtggtgcatggttgtcgtcagctcgtgtcgtgagatgttgggttaagtcccgcaacgagcgcaacccttgtcattagttgctaacagtaagatgagaactctaatgagactgccgtggataacacggaggaaggtggggatgacgtcaaatcatcatgccccttatgtcctgggctacacacgtgctacaatggtcggtacaaagagaagcgagaccgcaaggtggagcaaatctcaaaaaccgatcccagttcggattgcaggctgcaactcgcctgcatgaagtcggagttgctagtaatcgcagatcagaatgctgcggtgaatgcgttcccgggtcttgtacacaccgcccgtcacaccatggaagttgggggcgcccgaagtcggctagtaaataggctgcctaaggcgaaatcaatgactggggtg

SEQ ID NO: 50 - DNA, 1476 bp, Artificial Sequence
  Synthetic polymer
agagtttgatcctggctcaggatgaacgctggcggcgtgcctaacacatgcaagtcgagcgagaagctcgcaacggacgcttcggttgaagttgcgagtggaaagcggcggacgggtgagtaacgcgtaggcaacctgccctttgcagagggatagcctcgggaaaccgggattaaaacctcataacactttcctgagacatcttagggaggtcaaagatttatcggcaaaggatgggcctgcgtctgattagttagttggtgaggtaacggctcaccaaggcagcgatcagtagccgacctgagagggtgatcggccacattggaactgagacacggtccaaactcctacgggaggcagcagtgggggatattgcacaatgggggaaaccctgatgcagcaacgccgcgtgaaggaagaaggcctttgggtcgtaaacttctgttctgagggaagaataagacggtacctcaggagcaagtcccggctaactacgtgccagcagccgcggtaatacgtggggggcaagcgttatccggaatcattgggcgtaaagagtacgtaggtggttacctaagcacggggtataaggcaatagctcaactattgttcgccctgtgaactgggctacttgagtgcaggagagggaagcggaattcctagtgtagcggtgaaatgcgtagatattaggaggaacaccagtggcgaaggcggctttctggactgtaactgacactgaggtacgaaagcgtggggagcaaacaggattagataccctggtagtccacgccgtaaacgatgagcactaggtgtcggggtcgtaagacttcggtgccgcagttaacgcaataagtgctccgcctggggagtacgttcgcaagaatgaaactcaaaggaattgacggggacccgcacaagcagcggagcatgtggtttaattcgaagcaacgcgaagaaccttaccaaggcttgacatccctctgacgtacccgtaacggggtatttcttcggacagaggagacaggtggtgcatggttgtcgtcagctcgtgtcgtgagatgttgggttaagtcccgcaacgagcgcaacccttgtcattagttgccagcagtaagatgggcactctaatgagactgccggggacaactcggaggaaggtggggatgacgtcaaatcatcatgccccttatgtcttgggctacacacgtgctacaatggtcggaacagagagaaagcgagaccgcgaggtggagcgaaattcaaaaaccggccccagttcggattgcaggctgcaactcgcctgcatgaagtcggagttgctagtaatcgcagatcagaatgctgcggtgaatgcgttcccgggtcttgtacacaccgcccgtcacaccatggaagttgggggcgcccgaagttggctaagaaataggtcacctaaggcgaaatcaatgactggggtgaagtcgtaacaaggtaacc

SEQ ID NO: 51 - DNA, 1469 bp, Artificial Sequence
  Synthetic polymer
agagtttgatcctggctcaggatgaacgctggcggcgcgcctaacacatgcaagtcgaacggcacccctcttcggagggaagcgagtggcgaacggctgagtaacacgtggagaacctgccccctcctcggggatagccgcgggaaaccgcgggtaatacccgatgacccggtaccctcgcatgggggttccggcaaagctttcgcgggaggggatggctccgcggcccatcaggtagacggcggggtgacggcccaccgtgccgacaacgggtagccgggttgagagaccgaccggccagattgggactgagacacggcccagactcctacgggaggcagcagtggggaatcttgcgcaatgggggcaaccctgacgcagcgacgccgcgtgcgggatgaaggctctagggtcgtaaaccgctttcagcagggaagagacaagacggtacctgcagaagaagccccggctaactacgtgccagcagccgcggtaatacgtagggggcgagcgttatccggattcattgggcgtaaagcgcgcgtaggcggcccggtaggccggtgggtcgaagcggggggctcaaccccccgaagcccccggaacccccgtggcttgggtccggtaggggagggtggaacacccggtgtagcggtggaatgcgcagatatcgggtggaacaccggtggcgaaggcggccctctgggccgtgaccgacgctgaggcgcgaaagccgggggagcgaacaggattagataccctggtagtcccggccgtaaacgatggacgctaggtgtggggggacgatccctccgtgccgaagccaacgcattaagcgtcccgcctggggagtacggccgcagggctaaaactcaaaggaattgacgggggcccgcacaagcagcggagcatgtggcttaattcgaagcaacgcgaagaaccttaccagggcttgacatgagggtgaagcggcggagacgccgtggccgagaggagcccccacaggtggtgcatggctgtcgtcagctcgtgtcgtgagatgttgggttaagtcccgcaacgagcgcaacccccgccgcgtgttgccagcaggtcaagctgggcacccacgcgggaccgccggcgtcaagccggaggagggcggggacgacgtcaagtcatcatgccccttatgccctgggctgcacacgtgctacaatggccggtacagagggatgccaccccgcgagggggagcggatcccgtaaagccggccccagttcggattgggggctgcaacccgcccccatgaagtcggagttgctagtaatcgcggatcagcatgccgcggtgaatgcgttcccgggccttgtacacaccgcccgtcacaccacccgagtcgtctgcacccgaagccgccggcccaaccgtttggggggaggcgtcgaaggtgtggagggtgaggggggtgaagtcgtaacaaggtaacc

SEQ ID NO: 52 - DNA, 1354 bp, Artificial Sequence
  Synthetic polymer
gatgaacgctggcggcgtgcttaacacatgcaagtcgaacgaagcagctttaaagagaccttcgggtggaattaaaggtgactgagtggcggacgggtgagtaacgcgtgggtaacctgcctcatacagggggataacagttagaaatgactgctaataccgcataagcgcacaggatcgcatggtctggtgtgaaaaactccggtggtatgagatggacccgcgtctgattaggtagttggtgaggtaacggctcaccaagccgacgatcagtagccgacctgagagggtgatcggccacattgggactgagacacggcccaaactcctacgggaggcagcagtggggaatattgcacaatgggggaaaccctgatgcagcgacgccgcgtgaaggaagaagtatttcggtatgtaaacttctatcagcagggaagaaaatgacggtacctgactaagaagccccggctaactacgtgccagcagccgcggtaatacgtagggggcaagcgttatccggatttactgggtgtaaagggagcgtaggcggcagcgcaagtcagaagtgaaagcccggggctcaactccgggactgcttttgaaactgtgtagctagattgcaggagaggtaagtggaattcctagtgtagcggtgaaatgcgtagatattaggaggaacaccagtggcgaaggcggcttactggactgtaaatgacgctgaggctcgaaagcgtggggagcaaacaggattagataccctggtagtccacgccgtaaacgatgaatactaggtgtcgggttccaaaaggaattcggtgccgcagcaaacgcaataagtattccacctggggagtacgttcgcaagaatgaaactcaaaggaattgacggggacccgcacaagcggtggagcatgtggtttaattcgaagcaacgcgaagaaccttaccaagtcttgacatccctctgaccggcgagtaaagtcgcctttctttcgagacagaggagacaggtggtgcatggttgtcgtcagctcgtgtcgtgagatgttgggttaagtcccgcaacgagcgcaacccctatgttcagtagccagcaggtaaggctgggcactctggagagactgccagggataacctggaggaaggtggggatgacgtcaaatcatcatgccccttatgatttgggctacacacgtgctacaatggtgaaaacaaagtgaggcagcgccgtgaggctgagcgaatcacaaaaaattcatctcagttcggattgtagtctgcaactcgactacatgaagctggaatcgctagtaatcgcgaatcagaatgtcgcggtgaatacgttcccgggtct

SEQ ID NO: 53 - DNA, 1478 bp, Artificial Sequence
  Synthetic polymer
agagtttgatcctggctcaggatgaacgctggcggcgtgcctaacacatgcaagtcgagcgagaagcctatgaaggatccttcgggtgacagattgggtggaaagcggcggacgggtgagtaacgcgtaggtaacctgccccatacagggggatagccactggaaacggtgattaataccccataatactcttcagtcacatgtctgaagggtcaaagatttatcggtatgggatggacctgcgtctgattagctagttggtggggtaaaggcctaccaaggcgacgatcagtagccgacctgagagggtgatcggccacattggaactgagacacggtccaaactcctacgggaggcagcagtggggaatattgcacaatgggcgcaagcctgatgcagcaacgccgcgtgattgatgaaggcctttgggtcgtaaagatctgttctgagggaagaaaaaaatgacggtacctcaggagaaagccccggctaactacgtgccagcagccgcggtaatacgtagggggcaagcgttgtccggaattattgggcgtaaagagtacgtaggcggtttgctaagcgcaaggtgaaaggcagtggcttaaccattgtaagccttgcgaactgacagacttgagtgcaggaggggaaagtggaattcctagtgtagcggtgaaatgcgtagatattaggaggaacaccagtggcgaaggcgactttctggactgtaactgacgctgaggtacgaaagcgtggggagcaaacaggattagataccctggtagtccacgccgtaaacgatgagcactaggtgtcggggccgcagggcttcggtgccgcagttaacgcaataagtgctccgcctggggagtacgcacgcaagtgtgaaactcaaaggaattgacggggacccgcacaagcagcggagcatgtggtttaattcgaagcaacgcgaagaaccttaccaggacttgacatccctctgacatatccttaaccggatactccttcgggcagaggtgacaggtggtgcatggttgtcgtcagctcgtgtcgtgagatgttgggttaagtcccgcaacgagcgcaacccttgttgctagttactaacattaagttgaggactctagcaagactgccggggacaactcggaggaaggtggggatgacgtcaaatcatcatgccccttatgttctgggctacacacgtgctacaatggccggtacagagagatgcgataccgtgaggtggagccaaacttcaaaaccggtctcagttcggactgtaggctgcaactcgcctacacgaagtcggagttgctagtaatcgcggatcagaatgccgcggtgagtgcgttcccgggtcttgtacacaccgcccgtcacaccatggaagttgggggcgcccaaagttggtcagaaaatagattacctaaggcgaaaccaatgactggggtgaagtcgtaacaaggtaacc

SEQ ID NO: 54 - DNA, 1436 bp, Artificial Sequence
  Synthetic polymer
  misc_feature (193)..(193): n is a, c, g, or t
  misc_feature (443)..(443): n is a, c, g, or t
  misc_feature (1337)..(1337): n is a, c, g, or t
aacgctgggggcaggcctaacacatgcaagtcgaacggtagcacagagagcttgctctcgggtgacgagtggcggacgggtgagtaatgtctgggaaactgcctgatggagggggataactactggaaacggtagctaataccgcataacgtctttcggaccaaagtgggggaccttcgggcctcacaccatnggatgtgcccagatgggattagctagtaggtggggtaatggctcacctaggcgacgatccctagctggtctgagaggatgaccagccaactggaactgagacacggtccagactcctacgggaggcagcagtggggaatattgcacaatgggcgcaagcctgatgcagccatgccgcgtgtatgaagaaggccttcgggttgtaaagtactttcagcggggaggaaggcgawaaggttaataaccttgtngattgacgttacccgcagaagaagcaccggctaactccgtgccagcagccgcggtaatacggagggtgcaagcgttaatcggaattactgggcgtaaagcgcacgcaggcggtctgtcaagtcagatgtgaaatccccgggcttaacctgggaactgcatttgaaactggcaggctagagtcttgtagaggggggtagaattccaggtgtagcggtgaaatgcgtagagatctggaggaataccggtggcgaaggcggccccctggacaaagactgacgctcaggtgcgaaagcgtggggagcaaacaggattagataccctsgkagtccacgccgtaaacgatgttgacttggaggttgtgcccytgaggcgtggcttccggagctaacgcgttaagtcgaccgcctggggagtacggccgcaaggcttaaaactcaaatgaattgacgggggcccgcacaagcggtggagcatgtggtttaattcgatgcaacgcgaagaaccttacctggccttgacatccacggaattcggcagagatgccttagtgccttcgggaaccgtgagacaggtgctgcaatggctgtcgtcagctcgtgttgtgaaatgttgggttaagtcccgcaacgagcgcaacccttatcctttgttgccagcgagtaatgtcgggaactcaaaggaractgccggtgacaaaccggaggaaggtggggatgacgtcaagtcatcatggcccttacggccagggctacacacgtgctamaatggcscatacaaagagaagcgaattcgcgagagcaagcggacctcacaaagtgcgtcgtagtccggatcggagtctgcaactcgactccgtgaagtcggaatcgctagtaatcgtagatcagaatgcnacggtgaatacgttcccgggccttgtacacaccgcccgtcacaccatgggagtgggttgcaaaagaagtaggtagcttaaccttcggagggcgcttacc

SEQ ID NO: 55 - DNA, 1331 bp, Artificial Sequence
  Synthetic polymer
gacgaacgctggcggcacgcctaacacatgcaagtcgagcggagattgagagcttgctctcatgatcagcggcggacgggtgagtaacacgtgagcaacctgcctttcagagggggacaacagttggaaacgactgctaataccgcataacatattcgaacggcatcgtttgaatatcaaaggagcaatccgctgaaagatgggctcgcgtctgattagatagttggtgaggtaacggcccaccaagtcgacgatcagtagccggactgagaggttgatcggccacattgggactgagacacggcccagactcctacgggaggcagcggtgggggatattggacaatgggggaaaccctgatccagcgatgccgcgtgagggaagaaggttttcggattgtaaacctctgtggacagtgacgataatgacggtagctgtttagaaagccacggctaactacgtgccagcagccgcggtaatacgtaggtggcgagcgttgtccggaattactgggtgtaaagggagtgcaggcgggactgcaagtcagaagtgaaaattatgggcttaacccataacctgcttttgaaactgtagttcttgagtgaggcagaggcaagcggaattcctagtgtagcggtgaaatgcgtagatattaggaggaacaccagtggcgaaggcggcttgctgggcctttactgacgctgaggctcgaaagcgtggggagcaaacaggattagataccctggtagtccacgccgtaaacgatgattactaggtgtggggagttgaacctttccgtgccggagttaacacaataagtaatccacctggggagtacgaccgcaaggttgaaactcaaaggaattgacgggggcccgcacaagcagtggagtatgtggtttaattcgaagcaacgcgaagaaccttaccaggtcttgacatcgagtgacgttcctagagataggaattcccttcggggcacaaagacaggtggtgcatggttgtcgtcagctcgtgtcgtgagatgttgggttaagtcccgcaacgagcgcaacccttactattagttgctacgcaagagcactctaataggactgccgttgataaaacggaggaaggtggggatgacgtcaaatcatcatgccctttatgacctgggctacacacgtactacaatggcgtttaacaaagagaagcaaagccgcgaggtagagcaaatccccaaaaaacgtctcagttcagattgcaggctgcaactcgcctgcatgaagtcggaattgctagtaatcgtaggtcagcatactacggtgaatacgttcccgggccttgt

SEQ ID NO: 56 - DNA, 1408 bp, Artificial Sequence
  Synthetic polymer
tagagtttgatcatggctcagattgaacgctggcggcaggcctaacacatgcaagtcgagcggcagcgggaagtagcttgctactttgccggcgagcggcggacgggtgagtaatgtctgggaaactgcctgatggagggggataaccactggaaacggtggctaataccgcataatctcgcgagagcaaagtgggggaccttaatggcctcacgccatcggatgtgcccagatgggattagcttgttggtggggtaaaggctcaccaaggcgacgatccctagctggtctgagaggatgaccagccacactggaactgagacacggtccagactcctacgggaggcagcagtggggaatattgcacaatgggcgcaagcctgatgcagccatgccgcgtgtgtgaagaaggccttcgggttgtaaagcactttcagcggggaggaaggtggtgtggttaacagccacatcaattgacgttacccgcagaagaagcaccggctaactccgtgccagcagccgcggtaatacggagggtgcaagcgtcaatcggaattactgggcgtaaagcgcacgcaggcggtctgacaagtcagatgtgaaatccccgggcttaacctgggaactgcatttgaaactgtcaggctggagtcttgtagaggggggtagaattccaggtgtagcggtgaaatgcgtagagatctggaggaataccggtggcgaaggcggccccctggacaaagactgacgctcaggtgcgaaagcgtggggagcaaacaggattagataccctggtagtccacgctgtaaacgatgtcgacttggaggttgttcccttgaggagtggcttccggagctaacgcgttaagtcgaccgcctggggagtacggccgcaaggttaaaactcaaatgaattgacgggggcccgcacaagcggtggagcatgtggtttaattcgatgcaacgcgaagaaccttacctggccttgacatccacagaagaatccggagatggatttgtgccttcgggagctgtgagacaggtgctgcatggctgtcgtcagctcgtgttgtgaaatgttgggttaagtcccgcaacgagcgcaacccttatcctttgttgccatcgattaggtcgggaactcaaaggagactgccggtgataaaccggaggaaggtggggatgacgtcaagtcatcatggcccttacggccagggctacacacgtgctacaatggcgcatacaaagagaagcgagcctgcgaggggaagcggacctcataaagtgcgtcgtagtccggatcggagtctgcaactcgactccgtgaagtcggaatcgctagtaatcgtggatcagaatgccacggtgaatacgttcccgggccttgtacacaccgcccgtcacacca

SEQ ID NO: 57 - DNA, 1442 bp, Artificial Sequence
  Synthetic polymer
gacgaacgctggcggcgcgcctaacacatgcaagtcgaacggagttgagaggagcttgcttttcttgacttagtggcgaacgggtgagtaacgcgtgaggaacctgcctcaaagagggggacaacagttggaaacgactgctaataccgcataagcccacggttctgcatggaactgagggaaaaggagcaatccgctttgagatggcctcgcgtccgattagctggttggtgaggtaacggcccaccaaggcgacgatcggtagccggactgagaggttgaccggccacattgggactgagatacggcccagactcctacgggaggcagcagtggggaatattgggcaatgggcgcaagcctgacccagcaacgccgcgtgaaggaagaaggctttcgggttgtaaacttcttttgtcagggaacagtagaagagggtacctgacgaataagctccggctaactacgtgccagcagccgcggtaatacgtagggagcgagcgttgtccggatttactgggtgtaaagggcgtgcagccgggctggtaagtcagatgtgaaatccgtgggcttaacccacgaactgcatttgaaactgctggtcttgagtaccggagaggttatcggaattccttgtgtagcggtgaaatgcgtagatataaggaagaacaccagtggcgaaggcggataactggacggcaactgacggtgaggcgcgaaagcgtggggagcaaacaggattagataccctggtagtccacgctgtaaacgatggatactaggtgggcggggactgaccccctgcgtgccgcagttaacacaataagtatcccacctggggagtacgatcgcaaggttgaaactcaaaggaattgacgggggcccgcacaagcggtggattatgtggtttaattcgaagcaacgcgaagaaccttaccagggcttgacatcctactaacgaagtagagatacattaggtgcccttcggggaaagtagagacaggtggtgcatggttgtcgtcagctcgtgtcgtgagatgttgggttaagtcccgcaacgagcgcaacccctattgttagttgctacgcaagagcactctagcgagactgccgttgacaaaacggaggaaggtggggacgacgtcaaatcatcatgccccttatgtcctgggctacacacgtaatacaatggcggtcaacagagggaggcaaagccgcgaggcagagcaaaccccaaaaagccgtcccagttcggatcgcaggctgcaacccgcctgcgtgaagtcggaatcgctagtaatcgcggatcagcatgccgcggtgaatacgttcccgggccttgtacacaccgcccgtcacaccatgagagtcgggaacacccgaagtccgtagcctaaccgcaaggagggcgcggccgaaggtgggttcgataattggggtga

SEQ ID NO: 58 - DNA, 1449 bp, Artificial Sequence
  Synthetic polymer
gatgaacgctggcggcgtgcctaatacatgcaagtcgagcgaagcgcttgcctttgatccttcgggtgaagaggcttgtgactgagcggcggacgggtgagtaacacgtagggaacctgcctcacacagggggataacagttggaaacgactgctaataccgcataagcccacggtctcgcatgagacagagggaaaaggagcaatccgctttgagatggcctcgcgtccgattagctagttggtgaggtaacggcccaccaaggcgacgatcggtagccggactgagaggttgaacggccacattgggactgagacacggcccagactcctacgggaggcagcagtggggaatattgcacaatgggggaaaccctgatgcagcgacgccgcgtggaggaagaaggtcttcggattgtaaactcctgttgttggggaaaaagaggatggtacccaacaaggaagtgacggctaactacgtgccagcagccgcggtaaaacgtaggtcacaagcgttgtccggaattactgggtgtaaagggagcgcaggcgggtatgcaagttgggagtgaaatacatgggctcaacccatgaactgctctcaaaactgtgtatcttgagtagtgcagaggtaggcggaattcccggtgtagcggtggaatgcgtagatatcgggaggaacaccagtggcgaaggcggcctactgggcaccaactgacgctgaggctcgaaagtgtgggtagcaaacaggattagataccctggtagtccacaccgtaaacgatgatcactaggtgttggaggatagaccccttcagtgccgcagttaacacaataagtgatccacctggggagtacgaccgcaaggttgaaactcaaaggaattgacgggggcccgcacaagcagtggagtatgtggtttaattcgacgcaacgcgaagaaccttaccaagtcttgacatcctctgacgatgctggaaacagtattttccttcgggacagagagacaggtggtgcatggttgtcgtcagctcgtgtcgtgagatgttgggttaagtcccgcaacgagcgcaacccttatggatagttactacgcaagaggactctattcagactgccgttgacaaaacggaggaaggtggggatgacgtcaaatcatcatgccctttatgacttgggctacacacgtactacaatggcgttcaacaaagagaagcgaaatcgcgagatggagcaaaactcaaaaacaacgtcccagttcagattgcaggctgcaactcgcctgcatgaagtcggaattgctagtaatcgcagatcagcatgctgcggtgaatacgttcccgggccttgtacacaccgcccgtcacaccatgagagccggggggacccgaagtcggcagtctaaccgcaaggaggacgccgccgaaggtaaaactggtgattggggtga

SEQ ID NO: 59 - DNA, 1449 bp, Artificial Sequence
  Synthetic polymer
gatgaacgctagcggcaggcttaacacatgcaagtcgaggggcatcattggagtagcaatacttcagatggcgaccggcgcacgggtgcgtaacgcgtatgcaacctacctttaacagggggataacactgagaaatcggtactaataccccataacatcgcagacggcatcgtttgcggttgaaaactccggtggttagagatgggcatgcgttgtattagctggttggtggggtaacggctcaccaaggcaacgatacatagggggactgagaggttaaccccccacattggtactgagacacggaccaaactcctacgggaggcagcagtgaggaatattggtcaatggacgcaagtctgaaccagccatgccgcgtgcaggatgacggctctatgagttgtaaactgcttttgtacgagggtaaacgcagatacgtgtatctgtctgaaagtatcgtacgaataaggatcggctaaccccgtgccagcagccgcggtaatacggaggatccaagcgttatccggatttattgggtttaaagggtgcgtaggcggttcgataagttggaggtgaaatgttagggcttaaccctgaaactgcctccaatactgttgggctagagagtagttgcggtaggcggaatgtatggtgtagcggtgaaatgcttagagatcatacagaacaccgattgcgaaggcagcttaccaaactatatctgacgttgaggcacgaaagcgtggggagcaaacaggattagataccctggtagtccacgcagtaaacgatgataactcgttgtcggcgatacacagtcggtgactaagcgaaagcgataagttatccacctggggagtacgttcgcaagaatgaaactcaaaggaattgacgggggcctgcacaagcggaggaacatgtggtttaattcgatgatacgcgaggaaccttacccgggcttgaaagttagcgacagacattgaaagatgttttccctacggggcgcgaaactaggtgctgcatggttgtcgtcagctcgtgccgtgaggtgtcgggttaagtcccataacgagcgcaacccctaccgttagttgccatcaggtcgagctgggcactctggcgggactgccggtgtgagccgagaggaaggtggggatgacgtcaaatcagcacggcccttacgtccggggctacacacgtgttacaatggtaggtacagagggcagctaccctgcgaagggatgcgaatcccgaaagcctatctcagttcggattggaggctgaaacccgcctccatgaagttggattcgctagtaatcgcgcatcagccatggcgcggtgaatacgttcccgggccttgtacacaccgcccgtcaagccatgggagctgggggtgcctgaagttcgtgaccgcgaggagcgacctagggcaaaaccggtgactggggcta

SEQ ID NO: 60 - DNA, 1450 bp, Artificial Sequence
  Synthetic polymer
gatgaacgctggcggcgtgcttaacacatgcaagtcgaacggagagctcatgacggagttttcggacaacggattgagtttcttagtggcggacgggtgagtaacgcgtgaggaacctgccttggagtggggaataacagtccgaaaggactgctaataccgcataaagcagctgagtcgcatgactctggctgccaaagatttatcgctctgagatggcctcgcgtctgattagctggttggcggggtaacggcccaccaaggcgacgatcagtagccggactgagaggttggccggccacattgggactgagacacggcccagactcctacgggaggcagcagtggggaatattgggcaatgggcgcaagcctgacccagcaacgccgcgtgaaggaagaaggctttcgggttgtaaacttcttttatcagggacgaacaaatgacggtacctgatgaataagccacggctaactacgtgccagcagccgcggtaatacgtaggtggcaagcgttatccggatttactgggtgtaaagggcgtgtaggcgggactgcaagtcaggtgtgaaaaccacgggctcaacctgtggcctgcatttgaaactgtagttcttgagtgctggagaggcaatcggaattccgtgtgtagcggtgaaatgcgtagatatacggaggaacaccagtggcgaaggcggattgctggacagtaactgacgctgaggcgcgaaagcgtggggagcaaacaggattagataccctggtagtccacgccgtaaacgatggatactaggtgtggggggactgaccccctccgtgccgcagttaacacaataagtatcccacctggggagtacgatcgcaaggttgaaactcaaaggaattgacgggggcccgcacaagcagtggagtatgtggtttaattcgacgcaacgcgaagaaccttaccaagtcttgacatcctctgacgatgctggaaacagtattttccttcgggacagagagacaggtggtgcatggttgtcgtcagctcgtgtcgtgagatgttgggttaagtcccgcaacgaacgcaacccttatggatagttactacgcaagaggactctattcagactgccgttgacaaaacggaggaaggtggggatgacgtcaaatcatcatgccctttatgacttgggctacacacgtactacaatggcgttcaacaaagagaagcgaaaccgcgaggtggagcaaaactcaaaaacaacgtcccagttcagattgcaggctgcaactcgcctgcatgaagtcggaattgctagtaatcgcagatcagcatgctgcggtgagtacgttcccgggccttgtacacaccgcccgtcacaccatgagagccggggggacccgaagtcggcagtctaaccgcaaggaggacgccgccgaaggtaaaactggtgattggggtga

SEQ ID NO: 61 - DNA, 1452 bp, Artificial Sequence
  Synthetic polymer
tttgattctggctcaggacgaacgctggcggcgcgcctgacacatgcaagtcgaacggagcttgagagagcttgctttcttaagcttagtggcgaacgggtgagtaacgcgtgaggaacctgcctcagagtgggggacaacagttggaaacgactgctaataccgcataagcccacgggtctgcatggatctgagggaaaaggagcaatccgctttgagatggcctcgcgtccgattagctggttggtgaggtaacggcccaccaaggcgacgatcggtagccggactgagaggttgaacggccacattgggactgagacacggcccagactcctacgggaggcagcagtggggaatattgcacaatgggggaaaccctgatgcagcgacgccgcgtggaggaagaaggtcttcggattgtaaactcctgttgttgaggaaaaaacggatggtactcaacaaggaagtgacggctaactacgtgccagcagccgcggtaaaacgtaggtcacaagcgttgtccggaattactgggtgtaaagggagcgcaggcgggtatgcaagttggaagtgaaatacatgggctcaacccatgaactgctttcaaaactgtgtatcttgagtagtgcagaggtaggcggaattcccggtgtagcggtggaatgcgtagatatcgggaggaacaccagtggcgaaggcggcctactgggcaccaactgacgctgaggctcgaaagtgtgggtagcaaacaggattagataccctggtagtccacaccgtaaacgatgattactaggtgttggaggatagaccccttcagtgccgcagttaacacaataagtaatccacctggggagtacgaccgcaaggttgaaactcaaaggaattgacgggggcccgcacaagcagtggagtatgtggtttaattcgacgcaacgcgaagaaccttaccaagtcttgacatcctgcgacgagtacagaaatgtgcttttccttcgggacgcagagacaggtggtgcatggttgtcgtcagctcgtgtcgtgagatgttgggttaagtcccgcaacgagcgcaacccttatggatagttactacgcaagaggactctattcagactgccgttgacaaaacggaggaaggtggggacgacgtcaaatcatcatgccctttatgacttgggctacacacgtactacaatggcgttcaacaaagagaagcgaaatcgcgagatggagcaaaactcaaaaacaacgtcccagttcagattgcaggctgcaactcgcctgcatgaagtcggaattgctagtaatcgcagatcagcatgctgcggtgaatacgttcccgggccttgtacacaccgcccgtcacaccatgagagccggggggacccgaagtcggcagtctaaccgcaaggaggacgccgccgaaggtaaaactggtgattggggtga

SEQ ID NO: 62 - DNA, 1458 bp, Artificial Sequence
  Synthetic polymer
attgaacgctggcggcatgctttacacatgcaagtcgaacggcagcatggagagcttgctctctgatggcgagtggcgaacgggtgagtaatacatcggaacgtgtccgtttgtgggggacaaccatccgaaaggatggctaataccgcataagacctgagggtgaaagccggggaccgcaaggcctggcgcgaacggagcggccgatgactgattagctggttggcggggtaaaggcccaccaaggcgacgatcagtagctggtctgagaggacgaccagccacactggaactgagacacggtccagactcctacgggaggcagcagtggggaattttggacaatgggggcaaccctgatccagccatgccgcgtgcgggaagaaggccttcgggttgtaaaccgcttttgtcagggacgaaaagcaagatgtgaacagcatcttgtgctgacggtacctgaagaataagcaccggctaactacgtgccagcagccgcggtaatacgtagggtgcaagcgttaatcggaattactgggcgtaaagcgtgcgcaggcggttgggtaagacagatgtgaaatccccgggcttaacctgggaactgcatttgtgactgtccgactagagtatgtcagaggggggtggaattccaagtgtagcagtgaaatgcgtagatatttggaagaacaccgatggcgaaggcagccccctggggcaaaactgacgctcatgcacgaaagcgtggggagcaaacaggattagataccctggtagtccacgccctaaacgatgtctactggttgttggagggtaaaaccttcagtaacgaagccaacgcgtgaagtagaccgcctggggagtacggtcgcaagattaaaactcaaaggaattgacggggacccgcacaagcggtggatgatgtggattaattcgatgcaacgcgaaaaaccttacctagccttgacatgtcaggaacgcttcagagatgaggcggtgcccgcaagggaacctgagcacaggtgctgcatggctgtcgtcagctcgtgtcgtgagatgttgggttaagtcccgcaacgagcgcaacccttgtcactagttgctacgcaagagcactctagtgagactgccggtgacaaaccggaggaaggtggggatgacgtcaagtcctcatggcccttatggctagggcctcacacgtcatacaatggtcggaacagagggcagcgaagccgtgaggcggagcaaatcccagaaaaccgatcgtagtccggattgcagtctgcaactcgactgcatgaagtcggaatcgctagtaatcgcggatcagcatgccgcggtgaatacgttcccgggtcttgtacacaccgcccgtcacaccatgggagtggggttcaccagaaggcgtttgcctaaccttcgggagggcggcgaccacggtgggtttcatgactggggtga

SEQ ID NO: 63 - DNA, 1458 bp, Artificial Sequence
  Synthetic polymer
gatgaacgctggcggcgtgcttaacacatgcaagtcgaacggggaacccttgaaggagttttcggacaactgataggaattcctagtggcggacgggtgagtaacgcgtgaggaacctgccttggagtggggaataacagcccgaaagggttgcgaataccgcatgaagcagctgggtcgcatgactctggctgccaaagatttatcgctctgagatggcctcgcgtctgattagctagttggtgaggtaacggcccaccaaggcgacgatcagtagccggactgagaggttggccggccacattgggactgagacacggcccagactcctacgggaggcagcagtggggaatattgggcaatgggcgcaagcctgacccagcaacgccgcgtgaaggaagaaggctttcgggttgtaaacttcttttctcagggacgaaggacgtgacggtacctgaggaataagctccggctaactacgtgccagcagccgcggtaatacgtagggagcgagcgttatccggatttactgggtgtaaagggcgtgtaggcgggactgcaagtcagatgtgaaaactatgggctcaacccatagcctgcatttgaaactgtagttcttgagtgctggagaggcaatcggaattccgtgtgtagcggtgaaatgcgtagatatacggaggaacaccagtggcgaaggcggattgctggacagtaactgacgctgaggcgcgaaagcgtggggagcaaacaggattagataccctggtagtccacgccgtaaacgatggatactaggtgtggggggactgaccccctccgtgccgcagttaacacaataagtatcccacctggggagtacgatcgcaaggttgaaactcaaaggaattgacgggggcccgcacaagcggtggagtatgtggtttaattcgacgcaacgcgaagaaccttaccagggcttgacatatagaggaatacttaagagattaagtagctcttcggagtctctatacaggtggtgcatggttgtcgtcagctcgtgtcgtgagatgttgggttaagtcccgcaacgagcgcaacccctgttcttagttgccagcacgtaaaggtgggaactctaagaagactgccggtgataaatcggaggagggtggggacgacgtcaaatcatcatgccctatatgtcctgggctacacacgtactacaatggctataacaaagggaagcgaaaccgcgaggtggagcaaaacccaaaaaagtagtctcagttcggattgaaggctgaaattcgccttcatgaagccggaattgctagtaatggcaggtcagcatactgccgtgaatacgttcccgggccttgtacacaccgcccgtcacaccatgagagttgggaatacccgaagcctgtgagctaacttttaagaggcagcagtcgaaggtagaatcaatgattggggtga

SEQ ID NO: 64 - DNA, 1368 bp, Artificial Sequence
  Synthetic polymer
tagtggcggacgggtgagtaacgcgtgagcaacctgcctttcagagggggataacgtcttgaaaaggacgctaataccgcatgagactacgtgaccgcatggtcgagtggtcaaaggagcaatccgctgaaagatgggctcgcgtccgattaggtagttggtgaggtagcggcccaccaagccgacgatcggtagccggactgagaggttgaacggccacattgggactgagacacggcccagactcctacgggaggcagcagtgagggatattggtcaatgggggaaaccctgaaccagcaacgccgcgtgagggaagacggttttcggattgtaaacctctgtcctctgtgaaaatagtgatggtagcagaggaggaagctccggctaactacgtgccagcagccgcggtaatacgtagggagcgagcgttgtccggaattactgggtgtaaagggtgcgtaggcggctctgcaagtcagaagtgaaatccatgggcttaacccatgaactgcttttgaaactgtagagcttgagtgaagtagaggtaggcggaattcccggtgtagcggtgaaatgcgtagagatcgggaggaacaccagtggcgaaggcggcctactgggctttaactgacgctgaggcacgaaagcatgggtagcaaacaggattagataccctggtagtccatgccgtaaacgatgattactaggtgtggggggactgaccccctccgtgccggagtaacacaataagtaatccacctggggagtacggccgcaaggctgaaactcaaaggaattgacgggggcccgcacaagcagtggagtatgtggattaattcgatgcaacgcgaagaaccttaccaggtcttgacatccagctaacgaagtagagatacattaggtgcccttcggggaaagctgagacaggtggtgcatggttgtcgtcagctcgtgtcgtgagatgttgggttaagtcccgcaacgagcgcaacccttactgttagttgctacgcaagagcactctagcaggaccgccgttgacaaaacggaggaaggtggggatgatgtcaaatcatcatgccccttatgacctgggcctcacacgtactacaacggccatcaacagagggaagcaaaaccgcggggtggagcaaaaccctaaaaatggtcccagttcggattgtaggctgcaacccgcctgcatgaagttggaattgctagtaatcgcggatcagcatgccgcggtgaatacgttcccgggccttgtacacaccgcccgtcacaccatgggagccggtaatacccgaagttcagtagtctaaccgcaaggaggcgctgccgaaggtaggattggcgactggggtg

SEQ ID NO: 65 - DNA, 1454 bp, Artificial Sequence
  Synthetic polymer
gacgaacgctggcggcgtgcttaacacatgcaagtcgaacggagcacccttgactgaggtttcggccaaatgataggaatgcttagtggcggactggtgagtaacgcgtgaggaacctgccttccagagggggacaacagttggaaacgactgctaataccgcatgacacattcgggcggcatcgcctggatgtcaaagattttatcgctggaagatggcctcgcgtctgattagatagtaggcggggtaacggcccacctagtcgacgatcagtagccggactgagaggttgaccggccacattgggactgagatacggcccagactcctacgggaggcagcagtggggaatattgggcaatgggcgcaagcctgacccagcaacgccgcgtgaaggaagaaggctttcgggttgtaaacttcttttgtcagggaacagtagaagagggtacctgacgaataagccacggctaactacgtgccagcagccgcggtaatacgtaggtggcaagcgttgtccggatttactgggtgtaaagggcgtgcagccgggctggtaagtcagatgtgaaatccgtgggcttaacccacgaactgcatttgaaactgctggtcttgagtaccggagaggttatcggaattccttgtgtagcggtgaaatgcgtagatataaggaagaacaccagtggcgaaggcggataactggacggcaactgacggtgaggcgcgaaagcgtggggagcaaacaggattagataccctggtagtccacgctgtaaacgatggatactaggtgtgcggggactgaccccctgcgtgccgcagttaacacaataagtatcccacctggggagtacgatcgcaaggttgaaactcaaaggaattgacgggggcccgcacaagcggtggattatgtggtttaattcgaagcaacgcgaagaaccttaccagggcttgacatcctactaacgaagtagagatacattaggtgcccttcggggaaagtagagacaggtggtgcatggttgtcgtcagctcgtgtcgtgagatgttgggttaagtcccgcaacgagcgcaacccctattgttagttgctacgcaggagcactctagcgagactgccgttgacaaaacggaggaaggtggggacgacgtcaaatcatcatgccccttatgtcctgggctacacacgtaatacaatggcggtcaacaaagggaggcaaagccgcgaggcagagcgaaccccaaaaagccgtcccagttcggatcgcaggctgcaacccgcctgcgtgaagtcggaatcgctagtaatcgcggatcagaatgccgcggtgaatacgttcccgggccttgtacacaccgcccgtcacaccatgagagtcgggaacacccgaagcccatagcctaaccgcaaggaggacgccgccgaaggtaaaactggtgattggggtga

SEQ ID NO: 66 - DNA, 1445 bp, Artificial Sequence
  Synthetic polymer
gatgaacgctggcggcgtgcttaacacatgcaagtcgaacgatcttcggaaagatttctttggcgactgagtggcggacgggtgagtaacgcgtgggtaacctgccatacagggggataacagttagaaatgactgctaataccgcataagcgcacagtgccgcatggtacggtgtgaaaaactccggtggtatgagatggacccgcgtctgattagctcgttggcggggtaacggcccaccaaggcgacgatcagtagccgacctgagagggtgatcggccacattgggactgagacacggcccaaactcctacgggaggcagcagtggggaatattgcacaatgggggaaaccctgatgcagcgacgccgcgtgaaggaagacgtatttcggtatgtaaacttctatcagcaaggaagatgatgacggtacttgactaagaagccccggctaactacgtgccagcagccgcggtaatacgtagggggcaagcgttatccggatttactgggtgtaaagggagcgtaggcggccatgcaagtcagaagtgaaagcccggggctcaaccccgggactgcttttgaaactgtagggctagattgccggagaggtgagcagaattcctagtgtagcggtgaaatgcgtagatattaggaggaacaccggtggcgaaggcggctcactggacggtaaatgacgctgaggctcgaaagcgtggggagcaaacaggattagataccctggtagtccacgccgtaaacgatgaatactaggtgtcggggcccagaagggcttcggatgccgcagcaaacgcaataacgtattccacctggggagtacgttcgcaatgaatgaaactcaaaggaattcgacggggacccgcacaagcggtggagcatgtggtttaatatcgaagcaacgcgaagaaccttaccaggtcttgacatctgggtgaccggagagtaatgtctcctttcctacgggacgcccaaagacaggtcggtgcatggttgtcagtcagctcgtgtcgtcgagatgttgggttcaagtcccgcaacgagcgcaacccctatttttagtagccagcggtccggccgggcactctagagagactgccagggataacctggaggaaggtggggatgacgtcaaatcatcatgccccttatgatctgggctacacacgtgctacaatggtggcaacaaagtgaggcgaacctgtgagggggagcgaatcacataaaagccatctcagttcggattgtagtctgcaactcgactacatgaagctggaatcgctagtaatcgcgaatcagcatgtcgcggtgaatacgttcccgggtcttgtacacaccgcccgtcacaccatgggagttggatatgcccgaagtcagtgacccaaccgagaggagggagctgccgaaggtggagccgatgactgggg

SEQ ID NO: 67 - DNA, 1503 bp, Artificial Sequence
  Synthetic polymer
ttcgcccttagagtttgatcatgtctcaggacgaacgctggcggcgtgcctaacacatgcaagtcgaacggagttatgcgctgaacggaaagtgcttgcacaggaagttcttgtataacttagtggcggacgggtgagtaacgcgtgagcaacctgcctttcagagggggataacgtttggaaacgaacgctaataccgcatgagactacgtggccgcatggccgagtggtcaaaggagcaatccgctgaaagatgggctcgcgtccgattagatagttggcggggtagaggcccaccaagtcgacgatcggtagccggactgagaggttgaacggccacattgggactgagacacggcccagactcctacgggaggcagcagtgagggatattggtcaatgggggaaaccctgaaccagcaacgccgcgtgagggaagacggtcttcggattgtaaacctttgtcctctgtgaagataatgacggtagcagaggaggaagctccggctaactacgtgccagcagccgcggtaatacgtagggagcaagcgttgtccggatttactgggtgtaaagggtgcgtaggcggtttttcaagtcagaagtgaaatccatgggcttaacccgtgaaactgcttttgaaactggaagacttgagtgaagtagaggtaggcggaattcccggtgtagcggtgaaatgcgtagagatcgggaggaacaccagtggcgaaggcggcctactgggctttaactgacgctgaggcacgaaagcgtgggtaagcaaacaggattagataccctggtagtccatgccgtaaacgatgattactaggtgtggggggactgaccccctccgtgccggagttaacacaataagtaatccacctggggagtacgaccgcaaggttgaaactcaaaggaattgacgggggcccgcacaagcagtggagtatgttgaataattcgacgcaacgcgaagaaccttaccagttcttgacatccagctaacgaagcagagatgcattaggtgcccttcggggaaagctgagacaggtgctgcatggttgtcgtcagctcgtgtcgtgagatgttgggttaagtcccgcaacgagcgcaacccttactgttagttgctacgcaagagcactctagcaggactgccgttgacaaaacggaggaaggtggggatgatgtcaaatcatcatgccccttatgacctgggcttcaaacgtactacaatggccgtaaacagagggaagcaagggagcgatccggagcaaaaccctaaaagcggtctcagttcggattgtaggctgcaacccgcctgcatgaagttggaattgctagtaatcgcggatcagcatgccgcggtgaatacgttcccgggccttgtacacaccgcccgtcacaccatgggagccggtaacacccgaagtcagtagtctaaccgcaagggggacgctgccgaaggtgggattggcgactggggtgaagtcgtaacaa

SEQ ID NO: 68 - DNA, 1356 bp, Artificial Sequence
  Synthetic polymer
gagggtgccctcgggtgcgaccggcggacggatgagtaatgtctgggaaactgcctgatggagggggataactactggaaacggtagctaataccgcataacgtcccaagaccaaagagggggaccttcgggcctcttgccatcacatgtgcccagatgggattagctagtaggtggggtaatggctcacctaggcgacgatccctagctggtctgagaggatgaccagccacactggaactgagacacggtccagactcctacgggaggcagcagtggggaatattgcacaatgggcgcaagcctgatgcagccatgccgcgtgtatgaagaaggccttcgggttgtaaagtactttcagcgaggaggaaggcattgtggttaataaccacagtgattgacgttactcgcagaagaagcaccggctaactccgtgccagcagccgcggtaatacggagggtgcaagcgttaatcggaattactgggcgtaaagcgcacgcaggcggtctgtcaagtcggatgtgaaatccccgggctcaacctgggaactgcattcgaaactggcaggctagagtcttgtagaggggggtagaattccaggtgtagcggtgaaatgcgtagagatctggaggaataccggtggcgaaagcagccccctggacaaacactgacgctcaagtgcgaaagcgtggggagcaaacaggaatagataccctggtagtccacgccgtaaaccatgtccacttggaagttgttcccttggagattggcctcccccgctaacgcgttaagtcgaccgcctggggagtacggccgcaaggttaaaactcaaatgaattgacgggggccccacaccacggtggagaatgtggtttaattcgatgcaacgcgaagaaccttacctactcttgacatccagagaacttagcagagatgctttggtgccttcgggaactctgagacaggtgctgcatggctgtcgtcagctcgtgttgtgaaatgttgggttaagtcccgcaacgagcgcaacccttatcctttgttgccagcggttcggccgggaactcaaaggagactgccagtgataaactggaggaaggtggggatgacgtcaagtcatcatggcccttacgagtagggctacacacgtgctacaatggcatatacaaagagaagcgacctcgcgagagcaagcggacctcacaaagtatgtcgtagtccggatcggagtctgcaactcgactccgtgaagtcggaatcgctagtaatcgtagatcagaatgctacggtgaatacgttccctagccttgacacaccgcccgtcacaccatgggagtgggttgcaaaagaagtag

SEQ ID NO: 69 - DNA, 1476 bp, Artificial Sequence
  Synthetic polymer
gacgaacgctggcggcgtgcctaacacatgcaagtcgaacggaactgcttcgaaggatttcttcggaatgacattgattcagtttagtggcggacgggtgagtaacgcgtgagtaacctgccttcaagagggggataacattctgaaaagaatgctaataccgcatgacatatgattgtcgcatggcagacatatcaaagatttatcgcttgaagatggactcgcgtccgattagttagttggtgaggtaacggcccaccaagaccgcgatcggtagccggactgagaggttgaacggccacattgggactgagacacggcccagactcctacgggaggcagcagtgggggatattgcgcaatgggggcaaccctgacgcagcaacgccgcgtgaaggatgaaggttttcggattgtaaacttcttttattaaggacgaataatgacggtacttaatgaataagctccggctaactacgtgccagcagccgcggtaatacgtagggagcaagcgttgtccggatttactgggtgtaaagggtgcgtaggcggctaagcaagtcagatgtgaaatctatgggctcaacccataaactgcatttgaaactgcatagcttgagtgaagtagaggcaggcggaattccccgtgtagcggtgaaatgcgtagagatggggaggaacaccagtggcgaaggcggcctgctgggctttaactgacgctgaggcacgaaagcgtgggtagcaaacaggattagataccctggtagtccacgctgtaaacgatgattactaggtgtggggggtctgaccccttccgtgccggagttaacacaataagtaatccacctggggagtacggccgcaaggttgaaactcaaaggaattgacgggggcccgcacaagcagtggagtatgtggtttaattcgaagcaacgcgaagaaccttaccaggtcttgacatccaactaacgagatagagatatgttaggtgcccttcggggaaagttgagacaggtggtgcatggttgtcgtcagctcgtgtcgtgagatgttgggttaagtcccgcaacgagcgcaacccttgctattagttgctacgcaagagcactctaataggactgccgttgacaaaacggaggaaggtggggacgacgtcaaatcatcatgccccttatgacctgggctacacacgtactacaatgggcgttaacagagggaagcaaaatagcgatatggagcaaacccctaaaaacgttctcagttcagattgcaggctgcaacccgcctgcatgaagtcggaattgctagtaatcgcggatcagcatgccgcggtgaatacgttcccgggccttgtacacaccgcccgtcacaccatgggagccggtaatacccgaagtcagtagttcaaccgcaaggagagcgctgccgaaggtaggattggcgactggggtgaagtcgtaacaagtagccgtatcg

SEQ ID NO: 70 - DNA, 1489 bp, Artificial Sequence
  Synthetic polymer
  misc_feature (1333)..(1333): n is a, c, g, or t
agagtttgcttttggctcaggacgaacgctggcggcgtgcctaacacatgcaagtcgaacggaacttctttaaaggatttcttcggaatgaatttgattaagtttagtggcggacgggtgagtaacgcgtgagtaacctgcctctaagaggggaataacattctgaaaagaatgctaataccgcataatatatatttatcgcatggtagatatatcaaagatttatcgcttagagatggactcgcgtccgattagttagttggtgaggtaacggctcaccaagaccgcgatcggtagccggactgagaggttgaacggccacattgggactgagacacggcccagactcctacgggaggcagcagtgggggatattgcgcaatgggggaaaccctgacgcagcaacgccgcgtgaaggatgaaggtcttcggattgtaaacttcttttattaaggacgaagaaagtgacggtacttaatgaataagctccggctaactacgtgccagcagccgcggtaatacgtagggagcaagcgttgtccggatttactgggtgtaaagggtgcgtaggcggctttgcaagtcagatgtgaaatctatgggctcaacccatagcctgcatttgaaactgcagagcttgagtgaagtagaggcaggcggaattccccgtgtagcggtgaaatgcgtagagatggggaggaacaccagtggcgaaggcggcctgctgggctttaactgacgctgaggcacgaaagcgtgggtagcaaacaggattagataccctggtagtccacgctgtaaacgatgattactaggtgtggggggtctgaccccttccgtgccggagttaacacaataagtaatccacctggggagtacggccgcaagggttgaaactcaaaggaattgacgggggcccgcacaagccggtggagtatgtggtttaattcgaagcaacgcgaagaaccttaccaggtcttgacatcctactaacgagatagagatatgttaggtgcccttcggggaaagtagagacaggtggtgcatggttgtcgtcagctcgtgtcgtgagatgttgggttaagtcccgcaacgagcgcaacccttgctattagttgctacgcaagagcactctaataggactgccgttgacaaaacggaggaaggtggggacgacgtcaaatcatcatgccccttatgacctgggctacacacgtactacaatggacattaacagagggaagcaatacagtgatgtggagcaaacccctaaaaatgttctcagttcacattgcaggctgcaacccgcctgtatgaagatggaattgctagntatcgcagatcagcatgctgcggtgaatacgttccccgggcctgtacacaccgcccgtcacaccatgggagccggtataccccgagtcagtagtctaaccccaaggaggacgctgcccgagggtagaattggcaactggggtgaagtcgtaacaag

SEQ ID NO: 71 - DNA, 1486 bp, Artificial Sequence
  Synthetic polymer
gagtttgatcctgcttcagattgaacgctggcggcaggcctaacacatgcaagtcgaacggtagcacagaggagcttgctccttgggtgacgagtggcggacgggtgagtaatgtctgggaaactgcccgatggagagggataactactggaaacggtagctaataccgcataacgtcgcaagaccaaagagggggaccttcgggcctcttgccatcggatgtgcccagatgggattagctagtaggtggggtaacggctcacctaggcgacgatccctagctggtctgagaggatgaccagccacactggaactgagacacggtccagactcctacgggaggcagcagtggggaatattgcacaatgggcgcaagcctgatgcagccatgccgcgtgtatgaagaaggccttcgggttgtaaagtactttcagcgaggaggaaggcattaaggttaataaccttagtgattgacgttactcgcagaagaagcaccggctaactccgtgccagcagccgcggtaatacggagggtgcaagcgttaatcggaattactgggcgtaaagcgcacgcaggcggtctgtcaagtcggatgtgaaatccccgggctcaacctgggaactgcatccgaaactggcaggctagagtcttgtagaggggggtagaattccaggtgtagcggtgaaatgcgtagagatctggagaaataccggtggcgaaggcggccccctggacaaagactgacgctcaggtgcgaaagcgtggggagcaaacagaagtagataccctggtagtccatgctgtaatgaatgttgacttggaggttgtgccccttgaggcgtggtttcgggagctaacggcttaagtcgacggcgtggggaggtacggccgcaagagttaaaattcaaatgaattgacggggacccgcacaaagcggtggagcatgtggtttaattcgatgcaacgcgaagaaccttacttactcttgacatccagagaacttagcagagatgctttggtgccttcgggaactctgagacaggtgctgcatggctgttgtcagctcgtgttgtgaaatgttgggttaagtcccgcaacgagcgcaacccttatcctttgttgccagcgattcggtcgggaactcaaaggagactgccagtgataaaccggaggaaggtggggatgacgtcaagtcatcatggcccttacgagcagggctacacacgtgctacaatggcatatacaaagagaagcgacctcgcgagagcaagcggacctcataaagtatgtcgtagtccggattggagtctgcaactcgactccatgaagtcggaatcgctagtaatcgtggatcagaatgccacggtgaatacgttcccgggccttgtacacaccgcccgtcacaccatgggagtgggttgcaaaagaagtaggtagcttaaccttagggagggcgcttaccactttgtgattcatgactggggt

SEQ ID NO: 72 - DNA, 1452 bp, Artificial Sequence
  Synthetic polymer
gatgaacgctggcggcgtgcttaacacatgcaagtcgaacggagcacccctgatggagttttcggacaacagatgggaatgcttagtggcggacgggtgagtaacgcgtgaggaacctgccttggagaggggaataacacagtgaaaattgtgctaataccgcatgacgcagttgggccgcatggctctgactgccaaagatttatcgctctgagatggcctcgcgtctgattagctggttggtggggtaacggcccaccaaggcgacgatcagtagccggactgagaggttgaccggccacattgggactgagacacggcccagactcctacggggggcagcagtggggaatattgggcaatgggcgcaagcctgacccagcaacgccgcgtgaaggaagaaggctttcgggttgtaaacttcttttatgagggacgaaagaaatgacggtacctcatgaataagccacggctaactacgtgccagcagccgcggtaatacgtaggtggcaagcgttatccggatttactgggtgtaaagggcgtgtaggcgggactgcaagtcagatgtgaaaattatgggctcaacccataacctgcatttgaaactgtagttcttgagtgatggagaggcaggcggaattccgtgtgtagcggtgaaatgcgtagatatacggaggaacaccagtggcgaaggcggcctgctggacattaactgacgctgaggcgcgaaagcgtggggagcaaacaagattagataccctggtagtccacgctgtaaacgatggatactaggtgtgcggggtctgaccccctgggtgccgcagctaacgcaataagtatcccacctggggagtacgatcgcaaggttgaaactcaaaggaattgacgggggcccgcacaagcggtggagtatgtggtttaattcgaagcaacgcgaaggaccttaccagggcttgacatcccaaggccagatatagagatatatccttctcttcggagaccttggtgacaggtggtgcatggttgtcgtcagctcgtgtcgtgagatgttgggttaagtcccgcaacgagcgcaacccctattgttagttgctacgcgagagcactctagcgagactgccgttgacaaaacggaggaaggtggggacgacgtcaaatcatcatgccccttatgtcctgggctacacacgttctacaatggcggttaacagagggaggcaataccgcgaggtagagcaaacccctaaaagccgtcccagttcggattgcaggctgcaacccgcctgtatgaagttggaatcgctagtaatcgcggatcagcatgccgcggtgaatacgttcccgggccttgtacacaccgcccgtcacaccatgagagtcgggaacacccgaagtccgtagcctaacttttacgagaagaagcggccgaaggtgggttcgataattggg

SEQ ID NO: 73 - DNA, 1428 bp, Artificial Sequence
  Synthetic polymer
aacgctggcggcgcgcctaacacatgcaagtcgaacgagcgagagagagcttgctttctcaagcgagtggcgaacgggtgagtaacgcgtgaggaacctgcctcaaagagggggacaacagttggaaacgactgctaataccgcataagcccacaggtcggcatcgaccagagggaaaaggagcaatccgctttgagatggcctcgcgtccgattagctagttggtgaggtaatggcccaccaaggcgacgatcggtagccggactgagaggttgaacggccacattgggactgagacacggcccagactcctacgggaggcagcagtggggaatattgcacaatgggggaaaccctgatgcagcgacgccgcgtggaggaagaaggtcttcggattgtaaactcctgttgttgaggaagataatgacggtactcaacaaggaagtgacggctaactacgtgccagcagccgcggtaaaacgtaggtcacaagcgttgtccggaattactgggtgtaaagggagcgcaggcgggaagacaagttggaagtgaaatctatgggctcaacccataaactgctttcaaaactgtttttcttgagtagtgcagaggtaggcggaattcccggtgtagcggtggaatgcgtagatatcgggaggaacaccagtggcgaaggcggcctactgggcaccaactgacgctgaggctcgaaagtgtgggtagcaaacagggatagaaaccctgatagtccacaccgtaaacgatgattactaggtggtggaggattgactcgctcagagctgcagctaacacaataagtaccccacctggggagtacgaccgcaaggttgaaactcaaaggaattgacgggggcccgcacaagctttggagtatgtggtttaattcgacgcaacgcgaagaaccttaccaagtcttgacatcctgcgacgatgctggaaacagtattttccttcaagacgcagagacaggtggtgcatggttgtcgtcagctcgtgtcgtgagatgttgggttaagtctcgcaacgagcgcaacccttactgtcagtttctacgcaagaggactcttgcaggactgccgttgacaaaacagtggaaggtggggatgacgtcaaatcatcatgccctttatgtcttgggctacacacgtactacaatggcgttaaacaaagagaagcaagaccgcgatgtggagcaaaactcagaaacaacgttccagttcggattgcaggctgcaactcgcctgcacgaagtcggaattgctagtaatcgtggatcagcatgccacggtgaatacgtttccgggccttgtacacaccgcccgtcacaccatgagagccggggggacccgaagtcggtagtctaaccgcaaggaggacgccaccgaaggtaaaactggtgattggggt

SEQ ID NO: 74 - DNA, 1462 bp, Artificial Sequence
  Synthetic polymer
agagtttgatcctgttctcaggatgaacgctggcggcgtgcttaacacatgcaagtcgaacgaagcacctggaaatgacgttttcggacagaatttccttgtgactgagtggcggacgggtgagtaacgcgtgggcaacctgccttatacagggggataacagttagaaatgactgctaataccgcataagactccagcaccgcatggtggaggggtaaaagcttcggcagtataagatgggcccgcgtctgattagctggttggtgaggtaacggctctaccaaggcaacgatcagtagccggcttgagagagtggacggccacattgggactgagacacggcccaaactcctacgggaggcagcagtggggaatattgcacaatggggggaaccctgatgcagcgacgccgcgtgagtgaagaagtaattcgttatgtaaagctctatcagcagggaagaaaatgacggtacctgactaagaagccccggctaactacgtgccagcagccgcggtaatacgtagggggcaagcgttatccggaattactgggtgtaaagggtgcgtaggtggtctggcaagtcagaagtgaaaacccggggctcaactccgggcctgcttttgaaactgtcggactagagtgcaggagaggtaagcggaattcctagtgtagcggtgaaatgcgtagatattaggaggaacatcagtggcgaaggcggcttactggactgaaactgacactgaggcacgaaagcgtggggagcaaacaggattagataccctggtagtccacgctgtaaacgatgaatactaggtgtcggggccgtagaggcttcggtgccgcagccaacgcagtaagtattccacctggggagtacgttcgcaagaatgaaactcaaaggaattgacggggacccgcacaagcggtggagcatgtggtttaattcgaagcaacgcgaagaaccttacctggtcttgacatccttctgacagacttttaatcgagtaattccttcgggacagaagagacaggtggtgcatggttgtcgtcagctcgtgtcgtgagatgttgggttaagtcccgcaacgagcgcaacccctatctttagtagccagcatataaggtgggcactctagagagactgccagggataacctggaggaaggtggggacgacgtcaaatcatcatgccccttatgaccagggctacacacgtgctacaatggcgtaaacagagggaagcgatgccgtgaggttcagcaaatcccaaaaataacgtcacagttcggattgtagtctgcaactcgactacatgaagctggaatcgctagtaatcgcgaatcagaatgtcgcggtgaatacgttcccgggtcttgtacacaccgcccgtcacaccatgggagttggtaacgcccgaagtcagtgacccaaccgaaaggagggagctgccgaaggcggga

SEQ ID NO: 75 - DNA, 1475 bp, Artificial Sequence
  Synthetic polymer
gacgaacgctggcggcgtgcctaacacatgcatgtcgaacggagtaatttggcggaagttttcggatggaagctggtttacttagtggcggacgggtgagtaacacgtgagtaacctgcctctcagagggggataacgtcttgaaaaggacgctaataccgcataacatcttatggccgcatggttgtgagatcaaaggagcaatccgctgagagatggactcgcgtccgattagccagttggcggggtaacggcccaccaaagcaacgatcggtagccggactgagaggttgaacggccacattgggactgagacacggcccagacccctacgggaggcagcagtgggggatattgcacaatgggggaaaccctgatgcagcaacgccgcgcgaaggatgaaggtcttcggattgtaaacttttgtcctatgggaagaagaaagtgacggtaccataggaggaagctccggctaactacgtgccagcagccgcggtaatacgtagggagcaagcgttgtccggatttactgggtgtaaagggtgcgtaggcggaagagcaagtcagtagtgaaatctgggggcttaacccccaaactgctattgaaactgtttttcttgagtggagtagaggtaggcggaattcccggtgtagcggtgaaatgcgtagagatcgggaggaacaccagtggcgaaggcggcctactgggctctaactgacgctgaggcacgaaagtgtgggtagcaaacagatttagataccctggtagtccacaccgtaaacgatgattactaggtgtggggggtctgaccccctccgtgccgggagttaacacaataagtaatccacctggggagtacggccgcaaggttgaaactcaaaggaattgacgggggcccgcacaagcagtggagtatgtggtttaattcgaagcaacgcgaagaaccttaccaggtcttgacatccaactaacgaagcagagatgcatcaggtgcccttcggggaaagttgagacaggtggtgcatggttgtcgtcagctcgtgtcgtgagatgttgggttaagtcccgcaacgagcgcaacccttgtgattagttgctacgcaagagcactctaatcagactgccgttgacaaaacggaggaaggtggggacgacgtcaaatcatcatgccccttatgacctgggccacacacgtactacaatggccgtcaacagagagaagcaagaccgcgaggtggagcaaaactctaaaaacggtcccagttcggattgcaggctgcaacccgcctgcatgaagttggaattgctagtaatcgcggatcagcatgccgcggtgaatacgttcccgggccttgtacacaccgcccgtcacaccatgggagccggtaatacccgaagtcagtagcctaaccgcaaggagggcgctgccgaaggtaggattggcgactggggtgaagtcgtaacaaggtagccg

SEQ ID NO: 76 - DNA, 1487 bp, Artificial Sequence
  Synthetic polymer
ttcgcccttaaagtttgttcctggttcgggatgaacgctggcggcgtgcttaacacatgcaagtcgaacgagaaccaaaggattgaggattcgtccaaatgaatttggggaaagtggcggacgggtgagtaacgcgtgagcaatctgccttggagtggggaataacagctggaaacagctgctaataccgcatgatacagctgggaggcatctccctggctgtcaaagatttatcgctctgagatgagctcgcgtctgattagctggttggcggggtaacggcccaccaaggcgacgatcagtagccggactgagaggttggccggccacattgggactgagacacggcccagactcctacgggaggcagcagtggggaatattgggcaatgggcgcaagcctgacccagcaacgccgcgtgaaggaagaaggctttcgggttgtaaacttcttttaagggggacgaagaaaatgacggtaccccttgaataagccacggctaactacgtgccagcagccgcggtaatacgtaggtggcaagcgttatccggatttatcgggtgtaaagggcgtgtaggcgggaatgcaagtcagatgtgaaaactatgggctcaacccatagcctgcattcgaaactgtatttcttgagtgctggagaggcaatcggaattccgtgtgtagcggtgaaatgcgtagatatacggaggaacaccagtggcgaaggcggattgctggacagtaactgacgctgaggcgcgaaagcgtggggagcaaacaggattagataccctggtagtccacgccgtaaacgatggatactaggtgtggggggactgaccccctccgtgccgcagctaacgcaataagtatcccacctggggagtacgatcgcaaggttgaaactcaaaggaattgacgggggcccgcacaagcggtggagtatgtggtttaattcgaagcaacgcgaagaaccttaccagggcttgacatcctactaacgaaccagagatggattaggtgcccttcggggaaagtagagacaggtggtgcatggttgtcgtcagctcgtgtcgtgagatgctgggttaagtcccgcaacgagcgcaacccctattgttagttgctacgcaagagcactctagcgagactgccgttgacaaaacggaggaaggtggggacgacgtcaaatcatcatgccccttacgtcctgggccacacacgtactacaatggcggccaacaaagagaggcgagaccgcgaggtggagcaaatctcaaaaagccgtcccagttcggatcgcaggctgcaacccgcctgcgtgatgttggaatcgctagtaatcgcggatcagcatgccgcggtgaatacgttcccgggccttgtacacaccgcccgtcacaccatgagagtcgggaacacccgaagtccgtagcctaaccgcaaggggggcgcggccgaaggtgggttcgataattggggtgaagtc

SEQ ID NO: 77 - DNA, 1452 bp, Artificial Sequence
  Synthetic polymer
  misc_feature (771)..(771): n is a, c, g, or t
  misc_feature (773)..(773): n is a, c, g, or t
  misc_feature (783)..(783): n is a, c, g, or t
  misc_feature (788)..(788): n is a, c, g, or t
  misc_feature (795)..(795): n is a, c, g, or t
  misc_feature (797)..(797): n is a, c, g, or t
tggctcagattgaacgctggcggcaggcctaacacatgcttgtcgaacggtaacaggaaacagcttgctgtttcgctgacgagtggcggacgggtgagtaatgtctgggaaactgcctgatggagggggataactactggaaacggtagctaataccgcataacgtcgcaagaccaaagagggggaccttcgggcctcttgccatcggatgtgcccagatgggattagctagtaggtggggtaacggctcacctaggcgacgatccctagctggtctgagaggatgaccagccacactggaactgagacacggtcctgactcctacgggaggcagcagtggggaatattgcacaatgggcgcaagcctgatgcagccatgccgcgtgtatgaagaaggccttcgggttgtaaagtactttcagcggggaggaagggagtaaagttaatacctttgctcattgacgttacccgcagaagaagcaccggctaactccgtgccagcagccgcggtaatacggagggtgcaagcgttaatcggaattactgggcgtaaagcgcacgcaggcggtttgttaagtcagatgtgaaatccccgggctcaacctgggaactgcatctgatactggcaagcttgagtctcgtagaggggggtagaattccaggtgtagcggtgaaatgcgtagagatctggaggaataccggtggcgaaggcggccccctggacgaagactgacgctcaggtgcgaaagcgtggggcgcccacaagattngntcccctggtngtccncgccgtnancgacccaaaatgggaggttgtggccttgtaggggtggtttccgggagactaacgcgttaagtcgaccgcctggggggtacggccgcaaggttaaaactcaaatgaattgacgggggcccgcacaagcggtggagcatgtgggtttaattcgatgcaacgcgaagaacctttcctggtcttgacatccacggaagttttcagagatgagaatgtgccttcgggaaccgtgagacaggtgctgcatggctgtcgtcagctcgtgttgtgaaatgttgggttaagtcccgcaacgagcgcaacccttatcctttgttgccagcggtccggccgggaactcaaaggagactgccagtgataaactggaggaaggtggggatgacgtcaagtcatcatggcccttacgaccagggctacacacgtgctacaatggcgcatacaaagagaagcgacctcgcgagagcaagcggacctcataaagtgcgtcgtagtccggattggagtctgcaactcgactccatgaagtcggaatcgctagtaatcgtggatcagaatgccacggtgaatacgttccggggccttgtacacaccgcccgtcacaccatgggagtgggttgcaaaagaagtaggtagcttaaaattcgggagggcgctttcc

SEQ ID NO: 78 - DNA, 1428 bp, Artificial Sequence
  Synthetic polymer
gacgaacgctggcggcgtgcctaacacatgcaagtcgagcgaggagattcccttcggggatgaacctagcggcggacgggtgagtaacacatgggcgacctaccttatagaggggaatagccttccgaaaggaggattaataccgcataacattacattttcgcatgaaaaagtaattaaaggagtaatccgctataagatgggcccgcggcgcattaactagttggtgaggtaacggctcaccaaggcgacgatgcgtagccgacctgagagggtgatcggccacattgggactgagacacggcccagactcctacgggaggcagcagtggggaatattgcacaatgggggaaaccctgatgcagcaacgccgcgtgagtgatgaaggtcttcggatcgtaaagctctgtcttcagggacgataatgacggtacctgaggaggaagccacggctaactacgtgccagcagccgcggtaatacgtaggtggcgagcgttgtccggatttactgggcgtaaagggagcgtaggcggatttttaagtgagatgtgaaatacccgggctcaacttgggtgctgcatttcaaactggaagtctagagtgcaggagaggagagtggaattcctagtgtagcggtgaaatgcgtagagattaggaagaacaccagtggcgaaggcgactctctggactgtaactgacgctgaggctcgaaagcgtggggagcaaccaaaattagataccctggtagtccacgccgtaaacgatgaatactaggtgtagggggttgtctgacctctgtgccgccgcaacgcattaagtattccgcctggggagtacggtcgcaagattaaaactcaaaggaattgacgggggcccgcacaagcagcggagcatgtggtttaattcgaagcaacgcgaagaaccttacctagccttgacatctcgtgaatttattattaatcgaggaagtcccttcggggacaggaagacaggtggtgcatggttgtcgtcagctcgtgtcgtgagaatgtgggttaaagtcccggcaacgaggcgcaaccccttttttttagttgcagccattaagtggggcactttagcaaggctgcccgggttataccgggaggaagggggggatgacgtcaaattatcatgccccttatgtctagggctacccccgtggtacaatggcaggtacaaaaagatgcaatgccgcaaggaggaggtaaatttaaaaacttgtctcagtttggatataggatgaaactcgcctacatgaagatgtagttgtctagtaatcgtgaatcagaatgtcgcggtgaatacgttcccgggcgtcgtacacaccgcccgtcacaccatcagagttggcaatacccaaagttcgtgagctaacccgtaagggaggcagcgacctaaggtaggg

SEQ ID NO: 79 - DNA, 1431 bp, Artificial Sequence
  Synthetic polymer
tagtggcgaacgggtgagtaacgcgtaggcaacctgccctttagatggggacaacattccsaaaggggtgctaataccgaatgtgacggaccttccgcatggaaattccgtgaaagatggcctctacatgtaagctatcgctaaaggatgggccctgcgtctgattagttagttggtagggtaacggcttaccaagacgatgatcagtagccggtctgagaggatgaacggccacattgggactgagacacggcccagactcctacgggaggcagcagtggggaatcttccgcaatgggcgaaagcctgacggagcaatgccgcgtgagtgaagaaggaattcgttccgtaaagctcttttgtttatgacgaatgtgctgattgtgaataatgattagtaatgacggtagtaaacgaataagccacggctaactacgtgccagcagccgcggtaatacgtaggtggcgagcgttgtccggaattattgggcgtaaagagcatgtaggcggttttttaagtccggagtgaaaatgcggggctcaaccccgtatggctctggatactggaagacttgagtgcaggagaggaaaggggaattcccagtgtagcggtgaaatgcgtagatattgggaggaacaccagtggcgaaggcgcctttctggrctgtgtctgacgctgagatgcgaaagccagggtagcgaacgggattagataccccggtagtcctggccgtaaacgatgggtactaggtgtaggaggtatcgaccccttctgtgccggagttaacgcaataagtaccccgcctggggagtacgtccgcaaggatgaaactcaaaggaattgacgggggcccgcacaagcggtggagtatgtggtttaattcgacgcaacgcgaagaaccttaccaaggcttgacattgagcgccatgcctagagataggcagttctcttcggagacgtgaaaacaggtggtgcatggctgtcgtcagctcgtgtcgtgagatrttgggttaagtcccgcaacgagcgcaacccctattctatgttaccagcacgttatggtggggactcataggagactgccaaggacaacttggaggaaggcggggatgacgtcaagtcatcatgccccttatgtcttgggctacacacgtactacaatggtcggcaacagagggaagcgaagccgcgaggcagagcaaaccccagaaacccgatctcagttcggatcgcaggctgcaacccgcctgcgtgaagtcggaatcgctagtaatcgcaggtcagcatactgcggtgaatacgttcccgggccttgtacacaccgcccgtcacaccacgaaagttggaaacacccgaagccggtggggtaacctttaaaaggagccagccgtctaaggtggggccgatkwttggggtgaagtcgkaamaag

SEQ ID NO: 80 - DNA, 1377 bp, Artificial Sequence
  Synthetic polymer
agagtttgcttttggctcagattgaacgctggcggcaggcttaacacatgctagtcgaacggtaacaggaagaagcttgcttctttgctgacgagtggcggacgggtgagtaatgtctgggaaactgcctgatggagggggataactactggaaacggtagctaataccgcataacgtcgcaagaccaaagagggggaccttcgggcctcttgccatcggatgtgcccagatgggattagcttgttggtggggtaacggctcaccaaggcgacgatccctagctggtctgagaggatgaccagccacactggaactgagacacggtccagactcctacgggaggcagcagtggggaatattgcacaatgggcgcaagcctgatgcagccatgccgcgtgtatgaagaaggccttcgggttgtaaagtactttcagcggggaggaagggagtaaagttaatacctttgctcattgacgttacccgcagaagaagcaccggctaactccgtgccagcagccgcggtaatacggagggtgcaagcgttaatcggaattactgggcgtaaagcgcacgcaggcggtttgttaagtcagatgtgaaatccccgggctcaacctgggaactgcatctgatactggcaagcttgagtctcgtagaggggggtagaattccaggtgtagcggtgaaatgcgtagagatctggaggaataccggtggcgaaggcggccccctggacgaagactgacgctcaggtgcgaaagcgtggggagcaaacaggattagataccctggtagtccacgccgtaaacgatctcgaattggagggttgtgcccttgaggcgtggcttccggaagttaacgcgttaagttgactgcctgggggagtacgccggcaaggttataactcaaatgaattgacgggggcccgcacaagcggtggagcatatggtttaattcgatgcaacgcgaagaaccttacctggtctttgacatccacggaagttttcagagatgagaatgtgccttcgggaaccgtgagacaggtgttgcatggctgtcgtcagctcgtgttgtgaaatgttgggttaagtcccgcaacgagcgcaacccttatcctttgttgccagcggtccggccgggaactcaaaggagactgccagtgataaactggaggaaggtggggatgatgtcaagtcatcatggcccttatgaccagggctacacacgtgctacaatggtgcatacaaagagaagcgacctcgtgagagcaagcggacctcataaagtgcgtggtagtccggattggagtctgcaactcgattccatgaagtcggaatcgctagtaatcgtggatcagaatgcctcggtgaatatgt

SEQ ID NO: 81 - DNA, 1429 bp, Artificial Sequence
  Synthetic polymer
gacgaacgctggcggcgtgcctaacacatgcaagtcgagcgaggagattcccttcggggattaacctagcggcggacgggtgagtaacacgtgggcaacctgccttatagaggggaatagccttccgaaaggaagattaataccgcatgacattacattttcgcatgaagaagtaattaaaggagtaatccgctataagatgggcccgcggcgcattagctagttggtgaggtaacggctcaccaaggcgacgatgcgtagccgacctgagagggtgatcggccacattgggactgagacacggcccagactcctacgggaggcagcagtggggaatattgcacaatgggggaaaccctgatgcagcaacgccgcgtgagtgatgaaggtcttcggatcgtaaagctctgtcttcagggacgataatgacggtacctgaggaggaagccacggctaactacgtgccagcagccgcggtaatacgtaggtggcgagcgttgtccggatttactgggcgtaaagggagcgtaggcggatttttaagtgagatgtgaaatacccgggctcaacttgggtgctgcatttcaaactggaagtctagagtgcaggagaggagagtggaattcctagtgtagcggtgaaatgcgtagagattaggaagaacaccagtggcgaaggcgactctctggactgtaactgacgctgaggctcgaaagcgtggggagcaaacaggattagataccctggtagtccacgccgtaaacgatgaatactaggtgtaggggttgtcatgacgtctgtggccgcggcaagggcattaagtgttgcgcgcgggggggtgcggtcgcggggttaaaactcgaaggaattgacgggggcgggcacaagcagcggagcatgtggttagattcgaaggaacgtgaagagcgggtacggtggacttggcatctcgtgagttactcgtaatcgaggaggtcccttcggggacaggaagacaggtggtgcatggttgtcgtcagcttgtgtcgtgagagggggggttaggtcccgcaacgagggcgacccgtattggtagttggtagcagtaagttgggcagtctagcgagactgcccgggttagccggggggaaggtggggaggacgtcaaatcttcatgcgcgtggtgtctagggctacgcaggtggtacgatggcaagtacgaaaagatgcaatgccgcgagggggaggtaaacttagagagttgtctcagttcggagggtaggctggaactcgcctacatgaagctggagtggctagtaatcgggaatcagaatgtcgcggtgaaaacgttcccgggccttgtacacaccgcccgtcacaccatgggagttggcaatacccaaagttcgtgagctaaagggtaagggaggcagcgacctaaggtagggtc

SEQ ID NO: 82 - DNA, 1362 bp, Artificial Sequence
  Synthetic polymer
cggcggacgggggagtgacacgtgggctacctgccttatagaggggaatacccttccgaaaggaagattaataccgcataacattacattttcccatgaagaaataattaaaggagtaatccgctttaaaatgggcccgcggcgcattagctagttggtgaggtaacggctctccaaggcgaccatgcgtagccgacctgagagggtgatcggccacattgggactgagacacggcccacactcctaccggaggcatcagtggggaatactgcccagagggggaaaccctgatgcctcgacgccgcgtgagtggggaacgtcttctgatcgaaatgctctgtcttctcggaccataatgacagtacctgaagaggaagccacggctaactacgtgccagcagccgcggtaatacgtaggtggcgagcgttgtccggatttactgggcgtaaagggagcgtaggcggatttttaagtgagatgtgaaatacccgggctcaacttgggtgctgcatttcaaactggaagtctagagtgcaggggaggagagtggaattcctagtgtagcggtgaaatgcgtagagattaggaagaacaccagtggcgaaggcgactctctggactgtaactgacgctgaggctcgaaagcgtggggagcaaacaggattagataccctggtagtccaccccgtaaacgatgaatactaggtgtaggggttgtcatgacctctgtgccgccgcaaacgcattaagtattccgcctggggagtacggtcgcaagattaaaactcaaaggaattgacgggggcccgcacaagcagcggagcatgtggtttaattagaagcaacgcgaagaaccttacctagacttgacatctcctgaattactcttaatcgaggaagtcccttcggggacaggaagacaggtggtgcatggttgtcgtcagctcgtgtcgtgagatgttgggttaagtcccgcaacgagcgcaacccttattgttagttgctacctttaagttgagcattctagcaagactgcccgggttaaccgggaggaaggtggggatgacgtcaaatcatcatgccccttatgtctagggctacacacgtgctacaatggcaagtacaaaaagatgcgataccgcaaggtggagctaaacttaaaaacttgtctcagttcggatgtaggctgaaactcgcctacatgaagctggagttgctagtaatcgcgaatcagaatgtcgcggtgaatacgttcccgggccttgtacactccgcaccgtcacaccatgagagttggcaatacccaaagttcgtgagctaacccgtaagggaggcagcgacctaaggtagggtcagcgat

SEQ ID NO: 83 - DNA, 1471 bp, Artificial Sequence
  Synthetic polymer
gagtttgatcctggctcaggatgaacgctagcggcaggcttaacacatgcaagtcgaggggcagcatgaagtagcaatactttgatggcgaccggcggacgggtgcgtaacgcgtatgcaacctaccttaaacagggggataacactgagaaattggtactaataccccatattattcgagacggcatcgtcttgggttgaaaactccggtggtttaagatgggcatgcgttgtattagctggttggtgaggtaacggctcaccaaggcgacgatacatagggggactgagaggtcaaccccccacattggtactgagacacggaccaaactcctacgggaggcagcagtgaggaatattggtcaatggacgcaagtctgaaccagccatgccgcgtgcaggaagacggctctatgagttgtaaactgcttttgtacgagggtaacagcatctacgcgtaggtgcatgaaagtatcgtacgaataaggatcggctaactccgtgccagcagccgcggtaatacggaggatccaagcgttatccggatttattgggtttaaagggtgcgtaggcggttttataagttagaggttaaatatcggagcttaactccgttatgcctctaatactgtaggactagagaatagttgcggtaggcggaatgtatggtgtagcggtgaaatgcttagagatcatacagaacaccgattgcgagggcagcttaccaaactatgactgacgttgaggcacgaaagcgtggggagcaaacaggattagataccctggtagtccacgcagtaaacgatgataactcgttgtcggcgatacacagtcggtgactaagcgaaagcgataagttatccacctggggagtacgttcgcaagaatgaaactcaaaggaattgacgggggcccgcacaagcggagggacatgtggtttaattcgatgatacgcgaggaaccttacccgggcttgaaagttatcgacggacctagaaataggtcttccctacggggcgagaaactaggtgctgcatggttgtcgtcagctcgtgccgtgaggtgtcgggttaagtcccataacgagcgcaacccctaccgttagttgccatcaggtcaagctgggcactctggcgggactgccggtgtaagccgagaggaaggtggggatgacgtcaaatcagcacggcccttacgtccggggccacacacgtgttacaatggtaggtacagagggcagctaccctgcgaagggatgcgaatctcgaaagcctatctcagttcggattggaggctgaaacccgcctccatgaagttggattcgctagtaatcgcgcatcagccatggcgcggtgaatacgttcccgggccttgtacacaccgcccgtcaagccatggaagctgggggtgcctgaagttcgtgaccgcaaggagcgacctagggcaaaaccggtgactggggctaagtcgt

SEQ ID NO: 84 - DNA, 1405 bp, Artificial Sequence
  Synthetic polymer
gacgaacgctggcggcgtgcctaacacatgcaagtcgagcgaggagattcccttcggggatgaacctagcggcggacgggtgagtaacacgtgggcaacctgccttatagaggggaatagccttccgaaaggaagattaataccgcataacattacattttcgcatgaagaagtaattaaaggagtaatccgctataagatgggcccgcggcgcattagctagttggtgaggtaacggctcaccaaggcgacgatgcgtagccgacctgagagggtgatcggccacattgggactgagacacggcccagactcctacgggaggcagcagtggggaatattgcacaatgggggaaaccctgatgcagcaacgccgcgtgagtgatgatggtcttcggatcgtaaagctctgtcttcagggacgataatgacggtacctgaggaggaagccacggctaactacgtgccagcagctgcggtaatacgtaggtggcgagcgttgtccggatttactgggcgtaaagggagcgtaggcggatttttaagtgagatgtgaaatacccgggctcaacttgggtgctgcatttcaaactggaagtctagagtgcaggagaggagagtggaattcctagtgtagcggtgaaatgcgtagagattaggaagaacaccagtggcgaaggcgactctctggactgtaactgacgctgaggctcgaaagcgtggggagcacacaaggttagataccctggtagtccacgccgtaaacgatgaatactaggtgtaggggttgtcatgacatctgtgccgcagcatacgcattaagtattccgtctggggagtacggttgcaagattaaaactcaaaggaattgatgggggcccgcacaagcagcggagcatgtggtttaattcgaagcaacgcgaagaaccttacctagacttgacatctcctgaattactgttaatcgaggaagtcccttcggggacaggaagacaggtggtgcatggttgtggtcagctcgtgtcgtgagatgttgggttaagtcccgcaacgagcgcaacccttattgttagtttctaccattaagttgagcaccctagcaagactgcccgggttaaccgggaggaaggtggggatgacgtcaaatcatcatgcccacttatgtatagggcctacactctgtgatacaatggcacgtacaaaaagatgcaataccgcaaggtggagctaaacttaaaaacttgtctcagttcgtattgtaggttgaaactcgcgtacaagaagctggagttggtagtaatcgtgaatcagaatgtcgcggtgaattcgctcccgggccttgtacacaccgcccgtcacaccatgagagttggcaatacccaaagttagtgagataacccgtaaggg

SEQ ID NO: 85 - DNA, 1363 bp, Artificial Sequence
  Synthetic polymer
  misc_feature (1171)..(1171): n is a, c, g, or t
  misc_feature (1253)..(1253): n is a, c, g, or t
  misc_feature (1263)..(1263): n is a, c, g, or t
aacgggtgagtaacgcgtgaggaacctgcctcaaagagggggacaacagttggaaacgactgctaagggggggggggcgcacgggtcggcatcgaccagagggaaaaggagcaatccgctttgagatggcctcgcgtccgattagctagttggtgaggtaatggcccaccaaggcaacgatcggtagccggactgagaggttgaacggccacattgggactgagacacggcccagactcctacgggaggcagcagtggggaatattgcacaatgggggaaaccctgatgcagcgacgccgcgtggaggaagaaggtcttcggattgtaaactcctgttgttggggaagataatgacggtacccaacaaggaagtgacggctaactacgtgccagcagccgcggtaaaacgtaggtcacaagcgttgtccggaattactgggtgtaaagggagcgcaggcggggagacaagttggaagtgaaatctatgggctcaacccataaactgctttcaaaactgtttttcttgagtagtgcagaggtaggcggaattcccggtgtagcggtggaatgcgtagatatcgggaggaacaccagtggcgaaggcggcctactgggcaccaactgacgctgaggctcgaaagtgtgggtagcaaacaggattagataccctggtagtccacaccgtaaacgatgattactaggtgttggaggattgaccccttcagtgccgcagttaacacaataagtaatccacctggggagtacgaccgcaaggttgaaactcaaaggaattgacgggggcccgcacaagcagtggagtatgtggtttaattcgacgcaacgcgaagaaccttaccaagtcttgacatcccttgacaggcatagaaatatgtaatctcttcggagcaaggagacaggtggtgcatggttgtcgtcagctcgtgtcgtgagatgttgggttaagtcccgcaacgagcgcaacccttatggtcagttactacgcaagaggactctggccagactgccgttgacaaaacggaggaaggtggggatgacgtcaaatcatcatgccctttatgacttgggctacacacgtactacaatggcgttaaacaaagagaagcaagaccgcgaggtggagcaaaactcagaaacaacgtcccagttcgnactgcaggctgcaactcgcctgcacaaagtcggaattgctagtaatcgtggatcagcatgccacggtgaatacgttcccggnccttgacacnacgcccgtgacacatgagagctggggggacccgaggtcgtagcctaccgcaaagagacgccctcgagggtaaactggtgattggggggagtcgtaacaag

SEQ ID NO: 86 - DNA, 1432 bp, Artificial Sequence
  Synthetic polymer
agagtttgatcctggctcacattgaacgctggcggcaggcctgacacatgcaagtcgaacggtaacagcgaagcaagcttgcttctttgctgacgagtggcggacgggtgagtaatgtctgggaaactgcctgatggagggggataactactggaaacggtagctaataccgcataacgtcgcaagaccaaagagggggaccttcgggcctcttgccatcggatgtgcccagatgggattagcttgttggtggggtaacggctcaccaaggcgacgatccctagctggtctgagaggatgaccagccacactggaactgagacacggtccagactcctacggaaggcagcagtggggaatattgcacaatgggcgcaagcctgatgcagccatgccgcgtgtatgaagaaggccttcgggttgtaaagtactttcagcggggaggaagggagtaaagttaatacctttgctcattgacgttacccgcagaagaagcaccggctaactccgtgccagcagccgcggtaatacggagggtgcaagcgttaatcggaattactgggcgtaaagcgcacgcaggcggtttgttaagtcagatgtgaaatccccgggctcaacctgggaactgcatctgatactggcaagcttgagtctcgtagaggggggtagaattccaggtgtagcggtgaaatgcgtagagatctggaggaataccggtggcgaaggcggccccctggacgaagactgacgctcaggtgcgcaagcgtggggagcaaacaggattagataccctggtagtccacgccgtaaacgatgtcaacggggaggttgtgcccttgaggcgtggcttcaggagctaacgcgttaagtcgacctcctggggagtacggccgcaaggttaatactcaaaagaattgacgggggcccgcacaagcggtggagcatgtggtttaattcgatgcaacgcgaagaaccttacctggtcttgacatccacggaagttatcagagatgagaatgtgctttcgggaaccgtgagacaggtgatgcatggttgtcgtcagctcgtgttgtgaaatgttgggttaagtccagcaatgagcgcaacccttatcctttgttgctagcggtccggccgggaactcaaaggagacttccagtgataaactggaggaaggtggggatgacgtcaagtcatcatggcccttccgtccagggctacacacgtgctacaatggcgcatacaaagagaagcgacctcgcgagagcaagcggacttcataaagtgagtcgtagtccggattggagtctgcaacttgactccatgaagtcggaatggctagtaatcgtggatcagaatgctcacggcgaatatgttcgccgggccttgtacacaccgcccgtcacaccatgggagtgggttgcaaaagaag

SEQ ID NO: 87 - DNA, 1451 bp, Artificial Sequence
  Synthetic polymer
gaacgctggcggcgtgccttacacatgcaagtcgaacggcagcgcgggagcttgctcctggcggcgagtggcgcacgggtgagtaatgcatcggaacgtgtcttcttgtgggggataactgtccgaaaggacagctaataccgcataagacctgagggtgaaagcaggggatcgcaagaccttgcgcaggaagagcggccgatgtccgattagctagttggcggggtaaaggcccaccaaggcgacgatcggtagctggtctgagaggacgaccagccacactgggactgagacacggcccagactcctacgggaggcagcagtggggaattttggacaatgggggcaaccctgatccagccatgccgcgtgcaggatgaaggtcttcggattgtaaactgcttttgtcagggacgaaaagggacgtgataacaccacgttctgctgacggtacctgaagaataagcaccggctaactacgtgccagcagccgcggtaatacgtagggtgcaagcgttaatcggaattactgggcgtaaagcgtgcgcaggcggttttgtaagatagatgtgaaatccccgggctcaacctgggaattgcatatatgactgcaagacttgagtttgtcagaggagggtggaattccaagtgtagcagtgaaatgcgtagatatttggaagaacaccgatggcgaaggcagccctctgggacatgactgacgctcatgcacgaaagcgtggggagcaaacaggattagataccctggtagtccacgccctaaacgatgtctactagttgttgggagagcaatctcttggtaacgcagctaacgcgtgaagtagaccgcctggggagtacggtcgcaagattaaaactcaaaggaattgacggggacccgcacaagcggtggatgatgtggattaattcgacgcaacgcgaaaaaccttacctagccttgacatgccaggaaccctgaagagattcgggggtgcccgcaagggaatctggacacaggtgctgcatggctgtcgtcagctcgtgtcgtgagatgttgggttaagtcccgcaacgagcgcaacccttgtcactagttgctacgaaagggcactctagtgagactgccggtgacaaaccggaggaaggtggggatgacgtcaagtcctcatggcccttatggctagggcctcacacgtcatacaatggtcggaacagagggaagcgaagccgcgaggtgaagccaatcccagaaaaccgatcgtagtccggattgcagtctgcaactcgactgcatgaagtcggaatcgctagtaatcgcggatcagcatgccgcggtgaatacgttcccgggtcttgtacacaccgcccgtcacaccatgggagtggggttcaccagaagacgtttgcccaaccgaaaggaaggcggcgtccacggtgggcttcatgactggggt

SEQ ID NO: 88 - DNA, 1494 bp, Artificial Sequence
  Synthetic polymer
agagtttgatcatggctcaggatgaacgctggcggcgtgcttaacacatgcaagtcgaacggagtaaagcgctgaaagaggcttcggctgaattcttgctttacttagtggcggacgggtgagtaacgcgtgagtaacctgcctttgagtggggaataacgttctgaaaagaacgctaataccgcataacgtatttttgccgcatgacagagataccaaagatttatcgctcagagatggactcgcgtccgattagctggttggcggggtaacggcccaccaaggcgacgatcggtagccggactgagaggttgaacggccacattgggactgagacacggcccagactcctacgggaggcagcagtgggggatattgcgcaatgggggaaaccctgacgcagcaacgccgcgtggaggaagacggttttcggattgtaaactccttttataagggacgaattaagacggtaccttatgaataagctccggctaactacgtgccagcagccgcggtaatacgtagggagcaagcgttatccggatttactgggtgtaaagggtgcgtaggcggcttggtaagtcagatgtgaaatccatgggctcaacccatgaactgcatttgaaactatcgagcttgagtgaagtagaggcaggcggaattccctgtgtagcggtgaaatgcgtagagatagggaggaacaccagtggcgaaggcggcctgctgggctttaactgacgctgaggcacgaaagcgtgggtagcaaacaggattagataccctggtagtccacgctgtaaacgatgattactaggtgtgggtggactgaccccatccgtgccgcagttaacacaataagtaatccacctgggcagtacggccgcaaggttgaaactcaaaggaattgacgggggcccgcacaagcagtggagtatgtggtttaattcgaagcaacgcggagaaccttaccaggtcttgacatctgactgacgcatccttaaccggatggttcgtacgggacagtcaagacaggtggtgcatggtcgtcgtcagctcgtgtcgtgagatgttgggttaagtcccgcaacgagcgcaacccttattcttagtagccagcggtccgcccgggcactctaaggagactgccagggacaacctggaggaaggtggggatgacgtcaaatcatcatgccccttatgatctgggctacacacgtgctacaatggtggaaacaaagggaagcggccccgcgagggtgagcaaatctcaaaaataccgtcccagttcggactgtagtctgcaacccgactacacgaagttggaatcgctagtaatcgcgaatcagcatgtcgcggtgaatacgttcccgggtcttgtacacaccgcccgtcacaccatgggagttggtaatgcccgaagcctgtgagctaacagcaatgaggcagcagtcggaggcaggaccgataactggggtgaagtcgtaacaaggtagc

SEQ ID NO: 89 - DNA, 1393 bp, Artificial Sequence
  Synthetic polymer
agagtttgatcctggctcaggatgaacgccggcggcgtgcttaacacatgcaagtcgaacgaagcaccttattctgatttcttcggaatgaaaaatttggtgactgagtggcggacgggtgagtaacgcgtgggtaacctgcctcatacagggggataacagttagaaatgactgctaataccgcataagaccacagcaccgcatggtgcaggggtaaaaactccggtggtatgagatggacccgcgtctgattaggtagttggtggggtaacggcctaccaagccgacgatcagtagccgacctgagagggtgaccggccacattggaactgagacacggtccaaactcctacgggaggcagcagtggggaatattgcacaatgggggaaaccctgatgcagcaacgccgcgtgagtgaagaagtatttcggtatgtaaagctctatcagcagggaagataatgacggtacctgactaagaagctccggctaaatacgtgccagcagccgcggtaatacgtatggagcaagcgttatccggatttactgggtgtaaagggtgcgtaggtggcagtgcaagtcagatgtgaaaggccggggctcaaccccggagctgcatttgaaactgctcggctagagtacaggagaggcaggcggaattcctagtgtagcggtgaaatgcgtagatattaggaggaacaccagtggcgaaggcggcctgctggactgttactgacactgaggcacgaaagcgtggggagcaaacaggattagataccctggtagtccacgccgtaaacgatgaatactaggtgtcggggccgtataggcttcggtgccgccgctaacgcagtaagtattccacctggggagtacgttcgcaagaatgaaactcaaaggaattgacggggacccgcacaagcggtggagcacgtggtttaattcgaagcaacgcgaagaaccttaccaggtcttgacatccttctgaccactccgtaatgggagtcttccttcgggacagaagagacaggtggtgcatggttgtcgtcagctcgtgtcgtgagatgttgggttaagtcccgcaacgagcgcaacccctatcttcagtagccagcaggtaaggctgggcactctggagagactgccagggataacctggaggaaggtggggacgacgtcaaatcatcatgccccttatgacctgggctacacacgtgctacaatggctggtacaacgagtcgcgagtcggtgacggcaagctaatctcttaaagccagtctcagttcggattgtaggctgcaactcgcctacatgaagtcggaatcgctagtaatcgcggatcagcacgccgcggtgaatacgttcccgggccttgcactcaccgcccgtca

SEQ ID NO: 90 - DNA, 1373 bp, Artificial Sequence
  Synthetic polymer
agagtttgatcctggctcaggacgaacgctggcggcgcgcctaacacatgcaagtcgaacgagagatgaggagcttgctcttcaaatcgagtggcgaacgggtgagtaacgcgtgaggaacctgcctcaaagagggggacaacagttggaaacgactgctaataccgcataagcccacggctcggcatcgagcagagggaaaaggagtgatccgctttgagatggcctcgcgtccgattagctagttggtgaggtaatggcccaccaaggcaacgatcggtagccggactgagaggttgaacggccacattgggactgagacacggcccagactcctacgggaggcagcagtggggaatattgcacaatgggggaaaccctgatgcagcgacgccgcgtggaggaagaaggtcttcggattgtaaactcctgttgttgaggaagataatgacggtactcaacaaggaagtgacggctaactacgtgccagcagccgcggtaaaacgtaggtcacaagcgttgtccggaattactgggtgtaaagggagcgcaggcgggaagacaagttggaagtgaaatctatgggctcaacccataaactgctttcaaaactgtttttcttgagtagtgcagaggtaggcggaattcccggtgtagcggtggaatgcgtagatatcgggaggaacaccagtggcgaaggcggcctactgggcaccaactgacgctgaggctcgaaagtgtgggtagcaaacaggattagataccctggtagtccacaccgtaaacgatgattactaggtgttggaggattgaccccttcagtgccgcagctaacgcattaagtactccgcctggggagtacgctcgcaagagtgaaactcaaaggaattgacggggacccgcacaagtagcggagcatgtggtttaattcgaagcaacgcgaagaaccttacctaagcttgacatccttttgaccgatgcctaatcgcatttttcccttcggggaaagtggagacaggtggtgcatggttgtcgtcagctcgtgtcgtgagatgttgggttaagtcccgcaacgagcgcaacccctattgttagttgctacgcaagagcactctagcgagactgccgttgacaaaacggaggaaggcggggacgacgtcgaatcatcatgccccttatgtcctgggctacacacgtaatacaatggtcgtaaacagagggaagcgaaaccgcgaggtagagcaaatccccaaaaacggtctcagttcggattgcaggctgcaactcgcctgtatgaagtcggaattgctagtaatcgcggatcagcatgccgcggtgaatacgttcccgggccttgcacacaccgcccgtca

SEQ ID NO: 91 - DNA, 1396 bp, Artificial Sequence
  Synthetic polymer
agagtttgatcctggctcaggatgaacgctggcggcgtgcttaacacatgcaagtcgaacgaagcactttatttgatttccttcgggactgattattttgtgactgagtggcggacgggtgagtaacgcgtgggtaacctgccttgtacagggggataacagttggaaacggctgctaataccgcataagcccacaggtcggcatcgaccagagggaaaaggagtaatccgctttgagatggcctcgcgtccgattagctagttggtgaggtaacggcccaccaaggcaacgatcggtagccggactgagaggttgaacggccacattgggactgagacacggcccagactcctacgggaggcagcagtggggaatattgcacaatgggggaaaccctgatgcagcaacgccgcgtgagtgaagaagtatttcggtatgtaaagctctatcagcagggaagataatgacggtacctgactaagaagctccggctaaatacgtgccagcagccgcggtaatacgtatggagcaagcgttatccggatttactgggtgtaaagggtgcgtaggtggcagtgcaagtcagatgtgaaaggtcggggctcaaccccggagctgcatttgaaactgcatagctggagtacaggagaggcaggcggaattcctagtgtagcggtgaaatgcgtagatatttaggaagaacaccagtggcgaaggcggcttactggacggtaactgacgttgaggctcgaaagcgtggggagcaaacaggattagataccctggtagtccacgccgtaaacgatgaatgctaggtgttggggagcaaagctcttcggtgccgccgcaaacgcattaagcattccacctggggagtacgttcgcaagaatgaaactcaaaggaattgacggggacccgcacaagcggtggagcatgtggtttaattcgaagcaacgcgaagaaccttaccaggtcttgacatcccgatgaccggcccgtaacggggccttctcttcggagcattggagacaggtggtgcatggttgtcgtcagctcgtgtcgtgagatgttgggttaagtcccgcaacgagcgcaacccttatcctcagtagccagcaggtcaagctgggcactctgtggagactgccagggataacctggaggaaggtggggatgacgtcaaatcatcatgccccttatgatctgggctacacacgtgctacaatggcgtaaacaaagggaggcaaagccgcgaggtggagcaaatcccaaaaataacgtctcagttcgggctgcagtctgcaactcgactgcacgaagctggaatcgctagtaatcgcgaatcagaatgtcgcggtgaatacgttcccgggtcttgtactcaccgcccgtca

SEQ ID NO: 92 - DNA, 1361 bp, Artificial Sequence
  Synthetic polymer
agagtttgatcctggctcaggatgaacgctggcggcgcgcctaacacatgcaagtcgaacggcacccctctccggagggaagcgagtggcgaacggctgagtaacacgtggagaacctgccccctcccccgggatagccgcccgaaaggacgggtaataccggataccccggggtgccgcatggtaccccggctaaagccccgacgggaggggatggctccgcggcccatcaggtagacggcggggtgacggcccaccgtgccgacaacgggtagccgggttgagagaccgatcggccacattgggactgagatacggcccagactcctacgggaggcagcagtggggaattttgcgcaatgggggaaaccctgacgcagcaacgccgcgtgcgggacgaaggccttcgggttgtaaaccgctttcagcagggaatatagtgaaggtacctgcagaagaagctccggctaactacgtgccagcagccgcggtaatacgtagggagcgagcgttatccggattcattgggcgtaaagcgcgcgtaggcggcccgtcaagcggggtttcaaatccaggggctcaacctctggccggatcccgaactggcgggctcgagtgcggtagaggaaggtggaattcccagtgtagcggtgaaatgcgcagatattgggaagaacaccgatggcgaaggcagccttctgggccgccactgacgctgaggcgcgaaagctaggggagcgaacaggattagataccctggtagtcctagccgtaaacgatgggcactaggtgtgggggagcatctcctccgtgccgcagccaacgcattaagtgccccgcctggggagtacggccgcaaggctaaaactcaaaggaattgacgggggcccgcacaagcagcggagcatgtggcttaattcgaagcaacgcgaagaaccttaccagggcttgacatgcaggtgaagcggcggaaacgccgtggccgagaggagcctgcgcaggtggtgcatggctgtcgtcagctcgtgtcgtgagatgttgggttaagtcccgcaacgagcgcaacccctgtcgcgtgttgccagcattgagttggggactcgcgcgagactgccggcgtcaagccggaggaaggtggggacgacgtcaagtcatcatgccccttatgccctgggctgcacacgtgctacaatggccggtacaacgggctgcgacgccgcgaggcggagcgaatccctcaaagccggccccagttcggatcgcaggctgcaattcgcctgcgtgaagccggagttgctagtaatcgcggatcagcatgccgcggtgaatacgttcccgggccttgcactcaccgcccgtca

SEQ ID NO: 93 - DNA, 1379 bp, Artificial Sequence
  Synthetic polymer
agagtttgatcctggctcaggacgaacgctggcggcgtgcctaacacatgcaagtcgagcgaatgaagttccttcgggaacggatttaacggcggacgggtgactaacacatgcgcaacctgcctcatagacgggaatacccttcggaagcggagattaattccgcctaagattgtagtaccgcatggtacaacaaatgaaggagcaatacgctatgacatgggcccacggcgcattatctaattggtgaggtaacgggtcaccaaggcgacgatgcgtagaccacctgagagggtgatcaggctcattgggactgagacaccggccacactcctccgggaggcagcagtcgggaatattgcacaatgggggaaaccctgatgcagcaacgtccgcgtgagtgatgacgtctttcgggttgtaaagctctgtcttcagggatcgataatgacggtacctgaggaggaagccacggctaactacgtgccagcagccgcggtaatacgtaggtggcgagcgttgtccggatttactgggcgtaaagggagcgtaggcggatttttaagtgagatgtgaaatactcgggcttaacccgagtggtgcatttcaaactggaagtctagagtgcaggagaggagaagggaattcctagtgtagcggtgaaatgcgtagagattaggaagaacaccagtggcgaaggcgcttttctggacggtaactgacgttgaggctcgaaagcgtggggagcaaacaggattagataccctggtagtccacgccgtaaacgatgaatactaggtgtaggggttgtcatgacctctgtgccgccgctaacgcattaagtattccgcctggggagtacggtcgcaagattataactcaaaggaattgacgggggcccgcacaagcagcggagcatgtggtttaattggaagcaacgcgaagaaccttacctagacctgacatctcctgcattactcttaatggaggacgtcccttcggggacaggaagacaggtggtgcatggtggtcgtcagcttgtgtcgtgagatgttgggttaagtcccgcaacgagcgcaacctttattgttagttgccatcattaagttgggctctctagcgagactccccgggttatccgggaggaaggtggggatgatgtcaaatcatcacgccccttatgtctagggctacacacgtgcctacaatggtcggtccaataagaggcaagcccgcgagggggacgcaaacacctggaaacccgatctcagttcggattgcaggctgaaactcgcctacatgaagttggagttgctagtaatcgcgaatcagcatgtcgcggtgaatacgttcccgggccttgcacacaccgcccgtca

SEQ ID NO: 94 - DNA, 1379 bp, Artificial Sequence
  Synthetic polymer
agagtttgatcctggctcaggacgaacgctggcggcgtgcctaacacatgcaagtcgagcggagacagtgagtagcttgctatgagctgttttagcggcggacgggtgagtaacgcgtgagcaacctttcccagacaggggaataacacaccgaaaggtgtactaataccgcataagaccacgggatcacatggttctgaggtaaaagatttatcggtttggggtgggctcgcgtccgattaggtagttggtgaggtaacggcccaccaagccgacgatccatagccggcctgagagggtgaacggccacattgggactgagacacggcccaaactcctacgggaggcagcagtggggaatattgcacaatgggggaaaccctgatgcagcgacgccgcgtggaggaagaaggtcttcggattgtaaactcctgttgttgaggaagataatgacggtactcaacaaggaagtgacggctaactacgtgccagcagccgcggtaaaacgtaggtcacaagcgttgtccggaattactgggtgtaaagggagcgcaggcgggaagacaagttggaagtgaaatccatgggctcaacccatgaactgctttcaaaactgtttttcttgagtagtgcagaggtaggcggaattcccggtgtagcggtggaatgcgtagatatcgggaggaacaccagtggcgaaggcggcctactgggcaccaactgacgctgaggctcgaaagtgtgggtagcaaacagaattagataccctggtagtccacaccgtaaacgatgattacaaggtgttggaggattgaccccttcagtgccgcagttaacacaaataagtaatccccctgggggagtacgatcgcaaggttgaaaactcaaaggaattgacgggggcccgcacaagcggtggattatgtggttaaattcgaagcaacgggaagaaccttaccaggtcttgacatcctgctaacgaagtagagatacattaggtgcccttcggggaaagcagagacaggtggtgcatggttgtcgtcagctcgtgtcgtgagatgttgggttaagtcccgcaacgagcgcaacccctattgttagttgctacgcaagagcactctagcgagactgccgttgacaaaacggaggaaggtggggacgacgtcaaatcatcatgccccttatgacctgggctacacacgtaatacaatggcggtcaacaaagggatgcaaagccgcgaggcagagcgaaccccaaaaagccgtcccagttcggatcgcaggctgcaacccgcctgcgtgaagtcggaatcgctagtaatcgtgggtcagcataccacggtgaatacgttcccgggccttgcactcaccgcccgtca

SEQ ID NO: 95 - DNA, 1380 bp, Artificial Sequence
  Synthetic polymer
agagtttgattctggctcaggacgaacgctggcggcgcgcctaacacatgcaagtcgaacgagcgagagagagcttgctttctcgagcgagtggcgaacgggtgagtaacgcgtgaggaacctgcctcaaagagggggacaacagttggaaacgactgctaataccgcataagcccacggctcggcatcgagcagagggaaaaggagcaatccgctttgagatggcctcgcgtccgattagctagttggtgaggtaacggcccaccaaggcgacgatcggtagccggactgagaggttgaacggccacattgggactgagacacggcccagactcctacgggaggcagcagtggggaatattgcacagtgggggaaaccctgatgcagcgacgccgcgtggaggaagaaggtcttcggattgtaaactcctgttgttgaggaagataatgacggtactcaacaaggaagtgacggctaactacgtgccagcagccgcggtaaaacgtaggtcacaagcgttgtccggaattactgggtgtaaagggagcgcaggcgggaagacaagttggaagtgaaatccatgggctcaacccatgaactgctttcaaaactgtttttcttgagtagtgcagaggtaggcggaattccccgtgtagcggtgaaatgcgtagagatggggaggaacaccagtggcgaaggcggcctgctgggctttaactgacgctgaggcacgaaagcgtgggtagcaaacaggattagataccctggtagtccacgctgtaaacgatgattactaggtgtgggggggctgaccccttcccgtgccggagttaacacataagtaatccaccgggggaagtacggccgcaagggtgaaactcaaaaggaaatgacggggggcccgcccaagcagtggagtatgtggtttaattagtagcaacgagagagaaccttttcaagtcttgacatccaactaatgaagtagagatacattcggtgccctttggggaaaattgagacaggtggtgcatggttgtcgtcagctggttgtcgtgagatgttgggttacagtcccgcagcgagcgcaacccttgctattagttgttatgcaagagcactctaataggactgccgttgacaaaacggaggaaggtggggacgacgtcaaatcatcatgccccttatgacctgggctacacacgtactacaatggatgttaacagagggaagcaagacagcgatgtggagcaaacccctaaaaacattctcagttcagattgcaggctgcaacccgcctgcatgaagatggaattgctagtaatcgcggatcagcatgccgcggtgaatacgttcccgggccttgcacacaccgcccgtca

SEQ ID NO: 96 - DNA, 1405 bp, Artificial Sequence
  Synthetic polymer
ttcgcccttagagtttgatcctggctcaggacgaacgctggcggcgtgcttaacacatgcaagtcgaacgagaatctacggatcgaggattcgtccaagtgaagtagaggacagtggcggacgggtgagtaacgcgtgaggaacctgcctttcagagggggacaacagttggaaacgactgctaataccgcatgacacattggggtcgcatggccctgatgtcaaagatttatcgctgaaagatggcctcgcgtctgattagctagttggtgaggtaacggcccaccaaggcgacgatcagtagccggactgagaggttgaccggccacattgggactgagatacggcccagactcctacgggaggcagcagtggggaatattgggcaatgggcgcaagcctgacccagcaacgccgcgtgaaggaagaaggctttcgggttgtaaacttcttttgtcagggacgagtagaagacggtacctgacgaataagccacggctaactacgtgccagcagccgcggtaatacgtaggtggcaagcgttgtccggatttactgggcgtaaagggcgcgtaggcggactgtcaagtcagtcgtgaaataccggggcttaaccccggggctgcgattgaaactgacagccttgagtatcggagaggaaagcggaattcctagtgtagcggtgaaatgcgtagatattaggaggaacaccagtggcgaaggcggctttctggacgacaactgacgctgaggcgcgaaagtgtggggagcaaacaggattagataccctggtagtccacaccgtaaacgatggatacttagggtgtaggaggttatcgcccctttctggccgccagttaacacaataagtatccccctgggggagtacgacccgcaaggttgaaactcaaaggaattgacgggggcccgcacaagcagtggagtatgtggtttaattggaagcaacgcgaagaaccttacctgggcttgacatccctggaatcgagtagagatacttgagtgccttcgggaatcaggtgacaggtggtgcatggttgtcgtcagctcgtgtcgtgagatgttgggttaagtcccgcaacgagcgcaacccctattgtcagttgccatcattaagttgggcactctggcgagactgccggtgacaaatcggaggaaggtggggacgacgtcaaatcatcatgccccttatgacctgggctacacacgtactacaatggcagtcatacagagggaagcaaaaccgcgaggtggagcaaatccctaaaagctgtcccagttcagattgcaggctgcaacccgcctgcatgaagtcggaattgctagtaatcgcggatcagcatgccgcggtgaatacgttcccgggccttgcactcaccgcccgtca

SEQ ID NO: 97 - DNA, 1403 bp, Artificial Sequence
  Synthetic polymer
agagtttgatcctggctcaggacgaacgctggcggcatgcttaacacatgcaagtcgaacggactgattccttcgggatgaaagttagtggcgaacgggtgagtaatgtatgagcaacctgcctctgtcaacgggataacagttggaaacgactgctaatacggtatatgaccacggcaccgcatggtgcagcggtaaaagattttatcggacagagatgggctcatatcccattaggtagttggtgagataacagcccaccaagccgacgatcagtagccggtctgagaggatgaacggccacactggaactgagacacggtccagactcctacgggaggcagcagtggggaatcttccgcaatggacgaaagtctgacggagcaacgccgcgtgaacgatgaaggtcttcggattgtaaagttctgtgatccgggacgaaggcattgattgagaacattgattgatgttgacggtaccggaaaagcaagccacggctaactacgtgccagcagccgcggtaatacgtaggtggcaagcgttgtccggaattattgggcgtaaagcgcgcgcaggcggccgtgcaagtccatcttaaaagcgtggggcttaaccccatgaggggatggaaactgcagggctggagtgtcggaggggaaagtggaattcctagtgtagcggtgaaatgcgtagagattaggaagaacaccggtggcgaaggcgactttctagacgacaactgacgctgaggcgcgaaagcgtggggagcaaacaggattagataccctggtagtccacgccgtaaacgatggatactaggtgtaggaggtatcgaccccttctgtgccggagttaacgcaataagtatcccgcctgggaagtacgatcgcaagattaaaactcaaaggaattgacgggggcccgcacaagcggtggagtatgtggtttaattcgacgcaacgcgaagaaccttaccaagccttgacattgatcgcaatccgcagaaatgcggagttcctcttcggaggacgagaaaacaggtggtgcacggctgtcgtcagctcgtgtcgtgagatgttgggttaagtcccgcaacgagcgcaacccctatcttctgttgccagcacgtaaaggtgggaactcaggagagaccgccgcggacaacgcggaggaaggcggggatgacgtcaagtcatcatgccccttatggcttgggctacacacgtactacaatgggtgcaaacaaagagaagcgaagtcgcgagatggagcggacctcataaacgcactcccagttcagattgcaggctgcaacccgcctgcatgaagtaggaatcgctagtaatcgcgggtcagcataccgcggtgaatacgttcccgggccttgtacacaccgcccgtca

SEQ ID NO: 98 - DNA, 1387 bp, Artificial Sequence
  Synthetic polymer
ttcgcccttagagtttgatcctggctcaggacgaatcgctggcggcgcgcctaacacatgcaagtcgaacgagcgagagagagcttgcttcctcgagcgagtggcgaacgggtgagtaacgcgtgaggaacctgcctcaaagagggggacaacagttggaaacgactgctaataccgcataagcccacggctcggcatcgagcagagggaaaaggagcaatccgctttgagatggcctcgcgtccgattagctagttggtgaggtaatggcccaccaaggcaacgatcggtagccggactgagaggttgaacggccacattgggactgagacacggcccagactcctacgggaggcagcagtgggggatattgcgcaatgggggaaaccctgacgcagcaacgccgcgtgaaggatgaaggtcttcggattgtaaacttcttttattaaggacgaagaaagtgacggtacttaatgaataagctccggctaactacgtgccagcagccgcggtaatacgtagggagcaagcgttgtccggatttactgggtgtaaagggtgcgtaggcggctttgcaagtcagatgtgaaatctatgggctcaacccatagcctgcatttgaaactgcagagcttgagtgaagtagaggcaggcggaattccccgtgtagcggtgaaatgcgtagagatggggaggaacaccagtggcgaaggcggcctgctgggctttaactgacgctgaggcacgaaagcgtgggtagcaaacaggattagataccctggtagtccacgctgtaaacgatgattactaggtgtggggggtctgaccccttccgtgccggagttaacacaataagtaatccacctggggagtacggccgcaaggttgaaactcaaaggaattgacgggggcccgcacaagcagtggagtatgtggtttaattcgaagcaacgcgaagaaccttaccaggtcttgacatcctactaacgagatagagatatgttaggtgcccttcggggaaagtagagacaggtggtgcatggttgtcgtcagctcgtgtcgtgagatgttgggttaagtcccgcaacgagcgcaacccttgctattagttgctacgcaagagcactctaataggactgccgttgacaaaacggaggaaggtggggacgacgtcaaatcatcatgccccttatgacctgggctacacacgtactacaatggacataaacagagggaagcaaaacagcgatgtggagcaaacccctaaaaatgttctcagttcagattgcaggctgcaacccgcctgtatgaagatggaattgctagtaatcgcagatcagcatgctgcggtgaatacgttcccgggccttgcacacaccgcccgtca

SEQ ID NO: 99 - DNA, 1352 bp, Artificial Sequence
  Synthetic polymer
ttcgcccttagagtttgatcctggctcaggacgaacgctggcggcacgcttaacacatgcaagtcgaacggagaacattgagcttgcttaatgttcttagtggcggacgggtgagtaacacgtgagtaacctgcctctgagagtgggatagcttctggaaacggatggcaataccgcataacatcatggattcgcatgtttctatgatcaaagatttatcgctcagagatggactcgcgtctgattagctagttggtaaggtaacggcttaccaaggcgacgatcagtagccggactgagaggttgatcggccacattgggactgagacacggcccagactcctacgggaggcagcagtggggaatattgcacaatggaggaaactctgatgcagcgatgccgcgtgagggaagaaggttttaggattgtaaacctctgtcttcagggacgaaaaatgacggtacctgaggaggaagctccggctaactacgtgccagcagccgcggtaatacgtagggagcgagcgttgtccggaattactgggtgtaaagggagcgtaggcgggatcgcaagtcagatgtgaaaactatgggtttaacccataaactgcatttgaaactgtggttcttgagtgaagtagaggtaagcggaattcctagtgtagcggtgaaatgcgtagatattaggaggaacatcagtggcgaaggcggcttactgggctttaactgacgctgaggctcgaaagtgtgggtagcaaacaggattagataccctggtagtccacaccgtaaacgatgattactaggtgttggaggattgaccccttcagtgccgcagttaacacaataagtaatccacctggggagtacgaccgcaaggttgaaactcaaaggaattgacgggggcccgcacaagcagtggagtatgtggtttaattcgacgcaacgcgaagaaccttaccaagtcttgacatcccttgacaggcatagaaatatgttttctcttcggagcaaggagacaggtggtgcatggttgtcgtcagctcgtgtcgtgagatgttgggttaagtcccgcaacgagcgcaacccttatccttagtagccagcagtaagatgggcactctgaggagactgccagggataacctggaggaaggtggggatgacgtcaaatcatcatgccccttatgatttgggctacacacgtgctacaatggcgtaaacaaagggaagcaagagagtgatctggagcaaatcccaaaaataacgtcccagttcggaatgtagtctgcaacccgactacacgaagctggaatcgctagtaatcgcagatcagaatgctgcggtgaatac

SEQ ID NO: 100 - DNA, 1391 bp, Artificial Sequence
  Synthetic polymer
agagtttgatcctggctcaggatgaacgctggcggcgtgcttaacacatgcaagtcgaacgggaattactttattgaaacttcggtcgatttaattaaattctagtggcggacgggtgagtaacgcgtgggtaacctgccttatacagggggataacagtcagaaatggctgctaataccgtataagcgcacagagctgcatggctcggtgtgaaaaactccggtggtataagatggacccgcgttggattagcttgttggtggggtaacggcccaccaaggcgacgatccatagccggcctgagagggtgaacggccacattgggactgagacacggcccagactcctacgggaggcagcagtggggaatattgcacaatgggggaaaccctgatgcagcgacgccgcgtgaaggaagaagtatctcggtatgtaaacttctatcagcagggaagaaaatgacggtacctgactaagaagccccggctaaatacgtgccagcagccgcggtaatacgtatggagcaagcgttatccggatttactgggtgtaaagggtgcgtaggtggcagtgcaagtcagatgtgaaaggccggggctcaaccccggagctgcatttgaaactgcatagctagagtacaggagaggcaggcggaattcctagtgtagcggtgaaatgcgtagatattaggaggaacaccagtggcgaaggcggcctgctggactgtaactgacgttgaggctcgaaagcgtggggagcaaacaggattagataccctggtagtccacgccgtaaacgatgaatactaggtgtcagggagcacaagctctttggtgccgccgcaaacgcattaagtattccacctggggagtacgttcgcaagaatgaaactcaaaggaattgacggggacccgcacaagcggtggagcatgtggtttaattcgaagcaacgcgaagaaccttaccaaatcttgacatccctctgaccgggacttaaccgtccctttccttcgggacaggggagacaggtggtgcatggttgtcgtcagctcgtgtcgtgagatgttgggttaagtcccgcaacgagcgcaacccctatccttagtagccagcacgtaatggtgggcactctgaggagactgccagggataacctggaggaaggcggggatgacgtcaaatcatcatgccccttatgatttgggctacacacgtgctacaatggcgtaaacaaagggaagcgaacctgtgagggtgggcaaatctcaaaaataacgtcccagttcggactgcagtctgcaactcgactgcacgaagctggaatcgctagtaatcgcggatcagaatgccgcggtgaatacgttcccgggtcttgcacacaccgcccgtca

SEQ ID NO: 101 - DNA, 1376 bp, Artificial Sequence
  Synthetic polymer
ttagagtttgatcctggctcaggacgaacgctggcggcgcgcctaacacatgcaagtcgaacggagcttagagagcttgctttttaagcttagtggcgaacgggtgagtaacgcgtgagtaacctgccttcaagagggggataacattctgaaaagaatgctaataccgcatgacatatcggaaccacatggttttgatatcaaagattttatcgcttgaagatggactcgcgtccgattagttagttggtgaggtaacggctcaccaagaccgcgatcggtagccggactgagaggttgaacggccacattgggactgagacacggcccagactcctacgggaggcagcagtgggggatattgcgcaatgggggcaaccctgacgcagcaacgccgcgtgaaggatgaaggttttcggattgtaaacttcttttattaaggacgaaaaatgacggtacttaatgaataagctccggctaactacgtgccagcagccgcggtaatacgtagggagcaagcgttgtccggatttactgggtgtaaagggtgcgtaggcggctttgcaagtcagatgtgaaatctatgggctcaacccataaactgcatttgaaactgtagagcttgagtgaagtagaggcaggcggaattccccgtgtagcggtgaaatgcgtagagatggggaggaacaccagtggcgaaggcggcctgctgggctttaactgacgctgaggcacgaaagcgtgggtagcaaacaggattagataccctggtagtccacgctgtaaacgatgattactaggtgtggggggtctgaccccttccgtgccggagttaacacaataagtaatccacctggggagtacggccgcaaggttgaaactcaaaggaattgacgggggcccgcacaagcagtggagtatgtggtttaattcgaagcaacgcgaagaaccttaccaggtcttgacatccaactaacgaagtagagatacattaggtgcccttcggggaaagttgagacaggtggtgcatggttgtcgtcagctcgtgtcgtgagatgttgggttaagccccgcaacgagcgcaacccttgctattagttgctacgcaagagcactctaataggactgccgttgacaaaacggaggaaggtggggacgacgtcaaatcatcatgccccttatgacctgggctacacacgtactacaatggatgttaacagagggaagcaagacagtgatgtggagcaaacccctaaaaacattctcagttcagattgcaggctgcaacccgcctgcatgaagatggaattgctagtaatcgcggatcagcatgccgcggtgaatacgttcccgggccttgcactcaccgcccgtca

SEQ ID NO: 102 - DNA, 1378 bp, Artificial Sequence
  Synthetic polymer
agagtttgatcctggctcaggacgaacgctggcggcgtgcctaacacatgcaagtcgagcgaatgaagttccttcgggaatggatttagcggcggacgggtgagtaacacgtgggcaacctgcctcatagaggggaatagccttccgaaagggagattaataccgcataagattgtagtaccgcatgatacagcaattaaaggagcaatccgctatgagatgggcccgcggcgcattagctagttggtgaggtaacggctcaccaaggcgacgatgcgtagccgacctgagagggtgatcggccacattgggactgagacacggcccagactcctacgggaggcagcagtggggaatattgcacaatgggggaaaccctgatgcagcgacgccgcgtgagcgaagaagtatttcggtatgtaaagctctatcagcagggaagaaaatgaccgtacctgaccaagaagccccggctaactacttgtcatcagccgcggtaatacgtagggggccagcgttatccggatttactgggttataaagggagcgtagacgggaatggcaagtctgatgtgaaaggccggggctcaaccccgggactgcattggaaactgtcaatctagagtaccggaggggtaagtagaattcctagtgtagcggtgaaatgcgtagatattaggaggaacaccagtggcgaaggcggcttactggacggtaactgacgttgaggctcgaaagcgtggggagcaagcaggattagataccctggtagttcacgccgtaaacgatgattactagctgttgggggggtatgacccatcggtgccgcagcaaacgcaaataagtaatccacctggggagtacgttcgcaagaatgaaactcaaaggaattgacggggacccgcacaagcggtggagcatgtggtttaattcgaagcaacgcgaagaaccttacctggtcttgacatccctatgaataacgggcaatgccgttagtacttcggtacataggagacaggtggtgcatggttgtcgtcagctcgtgtcgtgagatgttgggttaagtctcgcaacgagcgcaacccttatctttagtagccagcagtaagatgggcactcaagagagactgccggggataacccggaggaaggtggggatgacgtcaaatcatcatgccccttatgaccagggctacacacgtgctacaatggcgtaaacaaagagaagcgaagccgtgaggcagggcgaatctcaaaaataacgtctcagttcggattgtagtctgcaactcgactacatgaagctggaatcgctagtaatcgcagatcagaatgctgcggtgaatacgttcccgggtcttgcacacaccgcccgtca

SEQ ID NO: 103 - DNA, 1383 bp, Artificial Sequence
  Synthetic polymer
ttcgcccttagagtttgatcctggctcaggacgaacgctggcggcgtgcctaacacatgcaagtcgaacggagttgaaaggagcttgcttttttcaactcagtggcggacgggtgagtaacgcgtgagtaacctgcctttcagagggggataacgttctgaaaagaacgctaataccgcataagattgtagtttcgcatggagcagcaatcaaaggagcaatccgctgaaagatggactcgcgtccgattagatagttggcggggtaacggcccaccaagtcgacgatcggtagccggactgagaggttgatcggccacattgggactgagacacggcccagactcctacgggaggcagcagtgagggatattgggcaatgggggaaaccctgacccagcaacgccgcgtgagggatgacggttttcggattgtaaacctctgtcctttgtgaagatagtgacggtagcagaggaggaagctccggctaactacgtgccagcagccgcggtaatacgtagggagcaagcgttgtccggatttactgggtgtaaagggtgcgtaggcggattggcaagtcagaagtgaaatccatgggcttaacccatgaactgcttttgaaactgttagtcttgagtgaagtagaggtaggcggaattcccggtgtagcggtgaaatgcgtagagatcgggaggaacaccagtggcgaaggcgcctttctggactgtgtctgacgctgagatgcgaaagccagggtagcgaacgggattagataccccggtagtcctggccgtaaacgatgattactaggtgtggggggactgaccccttccgtgccgcagcaaacgcaataagtaatccacctggggagtacgaccgcaaggttgaaactcaaaggaattgacgggggcccgcacaagcagtggagtatgtggattaattcgaagcaacgcgaagaaccttaccaggtcttgacatcgtatgcatagctcagagatgagtgaaatctcttcggagacatatagacaggtggtgcatggttgtcgtcagctcgtgtcgtgagatgttgggttaagtcccgcaacgagcgcaacccttactgttagttgctacgcaagagcactctagcaggactgccgttgacaaaacggaggaaggtggggatgacgtcaaatcatcatgccccttatgacctgggcctcacacgtactacaatggctgtcaacagagggatgcaaagccgcgaggtggagcgaacccctaaaagcagtcttagttcggattgtaggctgcaacccgcctacatgaagtcggaattgctagtaatcgcagatcagcatgctgcggtgaatacgttcccgggccttgtactcaccgcccgtca

SEQ ID NO: 104 - DNA, 1330 bp, Artificial Sequence
  Synthetic polymer
agagtttgatcctggctcaggatgaacgctggcggcgcgcctaacacatgcaagtcgaacggcacctgccctcgggcagaagcgagtggcgaacggctgagtaacacgtggagaacctgccccctcccccgggatagccgcccgaaaggacgggtaataccggataccccggggtgccgcatggcacccgggctaaagccccgacgggaggggatggctccgcggcccatcaggtagacggcggggtgacggcccaccgtgccgacaacgggtagccgggttgagagaccgaccggccagattgggactgagacacggcccagactcctacgggaggcagcagtggggaatcttgcgcaatggggggaaccctgacgcagcgacgccgcgtgcgggacggaggccttcgggtcgtaaaccgctttcagcagggaagagtcaagactgtacctgcagaagaagccccggctaactacgtgccagcagccgcggtaatacgtagggggcgagcgttatccggattcattgggcgtaaagcgcgcgtaggcggcccggcaggccgggggtcgaagcggggggctcaaccccccgaagcccccggaacctccgcggcttgggtccggtaggggagggtggaacacccggtgtagcggtggaatgcgcagatatcgggtggaacaccggtggcgaaggcggccctctgggccgagaccgacgctgaggcgcgaaagctgggggagcgaacaggattagataccctggtagtcccagccgtaaacgatggacgctaggtgtggggggatgatcccccctaggggcaaccaacactataagcgtcccgcgtggggagtacggccgcaaggggaaaactcaaaggaattgacgggggcccgcacaagcagcggagcatggggcttaattagaagcaacgcgaagaaccttaccagggacttgacatatgggtgaagcgggggagaccccgtggccgagaggagcccatacaggtggtgcatggctgtcgtcagctcgtgtcgtgagatgttgggttaagtcccgcaacgagcgcaacccccgccgcgtgttgccatcgggtgatgccgggaacccacgcgggaccgccgccgtcaaggcggaggagggcggggacgacgtcaagtcatcatgccccttatgccctgggctgcacacgtgctacaatggccggtacagagggatgccaccccgcgagggggagcggatcccggaaagccggccccagttcggattgggggctgcaacccgcccccatgaagtcggagttgctagtaatcgcggatcagcatgccgcggt

SEQ ID NO: 105 - DNA, 1392 bp, Artificial Sequence
  Synthetic polymer
agagtttgatcctggctcaggatgaacgctggcggcgtgcttaacacatgcaagtcgaacgggaattactttattgaaacttcggtcgatttaatttaattctagtggcggacgggtgagtaacgcgtgggtaacctgccttgtacagggggataacagtcagaaatgactgctaataccgcataagcgcacaggaccgcatggtccggtgtgaaaaactccggtggtataagatggacccgcgttggattagcttgttggtggggtaacggcccaccaaggcgacgatccatagccggcctgagagggtgaacggccacattgggactgagacacggcccagactcctacgggaggcagcagtgaggaatattgcacaatgggggaaaccctgatgcagcaacgccgcgtgagtgatgacggccttcgggttgtaaagctctgtcttcagggacgataatgacggtacctgaggaggaagccacggctaactacgtgccagcagccgcggtaatacgtaggtggcgagcgttgtccggatttactgggcgtaaagggagcgtaggcggacttttaagtgagatgtgaaatacccgggctcaacttgggtgctgcatttcaaactggaagtctagagtgcaggagaggagaatggaattcctagtgtagcggtgaaatgcgtagagattaggaagaacaccagtggcgaaggcgattctctggactgtaactgacgctgaggctcgaaagcgtggggagcaaacaggattagataccctggtagtccacgccgtaaacgatgaatactaggtgtaggggttgtcatgacctctgtgccgccgctaacgcattaagtattccgcctggggagtacggtcgcaagattaaaactcaaaggaattgacggggacccgcacaagcggtggagcatgtggtttaattcgaagcaacgcgaagaaccttaccaagtcttgacatcgattcgacgggagtgtaatgactcctttcccttcggggacgaagaagacaggtggtgcatggttgtcgtcagctcgtgtcgtgagatgttgggttaagtcccgcaacgagcgcaacccttatcttcagtagccaacgagtagagttgggcactctggagagactgccggggacaactcggaggaaggtggggacgacgtcaaatcatcatgccccttatgacctgggctacacacgtgctacaatggccacgacagagagaagcgaaatcgcaaggtagagcggaactcaaaaaagtggtcccagttcggattgtgggctgcaacccgcccacatgaagtcggagttgctagtaatcgcggatcagcatgccgcggtgaatacgttcccgggccttgcacacaccgcccgtca

SEQ ID NO: 106 - DNA, 1347 bp, Artificial Sequence
  Synthetic polymer
agagtttgatcctggctcaggacgaacgctggcggcacgcttaacacatgcaagtcgaacggagaatatcgaagcttgctttgatattcttagtggcggacgggtgagtaacacgtgagtaacctgcctctgagagtgggatagcttctggaaacggatggtaataccgcatgaaatcatagtatcgcatggtaccatgatcaaagatttatcgctcagagatggactcgcgtccgattagctagttggtgagataacagcccaccaaggcgacgatcggtagccgacctgagagggtgatcggccacattggaactgagagacggtccagactcctacgggaggcagcagtggggaatattgcacaatggaggaaactctgatgcagcgacgccgcgtgagtgaagaagtagttcgctatgtaaagctctatcagcagggaagatagtgacggtacctgactaagaagctccggctaaatacgtgccagcagccgcggtaatacgtatggagcaagcgttatccggatttactgggtgtaaagggagtgtaggtggccaggcaagtcagaagtgaaagcccggggctcaaccccgggactgcttttgaaactgcagggctagagtacaggagaggcaggcggaattcctagtgtagcggtgaaatgcgtagatattaggaggaacaccagtggcgaaggcggctttctggactgaaactgacactgaggcacgaaagcgtggggagcaaacaggattagataccctggtagtccacgccgtaaacgatgaatactaggtgtcggtctagcttagctgttgcgtgccgcagcattagcattaagtattccacttgggggagtgagattgcaagaataaaatgcaaaggaatagaaggggacccgcacaatccgtggagcatgtggtttaatttgaattcagcgagaagaacgtttccaggccttgacatcaaggtgaccgtcctgttatggggacctctgtttggtgcaccggtgacaggtggtgcatggttgttgtcaggttgtgtcgtgagatgttgggttaagtcccgcaacgagcgcaacccctatgttcagtagccagcaggtaaagctgggcactctggacagactgccggggataacccggaggaaggtggggatgacgtcaaatcatcatgccccttactacgtgggctacacacgtgttccaatgggtacaacaaagagaagtgagaccgcacggtggagcaaaactcagaaaagttctctcatttcagatggtggggtgcaacccgcccacaagaagttggagtttttagttatcgcggatgagcatgccgcggtga

SEQ ID NO: 107 - DNA, 1400 bp, Artificial Sequence
  Synthetic polymer
ttcgcccttagagtttgatcctggctcaggacgaacgctggcggcgtgcttaacacatgcaagtcgaacgaagcgatttaacggaagccttcgggcggaagataaattgacttagtggcggacgggtgagtaacgcgtgagcaacctgcccataagagggggataacagttggaaacgactgctaataccgcataagaccacattaccgcatggtaaaggggtcaaagaaattcgcttatggatgggctcgcgtcccattaggtagttggtagggtaacggcctaccaagccaatgatgggtagccgacctgagagggtgatcggccacactggaactgagacacggtccagactcctacgggaggcagcagtggggaatattgggcaatgggcgcaagcctgacccagcaacgccgcgtgagggaagaaggccttcgggttgtaaacctctgtcctatgggaagaaaaaaatgacggtaccataggaggaagctccggctaactacgtgccagcagccgcggtaatacgtagggagcaagcgttgtccggaattactgggcgtaaagggtgcgtaggcggttgcttaagtcagatgtgaaatactcgggctcaactcgggggctgcatctgatactgggtaactagagtgcaggagaggaaagtggaattcctagtgtagcggtggaatgcgtagatattaggaggaacaccagtggcgaaggcgactttctggactgtaactgacgctgaggcacgaaagtatgggtagcaaacaggattagataccctggtagtccatactgtaaacgatgaatactaggtgtggggggcaatagtcttccgtgccgcagctaacgcaataagtattccgcctggggagtacggtcgcaagactgaaactcaaaggaattgacgggggcccgcacaagcagcggagcatgtggtttaattcgaagcaacgcgaagaaccttaccaaggcttgacatcccggtgaccggcatagagatatgccttctcttcggagcaccggtgacaggtggtgcatggttgtcgtcagctcgtgtcgtgagatgttgggttaagtcccgcaacgagcgcaacccttgttactagttgccagcattacggatgggaactctagtgagactgccggggataactcggaggaaggtggggatgacgtcaaatcatcatgccctttatgtcttgggctacacacgtgctacaatggtcggtacaaagagcggcgaactcgtaagagcaagcgaatctcataaagccggtctcagttcagattgtgggctgcaacccgcccacatgaagtcggagttgctagtaatcgcggatcagcatgccgcggtgaatgcgttcccgggccttgtacacaccgcccgtca

SEQ ID NO: 108 - DNA, 1352 bp, Artificial Sequence
  Synthetic polymer
cacatgcaagtcgaggggcagcatggagtagcaatactctgatggcgaccggcgcacgggtgcgtaacgcgtatacaacctacccaaaacagggggataacactgagaaattggtactaataccccataatatcatgttcggcatcggatatggttgaaagttccggcggttttggatgggtatgcgttgtattagctagttggtgaggtaacggctcaccaaggcaacgatacatagggggactgagaggttaaccccccacattggtactgagacacggaccaaactcctacgggaggcagcagtgaggaatattggtcaatggacgcaagtctgaaccagccatgccgcgtgcaggaagacggctctatgagttgtaaactgcttttgtacgagggtaaacgcagatacgtgtatctgtctgaaagtatcgtacgaataaggatcggctaactccgtgccagcagccgcggtaatacggaggattcaagcgttatccggatttattgggtttaaagggtgcgtaggcggtttgataagttagaggtgaaatgttagggcttaaccctgaaactgcctctaatactgttgagctagaaagtagttgcggtaggcggaatgtatggtgtagcggtgaaatgcttagagatcatacagaacaccgattgcgtaggcagcttaccaaactatatctgacgttgaggcacgaaagcgtggggagcaaacaggattagataccctggtagtccacgcagtaaacgattgatgactcgctgtcggcgatacacagtcgggggtaaagcgaaagcgaataagttatccacctggggagtacgttcgcaaagaatgaaactcaaaggaattgacgggggcccgcacaagcggaggaacatgtggttaaattcgatgaatacgcgaggaaccttacccgggcttgaaagttatagacggacttggaaacaggtcttccctacggggcgagaaactaggtgctgcatggttgtcgtcagctcgtgccgtgaggtgtcgggttaagtcccataacgagcgcaacccctaccgttagttgccatcaggtcaagctgggcactctggcgggactgccggtgtaagccgagaggaaggtggggatgacgtcaaatcagcacggcccttacgtctggggccacacacgtgttacaatggtaggtacagagggcagctaccctgcgaagggatgcgaatctcgaaagcctatctcagttcggattggaggctgaaacccgcctccatgaagttggattcgctagtaatcgcgcatcagccatggcgcggtgaatacgttcccgggccttgcacacaccgcccgtca

SEQ ID NO: 109 - DNA, 1394 bp, Artificial Sequence
  Synthetic polymer
agagtttgatcctggctcaggatgaacgctggcggcgtgcttaacacatgcaagtcgaacgaagcactctatttgattttcttcggaaatgaagattttgtgactgagtggcggacgggtgagtaacgcgtgggtaacctgcctcatacagggggataacagttggaaacgactgctaataccgcataagcgcacaggatcgcatggtccggtgtgaaaaactccggtggtatgagatggacccgcgtctgattagccagttggcagggtaacggcctaccaaagcgacgatcagtagccgacctgagagggtgaccggccacattgggactgagacacggcccagactcctacgggaggcagcagtggggaatattgcacaatggaggaaactctgatgcagcgacgccgcgtgaaggatgaagtatttcggtatgtaaacttctatcagcagggaagaaaatgacggtacctgactaagaagccccggctaactacgtgccagcagccgcggtaatacgtagggggcaagcgttatccggatttactgggtgtaaagggagcgtagacggcacggcaagccagatgtgaaagcccggggctcaaccccgggactgcatttggaactgctgagctagagtgtcggagaggcaagtggaattcctagtgtagcggtgaaatgcgtagatattaggaggaacaccagtggcgaaggcggcttactggacggtaactgacgttgaggctcgaaagcgcggggagcaaacaggattagataccctggtagtccacgccgtagacgatgattgctaggtgtaggtgggtatggacccatcggtgccgcagctaacgcaataagcaatccacctggggagtacgttcgcaagaatgaaactcaaaggaattgacggggacccgcacaagcggtggagcatgtggtttaattcgaagcaacgcgaagaaccttaccaggtcttgacatcccgatgaaaaacccgtaacggggttccctcttcggagcatcggagacaggtggtgcatggttgtcgtcagctcgtgtcgtgagatgttgggttaagtcccgcaacgagcgcaacccttattcttagtagccagcaggtaaagctgggcactctaaggagactgccggggataacccggaggaaggtggggatgacgtcaaatcatcatgccccttatgatctgggctacacacgtgctacaatggttggtacaaagagaagcgaagcggtgacgtggagcaaacctcataaagccaatctcagttcggattgtaggctgcaactcgcctacatgaagttggaatcgctagtaatcgcgaatcagcatgtcgcggtgaatacgttcccgggtcttgtactcaccgcccgtca

SEQ ID NO: 110 - DNA, 1389 bp, Artificial Sequence
  Synthetic polymer
agagtttgatcctggctcaggatgaacgctggcggcgtgcctaacacatgcaagtcgaacgaagcaccttttaagattcttcggatgattgattggtgactgagtggcggacgggtgagtaacgcgtgggtaacctgccctgtacagggggataacagctggaaacggctgctaataccgcataagcgcacgaggagacatcttcttgtgtgaaaaactccggtggtacaggatgggcccgcgtctgattagctggttggcagggtaacggcctaccaaagcaacgatcagtagccggtctgagaggatgaacggccacattggaactgagacacggtccaaactcctacgggaggcagcagtggggaatattgcacaatgggggaaaccctgatgcagcaacgccgcgtgagtgaagaagtatttcggtatgtaaagctctatcagcagggaagataatgacggtacctgactaagaagctccggctaaatacgtgccagcagccgcggtaatacgtatggagcaagcgttatccggatttactgggtgtaaagggtgcgtaggtggcagtgcaagtcagatgtgaaaggccggggctcgaccccggagctgcatttgaaactgctcggctagagtacaggagaggcaggcggaattcctagtgtagcggtgaaatgcgtagatattaggaggaacaccagtggcgaaggcggcctgctggactgttactgacactgaggcacgaaagcgtggggagcaaacaggattagataccctggtagtccacgccgtaaacgatggatactaggtgtaggaggtatcgaccccttctgtgccggagtaaacacaataagtatcccacctggggagtacggtcgcaagattgaaactcaaaggaattgacgggggcccgcacaagcagtggagtatgtggtttaattcgaagcaacgcgaagaaccttaccaggacttgacatcccacgcatagcctagagataggtgaaatccttcgggacgtggagacaggtggtgcatggttgtcgtcagctcgtgtcgtgagatgttgggttaagtcccgcaacgagcgcaacccttactgtcagttgccagcacgtgaaggtggggactctggcaggactgccggtgacaaatcggaggaaggtggggacgacgtcaaatcatcatgccccttatgtcctgggctacacacgtactacaatggctgtcaacaaagtgaagcaaaacagcgatgtggagcaaaacacaaaaagcagtctcagttcagattgtaggctgaaactcgcctatatgaagtcggaattgctagtaatcgcagatcagcatgctgcggtgaatacgttcccgggccttgcacacaccgcccgtca

SEQ ID NO: 111 - DNA, 1366 bp, Artificial Sequence
  Synthetic polymer
agagtttgatcctggctcaggatgaactttggcggcgtgcctaacacatgcaagtcgaacgattaaggcgccttcgggcgcgaatagagtggcgaacgggtgagtaacacgtgaccaacctgcccccctccccgggataacgcgaggaaacccgcgctaataccggatactccgcccctcccgcatgggaggggcgggaaagccccgacggagggggatggggtcgcggcccattaggtagacggcggggcaacggcccaccgtgcctgcgatgggtagccgggttgagagaccgaccggccacattgggactgagatacggcccagactcctacgggaggcagcagtggggaatattgcgcaatggggggaaccctgacgcagcaacgccgcgtgcgggacgaaggccttcgggttgtaaaccgctttcagcagggaagaagttgacggtacctgcagaagaagccccggctaactacgtgccagcagccgcggtaatacgtagggggcgagcgttatccggattcattgggcgtaaagcgcgcgtaggcggcccgtcaagcggaacctctaacccgagggctcaacccccggccgggttccgaactggcaggctcgagtttggtagaggaagatggaattcccggtgtagcggtggaatgcgcagatatcgggaagaacaccgatggcgaaggcagtcttctgggccatcaactgacgctgaggcgcgaaagctgggggagcgaacaggattagataccctggtagtcccagccgtaaacgatgggcgctaggtgtggggggatcatccctccgtgccgcagccaacgcattaagcgccccgcctggggagtacggccgcaaggctaaaactcaaaggaattgacgggggcccgcacaagcagcggagcatgtggcttaattcgaagcaacgcgaagaaccttaccagggcttgacatgctggtgaagccggggaaacccggtggccgagaggagccagcgcaggtggtgcatggctgtcgtcagctcgtgtcgtgagatgttgggttaagtcccgcaacgagcgcaacccctgccatatgttgccagcattcagttggggactcatatgggactgccggcgtcaagccggaggaaggtggggacgacgtcaagtcatcatgccctttatgccctgggctgcacacgtgctacaatggccggtacaacgggccgcgacctggcgacaggaagcgaatccctcaaagccggccccagttcggatcggaggctgcaacccgcctccgtgaagtcggagttgctagtaatcgcggatcagcatgccgcggtgaatacgttcccgggccttgcactcaccgcccgtca

SEQ ID NO: 112 - DNA, 1370 bp, Artificial Sequence
  Synthetic polymer
agagtttgatcctggctcaggacgaacgctggcggcgcgcctaacacatgcaagtcgaacgagcgagagagagcttgctttcttgagcgagtggcgaacgggtgagtaacgcgtgaggaacctgcctcaaagagggggacaacagttggaaacgactgctaataccgcataagcccacaggtcggcatcgaccagagggaaaaggagcaatccgctttgagatggcctcgcgtccgattagctagttggtgaggtaatggcccaccaaggcaacgatcggtagccggactgagaggttgaacggccacattgggactgagacacggcccagactcctacgggaggcagcagtggggaatattgcacaatgggggaaaccctgatgcagcgacgccgcgtggaggaagaaggtcttcggattgtaaactcctgttgttgaggaagataatgacggtactcaacaaggaagtgacggctaactacgtgccagcagccgcggtaaaacgtaggtcacaagcgttgtccggaattactgggtgtaaagggagcgcaggcgggaagataagttggaagtgaaatctatgggctcaacccataaactgctttcaaaactgtttttcttgagtagtgcagaggtaggcggaattcccggtgtagcggtggaatgcgtagatatcgggaggaacaccagtggcgaaggcggcctactgggcaccaactgacgctgaggctcgaaagtgtgggtagcaaacaggattagataccctggtagtccacaccgtaaacgatgattactaggtgtcagaggattggcccattcaatgcagcggtaacaacgagaatgtaatcctcctggggagtacacgcgaaaaattaaagctcatagaaattgacgggggccagcacaagcagtggagtaagaggtttaaatcaaagcaacgggaagaaccttagcaagtctagacatcgtgtgacgcgcatagaaatatgtgtttcattcgggaggaagagacaggtggtgcatggttgtcgtcagctcgtgtcgtgggatgttgggttaagtcccgcaacgagcgcaacccttactgtcagttagtacgcaagaggactctggcgggactgccgttgacaaaacggaggaaggtggggatgacgtcaaatcatcatgccctttatgacttgggctacacacgtactacaatggcgttaaacaaagagaagcaagaccgcgaggtggagcaaaactcagaaacaacgtcccagttcgaactgcaggctgcaactcgcctgcacgaagtcggaattgctagtaatcgtggatcagcatgccacggtgaataaattcccgggccttgtctcgccgcccgtca

SEQ ID NO: 113 - DNA, 1380 bp, Artificial Sequence
  Synthetic polymer
agagtttgatcctggctcaggatgaacgctggcggcgtgcttaacacatgcaagtcgaacgagagaagatcggtgcttgcactgatccgatcgagtggcggacgggtgagtaacgcgtgggtaacctgcctcatacaggggaataacagttggaaacggctgctaaaaccgcataagcgcacggtatcgcatgatacagtgtgaaaaactccggtggtatgagatggacccgcgtctgattagctagttggtgaggtaacggcccaccaaggcaacgatcagtagccggcctgagagggtgaacggccacattgggactgagacacggcccaaactcctacgggaggcagcagtggggaatattgcacaatgggggaaaccctgatgcagcgacgccgcgtgagtgatgaagtatttcggtatgtaaagctctatcagcagggaagataatgacggtacctgactaagaagcaccggctaaatacgtgccagcagccgcggtaatacatatggtgcaagcgttatccggatttactgggtgtaaagggtgcgtaggtggtgagacaagtctgaagtgaaaatccggggcttaaccccggaactgctttggaaactgcctgactagagtacaggagaggtaagtggaattcctagtgtagcggtgaaatgcgtagatattaggaggaacaccagtggcgaaggcgacttactggactgctactgacactgaggcacgaaagcgtggggagcaaacaggattagataccctggtagtccacgccgtaaacgatgaatactaggtgtcggggcccaaagggcttcggtgccgcagccaacgcaataagtattccacctggggagtacgttcgcaagaatgaaactcaaaggaattgacggggacccgcacaagcggtggagcatgtggtttaattcgaagcaacgcgaagaaccttaccaagtcttgacatcctgctgaccattccttaaccggaattttccttcgggacagcagagacaggtggtgcatggttgtcgtcagctcgtgtcgtgagatgttgggttaagtcccgcaacgagcgcaacccctatcttcagtagccagcaggtgaagctgggcactctggagagactgccagggataacctggaggaaggtggggacgacgtcaaatcatcatgccccttatgatctgggcgacacacgtgctacaatggcggtcacagagtgaggcgaacccgcgagggggagcaaaccacaaaaaggccgtcccagttcggactgtagtctgcaacccgactacacgaagctggaatcgctagtaatcgcgaatcagaatgtcgcggtgaatacgttcccgggtcttgcactcaccgcccgtca

SEQ ID NO: 114 - DNA, 1391 bp, Artificial Sequence
  Synthetic polymer
agagtttgatcctggctcaggatgaacgctggcggcgtgcttaacacatgcaagtcgaacgaagcgcttaaacggatttcttcggattgaagtttttgcgactgagtggcggacgggtgagtaacgcgtgggtaacctgcctcgtacagggggataacagttagaaatgactgctaataccgcataagcgcacagtgctgcatggcacagtgtgaaaaactccggtggtatgagatggacccgcgtctgattagctagttggtggggtaacggcctaccaagccaacgatcagtagccgacctgagagggtgaccggccacattgggactgagacacggcccagactcctacgggaggcagcagtggggaatattgcacaatggaggaaactctgatgcagcgacgccgcgtgaaggatgaagtatctcggtatgtaaacttctatcagcagggaagaaaatgacggtacctgactaagaagccccggctaactacgtgccagcagccgcggtaatacgtagggggcaagcgttatccggatttactgggtgtaaagggagcgtagacggcacggcaagccagatgtgaaagcccggggctcaaccccgggactgcatttggaactgctgagctagagtgtcggagaggcaagtggaattcctagtgtagcggtgaaatgcgtagatattaggaggaacaccagtggcgaaggcggcttgctggacgatgactgacgttgaggctcgaaagcgtggggagcaaacaggattagataccctggtagtccacgccgtaaacgatggactgctaggtgtcgggtagcaaagctcttcggtgccgcagcaaacgcaataagtagtccacctggggagtacgttcgcaagaatgaaactcaaaggaattgacggggacccgcacaagcggtggagcatgtggtttaattcgaagcaacgcgaagaaccttacctgctcttgacatcccgctgaccggacggtaatgcgtccttcccttcggggcagcggagacaggtggtgcatggttgtcgtcagctcgtgtcgtgaggtgttgggttaagtcccgcaacgagcgcaacccctatctttagtagccagcggccaggccgggcactctagagagactgccggggataacccggaggaaggtggggatgacgtcaaatcatcatgccccttatgagcagggctacacacgtgctacaatggcgtaaacaaagggaagcgagaccgcgaggtggagcaaatcccaaaaataacgtctcagttcggattgtagtctgcaactcgactacatgaagctggaatcgctagtaatcgcgaatcagaatgtcgcggtgaatacgttcccgggtcttgcacacaccgcccgtca

SEQ ID NO: 115 - DNA, 1395 bp, Artificial Sequence
  Synthetic polymer
agagtttgatcctggctcaggacgaacgctggcggcgcgcctaacacatgcaagtcgaacggagttattaagacagaagccttcgggtggaagatttagtaacttagtggcggacgggtgagtaacacgtgaggaacctgccttacagagggggataacgtctggaaacggacgctaataccgcataacaccatcggggggcatcccctggcggtcaaagatttatcgctgtaagatggcctcgcggtcgattagctagttggtagggtaacggcctaccaaggcgacgatcagtagccggactgagaggttgaccggccacattgggactgagacacggcccagactcctacgggaggcagcagtggggaatattgggcaatgggcgcaagcctgacccagcaacgccgcgtgaaggaagaaggctttcgggttgtaaacttcttttatgagggacgaaggaagtgacggtacctcatgaataagctccggctaactacgtgccagcagccgcggtaatacgtagggagcgagcgttatccggatttactgggtgtaaagggcgtgtaggcggggaagcaagtcagatgtgaaaaccagtggctcaaccactggcctgcatttgaaactgtttttcttgagtgatggagaggcaggcggaattccgtgtgtagcggtgaaatgcgtagatatacggaggaacaccagtggggaaggcggcctgctggacattaactgacgctgaggcgcgaaagcgtggggagcaaacaggattagataccctggtagtccacgctgtaaacgatggatactaggtgtggggggactgaccccttccgtgccgcagttaacacaataagtatcccacctggggagtacgatcgcaaggttgaaactcaaaaggaattgacggggacccgcacaagcggtggagcatgtggtttaattcgaagcaacgcgaagaaccttacctgctcttgacatctccctgaccggcaagtaatgttgcctttccttcgggacagggatgacaggtggtgcatggttgtcgtcagctcgtgtcgtgagatgttgggttaagtcccgcaacgagcgcaacccctatctttagtagccagcggttcggccgggcactctagagagactgccagggataacctggaggaaggtggggatgacgtcaaatcatcatgccccttatgagcagggctacacacgtgctacaatggcgtaaacaaagggaggcagaaccgcgaggtcgagcaaatcccaaaaataacgtctcagttcggattgtagtctgcaactcgactacatgaagctggaatcgctagtaatcgcgaatcagaatgtcgcggtgaatacgttcccgggtcttgcactcaccgcccgtca

SEQ ID NO: 116 - DNA, 1390 bp, Artificial Sequence
  Synthetic polymer
agagtttgatcctggctcaggatgaacgctggcggcgtgcttaacacatgcaagtcgaacggggtgcctatgatagaggattcgtccaattgattaggctacctagtggcggacgggtgagtaacgcgtgagtaacctgccttggagtggggaataacagtccgaaaggactgctaataccgcatgatgcagcgaggtcgcatggccttgctgccaaagatttatcgctctgagatggactcgcgtctgattagctggttggcggggtaacggcccaccaaggcgacgatcagtagccggactgagaggttggccggccacattgggactgagacacggcccagactcctacgggaggcagcagtggggaatattgggcaatgggcgcaagcctgacccagcaacgccgcgtgaaggaagaaggctctcgggttgtaaacttcttttatcagggacgaaagaaatgacggtacctgatgaataagccacggctaactacgtgccagcagccgcggtaatacgtaggtggcaagcgttatccggatttactgggtgtaaagggcgtgtaggcgggaaagcaagtcaggcgtgaaaactatgggctcaacccatagcctgcgtttgaaactgtttttcttgagtgtcggagaggcaatcggaattccgtgtgtagcggtgaaatgcgtagatatacggaggaacaccagtggcgaaggcggattgctggacgataactgacgctgaggcgcgaaagcgtggggagcaaacaggattagataccctggtagtccacgccgtaaacgatggatactaggtgtggggggtctgaccccctccgtgccgcagttaacacaataagtatcccacctggggagtacgatcgcaaggttgaaactcaaaggaattgacgggggcccgcacaagcggtggagtatgtggtttaattcgaagcaacgcgaagaaccttaccagggcttgacatcgtactaacgaagcagagatgcattaggtgcccttcggggaaagtatagacaggtggtgcatggttgtcgtcagctcgtgtcgtgagatgttgggttaagtcccgcaacgagcgcaacccctattgttagttgctacgcaagagcactctagcgagactgccgttgacaaaacggaggaaggtggggacgacgtcaaatcatcatgccccttatgtcctgggccacacacgtactacaatggcggtcaacagagggaggcaataccgcgaggtggagcaaatccctaaaagccgtcccagttcggattgcaggctgaaacccgcctgcatgaagttggaatcgctagtaatcgcggatcagcatgccgcggtgaatacgttcccgggccttgcacacacagcccgtca

SEQ ID NO: 117 - DNA, 1396 bp, Artificial Sequence
  Synthetic polymer
agagtttgatcctggctcaggatgaacgctggcggcgtgcttaacacatgcaagtcgaacgaagctgcttaactgatcttcttcggaattgacgttttgtagactgagtggcggacgggtgagtaacgcgtgggtaacctgccctgtacagggggataacagtcagaaatgactgctaataccgcataagaccacagcaccgcatggtgcaggggtaaaaactccggtggtacaggatggacccgcgtctgattagctggttggtgaggtaacggctcaccaaggcgacgatcagtagccggcttgagagagtgaacggccacattgggactgagacacggcccagactcctacgggaggcagcagtgggggatattgcgcaatgggggaaaccctgacgcagcaacgccgcgtgaaggatgaaggtcttcggattgtaaacttcttttattaaggacgaagaaagtgacggtacttaatgaataagctccggctaactacgtgccagcagccgcggtaatacgtagggagcaagcgttgtccggatttactgggtgtaaagggtgcgtaggcggctttgcaagtcagatgtgaaatctatgggctcaacccatagcctgcatttgaaactgcagagcttgagtgaagtagaggcaggcggaattccccgtgtagcggtgaaatgcgtagagatggggaggaacaccagtggcgaaggcggcctgctgggctttaactgacgctgaggcacgaaagcgtgggtagcaaacaggattagataccctggtagtccacgctgtaaacgatgattacttgggtgtggggggtactgcccccttcggtaccggagttaacacaataattaatccacctggggagtacggccgcaagggttgaatctcaaaggaattgacgggggcccgcacaagcagtggagtatgtggttttaattggaagcaacgcgaagaaccttaccaggtcttgacatcctactaacgagatagagatatgttaggtgcccttcggggaaagtagagacaggtggtgcatggttgtcgtcagctcgtgtcgtgagatgttgggttaagtcccgcaacgagcgcaacccttgctattagttgctacgcaagagcactctaataggactgccgttgacaaaacggaggaaggtggggacgacgtcaaatcatcatgccccttatgacctgggctacacacgtactacaatggacattaacagagggaagcaatacagtgatgtggagcaaacccctaaaaatgttctcagttcagattgcaggctgcaacccgcctgtatgaagatggaattgctagtaatcgcagatcagcatgctgcggtgaatacgttcccgggccttgcactcaccgcccgtca

SEQ ID NO: 118 - DNA, 1407 bp, Artificial Sequence
  Synthetic polymer
ttcgcccttagagtttgatcctggctcaggacgaacgctggcggcgtgcctaacacatgcaagtcgaacgaagctccccgatacaaggcttcggccaagttgaagggatgacttagtggcggacgggtgagtaacgcgtgaggaacctgcctttcagtgggggacaacagttggaaacgactgctaataccgcataatgtttctggaccgcatgatctggaaaccaaagctttatgtgctgaaagatggcctcgcgtctgattagatagttggtgaggtaacggcccaccaagtctacgatcagtagccggactgagaggttgaacggccacattgggactgagatacggcccagactcctacgggaggcagcagtggggaatattgggcaatgggggaaaccctgacccagcaacgccgcgtgaaggaagaaggctttcgggttgtaaacttcttttaccagggacgaaggacgtgacggtacctggagaaaaagccacggctaactacgtgccagcagccgcggtaatacgtaggtggcaagcgttgtccggatttactgggtgtaaagggcgtgtaggcgggagagcaagtcagaagtgaaatccatgggcttaacccatgaactgcttttgaaactgttcttcttgagtatcggagaggcaggcggaattcctagtgtagcggtgaaatgcgtagatattaggaggaacaccagtggcgaaggcggcctgctggacgacaactgacgctgaggcgcgaaagcgtggggagcaaacaggattagataccctggtagtccacgctgtaaacgatgaatactaggtgtggggggactgaccccttccgtgccgcagttaacacaataagtattccacctggggagtacgatcgcaagattgaaactcaaaggaattgacgggggcccgcacaagcagtggattatgtggtttaattcgacgcaacgcgaagaaccttaccgggatttgacatcctactaacgaagcagagatgcattaggtgcccttcggggaaagtagagacaggtggtgcatggttgtcgtcagctcgtgtcgtgagatgttgggttaagtcccgcaacgagcgcaacccttatctttagtagccagcggtccggccgggcactctagagagactgccagggataacctggaggaaggcggggatgacgtcaaatcatcatgccccttatgacttgggctacacacgtgctacaatggcgtaaacaaagggaagcaaagctgtgaagccgagcaaatctcaaaaataacgtctcagttcggactgtagtctgcaacccgactacacgaagctggaatcgctagtaatcgcagatcagaatgctgcggtgaatacgttcccgggccttgcacacaccgcccgtca

SEQ ID NO: 119 - DNA, 1394 bp, Artificial Sequence
  Synthetic polymer
agagtttgatcctggctcaggatgaactctagcggcaggcttaacacatgcaagtcgaggggcagcataatggatagcaatatctatggtggcgaccggcgcacgggtgtgtaacgcgtatgcaacctacctttaacagggggataacactgagaaattggtactaataccccataatatcatagaaggcatcttttatggttgaaaattccgatggttagagatgggcatgcgttgtattagctagttggtggggtaacggctcaccaaggcgacgatacatagggggactgagaggttaaccccccacactggtactgagacacggaccagactcctacgggaggcagcagtgaggaatattggtcaatggacgcaagtctgaaccagccatgccgcgtgcaggatgacggctctatgagttgtaaactgcttttgtacgagggtaaacgcagatacgtgtatctgtctgaaagtatcgtacgaataaggatcggctaactccgtgccagcagccgcggtaatacggaggattcaagcgttatccggatttattgggtttaaagggtgcgtaggcggtttgataagttagaggtgaaatttcggggctcaaccctgaacgtgcctctaatactgttgagctagagagtagttgcggtaggcggaatgtatggtgtagcggtgaaatgcttagagatcatacagaacaccgattgcgaaggcagcttaccaaactatatctgacgttgaggcacgaaagcgaggggagcaaacaggattagataccctggtagtccacgcagtaaacgatgaatactcgctgttggcgatatacagtcagcggccaagcgaaagcattaagtattccacctggggagtacgccggcaacggtgaaactcaaaggaattgacgggggcccgcacaagcggaggaacatgtggtttaattcgatgatacgcgaggaaccttacccgggcttaaattgcaactgactgaaccggaaacggttctttcttcggacagttgtgaaggtgctgcatggttgtcgtcagctcgtgccgtgaggtgtcggcttaagtgccataacgagcgcaacccttatcgatagttactagcaggtcatgctgaggactctattgagactgccgtcgtaagatgtgaggaaggtggggatgacgtcaaatcagcacggcccctacgtccggggctacacacgtgttacaatggggggtacagaaggcagctacacggcgacgtggtgctaatcccgaaagcctctctcagttcggattggagtctgcaacccgactccatgaagctggattcgctagtaatcgcgcatcagccacggcgcggtgaatacgttcccgggccttgcactcaccgcccgtca

SEQ ID NO: 120 - DNA, 1372 bp, Artificial Sequence
  Synthetic polymer
agagtttgatcctggctcaggacgaacgctggcggcgcgcctaacacatgcaagtcgaacgagcgagagagagcttgctttctcgagcgagtggcgaacgggtgagtaacgcgtgaggaacctgcctcaaagagggggacaacagttggaaacgactgctaataccgcataagcccacagctcggcatcgagcagagggaaaaggagcaatccgctttgagatggcctcgcgtccgattagctagttggtgaggtaacggcccaccaaggcgacgatcggtagccggactgagaggttgaacggccacattgggactgagacacggcccagactcctacgggaggcagcagtggggaatattgcacaatgggggaaaccctgatgcagcgacgccgcgtggaggaagaaggtcttcggattgtaaactcctgttgttgaggaagataatgacggtactcaacaaggaagtgacggctaactacgtgccagcagccgcggtaaaacgtaggtcacaagcgttgtccggaattactgggtgtaaagggagcgcaggcggaccggcaagttggaagtgaaaactatgggctcaacccataaattgctttcaaaactgctggccttgagtagtgcagaggtaggtggaattcccggtgtagcggtggaatgcgtagatatcgggaggaacaccagtggcgaaggcgacctactgggcaccaactgacgctgaggctcgaaagcatgggtagcaaaccaggattagataccctggtagtccatgccgtaaacgatgattactaggtgttggaggattgaccccttcagtgccgcagttaacacaataagtaatccacctggggagtacgaccgcaaggttgaaactcaaaggaattgacgggggcccgcacaagcagtggagtatgtggtttaattcgaagcaacgcgaagaaccttaccaggtcttgacatccgatgcatagcttagagataagtgaagtccttcgggacatcgagacaggtggtgcatggttgtcgtcagctcgtgtcgtgagatgttgggttaagtcccgcaacgagcgcaacccttatggtcagttactacgcaagaggactctggccagactgccgttgacaaaacggaggaaggtggggatgacgtcaaatcatcatgccctttatgacttgggctacacacgtactacaatggcgttaaacaaagagaagcaagaccgcgaggtggagcaaaactcagaaacaacgtcccagttcggactgcaggctgcgactcgcctgcacgaagtcggaattgctagtaatcgtggatcagcatgccacggtgaatacgttcccgggccttgtacacaccgcccgtca

SEQ ID NO: 121 - DNA, 1370 bp, Artificial Sequence
  Synthetic polymer
agagtttgatcctggctcaggacgaacgctggcggcacgcttaacacatgcaagtcgaacggagaacattgagcttgcttaatgttcttagtggcggacgggtgagtaacacgtgagtaacctgcctctgagagtgggatagcttctggaaacggatggtaataccgcataacatcatggattcgcatgtttctatgatcaaagatttatcgctcagagatggactcgcgtctaattagatagttggtgaggtaacggcccaccaagtcgacgatcagtagccggactgagaggttgaccggccacattgggactgagacacggcccagactcctacgggaggcagcagtggggaatattgcacaatgggggaaaccctgatgcagcgatgccgcgtggaggaagaaggttttcggattgtaaactcctgtcgaagaggacgataatgacggtactctttaagaaagctccggctaactacgtgccagcagccgcggtaatacgtagggagcgagcgttgtccggaattactgggtgtaaagggagcgtaggcgggatggcaagtcagatgtgaaaactatgggctcaacccatagactgcatttgaaactgttgttcttgagtgaggtagaggtaagcggaattcctggtgtagcggtgaaatgcgtagagatcaggaggaacatcggtggcgaaggcggcttactgggcctttactgacgctgaggctcgaaagcgtggggagcaaacaggattagataccctggtagtccacgccgtaaacgatgattactaggtgtggggggactgaccccttccgtgccgcagttaacacaataagtaatccacctggggagtacggccgcaaggctgaaactcaaaggaattgacgggggcccgcacaagcagtggagtatgtggattaattcgaagcaacgcgaagaaccttaccaggtcttgacatcgtatgcatagctcagagatgagtgaaatctcttcggagacatatagacaggtggtgcatggttgtcgtcagctcgtgtcgtgagatgttgggttaagtcccgcaacgagcgcaacccttactgttagttgctacgcaagagcactctagcaggactgccgttgacaaaacggaggaaggtggggatgacgtcaaatcatcatgccccttatgacctgggcctcacacgtactacaatggctgttaacagagggatgcaaagccgcgaggtagagcgaacccctaaaagcagtcttagttcggattgtaggctgcaacccgcctacatgaagtcggaattgctagtaatcgcagatcagcatgctgcggtgaatacgttcccgggccctgcactcaccgcccgtca

SEQ ID NO: 122 - DNA, 1389 bp, Artificial Sequence
  Synthetic polymer
agagtttgatcctggctcaggatgaacgctggcggcgtgcttaacacatgcaagtcgaacgggaattactttattgaaactttggtcgatttaatttaattctagtggcggacgggtgagtaacgcgtgggtaacctgccctgtacagggggataacagtcggaaatgactgctaataccgcataagcgcacagcaccgcatggtgcaggggtaaaaactccggtggtgcaggatggacccgcgtctgattagctggttggtgaggtaacggctcaccaaggcgacgatcagtagccggcttgagagagtgaacggccacattgggactgagacacggcccaaactcctacgggaggcagcagtggggaatattgcacaatgggggaaaccctgatgcagcgacgccgcgtgagtgaagaagtatctcggtatgtaaagctctatcagcagggaagaaaatgacggtacctgactaagaagccccggcttactacgtgccagcagccgcggtaatacgtagggggcaagcgttatccggaattactgggtgtaaagggtgcgtaggtggtatggcaagtcagaagtgaaaacccagggcttaactctgggactgcttttgaaactgtcagactggagtgcaggagaggtaagcggaattcctagtgtagcggtgaagtgcgtagatattaggaggaacatcagtggcgaaggcggcttactggactgaaactgacactgaggcacgaaagcgtggggagcaaacaggattagataccctggtagtccacgccgtaaacgatgaatactaggtgtcggggccgtagaggcttcggtgccgcagccaacgcagtaagtattccacctggggagtacgttcgcaagaatgaaactcaaaggaattgacggggacccgcacaagcggtggagcatgtggtttaattcgaagcaacgcgaagaaccttacctggtcttgacatccttctgaccggtccttaaccggacctttccttcgggacaggagtgacaggtggtgcatggttgtcgtcagctcgtgtcgtgagatgttgggttaagtcccgcaacgagcgcaacccctatctttagtagccagcaattcggatgggcactctagagagactgccagggataacctggaggaaggcggggatgacgtcaaatcatcatgccccttatgacttgggctacacacgtgctacaatggcgtaaacaaagggaagcaaagctgtgaagccgagcaaatctcaaaaataacgtctcagttcggactgtagtctgcaacccgactacacgaagctggaatcgctagtaatcgcagatcagaatgctgcggtgaatacgttcccgggtcttgcacacaccgcccgtca

SEQ ID NO: 123 - DNA, 1389 bp, Artificial Sequence
  Synthetic polymer
agagtttgatcctggctcaggatgaacgctggcggcgtgcttaacacatgcaagtcgagcgaagcggctgaattgattcttcggatgattttcagttgactgagcggcggacgggtgagtaacgcgtgggtgacctgccccataccgggggataacagctggaaacggctgctaataccgcataagcgcacagagctgcatggctcggtgtgaaaaactccggtggtatgggatgggcccgcgtctgattaggcagttggcggggtaacggcccaccaaaccgacgatcagtagccggcctgagagggcgaccggccacattgggactgagacacggcccaaactcctacgggaggcagcagtggggaatattgcacaatgggggaaaccctgatgcagcgacgccgcgtgagtgaagaagtatctcggtatgtaaagctctatcagcagggaagaaaatgacggtacctgactaagaagccccggctaactacgtgccagcagccgcggtaatacgtagggggcaagcattatccggaattactgggtgtaaagggtgcgtaggtggtatggcaagtcagaagtgaaaacccagggcttaactctgggactgcttttgaaactgtcagactggagtgcaggagaggtaagcggaattcccagtgtagcggtgaaatgcgtagatattaggaggaacaccagtggcgaaggcggcctgctggactgttactgacactgaggcacgaaagcgtggggagcaaacaggattagataccctggtagtccacgccgtaaacgatgaatactaggtgtcggggccgtataggcttcggtgccgccgctaacgcagtaagtattccacctggggagtacgttcgcaagaatgaaactcaaaggaattgacggggacccgcacaagcggtggagcatgtggtttaattcgaagcaacgcgaagaaccttaccaggtcttgacatccttctgaccgcaccttaattggtgctttccttcgggacagaagagacaggtggtgcatggttgtcgtcagctcgtgtcgtgagatgttgggttaagtcccgcaacgagcgcaacccctatcttcagtagccagcaggtaaggctgggcactctggagagactgccagggataacctggaggaaggtggggacgacgtcaaatcatcatgccccttatgatctgggcgacacacgtgctacaatggcggtcacagagtgaggcgaacccgcgagggggagcaaaccacaaaaaggccgtcccagttcggactgtagtctgcaacccgactacacgaagctggaatcgctagtaatcgcgaatcagaatgtcgcggtgaatacgttcccgggtcttgtacacaccgcccgtca

SEQ ID NO: 124 - DNA, 1376 bp, Artificial Sequence
  Synthetic polymer
agagtttgatcctggctcaggacgaacgctggcggcgcgcctaacacatgcaagtcgaacggagcttagagagcttgctttttaagcttagtggcgaacgggtgagtaacgcgtgagtaacctgccctagagtgggggacgacagttggaaacgactgctaataccgcataagcccacggtgccgcatgacactgagggaaaaggatttattcgctttaggatggactcgcgtccaattagctagttggtgaggtaacggcccaccaaggcgacgattggtagccggactgagaggttgaacggccacattgggactgagacacggcccaaactcctacgggaggcagcagtggggaatattgcacaatgggggaaaccctgatgcagcgacgccgcgtgagtgatgaagtatttcggtatgtgaagctctatcagcagggaagataatgacggtacctgactaagaagcaccggctaaatacgtgccagcagccgcggtaatacgtatggtgcaagcgttatccggatttactgggtgtaaagggtgcgtaggtggcaaggcaagtctgaagtgaaaatccggggctcaaccccggaactgctttggaaactgtttagctggagtacaggagaggtaagtggaattcctagtgtagcggtgaaatgcgtagatattaggaggaacaccagtggcgaaggcgacttactggactgctactgacactgaggcacgaaagcgtggggagcaaacaggattagataccctggtagtccacgccgtaaacgatgaatactaggtgttgggttccaaaggaactcggtgccgtcgcaaacgcattaagtattccacctggggagtacgttcgcaagaatgaaactcaaaggaattgacggggacccgcacaagcggtggagcatgtggtttaattcgaagcagcgcgaaaaaccttaccaagtcttgacatcctgatgaccgttccttaaccggaacttttcttcggaacatcagagacaggtggtgcatggttgtcgtcagctcgtgtcgtgagatgttgggttaagtcccgcaacgagcgcaacccctatttccagtagccagcagtaagatgggcactctggagagactgccggggataacccggaggaaggtggggatgacgtcaaatcatcatgccccttatgatttgggctacacacgtgctacaatggcagttacaaagagaagcaaacctgtgaaggcgagcaaacctcaaaaaggctgtctcagttcggattgtggtctgcaactcgactacatgaagctggaatcgctagtaatcgcagatcagcatgctgcggtgaatacgttcccgggtcttgcacacaccgcccgtca

SEQ ID NO: 125 - DNA, 1376 bp, Artificial Sequence
  Synthetic polymer
agagtttgatcctggctcaggacgaacgctggcggcgtgcttaacacatgcaagtcgaacggggctatttgatttcgattgggtagcctagtggcgaacgggtgagtaacgcgtgaatgacctgaccttgagagggggataacaacgagaaatcgttgctaataccgcataggaccacactgccgcatggcagagaggtgaaaggagaaatccgctaaaggaggggttcgcgtcccattaggtagtaggcggggtaaaggcccacctagccgacgatgggtagccgagctgagaggctgaacggccacactggaactgagacacggtccagactcctacgggaggcagcagtggggaatattgggcaatgggcgcaagcctgacccagcaacgccgcgtgaaggaagaaggctttcgggttgtaaacttcttttatgagggacgaaggaagtgacggtacctcatgaataagctccggctaactacgtgccagcagccgcggtaatacgtagggagcgagcgttatccggatttactgggtgtaaagggcgtgtaggcggggaagcaagtcagatgtgaaaaccagtggctcaaccactggcctgcatttgaaactgtttttcttgagtgatggagaggcaggcggaattccgtgtgtagcggtgaaatgcgtagatatacggaggaacaccagtggcgaaggcggcctgctggacattaactgacgctgaggcgcgaaagcgtggggagcaaacaggattagataccctggtagtccacgctgtaaacgatggatactaggtgtggggggactgaccccttccgtgccgcagttaacacaataagtatcccacctggggagtacgatcgcaaggttgaaactcaaaggaattgacgggggcccgcacaagcggtggagtatgtggtttaattcgaagcaacgcgaagaaccttaccagggcttgacatcccacggctggaattagagatagttctttcccttcggggactgtggtgacaggtggtgcatggttgtcgtcagctcgtgtcgtgagatgttgggttaagtcccgcaacgagcgcaacccctattgttagttgctacgcaagagcactctagcgagactgccgttgacaaaacggaggaaggtggggacgacgtcaaatcatcatgccccttatgtcctgggctacacacgtactacaatggcggtaaacagagggaagcaagaccgcgaggtggagcaaacccctaaaagccgtcccagttcggattgcaggctgcaacccgcctgtatgaagttggaatcgctagtaatcgcggatcagcatgccgcggtgaatacgttcccgggccttgcacacaccgcccgtca

SEQ ID NO: 126 - DNA, 1405 bp, Artificial Sequence
  Synthetic polymer
agagtttgatcctggctcaggacgaacgctggcggcgcgcctaacacatgcaagtcgaacggagcttagagagcttgctttttaagcttagtggcgaacgggtgagtaacgcgtgagtaacctgccctagagtgggggacaacagttggaaacgactgctaataccgcataagcccacggtaccgcatggtactgagggaaaaggatttattcgctttaggatggactcgcgtccaattagctagttggtggggtaacggcctaccaaggcgatgatcagtagccggtctgagaggatgaacggccacattgggactgagacacggcccagactcctacgggaggcagcagtggggaatcttccgcaatgggcgaaagcctgacggagcaatgccgcgtgagtgatgaaggaattcgttccgtaaagctcttttgtttatgacgaacgtgcagattgtaaataatgatctgtaatgacggtagtaaacgaataagccacggctaactacgtgccagcagccgcggtaatacgtaggtggcgagcgttgtccggaattattgggcgtaaagagcatgtaggcggttttttaagtctggagtgaaaatgcggggctcaaccccgtatggctctggatactggaagacttgagtgcaggagaggaaaggggaattcccagtgtagcggtgaaatgcgtagatattgggaggaacaccagtggcgaaggcgcctttctggactgtgtctgacgctgagatgcgaaagctagggtagcgaacgggattagataccccggtagtcctggccgtaaacgatgggtactaggtgtaggaggtatcgtccccttctgtgccggagttaacgcaataagtaccccgcctggggagtacgtccgcaaggatgaaactcaaaggaattgacgggggcccgcacaagcggtggagtatgtggtttaattcgacgcaacgcgaagaaccttaccaaggcttgacattgaatgaccgctccagagatggagctttcccttcggggacatgaaaacaggtggtgcatggctgtcgtcagctcgtgtcatgagatgttgggttaagtcccgcaacgagcgcaacccctatcctatgttaccagcgggtaatgccggggactcataggagactgccaaggacaacttggaggaaggcggggatgacgtcaagtcatcatgccccttatgtcttgggctacacacgtactacaatggtcggcaacagagggaagcgaagccgtgaggcagagcaaaccccagaaacccgatctcagttcggattgcaggctgcaactcgcctgcatgaagtcggaatcgctagtaatcgcaggccagcatactgcggtgaatacgtaagcgggccttgcacacaccgcccgtca

SEQ ID NO: 127 - DNA, 1409 bp, Artificial Sequence
  Synthetic polymer
agagtttgatcctggctcaggacgaacgctggcggcgtgcctaacacatgcaagtcgaacggagaattttatttcggtagaattcttagtggcgaacgggtgagtaacgcgtaggcaacctaccctttagacggggacaacattccgaaaggagtgctaataccggatgtgatcatcgtgccgcatggcaggatgaagaaagatggcctctacaagtaagctatcgctaaaggatgggcctgcgtctgattagctagttggtagtgtaacggactaccaaggcgatgatcagtagccggtctgagaggatgaacggccacattgggactgagacacggcccaaactcctacgggaggcagcagtggggaatcttccgcaatggacgaaagtctgacggagcaacgccgcgtgagtgatgaaggatttcggtctgtaaagctctgttgtttatgacgaacgtgcagtgtgtgaacaatgcattgcaatgacggtagtaaacgaggaagccacggctaactacgtgccaccagccgcggtaatacgtaggtggcgagcgttgtccggaattattgggcgtaaagagcatgtaggcggcttaataagtcgagcgtgaaaatgcggggctcaaccccgtatggcgctggaaactgttaggcttgagtgcaggagaggaaaggggaattcccagtgtagcggtgaaatgcgtagatattgggaggaacaccagtggcgaaggcgcctttctggactgtgtctgacgctgagatgcgaaagccagggtagcgaacgggattagataccccggtagtcctggccgtaaacgatgggtactaggtgtaggaggtatcgaccccttctgtgccggagttaacgcaataagtaccccgcctggggagtacggccgcaaggttgaaactcaaaggaattgacgggggcccgcacaagcggtggagtatgtggtttaattcgaagcaacgcgaagaaccttaccaggtcttgacatcccgatgaccgccttagagataaggcttttcttcggaacatcggtgacaggtggtgcatggttgtcgtcagctcgtgtcgtgagatgttgggttaagtcccgcaacgagcgcaacccttacggttagttgatacgcaagatcactctagccggactgccgttgacaaaacggaggaaggtggggacgacgtcaaatcatcatgccccttatgacctgggctacacacgtgctacaatggcgtaaacaaagggaagcgaacctgcgagggtgggcaaatcccaaaaataacgtcccagttcggactgtagtctgcaacccgactacacgaagctggaatcgctagtaatcgcagatcagaatgctgcggtgaatacgttcccgggtcttgtactcaccgcccgtca

SEQ ID NO: 128 - DNA, 1376 bp, Artificial Sequence
  Synthetic polymer
agagtttgatcctggctcaggatgaacgctggcggcgtgcttaacacatgcaagtcgaacgggaaatatttcattgagacttcggtggatttgatctatttctagtggcggacgggtgagtaacgcgtgggtaacctgccttatacagggggataacagtcagaaatggctgctaataccgcataagcgcacagagctgcatggctcagtgtgaaaaactccggtggtatgagatggacccgcgtctgattagctagttggtggggtaacggcccaccaaggcgacgatcagtagccgacctgagagggtgatcggccacattgggactgagacacggcccaaactcctacgggaggcagcagtggggaatattgcacaatggaggaaactctgatgcagcgacgccgcgtgaaggatgaagtatttcggtatgtaaacttctatcagcagggaagaaaatgacggtacctgactaagaagccccggctaactacgtgccagcagccgcggtaatacgtagggggcaagcgttatccggatttactgggtgtaaagggagcgtagacggcacggcaagccagatgtgaaagcccggggctcaaccccgggactgcatttggaactgctgagctagagtgtcggagaggcaagtggaattcctagtgtagcggtgaaatgcgtagatattaggaggaacaccagtggcgaaggcggcttgctggacgatgactgacgttgaggctcgaaagcgtggggagcaaacaggattagataccctggtagtccacgccgtaaacgatgaatactaggtgtcggggagcatggctcttcggtgccgtcgcaaacgcagtaagcattccacctggggagtacgttcgcaagaatgaaactcaaaggaattgacggggacccgcacaagcggtggagcatgtggtttaattcgaagcaacgcgaagaaccttaccaagtcttgacatccctctgaccgactcttaaccgagtctttccttcgggacagaggagacaggtggtgcatggttgtcgtcagctcgtgtcgtgagatgttgggttaagtcccgcaacgagcgcaacccctatccccagtagccagcggttcggccgggcactctgaggagactgccagggataacctggaggaaggcggggatgacgtcaagtcatcatgccccttatgatttgggctacacacgtgctacaatggcgtaaacaaagggaagcgaacccgcgagggtgggcaaatcccaaaaataacgtcccagttcggactgtagtctgcaacccgactacacgaagctggaatcgctagtaatcgcggatcagaatgccgcggtgaataaaatcccgggtcttgtac

SEQ ID NO: 129 - DNA, 1400 bp, Artificial Sequence
  Synthetic polymer
agagtttgatcctggctcaggacgaacgctggcggcgtgcctaacacatgcaagtcgaacgaagctctgcgatacaagacttcggtcaagttgaacggatgacttagtggcggacgggtgagtaacgcgtgaggaacctgcctttcagtgggggacaacagttggaaacgactgctaataccgcataatgtattctgaccgcatgatcggaataccaaagatttattgctgaaagatggcctcgcgtctgattagatagttggtgaggtaacggctcaccaagtcgacgatcagtagccggactgagaggttgaacggccacattgggactgagatacggcccagactcctacgggaggcagcagtggggaatattgggcaatgggggaaaccctgacccagcaacgccgcgtgaaggaagaaggctttcgggttgtaaacttcttttaccagggacgaaggacgtgacggtacctggagaaaaagccacggctaactacgtgccagcagccgcggtaatacgtaggtggcaagcgttgtccggatttactgggtgtaaagggcgtgtaggcggagaagcaagtcagaagtgaaatccatgggcttaacccatgaactgcttttgaaactgtttcccttgagtatcggagaggcaggcggaattcctagtgtagcggtgaaatgcgtagatattaggaggaacaccagtggcgaaggcggcctgctggacgacaactgacgctgaggcgcgaaagcgtggggagcaaacagaattagataccctggtagtccacgctgtaaacgatgatatactaggtgtggggaggactgaccccttcggtgcggcagttaacacaataggtattccacttggggagtacgatcgcaagatggaaattcaaaggaattgacgggggccggcacaagcagtggattatgtggtttatttcgacgcaacgcgaagaactttaccggggatttgacatcctactaacgaagcagagatgcattaggtgccccttcggggaaagtagagacaggtggtgcatggttgtcgtcagctcgtgtcgtgagatgttgggttaagtcccgcaacgagcgcaacccttgtgatatgttactaacattgagttgaggactcatatcagactgccggtgataaaccggaggaaggtggggacgacgtcaaatcatcatgccccttatgacctgggctacacacgtactacaatggatgttaacagagggaagcaagacagcgatgtggagcaaacccctaaaaacattctcagttcagattgcaggctgcaacccgcctgcatgaagatggaattgctagtaatcgcggatcagcatgccgcggtgaatacgttcccgggtcttgcactcaccgcccgtca

SEQ ID NO: 130 - DNA, 1393 bp, Artificial Sequence
  Synthetic polymer
agagtttgatcctggctcaggatgaacgctggcggcgtgcttaacacatgcaagtcgaacgaaacaccttatttgattttcttcggaactgaagatttggtgattgagtggcggacgggtgagtaacgcgtgggtaacctaccctgtacagggggataacagtcagaaatgactgctaataccgcataagaccacagcaccgcatggtgcaggggtaaaaactccggtggtacaggatggacccgcgtctgattagctggttggtgaggtaacggctcaccaaggcgacgatcagtagccggcttgagagagtgaacggccacattgggactgagacacggcccaaactcctacgggaggcagcagtggggaatattgcacaatgggggaaaccctgatgcagcgacgccgcgtgagtgaagaagtatctcggtatgtaaagctctatcagcagggaagaaaatgacggtacctgactaagaagccccggctaactacgtgccagcagccgcggtaatacgtagggggcaagcgttatccggaattactgggtgtaaagggtgcgtaggtggtatggcaagtcagaagtgaaaacccagggcttaactctgggactgcttttgaaactgtcagactggagtgcaggagaggtaagcggaattcctagtgtagcggtgaaatgcgtagatattaggaggaacatcagtggcgaaggcggcttactggacgatcactgacgttgaggctcgaaagcgtggggagcaaacaggattagataccctggtagtccacgccgtaaacgatgaatactaggtgtcgggtggcaaagccattcggtgccgtcgcaaacgcagtaagtattccacctggggagtacgttcgcaagaatgaaactcaaaggaattgacggggacccgcacaagcggtggagcatgtggtttaattcgaagcaacgcgaagaaccttaccaagtcttgacatccgcctgaccgatccttaaccggatctttccttcgggacaggcgagacaggtggtgcatggttgtcgtcagctcgtgtcgtgagatgttgggttaagtcccgcaacgagcgcaacccttatcctcagtagccagcaggtaaagctgggcactctgtggagactgccagggataacctggaggaaggtggggatgacgtcaaatcatcatgccccttatgatctgggctacacacgtgctacaatggcgtaaacaaagggaggcaaagccgcgaggtggagcaaatcccaaaaataacgtctcagttcggactgcagtctgcaactcgactgcacgaagctggaatcgctagtaatcgcgaatcagaatgttgcggtgaatacgttcccgggtcttgcacacaccgcccgtca

SEQ ID NO: 131 - DNA, 1375 bp, Artificial Sequence
  Synthetic polymer
agagtttgatcctggctcaggacgaacgctggcggcgtgcctaacacatgcaagtcgagcgagttgattctcttcggagatgaagctagcggcggacgggtgagtaacacgtgggcaacctacctcatagaggggaatagcctcccgaaagggagattaataccgcataagattgtagcttcgcatgaagtagcaattaaaggagcaatccgctatgagatgggcccgcggcgcattagctagttggtgaggtaacggctcaccaaggcgacgatgcgtagccgacctgagagggtgatcggccacattgggactgagacacggcccagactcctacgggaggcagcagtggggaatattgcacaatgggggaaaccctgatgcagcgacgccgcgtgaaggaagaagtatctcggtatgtaaacttctatcagcagggaagaaaatgacggtacctgactaagaagccccggctaactacgtgccagcagccgcggtaatacgtagggggcaagcgttatccggatttactgggtgtaaagggagcgtagacggatggacaagtctgatgtgaaaggctggggctcaaccccgggactgcattggaaactgcccgtcttgagtgccggagaggtaagcggaattcctagtgtagcggtgaaatgcgtagatattaggaggaacaccagtggcgaaggcggcttactggacggtaactgacgttgaggctcgaaagcgtggggagcaaacaggattagataccctggtagtccacgcggtaaacgatgaatgctaggtgtcgggtgacaaagtcattcggtgccgccgcaaacgcattaagcattccacctggggagtacgttcgcaagaatgaaactcaaaggaattgacggggacccgcacaagcggtggagcatgtggtttaattcgaagcaacgcgaagaaccttaccaagtcttgacatccctctgaccggaacttaaccgttccttcccttcggggcagaggagacaggtggtgcatggttgtcgtcagctcgtgtcgtgagatgttgggttaagtcccgcaacgagcgcaacccctatccccagtagccagcatttaaggtgggcactctgaggagactgccagggataacctggaggaaggcggggatgacgtcaaatcatcatgccccttatgatttgggctacacacgtgctacaatggcgtaaacaaagggaagcgaacccgcgagggtgggcaaatcccaaaaataacgtcccagttcggactgtagtctgcaacccgactacacgaagctggaatcgctagtaatcgcggatcagaatgccgcggtgaatacgttcccgggtcttgcactcaccgcccgtca

SEQ ID NO: 132 - DNA, 1391 bp, Artificial Sequence
  Synthetic polymer
agagtttgatcctggctcaggatgaacgctggcggcgtgcttaacacatgcaagtcgaacgaagcacttatctttgattcttcggatgaagaggtttgtgactgagtggcggacgggtgagtaacgcgtgggtaacctgcctcatacagggggataacagttagaaatgactgctaataccgcataagaccacggggccgcatggctcagtgggaaaaactccggtggtatgagatggacccgcgtctgattaggtagttggtggggtaacggcccaccaagccgacgatcagtagccgacctgagagggtgaccggccacattgggactgagacacggcccagactcctacgggaggcagcagtggggaatattgcacaatgggggaaaccctgatgcagcaacgccgcgtgagtgaagaagtatttcggtatgtaaagctctatcagcagggaagataatgacggtacctgactaagaagctccggctaaatacgtgccagcagccgcggtaatacgtatggagcaagcgttatccggatttactgggtgtaaagggtgcgtaggtggcagtgcaagtcagatgtgaaaggccggggctcaaccccggagctgcatttgaaactgctcggctagagtacaggagaggcaggcggaattcctagtgtagcggtgaaatgcgtagatattaggaagaacaccagtggcgaaggcggcttactggacggtaactgacgttgaggctcgaaagcgtggggagcaaacaggattagataccctggtagtccacgccgtaaacgatgaatgctaggtgttggggagcaaagctcttcggtgccgccgcaaacgcattaagcattccacctggggagtacgttcgcaagaatgaaactcaaaggaattgacggggacccgcacaagcggtggagcatgtggtttaattcgaagcaacgcgaagaaccttaccaggtcttgacatcccgatgaccggcccgtaacggggccttctcttcggagcattggagacaggtggtgcatggttgtcgtcagctcgtgtcgtgagatgttgggttaagtcccgcaacgagcgcaacccttatcctcagtagccagcaggtaaagctgggcactctgtggagactgccagggataacctggaggaaggtggggatgacgtcaaatcatcatgccccttatgatctgggctacacacgtgctacaatggcgtaaacaaagggaggcaaagccgcgaggtggagcaaatcccaaaaataacgtctcagttcggactgcagtctgcaactcgactgcacgaagctggaatcgctagtaatcgcgaatcagaatgctgcggtgaatacgttcccgggtcttgcacaaaccgcccgtca

SEQ ID NO: 133 - DNA, 1375 bp, Artificial Sequence
  Synthetic polymer
ttcgcccttagagtttgatcctggctcaggataaacgctggcggcgtgcttaacacatgcaagtcgaacgaagtttttctttcgggaggaacttagtggcggacgggtgagtaacgcgtgggtaacctgccctgtacagggggacaacagctggaaacggctgctaataccgcataagcccttagcactgcatggtgcatagggaaaaggagcaatccggtacaggatggacccgcgtctgattagccagttggcagggtaacggcctaccaaagcgacgatcagtagccgatctgagaggatgtacggccacattgggactgagacacggcccagactcctacgggaggcagcagtggggaatattgcacaatgggggaaaccctgatgcagcgacgccgcgtggaggaagaaggtcttcggattgtaaactcctgttgttgaggaagataatgacggtactcaacaaggaagtgacggctaactacgtgccagcagccgcggtaaaacgtaggtcacaagcgttgtccggaattactgggtgtaaagggagcgcaggcgggaaggcaagttggaagtgaaatccatgggctcaacccatgaactgctttcaaaactgtttttcttgagtagtgcagaggtaggcgggattcccggtgtagcggtggaatgcgtagatatcgggaggaacaccagtggcgaaggcggcctactgggcaccaactgacgctgaggctcgaaagtgtgggtagcaaacaggattagataccctggtagtccacactgtaaacgatgattactaggtgttggaggattgaccccttcagtgccgcagttaacacaataagtaatccacctggggagtacgaccgcaaggttgaaactcaaaggaattgacgggggcccgcacaagcagtggagtatgtggtttaattcgacgcaacgcgaagaaccttaccaagtcctgacatcctgcgacgcacatagaaatatgtgtttccttcgggacgcagagacaggtggtgcatggttgtcgtcagctcgtgtcgtgagatgttgggttaagtcccgcaacgagcgcaacccttatggtcagttactacgcaagaggactctggccagactgccgttgacaaaacggaggaaggtggggatgacgtcaaatcatcatgccctttatgacttgggctacacacgtactacaatggcgttaaacaaagagaagcaagaccgcgaggtggagcaaaactcaaaaacaacgtctcagttcagattgcaggctgcaactcgcctgcatgaagtcggaattgctagtaatcgcggatcagcatgccgcggtgaatacgttcccgggccttgcacacacagcccgtca

SEQ ID NO: 134 - DNA, 1388 bp, Artificial Sequence
  Synthetic polymer
agagttttatcctggctcaggatgaacgctggcggcgtgcctaacacatgcaagtcgagcgagaagtctgcaaaagaaacttcggtggacattggagatggaaagcggcggacgggtgagtaacgcgtaggcaacctgccctttgcagagggatagcctcgggaaaccgggattaaaaccacataaagccgggagaccgcatgggataccggtcaaagatttatcggcagaggatgggcctgcgtctgattagttagttggtgaggtaacggctcaccaaggcaatgatcagtagccgacctgagagggtgaacggccacattggaactgagacacggtccaaactcctacgggaggcagcagtggggaatattgcacaatgggggaaaccctgatgcagcaacgccgcgtgagcgaagaaggcctttgggtcgtaaagctctgtcggaagggaagaaggacgtgacggtaccttccgaggaagccccggctaactacgtgccagcagccgcggtaatacgtagggggcaagcgttatccggaattattgggcgtaaagagtacgtaggcggtcttttaagcgcagggtataaggcaagggcttaacctttgttggccctgtgaactggaggacttgagtatcggagagggaagcggaattcctagtgtagcggtgaaatgcgtagatattaggaggaacaccagtggcgaaggcggctttctggacgaaaactgacgctgaggtacgaaagcgtggggagcaaacaggattagataccctggtagtccacgctgtaaacgatgagcactaggtgtcggggtggctagactcctgtgccggagttgtcgcaataagtgatctgctcgggggggcggcacgcaagtgtgaaactcaaaggaatggccggggaccggctcaagcagcggagcaggcggtttaattagaagctatgtgaagagccttcccagggcttgacatccatctgtcaggcttctaatggaggcattgttcgggctgaggagacaggtggggcagggtggtggtcatctggggtcgtgggagggggggagaagtcacgcaacgagcgccatccctatcctcagtagccagcacttaaggtgggcagtctggggaggtttccagggatgaaagggaggaaggaggggaaggcgtcaaatcatcatgcgctctatgatttggcccacccgcgtgctccaatggtgtatacaaagggaagggagagtgggagagggagcggatcccaaaaataatctcgcagctgggacggtcgtgagcaacccgagtacatgaagcgggaatcgcgagtaatcgaggatcggaacaccgcggggaatgcgttcccgggtcttggactcgccgcccgtca

SEQ ID NO: 135 - DNA, 1388 bp, Artificial Sequence
  Synthetic polymer
agagtttgatcctggctcaggatgaacgctggcggcgtgcctaacacatgcaagtcgaacgaagcgccttttgagattcttcggatgatcgtttggtgactgagtggcggacgggtgagtaacgcgtgggtaacctgccctgtacagggggataacagccagaaatggctgctaataccgcataagcgcacggaggggcatccttccgtgtgaaaaactccggtggtacaggatgggcccgcgtctgattagctggttggcggggtaacggcccaccaaggcgacgatcagtagccggtctgagaggatgaacggccacattggaactgagacacggcccaaactcctacgggaggcagcagtggggaatattgcacaatgggggaaaccctgatgcagcaacgccgcgtgagtgaagaagtatttcggtatgtaaagctctatcagcagggaagataatgacggtacctgactaagaagctccggctaaatacgtgccagcagccgcggtaatacgtatggagcaagcgttatccggatttactgggtgtaaagggtgcgtaggcggcacagcaagtcagatgtgaaagaccggggctcaaccccggggctgcatttgaaactgccgagcttgagtccgggagaggcaggcggaattcctagtgtagcggtgaaatgcgtagatattaggaggaacaccagtggcgaaggcggcctgctggaccggaactgacgctgaggcacgaaagcgtggggagcaaacaggattagataccctggtagtccacgccgtaaacgatgaatactaggtgtcggggccgtataggcttcggtgccgcagctaacgcagtaagtattccacctggggagtacgttcgcaagaatgaaactcaaaggaattgacggggacccgcacaagcggtggagcatgtggtttaattcgaagcaacgcgaagaaccttaccaagtcttgacatccgcctgaccgatccttaaccggatctttccttcgggacaggcgagacaggtggtgcatggttgtcgtcagctcgtgtcgtgagatgttgggttaagtcccgcaacgagcgcaacccctatcctcagtagccagcatttaaggtgggcactctggggagactgccagggataacctggaggaaggcggggatgacgtcaaatcatcatgccccttatgatttgggctacacacgtgctacaatggcgtaaacaaagggaagcgagatcgtgagatggagcaaatcccaaaaataacgtcccagttcggactgtagtctgcaacccgactacacgaagctggaatcgctagtaatcgcggatcagaatgccgcggtgaatacgttcccgggtcttgtactcaccgcccgtca

SEQ ID NO: 136 - DNA, 1391 bp, Artificial Sequence
  Synthetic polymer
ttcgcccttagagtttgatcctggctcaggacgaacgctggcggcgcgcctaacacatgcaagtcgaacggagctatgttgaaagcttgctggatatatagcttagtggcggacgggtgagtaacacgtgagcaacctgcctttcagagtggaataacgtttggaaacgaacgctaataccgcataatgtcagaggatggcatcattctttgaccaaagatttatcgctgaaagatgggctcgcggccgattaggtagttggtgagataatagcccaccaagccgacgatcggtagccggactgagaggttgaacggccacattgggactgagacacggcccagactcctacgggaggcagcagtgggggatattgcacaatgggggaaaccctgatgcagcgacgccgcgtgagggaagacggccttcgggttgtaaacctctgtcttcggggacgaataaatgacggtacccgaggaggaagccacggctaactacgtgccagcagccgcggtaatacgtaggtggcaagcgttgtccggaattactgggtgtaaagggagcgtaggcggggaagcaagttgaatgtctaaactatcggctcaactgatagtcgcgttcaaaactgccactcttgagtgcagtagaggtaggtggaattcctagtgtagcggtgaaatgcgtagatattaggaggaacaccagtggcgaaggcggcctactgggctgtaactgacgctgaggctcgaaagcgtgggtagcaaacaggattagataccctggtagtccacgccgtaaacgatgattactaggtgtggggggactgaccccttccgtgccggagttaacacaataagtaatccacctggggagtacggccgcaaggctgaaactcaaaggaattgacgggggcccgcacaagcagtggagtatgtggtttaattcgaagcaacgcgaagaaccttaccaagtcttgacatccttctgaccggtacttaaccgtaccttctcttcggagcaggagtgacaggtggtgcatggttgtcgtcagctcgtgtcgtgagatgttgggttaagtcccgcaacgagcgcaacccttatctttagtagccagcggtccggccgggcactctggagagactgccagggataacctggaggaaggtggggatgacgtcaaatcatcatgccccttatgagcagggctacacacgtgctacaatggcgtaaacaaagggaggcagaaccgcgaggtcgagcaaatcccaaaaataacgtctcagttcggattgtagtctgcaactcgactacatgaagctggaatcgctagtaatcgcgaatcagaatgtcgcggtgaatacgttcccgggtcttgcactcaccgcccgtca

SEQ ID NO: 137 - DNA, 1394 bp, Artificial Sequence
  Synthetic polymer
agagtttgatcctggctcaggatgaacgctggcggcgtgcctaacacatgcaagtcgaacgaagcgcttccgctagattttcttcggagatgaaggcggctgcgactgagtggcggacgggtgagtaacgcgtgggcaacctgccttgcactgggggataacagccagaaatggctgctaataccgcataagaccgaagcgccgcatggcgctgcggccaaagccccggcggtgcaagatgggcccgcgtctgattaggtagttggcggggtaacggcccaccaagccgacgatcagtagccgacctgagagggtgaccggccacattgggactgagacacggcccagactcctacgggaggcagcagtggggaatattgcacaatgggggaaaccctgatgcagcgacgccgcgtgaaggaagaagtatctcggtatgtaaagctctatcagcagggaagaaaatgacggtacctgactaagaagccccggctaactacgtgccagcagccgcggtaatacgtagggggcaagcgttatccggaattactgggtgtaaagggtgcgtaggtggtatggcaagtcagaagtgaaaacccagggcttaactctgggactgcttttgaaactgtcagactggagtgcaggagaggtaagcggaattcctagtgtagcggtgaaatgcgtagatattaggaggaacatcagtggcgaaggcggcttactggactgaaactgacactgaggcacgaaagcgtggggagcaaacaggattagataccctggtagtccacgccgtaaacgatgaatactaggtattgggaagcattgcttctcggtgccgtcgcaaacgcagtaagtattccacctggggagtacgttcgcaagaatgaaactcaaaggaattgacggggacccgcacaagcggtggagcatgtggtttaattcgaagcaacgcgaagaaccttaccaagtcttgacatccttctgaccggtacttaaccgtaccttctcttcggagcaggagtgacaggtggtgcatggttgtcgtcagctcgtgtcgtgagatgttgggttaagtcccgcaacgagcgcgacccttatctttagtagccagcggtccggccgggcactctagagggactgccagggataacctggaggaaggcggggatgacgtcaaatcatcatgccccttatgacttgggctacacacgtgctacaatggcgtaaacaaagggaagcaaagctgtgaagccgagcaaatctcaaaaataacgtctcagttcggactgtagtctgcaacccgactacacgaagctggaatcgctagtaatcgcagatcagaatgctgcggtgaatacgtccccgggtcttgcactcaccgcccgtca

SEQ ID NO: 138 - DNA, 1369 bp, Artificial Sequence
  Synthetic polymer
agagtttgatcctggctcaggatgaacgctggcggcgtgcttaacacatgcaagtcgaacgattaacccttcttcggaaggtcataaagtggcgaacgggtgagtaacacgtgaccaacctgcctctcacattgggataacttagagaaatctaagctaataccaaatactcttgatctgccgcatgacagaccaaggaaagctttcgcggtgagagatggggtcgcggcccattaggtagttggtggggtagaggcctaccaagccgatgatgggtagccgggttgagagaccgaccggccacattgggactgagatacggcccagactcctacgggaggcagcagtggggaattttgcgcaatgggcgaaagcctgacgcagcaacgccgcgtgcgggatgacggccttcgggttgtaaaccgctttcagtgggaaagataatgacggtacccacacaagaagctccggctaaatacgtgccagcagccgcggtaatacgtatggagcaagcgttatccggatttattgggcgtaaagcgcgcgtaggcggcttgttaagcaaggtcttaaatcttggggctcaacctcaagccggatcttgaactgacaggctcgagtatggtagaggaaagtggaattcccagtgtagcggtggaatgcgcagatattgggaagaacaccgatggcgaaggcagctttctgggccattactgacgctgaggtgcgaaagctaggggagcaaacaggattagataccctggtagtcctagccgtaaacgatggacagtaggtgtggggaggataaccttttccgtaccgcaagctaaagcattaagtgccccgcctggggagtacggccgcaaggctaaaactcaaaggaattgacgggggcccgcaacaagcagcggagcatgtggcttaattcgaagcaacgcgaagaaccttaccagggcttgacatataggtgaagcggtggaaacaccgtggccgaaaggagcctatacaggtggtgcatggctgtcgtcagctcgtgtcgtgagatgttgggttaagtcccgcaacgagcgcaacccctgttgcatgttgccagcattaagttggggactcatgcgagactgccggcgttaagccggaggaaggtggggatgacgtcaagtcatcatgccctttatgtcctgggctgcacacgtgctacaatggccggtacaacgggctgcgaactcgcgagagcaagcgaatcccttaaaaccggtcccagttcggattgcaggctgcaattcgcctgcatgaagtcggagttgctagtaatcgcggatcagcatgccgcggtgaatacgttcccgggccttgcacacaccgcccgtca

SEQ ID NO: 139 - DNA, 1353 bp, Artificial Sequence
  Synthetic polymer
ttaacacatgcaagtcgagcgaagcacttaagtttgattcttcggatgaagacttttgtgactgagcggcggacgggtgagtaacgcgtgggtaacctgcctcatacagggggataacagttagaaatggctgctaataccgcataagaccacagtactgcatggcacagtggtaaaaactccggtggtatgagatggacccgcgtctgattaggtagttggtgaggtaacggcccaccaagccgacgatcagtagccgacctgagagggtgaccggccacattgggactgagacacggcccagactcctacgggaggcagcagtggggaatattgcacaatgggcgaaagcctgatgcagcgacgccgcgtgaaggataaagtatttcggtatgtaaacttctatcagcagggaagaaaatgacggtacctgactaagaagccccggctaactacgtgccagcagccgcggtaatacgtatggagcaagcgttatccggatttactgggtgtaaagggagtgtaggtggccaggcaagtcagaagtgaaagcccggggctcaaccccgggactgcttttgaaactgcagggctagagtgcaggaggggcaagtggaattcctagtgtagcggtgaaatgcgtagatattaggaggaacaccagtggcgaaggcggcttgctggactgtaactgacactgaggctcgaaagcgtggggagcaaacaggattagataccctggtagtccacgccgtaaacgatgaatacaaggtggcgggggcacataagtgcttcggtgccgcagcaaacgcaaaaagtattcccccttggggagtacgttgccaagaatgaaactcaaagaaatgacggggacccgcacaagcgggggagcatggggtttaattcgaagcaacgcgaagaaccttaccaagtcttgacatcccactgaccggacagtaatgtgtcctttccttcgggacagtggagacaggtggtgcatggttgtcgtcagctcgtgtcgtgagatgttgggttaagtcccgcaacgagcgcaacccctatcctatgttaccagcgcgtaaaggcggggactcataggagactgccagggataacttggaggaaggcggggatgacgtcaagtcatcatgccccttatgtcttgggctgcacacgtgctacaatggcgtaaacaaagggaagcgagattgtgagatggagcaaatcccaaaaataacgtctcagttcggattgtagtctgcaactcgactacatgaagctggaatcgctagtaatcgcagatcagaatgctgcggtgaatacgttcccgggtcttgcacacaccgcccgtca

SEQ ID NO: 140 - DNA, 1381 bp, Artificial Sequence
  Synthetic polymer
agagtttgatcctggctcaggatgaactctggcggcgtgcttaacacatgcaagtcgaacgaagatgccggagtgcttgcactttggcagactgagtggcggacgggtgagtaacgcgtgggtaacctgccttatacagggggataacagttggaaacgactgctaataccgcataagcgcacggtatcgcatgatacagtgtgaaaaactccggtggtataagatggacccgcgtctgattagcttgttggtgaggtaacggcccaccaaggcgacgatcagtagccggcctgagagggtgaacggccacattgggactgagacacggcccaaactcctacgggaggcagcagtggggaatattgcacaatgggggaaaccctgatgcagcgacgccgcgtgagtgatgaagtatttcggtatgtaaaactctatcagcagggaagataatgacggtacctgactaagaagcaccggctaaatacgtgccagcagccgcggtaatacgtatggtgcaagcgttatccggatttactgggtgtaaagggtgcgtaggtggtatggcaagtcagaagtgaaaggctggggcttaaccccgggactgcttttgaaactgtcaaactagagtacaggagaggtaagcggaattcctagtgtagcggtgaaatgcgtagatattaggaagaacaccagtggcgaaggcggcttactggacggtaactgacgttgaggctcgaaagcgtggggagcaaacaggattagataccctggtagtccacgccgtaaacgatgaatgctaggtgttggggagcaaagctcttcggtgccgccgcaaacgcattaagcattccacctggggagtacgttcgcaagaatgaaactcaaaggaattgacggggacccgcacaagcggtggagcatgtggtttaattcgaagcaacgcgaagaaccttaccaggtcttgacatcccgatgaccggcccgtaacggggccttctcttcggagcattggagacaggtggtgcatggttgtcgtcagctcgtgtcgtgagatgttgggttaagtcccgcaacgagcgcaacccttatcctcagtagccagcaggtcaagctgggcactctgtggagactgccagggataacctggaggaaggtggggatgacgtcaaatcatcatgccccttatgatctgggctacacacgtgctacaatggcgtaaacaaagggaggcaaagccgcgaggtggagcaaatcccaaaaataacgtctcagttcggactgcagtctgcaactcgactgcacgaagctggaatcgctagtaatcgcgaatcagaatgtcgcggtggatacgttcccgggtcttgcactcaccgcccgtca

SEQ ID NO: 141 - DNA, 1389 bp, Artificial Sequence
  Synthetic polymer
agagtttgatcctggctcaggatgaacgctggcggcgtgcttaacacatgcaagtcgaacgggaaaccttttattgaagcttcggcggatttagctggtttctagtggcggacgggtgagtaacgcgtgggtaacctgcctcatacagggggataacagttagaaatgactgctaataccgcataagaccacggtaccgcatggtacagtggtaaaaactccggtggtatgagatggacccgcgtctgattaggtagttggtggggtaacggcctaccaagccgacgatcagtagccgacctgagagggtgaccggccacattgggactgagacacggcccagactcctacgggaggcagcagtggggaatattgcacaatggaggaaactctgatgcagcgacgccgcgtgaaggatgaagtatttcggtatgtaaacttctatcagcagggaagaaaatgacggtacctgactaagaagccccggctaactacgtgccagcagccgcggtaatacgtagggggcaagcgttatccggatttactgggtgtaaagggagcgtagacggcacggcaagccagatgtgaaagcccggggctcaaccccgggactgcatttggaactgctgagctagagtgtcggagaggcaagtggaattcctagtgtagcggtgaaatgcgtagatattaggaggaacaccagtggcgaaggcggcttgctggacgatgactgacgttgaggctcgaaagcgtggggagcaaacaggattagataccctggtagtccacgccgtaaacgatgactgctaggtgtcgggtggcaaagccattcggtgccgcagctaacgcaataagcagtccacctggggagtacgttcgcaagaatgaaactcaaaggaattgacggggacccgcacaagcggtggagcatgtggtttaattcgaagcaacgcgaagaaccttaccaagtcttgacatcctcttgcccggtcagtaatgtgaccttttcttcggaacaagagtgacaggtggtgcatggttgtcgtcagctcgtgtcgtgagatgttgggttaagtcccgcaacgagcgcaacccctattcttagtagccagcatataaggtgggcactctaggaagactgccagggataacctggaggaaggtggggatgacgtcaaatcatcatgccccttatgacttgggctacacacgtgctacaatggcgtaaacaaagtgaagcgagagtgtgagcttaagcaaatcacaaaaataacgtctcagttcggattgtagtctgcaactcgactacatgaagctggaatcgctagtaatcgcgaatcagaatgtcgcggtgaatacgttcccgggtcttgcactcaccgcccgtca

SEQ ID NO: 142 - DNA, 1393 bp, Artificial Sequence
  Synthetic polymer
agagtttgatcctggctcaggacgaacgctggcggcgcgcctaacacatgcaagtcgaacggggtatattggattgatccttcgggagattgataatagacctagtggcggacgggtgagtaacacgtgagcaacctgccttacagaggggggataacgttctgaaaagaacgctaataccgcataacatattgagggggcatcctcttggtatcaaaggagcaatccgctgtaagatgggctcgcgtccgattagccagttggcggggtaacggcccaccaaagcgacgatcggtagccggactgagaggttgaacggccacattgggactgagacacggcccagactcctacgggaggcagcagtgggggatattgcacaatgggggaaaccctgatgcagcgacgccgcgtgagggaagaaggttttcggattgtaaacctctgtcttcggtgacgaaacaagacggtagccgaggaggaagccacggctaactacgtgccagcagccgcggtaatacgtaggtggcaagcgttgtccggaattactgggtgtaaagggagcgcaggcggagaagcaagtcagtggtgaaaacgatgggcttaactcatcgactgccattgaaactgtttcccttgagtgaagtagaggcaggcggaattccgagtgtagcggtgaaatgcgtagatattcggaggaacaccagtggcgaaggcggcctgctgggctttaactgacgctgaggctcgaaagtgcggggagcaaacaggattagataccctggtagtccacactgtaaacgatgattgctaggtgtggggggtctgaccccttccgtgccggagttaacgcaataagcaatccacctggggagtacggccgcaaggttgaaactcaaaggaattgacggggacccgcacaagcggtggagcatgtggtttaattcgaagcaacgcgaagaaccttacctgctcttgacatctccctgagcggcaagtaatgttgcctttccttcgggacagggatgacaggtggtgcatggttgtcgtcagctcgtgtcgtgagatgttgggttaagtcccgcaacgagcgcaacccctatctttagtagccagcggtttggccgggcactctagagagactgccagggataacctggaggaaggtggggatgacgtcaaatcatcatgccccttatgagcagggctacacacgtgctacaatggcgtaaacaaagggaggcagaaccgcgaggtcgagcaaatcccaaaaataacgtctcagttcggattgtagtctgcaactcgactacatgaagctggaatcgctagtaatcgcgaatcagaatgtcgcggtgaatacgttcccgggtcttgcacacaccgcccgtca

SEQ ID NO: 143 - DNA, 1386 bp, Artificial Sequence
  Synthetic polymer
ttcgcccttagagtttgatcctggctcaggacgaacgctggcggcgcgcctaacacatgcaagtcgaacggagataaagatttcggtttttatcttagtggcgcacgggtgagtaacacgtgaataacctgacccaaagagggggataacacctggaaacaggtgctaataccgcataagaccacaatgtcgcatgacgaaggggtcaaagaaaatcgctttgggaggggttcgcgtcccattaggtagtaggcggggtaacggcccacctagccgacgatgggtagccgagctgagaggctgatcggccacactggaactgagactcggtccagactcctacgggaggcagcagtggggaatattgggcaatgggcgcaagcctgacccagcaacgccgcgtgagggaagaaggttttcggattgtaaacctctgtcgcagaagacgaaggaagtgacggtattctgtgaggaagccccggctaactacgtgccagcagccgcggtaatacgtagggggcgagcgttgtccggaattactgggcgtaaagggagcgtaggcggtctgataagttggatgtgaaatacccgggcttaacttggggggtgcatccaatactgttggactagagtacaggagaggaaagcggaattcctagtgtagcggtgaaatgcatagatattaggaggaacatcggtggcgaaggcggctttctggactgcaactgacgctgaggctcgaaagcgtggggagcaaacaggattagataccctggtagtccacgctgtaaacgatgaatattaggtgtagggggtagaaactccctctgtgccgcagcaaacgcaataagtattccgcctggggagtatggccgcaaggttgaaactcaaaggaattaacgggggcccgcacacagcagcggagcatgtggtttaattcttcacaacgagaagaaccttaccaaggcttgacatccacttaaagttatggaaacataatgtcctttcgtgggaagtgagacaggtggtgcatggttgtcgtcagctcgtgtcgtgagatgttgggttaagtcctgcaacgagcgcaacccctgttgccagttgccagcaagtaaagttggggactctggtgagactgccggggacaactcggaggaaggtggggaggacgtcaaatcatcatgccccttatgtcttggggtacacacgtgctacaatggctgtaacaaagggaagggaccttgtaagaggaagcggatctcagaaaagcagtcccagttcggattgtgggctgcaacccgcccacatgaagtcggagttgctagtaatcgcggatcagcatgccgcggtgaatacgttcccgggccttgcacacaccgcccgtca

SEQ ID NO: 144 - DNA, 1391 bp, Artificial Sequence
  Synthetic polymer
agagtttgatcctggctcaggacgaacgctggcggcgtgcctaacacatgcaagtcgaacggaacttctttaaaggatttcttcggaatgaatttgattaagtttagtggcggacgggtgagtaacgcgtgagtaacctgcctctaagaggggaataacattctgaaaagaatgctaataccgcataatatatatttatcgcatggtagatatatcaaagatttatcgcttagagatggactcgcgtccgattagttagttggtgaggtaacggctcaccaagaccgcgatcggtagccggactgagaggttgaacggccacattgggactgagacacggcccagactcctacgggaggcagcagtgggggatattgcgcaatgggggaaaccctgacgcagcaacgccgcgtgaaggatgaaggtcttcggattgtaaacttcttttattaaggacgaagaaagtgacggtacttaatgaataagctccggctaactacgtgccagcagccgcggtaatacgtagggagcaagcgttgtccggatttactgggtgtaaagggtgcgtaggcggctttgcaagtcagatgtgaaatctatgggctcaacccatagcctgcatttgaaactgcagagcttgagtgaagtagaggcaggcggaattccccgtgtagcggtgaaatgcgtagagatggggaggaacaccagtggcgaaggcggcctgctgggctttaactgacgctgaggcacgaaagcgtgggtagcaaacaagattagataccctggtagtccacgctgtaaacgatgattactaggtgtggggggtctgaccccttccgtgccggagttaacacaataagtaatccacctggggagtacggccgcaaggttgaaactcaaaggaattgacgggggcccgcacaagcagtggagtatgtggtttaattcgaagcaacgcgaagaaccttaccaggtcttgacatcctactaacgagatagagatatgttaggtgcccttcggggaaagtagagacaggtggtgcatggttgtcgtcagctcgtgtcgtgagatgttgggttaagtcccgcaacgagcgcaacccttgctattagttgctacgcaagagcactctaataggactgccgttgacaaaacggaggaaggtggggacgacgtcaaatcatcatgccccttatgacctgggctacacacgtactacaatggcgtaaacaaagggaagcgagatcgtgagatggagcaaatcccaaaaataacgtcccagttcggactgtagtctgcaacccgactacacgaagctggaatcgctagtagtcgcggatcagaatgccgcggtgaatacgttcccgggtcttgcacacaccgcccgtca

SEQ ID NO: 145 - DNA, 1391 bp, Artificial Sequence
  Synthetic polymer
ttagagtttgatcctggctcaggacgaacgctggcggcgtgcctaacacatgcaagtcgaacggaactgttttgaaagatttcttcggaatgaatttgatttagtttagtggcggacgggtgagtaacgcgtgagtaacctgccttcaagagggggataacattctgaaaagaatgctaataccgcatgacatatcggaaccacatggttttgatatcaaagattttatcgcttgaagatggactcgcgtccgattagttagttggtgaggtaacggctcaccaagaccgcgatcggtagccggactgagaggttgaacggccacattgggactgagacacggcccagactcctacgggaggcagcagtgggggatattgcgcaatgggggcaaccctgacgcagcaacgccgcgtgaaggatgaaggttttcggattgtaaacttcttttattaaggacgaaaaatgacggtacttaatgaataagctccggctaactacgtgccagcagccgcggtaatacgtagggagcaagcgttgtccggatttactgggtgtaaagggtgcgtaggcggctttgcaagtcagatgtgaaatctatgggctcaacccataaactgcatttgaaactgtagagcttgagtgaagtagaggcaggcggaattccccgtgtagcggtgaaatgcgtagagatggggaggaacaccagtggcgaaggcggcctgctgggctttaactgacgctgaggcacgaaagcgtgggtagcaaacaggattagataccctggtagtccacactgtaaacgatgattgctaggtgtggggggtctgaccccttccgtgccggagttaacgcaataagcaatccacctggggagtacggccgcaaggttgaaactcaaaggaattgacgggggcccgcacaagcagtggattatgtggtttaattcgacgcaacgcgaagaaccttaccaggtcttgacatccaacgaatccttaagagattagggagtgcctttcggggaacgttgagacaggtggtgcatggttgtcgtcagctcgtgtcgtgagatgttgggttaagtcccgcaacgagcgcaacccctgccattagttgctacgcaagagcactctaatgggaccgctaccgacaaggtggaggaaggtggggacgacgtcaaatcatcatgccccttatgacctgggctacacacgtaatacaatggccgttaacaacgggaggcaaaaccgcgaggtagagcaaaaccctaaaaacggtcccagttcggatcgcaggctgcaacccgcctgcgtgaagttggaattgctagtaattgcggatcagcatgccgcggtgaatacgttcccgggccttgtacacaccgcccgtca

SEQ ID NO: 146 - DNA, 1391 bp, Artificial Sequence
  Synthetic polymer
agagtttgatcctggctcaggatgaacgctggcggcgtgcttaacacatgcaagtcgaacgaaacaccttatttgattttcttcggagctgaagatttggtgattgagtggcggacgggtgagtaacgcgtgggtaacctaccctgtacagggggataacagtcagaaatgactgctaataccgcataagaccacagcaccgcatggtgcaggggtaaaaactccggtggtacaggatggacccgcgtctgattagctgggtggggaggtaacggctcaccaaggcgacgatcagtagcgcggcttgagagagtgaacggccacattgagcgactgagacacggcccaaactcctacgggaggcagcagtggggaatattgcacaatgggggaaaccctgatgcagcgacgccgcgtgagtgaagaagtatctcggtatgtaaagctctatcagcagggaagaaaatgacggtacctgactaagaagccccggctaactacgtgcagcagccgcggtaatacgtagggggcaagcgttatccggaattactgggtgtaaagggtgcgtaggtggtatggcaagtcagaagtgaaaacccagggcttaactctgggactgcttttgaaactgtcagactggagtgcaggagaggtaagcggaattcctagtgtagcggtgaaatgcgtagatattaggaggaacatcagtggcgaaggcggcttactggactgaaactgacactgaggctcgaaagcgtggggagcaaacaggattagataccctggtagtccacgccgtaaacgatgaatactaggggtcggggccctacgaggcttcggtcccgcagcccacgcagtaagcattccgcctggggagtacgttcgcaagaatgaaactcaaaggaattgacggggacccgcacaagcggtggagcatgtggtttaattggaagcaacgcgacgaaccttaccaggacttgacatcccactgacagatccctatccggatccttcttcgcacagtggacacaggtggcgcatggttgttgtcagctcgtgtcgtgagatgttgggttaagtcccgcagcgagcgcaccccttgccattagtccccatcattcacttggccaccctaatgggactgccggggacaactcggaggaaggtggggaggacgtcaaatcatcatcccccttatgttttgggctccacacgtgctccaatggccggtccagcaagaagcaaaaccgcgaggtggagcaaatttcaaaaaccggtcccagttcggactgcaggctgcaacccgcctgcacgaagccggagttgctagtaatcgcggatcagaatgccacggtgaatgaattcccgggtcttgcactcaccgcccgtca

SEQ ID NO: 147 - DNA, 1391 bp, Artificial Sequence
  Synthetic polymer
ttcgcccttagagtttgatcctggctcaggatgaacgctggcggcgtgcttaacacatgcaagtcgaacgggaaatacttcattgagacttcggtggatttgatctatttctagtggcggacgggtgagtaacgcgtgggtaacctgccttatacagggggataacagtcagaaatgactgctaataccgcataagcgcacgggaccgcatggtccagtgtgaaaaacttcggtggtgtgagatggacccgcgtttgattagctagttggtggggtaacggcctaccaaggcgacgatcaatagccgacctgagagggtgaccggccacattgggactgagacacggcccaaactcctacgggaggcagcagtggggaatattgcacaatgggggaaaccctgatgcagcgacgccgcgtggaggaagaaggtcttcggattgtaaactcctgttgttgaggaagataatgacggtactcaacaaggaagtgacggctaactacgtgccagcagccgcggtaaaacgtaggtcacaagcgttgtccggaattactgggtgtaaagggagcgcaggcgggcgatcaagttggaagtgaaatccatgggctcaacccatgaactgctttcaaaactggtcgtcttgagtagtgcagaggtaggcggaattcccggtgtagcggtggaatgcgtagatatcgggaggaacaccagtggcgaaggcggcctactgggcaccaactgacgctgaggctcgaaagtgtgggtagcaaacaggattagataccctggtagtccacaccgtaaacgatgattactaggtgttgggagattgaccctctcagtgccgcagttaacacaataagtaatccacctggggagtacgaccgcaaggttgaaactcaaaggaattgacgggggcccgcacaagcagtggagtatgtggtttaattcgacgcaacgcgaagaaccttaccaagtcttgacatcccttggcgatgctggaaacagtatttctcttcggagcaaggagacaggtggtgcatggttgtcgtcagcccgtgtcgtgagatgttgggttaagtcccgcaacgagcgcaacccttatggtcagttactacgcaagaggactctggccagactgccgttgacaaaacggaggaaggtggggatgacgtcaaatcatcatgccctttatgacttgggctacacacgtactacaatggcgttaaacaaagagaagcaagaccgcgaggtggagcaaaactcagaaacaacgtcccagttcggactgcaggctgcaactcgcctgcacgaagtcggaattgctagtaatcgtggatcagcatgccacggtgaatacgttcccgggccttgcactcaccgcccgtca

SEQ ID NO: 148 - DNA, 1366 bp, Artificial Sequence
  Synthetic polymer
agagtttgatcctggctcaggacgaacgctggcggcacgcttaacacatgcaagtcgaacggagaacattgagcttgcttaatgttcttagtggcggacgggtgagtaacacgtgagtaacctgcctctgagagtgggatagcttctggaaacggatggtaataccgcataacatcatggattcgcatgtttctatgatcaaagatttatcgctcagagatggactcgcgtctgattagatagttggtgaggtaacggcccaccaagtcgacgatcagtagccggactgagaggttgaccggccacattgggactgagacacggcccagactcctacgggaggcagcagtggggaatattgcacaatgggggaaaccctgatgcagcgatgccgcgtggaggaagaaggttttcggattgtaaactcctgtcgaagaggacgataatgacggtactctttaagaaagctccggctaactacgtgccagcagccgcggtaatacgtaggtggcaagcgttgtccggaattactgggtgtaaagggagcgtaggcggggaggcaagttgaatgtctaaactatcggctcaactgatagtcgcgttcaaaactgccactcttgagtgcagtagaggtaggcggaattcctagtgtagcggtgaaatgcgtagatattaggaggaacaccagtggcgaaggcggcctactgggctgtaactgacgctgaggctcgaaagcgtgggtggcaaacaggattagataccctggtagtccacgccgtaaacgatgattactaggtgtggggggactgaccccttccgtgccggagttaacacaataagtaatccacctggggagtacggccgcaaggctgaaactcaaaggaattgacgggggcccgcacaagcagtggagtatgtggtttaattcgaagcaacgcgaagaaccttaccaggtcttgacatcgagtgacgaacttagagataagttcttccttcgggacacgaagacaggtggtgcatggttgtcgtcagctcgtgtcgtgagatgttgggttaagtcccgcaacgagcgcaacccttatcattagttgctacgcaagagcactctaatgagactgccgttgataaaacggaggaaggtggggatgacgtcaaatcatcatgccccttatgatttgggctacacacgtgctacaatggcgtaaacaaagggaagcgagattgtgagatggagcaaatcccaaaaataacgtcccagttcggactgtagtctgcaacccgactacacgaagctggaatcgctagtaatcgcggatcagaatgtcgcggtgaatacgttcccgggtcttgtactcaccgcccgtca

SEQ ID NO: 149 - DNA, 1408 bp, Artificial Sequence
  Synthetic polymer
agagtttgatcctggctcaggatgaacgctggcggcgtgcttaacacatgcaagtcgaacgaagcgcttcggatggatttcttcggattgatatccttagtgactgagtggcggacgggtgagtaacgcgtgggtaacctgcctcatacagggggataacagttagaaatggctgctaataccgcataagcgcacagtaccacatggtacagtgtgaaaaactccggtggtatgagatggacccgcgtctgattagctagttggcagggtaacggcctaccaaggcgacgatcagtagccgacctgagagggtgatcggccacattgggactgagacacggcccaaactcctacgggaggcagcagtggggaatattgcacaatgggggaaaccctgatgcagcgacgccgcgtgaaggaagacgtatttcggtatgtaaacttctatcagcaaggaagatgatgacggtacttgactaagaagccccggctaactacgtgccagcagccgcggtaatacgtagggggcaagcgttatccggatttactgggtgtaaagggagcgtaggcggccatgcaagtcagaagtgaaagcccggggctcaaccccgggactgcttttgaaactgtaaggctagattgccggagaggtaagcggaattcctagtgtagcggtgaaatgcgtagatattaggaggaacaccagttgcgaaggcggctctctggactgtaactgacactgaggcacgaaagcgtggggagcaaacaggattagataccctggtagtccacgccgtaaacgatgaattattagggtggtgggggaggcaaagttcttcggttccgcagcaaacgccaataatgtattcccaccctgggggagtacgtttcgcaagaaatgaaactcaaaggaaattgacggggacccgcacaagcggtggagcatgtggtttaattcgaagcaacgcgaagaaccttaccaaatcttgacatcgatctgaccggactgtaatgagtcctttcccttcggggacagagaagacaggtggtgcatggttgtcgtcagctcgtgtcgtgagatgttgggttaagtcccgcaacgagcgcaacccttatcctcagtagccagcaggtgaagttgggcactctgtggagactgccagggataacctggaggaaggtggggatgacgtcaaatcatcatgccccttatgatttgggctacacacgtgctacaatggcgtaaacaaagggaagcgatcacgcgagtgtgagcaaatctcaaaaataacgtctcagttcggattgtagtctgcaactcgactacatgaagctggaatcgctagtaatcgcaggtcagcatactgcggtgaatacgttcctcgggtcttgcactcaccgcccgtca

SEQ ID NO: 150 - DNA, 1391 bp, Artificial Sequence
  Synthetic polymer
agagtttgatcctggctcaggatgaacgctggcggcgtgcttaacacatgcaagtcgaacgaagcacctgactacgatttcttcggaatgacggtcttgtgactgagtggcggacgggtgagtaacgcgtgggtaacctacctcacacaggggaataacagttagaaatgactgctaataccgcataagcgcacggtaccgcatggtacagtgtgaaaaactccggtggtgtgagatggacccgcgtctgattagctggttggtgaggtaacggctcaccaaggcaacgatcagtagccggcctgagagggtgaacggccacattggaactgagacacggtccaaactcctacgggaggcagcagtggggaatattgcacaatgggggaaaccctgatgcagcgacgccgcgtgagtgaagaagtatttcggtatgtaaagctctatcagcagggaagataatgacggtacctgactaagaagctccggctaaatacgtgccagcagccgcggtaatacgtatggagcaagcgttatccggatttactgggtgtaaagggagtgtaggtggccatgcaagtcagaagtgaaaatccggggctcaaccccggaactgcttttgaaactgtaaggctggagtgcaggaggggtgagtggaattcctagtgtagcggtgaaatgcgtagatattaggaggaacaccagtggcgaaggcggctcactggactgtaactgacactgaggctcgaaagcgtggggagcaaacaggattagataccctggtagtccacgccgtaaacgatgaatactaggtgtcggggcccataagggcttcggtgccgcagcaaacgcaataagtattccacctggggagtacgttcgcaagaatgaaactcaaaggaattgacggggacccgcacaagcggtggagcatgtggtttaattcgaagcaacgcgaagaaccttaccaagtcttgacatcccactgaccggacagtaatgtgtcctttccttcgggacagtggagacaggtggtgcatggttgtcgtcagctcgtgtcgtgagatgttgggttaagtcccgcaacgagcgcaacccctatccttagtagccagcagtaagatgggcactctagggagactgccagggataacctggaggaaggtggggatgacgtcaaatcatcatgccccttatgacttgggctacacacgtgctacaatggcgtaaacaaagtgaagcgaagtcgtgaggccaagcaaatcacaaaaataacgtctcagttcggattgtagtctgcaactcgactacatgaagctggaatcgctagtaatcgcagatcagcatgccgcggtgaatacgttcccgggccttgtacacaccgcccgtca

SEQ ID NO: 151 - DNA, 1363 bp, Artificial Sequence
  Synthetic polymer
agagtttgatcctggctcaggatgaacgctggcggcgtgcttaacacatgcaagtcgaacgaagcatttaagacagattacttcggtttgaagtcttttatgactgagtggcggacgggtgagtaacgcgtgggtaacctgcctcatacagggggatagcagctggaaacggctggtaataccgcataagcgcacagtaccacatggtacagtgtgaaaaactccggtggtatgagatggatccgcgtctgattagctagttggcggggtaacggcccaccaaggcgacgatcagtagccgacctgagagggtgaccggccacattgggactgagacacggcccaaactcctacgggaggcagcagtggggaatattgcacaatgggggaaaccctgatgcagcaacgccgcgtgagtgaagaagtatttcggtatgtaaagctctatcagcagggaagaaagtgacggtacctgactaagaagctccggctaaatacgtgccagcagccgcggtaatacgtatggagcaagcgttatccggatttactgggtgtaaagggagtgcaggtggccaggcaagtcagaagtgaaagcccggggctcaaccccgggactgcttttgaaactgcagggctagagtgcaggaggggcaagtggaattcctagtgtagcggtgaaatgcgtagatattaggaggaacaccagtggcgaaggcggcttgctggactgtaactgacactgaggctcgaaagcgtggggagcaaacaggattagataccctggtagtccacgccgtaaacgatgaatactaggtgtcggggcacataaagtgctccggtgccgcagcaacgcaaataagtattccacctggggagtacgttcgcaagaatgaaactcaaaggaattgacggggacccgcacaagcggtggagcatgtggtttaattcgaagcaacgcgaagaaccttaccaagtcttgacatcctcttgaccggtcagtaatgtgaccttttcttcggaacaagagtgacaggtggtgcatggttgtcgtcagctcgtgtcgtgagatgttgggttaagtcccgcaacgagcgcaacccttatccttagtagccagcagtttggctgggcactctagggagactgccagggataacctggaggaaggtggggatgacgtcaaatcatcatgccccttatgacttgggctacacacgtgttacaatggggggtacagagggccgctaccacgcgagtggatgccaatcccaaaaacctctctcagttcggactggagtctgcaacccgactccacgaagctggattcgctagtaatcgcgcatcagccacggcgcggtgaata

SEQ ID NO: 152 - DNA, 1392 bp, Artificial Sequence
  Synthetic polymer
agagtttgatcctggctcaggatgaacgctggcggcgtgcttaacacatgcaagtcgaacgaagcatttaaaacggattttttcggaatgaagttttttatgactgagtggcggacgggtgagtaacgcgtgggtaacctgcctcacacagggggatagcagttggaaacgactggtaataccgcataagcgcacagcttcgcatgaagcggtgtgaaaaactccggtggtgtgagatggacccgcgtctgattaggtagttggtgaggtaacggcccaccaagccgacgatcagtagccgacctgagagggtgaccggccacattgggactgagacacggcccagactcctacgggaggcagcagtggggaatattgcacaatggaggaaactctgatgcagcgacgccgcgtgagtgaagaagtatttcggtatgtaaagctctatcagcagggaagacagtgacggtacctgactaagaagctccggctaaatacgtgccagcagccgcggtaatacgtatggagcaagcgttatccggatttactgggtgtaaagggagtgtaggtggtatcacaagtcagaagtgaaagcccggggctcaaccccgggactgcttttgaaactgtggaactggagtgcaggagaggtaagtggaattcctagtgtagcggtgaaatgcgtagatattaggaggaacaccagtggcgaaggcggcttactggactgaaactgacactgaggcacgaaagcgtggggagcaaacaggattagataccctggtagtccacgccgtaaacgatgaatactaggtgtcggggccgtagaggcttcggtgccgcagccaacgcagtaagtattccacctggggagtatgttcgcaagaatgaaactcaaaggaattgacggggacccgcacaagcggtggagcatgtggtttaattcgaagcaacgcgaagaaccttacctggtcttgacatccttctgaccggtccttaaccggacctttccttcgggacaggagtgacaggtggtgcatggttgtcgtcagctcgtgtcgtgagatgttgggttaagtcccgcaacgagcgcaacccctatctttagtagccagcatataaggtgggcactctagagagactgccagggataacctggaggaaggtggggacgacgtcaaatcatcatgccccttatgaccagggctacacacgtgctacaatggcgtaaacagagggaagcagcctcgtgagagtgagcaaatcccaaaaataacgtctcagttcggattgtagtctgcaactcgactacatgaagctggaatcgctagtaatcgcgaatcagaatgtcgcggtgaatacgttcccgggtcttgcacacaccgcccgtca

SEQ ID NO: 153 - DNA, 1401 bp, Artificial Sequence
  Synthetic polymer
ttcgcccttagagtttgatcctggctcaggacgaacgctggcggcgtgcctaacacatgcaagtcgagcgggaagctttggatggagacttcggttgaaatttggagtggagagcggcggacgggtgagtaacgcgtgagtaacctgccttcaagagggggataacattctgaaaagaatgctaataccgcatgacatatcggaaccacatggttctgatatcaaagattttatcgcttgaagatggactcgcgtccgattagttagttggtgaggtaacggctcaccaagaccgcgatcggtagccggactgagaggttgaacggccacattgggactgagacacggcccagactcctacgggaggcagcagtgggggatattgcgcaatgggggcaaccctgacgcagcaacgccgcgtgaaggatgaaggttttcggattgtaaacttcttttattaaggacgaaacttgacggtacttaatgaataagctccggctaactacgtgccagcagccgcggtaatacgtagggagcaagcgttgtccggatttactgggtgtaaagggtgcgtaggcggctttgcaagtcagatgtgaaatctatgggctcaacccataaaccgcatttgaaactgtagagcttgagtgaagtagaggcaggcggaattccccgtgtagcggtgaaatgcgtagagattgggaggaacaccagtggcgaaggcgactaactggactgtaactgacgctgaggcgcgaaagtgtggggagcaaacaggattagataccctggtagtccacactgtaaacgatgaatgctaggtgtagggggtatcgaccccttctgtgccggagtaaacacaataagcattccgcctggggagtacggccgcaaggttgaaactcaaaggaattgacgggggcccgcacaagcagcggagcatgtggtttaattcgaagcaacgcgaagaaccttaccaggtcttgacatccagtaaaagcctaagagattaggtgtcccttcgggggtactgagacaggtggtgcatggttgtcgtcagctcgtgtcgtgagatgttgggttaagtcccgcaacgagcgcaacccttatgattagttactaacgcgtaaaggcgaggactctaatgagactgccggggacaactcggaggaaggtggggacgacgtcaaatcatcatgcccctcatgacctgggctacacacgtgctacaatggccactacaaagaggggcaaacccgcaagggggagcggatctcaaaaaagtggtcccagttcggattgtgggctgcaacccgcccacatgaagtcggagttgctagtaatcgcggatcagcatgccgcggtgaatacgttcccgggccttgtacacaccgcccgtca

SEQ ID NO: 154 - DNA, 1392 bp, Artificial Sequence
  Synthetic polymer
agagtttgatcctggctcaggatgaacgctggcggcgtgcttaacacatgcaagtcgaacgaagcactttatttgatttccttcgggaccgattattttgtgactgagtggcggacgggtgagtaacgcgtgggtaacctgccttgtacagggggataacagttggaaacggctgctaataccgcataagcgcacggcatcacatgatgcagtgtgaaaaactccggtggtacaggatgggcccgcgtctgattagctggttggcagggtaacggcctaccaaggcgacgatcagtagccggtctgagaggatgaacggccacattggaactgagacacggtccaaactcctacgggaggcagcagtggggaatattgcacaatgggggaaaccctgatgcagcaacgccgcgtgagtgaagaagtatttcggtgtgtaaagctctatcagcagggaagataatgacggtacctgactaagaagctccggctaaatacgtgccagcagccgcggtaatacgtatggagcaagcgttatccggatttactgggtgtaaagggtgcgtaggtggcagtgcaagtcagatgtgaaaggccggggctcaaccccggagctgcatttgaaactgcatagctagagtacaggagaggcaggcggaattcctagtgtagcggtgaaatgcgtagatattaggaggaacaccagtggcgaaggcggcctgctggactgttactgacactgaggcacgaaagcgtggggagcaaacaggattagataccctggtagtccacgccgtaaacgatgaatactaggtgtcggggccgtataggcttcggtgccgtcgcaaacgcagtaagtattccacctggggagtacgttcgcaagaatgaaactcaaaggaattgacggggacccgcacaagcggtggagcatgtggtttaattcgaagcaacgcgaagaaccttaccaagtcttgacatccttctgaccggtacttaaccgtaccttctcttcggagcaggagtgacaggtggtgcatggttgtcgtcagctcgtgtcgtgagatgttgggttaagtcccgcaacgagcgcaacccttatctttagtagccagcggttcggccgggcactctagagaaactgccagggataacctggaggaaggcggggatgacgtcaaatcatcatgccccttatgacttgggctacacacgtgctacaatggcgtaaacaaagggaagcgaagctgtgaagccgagcaaatctcaaaaataacgtctcagttcggactgtagtctgcaacccgactacacgaagctggaatcgctagtaatcgcagatcagaatgctgcggtgaatacgttcccgggtcttgtacacaccgcccgtca

SEQ ID NO: 155 - DNA, 1394 bp, Artificial Sequence
  Synthetic polymer
agagtttgatcctggctcaggacgaacgctggcggcgtgcctaacacatgcaagtcgaacggaactgttttgaaagatttcttcggaatgaatttgatttagtttagtggcggacgggtgagtaacgcgtgagtaacctgccttcaagagggggataacattctgaaaagaatgctaataccgcatgacatatcggaatcacatggttttgatatcaaagattttatcgcttgaagatggactcgcgtccgattagttagttggtgaggtaacggctcaccaagaccgcgatcggtagccggactgagaggttgaacggccacattgggactgagacacggcccagactcctacgggaggcagcagtgggggatattgcgcaatgggggcaaccctgacgcagcaacgccgcgtgaaggatgaaggttttcggattgtaaacttcttttattaaggacgaaaattgacggtacttaatgaataagctccggctaactacgtgccagcagccgcggtaatacgtagggagcaagcgttgtccggatttactgggtgtaaagggagcgtagacggtgtggcaagtctgatgtgaaaggcatgggctcaacctgtggactgcattggaaactgtcatacttgagtgccggaggggtaagcggaattcctagtgtagcggtgaaatgcgtagatattaggaggaacaccagtggcgaaggcggcttactggacggtaactgacgttgaggctcgaaagcgtggggagcaaacaggattagataccctggtagtccacgctgtaaacgatgaatactaggtgtcggggagcatggctcttcggtgccgtcgcaaacgcagtaagtattccacctggggagtacgttcgcaagaatgaaactcaaaggaattgacggggacccgcacaagcggtggagcatgtggtttaattcgaagcaacgcgaagaaccttaccaagtcttgacatcctcctgaccggtccttaaccggacctttccttcgggacaggagagacaggtggtgcatggttgtcgtcagctcgtgtcgtgagatgttgggttaagtcccgcaacgagcgcaacccctatcctcagtagccagcaagttaagttgggcactctggggagactgccagggataacctggaggaaggcggggatgacgtcaaatcatcatgccccttatgatttgggctacacacgtgctacaatggcgtaaacaaagggaagcgagattgtgagatggagcaaatcccaaaaataacgtcccagttcggactgtagtctgcaacccgactacacgaagctggaatcgctagtaatcgcggatcagaatgccgcggtgaatacgttcccgggtcttgtactcaccgcccgtca

SEQ ID NO: 156 - DNA, 1352 bp, Artificial Sequence
  Synthetic polymer
agagtttgatcctggctcaggatgaacgctggcggcgtgcctaacacatgcaagtcgagcgagaagcttttaacggacgcttcggttgaagttaagagtggaaagcggcggacgggtgagtaacgcgtaggcaacctgccccttgcagagggatagcctcgggaaaccgggattaaaaccacataaatcctttttatcgcatgatagagaggacaaagatttatcggcaagggatgggcctgcgtctgattagttagttggtggggtaacggcctaccaaggcgacgatcagtagccgacctgagagggtgaacggccacattggaactgagacacggtccaaactcctacgggaggcagcagtggggaatcttgcacaatgggcgaaagcctgatgcagcaacgccgcgtgagcgaagaaggcctttgggtcgtaaagctctgtcggtagggaagaaggaagtgacggtacctaccgaggaagccccggctaactacgtgccagcagccgcggtaatacgtagggggcgagcgttatccggaattattgggcgtaaagagtacgtaggcggttttttaagcgaggggtataaggcagcggcttaactgctgttggcccctcgaactggaggacttgagtgtcggagaggaaagcggaattcctagtgtagcggtgaaatgcgtagagattaggaggaacaccagtggcgaaggcggctttctggacgacaactgacgctgaggtacgaaagcgtggggagcaaacaggattagataccctggtagtccacgccgtaaacgatgagcactaggtgtcgggttcgcaagaattcggtgccggagttaacgcaataagtgctccgcctggggagtacgcacgcaagtgcgaaactcaaaggaattgacggggacccgcacaagcagcggagcatgtggtttaattcgaagcaacgcgaagaaccttaccaagtcttgacatccctctgaccggtgagtaacgtcacctttccttcgggacagaggagacaggtggtgcatggttgtcgtcagctcgtgtcgtgagatgttgggttaagtcccgcaacgagcgcaacccctatccttagtagccagcggtttggccgggcactctgaggagactgccagggataacctggaggaaggcggggatgacgtcaaatcatcatgccccttatgatttgggctacacacgtgctacaatggcgtaaacaaagggaagcgagagtgtgagcttaagcaaatcccaaaaataacgtcccagttcggactgcagtctgcaactcgactgcacgaagctggaatcgctagtaatcgcggatcagaatgccgcg

SEQ ID NO: 157 - DNA, 1391 bp, Artificial Sequence
  Synthetic polymer
agagtttgatcctggctcaggatgaacgctggcggcgtgcttaacacatgcaagtcgaacgggaattactttattgaaacttcggtcgatttaatttaattctagtggcggacgggtgagtaacgcgtgggtaacctgccttatacagggggataacagtcagaaatggctgctaataccgcataagcgcacagagctgcatggctcagtgtgaaaaactccggtggtataagatggacccgcgttggattagctagttggtggggtaacggcccaccaaggcgacgatccatagccggcctgagagggtgaccggccacattgggactgagacacggcccaaactcctacgggaggcagcagtggggaatattgcacaatgggggaaaccctgatgcagcgacgccgcgtgaaggaagaagtatctcggtatgtgaacttctatcagcagggaagataatgacggtacctgactaagaagccccggctaactacgtgccagcagccgcggtaaaacgtagggggcaagcgttatccggatttactgggtgtaaagggagcgtaggcggcggagcaagtcagaagtgaaagcccggggctcaaccccgggacggcttttgaaactgccctgcttgatttcaggagaggtaagcggaattcctagtgtagcggtgaaatgcgtagatattaggaggaacaccagtggcgaaggcggcttactggactgacaatgacgctgaggctcgaaagcgtggggagcaaacaggatttagataccctggtagtccacgccgtaaacgatgaatactaggtgtcggggctcataagagcttcggtgccgcagcaaacgcaataagtattccacctggggagtacgttcgcaagaatgaaactcaaaggaattgacggggacccgcacaagcggtggagcatgtggtttaattcgaagcaacgcgaagaaccttaccaggccttgacatcccggtgaccgtcccgtaatggggacctctcttcggagcaccggtgacaggtggtgcatggttgtcgtcagctcgtgtcgtgagatgttgggttaagtcccgcaacgagcgcaacccctatgttcagtagccagcaggtaaggctgggcactctggacagactgccggggataacccggaggaaggcggggatgacgtcaaatcatcatgccccttacggcctgggctacacacgtgctacaatggcgtaaacaaagggaagcgagagggtgacctggagcgaatcccaaaaataacgtcccagttcggactgtagtctgcaacccgactacccgaagccggaatcgctagtaatcgcgaatcagcatgtcgcggtgaatacgttcccgggtcttgtccacaccgcccgtc

SEQ ID NO: 158 - DNA, 1392 bp, Artificial Sequence
  Synthetic polymer
agagtttgatcctggcccaggatgaactctggcggcgtgcttaacacatgcaagtcgaacgaaacaccttatttaattttcttcggaactgaagatttggtgattgagtggcggacgggtgagtaacgcgtgggtaacctaccctgtacagggggataacagtcagaaatgactgctaataccgcataagaccacagcatcgcatggtgcaggggtaaaaactccggtggtacaggatggacccgcgtctgattagctggttggtgaggtaacggctcaccaaggcgacgatcagtagccggcttgagagagtgaacggccacattgggactgagacacggcccaaactcctacgggaggcagcagtggggaatattgcacaatgggggaaaccctgatgcagcgacgccgcgtgagtgaagaagtatctcggtatgtaaagctctatcagcagggaagaaaatgacggtacctgactaagaagccccggctaactacgtgccagcagccgcggtaatacgtagggggcaagcgttatccggaattactgggtgtaaagggtgcgtaggtggtatggcaagtcagaagtgaaaacccagggcttaactctgggactgcttttgaaactgtcagactggagtgcaggagaggtaagcggaattcctagtgtagcggtgaaatgcgtagatattaggaggaacaccagtggcgaaggcggcttactggacgataactgacgctgaggctcgaaagcgtggggagcaaacaggattagataccctggtagtccacgccgtaaacgatgaatactaggtgttgggaagcattgcttctcggtgccgtcgcaaacgcagtaagtattccacctggggagtacgttcgcaagaatgaaactcaaaggaattgacggggacccgcacaagcggtggagcatgtggtttaattcgaagcaacgcgaagaaccttaccaagtcttgacatccttctgaccggtacttaaccgtaccttctcttcggagcaggagtgacaggtggtgcatggttgtcgtcagctcgtgtcgtgagatgttgggttaagtcccgcaacgagcgcaacccttatccttagtagccagcggttcggccgggcactctagagagactgccagggataacctggaggaaggcggggatgacgtcaaatcatcatgccccttatgacttgggctacacacgtgctacaatggcgtaaacaaagggaagcaaagctgtgaagccgagcaaatctcaaaaataacgtctcagttcggactgtagtctgcaacccgactacacgaagctggaatcgctagtaatcgcagatcagaatgctgcggtgaatacgttcccgggtcttgcacacaccgcccgtca

SEQ ID NO: 159 - DNA, 1370 bp, Artificial Sequence
  Synthetic polymer
agagtttgatcctggctcaggacgaacgctggcggcgtgcctaacacatgcaagtcgaacggaagcaaagatttcggtttttgctttagtggcgaacgggtgagtaacgcgtgaggaacctgcctttcagtgggggacaacagttggaaacgactgctaataccgcataatgcttttgagtggcatcacttaaaagtcaaagatttattgctgaaagatggtctcgcgtctgattagctggttggcggggtaacggcccaccaaggcgacgatcagtagccggtctgagaggatgaacggccacattgggactgagatacggcccagactcctacgggaggcagcagtggggaatattgggcaatgggggaaaccctgacccagcaacgccgcgtgaaggaagaaggccttcgggttgtaaacttcttttaccaggggcgaaagaaatgacggtacctggagaaaaagcaacggctaactacgtgccagcagccgcggtaatacgtaggttgcgagcgttgtccggatttactgggtgtaaagggcgtgtaggcggagatgcaagttgggagtgaaatccatgggctcaacccatgaactgcttccaaaactgtatcccttgagtatcggagaggcaagcggaattcctagtgtagcggtgaaatgcgtagatattaggaggaacaccagtggcgaaggcggcttgctggacgacaactgacgctgaggcgcgaaagcgtggggagcaaacaggattagataccctggtagtccacgccgtaaacgatgaatgctaggtgttggggagcaaagctcttcggtgccgccgcaaacgcattaagcattccacctggggagtacgttcgcaagaatgaaactcaaaggaattgacggggacccgcacaagcggtggagcatgtggtttaattcgaagcaacgcgaagaaccttaccaggtcttgacatcccgatgaccggcccgcaacggggccttctcttcggagcaaggagacaggtggtgcatggttgtcgtcagctcgtgtcgtgagatgttgggttaagtcccgcaacgagcgcaacccttatggtcagttactacgcaagaggactctggccagactgccgttgacaaaacggaggaaggtggggatgacgtcaaatcatcatgccctttatgacttgggctacacacgtactacaatggcgttaaacaaagagaagcaagaccgcgaggtggagcaaaactcagaaacaacgtcccagttcggactgcaggctgcaactcgcctgcacgaagtcggaattgctagtaatcgtggatcagcatgccacggtgaatacgttcccgggccttgcacacaccgcccgtca

SEQ ID NO: 160 - DNA, 1387 bp, Artificial Sequence
  Synthetic polymer
ttcgcccttagagttcgatcctggctcaggacgaacgctggcggcgcgcctaacacatgcaagtcgaacgagcgagagagagcttgctttctcaagcgagtggcgaacgggtgagtaacgcgtgaggaacctgcctcaaagagggggacaacagttggaaacgactgctaataccgcataagcccacgacccggcatcgggtagagggaaaaggagcaatccgctttgagatggcctcgcgtccgattagctagttggtgaggtaacggcccaccaaggcgacgatcggtagccggactgagaggttgaacggccacattgggactgagacacggcccagactcctacgggaggcagcagtggggaatattgcacaatgggggaaaccctgatgtagcgacgccgcgtggaggaagaaggtcttcggattgtaaactcctgttgttgaggaagataatgacggtactcaacaaggaagtgacggctaactacgtgtcagcagccgcggtaaaacgtaggtcacaagcgttgtccggaattactgggtgtaaagggagcgcaggcgggaagacaagttggaagtgaaatccatgggctcaacccatgaactgctttcaaaactgtttttcttgagtagtgcagaggtaggcggaattcccggtgtagcggtgaaatgcgtagagatcgggaggaacaccagtggcgaaggcggcttactggactgtaactgacgctgaggcgcgaaagtgtggggagcaaacagaattagataccctggtagtccacactgtaaacgatgaatgctaggtgtagggggtatcgaccccttctgtgccggagtaaacacaataagcattccgcctggggagtacggccgcaaggttgaaactcaaaggaattgacgggggcccgcacaagcagcggagcatgtggtttaattcgaagcaacgcgaagaaccttaccaggtcttgacatccattaaaagccatagagatatggtgtgagcttgctcgtaatgagacaggtggtgcatggttgtcgtcagctcgtgtcgtgagatgttgggttaagtcccgcaacgagcgcaacccttgtgatcagttactaacgggtagtgccgaggactctgataagactgccggggacaactcggaggaaggtggggacgacgtcaaatcatcatgccccttatgacctgggctacacacgtgctacaatggccactacagagagcagcgaattcgtaaggaagagcaaatctcaaaaaagtggtcccagttcggattgtgggctgcaacccgcccacatgaagtcggagttgctagtaatcgcggatcagcatgccgcggtgaatacgttcccgggccttgcacacaccgcccgtca

SEQ ID NO: 161 - DNA, 1387 bp, Artificial Sequence
  Synthetic polymer
agagtttgatcctggctcaggatgaacgctggcggcgtgcctaacacatgcaagtcgaacgaagcaccttttgagattcttcggatgatcgattggtgactgagtggcggacgggtgagtaacgcgtgggtaacctgccctgtacagggggataacagctggaaacggctgctaataccgcataagcgcacgaggagacatctccttgtgtgaaaaactccggtggtacaggatgggcccgcgtctgattagctggttggcagggtaacggcctaccaaggcaacgatcagtagccggtctgagaggatgaacggccacattggaactgagacacggtccaaactcctacgggaggcagcagtggggaatattgcacaatgggggaaaccctgatgcagcaacgccgcgtgagtgaagaagtatttcggtatgtaaagctctatcagcagggaagataatgacggtacctgactaagaagctccggctaactacgtgccagcagccgcggtaatacgtagggagcgagcgttgtccggatttactgggtgtaaagggtgcgtaggcggccgagcaagtcaattgtgaaaactatgggcttaacccataacgtgcaattgaaactgtccggcttgagtgaagtagaggtaggcggaattcccggtgtagcggtgaaatgcgtagagatcgggaggaacaccagtggcgaaggcgacttactggactgctactgacactgaggcacgaaagcgtggggagcaaacaggattagataccctggtagtccacgccgtaaacgatgaatactaggtgttgggttccaaagggactcggtgccgtcgcaaacgcattaagtattccacctggggagtacgttcgcaagaatgaaactcaaaggaattgacggggacccgcacaagcggtggagcatgtggtttaattcgaagcaacgcgaaaaaccttaccaagtcttgacatcctgatgacagttccttaaccggaacttctcttcggagcatcagagacaggtggtgcatggttgtcgtcagctcgtgtcgtgagatgttgggttaagtcccgcaacgagcgcaacccctatttccagtagccagcagtaagatgggcactctggagagactgccggggataacccggaggaaggtggggatgacgtcaaatcatcatgccccttatgatttgggctacacacgtgctacaatggcagttacaaagagaagcaaacctgtgaaggcgagcaaacctcaaaaaggctgtctcagttcggattgtagtctgcaactcgactacatgaagctggaatcgctagtaatcgcagatcagcatgctgcggtgaatacgttcccgggtcttgtacacaccgcccgtca

SEQ ID NO: 162 - DNA, 1389 bp, Artificial Sequence
  Synthetic polymer
agagtttgatcctggctcaggatgaacgctggcggcgtgcttaacacatgcaagtcgaacgggaaatatttcattgagacttcggtggatttgatctatttctagtggcggacgggtgagtaacgcgtgggtaacctgccttatacagggggataacagtcagaaatggctgctaataccgcataagcgcacagtaccgcatggtaccgtgtgaaaaactccggtggtatgagatggacccgcgtctgattaggtagttggtggggtaacggcctaccaagccgacgatcagtagccgacctgagagggtgaccggccacattgggactgagacacggcccagactcctacgggaggcagcagtggggaatattgcacaatgggggaaaccctgatgcagcgacgccgcgtgaaggaagaagtatctcggtatgtaaacttctatcagcagggaagatagtgacggtacctgactaagaagccccggctaactacgtgccagcagccgcggtaatacgtagggggcaagcgttatccggaattactgggtgtaaagggtgcgtaggtggtatggcaagtcagaagtgaaaacccagggcttaactctgggactgcttttgaaactgtcagactagagtgcaggagaggtaagcggaattcctagtgtagcggtgaaatgcgtagatattaggaggaacatcggtggcgaaggcggcttactggactgaaactgacactgaggcacgaaagcgtggggagcaaacaggattagataccctggtagtccacgccgtaaacgatgaatactaggtgtcggggccgtagaggcttcggtgccgcagctaacgcagtaagtattccacctggggagtacgttcgcaagaatgaaactcaaaggaattgacggggacccgcacaagcggtggagcatgtggtttaattcgaagcaacgcgaagaaccttacctggtcttgacatccttctgatcggtccttagccggacttttccttcgggacaggagtgacaggtggtgcatggttgtcgtcagctcgtgtcgtgagatgttgggttaagtcccgcaacgagcgcaacccttatctttagtagccagcggttcggccgggcactctagagagactgccagggataacctggaggaaggcggggatgacgtcaaatcatcatgccccttatgacttgggctacacacgtgctacaatggcgtaaacaaagggaagcaaagctgtgaagccgagcaaatctcaaaaataacgtctcagttcggactgtagtctgcaacccgactacacgaagctggaatcgctagtaatcgcagatcagaatgctgcggtgaatacgttcccgggtcttgcacacaccgcccgtca

SEQ ID NO: 163 - DNA, 1378 bp, Artificial Sequence
  Synthetic polymer
agagtttgtttctggctcaggacgaacgctggcggcgtgcctaacacatgcaagtcgagcgaatgaagttccttcgggaatggatttagcggcggacgggtgagtaacacgtgggcaacctgcctcatagaggggaatagccttccgaaagggagattaataccgcataagattgtagtaccgcatgatacagcaactaaaggagcaatccgctatgagatgggcccgcggcgcattagctagttggtgaggtaacggcccaccaaggcgacgatccatagccggcctaagagggtgaacggccacattgggactgagacacggcccagactcctacgggaggcagcagtggggaatattgcacaatgggggaaaccctgatgcagcgacgccgcgtgaaggaagaagtatctcggtatgtaaacttctatcagcagggaagaaaatgacggtacctgactaagaagccccggctaactacgtgccagcagccgcggtaatacgtagggggcaagcgttatccggatttactgggtgtaaagggagcgtagacggatggacaagtctgatgtgaaaggctggggctcaaccccgggactgcattggaaactgcccgtcttgagtgccggagaggtaagcggaattcctagtgtagcggtaaaatgcgtagatattaggaggaacaccagtggcgaaggcggcttactggacgatgactgacgctgaggctcgaaagcgtggggagcaaacaggattagataccctggtagtccacgccgtaaacgatgaatactgggggtcgggggagcacagctcttcggtgccgtagcaaaacgcagtaagtattccacctggggagtacgttcgcaagaatgaaactcaaaggaattgacggggacccgcacaagcggtggagcatgtggtttaattcgaagcaacgcgaagaaccttaccaagtcttgacatccttctgacagagtatgtaatgtactttcccttcggggcaggagtgacaggtggtgcatggttgtcgtcagctcgtgtcgtgagatgttgggttaagtcccgcaacgagcgcaacccttatccttagtagccagcacgcagtggtgggcactctggggagactgccagggataacctggaggaaggtggggatgacgtcaaatcatcatgccccttatgacttgggctacacacgtgctacaatggcgtaaacaaagggaagcgagcccgtgagggggagcaaatcccaaaaataacgtcccagttcggattgtagtctgcaactcgactacatgaagctggaatcgctagtaatcgcgaatcagaatgtcgcggtgaatacgttcccgggtcttgcactcaccgcccgtca

SEQ ID NO: 164 - DNA, 1396 bp, Artificial Sequence
  Synthetic polymer
agtttgatcctggctcaggacgaattctggcggcgtgcttaacacatgcaagtcgaacgaagctgcttaactgatcttcttcggaattgacgttttgtagactgagtggcggacgggtgagtaaacgcgtgggtaacctgccctgtacagggggataacagtcagaaatgactgctaataccgcataagaccacagcatcgcatggtgcaggggtaaaaactccggtggtacaggatggacccgcgtctgattagctggttggtgaggtaacggctcaccaaggcgacgatcagtagccggcttgagagagtgaacggccacattgggactgagacacggcccaaactcctacgggaggcagcagtggggaatattgcacaatgggggaaaccctgatgcagcgacgccgcgtgagtgaagaagtatctcggtatgtaaagctctatcagcagggaagaaaatgacggtacctgactaagaagccccggctaactacgtgccagcagccgcggtaatacgtagggggcaagcgttatccggaattactgggtgtaaagggtgcgtaggtggtatggcaagtcagaagtgaaaacccagggcttaactctgggactgcttttgaaactgtcagactggagtgcaggagaggtaagcggaattcctagtgtagcggtgaaatgcgtagatattaggaggaacatcagtggcgaaggcggcttactggactgaaactgacactgaggcacgaaagcgtggggagcaaacaggattagataccctggtagtccacgccgtaaacgatgaattgtaggtgtcggggccgtagaggctttcggtgccgcaggccaacgcagtaaagtattccacctgggggagtacgttagcaagaatgaaattcaaaggaattgacggggacccgcacaagcggtggagcaatgtggtttaattcgaagcaacgcgaagaaccttaccaggtcttgacatcccgatgaccggcccgtaacggggctttctcttcggagcattggagacaggtggtgcatggttgtcgtcagctcgtgtcgtgagatgttgggttaagtcccgcaacgagcgcaacccttatcctcagtagccagcaggtaaagctgggcactctgtggagactgccagggataacctggaggaaggtggggatgacgtcaaatcatcatgccccttatgtctagggctacacatgtgctacaatggcaagtacaaagagaagcaagaccgtgaggtggagcaaaactcaaaaacttgtctcagttcggattgtaggctgaaactcgcctacatgaagctggagttgctagtaatcgcgaatcagcatgtcgcggtgaatacgttcccgggccttgcacacaccgcccgtca

SEQ ID NO: 165 - DNA, 1396 bp, Artificial Sequence
  Synthetic polymer
ttagagtttgatcctggctcaggatgaacgctggcggcgtgcttaacacatgcaagtcgagcgaagcactttggaaagattcttcggatgatttcctttgtgactgagcggcggacgggtgagtaacgcgtgggtaacctgcctcatacagggggataacagttagaaatgactgctaataccgcataagaccacggtaccgcatggtacagtggtaaaaactccggtggtatgagatggacccgcgtctgattaggtagttggtaaggtaacggcttaccaaggcgacgatcagtagccgacctgagagggtgatcggccacattggaactgagacacggtccaaactcctacgggaggcagcagtggggaatattgcacaatgggcgaaagcctgatgcagcaacgccgcgcgagcgatgaaggccttcgggtcgtaaagctctgtcctcaaggaagataatgacggtacttgaggaggaagccccggctaactacgtgccagcagccgcggtaatacgtagggggctagcgttatccggaattactgggcgtaaagggtgcgtaggtggtttcttaagtcagaggtgaaaggctacggctcaaccgtagtaagcctttgaaactgggaaacttgagtgcaggagaggagagtggaattcctagtgtagcggtgaaatgcgtagatattaggaggaacaccagtagcgaaggcggctttctggactgtaactgacactgaggcacgaaagcgtggggagcaaacaggattagataccctggtagtccacgccgtaaacgatgagtactagctgtcggaggttaccccccttcggggcgcagctaacgcattaagtacttcgcctgggaagtacgctcgcaaggagtgaaactcaaaggaaattgacggggacccgcacaagtagcggagcaatggtggtttaattcgaagcaacgcgaagaaccttacctaagcttgacatccttttgaccgatgcctaatcgcatctttcccttcggggacagaagtgacaggatggtgcatggttgtcgtcagctcgtgtcgtgagatgttgggttaagtcccgcaacgagcgcaacccttgcctttagttgccagcattaagttgggcactctagagggactgccagggataacctggaggaaggtggggatgacgtcaaatcatcatgccccttatgcttagggctacacacgtactacaatggatgttaacagagggaagcaagacagtgatgtggagcaaacccctaaaaacattctcagttcagattgcaggctgcaacccgcctgcatgaagatggaattgctagtaatcgcggatcagcatgccgcggtgaatacgttcccgggccttgtacacaccgcccgtca

SEQ ID NO: 166 - DNA, 1359 bp, Artificial Sequence
  Synthetic polymer
agagtttgatcctggctcaggatgaacgctggcggcgtgcctaacacatgcaagtcgagcgattctcttcggagaagagcggcggacgggtgagtaacgcgtgggtaacctgccctgtacacacggataacataccgaaaggtatgctaatacgagataatatgcttttatcgcatggtagaagtatcaaagctccggcggtacaggatggacccgcgtctgattagctagttggtaaggtaacggcttaccaaggcgacgatcagtagccgacctgagagggtgatcggccacattggaactgagacacggtccaaactcctacgggaggcagcagtggggaatattgcacaatgggggaaaccctgatgcagcaacgccgcgtgaaggaagaaggcctttgggtcgtaaacttctgttctaagggaagaaagaagacggtaccttaggagcaagtcccggctaactacgtgccagcagccgcggtaatacgtagggggcaagcgttatccggaattattgggcgtaaagagtacgtaggtggttacctaagcacggggtttaaggctatggcttaactatagttcgccttgtgaactgggctacttgagtgcaggagaggaaagcggaattcctagtgtagcggtgaaatgcgtagatattaggaggaacaccagtggcgaaggcggctttctggactgtaactgacactgaggtacgaaagcgtggggagcaaacaggattagataccctggtagtccacgccgtaaacgatgagcactaggtgtcggggtcgcaagacttcggtgccgcagttaacgcaataagtgctccgcctggggagtacgttcgcaagaatgaaactcaaaggaattgacggggacccgcacaagcagcggagcatgtggtttaattcgaagcaacgcgaagaaccttaccaaggcttgacatctccctgacaggtccttaaacggatctttctacggacagggaagacaggtggtgcatggttgtcgtcagctcgtgtcgtgagatgttgggttaagtcccgcaacgagcgcaacccttgtcattagttgccatcagataagctgggcactctaatgagactgccggggacaactcggaggaaggtggggatgacgtcaaatcatcatgccccttatgttctgggctacacacgtgctacaatggtcggtacaaagagaagcgagaccgcgaggtggagcaaatctcaaaaaccgatcccagttcggattgcaggctgcaactcgcctgcatgaagtcggagttgctagtaatcgcagatcagaatgctgcggtgaatgcgttcccgggtcttgcacacaccgcccgtca

SEQ ID NO: 167 - DNA, 1399 bp, Artificial Sequence
  Synthetic polymer
ttcgcccttagagtttgatcctggctcaggatgaacgctggcggcgtgcttaacacatgcaagtcgaacgagaatcaatggaaagaggattcgtccaattgaagttgaggaaagtggcggacgggtgagtaacgcgtgaggaacctgccttggagtggggaataacagctggaaacagctgctaataccgcataatgcaactgggtcgcatggccctggttgccaaagatttatcgctctgagatggcctcgcgtctgattagctagtaggcggggtaacggcccacctaggcgacgatcagtagccggactgagaggttggccggccacattgggactgagacacggcccagactcctacgggaggcagcagtggggaatattgggcaatgggcgcaagcctgacccagcaacgccgcgtgaaggaagaaggctttcgggttgtaaacttcttttgtcagggacgaagcaagtgacggtacctgacgaataagccacggctaactacgtgccagcagccgcggtaatacgtaggtggcaagcgttatccggatttattgggtgtaaagggcgtgtaggcgggattgcaagtcagatgtgaaaactgggggctcaacctccagcctgcatttgaaactgtagttcttgagtgtcggagaggcaatcggaattccgtgtgtagcggtgaaatgcgtagatatacggaggaacaccagtggcgaaggcggattgctggacgataactgacgctgaggcgcgaaagcgtggggagcaaacaggattagataccctggtagtccacgccgtaaacgatggatactaggtgtggggggactgaccccctccgtgccgcagctaacgcaataagtatcccacctggggagtacgatcgcaaggttgaaactcaaaggaattgacgggggcccgcacaagcggtggagtatgtggtttaattcgaagcaacgcgaagaaccttaccagggcttgacatcctactaacgaagcagagatgcattaggtgcccttcggggaaagtagagacaggtggtgcatggttgtcgtcagctcgtgtcgtgagatgttgggttaagtcccgcaacgagcgcaacccttattgttagttgctacgcaagagcactctagcgagactgccgttgacaaaacggaggaaggtggggacgacgtcaaatcatcatgccccttatgtcctgggccacacacgtactacaatggcggtaaacaaagagaggcaagaccgcgaggtggagcaaatctcaaaaagccgtcccagttcggattgcaggctgcaacccgcctgcatgaagttggaatcgctagtaatcgcggatcagcatgccgcggtgaatacgttcccgggccttgcactcaccgcccgtca

SEQ ID NO: 168 - DNA, 1391 bp, Artificial Sequence
  Synthetic polymer
agagtttgatcctggctcaggatgaacgctggcggcgtgcttaacacatgcaagtcgaacgaagcactttaattgatttcttcggaatgaagtttttgtgactgagtggcggacgggtgagtaacgcgtgggtaacctgcctcatacagggggataacagttggaaacgactgctaataccgcataagcgcacgggattgcatgatccagtgtgaaaaactccggtggtatgagatggacccgcgtctgattagccagttggcggggtaacggcccaccaaagcgacgatcagtagccgacctgagagggtgaccggccacattgggactgagacacggcccaaactcctacgggaggcagcagtggggaatattgcacaatgggggaaaccctgatgcagcgacgccgcgtgagcgaagaagtatttcggtatgtaaagctctatcagcagggaagaagaatgacggtacctgactaagaagccccggctaactacgtgccagcagccgcggtaatacgtagggggcaagcgttatccggatttactgggtgtaaagggagcgtaggcggcggagcaagtcagaagtgaaagcccggggctcaaccccgggacggcttttgaaactgccctgcttgatttcaggagaggtaagcggaattcctagtgtagcggtgaaatgcgtagatattaggaggaacaccagtggcgaaggcggcttactggactgacaatgacgctgaggctcgaaagcgtggggagcaaacaggattagataccctggtagtccacgccgtaaacgatgaatactaggtgtcgggaggcattgcctttcggtgccgtcgcaaacgcagtaagtattccacctggggagtacgttcgcaagaatgaaactcaaaggaattgacggggacccgcacaagcggtggagcatgtggtttaattcgaagcaacgcgaagaaccttaccaagtcttgacatccttctgaccggtacttaatcgtactttctcttcggagcaggagtgacaggtggtgcatggttgtcgtcagctcgtgtcgtgagatgttgggttaagtcccgcaacgagcgcgacccttatctttagtagccagcggtttggccgggcactctagagagactgccagggatagcctggaggaaggcggggatgacgtcaaatcatcatgccccttatgacttgggctacacacgtgctacaatggcgtaaacaaagggaagcaaagctgtgaagccgagcaaatctcaaaaataacgtctcagttcggactgtagtctgcaacccgactacacgaagctggaatcgctagtaatcgcagatcagaatgctgcggtgaatacgttcccgggtcttgtacacaccgcccgtca

SEQ ID NO: 169 - DNA, 1387 bp, Artificial Sequence
  Synthetic polymer
agagtttgatcctggctcaggacgaacgctggcggcgtgcctaacacatgcaagacgagcggggaatattgagcagcttgctgcttggtatttctagcggcggacgggtgagtaacgcgtgagcaacctgcctttatcagggggataacgcatcgaaagatgtgctaataccgcgtaagaccacagcttcacatggagcaggggtcaaaggagcaatccggataaagatgggctcgcgtccgattagctagttggtgagataacagcccaccaaggcgacgatcggtagccgacctgagagggtgatcggccacattggaactgagaaacggtccagactcctacgggaggcagcagtggggaatattgggcaatgggcgaaaccctgatgcagcaacgccgcgtgagtgaagaagtatttcggtatgtaaagctctatcagcagggaagataatgacggtacctgactaagaagctccggctaaatacgtgccagtagccgcggtaatacgtatggagcaagcgttatccggatttactgggtgtaaaggatgcgtaggtggcagtgcaagtcagatgtgaaaggccggggctcaaccccggagctgcatttgaaactgctcggctagagtacaggagaggcaggcggaattcctagtgtagcggtgaaatgcgtagatattaggaggaacaccagtggcgaaggcggcctgctggactgttactgacactgaggcacgaaagcgtggggagcaaacaggattagataccctggtagtccacgccgtaaacgatggatactaggtgtgggaggtattgaccccttccgtgccgcaggtaacacaataagtatccccacctgggggagtacggccgcagggttgaaactcaaagaaattgacggggacccgcacaagcggtggagcatgtggtttaattcgaagcaacgcgaagaaccttaccaggtcttgacatcccgatgaccggttcgtaatggaaccttctcttcggagcattggagacaggtggtgcatggttgtcgtcagctcgtgtcgtgagatgttgggttaagtcccgcaacgagcgcaacccttatcctcagtagccagcaagtaatgttgggcactctgtggagactgccagggataacctggaggaaggtggggatgacgtcaaatcatcatgccccttatgatctgggctacacacgtgctacaatggcgtaaacaaagggaggcaaagccgcgaggtggagcaaatcccaaaaataacgtctcagttcggactgcagtctgcaactcgactgcacgaagctggaatcgctagtaatcgcgaatcagaatgtcgcggtgaatacgttcccgggtcttgcactcaccgcccgtca

SEQ ID NO: 170 - DNA, 1390 bp, Artificial Sequence
  Synthetic polymer
gagtttgatcctggctcaggatgaacgctggcggcgtgcttaacacatgcaagtcgaacgggaaatatttcattgagacttcggtggatttgatctatttctagtggcggacgggtgagtaacgcgtgggtaacctgccttatacagggggataacagtcagaaatggctgctaataccgcataagcgcacagagctgcatggctcagtgtgaaaaactccggtggtataagatggacccgcgttggattagcttgttggtggggtaacggcccaccaaggcgacgatccatagccggcctgagagggtgaacggccacattgggactgagacacggcccagactcctacgggaggcagcagtggggaatattgcacaatgggggaaaccctgatgcagcgacgccgcgtgaaggaagaagtatctcggtatgtaaacttctatcagcagggaagatagtgacggtacctgactaagaagccccggctaactacgtgccagcagccgcggtaatacgtagggggcaagcgttatccggatttactgggtgtaaagggagcgtaggcggcggagcaagtcagaagtgaaagcccggggctcaaccccgggacggcttttgaaactgccctgcttgatttcaggagaggtaagcggaattcctagtgtagcggtgaaatgcgtagatattaggaggaacaccagtggcgaaggcggcttactggactgacaatgacgctgaggctcgaaagcgtggggagcaaacaggattagataccctagtagtccacgccgtaaacgatgaatactaggtgttggggagcgaagctcctcggtgccgcagttaacgcaataagtattccacctggggagtacgttcgcaagaatgaaactcaaaggaattgacggggacccgcacaagcggtggagcatgtggtttaattcgaagcaacgcgaagaaccttaccagatcttgacatccctctgaccgtcccgtaatgggggctttccttcgggacagaggagacaggtggtgcatggttgtcgtcagctcgtgtcgtgagatgttgggttaagtcccgcaacgagcgcaacccttatcgtcagtagccagcaggtgaagctgggcactctggcgagactgccggagataatccggaggaaggtggggatgacgtcaaatcatcatgccccttatgatctgggctacacacgtgctacaatggcgtttaacaaagagaagcgaagctgtgaggcagagcaaatctcaaaaacaacgtctcagttcggattgtagtctgcaactcgactacatgaagctggaatcgttagtaatcgcgaatcagaatgtcgcggtgaatacgttcccgggtcttgtacacaccgcccgtca

SEQ ID NO: 171 - DNA, 1392 bp, Artificial Sequence
  Synthetic polymer
agagtttgatcctggctcaggatgaacgctggcggcgtgcttaacacatgcaagtcgaacggagtgcccatgacagaggattcgtccaatggattgggttacttagtggcggacgggtgagtaacgcgtgaggaacctgcctcggagtggggaataacacaacgaaagctgtgctaataccgcatgatacagttgggtcgcatgactctgactgtcaaagatttatcgctctgagatggcctcgcgtctgattagctggttggcggggtaacggcccaccaaggcgacgatcagtagccggactgagaggttgaccggccacattgggactgagacacggcccagactcctacgggaggcagcagtggggaatattgggcaatgggcgcaagcctgacccagcaacgccgcgtgaaggaagaaggctttcgggttgtaaacttcttttctcagggacgaagcaagtgacggtacctgaggaataagccacggctaactacgtgccagcagccgcggtaatacgtaggtggcaagcgttatccggatttactgggtgtaaagggcgtgtaggcgggatcgcaagtcagatgtgaaaactggaggctcaacctccagcctgcatttgaaactgtggttcttgagtactggagaggcagacggaattcctagtgtagcggtgaaatgcgtagatattaggaggaacaccagtggcgaaggcggtctgctggacagcaactgacgctgaggcgcgaaagcgtggggagcaaacaggattagataccctggtagtccacgctgtaaacgatggatactaggtgtggggggtctgaccccctccgtgccgcagttaacacaataagtatcccacctggggagtacggtcgcaagattgaaactcaaaggaattgacgggggcccgcacaagcagtggagtatgtggtttaattcgaagcaacgcgaagaaccttaccaggacttgacatcccacgcatagcctagagataggtgaagtcctacgggacgtggagacaggtggtgcatggttgtcgtcagctcgtgtcgtgagatgttgggttaagtcccgcaacgagcgcaacccttactgtcagttaccatcattaagttggggactctggcaggactgccggtgacaaatcggaggaaggtggggacgacgtcaaatcatcatgccccttatgtcctgggctacacacgtactacaatggctgttaacaaagtgaagcaaagcagtgatgtggagcaaaacacaaaaagcagtctcagttcagattgtaggctgaaactcgcctatatgaagtcggaattgctagtaatcgcagatcagcatgctgcggtgaatacgtttccgggccttgcacacaccgcccgtca

SEQ ID NO: 172 - DNA, 1380 bp, Artificial Sequence
  Synthetic polymer
agagtttgatcctggctcaggatgaacgctggcggcgtgcttaacacatgcaagtcgaacgaagacatctgagtgcttgcacttggatggactgagtggcggacgggtgagtaacgcgtgggtaacctgccttatacagggggataacagttggaaacgactgctaataccgcataagcgcacggtatcgcatgatacagtgtgaaaaactccggtggtataagatggacccgcgtctgattagcttgttggtgaggtaacggcccaccaaggcgacgatcagtagccggcctgagagggtgaacggccacattgggactgagacacggcccaaactcctacgggaggcagcagtggggaatattgcacaatgggggaaaccctgatgcagcgacgccgcgtgagtgatgaagtatttcggtatgtaaaactctatcagcagggaagataatgacggtacctgactaagaagcaccggctaaatacgtgccagcagccgcggtaatacgtatggtgcaagcgttatccggatttactgggtgtaaagggtgcgtaggtggtatggcaagtcagaagtgaaaggctggggctcaaccccgggactgcttttgaaactgtcaaactagagtacaggagaggaaagcggaattcctagtgtagcggtgaaatgcgtagatattaggaggaacaccagtggcgaaggcggctttctggactgaaactgacactgaggcacgaaagcgtggggagcaaacaggattagataccctggtagtccacgccgtaaacgatgaatactaggtgttggggagcaaagctcttcggtgccgccgcaaacgcattaagtattccacctggggagtacgttcgcaagaatgaaactcaaaggaattgacggggacccgcacaagcggtggagcatgtggtttaattcgaagcaacgcgaagaaccttaccaagtcttgacatccctctgaccgactcttaaccgagtctttccttcgggacagaggagacaggtggtgcatggttgtcgtcagctcgtgtcgtgagatgttgggttaagtcccgcaacgagcgcaacccctatccccagtagccagcggttcggccgggcactctgaggagactgccagggataacctggaggaaggcggggatgacgtcaaatcatcatgccccttatgatttgggctacacacgtgctacaatggcgtaaacaaagggaagcgagattgtgagatggagcaaatcccaaaaataacgtcccagttcggactgtagtctgcaacccgactacacgaagctggaatcgctagtaatcgcggatcagaatgccgcggtgaatacgttcccgggccttgcactcaccgcccgtca

SEQ ID NO: 173 - DNA, 1387 bp, Artificial Sequence
  Synthetic polymer
agagtttgatcctggctcaggatgaacgctggcggcgtgcctaacacatgcaagtcgaacgaagcgccttttgagattcttcggatgattgatcggtgactgagtggcggacgggtgagtaacgcgtgggtaacctgccctgtacagggggataacagttggaaacggctgctaataccgcataagcgcacgagaggacatcctcttgtgtgaaaaactccggtggtacaggatgagcccgcgtctgattagctggttggcagggtaacggcctaccaaggcgacgatcagtagccggtctgagaggatgaacggccacattggaactgagacacggtccaaactcctacgggaggcagcagtggggaatattgcacaatgggggaaaccctgatgcagcaacgccgcgtgagtgaagaagtatttcggtatgtaaagctctatcagcagggaagataatgacggtacctgactaagaagctccggctaaatacgtgccagcagccgcggtaatacgtatggagcaagcgttatccggatttactgggtgtaaagggtgcgtaggtggcagtgcaagtcagatgtgaaaggccggggctcaaccccggagctgcatttgaaactgctcggctagagtacaggagaggcaggcggaattcctagtgtagcggtgaaatgcgtagatattaggaggaacaccagtggcgaaggcggcctgctggactgttactgacactgaggcacgaaagcgtggggagcaaacaggattagataccctggtagtccacgccgtaaacgatgaatactaggtgttgggttccaaaggaactcggtgccgtcgcaaacgcattaagtattccacctggggagtacgttcgcaagaatgaaactcaaaggaattgacggggacccgcacaagcggtggagcatgtggtttaattcgaagcaacgcgaaaaaccttaccaagtcttgacatcctgatgaccgttccttaaccggaacttttcttcggaacatcagagacaggtggtgcatggttgttgtcagctcgtgtcgtgagatgttgggttaagtcccgcaacgagcgcaacccctatttccagtagccagcagtaagatgggcactctggagagactgccggggataacccggaggaaggtggggatgacgtcaaatcatcatgccccttatgatttgggctacacacgtgctacaatggcagttacaaagagaagcaaacctgtgaaggcgagcaaacctcaaaaaggctgtctcagttcggattgtagtctgcaactcgactacatgaagctggaatcgctagtaatcgcagatcagcatgctgcggtgaatacattcccgggtcttgtacacaccgcccgtca

SEQ ID NO: 174 - DNA, 1372 bp, Artificial Sequence
  Synthetic polymer
ttagagtttgatcctggctcaggacgaacgctggcggcgcgcctaacacatgcaagtcgaacgagcgagagagagcttgctttctcgagcgagtggcgaacgggtgagtaacgcgtgaggaacctgcctcaaagagggggacaacagttggaaacgactgctaataccgcataagcccacgggtcggcatcgaccagagggaaaaggagcaatccgctttgagatggcctcgcgtccgattagctggttggtgaggtaacggcccaccaaggcgacgatcggtagccggactgagaggttgaacggccacattgggactgagacacggcccagactcctacgggaggcagcagtggggaatattgcacaatgggggaaaccctgatgcagcgacgccacgtggaggaagaaggtcttcggattgtaaactcctgttgttgaggaagataatgacggtactcaacaaggaagtgacggctaactacgtgccagcagccgcggtaaaacgtaggtcacaagcgttgtccggaattactgggtgtaaagggagcgcaggcgggaagacaagttggaagtgaaatccatgggctcaactcatgaactgctttcaaaactgtttttcttgagtagtgcagaggtaggcggaattcccggtgtagcggtggaatgcgtagatatcgggaggaacaccagtggcgaaggcggcctactgggcaccaactgacgctgaggctcgaaagtgtgggtagcaaacaggattagataccctggtagtccacaccgtaaacgatgactactaggtgttggaggattgaccccttcagtgccgcagttaacacaataagtaatccacctggggagtacgaccgcaaggttgaaactcaaaggaattgacgggggcccgcacaagcagtggagtatgtggtttaattcgacgcaacgcgaagaaccttaccaagtcttgacatcctgcgacagacatagaaatatgtttttccttcgggacgcagagacaggtggtgcatggttgacgtcagctcgtgtcgtgagatgttgggttaagtcccgcaacgagcgcaacccttatggtcagttactacgcaagaggactctggccagactgccgttgacaaaacggaggaaggtggggatgacgtcaaatcatcatgccctttatgacttgggctacacacgtactacaatggtcggcaacagagggaagcgaagccgtgaggcagagcaaaccccagaaacccgatctcagttcggattgcaggctgcaactcgcctgcatgaagtcggaatcgctagtaatcgcaggtcagcatactgcggtgaatacgttcccgggccttgcactcaccgcccgtca

SEQ ID NO: 175 - DNA, 1362 bp, Artificial Sequence
  Synthetic polymer
agagtttgatcctggctcaggatgaacgctggcggcgtgcctaacacatgcaagtcgagcgattctcttcggagaagagcggcggacgggtgagtaacgcgtgggtaacctgccctgtacacacggataacataccgaaaggtatgctaatacgagataatataagaaattcgcatgtttttcttatcaaagctccggcggtacaggatggacccgcgtctgattagctagttggtgaggtaatggctcaccaaggcgacgatcagtagccgacctgagagggtgatcggccacattggaactgagacacggtccaaactcctacgggaggcagcagtggggaatattgcacaatgggcgaaagcctgatgcagcaacgccgcgtgagcgatgaaggccttcgggtcgtaaagctctgtcctcaaggaagataatgacggtacttgaggaggaagccccggctaactacgtgccagcagccgcggtaatacgtagggggctagcgttatccggatttactgggcgtaaagggtgcgtaggcggtcttttaagtcaggagtgaaaggctacggctcaaccgtagtaagctcttgaaactggaggacttgagtgcaggagaggagagtggaattcctagtgtagcggtgaaatgcgtagatattaggaggaacaccagtagcgaaggcggctctctggactgtaactgacgctgaggcacgaaagcgtggggagcaaacaggattagataccctggtagtccacgccgtaaacgatgagtactagctgtcggaggttacccccttcggtggcgcagctaacgcattaagtactccgcctggggagtacgctcgcaagagtgaaactcaaaggaattgacggggacccgcacaagtagcggagcatgtggtttaattcgaagcaacgcgaagaaccttacctaagcttgacatccttttgaccgatgcctaatcgcatttttcccttcggggacagaagtgacaggtggtgcatggttgtcgtcagctcgtgtcgtgagatgttgggttaagtcccgcaacgagcgcaacccttgcctttagttgccatcattaagttgggcactctagagggactgccagggataacctggaggaaggtggggatgacgtcaaatcatcatgccccttatgcttagggctacacacgtgctacaatggcgtaaacaaagggaagcgagattgtgagatggagcaaatcccaaaaataacgtcccagttcggactgtagtctgcaacccgactacacgaagctggaatcgctagtaatcgcggatcagaatgccgcggtgaatacgttcccgggtcttgcactcaccgcccgtca

SEQ ID NO: 176 - DNA, 1362 bp, Artificial Sequence
  Synthetic polymer
agagtttgatcctggctcaggatgaacgctggcggcgtgcctaacacatgcaagtcgagcgattctcttcggagaagagcggcggacgggtgagtaacgcgtgggtaacctgccctgtacacacggataacataccgaaaggtatgctaatacgagataatatgcttttatcgcatggtagaagtatcaaagcttttgcggtacaggatggacccgcgtctgattagctagttggtaaggtaacggcttaccaaggcgacgatcagtagccgacctgagagggtgatcggccacattggaactgagacacggtccaaactcctacgggaggcagcagtggggaatattgcacaatgggcgaaagcctgatgcagcaacgccgcgtgagcgatgaaggccttcgggtcgtaaagctctgtcctcaaggaagataatgacggtacttgaggaggaagccccggctaactacgtgccagcagccgcggtaatacgtagggggctagcgttatccggaattactgggcgtaaagggtgcgtaggtggtttcttaagtcagaggtgaaaggctacggctcaaccgtagtaagcctttgaaactgggaaacttgagtgcaggagaggagagtggaattcctagtgtagcggtgaaatgcgtagatattaggaggaacaccagttgcgaaggcggctctctggactgtaactgacactgaggcacgaaagcgtggggagcaaacaggattagataccctggtagtccacgccgtaaacgatgagtactagctgtcggaggttacccccttcggtggcgcagctaacgcattaagtactccgcctgggaagtacgctcgcaagagtgaaactcaaaggaattgacggggacccgcacaagtagcggagcatgtggtttaattcgaagcaacgcgaagaaccttacctgatcttgacatcccgatgaccgcttcgtaatggaagcttttcttcggaacatcggtgacaggtggtgcatggttgtcgtcagctcgtgtcgtgagatgttgggttaagtcccgcaacgagcgcaacccctatcttcagtagccagcaggtgaagctgggcactctggagagactgccagggataacctggaggaaggtggggatgacgtcaaatcatcatgccccttatgaccagggctacacacgtgctacaatggcgtaaacaaagagaagcgaactcgcgagggtaagcaaatctcaaaaataacgtctcagttcggattgtagtctgcaactcgactacatgaagctggaatcgctagtaatcgcagatcagaatgctgcggtgaatacgttcccgggtcttgtacacaccgcccgtca

SEQ ID NO: 177 - DNA, 1369 bp, Artificial Sequence
  Synthetic polymer
agagtttgatcctggctcaggatgaacgctggcggcgtgcctaacacatgcaagtcgagcgagtgaatctccttcgggagtgaagctagcggcggacgggtgagtaacacgtgggcaacctgcctcatagaggggaatagcctttcgaaaggaagattaataccgcataagattgtagcttcgcatgaagtagcaattaaaggagcaatccgctatgagatgggcccgcggcgcattagctagttggtggggtaacggcccaccaaggcgacgatccatagccggcctgagagggtgaacggccacattgggactgagacacggcccagactcctacgggaggcagcagtgagggatattgggcaatgggggaaaccctgacccagcaacgccgcgtgagggatgacggttttcggattgtaaacctctgtcctctgtgaagatagtgacggtagcagaggaggaagctccggctaactacgtgccagcagccgcggtaatacgtagggagcaagcgttgtccggatttactgggtgtaaagggtgcgtaggcggattggtaagtcagaagtgaaatccatgggcttaacccatgaactgcttttgaaactgttagtcttgagtgaagtagaggtaggcggaattcccggtgtagcggtgaaatgcgtagagatcgggaggaacaccagtggcgaaggcggcttactggactgtaactgacgttgaggctcgaaagcgtagggagcaaacaggattagataccctggtagtccacgcggtaaacgatgaatgctaggtgtaggaggtatcaaccccttctgtgccgcagtaaacacaataagcattccgcctggggagtacggccgcaaggttgaaactcaaaggaattgacgggggcccgcacaagcagcggagcatgtggtttaattcgaagcaacgcgaagaaccttaccaggtcttgacatccgtgtaaagccgcagagatgcggtgtgagcttgctcaatacgagacaggtggtgcatggttgtcgtcagctcgtgtcgtgagatgttgggttaagtcccgcaacgagcgcaacccttgtgattagttgctacgcaagagcactctaatcagactgccgttgacaaaacggaggaaggtggggacgacgtcaaatcatcatgccctttatgacctgggctacacacgtactacaatggtcgttaacagagggaagcaataccgcgaggtggagcaaaaccctaaaaacggtctcagttcagattgtaggctgcaactcgcctacatgaagttggaattgctagtaatcgcggatcagcatgccgcggtgaatacgttcccgggccttgcactcaccgcccgtca

SEQ ID NO: 178 - DNA, 1384 bp, Artificial Sequence
  Synthetic polymer
agagtttgatcctggctcaggatgaacgctggcggcgtgcctaacacatgcaagtcgaacggaactttttttaattgatttcttcggaatgattttgattaagtttagtggcggacgggtgagtaacgcgtgagtaacctgcctctgagaggggaacaacattctgaaaagaatgctaataccgcataacatatatttatcgcatggtagatatatcaaagatttatcgctcagagatggactcgcgtccgattagttagttggtgaggtaacggctcaccaagaccgcgatcggtagccggactgagaggttgaacggccacattgggactgagacacggcccagactcctacgggaggcagcagtgggggatattgcgcaatgggggaaaccctgacgcagcaacgccgcgtgaaggatgaaggtcttcggattgtaaacttcttttattaaggacgaagaaagtgacggtacttaatgaataagctccggctaactacgtgccagcagccgcggtaatacgtagggagcaagcgttgtccggatttactgggtgtaaagggtgcgtaggcgggaaggcaagttggatgtgaaaactgtgggcttaaccgacagactgcattcaaaactgtttttcttgagtgaagtagaggcaagcggaattcctagtgtagcggtgaaatgcgtagatattaggaggaacaccagtggcgaaggcggcttgctgggcttttactgacgctggggctcgaaagtgtggggagcaaacaggattagataccctggtagtccacaccgtaaacgatgattactaggtgtgggggcgtcaagcttccgtgccggagttaacacaataagtaatccacctggggagtacgaccgcaaggttgaaactcaaaggaattgacgggggcccgcacaagcagtggagtatgtggtttaattcgaagcaacgcgaagaaccttaccaggtcttgacatcgagtgacgaatctagagatagatttttccttcgggacacaaagacaggtggtgcatggttgtcgtcagctcgtgtcgtgagatgttgggttaagtcccgcaacgagcgcaacccttgctattagttgctacgcaagagcactctaataggactgccgttgacaaaacggaggaaggtggggacgacgtcaaatcatcatgccccttatgacctgggctacacacgtactacaatggatgtaaacagagggaagcaaaatagcgatatggagcaaaccccaaaaagcattctcagttcagattgcaggctgcaactcgcctgtatgaagttggaattgctagtaatcgcggatcagcatgccgcggtgaatacgttcccgggccttgcacacacgcccgtca

SEQ ID NO: 179 - DNA, 1388 bp, Artificial Sequence
  Synthetic polymer
ttcgcccttagagtttgatcctggctcaggacgaacgctggcggcgtgcctaacacatgcaagtcgaacggagatatttatttcggtagatatcttagtggcgcacgggtgagtaacgcgtgaataacctgacccgaagagggggataacacctggaaacaagtgctaataccgcataagaccacggaccggcatcggtcagaggtcaaaggagaaatccgctttgggaggggttcgcgtcccattaggtagttggtgaggtaacggcccaccaagccgacgatgggtagccgagctgagaggctgatcggccacactggaactgagacacggtccagactcctacgggaggcagcagtggggaatattgggcaatgggcgcaagcctgacccagcaacgccgcgtgagggaagaaggttttcggattgtaaacctctgtcgcaggggacgaaggaagtgacggtaccctgtaagaaagccccggctaactacgtgccagcagccgcggtaatacgtagggggcgagcgttgtccggaattactgggcgtaaagggagcgtaggcggtcgattaagttagatgtgaaacccccgggcttaacttggggactgcatctaatactggttgacttagagtacaggagagggaagcggaattcctagtgtagcggtgaaatgcgtagatattaggaggaacaccagtggcgaaggcggctttctggactgacactgacgctgaggctcgaaagcgtggggagcaaacaggattagataccctggtagtccacgctgtaaacgatgaatactaggtgtagggggtatcaactccctctgtgccgcagcaaacgcaataagtattccgcctggggagtacggccgcaaggttgaaactcaaaggaattgacgggggcccgcacaagcagcggagcatgtggtttaattcgacgcaacgcgaagaaccttaccaaggcttgacatctacttaaagtcatggaaacatgatgtctcttcggaggaagtaagacaggtggtgcatggttgtcgtcagctcgtgtcgtgagatgttgggttaagtcccgcaacgagcgcaacccttatctttagtagccagcggtccggccgggcactctagagagactgccagggataacctggaggaaggcggggatgacgtcaaatcatcatgccccttatgacttgggctacacacgtgctacaatggcgtaaacaaagggaagcaaagctgtgaagccgagcaaatctcaaaaataacgtctcagttcggactgtagtctgcaacccgactacacgaagctggaatcgctagtaatcgcagatcagaatgctgcggtgaatacgttcccgggtcttgcacacaccgcccgtca

SEQ ID NO: 180 - DNA, 1379 bp, Artificial Sequence
  Synthetic polymer
ttcgcccttagagtttgatcctggctcaggacgaacgctggcggcgcgcctaacacatgcaagtcgaacgagcgagaggaggtttactttctcaagcgagtggcgaacgggtgagtaacgcgtgaggaacctgcctcaaagagggggacaacagttggaaacgactgctaataccgcataagcccacgacccggcatcgggtagagggaaaaggagcaatccgctttgagatggcctcgcgtccgattagctagttggtgaggtaatggcccaccaaggcgacgatcggtagccggactgagaggttgaacggccacattgggactgagacacggcccagactcctacgggaggcagcagtggggaatattgcacaatgggggaaaccctgatgcagcgacgccgcgtggaggaagaaggtcttcggattgtaaactcctgttgttgaggaagataatgacggtactcaacaaggaagtgacggctaactacgtgccagcagccgcggtaaaacgtaggtcacaagcgttgtccggaattactgggtgtaaagggagcgcaggcgggaaggcaagttggaagtgaaatccatgggctcaacccatgaactgctttcaaaactgtttttcttgagtagtgcagaggtaggcggaattcccggtgtagcggtggaatgcgtagatatcgggaggaacaccagtggcgaaggcggcctactgggcaccaactgacgctgaggctcgaaagtgtgggtagcaaacaggattagataccctggtagtccatgccgtaaacgatgattactaggtgttgggggattgaccccctcagtgccgcagttaacacaataagtaatccacctggggagtacgaccgcaaggttgaaactcaaaggaattgacgggggcccgcacaagcagtggagtatgtggtttaattcgacgcaacgcgaagaaccttaccaagtcttgacatcctgcgacgatgctggaaacagtattttccttcgggacgcagagacaggtggtgcatggttgtcgtcagctcgtgtcgtgagatgttgggttaagtcccgcaacgagcgcaacccttattgccagttactacgtaagaggactctggcgagactgccgttgacaaaacggaggaaggtggggatgacgtcaaatcatcatgccctttatgacctgggctacacacgtactacaatggcgtttaacaaagagaagcaagaccgcgaggtggagcaaaactcaaaaacaacgtctcagttcagattgcaggctgcaactcgcctgcatgaagtcggaattgctagtaatcgcggatcagcatgccgcggtgaatacgttcccgggccttgtactcaccgcccgtca

SEQ ID NO: 181 - DNA, 1375 bp, Artificial Sequence
  Synthetic polymer
agagtttgatcctggctcaggacgaacgctggcggtgcgcctaacacatgcaagtcgaacggagcttagagagcttgctttttaagcttagtggcgaacgggtgagtaacgcgtgagtaacctgccctagagtgggggacaacagttggaaacgactgctaataccgcataagcccacggtgccgcatgacactgagggaaaaggatttattcgctttaggatggactcgcgtccaattagctagttggtgaggtaacggcccaccaaggcgacgattggtagccggactgagaggttgaacggccacattgggactgagacacggcccagactcctacgggaggcagcagtgggggatattgggcaatgggggaaaccctgacccagcaacgccgcgtgagggatgacggttttcggattgtaaacctctgtcctctgtgaagatagtgacggtagcagaggaggaagctccggctaactacgtgccagcagccgcggtaatacgtagggagcaagcgttgtccggatttactgggtgtaaagggtgcgtaggcggattggcaagtcagaagtgaaatccatgggcttaacccatgaactgcttttgaaactgttagtcttgagtgaagtagaggtaggcggaattcccggtgtagcggtgaaatgcgtagagatcgggaggaacaccagtggcgaaggcggcctactgggctttaactgacgctgaggcacgaaagtgtgggtagcaaacaggattagataccctggtagtccacactgtaaacgatgattactaggtctgggggggtctaaccccctccgtgccggagttaacacaataagtaatccacctggggagtacgaccgcaaggttgaaactcaaaggaattgacgggggcccgcacaagcagtggagtatgtggtttaattcgacgcaacgcgaagaaccttaccaggtcttgacatccaactaacgaagcagagatgcattaggtgcccttcggggaaagttgagacaggtggtgcatggttgtcgtcagctcgtgtcgtgagatgttgggttaagtcccgcaacgagcgcaacccttgtgattagttgctacgcaagagcactctaatcagactgccgttgacaaaacggaggaaggtggggacgacgtcaaatcatcatgccctttatgacctgggctacacacgtactacaatggccgttaacagagggaagcaataccgcgaggtggagcaaaaccctaaaaacggtctcagttcagattgtaggctgcaactcgcctacatgaagttggaattgctagtaatcgcggatcagcatgccgcggtgaatacgttcccgggccttgcacacaccgcccgtca

SEQ ID NO: 182 - DNA, 1379 bp, Artificial Sequence
  Synthetic polymer
ttcgcccttagagtttgatcctggctcaggacgaacgctggcggcgcgcctaacacatgcaagtcgaacgagcgagagagagcttgctttctcgagcgagtggcgaacgggtgagtaacgcgtgaggaacctgcctcaaagaggggggcaacagttggaaacgactgctaataccgcataagcccacagctcggcatcgagcagagggaaaaggagcaatccgctttgagatggcctcgcgtccgattagctagttggtgaggtaatggcccaccaaggcgacgatcggtagccgggctgagaggttgaacggccacattgggactgagacacggcccagactcctacgggaggcagcagtggggaatattgcacaatgggggaaaccctgatgcagcgacgccgcgtggaggaagaaggtcttcggattgtaaactcctgttgttgaggaagataatgacggtactcaacaaggaagtgacggctaactacgtgccagcagccgcggtaaaacgtaggtcacaagcgttgtccggaattactgggtgtaaaaggagcgcaggcgggaagacaagttggaagtgaaatccatgggctcaacccatgaactgctttcaaaactgtttttcttgagtagtgcagaggtaggcggaattcccggtgtagcggtggaatgcgtagatatcgggaggaacaccagtggcgaaggcggcctactgggcaccaactgacgctgaggctcgaaagtgtgggtagcaaacaggattagataccctggtagtccacactgtaaacgatgattactaggtgttggaggattgaccccttcagtgccgcagttaacacaataagtaatccacctggggagtacgaccgcaaggttgaaactcaaaggaattgacgggggcccgcacaagcagtggagtatgtggtttaattcgacgcaacgcgaagaaccttaccaagtcttgacatcctgcgacgcacatagaaatatgtgtttccttcgggacgcagagacaggtggtgcatggttgtcgtcagctcgtgtcgtgagatgttgggttaagtcccgcaacgagcgcaacccttatcattagttgctacgcaagagcactctaatgagactgccgttgataaaacggaggaaggtggggatgacgtcaaatcatcatgccccttatgacctgggctacacacgtactacaatggtgataaaacagagggaagcaacacagcgatgtgaagcaaatcccgaaaaatcatctcagttcagattgcaggctgcaactcgcctgcatgaagtcggaattgctagtaatcgcggatcagcatgccgcggtgaatacgttcccgggccttgtacacaccgcccgtca

SEQ ID NO: 183 - DNA, 1392 bp, Artificial Sequence
  Synthetic polymer
agagtttgatcctggctcaggatgaacgctggcggcgtgcttaacacatgcaagtcgaacgaaacaccttatttgattttcttcggaactgaagatttggtgattgagtggcggacgggtgagtaacgcgtgggtaacctgccctgtacagggggataacagtcagaaatgactgctaataccgcataagaccacagcaccgcatggtgcaggggtaaaaactccggtggtacaggatggacccgcgtctgattagctggttggtgaggtaacggctcaccaaggcgacgatcagtagccggcttgagagagtgaacggccacattgggactgagacacggcccaaactcctacgggaggcagcagtggggaatattgcacaatgggggaaaccctgatgcagcgacgccgcgtgagtgaagaagtatttcggtatgtaaagctctatcagcagggaagaaaatgacggtacctgactaagaagccccggctaactacgtgccagcagccgcggtaatacgtagggggcaagcgttatccggaattactgggtgtaaagggtgcgtaggtggtatggcaagtcagaagtgaaaacccagggcttaactctgggactgcttttgaaactgtcagactggagtgcaggagaggtaagcggaattcctagtgtagcggtgaaatgcgtagatattaggaggaacatcagtggcgaaggcggcttactggactgaaactgacactgaggcacgaaggcgtggggagcaaacaggattagataccctggtagtccacgccgtaaacgatgaatactaggtgtcggggccgtagaggcttcggtgccgcagccaacgcagtaagtattccacctggggagtacgttcgcaagaatgaaactcaaaggaattgacggggacccgcacaagcggtggagcatgtggtttaattcgaagcaacgcgaagaaccttacctgctcttgacatctccctgaccggcaagtaatgttgcctttccttcgggacagggatgacaggtggtgcatggttgtcgtcagctcgtgtcgtgagatgttgggttaagtcccgcaacgagcgcaacccctatctttagtagccagcggttcagccgggcactctagagagactgccagggataacctggaggaaggtggggatgacgtcaaatcatcatgccccttatgagcagggctacacacgtgctacaatggcgtaaacaaagggaggcagaaccgcgaggtcgagcaaatcccaaaaataacgtctcagttcggattgtagtctgcaactcgactacatgaagctggaatcgctagtaatcgcgaatcagaatgtcgcggtgaatacgttcccgggtcttgcacacaccgcccgtca

SEQ ID NO: 184 - DNA, 1390 bp, Artificial Sequence
  Synthetic polymer
ttcgcccttagagtttgatcctggctcaggacgaacgctggcggcgtgcctaacacatgcaagtcgaacggagttgaaaggagcttgcttttttcaactcagtggcggacgggtgagtaacgcgtgagtaacctgcctttcagagggggataacgttctgaaaagaacgctaataccgcataagattgtagtttcgcatggagcagcaatcaaaggagcaatccgctgaaagatggactcgcgtccgattagatagttggcggggtaacggcccaccaagtcgacgatcggtagccggactgagaggttgatcggccacattgggactgagacacggcccagactcctacgggaggcagcagtgagggatattgggcaatgggggaaaccctgacccagcaacgccgcgtgagggatgacggttttcggattgtaaacctctgtcctctgtgaagatagtgacggtagcagaggaggaagctccggctaactacgtgccagcagccgcggtaatacgtagggagcaagcgttgtccggatttactgggtgtaaagggtgcgtaggcggattggcaagtcagaagtgaaatccatgggcttaacccatgaactgcttttgaaactgttagtcttgagtgaagtagaggtaggcggaattcccggtgtagcggtgaaatgcgtagagatcgggaggaacaccagtggcgaaggcggcctactgggctttaactgacgctgaggcacgaaagtgtgggtagcaaacaggattagataccctggtagtccacactgtaaacgatgattactaggtgtggggggtctaaccccctccgtgccggagttaacacaataagtaatccacctggggagtacgaccgcaaggttgaaactcaaaggaattgacgggggcccgcacaagcagtggagtatgtggtttaattcgacgcaacgcgaagaaccttaccaggtcttgacatccaactaacgaagcagagatgcattaggtgcccttcggggaaagttgagacaggtggtgcatggttgtcgtcagctcgtgtcgtgagatgttgggttaagtcccgcaacgagcgcaacccttgcctttagttgccagcattaagttgggcactctgaggagactgccagggataacctggaggaaggcggggatgacgtcaaatcatcatgccccttatgatttgggctacacacgtgctacaatggcgtaaacaaagggaagcaagcctgcgaaggtaagcaaatcccaaaaataacgtcccagttcggactgcagtctgcaactcgactgcacgaagctggaatcgctagtaatcgcggatcagaatgccgcggtgaatacgttcccgggtcttgcactcaccgcccgtca

SEQ ID NO: 185 - DNA, 1393 bp, Artificial Sequence
  Synthetic polymer
agagtttgatcctggctcaggatgaacgctggcggcgtgcttaacacatgcaagtcgaacgaaacaccttatttgattttcttcggaactgaagatttggtgattgagtggcggacgggtgagtaacgcgtgggtaacctgccctgtacagggggataacagtcagaaatgactgctaataccgcataagaccacagcaccgcatggtgcaggggtaaaaactccggtggtacaggatggacccgcgtctgattagctggttggtgaggtaacggctcaccaaggcgacgatcagtagccggcttgagagagtgaacggccacattgggactgagacacggcccaaactcctacgggaggcagcagtggggaatattgcacaatggggggaaccctgatgcagcgacgccgcgtgagtgaagaagtatctcggtatgtaaagctctatcagcagggaagaaaatgacggtacctgactaagaagccccggctaactacgtgccagcagccgcggtaatacgtagggggcaagcgttatccggaattactgggtgtaaagggtgcgtaggtggtatggcaagtcagaagtgaaaacccagggcttaactctgggactgcttttgaaactgtcagactagagtgcaggagaggtaagcggaattcctagtgtagcggtgaaatgcgtagatattaggaggaacatcagtggcgaaggcggcttactggactgaaactgacactgaggcacgaaagcgtgggggagcaaacaggattagataccctggtagtccacgccgtaaacgatgaatactaggtgtcggggccgtagaggcttcggtgccgcagccaacgcagtaagtattccacctggggagtacgttcgcaagaatgaaactcaaaggaattgacggggacccgcacaagcggtggagcatgtggtttaattcgaagcaacgcgaagaaccttaccaagtcttgacatcccgatggccggcacgtaacggtgccttctcttcggagcatcggagacaggtggtgcatggttgtcgtcagctcgtgtcgtgagatgttgggttaagtcccgcaacgagcgcaacccctatccttagtagccagcggtttggccgggcactctgaggagactgccagggataacctggaggaaggcggggatgacgtcaaatcatcatgccccttatgatttgggctacacacgtgctacaatggcgtaaacaaagggaagcgagagtgtgagcttaagcaaatcccaaaaataacgtcccagttcggactgcagtctgcaactcgactgcacgaagctggaatcgctagtaatcgcggatcagaatgccgcggtgaatacgttcccgggtcttgcactcaccgcccgtca

SEQ ID NO: 186 - DNA, 1380 bp, Artificial Sequence
  Synthetic polymer
agagtttgatcctggctcaggatgaacgctggcggcgtgcctaacacatgcaagtcgaacggacttacattgaagcctagcgatatgtaagttagtggcggacgggtgagtaacgcgtgggtaacctgccctgtacagggggataacagttagaaatgactgctaacaccgcataagcgcacaggaaggcatctttcggtgtgaaaatatttataggtacaggatgggcccgcgtctgattagccagttggcagggtaacggcctaccaaagcaacgatcagtagccggcttgagagagtgaacggccacattgggactgagacacggcccaaactcctacgggaggcagcagtggggaatattgcacaatgggggaaaccctgatgcagcgacgccgcgtgagtgaagaagtatttcggtatgtaaagctctatcagcagggaagaaaatgacggtacctgactaagaagccccggctaactacgtgccagcagccgcggtaatacgtagggggcaagcgttatccggatttactgggtgtaaagggtgcgtaggtggtctggcaagtcagaagtgaaaacgcagggcttaaccctgcgactgcttttgaaactgtcagactagagtgcaggagaggcaagcggaattcctagtgtagcggtgaaatgcgtagatattaggaggaacaccagtggcgaaggcggcttgctggactgttactgacactgaggcacgaaagcgtggggagcaaacaggattagataccctggtagtccacgccgtaaacgatgaatactaggtgtcggggcacaaaagtgcttcggtgccgcagccaacgcaataagtattccacctggggagtacgttcgcaagaatgaaattcaaaggaattgacggggacccgcacaagcggtggagcatgtggtttaattcgaagcaacgcgaagaaccttaccaggtcttgacatcctcttgaccgatgcttaatcgtatcttctcttcggagcaagagagacaggtggtgcatggttgtcgtcagctcgtgtcgtgagatgttgggttaagtcccgcaacgagcgcaacccctatttttagtagccagcggttcggccgggcactctagagagactgccgaggataactcggaggaaggtggggacgacgtcaaatcatcatgccccttatgatctgggctacacacgtgctacaatggcggatacaaagggaggcaaagccgcgaggcagagcaaaccccaaaaaagccgtctcagttcggattgtagtctgcaactcgactacatgaagctggaatcgctagtaatcgcgaatcagaatgtcgcggtgaatacgttcccgggtcttgcacacaccgcccgtca

SEQ ID NO: 187 - DNA, 1377 bp, Artificial Sequence
  Synthetic polymer
ttcgcccttagagtttgatcctggctcaggacgaacgctggcggcacgcctaacacatgcaagtcgaacggacgaggaggagcttgcttctccgagttagtggcggacgggtgagtaacacgtgagcaacctgcccttgagagggggatagcttctggaaacggatggtaataccccataacatatattttaggcatctaagatatatcaaagaaattcgctcaaggatgggctcgcgtctgattagatagttggtgaggtaacggcccaccaagtcgacgatcagtagccggactgagaggttgaacggccacattgggactgagacacggcccagactcctacgggaggcagcagtggggaatattgcacaatggggggaaccctgatgcagcgatgtcgcgtggaggaagaaggttttcggattgtaaactccttttaacagggacgataatgacggtacctgaagaaaaagctccggctaactacgtgccagcagccgcggtaatacgtagggagcgagcgttgtccggaattactgggtgtaaagggagcgtaggcgggacggtaagtcaggtgtgaaatatacgtgctcaacatgtagactgcacttgaaactgctgttcttgagtgaagtagaggtaagcggaattcctagtgtagcggtgaaatgcgtagatattaggaggaacatcggtggcgaaggcggcttactgggcttttactgacgctgaggctcgaaagcgtggggagcaaacaggattagataccctggtagtccacgctgtaaacgatgattactaggtgtggggggactgaccccttccgtgccgcagttaacacaataagtaatccacctggggagtacgaccgcaaggttgaaactcaaaggaattgacgggggcccgcacaagcggtggagcatgtggtttaattcgaagcaacgcgaagaaccttaccaagtcttgacatcccaatgacaagctgtgtaatgcagcctctcttcggagcattggtgacaggtggtgcatggttgtcgtcagctcgtgtcgtgagatgttgggttaagtcccgcaacgagcgcaacccttacctttagttgctacgcaagagcactctagagggactgccgttgacaaaacggaggaaggtggggatgacgtcaaatcatcatgccccttatgacttgggctacacacgtgctacaatggcgtaaacaaagggaagcgagcccgtgagggggagcaaatcccaaaaataacgtcccagttcggattgtagtctgcaactcgactacatgaagctggaatcgctagtaatcgcgaatcagaatgtcgcggtgaatacgttcccgggtcttgcacacaccgcccgtca

SEQ ID NO: 188 - DNA, 1377 bp, Artificial Sequence
  Synthetic polymer
agtttgatcctggctcaggacgaacgctggcggcgtgcctaacacatgcaagtcgaacggacgaggaggagcttgcttctccaagtcagtggcggacgggtgagtaacgcgtgagtaacctgcccttcagagggggataacgtctggaaacggacgctaataccgcataacatattcccatcgcatggtggagatatcaaaggagcaatccgctgaaggatggactcgcgtccgattagatagttggcggggtaacggcccaccaagtcgacgatcggtagccggactgagaggttgaacggccacattgggactgagacacggcccagactcctacgggaggcagcagtgggggatattgcacaatgggcgaaagcctgatgcagcaacgccgcgtgagggaagacggttttcggattgtaaacctctgttctaagtgacgaacaaatgacggtagcttaggagaaagccccggctaactacgtgccagcagccgcggtaatacgtagggggcaagcgttgtccggaattactgggtgtaaagggagcgcaggcggagaagcaagtcagtggtgaaaacgatgggcttaactcatcgactgccattgaaactgtttcccttgagtgaagtagaggcaggcggaattccgagtgtagcggtgaaatgcgtagatattcggaggaacaccagtggcgaaggcggcctgctgggctttaactgacgctgaggctcgaaagtgtggggagcaaacaggattagataccctggtagtccacactgtaaacgatgattgctaggtgtggggggtctgaccccttccgtgccggagttaacgcaataagcaatccacctggggagtacggccgcaaggttgaaactcaaaggaattgacgggggcccgcacaagcagtggattatgtggtttaattcgacgcaacgcgaagaaccttaccaggtcttgacatccaacgaatccttaagagattagggagtgcctttcggggaacgttgagacaggtggtgcatggttgtcgtcagctcgtgtcgtgagatgttgggttaagtcccgcaacgagcgcaacccttattattagttgctacattcagttgagcactctaatgagactgccgttgacaaaacggaggaaggtggggatgacgtcaaatcatcatgccccttatgacctgggctacacacgtaatacaatggcgatcaacagagggaagcaagaccgcgaggtggagcaaacccctaaaagtcgtctcagttcggattgcaggctgcaactcgcctgcatgaagtcggaattgctagtaatcgcggatcagcatgccgcggtgaataagttcccgggccttgcactcaccgcccgtca

SEQ ID NO: 189 - DNA, 1398 bp, Artificial Sequence
  Synthetic polymer
agtttgatcctggctcaggatgaacgctagcgacaggcctaacacatgcaagtcgaggggcagcggggaggtagcaatacctttgccggcgaccggcgcacgggtgagtaacacgtatgcaatccacctgtaacagggggataacccggagaaatccggactaataccccataatatgggcgctccgcatggagagtccattaaagagagcaatcttggttacagacgagcatgcgctccattagccagttggcggggtaacggcccaccaaggcgacgatggataggggttctgagaggaaggtcccccacattggaactgagacacggtccaaactcctacgggaggcagcagtgaggaatattggtcaatggtcggcagactgaaccagccaagtcgcgtgagggaagacggccctacgggttgtaaacctcttttgtcggagagtaaagtgcgctacgcgtagcgtattgcaagtatccgaagaaaaagcatcggctaactccgtgccagcagccgcggtaatacggaggatgcgagcgttatctggatttattgggtttaaagggtgcgtaggcggcacgccaagtcagcggtgaaatttccgggctcaacccggactgtgccgttgaaactggcgagctagagtgcacaagaggcaggcggaatgcgtggtgtagcggtgaaatgcatagatatcacgcagaaccccgattgcgaaggcagcctgctagggtgcgacagacgctgaggcacgaaagcgtgggtatcgaacaggattagataccctggtagtccacgcagtaaacgatgaatactaactgtttgcgatacaatgtaagcggtacagcgaaagcgttaagtattccacctggggagtacgccggcaacggtgaaactcaaaggaattgacgggggcccgcacaagcggaggaacatgtggtttaattcgatgatacgcgaggaaccttacccgggctcaaacgcagggggaatatatatgaaagtatatagctagcaatagtcacccgcgaggtgctgcatggttgtcgtcagctcgtgccgtgaggtgtcggcttaagtgccataacgagcgcaacccttatcactagttactaacaggtgaagctgtggactctggtgagactgccagcgtaagctgtgaggaaggtggggatgacgtcaaatcagcacggcccttacatccggggcgacacacgtgttacaatggcatggacaaagggcagctacctggcgacaggatgctaatctccaaaccatgtctcagttcggatcggagtctgcaactcgactccgtgaagctggattcgctagtaatcgcgcatcagccatggcgcggtgaatacgttcccgggccttgtactcacagcccgtca

SEQ ID NO: 190 - DNA, 1388 bp, Artificial Sequence
  Synthetic polymer
agagtttgatcctggctcaggacgaacgctggcggcgtgcctaacacatgcaagtcgaacgaagctctccgatacaagacttcggtcaagttgaagggatgacttagtggcggacgggtgagtaacgcgtgaggaacctgcctttcagtgggggacaacagttggaaacgactgctaataccgcataatgtttccggaccgcatgatctggaaaccaaagctttatgtgctgaaagatggcctcgcgtctgattagatagttggtgaggtaacggcccaccaagtctacgatcagtagccggactgagaggttgaacggccacattgggactgagatacggcccagactcctacgggaggcagcagtggggaatattgggcaatgggggaaaccctgacccagcaacgccgcgtgaaggaagaaggctttcgggttgtaaacttcttttaccagggacgaaggacgtgacggtacctggagaaaaagccacggctaactacgtgccagcagccgcggtaatacgtaggtggcaagcgttgtccggatttactgggtgtaaagggcgtgtaggcggagatgcaagtcagaagtgaaatccatgggcttaacccatgaactgcttttgaaactgtatcccttgagtatcggagaggcaggcggaattcctagtgtagcggtgaaatgcgtagatattaggaggaacaccagtggcgaaggcggcctgctggacgacaactgacgctgaggcgcgaaagcgtggggagcaaacaggattagataccctggtagtccacgctgtaaacgatgaatactaggtgtggggggactgaccccttccgtgccgcagttaacacaataagtattccacctggggagtacgatcgcaagattgaaactcaaaggaattgacgggggcccgcacaagcagtggattatgtggtttaattcgacgcaacgcgaagaaccttaccaagtcttgacatcctgcgacggtgctggaaacagtactttccttcgggacgcagagacaggtggtgcatggttgtcgtcagctcgtgtcgtgagatgttgggttaagtcccgcaacgagcgcaacccttatggtcagttactacgtaagaggactctggccagactgccgttgacaaaacggaggaaggtggggatgacgtcaaatcatcatgccctttatgacttgggctacacacgtactacaatggcgttaaacaaagagaagcaagaccgcgaggtggagcaaaactcagaaacaacgtcccagttcggactgcaggctgcaactcgcctgcacgaagtcggaattgctagtaatcgcagatcagcatgccgcggtgaatacgttcccgggccttgtacacaccgcccgtca

SEQ ID NO: 191 - DNA, 1402 bp, Artificial Sequence
  Synthetic polymer
ttcgcccttagagtttgatcctggctcaggacgaacgctggcggcgtgcctaatacatgcaagtcgaacggagatattcgctgatgaagtacttcggtaatgaatcttggatatcttagtggcggacgggtgagtaacgcgtgagcaacctgcctttcagagggggataacgtttggaaacgaacgctaataccgcatgacattatcttatcgcatggtaggataatcaaaggagcaatccgctgaaagatgggctcgcgtccgattaggtagttggtggggtaacggcccaccaagccgacgatcggtagccggactgagaggttggacggccacattgggactgagacacggcccagactcctacgggaggcagcagtaagggatattggtcaatgggggaaaccctgaaccagcaacgccgcgtgagggaagacggttttcggattgtaaacctctgtcctctgtgaagatgatgacggtagcagaggaggaagctccggctaactacgtgccagcagccgcggtaatacgtagggagcgagcgttgtccggatttactgggtgtaaagggtgcgtaggcggcttggcaagtcagtagtgaaatccatgggcttaacccatgaactgctattgaaactgtcgagcttgagtgaagtagaggtaggcggaattcccggtgtagcggtgaaatgcgtagagatcgggaggaacaccagtggcgaaggcggcctactgggctttaactgacgctgaggcacgaaagcgtgggtagcaaacaggattagataccctggtagtccacgctgtaaacgatgattactaggtgtgggtggactgaccccatccgtgccggagttaacacaataagtaatccacctggggagtacggccgcaaggctgaaactcaaaggaattgacgggggcccgcacaagcagtggagtatgtggattaattcgaagatacgcgaagaaccttaccaggtcttgacatccgactaacgaagtagagatacattaggtgcccttcggggaaagtcgagacaggtggtgcatggttgtcgtcagctcgtgtcgtgagatgttgggttaagtcccgcaacgagcgcaacccttactgttagttgctacgcaagagcactctagcaggactgccgttgacaaaacggaggaaggtggggacgacgtcaaatcatcatgccccttatgacctgggctacacacgtactacaatggccgtaaacagagggaagcaaagccgcgaggtggagccaacccccaaaagcggtctcagttcagattgcaggctgcaactcgcctgcatgaagtcggaattgctagtaatcgcagatcagaatgctgcggtgaatacgttcccgggccttgcacacaccgcccgtca

SEQ ID NO: 192 - DNA, 1364 bp, Artificial Sequence
  Synthetic polymer
agagtttgatcctcggctcaggatgaacgctggcggcgtgcgtaacacatgcaagtcgagcgagaagctcatgacggacgcttcggttgaagtcacgagtgaatagcggcggacgcgtgagtaacgcgtaggcaacctgccctctgcagagggatagcctcgcgaaaccgggattaaaacctcataataccgcagtgagacatctcgcggcggtcaaagatttatcggcaaaggatgggcctgcgtctgattagttagttggtggtggtaacggcctaccaaggcgacgatcagtagccgacctgagagggtgatcggccacattggaactgagacacggtccaaactcgtaccggaggcagcagtggggaatattgcacaatgggggaaaccctgatgcagcaacgccgcgtgaagtatgaaggcctttgggtcgtaaacttctgttctaagggaagatagtgacggtaccttaggagcaagtcccggctaactacgtgccagcagccgcggtaatacgtagggggcaagcgttatccggaattattgggcgtaaagagtacgtaggtggttttataagcacggggtttaaggcaatggcttaaccattgttcgccttgtgaactggaagacttgagtgcaggagaggaaagcggaattcctagtgtagcggtgaaatgcgtagatattaggaggaactccagtggcgaaggcggctttctggactgtaactgacactgaggtacgaaagcgtggggagcaaacgaggattagataccctggtagtccacgccgtaaacgatgagcactaggtgtcggggtcgcaagacttcggtgcagcagttaccgcattaagtgctcggattggggagtacgttcgcaagaatgaaactcaaaggaattgaggcggagagcacacagtatcgtagtatgtggtttaattcgaagcaacgcgatgacccttgccagggcttgacattcctaagacagatctttaaacggatgttttttcggacagaggagacaggtcgtgcagagtggttgtcagctggtgtcgcgagaaggtgtgtgaagtccgtcaaagagcgcaaccgtcgtcacaagttgtcagcaggaagatgggcaatctcgtgagagagccggggattactcggaggaaggaggggacgaggtcccatcatcaagcccattatggtttgggttacacaagtgttacaaggaccggcaccgagagaacccggaccgcgaggtggagcaaaaatcaaaagccggtcccagttaggagtgcagcatgcaagtagcatgcacgaagtaggagttgttagtaatggcagatcagaatgatgcggtgaacgagttcccgg

SEQ ID NO: 193 - DNA, 1355 bp, Artificial Sequence
  Synthetic polymer
cggcgtgcttaacacatgcaagtcgaacgagaatcactggaaggagttttcggacaacggaaggtgaggacagtggcggacgggtgagtaacgcgtgaggaacctgcctttcagaggggaacaacagttggaaacgactgctaataccgcataagcccacaggtcggcatcgaccagagggaaaaggagcaatccgctttgagatggcctcgcgtccgattagctagttggtgaggtaacggcccaccaaggcaacgatcggtagccggactgagaggttgaacggccacattgggactgagacacggcccagactcctacgggaggcagcagtggggaatattgggcaatgggcgaaagcctgacccagcaacgccgcgtgaaggaagaaggccctcgggttgtaaacttcttttgtcagggacgaagcaagtgacggtacctgacgaataagccacggctaactacgtgccagcagccgcggtaatacgtaggtggcaagcgttatccggatttactgggtgtaaagggcgtgtaggcgggaaggcaagtcagatgtgaaaactatgggctcaacccatagcctgcatttgaaactgtttttcttgagtgctggagaggcaatcggaattccgtgtgtagcggtgaaatgcgtagatatacggaggaacaccagtggcgaaggcggattgctggacagtaactgacgctgaggcgcgaaagcgtggggagcaaacaggattagataccctggtagtccacgctgtaaacgatggatactaggtgtggggggtctgaccccctccgtgccgcagttaacacaataagtattccacctggggagtacgatcgcaaggttgaaactcaaaggaattgacgggggcccgcacaagcagtggagtatgtggtttaattcgacgcaacgcgaagaaccttaccaagtcttgacatcctgcgacgatgctggaaacagtattttccttcgggacgcagagacaggtggtgcatggttgtcgtcagctcgtgtcgtgagatgttgggttaagtcccgcaacgagcgcaacccttactgtcagttactacgcaagaggactctggcgagactgccgttgacaaaacggaggaaggtggggatgacgtcaaatcatcatgccctttatgacctgggctacacacgtactacaatggcgtttaacaaagagaagcaagaccgcgaggtggagcaaaactcaaaaacaacgtctcagttcagattgcaggctgcaactcgcctgcatgaagtcggaattgctagtaatcgcggatcagcatgccgcggtgaatacgttcccgggccttgtactcaccgcccgtca

SEQ ID NO: 194 - DNA, 1391 bp, Artificial Sequence
  Synthetic polymer
agtttgatcctggctcaggacgaacgctggcggcgtgcctaacacatgcaagtcgaacggaactgttttgaaagatttcttcggaatgaatttgatttagtttagtggcggacgggtgagtaacgcgtgagtaacctgccttcaagagggggataacattctgaaaagaatgctaataccgcatgacatatcggaaccacatggttttgatatcaaagattttatcgcttgaagatggactcgcgtccgattagttagttggtgaggtaacggctcaccaagaccgcgatcggtagccggactgagaggttgaacggccacattgggactgagacacggcccagactcctacgggaggcagcagtgggggatattgcgcaatgggggcaaccctgacgcagcaacgccgcgtgaaggatgaaggttttcggattgtaaacttcttttattaaggacgaaaattgacggtacttaatgaataagctccggctaactacgtgccagcagccgcggtaatacgtagggagcaagcgttgtccggatttactgggtgtaaagggtgcgtaggcggctttgcaagtcagatgtgaaatctatgggctcaacccataaactgcatttgaaactgtagagcttgagtgaagtagaggcaggcggaattccccgtgtagcggtgaaatgcgcagatattaggaggaacaccagtggcgaaggcggcttactggacggtaactgacgttgaggctcgaaagcgtggggagcaaacaggattagataccctggtagtccacgccgtaaacgatgactactaggtgtcgggcagcaaagctgttcggtgccgcagcaaacgcaataagtagtccacctggggagtacgttcgcaagaatgaaactcaaaggaattgacggggacccgcacaagcggtggagcatgtggtttaattcgaagcaacgcgaagaaccttacctgctcttgacatctccctgaccggcaagtaatgttgcctttctttcgggacagggatgacaggtggtgcatggttgtcgtcagctcgtgtcgtgagatgttgggttaagtcccgcaacgagcgcaacccctatctttagtagccagcggttcggccgggcactctagagagactgccagggataacctggaggaaggtggggatgacgtcaaatcatcatgccccttatgagcagggctacacacgtgctacaatggcgtaaacaaagggaggcagaaccgcgaggtcgagcaaatcccaaaaataacgtctcagttcggattgtagtctgcaactcgactacatgaagctggaatcgctagtaatcgcgaatcagaatgtcgcggtgaatacgttcccgggtcttgcacacaccgcccgtca

SEQ ID NO: 195 - DNA, 1381 bp, Artificial Sequence
  Synthetic polymer
agtttgatcctggctcaggatgaacgctggcggcgtgcttaacacatgcaagtcgaacgaagcactttggacagattcttcggatgaagtccttagtgactgagtggcggacgggtgagtaacgcgtgggtaacctgcctcatacagggggataacagttagaaatggctgctaataccgcataagcgcacggtactgcatggtacagtgtgaaaaactccggtggtatgagatggacccgcgttggattagctagttggcagggtaacggcctaccaaggcgacgatccatagccggcctgagagggtggacggccacattgggactgagacacggcccagactcctacgggaggcagcagtggggaatattgcacaatgggggaaaccctgatgcagcgacgccgcgtggaggaagaaggtcttcggattgtaaactcctgttgttggggaagataatgacggtacccaacaaggaagtgacggctaactacgtgccagcagccgcggtaaaacgtaggtcacaagcgttgtccggaattactgggtgtaaagggagcgcaggcgggaagacaagttggaagtgaaatccatgggcttaacccatgaactgctttcaaaactgtttttcttgagtagtgcagaggtaggcggaattcccggtgtagcggtggaatgcgtagatatcgggaggaacaccagtggcgaaggcggcctactgggcaccaactgacgctgaggctcgaaagtgtgggtagcaaacaggattagataccctggtagtccacaccgtaaacgatgattactaggtgttggaggattgaccccttcagtgccgcagttaacacaataagtaatccacctggggagtacgaccgcaaggttgaaactcaaaggaattgacgggggcccgcacaagcagtggagtatgtggtttaattcgacgcaacgcgaagaaccttaccaagtcttgacatcctgtgacagacgtagaaatacgttcttccttcgggacacagagacaggtggtgcatggttgtcgtcagctcgtgtcgtgagatgttgggttaagtcccgcaacgagcgcaacccttatggtcagttactacgcaagaggactctggccagactgccgttgacaaaacggaggaaggtggggatgacgtcaaatcatcatgccctttatgacttgggctacacacgtactacaatggcgttaaacaaagagaagcaagaccgcgaggtggagcaaaactcagaaacaacgtcccagttcggactgcaggctgcaactcgcctgcacgaagtcggaattgctagtaatcgtggatcagcatgccacggtgaatacgttcccgggccttgtactcaccgcccgtca

SEQ ID NO: 196 - DNA, 1393 bp, Artificial Sequence
  Synthetic polymer
agagtttgatcttggctcaggatgaacgctggcggcgtgcttaacacatgcaagtcgaacggaacgccaaggaaagagttttcggacaatggaattggttgtttagtggcggacgggtgagtaacgcgtgagtaacctgccttggagtggggaataacacagtgaaaactgtgctaataccgcatgacatattggtgtcgcatggcactgatatcaaagatttatcgctctgagatggactcgcgtctgattagatagttggcggggtaacggcccaccaagtcgacgatcagtagccggactgagaggttggccggccacattgggactgagacacggcccagactcctacgggaggcagcagtggggaatattgggcaatgggcgcaagcctgacccagcaacgccgcgtgaaggaagaaggctttcgggttgtaaacttcttttaacagggacgaagcaagtgacggtacctgttgaataagccacggctaactacgtgccagcagccgcggtaatacgtaggtggcaagcgttatccggatttactgggtgtaaagggcgtgtaggcgggactgcaagtcagatgtgaaaactatgggctcaacccatagcctgcatttgaaactgtagttcttgagtgtcggagaggcaatcggaattccgtgtgtagcggtgaaatgcgtagatatacggaggaacaccagtggcgaaggcggattgctggacgataactgacgctgaggcgcgaaagcgtggggagcaaacaggattagataccctggtagtccacgccgtaaacgatggatactaggtgtggggggtctgaccccctccgtgccgcagctaacgcaataagtatcccacctggggagtacgatcgcaaggttgaaactcaaaggaattgacgggggcccgcacaagcggtggagtatgtggtttaattcgaagcaacgcgaagaaccttaccaaatcttgacatccctctgaccggcgagtaatgtcgcctttccttcgggacagaggagacaggtggtgcatggttgtcgtcagctcgtgtcgtgagatgttgggttaagtcccgcaacgagcgcaacccttatcctaagtagccagcggtttggccgggcactcttgggagactgccagggataacctggaggaaggtggggatgacgtcaaatcatcatgccccttatgatttgggctacacacgtgctacaatggcgtaaacaaagagaagcgagaccgcgaggtggagcaaatctcaaaaataacgtctcagttcggactgcaggctgcaactcgcctgcacgaagctggaatcgctagtaatcgcgaatcagaatgtcgcggtgaatacattcccgggtcttgcacacaccgcccgtca

SEQ ID NO: 197 - DNA, 1386 bp, Artificial Sequence
  Synthetic polymer
ttcgcccttagagtttgatcctggctcaggacgaacgctggcggcgcgcctaacacatgcaagtcgaacgagcgagaggaggtttactttctcaagcgagtggcgaacgggtgagtaacgcgtgaggaacctgcctcaaagagggggacaacagttggaaacgactgctaataccgcataagcccacgacccggcatcgggtagagggaaaaggagcaatccgctttgagatggcctcgcgtccgattagctagttggtgaggtaatggcccaccaaggcgacgatcggtagccggactgagaggttgaacggccacattgggactgagacacggcccagactcctacgggaggcagcagtggggaatattgcacaatgggggaaaccctgatgcagcgacgccgcgtggaggaagaaggtcttcggattgtaaactcctgttgttgaggaagataatgacggtactcaacaaggaagtgacggctaactacgtgccagcagccgcggtaaaacgtaggtcacaagcgttgtccggaattactgggtgtaaagggagcgcaggcgggaaggcaagttggaagtgaaatccatgggctcaacccatgaactgctttcaaaactgtttttcttgagtagtgcagaggtaggcggaattcccggtgtagcggtggaatgcgtagatatcgggaggaacaccagtggcgaaggcggcctactgggcaccaactgacgctgaggctcgaaagtgtgggtagcaaacaggattagataccctggtagtccacactgtaaacgatgattactaggtgttggaggatttggccctttcatgtgcggcagttatcacaataaaataatccacctggggcgtacgaccgcaaggttgaaactcaaaggaattggcgagggcccacacaggccagtggagtatgtggtttaattcgacgcaacgcgaagaaccttaaccaaagtcttgacatcctgcgacgcacatagaaatatgagtttccttcgggacgcagaagacaggtggtgcatggttgtcgtcagctcgtgtcgtgagatgttgggttaagtcccgcaacgagcgcaacccttatggtcagttagtacgcaagaggactctggccagactgccgttgacaaaacggaggaaggtggggatgacgtcaaatcatcatgccctttatgacttgggctacacacgtactacaatggcgttaaacaaagagaagcaagaccgcgaggtggagcaaaactcagaaacaacgtcccagttcggactgcaggctgcaactcgcctgcacgaagtcggaattgctagtaatcgcagatcagcatgctgcggtgaatacgttcccgggccttgcactcaccgcccgtca

SEQ ID NO: 198 - DNA, 1385 bp, Artificial Sequence
  Synthetic polymer
ttcgcccttagagtttgatcctggctcaggacgaacgctggcggcgtgcctaacacatgcaagtcgaacggagttgaaaggagcttgcttttttcaactcagtggcggacgggtgagtaacgcgtgagtaacctgcctttcagagggggataacgttctgaaaagaacgctaataccgcataagattgtagtttcgcatgggacagcaatcaaaggagcaatccgctgaaagatggactcgcgtccgattagatagttggcggggtaacggcccaccaagtcgacgatcggtagccggactgagaggttgatcggccacattgggactgagacacggcccagactcctacgggaggcagcagtgagggatattgggcaatgggggaaaccctgacccagcaacgccgcgtgagggatgacggttttcggattgtaaacctctgtcctctgtgaagatagtgacggtagcagaggaggaagctccggctaactacgtgccagcagccgcggtaatacgtagggagcgagcgttgtccggatttactgggtgtaaagggtgcgtaggcggctctgcaagtcagaagtgaaatccatgggcttaacccatgaactgcttttgaaactgtagagcttgagtgaagtagaggtaggcggaattcccggtgtagcggtgaaatgcgtagagatcgggaggaacaccagtggcgaaggcggcctactgggctttaactgacgctgaggcacgaaagcatgggtagcaaacaggattagataccctggtagtccatgccgtaaacgatgattactaggtgtggggggtctgaccccctccgtgccggagttaacacaataagtaatccacctggggagtacgaccgcaaggttgaaactcaaaggaattgacgggggcccgcacaagcagtggagtatgtggattaattcgaagcaacgcgaagaaccttaccaggtcttgacatccaactaacgaagcagagatgcattaggtgcccttcggggaaagttgagacaggtggtgcatggttgtcgtcagctcgtgtcgtgagatgttgggttaagtcccgcaacgagcgcaacccttactgttagttgctacgcaagagcactctagcaggactgccgttgacaaaacggaggaaggtggggacgacgtcaaatcatcatgccccttatgacctgggcctcacacgtactacaatggccattaacagagggaagcaagcccgcgaggtggagcaaaaccctaaaaatggtctcagttcggatcgtaggctgaaacccgcctgcgtgaagttggaattgctagtaatcgcggatcagcatgccgcggtgaatacgttcccgggccttgcactcaccgcccgtca

SEQ ID NO: 199 - DNA, 1399 bp, Artificial Sequence
  Synthetic polymer
agagtttgatcctggctcaggacgaacgctggcggcgtgcctaacacatgcaagtcgaacggaactgttttgaaagatttcttcggaatgaatttgatttagtttagtggcggacgggtgagtaacgcgtgagtaacctgccttcaagagggggataacattctgaaaagaatgctaataccgcatgatatatcggaatcacatggttttgatatcaaagattttatcgcttgaagatggactcgcgtccgattagttagttggtgaggtaacggctcaccaagaccgcgatcggtagccggactgagaggttgaacggccacattgggactgagacacggcccagactcctacgggaggcagcagtgggggatattgcgcaatgggggcaaccctgacgcagcaacgccgcgtgaaggatgaaggttttcggattgtaaacttcttttattaaggacgaaaaacgacggtacttaatgaataagctccggctaactacgtgccagcagccgcggtaatacgtagggagcaagcgttgtccggatttactgggtgtaaagggtgcgtaggcggctttgcaagtcagatgtgaaatctatgggctcaacccataaactgcatttgaaactgtagagcttgagtgaagtagaggcaggcggaattccccgtgtagcggtgaaatgcgtagagatggggaggaacaccagtggcgaaggcggcctgctgggctttaactgacgctgaggcgcgaaagcgtgggtagcaaacaggattagataccctggtagtccacgctgtaaacgatgattactaggtgtgggggggctgaccccttccgtgccggagttaacacaataagtaatccaccttggggagtccggccgcaaggttgaaactcaagggaattgacgggggccccgcacaaccaggggagtaggtggtttatttcgaagcaacgggaagacctttaccaggtcttgccttccaactaacgaagtagagatccattaggtgcctttcggggaaagttgagacaggtggtgcagggttgtcgtcagctcgtgtcgtgagatgttgggttaagtcccgcaacgagcgcaacccctattttcagtagccagcaggtaaggctgggcactctggagagactgccagggataacctggaggaagggggggacgaggtcaaatcatcatgccccttatgatctgggcgacacacgtgctacaatggcggtcacagagtgaggcgaacccgcgagggggagcaaaccacaaaaaggccgtcccagttcggactgtagtctgcaacccgactacacgaagctggaatcgctagtaatcgcgaatcagaatgtcgcggtgaatgcgttcccgggccttgtacacaccgcccgtca

SEQ ID NO: 200 - DNA, 1385 bp, Artificial Sequence
  Synthetic polymer
agagtttgatcctggctcaggatgaacgctggcggcgtgcctaacacatgcaagtcgaacggaacttctttgacagaattcttcggaaggaagttgattaagtttagtggcggacgggtgagtaacgcgtgagtaacctgcctttgagaggggaataacttcccgaaagggatgctaataccgcatgatgcatagaagtcgcatggcttttatgccaaagatttatcgctcaaagatggactcgcgtccgattagccagttggcggggtaacggcccaccaaagcgacgatcggtagccggactgagaggttgaacggccacattgggactgagacacggcccagactcctacgggaggcagcagtgggggatattgcgcaatgggggaaaccctgacgcagcaacgccgcgtgaaggatgaaggttttcggattgtaaacttcttttatttaggacgaagaatgacggtactaaatgaataagctccggctaactacgtgccagcagccgcggtaatacgtagggagcaagcgttatccggatttactgggtgtaaagggtgcgtaggcggcttggtaagtcagatgtgaaatgtatgggctcaacccatgcactgcatttgaaactattgagcttgagtgaagtagaggtaggcggaattccctgtgtagcggtgaaatgcgtagagatagggaggaacaccagtggcgaaggcggcctactgggctttaactgacgctgaggcacgaaagcgtgggtagcaaacaggattagataccctggtagtccacgctgtaaacgatgattactaggtgtggggggtctgaccccttccatgccggagttaacacaataagtaatccacctggggagtacgaccgcaaggttgaaactcaaaggaattgacgggggcccgcacaagcagtggagtatgtggtttaattcgaagcaacgcgaagaaccttaccaggtcttgacatcgagtgacgaatctagagatagatttttccttcgggacacaaagacaggtggtgcatggttgtcgtcagctcgtgtcgtgagatgttgggttaagtcccgcaacgagcgcaacccttatcattagttgctacgcaagagcactctaatgagactgccgttgataaaacggaggaaggtggggatgacgtcaaatcatcatgccccttatgacctgggctacacacgtactacaatggtgatcaaacagagggaagcaacacagcgatgtgaagcagaacccgaaaaatcatctcagttcagattgcaggctgcaactcgcctgcatgaagtcggaattgctagtaatcgcggatcagcatgccgcggtgaatacgttcccgggccttgcactcaccgcccgtca

SEQ ID NO: 201 - DNA, 1398 bp, Artificial Sequence
  Synthetic polymer
ttcgcccttagagtttgatcctggctcaggacgaacgctggcggcgtgcttaacacatgcaagtcgaacggagcacccctgactgaggtttcggccaaatgatgggaatgcttagtggcggactggtgagtaacgcgtgaggaacctgccttccagagggggacaacagttggaaacgactgctaataccgcatgacgcatgatcggggcatcccggacatgccaaagatttatcgctggaagatggcctcgcgtctgattagctagtaggcggggtaacggcccacctaggcgacgatcagtagccggactgagaggttgaccggccacattgggactgagatacggcccagactcctacgggaggcagcagtggggaatattgggcgatggacgcaagtctgacccagcaacgccgcgtgaaggaagaaggctttcgggttgtaaacttcttttgtcagggaacagtagaagagggtacctgacgaataagccacggctaactacgtgccagcagccgcggtaatacgtaggtggcaagcgttgtccggatttactgggtgtaaagggcgtgtagccgggctgataagtcagatgtgaaatctggaggctcaacctccaaactgcatttgaaactgtcggtcttgagtatcggagaggtaaccggaattcctagtgtagcggtgaaatgcgtagatattaggaagaacaccagtggcgaaggcgggttactggacgacaactgacggcgaggcgcgaaagcgtggggagcaaacaggattagataccctggtagtccacgctgtaaacgatcaatactaggtgtgcggggactgaccccctgcgtgccgcagttaacacaataagtattgcacctggggagtacgatcgcaaggttgaaactcaaaggaattgacgggggcccgcacaagcggtggattatgtggtttaattcgaagcaacgcgaagaaccttaccagggcttgacatcctgctaacgaagtagagatacattaggtgcccttcggggaaagcagagacaggtggtgcatggttgtcgtcagctcgtgtcgtgagatgttgggttaagtcccgcaacgagcgcaacccctattgttagttgctacgcaagagcactctagcgagactgccgttgacaaaacggaggaaggtggggacgacgtcaaatcatcatgccccttatgtcctgggctacacacgtaatacaatggcggtcaacagagggaggcaaagccgcgaggcagagcgaacccctaaaagccgtcccagttcggatcgcaggctgcaacccgcctgcgtgaagtcggaatcgctagtaatcgcggatcagcatgccgcggtgaatacgttcccgggccttgcactcaccgcccgtca

SEQ ID NO: 202 - DNA, 1369 bp, Artificial Sequence
  Synthetic polymer
agagtttgatcctggctcaggacgaacgctggcggcgcgcctaacacatgcaagtcgaacggtgaagaggagcttgctcctcggatcagtggcggacgggtgagtaacacgtgagcaacctggctctaagagggggacaacagttggaaacgactgctaataccgcataacgtatcgggatggcatctttctgataccaaagattttatcgcttagagatgggctcgcgtctgattagatagttggcggggtaacggcccaccaagtcgacgatcagtagccggactgagaggttgaacggccacattgggactgagacacggcccagactcctacgggaggcagcagtgggggatattggacaatgggggcaaccctgatccagcgacgccgcgtgagggaagaaggttttcggattgtaaacctctgttgacggagaaaaaaatgatggtatccgtttagaaagccacggctaactacgtgccagcagccgcggtaatacgtaggtggcaagcgttgtccggaattactgggtgtaaagggagtgtaggcgggatatcaagtcagaagtgaaaattacgggctcaactcgtaacctgcttttgaaactgacattcttgagtgaagtagaggcaagcggaattcctagtgtagcggtgaaatgcgtagatattaggaggaacaccagtggcgaaggcggcttgctgggcttttactgacgctgaggctcgaaagcgtggggagcaaacaggattagataccctggtagtccacgccgtaaacgatgattactaggtgtggggggattgaccccttccgtgccggagtaaacacaataagtaatccacctggggagtacgaccgcaaggttgaaactcaaaggaattgacgggggcccgcacaagcagtggagtatgtggtttaattcgaagcaacgcgaagaaccttaccaggtcttgacatccgatgcatagcacagagatgtgtgaaatccttcgggacatcgagacaggtggtgcatggttgtcgtcagctcgtgtcgtgagatgttgggttaagtcccgcaacgagcgcaacccttattgccagttactacgttaagaggactctggcgagactgccgttgacaaaacggaggaaggtggggatgacgtcaaatcatcatgccctttatgacctgggctacacacgtactacaatggcgttaaacaaagagaagcgagaccgcgaggtggagcaaaactcaaaaacaacgtcccagttcggactgcaggctgcaactcgcctgcacgaagtcggaattgctagtaatcgtggatcggcatgccacggtgaatacgttcccgggccgtgcactcaccgcccgtca

SEQ ID NO: 203 - DNA, 1389 bp, Artificial Sequence
  Synthetic polymer
agagtttgatcctggctcaggatgaacgctagcggcgtgcctaacacatgcaagtcgaacgaagcaccttacttgattcttcggatgaaggtctggtgactgagtggcggacgggtgagtaacgcgtgggtaacctgccctgtacagggggataacagctggaaacggctgctaataccgcataagcgcacgaggagacatctcctagtgtgaaaaactccggtggtacaggatgggcccgcgtctgattagctggttggcagggtaacggcctaccaaggcaacgatcagtagccggtctgagaggatgaacggccacattggaactgagacacggtccaaactcctacgggaggcagcagtggggaatattgcacaatgggggaaaccctgatgcagcaacgccgcgtgagtgaagaagtatttcggtatgtaaagctctatcagcagggaagataatgacggtacctgactaagaagctccggctaaatacgtgccagcagccgcggtaatacgtagggggcaagcgttatccggaattactgggtgtaaagggtgcgtaggtggtatggcaagtcagaagtgaaaacccagggcttaactctgggactgcttctgaaactgtcagactggagtacaggagaggcaggcggaattcctagtgtagcggtgaaatgcgtagatattaggaggaacaccagtggcgaaggcggcctgctggactgttactgacactgaggcacgaaagcgtggggagcaaacaggattagataccctggtagtccacgccgtaaacgatgaatactaggtgtcggggccgtataggcttcggtgccgccgcaaacgcagtaagtattccacctggggagtacgttcgcaagaatgaaactcaaaggaattgacggggacccgcacaagcggtggagcatgtggtttaattcgaagcaacgcgaagaaccttaccaggtcttgacatccttctgaccgcaccttaatcggtgctttccttcgggacagaagagacaggtggtgcatggttgtcgtcagctcgtgtcgtgagatgttgggttaagtcccgcaacgagcgcaacccctatcttcagtagccagcaggtaaggctgggcactctggagagactgccagggataacctggaggaaggtggggacgacgtcaaatcatcatgccccttatgatctgggcgacacacgtgctacaatggcggtcacagagtgaggcgaacccgcgagggggagcaaaccacaaaaaggccgtcccagttcggactgtagtctgcaacccgactacacgaagctggaatcgctagtaatcgcgaatcagaatgtcgcggtgaatacgttcccgggtcttgtactcaccgcccgtca

SEQ ID NO: 204 - DNA, 1376 bp, Artificial Sequence
  Synthetic polymer
agagtttgatcctggctcaggatgaacgctggcggcgtgcctaacacatgcaagtcgaacggacgacgaagagcttgctcttcaaagttagtggcggacgggtgagtaacgcgtgggtaacctgcctcatacagggggatagcagctggaaacggctgataaaaccgcataagcgcacagcatcgcatgatgcagtgtgaaaaactccggtggtatgagatggacccgcgtctgattagctggttggtgaggtaacggcccaccaaggcgacgatcagtagccggcctgagagggtgaccggccacattgggactgagacacggcccaaactcctacgggaggcagcagtggggaatattgcacaatgggggaaaccctgatgcagcgacgccgcgtgaaggaagaagtatctcggtatgtaaacttctatcagcagggaagataatgacggtacctgactaagaagccccggctaactacgtgccagcagccgcggtaatacgtagggggcaagcgttatccggatttactgggtgtaaagggagcgtaggcggcggagcaagtcagaagtgaaagcccggggctcaaccccgggacggcttttgaaactgccctgcttgatttcaggagaggtaagcggaattcctagtgtagcggtgaaatgcgtagatattaggaggaacaccagtggcgaaggcggcttactggactgtaactgacgttgaggcacgaaagcgtggggagcaaacaggattagataccctggtagtccacgccgtaaacgatgaatactaggtgttgggtttcataagaagctcggtgccggcgcaaacgcattaagtattccacctggggagtacgttcgcaagaatgaaactcaaaggaattgacggggacccgcacaagcggtggagcatgtggtttaattcgaagcaacgcgaagaaccttaccaagtcttgacatcccgttgacctgttatgtaatgtaacatctcttcggagcaacggagacaggtggtgcatggttgtcgtcagctcgtgtcgtgagatgttgggttaagtcccgcaacgagcgcaacccttgtccttagtagccagcagtaagatgggcactctagggagactgccggggataactcggaggaaggtggggacgacgtcaaatcatcatgccccttatgacttgggctacacacgtgctacaatggcgtaaacaaagggaagcgaacctgtgaaggcaagcaaatcccaaaaataacgtctcagttcggattggagtctgcaacccgactccatgaagctggattcgctagtaatcgcgcatcagccatggcgcggtgaatacgttcccgggccttgtacacaccgcccgtca

SEQ ID NO: 205 - DNA, 1386 bp, Artificial Sequence
  Synthetic polymer
ttcgcccttagagtttgatcctggctcaggacgaacgctggcggcgcgcctaacacatgcaagtcgaacgagagagagggagcttgcttcctcaatcgagtggcgaacgggtgagtaacgcgtgaggaacctgcctcaaagagggggacaacagttggaaacgactgctaataccgcataagcccacgggtcggcatcgaccagagggaaaaggagcaatccgctttgagatggcctcgcgtccgattagctagttggtgaggtaacggcccaccaaggcaacgatcggtagccggactgagaggttgaacggccacattgggactgagacacggcccagactcctacgggaggcagcagtggggaatattgcacaatgggggaaaccctgatgcagcgacgccgcgtggaggaagaaggtcttcggattgtaaactcctgttgttgaggaagataatgacggtactcaacaaggaagtgacggctaactacgtgccagcagccgcggtaaaacgtaggtcacaagcgttgtccggaattactgggtgtaaagggagcgcaggcgggaagacaagttggaagtgaaatccatgggctcaacccatgaactgctttcaaaactgtttttcttgagtagtgcagaggtaggcggaattcccggtgtagcggtggaatgcgtagatatcgggaggaacaccagtggcgaaggcggcctactgggcaccaactgacgctgaggctcgaaagtgtgggtagcaaacaggattagataccctggtagtccacactgtaaacgatgattactaggtgttggaggattgaccccttcagtgccgcagttaacacaataagtaatccacctggggagtacgaccgcaaggttgaaactcaaaggaattgacgggggcccgcacaagcagtggagtatgtggtttaattcgacgcaacgcgaagaaccttaccaaggcttgacatctacttaaagtcatggaaacatgatgtctcttcggaggaagtaagacaggtggtgcatggttgtcgtcagctcgtgtcgtgagatgttgggttaagtcccgcaacgagcgcaacccctgttgccagttaccagcacgtaaaggtggggactctggtaagactgccggggacaactcggaggaaggtggggacgacgtcaaatcatcatgccccttatgtcttgggctacacacgtgctacaatggctgtaacaaagagaagcaagaccgcgaggtggagcaaaactcagaaacaacgtcccagttcggactgcaggctgcaactcgcctgcacgaagtcggaattgctagtaatcgtggatcagcatgccacggtgaatacgttcccgggccttgtacacaccgcccgtca

SEQ ID NO: 206 - DNA, 1395 bp, Artificial Sequence
  Synthetic polymer
agagtttgatcctggctcaggacgaacgctggcggcgtgcctaacacatgcaagtcgaacgaagctctgcgatacaagactccggtcaagttgaacggatgacttagtggcggacgggtgagtaacgcgtgaggaacctgcctttcagtgggggacaacagttggaaacgactgctaataccgcataatgtattctgaccgcatgatcggaataccaaagatttattgctgaaagatggcctcgcgtctgattagatagttggtgaggtaacggctcaccaagtcgacgatcagtagccggactgagaggttgaacggccacattgggactgagatacggcccagactcctacgggaggcagcagtggggaatattgggcaatgggggaaaccctgacccagcaacgccgcgtgaaggaagaaggctttcgggttgtaaacttcttttaccagggacgaaggacgtgacggtacctggagaaaaagccacggctaactacgtgccagcagccgcggtaatacgtaggtggcaagcgttgtccggatttactgggtgtaaagggcgtgtaggcggagaagcaagtcagaagtgaaatccatgggcttaacccatgaactgcttttgaaactgtttcccttgagtatcggagaggcaggcggaattcctagtgtagcggtgaaatgcgtagatattaggaggaacaccagtggcgaaggcggcctgctggacgacaactgacgctgaggcgcaaaagcgtggggagcaaacaggattagataccctggtagtccacgctgtaaacgatgaatactaggtgtgggaggactgaccccttccgtgccgcagttaacacaataagtattccacctggggagtacgatcgcaagattgaaactcgaaggaattgacggggacccgcacaagcggtggagcatgtggtttaattcgaagcaacgcgaagaaccttaccaggtcttgacatcccgatgaccggcccgtaacggggccttctcttcggagcattggagacaggtggtgcatggttgtcgtcagctcgtgtcgtgagatgttgggttaagtcccgcaacgagcgcaacccttatcctcagtagccagcaggtcaagctgggcactctgtggagactgccagggataacctggaggaaggtggggatgacgtcaaatcatcatgccccttatgatctgggctacacacgtgctacaatggcgtaaacaaagggaggcaaagccgcgaggtggagcaaatcccaaaaataacgtctcagttcggactgcagtctgcaactcgactgcacgaagctggaatcgctagtaatcgcgaatcagaatgtcgcggtgaatacgttcccgggtcttgcactcaccgcccgtca

SEQ ID NO: 207 - DNA, 1376 bp, Artificial Sequence
  Synthetic polymer
ttagagtttgatcctggctcaggacgaacgctggcggcgcgcctaacacatgcaagtcgaacgagcgagagagagcttgctttctcgagcgagtggcgaacgggtgagtaacgcgtgaggaacctgcctcaaagagggggacaacagttggaaacgactgctaataccgcataagcccacggctcggcatcgagcagagggaaaaggagcaatccgctttgagatggcctcgcgtccgattagctagttggtgaggtaatggcccaccaaggcaacgatcggtagccggactgagaggttgaacggccacattgggactgagacacggcccagactcctacgggaggcagcagtggggaatattgcacaatgggggaaaccctgatgcagcgacgccgcgtggaggaagaaggtcttcggattgtaaactcctgttgttgaggaagataatgacggtactcaacaaggaagtgacggctaactacgtgccagcagccgcggtaaaacgtaggtcacaagcgttgtccggaattactgggtgtaaagggagcgcaggcgggaagacaagttggaagtgaaatctatgggctcaacccataaactgctttcaaaactgtttttcttgagtagtgcagaggtaggcggaattcccggtgtagcggtggaatgcgtagatatcgggaggaacaccagtggcgaaggcggcctactgggcaccaactgacgctgaggctcgaaagcatgggtagcaaacaggattagataccctggtagtccacaccgtaaacgatgattactaggtgtggggggactgaccccttccgtgccgcagttaacacaataagtaatccacctggggagtacgaccgcaaggttgaaactcaaaggaattgacgggggcccgcacaagcagtggagtatgtggtttaattcgaagcaacgcgaagaaccttaccaggtcttgacatcgtatgcatagtctagagatagatgaaatcccttcggggacatatagacaggtggtgcatggttgtcgtcagctcgtgtcgtgagatgttgggctaagtcccgcaacgagcgcaacccttattgccagttactacgttaagaggactctggcgagactgccgttgacaaaacggaggaaggtggggatgacgtcaaatcatcatgccctttatgacctgggctacacacgtactacaatggcgttaaacaaagagaagcaagaccgcgaggtggagcaaaactcaaaaacaacgtctcagttcagattgcaggctgcaactcgcctgcatgaagtcggaattgctagtaatcgtggatcagcatgccacggtgaatacgttcccgggccttgtacacaccgcccgtca

SEQ ID NO: 208 - DNA, 1373 bp, Artificial Sequence
  Synthetic polymer
agagtttgatcctggctcaggacgaacgctggcggcgtgcctaacacatgcaagtcgagcgagtgaatctccttcgggagtgaagctagcggcggacgggtgagtaacacgtgggcaacctgcctcatagaggggaatagcctttcgaaaggaagattaataccgcataagattgtagcttcgcatgaagtagcaattaaaggagcaatccgctatgagatgggcccgcggcgcattagctagttggtgaggtaacggctcaccaaggcgacgatgcgtagccgacctgagagggtgatcggccacattgggactgagacacggcccagactcctacgggaggcagcagtggggaatattgcacaatgggggaaaccctgatgcagcaacgccgcgtgagtgatgacggccttcgggttgtaaagctctgtcttcagggacgataatgacggtacctgaggaggaagccccggctaactacgtgccagcagccgcggtaatacgtagggggcaagcgttatccggatttactgggtgtaaagggagcgtagacggtgtggcaagtctgatgtgaaaggcatgggctcaacctgtggactgcattggaaactgtcatacttgagtgccggaggggtaagcggaattcctagtgtagcggtgaaatgcgtagatattaggaggaacaccagtggcgaaggcggcttactggacggtaactgacgttgaggctcgaaagcgtggggagcaaacaggattagataccctggtagtccacgccgtaaacgatgaatactaggtgtcggggagcaaagctcttcggtgccgtcgcaaacgcagtaagtattccacctggggagtacgttcgcaagaatgaaacttaaaggaattgacggggacccgcacaagcggtggagcatgtggtttaattcgaagcaacgcgaagaaccttacctagacttgacatctcctgcattacccttaatcgggaaagttccttcggggacaggaagacaggtggtgcatggttgtcgtcagctcgtgtcgtgagatgttgggttaagtcccgcaacgagcgcaacccttattgttagttgctaccatttagttgagcactctagcgagactgcccgggttaaccgggaggaaggtggggatgacgtcaaatcatcatgccccttatgtctagggctacacacgtgctacaatggcaagtacaaagagatgcaataccgcgaggtggagcaaaactcaaaaacttgtctcagttcggattgtaggctgaaactcgcctacatgaagctggagttgctagtaatcgcgaatcagcatgtcgcggtgaatacgttcccgggccttgtacacaccgcccgtca

SEQ ID NO: 209 - DNA, 1388 bp, Artificial Sequence
  Synthetic polymer
agagtttgatcctggctcaggatgaacgctggcggcgtgcctaacacatgcaagtcgaacgaagcaccttacctgattcttcggatgaaggtctggtgactgagtggcggacgggtgagtaacgcgtgggtaacctgccctgtacagggggataacagttggaaacggctgctaatatcgcataagcgcacgagaggacatcctcttgtgtgaaaaactccggtggtacaggatgggcccgcgtctgattagctggttggcagggtaacggcctaccaaggcgacgatcagtagccggtctgagaggatgaacggccacattggaactgagacacggtccaaactcctacgggaggcagcagtggggaatattgcacaatgggggaaaccctgatgcagcaacgccgcgtgagtgaagaagtatttcggtatgtaaagctctatcagcagggaagataatgacggtacctgactaagaagctccggctaaatacgtgccagcagccgcggtaaaacgtagggtgcaagcgttgtccggaattactgggtgtaaagggagcgcaggcggaccggcaagttggaagtgaaaactatgggctcaacccataaattgctttcaaaactgctggccttgagtagtgcagaggtaggtggaattcccggtgtagcggtgaaatgcgtagatattaggaggaacaccagtggcgaaggcggcctgctggactgttactgacactgaggcacgaaagcgtggggagcaaacaggattagataccctggtagtccacgccgtaaacgatgaatactaggtgttggggagcaaagctcttcggtgccgccgcaaacgcattaagtattccacctggggagtacgttcgcaagaatgaaactcaaaggaattgacggggacccgcacaagcggtggagcatgtggtttaattcgaagcaacgcgaagaaccttaccaagtcttgacatccctctgaccgactcttaaccgagtctttccttcgggacagaggagacaggtggtgcatggttgtcgtcagctcgtgtcgtgagatgttgggttaagtcccgcaacgagcgcaacccctatccccagtagccagcggttcggccgggcactctgaggagactgccagggataacctggaggaaggcggggatgacgtcaaatcatcatgccccttatgatttgggctacacacgtgctacaatggcgtaaacaaagggaagcgagcctgcgaaggtaagcaaatcccaaaaataacgtcccagttcggactgcagtctgcaactcgactgcacgaagctggaatcgctagtaatcgcggatcagaatgccgcggtgaatacgttcccgggtcttgcacacaccgcccgtca

SEQ ID NO: 210 - DNA, 1388 bp, Artificial Sequence
  Synthetic polymer
agagttttatcctggctcaggatgaacgctggcggcgtgcctaacacatgcaagtcgaacgaagcaccttttgagattcttcggatgattgattggtgactgagtggcggacgggtgagtaacgcgtgggtaacctgccctgtacagggggataacagctggaaacggctgctaataccgcataagcgcacgaggagacatctccttgtgtgaaaaactccggtggtacaggatgggcccgcgtctgattagctggttggcagggtaacggcctaccaaggcaacgatcagtagccggtctgagaggatgaacggccacattggaactgagacacggtccaaactcctacgggaggcagcagtagggaatattgcacaatgggggaaaccctgatgcagcaacgccgcgtgagtgaagaagtatttcggtatgtaaagctctatcagcagggaagataatgacggtacctgactaagaagctccggctaaatacgtgccagcagccgcggtaatacgtatggagcaagcgttatccggatttactgggtgtaaagggtgcgtaggtggcagtgcaagtcagatgtgaaaggccggggctcaaccccggagctgcatttgaaactgctcggctagagtacaggagaggcaggcggaattcctagtgtagcggtgaaatgcgtagatattaggaggaacaccagtggcgaaggcggcctgctggaccgttactgacactgaggcacgaaagcgtggggagcaaacaggattagataccctggtagtccacgccgtaaacgatgaatactaggtgtcggggccgtataggcttcggtgccgccgctaacgcagtaagtattccacctggggagtacgttcgcaagaatgaaactcaaaggaattgacggggacccgcacaagcggtggagcatgtggtttaattcgaagcaacgcgaagaaccttacctgcccttgacatccgaatgaccggtgagtaatgtcgcctttccttcgggacattcgagacaggtggtgcatggttgtcgtcagctcgtgtcgtgagatgttgggttaagtcccgcaacgagcgcaacccttatctttagtagccagcatttaaggtgggcactctggggagactgccagggataacctggaggaaggcggggatgacgtcaaatcatcatgccccttatgatttgggctacacacgtgctacaatggcgtaaacaaagggaagcgagatcgtgagatggagcaaatcccaaaaataacgtcccagttcggactgtagtctgcaacccgactacacgaagctggaatcgctagtaatcgcggatcagaatgccgcggtgaatacgttcccgggtcttgcacacaccgcccgtca

SEQ ID NO: 211 - DNA, 1386 bp, Artificial Sequence
  Synthetic polymer
ttcgcccttagagtttgatcctggctcaggacgaacgctggcggcgcgcctaacacatgcaagtcgaacgagagagagggagcttgcttcctcaatcgagtggcgaacgggtgagtaacgcgtgaggaacctgcctcaaagagggggacaacagttggaaacgactgctaataccgcataagcccacaggtcggcatcgaccagagggaaaaggagcaatccgctttgagatggcctcgcgttcgattagctagttggtgaggtaacggcccaccaaggcaacgatcggtagccggactgagaggttgaacggccacattgggactgagacacggcccagactcctacgggaggcagcagtggggaatattgcacaatgggggaaaccctgatgcagcgacgccgcgtggaggaagaaggtcttcggattgtaaactcctgttgttgaggaagataatgacggtactcaacaagggagtgacggctaactacgtgccagcagccgcggtaaaacgtaggtcacaagcgttgtccggaattactgggtgtaaagggagcgcaggcgggaggacaagttggaagtgaaatccatgggctcaacccatgaactgctttcaaaactgtttttcttgagtagtgcagaggtaggcggaattcccggtgtagcggtggaatgcgtagatatcgggaggaacaccagtggcgaaggcggcctactgggcaccaactgacgctgaggctcgaaagtgtgggtagcaaacaggattagataccctggtagtccacaccgtaaacgatgattactaggtgttggaggattgaccccttcagtgccgcagttaacacaataagtaatccacctggggagtacggccgcaaggttgaaactcaaaggaattgacgggggcccgcacaagcagcggagcatgttgtttaattcgatgcaacgcgaagaaccttaccaggtcttgacatcgaggtaaagcggtagagataccgtgtggattcgtccaaccgaagacaggtggtgcatggttgtcgtcagctcgtgtcgtgagatgttgggttaagtcccgcaacgagcgcaacccttatgatcagttactaacgggtaaagccgaggactctgatgagactgccggggacaactcggaggaaggtggggacgacgtcaaatcatcatgccccttatgacctgggctacaaacgtgctacaatggcggccacaaagaggggcgagactgtgaagttaagcggatctcaaaaaagccgtcccagttcggattgtgggctgcaacccgcccacatgaagttggagttgctagtaatcgcggatcagcatgccgcggtgaatacgttcccgggccttgcacacaccgcccgtca

SEQ ID NO: 212 - DNA, 1388 bp, Artificial Sequence
  Synthetic polymer
agagtttgatctctggctcaggatgaacgctggcggcgtgcctaacacatgcaagtcgagcgagaaatgtatttatgaaacttcggtagattagatacatggaaagcggcggacgggtgagtaacgcgtaggcaacctgccccttgcagagggatagccattggaaacgatgattaaaacctcataacgctgcattgtcacatgatggagcagccaaagatttatcggcaagggatgggcctgcgtctgattagctagttggtggggtaacggcctaccaaggcgacgatcagtagccgacctgagagggtgatcggccacattggaactgagacacggtccaaactcctacgggaggcagcagtggggaatattgcacaatgggcgaaagcctgatgcagcaacgccgcgtgaaggaagaaggctttcgggtcgtaaacttctgtcctaggggaagataatgacgcaacccttggaggaagccccggctaactacgtgccagcagccgcggtaatacgtagggggcaagtgttatccggaattattgggcgtaaagagtgcgtaggtggtaacttaagcgcggggtttaaggcaatggcttaaccattgttcgccccgcgaactgggatacttgagtgcaggagaggaaagcggaattcctagtgtagcggtgaaatgcgtagatattaggaggaacaccagtggcgaaggcggctttctggactgaaactgacactgaggcacgaaagtgtggggagcaaacaggattagataccctggtagtccacaccgtaaacgatgaacactaggtgtcgggtgagcaatcattcggtgccggagttaacgcattaagtattccacctggggagtacgttcgcaagaatgaaactcaaaggaattgacggggacccgcacaagcggtggagcatgtggtttaattcgaagcaacgcgaagaaccttaccaagtcttgacatccctctgacggactcttaaccgagtctttccttcgggacagaggagacaggtggtgcatggttgtcgtcagctcgtgtcgtgagatgttgggttaagtcccgcaacgagcgcaacccctatccccagtagccagcattttggatgggcactctgaggagactgccagggataacctggaggaaggcggggatgacgtcaaatcatcatgccccttatgatttgggctacacacgtgctacaatggcgtaaacaaagggaagcgaacctgcgagggtgggcaaatcccaaaaataacgtcccagttcggactgtagtctgcaacccgactacacgaagctggaatcgctagtaatcgcggatcagaatgccgcggtgaataagttcccgggtcttgcacacaccgcccgtca

SEQ ID NO: 213 - DNA, 1362 bp, Artificial Sequence
  Synthetic polymer
agagtttgatcctggctcaggatgaacgctggcggcgtgcctaacacatgcaagtcgagcgattctcttcggagaagagcggcggacgggtgagtaacgcgtgggtaacctgccctgtacacacggataacataccgaaaggtatgctaatacgagataatatgcttttatcgcatggtagaagtatcaaagcttttgcggtacaggatggacccgcgtctgattagctagttggtaaggtaacggcttaccaaggcgacgatcagtagccgacctgagagggtgatcggccacattggaactgagacacggtccaaactcctacgggaggcagcagtggggaatattgcacaatgggcgaaagcctgatgcagcaacgccgcgtgagcgatgaaggccttcgggtcgtaaagctctgtcctcaaggaagataatgacggtacttgaggaggaagccccggctaactacgtgccagcagccgcggtaatacgtagggggctagcgtcatccggaattactgggcgtaaagggtgcgtaggtggtttcttaagtcaggggtgaaaggctacggctcaaccgtagtaagcctttgaaactgggaaacttgagtgcaggagaggagagtggaattcctagtgtagcggtgaaatgcgtagatattaggaggaacaccagttgcgaaggcggctctctggactgtaactggcactgaggcacgaaagcgtggggagcaaacaggattagataccctggtagtccacgccgtagacgatgaatactaggtgttgggaagcattgcttctcggtgccgtcgcaaacgcagtaagtattccacctggggagtacgttcgcaagaatgaaactcaaaggaattgacggggacccgcacaagcggtggagcatgtggtttaattcgaagcaacgcgaagaaccttaccaagtcttgacatccttctgaccggtacttaaccgtactttctcttcggagcaggagtgacaggtggtgcatggttgtcgtcagctcgtgtcgtgagatgttgggttaagtcccgcaacgagcgcaacccttatctttagtagccagcggttcggccgggcactctagagagactgccagggataacctggaggaaggcggggatgacgtcaaatcatcatgccccttatgacttgggctacacacgtgctacaatggcgtaaacaaagggaggcaaagctgtgaagctgagcaaatctcaaaaataacgtctcagttcggactgtagtctgcaacccgactacacgaagctggaatcgctagtaatcgcagatcagaatgctgcggtgaatacgtacgcgggtcttgtacacaccgcccgtca

SEQ ID NO: 214 - DNA, 1389 bp, Artificial Sequence
  Synthetic polymer
agtttgatcctggctcaggatgaacgctggcggcgtgcttaacacatgcaagtcgaacgggaaacactttattgaagcttcggcagattagcttgtttctagtggcggacgggtgagtaacgcgtgggtaacctgccttatactgggggataacagccagaaatgactgctaataccgcataagcgcacagaaccgcatggttcggtgtgaaaaactccggtggtataagatggacccgcgttggattagctggttggcagggtaacggcctaccaaggcaacgatcagtagccggtctgagaggatgaacggccacattggaactgagacacggtccaaactcctacgggaggcagcagtggggaatattgcacaatgggggaaaccctgatgcagcaacgccgcgtgaaggaagaagtatttcggtatgtaaagctctatcagcagggaagataatgacggtacctgactaagaagctccggctaaatacgtgccagcagccgcggtaatacgtatggagcaagcgttatccggatttactgggtgtaaagggtgcgtaggtggcagtgcaagtcagatgtgaaaggccggggctcaaccccggagctgcatttgaaactgcatagctggagtacaggagaggcaggcggaattcctagtgtagcggtgaaatgcgtagatattaggaggaacaccagtggcgaaggcggcctgctggactgttactgacactgaggcacgaaagcgtggggagcaaacaggattagataccctggtagtccacgctgtaaacgatgaatactaggtgtgcggggactgaccccctgcgtgccgcagctaacgcaataagtattccacctggggagtacgatcgcaaggttgaaactcaaaggaattgacgggggcccgcacaagcggtggattatgtggtttaattcgaagcaacgcgaagaaccttaccagggcttgacatcctactaacgaagtagagatacatcaggtgcccttcggggaaagtagagacaggtggtgcatggttgtcgtcagctcgtgtcgtgagatgttgggttaagtcccgcaacgagcgcaacccctatcctcagtagccagcatttaaggtgggcactctggggagactgccagggataacctggaggaaggcggggatgacgtcaaatcatcatgccccttatgatttgggctacacacgtgctacaatggcgtaaacaaagggaagcgagatcgtgagatggagcaaatcccaaaaataacgtcccagttcggactgtagtctgcaacccgactacacgaagctggaatcgctagtaatcgcggatcagaatgccgcggtgaatacgttcccgggtcttgcacacaccgcccgtca

SEQ ID NO: 215 - DNA, 1396 bp, Artificial Sequence
  Synthetic polymer
agagtttgattctggctcaggatgaacgctggcggcgtgcttaacacatgcaagtcgaacgaagctctttggacagattcttcggatgaagtccttagtgactgagtggcggacgggtgagtaacgcgtgggtaacctgcctcatacagggggataacagttagaaatggctgctaataccgcataagcgcacagtaccgcatggtacggtgtgaaaaaactccggtggtatgagatggacccgcgttggattagctagttggcagggtaacggcctaccaagccgacgatcagtagccgacctgagagggtgaccggccacattgggactgagacacggcccagactcctacgggaggcagcagtggggaatattgcacaatggaggaaactctgatgcagcgtcgccgcgtgaaggatgaagtatttcggtatgtaaacttctatcagcagggaagaaaatgacggtacctgactaagaagccccggctaactacgtgccagcagccgcggtaatacgtggggggcaaacgttatccggatttactgggtgtaaagggagcgtagacggcacggcaagccagatgtgaaagcccggggctcaaccccgggactgcatttggaactgctgagctagagtgtcggagaggcaagtggaattcctagtgtagcggtgaaatgcgtagatattaggaggaacaccagtggcgaaggcggcttactggacggtaactgacgttgaggctcgaaagcgtggggagcaaaaaggattagataccctggtagtccacgccgtaaacgatgaataattgggtgtgggggaggcaagctcttcggtgccgcagcaaacgcaataagtattccaacctggggagtacgttcgcaagaatgaaactcaaaggaattgacggggacccgcacaagcggtggagcatgtggtttaattcgaagcaacgcgaagaaccttaccaaatcttgacatcgatctgaccggactgtaatgagtcctttcccttcggggacagagaagacaggtggtgcatggttgtcgtcagctcgtgtcgtgagatgttgggttaagtcccgcaacgagcgcaacccttatcctcagtagccagcaagtgaagttgggcactctgtggagactgccagggataacctggaggaaggtggggatgacgtcaaatcatcatgccccttatgatttgggctacacacgtgctacaatggcgtaaacaaagggaagcgatcacgcgagtgtgagcaaatctcaaaaataacgtctcagttcggattgtagtctgcaactcgactacatgaagctggaatcgctagtaatcgcaggtcagcatactgcggtgaataagttcccgggtcttgtacacaccgcccgtca

SEQ ID NO: 216 - DNA, 1392 bp, Artificial Sequence
  Synthetic polymer
agagtttgatcctggctcaggatgaacgctggcggcgtgcttaacacatgcaagtcgaacgaagctgcttaactgatcttcttcggaattgatgttttgtagactgagtggcggacgggtgagtaacgcgtgggtaacctgccctgtacagggggataacagtcagaaatgactgctaataccgcataagaccacagcaccgcatggtgcaggggtaaaaactccggtggtacaggatggacccgcgtctgattagctggttggtgaggtaacggctcaccaaggcgacgatcagtagccggcttgagagagtgaacggccacattgggactgagacacggcccaaactcctacggggggcagcagtggggaatattgcacaatgggggaaaccctgatgcagcgacgccgcgtgagtgaagaagtatctcggtatgtaaagctctatcagcagggaagaaaatgacggtacctgactaagaagccccggctaactacgtgccagcagccgcggtaatacgtagggggcaagcgttatccggaattactgggtgtaaagggtgcgtaggtggtatggcaagtcagaagtgaaaacccagggcttaactctgggactgcttttgaaactgtcagactagagtgcaggagaggtaagcggaattcctagtgtagcggtgaaatgcgtagatattaggaggaacatcagtggcgaaggcggcttactggactgaaactgacactgaggcacgaaagcgtggggagcaaaacaggattagataccctggtagtccacgccgtaaacgatgaatactaggtgtcggggctcataagagcttcggtgccgcagcaaacgcaataagtattccacctggggagtacgttcgcaagaatgaaactcaaaggaattgacggggacccgcacaagcggtggagcatgtggtttaattcgaagcaacgcgaagaaccttaccaagtcttgacatccttctgaccggacagtaatgtgtcctttccttcgggacagaagagacaggtggtgcatggttgtcgtcagctcgtgtcgtgagatgttgggttaagtcccgcaacgagcgcaacccctatcctcagtagccagcaggtaaagctgggcactctgtggagactgccagggataacctggaggaaggtggggatgacgtcaaatcatcatgccccttatgacttgggctacacacgtgctacaatggcgtaaacaaagtgaagcgagagtgtaagcttaagcaaatcacaaaaataacgtctcagttcggattgtagtctgcaactcgactacatgaagctggaatcgctagtaatcgcgaatcagaatgtcgcggagaatacgttcccgggtcttgcacacaccgcccg

SEQ ID NO: 217 - DNA, 1391 bp, Artificial Sequence
  Synthetic polymer
agagtttgatcctggctcaggatgaacgctggcggcgtgcttaacacatgcaagtcgagcgaagcacttgagtttgattcttcggatgaagacttttgtgactgagcggcggacgggtgagtaacgcgtgggtaacctgcctcatacagggggataacagttagaaatgactgctaataccgcataagaccacggtaccgcatggtacagtggtaaaaactccggtggtatgagatggacccgcgtctgattaggtagttggtggggtaacggcctaccaagccgacgatcagtagccgacctgagagggtgaccggccacattgggactgagacacggcccagactcctacgggaggcagcagtggggaatattgcacaatggaggaaactctgatgcagcgacgccgcgtgaaggatgaagtatttcggtatgtaaacttctatcagcagggaagaaaatgacggtacctgactaagaagccccggctaactacgtgccagcagccgcggtaatacgtagggggcaagcgttatccggatttactgggtgtaaagggagcgtagacggcacggcaagccagatgtgaaagcccggggctcaaccccgggactgcatttggaactgctgagctagagtgtcggagaggcaagtggaattcctagtgtagcggtgaaatgcgtagatattaggaggaacaccagtggcgaaggcggcctgctggactgttactgacactgaggcacgaaagcgtggggagcaaacaggattagataccctggtagtccacgccgtaaacgatgaatactaggtgtcggggccgtataggcttcggtgccgtcgcaaacgcagtaagtattccacctggggagtacgttcgcaagaatgaaactcaaaggaattgacggggacccgcacaagcggtggagcatgtggtttaattcgaagcaacgcgaagaaccttaccaggtcttgacatccttctgaccactccgtaatgggagtcttccttcgggacagaagagacaggtggtgcatggttgtcgtcagctcgtgtcgtgagatgttgggttaagtcccgcaacgagcgcaacccctatcttcagtagccagcaggtaaggctgggcactctggagagactgccagggataacctggaggaaggtggggacgacgtcaaatcatcatgccccttatgatctgggcgacacacgtgctacaatggcggtcacaaagtgaggcgaacctgcgagggggagcaaaccacaaaaaggtcgtcccagttcggactgtagtctgcaacccgactacacgaagctggaatcgctagtaatcgcggatcagaatgccgcggtgaatacgttcccgggtcttgcacacaccgcccgtca

SEQ ID NO: 218 - DNA, 1376 bp, Artificial Sequence
  Synthetic polymer
agagtttgatcctggctcaggacgaacgctggcggcgtgcctaacacatgcaagtcgaacggagttgaaaggagtttgcttttttcaactcagtggcggacgggtgagtaacgcgtgagtaacctgcctttcagagggggacaacagtcggaaacgactgctaataccgcataacgtatttgaaccgcatgatttgaataccaaagatttatcgctgaaagatggactcgcgtctgattagctagttggtgaggtaacggcccaccaaggcgacgatcagtagccggactgagaggttgaacggccacattgggactgagatacggcccagactcctacgggaggcagcagtggggaatattgggcaatgggggaaaccctgacccagcaacgccgcgtgagggatgacggttttcggattgtaaacctctgtcctctgtgaagatagtgacggtagcagaggaggaagctccggctaactacgtgccagcagccgcggtaatacgtagggagcaagcgttgtccggatttactgggtgtaaagggtgcgtaggcggattggcaagtcagaagtgaaatccatgggcttaacccatgaactgcttttgaaactgttagtcttgagtgaagtagaggtaggcggaattcccggtgtagcggtgaaatgcgtagagattgggaggaacaccagtggcgaaggcggcctactgggctttaactgacgctgaggcacgaaagtgtgggtagcaaacaggattagataccctggtagtccacactgtaaacgatgattactaggtgtggggggtctaaccccctccgtgccggagttaacacaataagtattccacctggggagtacgttcgcaagaatgaaactcaaaggaattgacggggacccgcacaagcggtggagcatgtggtttaattcgaagcaacgcgaagaaccttaccaagtcttgacatcctcttggccggtcagtaatgtgaccttttcttcggaacattggagacaggtggtgcatggttgtcgtcagctcgtgtcgtgagatgttgggttaagtcccgcaacgagcgcaacctctattgtcagttgccatcattaagttgggcactctggcgagactgccggtgacaaatcggaggaaggtggggacgacgtcaaatcatcatgccccttatgcccagggctacacacgtactacaatggccgataacaaagtgcagcgaaaccgtgaggtggagcgaatcacaaaactcggtctcagttcagattgcaggctgcaactcgcctgtatgaagttggaattgctagtaatcgcggatcagaatgccgcggtgaatacgttcccgggccttgtacacaccgcccgtca

SEQ ID NO: 219 - DNA, 1392 bp, Artificial Sequence
  Synthetic polymer
agagtttgatcctggctcaggatgaacgctggcggcgtgcttaacacatgcaagtcgaacgaagcactttatttgatttccttcgggactgattattttgtgactgagtggcggacgggtgagtaacgcgtgggtaacctgccttgtacagggggataacagttggaaacggctgctaataccgcataagcgcacagcatcgcatgatgcagtgtgaaaaactccggtggtataagatggacccgcgttggattagctagttggtgaggtaacggcccaccaaggcgacgatccatagccgacctgagagggtgaccggccacattgggactgagacacggcccaaactcctacgggaggcagcagtggggaatattgcacaatgggcgaaagcctgatgcagcgacgccgcgtgagcgaagaagtatttcggtatgtaaagctctatcagcagggaagataatgacggtacctgactaagaagcaccggctaaatacgtgccagcagccgcggtaatacgtatggtgcaagcgttatccggaattactgggtgtaaagggtgcgtaggtggtatggcaagtcagaagtgaaaacccagggcttaactctgggactgcttttgaaactgtcagactggagtgcaggagaggtaagcggaattcctagtgtagcggtgaaatgcgtagatattaggaggaacatcagtggcgaaggcggcttactggactgaaactgacactgaggcacgaaagcgtggggagcaaacaggattagataccctggtagtccacgccgtaaacgatgaatactaggtgtcggggccgtagaggcttcggtgccgcagccaacgcagtaagtattccacctggggagtacgttcgcaagaatgaaactcaaaggaattgacggggacccgcacaagcggtggagcatgtggtttaattcgaagcaacgcgaagaaccttacctggtcttgacatccttctgaccggtccttaatcggacctttccttcgggacaggagagacaggtggtgcatggttgtcgtcagctcgtgtcgtgagatgttgggttaagtcccgcaacgagcgcaacccttatcttcagtagccagcaattcggatgggcactctggagagactgccagggataacctggaggaaggtggggatgacgtcaaatcatcatgccccttatgagcagggctacacacgtgctacaatggcgtaaacaaagggaagcgagcctgcgagggtaagcaaatctcaaaaataacgtctcagttcggattgtagtctgcaactcgactacatgaagctggaatcgctagtaatcgcgaatcagcatgtcgcggtgaatacgttcccgggtcttgcacacaccgcccgtca

SEQ ID NO: 220 - DNA, 1386 bp, Artificial Sequence
  Synthetic polymer
ttcgcccttagagtttgatcctggctcaggacgaacgctggcggcgcgcctaacacatgcaagtcgaacgagagagagggagcttgcttccttgatcgagtggcgaacgggtgagtaacgcgtgaggaacctgcctcaaagagggggacaacagttggaaacgactgctaataccgcataagcccacgacccggcatcgggaagagggaaaaggagcaatccgctttgagatggcctcgcgtccgattagctggttggtgaggtaacggcccaccaaggcgacgatcggtagccggactgagaggttgaacggccacattgggactgagacacggcccagactcctacgggaggcagcagtggggaatattgcacaatgggggaaaccctgatgcagcgacgccgcgtggaggaagaaggtcttcggattgtaaactcctgttgttgaggaagataatgacggtactcaacaaggaagtgacggctaactacgtgccagcagccgcggtaaaacgtaggtcacaagcgttgtccggaattactgggtgtaaagggagcgcaggcgggcgatcaagttggaagtgaaatccatgggctcaacccatgaactgctttcaaaactggtcgtcttgagtagtgcagaggtaggcggaattcccggtgtagcggtggaatgcgtagatatcgggaggaacaccagtggcgaaggcggcctactgggcaccaactgacgctgaggctcgaaagtgtgggtagcaaacaggattagataccctggtagtccacaccgtaaacgatgattactaggtgttgggagattgaccctctcagtgccgcagttaacacaataagtaatccacctggggagtacgaccgcaaggttgaaactcaaaggaattgacgggggcccgcacaagcagcggagcatgtggtttaattcgacgcaacgcgaagaaccttaccaggtcttgacatccacttaaacttacagagatgtaaggtgtgcttgcacaaagtgagacaggtggtgcatggttgtcgtcagctcgtgtcgtgagatgttgggttaagtcccgcaacgagcgcaacccttatcttcagttactaacgcgtgagggtgaggactctgaagagactgccggggacaactcggaggaaggtggggacgacgtcaaatcatcatgccccttatgacctgggctacacacgtgctacaatggccacgacagagagaagcgaaatcgcaaggtagagcggaactcaaaaaagtggtcccagttcggattgtgggctgcaacccgcccacatgaagtcggagttgctagtaatcgcggatcagcatgccgcggtgaatacgttcccgggccttgcactcaccgcccgtca

SEQ ID NO: 221 - DNA, 1392 bp, Artificial Sequence
  Synthetic polymer
agagtttgatcctggctcaggatgaacgctggcggcgtgcttaacacatgcaagtcgaacgaagcactttatttgatttccttcgggactgattattttgtgactgagtggcggacgggtgagtaacgcgtgggtaacctgccttgtacagggggataacagttggaaacggctgctaataccgcataagcgcacagcatcgcatgatgcagtgtgaaaaactccggtggtataagatggacccgcgttggattagctagttggtgaggtaacggcccaccaaggcgacgatccatagccgacctgagagggtgaccggccacattgggactgagacgcggcccaaactcctacgggaggcagcagtggggaatattgcacaatgggcgaaagcctgatgcagcgacgccgcgtgagcgaagaagtagttcgctatgtaaagctctatcagcagggaagatagtgacggtacctgactaagaagctccggctaaatacgtgccagcagccgcggtaatacgtatggagcaagcgttatccggatttactgggtgtaaagggagtgtaggtggccaggcaagtcagaagtgaaagcccggggctcaaccccgggactgcttttgaaactgcagggctagagtgcaggaggggcaagtggaattcctagtgtagcggtgaaatgcgtagatattaggaggaacaccagtggcgaaggcggcttgctggactgtaactgacactgaggctcgaaagcgtggggagcaaacaggattagataccctggtagtccacgccgtaaacgatgaatactaggtgtcgggtgacgaagtcattcggtgccgccgcaaacgcattaagcattccacctggggagtacgttcgcaagaatgaaactcaaaggaattgacggggacccgcacaagcggtggagcatgtggtttaattcgaagcaacgcgaagaaccttaccaagtcttgacatcctcttgaccggtcagtaatgtgaccttttcttcggaacaagagtgacaggtggtgcatggttgtcgtcagctcgtgtcgtgagatgttgggttaagtcccgcaacgagcgcaacccttatccttagtagccagcagttcggctgggcactctagggagactgccagggataacctggaggaaggtggggatgacgtcaaatcatcatgccccttatgacttgggctacacacgtgctacaatggcgtaaacaaagtgaagcgagagtgtgagcttaagcaaatcacaaaaataacgtctcagttcggattgtagtctgcaactcgactacatgaagctggaatcgctagtaatcgcagatcagaatgctgcggtgaatacgttcccgggtcttgcactcaccgcccgtca

SEQ ID NO: 222 - DNA, 1390 bp, Artificial Sequence
  Synthetic polymer
agagtttgatcctggctcaggatgaacgctggcggcgtgcttaacacatgcaagtcgagcgaagcacttaagtctgattcttcggatgaagacttttgtgactgagcggcggacgggtgagtaacgcgtgggtaacctggctcatacagggggataacagtcagaaatgactgctaataccgcataagaccacggtaccgcatggtacagtggtaaaaactccggtggtatgagatggacccgcgtctgattaggtagttggtggggtaacggcctaccaagccgacgatcagtagccgacctgagagggtgaccggccacattgggactgagacacggcccagactcctacgggaggcagcagtggggaatattgcacaatgggggaaaccctgatgcagcaacgccgcgtgagtgaagaagtatttcggtatgtaaagctctatcagcagggaagataatgacggtacctgactaagaagctccggctaaatacgtgccagcagccgcggtaatacgtatggagcaagcgttatccggatttactgggtgtaaagggtgcgtaggtggcagtgcaagtcagatgcgaaaggccggggctcaaccccggagctgcatttgaaactgctcggctagagtacaggagaggcaggcggaattcccggtgtagcggtggaatgcgtagatatcgggaggaacaccagtggcgaaggcggcctactgggcaccaactgacgctgaggctcgaaagcgtggggagcaaacaggattagataccctggtagtccacgccgtaaacgatgaatactaggtgttgggaagcattgcttctcggtgccgtcgcaaacgcagtaagtattccacctggggagtacgttcgcaagaatgaaactcaaaggaattgacggggacccgcacaagcggtggagcatgtggtttaattcgaagcaacgcgaagaaccttaccaagtcttgacatccttctgaccggtacttaatcgtaccttctcttcggagcaggagtgacaggtggtgcatggttgtcgtcagctcgtgtcgtgagatgttgggttaagtcccgcaacgagcgcaacccttatctttagtagccagcggttcggccgggcactctagagagactgccagggataacctggaggaaggcggggatgacgtcaaatcatcatgccccttatgacttgggctacacacgtgctacaatggcgtaaacaaagggaagcaaagctgtgaagccgagcaaatctcaaaaataacgtctcagttcggactgtagtctgcaacccgactacacgaagctggaatcgctagtaatcgcagatcagaatgctgcggtgaatacgttcccgggtcttgtactcaccgcccgtca

SEQ ID NO: 223 - DNA, 1375 bp, Artificial Sequence
  Synthetic polymer
agagtttgatcctggctcaggacgaacgctggcggcacgcttaacacatgcaagtcgaacggagaacattgagcttgcttaatgttcttagtggcggacgggtgagtaacacgtgagtaacctgcctctgagagtggaatagcttctggaaacggatggtaataccgcataacatcatggattcgcatgtttctatgatcaaagatttatcgcttagagatggactcgcgtctgattagctagttggtaaggtaacggcttaccaaggcgacgatcagtagccggactgagaggttgatcggccacattgggactgagacacggcccagactcctacgggaggcagcagtggggaatattgcacaatggggggaaccctgatgcagcgatgccgcgtggaggaagaaggttttcggattgtaaactcctgttgaagaggacgataatgacggtactcttttagaaagctccggctaactacgtgccagcagccgcggtaatacgtagggagcgagcgttgtccggaattactgggtgtaaagggagcgtaggcgggatggcaagtcagatgtgaaaactatgggctcaacccatagactgcatttgaaactgttgttcttgagtgaggtagaggtaagcggaattcctggtgtagcggtgaaatgcgtagagatcaggaggaacatcggtggcgaaggcggcttactgggcctttactgacgctgaggctcgaaagcgtggggagcagacaggattagataccctggtagtccacgccgtaaacgatgaatactaggtgtcggggagcaaagctcttcggtgccgccgcaaacgcaataagtattccacctggggagtacgttcgcaagaatgaaactcaaaggaattgacggggacccgcacaagcggtggagcatgtggtttaattcgaagcaacgcgaagaaccttaccaagccttgacatcccattgacagagcatgtaatgtgctttcccttcggggcagtggtgacaggtggtgcatggttgtcgtcagctcgtgtcgtgagatgttgggttaagtcccgcaacgagcgcaacccctatcttcagtagccagcggttcggccgggcactctggagagactgccagggataacctggaggaaggtggggatgacgtcaaatcatcatgccccttatggcttgggctacacacgtgctacaatggcgtaaacaaagggaagcgagcctgcgagggggagcaaatcccaaaaataacgtctcagttcggattgtagtctgcaactcgactacatgaagctggaatcgctagtaatcgcgaatcagaatgtcacggtgaatacgttcccgggtcttgcactcaccgcccgtca

SEQ ID NO: 224 - DNA, 1396 bp, Artificial Sequence
  Synthetic polymer
agagtttgatcctggctcaggatgaacgctggcggcgtgcttaacacatgcaagtcgaacgaagcaccttgatttgattcttcggatgaagatcttggtgactgagtggcggacgggtgagtaacgcgtgggtaacctgcctcatacagggggataacagttagaaatgactgctaataccgcataagaccacagcaccgcatggtgcaggggtaaaaactccggtggtatgagatggacccgcgtctgattaggtagttggtggggtaacggcctaccaagccgacgatcagtagccgacctgagagggtgaccggccacattgggactgagacacggcccaaactcctacgggaggcagcagtggggaatattgggcaatgggcgcaagcctgacccagcaacgccgcgtgaaggaagaaggctttcgggttgtaaacttcttttaagagggaagagcagaagacggtacctctagaataagccacggctaactacgtgccagcagccgcggtaatacgtaggtggcaagcgttgtccggatttactgggtgtaaagggcgtgcagccgggtctgcaagtcagatgtgaaatccatgggctcaacccatgaactgcatttgaaactgtagttcttgagtgctggagaggcaatcggaattccgtgtgtagcggtgaaatgcgtagatatacggaggaacaccagtggcgaaggcggattgctggacagtaactgacgctgaggcgcgaaagcgtggggagcaaacaggattagataccctggtagtccacgccgtaaacgatggatactaggtgtagggggtatgaccccctccgtgccgcagttaacacaataagtatcccacctggggagtacgatcgcaaggttaaaactcaaaggaattgacgggggcccgcacaagcggtggagtatgtggtttaattcgaagcaacgcgaagaaccttaccagggcttgacatcccactaacgaggcagagatgcgttaggtgcccttcggggaaaaaaaagacaggtggtgcatggttgtcgtcagctcgtgtcgtgagatgttgggttaagtcccgcaacgagcgcaacccctattatcagttactaacgtgtagaggcgaggactctgatgagactgccggggacaactcggaggaaggtggggacgacgtcaaatcatcatgccccttatgacctgggctacacacgtgctacaatggctgtaacaaagagaagcagagccgtaaggccgagcggatctcaaaaaagcagtctcagttcggattgtgggctgcaacccgcccacatgaagttggagttgctagtaatcgcggatcaacatgccgcggtgaatacgttcccgggccttgtacacaccgcccgtca

SEQ ID NO: 225 - DNA, 1376 bp, Artificial Sequence
  Synthetic polymer
agagtttgatcctggctcaggacgaacgctggcggcgtgcctaacacatgcaagtcgagcgagtgaatttccttcgggattgaagctagcggcggacgggtgagtaacacgtgggcaacctgcctcatagaggggaatagcctttcgaaaggaagattaataccgcataagattgtagcttcgcatgaagtagcaattaaaggagcaatccgctatgagatgggcccgcggcgcattagctagttggtgaggtaacggctcaccaaggcgacgatgcgtagccgacctgagagggtgatcggccacattgggactgagacacggcccagactcctacgggaggcagcagtggggaatattgcacaatgggggaaaccctgatgcagcaacgccgcgtgagtgatgacggccttcgggttgtaaagctctgtcttcagggacgataatgacggtacctgaggaggaagccacggctaactacgtgccagcagccgcggtaatacgtaggtggcaagcgttgtccggatttactgggcgtaaagggagcgtaggcggacttttaagtgagatgtgaaatacccgggctcaacttgggtgctgcatttcaaactggaagtctagagtgcaggagaggagaatggaattcctagtgtagcggtgaaatgcgtagagattaggaagaacaccagtggcgaaggcgattctctggactgtaactgacgctgaggctcgaaagcgtggggagcaaacaggattagataccctggtagtccacgccgtaaacgatgaatactaggtgtcgggtggcagagccattcggtgccgtcgcaaacgcagtaagtattccacctggggagtacgttcgcaagaatgaaactcaaaggaattgacggggacccgcacaagcggtggagcatgtggtttaattcgaagcaacgcgaagaaccttacctaagcttgacatccttttgaccgatgcctaatcgcatctttcccttcggggacagaagtgacaggtggtgcatggttgtcgtcagctcgtgtcgtgagatgttgggttaagtcccgcaacgagcgcaacccttgcctttagttgccagcattaagttgggcactctagagggactgccagggataacctggaggaaggtggggatgacgtcaaatcatcatgccccttatgcttagggctacacacgtgctacaatgggtggtacagagggcagccaagtcgtgaggcggagctaatcccttaaagccattctcagttcggattgtaggctgaaactcgcctacatgaagctggagttactagtaatcgcgaatcagcatgtcgcggtgaatacgttcccgggtcttgtactcaccgcccgtca

SEQ ID NO: 226 - DNA, 1392 bp, Artificial Sequence
  Synthetic polymer
agagtttgatcctggctcaagatgaacgctggcggcgtgcttaacacatgcaagtcgaacgaagcatttgcgacagatttcttcgggatgaagttgcttatgactgagtggcggacgggtgagtaacgcgtgggtaacctgccttgtactgggggatagcagctggaaacggctggtaataccgcataagcgcacaatgttgcatgacatggtgtgaaaaactccggtggtataagatggacccgcgtctgattagctagttggtgagataacagcccaccaaggcgacgatcagtagccgacctgagagggtgaccggccacattgggactgagacacggcccagactcctacgggaggcagcagtggggaatattgcacaatggaggaaactctgatgcagcgacgccgcgtgagtgaagaagtaattcgttatgtaaagctctatcagcagggaagatagtgacggtacctgactaagaagctccggctaaatacgtgccagcagccgcggtaatacgtatggagcaagcgttatccggatttactgggtgtaaagggagtgtaggtggccatgcaagtcagaagtgaaaatccggggctcaaccccggaactgcttttgaaactgtaaggctagagtgcaggaggggtgagtggaattcctagtgtagcggtgaaatgcgtagatattaggaggaacaccagtggcgaaggcggctcactggactgtaactgacactgaggctcgaaagcgtggggagcaaacaggattagataccctggtagtccgcgccgtaaacgatgaatactaggtgtcggggagcaaagctcttcggtgccgccgcaaacgcaataagtattccacctggggagtacgttcgcaagaatgaaactcaaaggaattgacggggacccgcacaagcggtggagcatgtggtttaattcgaagcaacgcgaagaaccttaccaagccttgacatcccattgacagagcatgtaatgtgctttcccttcggggcagtggtgacaggtggtgcatggttgtcgtcagctcgtgtcgtgagatgttgggttaagtcccgcaacgagcgcaacccctatcttcagtagccagcggttcggccgggcactctggagagactgccagggacaacctggaggaaggtggggatgacgtcaaatcatcatgccccttatggcttgggctacacacgtgctacaatggcgtaaacaaagggaagcgagcctgcgagggggagcaaatcccaaaaataacgtctcagttcggattgtagtctgcaactcgactacatgaagctggaatcgctagtaatcgcgaatcagaatgtcgcggtgaatacgttcccgggtcttgcacacaccgcccgtca

SEQ ID NO: 227 - DNA, 1389 bp, Artificial Sequence
  Synthetic polymer
agagtttgatcctggctcaggatgaacgctggcggcgtgcttaacacatgcaagtcgagcgaagcactttggaaagattcttcggatgatttcctttgtgactgagcggcggacgggtgagtaacgcgtgggtaacctgcctcatacagggggataacagttagaaatgactgctaataccgcataagaccacggtaccgcatggtacagtggtaaaaactccggtggtatgagatggacccgcgtctgattaggtagttggtaaggtaatggcttaccaaggcttcgatcagtagccgacctgagagggtgatcggccacattggaactgagacacggtccaaactcctacgggaggcagcagtggggaatattgcacaatgggcgaaagcctgatgcagcaacgccgcgtgagcgatgaaggccttcgggtcgtaaagctctgtcctcaaggaagataatgacggtacttgaggaggaagccccggctaactacgtgccagcagccgcggtaatacgtagggggctagcgttatccggatttactgggcgtaaagggtgcgtaggtggtttcttaagtcaggagtgaaaggctacggctcaaccgtagtaagctcttgaaactgggaaacttgagtgcaggagaggaaagtggaattcctagtgtagcggtgaaatgcgtagatattaggaggaacaccagtagcgaaggcggctttctggactgtaactgacactgaggcacgaaagcgtggggagcaaacaggattagataccctggtagtccacgccgtaaacgatgagtactaggtgtcgggggttacccctctcggtgccgcagctaacgcattaagtactccgcctggggagtacgctcgcaagagtgaaactcaaaggaattgacggggacccgcacaagtagcggagcatgtggtttaattcgaagcaacgcgaagaaccttacctaagcttgacatccttttgaccgatgcctaatcgcatttttcccttcggggacagaagtgacaggtggtgcatggttgtcgtcagctcgtgtcgtgagatgttgggttaagtcccgcaacgagcgcaacccctatttccagtagccagcagtaagatgggcactctggagagactgccagggataacccggaggaaggtggggatgacgtcaaatcatcatgccccttatgatttgggctacacacgtgctacaatggcagttacaaagagaagcaaacctgtgaaggcgagcaaacctcaaaaaggctgtctcagttcggattgtagtctgcaactcgactacatgaagctggaatcgctagtaatcgcagatcagcatgctgcggtgaatacgttcccgggtcttgcacacaccgcccgtca

SEQ ID NO: 228 - DNA, 1380 bp, Artificial Sequence
  Synthetic polymer
agagtttgatcctggctcaggacgaacgctggcggcgcgcctaacacatgcaagtcgaacgagcgagagagagcttgctttctcgagcgagtggcgaacgggtgagtaacgcgtgaggaacctgcctcaaagagggggacaacagttggaaacgactgctaataccgcataagcccacgacccggcatcgggtagagggaaaaggagcaatccgctttgagatggcctcgcgtccgattagctagttggtgaggtaacggcccaccaaggcaacgatcggtagccggactgagaggttgaacggccacattgggactgagacacggcccagactcctacgggaggcagcagtggggaatattgcacaatgggggaaaccctgatgcagcgacgccgcgtggaggaagaaggtcttcggattgtaaactcctgttgttgaggaagataatgacggtactcaacaaggaagtgacggctaactacgtgccagcagccgcggtaaaacgtaggtcacaagcgttgtccggaattactgggtgtaaagggagcgcaggcgggaagacaagttggaagtgaaatctatgggctcaacccataaactgctttcaaaactgtttttcttgagtagtgcagaggtaggcggaattcccggtgtagcggtggaatgcgtagatatcgggaggaacaccagtggcgaaggcggcctactgggcaccaactgacgctgaggctcgaaagtgtgggtagcaaacaggattagataccctggtagtccacaccgtaaacgatgattactaggtgttggaggaatgaccccttcatggccgcagttaaccacaataataatccacctggggggaagacgaacggcaagggttgaaaactcaaaggaattgacgggggccccgcacaaagcagtggagtatgtggtttaaattcgacgcaaacgcgaagaacccttaccaagtcttgacatcctgcgacgcacatagaaatatgtgtttccttcgggacgcagagacaggtggtgcatggttgtcgtcagctcgtgtcgtgagatgttgggttaagtcccgcaacgagcgcaacccttactgtcagttactacgcaagaggactctggcaggactgccgttgacaaaacggaggaaggtggggatgacgtcaaatcatcatgccctttatgacttgggctacacacgtactacaatggcgttaaacaaagagaagcaagaccgcgaggtggagcaaaactcagaaacaacgtcccagttcggactgcaggctgcaactcgcctgcacgaagtcggaattgctagtaatcgtggatcagcatgccacggtgaatacgttcccgggccttgtacacaccgcccgtca

SEQ ID NO: 229 - DNA, 1374 bp, Artificial Sequence
  Synthetic polymer
agagtttgatcctggctcaggacgaacgctggcggcgcgcctaacacatgcaagtcgaacgagagatgaggagcttgctcttcaaatcgagtggcgaacgggtgagtaacgcgtgaggaacctgcctcaaagagggggacaacagtcggaaacgactgctaataccgcataagcccacggctcggcatcgagcagagggaaaaggagcaatccgctttgagatggcctcgcgtccgattagctagttggtgaggtaacggcccaccaaggcgacgatcggtagccggactgagaggttgaacggccacattgggactgagacacggcccagactcctacgggaggcagcagtggggaatattgcacaatgggggaaaccctgatgcagcgacgccgcgtggaggaagaaggtcttcggattgtaaactcctgttgttgaggaagataatgacggtactcaacaaggaagtgacggctaactacgtgccagcagccgcggtaaaacgtaggtcacaagcgttgtccggaattactgggtgtaaagggagcgcaggcgggagaacaagttggaagtgaaatccatgggctcaacccatgaactgctttcaaaactgtttttcttgagtagtgcagaggtaggcggaattcccggtgtagcggtggaatgcgtagatatcgggaggaacaccagtggcgaaggcggcctactgggcaccaactgacgctgaggctcgaaagtgtgggtagcaaacaggattagataccctggtagtccacaccgtaaacgatgattactaggtgttggaggattgaccccttcagtgccgcagttaacacaataagtaatccacctggggagtacgaccgcaaggttgaaactcaaaggaattgacgggggcccgcacaagcggtggagtatgtggtttaattcgaagcaacgcgaagaaccttaccagggcttgacatcccactaacgaagcagagatgcattaggtgcccttcggggaaagtggagacaggtggtgcatggttttcgtcagctcgtgtcgtgagatgttgggttaagtcccgcaacgagcgcaacccttattgttagttgctacgcaagagcactctagcgagactgccgttgacaaaacggaggaaggtggggacgacgtcaaatcatcatgccccttatgtcctgggccacacacgtactacaatggtggttaacagagggaggcaataccgcgaggtggagcaaatccctaaaagccatcccagttcggattgcaggctgaaacccgcctgtatgaagttggaatcgctagtaatcgcggatcagcatgccgcggtgaatacgttcccgggccttgcactaagcgcccgtca

SEQ ID NO: 230 - DNA, 1391 bp, Artificial Sequence
  Synthetic polymer
agagtttgatcctggctcaggacgaacgctggcggcgtgcctaacacatgcaagtcgaacgaagcttgacgaatgatttcttcggaatgaaatctgatatgactgagtggcggacgggtgagtaacgcgtgagcaacctgcccttcggaacgggatagtgtctggaaacggacagtaataccgtataacgtatttttaccgcatgatagaaataccaaaactgaggtgccgaaggatgggctcgcgtctgattagatagttggtggggtaacggcctaccaagtcgacgatcagtagccggactgagaggttgaacggccacattgggactgagacacggcccagactcctacgggaggcagcagtgggggatattgcacaatgggggaaaccctgatgcagcgacgccgcgtgagcgaagaagtatttcggtatgtaaagctctatcagcagggaagaaaatgacggtacctgactaagaagccccggctaactacgtgccagcagccgcggtaatacgtaggtggcgagcgttgtccggatttactgggcgtaaagggagcgtaggcggacttttaagtgagatgtgaaatacccgggctcaacttgggtgctgcatttcaaactggaagtctagagtgcaggagaggagaatggaattcctagtgtagcggtgaaatgcgtagagattaggaagaacaccagtggcgaaggcgattctctggactgtaactgacgctgaggctcgaaagcgtggggagcaaacaggattagataccctggtagtccacgccgtaaacgatgaatactaggtgtaggggttgtcatgacctctgtgccgccgctaacgcattaagtattccgcctggggagtacggtcgcaagattaaaactcaaaggaattgacggggacccgcacaagcggtggagcatgtggtttaattcgaagcaacgcgaagaaccttacctgctcttgacatctccctgaccggcaagtaatgttgcctttccttcgggacagggatgacaggtggtgcatggttgtcgtcagctcgtgtcgtgagatgttgggttaagtcccgcaacgagcgcaacccctatctttagtagccagcggttcggccgggcactctagagagactgccagggataacctggaggaaggtggggatgacgtcaaatcatcatgccccttatgagcagggctacacacgtgctacaatggcgtaaacaaagggaggcagaaccgcgaggtcgagcaaatcccaaaaataacgtctcagttcggattgtagtctgcaactcgactacatgaagccggaatcgctagtaatcgcgaatcagaatgtcgcggtgaatacgttcccgggtcttgtacacaccgcccgtca

SEQ ID NO: 231 - DNA, 1350 bp, Artificial Sequence
  Synthetic polymer
agtttgatcttggctcaggatgaacgctggcggcgtgcctaacacatgcaagtcgaacgatgaaaccgcccccgggcggacatgaagtggcgaacgggtgagtaacacgtgaccgacctgccccccgcccagggacagccccccgaaagggggattaatacctggtactccggaagcggcgcatgccgcggccgggaaagctctcgcggcgggggatggggtcgcggcccatcaggtagacggcggggcagaggcccaccgtgccgacgacgggtagccgggttgagagaccgaccggccacattgggactgagatacggcccagactcctacgggaggcagcagtggggaatcttgcgcaatgggggcaaccctgacgcagcaacgccgcgtgcgggacgaaggcgtccgcgtcgtaaaccgctttcagcggggaacacttaaacgagggtacccgcagaagaagccccggctaaatacgtgccagcagccgcggtaatacgtatggggcgagcgttatccggattcattgggcgtaaagcgcgcgtaggcggagcgctaagcgggacctctaacccgagggctcaacccccggccgggtcccgaactggcgctctcgagtgcggtaggggagagcggaattcccggtgtagcggtggaatgcgcagatatcgggaagaacaccgacggcgaaggcagctctctgggccgaaactgacgctgaggcgcgaaagctgggggagcgaacaggattagataccctggtagtcccagccgtaaacgatgggcgctaggtgtgggggagcagatcccccgttccgcaaccaaagcataaggcgccccgcgtggggagtacggccgcaaggtaggaactcaaaggagttgacgggggcccgcacaaacggcggagcatgtggattaattagaagcaacgcgaagaaccttaccagggcttgacatgcagatgaagcggcggagacgccgtggctgagaggagcctgcacaggtggtgcatggctgtcttcagctcgtgtcgtgagatgttgggttaagtcccgcaacgagcgcaaccccagccccgtgttgccagcattcagttggggactcgcgggggactgccggcgtcaagccggaggaaggtggggacgacgtcaagtcatcatgccccttatgccctgggccgcacacgtgctacaatggccggtacagagggttgcgaccccgcgagggggagcggatcccgcaaagccggccccagttcggatcggaggctgcaacccgcctccgtgaagccggagttgctagtaatcgcggatcagcgcgccgcggtgaatacattcccgggccttg

SEQ ID NO: 232 - DNA, 1375 bp, Artificial Sequence
  Synthetic polymer
agagtttgatcctggctcaggacgaacgctggcggcgcgcctaacacatgcaagtcgaacgagagatgaggagcttgctcttcaaatcgagtggcgaacgggtgagtaacgcgtgaggaacctgcctcaaagagggggacaacagttggaaacgactgctaataccgcataagcccacggctcggcatcgagcagagggaaaaggagcaatccgctttgagatggcctcgcgtccgattagctagttggtgaggtaatggcccaccaaggcgacgatcggtagccggactgagaggttgaacggccacattgggactgagacacggcccagactcctacgggaggcagcagtggggaatattgcacaatgggggaaaccctgatgcagcgacgccgcgtggaggaagaaggtcttcggattgtaaactcctgttgttgaggaagataatgacggtactcaacaaggaagtgacggctaactacgtgccagcagccgcggtaaaacgtaggtcacaagcgttgtccggaattactgggtgtaaagggagcgcaggcgggaagacaagttggaagtgaaatccatgggctcaacccatgaactgctttcaaaactgtttttcttgagtagtgcagaggtaggcggaattcccggtgtagcggtggaatgcgtagatatcgggaggaacaccagtggcgaaggcggcctactgggcaccaactgacgctgaggctcgaaagtgtgggtagcaaacaggattagataccctggtagtccacaccgtaaacgatgattactaggtgttggaggattgaccccttcagtgccgcagttaacacaataagtatcccgcctggggagtacgatcgcaagattgaaactcaaaggaattgacgggggcccgcacaagcagcggagcatgtggtttaattcgaagcaacgcgaagaaccttaccaagacttgacatcccttgacaggcatggaaacatgctttcccttcggggcaaggagacaggtggtgcatggttgtcgtcagctcgtgtcgtgagatgttgggttaagtcccgcaacgagcgcaacccttacacttagttaccagcgggtaaagccggggactctaagtggactgccggggacaactcggaggaaggtggggacgacgtcaaatcatcatgccccttatgtcctgggctacacacgtactacaatggtgagaacagagcgaagcgagacagtgatgtggagcaaaccgcgaaatctcatctcagttcagattgcaggctgcaactcgcctgcatgaagtcggaattgctagtaatcgcggatcagcatgccgcggtgaatacgttcccgggccttgtacacaccgcccgtca

SEQ ID NO: 233 - DNA, 1398 bp, Artificial Sequence
  Synthetic polymer
ttcgcccttagagtttgatcctggctcaggatgaacgctggcggcgtgcttaacacatgcaagtcgaacgggaattactttattgaaacttcggtcgatttaatttaattctagtggcggacgggtgagtaacgcgtgggtaacctgccttatacagggggataacagtcagaaatgactgctaataccgcataagcgcacagagctgcatggctcggtgtgaaaaactccggtggtataagatggacccgcgttggattagctagttggtgaggtaacggcccaccaaggcgacgatccatagccggcctgagagggtgaacggccacattgggactgagacacggcccagactcctacgggaggcagcagtggggaatattgggcaatgggcgcaagcctgacccagcaacgccgcgtgaaggaagaaggctttcgggttgtaaacttcttttgtcggggacgaaacaaatgacggtacccgacgaataagccacggctaactacgtgccagcagccgcggtaatacgtaggtggcaagcgttatccggatttactgggtgtaaagggcgtgtaggcgggattgcaagtcagatgtgaaaactgggggctcaacctccagcctgcatttgaaactgtagttcttgagtgctggagaggcaatcggaattccgtgtgtagcggtgaaatgcgtagatatacggaggaacaccagtggcgaaggcggattgctggacagtaactgacgctgaggcgcgaaagcgtggggagcaaacaggattagataccctggtagtccacgccgtaaacgatggatactaggtgtggggggtctgaccccctccgtgccgcagttaacacaataagtatcccacctggggagtacgatcgcaaggttgaaactcaaaggaattgacgggggcccgcacaagcggtggagtatgtggtttaattcgaagcaacgcgaagaaccttaccagggcttgacatcccactaacgaagcagagatgcattaggtgcccttcggggaaagtggagacaggtggtgcatggttgtcgtcagctcgtgtcgtgagatgttgggttaagtcccgcaacgagcgcaacccttattgttagttgctacgcaagagcactctagcgagactgccgttgacaaaacggaggaaggtggggacgacgtcaaatcatcatgccccttatgtcctgggccacacacgtactacaatggtggttaacagagggaggcaataccgcgaggtggagcaaatccctaaaagccatcccagttcggattgcaggctgaaacccgcctgtatgaagttggaatcgctagtaatcgcggatcagcatgccgcggtgaatacgttcccgggccttgtacacaccgcccgtca

SEQ ID NO: 234 - DNA, 1377 bp, Artificial Sequence
  Synthetic polymer
ttcgcccttagagtttgatcctggctcaggacgaacgctggcggcgcgcctaacacatgcaagtcgaacggtgaagaggagcttgctcctcggatcagtggcggacgggtgagtaacacgtgagcaacctggctctaagagggggacaacagttggaaacgactgctaataccgcatgatgtatcgggatggcatcttcctgataccaaagattttatcgcttagagatgggctcgcgtctgattagatagttggcggggtaacggcccaccaagtcgacgatcagtagccggactgagaggttgaacggccacattgggactgagacacggcccagactcctacgggaggcagcagtggggggtattggacaatgggggcaaccctgatccagcgacgccgcgtgagggaagaaggttttcggattgtaaacctctgttgacggagaaaaaaatgatggtatccgtttagaaagccacggctaactacgtgccagcagccgcggtaatacgtaggtggcaagcgttgtccggaattactgggtgtaaagggagtgtaggcgggatatcaagtcagaagtgaaaattacgggcccaactcgtaacctgcttttgaaactgacattcttgagtgaagtagaggcaagcggaattcctagtgtagcggtgaaatgcgtagatattaggaggaacaccagtggcgaaggcggcttgctgggcttttactgacgctgaggctcgaaagcgtggggagcaaacaggattagataccctggtagtccacgccgtaaacgatgattactaggtgtggggggattgaccccttccgtgccggagtaaacacaataagtaatccacctggggagtacgaccgcaaggttgaaactcaaaggaattgacgggggcccgcacaagcagtggagtatgtggtttaattcgacgcaacgcgaagaaccttaccaggtcttgacatcgagtgacagtctaagagattagaccttcccttcggggacacaaagacaggtggtgcatggttgtcgtcagctcgtgtcgtgagatgttgggttaagtcccgcaacgagcgcaacccttatcattagttgctacgcaagagcactctaatgagactgccgttgacaaaacggaggaaggtggggatgacgtcaaatcattatgccctttatgacctgggctacacacgtactacaatggcgtttaacaaagagaagcaaagccgcgaggcagagcaaatctccaaaaaacgtctcagttcggattgtaggctgcaactcgcctacatgaagtcggaattgctagtaatcgtaggtcagcgtactacggtgaatacgttcccgggccttgcactcaccgcccgtca

SEQ ID NO: 235 - DNA, 1398 bp, Artificial Sequence
  Synthetic polymer
agagtttgatcctggctcaggatgaacgctagctacaggcttaacacatgcaagtcgaggggcagcatggtcttagcttgctaaggccgatggcgaccggcgcacgggtgagtaacacgtatccaacctgccgtctactcttggacagccttctgaaaggaagattaatacaagatggcatcatgagtccgcatgttcacatgattaaaggtattccggtagacgatggggatgcgttccattagatagtaggcggggtaacggcccacctagtcttcgatggataggggttctgagaggaaggtctcccacattggaactgagacacggtccaaactcctacgggaggcagcagtgaggaatattggtcaatggtcggcagactgaaccagccaagtcgcgtgagggaagacggccctacgggttgtaaacctcttttgtcggagagtaaagtacgctgcgtgtagcgtattgcaagtatccgaagaaaaagcatcggctaactccgtgccagcagccgcggtaatacggaggatgcgagcgttatccggatttattgggtttaaagggtgcgtaggcggcacgccaagtcagcggtgaaattttcgggctcaacccggactgtgccgttgaaactggcgagctagagtgcacaagaggcaggcggaatgcgtggtgtagcggtgaaatgcatagatatcacgcagaaccccgattgcgaaggcagcctgctagggtgcgacagacgctgaggcacgaaagcgtgggtatcgaacaggattagataccctggtagtccacgcagtaaacgatgaatactaactgtttgcgatacaatgtaagcggtacagcgaaagcgttaagtattccacctggggagtacgccggcaacggtgaaactcaaaggaattgacgggggcccgcacaagcggaggaacatgtggtttaattcgatgatacgcgaggaaccttacccgggctcaaacgcagggggaatatatatgaaagtatatagctagcaatagtcacctgcgaggtgctgcatggttgtcgtcagctcgtgccgtgaggtgtcggcttaagtgccataacgagcgcaacccctatcgacagttactaacgggtgaagccgaggactctgtcgagactgccggcgcaagccgcgaggaaggtggggatgacgtcaaatcagcacggcccttacgtccggggcgacacacgtgttacaatggcaggtacagaaggcagccagtcagcaatgacgcgcgaatcccgaaaacctgtctcagttcggattggagtctgcaacccgactccatgaagctggattcgctagtaatcgcgcatcagccatggcgcggtgaatacgttcccgggccttgcacacaccgcccgtca

SEQ ID NO: 236 - DNA, 1392 bp, Artificial Sequence
  Synthetic polymer
agagtttgatcctggctcaggatgaacgctggcgacgtgcctaacacatgcaagtcgaacgaagcaccttacctgattcttcggatgaaggtctggtgactgagtggcggacgggtgagtaacgcgtgggtaacctgccctgtacagggggataacagttgtgaaacggctgctaataccgcataagcgcacgagaggacatcctcttgtgtgaaaaactccggtggtacaggatgggcccgcgtctgattagctggttggcagggtaacggcctaccaaggcgacgatcagtagccggtctgagaggatgaacggccacattggaactgagacaccgtccaaactcctacgggaggcagcagtggggaatattgcacaatgggggaaaccctgatgcagcaacgccgcgtgagtgaagaagtatttcggtatgtaaagctctatcagcagggaagataatgacggtacctgactaagaagctccggctaaatacgtgccagcagccgcggtaatacgtatggagcaagcgttatccggatttactgggtgtaaagggtgcgtaggtggcagtgcaagtcagatgtgaaagtccggggctcaaccccggagctgcatttgaaactgcatagctagagtacaggagaggcaggcggaattcctagtgtagcggtgaaatgcgtagatattaggaggaacaccagtggcgaaggcggcctgctggactgttactgacactgaggcacgaaagcgtggggagcaaacagaagtagataccctggtagtccacgccgtaaaacgatgaatatttaggtgtcggggccgtataggctccggtgccgtcgcaaacgcagtaagtattctctcctggggagtacgttcgcaagaatgaaactcataggaattgacggggacccgcacaagcggtggagcatgtggtttaattcgaagcaacgcgaagaaccttaccaagtcttgacatccgcctgaccgatccttaaccggatctttccttccggacaggcgagacagatggtgcatggtcgtcgtcagctcgtgttgtgagatgttgggttaagtcccgctacgagcgcaacccctatcctcagtagccagcatttaaggtgggcactctggggagactgccagggataacctggaggaaggcggggatgacgtcaaatcatcatgccccttatgatttgggctacacacgtgctacaatggcgtaaacaaagggaagcgagatcgtgagatggagccaatcccaaaaataacgtcccagttcggactgtagtctgcaacccgcctacacgaagctggaatcgctagtaatcgcggatcagaatgccgcggtgaatacgttcccgggtcttgcacacaccgcccgtca

SEQ ID NO: 237 - DNA, 1383 bp, Artificial Sequence
  Synthetic polymer
ttcgcccttagagtttgatcctggctcaggacgaacgctggcggcgtgcctaacacatgcaagtcgaacggagatgtttatttcggtagatatcttagtggcgcacgggtgagtaacgcgtgaataacctgacccgaagagggggataacacctggaaacaagtgctaataccgcataagaccacggaccggcatcggtcagaggtcaaaggaggaatccgctttgggaggggttcgcgtcccattaggtagttggtgaggtaacggcccaccaagccgacgatgggtagccgagctgagaggctgatcggccacactggaactgagacacggtccagactcctacgggaggcagcagtggggaatattgggcaatgggcgcaagcctgacccagcaacgccgcgtgagggaagaaggttttcggattgtaaacctctgtcgcaggggacgaaggaagtgacggtaccctgtaagaaagccccggctaactacgtgccagcagccgcggtaatacgtagggggcgagcgttgtccggaattactgggcgtaaagggagcgtaggcggtcgattaagttagatgtgaaacccccgggcttaacttggggactgcatctaatactggttgacttagagtacaggagagggaagcggaattcctagtgtagcggtgaaatgcgtagatattaggaggaacaccagtggcgaaggcggctttctggactgacactgacgctgaggctcgaaagcgtggggagcaaacaggattagataccctggtagtccatgccgtaaacgatgattactaggtgttgggggattgaccccctcagtgccgcagttaacacaataagtaatccacctggggagtacgaccgcaaggttgaaactcaaaggaattgacgggggcccgcacaagcagtggagtatgtggtttaattcgaagcaacgcgaagaaccttaccaggtcttgacatccgatgcatagcacagagatgtgtgaaatccttcgggacatcgagacaggtggtgcatggttgtcgtcagctcgtgtcgtgagatgttgggttaagtcccgcaacgagcgcaacccttattgccagttactacgttaagaggactctggcgagactgccgttgacaaaacggaggaaggtggggatgacgtcaaatcatcatgccctttatgacctgggctacacacgtactacaatggcgttaaacaaagagaagcaagaccgcgaggtggagcaaaactcaaaaacaacgtctcagttcagattgcaggctgcaactcgcctgcatgaagtcggaattgctagtaatcgcggatcagcatgccgcggtgaatacgttcccgggccttgtacacaccgcccgtca

SEQ ID NO: 238 - DNA, 1371 bp, Artificial Sequence
  Synthetic polymer
agagtttgatcctggctcaggacgaacgctggcggcgcgcctaacacatgcaagtcgaacgagcgagagagagcttgctttctcgagcgagtggcgaacgggtgagtaacgcgtgaggaacctgcctcaaagagggggacaacagttggaaacgactgctaataccgcataagcccacaggtcggcatcgaccagagggaaaaggagcaatccgctttgagatggcctcgcgtccgattagctagttggtgaggtaacggcccaccaaggcaacgatcggtagccggactgagaggttgaacggccacattgggactgagacacggcccagactcctacgggaggcagcagtggggaatattgcacaatgggggaaaccctgatgcagcgacgccgcgtggaggaagaaggtcttcggattgtaaactcctgttgttgaggaagataatgacggtactcaacaaggaagtgacggctaactacgtgccagcagccgcggtaaaacgtaggtcacaagcgttgtccggaattactgggtgtaaagggagcgcaggcgggaagacaagttggaagtgaaatctatgggctcaacccataaactgctttcaaaactgtttttcttgagtagtgcagaggtaggcggaattcccggtgtagcggtggaatgcgtagatatcgggaggaacaccagtggcgaaggcggcctactgggcaccaactgacgctgaggctcgaaagtgtgggtagcaaacaggattagataccctggtagtccacaccgtaaacgatgattactaggtgtggggggattgaccccttccgtgccggagtaaacacaataagtaatccacctggggagtacgaccgcaaggttgaaactcaaaggaattgacgggggcccgcacaagcagtggagtatgtggtttaattcgacgcaacgcgaagaaccttaccaggtcttgacatcaagtgacagtctaagagattaggccttcccttcggggacacaaagacaggtggtgcatggttgtcgtcagctcgtgtcgtgagatgttgggttaagtcccgcaacgagcgcaacccttatcattagttgctacgcaagagcactctaatgagactgccgttgacaaaacggaggaaggtggggatgacgtcaaatcatcatgccctttatgacctgggctacacacgtactacaatggcgtttaacaaagagaagcaaagccgcgaggcagagcaaatctccaaaaaacgtctcagttcggattgtaggctgcaactcgcctacatgaagtcggaattgctagtaatcgtagatcagcatgccacggtgaatacgttcccgggccttgcacacaccgcccgtca

SEQ ID NO: 239 - DNA, 1377 bp, Artificial Sequence
  Synthetic polymer
agagtttgatcctggctcaggacgaacgctggcggcgcgcctaacacatgcaagtcgaacgagagatgaggagcttgctcttcaaatcgagtggcgaacgggtgagtaacgcgtgaggaacctgcctcaaagagggggacaacagttggaaacgactgctaataccgcataagcccacggctcggcatcgagcagagggaaaaggagtgatccgctttgagatggcctcgcgtccgattagctagttggtgaggtaatggcccaccaaggcgacgatcggtagccggactgagaggttgaacggccacattgggactgagacacggcccagactcctacgggaggcagcagtggggaatattgcacaatgggggaaaccctgatgcagcgacgccgcgtggaggaagaaggtcttcggattgtaaactcctgttgttgaggaagataatgacggtactcaacaaggaagtgacggctaactacgtgccagcagccgcggtaaaacgtaggtcacaagcgttgtccggaattactgggtgtagagggagcgcaggcgggagaacaagttggaagtgaaatccatgggctcaacccatgaactgctttcaaaactgtttttcttgagtagtgcagaggtaggcggaattcccggtgtagcggtggaatgcgtagatatcgggaggaacaccagtggcgaaggcggcctactgggcaccaactgacgctgaggctcgaaagtgtgggtagcaaacaggattagataccctggtagtccacaccgtaaacgatgattactaaggggttggaaggattggccccttcagtgctgcagttaacacaataaagtaatccacctggggagtacggccgcaaggttgaaactcaaaggaattgacgggggcccgcacaagcagtggagtatgtggtttaattcgaagcaacgcgaagaaccttaccagggcttgacatcctactaacgagatagagatatgttaggtgcccttcggggaaagtagagacaggtggtgcatggttgtcgtcagctcgtgtcgtgagatgttgggttaagtcccgcaacgagcgcaacccctattgttagttgctacgcaagagcactctagcgagactgccgttgacaaaacggaggaaggtggggacgacgtcaaatcatcatgccccttatgtcctgggctacacacgtaatacaatggcggtcaacagagggatgcaaaatcgcaagatggagcgaacccctaaaagccgtcccagttcagattgtgggctgcaacccgcccacatgaagtcggaatcgctagtaatcgcggatcagcatgccgcggtgaatacgttcccgggccttgcacacaccgcccgtca

SEQ ID NO: 240 - DNA, 1362 bp, Artificial Sequence
  Synthetic polymer
agagtttgatcctggctcaggatgaacgctggcggcgtgcctaacacatgcaggtcgagcgattctcttcggagaagagcggcggacgggtgagtaacgcgtgggtaacctgccctgtacacacggataacataccgaaaggtatgctaatacgagataatatgcttttatcgcatggtagaagtatcaaagctccggcggtacaggatggacccgcgtctgattagctagttggtaaggtaacggcttaccaaggcgacgatcagtagccgacctgagagggtgatcggccacattggaactgagacacggtccaaactcctacgggaggcagcagtggggaatattgcacaatgggcgaaagcctgatgcagcaacgccgcgtgagcgatgaaggccttcgggtcgtaaagctctgtcctcaaagaagataatgacggtacttgaggaggaagccccggctaactacgtgccagcagccgcggtaatacgtagggggctagcgttatccggaattactgggcgtaaagggtgcgtaggtggtttcttgagtcagaggtgaaaggctacggctcaaccgtagtaagcctttgaaactgggaaacttgagtgcaggagaggagagtggaattcctagtgtagcggtgaaatgcgtagatattaggaggaacaccagttgcgaaggcggctctctggactgtaactgacactgaggcacgaaagcgtggggagcaaacaggattagataccctggtagtccacgccgtaaacgatgagtactagctgtcggaggttacccccttcggtggcgcagctaacgcattaagtactccgcctgggaagtacgctcgcaagagtgaaactcaaaggaattgacggggacccgcacaagtagcggagcatgtggtttaattcgaagcaacgcgaagaaccttacctaagcttggcatccttttgaccgatgcctaatcgcatctttcccttcggggacagaagtgacaggtggtgcatggttgtcgtcagctcgtgtcgtgagatgttgggttaagtcccgcaacgagcgcaacccttgcctttagttgccagcattaagttgggcactctagagggactgccagggataacctggaggaaggcggggatgacgtcaaatcatcatgccccttatgacttgggctacacacgtgctacaatggcgtaaacaaagggaagcaaagctgtgaagccgagcaaatctcaaaaataacgtctcagttcggactgtagtctgcaacccgactacacgaagctggaatcgctagtaatcgcagatcagaatgctgcggtgaatacgttcccgggtcttgcacacaccgcccgtca

SEQ ID NO: 241 - DNA, 1390 bp, Artificial Sequence
  Synthetic polymer
agagtttgatcctggctcaggatgaacgctggcggcgtgcttaacacatgcaagtcgagcgaagcagttaagttgatttcttcggattgattcttaactgactgagcggcggacgggtgagtaacgcgtgggtgacctgccccataccgggggataacagctggaaacggctgctaataccgcataagcgcacgagaggacatcctcttgtgtgaaaaactccggtggtacaggatgggcccgcgtctgattagctggttggcagggtaacggcctaccaaggcgacgatcagtagccggtctgagaggatgaacggccacattggaactgagacacggtccaaactcctacgggaggcagcagtggggaatattgcacaatgggggaaaccctgatgcagcaacgccgcgtgagtgaagaagtatttcggtatgtaaagctctatcagcagggaagataatgacggtacctgactaagaagctccggctaaatacgtgccagcagccgcggtaatacgtatggagcaagcgttatccggatttactgggtgtaaagggtgcgtaggtggcagtgcaagtcagatgtgaaaggccggggctcaacctcggagctgcatttgaaactgctcggctagagtacaggagaggcaggcggaattcctagtgtagcggtgaaatgcgtagatattaggaggaacaccagtggcgaaggcggcctgctggactgttactgacactgaggcacgaaagcgtggggagcaaacaggattagataccctggtagtccacgctgtaaacgatgaatactaggtgtcggggccgtataggcttcggtgccgtcgcaaacgcagtaagtattccacctggggagtacgttcgcaagaatgaaactcaaaggaattgacggggacccgcacaagcggtggagcatgtggtttaattcgaagcaacgcgaagaaccttaccaggtcttgacatccttctgaccactccgtaatgggagtttttcttcggaacaagagtgacaggtggtgcatggttgtcgtcagctcgtgtcgtgagatgttgggttaagtcccgcaacgagcgcaacccttatccttagtagccagcagtccggctgggcactctagggagactgccagggataacctggaggaaggtggggatgacgtcaaatcatcatgccccttatgacttgggctacacacgtgctacaatggcgtaaacaaagtgaagcgagagtgtgagcttaagcaaatcacaaaaataacgtctcagttcggattgtagtctgcaactcgactacatgaagctggaatcgctagtaatcgcagatcagaatgctgcggtgaatacgttcccgggtcttgcacacaccgcccgtca

SEQ ID NO: 242 - DNA, 1390 bp, Artificial Sequence
  Synthetic polymer
agagtttgatcctggctcaggatgaacgctggcggcgtgcttaacacatgcaagtcgagcgaagcactttggaaagattcttcggatgatttcctttgtgactgagcggcggacgggtgagtaacgcgtgggtaacctgcctcatacagggggataacagttagaaatgactgctaataccgcataagaccacggtaccgcatggtacagtggtaaaaactccggtggtatgagatggacccgcgtctgattaggtagttggtggggtaacggcctaccaagccgacgatcagtagccgacctgagagggtgaccggccacattgggactgagacacggcccagactcctacgggaggcagcagtggggaatattgcacaatggaggaaactctgatgcagcgacgccgcgtgaaggatgaagtatttcggtatgtaaacttctatcagcagggaagaaaatgacggtacctgactaagaagccccggctaactacgtgccagcagccgcggtaatacgtagggggcaagcgttatccggatttactgggtgtaaagggagcgtagacggcacggcaagccagatgtgaaagcccggggctcaaccccgggactgcatttggaactgctgagctagagtgtcggagaggcaagtggaattcctagtgtagcggtgaaatgcgtagatattaggaggaacaccagtggcgaaggcggcttgctggacgatgactgacgttgaggctcgaaagcgtggggagcaaacaggattagataccctggtagtccacgccgtaaacgatgactgctaggtgtcgggtggcaaagccattcggtgccgcagctaacgcaataagcagtccacctggggagtacgttcgcaagaaggaaactcaaaggaattgacggggacccgcacaagcggtggagcatgtggtttaattcgaagcaacgcgaagaaccttacctgatcttgacatcccgatgaccgcttcgtaatggaagtttttcttcggaacatcggtgacaggtggtgcatggttgtcgtcagctcgtgtcgtgagatgttgggttaagtcccgcaacgagcgcaacccttatctttagtagccagcggtcaggccgggcactctagagagactgccagggataacctggaggaaggcggggatgacgtcaaatcatcatgccccttatgacttgggctacacacgtgctacaatggccacgacagagagaagcgaaatcgcaaggtagagcggaactcaaaaaagtggtcccagttcggattgtgggctgcaacccgcccacatgaagtcggagctgctagtaatcgcggatcagtatgccacggtgaatacgttcccgggccttgtacacaccgcccgtca

SEQ ID NO: 243 - DNA, 1373 bp, Artificial Sequence
  Synthetic polymer
agagtttgatcctggctcaggacgaacgctggcggcgcgcctaacacatgcaagtcgaacgagcgagagagagcttgctttctcgagcgagtggcgaacgggtgagtaacgcgtgaggaacctgcctcaaagagggggacaacagttggaaacgactgctaataccgcataagcccacggtgccgcatggcacagagggaaaaggagcaatccgctttgagatggcctcgcgtccgattagctagttggtgaggtaatggcccaccaaggcgacgatcggtagccggactgagaggttgaacggccacattgggactgagacacggcccagactcctacgggaggcagcagtggggaatattgcacaatgggggaaaccctgatgcagcgacgccgcgtggaggaagaaggtcttcggattgtaaactcctgttgttgaggaagataatgacggtactcaacaaggaagtgacggctaactacgtgccagcagccgcggtaaaacgtaggtcacaagcgttgtccggaattactgggtgtaaagggagcgcaggcgggaagacaagttggaagtgaaatccatgggctcaacccatgaactgctttcaaactgtttttcttgagtagtgcagaggtagggcggaattcccggtgtagcggtggaatgcgtagatatcgggaggaacaccagtggcgaaggcggcctactgggcaccaactgacgctgaggctcgaaagtgtgggtagcaaacaggatttaggacccctggagtccccactgaaaacgaggattaccaggtggttggagggatgaccccttccagtgcccgccattaacccaataagtaatccacctggggagtccgacagcaaggttaaaactcaaaggaattgacgggggccggcacaagcagtggagtatgtggtttaatttgacgcaacacgaagaaccttaccaagttttgacatcccttgacgatgcgggaaacagtatttctattcggagcaaggagacaggtggtgcatggttgtcgtcagctcgtgtcgtgagatgttgggttaagtcccgcaacgagcgcaacccttatggtcagttagtacgcaagaggactctggccagactgccgttgacaaaacggaggaaggtggggatgacgtcaaatcatcatgccccttatgacttgggctacacacgtactacaatggcgttaaacaaagagaagcaagcccgcgagggggagcaaaactcagaaacaacgtcccagttcggactgcaggctgcaactcgcctgcacgaagtcggaattgctagtaatcgcagatcagcatgctgcggtgaatacgttcccgggccttgcacacaccgcccgtca

SEQ ID NO: 244 - DNA, 1389 bp, Artificial Sequence
  Synthetic polymer
agagtttgatcctggctcaggacgaactctggcggcgtgcctaacacatgcaagtcgaacgaagcaccttaccggattcttcggatgaaagtctggtgactgagtggcggacgggtgagtaacgcgtgggtaacctgccctgtacagggggataacagctggaaacggctgctaataccgcataagcgcacgaggagacatctccttgtgtgaaaaactccggtggtacaggatgggcccgcgtctgattagctggttggcagggtaacggcctaccaaggcaacgatcagtagccggtctgagaggatgaacggccacattggaactgagacacggtccaaactcctacgggaggcagcagtggggaatattgcacaatgggggaaaccctgatgcagcaacgccgcgtgagtgaagaagtatttcggtatgtaaagctctatcagcagggaagataatgacggtacctgactaagaagctccggctaaatacgtgccagcagccgcggtaatacgtatggagcaagcgttatccggatttactgggtgtaaagggtgcgtaggtggcagtgcaagtcagatgtgaaaggccggggctcaaccccggagctgcatttgaaactgctcggctagagtacaggagaggcaggcggaattcctagtgtagcggtgaaatgcgtagatattaggaggaacaccagtggcgaaggcggcctgctggactgttactgacactgaggcacgaaagcgtggggagcaaacaggattagataccctggtagtccacgccgtaaacgatgaatactaggtgtcggggccgtataggcttcggtgccgccgctaacgcagtaagtattccaccctggggagtacgttcgcaagaatgaaactcaaaggaattgacggggacccgcacaagcggtggagcatgtggtttaattcgaagcaacgcgaagaaccttaccaggtcttgacataccattgaccgttctagagataggattttcccttcggggacaatggatacaggtggtgcatggttgtcgtcagctcgtgtcgtgagatgttgggttaagtcccgcaacgagcgcaacccctgtcgttagttgccagcattcagttgggcactctagtgagactgccggggacaactcggaggaaggtggggatgacgtcaaatcatcatgccccttatgttctgggctacacacgtgctacaatggtcggtacaaagagcggcaatactgtgaagtggagcaaatctcaaaaaccgatcccagttcggattgtaggctgcaactcgcctacatgaagttggagttgctagtaatcgcagatcagaatgctgcggtgaatgcgttcccgggtcttgcacacaaagcccgtca

SEQ ID NO: 245 - DNA, 1388 bp, Artificial Sequence
  Synthetic polymer
ttcgcccttagagtttgatcctggctcaggacgaacgctggcggcgcgcctaacacatgcaagtcgaacgagagaggaagagcttgcttttccgatcgagtggcgaacgggtgagtaacgcgtgaggaacctgcctcaaagagggggacaacagttggaaacgactgctaataccgcataagcccacagctcggcatcgagcagagggaaaaggagcaatccgctttgagatggcctcgcgtccgattagctagttggtgaggtaatggcccaccaaggcgacgatcggtagccggactgagaggttgaacggccacattgggactgagacacggcccagactcctacgggaggcagcagtggggaatattgcacaatgggggaaaccctgatgcagcgacgccgcgtggaggaagaaggtcttcggattgtaaactcctgttgttgaggaagataatgacggtactcaacaaggaagtgacggctaactacgtgccagcagccgcggtaaaacgtaggtcacaagcgttgtccggaattactgggtgtaaagggagcgcaggcgggcgatcaagttggaagtgaaatccatgggctcaacccatgaactgctttcaaaactgattgtcttgagtagtgcagaggtaggcggaattcccggtgtagcggtggaatgcgtagatatcgggaggaacaccagtggcgaaggcggcctgctggacattaactgacgctgaggagcgaaagcgtggggagcaaacaggattagataccctggtagtccacgccgtaaacgatggatactaggtgtgggaggtattgactccttccgtgccgcagttaacacattaagtatcccacctggggagtacgaccgcaaggttgaaactcaaaggaattgacgggggcccgcacaagcagtggagtatgtggtttaattcgaagcaacgcgaagaaccttacctggtcttgacatcccgatgaccggtctagagatagacttttctcttcggagacatcggtgacaggtggtgcatggttgtcgtcagctcgtgtcgtgagatgttgggttaagtcccgcaacgagcgcaacccttattgttagttgatacatttagttgatcactctagcgagactgccgttgacaaaacggaggaaggtggggacgacgtcaaatcatcatgccccttatgaccagggctacacacgtactacaatggcagtcatacagagggaagcaaagctgtgaagcagagcaaatccctaaaagctgtcccagttcagattgcaggctgcaactcgcctgcatgaagtcggaattgctagtaatcgcggatcagcatgccgcggtgaatacgttcccgggccttgcacacaccgcccgtca

SEQ ID NO: 246 - DNA, 1394 bp, Artificial Sequence
  Synthetic polymer
ttagagtttgatcctggctcaggatgaacgctagcggcaggcctaacacatgcaagtcgagggggcatcacgaggtagcaatactttggtggcgaccggcgcacgggtgcgtaacgcgtatgtaacctacctataacaggggcataacactgagaaattggtactaattccccataatattcggagaggcatctctccgggttgaaaactccggtggttatagatggacatgcgttgtattagctagttggtgaggtaacggctcaccaaggcaacgatacatagggggactgagaggttaaccccccacactggtactgagacacggaccagactcctacgggaggcagcagtgaggaatattggtcaatggacgcaagtctgaaccagccatgccgcgtgcaggaagacggctctatgagttgtaaactgcttttgtacgagggtaaactcacctacgtgtaggtgactgaaagtatcgtacgaataaggatcggctaactccgtgccagcagccgcggtaatacggaggatccgagcgttatccggatttattgggtttaaagggagcgtaggcgggtgcttaagtcagttgtgaaagtttgcggctcaaccgtaaaattgcagttgatactgggcgccttgagtgcagcataggtaggcggaattcgtggtgtagcggtgaaatgcttagatatcacgaagaactccgattgcgaaggcagcttactagactgtaactgacgctgatgctcgaaagtgtgggtatcaaacaggattagataccctggtagtccacacagtaaacgatgaatactcgctgttggcgatacacagtcagcggccaagcgaaagcattaagtattccacctggggagtacgccggcaacggtgaaactcaaaggaattgacgggggcccgcacaagcggaggaacatgtggtttaattcgatgatacgcgaggaaccttacccgggcttaaattgcagcggaatgtagtggaaacattacagccttcgggccgctgtgaaggtgctgcatggttgtcgtcagctcgtgccgtgaggtgtcggcttaagtgccataacgagcgcaacccttatctatagttactatcaggtcatgctgaggactctatggagactgccgtcgtaagatgtgaggaaggtggggatgacgtcaaatcagcacggcccttacgtccggggctacacacgtgttacaatggggggtacagaaggcagctacctggcgacaggatgctaatcccaaaaacctctctcagttcggattggagtctgcaacccgactccatgaagctggattcgctagtaatcgcgcatcagccacggcgcggtgaatacgttcccgggccttgtacacaccgcccgtca

SEQ ID NO: 247 - DNA, 1390 bp, Artificial Sequence
  Synthetic polymer
agagtttgatcctggctcaggatgaacgctggcggcgtgcttaacacatgcaagtcgagcgaagcgcttaagtctgattcttcggatgaagatttttgtgactgagcggcggacgggtgagtaacgcgtgggtaacctgcctcatacagggggataacagttagaaatgactgctaataccgcataagaccacggtaccgcatggtacagtggtaaaaactccggtggtatgagatggacccgcgtctgattaggtagttggtggggtaacggcctaccaagccgacgatcagtagccgacctgagagggtgaccggccacattgggactgagacacggcccagactcctacgggaggcagcagtggggaatattgcacaatggaggaaactctgatgcagcgacgccgcgtgaaggatgaagtatttcggtatgtaaacttctatcagcagggaagaaaatgacggtacctgactaagaagccccggctaactacgtgccagcagccgcggtaatacgtagggggcaagcgttatccggatttactgggtgtaaagggagcgtagacggcacggcaagccagatgtgaaagcccggggctcaaccccgggactgcatttggaactgctgagctagagtgtcggagaggcaagtggaattcctagtgtagcggtgaaatgcgtagatattaggaggaacaccagtggcgaaggcggcttactggacgataactgacgctgaggctcgaaagcgtggggagcaaacaggattagataccctggtagtccacgccgtaaacgatgaatactaggtgtcggggagcattgctcttcggtgccgcagcaaacgcaataagtattccacctggggagtacgttcgcaagaatgaaactcaaaggaattgacggggacccgcacaagcggtggagcatgtggtttaattcgaagcaacgcgaagaaccttaccaagtcttgacatcccgatgacagagtatgtaatgtactttcccttcggggcatcggtgacaggtggtgcatggttgtcgtcagctcgtgtcgtgagatgttgggttaagtcccgcaacgagcgcaacccctgttcttagtagccagcggttcggccgggcactctagggagactgccagggataacctggaggaaggcggggatgacgtcaaatcatcatgccccttatgacttgggctacacacgtgctacaatggcgtaaacaaagggaagcggagccgtgaggccgagcaaatctcaaaaataacgtctcagttcggactgtagtctgcaacccgactacacgaagctggaatcgctagtaatcgcagatcagaatgctgcggtgaatacgttcccgggtcttgcactcaccgcccgtca

SEQ ID NO: 248 - DNA, 1388 bp, Artificial Sequence
  Synthetic polymer
agagtttgatcctggctcaggatgaactttggcggcgtgcttaacacatgcaagtcgaacgaaacaccttatctgattttcttcggaactgaagatttggtgattgagtggcggacgggtgagtaacgcgtgggtaacctgccctgtacagggggataacagtcagaaatgactgctaataccgcataagaccacagcaccgcatggtgcaggggtaaaaactccggtggtacaggatggacccgcgtctgattagctggttggtggggtaacggctcaccaaggcgacgatcagtagccggcttgagagagtgaacggccacattgggactgagacacggcccaaactcctacgggaggcagcagtggggaatattgcacaatgggggaaaccctgatgcatcgacgccgcgtgagtgaagaagtatctcggtatgtaaagctctatcagcagggaagaaaatgacggtacctgactaagaagccccggctaactacgtgccagcagccgcggtaatacttagggggctagcgttatccggaattactgggtgtaaagggtgcgtaggtggtatggcaagtcagaagtgaaaaccccaggggcttaactctgggactgctttgaaactgtcaggctggagtgcaggagaggtaagcggaattcctagtgtagcggtgaaatgcgtagatattaggaggaacatcagtggcgaaggcggcttactggactgaaactgacactgaggcacgaaagcgtggggagcaaacaggattagataccctggtagtccacgccgtaaacgatgaatactaggtgtcggggccgtagaggcttcggtgccgcagccaacgcagtaagtattccacctggggagtacgttcgcaagaatgaaactcaaaggaattgacggggacccgcacaagcggtggagcatgtggtttaattcgaagcaacgcgaagaaccttaccaggtcttgacatcgatctaaaggctccagagatggagagatagctatagagaagacaggtggtgcatggttgtcgtcagctcgtgtcgtgagatgttgggttaagtcccgcaacgagcgcaacccctgttgccagttgccagcattaagttggggactctggcgagactgccggtgacaagccggaggaaggcggggatgacgtcaaatcatcatgccccttatgacctgggctacacacgtgctacaatggcgtaaacaaagtgaagcaaagctgtgaagccaagcaaatcacaaaaataacgtctcagttcggattgtagtctgcaactcgactacatgaagctggaatcgctagtaatcgcagatcagaatgctgcggtgaatacgttcccgggtcttgcacacaccgcccgtca

SEQ ID NO: 249 - DNA, 1389 bp, Artificial Sequence
  Synthetic polymer
agagtttgatcctggctcaggatgaacgctggcggcgtgcctaacacatgcaagtcgaacggaacttctttgacagaattctacggaaggaagttgattaagtttagtggcggacgggtgagtaacgcgtgagtaacctgcctttgagaggggaataacttcccgaaagggatgctaataccgcatgacgcatatttatcgcatggtagatatgccaaagatttatcgctcaaagatggactcgcgtccgattagccagttggcggggtaacggcccaccaaagcgacgatcggtagccggactgagaggttgaacggccacattgggactgagacacggcccagactcctacgggaggcagcagtgggggatattgcgcaatgggggaaaccctgacgcagcaacgccgcgtgaaggatgaaggttttcggattgtaaacttcttttatttaggacgaagaatgacggtactaaatgaataagctccggctaactacgtgccagcagccgcggtaatacgtagggagcaagcgttatccggatttactgggtgtaaagggtgcgtaggcggcttggtaagtcagatgtgaaatctatgggctcaacccatagcctgcatttgaaactgcagagcttgagtgaagtagaggcaggcggaattccccgtgtagcggtgaaatgcgtagagatggggaggaacaccagtggcgaaggcggcctgctgggctttaaccgacgctgaggcacgaaagcgtgggtagcaaacaggattagataccctggtagtccacgctgtaaacgatgattactaggtgtggggggtctgaccccttccgtgccggagttaacacaataagtaatccacctggggagtacggccgcaaggttgaaactcaaaggaattgacgggggcccgcacaagcagtggagtatgtggtttaattcgaagcaacgcgaagaaccttaccaggtcttgacatcctactaacgagatagagatatgttaggtgcccttcggggaaagtagagacaggtggtgcatggttgtcgtcagctcgtgtcgtgagatgttgggttaagtcccgcaacgagcgcaacccttgctattagttgctacgcaagagcactctaataggactgccgttgacaaaacggaggaaggtggggacgacgtcaaatcatcatgccccttatgacctgggctacacacgtactacaatggacattaacagagggaagtaatacagcgatgtggagcaaacccctaaaaatgttctcagttcagattgcaggctgcaacccgcctgtatgaagatggaattgctagtaatcgcagatcagcatgctgcggtgaatacgttcccgggccttgtacacaccgcccgtca

SEQ ID NO: 250 - DNA, 1393 bp, Artificial Sequence
  Synthetic polymer
agagtttgatcctggctcaggatgaacgctggcggcgtgcttaacacatgcaagtcgaacgaagcatttaagacagattacttcggtttgaagtcttttatgactgagtggcggacgggtgagtaacgcgtgggtaacctgcctcatacagggggatagcagctggaaacggctggtaataccgcataagcgcacggtatcgcatgatacagtgtgaaaaactccggtggtatgagatggacccgcgtctgattagctggttggtgaggtaacggcccaccaaggcgacgatcagtagccgacctgagagggtgaccggccacattgggactgagacacggcccagactcctacgggaggcagcagtggggaatattgcacaatggaggaaactctgatgcagcgacgccgcgtgagtgaagaagtagttcgctatgtaaagctctatcagcagggaagatagtgacggtacctgactaagaagctccggctaaatacgtgccagcagccgcggtaatacgtatggagcaagcgttatccggatttactgggtgtaaagggagtgtaggtggccaggcaagtcagaagtgaaagcccggggctcaaccccgggactgcttttgaaactgcagggctagagtgcaggaggggcaagtggaattcctagtgtagcggtgaaatgcgtagatattaggaggaacaccagtggcgaaggcggcttgctggactgtaactgacactgaggctcgaaagcgtggggagcaaacaggattagataccctggtagtccacgccgtaaacgatgaatactaggtgtcggggcacataagtgcttcggtgccgcagcaaacgcaataagtattccacctggggagtacgttcgcaagaatgaaactcaaaggaattgacggggacccgcacaagcggtggagcatgtggtttaattcgaagcaacgcgaagaaccttaccaagtcttgacatcccactgaccggacagtaatgtgtccttcccttcggggcagtggagacaggtggtgcatggttgtcgtcagctcgtgtcgtgagatgttgggttaagtcccgcaacgagcgcaacccttattcttagtagccagcagttcggctgggcactctagggagactgccagggataacctggaggaaggtggggatgacgtcaaatcatcatgccccttatgacttgggctacacacgtgctacaatggctgtaacaaagggaagcgaccccgtaaggggaagcggatctcagaaaagcagtctcagttcggattgtgggctgcaacccgcccacatgaagttggagttgctagtaatcgcggatcagcatgccgcggtgaatacgttcccgggccttgcacacaccgcccgtca

SEQ ID NO: 251 - DNA, 1371 bp, Artificial Sequence
  Synthetic polymer
agagtttgatcctggctcaggacgaacgctggcggcgcgcctaacacatgcaagtcgaacgagcgagagagagcttgctttctcgagcgagtggcgaacgggtgagtaacgcgtgaggaacctgcctcaaagagggggacaacagttggaaacgactgctaataccgcataagcccacggctcggcatcgagcagagggaaaaggagcaatccgctttgagatggcctcgcgtccgattagctagttggtgaggtaatggcccaccaaggcaacgatcggtagccggactgagaggttgaacggccacattgggactgagacacggcccagactcctacgggaggcagcagtggggaatattgcacaatgggggaaaccctgatgcagcgacgccgcgtggaggaagaaggtcttcggattgtaaactcctgttgttgaggaagataatgacggtactcaacaaggaagtgacggctaactacgtgccagcagccgcggtaaaacgtaggtcacaagcgttgtccggaattactgggtgtaaagggagcgcaggcgggaagacaagttggaagtgaaatctatgggctcaacccataaactgctttcaaaactgtttttcttgagtagtgcagaggtaggcggaattcccggtgtagcggtgaaatgcgtagagatcgggaggaacaccagtggcgaaggcggcctactgggctttaactgacgctgaggcacgaaagcatgggtagcaaacaggattagataccctggtagtccatgccgtaaacgatgattactaggtgtggggggactgaccccttccgtgccgcagttaacacaataagtaatccacctggggagtacggccgcaaggttgaaactcaaaggaattgacgggggcccgcacaagcagtggagtatgtggtttaattcgaagcaacgcgaagaaccttaccaggtcttgacatcctgagaatccttaagagattagggagtgccttcgggaactcagagacaggtggtgcatggttgtcgtcagctcgtgtcgtgagatgttgggttaagtcccgcaacgagcgcaacccttgctattggttgctacgcaagagcactctaataggactgccgttgacaaaacggaggaaggtggggacgacgtcaaatcatcatgccccttatgacctgggctacacacgtactacaatggccatcaacagagggaagcaaaaccgcgaggcagagcaaacccctaaaaatggtcccagttcggattgtaggctgcaacccgcctacatgaagttggaattgctagtaatcgcggatcagcatgccgcggtgaatacgttcccgggccttgtactcaccgcccgtca

SEQ ID NO: 252 - DNA, 1394 bp, Artificial Sequence
  Synthetic polymer
agagtttgatcctggctcaggatgaacgctggcggcgtgcctaacacatgcaagtcgaacgaagcgcttaaatggatttcttcggattgaaatttttgtgactgagtggcggacgggtgagtaacgcgtgggtaacctgcctcatacagggggataacagttagaaatgactgctaataccgcataagcgcacggtgtcgcatgacacagtgtgaaaagccgagacggtatgagatggacccgcgtctgattagctggttggcggggtaacggcccaccaaggcgacgatcagtagccggcctgagagggtggacggccacattgggactgagacacggcccaaactcctacgggaggcagcagtggggaatattgcacaatgggggaaaccctgatgcagcgacgccgcgtgaaggaagaagtatttcggtatgtaaacttctatcagcagggaagaaaatgacggtacctgactaagaagccccggctaactacgtgccagcagccgcggtaatacgtagggggcaagcgttatccggatttactgggtgtaaagggagcgtaggcggtctgacaagtcagaggtgaaagcccggggctcaactccgggactgcctttgaaactgccggactagattgcaggagaggcaagtggaattcctagtgcagcggtgaaatgcgtagatattaggaggaacaccagtggcgaaggcggcttgctggactgtaaatgacgctgaggctcgaaagcgtggggagcaaaccaggattagataccctggtagtccacgccgtaaacgatgaatactaggtgtcagggagcaaagctctttggtgccgcagcaaacgcagtaagtattccacctgggggagaacgttcgcaaaattgaactcaaaggaattgacggggaccccgcccaaggcggggagccatggggtttaaatcggaagcaacgcgaagacccttacccagtcttgacatccggctgaccggtgagtacgttcacttttctttcgggacagccgagacaggtggtgcatggttgtcgtcagctcgtgtcgtgagatgttgggttaagtcccgcaacgagcgcaacccttaccttcagtagccagcaattcggatgggcactctggagggactgccagggataacctggaggaaggtggggatgacgtcaaatcatcatgccccttatgatttgggctacacacgtgctacaatggcgtaaacaaagggaagcgagagtgtgagcttaagcaaatcccaaaaataacgtctcagttcggattgtagtctgcaactcgactacatgaagctggaatcgctagtaatcgcgaatcagcatgtcgcggtgaatacgttcccgggtcttgcacacaccgcccgtca

SEQ ID NO: 253 - DNA, 1400 bp, Artificial Sequence
  Synthetic polymer
ttcgcccttagagtttgatcctggctcaggacgaacgctggcggcgtgcctaacacatgcaagtcgaacggggatcatgaagcggaagttttcggatggaaggttcatgattctagtggcgcacgggtgagtaacgcgtgaacaacctgcctttcagtgggggataacacctggaaacaagtgctaataccgcatgagaccacgacctggcatcgggatggggtcaaagatttatcgctgaaagaggggttcgcgtcccattaggtagttggtgagataacagcccaccaagccgacgatgggtagccgagctgagaggctgatcggccacactggaactgagacacggtccagactcctacgggaggcagcagtggggaatattgggcaatgggcgcaagcctgacccagcaacgccgcgtgagggaagaaggttttcggattgtaaacctctgtcgcaggggacgaaggaagtgacggtaccctgtaagaaagccccggctaactacgtgccagcagccgcggtaatacgtagggggcgagcgttgtccggaattactgggcgtaaagggagcgtaggcggtcgattaagttagatgtgaaacccccgggcttaacttggggactgcatctaatactggttgacttagagtacaggagagggaagcggaattcccagtgtagcggtgaaatgcgtagatattcggaggaacaccagtggcgaaggcggcctgctgggctttaactgacgctgaggctcgaaagtgtggggagcaaacaggattagataccctggtagtccacactgtaaacgatgattgctaggtgtggggggtctgaccccttccgtgccggagttaacgcaataagcaatccacctggggagtacggccgcaaggttgaaactcaaaggaattgacgggggcccgcacaagcagtggattatgtggtttaattcgacgcaacgcgaagaaccttaccaggtcttgacatccaacgaatccttaagagattagggagtgcctttcggggaacgttgagacaggtggtgcatggttgtcgtcagctcgtgtcgtgagatgttgggttaagtcccgcaacgagcgcaacccctgccattagttgctacgcaagagcactctaatgggaccgctaccgacaaggtggaggaaggtggggacgacgtcaaatcatcatgccccttatgacctgggctacacacgtaatacaatggccgttaacaacgggaggcaaaaccgcgaggtggagcaaaaccctaaaaacggtcccagttcggatcgcaggctgcaacccgcctgcgtgaagttggaattgctagtaatcgcggatcagcatgccgcggtgaatacgttcccgggccttgtacacaccgcccgtca

SEQ ID NO: 254 - DNA, 1393 bp, Artificial Sequence
  Synthetic polymer
ttcgcccttagagtttgatcctggctcaggacgaacgctggcggcgcgcctaacacatgcaagtcgaacgaagtttcataacggaagttttcggatggaagatatgaaacttagtggcggacgggtgagtaacacgtgagcaacctgcctttcagagggggataacgtttggaaacgaacgctaataccgcataacgtagcatctcggcatcgaggagttaccaaaggagcaatccgctgaaagatgggctcgcgtccgattagatagttggcggggtaacggcccaccaagtcgacgatcggtagccggactgagaggttgatcggccacattgggactgagacacggcccagactcctacgggaggcagcagtggggaatattgcacaatgggggaaaccctgatgcggcgacgccgcgtggaagaagaaggtcttcggattgtaaactcctgttgttgaggaagataatgacggtactcaacaaggaagtgacggctaactacgtgccagcagccgcggtaaaacgtaggtcacaagcgttgtccggaattactgggtgtaaagggagcgcaggcgggaagacaagttggaagtgaaatccatgggctcaacccatgaactgctttcaaaactgtttttcttgagtagtacagaggtaggcggaattcccggtgtagcggtggaatgcgtagatatcgggaggaacaccagtggcgaaggcggcctactgggcaccaactgacgctgaggctcgaaagtgtgggtagcaaacaggattagataccctggtagtccacactgtaaacgatgattactaggtgttggaggattgaccccttcagtgccgcagttaacacaataagtaatccacctggggagtacgaccgcaaggttgaaactcaaaggaattgacgggggcccgcacaagcagtggagtatgtggtttaattcgacgcaacgcgaagaaccttaccaagtcctgacatcctgcgacgcacatagaaatatgtgtttccttcgggacgcagagacaggtggtgcatggttgtcgtcagctcgtgtcgtgagatgttgggttaagtcccgcaacgagcgcaacccttatggtcagttacttcgcaagaggactctggccagactgccgttgacaaaacggaggaaggtggggatgacgtcaaatcatcatgccctttatgacttgggctacacacgtactacaatggcgttaaacaaagagaagcaagaccgcgaggtggagcaaaactcagaaacaacgtcccagttcggactgcaggctgcaactcgcctgcacgaagtcggaattgctagtaatcgcagatcagcatgctgcggtgaatacgatcccgggccttgcacacaccgcccgtca

SEQ ID NO: 255 - DNA, 1391 bp, Artificial Sequence
  Synthetic polymer
agagtttgatcctggctcaggacgaacgctggcggcgtgcttaacacatgcaagtcgaacggagcacccttgattgaggtttcggccaaatgataggaatgcttagtggcggactggtgagtaacgcgtgaggaacttgcctttcagagggggacaacagttggaaacgactgctaataccgcatgacgcattttgatcgcatggtcgaaacgccaaagatttatcgctgaaagatggcctcgcgtctgattagctagttggtgaggtaacggcccaccaaggcgacgatcagtagccggactgagaggttgaccggccacattgggactgagatacggcccagactcctacgggaggcagcagtggggaatattgggcaatgggcgcaagcctgacccagcaacgccgcgtgaaggaagaaggctttcgggttgtaaacttcttttaagtgggaagagtagaagacggtaccacttgaataagccacggctaactacgtgccagcagccgcggtaatacgtaggtggcaagcgttgtccggatttactgggtgtaaagggcgtgcagccgggcatgcaagtcagatgtgaaatcttagggcttaaccctgaaactgcatttgaaactgtatgtcttgagtgccggagaggtaatcggaattccttgtgtagcggtgaaatgcgcagatataaggaagaacaccagtggcgaaggcggattactggacggtaactgacggtgaggcgcgaaagcgtggggagcgaacaggattagataccctggtagtccacgctgtaaacgatggatactaggtgtgcggggactgaccccctgcgtgccgcagttaacacaataagtatcccacctggggagtacgatcgcaaggttgaaactcaaaggaattgacgggggcccgcacaagcggtggattatgtggtttaattcgaagcaacgcgaagaaccttacctggtcttgacatccctatgaataacgggcaatgccgttagtacttcggtacataggagacaggtggtgcatggttgtcgtcagctcgtgtcgtgagatgttgggttaagtcccgcaacgagcgcaacccttatctttagtagccagcagtaagatgggcactctagagagactgccggggataacccggaggaaggtggggatgacgtcaaatcatcatgccccttatgaccagggctacacacgtgctacaatggcgtaaacaaagagaagcgaagtcgtgaggcagagcgaatctcaaaaataacgtctcagttcggattgtagtctgcaactcgactacatgaagctggaatcgctagtaatcgcagatcagaatgctgcggtgaataaattcccgggtcttgcactcaccgcccgtca

SEQ ID NO: 256 - DNA, 1360 bp, Artificial Sequence
  Synthetic polymer
agagtttgatcctggctcaggatgaacgctggcggcgtgcctaacacatgcaagtcgagcgattctcttgggagaagagcggcggacgggtgagtaacgcgtgggtaacctgccctgtacacacggataacataccgaaaggtatgctaatacgggataacataagaaattcgcatgtttttcttatcaaagctccggcggtacaggatggacccgcgtctgattagctagttggtgaggtaatggctcaccaaggcgacgatcagtagccgacctgagagggtgatcggccacattggaactgagacacggtccaaactcctacgggaggcagcagtggggaatattgcacaatgggcgaaagcctgatgcagcaacgccgcgtgagcgatgaaggccttcgggtcgtaaagctctgtcctcaaggaagataatgacggtacttgaggaggaagccccggctaactacgtgccagcagccgcggtaatacgtagggggctagcgttatccggatttactgggcgtaaagggtgcgtaggcggtcttttaagtcaggagtgaaaggctacggctcaaccgtagtaagctcttgaaactggaggacttgagtgcaggagaggagagtggaattcctagtgtagcggtgaaatgcgtagatattaggaggaacaccagtagcgaaggcggctctctggactgtaactgacgctgaggcacgaaagcgtggggagcaaacaggattagataccctggtagtccacgccgtaaacgatgagtactagctgtcggaggttacccccttcggtggcgcagctaacgcattaagtactccgcctggggagtacgctcgcaagaatgaaactcaaaggaattgacggggacccgcacaagcggtggagcatgtggtttaattcgaagcaacgcgaagaaccttaccagtccttgacatccaactgaccgaccagtaacgtggtcttctcttcggagcagttgagacaggtggtgcatggttgtcgtcagctcgtgtcgtgagatgttgggttaagtcccgcaacgagcgcaacccctatccttagtagccagcagtaagatgggaactctagggagactgccggggataacccggaggaaggtggggacgacgtcaaatcatcatgccccttatgggctgggctacacacgtgctacaatggtgctaatagagtgaggcgagactgtgaagttaagcaaatcacaaaaatggcatctcagttcggattgtagtctgcaactcgactacatgaagctggaatcgctagtaatcgcagatcagaatgctgcggtgaatacgttcccgggtcttgcactcaccgcccgtca

SEQ ID NO: 257 - DNA, 1395 bp, Artificial Sequence
  Synthetic polymer
agagtttgatcctggctcaggatgaacgctggcggcgtgcctaacacatgcaagtcgaacgaagacataccgacggaatccttcgggaggaagatggtatggactgagtggcggacgggtgagtaacgcgtgggtaacttgccctgtacaggggggacaacagttagaaatgactgctaataccgcataagcgcacagtaccgcatggtacagtgcgaaaaactccggtggtacaggatgggcccgcgtctgattagttagttggcggggtaacggcccaccaagacgacgatcagtagccggcttgagagagtgaacggccacattgggactgagacacggcccaaactcctacgggaggcagcagtgggggatattgcacaatgggcgaaagcctgatgcagcaacgccgcgtgagggaagacggttttcggattgtaaacctctgttctaagtgacgaacaaatgacggtagcttaggagaaagccccggctaactacgtgccagcagccgcggtaatacgtagggggcaagcgttgtccggaattactgggtgtaaagggagcgcaggcggagaagcaagtcagtggtgaaaacgatgggcttaactcatcgactgccattgaaactgtttcccttgagtgaagtagaggcaggcggaattccgagtgtagcggtgaaatgcgtagatattcggaggaacaccagtggcgaaggcggcctgctgggctttaactgacgctgaggctcgaaagtgtggggagcaaacaggattagataccctggtagtccacgccgtaaacgatgaatactaggtgtcggggccgtagaggcttcggtgccgcagccaacgcaataagtattccacctggggagtacgttcgcaagaatgaaactcaaaggaattgacggggacccgcacaagcggtggagcatgtggtttaattcgaagcaacgcgaagaaccttacctgatcttgacatcccgctgaccgttccgtaatgggagctttccttcggaacatcggagacaggtggtgcatggttgtcgtcagctcgtgtcgtgagatgttgggttaagtcccgcaacgagcgcaacccctattttcagtagccagcattttggatgggcactctggagagactgcccgggataaccgggaggaaggtggggatgacgtcaaatcatcatgccccttatgatctgggctacacacgtgctacaatggctgttacagagagaagcgaatccgcgaggaagagcaaacctcaaaaaggcagtctcagttcggattgtagtctgcaactcgactacatgaagctggaatcgctagtaatcgcgaatcagaatgtcgcggtgaatacgttcccgggtcttgtactcaccgcccgtca

SEQ ID NO: 258 - DNA, 1386 bp, Artificial Sequence
  Synthetic polymer
agagtttgatcctggctcaggatgaacgctggcggcgtgcctaacacatgcaagtcgagcgggaaattttaaaatgaagcttcggtagatttttaagatggagagcggcggacgggtgagtaacgcgtaggcaacctgccctttgcagagggatagccattggaaacgatgattaaaacctcataatactaaatagtcacatggctgtttggtcaaagatttatcggcaaaggatgggcctgcgtctgattagctagttggtggggtaacggcctaccaaggcgacgatcagtagccgacctgagagggtgatcggccacattggaactgagacacggtccaaactcctacgggaggcagcagtggggaatattgcacaatgggcgaaagcctgatgcagcaacgccgcgtgaaggaagaaggtcttcggatcgtaaacttctgtccttggggaagataatgacggtacccttggaggaagccccgactaactacgtgccagcagccgcggtaatacgtagggggcaagcgttatccggaattattgggcgtaaagagtgcgtaggtggttacttaagcgcggggtttaaggcaatggctcaaccattgttcgccctgcgaactgggttacttgagtgcaggagaggaaagcggaattcctagtgtagcggtgaaatgcgtagatattaggaggaacaccagtggcgaaggcggctttctggactgttactgacactgaggcacgaaagtgtggggagcaaacaggattagataccctggtagtccacaccgtaaacgatgagcactaggtgtcggggtcgcaagacttcggtgccgcagttaacgcattaagtgctccgcctggggagtacgtacgcaagtatgaaactcaaaggaattgacggggacccgcacaagcagcggagcatgtggtttaattcgaagcaacgcgaagaaccttaccaggacttgacatcctcctgaccgctctttaataggagctttccttcgggacaggagagacaggtggtgcatggttgtcgtcagctcgtgtcgtgagatgttgggttaagtcccgcaacgagcgcaacccttgtcattagttgccatcattaagttgggcactctagtgagactgccgggaataactcggaggaaggtggggatgacgtcaaatcatcatgccccttatgttctgggctacacacgtgctacaatggtcggtacaaagagacgcgaagtcgcgaggcggagcaaatctcaaaagccgatcccagttcggactgtggtctgcaacccgaccacacgaagctggaatcgctagtaatcgcgaatcagaatgtcgcggtgaatacgttcccgcggtcttgcacacaccgcccgtca

SEQ ID NO: 259 - DNA, 1393 bp, Artificial Sequence
  Synthetic polymer
agagtttgatcctggctcaggatgaacgctggcggcgtgcttaacacatgcaagtcgaacgaaacaccttatttgattttcttcggaactgaagatttggtgattgagtggcggacgggtgagtaacgcgtgggtaacctgccctgtacagggggataacagtcagaaatgactgctaataccgcataagaccacagcaccgcatggtgcaggggtaaaaactccggtggtacaggatggacccgcgtctgattagctggttggtgaggtaacggctcaccaaggcgacgatcagtagccggcttgagagagtgaacggccacattgggactgagacacggcccaaactcctacgggaggcagcagtggggaatattgcacaatgggggaaaccctgatgcagcgatgccgcgtgagtgaagaagtatctcggtatgtaaagctctatcagcagggaagaaaatgacggtacctgactaagaagccccggctaactacgtgccagcagccgcggtaatacgtagggggcaagcgttatccggaattactgggtgtaaagggtgcgtaggtggtatggcaagtcagaagtgaaagcccggggctcaaccccgggactgcttttgaaactgtggagctggagtgcaggagaggcaagtggaattcctagtgtagcggtgaaatgcgtagatattaggaggaacaccagtggcgaaggcggcttgctggactgtaactgacactgaggctcgaaagcgtggggagcaaacaggattagataccctggtagtccacgccgtaaacgatgaatactaggtgtcggggctcataagagcttcggtgccgcagcaaacgcaataagtattccacctggggagtacgttcgcaagaatgaaactcaaaggaattgacggggacccgcacaagcggtggagcatgtggtttaattcgaagcaacgcgaagaaccttaccaagtcttgacatcctcttggccggtcagtaatgtgaccttttcttcggaacaagagtgacaggtggtgcatggttgtcgtcagctcgtgtcgtgagatgttgggttaagtcccgcaacgagcgcaacccctattcttagtagccagcatttaaggtgggcactctaggaagactgccagggataacctggaggaaggtggggatgacgtcaaatcatcatgccccttatgacttgggctacacacgtgctacaatggcgtaaacaaagtgaagcgagagtgtgagcttaagcaaatcacaaaaataacgtctcagttcggattgtagtctgcaactcgactacatgaagctggaatcgctagtaatcgcgaatcagaatgtcgcggtgaatacgttcccgggtcttgtactcaccgcccgtca

SEQ ID NO: 260 - DNA, 1370 bp, Artificial Sequence
  Synthetic polymer
agagtttgatcctggctcaggacgaacgctggcggcgcgcctaacacatgcaagtcgaacgagcgagagagagcttgctttctcgagcgagtggcgaacgggtgagtaacgcgtgagcaatctgcctttaagagggggataacagtcggaaacggctgctaataccgcataaagcattgaattcgcatgttttcgatgccaaaggagcaatccgcttttagatgagctcgcgtctgattagccagttggtgaggtaacggcccaccaaggcgacgatgcatagccggcctgagagggcggacggccacattgggactgagacacggcccaaactcctacgggaggcagcagtggggaatattgcacaatgggggaaaccctgatgcagcgacgccgcgtggaggaagaaggtcttcggattgtaaactcctgttgttggggaagataatgacggtacccaacaaggaagtgacggctaactacgtgccagcagccgcggtaaaacgtaggtcacaagcgttgtccggaattactgggtgtaaagggagcgcaggcgggaagacaagttggaagtgaaatctatgggctcaacccataaactgctttcaaaactgtttttcttgagtagtgcagaggtaggcggaattcccggtgtagcggtggaatgcgtagatatcgggaggaacaccagtggcgaaggcggcctactgggcaccaactgacgctgaggctcgaaagtgtgggtagcaagcagaattagataccctggtagtccacaccgtaaacgatgattactaggggtggagggattgaccccttcagtgccgcagttaacacaataagtaatccacctggggagtacgaccgcaaggttgaaactcaaaggaattgacgggggcccgcacaagcagtggagtatgtggtttaattcgacgcaacgcgaagaaccttaccaagtcttgacatcccttgacaggcatagaaatatgtaatctcttcggagcaaggagacaggtggtgcatggttgtcgtcagctcgtgtcgtgagatgttgggttaagtcccgcaacgagcgcaacccttatcattagttgctacgcaagagcactctaatgagactgccgttgataaaacggaggaaggtggggatgacgtcaaatcatcatgccccttatgacctgggctacacacgtactacaatggtgatcaaacagagggaagcaacacagcgatgtgaagcagaacccgaaaaatcatctcagttcagattgcaggctgcaactcgcctgcatgaagtcggaattgctagtaatcgcggatcagcatgccgcggtgaatacgttcctgggccttgtacacacaggccgtca

SEQ ID NO: 261 - DNA, 1395 bp, Artificial Sequence
  Synthetic polymer
agagtttgatcctggctcaggatgaacgctggcggcgtgcctaacacatgcaagtcgaacggagttcttaaggaatgctacttcggtcaaatgacttttgaacttagtggcagacgggagagtaacgcgtgagccacctgcctttcagagggggataacatttggaaacagatgctaataccgcataagattacagtaccgcgtgatacagtgatcaaaggagcaatccgctgaaagatgggctcgcgtctgattagatagttggtgaggtaacggctcaccaaatcaacgatcggtaaccggactgagaggttgaacggccacattgggactgagacacggcccacactcctacgggaggcagcagtggggaatattgcacaatgggcgaaagcctgatgcaccaacgccgcgtgagggaagacggttttctgattgtaaacctctgttttcagtgacaaataaatgacggtacccgagtaggaagccccggctaactacgtgccagcagccgcggtaatacgtaggtggcaagcgttatccggaattactgggtgtaaagggagcgcaggcgggatagcaagtcagctgtgaaaactatgggctcaacccataaactgcagttgaaactgttattcttgagtggagtagaggcaagcggaattcccagtgtagcggtgaaatgcgtagatattcggaggaacaccagtggcgaaggcggcttgctgggctctaactgacgctgaggctcgaaagtgtggggagcaaacaggattagataccctggtagtccataccgtaaacgatgattgctagggtgtggggggtctgaccccctccgtgccagagtaaacgcaatacgcaatccccctggggagtacggccgcaaggttgaaactcaaaggaattgacggggacccgcacaagcggtggagcatgtggtttaattcgaagcaacgcgaagaaccttacctggtcttgacatccctatgaataacgggcaatgccgctagttcttcggtacataggagacaggtggtgcatggttgtcgtcagctcgtgtcgtgagatgttgggttaagtcccgcaacgagcgcaacccttatctttagtagccagcagtaagatgggcactttagagagactgccggggataacccggaggaaggtggggatgacgtcaaatcatcatgccccttatgaccagggctacacacgtgctacaatggcgtaaacaaagagaagcgaactcgtgaggcagagcgaatctcaaaaataacgtctcagttcggattgtagtctgcaactcgactacatgaagctggaatcgctagtaatcgcagatcagaatgccgcggtgaatacgttcccgggccttgcacacaccgcccgtca

SEQ ID NO: 262 - DNA, 1390 bp, Artificial Sequence
  Synthetic polymer
agagtttgatcctggctcaggatgaacgctggcggcgtgcttaacacatgcaagtcgaacgggaattactttattgaaacttcggtcgatttaatttaattctagtggcggacgggtgagtaacgcgtgggtaacctgccttatacagggggataacagtcagaaatggctgctaataccgcataagcgcacagagctgcatggctcagtgtgaaaaactccggtggtataagatggacccgcgttggattagcttgttggtggggtaacggcccaccaaggcgacgatccatagccggcctgagagggtgaacggccacattgggactgagacacggcccaaactcctacgggaggcagcagtggggaatattgcacaatgggggaaaccctgatgcagcaacgccgcgtgagtgaagaagtatttcggtatgtaaagctctatcagcagggaagataatgacggtacctgactaagaagctccggctaaatacgtgccagcagccgcggtaatacgtatggagcaagcgttatccggatttactgggtgtaaagggtgcgtaggtggcagtgcaagtcagatgtgaaaggccggggctcaaccccggagctgcatttgaaactgcatagctggagtacaggagaggcaggcggaattcctagtgtagcggtgaaatgcgtagatattaggaggaacaccagtggcgaaggcggcctgctggactgttactgacactgaggcacgaaagcgtggggagcaaacaggattagataccctggtagtccacgccgtaaacgatgactgctaggtgtcgggtggcaaagccattcggtgccgcagctaacgcaataagcagtccacctggggagtacgttcgcaagaatgaaactcaaaggaattgacggggacccgcacaagcggtggagcatgtggtttaattcgaagcaacgcgaagaaccttacctgatcttgacatcccgatgaccgcttcgtaatggaagcttttcttcggaacatcggtgacaggtggtgcatggttgtcgtcagctcgtgtcgtgagatgttgggttaagtcccgcaacgagcgcaacccctatcttcagtagccagcaggttaagctgggcactctggagagactgccagggataacctggaggaaggtggggatgacgtcaaatcatcatgccccttatgaccagggctacacacgtgctacaatggcgtaaacaaagagaagcaaactcgcgagggtaagcaaatctcaaaaataacgtctcagttcggattgtagtctgcaactcgactacatgaagctggaatcgctagtaatcgcagatcagaatgctgcggtgaatacgttcccgggtcttgcacacaccgcccgtca

SEQ ID NO: 263 - DNA, 1392 bp, Artificial Sequence
  Synthetic polymer
agagtttgatcctggctcaggatgaacgctggcggtgtgcttaacacatgcaagtcgaacgaaacaccttatttgattttcttcggaactgaagatttggtgattgagtggcggacgggtgagtaacgcgtgggtaacctgccctgtacagggggataacagtcagaaatgactgctaataccgcataagaccacagcaccgcatggtgcaggggtaaaaactccggtggtacaggatggacccgcgtctgattagctggttggtgaggtaacggctcaccaaggcgacgatcagtagccggcttgagagagtgaacggccacattgggactgagacacggcccaaactcctacgggaggcagcagtggggaatattgcacaatgggggaaaccctgatgcagcgacgccgcgtgagtgaagaagtatctcggtatgtaaagctctatcagcagggaagaaaatgacggtacctgactaagaagccccggctaactacgtgccagcagccgcggtaatacgtagggggcaagcgttatccggaattactgggtgtaaagggtgcgtaggtggtatggcaagtcagaagtgaaaacccagggcttaactctgggactgcttttgaaactgtcggactagagtgtcggaggggtaagtggaattcctagtgtagcggtgaaatgcgtagatattaggaggaacaccagtggcgaaggcggcttactggacgattactgacgctgaggctcgaaagcgtggggagcaaacaggattagataccctggtagtccacgccgtaaacgatgaatactaggtgtcggggagcattgctcttcggtgccgcagcaaacgcaataagtattccacctggggagtacgttcgcaagaatgaaactcaaaggaattgacgggggcccgcacaagcggtggagtatgtggtttaattcgaagcaacgcgaagaaccttaccaagtcttgacatccgcctgaccgatccttaaccggatctttccttcgggacaggcaagacaggtggtgcatggttgtcgtcagctcgtgtcgtgagatgttgggttaagtcccgcaacgagcgcaacccctatccttagtagccagcatttaaggtgggcactctagggagactgccggggataacccggaggaaggtggggacgacgtcaaatcatcatgccccttatgatttgggctacacacgtgctacaatggcgtaaacaaagggaagcgaagcggtgacgccaagcaaatcccaaaaataacgtcccagttcggactgtagtctgcaacccgactacacgaagctggaatcgctagtaatcgcggatcagaatgccgcggtgaatacgttcccgggccttgtacacaccgcccgtca

SEQ ID NO: 264 - DNA, 1395 bp, Artificial Sequence
  Synthetic polymer
ttcgcccttagagtttgatcctggctcaggatgaacgctggcggcgtgcctaacacatgcaagtcgagcgaagcactttacttggatttcttcggaatgacgagtgatttgactgagcggcggacgggtgagtaacgcgtgggtaacctgcctcacacagggggataacagttagaaatgactgctaataccgcataagaccccagcaccgcatggtgcagtggtaaaaactccggtggtgtgagatggacccgcgtctgattaggtagttggtgaggtaacggctcaccaagccgacgatcagtagccggcctgagagggtggacggccacattgggactgagacacggcccaaactcctacgggaggcagcagtggggaatattgcacaatgggggaaaccctgatgcagcgacgccgcgtggaggaagaaggtcttcggattgtaaactcctgttgttgaggaagataatgacggtactcaacaaggaagtgacggctaactacgtgccagcagccgcggtaaaacgtaggtcacaagcgttgtccggaattactgggtgtaaagggagcgcaggcgggaagacaagttggaagtgaaatctatgggctcaacccataaactgctttcaaaactgtttttcttgagtagtgcagaggtaggcggaattcccggtgtagcggtggaatgcgtagatatcgggaggaacaccagtggcgaaggcggcctactgggcaccaactgacgctgaggctcgaaagtgtgggtagcaaacaggattagataccctggtagtccacaccgtaaacgatgattactaggtgttggaggattgaccccttcagtgccgcagttaacacaataagtaatccacctggggagtacgaccgcaaggttgaaactcaaaggaattgacgggggcccgcacaagcagtggagtatgtggtttaattcgaagcaacgcgaagaaccttaccaggtcttgacatccgatgcatagtgcggagatgcatgaagtccttcgggacatcgagacaggtggtgcatggttgtcgtcagctcgtgtcgtgagatgttgggttaagtcccgcaacgagcgcaacccttattgccagttactacgaaagaggactctggcgagactgccgttgacaaaacggaggaaggtggggatgacgtcaaatcatcatgccctttatgacctgggctacacacgtactacaatggcgtttaacaaagagaagcaagaccgcgaggtggagcaaaactcaaaaacaacgtctcagttcagattgcaggctgcaactcgcctgcatgaagtcggaatcgctagtaatcgcggatcagcatgccgcggtgaatacgttcccgggccttgcacacaccgcccgtca

SEQ ID NO: 265 - DNA, 1391 bp, Artificial Sequence
  Synthetic polymer
agagtttgatcctggctcaggatgaacgctggcggcgtgcttaacacatgcaagtcgaacgaagcactttatttgatttccttcgggactgattattttgtgactgagtggcggacgggtgagtaacgcgtgggtaacctgccttgtacagggggataacagttagaaatgactgctaataccgcataagcgcacaggattgcatgatctggtgtgaaaaactccggtggtataagatggacccgcgtctgattagctggttggtgaggtaacggcccaccaaggcaacgatcagtagccgacctgagagggtgactggccacattgggactgagacacggcccaaactcctacgggaggcagcagtggggaatattgcacaatgggggaaaccctgatgcagcgacgccgcgtgagtgatgaagtatttcggtatgtaaagctctatcagcagggaagataatgacggtacctgactaagaagcaccggctaaatacgtgccagcagccgcggtaatacgtatggtgcaagcgttatccggatttactgggtgtaaagggtgcgtaggtggcaaggcaagtctgaagtgaaaatccggggctcaaccccggaactgctttggaaactgtttagctggagtacaggagaggtaagtggaattcctagtgtagcggtgaaatgcgtagatattaggaggaacaccagtggcgaaggcgacttactggactgctactgacactgaggcacgaaagcgtggggagcaaacaggattagataccctggtagtccacgccgtaaacgatgaatactaggtgttgggttccaaaggaactcggtgccgtcgcaaacgcattaagtattccacctggggagtacgttcgcaagaatgaaactcaaaggaattgacggggacccgcacaagcggtggagcatgtggtttaattcgaagcaacgcgaaaaaccttaccaagtcttgacatcctgatgacggttccttaaccggaacttttcttcggaacatcagagacaggtggtgcatggttgtcgtcagctcgtgtcgtgagatgttgggttaagtcccgcaacgagcgcaacccctatttccagtagccagcagtaagatgggcactctggagagactgccggggataacccggaggaaggtggggatgacgtcaaatcatcatgccccttatgatttgggctacacacgtgctacaatggcagttacaaagagaagcaaacctgtgaaggcgagcaaacctcaaaaaggctgtctcagttcggattgtagtctgcaactcgactacatgaagctggaatcgctagtaatcgcagatcagcatgctgcggtgaatacgttcccgggtcttgtactcaccgcccgtca

SEQ ID NO: 266 - DNA, 1394 bp, Artificial Sequence
  Synthetic polymer
agagtttgatcctggctcaggatgaacgctggcggcgtgcttaacacatgcaagtcgaacgaagcactttatttgatttccttcgggactgattattttgtgactgagtggcggacgggtgagtaacgcgtgggtaacctgccttgtacagggggataacagttggaaacggctgctaataccgcataagcgcacagcatcgcatgatgcagtgtgaaaaactccggtggtataagatggacccgcgttggattagctagttggtgaggtaacggcccaccaaggcgacgatccatagccgacctgagagggtgaccggccacattgggactgagacacggcccaaactcctacgggaggcagcagtggggaatattgcacaatggaggaaactctgatgcagcgacgccgcgtgaaggatgaagtatttcggtatgtaaacttctatcagcagggaagaaaatgacggtacctgactaagaagccccggctaactacgtgccagcagccgcggtaatacgtagggggcaagcgttatccggatttactgggtgtaaagggagcgtagacggcacggcaagccagatgtgaaagcccggggctcaaccccgggactgcatttggaactgctgagctagagtgtcggagaggcaagtggaattcctagtgtagcggtgaaatgcgtagatattaggaggaacaccagtggcgaaggcggcttactggacggcaactgacgttgaggctcgaaagcgtggggagcaaacaggattagataccctggtagtccacgccgtaaaacgatgaatactaggtgtcggggagcaaagctcttcggtgccgccgcaaacgcattaagcattccacctggggagtacgttcgcaagaatgaaactcaaaggaattgacggggacccgcacaagcggtggagcatgtggtttaattcgaagcaacgcgaagaaccttaccaggtcttgacatcccgatgaccggcccgtaacggggctttctcttcggagcattggagacaggtggtgcatggttgtcgtcagctcgtgtcgtgagatgttgggttaagtcccgcaacgagcgcaacccttatcctcagtagccagcaggtaaagctgggcactctgtggagactgccagggataacctggaggaaggtggggatgacgtcaaatcatcatgccccttatgatctgggctacacacgtgctacaatggcgtaaacaaagagaagcgaactcgcgagggtaagcaaatctcaaaaataacgtctcagttcggattgtagtctgcaactcgactacatgaagctggaatcgctagtaatcgcagatcagaatgctgcggtgaatacgttcccgggtcttgcactcaccgcccgtca

SEQ ID NO: 267 - DNA, 1343 bp, Artificial Sequence
  Synthetic polymer
agagtttgatcctggctcaggacgaacgctggcggcacgcttaacacatgcaagtcgaacggagaacattgagcttgcttaatgttcttagtggcggacgggtgagtaacacgtgagtaacctgcctctaagagtgtgatagcttctggaaacggatggtaataccgcataacatcatggattcgcatgtttctatgatcaaagatttatcgcttagagatggactcgcgtctgattagctagttggtaaggtaacggcttaccaaggcgacgatcagtagccggactgagaggttgatcggccacattgggactgagacacggcccagactcctacgggaggcagcagtggggaatattgcacaatgggggaaaccctgatgcagcgatgccgcgtggaggaagaaggttttcggattgtaaactcctgttgaagaggacgataatgacggtactcttttagaaagctccggctaactacgtgccagcagccgcggtaatacgtagggagcgagcgttgtccggaattactgggtgtaaagggagcgtaggcgggatggcaagtcagatgtgaaaactatgggctcaacccatagactgcatttgaaactgttgttcttgagtgaggtagaggtaagcggaattcctggtgtagcggtgaaatgcgtagatattaggaggaacaccagtggcgaaggcggcttactggacgataactgacgctgaggctcgaaagcgtggggagcaaacaggattagataccctggtagtccacgccgtgaacgatgaatactaggtgtcgggtggcaaagcccttcggggccgtcgcaaacgcagtaagtattccacctggggagtacgttcgcaagaaagaaaactcaaaaggaaattgacgggggacccgcacaagcggtggagcatgtggtttaattcgaagcaacgcgaagaaccttaccaagtcttgacatccgcctgaccgatccataaccggatctttccttcgggacaggcgagacaggtggcgcatggttgtcgtcagctcgtgtcgtgagatgttgggttaagtcccgcaacgagcgcaacccctatcctcagtagccagcatttaaggtgggcactctggggagactgccagggataacctggaggaaggcggggatgacgtcaaatcatcatgccccttatgatttgggctacacacgtgctacaatggcgtaaacaaagggaagcgagattgtgagatggagcaaatcccaaaaataacgtcccagttcggacagtagtctgcaacccgactacacgaagctggaatcgctagtaatcgcggatcagaatgccgcggt

SEQ ID NO: 268 - DNA, 1363 bp, Artificial Sequence
  Synthetic polymer
agagtttgatcctggctcaggatgaacgctggcggcgtgcctaacacatgcaagtcgagcgatcttcttcggaagagagcggcggacgggtgagtaacgcgtgggtaacctgccctgtacacacggataacataccgaaaggtatgctaatacgagataatatgcttttatcgcatggtagaagtatcaaagcttttgcggtacaggatggacccgcgtttgattagctagttggtaaggtaacggcttaccaaggcgacgatcagtagccgacctgagagggtgatcggccacattggaactgagacacggtccaaactcctacgggaggcagcagtggggaatattgcacaatgggcgaaagcctgatgcagcaacgccgcgtgagcgatgaaggccttcgggtcgtaaagctctgtcctcaaggaagataatgacggtacttgaggaggaagccccggctaactacgtgccagcagccgcggtaatacgtagggggctagcgttatccggaattactgggcgtaaagggtgcgtaggtggtttcttaagtcagaggtgaaaggctacggctcaaccgtagtaagcctttgaaactgggaaacttgagtgcaggagaggagagtggaattcctagtgtagcggtgaaatgcgtagatattaggaggaacaccagttgcgaaggcggcctgctggactgttactgacactgaggcacgaaagcgtggggagcaaacaggattagataccctggtagtccacgccgtaaacgatgaatactaggtgtcggggccgtataggcttcggtgccgccgctaacgcagtaagtattccacctggggagtacgttcgcaagaatgaaactcaaaggaattgacggggacccgcacaagcggtggagcatgtggtttaattcgaagcaacgcgaagaaccttaccaggtcttgacatccttctgaccgcaccttaatcggtgctttccttcgggacagaagagacaggtggtgcatggttgtcgtcagctcgtgtcgtgagatgttgggttaagtcccgcaacgagcgcaacccctatcttcagtagccagcaggtaaggctgggcactctggagagactgccagggataacctggaggaaggtggggacgacgtcaaatcatcatgccccttatgatctgggcgacacacgtgctacaatggcggtcacagagtgaggcgaacctgcgagggggagcaaaccacaaaaaaatcatctcagttcggactgtgggctgcaacccgcccacacgaagttggagttgctagtaatcgcggatcagaacgccgcggtgaatacgttcccgggccttgcacacaccgcccgtca

SEQ ID NO: 269 - DNA, 1370 bp, Artificial Sequence
  Synthetic polymer
agagtttgatcctggctcaggacgaacgctggcggcgcgcctaacacatgcaagtcgaacggtgaagaggagcttgctcctcggatcagtggcggacgggtgagtaacacgtgagcaacctggctctaagagggggacaacagttggaaacgactgctaataccgcataacgtatcgggatggcatcttcctgataccaaagattttatcgcttagagatgggctcgcgtctgattagatagttggcggggtaacggcccaccaagtcgacgatcagtagccggactgagaggttgaacggccacattgggactgagacacggcccagactcctacgggaggcagcagtgggggatattggacaatgggggcaaccctgatccagcgacgccgcgtgagggaagaaggttttcggattgtaaacctctgttgacggagaaaaaaatgatggtatccgtttagaaagccacggctaactacgtgccagcagccgcggtaatacgtaggtggcaagcgttgtccggaattactgggtgtaaagggagtgtaggcgggatatcaagtcagaagtgaaaattacgggctcaactcgtaacctgcttttgaaactgacattcttgagtgaagtagaggcaagcggaattcctagtgtagcggtgaaatgcgtagatattcggaggaacaccagtggcgaaggcggcctgctgggctttaactgacgctgaggctcgaaagtgtggggagcaaacaggattagataccctggtagtccacactgtaaacgatgattgctaggtgtggggggtctgaccccttccgtgccggagttaacgcaataagcaatccacctggggagtacggccgcaaggttgaaactcaaaggaattgacgggggcccgcacaagcagtggattatgtggtttaattcgacgcaacgcgaagaaccttaccaggtcttgacatccaacgaatccttaagagattagggagtgcctttcggggaacgttgagacaggtggtgcatggttgtcgtcagctcgtgtcgtgagatgttgggttaagtcccgcaacgagcgcaacccctgccattagttgctacgcaagagcactctaatgggaccgctaccgacaaggtggaggaaggtggggacgacgtcaaatcatcatgccccttatgacctgggctacacacgtaatacaatggccgttaacaacgggaggcaaaaccgcgaggtggagcaaaaccctaaaaacggtcccagttcggatcgcaggctgcaacccgcctgcgtgaagttggaattgctagtaatcgcggatcagcatgccgcggtgaatacgttcccgggccttgcacacaccgcccgtca

SEQ ID NO: 270 - DNA, 1395 bp, Artificial Sequence
  Synthetic polymer
agagtttgatcctggctcaggatgaacgctggcggcgtgcttaacacatgcaagtcgaacgaaacaccttatttgattttcttcggaactgaagatttggtgattgagtggcggacgggtgagtaacgcgtgggtaacctaccctgtacagggggataacagtcagaaatgactgctaataccgcataagaccacagcaccgcatggtgcaggggtaaaaactccggtggtacaggatggacccgcgtctgattagctggttggtgaggtaacggctcaccaagtcaacgatctgtagccgaactgagaggttgatcggccgcattgggactgagacacggcccagactcctacgggaggcagcagtggggaatattgcgcaatgggggcaaccctgacgcagcaacgccgcgtgcaggaagaaggtcttcggattgtaaactgttgtcgcaagggaagaagacagtgacggtaccttgtgagaaagtcacggctaactacgtgccagcagccgcggtaatacgtaggtgacaagcgttgtccggatttactgggtgtaaagggcgcgtaggcggactgtcaagtcagtcgtgaaataccggggcttaaccccggggctgcgattgaaactgacagccttgagtatcggagaggaaagcggaattcctagtgtagcggtgaaatgcgtagatattaggaggaacaccagtggcgaaggcggctttctggacgacaactgacgctgaggcgcgaaagtgcggggagcaaacaggattagataccctggtagtccacaccgtaaacgatggatactaggtgtaggaggtatcgaccccttctgtgccgcagttaacacaataagtatcccacctggggagtacgaccgcaaggttgaaactcaaaggaattgacgggggcccgcacaagcagtggagtatgtggtttaattcgaagcaacgcgaagaaccttacctgggcttgacatccctggaatcgagtagagatacttgagtgccttcgggaatcaggtgacaggtggtgcatggttgtcgtcagctcgtgtcgtgagatgttgggttaagtcccgcaacgagcgcaacccctattgtcagttgccatcattaagttgggcactctggcgagactgccggtgacaaatcggaggaaggtggggacgacgtcaaatcatcatgccccttatgcccagggctacacacgtactacaatggccgataacaaagtgcagcgaaaccgtgaggtggagcgaatcacaaaactcggtctcagttcagattgcaggctgcaactcgcctgcatgaagttggaattgctagtaatcgcggatcagaatgccgcggtgaatacgttcccgggccttgcacacaccgcccgtca

SEQ ID NO: 271 - DNA, 1402 bp, Artificial Sequence
  Synthetic polymer
agagtttgatcctggctcaggatgaacgctggcggcgtgcttaacacatgcaagtcgaacgaagcttgatcccggatcccttcggggtgacgggtgatatgactgagtggcggacgggtgagtaacgcgtgggcaacctgcctcatacaaggggataacagttagaaatgactgctaaaaccgcataaaaccacatcaccgcatggtggagtggtaaaagctccggtggtatgagatgggcccccgtctgattagctggttggtgaggtaacggctctaccaaggacaacgatcagtagccggcttgagagagtgaacggccacattgggactgagacacggcccaaactcctacgggaggcagcagtggggaatattgcacaatgggggaaaccctgatgcagcgacgccgcgtgagtgaagaattatttcggtatgtaaagctctatcagcagggaagaaaatgacggtacctgactaagaagccccggctaactacgtgccagcagccgcggtaatacgtagggggcaagcgttatccggaattactgggtgtaaagggtgcgtaggtggcagggcaagtcagaagtgaaaacccggggctcaactccgggactgcttttgaaactgtccagctagagtgcaggagaggtaagcggaattcctagtgtagcggtgaaatgcgtagatattaggaggaacatcagtggcgaaggcggcttactggactgaaactgacactgaggcacgaaagcgtggggagcaaacaggattagataccctggtagtccacgccgtaaacgatgaatactaggtgtcggggccgtataggcttcggtgccgcagcaaacgcattaagtattccacccggggagtacgttcgcaagaatgaaactcaaaggaattgacggggacccgcacaagcggtcgagcatgtggtttaattcgaaagcaacgcagaagaacacttaccctggtcttgtacatcccctctgaccgctccttaatcggagttttccttcggcgacaagggtgacaggtggcgcatggttgtcgtcagctcgtgtcgtgagatgttgggttaagtcccgcaacgagcgcaacccctatctcttagtagccagcacggaaaggtgggcactctagagagactgccagggagaacctggaggaaggtggggacgacgtcaaatcatcatgccccttatgaccagggctacacacgtgctacaatggcgtaaaccaagggaagcgaccccgtgaaggcaagccaatcccaaaaataacgtcacagttcggattgtagtctgcaactcgcctacatgaagctggaatcgctagtaatcgcgaatcagcatgtcgcggtgaatacgttcccgggtcttgcacacaccgcccgtca

SEQ ID NO: 272 - DNA, 1372 bp, Artificial Sequence
  Synthetic polymer
agagtttgatcctggctcaggatgaacgctggcggcgcgcctaacacatgcaagtcgaacgagcgagagagagcttgctttctcgagcgagtggcgaacgggtgagtaacgcgtgaggaacctgcctcaaagagggggacaacagttggaaacgactgctaataccgcataagcccacggctcggcatcgagcagggggaaaaggagcaatccgctttgagatggcctcgcgtccgattagctagttggtgaggtaatggcccaccaaggcgacgatcggtagccggactgagaggttgaacggccacattgggactgagacacggcccagactcctacgggaggcagcagtggggaatattgcacaatgggggaaaccctgatgcagcgacgccgcgtggaggaagaaggtcttcggattgtaaactcctgttgttggggaagataatgacggtacccaacaaggaagtgacggctaactacgtgccagcagccgcggtaaaacgtaggtcacaagcgttgtccggaattactgggtgtaaagggagcgcaggcgggaagacaagttggaagtgaaatctatgggctcaacccataaactgctttcaaaactgtttttcttgagtagtgcagaggtaggcggaattcccggtgtagcggtggaatgcgtagatatcgggaggaacaccagtggcgaaggcggcctactgggcaccaactgacgctgaggctcgaaagtgtgggtagcaaacaggattagataccctggtagtccacaccgtaaacgatgattactaggtgttggaggattgaccccttcagtgccgcagttaacacaataagtaatccacctggggagtacgaccgcaaggttgaaactcaaaggaattgacgggggcccgcacaagcagtggagtatgtggtttaattcgaagcaacgcgaagaaccttaccaggtcttgacatcccgatgaccggttcagagatgagccttttcttcggaacatcggtgacaggtggtgcatggttgtcgttagctcgtgtcgtgagatgttgggttaagtcccgcaacgagcgcaacccttacggttagttgatacgcaagatcactctagccggactgccgttgacaaaacggaggaaggtggggacgacgtcaaatcatcatgccccttatgacctgggctacacacgtactacaatggcagtcatacagagggaagcaaaaccgcgaggtggagcaaatccctaaaagctgtcccagttcagattgcaggctgcaacccgcctgcatgaagtcggaattgctagtaatcgcggatcagcatgccgcggtgaatacgttcccgggccttgcacacaccgcccgtca

SEQ ID NO: 273 - DNA, 1389 bp, Artificial Sequence
  Synthetic polymer
ttcgcccttagagtttgatcctggctcaggacgaacgctggcggcgtgcctagcacatgcaagtcgaacggacgaggaggagcttgcttctccaagtcagtggcggacgggtgagtaacgcgtgagtaacctgcccttcagagggggataacgtctggaaacggacgctaataccgcatgacatatttccatcgcatggtggagatatcaaaggagcaatccgctgaaggatggactcgcgtccgattagatagttggcggggtaacggcccaccaagtcgacgatcggtagccggactgagaggttgaacggccacattgggactgagacacggcccagactcctacgggaggcagcagtgggggatattgcacaatgggcgaaagcctgatgcagcaacgccgcgtgagggaagacggttttcggattgtaaacctctgttctaagtgacgaacaaatgacggtagcttaggagaaagccccggctaactacgtgccagcagccgcggtaatacgtagggggcaagcgttgtccggaattactgggtgtaaagggagcgcaggcggagaagcaagtcagtggtgaaaacgatgggcttaactcatcgactgccattgaaactgtttcccttgagtgaagtagaggcaggcggaattccgagtgtagcggtgaaatgcgtagatattcggaggaacaccagtggcgaaggcggcctgctgggctttaactgacgctgaggctcgaaagtgtggggagcaaacaggattagataccctggtagtccacactgtaaacgatgaatactaggtgtcgggtggcaaagccattcggtgccgcagcaaacgcaataagtattccacctggggagtacgttcgcaagaatgaaactcaaaggaattgacggggacccgcacaagcggtggagcatgtggtttaattcgaagcaacgcgaagaaccttaccaagtcttgacatccctctgaccggcccgtaacggggccttcccttcggggcagaggagacaggtggtgcatggttgtcgtcagctcgtgtcgtgagatgttgggttaagtcccgcaacgagcgcaacccctatccttagtagccagcaggtagagctgggcactctagggagactgccggggataacccggaggaaggcggggacgacgtcaaatcatcatgccccttatgatttgggctacacacgtgctacaatggcgtaaacaaagggaagcgagacagcgatgttgagcaaatcccaaaaataacgtcccagttcggactgcagtctgcaactcgactgcacgaagctggaatcgctagtaatcgcgaatcagaatgtcgcggtgaatacgttcccgggtcttgcactcaccgcccgtca

SEQ ID NO: 274 - DNA, 1376 bp, Artificial Sequence
  Synthetic polymer
agagtttgatcctggctcaggacgaacgctggcggcgtgcctaacacatgcaagtcgagcgagtcaatctccttcgggagtgaagctagcggcggacgggtgagtaacacgtgggcaacctgcctcatagaggggaatagccttccgaaaggaagattaataccgcataagattgcagcttcgcatgaagtagcaattaaaggagcaatccgctatgagatgggcccgcggcgcaatagctagttggtgaggtaacggctcaccaaggcgacgatgcgtagccgacctgagagggtgatcggccacattgggactgagacacggcccagactcctacgggaggcagcagtggggaatattgcacaatgggggaaaccctgatgcagcaacgccgcgtgagtgatgacggccttcgggttgtaaagctctgtcttcagggaagaaaatgacggtacctgactaagaagcaccggctaactacgtgccagcagccgcggtaatacgtagggggctagcgttatccggatttactgggtgtaaagggagcgtagacggagtggcaagtctgatgtgaaaacccagggcttaaccctgggactgcattggaaactgtctggctcgagtgccggagaggtaagcggaattcctagtgtagcggtgaaatgcgtagatattaggaggaacaccagtggcgaaggcggcttgctggacgatgactgacgttgaggctcgaaagcgtggggagcaaacaggattagataccctggtagtccacgccgtaaacgatgactgctaggtgtcgggtggcaaagccattcggtgccgcagctaacgcaataagcagtccacctggggagtacgttcgcaagaatgaaactcaaaggaattgacggggacccgcacaagcggtggagcatgtggtttaattcgaagcaacgcgaagaaccttacctgatcttgacatcccgatgaccgcttcgtaatggaagcttttcttcggaacatcggtgacaggtggtgcatggttgtcgtcagctcgtgtcgtgagatgttgggttaagtcccgcaacgagcgcaacccctatcttcagtagccagcaggttaagctgggcactctggagagactgccagggataacctggaggaaggtggggatgacgtcaaatcatcatgccccttatgacttgggctacacacgtgctacaatggcgtaaacaaagggaagcaaagctgtgaagccgagcaaatctcaaaaataacgtctcagttcggactgtagtctgcaacccgactacacgaagctggaatcgctagtaatcgcagatcagaatgctgcggtgaatacgttcccgggtcttgtactcaccgcccgtca

SEQ ID NO: 275 - DNA, 1377 bp, Artificial Sequence
  Synthetic polymer
agagtttgatcctggctcaggacgaacgctggcggcgcgcctaacacatgcaagtcgaacgagcgagagagagcttgctttcttgagcgagtggcgaacgggtgagtaacgcgtgaggaacctgcctcaaagagggggacaacagttggaaacgactgctaataccgcataagcccacaggtcggcatcgaccagagggaaaaggagcaatccgctttgagatggcctcgcgtccgattagctagttggtgaggtaatggcccaccaaggcaacgatcggtagccggactgagaggttgaacggccacattgggactgagacacggcccagactcctacgggaggcagcagtggggaatattgcacaatgggggaaaccctgatgcagcgacgccgcgtggaggaagaaggtcttcggattgtaaactcctgttgttgaggaagataatgacggtactcaacaaggaagtgacggctaactacgtgccagcagccgcggtaaaacgtaggtcacaagcgttgtccggaattactgggtgtaaagggagcgcaggcgggaagataagttggaagtgaaatctatgggctcaacccataaactgctttcaaaactgtttttcttgagtagtgcagaggtaggcggaattcccggtgtagcggtggaatgcgtagatatcgggaggaacaccagtggcgaaggcggcctactgggcaccaactgacgctgaggctcgaaagtgtgggtagcaaacaggattagataccctggtagtccacaccgtaaacgatgattactaggtgttggaggattgaccccttcagtgccgcagttaacacaataagcattccgcctggggagtacggccgcaaggttgaaactcaaaggaattgacgggggcccgcacaagcagcggagcatgtggtttaattcgacgcaacgcgaagaaccttaccaggtcttgacatccacttaaagccatagagatatggtgtgagcttgctcgaagtgagacaggtggtgcatggttgtcgtcagctcgtgtcgtgagatgttgggttaagtcccgcaacgagcgcaacccttgctgatagttactaacgtgtaaagacgaggactctatcaggactgccggggacaactcggaggaaggtggggacgacgtcaaatcatcatgccccttatgacctgggctacacacgtgctacaatggccgttacaaagagaagcgaggctgtaaagcggagcagatctcaaaaaagcggtctcagttcggattgtgggctgcaacccgcccacatgaagtcggagttgctagtaatcgcggatcagcatgccgcggtgaatacgttcccgggccttgtacacaccgcccgtca

SEQ ID NO: 276 - DNA, 1395 bp, Artificial Sequence
  Synthetic polymer
agagtttgatcctggctcaggatgaacgctggcggcgtgcctaacacatgcaagtcgaacggaacttctttgacagaattctacggaaggaagttgattaagtttagtggcggacgggtgagtaacgcgtgagtaacctgcctttgagaggggaataacttcccgaaagggatgctaataccgcatgacgcatatttatcgcatggtagatatgccaaagatttatcgctcaaagatggactcgcgtccgattagccagttggcggggtaacggcccaccaaagcgacgatcggtagccggactgagaggttgaacggccacattgggactgagacacggcccagactcctacgggaggcagcagtgggggatattgcgcaatgggggaaaccctgacgcagcaacgccgcgtgaaggatgaaggttttcggattgtaaacttcttttatttaggacgaagaatgacggtactaaatgaataagctccggctaactacgtgccagcagccgcggtaatacgtagggagcaagcgttatccggatttactgggtgtaaagggtgcgtaggcggcttggtaagtcagatgtgaaatgtatgggctcaaccccgggactgcattggaaactgcccgtcttgagtgccggagaggtaagcggaattcctagtgtagcggtgaaatgcgtagatattaggaggaacaccagtggcgaaggcggcttactggacggtaactgacgttgaggctcgaaagcgtggggagcaaacaggattagataccctggtagtccacgccgtaaacgatgaatactaggtgtgggggagcatggcttcttcggtgcggtcgcaaacgcagtaagtatccaacctgggagtacgtcgcaaagaatgaaactcaaaggaattgacggggcacccgcaccagcggtgggagcatgtgttttattcgaaagcaacgcgaagacccttacccaagtcttgacatccctctgaccgactcttaaccgagtctttccttcgggacagaggagacaggtggtgcatggttgtcgtcagctcgtgtcgtgagatgttgggttaagtcccgcaacgagcgcaacccctatcctcagtagccagcatttaaggtgggcactctgtggagactgccagggataacctggaggaaggcggggatgacgtcaaatcatcatgccccttatgatttgggctacacacgtgctacaatggcgtaaacaaagggaagcgagatcgtgagatggagcaaatcccaaaaataacgtcccagttcggactgtagtctgcaacccgactacacgaagctggaatcgctagtaatcgtggatcagaatgccgcggtgaatacgttcccgggtcttgcacacaccgcccgtca

SEQ ID NO: 277 - DNA, 1365 bp, Artificial Sequence
  Synthetic polymer
agagtttgatcctggctcaggacgaacgctggcggcacgcttaacacatgcaagtcgaacggagaacattgagcttgcttaatgttcttagtggcggacgggtgagtaacacgtgagtaacctgcctctgagagtggaatagcttctggaaacagatggtaataccgcataacatcatggattcgcatgtttctatgatcaaagatttatcgcttagagatggactcgcgtctgattagctagttggtaaggtaacggcttaccaaggcgacgatcagtagccggactgagaggttgatcggccacattgggactgagacacggcccagactcctacgggaggcagcagtggggaatattgcacaatggggggaaccctgatgcagcgatgccgcgtggaggaagaaggttttcggattgtaaactcctgttgaagaggacgataatgacggtactcttttagaaagctccggctaactacgtgccagcagccgcggtaatacgtagggagcgagcgttgtccggaattactgggtgtaaagggagcgtaggcgggatggcaagtcagatgtgaaaactatgggctcaacccatagactgcatttgaaactgttgttcttgagtgaggtagaggtaagcggaattcctggtgtagcggtgaaatgcgtagatattaggaggaacaccagtggcgaaggcgacgatctggcgcataactgacgctcagtcccgaaagcgtggggagcaaataggattagataccctagtagtccacgccgtaaacgatgagtactaagtgttgggggtcaaacctcagtgctgcagttaacgcaataagtactccgcctgagtagtacgaccgcaaggttgaaactcaaaggaattgacgggggcccgcacaagcagtggagtatgtggtttaattcgacgcaacgcgaagaaccttaccaggtcttgacatcgagtgacgtacctagagataggtattttcttcggaacacaaagacaggtggtgcatggttgtcgtcagctcgtgtcgtgagatgttgggttaagtcccgcaacgagcgcaacccttaccattagttgctacgcaagagcactctaatgggactgccgttgacaaaacggaggaaggtggggatgacgtcaaatcatcatgccccttatgacctgggctacacacgtactacaatggcaatataacagagggaagcaatacagcgatgtggagcaaatccccaaaaattgtcccagttcagattgcaggctgcaactcgcctgcatgaagtcggaattgctagtaatcgcagatcagcatgctgcggtgaatacgatcccgggccttgtacacaccgcccgtca

SEQ ID NO: 278 - DNA, 1360 bp, Artificial Sequence
  Synthetic polymer
aggatgaacgctggcggcgtgcttaacacatgcaagtcgaacggacgatgaagagcttgcttttcagagttagtggcggacgggtgagtaacgcgtgggtaacctgcctcatacagggggatagcagctggaaacggctgataaaaccgcataagcgcacagcatcgcatgatgcagtgtgaaaaactccggtggtatgagatggacccgcgtctgattagctggttggtgaggtaacggcccaccaaggcgacgatcagtagccggcctgagagggtgaccggccacattgggactgagacacggcccaaactcctacgggaggcagcagtggggaatattgcacaatgggggaaaccctgatgcagcgacgccgcgtgaaggaagaagtatctcggtatgtaaacttctatcagcagggaagataatgacggtacctgactaagaagccccggctaactacgtgccagcagccgcggtaatacgtagggggcaagcgttatccggatttactgggtgtaaagggagcgtaggcggcggagcaagtcagaagtgaaagcccggggctcaaccccgggacggcttttgaaactgccctgcttgatttcaggagaggtaagcggaattcctagtgtagcggtgaaatgcgtagatattaggaggaacaccagtggcgaaggcggcttactggactgacaatgacgctgaggctcgaaagcgtggggagcaaacaggattagataccctggtagtccacgccgtaaacgatgaatactaggtgtcggggctcataagagcttcggtgccgcagcaaacgcaataagtattccacctggggagtacgttcgcaagaatgaaactcaaaggaattgacggggacccgcacaagcggtggagcatgtggtttaattcgaagcaacgcgaagaaccttaccaggccttgacatcccggtgaccgtcccgtaatggggacctctcttcggagcaccggtgacaggtggtgcatggttgtcgtcagctcgtgtcgtgagatgttgggttaagtcccgcaacgagcgcaacccctatgttcagtagccagcaggtaaagctgggcactctggacagactgccggggataacccggaggaaggcggggatgacgtcaaatcatcatgccctttatgacttgggctacacacgtactacaatggcgttaaacaaagagaagcaagaccgcgaggtggagcaaaactcagaaacaacgtcccagttcggactgcaggctgcaactcgcctgcacgaagtcggaattgctagtaatcgtggatcagcatgccacggtgaatacgttcccgggccttgcactcaccgcccgtca

SEQ ID NO: 279 - DNA, 1326 bp, Artificial Sequence
  Synthetic polymer
gagtggcggacgggtgagtaacgcgtgggtawccysccctstacrgggggayaacagttgraaacggctgctaataccgcataagcgcacgagaggacatcctcttgtgtgaaaaactccggtggtacaggatgggcccgcgtctgattagctggttggcagggtaacggcctaccaaggcgacgatcagtagccggtctgagaggatgaacggccacattggaactgagacacggtccaaactcctacgggaggcagcagtggggaatattgcacaatgggggaaaccctgatgcagcaacgccgcgtgagtgaagaagtatttcggtatgtaaagctctatcagcagggaagataatgacggtacctgtctaagaagctccggctaaatacgtgccagcagccgcggtaatacgtatggagcaagcgttatccggatttactgggtgtaaagggtgcgtaggtggcagtgcaagtcagatgtgaaaggccggggctcaaccccggagctgcatttgaaactgcatagctggagtacaggagaggcaggcggaattcctagtgtagcggtgaaatgcgtagatattaggaggaacaccagtggcgaaggcggcctgctggactgttactgacactgaggcacgaaagcgtggggagcaaacaggattagataccctggtagtccacgccgtaaacgatgaatactaggtgtcggggccgtataggcttcggtgccgtcgcaaacgcagtaagtattccacctggggagtacgttcgcaagaatgaaactcaaaggaattgacggggacccgcacaagcggtggagcatgtggtttaattcgaagcaacgcgaagaaccttacctggtcttgacatccttctgaccgactcttaaccgagtctttccttcgggacaggagtgacaggtggtgcatggttgtcgtcagctcgtgtcgtgagatgttgggttaagtcccgcaacgagcgcaacccctatctttagtagccagcatttaaggtgggcactctagagagactgccagggataacctggaggaaggtggggacgacgtcaaatcatcatgccccttatgaccagggctacacacgtgctacaatggcgtaaacagagggaagcagcctcgtgagagtgagcaaatcccaaaaataacgtctcagttcggattgtagtctgcaactcgactacatgaagctggaatcgctagtaatcgcgaatcagaatgtcgcggtgaatacgttcccgggtcttgtacacaccgcccgtcacaccatgggagtcagtaacgcccgaagtcagtgacccaa

SEQ ID NO: 280 - DNA, 1371 bp, Artificial Sequence
  Synthetic polymer
agagtttgatcctggctcaggatgaattttggccgcccgcctaatacttgccagtcgaacggcacccctctcctgagggaagcgagtggagaacggctgattaacacggggagaacctgccccctcccccgggacagccgcccgaaaggacgggtaataccagatacccccggggtgctgcatggcaccccggcttaaagccccgacgggaggggatggctccgcggcccatcaggtagacggcggggtgacggcccaccgtgccgacaacgggtagccgggttgagagaccgaccggccagattgggactgagacacggcccagactcctacgggaggcagcagtggggaatcttgcgcaatggggggaaccctgacgcagcgacgccgcgtgcgggacggaggccttcgggtcgtaaaccgctttcagcagggaagagtcaagactgtacctgcagaagaagccccggctaactacgtgccagcagccgcggtaatacgtagggggcgagcgttatccggattcattgggcgtaaagcgcgcgtaggcggcccggcaggccgggggtcgaagcggggggctcaaccccccgaagcccccggaacctccgcggcttgggtccggtaggggagggtggaacacccggtgtagcggtggaatgcgcagatatcgggtggaacaccggtggcgaaggcggccctctgggccgagaccgacgctgaggcgcgaaagctgggggagcgaacaggattagataccctggtagtcccagccgtaaacgatggacactaggtgtggggggacggatcccctccgttccgcagccaacgcattaagagtttccgcctggggagtacgcccgcaaggttaaaactcaaaggaattgacgggggcccgcacacgcggcggaacatgtggtttaatttgaagcaacgggaagagccttaccagggcttgacatatggtgtgaagcgggggagaccccgtggccgagaggagcccatacaggtggtgcatggctgtcgtctgctcgtgtcgtgagatgttgggttaagtcccgcaacgagcgcaacccccgccgcgtgttgccatcgggtgatgccgggaacccacgcgggaccgccgccgtcaaggcggaggagggcggggacgacgtcaagtcatcatgccccttatgccctgggctgcacacgtgctacaatggccggtacagagggatgccaccccgcgagggggagcggatcccggaaagccggccccagttcggattgggggctgcaacccgcccccatgaagtcggagttgctagtaatcgcggatcagcatgccgcggtgaatgcgttcccgggccttgcacacaccgcccgtca

SEQ ID NO: 281 - DNA, 1355 bp, Artificial Sequence
  Synthetic polymer
agagttttatcctggctcaggatgaacgctggcggcgtgcttaacacatgcaagtcgagcgaagcactctgctttgattctttcgggatgaagagcattgtgactgagcggcggacgggtgagtaacgcgtgggtaacctgcctcatacagggggataacagttagaaatggctgctaataccgcataagaccacagcaccgcatggtgcaggggtaaaaactccggtggtatgagatggacccgcgtctgattagctagttggtggggtaacggcctaccaaggcgacgatcagtagccgacctgagagggtgaccggccacattgggactgagacacggcccaaactcctacgggaggcagcagtggggaatattgcacaatgggggaaaccctgatgcagcaacgccgcgtgagtgaagaagtatttcggtatgtaaagctctatcagcagggaagataatgacggtacctgactaagaagctccggctaaatacgtgccagcagccgcggtaatacgtatggagcaagcgttatccggatttactgggtgtaaagggtgcgtaggtggcagtgcaagtcagatgtgaaaggccggggctcaaccccggagctgcatttgaaactgcatagctggagtacaggagaggcaggcggaattcctagtgtagcggtgaaatgcgtagatattaggaggaacaccagtggcgaaggcggcctgctggactgttactgacactgaggcacgaaagcgtggggagcaaacaggattagataccctggtagtccacgccgtaaacgatgaatactaggtgtcggggccgtataggctccggtgccgccgctaacgcagtaagtattccacctggggagtacgttcgcaagaatgaaactcaaaggaattgacggggacccgcacaagcggtggagcatgtggtttaattcgaagcaacgcgaagaaccttaccaggtcttgacatccttctgaccgcaccttaatcggtgctttccttcgggacagaagagacaggtggtgcatggttgtcgtcagctcgtgtcgtgagatgttgggttaagtcccgcaacgagcgcaacccttatggtcagttactacgcaagaggactctggccagactgccgttgacaaaacggaggaaggtggggatgacgtcaaatcatcatgccctttatgacttgggctacacacgtactacaatggcgtaaacaaagggaagcaaagctgtgaagccgagcaaatctcaaaaataacgtctcagttcggacagtagtctgcaacccgactacacgaagctggaatcgctagtaatcgcagatcagaatgctgcggtgaata

SEQ ID NO: 282 - DNA, 1389 bp, Artificial Sequence
  Synthetic polymer
agagtttgatcctggctcaggatgaacgctggcggcgtgcttaacacatgcaagtcgaacgggaattattttattgaaacttcggtcgatttaatttaattctagtggcggacgggtgagtaacgcgtgggtagcctgccttatacagggggataacagtcagaaatgactgctaataccgcataagcgcacagagctgcatggctcggtgtgaaaaactccggtggtataagatggacccgcgttggattagctagttggtgaggtaacggcccaccaaggcgacgatccatagccggcctgagagggtgaacggccacattgggactgagacacggcccagactcctacgggaggcagcagtggggaatattgcacaatgggggaaaccctgatgcagcgacgccgcgtgaaggatgaagtatttcggtatgtaaacttctatcagcagggaagaaaatgacggtacctgactaagaagccccggctaactacgtgccagcagccgcggtaatacgtagggggcaagcgttatccggatttactgggtgtaaagggagcgtagacggcacggcaagccagatgtgaaagcccggggctcaaccccgggactgcatttggaactgctgagctagagtgtcggagaggcaagtggaattcctagtgtagcggtgaaatgcgtagatattaggaggaacaccagtggcgaaggcggcttgctggacgatgactgacgttgaggctcgaaagcgtggggagcaaacaggattagataccctggtagtccacgccgtaaacgatgactgctaggtgtcgggtggcaaagccattcggtgccgcagctaacgcaataagcagtccacctggggagtacgttcgcaagaatgaaactcaaaggaattgacggggacccgcacaagcggtggagcatgtggtttaattcgaagcaacgcgaagaaccttaccaagtcttgacatccgcctgaccgatccttaaccggatctttccttcgggacaggcgagacaggtggtgcatggttgtcgtcagctcgtgtcgtgagatgttgggttaagtcccgcaacgagcgcaacccctatcctcagtagccagcatttaaggtgggcactctggggagactgccagggataacctggaggaaggcggggatgacgtcaaatcatcatgccccttatgatttgggctacacacgtgctacaatggcgtaaacaaagggaagcgagattgtgagatggagcaaatcccaaaaataacgtcccagttcggactgtagtctgcaacccgactacacgaagctggaatcgctagtaatcgcggatcagaatgccgcggtgaatacgttcccgggtcttgcacacacagcccgtca

SEQ ID NO: 283 - DNA, 1391 bp, Artificial Sequence
  Synthetic polymer
agagtttgatcctggctcaggatgaacgctggcggcgtgcttaacacatgcaagtcgaacgaaacaccttatttgattttcttcggaactgaagatttggtgattgagtggcggacgggtgagtaacgcgtgggtaacctgccctgtacagggggataacagtcagaaatgactgctaataccgcataagaccgcagcaccgcatggtgcaggggtaaaaactccggtggtacaggatggacccgcgtctgattagctggttggtgaggtaacggctcaccaaggcgacgatcagtagccggcttgagagagtgaacggccacattgggactgagacacggcccaaactcctacgggaggcagcagtggggaatattgcacaatggggggaaccctgatgcagcgacgccgcgtgagtgaagaagtatctcggtatgtaaagctctatcagcagggaagaaaatgacggtacctgactaagaagccccggctaactacgtgccagcagccgcggtaatacgtagggggcaagcgttatccggaattactgggtgtaaagggtgcgtaggtggcatggcaagtcagaagtgaaaacccagggcttaactctgggactgcttttgaaactgtcagactagagtgcaggagaggtaagcggaattcctagtgtagcggtgaaatgcgtagatattaggaggaacatcagtggcgaaggcggcttactggactgaaactgacactgaggcacgaaagcgtggggagcaaacaggattagataccctggtagtccacgccgtaaacgatgaatactaggtgtcggggccgtagaggcttcggtgccgcagccaacgcagtaagtattccacctggggagtacgttcgcaagaatgaaactcaaaggaattgacggggacccgcacaagcggtggagcatgtggtttaattcgaagcaacgcgaagaaccttaccagtccttgacatccaactgaccgaccagtaacgtggtcttctcttcggagcagttgagacaggtggtgcatggttgtcgtcagctcgtgtcgtgagatgttgggttaagtcccgcaacgagcgcaacccctatccttagtagccagcagtaagatgggaactctggggagactgccggggataacccggaggaaggtggggacgacgtcaaatcatcatgccccttatgggctgggctacacacgtgctacaatggtgctaacagagtgaggcgagactgtgaggttaagcaaatcacaaaaatggcatctcagttcggattgtagtctgcaactcgactacatgaagctggaatcgctagtaatcgcagatcagaatgctgcggtgaatacgttcccgggtcttgcacacaccgcccgtca

SEQ ID NO: 284 - DNA, 1397 bp, Artificial Sequence
  Synthetic polymer
agagtttgatcctggctcaggatgaacgctggcggcgtgcctaacacatgcaagtcgaacgaagcaccttttgagattcttcggatgatcgatcggtgactgagtggcggacgggtgagtaacgcgtgggtaacctgccctgtacagggggataacagctggaaacggctgctaataccgcataagcgcacgaggagacatctcctagtgtgaaaaactccggtggtacaggatgggcccgcgtctgattagctggttggcagggtaacggcctaccaaggcaacgatcagtagccggtctgagaggatgaacggccacattggaactgagacacggtccaaactcctacgggaggcagcagtggggaatattgcacaatgggggaaaccctgatgcagcaacgccgcgtgagtgaagaagtatttcggtatgtaaagctctatcagcagggaagataatgacggtacctgactaagaagctccggctaaatacgtgccagcagccgcggtaatacgtatggagcaagcgttatccggatttactgggtgtaaagggtgcgtaggtggcagtgcaagtcagatgtgaaaggccggggctcaaccccggagctgcatttgaaactgctcggctagagtacaggagaggcaggcggaattcctagtgtagcggtgaaatgcgtagatattaggaggaacaccagtggcgaaggcggcctgctggactgttactgacgctgaggcgcgaaagcgtggggagcgaacgggattagataccccggtagtccacgctgtaaacgatgggtaataggtgtaggaagtatcgaccccttctgtgcccggagttaacgcaataagtacccccgcctgggggagtacggccgcaaggttgaaactcaaaggaattgacggggacccgcacaagcggtggagcatgtggtttaattcgaagcaacgcgaagaaccttaacagggcttgacatcttccgaaaagcatagagatatgtaatgtgtcccttcggggataacggaaagacaggtggtgcatggttgtggtcagctcgtgtcgtgagatgttgggttaagtcccgcaacgagcgcaacccctacgtctagttgccatcattaagttgggcactctagaggaactgccggcgacaaaccggaggaaggtggggatgacgtcaaatcatcatgccccttatgtcctgggctacacacgtgctccaatggacggtacagagggttgccaagccgtgaggtggagctaatcccaaaaaaccattctcagttcggattgtagtctgcaactcgactacatgaagtcggaatcgctagtaatcgcgagtcagcatatcgcggtgaatacgttcccgggtcttgcactcaccgcccgtca

SEQ ID NO: 285 - DNA, 1393 bp, Artificial Sequence
  Synthetic polymer
atcctggctcaggatgaacgctagctacaggcttaacacatgcaagtcgaggggcagcattttagtttgcttgcaaactaaagatggcgaccggcgcacgggtgagtaacacgtatccaacctgccgataactcggggatagcctttcgaaagaaagattaatatccgatggtatattaaaaccgcatggttttactattaaagaatttcggttatcgatgggatgcgttccattagtttgttggcggggtaacggcccaccaagactacgatggataggggttctgagaggaaggtcccccacattggaactgagacacggtccaaactcctacggggggcagcagtgaggaatattggtcaatggacgagagtctgaaccagccaagtagcgtgaaggatgactgccctatgggttgtaaacttcttttatatgggaataaagtattccacgtgtgggattttgtatgtaccatatgaataaggatcggctaactccgtgccagcagccgcggtaatacggaggatgcgagcgttatccggatttattgggtttaaagggtgcgtaggcggcacgccaagtcagcggtgaaatttccgggctcaacccggagtgtgccgttgaaactggcgagctagagtacacaagaggcaggcggaatgcgtggtgtagcggtgaaatgcatagatatcacgcagaaccccgattgcgaaggcagcctgctagggtgaaacagacgctgaggcacgaaagcgtgggtatcgaacaggattagataccctggtagtccacgcagtaaacgatgaataactaactgtttgcgatacaatgtaagcggtacagcgaaagcgttaagtattccacctggggagtacgccggcaacggtgaaactcaaaggaatttgacgggggcccgcacaaagcggaggaacatgtggtttaattcgatgatacgcgaggaaccttacccgggctcaaacgcagggggaatgtcggtgaaagccggcagctagtaatagtcacctgcgaggtgctgcatggttgtcgtcagctcgtgccgtgaggtgtcggcttaagtgccataacgagcgcaacccctatcgacagttactaacgggtgaagccgaggactctgtcgagactgccggcgcaagccgcgaggaaggtggggatgacgtcaaatcagcacggcccttacgtccggggcgacacacgtgttacaatggcaggtacagaaggcagccagtcagcaatgacgcgcgaatcccgaaaacctgtctcagttcggattggagtctgcaacccgactccataaagctggattcgctagtaatcgcgcatcagccatggcgcggtgaatacgttcccgggccttgcactcaccgcccgtca

SEQ ID NO: 286 - DNA, 1388 bp, Artificial Sequence
  Synthetic polymer
agagtttgatcctggctcaggatgattgctggcggcgtgcctaacacatgcaagtcgaacggagttcttaaggaatgcgacttcggtcaaatgacttttgaacttagtggcggacgggtgagtaacgcgtgagcaacctgcctttcagagggggataacatttggaaacagatgctaataccgcataagattacagtaccgcatgatacagtgatcaaaggagcaatccgctgaaagatgggctcgcgtctgattagatagttggcggggtaacggcccaccaagtcgacgatcagtagccggactgagaggttgaacggccacattgggactgagacacggcccaaactcctacgggaggcagcagtgggggatattggacaatgggggcaaccctgatccagcgacgccgcgtgagggaagaaggttttcggattgtaaacctctgttgacggagaaaaaaatgatggtatccgtttagaaagccacggctaactacgtgccagcagccgcggtaatacgtaggtggcaagcgttgtccggaattactgggtgtaaagggagtgtaggcgggatatcaagtcagaagtgaaaattacgggctcaactcgtaacctgcttttgaaactgacattcttgagtgaagtagaggcaagcggaattcctagtgtagcggtgaaatgcgtagatattaggaggaacaccagtggcgaaggcggcttgctgggcttttactgacgctgaggctcgaaagcgtggggagcaaacaggattagataccctggtagtccacgccgtaaacgatgattactagatgtggggggattgaccccttccgtgccggagtaaacaacaataagtaatccacctggggagtacgaccgcaaggttgaaactcaaaggaattgacgggggcccgcacaagcagtggagtatgtggtttaattcgacgcaacgcgaagaaccttaccaggtcttgacatccgatgcatagtgcagagatgcatgaagtccttcgggacatcgagacaggtggtgcatggttgtcgtcagcttgtgtcgtgagatgttgggttaagtcccgcaacgagcgcaacccttattgccagttactacgcaagaggactctggcgagactgccgttgacaaaacggaggaaggtggggatgacgtcaaatcatcatgccctttatgacctgggctacacacgtactacaatggcgtttaacaaagagaagcaagaccgcgaggtggagcaaaactcaaaaacaacgtctcagttcagattgcaggctgcaactcgcctgcatgaagtcggaattgctagtaatcgcggatcagcatgccgcggtgaatacgttcccgggccttgcactcaccgcccgtca

SEQ ID NO: 287 - DNA, 1375 bp, Artificial Sequence
  Synthetic polymer
agagtttgatcctggctcaggacgaacgctggcggcgcgcctaacacatgcaagtcgaacggtgaagaggagcttgctcctcggatcagtggcggacgggtgagtaacacgtgagcaacctggctctaagagggggacaacagttggaaacgactgctaataccgcataacgtatcgggatggcatctttctgataccaaagattttatcgcttagagatgggctcgcgtctgattagatagttggcggggtaacggcccaccaagttgacgatcagtagccggactgagaggttgaacggccacattgggactgagacacggcccagactcctacgggaggcagcagtgggggatattggacaatgggggcaaccctgatccagcgacgccgcgtgagggaagaaggttttcggattgtaaacctctgttgacggagaaaaaaatgatggtatccgtttagaaagccacggctaactacgtgccagcagccgcggtaatacgtaggtggcaagcgttgtccggaattactgggtgtaaagggagtgtaggcgggatatcaagtcagaagtgaaaattacgggctcaactcgtaacctgcttttgaaactgacgttcttgagtgaagtagaggcaagcggaattcctagtgtagcggtgaaatgcgtagatattaggaggaacaccagtggcgaaggcggcttgctgggcttttactgacgctgaggctcgaaagcgtggggagcaaacaggattagataccctggtagtccacgccgtaaacgatgattactaagtgtggggggattgactcttttggtgccggtgtaaacacaaataagaaatcccacttggggagtacgaccgcagggttgaaactcaaatgaattgatgggggcccgcacaagcagtggaagtatgttggtttaattcgacgcaacgcgaagatccttcccagggcttgacatcttactaaagaagtagagatacttcaggtgcccttcggggaaagaagagacaggtggtgcatggttgtggtcagctcgtgtcgtgagatgttgggttaagtcccgcaacgagcgcaacccttattgttagttgctacgcaagagcactctagcgagactgccgttgacaaaccggaggaaggtggggacgacgtcaaatcatcatgccccttatgtcctgggctacacacgtaatacaatggcgttcaacagagggaagcaaaaccgcgaggtggagcaaatccccaaaaagcgtctcagttcggaatgcaggctgcaacccgcctgcatgaagtcggaattgctagtaatcgcggatcagcatgccgcggtgaataaaatcccgggccttgtacacaccgcccgtca

SEQ ID NO: 288 - DNA, 1383 bp, Artificial Sequence
  Synthetic polymer
agagtttgatcctggctcaggatgaacgctggcggcgtgcctaacacatgcaagtcgaacggaatttacatgaagcctagcgattgtaaatttagtggcggacgggtgagtaacgcgtgggtaacctgccttgtactgggggacaacagttggaaacgactgctaataccgcataagcgcacagcttcgcatgaagcagtgtgaaaaactccggtggtacaagatggacccgcgtctgattagctggttggtgaggtaacggcccaccaaggcgacgatcagtagccggcctgagagggtgaacggccacattgggactgagacacggcccaaactcctacgggaggcagcagtggggaatattgggcaatggacgcaagtctgacccagcaacgccgcgtgaaggaagaaggctttcgggttgtaaacttcttttgtcagggaagagcagaagacggtacctgacgaataagccacggctaactacgtgccagcagccgcggtaatacgtaggtggcaagcgttgtccggatttactgggtgtaaagggcgtgcagccgggccggcaagtcagatgtgaaatccacgagcttaactcgtgaactgcatttgaaactgttggtcttgagtatcggagaggtaatcggaattccttgtgtagcggtgaaatgcgtagatataaggaagaacaccagtggcgaaggcggattactggacgacaactgacggtgaggcgcgaaagcgtggggagcaaacaggattagataccctggtagtccacgctgtaaacgatggatactaggtgtgcggggactgaccccctgcgtgccgcagttaacacaataagtatcccacctggggagtacgatcgcaaggttgaaactcaaaggaattgacgggggcccgcacaagcggtggattatgtggtttaattcgaagcaacgcgaagaaccttaccaggacttgacatcctactaacgaagtagagatacatcaggtgcccttcggggaaagtagagacaggtggtgcatggttgtcgtcagctcgtgtcgtgagatgttgggttaagtcccgcaacgagcgcaacccttatctttagtagccagcagtaagatgggcactctagagagactgccggggataacccggaggaaggtggggatgacgtcaaatcatcatgccccttatgaccagggctacacacatgctacaatggcgtaaacaaagagaagcgaagtcgtgaggctgagcgaatctcaaaaataacgtctcagttcggattgtagtctgcaactcgactacatgaagctggaatcgctagtaatcgcagatcagaatgctgcggtgaatacgttcccgggtcttgcacacaccgcccgtca

SEQ ID NO: 289 - DNA, 1342 bp, Artificial Sequence
  Synthetic polymer
cgcgcctaacacatgcaagtcgaacggacgatgagagagctcgcttctccaagtcggtggcgaacgggtgagtaacgcgtgagtaacctgcccttcagagggggataacgtctggaaacggacgctaataccgcatgacatatttccatcgcatggtggagatatcaaaggagcaatccgctgaaggatggcctcgcgtctgattagatagttggcggggtaacggcccaccaagtcgacgatcggtagccggactgagaggttgaacggccacattgggactgagacacggcccagactcttacgggaggcagcagtgggggatattgcacaatgggcgaaagcctgatgcagcaacgccgcgtgagggaagacggttttcggattgtaaacctctgttttaagtgacgaacaaatgacggtagcttaggagaaagccccggctaactacgtgccagcagccgcggtaatacgtagggggcaagcgttgtccggaattactgggtgtaaagggagcgcaggcggagaagcaagtcagtggtgaaaacgatgggcttaactcatcgactgccattgaaactgtttcccttgagtgaagtagaggcaggcggaattccgagtgtagcggtgaaatgcgtagatattaggaggaacaccagtggcgaaggcggcctgctggacgacaactgacgctgaggcgcgaaagcgtggggagcaaacaggattagataccctggtagtccacgctgtaaacgatgaatactaggtgtgggaggactgaccccttccgtgccgcagttaacacaataagtattccacctggggagtacgatcgcaagattgaaactcaaaggaattgacgggggcccgcacaagcagtggattatgtggtctaattcgacgcaacgcgaagaaccttaccgggatttgacatcctactaacgaagtagagatacattaggtgcccttcggggaaagtagagacaggtggtgcatggttgtcgtcagctcgtgtcgtgagatgttgggttaagtcccgcaacgagcgcaacccctattgttagttgctacgcaagagcactctagcgagactgccgttgacaaaacggaggaaggcggggacgacgtcaaatcatcatgccccttatgtcccgggctacacacgtaatacaatggcggtcaacagagggaagcaaagccgcgaggcagagcaaacccctaaaagccgtctcagttcggattgcaggctgcaactcgcctgcatgaagttggaattgctagtaattgtggatcagcatgccacggtgaatacgttcccgggccttgcacacaccgcccgtca

SEQ ID NO: 290 - DNA, 1389 bp, Artificial Sequence
  Synthetic polymer
agagtttgatcctggctcaggatgaacgctggcggcgtgcctaacacatgcaagtcgagcgagaagctgatgattgacacttcggttgagagaatcagtggaaagcggcggacgggtgagtaacgcgtgggtaacctgccctgtacagggggataacagttggaaacggctgctaataccgcataagcacacgagaggacatcctcttgtgtgaaaaactccggtggtacaggatgggcccgcgtctgattagctggttggcagggtaacggcctaccaaggcgacgatcagtagccggtctgagaggatgaacggccacattggaactgagacacggtccaaactcctacgggaggcagcagtggggaatattgcacaatgggggaaaccctgatgcagcaacgccgcgtgagtgaagaagtatttcggtatgtaaagctctatcagcagggaagataatgacggtacctgactaagaagctccggctaaatacgtgccagcagccgcggtaatacgtatggagcaagcgttatccggatttactgggtgtaaagggtgcgtaggtggcagtgcaagtcagatgtgaaaggccggggctcaaccccggagctgcatttgaaactgctcggctagagtacaggagaggcaggcggaattcctagtgtagcggtgaaatgcgtagatattaggaggaacaccagtggcgaaggcggcctgctggactgttactgacactgaggcacgaaagcgtggggagcaaacaggattagataccctggtagtccacgccgtaaacgatgaatactaggtgtcggggccgtataggcttcggtgccgtcgcaaacgcagtaagtattccacctggggagtacgttcgcaagaatgaaactcaaaggaattgacggggacccgcacaagcggtggagcatgtggtttaattcgaagcaacgcgaagaaccttaccaagtcttgacatccttctgaccggtacttaaccgtaccttctcttcggagcaggagtgacaggtggtgcatggttgtcgtcagctcgtgtagtgagatgttgggttaagtcccgcaacgagcgcaacccttatctttagtagccagcggtcaggccgggcactctagagagactgccagggataacctggaggaaggcggggatgacgtcaaatcatcatgccccttatgacttgggctacacacgtgctacaatggcgtaaacaaagggaagcaaagctgtgaagccgagcaaatctcaaaaataacgtctcagttcggactgtagtctgcaacccgactacacgaagctggaatcgctagtaatcgcagatcagaatgctgcggtgaatacgatcccgggtcttgcacacaccgcccgtca

SEQ ID NO: 291 - DNA, 1409 bp, Artificial Sequence
  Synthetic polymer
ttcgcccttagagtttgattctggctcaggatgaacgctggcggcgtgcttaacacatgcaagtcgaacggaacgccaaggaaagagttttcggacaatggaattggttgtttagtggcggacgggtgagtaacgcgtgagtaacctgccttggagtggggaataacacagtgaaaactgtgctaataccgcatgacatattagtgtcgcatggcactgatatcaaagatttatcgctctgagatggactcgcgtctgattagatagttggcggggtaacggcccaccaagtcgacgatcagtagccggactgagaggttggccggccacattgggactgagacacggcccagactcctacgggaggcagcagtggggaatattgggcaatgggcgcaagcctgacccagcaacgccgcgtgaaggaagaaggctttcgggttgtaaacttcttttaacagggacgaagtaagtgacggtacctgacgaataagctccggctaactacgtgccagcagccgcggtaatacgtagggagcgagcgttgtccggatttactgggtgtaaagggtgcgtaggcggccgagcaagtcagttgtgaaaactatgggcttaacccataacgtgcaattgaaactgtccggcttgagtgaagtagaggtaggcggaattcccggtgtagcggtgaaatgcgtagagatcgggaggaacaccagtggcgaaggcggcctactgggctttaactgacgctgaggcacgaaagcatgggtagcaaacaggattagataccctggtagtccatgccgtaaacgatgattactaggtgtggggggactgaccccttccgtgccgcagttaacacaataagtaatccacctggggagtacgaccgcaaggttgaaactcaaaggaattgacgggggcccgcacaagcagcggagcatgtggtttaattcgacgcaacgcgaagaaccttaccagggcttgacatcccttgaccgccatggaaacatggtttttggagcttcggttccaacaaggagacaggtggtgcatggttgtcgtcagctcgtgtcgtgagatgttgggttaagtcccgcaacgagcgcaacccctaatttcagttgccagcacgtaaaggtgggaactctgaagtaactgccggtgacaaaccggaggaaggtggggatgacgtcaaatcatcatgccctttatgtcctgggctacacacgtgctacaatggctggtacagagggcagcgaaaccgcgaggtggagcgaatcccaaaaagccagtctcagttcggattgcaggctgcaacccgcctgcatgaagtcggaatcgctagtaatcgcgagtcagcatatcgcggtgaatacgttcccgggtcttgcactcaccgcccgtca

SEQ ID NO: 292 - DNA, 1349 bp, Artificial Sequence
  Synthetic polymer
tggctcaggatgaacgctggcggcgtgcctaacacatgcaagtcgagcgatcttcttccgaagagagcggcggacgggcgagtaacgcgtgggtaacctaccctgtacacacggataacataccgaaaggtatgctaatacgagataatatacttttatcgcatggtagaagtatcaaagcttttgcggtacaggatggacccgcgtctgattagctagttggtaaggtaacggcttaccaaggcgacgatcagtagccgacctgagagggtgatcggccacattggaactgagacacggtccaaactcctacgggaggcagcagtggggaatattgcacaatgggcgaaagcctgatgcagcaacgccgcgtgagcgatgaaggtcttcgggtcgtaaagctctgtcctcaaggaagataatgacggtacttgagggggaagccccggctaactacgtgccagcagccgcggtaatacgtagggggctagcgttatccggaattactgggcgtaaagggtgcgtaggtggtttcttaagtcagaggtgaaaggctacggctcaaccgtagtaagcctttgaaactgggaaacttgagtgcaggagaggagagtggaattcctagtgtagcggtgaaatgcgtagatattaggaggaacaccagttgcgaaggcggctctctggactgtaactgacactgaggcacgaaagcgtggggagcaaacaggatgagataccctggtagtccacgccgtaaacgatgaatacaggggtcgggttgcaaagcaattcggtgccgcagcaaacgcaataagtattccacctggggagtacgttagcaagaatgaaactcaaaggaattgacggggacccgcacaagcggtggagcatgtggtttaattcgaagcaacgcgaagaaccttaccaagtcttgacatccggatgaccggaacttaaccgttccttccctaaaggggcatccgagacaggtggtgcatggttgtcgtcagctcgtgtcgtgagatgttgggttaagtcccgcaacgagcgcaacccctgtccttagtagccagcagtaagatgggcactctagggagactgccggggataacccggaggaaggcggggacgacgtcaaatcatcatgccccttatgatttgggctacacacgtgctacaatggcgtaaacaaagggaagcaagagtgcgagcttgagcaaatcccaaaaataacgtcccagttcggactgcagtctgcaactcgactgcacgaagctggaatcgctagtaatcgcagatcagaatgctgcggtgaatacgttcccgggtcttgcacacaccgcccgtca

SEQ ID NO: 293 - DNA, 1392 bp, Artificial Sequence
  Synthetic polymer
agagtttgatcctggctcaggatgaacgctggcggcgtgcttaacacatgcaagtcgaacggggattattttgacagagacttcggttgaagtcgttataatcctagcggcggacgggtgagtaacgcgtgggtaacctgcctcacactgggggataacagtcagaaatgactgctaataccgcataagcgcacagagctgcatggcttagtgtgaaaaactccggtggtatgagatggacccgcgtctgattagctagttggtggggtaacggcccaccaaggcgacgatcagtagccggcctgagagggtgaacggccacattgggactgagacacggcccaaactcctacgggaggcagcagtggggaatattgcacaatgggggaaaccctgatgcagcgacgccgcgtgaaggatgaagtatttcggtatgtaaacttctatcagcagggaagaaaatgacggtacctgactaagaagccccggctaactacgtgccagcagccgcggtaatacgtagggggcaagcgttatccggatttactgggtgtaaagggagcgtagacggcagtgcaagtctgaagtgaaagcccggggctcaaccccgggactgctttggaaactgtgcagctagagtgtcggagaggtaagcggaattcctagtgtagcggtgaaatgcgtagatattaggaggaacaccagtggcgaaggcggcttactggacggtaactgacgttgaggctcgaaagcgtggggagcaaacaggattagataccctggtagtccacgccgtaaacgatgaatactaggtgtcgggtggcaaagccattcggtgccgcagcaaacgcaataagtattccacctggggagtacgttcgcaagaatgaaactcaaaggaattgacggggacccgcacaagcggtggagcatgtggtttaattcgaagcaacgcgaagaaccttaccaagtcttgacatccctctgaccggcccgtaacggggccttcccttcggggcagaggagacaggtggtgcatggttgtcgtcggctcgtgtcgtgagatgttgggttaagtcccgcaacgagcgcaacccctatccttagtagccagcaggtgaagctgggcactctagggagactgccggggataacccggaggaaggcggggacgacgtcaaatcatcatgccccttatgatttgggctacacacgtgctacaatggcgtaaacaaagggaagcgagattgtgagatggagcaaatcccaaaaataacgtcccagttcggactgtagtctgcaacccgactacacgaagctggaatcgctagtaatcgcgaatcagaatgtcgcggtgaatacgttcccgggtcttgtactcaccgcccgtca

SEQ ID NO: 294 - DNA, 1373 bp, Artificial Sequence
  Synthetic polymer
agtttgatcctggctcaggatgaacgcttgcggcgtgcctaacacatgcaagtcgaacgatgaaaccgcccccgggcggacatgaagtggcgaacgggtgagtaacacgtgaccgacctgccccccgcccagggacagccccccgaaagggggattaatacctggtactccggaagcggcgcatgccgcccccgggaaagctctggcggcgggggatggggtcgcggcccatcaggtagacggcggggcagaggcccaccgtgccgacgacgggtagccgggttgagagaccgaccggccacattgggactgagatacggcccagactcctacgggaggcagcagtggggaattttgcgcaatgggggcaaccctgacgcagcaacgccgcgtgaaggaagaagtatctcggtatgtaaacttctatcagcagggaagagtcaagactgtacctgcagaagaagccccggctaactacgtgccagcagccgcggtaatacgtagggggcgagcgttatccggattcattgggcgtaaagcgcgcgtaggcggcccggcaggccgggggtcgaagcggggggctcaaccccccgaagcccccggaacctccgcggcttgggtccggtaggggagggtggaacacccggtgtagcggtggaatgcgcagatatcgggtggaacaccggtggcgaaggcggccctctgggccgagaccgacgctgaggcgcgaaagctgggggagcgaacaggattagataccctggtagtcccagccgtaaacgatggacactaggtgtgggggggacgatcccccccgttacggaggccaaaccattaagggtccgcgccgggggagtaccggccgcaaggctaaaactaaaaggaatggacgggggcccgcacaagcagcggagcatgtggcttaatttgaagcaacgggaagaaccttaccagggcttgacatatgggtgaagcgggggagaccccgtggccgagaggagcccatacagagtggtgcatggctgtcgtcagctcgtgtcgtgagatgttgagttaagtcccgcaacgagcgcaacccccgccgcgtgttgccatcgggtgatgccgggaacccacgcgggaccgccgccgtcaaggcggaggagggcggggacgacgtcaagtcatcatgccccttatgccctgggctgcacacgtgctacaatggccggtacagagggatgccaccccgcgagggggagcggatcccggaaagccggccccagttcggattgggggctgcaacccacccccatgaagtcggagttgctagtaatcgcggatcagcatgccgcggtgaatgcgttcccgggccttgcacacacagcccgtca

SEQ ID NO: 295 - DNA, 1388 bp, Artificial Sequence
  Synthetic polymer
agagtttgatcctggctcaggatgaacgctggcggcgtgcttaacacatgcaagtcgagcgaagcagtttaaatgagacttcggtggattttaaactgactgagcggcggacgggtgagtaacgcgtggataacctgcctcacacagggggataacagttagaaatgactgctaataccgcataagaccacagcaccgcatggtgcaggggtaaaaactccggtggtacaggatggacccgcgtctgattagctggttggtgaggtaacggctcaccaaggcgacgatcagtagccggcttgagagagtgaacggccacattgggactgagacacggcccaaactcctacgggaggcagcagtggggaatattgcacaatgggggaaaccctgatgcagcgacgccgcgtgagtgaagaagtatctcggtatgtaaagctctatcagcagggaagaaaatgacggtacctgactaagaagccccggctaactacgtgccagcagccgcggtaatacgtagggggcaagcgttatccggaattactgggtgtaaagggtgcgtaggtggtatggcaagtcagaagtgaaaacccagggcttaactctgggactgcttttgaaactgtcagactggagtgcaggagaggtaagcggaattcctagtgtagcggtgaaatgcgtagatattaggaggaacaccagtggcgaaggcggcttactggacggtaactgacgttgaggctcgaaagcgtggggagcaaacaggattagataccctggtagtccacgccgtaaacgatgaatactaggtgtcggggagcatggctcttcggtgccgtcgcaaacgcagtaagtattccacctggggagtacgttcgcaagaatgaaactcaaaggaattgacggggacccgcacaagcggtggagcatgtggtttaattcgaagcgacgcgaagaaccttaccaagtcttgacatcctcctgaccggtccttaaccggacctttccttcgggacaggagagacaggtggtgcatggttgtcgtcagctcgtgtcgtgagatgttgggttaagtcccgcaacgagcgcaacccctatcctcagtagccagcatttaaggtgggcactctggggagactgccagggataacctggaggaaggcggggatgacgtcaaatcatcatgccccttatgatttgggctacacacgtgctacaatggcgtaaacaaagggaagcgagatcgtgagatggagcaaatcccaaaaataacgtcccagttcggactgtagtctgcaacccgactacacgaagctggaatcgctagtaatcgcggatcagaatgccgcggtgaatacgttcccgggtcttgtactcaccgcccgtca

SEQ ID NO: 296 - DNA, 1403 bp, Artificial Sequence
  Synthetic polymer
ttcgcccttagagtttgatcctggctcaggacgaacgctggcggcgtgcctaacacatgcaagtcgaacgagaatctttgaacagatcttttcggagtgacgttcaaagaggaaagtggcggacgggcgagtaacgcgtgagtaacctgcccataagagggggataatccatggaaacgtggactaataccgcatattgtagttaagttgcatgacttgattatgaaagatttatcgcttatggatggactcgcgtcagattagatagttggtgaggtaacggctcaccaagtcaacgatctgtagccgaactgagaggttgatcggccgcattgggactgagacacggcccagactcctacgggaggcagcagtggggaatattgcgcaatgggggcaaccctgacgcagcaacgccgcgtgcaggaagaaggtcttcggattgtaaactgttgtcgcaagggaagaagacagtgacggtaccttgtgagaaagtcacggctaactacgtgccagcagccgcggtaatacgtaggtgtcaagcgttgtccggatttactgggtgtaaagggcgcgtaggcggactgtcaagtcagtcgtgaaataccggggcttaaccccggggctgcgattgaaactgacagccttgagtatcggagaggaaagcggaattcctagtgtagcggtgaaatgcgtagatattaggaggaacaccagtggcgaaggcggctttctggacgacaactgacgctgaggcgcgaaagtgtggggagcaaacaggaaaagataccctggtagtccacaccgtaaacgagggctcctaaaagtaggaggtatgtaccccttctgtaccgcagtagactcactaagtatcccccctggggagtacgactgcaaggtgaaaacacaaaggaattgacgtgggcccgcacaagcagtggagtatgtggtttaattcgaagcaacgcgaaagagccttacctgggctgacatcacctggaatagagtggagatacttgagtgccttagagaatcaggtgacaggtggtgcatggttgtcgtcagctcgtgtcgtgagatgttgggttaagtcccgcaacgagcgcaacccctattgtcagttgccatcattaagttgggcactctggcgagactgccggtgacaaatcggaggaaggaggggacgacgtcaaatcatcatgccccttatgcccagggctacacacgtactacaatggccgataacaaagtgcagcgaaaccgtgaggtggagcgaatcacaaaactcggtctcagttcagattgcaggctgcaactcgcctgcatgaagttggaattgctagtaatcgcggatcagaatgccgcggtgaatacgttcccgggccttgtacacaccgcccgtc

SEQ ID NO: 297 - DNA, 1395 bp, Artificial Sequence
  Synthetic polymer
agagtttgatcctggctcaggatgaacgctggcggcgtgcttaacacatgcaagtcgaacggaggacccttgacggagttttcggacaacggataggaatccttagtggcggacgggtgagtaacgcgtgaggaacctgccttggagaggggaataacacagagaaatttgtgctaataccgcatgatgcagttgggtcgcatggctctgactgccaaagatttatcgctctgagatggcctcgcgtctgattagctagttggtagggtaacggcctaccaaggcgacgatcagtagccggactgagaggttgaccggccacattgggactgagacacggcccagactcctacgggaggcagcagtggggaatattgggcaatgggcgcaagcctgacccagcaacgccgcgtgaaggaagaaggctttcgggttgtaaacttcttttatgagggacgaaggaagtgacggtacctcatgaataagctccggctaactacgtgccagcagccgcggtaatacgtagggagcgagcgttatccggatttactgggtgtaaagggcgtgtaggcggggaagcaagtcagatgtgaaaaccagtggctcaaccactggcctgcatttgaaactgtttttcttgagtgatggagaggcaggcggaattccgtgtgtagcggtgaaatgcgtagatatacggaggaacaccagtggcgaaggcggcctgctggacattaactgacgctgaggcgcgaaagcgtggggagcaaacaggattagataccctggtagtccacgccgtaaacgatggatactaggtgtgggaggtattgaccccttctgtgccgcagttaacacaataagtatcccacctggggagtacggccgcaaggttgaaactcaaaggaattgacgggggcccgcacaagcagtggagtatgtggtttaattcgaagcaacgcgaagaaccttaccaggtcttgacatcccgatgaccgccttagagataaggcttttcttcggaacatcggtgacaggtggtgcatggttgtcgtcagctcgtgtcgtgagatgttgggttaagtcccgcaacgagcgcaacccctattcttagtagccagcggttcggccgggcactctagggagactgccagggataacctggaggaaggtggggatgacgtcaaatcatcatgccccttatgacttgggctacacacgtgctacaatggcgtaaacaaagggaagcgagcctgcgagggggagcaaatctcaaaaataacgtctcagttcggactgcagtctgcaactcgactgcacgaagctggaatcgctagtaatcgcaaatcagaatgttgcggtgaatacgttcccgggtcttgcacacaccgcccgtca

SEQ ID NO: 298 - DNA, 1377 bp, Artificial Sequence
  Synthetic polymer
agagtttgatcctggctcaggacgaacgctggcggcgcgcctaacacatgcaagtcgaacggagcttagagagcttgctttttaagcttagtggcgaacgggtgagtaacgcgtgagtaacctgccctagagtgggggacaacagttggaaacgactgctaataccgcataagcccacggtgccgcatgacactgagggaaaaggatttattcgctttaggatggactcgcgtccgattagctagttggtggggtaacggcctaccaagccgacgatcagtagccgacctgagagggtgaccggccacattgggactgagacacggcccagactcctacgggaggcagcagtggggaatattgcacaatggaggaaactctgatgcagcgacgccgcgtgaaggatgaagtatttcggtatgtaaacttctatcagcagggaagaaaatgacggtacctgactaagaagccccggctaactacgtgccagcagccgcggtaatacgtagggggcaagcgttatccggatttactgggtgtaaagggagcgtagacggcacggcaagccagatgtgaaagcccggggctcaaccccgggactgcatttggaactgctgagctagagtgtcggagaggcaagtggaattcctagtgtagcggtgaaatgcgtagatattaggaggaacaccagtggcgaaggcggcttgctggacgatgactgacgttgaggctcgaaagcgtggggagcaaacaggattagataccctggtagtccacgccgtaaacgatggctgctaggtgtcgggtggcaaagccattcggtgccgcagctaacgcaataagcagtccacctggggagtacgttcgcaagaatgaaactcaaaggaattgacggggacccgcacaagtagcggagcatgtggtttaattcgaagcaacgcgaagaaccttaccaagtcttgacatccctctgacggactcttaaccgagtctttccttcgggacagaggagacaggtggtgcatggttgtcgtcagctcgtgtcgtgagatgttgggttaagtcccgcaacgagcgcaacccctatccccagtagccagcattttggatgggcactctgaggagactgccagggataacctggaggaaggcggggatgacgtcaaatcatcatgccccttatgatttgggctacacacgtgctacaatggcgtaaacaaagggaagcgagcctgcgagggtaagcaaatcccaaaaataacgtcccagttcggactgcagtctgcaactcgactgcacgaagctggaatcgctagtaatcgcggatcagaatgccgcggtgaatacgttcccgggtcttgcactcaccgcccgtca

SEQ ID NO: 299 - DNA, 1375 bp, Artificial Sequence
  Synthetic polymer
agagtttgatcctggctcaggacgaacgctggtggcgtgcctaacacatgcaagtcgagcggatgaagttccttcgggaacggatttagcggcggacgggtgagtaacacgtgggcaacctgcctcatagaggggaatagccttccgaaagggagattaataccgcataagattgtagtaccgcatggtacagcaattaaaggaataatccgctatgagatgggcccgcggcgcattaactagttggggagggaacgggtcaccaaggcgaccatgcgtagcccacctgaaagggtgatcggccaccttgggactgaaacaccgcccagactcctaccggaggcagcagtggggaatattgcacaatgggggaaaccctgactgcagcaacgccgcgtgagtgatgacggccttcgggttgtaaagctctgtcttcagggacgataatgacggtacctgaggaggaagccccggctaactacgtgccagcagccgcggtaatacgtaggtggcgagcgttgtccggatttactgggcgtaaagggagcgtaggcggatttttaagtgagatgtgaaatactcgggcttaacctgagtgctgcatttcaaactggaagtctagagtgcaggagaggagaagggaattcctagtgtagcggtgaaatgcgtagagattaggaagaacaccagtggcgaaggcgcttctctggactgtaactgacgctgaggctcgaaagcgtggggagcaaacaggattagataccctggtagtccacgccgtaaacgatgaatactaagtgtaggggttggtcatgacctctgttgcgccgctaacgcattaagtattccgcgtggggagtacggtcgcaagattaatactcaaaggaattgacgggggcccgcaccagcagcggagcatgtggttttattagaagcaacgcgaacatccttacctagactcgtcatctcctgcattactatttatagaggaagtcccttcggggacaggatgacaggtggtgcatggttgtcgtcagctcgtgtcgtgagatgttgggttaagtcccgcaacgagcgcaacccttattgttagttgccatcattaagttgggcactctagcgagactgcccgggttaaccgggaggaaggtggggatgacgtcaaatcatcatgccccttatgtctagggctacacacgtgctacaatggtcggtacaataagacgcaagcccgcgagggggagcaaaactggaaaaccgatctcagttcggattgtaggctgaaactcgcctacatgaagctggagttgctagtaatcgcgaatcagcatgtcgcggtgaatacgttcccgggccttgtacacaccgcccgtca

SEQ ID NO: 300 - DNA, 1392 bp, Artificial Sequence
  Synthetic polymer
agagtttgatcctggctcaggacgaacgctggcggcgtgcctaacacatgcaagtcgaacggaacttctttaaaagatttcttcggaatgaatttgattaaatttagtggcggacgggtgagtaacgcgtgagtaacctgcctctgagaggggaataacattctgaaaagaatgctaataccgcataacatatatttatcgcatggtagatatatcaaagatttatcgctcagagatggactcgcgtccgattagttagttggtgaggtaacggctcaccaagaccgcgatcggtagccggactgagaggttgaacggccacattgggactgagacacggcccagactcctacgggaggcagcagtgggggatattgcgcaatgggggaaccctgatgcagcaacgccgcgtgaaggaagacggttttcggattgtaaacttctatcaatagggacgaagaaagtgacggtacctaaataagaagccacggctaactacgtgccagcagccgcggtaatacgtaggtggcaagcgttgtccggaattactgggtgtaaagggagcgtaggcgggatgccaagtcagctgtgaaaactatgggcttaacccgtagactgcagttgaaactggtattcttgagtgaagtagaggttggcggaattccgagtgtagcggtgaaatgcgtagatattcggaggaacaccggtggcgaaggcggccaactgggctttaactgacgctgaggctcgaaagtgtggggagcaaacaggattagataccctggtagtccacgccgtaaacgatgaatactaggtgtcggggagcacagctcttcggtgccgccgcaaacgcaataagtattccacctggggagtacgttcgcaagaatgaaactcaaaggaattgacggggacccgcacaagcggtggagcatgtggtttaattcgaagcaacgcgaagaaccttaccaagtcttgacatccctctgaccggacagtaatgtgtcctttccttcgggacagaggagacaggtggtgcatggttgtcgtcagctcgtgtcgtgagatgttgggttaagtcccgcaacgagcgcaacccttaccttcagtagccagcagtcagatgggcactctggagggactgccagggataacctggaggaaggtggggatgacgtcaaatcatcatgccccttatgacttgggctacacacgtgctacaatggcgtaaacaaagggaagcagccctgtgaaggtgagcaaaccccaaaaataacgtcccagttcggattgtagtctgcaactcgactacatgaagctggaatcgctagtaatcgcgaatcagcatgtcgcggtgaatacgttcccgggtcttgcactcaccgcccgtca

SEQ ID NO: 301 - DNA, 1390 bp, Artificial Sequence
  Synthetic polymer
agagtttgatcctggctcaggatgaacgctggcggcgtgcttaacacatgcaagtcgaacgaagcactttatttgatttcttcggaatgaagattttgtgactgagtggcggacgggtgagtaacgcgtgggtaacctgcctcatacagggggataacagttggaaacgactgctaataccgcataagcgcacagggtcgcatgacctggtgtgaaaaactccggtggtatgagatggacccgcgtctgattagccagttggcggggtaacggcccaccaaagcgacgatcagtagccggcctgagagggtgaacggccacattgggactgagacacggcccaaactcctacgggaggcagcagtggggaatattgcacaatggaggaaactctgatgcagcgacgccgcgtgaaggatgaagtatttcggtatgtaaacttctatcagcagggaagaaaatgacggtacctgactaagaagccccggctaactacgtgccagcagccgcggtaatacgtagggggcaagcgttatccggatttactgggtgtaaagggagcgtagacggcacggcaagccagatgtgaaagcccggggctcaaccccgggactgcatttggaactgctgagctagagtgtcggagaggcaagtggaattcctagtgtagcggtgaaatgcgtagatattaggaggaacaccagtggcgaaggcggcttgctggacgatgactgacgttgaggctcgaaagcgtggggagcaaacaggattagataccctggtagtccacgccgtaaacgatgactgctaggtgtcgggtggcaaagccattcggtgccgcagctaacgcaataagcagtccacctggggagtacgttcgcaagaatgaaactcaaaggaattgacggggacccgcacaagcggtggagcatgtggtttaattcgaagcaacgcgaagaaccttaccaggtcttgacatcccgatgaaaaacccgtaacggggttccctcttcggagcatcggagacaggtggtgcatggttgtcgtcagctcgtgtcgtgagatgttgggttaagtcccgcaacgagcgcaacccttattcttagtagccagcaggtaaggctgggcactctaaggagactgccggggataacccggaggaaggtggggatgacgtcaaatcatcatgccccttatgatctgggctacacacgtgctacaatggcgtaacaaagggaagcgagcctgcgagggtgagcaaatcccaaaaataacgtcccagttcggactgtagtctgcaacccgactacacgaagctggaatcgctagtaatcgcgaatcagaatgtcgcggtgaatacgttcccgggtcttgcactcaccgcccgtca

SEQ ID NO: 302 - DNA, 1391 bp, Artificial Sequence
  Synthetic polymer
agagtttgatcctggctcaggatgaacgctggcggcgtgcctaacacatgcaagtcgaacgaagcgccttacctgattcttcggatgaaggtctggtgactgagtggcggacgggtgagtaacgcgtgggtaacctgccctgtacaggggaataacagttggaaacggctgctaataccgcataagcgcacgagaggacatcctcttgtgtgaaaaactccggtggtacaggatgggcccgcgtctgattagctggttggcagggtaacggcctaccaaggcgacgatcagtagccggtctgagaggatgaacggccacattggaactgagacacggtccaaactcctacgggaggcagcagtggggaatattgcacaatgggggaaaccctgatgcagcaacgccgcgtgagtgaagaagtatttcggtatgtaaagctctatcagcagggaagataatgacggtacctgactaagaagctccggctaaatacgtgccagcagccgcggtaatacgtatggagcaagcgttgtccggatttactgggtgtaaagggtgcgtaggcggctttgcaagtcagatgtgaaatctatgggctcaacccataaactgcatttgaaactgtagagcttgagtgaagtagaggcaggcggaattccccgtgtagcggtgaaatgcgtagagatggggaggaacaccagtggcgaaggcggcctgctgggctttaactgacgctgaggcacgaaagcgtgggtagcaaacaggattagataccctggtagtccacgctgtaaacgatgattactaggtgtggggggtctgaccccttccgtgccggagttaacacaataagtaatccacctggggagtacggccgcaaggttgaaactcaaaggaattgacgggggcccgcacaagcagtggagtatgtggtttaattcgaagcaacgcgaagaaccttaccaggtcttgacatccaactaacgaagtagagatacattaggtgcccttcggggaaagttgagacaggtggtgcatggttgtcgtcagctcgtgtcgtgagatgttgggttaagtcccgcaacgagcgcaacccctatcctcagtagccagcatttaaggtgggcactctggggagactgccagggataacctggaggaaggcggggatgacgtcaaatcatcatgccccttatgatttgggctacacacgtactacaatggcgtaaacaaagggaagcgaacccgcgagggtgggcaaatctcaaaaataacgtcccagttcggactgcagtctgcaactcgactgcacgaagctggaatcgctagtaatcgcgaatcagcatgtcgcggtgaatacgttctcgggccttgtacacaccgcccgtca

SEQ ID NO: 303 - DNA, 1371 bp, Artificial Sequence
  Synthetic polymer
agagtttgatcctggctcaggacgaacgctggcggcgcgcctaacacatgcaagtcgaacgagcgagagagagcttgctttctcgagcgagtggcgaacgggtgagtaacgcgtgaggaacctgcctcaaagagggggacaacagttggaaacgactgctaataccgcataagcccacggctcggcatcgagcagagggaaaaggagcaatccgctttgagatggcctcgcgtccgattagctagttggtgaggtaatggcccaccaaggcgacgatcggtagccggactgagaggttgaacggccacattgggactgagacacggcccagactcctacgggaggcagcagtggggaatattgcacaatgggggaaaccctgatgcagcgacgccgcgtggaggaagaaggtcttcggattgtaaactcctgttgttggggaagataatgacggtacccaacaaggaagtgacggctaactacgtgccagcagccgcggtaaaacgtaggtcacaagcgttgtccggaattactgggtgtaaagggagcgcaggcgggaagacaagttggaagtgaaatctatgggctcaacccataaactgctttcaaaactgtttttcttgagtagtgcagaggtaggcggaattcccggtgtagcggtggaatgcgtagatatcgggaggaacaccagtggcgaaggcggcctactgggcaccaactgacgctgaggctcgaaagtgtgggtagcaaacaggattagataccctggtagtccacaccgtaaacgatgattactaggtgttggaggattgaccccttccgtgccgcagttaacacaataagtaatccacctggggagtacgaccgcaaggttgaaactcaaaggaattggcgggggcccgcacaagcagtggagtatgtggtttaattcgaagcaacgcgaagaaccttaccaggtcttgacatcccgtgcatagctaagagattagtgaagtccttcgggacacggagacaggtggtgcatggttgtcgtcagctcgtgtcgtgagatgttgggttaagtcccgcaacgagcgcaacccttatcgttagttactacgcaagaggactctagcgagactgccgttgacaaaacggaggaaggtggggatgacgtcaaatcatcatgccctttatgacctgggctacacacgtactacaatggctattaacagagagaagcgaagccgcgaggtagagcaaacctcagaaaaatagtctcagttcggatcgcaggctgcaacccgcctgcgtgaagccggaattgctagtaatcgcggatcagcatgccgcggtgaatacgttcccgggccttgcactcaccgcccgtca

SEQ ID NO: 304 - DNA, 1354 bp, Artificial Sequence
  Synthetic polymer
ttcgcccttagagtttgatcctggctcaggacgaacgctggcggcgtgcctaacacatgcaagtcgaacggacgaggaggagcttgcttctccaagtcagtggcggacgggtgagtaacgcgtgagtaacctgcccttcagagggggataacgtctggaaacggacgctaataccgcatgacatatttccatcgcatggtggagatatcaaaggagcaatccgctgaaggatggactcgcgtccgattagatagttggcggggtaacggcccaccaagtcgacgatcggtagccggactgagaggttgaacggccacattgggactgagacacggcccagactcctacgggaggcagcagtgggggatattgcacaatgggcgaaagcctgatgcagcaacgccgcgtgagggaagacggttttcggattgtaaacctctgttctaagtgacgaacaaatgacggtagcttaggagaaagccccggctaactacgtgccagcagccgcggtaatacgtagggggcaagcgttgtccggaattactgggtgtaaagggagcgcaggcggagaagcaagtcagtggtgaaaacgatgggcttaactcatcgactgccattgaaactgtttcccttgagtgaagtagaggcaggcggaattccgagtgtagcggtgaaatgcgtggatattcggaggaacaccagtggcgaaggcggcctgctgggctttaactgacgctgaggctcgaaagtgtggggagcaaacaggattagataccctggtagtccacactgtaaacgatgattggctaggtgggggggggtctgacccccttccctgcccgaaattaaccgcaaataaacaatccacctggggagtacggccgcaaggttgaaactcaaaggaattgacgggggcccgcacaagcagtggattatgtggtttaattcgacgcaacgcgaagaaccttaccaggtcttgacatccaacgaatccttaagagattagggagtgcctttcggggaacgttgagacaggtggtgcatggttgtcgtcagctcgtgtcgtgagatgttgggttaagtcccgcaacgagcgcaacccctgccattagttgctacgcaagagcactctaatgggaccgctaccgacaaggtggaggaaggtggggacgacgtcaaatcatcatgccccttatgacctgggctacacacgtaatacaatggccgttaacaacgggaggcaaaaccgcgaggtagggcaaaaccctaaaaacggtcccagttcggatcgcaggctgcaacccgcctgcgtgaagttggaattgctagtaatcgcggatcagcatgccgcggt

SEQ ID NO: 305 - DNA, 1362 bp, Artificial Sequence
  Synthetic polymer
cgtgcctaacacatgcaaagtcgaacgaagctctgcgatacaagacttcggtcaagttgaacggatgacttagtggcggacgggtgagtaacgcgtgaggaacctgcctttcagtgggggacaacagttggaaacgactgctaataccgcataatgtattctgaccgcatgatcggaataccaaagatttattgctgaaagatggcctcgcgtctgattagatagttggtgaggtaacggctcaccaagtcgacgatcagtagccggactgagaggttgaacggccacattgggactgagatacggcccagactcctacgggaggcagcagtggggaatattgggcaatgggggaaaccctgacccagcaacgccgcgtgaaggaagaaggctttcgggttgtaaacttcttttaccagggacgaaggacgtgacggtacctggagaaaaagccacggctaactacgtgccagcagccgcggtaatacgtaggtggcaagcgttgtccggatttactgggtgtaaagggagcgtaggtggcaaggcaagccagaagtgaaaacccggggctcaaccgcgggattgcttttggaactgtcatgctagagtgcaggaggggtgagcggaattcctagtgtagcggtgaaatgcgtagatattaggaggaacaccggaggcgaaggcggctcactggactgtaactgacactgaggctcgaaagcgtggggagcaaacaggattagataccctggtagtccacgccgtaaacgatgaatactaggtgtggggggactgaccccttccgtgccgcagttaacacaataagtattccacctggggagtacgaccgcaaggttgaaactcaaaggaattgacgggggcccgcacaagcagtggattatgtggtttaattcgaagcaacgcgaagaaccttaccagggcttgacatccaactaacgaagcagagatgcattaggtgcccttcggggaaagttgagacaggtggtgcatggttgtcgtcagctcgtgtcgtgagatgttgggttaagtcccgcaacgagcgcaacccctgtccttagtagccagcagtaagatgggcactctagggagaccgccggggataacccggaggaaggtggggatgacgtcaaatcatcatgccccttatgatttgggctacacacgtgctacaatggcgtaaacaaagagaggcgagaccgcgaggttaagcaaagctcaaaaataacgtctcagttcggattgtagtctgcaactcgactacatgaagctggaatcgctagtaatcgcaaatcagaatgctgcggtgaatacgttcccgggtcttgtactcaccgcccgtca

SEQ ID NO: 306 - DNA, 1372 bp, Artificial Sequence
  Synthetic polymer
agagtttgatcctggctcaggatgaacgctggcggcgtgcttaacacatgcaagtcgaacgagagaagatcggtgcttgcactgatccaatcgagtggcggacgggtgagtaacgcgtgggtaacctgcctcatacaggggaataacagttggaaacggctgctaaaaccgcataagcgcacagtatcgcatgatacagtgtgaaaaactccggtggtatgagatggacccgcgtctgattagctagttggtgaggtaacggcccaccaaggcgacgatcggtagccggactgagaggttgaacggccacattgggactgagacacggcccagactcctacgggaggcagcagtggggaatattgcacaatgggggaaaccctgatgtagcgacgccgcgtggaggaagaaggtcttcggattgtaaactcctgttgttgaggaagataatgacggtactcaacaaggaagtgacggctaactacgtgccagcagccgcggtaaaacgtaggtcacaagcgttgtccggaattactgggtgtaaagggagcgcaggcgggaagacaagttggaagtggaatccatgggctcaacccatgaactgctttcaaaactgtttttcttgagtagtgcagaggtaggcggaattcccggtgtagcggtggaatgcgtagatatcgggaggaacaccagtggcgaaggcggcctactgggcaccaactgacgttgaggctcgaaagtgtgggtagcaaacaggattagataccctggtagtccacactgtaaacgatgattactaggtgttggaggattgaccccttcagtgccgcagttaacacaataagtaatccacctggggagtacgaccgcaaggttgaaactcaaaggaattgacgggggcccgcacaagcagtggagtatgtggtttaattcgacgcaacgcgaagaaccttaccaagtcttgacatcccttgacgatgctggaaacagtatttctcttcggagcaaggagacaggtggtgcatggttgtcgtcagctcgtgtcgtgagatgttgggttaagtcccgcaacgagcgcaacccttgctattagttgctacgcaagagcactctaataggactgccgttgacaaaacggaggaaggtggggacgacgtcaaatcatcatgccctttatgacctgggctacacacgtactacaatggcgtttaacaaagagaagcaagaccgcgaggtggagcaaaactcaaaaacaacgtctcagttcagattgcaggctgcaactcgcctgcatgaagtcggaattgctagtaatcgcggatcagcatgccgcggtgaatacgttcccgggccttgtactcaccgcccgtca

SEQ ID NO: 307 - DNA, 1404 bp, Artificial Sequence
  Synthetic polymer
ttcgcccttagagtttgatccttgctcaggatgaacgctggcggcgtgcctaacacatgcaagtcgaacggagttcttaaggaatgcgacttcggtcaaatgacttttgaacttagtggcggacgggtgagtaacgcgtgagcaacctgcctttcagagggggataacatttggaaacagatgctaataccgcataagattacagtaccgcatgatacagtgatcaaaggagcaatccgctgaaagatgggctcgcgtccgattagatagttggtgaggtaacggctcaccaagtcgacgatcggtagccggactgagaggttgaacggccacattgggactgagacacggcccagactcctacgggaggcagcagtggggaatattgcacaatgggcgaaagcctgatgcagcaacgccgcgtgagggaagacggttttcggattgtaaacctctgttttcggtgacgaacaaatgacggtaaccgagtaggaagccacggctaactacgtgccagcagccgcggtaatacgtaggtggcaagcgttatccggaattactgggtgtaaagggagcgcaggcgggatagcaagtcagctgtgaaaactatgggctcaacccataaactgcagttgaaactgttattcttgagtggagtagaggcaagcggaattcccgagtgtagcggggaaaatgcgtagatattcggaggaacaccagtggggaagggggcttgctgggctctaactgacgctgaggctcgaaagtgtggggagcaaacaggatttagataccctggtagtccacactgtaaacgatgattgctaggtgtggggggtctgaccccctccgtgccggagttaacgcaataagcaatccacctggggagtacggccgcaaggttgaaactcaaaggaattgacggggacccgcacaagcagtggattatgtggtttaattcgaagcaacgcgaagaaccttaccaggtcttgacatccgactaacgagatagagatatgtcaggtgcccttcggggaaagtcgagacaggtggtgcatggttgtcgtcagctcgtgtcgtgagatgttgggttaagtcccgcaacgagcgcaacccctgccattagttgctacgcaagagcactctaatgggaccgctaccgacaaggtggaggaaggtggggacgacgtcaaatcatcatgccccttatgacctgggctacacacgtgctacaatggcgtaaacaaagggaagcggagccgtgaggccgagcaaatctcaaaaataacgtctcagttcggactgtagtctgcaacccgactacacgaagctggaatcgctagtaatcgcagatcagaatgctgcggtgaatacgttcccgggtcttgcactcaccgcccgtca

SEQ ID NO: 308 - DNA, 1380 bp, Artificial Sequence
  Synthetic polymer
agagtttgatcctggctcaggatgaacgctggcggcgtgcttaacacatgcaagtcgaacgagagaagatcggtgcttgcactgatccaatcgagtggcggacgggtgagtaacgcgtgggtagcctgcctcatacaggggaataacagttggaaacggctgctaaaaccgcataagcgcacagtatcgcatgatacagtgtgaaaaactccggtggtatgagatggacccgcgtctgattagctagttggtgaggtaacggctcaccaaggcgacgatcagtagccggcctgagagggtgaacggccacattgggactgagacacggcccaaactcctacgggaggcagcagtggggaatattgcacaatgggggaaaccctgatgcagcgacgccgcgtgagtgatgaagtatttcggtatgtaaagctctatcagcagggaagataatgacggtacctgactaagaagcaccggctaaatacgtgccagcagccgcggtaatacgtatggtgcaagcgttatccggaattactgggtgtaaagggtgcgtaggtggtatggcaagtcagaagtgaaaacccagggcttaactctgggactgcttttgaaactgtcagactggagtgcaggagaggtaagcggaattcctagtgtagcggtgaaatgcgtagatattaggaggaacaccagtggcgaaggcggcctgctggactgttactgacactgaggcacgaaagcgtggggagcaaacaggattagataccctggtagtccacgccgtaaacgatgaatactaggtgtcggggccgtataggcttcggtgccgtcgcaaacgcagtaagtattccacctggggagtacgttcgcaagaatgaaactcaaaggaattgacggggacccgcacaagcggtggagcatgtggtttaattcgaagcaacgcgaagaaccttaccaggtcttgacatccttctgaccactccgtaatgggagtcttccttcgggacagaagagacaggtggtgcatggttgtcgtcagctcgtgtcgtgagatgttgggttaagtcccgcaacgagcgcaacccctatcttcagtagccagcaggcaaggctgggcactctggagagactgccagggataacctggaggaaggtggggacgacgtcaaatcatcatgccccttatgatctgggcgacacacgtgctacaatggcggtcacaaagtgaggcgaacctgcgagggggagcaaaccacaaaaaggccgtcccagttcggactgtagtctgcaacccgactacacgaagctggaatcgctagtaatcgcgaatcagaatgtcgcggtgaatacgttcccgggtcttgcacacaccgcccgtca

SEQ ID NO: 309 - DNA, 1396 bp, Artificial Sequence
  Synthetic polymer
ttcgcccttagagtttgatcctggctcaggacgaacgctggcggcgtgcctaacacatgcaagtcgagcggagaacagggaagtgcttgcacggaactgtttttagcggcggacgggtgagtaacgcgtgaacaagctgtccttcacagggggataacacttggaaacaggtgctaataccgcataagaccacaggggtgcatgctccaggggtcaaaggagcaatccggtgaagggtgcgttcgcgtcccattagatagttggcggggcaacggcccaccaagtcgacgatgggtagccgacctgagagggtgatcggccacactgggactgagacacggcccagactcctacgggaggcagcagtggggaatattgggcaatgggcgaaagccttacccagcaacgccgcgtgagggaagaaggttttcggattgtaaacctctgtcctgggggacgaaggaagtgacggtaccccgggaggaagccccggctaactacgtgccagcagccgcggtaatacgtagggggcgagcgttgtccggaattattgggcgtaaagggcgcgtagacggctgagtaagttactggtgaaagcccggcttttaaggctggaattgccggtaatactgttcagcttgagtgcaggagagggaagcggaattcctagtgtagcggtgaaatgcgtagatattaggaggaacaccagtggcgaaggcggctttctggactgtaactgacgttgaggcgcgaaagcgtggggagcaaacaggattagataccctggtagtccacgccgtaaacgatggatgctaggtgtgggaggtatcgaccccttccgtgccgcagttaacgcaataagcatcccgcctggggagtacggccgcaaggttgaaactcaaaggaattgacgggggcccgcacaagcagcggagcatgtggtttaattcgacgcaacgcgaagaaccttaccaggtcttgacatccacttaaacttacagagatgtaaggtgtgcttgcacaaagtgagacaggtggtgcatggttgtcgtcagctcgtgtcgtgagatgttgggttaagtcccgcaacgagcgcaacccttatcttcagttactaacgcgtagaggtgaggactctgaagagactgccggggacaactcggaggaaggtggggacgacgtcaaatcatcatgccccttatgacctgggctacacacgtgctacaatggccacgacagagagaagcgaaatcgcaaggtagagcggaactcaaaaaagtggtcccagttcggattgtgggctgcaacccgcccacatgaagtcggagttgctagtaatcgcggatcagcatgccgcggtgaatacgttcccgggccttgtacacaccgcccgtca

SEQ ID NO: 310 - DNA, 1385 bp, Artificial Sequence
  Synthetic polymer
ttcgcccttagagtttgatcctggctcaggacgaacgctggcggcgcgcctaacacatgcaagtcgaacgagcgagagagagcttgctttctcaagcgagtggcggacgggtgagtaacgcgtgagcaacctggcctatacagggggataacagggagaaattcctgctaataccgcataagaccacagtatcgcatggtactggggtcaagggagagattcggtataggatgggctcgcgtcccattagctagttgggggtgcaacggaccaccaaggcgacgatgggtagccgacctgagagggtgatcggccacactgggactgagacacggcccagactcctacgggaggcagcagtagggaatattggacaatgggggaaaccctgatccagcaacgccgcgtgaaggaagaaggtcttcggattgtaaacttatgttgtcggggacgaagaaagacggtacccgacgaggaagccccggctaactacgtgccagcagccgcggtaatacgtagggggcgagcgttgtccggaattactgggcgtaaagggcgcgtaggcggccaattaagttagatgtgaaatccccgggcttaacctgggtgttgcatttaaaactgataggcttgagtgcaggagagggaagcggaattcctagtgtagcggtggaatgcgtagatattaggaggaacaccagtggcgaaggcggctttctggactgtaactgacgctgaggcgcgagagcgtggggagcaaacaggattagataccctggtagtccacgccgtaaacgatggatactaggtgtagagggtatcgaccccctctgtgccggagcaaacgcaataagtatcccgcctggggagtacggccgcaaggttgaaactcaaaggaattgacgggggcccgcacaagcagcggagcatgtggtttaattcgaagcaacgcgaagaaccttaccaaggcttgacatcccctgacgtatgtagagatacatatttccttcgggacagggagacaggtggtgcatggttgtcgtcagctcgtgtcgtgagatgttgggttaagtcccgcaacgagcgcaacccttgtatacagttaccagtattaagttagggactctgtatagactgccgtggataacacggaggaaggtggggacgacgtcaaatcatcatgccccttatgtcttgggctacacacgtgctacaatggccgcaacagagggcagcgaagtggcaacatggagcgaatctcaaaaaagcggtctcagttcagattgtgggctgcaacccgcccacatgaagacggagttgctagtaatcgcggatcagcatgccgcggtgaatgcgttcccgggccttgcacacaccgcccgtca

SEQ ID NO: 311 - DNA, 1390 bp, Artificial Sequence
  Synthetic polymer
agagtttgatcctggctcaggatgaacgctggcggcgtgcttaacacgtgcaagtcgagcgaagcactttggaaagattcttcggatgatttcctttgtgactgagcggcggacgggtgagtaacgcgtgggtaacctgcctcatacagggggataacagttagaaatgactgctaataccgcataagaccacggtaccgcatggtacagtggtaaaaactccggtggtatgagatggacccgcgtctgattaggtagttggtggggtaacggcctaccaagccgacgatcagtagccgacctgagagggtgaccggccacattgggactgagacacggcccagactcctacgggaggcagcagtggggaatattgcacaatggaggaaactctgatgcagcgacgccgcgtgaaggatgaagtatttcggtatgtaaacttctatcagcagggaagaaaatgacggtacctgactaagaagccccggctaactacgtgccagcagccgcggtaatacgtagggggcaagcgttatccggatttactgggtgtaaagggagcgtagacggcacggcaagccagatgtgaaagcccggggctcaaccccgggactgcatttggaactgctgagctagagtgtcggagaggtaagcggaattcctagtgtagcggtgaaatgcgtagatattaggaggaacaccagtggcgaaggcggcttactggacggtaactgacgttgaggctcgaaagcgtggggagcaaacaggattagataccctggtagtccacgccgtaaacgatgaatactaggtgttggggagcaaagctcttcggtgccgccgcaaacgcattaagtattccacctggggagtacgttcgcaagaatgaaactcaaaggaattgacggggacccgcacaagcggtggagcatgtggtttaattcgaagcaacgcgaagaaccttaccaagtcttgacatccctctgaccgttccttaaccggaactttccttcgggacaggggagacaggtggtgcatggttgtcgtcagctcgtgtcgtgagatgttgggttaagtcccgcaacgagcgcaacccctatccccagtagccagcagtccggctgggcactctgaggagactgccagggataacctggaggaaggcggggatgacgtcaaatcatcatgccccttatgatttgggctacacacgtgctacaatggcgtaaacaaagggaagcaagcctgcgaaggtaagcaaatcccaaaaataacgtcccagttcggactgcagtctgcaactcgactgcacgaagctggaatcgctagtaatcgcggatcagaatgccgcggtgaatacgttcccgggtcttgcacacaccgcccgtca

SEQ ID NO: 312 - DNA, 1367 bp, Artificial Sequence
  Synthetic polymer
agagtttgatcctggctcaggatgaacgctggcggcgtgcctaacacatgcaagtcgaacggttaaaccgccttcggacggacatacagtggcgaacgggtgagtaacacgtgaccaacctgccccgcgctccgggacaacctcgggaaaccgaggctaataccggatgcgccgcccgccccgcatggggcgggcgggaaagccgagacggcgcgggatggggtcgcggcccatcaggtagacggcgggatgagagcccaccgtgcctgcgacgggtagccggcctgagagggcgatcggccacattgggactgagatacggcccagactcctacgggaggcagcagtggggaattttgcgcaatgggggaaaccctgacgcagcaacgccgcgtgcgggacgaaggccttcgggttgtaaaccgctttcagcagggaagacatcgacggtacctgcagaagaagccccggctaactacgtgccagcagccgcggtaacacgtagggggcgagcgttatccggattcattgggcgtaaagcgcgcgtaggcggccgctcaagcgggacctctaatcccggggctcaaccccgggccgggtcccgaactgggcggctcgagtcaggtagaggcaggcggaattcccggtgtagcggtgaaatgcgcagatatcgggaagaacaccgatggcgaaggcagcctgctgggccttgactgacgctgaggcgcgaaagccgggggagcgaacaggattagataccctggtagtcccggccgtaaacgatgggcgctaggtgtggggagggtcgtcctctccgtgccgcagccaacgcattaagcgccccgcctggggagtacggccgcaaggctaaaactcaaaggaattgacgggggcccgcacaagcagcggagcatgtggcttaattcgaagcaacgcgaagaaccttaccagggcttgacatgccagtgaagcggcggagacgccgtggccgagaggagctagcgcaggtggtgcatggctgtcgtcagctcgtgtcgtgagatgttgggttaagtcccgcaacgagcgcaacccctgccccgtgttgccagcactcagttggggactcgcgggggactgccggcgtcaagccggaggaaggtggggacgacgtcaagtcatcatgccccttatgccctgggctgcacacgtgctacaatggccggtacagcgggctgcgaccaggcgactggaagcgaatcccacaaagccggccccagttcggaccggaggctgcaacccgcctccgcgaagtcggagttgctagtaatcgcggatcagcatgccgcggtgaatacgttcccgggccttgcactcaccgcccgtca

SEQ ID NO: 313 - DNA, 1392 bp, Artificial Sequence
  Synthetic polymer
agagtttgattcctggctcaggatgaacgctggcggcgtgcttaacacatgcaagtcgagcgaagcgcttaagtttgattcttcggatgaagacttttgtgactgagcggcggacgggtgagtaacgcgtgggtaacctgcctcatacagggggataacagttagaaatgactgctaataccgcataagaccacaaggtcgcatgaccaggtggtaaaaactccggtggtatgagatggacccgcgtttgattaggtagttggtgaggtaacggctcaccaagccgacgatcagtagccgacctgagagggtgaccggccacattgggactgagacacggcccagactcctacgggaggcagcagtggggaatattgcacaatgggcgaaagcctgatgcagcgacgccgcgtgaaggatgaagtatttcggtatgtaaacttctatcagcagggaagaattaggacggtacctgactaagaagccccggctaactacgtgccagcagccgcggtaatacgtagggggcaagcgttatccggatttactgggtgtaaagggagcgtagacggctgtgcaagtctgaagtgaaagcccggggctcaaccccgggactgctttggaaactgtatagctagagtgctggagaggtaagtggaattcctagtgtagcggtgaaatgcgtagatattaggaggaacaccagtggcgaaggcggcttactggacagtgactgacgttgaggctcgaaagcgtggggagcaaacaggattagataccctggtagtccacgccgtaaacgatgactactaggtgtcgggtggcaaagccattcggtgccgtcgcaaacgcagtaagtattccacctggggagtacgttcgcaagaatgaaactcaaaggaattgacggggacccgcacaagcggtggagcatgtggtttaattcgaagcaacgcgaagaaccttaccaagtcttgacatccgcctgaccgatccttaaccggatctttccttcgggacaggcgagacaggtggtgcatggttgtcgtcagctcgtgtcgtgagatgttgggttaagtcccgcaacgagcgcaacccctatcctcagtagccagcatttaaggtgggcactctggggagactgccagggataacctggaggaaggcggggatgacgtcaaatcatcatgccccttatgatttgggctacacacgtgctacaatggcgtaaacaaagggaagcgagattgtgagatggagcaaatcccaaaaataacgtcccagttcggactgtagtctgcaacccgactacacgaagctggaatcgctagtaatcgcggatcagaatgctgcggtgaatacattcccgggccttgtactcaccgcccgtca

SEQ ID NO: 314 - DNA, 1404 bp, Artificial Sequence
  Synthetic polymer
ttcgcccttagagtttgatcctggctcaggatgaacgctggcggcgtgcctaacacatgcaagtcgaacggagttcttaaggaatgcgacttcggtcaaatgacttttgaacttagtggcgaacgggtgagtaacgcgtgagtaacctgccctggagtgggggacaacagttggaaacgactgctaataccgcataagcccacggtgccgcatggcacagcgggaaaaggatttattcgcttcaggatggactcgcgtccaattagctagttggtgaggtaacggcccaccaaggcgacgattggtagccggactgagaggttgaacggccacattgggactgagacacggcccagactcctacgggaggcagcagtgggggatattgcgcaatgggggaaaccctgacgcagcaacgccgcgtgaaggatgaaggtcttcggattgtaaacttcttttattaaggacgaagaaagtgacggtacttaatgaataagctccggctaactacgtgccagcagccgcggtaatacgtagggagcaagcgttgtccggatttactgggtgtaaagggtgcgtaggcggctttgcaagtcagatgtgaaatctatgggctcaacccatagcctgcatttgaaactgcagagcttgagtgaagtagaggcaggcggaattccccgtgtagcggtgaaatgcgtagagatggggaggaacaccagtggcgaaggcggcctgctgggctttaactgacgctgaggcacgaaagcgtgggtagcaaacaggattagataccctggtagtccacgctgtaaacgatgattactaggtgtggggggtctgaccccttcccgtgccgggagttaacacaataagtaatccacctggggagtacggccgcaaggttgaaactcaaaggaattgacgggggcccgcacaagcagtggagtatgtggtttaattcgaagcaacgcgaagaaccttaccaggtcttgacatcctactaacgagatagagatatgttaggtgcccttcggggaaagtagagacaggtggtgcatggttgtcgtcagctcgtgtcgtgagatgttgggttaagtcccgcaacgagcgcaacccttgctattagttgctacgcaagagcactctaataggactgccgttgacaaaacggaggaaggtggggacgacgtcaaatcatcatgccccttatgacctgggctacacacgtactacaatggacattaacagagggaagcaatacagcgatgtggagcaaacccctaaaaatgttctcagttcagattgcaggctgcaacccgcctgtatgaagatggaattgctagtaatcgcagatcagcatgctgcggtgaatacgttcccgggccttgcactcaccgcccgtca

SEQ ID NO: 315 - DNA, 1349 bp, Artificial Sequence
  Synthetic polymer
agagtttgatcctggctcaggatgaacgctggcggcgtgcttaacacatgcaagtcgaacggaggacccttgacggagttttcggacaacggataggaatccttagtggcggacgggtgagtaacgcgtgagtaacctgcctttgagaggggaataacttcccgaaagggatgctaataccgcatgacgcatatttatcgcatggtagatatgccaaagatttatcgctcaaagatggactcgcgtccgattagccagttggcggggtaacggcccaccaaagcgacgatcggtagccggactgagaggttgaacggccacattgggactgagacacggcccagactcctacgggaggcagcagtgggggatattgcgcaatgggggaaaccctgacgcagcaacgccgcgtgaaggatgaaggttttcggattgtaaacttcttttatttaggacgaaggatgacggtactaaatgaataagctccggctaactacgtgccagcagccgcggtaatacgtagggagcgagcgttatccggatttactgggtgtaaagggcgtgtaggcggggaagcaagtcagatgtgaaaaccagtggctcaaccactggcctgcatttgaaactgtttttcttgagtgatggagaggcaggcggaattccctgtgtagcggtgaaatgcgtagagatagggaggaacaccagtggcgaaggcggcctactgggctttaactgacgctgaggcacgaaagcgtgggtagcaaacaggattagataccctggtagtccacgctgtaaacgatgattactagatgtgggggctcggtcccctttcgggcgggaggcgacataataattattcctcctggggagcagggcagctatggtgaaactcaagggaattgacgggggcccgcactagctgaggagtaagtggtttaattagaagcaacgcgaagcaccttaccagggcttgacatccaaaggatcctgtggaaacataggagtgccgtttggggaacattgagacaggtggagcatggttgtcgtcagctcgtgtcgtgagatgttgggttaagtcccgcaacgagcgcatcccttgctattagttgctacgcaagagcactctaataggactgccgttgacaaaacggaggaaggtggggacgacgtcaaatcatcatgccccttatgacttgggctacacacgtactacaatggatgtaaacagagggaagcaaaatagcgatatggagcaaaccccaaaaagcattctcagttcagaatgcaggctgcaactcgcctgtatgaagttggaattgctagtaatcgcggatcagcatgccgcg

SEQ ID NO: 316 - DNA, 1377 bp, Artificial Sequence
  Synthetic polymer
ttcgcccttagagtttgatcctggctcaggacgaacgctggcggcgcgcctaacacatgcaagtcgaacgagcgagagagagcttgctttcttgagcgagtggcgaacgggtgagtaacgcgtgaggaacctgcctcaaagagggggacaacagttggaaacgactgctaataccgcataagcccacgacccggcatcgggtagagggaaaaggagcaatccgctttgagatggcctcgcgtccgattagctagttggtgaggtaatggcccaccaaggcgacgatcggtagccggactgagaggttgaacggccacattgggactgagacacggcccagactcctacgggaggcagcagtggggaatattgcacaatgggggaaaccctgatgcagcgacgccgcgtggaggaagaaggtcttcggattgtaaactcctgttgttgaggaagataatgacggtactcaacaaggaagtgacggctaactacgtgccagcagccgcggtaaaacgtaggtcacaagcgttgtccggaattactgggtgtaaagggagcgcaggcgggaaggcaagttggaagtgaaatccatgggctcaacccatgaactgctttcaaaactgtttttcttgagtagtgcagaggtaggcggaattcccggtgtagcggtggaatgcgtagatatcgggaggaacaccagtggcgaaggcggcctactgggcaccaactgacgctgaggctcgaaagtgtgggtagcaaacaggattagataccctggtagtccacaccgtaaacgatgattactaggtgttggaggattgaccccttcagtgccgcagttaacacaataagttctccgcctggggagtatgcacgcaagtgtgaaactcaaaggaattgacgggggcccgcacaagcggtggagtatgtggtttaattcgaagcaacgcgaagaaccttaccaggccttgacatcccttgcagaggtatagagatatatccgaggttatcaaggagacaggtggtgcatggttgtcgtcagctcgtgtcgtgagatgttgggttaagtcccgcaacgagcgcaacccttatggtcagttactacgcaagaggactctggccagactgccgttgacaaaacggaggaaggtggggatgacgtcaaatcatcatgccctttatgacttgggctacacacgtactacaatggcgttaaacaaagagaagcaagaccgcgaggtggagcaaaactcagaaacaacgtcccagttcggactgcaggctgcaactcgcctgcacgaagtcggaattgctagtaatcgcagatcagcatgctgcggtgaatacgttcccgggccttgtactcaccgcccgtca

SEQ ID NO: 317 - DNA, 1357 bp, Artificial Sequence
  Synthetic polymer
agagtttgatcttggctcaggacgaacgctggcggcgcgcctaacacatgcaagtcgaacgagcgagagggagcttgctttctcgagcgagtggcgaacgggtgagtaacgcgtgaggaacctgcctcaaagagggggacaacagtcggaaacgactgctaataccgcataagcccacaggtcggcatcgaccagagggaaaaggagcaatccgctttgagatggcctcgcgtccgattagctagttggtgaggtaaaggcccaccaaggcgacgatcggtagccggactgagaggttgaacggccacattgggactgagacacggcccagactcctacgggaggcagcagtggggaatattgcacaatgggggaaaccctgatgcagcgacgccgcgtggaggaagaaggtcttcggattgtaaactcctgttgttgaggaagataatgacggtactcaacaaggaagtgacggctaactacgtgccagcagccgcggtaaaacgtaggtcacaagcgttgtccggaattactgggtgtaaagggagcgcaggcgggaagacaagttggaagtgaaatccatgggctcaacccatgaactgctttcaaaactgtttttcttgagtagtgcagaggtaggcggaattcccggtgtagcggtggaatgcgtagatatcgggaggaacaccagtggcgaaggcggcctactgggcaccaactgacgctgaggctcgaaagtgtgggtagcaaacaggattagataccctggtagtccacactgtaaacgatgattactgggtgttggaggattgaccccttcagtgccagcagttaacaccatatggaaatccacgtggggagtacgaccgcaaggttgagagctcaaaagaatagacgggggcccgctcaagcagtggagtaggtggtttaattgaacgcaacgcgaagacccttaccaagtcttgacatcctgcgacggacatagaaatatgtttttcattcgggacgcagagacaggtggtgcatggttgtcgtcagctcgtgtcgtgagatgtagggttaagtcccgcaacgagcgcaacccttatggtcagttactacgcaagaggactctggccagactgccgttgacaaaacggaggaaggtggggatgacgtcaaatcatcatgccctttatgacttgggctacacacgtactacaatggcgttaaacaaagagaagcaagaccgcgaggtggagcaaaactcagaaacaacgtcccagttcggactgcaggctgcaactcgcctgcacgaagtcggaattgctagtaatcgcagatcagcatgctgcggtgaataagatcccgggccttg

SEQ ID NO: 318 - DNA, 1387 bp, Artificial Sequence
  Synthetic polymer
ttcgcccttagagtttgtatcctggctcaggacgaacgctggcggcacgcttaacacatgcaagtcgaacgagagaagagaagcttgcttttctgatctagtggcggacggggtgagtaacacgtgagcaatctgcctttcagagggggataccgattggaaacgatcgttaataccgcataacataattgaaccgcgtgatttgattatcaaagatttatcgctgaaagatgagctcgcgtctgattagctagttggtaaggtaacggcttaccaaggcgacgatcagtagccggactgagaggttgatcggccacattgggactgagacacggcccagactcctacgggaggcagcagtggggaatattgcacaatggaggaaactctgatgcagcgatgccgcgtgagggaagaaggttttaggattgtaaacctctgtcttcggggacgaaaaaagacggtacctgaggaggaagctccggctaactacgtgccagcagccgcggtaatacgtagggagcgagcgttgtccggaattactgggtgtaaagggagcgtaggcgggatcgcaagtcagatgtgaaaactatgggcttaacccataaactgcatttgaaactgtggttcttgagtgaagtagaggtaagcggaattcctagtgtagcggtgaaatgcgtagatattaggaggaacatcagtggcgaaggcggcttactgggctttaactgacgctgaggctcgaaagcgtggggagcaaacaggattagataccctggtagtccacgccgtaaacgatgattactaggtgtggggggactgaccccttccgtgccgcagcaaacgcaataagtaatccacctggggagtacgaccgcaaggttgaaactcaaaggaattgacgggggcccgcacaagcagtggagtatgtggattaattcgaagcaacgcgaagaaccttaccaggtcttgacatccttctgaccggtccttaaccggacttttccttcgggacaggagtgacaggtggtgcatggttgtcgtcagctcgtgtcgtgagatgttgggttaagtcccgcaacgagcgcaacccctatctttagtagccagcatttcaggtgggcactctagagagactgccagggataacctggaggaaggtggggacgacgtcaaatcatcatgccccttatgatctgggcgacacacgtgctacaatggcggtcacagagtgaggcgaacccgcgagggggagcaaaccacaaaaaggccgtcccagttcggactgtagtctgcaacccgactacacgaagctggaatcgctagtaatcgcgaatcagaatgtcgcggtgaatacaaggccgggtcttgtactcaccgcccgtca

SEQ ID NO: 319 - DNA, 1381 bp, Artificial Sequence
  Synthetic polymer
agagtttgatcctggctcaggatgaacgctggcggcgtgcttaacacatgcaagtcgagcgaagcagttaagaagattcttcggatgattcttaactgactgagcggcggacgggtgagtaacgcgtgggtgacctgccccataccgggggataacagctggaaacggctgctaataccgcataagcgcacagagctgcatggctcggtgtgaaaaactccggtggtatgggatgggcccgcgtctgattaggcagttggcggggtaacggcccaccaaaccgacgatcagtagccggcctgagagggcgaccggccacattgagactgagacacggcccagactcctacgggaggcagcagtgggggatattgcgcaatgggggaaaccctgacgcagcaacgccgcgtgaaggatgaaggttttcggattgtaaacttcttttatttaggacgaagaatgacggtactaaatgaataagctccggctaactacgtgccagcagccgcggtaatacgtagggagcaagcgttatccggatttactgggtgtaaagggtgcgtaggcggcttggtaagtcagatgtgaaatgtatgggctcaacccatgcactgcatttgaaactattgagcttgagtgaagtagaggtaggcggaattccctgtgtagcggtgaaatgcgtagagatagggaggaacaccagtggcgaaggcggcctactgggctttaactgacgctgaggcacgaaagcgtgggtagcaaacaggattagataccctggtagtccacgctgtaaacgatgattactaggtgtggggggtctgaccccttccgtgccggagttaacacaataagtaatccacctggggagtacgaccgcaaggttgaaactcaaaggaattgacgggggcccgcacaagcagtggagtatgtggtttaattcgaagcaacgcgaagaaccttaccaggtcttgacatcgagtgacgaatctagagatagatttttccttcgggacacaaagacaggtggtgcatggttgtcgtcagctcgtgtcgtgagatgttgggttaagtcccgcaacgagcgcaacccttgctattagttgctacgcaagagcactctagtaggactgccgttgacaaaacggaggaaggtggggacgacgtcaaatcatcatgccccttatgacctgggctacacacgtactacaatggatgtaaacagagggaagcaaaatagcgatatggagcaaaccccaaaaagcattctcagttcagattgcaggctgcaactcgcctgtatgaagttggaattgctagtaatcgcggatcagcatgccgcggtgaatacgttcccgggccttgcacacaccgcccgtca

SEQ ID NO: 320 - DNA, 1376 bp, Artificial Sequence
  Synthetic polymer
ttcgcccttagagtttgatcctggctcaggacgaacgctggcggcgcgcctaacacatgcaagtcgaacggtgaagaggagcttgctcctcggatcagtggcggacgggtgagtaacacgtgagcaacctgcctttcagtgggggacaacagttggaaacgactgctaataccgcataacgtgccggaggggcatccttttggtaccaaagatttatcgctggaagatgggctcgcgtctgattagatagttggtgaggtaacggctcaccaagtcgacgatcagtagccggactgagaggttgatcggccacattgggactgagacacggcccagactcctacgggaggcagcagtggggaatattggacaatgggggaaacccttatccagcgacgccgcgtgagggaagaaggttttcggattgtaaacctctgtcagtggggacgataatgacggtacccacggaggaagccacggctaactacgtgccagcagccgcggtaatacgtaggtggcaagcgttgtccggaattactgggtgtaaagggagcgtaggcgggatgtcaagtcagaagtgaaaattatgggctcaactcataacctgcttttgaaactgatattcttgagtgaagtagaggcaagcggaattcctagtgtagcggtgaaatgcgtagatattaggaggaacaccagtggcgaaggcggcttgctgggcttttactgacgctgaggctcgaaagcgtggggagcaaacaggattagataccctggtagtccatgctgtaaacgatgattactaggtgtggggggattgaacccttccgtgccggagttaacacaataagtaatccacctggggagtacgaccgcaaggttgaaactcaaaggaattgacgggggcccgcacaagcagtggagtatgtggattaattcgatgcaacgcgaagaaccttaccaggtcttgacatcaagtgcaagtcccagagatgggatcctctcttcggagacacgaagacaggtggtgcatggttgtcgtcagctcgtgtcgtgagatgttgggttaagtcccgcaacgagcgcaacccttatgattagttgctacgcaagagcactctgatcagactgccgttgacaaaacggaggaaggtggggatgaggtcaaatcatcatgccccttatgatttgggctacacacgtgctacaatggcgtaaacagagggaagcgaacccgcgagggggagcaaatcccaaaaataacgtcccagttcggattgtagcctgcaacccggctacatgaagctggaatcgctagtaatcgcgaatcagaatgtcgcggtgaatacgttcccgggtcttgcactcaccgcccgtca

SEQ ID NO: 321 - DNA, 1401 bp, Artificial Sequence
  Synthetic polymer
ttcgcccttagagtttgatcctggctcaggacgaacgctggcggcgcgcctaacacatgcaagtcgaacggaactgttttgaaagatttcttcggaatgaatttgatttagtttagtggcggacgggtgagtaacgcgtgagtaacctgccttcaagagggggataacattctgaaaagaatgctaataccgcatgacatatcggaaccacatggttttgatatcaaagattttatcgcttgaagatggactcgcgtccgattagttagttggtgaggtaacggctcaccaagaccgcgatcggtagccggactgagaggttgaacggccacattgggactgagacacggcccagactcctacgggaggcagcagtgggggatattgcgcaatgggggcaaccctgacgcagcaacgccgcgtgaaggatgaaggttttcggattgtaaacttcttttattaaggacgaaaaatgacggtacttaatgaataagctccggctaactacgtgccagcagccgcggtaatacgtagggagcaagcgttgtccggatttactgggtgtaaagggtgcgtaggcggctttgcaagtcagatgtgaaatctatgggctcaacccataaactgcatttgaaactgtagagcttgagtgaagtagaggcaggcggaattccccgtgtagcggtgaaatgcgtagagatggggaggaacaccagtggcgaaggcgactctctggactgtaactgacgctgaggcacgaaagcgtggggagcaaacaggattagataccctggtagtccacgccgtaaacgatgagtactagctgttggaggattgaccccttcagtgccgcagttaacacaataagtaatccacctggggagtacgaccgcaaggttgaaactcaaaggaattgacgggggcccgcacaagcagtggagtatgtggtttaattcgacgcaacgcgaagaaccttaccaagtcttgacatcccttgacaggcatagaaatatgttttctcttcggagcaaggagacaggtggtgcatggttgtcgtcagctcgtgtcgtgagatgttgggttaagtcccgcaacgagcgcaacccctatcctcagtagccagcaagttaagttgggcactctggggagactgccagggataacctggaggaaggcggggatgacgtcaaatcatcatgccccttatgatttgggctacacacgtgctacaatggcgtaaacaaagggaagcgagattgtgagatggagcaaatcccaaaaataacgtcccagttcggactgtagtctgcaacccgactacacgaagctggaatcgctagtaatcgcggatcagaatgccgcggtgaatacgttcccgggtcttgcacacaccgcccgtca

SEQ ID NO: 322 - DNA, 1389 bp, Artificial Sequence
  Synthetic polymer
agagtttgatcctggctcaggatgaacgctggcggcgtgcttaacacatgcaagtcgaacgaagcaccttacctgattcttcggatgaaggtctggtgactgagtggcggacgggtgagtaacgcgtgggtaacctgccctgtacagggggataacagttggaaacggctgctaataccgcataagcacacgagaggacatcctcttgtgtgaaaaactccggtggtacaggatgggcccgcgtctgactagctggttggcagggtaacggcctaccaaggcgacgatcagtagccggtctgagaggatgaacggccacattggaactgagacacggtccaaactcctacgggaggcagcagtggggaatattgcacaatgggggaaaccctgatgcagcaacgccgcgtgagtgaagaagtatttcggtatgtaaagctctatcagcagggaagataatgacggtacctgactaagaagctccggctaaatacgtgccagcagccgcggtaatacgtatggagcaagcgttatccagatttactgggtgtaaagggtgcgtaggtggcagtgcaagtcagatgtgaaaggccggggctcaaccccggagctgcatttgaaactgctcggctagagtacaggagaggcaggcggaattcctagtgtagcggtgaaatgcgtagatattaggaggaacaccagtggcgaaggcggcttactggacggtaactgacgttgaggctcgaaagcgtggggagcaaacaggattagataccctggtagtccacgccgtaaacgatgaatactaggtgtcagggagcacagctctttggtgccgccgcaaacgcattaagtattccacctggggagtacgttcgcaagaatgaaactcaaaggaattgacggggacccgcacaagcggtggagcatgtggtttaattcgaagcaacgcgaagaaccttaccaaatcttgacatccctctgaccgggacttaaccgtccctttccttcgggacaggggagacaggtggtgcatggttgtcgtcagctcgtgtcgtgagatgttgggttaagtcccgcaacgagcgcaacccctatccttagtagccagcacgtaatggtgggcactctgaggagactgccagggataacctggaggaaggcggggatgacgtcaaatcatcatgccccttatgatttgggctacacacgtgctacaatggcgtaaacaaagggaagcaaagctgtgaagccgagcaaatctcaaaaataacgtctcagttcggactgtagtctgcaacccgactacacgaagctggaatcgctagtaatcgcagatcagaatgctgcggtgaatacgttcccgggtcttgcactcaccgcccgtca

SEQ ID NO: 323 - DNA, 1372 bp, Artificial Sequence
  Synthetic polymer
agagtttgatcctggctcaggacgaacgctggcggcgtgcctaacacatgcaagtcgaacggagttgaaaggagcttgcttttttcaactcagtggcggacgggtgagtaacgcgtgagtaacctgcctttcagagggggataacgttctgaaaagaacgctaataccgcataagattgtagcttcgcatggagcagcaatcaaaggagcaatccgctgaaagatggactcgcgtccgattagatagttggcggggtaacggcccaccaagtcgacgatcggtagccggactgagaggttgatcggccacattgggactgagacacggcccagactcctacgggaggcagcagtgagggatattgcacaatgggggaaaccctgatgcagcgacgccgcgtggaggaagaaggtcttcggattgcaaactcctgttgttggggaagataatgacggtacccaacaaggaagtgacggctaactacgtgccagcagccgcggtaaaacgtaggtcacaagcgttgtccggaattactgggtgtaaagggagcgcaggcgggaagacaagttggaagtgaaatctatgggctcaacccataaactgctttcaaaactgtttttcttgagtagtgcagaggtaggcggaattcccggtgtagcggtggaatgcgtagatatcgggaggaacaccagtggcgaaggcggcctactgggcaccaactgacgctgaggctcgaaagtgtgggtagcaaacaggattagataccctggtagtccacaccgtaaacgatgattactaggtgttgggggattgaccccctcagtgccgcagttaacacaataagtaatccacctggggagtacgaccgcaaggttgaaactcaaaggaattgacgggggcccgcacaagcagtggagtatgtggtttaattcgacgcaacgcgaagaaccttaccaagtcttgacatcccttgacaggcatagaaatatgttttctcttcggagcaaggagacaggtggtgcatggttgtcgtcagctcatgtcgtgagatgttgggttaagtcccgcaacgagcgcaacccttattgccagttactacgtaagaggactctggcgagactgccgttgacaaaacggaggaaggtggggatgacgtcaaatcatcatgccctttatgacctgggctacacacgtactacaatggcgtttaacaaagagaagcaagaccgcgaggtggagcaaaactcaaaaacaacgtctcagttcagattgcaggctgcaactcgcctgcatgaagtcggaattgctagtaatcgcggatcagcatgccgcggtgaatacgttcccgggccttgtacacaccgcccgtca

SEQ ID NO: 324 - DNA, 1367 bp, Artificial Sequence
  Synthetic polymer
agagtttgatcctggctcaggatgaacgctggcggcgcgcctaacacatgcaagtcgaacggcacctatcttcggatagaagcgagtggcgaacggctgagtaacacgtggagaacctgccccctcccccgggatagccgcccgaaaggacgggtaataccggatacccccgggcgccgcatggcgcccgggctaaagccccgacgggaggggatggctccgcggcccatcaggtagacggcggggtgacggcccaccgtgccgacaacgggtagccgggttgagagatcgaccggccagattgggactgagacacggcccagactcctacgggaggcagcagtggggaatcttgcgcaatggggggaaccctgacgcagcgacgccgcgtgcgggacggaggccttcgggtcgtaaaccgctttcagcagggaagagtcaagactgtacctgcagaagaagccccggctaactacgtgccagcagccgcggtaatacgtagggggcgagcgttatccggattcattgggcgtaaagcgcgcgtaggcggcccggcaggccgggggtcgaagcggggggctcaaccccccgaagcccccggaacctccgcggcttgggtccggtaggggagggtggaacacccggtgtagcggtggaatgcgcagatatcgggtggaacaccggtggcgaaggcggccctctgggccgagaccgacgctgaggcgcgaaagctgggggagcgaacaggattagataccctggtagtcccagccgtaaacgatggacactaggtgtggggggacgatccccccgtgcggcagccagtgcattaatgcgtcccgccgggggagtacggccgcaaggataaaattagaaggaatttaagggggccggcacaagcatcggagcatgtggattaaatggaagcaacgcgaagaaccttatcaggccctgacatatgggtgaagcgggggagaccccgtggccgagaggagcccatacaggtggtgcatggctgtcgtcagctcgtgtcgtgagatgttgggttaagtcccgcaacgagcgcaacccccgctgtgtgttgccatcgggtgatgccgggaacccacgcgggaccgccgccgtcaaggcggaggagggcggggacgacgtcaagtcaccatgccccttatgccctgggctgcacacgtgctacaatggccggtacagagggatgccaccccgcgagggggagcggatcccggaaagccggccccagttcggaaaagggggctgcaacccgcccccatgaagtcggagttgctagtaatcgcggatcagcatgccgcggtgaatgcgatcccgggccttgcactcaccgcccgtca

SEQ ID NO: 325 - DNA, 1380 bp, Artificial Sequence
  Synthetic polymer
ttcgcccttagagtttgatcctggctcaggacgaacgctggcggcgcgcctaacacatgcaagtcgaacgagcgagagagagcttgctttctcgagcgagtggcgaacgggtgagtaacgcgtgaggaacctgcctcaaagagggggacaacagttggaaacgactgctaataccgcataagcccacaggtcggcatcgaccagagggaaaaggagcaatccgctttgagatggcctcgcgtccgattagctagttggtgaggtaatggcccaccaaggcgacgatcggtagccggactgagaggttgaacggccacattgggactgagacacggcccagactcctacgggaggcagcagtggggaatattgcacaatgggcgaaagcctgatgcagcaacgccgcgtgagcgatgaaggccttcgggtcgtaaagctctgtcctcaaggaagataatgacggtacttgaggaggaagccccggctaactacgtgccagcagccgcggtaatacgtagggggctagcgttatccggaattactgggcgtaaagggtgcgtaggtggtttcttaagtcagaggtgaaaggctacggctcaaccgtagtaagcctttgaaactgggaaacttgagtgcaggagaggagagtggaattcctagtgtagcggtgaaatgcgtagatattaggaggaacaccagttgcgaaggcggctctctggactgtaactgacactgaggcacgaaagcgtggggagcaaacaggattagataccctggtagtccacgccgtaaacgatgattactaggtgtggggggactgaccccttccgtgccgcagcaaacgcaataagtaatccacctggggagtacgaccgcaaggttgaaacacaaaggaattgacgggggcccgcacaagcagtggagtatgtggattaattcgaagcaacgcgaagaaccttaccaggtcttgacatcgtatgcatagctcagagatgagtgaaatctcttcggagacatatagacaggtggtgcatggttgtcgtcagctcgtgtcgtgagatgttgggttaagtcccgcaacgagcgcaacccttactgttagttgctacgcaagagcactctagcaggactgccgttgacaaaacggaggaaggtggggatgacgtcaaatcatcatgccccttatgacctgggcctcacacgtactacaatggctgttaacagagggatgcaaagccgcgaggtggagcgaacccctaaaagcagtcttagttcggattgtaggctgcaacccgcctacatgaagtcggaattgctagtaatcgcagatcagcatgctgcggtgaatacgttcccgggccttgcacacaccgcccgtca

SEQ ID NO: 326 - DNA, 1390 bp, Artificial Sequence
  Synthetic polymer
agagtttgatcctggctcaggatgaacgctggcggcgtgcctaacacatgcaagtcgaacgaagcgatttggaggaagttttcggatggaatctgaattgactgagtggcggacgggtgagtaacgcgtgggtaacctgccctgtacagggggataacagttggaaacggctgctaataccgcataagcgcacgagaggacatcctcttgtgtgaaaaactccggtggtacaggatgggcccgcgtctgattagctggttggcagggtaacggcctaccaaggcgacgatcagtagccggtctgagaggatgaacggccacattggaactgagacacggtccaaactcctacgggaggcagcagtggggaatattgcacaatgggggaaaccctgatgcagcaacgccgcgtgagtgaagaagtatttcggtatgtaaagctctatcagcagggaagataatgacggtacctgactaagaagctccggctaaatacgtgccagcagccgcggtaatacgtatggagcaagcgttatccggatttactgggtgtaaagggtgcgtaggtggcagtgcaagtcagatgtgaaaggccggggctcaaccccggagctgcatttgaaactgcatagctggagtacaggagaggcaggcggaattcctagtgtagcggtgaaatgcgtagatattaggaggaacaccagtggcgaaggcggctttctggacgacaactgacgctgaggcgcgaaagtgtggggagcaaacaggattagataccctggtagtccacaccgtaaacgatggatactaggtgtaggaggtatcgaccccttctgtgccgcagttaacacaataagtatcccacctggggagtacgaccgcaaggttgaaactcaaaggaattgacgggggcccgcacaagcagtggagtatgtggtttaattcgaagcaacgcgaagaaccttacctgggcttgacatccctggaatcgagtagagatacttgagtgccttcgggaatcaggtgacaggtggtgcatggttgtcgtcagctcgtgtcgtgagatgttgggttaagtcccgcaacgagcgcaacccctattgtcagttgccatcattaagttgggcactctggcgagactgccggtgacaaatcggaggaaggtggggacgacgtcaaatcatcatgccccttatgcccagggctacacacgtactacaatggccgataacaaagtgcagcgaaaccgtgaggtggagcgaatcacaaaactcggtctcagttcagattgcaggctgcaactcgcctgcatgaagttggaattgctagtaatcgcggatcagaatgccgcggtgaatacgttcccgggccttgcactcaccgcccgtca

SEQ ID NO: 327 - DNA, 1380 bp, Artificial Sequence
  Synthetic polymer
tggctcaggatgaacgctggcggcgtgcttaacacatgcaagtcgagcgaagcgctttggaaagattcttcggatgatttcctttgtgactgagcggcggacgggtgagtaacgcgtgggtaacctgcctcatacaggggggataacagttagaaatgactgctaataccgcataagaccacggtaccgcatggtacagtggtaaaaactccggtggtatgagatggacccgcgtctgattaggtagttggtggggtaacggcctaccaagccgacgatcagtagccgacctgagagggtgaccggccacattgggactgagacacggcccagactcctacgggaggcagcagtggggaatattgcacaatggaggaaactctgatgcagcgacgccgcgtgaaggatgaagtatttcggtatgtaaacttctatcagcagggaagaaaatgacggtacctgactgagaagccccggctaactacgtgccagcagccgcggtaatacgtagggggcaagcgttatccggatttactgggtgtaaagggagcgtagacggcacggcaagccagatgtgaaagcccggggctcaaccccgggactgcatttggaactgctgagctagagtgtcggagaggcaagtggaattcctagtgtagcggtgaaatgcgtagatattaggaggaacaccagtggcgaaggcggcttgctggacgatgactgacgttgaggctcgaaagcgtggggagcaaacaggattagataccctggtagtccacgccgtaaacgatgaatactaggtgtcgggtggcaaagccattcggtgccgcagctaacgcaataagcagtccacctggggagtacgttcgcaagaatgaaactcaaaggaattgacggggacccgcacaagcggtggagcatgtggtttaattcgaagcaacgcgaagaaccttacctggtcttgacatccttctgaccggtccttaaccggacctttccttcgggacaggagtgacaggtggtgcatggttgtcgtcagctcgtgtcgtgagatgttgggttaagtcccgcaacgagcgcaacccttatcttcagtagccagcaagtgaagttgggcactctggagagactgccagggacaacctggaggaaggtggggatgacgtcaaatcatcatgccccttatgacttgggctacacacgtgctacaatggcgtaaacaaagggaagcagccctgtgaaggtgagcaaatcccaaaaataacgtctcagttcggattgtagtctgcaactcgactacatgaagctggaatcgctagtaatcgcgaatcagaatgtcgcggtgaatacgttcccgggtcttgcacacaccgcccgtca

SEQ ID NO: 328 - DNA, 1364 bp, Artificial Sequence
  Synthetic polymer
agagtttgatcctggctcaggatgaacgctggcggcgtgcctaacacatgcaagtcgagcgattctcttcggagaagagcggcggacgggtgagtaacgcgtgggtaacctgccctgtacacacggataacataccgaaaggtatgctaatacgagataatatgcttttatcgcatggtagaagtatcaaagctccggcggtacaggatggaccagcgtctgattagctagttggtaaggtaacggcttaccaaggcgacgatcagtagccgacctgagagggtgatcggccacattggaactgagacacggtccaaactcctacgggaggcagcagtggggaatattgcacaatgggcgaaagcctgatgcagcaacgccgcgtgagcgatgaaggccttcgggtcgtaaagctctgtcctcaaggaagataatgacggtacttgaggaggaagccccggctaactacgtgccagcagccgcggtaatacgtagggggctagcgttatccggaattactgggcgtaaagggtgcgtaggtggtttcttaagtcagaggtgaaaggctacggctcaaccgtagtaagcctttgaaactgggaaacttgagtgcaggagaggagagtggaattcctagtgtagcggtgaaatgcgtagatattaggaggaacaccagttgcgaaggcggctctctggactgtaactgacactgaggcacgaaagcgtggggagcaaacaggattagataccctggtagtccacgccgtaaacgatgaatactaggtgtcggggctcataagagcttcggtgccgcagcaaacgcaataagtattccacctggggagtacgttcgcaagaatgaaactcaaaggaattgacggggacccgcacaagcggtggagcatgtggtttaattcgaagcaacgcgaagaaccttaccaggccttgacatcccggtgaccgtcccgtaatggggacctctcttcggagcaccggtgacaggtggtgcatggttgtcgtcagctcgtgtcgtgagatgttgggttaagtcccgcaacgagcgcaacccctatgttcagtagccagcaggtaaagctgggcactctggacagactgccggggataacccggaggaaggcggggatgacgtcaaatcatcatgccccttacggcctgggctacacacgtgctacaatggcgtaaacaaagggaagcgagatcgtgagatggagcaaatcccaaaaataacgtcccagttcggactgtagtctgcagcccgactacacgaagctggagtcgctagtaatcgcagatcagaatgctgcggtgaatacgttcccgggtcttgcactcaccgcccgtca

SEQ ID NO: 329 - DNA, 1390 bp, Artificial Sequence
  Synthetic polymer
agagtttgatcctggctcaggatgaacgctggcggcgtgcctaacacatgcaagtcgaacgaagcaccttacctgattcttcggatgaaggtctggtgactgagtggcggacgggtgagtaacgcgtgggtaacctgccctgtacagggggataacagctggaaacggctgctaataccgcataagcgcacgaggagacatctcctagtgtgaaaaactccggtggtacaggatgggcccgcgtctgattagctggttggcagggtaacggcctaccaaggcaacgatcagtagccggtctgagaggatgaacggccacattggaactgagacacggtccaaactcctacgggaggcagcagtggggaatattgcacaatgggggaaaccctgatgcagcaacgccgcgtgagtgaagaagtatttcggtatgtaaagctctatcagcagggaagataatgacggtacctgactaagaagctccggctaaatacgtgccagcagccgcggtaatacgtatggagcaagcgttatccggatttactgggtgtaaagggtgcgtaggtggcagtgcaagtcagatgtgaaaggccggggctcaaccccggagctgcatttgaaactgctcggctagagtacaggagaggcaggcggaattcctagtgtagcggtgaaatgcgtagatattaggaggaacaccagtggcgaaggcggcctgctggactgttactgacactgaggcacgaaagcgtggggagcaaacaggattagataccctggtagtccacgccgtaaacgatgaatactaggtgtcggggccgtataggctccggtgccgccgctaacgcagtaagtattccacctggggagtacgttcgcaagaatgaaactcaaaggaattgacggggacccgcacaagcggtggagcatgtggtttaattcgaagcaacgcgaagaaccttaccaggtcttgacatccttctgaccgcaccttaatcggtgctttccttcgggacagaagagacaggtggtgcatggttgtcgtcagctcgtgtcgtgagatgttgggttaagtcccgcaacgagcgcaacccctatcttcagtagccagcaggtaaggctgggcactctggagagactgccagggataacctggaggaaggtggggacgacgtcaaatcatcatgccccttatgacttgggctacacacgtactacaatggcgttaaacaaagagaagcaagaccgcgaggtggagcaaaactcagaaacaacgtcccagttcggactgcaggctgcaactcgcctgcacgaagtcggaattgctagtaatcgtggatcagcatgccacggtgaatacgttcccgggccttgcacacaccgcccgtca

SEQ ID NO: 330 - DNA, 1405 bp, Artificial Sequence
  Synthetic polymer
agagtttgatcctggctcaggatgaacgctggcggcgtgcttaacacatgcaagtcgaacgaagcacctctcccgaagattgacacagcttgctgtagattgattcatttgaggtgactgagtggcggacgggtgagtaacgcgtgggtaacctgcctcatagagggggacaacagttggaaacgactgctaataccgcatagtaagaaagattcgcatgtttctttcttgaaagatttatcgctatgagatggacccgcgtctgattagctagttggtaaggtaacggcttaccaaggcgacgatcagtagccggcttgagagagtgaacggccacattgggactgagacacggcccaaactcctacgggaggcagcagtggggaatattgcacaatgggggaaaccctgatgcagcgacgccgcgtgagtgaagaagtatttcggtatgtaaagctctatcagcagggaagataatgacggtacctgactaagaagccccggctaactacgtgccagcagccgcggtaatacgtagggggcaagcgttatccggatttactgggtgtaaagggtgcgtaggtggcaaggcaagtcagatgtgaaagcccggggctcaaccccggtactgcatttgaaactgtctagctagagtgcaggagaggtaagcggaattcctagtgtagcggtgaaatgcgtagatattaggaggaacaccagtggcgaaggcggcttactggactgtaactgacactgaggcacgaaagcgtggggagcaaacaggattagataccctggtagtccacgccgtaaacgatgaatactaggtgtcggggagcacagctcttcggtgccgcagcaaacgcagtaagtattccacctggggagtacgttcgcaagaatgaaactcaaaggaattgacggggacccgcacaagcggtggagcatgtggtttaattcgaagcaacgcgaagaaccttaccaagtcttgacatccttctgacagagtatgtaatgtactttcccttcggggcaggagtgacaggtggtgcatggttgtcgtcagctcgtgtcgtgagatgttgggttaagtgccgcaacgagcgcaacccttatctttagtagccagcagtaagatgggcactctagagagactgccggggataacccggaggaaggtggggatgacgtcaaatcatcatgccccttatgaccagggctacacacgtgctacaatggcgtaaacaaagagaagcgaagtcgtgaggcagagcgaatctcaaaaataacgtctcagttcggattgtagtctgcaactcgactacatgaagctggaatcgctagtaatcgcagatcagaatgctgcggtgaatacgtgcccgggtcttgcacacatcgcccgtca

SEQ ID NO: 331 - DNA, 1376 bp, Artificial Sequence
  Synthetic polymer
agagtttgatcctggctcaggacgaacgctggcggcgcgcctaacacatgcaagtcgaacgagagagagggagcttgcttcctcaatcgagtggcgaacgggtgagtaacgcgtgaggaacctgcctcaaagagggggacaacagttggaaacgactgctaataccgcataagcccacaggtcggcatcgaccagagggaaaaggagcaatccgctttgagatggcctcgcgtccgattagctagttggtgaggtaacggcccaccaaggcaacgatcggtagccggactgagaggttgaacggccacattgggactgagacacggcccagactcctacgggaggcagcagtggggaatattgcacaatgggggaaaccctgatgcagcgacgccgcgtggaggaagaaggtcttcggattgtacactcctgttgttgaggaagataatgacggtactcaacaaggaagtgacggctaactacgtgccagcagccgcggtaaaacgtaggtcacaagcgttgtccggaattactgggtgtaaagggagcgcgggcgggaagacaagttggaagtgaaatctatgggctcaacccataaactgctttcaaaactgtttttcttgagtagtgcagaggtaggcggaattcccggtgtagcggtggaatgcgtagatatcgggaggaacaccagtggcgaaggcggcctactgggcaccaactgacgctgaggctcgaaagtgtgggtagcaaacaggattagataccctggtagtccacaccgtaaacgatgattactaggtgttggaggattgaccccttcagtgccgcagttaacacaataagtaatccacctggggagtacgaccgcaaggttgaaactcaaaggaattgacgggggcccgcacaagcagtggagtatgtggtttaattcgacgcaacgcgaagaaccttaccaagtcttgacatcctgcgacgatgctggaaacagtattttccttcgggacgcagagacaggtggtgcatggttgtcgtcagctcgtgtcgtgagatgttgggttaagtcccgcaacgagcgcaacccttactgtcagttactagcaggtagcgctgaggactctgatgagactgccggggacaactcggaggaaggtggggacgacgtcaaatcatcatgccccttatgacctgggctacaaacgtgctacaatggcggccacaaagaggggcgagactgtgaagttaagcggatctcaaaaaagccgtcccagttcggattgtgggctgcaacccgcccacatgaagttggagttgctagtaatcgcggatcagcatgccgcggtgaatacgttcccgggccttgcacacaccgcccgtca

SEQ ID NO: 332 - DNA, 1374 bp, Artificial Sequence
  Synthetic polymer
agagtttgatcctggctcaggacgaacgctggcggcgtgcctaacacatgcaagtcgaacgaagcattggaagcttgcttttgatgcttagtggcggacgggtgagtaacgcgtgagcaacctgcctttcagagggggataacgtttggaaacgaacgctaataccgcataacatatctgagtcgcatgattgagatatcaaaggagcaatccgctgaaagatgggctcgcgtccgattagctagttggcgggataacagcccaccaaggcgacgatcggtagccggactgagaggtcgaacggccacattgggactgagacacggcccagacttctacgggaggcagcagtgggggatattgcacaatggaggaaactctgatgcagcaacgccgcgtgagggaagaaggatctcggtttgtaaacctctgtcattggtgacgataatgacggtagccgatgaggaagctccggctaactacgtgccagcagccgcggtaatacgtagggagcgagcgttgtccggaattactgggtgtaaagggtgcgtaggcgggggaccaagtcaggtgtgaaaactatcggcttaaccggtagcctgcacttgaaactggccctcttgagtgaagtagaggcaggcggaattcccggtgtagcggtgaaatgcgtagagatcgggaggaacaccagtggcgaaggcggcctgctgggctttaactgacgctgaggcacgaaagcatgggtagcaaacaggattagataccctggtagtccatgccgtaaacgatgattactaggtgtgggtggtctgaccccatccgtgccggagttaacacaataagtaatccacctggggagtacggccgcaaggttgaaactcaaaggaattgacgggggcccgcacaagcagtggagtatgtggtttaattcgacgcaacgcgaagaaccttaccgggatttgacatcctactaacgaagtagagatacattaggtgcccttcggggaaagtagagacaggtggtgcatggttgtcgtcagctcgtgtcgtgagatgttgggttaagtcccgcaacgagcgcaacccctattgttagttgctacgcaagagcactctagcgagactgccgttgacaaaacggaggaaggcggggacgacgtcaaatcatcatgccccttatgtcccgggctacacacgtaatacaatggcggtcaacagagggaagcaaagccgcgaggcagagcaaacccctaaaagccgtctcagttcggattgcaggctgcaactcgcctgcatgaagttggaattgctagtaatcgtggatcagcatgccacggtgaatacgttcccgggccttgcacacaccgcccgtca

SEQ ID NO: 333 - DNA, 1386 bp, Artificial Sequence
  Synthetic polymer
agagtttgatcctggctcaggatgaacgctggcggcgtgcctaacacatgcaagtcgagcgagaagctgatgactgattcttcggatgagagattcagtggaaagcggcggacgggtgagtaacgcgtaggcaacctgccctttgcagagggatagccattggaaacgatgattaaaacctcataatacctttttcctgcataggagagaggtcaaagatttatcggcaaaggatgggcctgcgtctgattagctggttggtggggtaacggctcaccaaggcgacgatcagtagccgacctgagagggtgatcggccacattggaactgagacacggtccaaactcctacgggaggcagcagtggggaatattgcacaatgggcgaaagcctgatgcagcaacgccgcgtgaaggaggaaggccttcgggtcgtaaacttctgtccttgaggaagaagaaatgacggtactcaaggaggaagccccggctaactacgtgccagcagccgcggtaatacgtagggggcaagcgttatccggaattattgggcgtaaagagtgcgtaggtggttacctaagcgcagggtataaggcaatggctcaaccattgttggccctgcgaactgggctacttgagtgcaggagaggaaagcggaattcctagtgtagcggtgaaatgcgtagatattaggaggaacaccagtggcgaaggcggctttctggactgtaactgacactgaggcacgaaagcgtggggagcaaacaggattagataccctggtagtccacgccgtaaacgatgagcattaggtgtcggggccgcaaggcttcggtgccgcagtcaacgcattaagtgctccgcctggggagtacgcaagcaagtgtgaaactcaaaggaattgacggggacccgcacaagcagcggagcatgtggtttaattcgaagcaacgcgaagaaccttaccaggacttgacatccctctgacaggaccttaaccggttccttctacggacagaggagacaggtagtgcatggttgtcgtcagctcgtgtcgtgagatgttgggttaagtcccgcaacgagcgcaacccttgccattagttgccagcagtaagatgggcactctaatgggaccgccggggacaactcggaggaaggtggggatgacgtcaaatcatcatgccccttatgttctgggctacacacgtgctacaatggccggtacagaaagtcgcgaagccgcgaggcggagccaatctcgaaaaccggtcccagttcggactgcaggctgaaacccgcaatgcacgaagtcggagttgctagtaatcgcggatcagcatgccgcggtgaatgcgttcccgggtcttgcacaaagcgcccgtca

SEQ ID NO: 334 - DNA, 1371 bp, Artificial Sequence
  Synthetic polymer
agtttgatcctggctcaggacgaacgctggcggcacgcttaacacatgcaagtcgaacgagagaagagaagcttgcttttctgatctagtggcggacgggtgagtaacacgtgagcaatctgcctttcagagggggataccgattggaaacgatcgttaataccgcataatataattgaaccgcatgatttgattatcaaagatttatcgctgaaagatgagctcgcgtctgattagctagttggtaaggtaacggcttaccaaggcgacgatcagtagccggactgagaggttgatcggccacattgggactgagacacggcccaaactcctacgggaggcagcagtggggaatattgcacaatgggggaaaccctgatgcagcgacgccgcgtggaggaagaaggtcttcggattgtaaactcctgttgttgaggaagataatgacggtactcaacaaggaagtgacggctaactacgtgccagcagccgcggtaaaacgtaggtcacaagcgttgtccggaattactgggtgtaaagggagcgcaggcgggaagacaagttggaagtgaaatccatgggctcaacccatgaactgctttcaaaactgtttttcttgagtagtgcagaggtaggcggaattcccggtgtagcggtggaatgcgtagatatcgggaggaacaccagtggcgaaggcggcctactgggcaccaactgacgctgaggctcgaaagtgtgggtagcaaacaggattagataccctggtagtccacaccgtaaacgatgattacttaggggtggaggattgaccccttcagagccgcaagttaacacaaataagtaatccaccctgggggagttacgaccgcaaggttgaaactcaaagaaattgacgggggcccgcacaagcagtggagtatgtggtttaattggacgcaacgcgaagaaccttaccaagtcttgacatcctacgacgatgctggaaacagtattttccttcgggacgcagagacaggtggtgcatggttgtcgtcagctcgtgtcgtgagatgttgggttaagtcccgcaacgagcgcaacccttactgtcagttactacgcaagaggactctggcaggactgccgttgacaaaacggaggaaggtggggatgacgtcaaatcatcatgccctttatgacttgggctacacacgtactacaatggcgttaaacaaagagaagcaagaccgcgaggtggagcaaaactcagaaacaacgtcccagttcggactgcaggctgcaactcgcctgcacgaagtcggaattgctagtaatcgtggatcagcatgccacggtgaatacgttcccgggccttgtacacaccgcccgtca

SEQ ID NO: 335 - DNA, 1402 bp, Artificial Sequence
  Synthetic polymer
agagtttgatcctggctcaggatgaacgctagcgacaggcctaacacatgcaagtcgaggggcagcggggaggtagcaatacctttgccggcgaccggcgcacgggtgagtaacacgtatgcaatccacctgtaacagggggataacccggagaaatccggactaataccccataatatgggcgctccgcatggagagtccattaaagagagcaatcttggttacagacgagcatgcgctccattagccagttggcggggtaacggcccaccaaggcgacgatggataggggttctgagaggaaggtcccccacattggaactgagacacggtccaaactcctacgggaggcagcagtgaggaatattggtcaatggtcggcagactgaaccagccaagtcgcgtgagggaagacggccctacgggttgtaaacctcttttgtcggagagtaaagtgcgctacgcgtagcgtattgcaagtatccgaagaaaaagcatcggctaactccgtgccagcagccgcggtaatacggaggatgcgagcgttatccggatttattgggtttaaagggtgcgtaggcggcacgccaagtcagcggtgaaatttccgggctcaatccggactgtgccgttgaaactggcgagctagagtgcacaagaggcaggcggaatgcgtggtgtagcggtgaaatgcatagatatcacgcagaaccccgattgcgaaaggcagcctgccaagccattactgacgctgatgcacgaaagcgtgggggatcaaccaggattagataccctggtagtccacgcagtaaacgatgatcactagctgtttgcgatacactgtaagcggcacagcgaaagcgttaagtgatccacctggggagtacgccggcaacggtgaaactcaaaggaattgacgggggcccgcacaagcggaggaacatgtggtttaattcgatgatacgcgaggaaccttacccgggtttgaacgcattcggaccgaggtggaaacaccttttctagcaatagccgtttgcgaggtgctgcatggttgtcgtcagctcgtgccgtgaggtgtcggcttaagtgccataacgagcgcaacccttgccactagttactaacaggtaaagctgaggactctggtgggactgccagcgtaagctgcgaggaaggcggggatgacgtcaaatcagcacggcccttacatccggggcgacacacgtgttacaatggcgtggacaaagggaagccacctggcgacagggagcgaatccccaaaccacgtctcagttcggatcggagtctgcaacccgactccgtgaagctggattcgctagtaatcgcgcatcagccatggcgcggtgaatacgttcccgggccttgtacacaccgcccgtca

SEQ ID NO: 336 - DNA, 1389 bp, Artificial Sequence
  Synthetic polymer
ttcgcccttagagtttgatcctggctcaggacgaacgctggcggcgtgcctaacacatgcaagtcgaacggagatatttatttcggtagatatcttagtggcgcacgggtgagtaacgcgtgaataacctgacccgaagagggggataacacctggaaacaagtgctaataccgcataagaccacggaccggcatcggtcagaggtcaaaggaggaatccgctttgggaggggttcgcgtcccattaggtagttggtgaggtaacggcccaccaagccgacgatgggtagccgagctgagaggctgatcggccacactggaactgagacacggtccagactcctacgggaggcagcagtggggaatattgggcaatgggcgcaagcctgacccagcaacgccgcgtgagggaagaaggttttcggattgtaaacctctgtcgcaggggacgaaggaagtgacggtaccctgtaagaaagccccggctaactacgtgccagcagccgcggtaatacgtagggggcgagcgttgtccggaattactgggcgtaaagggagcgtaggcggtcgattaagttagatgtgaaacccccgggcttaacttggggactgcatctaatactggttgacttagagtacaggagagggaagcggaattcctagtgtagcggtgaaatgcgtagatattaggaggaacaccagtggcgaaggcggctttctggaccgacactgacgctgaggctcgaaagcgtggggagcaaacaggattagataccctggtagtccacgctgtaaacgatgaatactaggtgtagggggtatcaactccctctgtgccgcagcaaacgcaataagtattccgcctggggagtacggccgcaaggttgaaactcaaaggaattgacgggggcccgcacaagcagcggagcatgtggtttaattcgaagcaacgcgaagaaccttaccaagtcttgacatctccctgacagagtatgtaatgtacttttccttcgggacagggaagacaggtggtgcatggttgtcgtcagctcgtgtcgtgagatgttgggttaagtcccgcaacgagcgcaacccttatcctcagtagccagcggttcggccgggcactctgtggagactgccagggataacctggaggaaggtggggatgacgtcaaatcatcatgccccttatgacttgggctacacacgtgctacaatggcgtaaacaaagggaagcaagagagcgatctggagcaaatcccaaaaataacgtcccagttcggattgtagtctgcaactcgactacatgaagctggaatcgctagtaatcgcgaatcagaatgtcgcggtgaatacgttcccgggtcttgtacacaccgcccgtca

SEQ ID NO: 337 - DNA, 1351 bp, Artificial Sequence
  Synthetic polymer
agagtttgatcctggctcaggatgaattttggcggcgtgcctaacacatgcaagtcgaacgatgaaaccgccctcgggcggacatgaagtggcgaacgggtgagtaacacgtgaccaacctgccccttgctccgggacaaccttgggaaaccgaggctaataccggatactcctcgcccccctcctggggggcccgggaaagcccagacggcaagggatggggtcgcggcccattaggtagtaggcggggtaacggcccacctagcccgcgatgggtagccgggttgagagaccgaccggccacattgggactgagatacggcccagactcctacgggaggcagcagtggggaattttgcgcaatgggggaaaccctgacgcagcaacgccgcgtgcgggacgacggccttcgggttgtaaaccgctttcagcagggaagaaattcgacggtacctgcagaagaagctccggctaactacgtgccagcagccgcggtaatacgtagggagcgagcgttatccggattcattgggcgtaaagcgcgcgtaggcggcccggcaggccgggggtcgaagcggggggctcaaccccccgaagcccccggaacctccgcggcttgggtccggtaggggagggtggaacacccggtgtagcggtggaatgcgcagatatcgggtggaacaccggtggcgaaggcggccctctgggccgagaccgacgctgaggcgcgaaagctgggggagcgaacaggattagataccctggtagtcccagccgtaaacgatggacgctaggtgtggggggacgatccccccgtgccgcagccaacgcattaagcgtcccgcctggggagtacggccgcaaggctaaaaactcaaaggaattgacgggggcccgcacaagcagcggagcatgtggcttaattcgaagcaacgcgaagaaccttaccagggcttgacatatgggtgaagcgggggagaccccgtggccgagagggagcccatacaggtggtgcatggctgtcgtcagctcgtgtcgtgagatgttgggttaagtcccgcaacgagcgcaacccccgccgcgtgttgccatcgggtgatgccgggaacccacgcgggaccgccgccgtcaaggcggaggagggcggggacgacgtcaagtcatcatgccccttatgccctgggctgcacacgtgctacaatggccggtacagagggatgccaccccgcgagggggagcggatcccggaaagccggccccagttcggattgggggctgcaacccgcccccatgaagtcggagttgctagtaatcgcggatcagcatgccgcggtgaatgcgttcccgggc

SEQ ID NO: 338 - DNA, 1392 bp, Artificial Sequence
  Synthetic polymer
agagtttgatcctggctcaggatgaacgctggcggcgtgcttaacacatgcaagtcgaacgaagcatttgcaacagatttcttcggattgaagttgcttatgactgagtggcggacgggtgagtaacgcgtgggtaacctgcctcatacagggggatagcagctggaaacggctggtaataccgcataagcgcacagtaccacatggtacagtgtgaaaaactccggtggtatgagatggacccgcgtctgattagctagttggcggggtaacggcccaccaaggcgacgatcagtagccgacctgagagggtgaccggccacattgggactgagacacggcccagactcctacgggaggcagcagtggggaatattgcacaatggaggaaactctgatgcagcgacgccgcgtgagtgaagaagtagttcgctatgtaaagctctatcagcagggaagatagtgacggtacctgactaagaagctccggctaaatacgtgccagcagccgcggtaatacgtatggagcaagcgttatccggatttactgggtgtaaagggagtgtaggtggccaggcaagtcagaagtgaaagcccggggctcaaccccgggactgcttttgaaactgcagggctagagtgcaggaggggcaaatggaattcctagtgtagcggtgaaatgcgtagatattaggaggaacaccagtggcgaaggcggcttgctggactgtaactgacgttgaggctcgaaagcgtggggagcaaacaggattagataccctggtagtccacgccgtaaacgatgaatactaggtgttggggagcaaagctcttcggtgccgccgcaaacgcattaagtattccacctggggagtacgttcgcaagaatgaaactcaaaggaattgacggggacccgcacaagcggtggagcatgtggtttaattcgaagcaacgcgaagaaccttaccaagtcttgacatccctctgaccgttccttaaccggaactttccttcgggacaggggagacaggtggtgcatggttgtcgtcagctcgtgtcgtgagatgttgggttaagtcccgcaacgagcgcaacccctatccccagtagccagcggttcggccgggcactctgaggagactgccagggataacctggaggaaggcggggatgacgtcaaatcatcatgccccttatgatttgggctacacacgtgctacaatggcgtaaacaaagagaagcgaactcgcgagggtaagcaaatctcaaaaataacgtctcagttcggattgtagtctgcaactcgactacatgaagctggaatcgctagtaatcgcagatcagaatgctgcggtgaatacgttcccgggtcttgtacacaccgcccgtca

SEQ ID NO: 339 - DNA, 1389 bp, Artificial Sequence
  Synthetic polymer
agagtttgatcctggctcaggatgaacgctggcggcgtgcttaacacatgcaagtcgaacgggaattactttattgaaacttcggtcgatttaatttaattctagtggcggacgggtgagtaacgcgtgggtaacctgccttatacagggggataacagtcagaaatggctgctaataccgcataagcgcacagagctgcatggctcagtgtgaaaaactccggtggtataagatggacccgcgttggattagctggttggcagggtaacggcctaccaaggcgacgatcagtagccggtctgagaggatgaacggccacattggaactgagacacggtccaaactcctacgggaggcagcagtggggaatattgcacaatgggggaaaccctgatgcagcaacgccgcgtgagtgaagaagtatttcggtatgtaaagctctatcagcagggaagataatgacggtacctgactaagaagctccggctaaatacgtgccagcagccgcggtaatacgtatggagcaagcgttatccggatttactgggtgtaaagggtgcgtaggtagcagtgcaagtcagatgtgaaaggccggggctcaaccccggagctgcatttgaaactgcatagctagagtacaggagaggcaggcggaattcctagtgtagcggtgaaatgcgtagatattaggaggaacaccagtggcgaaggcggcctgctggactgttactgacactgaggcacgaaagcgtggggagcaaacaggattagataccctggtagtccacgccgtaaacgatgaatactaggtgtcggggccgtataggcttcggtgccgtcgcaaacgcagtaagtattccacctggggagtacgttcgcaagaatgaaactcaaaggaattgacggggacccgcacaagcggtggagcatgtggtttaattcgaagcaacgcgaagaaccttaccaggtcttgatatcccgatgaccgcttcttaatcgaagcttttcttcggaacatcggagacaggtggtgcatggttgtcgtcagctcgtgtcgtgagatgttgggttaagtcccgcaacgagcgcaacccctattttcagtagccagcattttggatgggcactctggagagactgcccgggataaccgggaggaaggtggggatgacgtcaaatcatcatgccccttatgtcctgggccacacacgtactacaatggtggttaacagagggaggcaataccgcgaggtggagcaaacccctaaaagccatcccagttcggattgcaggctgcaacccgcctgcatgaagttggaatcgctagtaatcgcggatcagcatgccgcggtgaatacgttcccgggccttgtacacaccgcccgtca

SEQ ID NO: 340 - DNA, 1389 bp, Artificial Sequence
  Synthetic polymer
agagtttgatcctggctcaggatgaacgctggcggcgtgcctaacacatgcaagtcgaacgaagcaccttacctgattcttcggatgaaggtctggtgactgagtggcggacgggtgagtaacgcgtgggtaacctgccctgtacagggggataacagctggaaacggctgctaataccgcataagcgcacgaggagacatctcctagtgtgaaaaactccggtggtacaggatgggcccgcgtctgattagctggttggcagggtaacggcctaccaaggcaacgatcagtagccggtctgagaggatgaacggccacattggaactgagacacggtccaaactcctacgggaggcagcagtggggaatattgcacaatgggggaaaccctgatgcagcaacgccgcgtgagtgaagaagtatttcggtatgtaaagctctatcagcagggaagataatgacggtacctgactaagaagctccggctaaatacgtgccagcagccgcggtaatacgtatggagcaagcgttatccggatttactgggtgtaaagggtgcgtaggtggcagtgcaagtcagatgtgaaaggccggggctcaaccccggagctgcatttgaaactgctcggctagagtacaggagaggcaggcggaattcctagtgtagcggtgaaatgcgtagatattaggaggaacaccagtggcgaaggcggcctgctggactgttactgacactgaggcacgaaagcgtggggagcaaacaggattagataccctggtagtccacgccgtaaacgatgaatactaggtgtcggggccgtataggcttcggtgccgccgctaacgcagtaagtattccacctggggagtacgttcgcaagaatgaaactcaaaggaattgacggggacccgcacaagcggtggagcatgtggtttaattcgaagcaacgcgaagaaccttaccaggtcttgacatccttctgaccgcaccttaatcggtgctttccttcgggacagaagagacaggtggtgcatggttgtcgtcagctcgtgtcgtgagatgttgggttaagtcccgcaacgagcgcaacccctatcttcagtagccagcaggtaaggctgggcactctggagagactgccagggataacctggaggaaggtggggacgacgtcaaatcatcatgccccttatgcttagggctacacacgtgctacaatgggtggtacagagggcagccaagtcgtgaggcggagctaatcccttaaagccattctcagttcggattgtaggctgaaactcgcctacatgaagctggagttactagtaatcgcagatcagaatgctgcggtgaatgcgttcccgggtcttgtactcaccgcccgtca

SEQ ID NO: 341 - DNA, 1381 bp, Artificial Sequence
  Synthetic polymer
agagtttgatcctggctcaggatgaacgctggcggcgtgcttaacacatgcaagtcgaacgattgaagctggagcttgctccggccgatttagtggcggacgggtgagtaacgcgtgggtaacctgcctcatacagggggatagcagttggaaacgactggtaaaaccgcataagcgcacggtgtcgcatgacacagtgtgaaaacactccggtggtatgagatggacccgcgtctgattagctagttggcgaggtaacggcccaccaaggcgacgatcagtagccggcctgagagggtgaacggccacattgggactgagacacggcccaaactcctacgggaggcagcagtggggaatattgcacaatgggggaaaccctgatgcagcgacgccgcgtgagtgatgaagtatttcggtatgtaaagctctatcagcagggaagataatgacggtacctgactaagaagcaccggctaaatacgtgccagcagccgcggtaatacgtatggtgcaagcgttatccggatttactgggtgtaaagggtgcgtaggtggcaaggcaagtctgaagtgaaaatccggggctcaaccccggaactgctttggaaactgtttagctagagtacaggagaggtgagtggaattcctagtgtagcggtgaaatgcgtagatattaggaggaataccagtggcgaaggcgacttactggactgctactgacactgaggcacgaaagcgtggggagcaaacaggattagataccctggtagtccacgccgtaaacgatgaatactaaggtgttgggttccaaaagggactcggtgccgtcgcaaacgcattaagtattccacctggggagtacgttcgcaagaaatgaaactcaaaggaattgacggggacccgcacaagcggtggagcatgtggtttaattcgaagcaacgcgaaaaaccttaccaagtcttgacatcctgatgacagttccttaaccggaacttctcttcggagcatcagagacaggtggtgcatggttgtcgtcagctcgtgtcgtgagatgttgggttaagtcccgcaacgagcgcaacccctatttccagtagccagcagtaagatgggcactctggagagactgccggggataacccggaggaaggtggggatgacgtcaaatcatcatgccccttatgatttgggctacacacgtgctacaatggcagttacaaagagaagcaaacctgtgaaggcgagcaaacctcaaaaaggctgtctcagttcggattgtagtctgcaactcgactacatgaagctggaatcgctagtaatcacagatcagcatgctgcggtgaatacgttccgcgggtcttgcactcaccgcccgtca

SEQ ID NO: 342 - DNA, 1431 bp, Artificial Sequence
  Synthetic polymer
gacgaacgctggcggcgtgcctaacacatgcaagtcgagcgatgaagcccttcggggcggattagcggcggacgggtgagtaacacgtgggtaacctgcctcatagagggggatagccttccgaaaggaagattaataccgcataacatgtcagtgccgcatggcacagacatcaaaggagcaatccgctatgagatggacccgcggcgcattagctagttggtgaggtaacggcccaccaaggcgacgatgcgtagccgacctgagagggtgatcggccacattggaactgagacacggtccagactcctacgggaggcagcagtggggaatattgcgcaatgggggaaaccctgacgcagcaacgccgcgtgaatgaagaaggccttcgggttgtaaagttctgtttacggggacgataatgacggtacccgtggaggaagccacggctaactacgtgccagcagccgcggtaatacgtaggtggcaagcgttgtccggatttactgggcgtaaaggatgcgtaggcggatgtttaagtgagatgtgaaatacccgggctcaacttgggtgctgcatttcaaactggacgtctagagtgcaggagaggaaagcggaattcctagtgtagcggtgaaatgcgtagagattgggaagaacaccagtggcgaaggcggctttctggactgtaactgacgctgaggcatgaaagcgtggggagcaaacaggattagataccctggtagtccacgccgtaaacgatgagtactaggtgtaggaggtatcgactccttctgtgccgcagttaacacaataagtactccgcctgggaagtacgatcgcaagattaaaactcaaaggaattgacgggggcccgcacaagcagcggagcatgtggtttaattcgaagcaacgcgaagaaccttacctagacttgacatctcctgaattacccttaaccggggaagtccttcggggcaggaagacaggtggtgcatggttgtcgtcagctcgtgtcgtgagatgttgggttaagtcccgcaacgagcgcaacccttatcattagttgctaccattaagttgagcactctagtgagactgccacggttaacgtggaggaaggtggggatgacgtcaaatcatcatgccccttatgtctagggctacacacgtgctacaatggcaaatacaaagagatgcgataccgcgaggtggagccaaactataaaacttgtcccagttcggattgcagtctgaaactcgactgcatgaagccggagttgctagtaatcgcgaatcagcatgtcgcggtgaatacgttcccgggccttgtacacaccgcccgtcacaccatgagagctggtaacacccgaagtccgtgaggtaaccgcaaggagccagcggccgaaggtgggattagtgattggggtg

SEQ ID NO: 343 - DNA, 1398 bp, Artificial Sequence
  Synthetic polymer
ttagagtttgatcctggctcaggatgaacgctagcggcaggcttaacacatgcaagtcgaggggcagcatataaattgcttgcaatttatgatggcgaccggcgcacgggtgtgtaacgcgtatgcaacctacctgtaacagggggataacaccgagaaattggtactaataccccgtaatattatttaaggcatcttagatagttgaaagttccggcggttacagatgggcatgcgttgtattagctagttggtgaggtaacggctcaccaaggcgacgatacatagggggactgagaggttaaccccccacattggtactgagacacggaccaaactcctacgggaggcagcagtgaggaatattggtcaatggacgcaaggctgaaccagccatgccgcgtgcaggaagacggctctatgagttgtaaactgcttttgtatgagggtaaaataagatacgtgtatcttactgaaagtatcatacgaataaggatcggctaactccgtgccagcagccgcggtaatacggaggatccaagcgttatccggatttattgggtttaaagggtgcgtaggcggttcggtaagttagaggtgaaatttcggggctcaacccccggcattgcctctgatactgtcgaactagagagtagttgcggtaggcggaatgtatggtgtagcggcgaaatgcttagagatcatacagaacaccgattgcgaaggcagcttaccaaactatatctgacgttgaggcacgaaagcgtggggagcaaacaggattagataccctggtagtccacgcagtaaacgatgatagctcgttgtcggcgatacacagtcggtgacttagagaaatcgataagctatccacctggggagtacgttcgcaagaatgaaactcaaaggaattgacgggggcccgcacaagcggaggaacatgtggtttaattcgatgatacgcgaggaaccttacccgggcttgaaagttattgacgattctggaaacaggatttcccttcggggcaagaaactaggtgctgcatggttgtcgtcagctcgtgccgtgaggtgtcgggttaagtcccataacgagcgcaacccctgctgatagttgccatcaggttaagctgggcactctatcgggactgcctgtgtaagcaggaggagggtggggatgacgtcaaatcagcacggcccttacgtccggggcgacacacgtgttacaatggtaggtacagagggcagccacccagtgatggggagcaaatctcgaaagcctatctcagttcggattggaggctgaaactcgcctccatgaagttggattcgctagtaatcgcgcatcagccatggcgcggtgaatacgttcccgggccttgtacacaccgcccgtca

SEQ ID NO: 344 - DNA, 1388 bp, Artificial Sequence
  Synthetic polymer
ttcgcccttagagtttgatcctggctcaggacgaacgctggcggcgtgcctaacacatgcaagtcgaacggacgaggaggagcttgcttctccaagtcagtggcggacgggtgagtaacgcgtgagtaacctgcccttcagagggggataacgtctggaaacggacgctaataccgcatgacatatttccatcgcatggtggagatatcaaaggagcaatccgctgaaggatggactcgcgtccgattagatagttggcggggtaacggcccaccaagtcgacgatcggtagccggactgagaggttgaacggccacattgggactgagacacggcccagactcctacgggaggcagcagtgggggatattgcacaatgggcgaaagcctgatgcagcaacgccgcgtgagggaagacggttttcggattgtaaacctctgttctaagtgacgaacaaatgacggtagcttaggagaaagccccggctaactacgtgccagcagccgcggtaatacgtagggggcaagcgttgtccggaattactgggtgtaaagggagcgcaggcggagaagcaagtcagtggtgaaaacgatgggcttaactcatcgactgccattgaaactgtttcccttgagtgaagtagaggcaggcggaattccgagtgtagcggtgaaatgcgtagatattcggaggaacaccagtggcgaaggcggcctgctgggctttaactgacgctgaggctcgaaagtgtggggagcaaacaggattagataccctggtagtccacactgtaaacgatgattgctaggtgtggggggtttgaccccttccgtgccggagtttaacgcaataagcaatccacctgggagtacggccgcaaggttgaaactcaaaggaattgacgggggcccgcacaagcagcggagcatgtggtttaattcgacgcaacgcgaagaaccttaccaggtcttgacatccacttaaacttacagagatgtaaggtgtgcttgcacaaagtgagacaggtggtgcatggttgtcgtcagctcgtgtcgtgagatgttgggttaagtcccgcaacgagcgcaacccttatcttcagttactaacgcgtgaaggtgaggactctgaagagactgccggggacaactcggaggaaggtggggacgacgtcaaatcatcatgccccttatgacctgggctacacacgtgctacaatggccacgacagagagaagcgaaatcgcaaggtagagcggaactcaaaaaagtggtcccagttcggattgtgggctgcaacccgcccacatgaagtcggagttgctagtaattgcggatcagcatgccgcggtgaatacgttcccgggccttgcacacaccgcccgtca

SEQ ID NO: 345 - DNA, 1395 bp, Artificial Sequence
  Synthetic polymer
agagtttgatcctggctcaggatgaacgctagcggcaggcttaacacatgcaagtcgaggggcagcataatggtagtaatactattgatggcgaccggcggacgggtgcgtaacgcgtatgcaacctaccctttacagggggataacactgagaaatcggtactaataccccataatattctgggaggcatctttcggagttgaaagctttggtggtaaaggatgggcatgcgttgtattagctagttggtaaggtaacggcttaccaaggcgacgatacatagggggactgagaggttaaccccccacattggtactgagacacggtccaaactcctacgggaggcagcagtgaggaatattggtcaatggtcggcagactgaaccagccaagtcgcgtgagggaagacggccctacgggttgtaaacctcttttgtcggagagtaaagtacgctacgtgtagcgtattgcaagtatccgaagaaaaagcatcggctaactccgtgccagcagccgcggtaatacggaggatgcgagcgttatccggatttattgggtttaaagggtgcgtaggcggcacgccgagtcagcggtgaaatttccgggctcaacccggagtgtgccgttgaaactggcgagctagagtacacaagaggcaggcggaatgcgtggtgtagcggtgaaatgcatagatatcacgcagaaccccgattgcgaaggcagcctgctagggtgaaacagacgctgaggcacgaaagcgtgggtatcgaacaggattagataccctggtagtccacgcagtaaacgatgaatactaactgtttgcgatacaatgtaagcggtacagcgaaagcgttaagtattccacctggggagtacgccggcaacggtgaaactcaaaggaattgacgggggcccgcacaagcggaggaacatgtggtttaattcgatgatacgcgaggaaccttacccgggctcaaacgcagggggaatgtcggtgaaagccggcagctagtaatagtcacctgcgaggtgctgcatggttgtcgtcagctcgtgccgtgaggtgtcggcttaagtgccataacgagcgcaacccctatcgacagttactaacgggtgaagccgaggactctgtcgagactgccggcgcaagccgcgaggaaggtggggatgacgtcaaatcagcacggcccttacgtccggggcgacacacgtgttacaatggcaggtacagaaggcagccagtcagcaatgacgcgcgaatcccgaaaacctgtctcagttcggattggagtctgcaacccgactccatgaagctggattcgctagtaatcgcgcatcagccatggcgcggtgaatacgttcccgggccttgtactcaccgcccgtca

SEQ ID NO: 346 - DNA, 1377 bp, Artificial Sequence
  Synthetic polymer
gtttgatcctggctcaggatgaacgctggcggcgtgcttaacacatgcaagtcgagcgaagcactttggaaagattcttcggatgatttcctttgtgactgagcggcggacgggtgagtaacgcgtgggtaacctgcctcatacagggggataacagttagaaatgactgctaataccgcataagaccacggtaccgcatggtacagtggtaaaaactccggtggaatgagatggacccgcgtctgattaggtggttggtggggtaacggcctaccaagccgacgatcagtagccgacctgagagggtgaccggccacattgggactgagacacggcccagactcctacgggaggcagcagtggggaatattgcacaatggaggaaactctgatgcagcgacgccgcgtgaaggatgaagtatttcggtatgtaaacttctatcagcagggaagaaaatgacggtacctgactaagaagccccggctaactacgtgccagcagccgcggtaatacgtagggggcaagcgttatccggatttactgggtgtaaagggagcgtagacggcacggcaagccagatgtgaaagcccggggctcaaccccgggactgcatttggaactgctgagctagagtgtcggagaggcaagtggaattcctagtgtagcggtgaaatgcgtagatattaggaggaacaccagtggcgaaggcggcttgctggacgatgactgacgttgaggctcgaaagcgtggggagcaaacaggattagataccctggtagtccacgccgtaaacgatgactgctgggtgtcgggtggcaaagccattcggtgccgcagctaaagcaataagcagtccacctgggggagtacgttcgcaagaatgaaactcaaaggaattgacggggacccgcacaagcggtggagcatgtggtttaattcgaagcagcgcgaagaaccttacctgatcttgacatcccgatgaccgctttgtaatggaagtttttcttcggaacatggggggcaggagaaacatggttgtcgtcagctcgtgtcgtgagatgttgggttaagtcccgcaacgagcgcaacccctatcctcagtagccagcatttaaggtgggcactctggggagactgccagggataacctggaggaaggcggggatgacgtcaaatcatcatgccccctatgatttgggcgacacacgtgctacaatggcgtaaacaaagggaagcgagattgtgagatggagcaaatcccaaaaataacgtcccagttcggactgtagtctgcaacccgactacacgaagctggaatcgctagtaatcgcggatcagaatgccgcggtgaatacgttcccgggtcttgcacac

SEQ ID NO: 347 - DNA, 1391 bp, Artificial Sequence
  Synthetic polymer
agagtttgatcctggctcaggatgaacgctggcggcgtgcttaacacatgcaagtcgaacggaggacccttgacggagttttcggacaacggataggaatccttagtggcggacgggtgagtaacgcgtgaggaacctgccttggagaggggaataacacagagaaatttgtgctaataccgcatgatgcagttgggtcgcatggctctgactgccaaagatttatcgctctgagatggcctcgcgtctgattagctagttggtagggtaatggcctaccaaggcgacgatcagtagccggactgagaggttgaccggccacactgggactgagacacggcccagactcctacgggaggcagcagtggggaatattgggcaatgggcgcaagcctgacccagcaacgccgcgtgaaggaagaaggctttcgggttgtaaacttcttttatgagggacgaaggaagtgacggtacctcatgaataagctccggctaactacgtgccagcagccgcggtaatacgtagggagcgagcgttatccggatttactgggtgtaaagggcgtgtaggcggggaagcaagtcagatgtgaaaaccagtggctcaaccactggcctgcatttgaaactgtttttcttgagtgatggagaggcaggcggaattccgtgtgtagcggtgaaatgcgtagatatacggaggaacaccagtggcgaaggcggcctgctggacattaactgacgctgaggcgcgaaagcgtggggagcaaacaggattagataccctggtagtccacgctgtaaacgatggatactaggtgtggggggactgaccccttccgtgccgcagttaacacaataagtattccacctggggagtacgatcgcaaggttgaaactcgaaggaattgacgggggcccgcacaagcggtggattatgtggtttaattcgacgcaacgcgaagaaccttaccagggcttggcatcctactaacgaagtagagatacattaggtgcccttcggggaaagttgagacaggtggtgcatggttgtcgtcagctcgtgtcgtgagatgttgggttaagtcccgcaacgagcgcaacccttgctattagttgctacgcaagagcactctaataggactgccgttgacaaaacggaggaaggtggggacgacgtcaaatcatcatgccccttatgacctgggctacacacgtactacaatggatgttaacagagggaagcaagacagcgatgtggagcaaacccctaaaaacattcacagttcagattgcaggctgcaacccgcctgcatgaagatggaattgctagtaatcgcggatcagcatgccgcggtgaatacgttcccgggccttgcacacaccgcccgtca

SEQ ID NO: 348 - DNA, 1386 bp, Artificial Sequence
  Synthetic polymer
agagtttgatcctggctcaggatgaacgctggcggcgtgcctaacacatgcaagtcgagcgagaagctcatgacggaaacttcggttgacggattgagtggaaagcggcggacgggtgagtaacgcgtaggcaacctgccccttacagagggatagccattggaaacgatgattaaaacctcataacgcaaggcagtcacatgacagttttgccaaagatttatcggtaagggatgggcctgcgtctgattagctggttggtggggtaacggcctaccaaggcgacgatcagtagccgacctgagagggtgatcggccacattggaactgagacacggtccaaactcctacgggaggcagcagtggggaatattgcacaatgggcgaaagcctgatgcagcaacgccgcgtgaaggaagaaggccttcgggtcgtaaacttctgtcctaggggaagaagaaaatgacggtacccttggaggaagccccggctaactacgtgccagcagccgcggtaatacgtagggggcgagcgttatccggaattattgggcgtaaagagtgcgtaggtggctttctaagcgcagggtttaaggcaatggcccaaccattgttcgccctgcgaactgggaggcttgagtgcaggagaggaaagcggaattcctagtgtagcggtgaaatgcgtagatattaggaggaacaccagtggcgaaggcggctttctggactgtaactgacactgaggcacgaaagtgtgaggagcaaacaggattagataccctggtagtccacaccgtaaacgatgagcactaggtgtcggggtcgcaagacttcggtgccggagttaacgcattaagtgctccgcctggggagtacgtacgcaagtatgaaactcaaaggaattgacggggacccgcacaagcagcggagcatgtggtttaattcgaagcaacgcgaagaaccttaccaggacttgacatcctcctgacagatctttaatcggattcttctacggacaggagagacaggtggtgcatggttgtcgtcagctcgtgtcgtgagatgttgggttaagtcccgcaacgagcgcaacccttgccattagttgccagcagtaagatgggcactctaatgggactgccggggacaactcggaggaaggtggggatgacgtcaaatcatcatgccccttatgttctgggctacacacgtgctacaatggccggtacagaaagcagcgaagccgcgaggcggagcaaatctcgaaaaccggtcccagttcggactgcaggctgcaacccgcctgcacgaagccggagttgctagtaatcgcgaatcagaatgtcgcggtgaatgcgttcccgggtcttgcactcaccgcccgtca

SEQ ID NO: 349 - DNA, 1377 bp, Artificial Sequence
  Synthetic polymer
ttcgcccttagagtttgatcctggctcaggacgaacgctggcggcgtgcctaacacatgcaagtcgaacggagatgtttatttcggtagatatcttagtggcgcacgggtgagtaacgcgtgaataacctgacccgaagagggggataacacctggaaacaagtgttaataccgcataagaccacggaccggcatcggtcagaggtcaaaggaggaatccgctttgggaggggttcgcgtcccattaggtagttggtgaggtaacggcccaccaaggcaacgatcggtagccggactgagaggttgaacggccacattgggactgagacacggcccagactcctacgggaggcagcagtggggaatattgcacaatgggggaaaccctgatgcagcgacgccgcgtggaggaagaaggtcttcggattgtaaactcctgttgttggggaagataatgacggtacccaacaaggaagtgacggctaactacgtgccagcagccgcggtaaaacgtaggtcacaagcgttgtccggaattactgggtgtaaagggagcgcaggcgggaagacaagttggaagtgaaatctatgggctcaacccataaactgctttcaaaactgtttttcttgagtagtgcagaggtaggcggaattcccggtgtagcggtggaatgcgtagatatcgggaggaacaccagtggcgaaggcggcctactgggcaccaactgacgctgaggctcgaaagtgtgggtagcaaacaggattagataccctggtagtccacaccgtaaacgatgattactaggtgttggaggattgaccccttcagtgccgcagttaacacaataagtaatccacctggggagtacgaccgcaaggttgaaactcaaaggaattgacgggggcccgcacaagcagtggagtatgtggtttaattcgacgcaacgcgaagaaccttaccaagtcttgacatcccttgacagacatagaaatatgtaatctcttcggagcaaggagacaggtggtgcatggttgtcgtcagctcgtgtcgtgagatgttgggttaagtcccgcaacgagcgcaacccttatggtcagttactacgcaagaggactctggccagactgccgttgacaaaacggaggaaggtggggatgacgtcaaatcatcatgccctttatgacttgggctacacacgtactacaatggcgttaaacaaagagaagcaagaccgcaaggtggagcaaaactcagaaacaacgtcccagttcggactgcaggctgcaactcgcctgcacgaagtcggaattgctagtaatcgtggatcagcatgccacggtgaatacgttcccgggccttgcacacaccgcccgtca

SEQ ID NO: 350 - DNA, 1339 bp, Artificial Sequence
  Synthetic polymer
tggcggcgcgcctaacacatgcaagtcgaacggcacctatcttcggatagaagcgagtggcgaacggctgagtaacacgtggagaacctgccccctcccccgggatagccgcccgaaaggacgggtaataccggataccccggggtgccgcatggcaccccggctaaagccccgacgggaggggatggctccgcggcccatcaggtagacggcggggtgacggcccaccgtgccgacaacgggtagccgggttgagagaccgaccggccagattgggactgagacacggcccagactcctacgggaggcagcagtggggaatcttgcgcaatggggggaaccctgacgcagcgacgccgcgtgcgggacggaggccttcgggtcgtaaaccgctttcagcagggaagagtcaagactgtacctgcagaagaagccccggctaactacgtgccagcagccgcggtaatacgtagggggcgagcgttatccggattcattgggcgtaaagcgcgcgtaggcggcccggcaggccgggggtcgaagcggggggctcaaccccccgaagcccccggaacctccgcggcttgggtccggtaggggagggtggaacacccggtgtagcggtggaatgcgcagatatcgggtggaacaccggtggcgaaggcggccctctgggccgagaccgacgctgaggcgcgaaagctgggggagcgaacgggattagataccctggtagtcccagccgtaaaccatgaacggtaggtgtggggggtcgatcctcccgttccgcagccaaggcattaagcgtcctgacgccggggagtagggccgcaaggctaaaactcaaaaagaattgtcggggtcccgcgcaagcagcggagcatgtggtttaattggaagcaagacgaagaaccttcctgtggtttgacatatgggtgatgcgggggaggggggggggcaaaaaaaagcccatacaggtggtgcatggctgtcgtcagctcgtgtcgtgagatgttgggttaagtcccgcaacgagcgcaacccccgccgcgtgttgccatcgggtgatgccgggaacccacgcgggaccgccgccgtcaaggcggaggagggcggggacgacgtcaagtcatcatgccccttatgccctgggctgcacacgtgctacaatggccggtacagagggatgccaccccgcgagggggagcggatcccggaaagccggccccagttcggattgggggctgcaacccgcccccatgaagtcggagttgctagtaatcgcggatcagcatgccgcggtgaatgcgttcccgggccttgtactcaccgcccgtca

SEQ ID NO: 351 - DNA, 1391 bp, Artificial Sequence
  Synthetic polymer
agagtttgatcctggctcaggatgaacgctggcggcgtgcctaacacatgcaagtcgaacggaacttctttgacagaattctacggaaggaagttgattaagtttagtggcggacgggtgagtaacgcgtgagtaacctgcctttgagaggggaataacttctggaaacggacgctaataccgcatgacatatttccatcgcatggtggagatatcaaaggagcaatccgctgaaggatggactcgcgtccgattagatagttggcggggtaacggcccaccaagtcgacgatcggtagccggactgagaggttgaacggccacattgggactgagacacggcccagactcctacgggaggcagcagtgggggatattgcacaatgggcgaaagcctgatgcagcaacgccgcgtgagggaagacggttttcggattgtaaacctctgttctaagtgacgaacaaatgacggtagcttaggagaaagccccggctaactacgtgccagcagccgcggtaatacgtagggggcaagcgttgtccggaattactgggtgtaaagggagcgcaggcggagaagcaagtcagtggtgaaaacgatgggcttaactcatcgactgccattgaaactgtttcccttgagtgaagtagaggcaggcggaattccgagtgtagcggtgaaatgcgtagatattcggaggaacaccagtggcgaaggcggcctgctgggctttaaccgacgctgaggctcgaaagtgtggggagcaaacaggattagataccctggtagtccacactgtaaacgatgattgctaggtgtggggggtctgaccccttccgtgccggagttaacgcaataagcaatccacctggggagtacggccgcaaggttgaaactcaaaggaattgacgggggcccgcacaagcagtggattatgtggtttaattcgacgcaacgcgaagaaccttaccaggtcttgacatccaacgaatccttaagagattagggagtgcctttcggggaacgttgagacaggtggtgcatggttgtcgtcagctcgtgtcgtgagatgttgggttaagtcccgcaacgagcgcaacccctgccattagttgctacgcaagagcactctaatgggaccgctaccgacaaggtggaggaaggtggggacgacgtcaaatcatcatgccccttatgacctgggctacacacgtaatacaatggccgttaacaacgggaggcaaaaccgcgaggtggagcaaaaccctaaaaacggtcccagttcggatcgcaggctgcaacccgcatgcgtgaagttggaattgctagtaatcgcggatcagcatgccgcggtgaatacgttcccgggccttgcacaaagcgcccgtca

SEQ ID NO: 352 - DNA, 1373 bp, Artificial Sequence
  Synthetic polymer
agagtttgatcctggctcaggacgaacgctggcggcgtgcctaacacatgcaagtcgaacgaagctttgaggagcttgctttttaaagcttagtggcggacgggtgagtaacgcgtgagcaacctgcctctcagaggggaataacgttttgaaaagaacgctaataccgcataacatatcggaaccgcatgattctgatatcaaaggagcaatccgctgagagatgggctcgcgtccgattagttagttggtgaggtaacggctcaccaagactacgatcggtagccggactgagaggttgatcggccacattgggactgagacacggcccagactcctacgggaggcagcagtggggaatattgcacaatgggggaaaccctgatgcagcgacgccgcgtggaggaagaaggtcttcggattgtaaactcctgttgttgaggaagataatgacggtactcaacaaggaagtgacggctaactacgtgccagcagccgcggtaaaacgtaggtcacaagcgttgtccggaattactgggtgtaaagggagcgcaggcgggaagacaagttggaagtgaaatccatgggctcaacccatgaactgctttcaaaactgtttttcttgagtagtgcagaggtaggcggaattcccggtgtagcggtggaatgcgtagatatcgggaggaacaccagtggcgaaggcggcctactgggcaccaactgacgctgaggctcgaaagtgtgggtagcaaacaggattagataccctggtagtccacactgtaaacgatgattaataggtgttggaggattgaccccttcagtgccgcagttaaccacaataagtaatccacctggggagtacgaccgcaaggttgaaattcaaaggaattgacgggggcccgcacaagcagtggagtatgtggtttaattcgacgcaacgcgaagaaccttaccaagtcttgacatcttgcgacgcacatagaaatatgtgtttccttcgggacgcagagacaggtggtgcatggttgtcgtcagctcgtgtcgtgagatgttgggttaagtcccgcaacgagcgcaacccttatggtcagttactacgcaagaggactctggccagactgccgttgacaaaacggaggaaggtggggatgacgtcaaatcatcatgccctttatgacttgggctacacacgtactacaatggcgttaaacaaagagaagcaagaccgcgaggtggagcaaaactcagaaacaacgtcccagttcggactgcaggctgcaactcgcctgcacgaagtcggaattgctagtaatcgcagatcagcatgctgcggtgaatacgttcccgggccttgtacacaaagcccgtca

SEQ ID NO: 353 - DNA, 1364 bp, Artificial Sequence
  Synthetic polymer
agagtttgatcctggctcaggatgaacgctggcggcgtgcctaacacatgcaagtcgagcgattctcttcggagaagagcggcggacgggtgagtaacgcgtgggtaacctgccctgtacacacggataacataccgaaaggtatgctaatacgagataatatgcttttatcgcagggtagaagtatcaaagcttttgcggtacaggatggacccgcgtctgattagctggttggtgaggtaacggcccaccaaggcgacgatcagtagccggactgagaggttgaacggccacattgggactgagatacggcccagactcctacgggaggcagcagtggggaatattgcacaatgggcgaaagcctgatgcagcaacgccgcgtgagcgatgaaggccttcgggtcgtaaagctctgtcctcaaggaagataatgacggtacttgaggaggaagccccggctaactacgtgccagcagccgcggtaatacgtagggggctagcgttatccggaattactgggcgtaaagggtgcgtaggtggtttcttaagtcagaggtgaaaggctacggctcaaccgtagtaagcctttgaaactgggaaacttgagtgcaggagaggagagtggaattcctagtgtagcggtgaaatgcgtagatattaggaggaacaccagttgcgaaggcggctctctggactgtaactgacactgaggcacgaaagcgtggggagcaaacaggattagataccctggtagtccacgccgtaaacgatgagtactagctgtcggaggttacccccttcggtggcgcagctaacgcattaagtactccgcctgggaagtacgctcgcaagagtgaaactcaaaggaattgacggggacccgcacaagcggtggagcatgtggtctaattcgaagcaacgcgaagaaccttaccaaatcttgacatcgatctgaccggaccgtaatgggtcctttcccttcggggacagagaagacaggtggtgcatggttgtcgtcagctcgtgtcgtgagatgttgggttaagtcccgcaacgagcgcaacccttatcctcagtagccagcaagtgaagttgggcactctgtggagactgccagggataacctggaggaaggtggggatgacgtcaaatcatcatgccccttatgatttgggctacacacgtgctacaatggcgtaaacaaagggaagcgatcacgcgagtgtgagcaaatctcaaaaataacgtctcagttcggattgtagtctgcaactcgactacatgaagctggaatcgctagtaatcgcaggtcagcatactgcggtgaatacgttcccgggtcttgcacacaccgcccgtca

SEQ ID NO: 354 - DNA, 1390 bp, Artificial Sequence
  Synthetic polymer
agagtttgattctggctcaggatgaacgctggcggcgtgcctaacacatgcaagtcgaacgaagcactgcaaacggagattcgtcaaagtttgctttgacttagtggcggacgggtgagtaatgtatgagcaacctgcctttcagtgggggacaacagttggaaacgactgctaataccgcatgatgtcaattgggggcatccccgaatgaccaaaggatttattcgctgaaagatgggctcatatctgattagctagttggtgaggtaacggctcaccaaggctgcgatcagtagccggactgagaggttgaacggccacattgggactgagatacggcccagactcctacgggaggcagcagtggggaatattgggcaatgggcgaaagcctgacccagcaacgccgcgtgaaggaagaaggtcttcggattgtaaacttcttttatgagggacgaaggacgtgacggtacctcatgaataagccacggctaactacgtgccagcagccgcggtaatacgtaggtggcaagcgttatccggatttactgggtgtaaagggcgcgtaggcggggatgcaagtcagatgtgaaatctatgggcttaacccataaactgcatttgaaactgtagagcttgagtgaagtagaggcaggcggaattccccgtgtagcggtgaaatgcgtagagatggggaggaacaccagtggcgaaggcggcctgctgggctttaactgacgctgaggcacgaaagcgtgggtagcaaacaggattagataccctggtagtccacgctgtaaacgatgattactaggtgtggggggtctgaccccttccgtgccggagttaacacaataagtaatccacctggggagtacggccgcaaggttgaaactcaaaggaattgacgggggcccgcacaagcagtggagtatgtggtttaattcgaagcaacgcgaagaaccttaccaggtcttgacatccaactaacgaagtagagatacattaggtgcccttcggggaaagttgagacaggtggtgcatggttgtcgtcagctcgtgtcgtgagatgttgggttaagtcccgcaacgagcgcaacccttgctattagttgctacgcaagagcactctaataggactgccgttgacaaaacggaggaaggtggggacgacgtcaaatcatcatgccccttatgacctgggctacacacgtactacaatggatgttaacagagggaagcaagacagtgatgtggagcaaacccctaaaaacattctcagttcagattgcaggctgcaacccgcctgcatgaagatggaattgctagtaatcgcggatcagcatgccgcggtgaatacgttcccgggccttgcacacaccgcccgtca

SEQ ID NO: 355 - DNA, 1360 bp, Artificial Sequence
  Synthetic polymer
ttcgcccttagagctttatcctggctcaggacgaacgctggcggcgtgcttaacacatgcaagtcgaacgaagcttgatttatgatttcttcggaatgaataatgatatgactgagtggcggacgggtgagtaacgcgtgagcaacctgcccttcggagggggatagcgtctggaaacggacggtaataccgcataaagtgtcttgaccgcatgatcgagataccaaaactgaggtgccgaaggatgggctcgcgttggattagatagttggtggggtaacggcctaccaagtcgacgatccatagccggactgagaggttgatcggccacattgggactgagacacggcccagactcctacgggaggcagcagtggggaatattgcacaatgggggaaaccctgatgcagcgacgccgcgtggaggaagaaggtcttcggattgtaaactcctgttgttgaggaagataatgacggtactcaacaaggaagtgacggctaactacgtgccagcagccgcggtaaaacgtaggtcacaagcgttgtccggaattactgggtgtaaagggagcgcaggcgggaagacaagttggaagtgaaatctatgggctcaacccataaactgctttcaaaactgtttttcttgagtagtgagaggtaggcggaattcccggtgtagcggtggaatgcgtagatatcgggaggaacaccagtggcgaaggcggcctactgggcaccaactgacgctgaggctcgaaagtgtgggtagcaaacaggattagataccctggtagtccacactgtaaacgatgattactaggtgttggaggattgaccccttcagtgccgcagttaacacaataagtaatccacctggggagtacgaccgcaaggttgaaactcaaaggaattgacgggggcccgcacaagcagtggagtatgtggtttaattcgacgcaacgcgaagaaccttaccaagtcttgacatcctgcgacggtgctggaaacagtactttccttcgggacgcagagacaggtggtgcatggttgtcgtcagctcgtgtcgtgagatgttgggttaagtcccgcaacgagcgcaacccttatggtcagttactacgcaagaggactctggccagactgccgttgacaaaacggaggaaggtggggatgacgtcaaatcatcatgccctttatgacttgggctacacacgtactacaatggcgttaaacaaagagaagcaagaccgcgaggtggagcaaaactcagaaacaacgtcccagttcggactgcaggctgcaactcgcctgcacgaagtcggaattgctagtaatcgcagatcagcatgctgcggtgaat

SEQ ID NO: 356 - DNA, 1394 bp, Artificial Sequence
  Synthetic polymer
agagtttgatcctggctcaggacgaacgctggcggcgtgcttaacacatgcaagtcgaacggagcacccttgactgaggtttcggccaaatgataggaatgcttagtggcggactggtgagtaacgcgtgaggaacctgcctttcagagggggacaacagttggaaacgactgctaataccgcatgatgcgtaactgggacatcccggatacgccaaagattttatcgctgaaagatggcctcgcgtctgattagatagttggcggggtaacggcccaccaagtcgacgatcagtagccggactgagaggttgaccggccacattgggactgagatacggcccagactcctacgggaggcagcagtggggaatattgggcaatgggcgcaagcctgacccagcaacgccgcgtgaaggaagaaggctttcgggttgtaaacttcttttaagtgggaagagtagaagacggtaccacttgaataagccacggctaactacgtgccagcagccgcggtaatacgtaggtggcaagcgttgtccggatttactgggtgtaaagggcgtgcagccgggcatgcaagtcagatgtgaaatctcagggcttaaccctgaaactgcatttgaaactgtatgtcttgagtgccggagaggtaatcggaattccttgtgtagcggtgaaatgcgtagatataaggaagaacaccagtggcgaaggcggattactggacggtaactgacggtgaggcgcgaaagcgtggggagcgaacaggagtagataccctggtagtccacgctgtaaacgatggatacataggtgtgcgggggactgaccccctgcgtgccgcagttaacacaataagtatcccacctgggggaggtgcgatcgcaaggttgaaactcaaaggaattgacgggggcccgcacaagcggtggattatgtggtttaattcgaagcaacgcgaagacccttaccaggtcttgacatcctgctaacgaagtagagatacattaggtgcccttcggggaaagcagagacaggtggtgcatggttgtcgtcagctcgtgtcgtgagatgttgggttaagtcccgcaacgagcgcaacccctattgttagttgctacgcaagagcactctagcgagactgccgttgacaaaacggaggaaggtggggacgacgtcaaatcatcatgccccttatgacctgggctacacacgtaatacaatggcggtcaacaaagggatgcaaagccgcgaggcagagcgaaccccaaaaagccgtcccagttcggatcgcaggctgcaacccgcctgcgtgaagtcggaatcgctagtaatcgtgggtcagcataccatggtgaatacgttcccgggccttgcacacaccgcccgtca

SEQ ID NO: 357 - DNA, 1388 bp, Artificial Sequence
  Synthetic polymer
agagtttgatcctggctcaggacgaacgctggcggcgtgcttaacacatgcaagtcgaacgggaaaccttttattgaagcttcggcagatttagctggtttctagtggcggacgggtgagtaacgcgtgggtaacctgccttatacagggggataacaaccagaaatggttgctaataccgcataagcgcacaggaccgcatggtccggtgtgaaaaactccggtggtataagatggacccgcgttggattagctagttggcagggtaacggcctaccaaggcgacgatccatagccggcctgagagggtgaacggccacattgggactgagacacggcccagactcctacgggaggcagcagtggggaatattgcacaatgggggaaaccctgatgcagcaacgccgcgtgagtgaagaagtatttcggtatgtaaagctctatcagcagggaagataatgacggtacctgactaagaagctccggctaaatacgtgccagcagccgcggtaatacgtatggagcaagcgttatccggatttactgggtgtaaagggtgcgtaggtggcagtgcaagtcagatgtgaaaggccggggctcaaccccggagctgcatttgaaactgcatagctagagtacaggagaggcaggcggaattcctagtgtagcggtgaaatgcgtagatattaggaggaacaccagtggcgaaggcggcttactggactgtaactgacgttgaggctcgaaagcgtggggagcaaacaggattagataccctggtagtccacgccgtaaacgatgattactaggtgttggtgggtatgacccatcggtgccgcagcaaacgcaataagtaatccacctggggagtacgttcgcaagaatgaaactcaaaggaattgacggggacccgcacaagcggtggagcatgtggtttaattcgaagcaacgcgaagaaccttacctggtcttgacatcccgatgacagatctgtaatgagatccttacttcggtacatcggagacaggtggtgcatggttgtcgtcagctcgtgtcgtgagatgttgggttaagtcccgcaacgagcgcaacccttatctttagtagccagcagtaagatgggcactctagagagactgccggggataacccggaggaaggtggggatgacgtcaaatcatcatgccccttatgaccagggctacacacgtgctacaatggcgtaaacaaagagaagcgaagtcgtgaggcagagcgaatctcaaaaataacgtctcagttcggattgtagtctgcaactcgactacatgaagctggaatcgctagtaatcgcagatcagaatgctgcggtgaatacgttcccgggtcttgtacacaccgcccgtca

SEQ ID NO: 358 - DNA, 1378 bp, Artificial Sequence
  Synthetic polymer
ttcgcccttagagtttgatcctggctcaggacgaacgctggcggcacgcctaacacatgcaagtcgaacggacgaggaggagcttgcttctccgagttagtggcggacgggtgagtaacacgtgagcaacctgcccttgagagggggatagcttctggaaacggatggtaataccccataacatatattttaggcatctaagatatatcaaagaaattcgctcaaggatgggctcgcgtctgattagatagttggtgaggtaacggcccaccaagtcgacgatcagtagccggactgagaggttgaacggccacattgggactgagacacggcccagactcctacgggaggcagcagtggggaatattgcacaatggggggaaccctgatgcagcgatgccgcgtggaggaagaaggttttcggattgtaaactccttttaacagggacgataatgacggtacctgaagaaaaagctccggctaactacgtgccagcagccgcggtaatacgtagggagcgagcgttgtccggaactactgggtgtaaagggagcgtaggcgggacggtaagtcaggtgtgaaatatacgtgctcaacatgtagactgcacttgaaactgctgttcttgagtgaagtagaggtaagcggaattcctagtgtagcggtgaaatgcgtagatattaggaggaacatcggtggcgaaggcggcttactgggcttttactgacgctgaggctcgaaagcgtggggagcaaacaggattagataccctggtagtccacgctgtaaacgatgattactaggtgtggggggactgaccccttccgtgccgcagttaacacaataagtaatccacctggggagtacgaccgcaaggttgaaactcaaaggaattgacgggggcccgcacaagcagtggagtatgtggtttaattcgaagcaacgcgaagaaccttaccaggtcttgacatcgtatgcatagtctagagatagatgaaatcccttcggggacatatagacaggtggtgcatggttgtcgtcagctcgtgtcgtgagatgttgggttaagtcccgcaacgagcgcaacccttacctttagttgctacgcaagagcactctagagggactgccgttgacaaaacggaggaaggtggggatgacgtcaaatcatcatgccccttatgacctgggctacacacgtactacaatggcaattaacagagggaagcaaaacagcgatgtggagcaaatcccgaaaaattgtctcagttcagattgcaggctgcaactcgcctgcatgaagtcggaattgctagtaatcgcagatcagaatgctgcggtgaatacgttcccgggccttgtactcaccgcccgtca

SEQ ID NO: 359 - DNA, 1380 bp, Artificial Sequence
  Synthetic polymer
agagtttgatcctggctcaggacgaacgctggcggcgtgcctaacacatgcaagtcgagcggagacagtgagtagcttgctatgagctgttttagcggcggacgggtgagtaacgcgtgagcaacctttcccagacaggggaataacacaccgaaaggtgtactaataccgcataagaccacgggatcacatggttctggggtaaaagaattatcggtttggggtgggctcgcgtccgattaggtagttggtgaggtaacggcccaccaagccgacgatcggtagccgacctgagagggtgatcggccacattgggactgagacacggcccaaactcctacgggaggcagcagtggggaatattgcacaatgggggaaaccctgatgcagcaacgccgcgtgagtgaagaagtatttcggtatgtaaagctctatcagcagggaagataatgacggtacctgactaagaagctccggctaaatacgtgccagcagccgcggtaatacgtatggagcaagcgttatccggatttactgggtgtaaagggtgcgtaggtggcagtgcaagtcagatgtgaaaggccggggctcaaccccggagctgcatttgaaactgcatagctagagtacaggagaggcaggcggaatccctagtgtagcggtgaaatgcgtagatattaggaggaacaccagtggcgaaggcggcctgctggactgttactgacactgaggcacgaaagcgtggggagcaaacaggattagataccctggtagtccacgccgtaaacgatgaatactaggtgtcggggccgtataggctccggggccgtcgcaaacgcattaagcattccacctggggagtacgttcgcaagaatgaaactcaaaggaattgacggggacccgcacaagcggtggagcatgtggtttaattcgaagcaacgcgaagaaccttaccaggtcttgacatcccgatgaccggcccgtaacggggccttctcttcggagcattggagacaggtggtgcatggttgtcgtcagctcgtgtcgtgagatgttgggttaagtcccgcaacgagcgcaacccttatcctcagtagccagcaggtcaagctgggcactctgtggagactgccagggataacctggaggaaggtggggatgacgtcaaatcatcatgccccttatgatctgggctacacacgtgctacaatggcgtaaacaaagggaggcaaagccgcgaggtggagcaaatcccaaaaataacgtctcagttcggactgcagtctgcaactcgactgcacgaagctggaatcgctagtaatcgcgaatcagaatgtcgcggtgaatacgttcccgggtcttgcacacaccgcccgtca

SEQ ID NO: 360 - DNA, 1369 bp, Artificial Sequence
  Synthetic polymer
agagtttgatcctggctcaggacgaacgctggcggcgcgcctaacacatgcaagtcgaacgagagatgaggagcttgctcttcaaatcgagtggcgaacgggtgagtaacgcgtgaggaacctgcctcaaagagggggacaacagttggaaacgactgctaataccgcataagcccacggctcggcatcgagcagagggaaaaggagcaatccgctttgagatggcctcgcgtccgattagctagttggtgaggtaatggcccaccaaggcgacgatcggtagccggactgagaggttgaacggccacattgggactgagacacggcccagactcctacgggaggcagcagtggggaatattgcacaatgggggaaaccctgatgcagcgacgccgcgtggaggaagaaggtcttcggattgtaaactcctgttgttgaggaagataatgacggtactcaacaaggaagtgacggctaactacgtgccagcagccgcggtaaaacgtaggtcacaagcgttgtccggaattactgggtgtaaagggagcgcaggcgggagaacaagttggaagtgaaatccatgggctcaacccatgaactgctttcaaaactgtttttcttgagtagtgcagaggtaggcggaattcccggtgtagcggtggaatgcgtagatatcgggaggaacaccagtggcgaaggcggcctactgggcaccaactgacgctgaggctcgaaagtgtgggtagcaaacaggattagataccctggtagtccacaccgtaaacgatgattactaggtgttggaggattgaccccttcagtgccgcagttaacacaataagtaatccacctggggagtacgaccgcaaggttgaaactcaaaggaattgacgggggcccgcacaagcagtggagtatgtggtttaattcgacgcaacgcgaagaaccttaccaagtcttgacatcccttgacgatgctggaaacagcatttctcttcggagcaaggagacaggtggtgcatggttgtcgtcagctcgtgtcgtgagatgttgggttaagtcccgcaacgagcgcaacccttatggtcagttactacgcaagaggaccctggccagactgccgttgacaaaacggaggaaggtggggatgacgtcaaatcatcatgccctttatgacttgggctacacacgtactacaatggacggatcagagggaggcgaagccgcgaggtggagcgaaacccagaaacccgttcacagttcggactgcagtctgcaactcgactgcacgaagctggaatcgctagtaatcgcgaatcagcatgtcgcggtgaatacgatctcgggccttgcacacaccgcccgtca

SEQ ID NO: 361 - DNA, 1390 bp, Artificial Sequence
  Synthetic polymer
agagtttgatcctggctcaggatgaacgctggcggcgtgcttaacacatgcaagtcgagcgaagcagttaagttgatttcttcggattgattcttgactgactgagcggcggacgggtgagtaacgcgtgggtgacctgccccataccgggggataacagctggaaacggctgctaataccgcataagcgcacagagctgcatggctcggtgtgaaaaactccggtggtacaggatggacccgcgtctgattagctggttggtgaggtaacggctcaccaaggcgacgatcagtagctggcttgagagagtgaacggccacattgggactgagacacggcccaaactcctacgggaggcagcagtggggaatattgcacaatgggggaaaccctgatgcagcgacgccgcgtgagtgaagaagtatctcggtatgtaaagctctatcagcagggaagaaaatgacggtacctgactaagaagccccggctaactacgtgccagcagccgcggtaatacgtagggggcaagcgttatccggaattactgggtgtaaagggtgcgtaggtggtatggcaagtcagaagtgaaaacccagggcttaactctgggactgcttttgaaactgtcagactggagtgcaggagaggtaagcggaattcctagtgtagcggtgaaatgcgtagatattaggaggaacatcagtggcgaaggcggcttactggactgaaactgacactgaggcacgaaagcgtggggagcaaacaggattagataccctggtagtccacgccgtaaacgatgaatactaggtgtcggggccgtagaggcttcggtgccgcagccaacgcagtaagtattccacctggggagtacgttcgcaagaatgaaactcaaaggaattgacggggacccgcacaagcggtggagcatgtggtttaattcgaagcaacgcgaagaaccttaccaagtcttgacatccgcctgaccgatccttaaccggatctttccttcgggacaggcgagacaggtggtgcatggttgtcgtcagctcgtgtcgtgagatgttgggttaagtcccgcaacgagcgcaacccctatcctcagtagccagcatttaaggtgggcactctggggagactgccagggataacctggaggaaggcggggatgacgtcaaatcatcatgccccttatgatttgggctacacacgtgctacaatggcgtaaacaaagggaagcgagattgtgagatggagcaaatcccaaaaataacgtcccagttcggactgtagtctgcaacccgactacacgaagctggaatcgctagtaatcgcggatcagaatgccgcggtgaatacgttcccgggtcttgcactcaccgcccgtca

SEQ ID NO: 362 - DNA, 1381 bp, Artificial Sequence
  Synthetic polymer
ttcgcccttagagtttgatcctggctcaggacgaacgctggcggcgtgcttaatacatgcaagtcgaacggagttaagggtttcggcctttaacttagtggcgaacgggtgagtaacgcgtgaataacctgactcaaagagggggataacaacgggaaactgttgctaataccgcatgagaccacaacaccgcatgatgaaggggtcaaagatttatcgctttgagaggggttcgcgtcccattaggtagttggaggggtaacggcccaccaagccaacgatgggtagccgagctgagaggctgatcggccacactggaactgagacacggtccagactcctacgggaggcagcagtagggaatattgggcaatgggcgcaagcctgacccagcaacaccgcgtgagggaagaaggttttcggattgtaaacctctgtcctatgtgacgaaggaagtgacggtagcataggaggaagccccggctaactacgtgccagcagccgcggtaatacgtagggggcgagcgttgtccggaattactgggcgtaaagggtgcgtaggcggtttggtaagttggatgtgaaatacccgggcttaacttgggggctgcatccaatactgtcggacttgagtgcaggagaggagagcggaattcctagtgtagcggtgaaatgcgtagatattcggaggaacaccagtggcgaaggcggcctgctgggctttaactgacgctgaggctcgaaagtgtggggagcaaacaggattagataccctggtagtccacactgtaaacgatgattgctaggtgtggggggtctgaccccttccgcgccggagttaacgcaataagcaatccacctggggagtacggccgcaaggttgaaactcaaaggaattgacgggggcccgcacaagcagtggattatgtggtttaattcgacgcaacgcgaagaaccttaccaggtcttgacatccaacgaatccttaagagattagggagtgcctttcggggaacgttgagacaggtggtgcatggttgtcgtcagctcgtgtcgtgagatgttgggttaagtcccgcaacgagcgcaacccctgccattagttgctacgcaagagcactctaatgggaccgctaccgacaaggtggaggaaggtggggacgacgtcaaatcatcatgccccttatgacctgggctacacacgtaatacaatggccgttaacaacgggaggcaaaaccgcgaggtagagcaaaaccctaaaaacggtcccagttcggatcgcaggctgcaacccgcctgcgtgaagttggaattgctagtaatcgcggatcagcatgccgcggtgaatacgttcccgggccttgcacacaccgcccgtca

SEQ ID NO: 363 - DNA, 1404 bp, Artificial Sequence
  Synthetic polymer
ttcgcccttagagtttgatcctggctcaggacgaacgctggcggcgtgcctaacacatgcaagtcgaacggaactgttttgaaagatttcttcggaatgaatttgatttagtttagtggcggacgggtgagtaacgcgtgagtaacctgccttcaagagggggataacattctgaaaagaatgctaataccgcatgacatatcggaatcacatggttttgatatcaaagattttatcgcttgaagatggactcgcgtccgattagttagttggtgaggtaacggctcaccaagaccgcgatcggtagccggactgagaggttgaacggccacattgggactgagacacggcccagactcctacgggaggcagcagtgggggatattgcgcaatgggggcaaccctgacgcagcaacgccgcgtgaaggatgaaggttttcggattgtaaacttcttttattaaggacgaaaattgacggtacttaatgaataagctccggctaactacgtgccagcagccgcggtaatacgtagggagcaagcgttgtccggatttactgggtgtaaagggtgcgtaggcggctttgcaagtcagatgtgaaatctatgggctcaacccataaactgcatttgaaactgtagagcttgagtgaagtagaggcaggcggaattccccgtgtagcggtgaaatgcgtagagatggggaggaacaccagtggcgaaggcggcctgctgggctttaactgacgctgaggcacgaaagcgtgggtagcaaacaggattagataccctggtagtccacgctgtaaacgatgattactaggtgtgggggggtctgaccccttccgtgccggagttacacaataaagtaatccaactaagggagtaaggaccgcatggttgaaactcaaaggaattggaggggggcccgcacaagcagtggagtatgtggattaattcgaagcaacgcgaagatccttaccaggtcttgacatccaactaaggaagtagagatgcattaggtgcccttcggggaaagttgagacaggtggtgcatggttgtcgtcaagctcgtgtcgtgagatgttgggttaagtcccgcaacgagcgcaaccctcgatattagttgctacgcaagagcactctaatagggctgcagttgacaaaacggaggaaggtggggacgacgtcaaatcatcatgcctcttatgacctgggctacacgcgtaatacaatggatgttaacagagggaagcaagacagcgatgtggagcaaacccctaaaaacattctcagttcagattgcaggctgcaacccgcctgcatgaagatggaattgctagtaatcgcagatcagcatgccgcggtgaatacgaaaaggggccttgtactcaccgcccgtca

SEQ ID NO: 364 - DNA, 1379 bp, Artificial Sequence
  Synthetic polymer
ttcgcccttagagtttgatcctggctcaggacgaacgctggcggcgtgcctaacacatgcaagtcgaacggacgaggaggagcttgcttctccaagtcagtggtggacgggtgagtaacgcgtgagtaacctgcccttcagagggggataacgtctggaaacggacgctaataccgcatgacatatttccatcgcatggtggagatatcaaaggagcaatccgctgaaggatggactcgcgtccgattagatagttggcggggtaacggcccaccaagtcgacgatcggtagccggactgagaggttgaacggccacattgggactgagacacggcccagactcctacgggaggcagcagtgggggatattgcacaatgggcgaaagcctgatgcagcaacgccgcgtgagggaagaaggtcttcggattgtaaactcctgttgttgaggaagataatgacggtactcaacaaggaagtgacggctaactacgtgccagcagccgcggtaaaacgtaggtcacaagcgttgtccggaattactgggtgtaaagggagcgcaggcgggaagacaagttggaagtgaaatctatgggctcaacccataaactgctttcaaaactgtttttcttgagtagtgcagaggtaggcggaattcccggtgtagcggtggaatgcgtagatatcgggaggaacaccagtggcgaaggcggcctactgggcaccaactgacgctgaggctcgaaagtgtgggtagcaaacaggattagataccctggtagtccacaccgtaaacgatgattactaggtgttggaggattgaccccttcagtgccgcagttaacacaataagtaatccacctggggagtacgaccgcaaggttgaaactcaaaggaattgacgggggcccgcacaagcagtggagtatgtggtttaattcgacgcaacgcgaagaaccttaccaagtcttgacatcctgcgacgcacatagaaatatgtgtttccttcgggacgcagagacaggtggtgcatggttgtcgtcagctcgtgtcgtgagatgttgggttaagtcccgcaacgagcgcaacccttatggtcagttactacgcaagaggactctggccagactgccgttgacaaaacggaggaaggtggggatgacgtcaaatcatcatgccctttatgacttgggctacacacgtactacaatggcgttaaacaaagagaagcaagaccgcgaggtggagcaaaactcagaaacaacgtcccagttcggactgcaggctgcaactcgcctgcacgaagtcggaattgctagtaatcgcagatcagcatgctgcggtgaatacgttcccgggccttgcacacaccgcccgtca

SEQ ID NO: 365 - DNA, 1394 bp, Artificial Sequence
  Synthetic polymer
agagtttgatcctggctcaggatgaacgctggcggcgtgcttaacacatgcaagtcgaacgaagcactttatttgatttccttcgggactgattattttgtgactgagtggcggacgggtgagtaacgcgtgagtaacctgccattgagaggggaataacttcccgaaagggatgctaataccgcatgacgcatatttatcgcatggtagatatgccaaagatttatcgctcaaagatggactcgcgtccgattagccagttggcggggtaacggcccaccaaagcgacgatcggtagccggactgagaggttgaacggccacattgggactgagacacggcccagactcctacgggaggcagcagtgggggatattgcgcaatgggggaaaccctgacgcagcaacgccgcgtgaaggatgaaggttttcggattgtaaacttcttttatttaggacgaagaatgacggtactaaatgaataagctccggctaactacgtgccagcagccgcggtaatacgtagggagcaagcgttatccggatttactgggtgtaaagggtgcgtaggcggcttggtaagtcagatgtgaaatgtatgggctcaacccatgcactgcatttgaaactattgagcttgagtgaagtagaggtaggcggaattccctgtgtagcggtgaaatgcgtagagatagggaggaacaccagtggcgaaggcggcctactgggctttaactgacgctgaggctcgaaagcgtggggagcaaacaggattagataccctggtagtccacgccgtaaacgatgaatactaggtgttggggaagcattgcttctcggtgccgtcgcaaacgcagtaagtattccacctggggagtacgttagcaagaatgaaactcaaaggaattgacggggacccgcacaagcggtggagcatgtggtttaattcgaagcaacgcgaagaacctttccaagtcttgacatccgcctgactgatccttaaccggatctttccttcgggacaggcgagacagatgatgcatggttgtcgtcagctcgtgtcgtgagatgttgggttaagtcccgcaacgagcgcaacccctatcctcagtagccagcatttaaggtgggcactctggggagactgccagggataacctggaggaaggcggggatgacgtcaaatcatcatgccccttatgatttgggctacacacgtgctacaatggcgtaaacaaagggaagcgagattgtgagatggagcaaatcccaaaaataacgtcccagttcggactgtagtctgcaacccgactacacgaagctggaatcgctagtaatcgcggatcagaatgccgcggtgaatacgttcccgggtcttgcacacaccgcccgtca

SEQ ID NO: 366 - DNA, 1395 bp, Artificial Sequence
  Synthetic polymer
ttcgcccttagagtttgatcctggctcaggacgaacgctggcggcgtgcttaacacatgcaagtcgaacgagaatctacggatcgaggattcgtccaagtgaagtagaggacagtggcggacgggtgagtaacgcgtgaggaacctgcctttcagagggggacaacagttggaaacgactgctaataccgcatgacacattggggtcgcatggctctgatgtcaaagatttatcgctgaaagatggcctcgcgtctgattagctagttggtgaggtaacggcccaccaaggcgacgatcagtagccggactgagaggttgaccggccacattgggactgagatacggcccagactcctacgggaggcagcagtggggaatattgggcaatgggcgcaagcctgacccagcaacgccgcgtgaaggaagaaggctttcgggttgtaaacttcttttgtcagggacgagtagaagacggtacctgacgaataagccacggctaactacgtgccagcagccgcggtaatacgcaggtggcaagcgttgtccggatttactgggtgtaaagggcgtgtagccgggaaggcaagtcagatgtgaaatccacgggcttaactcgtgaactgcatttgaaactgtttttcttgagtatcggagaggcaatcggaattcctagtgtagcggtgaaatgcgtagatattaggaggaacaccagtggtgaaggcggctttctggactgtaactgacgctgaggtacgaaagcgtggggagcaaacaggattagataccctggtagtccacgccgtaaacgatgagcactaggtgtcgggatcgtaggatttcggtgccgcagttaacgcattaagtgctccgcctggggagtacgcacgctagtgtgaaactcaaaggaattgacggggacccgcacaagcagcggagcatgtggtttaattcgaagcaacgcgaagaaccttaccaggacttgacatccctctgacagagccttaaccggctccttcttcggacagaggagacaggtggtgcatggttgtcgtcagctcgtgtcgtgagatgttgggttaagtcccgcaacgagcgcaacccttgtcattagttactaacattaagttgaggactctaatgagactgccggggacaactcggaggaaggtggggatgacgtcaaatcatcatgccccttatgttctgggctacacacgtgctacaatggccggtacaaagagaagcaagaccgcgaggtggagcgaaactcaaaaaccggtcccagttcggactgcaggctgcaactcgcctgcacgaagttggagttgctagtaatcgcggatcagaatgccgcggtgaatgcgttcccgggtcttgcacacaccgcccgtca

SEQ ID NO: 367 - DNA, 1362 bp, Artificial Sequence
  Synthetic polymer
agagtttgatcctggctcaggatgaacgctggcggcgtgcttaacacatgcaagtcgaacgaagcactttatttgatttccttcgggactgattattttgtgactgagtggcggacgggtgagtaacgcgtgggtaacctaccctgtacagggggataacagtcagaaatgactgctaataccgcataagaccacagcaccgcatggtgcaggggtaaaaactccggtggtacaggatggacccgcgtctgattagctggttggtgaggtaacggctcaccaaggcgacgatcagtagccggcttgagagagtgaacggccacattgggactgagacacggcccaaactcctacgggaggcagcagtggggaatattgcacaatgggggaaaccctgatgcagcgacgccgcgtgagtgaagaagtatctcggtatgtaaagctctatcagcagggaagaaaatgacggtacctgactaagaagccccggctaactacgtgccagcagccgcggtaatacgtagggggcaagcgttatccggaattactgggtgtaaagggtgcgtaggtggtatggcaagtcagaagtgaaaacccagggcttaactctgggactgcttttgaaactgtcagactagagtgcaggagaggtaagcggaattcctagtgtagcggtgaaatgcgtagatattaggaggaacatcagtggcgaaggcggcttactggactgaaactgacactgaggcacgaaagcgtggggagcaaacaggattagataccctggtagtccacgccgtaaacgatgaatactaggtggtgggggcccgtagaggcttcggtaccgcagttagcgcaataagtatcccacatggggagtacgaccgcaaggttgaaactcaaaggattagacgggggcccgcacaagcagtggagtatgtggtttaattagaagcaaggcgaagaaccttacctgggcttgacatccctggaatcgagtagagatacttgagtgccttcgggaatcaggtgacaggtggtgcatggttgtcgtcagctcgtgtcgtgagatgttgggttaagtcccgcaacgagcgcaacccctattgtcagttgccatcattaagttgggcactctggcgagactgccggtgacaaatcggaggaaggtggggacgacgtcaaatcatcatgccccttatgcccagggctacacacgtactacaatggccgataacaaagtgcagcgaaaccgtgaggtggagcgaatcacaaaactcggtctcagttcagaatgcaggctgcaactcgcctgcatgaagttggaattgctagtaatcgcggatcagaatgccgcggtgaata

SEQ ID NO: 368 - DNA, 1389 bp, Artificial Sequence
  Synthetic polymer
agagtttgatcctggctcaggacgaacgctggcggcgtgcctaacacatgcaagtcgaacgagaatctgtggaacggagcttcggcgaagggaagcagaggacagtggcgaacgggtgagtaacgcgtgaggaacctgcctttcagagggggacaacagctggaaacggctgctaataccgcataacacgatctgaccgcatgatcggatcgtcaaagatttatcgctgaaagatggcctcgcgtctgattagctggttggcggggtaacggcccaccaaggcgacgatcagtagccggcctgagagggtgaacggccacattgggactgagacacggcccaaactcctacgggaggcagcagtggggaatattgcacaatgggggaaaccctgatgcagcgacgccgcgtgagtgatgaagtatttcggtatgtaaagctctatcagcagggaagataatgacggtacctgactaagaagcaccggctaaatacgtgccagcagccgcggtaatacgtatggtgcaagcgttatccggatttactgggtgtaaagggtgcgtaggtggcaaggcaagtctgaagtgaaaatccggggctcaaccccggaactgctttggaaactgtttagctggagtacaggagaggtaagtggaattcctagtgtagcggtgaaatgcgtagatattaggaggaacaccagtggcgaaggcgacttactggactgctactgacactgaggcacgaaagcgtggggagcaaacaggattagataccctggtagtccacgccgtaaacgatgaaatactaggtgttgggttccaaaggaactcggtgccgtcgcaaacgcattaagtattccacctggggagtacgttcgcaagaatgaaactcaaaggaattgacggggacccgcacaagcggtggagcatgtggtttaattcgaagcaacgcgaaaaaccttaccaagtcttgacatcctgatgacggttccttaaccggaacttttcctcggaacatcagagacaggtggtgcatggttgtcgtcagctcgtgtcgtgagatgttgggttaagtcccgcaacgagcgcaacccctatttccagtagccagcagtaagatgggcactctggagagactgccagggataacccggaggaaggtggggatgacgtcaaatcatcatgccccttatgatttgggctacacacgtgctacaatggcagttacaaagagaagcaaacctgtgaaggcgagcaaacctcaaaaaggctgtctcagttcggattgtagtctgcaactcgactacatgaagctggaatcgctagtaatcgcagatcagcatgctgcggtgaatacgttcccgggtcttgtacacaccgcccgtca

SEQ ID NO: 369 - DNA, 1391 bp, Artificial Sequence
  Synthetic polymer
agagtttgatcctggctcaggatgaacgctggcggcgtgcttaacacatgcaagtcgaacgggaattactttattgaaacttcggtcgatttaatttaattctagtggcggacgggtgagtaacgcgtgggtaacctgcctcatacagggggataacagttagaaatgactgctaataccgcataagaccacagcaccgcatggtgcaggggtaaaaactccggtggtgtgagatggacccgcgtctgattaggtagttggtgaggtaacggcccaccaagccgacgatcagtagccgacctgagagggtgaccggccacattgggactgagacacggcccagactcctacgggaggcagcagtggggaatattgcacaatggaggaaactctgatgcagcgacgccgcgtgagtgaagaagtatttcggtatgtaaagctctatcagcagggaagacagtgacggtacctgactaagaagctccggctaaatacgtgccagcagccgcggtaatacgtatggagcaagcgttatccggatttactgggtgtaaagggagtgtaggtggtatcacaagtcagaagtgaaagcccggggctcaaccccgggactgcttttgaaactgtggaactggagtgcaggagaggtaagtggaattcctagtgtagcggtgaaatgcgtagatattaggaggaacaccagtggcgaaggcggcttactggactgtaactgacactgaggctcgaaagcgtggggagcaaacaggattagataccctggtagtccacgccgtaaacgatgaatactaggtgtcggggctcataagagcttcggtgccgcagcaaacgcaataagtattccacctggggagtacgttcgcaagaatgaaactcaaaggaattgacggggacccgcacaagcggtggagcatgtggtttaattcgaagcaacgcgaagaaccttaccaagtcttgacatccttctgaccggacagtaatgtgtcctttccttcgggacagaagagacaggtggtgcatggttgtcgtcagctcgtgtcgtgagatgttgggttaagtcccgcaacgagcgcaacccctatcctcagtagccagcaggtaaagctgggcactctgtggagactgccagggataacctggaggaaggtggggatgacgtcaaatcatcatgccccttatgacttgggctacacacgtgctacaatggcgtaaacaaagtgaagcgagagtgtgagcttaagcaaatcacaaaaataacgtctcagttcggattgtagtctgcaactcgactacatgaagctggaatcgctagtaatcgcgaatcagaatgtcgcggtgaatacaaagccgggtcttgcacacaccgcccgtca

SEQ ID NO: 370 - DNA, 1368 bp, Artificial Sequence
  Synthetic polymer
agagtttgatcctggctcaggacgaacgctggcggcacgcttaacacatgcaagtcgaacggagaacattgagcttgcttaatgttcttagtggcggacgggtgagtaacacgtgagtaacctgcctctgagagtggaatagcttctggaaacggatggtaataccgcataacatcatggattcgcatgtttctatgatcaaagatttatcgcttagagatggactcgcgtctgattagctagttggtaaggtaacggcttaccaaggcgacgatcagtagccggactgagaggttgatcggccacattgggactgagacacggcccagactcctacgggaggcagcagtggggaatattgcacaatggggggaaccctgatgcagcgatgccgcgtggaggaagaaggttttcggattgtaaactcctgttgaagaggacgataatgacggtactcttttagaaagctccggctaactacgtgccagcagccgcggtaatacgtagggagcgagcgttgtccggaattactgggtgtaaagggagcgtaggcgggatggcaagtcagatgtgaaaactatgggctcaacccatagactgcatttgaaactgttgttcttgagtgaggtagaggtaagcggaattcctggtgtagcggtgaaatgcgtagagatcaggaggaacatcggtggcgaaggcggcttactgggcctttactgacgctgaggctcgaaagcgtggggagcaaacaggattagataccctggtagtccacgccgtaaacgatgattactaggtgtgggggggctgaccccttccgtgccgcagttaacacaataagtaatccacctggggagtacgaccgcaaggttgaaactcaaaggaattgacgggggcccgcacaagcagtggagtatgtggtttaattcgacgcaacgcgaagaaccttaccaagtcttgacatcccttgacaggcatagaaatatgttttctcttcggagcaaggagacaggtggtgcatggttgtcgtcagctcgtgtcgtgagatgttgggttaagtcccgcaacgagcgcaacccttatggtcagttactacgcaagaggactctggccagactgccgttgacaaaacggaggaaggtggggatgacgtcaaatcatcatgccctttatgacttgggctacacacgtactacaatggcgttaaacaaagagaagcaagaccgcgaggtggagcaaaactcaggaacaacgtcccagttcggactgcaggctgcaactcgcctgcacgaagtcggaattgctagtaatcgtggatcagcatgccacggtgaatacgttcccgggccttgcactcaccgcccgtca

SEQ ID NO: 371 - DNA, 1371 bp, Artificial Sequence
  Synthetic polymer
agagtttgatcctgtgtctcaggatgaacgctggcggcgtgcctaacacatgcaagtcgaacggttaaggcgccctcgggcgcgcatagagtggcgaacgggtgagtaacacgtgaccaacctgccccctcctccgggacaacctcgggaaaccgaggctaataccggatgcccccgccgggccgcatggccgggcggggaaagcccagacgggaggggatggctccgcggcccatcaggtagacggcggggtgacggcccaccgtgccgacaacgggtagccgggttgagagaccgaccggccagattgggactgagacacggcccagactcctacgggaggcagcagtggggaatcttgcgcaatggggggaaccctgacgcagcgacgccgcgtgcgggacggaggccttcgggtcgtaaaccgctttcagcagggaagagtcaagactgtacctgcagaagaagccccggctaactacgtgccagcagccgcggtaatacgtagggggcgagcgttatccggattcattgggcgtaaagcgcgcgtaggcggcccggcaggccgggggtcgaagcggggggctcaaccccccgaagcccccggaacctccgcggcttgggtccggtaggggagggtggaacacccggtgtagcggtggaatgcgcagatatcgggtggaacaccggtggcgaaggcggccctctgggccgagaccgacgctgaggcgcgaaagctgggggagcgaacaggattagataccctggtagtcccagccgtaaacgatggacgctaggtgtggggggacgatccccccgtgccgcagccaacgcattaagcgtcccgcctggggagtacggccgcaaggctaaaactcaaaggaattgacgggggcccgcacaagcagcggagcatgtggcttaattcgaagcaacgcgaagaaccttaccagggcttgacatatgggtgaagcgggggagaccccgtggccgagaggagcccatacaggtggtgcatggctgtcgtcagctcgtgtcgtgagatgttgggttaagtcccgcaacgagcgcaacccccgccgcgtgttgccatcgggtgatgccgggaacccacgcgggaccgccgccgtcaaggcggaggagggcggggacgacgtcaagtcatcatgccccttatgccctgggctgcacacgtgctacaatggccggtacagagggatgccaccccgcgagggggagcggatcccggaaagccggccccagttcggattgggggctgcaacccgcccccatgaagtcggagttgctagtaatcgcggatcagcatgccgcggtgaatgcgttcccgggccttgcactcaccgcccgtca

SEQ ID NO: 372 - DNA, 1393 bp, Artificial Sequence
  Synthetic polymer
agagtttgatcctggctcaggatgaacgctggcggcgtgcttaacacatgcaagtcgaacgaagcgcttaaacggatttcttcggattgaagtttttgcgactgagtggcggacgggtgagtaacgcgtgggtaacctgcctcatacagggggataacagttagaaatgactgctaataccgcataagcgcacagtgctgcatggcacagtgtgaaaaactccggtggtatgagatggacccgcgtctgattagctagttggtggggtaacggcctaccaaggcgacgatcagtagccggcctgagagggtgaacggccacattgggactgagacacggcccaaactcctacgggaggcagcagtggggaatattgcacaatgggggaaaccctgatgcagcgacgccgcgtgagcgaagaagtatttcggtatgtaaagctctatcagcagggaagaaaatgacggtacctgactaagaagcaccggctaaatacgtgccagcagccgcggtaatacgtatggtgcaagcgttatccggatttactgggtgtaaagggtgcgtaggtggcagtgcaagtcagatgtgaaaggccggggctcaaccccggagctgcatttgaaactgcatagctagagtacaggagaggcaggcggaattcctagtgtagcggtgaaatgcgtagatattaggaggaacaccagtggcgaaggcggcctgctggactgttactgacactgaggcacgaaagcgtggggagcaaacaggattagatactctggtagtccacgccgtaaacgatgaatactaggtgttgggtggcagagccattcagtgccacagcaaacgcagtaagtattccacctggggaagtacgttcgcaagaatgaaactcaaaggaattgacggggacccgcacaagcggtggagcatgtggtttaattcgaagcaacgcgaagaaaccttaccaagtcttgacatcccgaatgaccggcacgtaacggtgccttctcttcgaagcatcggagacaggtggtgcatggttgtcgtcagctcgtgtcgtgagatgttgggttaagtcccgcaacgagcgcaacccctatccttagtagccagcggtttggccgggcactctgaggagactgccagggataacctggaggaaggcggggatgacgtcaaatcatcatgccccttatgacttgggctacacacgtgctacaatggcgtaaacaaagggaagcaaagctgtgaagccgagcaaatctcaaaaataacgtctcagttcggactgtagtctgcaacccgactacacgaagctggaatcgctagtaatcgcagatcagaatgctgcggtgaatacgttcccgggtcttgcacacaccgcccgtca

SEQ ID NO: 373 - DNA, 1384 bp, Artificial Sequence
  Synthetic polymer
agagtttgatcctggctcaggatgaacgctggcggcgcgcctaacacatgccaggttgttacgagcgagatgaggacctttctttttcaagggagtggcgaacggggcgagtaacgcgggggtaacctgcctccatgcagggggataaccaatcggaaatcggcttgctaataccggcataagccgctcagtaccgccatggtcgccccggctaaagccccgacgggaggggatggctccgcggcccatcaggtagacggcggggtgacggcccaccgtgccgacaacgggtagccgggttgagagaccgaccggccagattgggactgagacacggcccagattcctacgggaggcagcagtggggaatcttgcgcaatggggggaaccctgacgcagcgacgccgcgtgcgggacggaggccttcgggtcgtaaaccgctttcagcagggaagagtcaagactgtacctgcagaagaagccccggctaactacgtgccagcagccgcggtaatacgtagggggcgagcgttatccggattcattgggcgtaaagcgcgcgtaggcggcccggcaggccgggggtcgaagcggggggctcaaccccccgaagcccccggaacctccgcggcttgggtccggtaggggagggtggaacacccggtgtagcggtggaatgcgcagatatcgggtggaacaccggtggcgaaggcggccctctgagccgagaccgacgctgaggcgcgaaagctgggggagcgaacaggattagataccctggtagtcccagccgtaaacgatggacgctaggtgtggggggacgatccccccgtgccgcagccaacgcattaagcgtcccgcctggggagtacggccgcaaggctaaaactcaaaggaattgacgggggcccgcacaagcagcggagcatgtggcttaattcgaagcaacgcgaagaaccttaccagggcttgacatatgggtgaagcgggggagaccccgtggccgagaggagcccatacaggtggtgcatggctgtcgtcagctcgtgtcgtgagatgttgggttaagtcccgcaacgagcgcaacccccgccgcgtgttgccatcgggtgatgccgggaacccacgcgggaccgccgccgtcaaggcggaggagggcggggacgacgtcaagtcatcatgccccttatgccctgggctgcacacgtgctacaatggccggtacagagggatgccaccccgcgagggggagcggatcccggaaagccggccccagttcggattgggggctgcaacccgcccccatgaagtcggagttgctagtaatcgcggatcagcatgccgcggtgaatgcgttcccgggccttgcacacaccgcccgtca

SEQ ID NO: 374 - DNA, 1387 bp, Artificial Sequence
  Synthetic polymer
agagtttgatcctggctcaggatgaacgctggcggcgtgcttaacacatgcaagtcgaacgaaacaccttatttgattttcttcggaactgaagatttggtgattgagtggcggacgggtgagtaacgcgtgggtaacctgccctgtacagggggataacagtcagaaatgactgctaataccgcataagaccacagcaccgcatggtgcaggggtaaaaactccggtggtacaggatggacccgcgtctgattagctggttggtgaggtaacggctcaccaaggcgacgatcagtagccggcttgagagagtgaacggccacattgggactgagacacggaccaaactcctacgggaggcagcagtggggaatattgcacaatgggggaaaccctgatgcagcgacgccgcgtgagtgaagaagtatttcggtatgtaaagctctatcagcagggaagaaaatgacggtacctgactaagaagccccggctaactacgtgccagcagccgcggtaatacgtagggggcaagcgttatccggaattactgggtgtaaagggtgcgtaggtggtatggcaagtcagaagtgaaaacccagggcttaactctgggactgcttttgaaactgtcagactggagtgcaggagaggtaagcggaattcctagtgtagcggtgaaatgcgtagatattaggaggaacatcagtggcgaaggcggcttactggactgaaactgacactgaggcacgaaagcgtggggagcaaacaggattagataccctggtagtccacgccgtaaacgatgaatagtaggtgtcggggcggtagaggcttcggtgccgcagccaacgcagtaagtattccacatggggagtacgttagcaagaatgaaactcaaaggaattgacggggacccgcacaagcgctggagcatgtggtttaattagaagcaacgccaagaacctttcctggtctcgtcatccttctgcccggtccttacccgtgccctttccttcgggacaggagtgacaggtggtgcatggtcgtcgtcagttcgtgtcgtgagatgttgggttaagtcccgcagcgagcgcaacccttaccattagttgttacgcaagagcactctaatgggactgccgtggacaaaacggaggaaggtggggacgacgtcaaatcatcatgccccttatgacctgggcctcacacgtactacaatggccattaccagagggaagcaagcccgcgaggtggagcaataccctaaaaatggtctcagttcggatcgtaggctgaaacccgcctgcgtgaagttggaattgctagtaatcgcggatcagcatgccgcggtgaatacgttcccgggccttgcactcaccgcccgtca

SEQ ID NO: 375 - DNA, 1374 bp, Artificial Sequence
  Synthetic polymer
agagtttgatcctggctcaggacgaacgctggcggcgtgcctaacacatgcaagtcgagcgagtgaatctccttcgggagtgaagctagcggcggacgggtgagtaacacgtgggcaacctgcctcatagaggggaatagcctttcgaaaggaagattaataccgcataagattgtagcttcgcatgaagtagcaattaaaggagcaatccgctatgagatgggcccgcggcgcattagctagttggtgaggtaacggctcaccaaggcgacgatgcgtagccgacctgagagggtgatcggccacattgggactgagacacggcccagactcctacgggaggcagcagtggggaatattgcacaatgggggaaaccctgatgcagcaacgccgcgtgagtgatgacggccttcgggttgtaaagctctatcagcagggaagataatgacggtacctgactaagaagccccggctaactacgtgccagcagccgcggtaatacgtagggggcaagcgttatccggatttactgggtgtaaagggagcgtagacggcaaggcaagtctgatgtgaaaacccagggcttaaccctgggactgcattggaaactgtctggctcgagtgccggagaggtaagcggaattcctagtgtagcggtgaaatgcgtagatattaggaggaacaccagtggcgaaggcggcttactggactgtaactgacgttgaggctcgaaagcgtggggagcaaacaggattagataccctggtagtccacgccgtaaacgatgattactaggtgttggtgggtatgacccatcggtgccgcagcaaacgcaataagtaatccacctggggagtacgttcgcaagaatgaaactcaaaggaattgacggggacccgcacaagcggtggagcatgtggtttaattcgaagcaacgcgaagaaccttacctggtcttgacatcccgatgacagatctgtaatgagatccttacttcggtacatcggagacaggtggtgcatggttgtcgtcagctcgtgtcgtgagatgttgggttaagtcccgcaacgagcgcaacccttatctttagtagccagcagtaagatgggcactctagagagactgccggggataacccggaggaaggtggggatgacgtcaaatcatcatgccccttatgaccagggctacacacgtgctacaatggcgtaaacaaagagaagcgaagtcgtgaggcagagcgaatctcaaaaataacgtctcagttcggattgtagtctgcaactcgactacatgaagctggaatcgctagtaatcgcagatcagaatgctgcggtgaatacgttcccgggtcttgcacacaccgcccgtca

SEQ ID NO: 376 - DNA, 1393 bp, Artificial Sequence
  Synthetic polymer
agagtttgatcctggctcaagatgaacgctggcggcgtgcttaacacatgcaagtcgaacgaaacaccttatttgattctcttcggaactgaagatttggtgattgagtggcggacgggtgagtaacgcgtgggtaacctgccctgtacagggggataacagtcagaaatgactgctaataccgcataagaccacagcaccgcatggtgcaggggtaaaaactccggtggtacaggatggacccgcgtctgattagctggttggtgaggtaacggctcaccaaggcgacgatcagtagccggcttgagagagtgaacggccacattgggactgagacacggcccaaactcctacgggaggcaccagtggggaatattgcccaatgggggaaaccctgacgccgcaacgccgcgtgcaggaagaagtatctcggtatgtaaaactctatcagcagaggaagaaaatgacggtacctgactaagaagccccggctaactacgtgccagcagccgcggtaatacgtagggggcaagcgttatccggatttactgggtgtaaagggagcgtaggtggcaaggcaagtcagatgtgaaaacccggggctcaaccccgggactgcatttgaaactgtctagctagagtgcaggagaggtaagtggaattcctagtgtagcggtgaaatgcatagatattaggaggaacaccagtggcgaaggcggcttactggactgtaactgacactgaggctcgaaagcgtggggagcaaacaggattagataccctggtagtccacgcggtaaacgatgaatgctaggtgtcggggagcaaagctcttcggtgccgccgcaaacgcattaagcattccacctggggagtacgttcgcaagaatgaaactcaaaggaattgacggggacccgcacaagcggtggagcatgtggtttaattcgaagcaacgcgaagaaccttaccagtccttgacatccaactgaccgaccagtaacgtggtcttctcttcggagcagttgagacaggtggtgcatggttgtcgtcagctcgtgtcgtgagatgttgggttaagtcccgcaacgagcgcaacccctatcctcagtagccagcatttaaggtgggcactctggggagactgccagggataacctggaggaaggcggggatgacgtcaaatcatcatgccccttatgatttgggctacacacgtgctacaatggcgtaaacaaagggaagcgagattgtgagatggagcaaatcccaaaaataacgtcccagttcggactgtagtctgcaacccgactacacgaagctggaatcgctagtaatcgcggatcagaatgccgcggtgaatacgttcccgggtcttgtacacaccgcccgtca

SEQ ID NO: 377 - DNA, 1392 bp, Artificial Sequence
  Synthetic polymer
agagtttgatcctggctcaggatgaacgctggcggcgtgcttaacacatgcaagtcgagcgaagcacttaagtctgattcttcggatgaagacttttgtgactgagcggcggacgggtgagtaacgcgtgggtaacctgcctcatacagggggataacagttagaaatgactgctaataccgcataagtccacggtaccgcatggtacagtggtaaaaactccggtggtatgagatggacccgcgtctgattaggtagttggtggggtaacggcctaccaagccgacgatcagtagccgacctgagagggtgaccggccacattgggactgagacacggcccagactcctacgggaggcagcagtggggaatattgcacaatggaggaaactctgatgcagcgacgccgcgtgaaggatgaagtatttcggtatgtaaacttctatcagcagggaagaaaatgacggtacctgactaagaagccccggctaactacgtgccagcagccgcggtaatacgtagggggcaagcgttatccggatttactgggtgtaaagggagcgtagacggcacggcaagccagatgtgaaagcccggggctcaaccccgggactgcatttggaactgctgagctagagtgtcggagaggcaagtggaattcctagtgtagcggtgaaatgcgtagatattaggaggaacaccagtggcgaaggcggcttactggacggtaactgacgttgaggctcgaaagcgtggggagcaaacaggattagataccctggtagtccacgccgtaaacgatgaatactaggtgtcggggagcaaagctcttcggtgccgtcgcaaacgcagtaagtattccacctggggagtacgttcgcaagaatgaaactcaaaggaattgacggggacccgcacaagcggtggagcatgtggtttaattcgaagcaacgcgaagaaccttaccaagtcttgacatccgcctgaccgatccttaatcgttcctttccttcgggacagaggagacaggtggtgcatggttgtcgtcagctcgtgtcgtgagatgttgggttaagtcccgcaacgagcgcaacccttatcctcagtagccagcaagtgaagttgggcactctgtggagactgccagggataacctggaggaaggtggggatgacgtcaaatcatcatgcctcttatgtcttgggctacacacgtactacaatggtcggaaacagagggaagcgaagccgcgaggcagagcaaaccccagaaacccgatctcagttcggatcgcaggctgcaacccgcctgcgtgaagtcggaatcgctagtaatcgcaggtcagcatactgcggtgaatacgttcccgggccttgtactcaccgcccgtca

SEQ ID NO: 378 - DNA, 1391 bp, Artificial Sequence
  Synthetic polymer
agagtttgatcctggctcaggatgaacgctggcggcgtgcttaacacatgcaagtcgaacgaaacaccttatttgattttcttcggaactgaagatttggtgattgagtggcggacgggtgagtaacgcgtgggtaacctgccctgtacagggggataacagtcagaaatgactgctaataccgcataagaccacagcaccgcatggtgcaggggtaaaaactccggtggtacaggatggacccgcgtctgattagctggttggtgaggtaacggctcaccaaggcgacgatcagtagccggcttgagagagtgaacggccacattgggactgagacacggcccaaactcctacgggaggcagcagtggggaatattgcacaatgggggaaaccctgatgcagcgacgccgcgtgagtgaagaagtatctcggtatgtaaagctctatcagcagggaagaaaatgacggtacctgactaagaagccccggctaactacgtgccagcagccgcggtaatacgtagggggcaagcgttatccggaattactgggtgtaaagggtgcgtaggtggtatggcaagtcagaagtgaaaacccagggcttaactctgggactgcttttgaaactgtcagactggagtgcaggagaggtaagcggaattcctagtgtagcggtgaaatgcgtagatattaggaggaacaccagtggcgaaggcggcttactggacagtaactgacgttgaggctcgaaagcgcggggagcaaacaggattagataccctggtagtccacgcggtaaacgatgaatgctaggtgttggggagcaaagctcttcggtgccgtcgcaaacgcaataagcattccacctggggagtacgttcgcaagaatgaaactcaaaggaattgacggggacccgcacaagcggtggagcatgtggtttaattcgaagcaacgcgaagaaccttaccaagtcttgacatccttctgaccggtacgtaacggtaccttctcttcggagcaggagtgacaggtggtgcatggttgtcgtcagctcgtgtcgtgagatgttgggttaagtcccgcaacgagcgcaacccttatccttagtagccagcagtaagatgggcactctagggagactgccagggataacctggaggaaggtggggatgacgtcaaatcatcatgccccttatgatttgggctacacacgtgctacaatggcgtaaacaaagggaagcgaagccgcgaggtgaagcaaatcccaaaaataacgtcccagttcggattgtaggctgcaactcgcctgcatgaagctggaatcgctagtaatcgcgaatcagaatgtcgcggtgaatacgttcccgggtcttgcactcaccgcccgtca

SEQ ID NO: 379 - DNA, 1389 bp, Artificial Sequence
  Synthetic polymer
agagtttgatcctggctcaggacgaacgctggcggcgtgcctaacacatgcaagtcgaacgaagcgccttacctgattcttcggatgaaggtctggtgactgagtggcggacgggtgagtaacgcgtgggtaacctgccctgtacagggggataacagttggaaacggctgctaataccgcataagcgcacgagaggacatcctcttgtgtgaaaaactccggtggtacaggatgggcccgcgtctgattagctggttggcagggtaacggcctaccaaggcgacgatcagtagccggtctgagaggatgaacggccacattggaactgagacacggtccaaactcctacgggaggcagcagtggggaatattgcacaatgggggaaaccctgatgcagcaacgccgcgtgagtgaagaagtatttcggtatgtaaagctctatcagcagggaagataatgacggtacctgactaaggagctccggctaaatacgtgccagcagccgcggtaatacgtatggagcaagcgttatccggatttactgggtgtaaagggtgcgtaggtggcagtgcaagtcagatgtgaaaggccggggctcaaccccggagctgcatttgaaactgcatagctagagtacaggagaggcaggcggaattcctagtgtagcggtgaaatgcgtagatattaggaggaacaccagtggcgaaggcggcttactggacgataactgacgctgaggctcgaaagcgtggggagcaaacaggattagataccctggtagtccacgccgtaaacgatgaatactaggtgtcgggggacatagtccttcggtgccgcagcaaacgcaataagtattccacctggggagtacgttcgcaagaatgaaactcaaaggaattgacggggacccgcacaagcggtggagcatgtggtttaattcgaagcaacgcgaagaaccttaccaagtcttgacatcccggtgacaaagtatgtaatgtactctttcttcggaacaccggtgacaggtggtgcatggttgtcgtcagctcgtgtcgtgagatgttgggttaagtcccgcaacgagcgcaacccctgttcttagtagccagcggtccggccgggcactctagggagactgccagggataacctggaggaaggcggggatgacgtcaaatcatcatgccccttatgacttgggctacacacgtgctacaatggcgttaaacaaagagaagcaagaccgcgaggtggagcaaaactcaaaaacaacgtctcagttcagattgcaggctgcaactcgcctgcatgaagtcggaattgctagtaatcgcggatcagcatgccgcggtgaatacgttcccgggccttgcactcaacacccgtca

SEQ ID NO: 380 - DNA, 1390 bp, Artificial Sequence
  Synthetic polymer
agagtttgatcctggctcaggatgaacgctggcggcgtgcttaacacatgcaagtcgagcgaagcacttaagtttgattcttcggatgaagacttttgtgactgagcggcggacgggtgagtaacgcgtgggtaacctgcctcatacagggggataacagttagaaatggctgctaataccgcataagaccacagtactgcatggtacagtggtaaaaactccggtggtataagatggacccgcgtctgattagctagttggtgagataacagcccaccaaggcgacgatcagtagccgacctgagagggtgaccggccacattgggactgagacacggcccagactcctacgggaggcagcagtggggaatattgcacaatggaggaaactctgatgcagcgacgccgcgtgagtgaagaagtaattcgttatgtaaagctctatcagcagggaagatagtgacggtacctgactaagaagctccggctaaatacgtgccagcagccgcggtaatacgtatggagcaagcgttatccggatttactgggtgtaaagggagtgtaggtggccatgcaagtcagaagtgaaaatccggggctcaaccccggaactgcttttgaaactgtaaggctggagtgcaggaggggtgagtggaattcccagtgtagcggtgaaatgcgtagatattgggaggaacaccagtggcgaaggcggcttactggacgatgactgacgttgaggctcgaaagcgtggggagcaaacaggattagataccctggtagtccacgccgtaaacgatgactactaggtgtcggggagcaaagctcttcggtgccgcagcaaacgcaataagtagtccacctggggagtacgttcgcaagaatgaaactcaaaggaattgacggggacccgcacaagcggtggagcatgtggtttaattcgaagcaacgcgaagaaccttacctgctcttgacatcccggtgaccggcgtgtaatgacgccttttcttcggaacaccggtgacaggtggtgcatggttgtcgtcagctcgtgtcgtgagatgttgggttaagtcccgcaacgagcgcaacccttatcttcagtagccagcattttggatgggcactctggagagactgccagggataacctggaggaaggtggggatgacgtcaaatcatcatgccccttatgagcagggctacacacgtgctacaatggcgtaaacaaagggaagcaaacctgcgagggtaagcaaatctcaaaaataacgtctcagttcggattgtagtctgcaactcgactacatgaagctggaatcgctagtaatcgcgaatcagcatgtcgcggtgaatacgttcccgggtcgtgcactcaccgcccgtca

SEQ ID NO: 381 - DNA, 1393 bp, Artificial Sequence
  Synthetic polymer
agagtttgatcctggctcaggatgaacgctggcggcgtgcttaacacatgcaagtcgaacgaaacaccttatttgattttcttcggaactgaagatttggtgattgagtggcggacgggtgagtaacgcgtgggtaacctaccctgtacagggggataacagtcagaaatgactgctaataccgcataagaccacagcaccgcatggtgcaggggtaaaaactccggtggtacaggatggacccgcgtctgattagctggttggtgaggtaacggctcaccaaggcgacgatcagtagccggcttgagagagtgaacggccacattgggactgagacacggcccaaactcctacgggaggcagcagtggggaatattgcacaatgggggaaaccctgatgcagcgacgccgcgtgagtgaagaagtatttcggtatgtaaagctctatcagcagggaagaaaatgacggtacctgactaagaagccccggctaactacgtgccagcagccgcggtaatacgtagggggcaagcgttatccggaattactgggtgtaaagggtgcgtaggtggtatggcaagtcagaagtgaaaacccagggcttaactctgggactgcttttgaaactgtcagactagagtgcaggagaggtaagcggaattcctagtgtagcggtgaaatgcgtagatattaggaggaacatcagtggcgaaggcggcttactggactgaaactgacactgaggcacgaaagcgtggggagcaaacaggattagataccctggtagtccacgccgtaaacgatgaatactaggtgtcggggccgtagaggcttcggtgccgcagccaacgcagtaagtattccacctggggagtacgttcgcaagaatgaaactcaaaggaattgacggggacccgcacaagcggtggagcatgtggtttaattcgaagcaacgcgaagaaccttacctggtcttgacatccttctgaccggtccttaaccggacttttccttcgggacaggagtgacaggtggtgcatggttgtcgtcagctcgtgtcgtgagatgttgggttaagtcccgcaacgagcgcaacccctaatttcagttgccagcacgtaaaggtgggaactctgaagtaactgccggtgacaaaccggaggaaggtggggatgacgtcaaatcatcatgccctttatgtcctgggctacacacgtgctacaatggctggtacagagggcagcgaaaccgcgaggtggagcgaatcccaaaaagccagtctcagttcggattgcaggctgcaacccgcctgcatgaagtcggaatcgctagtaatcgcgagtcagcatatcgcggtgaatacgttcccgggtcttgcactcaccgcccgtca

SEQ ID NO: 382 - DNA, 1379 bp, Artificial Sequence
  Synthetic polymer
agagtttgatcctggctcaggacgaacgctggcggcgcgcctaacacatgcaagtcgaacgagcgagagagagcttgctttctcgagcgagtggcgaacgggtgagtaacgcgtgaggaacctgcctcaaagagggggacaacagttggaaacgactgctaataccgcataagcccacgggtcggcatcgaccagagggaaaaggagcaatccgctttgagatggcctcgcgtccgattagctagttggtaaggtaacggcttaccaaggcgacgatcagtagccggactgagaggttgatcggccacattgggactgagacacggcccagactcctacgggaggcagcagtggggaatattgcacaatggaggaaactctgatgcagcgatgccgcgtgagggaagaaggttttaggattgtaaacctctgtcttcagggacgaaaaaagacggtacctgaggaggaagctccggctaactacgtgccagcagccgcggtaatacgtagggagcgagcgttgtccggaattactgggtgtaaagggagcgtaggcgggatcgcaagtcagatgtgaaaactatgggcttaacccataaactgcatttgaaactgtggttcttgagtgaagtagaggtaagcggaattcctagtgtagtggtgaaatgcgtagatattaggaggaacatcagtggcgaaggcggcttactgggctttaactgacgctgaggctcgaaagcgtggggagcaaacaggattagataccctggtagtccacgccgtaaacgatgattactaggtgttggggagcaaagctcttcggtgccgccgcaaacgcattaagtattccacctggggagtacgttcgcaagaatgaaactcaaaggaattgacggggacccgcacaagcggtggagcatgtggtttaattcgaagcaacgcgaagaaccttacctgctcttgacatcccattcgatagagggtaatgcctctagcccttcgggggaatggagacaggtggtgcatggttgtcgtcagctcgtgtcgtgagatgttgggttaagtcccgcaacgagcgcaacccttattgtcagtagccagcaggtgaagctgggcactctgatgagactgccggggataacccggaggaaggtggggatgacgtcaaatcatcatgccccttatgagcagggctacacacgtgctacaatggcgtaaacagagggaagcgaaggagtgatctggagcaaatctcaaaaataacgtctcagttcggattgtagtctgcaactcgactacatgaagctggaatcgctagtaatcgcagatcagaatgctgcggtgaatacgttcccgggtcttgtacacaccgcccgtca

SEQ ID NO: 383 - DNA, 1375 bp, Artificial Sequence
  Synthetic polymer
ttcgcccttagagttttatcctggctcaggacgaacgctggcggcgcgcctaacacatgcaagtcgaacgagcggagacccttcggggttgaagttagtggcggacgggtgagtaacacgtgaggaacctgccttacagagagggataccgtttggaaacgaacgttaataccgcataatgtattgaaatcgcatggttttgataccaaagatttatcgctgtaagatggcctcgcgtctgattagatagttggtgaggtaacggcccaccaagtcgacgatcagtagccggactgagaggttgatcggccacattgggactgagacacggcccagactcctacgggaggcagcagtgggggatattgcacaatgggcgaaagcctgatgcagcgacgccgcgtgagggaagacggttttcggattgtaaactcctgttgttgaggaagataatgacggtactcaacaaggaagtgacggctaactacgtgccagcagccgcggtaaaacgtaggtcacaagcgttgtccggaattactgggtgtaaagggagcgcaggcgggaagacaagttggaagtgaaatccatgggctcaacccatgaactgctttcaaaactgtttttcttgagtagtgcagaggtaggcggaattcccggtgtagcggtggaatgcgtagatatcgggaggaacaccagtggcgaaggcggcctactgggcaccaactgacgctgaggctcgaaagtgtgggtagcaaacaggattagataccctggtagtccacactgtaaacgatgattactaggtgttggaggattgaccccttcagtgccgcagttaacacaataagtaatccacctggggagtacgaccgcaaggttgaaactcaaaggaattgacgggggcccgcacaagcagtggagtatgtggtttaattcgacgcaacgcgatgaaccttaccaagtcttgacatccatcgacgactatagaaatatagttttccttcgggacggtgagacaggtggtgcatggttgtcgtcagctcgtgtcgtgagatgttgggttaagtcccgcaacgagcgcaacccttatggtcagttactacgcaagaggactctggccagactgccgttgacaaaacggaggaaggtggggatgacgtcaaatcatcatgccctttatgacttgggctacacacgtactacaatggcgttaaacaaagagaagcaagaccgcgaggtggagcaaaactcagaaacaacgtcccagttcggactgcaggctgcaactcgcctgcacgaagttggaattgctagtaatcgcagatcagcatgctgcggtgaatacgttcccgggccttgcactcaccgcccgtca

SEQ ID NO: 384 - DNA, 1386 bp, Artificial Sequence
  Synthetic polymer
ttcgcccttagagtttgatcctggctcaggacgaacgctggcggcgtgcctaacacatgcaagtcgaacgggcggaggagcttcggctcccgagctagtggcggacgggtgagtaacgcgtgaggaacctgcctttcagagggggacaacagttggaaacgactgctaataccgcataacatgtgcggatcgcatgatctgcacatcaaagatttatcgctgaaagatggcctcgcgtctgattagatagttggtggggtaacggcccaccaagtcgacgatcagtagccggactgagaggttgaacggccacattgggactgagatacggcccagactcctacgggaggcagcagtggggaatattgggcaatgggggcaaccctgacccagcaacgccgcgtgaaggaagaaggctttcgggttgtaaacttcttttaccagggacgaaggacgtgacggtacctggagaaaaagccacggctaactacgtgccagcagccgcggtaatacgtaggtggcgagcgttgtccggaattactgggtgtaaagggagtgtaggcgggaaggcaagtcagaagtgaaaattatgggcttaacccataacctgcttttgaaactgtttttcttgagtgaggcagaggcaagcggaattcctagtgtagcggtgaaatgcgtagatattaggaggaacaccagtggcgaaggcggcttgctgggcctttactgacgctgaggctcgaaagcgtggggagcaaacaggattagatacccttggtagtccacgccgtaaacgatgatccctaggtgtgggggagttgaacccttcccgtgcccgaattaacaccataaagtgatcccccctggggaataccacccccaaggttgaaactccaaaggaatttgacggggggccccccccacgcagtggagtatgtggtttaattggaagcaacgcgaagacccttaccaggtcttgacatcgagtgacgatcccagagatgggatttcccttcggggcacaaagacaggtggtgcatggttgtcgtcagctcgtgtcgtgagatgttgggttaagtcccgcaacgagcgcaacccttactattagttgctacgcaagagcactctaataggactgccgttgataaaacggaggaaggtggggatgacgtcaaatcatcatgccctttatgacctgggctacacacgtactacaatggcgtttaacaaagagaagcgaaaccgcgaggttgagcaaatccccaaaaaacgtctcagttcagattgcaggctgcaactcgcctgcatgaagtcggaattgctagtaatcgtaggtcagcatactacggtgaatacgttcccgggccttgtacacaccgcccgtca

SEQ ID NO: 385 - DNA, 1389 bp, Artificial Sequence
  Synthetic polymer
agagtttgttcctggctcaggatgaacgctggcggcgtgcctaacacatgcaagtcgaacgaagcaccttttgagattcttcggatgattgatcggtgactgagtggcggacgggtgagtaacgcgtgggtaacctgccctgtacagggggataacagctggaaacggctgctaataccgcataagcgcacgaggagacatctccttgtgtgaaaaactccggtggtacaggatgggcccgcgtctgattagctggttggcagggtaacggcctaccaaggcaacgatcagtagccggtctgagaggatgaacggccacattggaactgagacacggtccaaactcctacgggaggcagcagtggggaatattgcacaatgggggaaaccctgatgcagcaacgccgcgtgagtgaagaagtatttcggtatgtaaagctctatcagcagggaagataatgacggtacctgactaagaagctccggctaaatacgtgccagcagccgcggtaatacgtatggagcaagcgttatccggatttactgggtgtaaagggtgcgtaggtggcagtgtaagtcagatgtgaaaggccggggctcaaccccggagctgcatttgaaactgctcggctagagtacaggagaggcaggcggaattcctagtgtagcggtgaaatgcgtagatattaggaggaacaccagtggcgaaggcggcctgctggactgttactgacactgaggcacgaaagcgtggggagcaaacaggattagataccctggtagtccacgccgtaaacgatgaatactaggtgtcggggccgtataggcttcggtgccgccgctaacgcagtaagtattccacctggggagtacgttcgcaagaatgaaactcaaaggaattgacggggacccgcacaagcggtggagcatgtggtttaatccgaagcaacgcgaagaaccttacctgatcttgacatcccgatgaccgcttcgtaatggaggcttttcttcggaacatcggtgacaggtggtgcatggttgtcgtcagctcgtgtcgtgagatgttgggttaagtcccgcaacgagcgcaacccctatcttcagtagccagcaggttaagctgggcactctggagagactgccagggataacctggaggaaggtggggatgacgtcaaatcatcatgccccttatgaccagggctacgcacgtgctacaatggcgtaaacaaagagaagcgaactcgcgagggtaagcaaatctcaaaaataacgtctcagttcggattgtagtctgcaactcgactacatgaagctggaatcgctagtaatcgcagatcagaatgctgcggtgaatacgaacccgggtcttgcactcaccgcccgtca

SEQ ID NO: 386 - DNA, 1407 bp, Artificial Sequence
  Synthetic polymer
agagtttgatcctggctcaggatgaacgctggcggcgtgcttaacacatgcaagtcgagcgaagcgctttggaaagattcttcggatgatttcctttgtgactgagcggcgcacgggtgagtaatacatcggaacgtgtcctgttgtgggggataactgctcgaaagggtggctaataccgcatgagacctgagggtgaaagcgggggatcgcaagacctcgcgcaattggagcggccgatgcccgattagctagttggtgaggtaaaggctcaccaaggcgacgatcggtagctggtctgagaggacgaccagccacactgggactgagacacggcccagactcctacgggaggcagcagtggggaattttgggcaatgggggcaaccctgatccagccatgccgcgtgcaggatgaaggccttcgggttgtaaactgcttttgtcagggacgaaaaggaccgtgttaataccatggtctgctgacggtacctgaagaataagcaccggctaactacgtgccagcagccgcggtaatacgtagggtgcaagcgttaatcggaattactgggcgtaaagcgtgcgcaggcggttctgtaagacagatgtgaaatccccgggctcaacctgggaattgcatttgtgactgcaggactagagttcatcagaggggggtggaattccaagtgtagcagtgaaatgcgtagatatttggaagaacaccaatggcgaaggcagccccctgggatgcgactgacgctcatgcacgaaagcgtggggagcaaacaggattagataccctggtagtccacgccctaaacgatgtctactggttgttggggtttattaaccttggtaacgaagctaacgcgtgaagtagaccgcctggggagtacggtcgcaagattaaaactcaaaggaattgacggggacccgcacaagcggtggatgatgtggattaattcgatgcaacgcgaaaaaccttacctagccttgacatgccaggaatcctgaagagattcgggagtgcccgcaagggaatctggacacaggtgctgcatggctgtcgtcagctcgtgtcgtgagatgttgggttaagtcccgcaacgagcgcaacccttgtcactagttgctacgcaagagcactctagtgagactgccggtgacaaaccggaggaaggtggggatgacgtcaagtcctcatggccctcatggctagggcctcacacgtcatacaatggtcggaacagagggcagcgaagccgcgaggtggagcaaatcccagaaaaccgatcgtagtccggattgcagtctgcaactcgactgcatgaagtcggaatcgctagtaatcgcggatcagcatgccgcggtgaatacgttcccgggtcttgcactcaccgcccgtca

SEQ ID NO: 387 - DNA, 1369 bp, Artificial Sequence
  Synthetic polymer
gtttgatcctggctcaggacgaacgctggcggcgcgcttaacacatgcaagtcgaacggagctgagaggagcttgcttttctcagcttagtggcgaacgggtgagtaacgcgtgagtaacctgccctggagtgggggacaacagttggaaacgactgctaataccgcataagcccacggcccggcatcgggctgcgggaaaaggatttattcgcttcaggatggactcgcgtccaattagccagttggtgaggtaacggcccaccaaggcaacgatcggtagccggactgagaggttgaacggccacattgggactgagacacggcccagactcctacgggaggcagcagtggggaatattgcacaatgggggaaaccctgatgcagcgacgccgcgtggaggaagaaggtcttcggattgtaaactcctgttgttgaggaagataatgacggtactcaacaaggaagtgacggctaactacgtgccagcagccgcggtaaaacgtaggtcacaagcgttgtccggaattactgggtgtaaagggagcgcaggcgggaagacaagttggaagtgaaatctatgggctcaacccataaactgctttcaaaactgtttttcttgagtagtgcagaggtaggcggaattcccggtgtagcggtggaatgcgtagatatcgggaggaacaccagtggcgaaggcggcctactgggcaccagctgacgctgaggctcgaaagtgtgggtagcaaacaggattagataccctggtagtccacaccgtaaacgatgattactaggtgttggaggattgaccccttcagtgccgcagttaacacaataagtaatccacctggggagtacgaccgcaaggttgaaactcaaaggaattgacgggggcccgcacaagcagtggagtatgtggtttaattcgacgcaacgcgaagaaccttaccaagtcttgacatcctgcgacgatgctggaaacagtattttccttcgggacgcagagacaggtggtgcatggttgtcgtcagctcgtgtcgtgagatgttgggttaagtcccgcaacgagcgcaacccttactgtcagttactacgcaagaggactctggcgagactgccgttgacaaaacggaggaaggtggggatgacgtcaaatcatcatgccctttatgacctgggctacacacgtactacaatggcgtttaacaaagagaagcaagaccgcgaggtggagcaaaactcaaaaacaacgtctcagttcagattgcaggctgcaactcgcctgcatgaagtcggaattgctagtaatcgcggatcagcatgccgcggtgaatacgttcccgggccttgtactcaccgcccgtca

SEQ ID NO: 388 - DNA, 1393 bp, Artificial Sequence
  Synthetic polymer
agagtttgatcctggctcaggatgaacgctggcggcgtgcttaacacatgcaagtcggacgaagcttgactcttgaatttttcggaaggatagacgatatgactgagtggcggacgggtgagtaacgcgtgggcaacctgccttatacagggggataacagttagaaatgactgctaaaaccgcataagaccacaggatcgcatgatccggtggtaaaaactccggtggtataagatgggcccgcgtctgattagctagttggtgaggtaacggctctaccaaggcaacgatcagtagccggcttgagagagtggacggccacattgggactgagacacggcccaaactcctacgggaggcagcagtggggaatattgcacaatggggggaaccctgatgcagcgacgccgcgtgagtgaagaagtacttcggtatgtaaagctctatcagcagggaagaaaatgacggtacctgactaagaagccccggctaactacgtgccagcagccgcggtaatacgtagggggcaagcgttatccggaattactgggtgtaaagggtgcgtaggtggcagggcaagtcagaagtgaaagcccggggcttaactccgggactgcttttgaaactgccaggctggagtgcaggagaggtaagcggaattcctagtgtagcggtgaaatgcgtagatattaggaggaacatcagtggcgaaggcggcttactggactgaaactgacactgaggcacgaaagcgtggggagcaaacaggattagataccctggtagtccacgccgtaaacgatgaatactaggtgtcggggccgtagaggcttcggtgccgcagcaaacgcattaagtattccacctggggagtacgttcgcaagaatgaaactcaaaggaattgacggggacccgcacaagcggtggagcatgtggtttaattcgaagcaacgcgaagaaccttacctggtcttgacatccttctgacggctctttaatcggagttttccttcgggacaggagagacaggtggtgcatggttgtcgtcagctcgtgtcgtgagatgttgggttaagtcccgcaacgagcgcaacccctatctttagtagccagcaagtgaagttgggcactctagagagactgccagggagaacctggaggaaggtggggacgacgtcaaatcatcatgccccttatgaccagggctacacacgtgctacaatggcgtaaacaaagggaggcgaccctgtgaaggcaagcgaatcccaaaaataacgtcgcagttcggattgtagtctgcaactcgactacatgaagctggaatcgctagtaatcgcgaatcagaatgtcgcggtgaatacgttcccgggtcttgtacacaccgcccgtca

SEQ ID NO: 389 - DNA, 1381 bp, Artificial Sequence
  Synthetic polymer
agagtttgatcctggctcaggacgaattttggcggcgcgcctaacacatgcaagtcgaacgagcgagagagagcttgctttctcgagcgagtggcgaacgggtgagtaacgcgtgaggaacctgcctcaaagagggggacaacagttggaaacgactgctaataccgcataagcccacagctcggcatcgagcagagggaaaaggagcaatccgctttgagatggcctcgcgtccgattagctagttggtgaggtaacggcccaccaaggcgacgatcggtagccggactgagaggttgaacggccacattgggactgagacacggcccagactcctacgggaggcagcagtggggaatattgcacaatggaggaaactctgatgcagcgacgccgcgtgaaggatgaagtatttcggtatgtaaagctctatcagcagggaagaaaatgacggtacctgactaagaagccccggctaactacgtgccagcagccgcggtaatacgtagggggcaagcgttatccggatttactgggtgtaaagggagcgtagacggcgaggcaagtctgatgtgaaaacccggggctcaaccccgggacggcttttgaaactgccctgcttgatttcaggagaggtaagcggaattcctagtgtagcggtgaaatgcgtagatattaggaggaacaccagtggcgaaggcggcttactggactgacaatgacgctgaggctcgaaagcgtggggagcaaacaggattagataccctggtagtccacgccgtaaacgatgaatactaggtgtcggggctcaataagagcttcggtgccgcaggcaaacgcaataagtattccacctggggagtacgttcgcaagaatgaaactcaaaggaattgacggggacccgcacaagcggtggagcatgtggtttaattcgaagcaacgcgaagaaccttaccaggccttgacatcccggtgaccgtcccgtaatggggacctctcttcggagcaccggtgacaggtggtgcatggttgtcgtcagctcgtgtcgtgagatgttgggttaagtcccacaacaagcgcaacccctatgttcagtagccagcaggtaaagctgggcactctggacagactgccggggataacccggaggaaggcggggatgacgtcaaatcatcatgccccttacggcctgggctacacacgtgctacaatggcgtaaacaaagggaagcgagagggtgacctggagcgaatcccaaaaataacgtcccagttcggactgtagtctgcaacccgactacacgaagctggaatcgctagtaatcgcgaatcagcatgtcgcggtgaatacgttcccgggtcttgcacacaaagcccgtca

SEQ ID NO: 390 - DNA, 1401 bp, Artificial Sequence
  Synthetic polymer
ttagagtttgatcctggctcaggatgaacgctagctacaggcttaacacatgcaagtcgaggggcagcatcatcaaagcttgctttgatggatggcgaccggcgcacgggtgagtaacacgtatccaacctgccgacaacactgggatagcctttcgaaagaaagattaataccggatggcatagttttcccgcatgggataattattaaagaatttcggttgtcgatggggatgcgttccattaggcagttggcggggtaacggcccaccaaaccaacgatggataggggttctgagaggaaggtcccccacattggaactgagacacggtccaaactcctacgggaggcagcagtgaggaatattggtcaatggacgagagtctgaaccagccaagtagcgtgaaggatgactgccctatgggttgtaaacttcttttatacgggaataaagttagccacgtgtggctttttgtatgtaccgtatgaataaggatcggctaactccgtgccagcagccgcggtaatacggaggatccgagcgttatccggatttattgggtttaaagggtgcgtaggcggctttataagttagtggtaaaatttcggagcttcactccggtccgccattaaaactgtagagctagagaatggacgaggtaggcggaataagttaagtagcggtgaaatgcatagatataacttagaactccgatagcgaaggcagcttaccagaccataactgacgctgatgcacgagagcgtgggtagcgaacaggattagataccctggtagtccacgccgtaaacgatgctcacgggcccttaccgataaaacagttaggggttaatttgaaagaataaattgagccacctggggagtacgtcggcaaacgatgaaactcaaaggaattgacgggggcccgcacaagcgaaggaacatgtggtttaattcgatgatacgcgaggaaccttacctgggtttaaatgtatgttgcataatctggaaacagttttcctcttagaagctatatacaaggtgctgcatggttgtcgtcagctcgtgccgtgaggtgtcggcttaagtgccataacgagcgcaacccttatcgatagttaccatcaggtcatgctggggactctgtcgagactgccgtcgtaagatgcgaggaaggtggggatgacgtcaaatcagcacggcccttacgtccggggccacacacgtgttacaatggggggtacagaaggccgctacacagcgatgtgatgccaatccccaaaacccctctcagttcggattggagtctgcaacccgactccatgaagctggattcgctagtaatcgcgcatcagccacggcgcggtgaatacgttcccgggccttgcactcaccgcccgtca

SEQ ID NO: 391 - DNA, 1389 bp, Artificial Sequence
  Synthetic polymer
agagtttgatcctggctcaggacgaacgctggcggcgtgcttaacacatgcaagtcgaacgagaatctgcggaaagaggattcgtccaattgaagcagaggacagtggcggacgggtgagtaacgcgtgaggaacctgcctttcagagggggacaacagttggaaacgactgctaataccgcataacatatagatgtcgcatggcatttatatcaaagatttatcgctgaaagatggcctcgcgtctgattagctagttggtgaggtaacggcccaccaaggcgacgatcagtagccggactgagaggttgaacggccacattgggactgagatacggtccaaactcctacgggaggcagcagtggggaatattgcacaatgggcgaaagcctgatgcagcaacgccgcgtgagcgatgaaggccttcgggtcgtaaagctctgtcctcaaggaagataatgacggtacttgaggaggaagccccggctaactacgtgccagcagccgcggtaatacgtagggggctagcgttatccggatttactgggcgtaaagggtgcgtaggcggtcttttaagtcaggagtgaaaggctacggctcaaccgtagtaagctcttgaaactggaggacttgagtgcaggagaggagagtggaattcctagtgtagcggtgaaatgcgtagatattaggaggaacaccagtggcgaaggcggcctgctggactgttactgacactgaggcacgaaagcgtggggagcaaacaggattagataccctggtagtccacgccgtaaacgatgaatactaggtgtcggggccgtataggcttcggtgccgtcgcaaacgcagtaagtattccacctggggagtacgttcgcaagaatgaaactcaaaggaattgacggggacccgcacaagcggtggagcatgtggtttaattcgaagcaacgcgaagaaccttaccaggtcttgacatccttctgaccactccgtaatgggagtcttccttcgggacagaagagacaggtggtgcatggttgtcgtcagctcgtgtcgtgagatgttgggttaagtcccgcaacgagcgcaacccctatcttcagtagccagcaggtaaggctgggcactctggagagactgccagggataacctggaggaaggtggggacgacgtcaaatcatcatgccccttatgatctgggcgacacacgtgctacaatggcggtcacaaagtgaggcgaacccgcgagggggagcaaaccacaaaaaggccgtcccagttcggactgtagtctgcaacccgactacacgaagctggaatcgctagtaatcgcgaatcagaatgtcgcggtgaatacgttcccgggtcttgtactaaccgcccgtca

SEQ ID NO: 392 - DNA, 1391 bp, Artificial Sequence
  Synthetic polymer
ttagagtttgatcctggctcaggatgcattctggcggcgtgcttaacacatgcaagtcgaacgaagcgatcaggaggaagttttcggatggaatccggattgactgagtggcggacgggtgagtaacgcgtgggtaacctgcctcatacagggggataacagttagaaatgactgctaataccgcataagcgcacagggacacatgttccggtgtgaaaaactccggtggtatgagatggacccgcgtctgattagctggttggcggggcaacggcccaccaaggcgacgatcagtagccggactgagaggttggccggccacattgggactgagacacggcccagactcctacgggaggcagcagtggggaatattgggcaatgggcgcaagcctgacccagcaacgccgcgtgaaggaagaaagctttcgggttgtaaacttcttttctcagggacgaagcaagtgacggtacctgaggaataagccacggctaactacgtgccagcagccgcggtaatacgtaggtggcaagcgttatccggatttactgggtgtaaagggcgtgtaggcgggactgcaagtcagatgtgaaaaccacgggctcaacctgtggcctgcatttgaaactgtagttcttgagtactggagaggcagacggaattcctagtgtagcggtgaaatgcgtagatattaggaggaacaccagtggcgaaggcggtctgctggacagcaactgacgctgaggcgcgaaagcgtggggagcaaacaggattagataccctggtagtccacgctgtaaacgatggatactaggtgtggggggactgaccccctccgtgccgcagttaacacaataagtatcccacctggggagtacgatcgcaaggttgaaactcaaaggaattgacgggggcccgcacaagcggtggagtatgtggtttaattcgaagcaacgcgaagaaccttaccagggcttgacatcccgaggaccggactagagatagtcttttctcttcggagacctcggagacaggtggtgcatggttgtcgtcagctcgtgtcgtgagatgttgggttaagtcccgcaacgagcgcaacccttattgttagttgctacgcaagagcactctagcgagactgccgttgacaaaacggaggaaggtggggatgacgtcaaatcatcatgccccttatgatttgggctacacacgtgctacaatggcgtaaacagagggaagcgaacccgcgagggggagcaaatcccaaaaataacgtcccagttcggattgtagcctgcaacccggctacatgaagctggaatcgctagtaatcgcggatcagaatgccgcggtgaatacgttcccgggtcttgcacacaccacccgtca

SEQ ID NO: 393 - DNA, 1385 bp, Artificial Sequence
  Synthetic polymer
agagtttgatcctggctcaggatgaacgctggcggcgtgcctaacacatgcaagtcgaacgggaaaccttttattgaagcttcggcagatttagattgtttctagtggcggacgggtgagtaacgcgtgggtaacctgccttatacagggggataacagtcagaagtgactgctaataccgcataagcgcacagagctgcatggctcagtgtgaaaaactccggtggtataagatggacccgcgttggattagctggttggtgaggtaacggcccaccaaaccgacgatcagtaaccgacctgagagggtgatcggccacattgggactgagacacggcccagactcctacgggaggcagcagtggggaatattgcacaatggaggaaactctgatgcagcgacgccgcgtgagtgaagaagtaattcgttatgtaaagctctatcagcagggaagatagtgacggtacctgactaagaagctccggctaaatacgtgccagcagccgcggtaatacgtatggagcaagcgttatccggatttactgggtgtaaagggagtgtaggtggcatcacaagtcagaagtgaaagcccggggctcaaccccgggactgcttttgaaactgtggagctggagtgcaggagaggcaagtggaattcctagtgtagcggtgaaatgcgtagatattaggaggaacaccagtggcgaaggcggcttgctggactgtaactgacactgaggctcgaaagcgtggggagcaaacaggattagataccctggtagtccacgccgtaaacgatgaatactaggtgtcggggctcataagagcttcggtgccgcagcaaacgcaataagtattccacctggggagtacgttcgcaagaatgaaactcaaaggaattgacggggacccgcacaagcggtggagcatgtggtttaattcgaagcaacgcgaagaaccttaccaagtcttgacatcctcttgcccggtcagtaatgtggccttttcttcggaacaagagtgacaggtggtgcatggttgtcgtcagctcgtgtcgtgagatgttgggttaagtcccgcaacgagcgcaacccttatggtcagttactacgcaagaggactctggccagactgccgttgacaaaacggaggaaggtggggatgacgtcaaatcatcatgccctttatgacttgggctacacacgtactacaatggcgttaaacaaagagaagcaagaccgcgaggtggagcaaaactcagaaacaacgtcccagttcggactgcaggctgcaactcgcctgcacgaagtcggaattgctagtaatcgtggatcagcatgccacggtgaatacgttcccgggccttgcactcaccgcccgtca

SEQ ID NO: 394 - DNA, 1385 bp, Artificial Sequence
  Synthetic polymer
agagtttgatcctggctcaggatgaacgctggcggcgtgcttaacacatgcaagtcgaacgaagcactttaccacgattccttcgggatgacggtttagtgactgagtggcggacgggtgagtaacgcgtggggaacctgccccataccgggggataacagccggaaacggctgctaataccgcataagcgcacagtaccgcatggtacggtgtgaaaaactccggtggtatgggatggacccgcgtctgattagccagttggcggggtaacggcccaccaaagcgacgatcagtagccggcctgagagggcgaccggccacattgggactgagacacggcccagactcctacgggaggcagcagtggggaatattgcacaatggaggaaactctgatgcagcgacgccgcgtgagtgaagaagtagttcgctatgtaaagctctatcagcagggaagatagtgacggtacctgactaagaagctccggctaaatacgtgccagcagccgcggtaatacgtatggagcaagcgttatccggatttactgggtgtaaagggagtgtaggtggccaggcaagtcagaagtgaaagcccggggctcaaccccgggactgcttttgaaactgcagggctagagtgcaggaggggcaagtggaattcctagtgtagcggtgaaatgcgtagatattaggaggaacaccagtggcgaaggcggcctgctggactgttactgacactgaggcacgaaagcgtggggagcaaacaggattagataccctggtagtccacgctgtaaacgatgaatactaggtgtcggggccgtataggcttcggtgccgtcgcaaacgcagtaagtattccacctggggagtacgttcgcaagaatgaaactcaaaggaattgacggggacccgcacaagcggtggagcatgtggtttaattcgaagcaacgcgaagaaccttaccaggtcttgacatccttctgaccactccgtaatgggagctttccttcgggacagaagagacaggtggtgcatggttgtcgtcagctcgtgtcgtgagatgttgggttaagtcccgcaacgagcgcaacccctattgttagttgctacgcaagagcactctagcgagactgccgttgacaaaacggaggaaggtggggacgacatcaaatcatcatgccccttatgtcctgggctacacacgtaatacaatggcggtcaacagagggatgcgataccgcaaggtggagcgaacccttaaaagccgtcccagttcagattgtgggctgcaacccgcccacatgaagtcggaatcgctagtaatcgcagatcagcatgctgcggtgaatacgttcccgggccttgcactcaccgcccgtca

SEQ ID NO: 395 - DNA, 1379 bp, Artificial Sequence
  Synthetic polymer
agagtttgatcctggctcaggatgaacgctggcggcgtgcttaacacatgcaagtcgaacgattgaagctggagcttgctctggccgatttagtggcggacgggtgagtaacgcgtgggtaacctgcctcatacagggggatagcagttggaaacgactggtaaaaccgcataagcgcacggtgtcgcatgacacagtgtgaaaacactccggtggtatgagatggacccgcgtctgattagctagttggtgaggtaacggcccaccaaggcgacgatcagtagccggcctgagagggtgaacggccacattgggactgagacacggcccaaactcctacgggaggcagcagtggggaatattgcacaatgggggaaaccctgatgcagcgacgccgcgtgagtgatgaagtatttcggtatgtaaagctctatcagcagggaagataatgacggtacctgactaagaagcaccggctaaatacgtgccagcagccgcggtaatacgtatggtgcaagcgttatccggatttactgggtgtaaagggtgcgtaggtggcaaggcaagtctgaagtgaaaatccggggctcaaccccggaactgctttggaaactgtttagctggagtacaggagaggtaagtggaattcctagtgtagcggtgaaatgcgtagatattaggaggaacaccagtggcgaaggcggcttactggacggtaactgacgctgaggctcgaaagcgtggggagcaaacaggattagataccctggtagtccacgccgtaaacgatgaatactaggtgtcggggcacataagtgcttcggtgccgcagcaaacgcattaagtattccacctggggagtacgttcgcaagaatgaaactcaaaggaattgacggggacccgcacaagcggtggagcatgtggtttaattcgaagcaacgcgaagaaccttaccagtccttgacatccaactgaccgaccagtaacgtggtcttctcttcggagcagttgagacaggtggtgcatggttgtcgtcagctcgtgtcgtgagatgttgggttaagtcccgcaacgagcgcaacccctatccccagtagccagcggttcggccgggcactctgaggagactgccagggataacctggaggaaggcggggatgacgtcaaatcatcatgccccttatgatttgggctacacacgtgctacaatggcgtaaacaaagggaagcgagcctgcgaaggtaagcaaatcccaaaaataacgtcccagttcggactgcagtctgcaactcgactgcacgaagctggaatcgctagtaatcgcggatcagaatgccgcggtgaatacgttcccgggtcttgcactcaccgcccgtca

SEQ ID NO: 396 - DNA, 1378 bp, Artificial Sequence
  Synthetic polymer
  misc_feature (788)..(788): n is a, c, g, or t
ttagagtttgatcctggctcaggacgccctttggcggcgtgcctaacacaggggagtcgaacggagttgaaaggagcttgcttttttcaactcagtggcgttttggtgagtaacgcgtgagtaacctgcctttcagagggggataacgttctgaaaagaacgctaataccgcataagattgtagtttcgcatggagcagcaatcaaaggagcaatccgctgaaagatggactcccgtccgattagatagttggcggggtaacggcccaccaagccgacgatcggtagccggactgagaggttgatcggccacattgggactgagacacggcccagactcctacgggaggcagcagtgagggatattgggcaatgggggaaaccctgacccagcaacgccgcgtgagggatgacggttttcggattgtaaacctctgtcctctgtgaagatagtgacggtagcagaggaggaagctccggctaactacgtgccagcagccgcggtaatgcgtagggagcgagcgttgtccggaattactgggtgtaaagggagcgtaggcgggatcgcaagtcagatgtgaaaactatgggcttaacccataaactgcatttgaaactgtggttcttgagtgaagtagaggtaagcggaattcctagtgtagcggtgaaatgcgtagatattaggaggaacatcagtggcgaaggcggcttactgggctttaactgacgctgaggctcgaaagcgtggggagcaaacaaaattagatgccctggtagtcctcgccgtcntcgaccctaaaaggttggggggactgacccccttccgtgccgcaaccaaacggcaataagtaatccactgggggagtacgaccgcaaggttgaaactcaaaggaattgacggggggcccgcacaagcagtggagtatgtggataaattggaagcaacgcgaagaactttaccaggtcttgacatcgtatgcatagttcagagatgagtgaaatctcttcggagacatatagacaggtggtgcatggttgtcgtcagctcgtgtcgtgagatgttgggttaagtcccgcaacgagcgcaacccttactgttagttgctacgcaagagcactctagcaggactgccgttgacaaaacggaggaaggtggggatgacgtcaaatcatcatgccccttatgacctgggcctcacacgtactacaatggctgtcaacagagggatgcaaagccgcgaggtggagcgaacccctaaaagcagtcttagttcggattgtaggctgcaacccgcctacatgaagtcggaattgctagtaatcgcagatcagcatgctgcggtgaatacgttcccgggccttgtactcaccgcccgtca

SEQ ID NO: 397 - DNA, 1379 bp, Artificial Sequence
  Synthetic polymer
ttcgcccttagagtttgatcctggctcaggacgaacgctggcggcacgcttaacacatgcaagtcgaacgagagaagagaagcttgcttttctgatctagtggcggacgggtgagtaacacgtgagcaatctgcctttcagagggggataccgattggaaacgatcgttaataccgcataatataattgaaccgcatgatttgattatcaaagatttatcgctgaaagatgagctcgcgtctgattagctagttggtaaggtaacggcttaccaaggcgacgatcagtagccggactgagaggttgatcggccacattgggactgagacacggcccagactcctacgggaggcagcagtggggaatattgcacaatggaggaaactctgatgcagcgatgccgcgtgagggaagaaggttttaggattgtaaacctctgtcttcagggacgaaaaaagacggtacctgaggaggaagctccggctaactacgtgccagcagccgcggtaatacgtagggagcgagcgttgtccggaattactgggtgtaaagggagcgtaggcgggatcgcaagtcagatgtgaaaactatgggcttaacccataaactgcatttgaaactgtggttcttgagtgaagtagaggtaagcggaattcctagtgtagcggtgaaatgcgtagatattaggaggaacatcggtggcgaaggcggcttactgggcctttactgacgctgaggctcgaaagcgtggggagcaaacaggattagataccctggtagtccacgccgtaaacgatgattactaggtgtggggggactgaccccttccgtgccgcagttaacacaataagtaatccacctggggagtacggccgcaaggttgaaactcaaaggaattgacgggggcccgcacaagcagtggagtatgtggtttaattcgaagcaacgcgaagaaccttaccaggtcttgacatcgagtgacgtacctagagataggtattttcttcggaacacaaagacaggtggtgcatggttgtcgtcagctcgtgtcgtgagatgttgggttaagtcccgcaacgagcgcaacccttaccattagttgctacgcaagagcactctaatgggactgccgttgacaaaacggaggaaggtggggatgacgtcaaatcatcatgccccttatggcctgggctacacacgtactacaatggcaatataacagagggaagcaatacagcgatgtggagcaaaactcagaaacaacgtcccagttcggactgcaggctgcaactcgcctgcacgaagtcggaattgctagtaatcgcagatcagcatgctgcggtgaatacgttcccgggccttgcacacaccgcccgtca

SEQ ID NO: 398 - DNA, 1389 bp, Artificial Sequence
  Synthetic polymer
ttagagtttgatcctggctcaggaccaacgctggcggcgtgcctaacacatgcaagtcgaacggaactgttttgaaagatttcttcggaatgaatttgatttagtttagtggcggacgggtgagtaacgcgtgagtaacctgccttcaagagggggataacattctgaaaagaatgctaataccgcatgacatatcggaatcacatggttttgatatcaaagattttatcgcttgaagatggactcgcgtccgattagttagttggtgaggtaacggcctaccaaggcgacgatccatagccggcctgagagggtggacggccacattgggactgagacacggcccagactcctacgggaggcagcagtagggaatattgcacaatgggggaaaccctgatgcagcgacgccgcgtggaggaagaaggtcttcggattgtaaactcctgttgttgaggaagataatgacggtactcaacaaggaagtgacggctaactacgtgccagcagccgcggtaaaacgtagggtgcaagcgttgtccggaattactgggtgtaaagggagcgcaggcgggaagacaagttggaagtgaaaaccatgggctcaacccatgaattgctttcaaaactgtttttcttgagtagtgcagaggtagatggaattcccggtgtagcggtggaatgcgtagatatcgggaggaacaccagtggcgaaggcggtctactgggcaccaactgacgctgaggctcgaaagcatgggtagcaaacaggattagataccctggtagtccatgccgtaaacgatgattactaggtgttgggggattgaccccctcagtgccgcagttaacacaataagtaatccacctggggagtacgaccgcaaggttgaaactcaaaggaattgacgggggcccgcacaagcagtggagtatgtggtttaattcgaagcaacgcgaagaaccttaccaggtcttgacatccgatgcataacacagagatgtgtgaaatccttcgggacatcgagacaggtggtgcatggttgtcgtcagctcgtgtcgtgagatgttgggttaagtcccgcaacgagcgcaacccttattgccagttactacgttaagaggactctggcgagactgccgttgacaaaacggaggaaggtggggatgacgtcaaatcatcatgccctttatgacctgggctacacacgtactacaatggcgttaaacaaagagaagcaagaccgcgaggtggagcaaaactcaaaaacaacgtctcagttcagattgcaggctgcaactcgcctgcatgaagtcggaattgctagtaatcgcggatcagcatgccgcggtgaatacgttcccgggccttgcacacaccgcccgtca

SEQ ID NO: 399 - DNA, 1393 bp, Artificial Sequence
  Synthetic polymer
agagtttgatcctggctcaggatgaacgctggcggcgtgcctaacacatgcaagtcgaacggaacttctttgacagaattcttcggaaggaagttgattaagtttagtggcggacgggtgagtaacgcgtgagtaacctgcctttgagaggggaataacttcccgaaagggatgctaataccgcatgatgcatagaagtcgcatggcttttatgccaaagatttatcgctcaaagatggactcgcgtccgattagccagttggcggggtaacggcccaccaaagcgacgatcggtagccggactgagaggttgaacggccacattgggactgagacacggcccagactcctacgggaggcagcagtgggggatattgcgcaatgggggaaaccctgacgcagcaacgccgcgtgaaggatgaaggttttcggattgtaaacttcttttatttaggacgaagaatgacggtactaaatgaataagctccggctaactacgtgccagcagccgcggtaatacgtagggagcaagcgttatccggatttactgggtgtaaagggtgcgtaggcggcttggtaagtcagatgtgaaatgtatgggctcaacccatgcactgcatttgaaactattgagcttgagtgaagtagaggtaggcggaattccctgtgtagcggtgaaatgcgtagagatagggaggaacaccagtggcgaaggcggcctactgggctttaactgacgctgaggcacgaaagcgtgggtagcaaacaggattagataccctggtagtccacgctgtaaacgatgattactaggtgtggggggtctgaccccttccgtgccggagtttaacacaataagtaatccacctggggagtacgaccgcaaggttgaaactcaaaggaattgacggggacccgcacaagcggtggagcatgtggtttaattcgaagcaacgcgaagaaccttacctggtcttgacatccttctgaccggtccttaaccggacctttccttcgggacaggagtgacaggtggtgcatggttgtcgtcagctcgtgtcgtgagatgttgggttaagtcccgcaacgagcgcaacccctatctttagtagccagcatttaaggtgggcactctagagagactgccagggataacctggaggaaggtggggacgacgtcaaatcatcatgccccttatgaccagggctacacacgtgctacaatggcgtaaacagagggaagcagcctcgtgagagtgagcaaatcccaaaaataacgtctcagttcggattgtagtctgcaactcgactacatgaagctggaatcgctagtaatcgcgaatcagaatgtcgcggtgaatacgttcccgggtcttgcacacaccgcccgtca

SEQ ID NO: 400 - DNA, 1392 bp, Artificial Sequence
  Synthetic polymer
agagtttgacctggctcaggatgaacgctggcggcgtgcttaacacatgcaagtcgaacgaagcaccttggacagattcttcggatgaagtccttagtgactgagtggcggacgggtgagtaacgcgtgggtaacctgcctcatacagggggataacagtcagaaatggctgctaataccgcataagcgcacagagctgcatggctcagtgtgaaaaactccggtggtataagatggacccgcgttggattagctagttggtggggtaacggcccaccaaggcgacgatccatagccggcctgagagggtgaacggccacattgggactgagacacggcccagactcctacgggaggcagcagtggggaatattgcacaatgggggaaaccctgatgcagcgacgccgcgtgagcgaagaagtatttcggtatgtaaagctctatcagcagggaagaaaatgacggtacctgactaagaagccccggctaactacgtgccagcagccgcggtaatacgtagggggcaagcgttatccggatttactgggtgtaaagggagcgtagacggaatggcaagtctgatgtgaaagcccggggctcaaccccgggactgcttttgaaactgtggaactggagtgcaggagaggtaagtggaattcctagtgtagcggtgaaatgcgtagatattaggaggaacaccagtggcgaaggcggcttactggactgtaactgacactgaggctcgaaagcgtggggagcaaacaggattagataccctggtagtccacgccgtaaacgatgaatactaggtgtcgggggctcataagagcttcggtgccgcagcaaacgcaataagtattccgcctggggagtacgttcgcaagaatgaaactcaaaggaattgacggggacccgcacaagcggtggagcatgtggtttaattcgaagcaacgcgaagaaccttaccaagtcttgacatccttctgaccggacagtaatgtgtcctttccttcgggacagaagagacaggtggtgcatggttgtcgtcagctcgtgtcgtgagatgttgggttaagtcccgcaacgagcgcaacccctatcctcagtagccagcaggtaaagctgggcactctgtggagactgccagggataacctggaggaaggtggggatgacgtcaaatcatcatgccccttatgacttgggctacacacgtgctacaatggcgtaaacaaagtgaagcgagagtgtgagcttaagcaaatcacaaaaataacgtctcagttcggattgtagtctgcaactcgactacatgaagctggaatcgctagtaatcgcgaatcagaatgtcgcggtgaatacgttcccgggtcttgcactcaccgcccgtca

SEQ ID NO: 401 - DNA, 1391 bp, Artificial Sequence
  Synthetic polymer
agagtttgatcctggctcaggatgaacgctggcggcgtgcttaacacatgcaagtcgagcgaagcacttaagtttgattcttcggatgaagacttttgtgactgagcggcggacgggtgagtaacgcgtgggtaacctgcctcatacagggggataacagttagaaatgactgctaataccgcataagaccacggtaccgcatggtacagtggtaaaaactccggtggtatgagatggacccgcgtctgattaggtagttggtggggtaacggcctaccaagccgacgatcagtagccgacctgagagggtgaccggccacattgggactgagacacggcccagactcctacgggaggcagcagtggggaatattgcacaatggaggaaactctgatgcagcgacgccgcgtgaaggatgaagtatttcggtatgtaaacttctatcagcagggaagaaaatgacggtacctgactaagaagccccggctaactacgtgccagcagccgcggtaatacgtagggggcaagcgttatccggatttactgggtgtaaagggagcgtagacggcacggcaagccagatgtgaaagcccggggctcaaccccgggactgcatttggaactgctgagctagagtgtcggagaggcaagtggaattcctagtgtagcggtgaaatgcgtagatattaggaggaacaccagtggcgaaggcggcttgctggacgatgactgacgttgaggctcgaaagcgtggggagcaaacaggattagataccctggtagtccacgccgtaaacgatgactgctaggtgtcgggtggcaaacccattcgggcccccagctaacgcaataagcagtccacctgggggagtacgttcgcaagaatgaaactcaaaggaattgacggggacccgcacaagcggtggagcatgtggtttaattcgaagcaaacgcgaagaaccttaccaagtcttgacatcccactgaccggacagtaatgtgtcctttccttcgggacagtggtgacaggtggtgcatggttgtcgtcagctcgtgtcgtgagatgttgggttaagtcccgcaacgagcgcaacccctatccttagtagccagcagtaagatgggcactctagggagactgccagggataacctggaggaaggtggggatgacgtcaaatcatcatgccccttatgacttgggctacacacgtgctacaatggcgtaaacaaagtgaagcgaagtcgtgaggccaagcaaatcacaaaaataacgtctcagttcggattgtagtctgcaactcgactacatgaagctggaatcgctagtaatcgcagatcagaatgctgcggtgaatacgttcccgggtcttgtacacaccgcccgtca

SEQ ID NO: 402 - DNA, 1388 bp, Artificial Sequence
  Synthetic polymer
agagtttgacctggctcaggatgaacgctggcggcgtgcttaacacatgcaagtcgaacgggaattactttattgaaacttcggtcgatttaatttaattctagtggcggacgggtgagtaacgcgtgggtaacctgccttatacagggggataacagtcagaaatggctgttaataccgtataagcgcacagagctgcatggctcggtgtgaaaaactccggtggtatgagatggacccgcgtctgattagctagttggtgaggtaacggcccaccaaggcgacgatcagtagccggcctgagagggtgaacggccacattgggactgagacacggcccaaactcctacgggaggcagcagtggggaatattgcacaatgggggaaaccctgatgcagcaacgccgcgtgagtgaagaagtatttcggtatgtaaagctctatcagcagggaagataatgacggtacctgactaagaagctccggctaaatacgtgccagcagccgcggtaatacgtatggagcaagcgttatccggatttactgggtgtaaagggtgcgtaggtggcagtgcaagtcagatgtgaaaggccggggctcaaccccggagctgcatttgaaactgcatagctagagtacaggagaggcaggcggaattcctagtgtagcggtgaaatgcgtagatattaggaggaacaccagtggcgaaggcggcctgctggactgttactgacactgaggcacgaaagcgtggggagcaaacaggattagataccctggtagtccacgccgtaaacgatgaatactaggtgtcggggccgtataggcttcggtgccgtcgcaaacgcagtaagtattccacctggggagtacgttcgcaagaatgaaactcaaaggaattgacggggacccgcacaagcggtggagcatgtggtttaattcgaagcaacgcgaagaaccttaccaggtcttgacatccttctgaccggtccttaaccggacctttccttcgggacaggagagacaggtggtgcatggttgtcgtcagctcgtgtcgtgagatgttgggttaagtcccgcaacgagcgcaacccctatcttcagtagccagcattccggatgggcactctggagagactgccagggacaacctggaggaaggtggggatgacgtcaaatcatcatgccccttatgaccagggctacacacgtgctacaatggcgtaaacaaagggaggcgaacccgcgagggtgggcaaatcccaaaaataacgtctcagttcggattgtagtctgcaactcgactacatgaagctggaatcgctagtaatcgcgaatcagaatgtcgcggtgaatacgttcccgggtcttgcactcaccgcccgtca

SEQ ID NO: 403 - DNA, 1393 bp, Artificial Sequence
  Synthetic polymer
agagtttgatcctggctcaggatgaacgctggcggcgtgcttaacacatgcaagtcgaacgaagcactttatttgatttccttcgggactgattattttgtgactgagtggcggacgggtgagtaacgcgtgggtaacctgccttgtacagggggataacagctggaaacggctgctaataccgcataagcgcacggcatcgcatgatgcagtgtgaaaaactccggtggtataagatggacccgcgttggattagctagttggtgaggtaacggcccaccaaggcgacgatccatagccgacctgagagggtgaccggccacattgggactgagacacggcccaaactcctacgggaggcagcagtggggaatattgcacaatgggggaaaccctgatgcagcaacgccgcgtgagtgaagaagtatttcggtatgtaaagctctatcagcagggaagataatgacggtacctgactaagaagctccggctaaatacgtgccagcagccgcggtaatacgtatggagcaagcgttatccggatttactgggtgtaaagggtgcgtaggtggcagtgcaagtcagatgtgaaaggccggggctcaaccccggagctgcatttgaaactgcatagctagagtacaggagaggcaggcggaattcctagtgtagcggtgaaatgcgtagatattaggaggaacaccagtggcgaaggcggcctgctggactgttactgacactgaggcacgaaagcgtggggagcaaacaggattagataccctggtagtccacgccgtaaacgatgaatactaggtgtcggggccgtataggcttcggtgccgtcgcaaacgcagtaagtattccacctggggaggtacgttcgcaagaatgaaactcaaaggaattgacggggacccgcacaagcggtggagcatgtggtttaattcgaagcaacgcgaagaaccttacctggtcttgacatccctctgaccgctctttaatcggagctttccttcgggacagaggagacaggtggtgcatggttgtcgtcagctcgtgtcgtgagatgttgggttaagtcccgcaacgagcgcaacccctatctttagtagccagcatttaaggtgggcactctagagagactgccagggataacctggaggaaggtggggatgacgtcaaatcatcatgccccttatgaccagggctacacacgtgctacaatggcgtaaacaaagggaagcgagcccgtgagggggagcaaatcccaaaaataacgtctcagttcggattgtagtctgcaactcgactacatgaagctggaatcgctagtaatcgcgaatcagaatgtcgcggtgaatacgttcccgggtcttgtacacaccgcccgtca

SEQ ID NO: 404 - DNA, 1393 bp, Artificial Sequence
  Synthetic polymer
agagtttgatcctggctcaggatgaacgctggcggcgtgcttaacacatgcaagtcgaacgaagcgccccggatagatttcttcggattgaagtcctgggtgactgagtggcggacgggtgagtaacgcgtgggtaacctgcctcatacagggggataacagttagaaatgactgctaataccgcataagcgcacgataccgcatggtattgtgtgaaaaactccggtggtatgagatggacccgcgtctgattagcttgttggcggggtaacggcccaccaaggcgacgatcagtagccgacctgagagggtgaccggccacattgggactgagacacggcccaaactcctacgggaggcagcagtggggaatattgcacaatgggggaaaccctgatgcagcgacgccgcgtgaaggatgacgtatttcggtatgtaaacttctatcagcaaggaagatgatgacggtacttgactaagaagccccggctaactacgtgccagcagccgcggtaatacgtagggggcaagcgttatccggatttactgggtgtaaagggagcgtaggcggccatgcaagtcagaagtgaaagcccggggctcaaccgcgggactgcttttgaaactgtaaggctagattgccggagaggtaagcggaattcctagtgtagcggtgaaatgcgtagatattaggaggaacaccagtggcgaaggcggcttactggacggtgaatgacgctgaggctcgaaagcgtggggagcaaacaggattagataccctggtagtccacgccgtaaacgatgaatactaggtgttggggcccagaagggcttcggtgccgcagcaaacgcaataagtattccacctggggagtacgttcgcaagaatgaaactcaaaggaattgacggggacccgcacaagcggtggagcatgtggtttaattcgaagcaacgcgaagaaccttaccaggtcttgacatctgggtgacggaagagtaatgtcttctttcctacgggacacccaagacaggtggtgcatggttgtcgtcagctcgtgtcgtgagatgttgggttaagtcccgcaacgagcgcaacccttatttttagtagccagcggtacggccgggcactctagagagactgccagggataacctggaggaaggtggggatgacgtcaaatcatcatgccccttatgacctgggctacacacgtgctacaatggtggtaacaaagtgaggcgagcccgtgagggggagcaaatcccaaaaataacgtctcagttcggattgtagtctgcaactcgactacatgaagctggaatcgctagtaatcgcgaatcagaatgtcgcggtgaatacgttcccgggtcttgcactcaccgcccgtca

SEQ ID NO: 405 - DNA, 1394 bp, Artificial Sequence
  Synthetic polymer
agagtttgatcctggctcaggatgaacgctggcggcgtgcttaacacatgcaagtcgaacgaagcatttaagacggattttttcggaatgaagttttttatgactgagtggcggacgggtgagtaacgcgtgggtaacctgcctcacacagggggatagcagttggaaacgactggtaataccgcataagcgcacagcttcgcatgaagcggtgtgaaaaactccggtggtgtgagatggacccgcgtctgattaggtagttggtgaggtaacggcccaccaagccgacgatcagtagccgacctgagagggtgaccggccacattgggactgagacacggcccagactcctacgggaggcagcagtggggaatattgcacaatggaggaaactctgatgcagcgacgccgcgtgagtgaagaagtatttcggtatgtaaagctctatcagcagggaagacagtgacggtacctgactaagaagctccggctaaatacgtgccagcagccgcggtaatacgtatggagcaagcgttatccggatttactgggtgtaaagggagtgtaggtggtatcacaagtcagaagtgaaagcccggggctcaaccccgggactgcttttgaaactgtggaactggagtgcaggagaggtaagtggaattcctagtgtagcggtgaaatgcgtagatattaggaggaacaccagtggcgaaggcggcttactggactgtaactgacactgaggctcgaaagcgtggggagcaaacaggattagataccctggtagtccacgccgtaaacgatgaatactaggtgtcggggctcataagagcttcggtgccgcagcaaacgcaataagtattccacctggggagtacgttcgcaagaatgaaactcaaaggaattgacgggggcccgcacaagcagcagagcatgtggtttaattcgaagcaacgcgaagaaccttaccaggtcttgacatccaggtaaaactgaagagattcagcgtggacttcggtccgatctgagacaggtggtgcatggttgtcgtcagctcgtgtcgtgagatgttgggttaagtcccgcaacgagcgcaacccctatcctcagtagccagcatttaaggtgggcactctggggagactgccagggataacctggaggaaggcggggatgacgtcaaatcatcatgccccttatgatttgggctacacacgtgctacaatggcgtaaacaaagggaagcgagattgtgagatggagcaaatcccaaaaataacatcccagttcggactgtagtctgcaacccgactacacgaagctggaatcgctagtaatcgcggatcagaatgccgcggtgaatacgttcccgggtcttgcacacaccgcccgtca

SEQ ID NO: 406 - DNA, 1378 bp, Artificial Sequence
  Synthetic polymer
ttcgcccttagagtttgatcctggctcaggacgaacgctggcggcacgcctaacacatgcaagtcgaacggacgaggaggagcttgcttctccgagttagtggcggacgggtgagtaacacgtgagcaacctgcccttgagagggggatagcttctggaaacggatggtaataccccataacatatattttaggcatctaagatatatcaaagaaattcgctcaaggatgggctcgcgtctgattagatagttggtgaggtaacggcccaccaagtcgacgatcagtagccggactgagaggttgaacggccacattgggactgagacacggcccagactcctacgggaggcagcagtggggaatattgcacaatggggggaaccctgatgcagcgatgccgcgtggaggaagaaggttttcggattgtaaactcctgttgttggggaagataatgacggtacccaacaaggaagtgacggctaactacgtgccagcagccgcggtaaaacgtaggtcacaagcgttgtccggaattactgggtgtaaagggagcgcaggcgggaagacaagttggaagtgaaatctatgggctcaacccataaactgctttcaaaactgtttttcttgagtagtgcagaggtaggcggaattcccggtgtagcggtggaatgcgtagatatcgggaggaacaccagtggcgaaggcggtctactgggcaccaactgacgctgaggctcgaaagcatgggtagcaaacaggattagataccctagtagtccacgccgtaaacgatgagaactaggtgttggaggattgaccccctcagtgccgcagttaacacaataagtaatccacctggggagtacgaccgcaaggttgaaactcaaaggaattgacgggggcccgcacaagcagtggagtatgtggtttaattcgaagcaacgcgaagaaccttaccaggtcttgacatccgatgcataacacagagatgtgtgaaatccttcgggacatcgagacaggtggtgcatggttgtcgtcagctcgtgtcgtgagatgttgggttaagtcccgcaacgagcgcaacccttattgccagttactacgttaagaggactctggcgagactgccgttgacaaaacggaggaaggtggggatgacgtcaaatcatcatgccctttatgacctgggctacacacgtactacaatggcgttaaacaaagagaagcaagaccgcgaggtggagcaaaactcaaaaacaacgtctcagttcagattgcaggctgcaactcgcctgcatgaagtcggaattgctagtaatcgcggatcagcatgccgcggtgaatacgttcccgggccttgcactcaccgcccgtca

SEQ ID NO: 407 - DNA, 1373 bp, Artificial Sequence
  Synthetic polymer
agagtttgatcctggctcaggacgaacgctggcggcgcgcctaacacatgcaagtcgaacgagcgagagagagcttgctttctcgagcgagtggcgaacgggtgagtaacgcgtgaggaacctgcctcaaagagggggacaacagttggaaacgactgctaataccgcataagcccacggctcggcatcgagcagggggaaaaggagcaatccgctttgagatggcctcgcgtccgattagctagttggtgaggtaatggcccaccaaggcgacgatcggtagccggactgagaggttgaacggccacattgggactgagacacggcccagactcctacgggaggcagcagtggggaatattgcacaatgggggaaaccctgatgcagcgacgccgcgtggaggaagaaggtcttcggattgtaaactcctgttgttggggaagataatgacggtacccaacaaggaagtgacggctaactacgtgccagcagccgcggtaaaacgtaggtcacaagcgttgtccggaattactgggtgtaaagggagcgcaggcgggaagacaagttggaagtgaaatctatgggctcaacccataaactgctttcaaaactgtttttcttgagtagtgcagaggtaggcggaattcccggtgtagcggtggaatgcgtagatatcgggaggaacaccagtggcgaaggcggcctactgggcaccaactgacgctgaggctcgaaagtgtgggtagcaaacaggattagataccctggtagtccacgctgtaaacgatggatactaggtgtggggggactgaccccttccgtgccgcagttaacacaataagtatcccacctggggagtacgatcgcaaggttgaaactcaaaggaattgacgggggcccgcacaagcggtggagtatgtggtttaattcgaagcaacgcgaagaaccttaccagggcttgacatcccacggctggaattagagatagttctttctcttcggagactgtggtgacaggtggtgcatggttgtcgtcagctcgtgtcgtgagatgttgggttaagtcccgcaacgagcgcaacccctattgttagttgctacgcaagagcactctagcgagactgccgttgacataacggaggaaggtggggacgacgtcaaatcatcatgccccttatgtcctgggctacacacgtactacaatggcggtaaacagagggaagcaagaccgcgaggtggagcaaacccctaaaagccgtcccagttcggattgcaggctgcaacccgcctgtatgaagttggaatcgctagtaatcgcggatcagcatgccgcggtgaatacgttcccgggccttgtacacaccgcccgtca

SEQ ID NO: 408 - DNA, 1379 bp, Artificial Sequence
  Synthetic polymer
agagtttgatcctggctcaggacgaacgctggcggcgcgcctaacacatgcaagtcgaacggagcttagagagcttgctttttaagcttagtggcgaacgggtgagtaacgcgtgagtaacctgccctagagtgggggacaacagttggaaacgactgctaataccgcataagcccacggtaccgcatggtactgagggaaaaggatttattcgctttaggatggactcgcgtccaattagctagttggtgaggtaacggcccaccaaggcgacgattggtagccggactgagaggttgaacggccacattgggactgagacacggcccagactcctacgggaggcagcagtgggggatattgcacaatgggggaaaccctgatgcagcgacgccgcgtggaggaagaaggttttcggattgtaaacttctatcagcagggaagataatgacggtacctgactaagaagccccggctaactacgtgccagcagccgcggtaatacgtagggggcaagcgttatccggatttactgggtgtaaagggagcgtaggcggcggagcaagtcagaagtgaaagcccggggctcaaccccgggacggcttttgaaactgccctgcttgatttcaggagaggtaagcggaattcctagtgtagcggtgaaatgcgtagatattaggaggaacaccagtggcgaaggcggcttactggactgacaatgacgctgaggctcgaaagcgtggggagcaaacaggattagataccctggtagtccacgccgtaaacgatgaatactaggtgtcggggctcataagagcttcggtgccgcagcaaacgcaataagtattccacctggggagtacgttcgcaagaatgaaacccaaaggaattgacggggacccgcacaagcggtggagcatgtggtttaattcgaagcaacgcgaagaaccttaccaggccttgacatcccggtgaccgtcccgtaatggggacctctcttcggagcaccggtgacaggtggtgcatggttgtcgtcagctcgtgtcgtgagatgttgggttaagtcccgcaacgagcgcaacccctatgttcagtagccagcaggtaaggctgggcactctggacagactgccggggataacccggaggaaggcggggatgacgtcaaatcatcatgccccttacggcctgggctacacacgtgctacaatggcgtaaacaaagggaagcgagagggtgacctggagcgaatcccaaaaataacgtcccagttcggactgtagtctgcaacccgactacacgaagctggaatcgctagtaatcgcgaatcagcatgtcgcggtgaatacgttcccgggtcttgcacacaccgcccgtca

SEQ ID NO: 409 - DNA, 1392 bp, Artificial Sequence
  Synthetic polymer
agagtttgatcctggctcaggatgaacgctggcggcgtgcttaacacatgcaagtcgaacgaaacaccttatttgattttcttcggaactgaagatttggtgattgagtggcggacgggtgagtaacgcgtgggtaacctgccctgtacagggggataacagtcagaaatgactgctaataccgcataagaccacagcaccgcatggtgcaggggtaaaaactccggtggtacaggatggacccgcgtctgattagctggttggtgaggtaacggctcaccaaggcgacgatcagtagccggcttgagagagtgaacggccacattgggactgagacacggcccaaactcctacgggaggcagcagtggggaatattgcacaatgggggaaaccctgatgcagcgacgccgcgtgagtgaagaagtatctcggtatgtaaagctctatcagcagggaagaaaatgacggtacctgactaagaagccccggctaactacgtgccagcagccgcggtaatacgtagggggcaagcgttatccggaattactgggtgtaaagggtgcgtaggtggtatggcaagtcagaagtgaaaacccagggcttaactctgggactgcttttgagactgtcagactggagtgcaggagaggtaagcggaattcctagtgtagcggtgaaatgcgtagatattaggaggaacatcagtggcgaaggcggcttactggactgaaactgacactgaggcacgaaagcgtggggagcaaacaggattagataccctggtagtccacgccgtaaacgatgaatactaggtgtcggggagcatggctcttcggtgccgtcgcaaacgcagtaagtattccacctggggagtacgttcgcaagaatgaaacccaaaggaattgacggggacccgcacaagcggtggagcatgtggtttaattcgaagcaacgcgaagaaccttaccaaatcttgacatccctctgaccggtctttaatcggaccttctcttcggagcagaggtgacaggtggtgcatggttgtcgtcagctcgtgtcgtgagatgttgggttaagtcccgcaacgagcgcaacccctatcctcagtagccagcatttaaggtgggcactctggggagactgccagggataacctggaggaaggcggggatgacgtcaaatcatcatgccccttatgatttgggctacacacgtgctacaatggcgtaaacaaagggaagcgagatcgtgagatggagcaaatcccaaaaataacgtcccagttcggactgtagtctgcaacccgactacacgaagctggaatcgctagtaatcgcggatcagaatgccgcggtgaatacgttcccgggtcttgcacacaccgcccgtca

SEQ ID NO: 410 - DNA, 1400 bp, Artificial Sequence
  Synthetic polymer
ttcgcccttagagtttgatcctggctcaggacgaacgctggcggcgtgcttaacacatgcaagtcgaacgtagcacccttgattgaggtttcggccaaatgataggaatacttagtggcggactggtgagtaacgcgtgaggaacctgcctttcagagggggacaacagttggaaacgactgctaataccgcataacgcattttgatcgcatggtcgaaatgccaaagatttatcgctgaaagatggcctcgcgtctgattagctagttggtgaggtaacggcccaccaaggcgacgatcagtagccggactgagaggttgaccggccacattgggactgagatacggcccagactcctacgggaggcagcagtggggaatattgggcaatgggcgcaagcctgacccagcaacgccgcgtgaaggaagaaggctttcgggttgtaaacttcttttaagtgggaagagtagaagacggtaccacttgaataagccacggctaactacgtgccagcagccgcggtaatacgtaggtggcaagcgttgtctggatttactgggtgtaaagggcgtgcagccgggcatgcaagtcagatgtgaaatctcagggcttaaccctgaaactgcatttgaaactgtatgtcttgagtgccggagaggtaatcggaattccttgtgtagcggtgaaatgcgtagatataaggaagaacaccagtggcgaaggcggattactggacggtaactgacggtgaggcgcgaaagcgtggggagcgaacaggattagataccctggtagtccacgctgtaaacgatggatactaggtgtgcggggactgaccccctgcgtgccgcagttaacacaataagtatcccacctggggagtacgatcgcaaggttgaaactcaaaggaattgacgggggcccgcacaagcagtggagcatgtggtttaattcgaagcaacgcgaagaaccttaccaagtcttgacatcccactgaccggacagtaatgtgtcctttccttcgggacagtggtgacaggtggtgcatggttgtcgtcagctcgtgtcgtgagatgttgggttaagtcccgcaacgagcgcaacccctatttccagtagccagcagtaagatgggcactctggagagactgccggggataacccggaggaaggtgggtatgacgtcaaatcatcatgccccttatgatttgggctacacacgtgctacaatggcagttacaaagagaagcaaacctgtgaaggcgagcaaacctcaaaaataacgtctcagttcggattgtagtctgcaactcgactacatgaagctggaatcgctagtaatcgcagatcagaatgctgcggtgaatacgttcccgggtcttgtacacaccgcccgtca

SEQ ID NO: 411 - DNA, 1375 bp, Artificial Sequence
  Synthetic polymer
ttcgcccttagagtttgatcctggctcaggacgaacgctggcggcacgcctaacacatgcaagtcgagcggagattgagagcttgctctcatgatcagcggcggacgggtgagtaacacgtgagcaacctgcctttcagagggggacaacagttggaaacgactgctaataccgcataacattgccgaacggcatcgtttggcaatcaaaggagcaatccgctgaaagatgggctcgcgtctgattagatagttggtgaggtaacggctcaccaagtcgacgatcagtagccggactgagaggttgatcggccacattgggactgagacacggcccagactcctacgggaggcagcagtggggaatattgcacaatgggggaaaccctgatgcagcgacgccgcgtggaggaagaaggtcttcggattgtaaactcctgttgttgaggaagataatgacggtactcaacaaggaagtgacggctaactacgtgccagcagccgcggtaaaacgtaggtcacaagcgttgtccggaattactgggtgtaaagggagtgtaggcgggaaggcaagtcagaagtgaaaattatgggcttaacccataacctgcttttgaaactgtttttcttgagtgaggcagaggcaagcggaattcctagtgtagcggtgaaatgcgtagatattaggaggaacaccagtggcgaaggcggcttgctgggcctttactgacgctgaggctcgaaagcgtggggagcaaacaggattagataccctggtagtccacgccgtaaacgatgatcactaggtgtggggagttgaacctttccgtgccggagttaacacaataagtgatccacctggggagtacgaccgcaaggttgaaactcaaaggaattgacgggggcccgcacaagcagtggagtatgtggtttaattcgaagcaacgcgaagaaccttaccaggtcttgacatcgagtgacgatcccagagatgggatttcccttcggggcacaaagacaggtggtgcatggttgtcgtcagctcgtgtcgtgagatgttgggttaagtcccgcaacgagcgcaacccttactattagttgctacgcaagagcactctaataggactgccgttgataaaacggaggaaggtggggatgacgtcaaatcatcatgccctttatgacctgggctacacacgtactacaatggcgtttaacaaagagaagcgaaaccgcgaggttgagcaaatccccaaaaaacgtctcagttcagattgcaggctgcaactcgcctgcatgaagtcggaattgctagtaatcgtaggtcagcatactacggtgaatacgttcccgggccttgcactcaccgcccgtca

SEQ ID NO: 412 - DNA, 1367 bp, Artificial Sequence
  Synthetic polymer
agagtttgatcctggctcaggacgaacgctggcggcgtgcctaacacatgcaagtcgaacggagatattcggagcttgctttggatatcttagtggcggacgggtgagtaacgcgtgagtaacctgcctctcagagggggataacgttctgaaaagaacgctaataccgcatgatattgcgaaaccgcatggttttgcaatcaaaggagtaatccgctgagagatggactcgcgtccgattagccagttggcggggtaacggcccaccaaagcgacgatcggtagccggactgagaggttgaacggccacattgggactgagacacggcccagactcctacgggaggcagcagtgggggatattgcacaatgggggaaaccctgatgcagcaacgccgcgtgtgggaagaaggttttcggattgtaaaccactgttctcagggacgataatgacggtacctgaggagaaagctccggctaactacgtgccagcagccgcggtaatacgtagggagcgagcgttgtccggatttactgggtgtaaagggtgcgtaggcggctctgcaagtcagtcgtgaaaaccatgggctcaacccgtggactgcgattgaaactgtggaacttgagtgaagtagaggcaggcggaattcccggtgtagcggtgaaatgcatagagatcgggaggaacaccagtggcgaaggcggcctgctgggctttaactgacgctgaggcacgaaagtatgggtagcaaacaggattagataccctggtagtcctagccgtaaacgatggatactaggtgtggggggctccgccctccgtgccgcagccaacgcattaagtatcccgcctggggagtacggccgcaaggctaaaactcaaaggaattgacgggggcccgcacaagcagcggagcatgtggcttaattcgaagcaacgcgaagaaccttaccagggcttgacatggacgtgaagccggggaaacccggtggccgagaggagcgtccgcaggtggtgcatggctgtcgtcagctcgtgtcgtgagatgttgggttaagtcccgcaacgagcgcaacccctattgttagttgctacgcaagagcactctagcgagactgccgttgacaaaacggaggaaggtggggacgacgtcaaatcatcatgccccttatgacctgggctacacacgtaatacaatggcggtcaacaaagggatgcaaagccgcgaggcagagcgaaccccaaaaagccgtcccagttcggatcgcaggctgcaacccgcctgcgtgaagtcggaatcgctagtaatcgtgggtcagcataccacggtgaatacgttcccgggccttgcacacaccgcccgtca

SEQ ID NO: 413 - DNA, 1393 bp, Artificial Sequence
  Synthetic polymer
agagtttgatcctggctcaggatgaacgctggcggcgtgcctaacacatgcaagtcgaacggaacttcttcgacagaattcttcggaaggaagttgattaagtttagtggcggacgggtgagtaacgcgtgagtaacctgcctttgagaggggaataacttcccgaaagggatgctaataccgcatgacgcatatttatcgcatggtagatatgccaaagatttatcgctcaaagatggactcgcgtccgattagccagttggcggggtaacggcccaccaaagcgacgatcggtagccggactgagaggttgaacggccacattgggactgagacacggcccagactcctacgggaggcagcagtgggggatattgcgcaatgggggaaaccctgacgcagcaacgccgcgtgaaggatgaaggttttcggattgtaaacttcttttatttaggacgaagaatgacggtactaaatgaataagctccggctaactacgtgccagcagccgcggtaatacgtagggggcaagcgttatccggatttactgggtgtaaagggagcgtaggcggcggagcaagtcagaagtgaaagcccggggctcaaccccgggacggcttttgaaactgccctgcttgatttcaggagaggtaagcggaattcctagtgtagcggtgaaatgcgtagatattaggaggaacaccagtggcgaaggcggcttactggactgacaatgacgctgaggctcgaaagcgtggggagcaaacaggattagataccctggtagtccacgccgtaaacgatgaatactaggtgtcggggctcataagagcttcggtgccgcagcaaacgcaataagtattccacctggggagtacgttcgcaagaatgaaactcaaaggaattgacggggacccgcacaagcggtggagcatgtggtttaattcgaagcaacgcgaagaaccttaccaagtcttgacatccgcctgaccgatccttaaccggatctttccttcgggacaggcgagacaggtggtgcatggttgtcgtcagctcgtgtcgtgagatgttgggttaagtcccgcaacgagcgcaacccctatcctcagtagccagcatttaaggtgggcactctggggagactgccagggataacctggaggaaggcggggatgacgtcaaatcatcatgccccttatgatttgggctacacacgtgctacaatggcgtaaacaaagggaagcgagatcgtgagatggagcaaatcccaaaaataacgtcccagttcggactgtagtctgcaactcgactacatgaagctggaatcgctagtaatcgcgaatcagaatgtcgcggtgaatacgttcccgggtcttgcacacaccgcccgtca

SEQ ID NO: 414 - DNA, 1396 bp, Artificial Sequence
  Synthetic polymer
ttcgcccttagagtttgatcctggctcaggatgaacgctggcggcgtgcttaacacatgcaagtcgagcgaagcacttaagtctgattcttcggatgaagacttttgtgactgagcggcggacgggtgagtaacgcgtgggtaacctgcctcatacagggggataacagttagaaatgactgctaataccgcataagcccacgggtcggcatcgaccagagggaaaaggagcaatccgctttgagatggcctcgcgtccgattagctagttggtgaggtaacggcccaccaaggcgacgatcggtagccggactgagaggttgaacggccacattgggactgagacacggcccagactcctacgggaggcagcagtggggaatattgcacaatgggggaaaccctgatgcagcgacgccgcgtggaggaagaaggtcttcggattgtaaactcctgttgttggggaagataatgacggtacccaacaaggaagtgacggctaactacgtgccagcagccgcggtaaaacgtaggtcacaagcgttgtccggaattactgggtgtaaagggagcgcaggcgggaagacaagttggaagtgaaatctatgggctcaacccataaactgctttcaaaactgtttttcttgagtagtgcagaggtaggcggaattcccggtgtagcggtggaatgcgtagatatcgggaggaacaccagtggcgaaggcggcctactgggcaccaactgacgctgaggctcgaaagtgtgggtagcaaacagaaagagataccctggtagtccacaccgtaaacgatgactataaggtgttggaggattgaccccctcagtaccgacagttaatcgcaataagtaatccgcctggggagtccggccgcaaggttgaaagtcaaaggaattgacgggggcccgcacaagcagtggagtatgtggtttaattcgacgcaacgcgaagaaccttatcaagtcttgacttcccttgacagacatagaaatattttttctattaggagcaaggagacaggtagtgcatggttgtcgtcagctcgtgtcgtgagatgttgggttaagtcccgcaacgagcgcaacccttatggtcagttactacgcaagaggactttggccagactgccgttgacaaaacggaggaaggtggggatgacgtcaaatcatcatgccctttatgacttgggctacacacgtactacaatggcgttaaacaaagagaagcaagaccgcgaggtggagcaaaactcagaaacaacgtcccagttcggactgcaggctgcaactcgcctgcacgaagtcggaattgctagtaatcgtggatcagcatgccacggtgaatacgttcccgggccttgcactcaccgcccgtca

SEQ ID NO: 415 - DNA, 1398 bp, Artificial Sequence
  Synthetic polymer
agagtttgatcctggctcaggatgaacgctagctacaggctgaacacatgcaagtcgaggggcagcatggtcttagcttgctaaggccgatggcgaccggcgcacgggtgagtaacacgtatccaacctgccgtctactcttggacagcctcctgaaaggaagattaatacaagatggcatcatgagttcgcatgttcacatgattaaaggtattccggtagacgatggggatgcgttccattagatagtaggcggggtaacggcccacctagtcttcgatggataggggttctgagaggaaggtcccccacactggtactgagacacggaccagactcctacgggaggcagcagtgaggaatattggtcaatggtcgagagactgaaccagccaagtcgcgtgagggaagactgccctatgggttgtaaacctcttttctactgggagaataagccttatgtataaggtgatgacagtacagtaggaataagcatcggctaactccgtgccagcagccgcggtaatacggaggatgcgagcgttatccggatttattgggtttaaagggtgcgtaggcggctttataagttagtggtaaaatttcggagcttcactccggtccgccattaaaactgtagagctagagaatggacgaggtaggcggaataagttaagtagcggtgaaatgcatagatataacttagaactccgatagcgaaggcagcttaccagaccataactgacgctgatgcacgagagcgtgggtagcgaacaggattagataccctggtagtccacgccgtaaacgatgctcaccggcccttagcgataagacagttaggggttaattgaaagaattaagtgagccacctggggagtacgtcggcaacgatgaaactcaaaggaattgacgggggcccgcacaagcggaggaacatgtggtttaattcgatgatacgcgaggaaccttacctgggtttaaatgtatattgcataatctggaaacagtttttctcttcggagctatatacaaggtgctgcatggttgtcgtcagctcgtgccgtgaggtgtcgggttaagtcccataacgagcgcaacccttaccgttagttgctagcatgtaatgatgagcactctagcgggactgccaccgtaaggtgagaggaagggggggatgacgtcaaatcagcacggcccttacatccagggcgacacacgtgttacaatggccataacagcgggtagctaccgggtgaccggatgcaaatctcgaaaattggtctaagttcggattggagtctgcaacccgactccatgaagttggattcgctagtaatcgcgcatcagccatggcgcggtgaatacgttcccgggccttgcacacaccgcccgtca

SEQ ID NO: 416 - DNA, 1382 bp, Artificial Sequence
  Synthetic polymer
ttcgcccttagagtttgatcctggctcaggacgaacgctggcggcgtgcttaacacatgcaagtcgaacggagcacccctgaaggagttttcggacaacggaagggaatgcttagtggcggactggtgagtaacgcgtgaggaacctgccttccagagggggacaacagttggaaacgactgctaataccgcatgatacgttggagccgcatgactccgacgtcaaagatttatcgctggaagatggcctcgcgtctgattagctagttggcggggtaacggcccaccaaggcgacgatcagtagccggactgagaggttggccggccacattgggactgagacacggcccagactcctacgggaggcagcagtggggaatattgggcaatgggcgcaagcctgacccagcaacgccgcgtgaaggaagaaggctttcgggttgtaaacttcttttctcagggacgaagcaagtgacggtacctgaggaataagccacggctaactacgtgccagcagccgcggtaatacgtaggtggcaagcgttgtccggatttactgggtgtaaagggcgtgtaggcgggactgcaagtcagatgtgaaaaccacgggctcaacctgtggcctgcatttgaaactgtagttcttgagtactggagaggcagacggaattcctagtgtagcggtgaaatgcgtagatattaggaggaacaccagtggcgaaggcggtctgctggacagcaactgacgctgaggcgcgaaagcgtggggagcaaacaggattagataccctggtagtccacgctgtaaacgatggatactaggtgtggggggactgaccccctccgtgccgcagttaacacaataagtatcccacctggggagtacgatcgcaaggttgaaactcaaaggaattgacgggggcccgcacaagcggtggagtatgtggtttaattcgaagcaacgcgaagaaccttaccagggcttgacatcccggtgaccgctctcgagatagagctttctcttcggagacatcggtgacaggtggtgcatggttgtcgtcagctcgtgtcgtgagatgttgggttaagtcccgcaacgagcgcaacccttattgttagttgctacgcaagagcactctagcgagactgccgttgacaaaacggaggaaggtggggacgacgtcaaatcatcatgccccttatgtcctgggccacacacgtactacaatggtggtcaacagagggaagcaataccgcgaggtggagcaaatccctaaaagccatcccagttcggatcgcaggctgcaacccgccagcgtgaagttggaatcgctagtaatcgcggatcagcatgccgcggtgaatacgttcccgggccttg

SEQ ID NO: 417 - DNA, 1383 bp, Artificial Sequence
  Synthetic polymer
ttcgcccttagagtttgatcctggctcaggacgaacgctggcggcgcgcctaacacatgcaagtcgaacgagcgagagagagcttgctttctcgagcgagtggcgaacgggtgagtaacgcgtgaggaatctgcctcaaagagggggacaacagttggaaacgactgctaataccgcataagcccacggtgccgcatggcacagagggaaaaggagcaatccgctttgagatggcctcgcgtccgattagctagttggtgaggtaatggcccaccaaggcaacgatcggtagccggactgagaggttgaacggccacattgggactgagacacggcccagactcctacgggaggcagcagtggggaatattgcacaatgggggaaaccctgatgcagcgacgccgcgtggaggaagaaggtcttcggattgtaaactcctgttgttggggaagataatgacggtacccaacaaggaagtgacggctaactacgtgccagcagccgcggtaaaacgtaggtcacaagcgttgtccggaattactgggtgtaaagggagcgcaggcgggaagacaagttggaagtgaaatctatgggctcaacccataaactgctttcaaaactgtttttcttgagtagtgcagaggtaggcggaattcccggtgtagcggtggaatgcgtagagatggggaggaacaccagtggcgaaggcggcctgctgggctttaactgacgctgaggcacgaaagcgtgggtagcaaacaggattagataccctggtagtccacgctgtaaacgatgattactaggtgtggggggtctgaccccttccgtgccggagttaacacaataagtaatccacctggggagtacggccgcaaggttgaaactcaaaggaattgacgggggcccgcacaagcagtggagtatgtggtttaattcgaagcaacgcgaagaaccttaccaggtcttgacatccaactaacgaagtagagatacattaggtgcccttcggggaaagttgagacaggtggtgcatggttgtcgtcagctcgtgtcgtgagatgttgggttaagtcccgcaacgagcgcaacccttgctattagttgctacgcaagagcactctaataggactgccgttgacaaaacggaggaaggtggggacgacgtcaaatcatcatgccccttatgacctgggctacacacgtactacaatggatgttaacagagggaagcaagacagcgatgtggagcaaacccctaaaaacattctcagttcagattgcaggctgcaacccgcctgcatgaagatggaattgctagtaatcgcggatcagcatgccgcggtgaatacgttcccgggtcttgcacacaccgcccgtca

SEQ ID NO: 418 - DNA, 1399 bp, Artificial Sequence
  Synthetic polymer
ttagagtttgatcctggctcaggatgaacgctagcgacaggcttaacacatgcaagtcgaggggcagcgggtagatgagcttgctcatttatgccggcgaccggcgcacgggtgagtaacacgtatgcaacctgcccgtctcagggggataatcgtcggaaacggcgtctaataccccgtatgaagctggacggcatcgtctggttttgaaagaatatcggagacggatgggcatgcggcgcattagctggttggcggggtaacggcccaccaaggcgacgatgcgtaggggttctgagaggaaggtcccccacactggtactgagacacggaccaaactcctacgggaggcagcagtgaggaatattggtcaatggacgcaagtctgaaccagccatgccgcgtgcaggaagacggctctatgagttgtaaactgcttttgtacgagggtaaactcgggtacgtgtacccgactgaaagtatcgtacgaataaggatcggctaactccgtgccagcagccgcggtaatacggaggattcaagcgttatccggatttattgggtttaaagggtgcgtaggcggtcggataagttagaggtgaaatcccggggctcaactccggaattgcctctgatactgttcggctagagagtagttgcggtaggcggaatgtatggtgtagcggtgaaatgcttagagatcatacagaacaccgattgcgaaggcagcttaccaagctacatctgacgttgaggcacgaaagcgtggggagcaaacaggattagataccctggtagtccacgcagtaaacgatgataactcgttgtcggcgatacaatgtcggtgactaagcgaaagcgataagttatccacctggggagtacgttcgcaagaatgaaactcaaaggaattgacgggggcccgcacaagcggaggaacatgtggtttaattcgatgatacgcgaggaaccttacccgggcttgaaagttactgacgcttctggaaacaggagttcccttcggggcaggaaactaggtgctgcatggttgtcgtcagctcgtgccgtgaggtgtcgggttaagtcccataacgagcgcaacccctaccgttagttgccatcaggtaaagctgggcactctggcgggactgccggtgtaagccgagaggaaggtggggatgacgtcaaatcagcacggcccttacgtccggggctacacacgtgttacaatggcaggtacagagggcagctacctcgtgagaggatgcgaatctcgaaagcctgtctcagttcggattggaggctgaaacccgcctccatgaagttggattcgctagtaatcgcgcatcagccatggcgcggtgaatacgttcccgggccttgcacacaccgcccgtca

SEQ ID NO: 419 - DNA, 1350 bp, Artificial Sequence
  Synthetic polymer
agagtttgatcctggctcaggacgaacgctggcggcgtgcctaacacatgcaagtcgagcgagtgaatctccttcgggagtgaagctagcggcggacgggtgagtaacacgtgggcaacctgcctcatagaggggaatagcctttcgaaaggaagattaataccgcataagattgtagcttcgcatgaagtagcaattaaaggagcaatccgctatgagatgggcccgcggcgcattagctagttggtgaggtaacggctcaccaaggcgacgatgcgtagccgacctgagagggtgatcggccacattggggctgagatacggcccagactcctacgggaggcagcagtagggaacattgggcaatgggcgcaagcctgacccagcaacgccgcgtgagggaagaaggttttcggattgtaaacctctgtcctatgtgacgaaggaagtgacggtagcataggaggaagccccggctaactacgtgccagcagccgcggtaatacgtagggggcgagcgttgtccggaattactgggcgtaaagggtgcgtaggcggtttggtaagttggatgtgaaatacccgggcttaacttgggggctgcatccaatactgtcggacttgagtgcaggagaggaaagcggaattcctagtgtagcggtgaaatgcgtagatattaggaggaacaccggtggcgaaggcggctttctggactgtaactgacgctgaggcacgaaagcgtggggagcaaaccaggattagataccctggtagtccacgccgtaaacgatgaatacaaggtgtagggggtatagactccctctgtgcagcggcaaacgctataagtattcccccctggggggtacggccgcaaggttgaaactcaaaggaatggacggggggcccgcacaagcagcggagcatgtggtttaattcgacgcaacgcgaaaaacctttccaagacttgtcaccctactaaactcatggaaacatgaggtgacttcggtcgagtagagacaggtggtgcatggttgtcgtcagctcgtgtcgtgagatgttgggttaagtcccgcaacgagcgcaacccctgttgccggttaccagcgagtaaagtcggggactccggtgagactgccgaggacaactcggaggaaggtggggaagacgtcaaatcatcatgccccttatgacctgggctacacacgtactacaatggatgttaacagagggaagcaagacagcgatgtggagcaaacccctaaaaacattctcagttcagaatgcaggctgcaacccgcctgcatgaagatggaattgctagtaatcgcggatcagcatgccgcggtgaat

SEQ ID NO: 420 - DNA, 1394 bp, Artificial Sequence
  Synthetic polymer
agagtttgatcctggctcaggatgaacgctggcggcgtgcttaacacatgcaagtcgaacggagtgctcatgacagaggattcgtccaatggattgagttacttagtggcggacgggtgagtaacgcgtgaggaacctgcctcggagtggggaataacacaacgaaagctgtgctaataccgcatgatacagttgggtcgcatgactctgactgtcaaagatttatcgctctgagatggcctcgcgtctgattagctagttggcggggtaacggcccaccaaggcgacgatcagtagccggactgaggggttgaccggccacattgggactgagacacggcccagactcctacgggaggcagcagtggggaatattgggcaatgggcgcaagcctgacccagcaacgccgcgtgaaggaagaaggctttcgggttgtaaacttcttttctcagggacgaagcaagtgacggtacctgaggaataagccacggctaactacgtgccagcagccgcggtaatacgtaggtggcaagcgttatccggatttactgggtgtaaagggcgtgtaggcgggatcgcaagtcagatgtgaaaactggaggctcaacctccagcctgcatttgaaactgtggttcttgagtactggagaggcagacggaattcctagtgtagcggtgaaatgcgtagatattaggaggaacaccagtggcgaaggcggtctgctggacagcaactgacgctgaggcgcgaaagcgtggggagcaaacaggattagataccctggtagtccacgctgtaaacgatggatactaggtgtggggggtctgaccccctccgtgccgcagttaacacaataagtatcccacctggggagtacgttcgcaagaatgaaactcaaaggaattgacggggacccgcacaagcggtggagcatgtggtttaattcgaagcaacgcgaagaaccttaccaagtcttgacatccgcctgaccgatccttaaccggatctttccttcgggacaggcgagacaggtggtgcatggttgtcgtcagctcgtgtcgtgagatgttgggttaagtcccgcaacgagcgcaacccctatcctcagtagccagcatttaaggtgggcactctggggagactgccagggataacctggaggaaggcggggatgacgtcaaatcatcatgccccttatgatttgggctacacacgtgctacaatggcgtaaacaaagggaagcgagattgtgagatggagcaaatcccaaaaataacgtcccagttcggactgtagtctgcaacccgactacacgaagctggaatcgctagtaatcgcggatcagaatgccgcggtgaatacgttcccgggtcttgcactcaccgcccgtca

SEQ ID NO: 421 - DNA, 1369 bp, Artificial Sequence
  Synthetic polymer
agagtttgatcctggctcaggatgaacgctggcggcgtgcttaacacatgcaagtcgaacgagaaagcaccttcgggtgtgagtagagtggcgaacgggtgagtaacacgtgagcaacctgcctctcacttcggaataactcagggaaacctgtgctaataccggatactccgtacattccgcatgctatgtacgggaaagccttgtgcggtgagagatgggctcgcggcccattaggtagttggtggggtaacggcctaccaagccaacgatgggtagccgggttgagagaccgaccggccacattgggactgagacacggcccagactcctacgggaggcagcagtggggatattgggcaatgggggaaaccctgacccagcaacgccgcgtgagggatgacggttttcggattgtaaacctctgtcccctgtgaagatagtgacggtagcagaggaggaagctccggctaactacgtgccagcagccgcggtaatacgtagggagcaagcgttgtccggatttactgggtgtaaagggtgcgtaggcggattggcaagtcagaagtgaaatccatgggcttaacccatgaactgcttttgaaactgttagtcttgagtgaagtagaggtaggcggaattcccggtgtagcggtgaaatgcgtagagatcgggaggaacaccagtggcgaaggcggcctactgggctttaactgacgctgaggcacgaaagtgtgggtagcaaacaggattagataccctggtagtccacactgtaaacgatgattactaggtgtggggggtctaaccccctccgtgccggagttaacacaataagtaatccacctggggagtacgaccgcaaggttgaaactcaaaggaattgacgggggcccgcacaagcagtggagtatgtggtttaattcgacgcaacgcgaagaaccttaccaggtcttgacatccaactaacgaagcagagatgcattaggtgcccttcggggaaagttgagacaggtggtgcatggttgtcgtcagctcgtgtcgtgagatgttgggttaagtcccgcaacgagcgcggcccttgtgattagttgctacgcaagagcactctaatcagactgccgttgacaaaacggaggaaggtggggacgacgtcaaatcatcatgccctttatgacctgggctacacacgtactacaatggtcgttaacagagggaagcaataccgcgaggtggagcaaaaccctaaaaacggtctcagttcagattgtaggctgcaactcgcctacatgaagttggaattgctagtaatcgcggatcagcatgccgcggtgaatacgttcccgggccttgtacacaccgcccgtca

SEQ ID NO: 422 - DNA, 1391 bp, Artificial Sequence
  Synthetic polymer
agagtttgatcctggctcagattgaacgctggcggaacgctttacacatgcaagtcgaacgggaattactttattgaaacttcggtcgatttaatttaattctagtggcggacgggtgagtaacgcgtgggtaacctgccttatacagggggataacagtcagaaatggctgctaataccgcataagcgcacagagctgcatggctccgtgtgaaaaactccggtggtataagatggacccgcgttggattagcttgttggtgaggtaacggcccaccaaggcgacgatccatagccggcctgagagggtgaacggccacattgggactgagatacggcccagactcctacgggaggcagcagtggggaatattgggcaatgggcgcaagcctgacccagcaacgccgcgtgaaggaagaaggctttcgggttgtaaacttcttttaagtgggaagagtagaagacggtaccacttgaataagccacggctaactacgtgccagcagccgcggtaatacgtaggtggcaagcgttgtccggatttactgagtgtaaagggcgtgcagccgggcatgcaagtcagatgtgaaatctcagggcttaaccctgaaactgcatttgaaactgtatgtcttgagtgccggagaggtaatcggaattccttgtgtagcggtgaaatgcgtagatataaggaagaacaccagtggcgaaggcggattactggacggtaactgacggtgaggcgcgaaagcgtggggagcgaacaggattagataccctggtagtccacgctgtaaacgatggatactaggtgtgcggggactgaccccctgcgtgccgcagttaacacaataagtatcccacctggggagtacgatcgcaaggttgaaactcaaaggaattgacgggggcccgcacaagcggtggattatgtggtttaattcgaagcaacgcgaagaaccttaccaagtcttgacatccctctgaccgactcttaaccgagtctttccttcggaacaggggagacaggtggtgcatggttgtcgtcagctcgtgtcgtgagatgttgggttaagtcccgcaacgagcgcaacccctattcttagtagccagcgggtaagccgggcactctagggagactgccagggataacctggaggaaggtggggatgacgtcaaatcatcatgccccttatgacttgggctacacacgtgctacaatggcgtaaacaaagggaagcgagcctgcgagggggtgcaaatctcaaaaataacgtctcagttcggactgcagtctgcaactcgactgcacgaagctggaatcgctagtaatcgcgaatcagaatgtcgcggtgaatacgttcccgggtcttgcactcaccgcccgtca

SEQ ID NO: 423 - DNA, 1392 bp, Artificial Sequence
  Synthetic polymer
agagtttgatcctggctcaggatgaacgctggcggcgtgcttaacacatgcaagtcgagcgaagcactttggaaagattcttcggatgatttcctttgtgactgagcggcggacgggtgagtaacgcgtgggtaacctgcctcatacagggggataacagttagaaatgactgctaataccgcataagaccacggtaccgcatggtacagtggtaaaaactctggtggtatgagatggacccgcgtctgattaggtagttggtggggtaacggcctaccaagccgacgatcagtagccgacctgagagggtgaccggccacattgggactgagacacggcccagactcctacgggaggcagcagtggggaatattgcacaatggaggaaactctgatgcagcgacgccgcgtgaaggatgaagtatttcggtatgtaaacttctatcagcagggaagaaaatgacggtacctgactaagaagccccggctaactacgtgccagcagccgcggtaatacgtagggggcaagcgttatccggatttactgggtgtaaagggagcgtagacggcacggcaagccagatgtgaaagcccggggctcaaccccgggactgcatttggaactgctgagctagagtgtcggagaggcaagtggaattcctagtgtagcggtgaaatgcgtaggtattaggaggaacaccagtggcgaaggcggcttgctggacgatgactgacgttgaggctcgaaagcgtggggagcaaacaggattagataccctggtagtccacgccgtaaacgatgactgctaggtgtcgggtggcaaagccattcggcgccgcagctaacgcaataagcagtccacctggggagtacgttcgcaagaatgaaactcaaaggaattgacggggacccgcacaagcggtggagcatgtggtttaattcgaagcaacgcgaagaaccttacctgatcttgacattccgatgaccgcttcgtaatggaagtttttcttcggaacatcggtgacaggtggtgcatggttgtcgtcagctcgtgtcgtgagatgttgggttaagtcccgcaacgagcgcaacccctatcttcagtagccagcaggttaagctgggcactctggagagactgccagggataacctggaggaaggtggggatgacgtcaaatcatcatgccctttatgacttgggctacacacgtactacaatggcgttaaacaaagagaagcaagaccgcgaggtggagcaaaactcagaaacaacgtcccagttcggactgcaggctgcaactcgcctgcacgaagtcggaattgctagtaatcgcagatcagcatgctgcggtgaatacgttcccgggccttgcactcaccgcccgtca

SEQ ID NO: 424 - DNA, 1375 bp, Artificial Sequence
  Synthetic polymer
agagtttgatcctggctcaggacgaacgctggcggcgcgcctaacacatgcaagtcgaacgagagagaggaagcttgcttcctcaatcgagtggcggacgggtgagtaacgcgtgggtaacctgccctgtacagggggataacagtcagaaatgactgctaataccgcataagaccacagcatcgcatggtgcaggggtaaaaactccggtggtacaggatggacccgcgtctgattagctggttggtgaggtaacggctcaccaaggcgacgatcagtagccggcttgagagagtgaacggccacattgggactgagacacggcccaaactcctacgggaggcagcagtggggaatattgcacaatgggggaaaccctgatgcagcgacgccgcgtgagtgaagaagtatctcggtatgtaaagctctatcagcagggaagaaaatgacggtacctgactaagaagccccggctaactacgtgccagcagccgcggtaatacgtagggggcaagcgttatccggaattactgggtgtaaagggtgcgtaggtggtatggcaagtcagaagtgaaaacccagggcttaactctgggactgcttttgaaactgtcagactagagtgcaggagaggtaagcggaattcctagtgtagcggtgaaatgcgtagatattaggaggaacatcagtggcgaaggcggcttactggactgaaactgacgttgaggctcgaaagcgtggggagcaaacaggattagataccctggtagtccacgccgtaaacgatgaatactaggtgtcgggtggcagagccattcggtgccgtcgcaaacgcagtaagtattccacctggggagtacgttcgcaagaatgaaactcaaaggaattgacggggacccgcacaagcggtggagcatgtggtttaattcgaagcaacgcgaagaaccttaccaagtcttgacatccgcctgaccgatccttaaccggatctttccttcgggacaggcgagacaggtggtgcatggttgtcgtcagctcgtgtcgtgagatgttgggttaagtcccgcaacgagcgcaacccctatcctcagtagccagcatttaaggtgggcactctggggagactgccagggataacctggaggaaggcggggatgacgtcaaatcatcatgccccttatgatttgggctacacacgtgctacaatggcgtaaacaaagggaagcgagattgtgagatggagcaaatcccaaaaataacgtcccagttcggactgtagtctgcaacccgactacacgaagctggaatcgctagtaatcgcggatcagaatgccgcggtgaatacgttcccgggtcttgcactcaccgcccgtca

SEQ ID NO: 425 - DNA, 1395 bp, Artificial Sequence
  Synthetic polymer
agagtttgatcctggctcaggatgaacgctggcggcgtgcttaacacatgcaagtcgaacggggatgctgacggaaggggtgcttgcactctggaagtaaggatcttagtggcggacgggtgagtaacgcgtgagtaacctgccttggagtggggaataacagctggaaacagctgctaataccgcataatatgtctgtgtcgcatggcagtggatatcaaagatttatcgctctgagatggactcgcgtctgattagctagttggcggggtaacggcccaccaaggcgacgatcagtagccggactgagaggttggccggccacattgggactgagacacggcccagactcctacgggaggcagcagtggggaatattgggcaatgggcgcaagcctgacccagcaacgccgcgtgaaggaagaaggctttcgggttgtaaacttcttttctcagggacgaagcaagtgacggtacctgaggaataagccacggctaactacgtgccagcagccgcggtaatacgtaggtggcaagcgttatccggatttactgggtgtagagggcgtgtaggcgggactgcaagtcagatgtgaaaaccacgggctcaacctgtggcctgcatttgaaactgtagttcttgagtactggagaggcagacggaattcctagtgtagcggtgaaatgcgtagatattaggaggaacaccagtggcgaaggcggcttactggacgataactgacgctgaggctcgaaagcgtggggagcaaacaggattagataccctggtagtccacgccgtaaacgatgaatactaggtgtcggggggcattgcccttcggtgccgcagcaaacgcagtaagtattcctcctgggggagtagattcgcaagaataaaactcaaaggaattgacgggaacccgcacaagcggtggagccatgtggtttaattcgtagcaacgcgaagaaccttaccaagccttgacatcctgatgacagagcatgtaatgtgttttttctttcgggacatcagagacaggtggcgcatggttgtcgtcagctagtgtcgtgagatgttgggttaagtcccgcaacgagcgcaacccttatccttagtagccagcacttcgggtgggcactctagggagactgccagggataacctggaggcaggtggggatgacgtcaaatcatcacgccccttatggcttgggctacacacgtgctacaatggcgtaacaaagggaagcgaacccgtgagggggagcaaatcccaaaaataacgtcccagttcggactgtagtctgcaacccgactacacgaagctggaatcgctagtaatcgcgaatcagaatgtcgcggtgaatacgttcccgggtcttgcacacaccgccc

SEQ ID NO: 426 - DNA, 1393 bp, Artificial Sequence
  Synthetic polymer
agagtttgatcctggctcaggatgaacgctggcggcgtgcttaacacatgcaagtcgaacgaagcatttaagatggattctttcgggatgaagacttttatgactgagtggcggacgggtgagtaacgcgtgggtaacctgcctcacacagggggatagcagttggaaacggctgataataccgcataagcgcacagtaccgcatggtacagtgtgaaaaactccggtggtgtgagatggacccgcgtctgattagcttgttggcagggtaacggcctaccaaggcaacgatcagtagccgacctgagagggtgaccggccacattgggactgagacacggcccagactcctacgggaggcagcagtggggaatattgcacaatggaggaaactctgatgcagcgacgccgcgtgagtgaagaagtaattcgttatgtaaagctctatcagcagggaagatagtgacggtacctgactaagaagctccggctaaatacgtgccagcagccgcggtaatacgtatggagcaagcgttatccggatttactgggtgtaaagggagtgtaggtggcatcacaagtcagaagtgaaagcccggggcttaacccctggactgcactggaaactgctgtgcttgagtgccggaggggtaagcggaattcctagtgtagcggtgaaatgcgtagatattaggaggaacaccagtggcgaaggcggcttactggacggtaactgacgttgaggctcgaaagcgtggggagcaaacaggattagataccctggtagtcacgccgtaaacgatgaatactaggtgtcagggagcacagctcttttggtgccgccgcaaacgcattaagtattccacctggggagtacgttcgcaagaatgaaactcaaaggaattgacggggacccgcacaagcggtggagcatgtggtttaattcgaagcaacgcgaagaaccttaccaaatcttgacatccctctgaccgggacttaaccgtccctttctttcgtgacagaggagacaggtggtgcatggttgtcgtcagctcgtgtcgtgagatgttgggttaagtcccgcaacgagcgcaacccctatccttagtagccagcacgtaatggtgggcactctgaggagactgccagggataacctggaggaaggcggggatgacgtcaaatcatcatgccccttatgatttgggctacacacgtgctacaatggcgtaaacaaagggaagcgaacccgcgagggtgggcaaatctcaaaaataacgtcccagttcggactgcagtctgcaactcgactgcacgaagctggaattgctagtaatcgcggaccagaatgccgcggtgaatacgttcccgggtcttgtactcaccgcccgtca

SEQ ID NO: 427 - DNA, 1387 bp, Artificial Sequence
  Synthetic polymer
agagtttgatcctggctcaggatgaacgctggcggcgtgcctaacacatgcaagtcgaacgaagcaccttacctgattcttcggatgaaggtctggtgactgagtggcggacgggtgagtaacgcgtgggtaacctgccctgtacagggggataacagctggaaacggctgctaataccgcataagcgcacgaggagacatctccttgtgtgaaaaactccggtggtacaggatgggcccgcgtctgattagctggttggcagggtaacggcctaccaaggcaacgatcagtagccggtctgagaggatgaacggccacattggaactgagacacggtccaaactcctacgggaggcagcagtggggaatattgcacaatgggggaaaccctgatgcagcaacgccgcgtgagtgaagaagtatttcggtatgtaaagctctatcagcagggaagataatgacggtacctgactaagaagctccggctaaatacgtgccagcagccgcggtaatacgtatggagcaagcgttatccggatttactgggtgtaaagggtgcgtaggtggcagtgtaagtcagatgtgaaaggccggggctcaaccccggagctgcatttgaaactgcatagctagagtacaggagaggcaggcggaattcctagtgtagcggtgaaatgcgtagatattaggaggaacaccagtggcgaaggcggcctgctggactgttactgacactgaggctcgaaagcgtggggagcaaacaggattagataccctggtagtcacgccgtaaacgatgaatactaggtgttgggaagcattgcttctcggtgccgtcgcaaacgcagtaagtattccacctggggagtacgttcgcaagaatgaaactcaaaggaattgacggggacccgcacaagcggtggagcatgtggtttaattcgaagcaacgcgaagaaccttaccaagtcttgacatccttctgaccggtacttaaccgtaccttctcttcggagcaggagtgacaggtggtgcatggttgtcgtcagctcgtgtcgtgagatgttgggttaagtcccgcaacgagcgcaacccctatccccagtagccagcggtttggccgggcactctagagagactgccagggataacctggaggaaggtggggatgacgtcaaatcatcatgccccttatgagcagggctacacacgtgctacaatggcataaacaaagggaggcagaaccgcgaggtcgagcaaatcccaaaaataacgtctcagttcggattgtagtctgcaactcgactacatgaagctggaatcgctagtaatcgcgaatcagaatgtcgcggtgaatacgttcccgggtcttgcactcaccgcccgtca

SEQ ID NO: 428 - DNA, 1394 bp, Artificial Sequence
  Synthetic polymer
agagtttgatcctggctcaggatgaacgctggcggcgtgcttaatacatgcaagtcgaacgaagcaccttggacagaatccttcgggaggaagaccattgtgactgagtggcggacgggtgagtaacgcgtgggtaacctgccttgtacagggggacaacagttggaaacgactgctaataccgcataagcccacgggtcggcatcgaccagagggaaaaggagcaatccgctttgagatggcctcgcgtccgattagctagttggtgaggtaacggcccaccaaggcgacgatcggtagccggactgagaggttgaacggccacattgggactgagacacggcccagactcctacgggaggcagcagtggggaatattgcacaatgggggaaaccctgatgcagcgacgccgcgtgagcgatgaagtatttcggtatgtaaagctctatcagcagggaagaaaatgacggtacctgactaagaagctccggctaaatacgtgccagcagccgcggtaatacgtatggagcaagcgttatccggatttactgggtgtaaagggagtgtaggtggccatgcaagtcagaagtgaaaatccggggctcaaccccggaactgcttttgaaactgtaaggctagagtgcaggaggggtgagtggaattcctagtgtagcggtgaaatgcgtagatattaggaggaacaccagtggcgaaggcggctcactggactgtaactgacactgaggctcgaaagcgtggggagcaaacaggattagataccctggtagtccacgccgtaaacgatgaatactaggtgtcggggcccataagggcttcggtgccgcagcaaacgcaataagtattccacctggggagtacgttcgcaagaatgaaactcaaaggaattgacggggacccgcacaagcagtggagcatgtggtttaattcgaagcaacgcgaagaaccttaccaagtcttgacatcccactgaccggacagtaatgtgtcctttccttcgggacagtggagacaggtggtgcatggttgtcgtcagctcgtgtcgtgagatgttgggttaagtcccgcaacgagcgcaacccctatccttagtagccagcagtaagatgggcactctagggagactgccagggataacctggaggaaggtggggatgacgtcaaatcatcatgccccttatgacttgggctacacacgtgctacaatggcgtaaacaaagtgaagcgaagtcgtgaggccaagcaaatcacaaaaataacgtctcagttcggattgtagtctgcaactcgactacatgaagctggaatcgctagtaatcgcagatcagaatgctgcggtgaatacgttcccgggtcttgcacacaccgcccgtca

SEQ ID NO: 429 - DNA, 1400 bp, Artificial Sequence
  Synthetic polymer
agagtttgatcctggctcaggatgaacgctagcgacaggcctaacacatgcaagtcgaggggcagcatttttgaagcttgcttcaaaagatggcgaccggcgcacgggtgagtaacgcgtatggaaccaacccgcaacagggggataacccggagaaatccggactaataccgcatggtactctttgcacagaagtgtgaagatttaaagatgcgaatcggttgcggacggtcatgcgttccattagctagttggcggggtaacggtccaccaaggcgacgatggataggggttctgagaggaaggtcccccacactggtactgagacacggaccagactcctacgggaggcagcagtgaggaatattggtcaatgggcgagagcctgaaccagccaagtcgcgtgagggaagacggccctatgggttgtaaacctcttttagatgggagtaaagtgttctacgcgtaggatattgcaagtaccatcagaataagcatcggctaattccgtgccagcagccgcggtaatacggaagatgcgagcgttatccggatttattgggtttaaagggtgcgtaggcgggtgattaagtcagcggtgaaatgcgtcagcttaactggcgaactgccattgaaactggttaccttgagtgtagcggaagtatgcggaatgcgtggtgtagcggtgaaatgcatagatatcacgcagaactccgattgcgaaggcagcttactaaaccataactgacactgaagcacgaaagcgtggggatcaaacaggattagataccctggtagtccacgcagtaaacgatgattactaggagtttgcgatacaatgtaagctctacagcgaaagcgttaagtaatccacctggggagtacgccggcaacggtgaaactcaaaggaattgacgggggcccgcacaagcggaggaacatgtggtttaattcgatgatacgcgaggaaccttacccgggtttgaacgtagtctgaccggagtggaaacactccttctagcaatagcagattacgaggtgctgcatggttgtcgtcagctcgtgccgtgaggtgtcggcttaagtgccataacgagcgcaacccttatcactagttactaacaggtgaagctgaggactctggtgagactgccagcgtaagctgtgaggaaggtggggatgacgtcaaatcagcacggcccttacatccggggcgacacacgtgttacaatggcatggacaaagggcagctacctggcgacaggatgctaatctccaaaccatgtctcagttcggatcggagtctgcaactcgactccgtgaagctggattcgctagtaatcgcgcatcagccatggcgcggtgaatacgttcccgggccttgtacacaccgcccgtca

SEQ ID NO: 430 - DNA, 1391 bp, Artificial Sequence
  Synthetic polymer
agagtttgatcctggctcaggatgaacgctggcggcgtgcttaacacatgcaagtcgaacgaagcatttgcgacagatttcttcgggatgaagttgcttatgactgagtggcggacgggtgagtaacgcgtgggtaacctgccttgtactgggggatagcagctggaaacggctggtaataccgtataagcgcacaatgttgcatgacatggtgtgaaaaactccggtggtataagatggacccgcgtctgattagctagttggtgagataacagcccaccaaggcgacgatcagtagccgacctgagagggtgaccggccacattgggactgagacacggcccagactcctacgggaggcagcagtggggaatattgcacaatggaggaaactctgatgcagcgacgccgcgtgagtgaagaagtaattcgttatgtaaagctctatcagcagggaagatagtgacggtacctgactaagaagctccggctaaatacgtgccagcagccgcggtaatacgtatggagcaagcgttatccggatttactgggtgtaaagggagtgtaggtggccatgcaagtcagaagtgaaaatccggggctcaaccccggaactgcttttgaaactgtcagactggagtgcaggagaggtaagcggaattcctagtgtagcggtgaaatgcgtagatattaggaggaacatcagtggcgaaggcggcttactggactgaaactgacactgaggcacgaaagcgtggggagcaaacaggattagataccctggtagtccacgccgtaaacgatgaatactaggtgtcggggccgtagaggcttcggtgccgcagccaacgcagtaagtattccacctggggagtacgttcgcaagaatgaaactcaaaggaattgacggggacccgcacaagcggtggagcatgtggtttaattcgaagcaacgcgaagaaccttacctggtcttgacatccctatgaataacgggcaatgccgttagtacttcggtacataggagacaggtggtgcatggttgtcgtcagctcgtgtcgtgagatgttgggttaagtcccgcaacgagcgcaacccttatctttagtagccagcagtaagatgggcactctagagagactgccggggataacccggaggaaggtggggatgacgtcaaatcatcatgccccttatgaccagggctacacacgtgctacaatggcgtaaacaaagagaagcgaagccgtgaggcagagcgaatctcaaaaataacgtctcagttcggattgtagtctgcaactcgactacatgaagctggaatcgctagtaatcgcagatcagaatgctgcggtgaatacgttcccgggtcttgcacacaccgcccgtca

SEQ ID NO: 431 - DNA, 1393 bp, Artificial Sequence
  Synthetic polymer
agagtttgatcctggctcaggatgaaccctggcggcgtgcttaacacatgcaagtcgaacgaagctgcttaactgatcttcttcggaattgatgttttgtagactgagtggcggacgggtgagtaacgcgtgggtaacctgccctgtacagggggataacagtcagaaatgactgctaataccgcataagaccacagcaccgcatggtgcaggggtaaaaactccggtggtacaggatggacccgcgtctgattagctggttggtgaggtaacggctcaccaaggcgacgatcagtagccggcttgagagagtgaacggccacattgggactgagacacggcccaaactcctacgggaggcagcagtggggaatattgcacaatgggggaaaccctgatgcagcgacgccgcgtgagtgaagaagtatctcggtatgtaaagctctatcagcagggaagaaaatgacggtacctgactaagaagccccggctaactacgtgccagcagccgcggtaatacgtagggggcaagcgttatccggaattactgggtgtaaagggtgcgtaggtggtatggcaagtcagaagtgaaaacccagggcttaactctgggactgcttttgaaactgtcagactagagtgcaggagaggtaagcggaattcctagtgtagcggtgaaatgcgtagatattaggaggaacatcagtggcgaaggcggcttactggactgaaactgacactgaggcacgaaagcgtggggagcaaacaggaattagataccctggtagtccacgccgtaaacgatgaatactaggtgtcggggccgtagaggcttcggtgccgcagccaacgcagtaagtattccacctggggagtacgttcgcaagaatgaaactcaaaggaattgacggggacccgcacaagcggtggagcatgtggtttaattcgaagcaacgcgaagaaccttacctggtcttgacatccttctgaccggtacttaaccgtactttctcttcggagcaggagtgacaggtggtgcatggttgtcgtcagctcgtgtcgtgagatgttgggttaagtcccgcaacgagcgcaacccttatctttagtagccagcggttcggccgggcactctagagagactgccagggataacctggaggaaggcggggatgacgtcaaatcatcatgccccttatgacttgggctacacacgtgctacaatggcgtaaacaaagggaggcaaagctgtgaagccgagcaaatctcaaaaataacgtctcagttcggactgtagtctgcaacccgactacacgaagctggaatcgctagtaatcgcagatcagaatgctgcggtgaatacgatcccgggtcttgcacacaccgcccgtca

SEQ ID NO: 432 - DNA, 1394 bp, Artificial Sequence
  Synthetic polymer
agagtttgatcctggctcaggatgaacgctggcggcgtgcttaacacatgcaagtcgaacgaagcatttaagacagattttttcggaatgaagttttttatgactgagtggcggacgggtgagtaacgcgtgggtaacctgcctcacacagggggatagcagttggaaacgactggtaataccgcataagcgcacagcttcgcatgaagcggtgtgaaaaactccggtggtgtgagatggacccgcgtctgattaggtagttggtgaggtaacggcccaccaagccgacgatcagtagccgacctgagagggtgaccggccacattgggactgagacacggcccagactcctacgggaggcagcagtggggaatattgcacaatggaggaaactctgatgcagcgacgccgcgtgagtgaagaagtatttcggtatgtaaagctctatcagcagggaagacagtgacggtacctgactaagaagctccggctaaatacgtgccagcagccgcggtaatacgtatggagcaagcgttatccggatttactgggtgtaaagggagtgtaggtggtatcacaagtcagaagtgaaagcccggggctcaaccccgggactgcttttgaaactgtggaactggagtgcaggagaggtaagtggaattcctagtgtagcggtgaaatgcgtagatattaggaggaacaccagtggcgaaggcggcttactggactgtaactgacactgaggctcgaaagcgtggggagcaaacaggattagataccctggtagtccacgccgtaaacgatgaatactaggtgtcggggctcataagagcttcggtgccgcagcaaacgcaataagtattccacctggggagtacgttcgcaagaatgaaactcaaaggaattgacggggacccgcacaagcggtggagcatgtggtttaattcgaagcagcgcgaagaaccttaccaagtcttgacatccttctgaccggacagtaatgtgtcctttccttcgggacagaagagacaggtggtgcatggttgtcgtcagctcgtgtcgtgagatgttgggttaagtcccgcaacgagcgcaacccctatcctcagtagccagcaggtaaagctgggcactctgtggagactgccagggataacctggaggaaggtggggatgacgtcaaatcatcatgccccttatgatttgggctacacacgtgctacaatggcgtaaacaaagggaagcgatcacgcgagtgtgagcaaatctcaaaaataacgtctcagttcggattgtagtctgcaactcgactacatgaagctggaatcgctagtaatcgcaggtcagcatactgcggtgaatacgttcccgggtcttgtactcaccgcccgtca

SEQ ID NO: 433 - DNA, 1386 bp, Artificial Sequence
  Synthetic polymer
agagtttgatcctggctcaggatgaacgctggcggcgtgcctaacacatgcaagtcgaacgaagcaccttaccggattcttcggatgaaagtctggtgactgagtggcggacgggtgagtaacgcgtgggtaacctgccctgtacagggggataacagctggaaacggctgctaataccgcataagcgcacgaggagacatctccttgtgtgaaaaactccggtggtacaggatgggcccgcgtctgattagctggttggcagggtaacggcctaccaaggcaacgatcagtagccggtctgagaggatgaacggccacattggaactgagacacggtccaaactcctacgggaggcagcagtggggaatattgcacaatgggggaaaccctgatgcagcaacgccgcgtgagtgaagaagtatttcggtatgtaaagctctatcagcagggaagataatgacggtacctgactaagaagctccggctaaatacgtgccagcagccgcggtaatacgtatggagcaagcgttatccggatttactgggtgtaaagggtgcgtaggtggcagtgcaagtcagatgtgaaaggccggggctcaaccccggagctgcatttgaaactgctcggctagagtacaggagaggcaggcggaattcctagtgtagcggtgaaatgcgtagatattaggaggaacaccagtggcgaaggcggcctgctggactgttactgacactgaggcacgaaagcgtggggagcaaacaggattagataccctggtagtccacgccgtaaacgatgaatactaggtgtcggggccgtataggcttcggtgccgccgctaacgcagtaagtattccacctggggagtacgttcgcaagaatgaaactcaaaggaattgacggggacccgcacaagcggtggagcatgtggtttaattcgaagcaacgcgaagaaccttaccagggcttgacatccaactaacgaggtagagatacgttaggtgcccttcggggaaagttgagacaggtagtgcatggttgtcgtcagctcgtgtcgtgagatgttgggttaagtcccgcaacgagcgcaacccttattgttagttgctacgcaagagcactctagcgagactgccgttgacaaaacggaggaaggtggggacgacgtcaaatcatcatgccccttatgtcctgggctacacacgtaatacaatggcgtttaacagagggaagcaaagccgcgaggtggagcaaaactcaaaaacaacgtctcagttcagattgcaggctgcaactcgcctgcatgaagtcggaattgctagtaatcgcggatcagcatgccgcggtgaatacgttcccgggccttgcacacaccgcccgtca

SEQ ID NO: 434 - DNA, 1380 bp, Artificial Sequence
  Synthetic polymer
ttcgcccttagagtttgatccggctcaggacgaacgctggcggcgcgcctaacacatgcaagtcgaacgagcgagagagagcttgctttcttgagcgagtggcgaacgggtgagtaacgcgtgaggaacctgcctcaaagagggggacaacagttggaaacgactgctaataccgcataagcccacgacccggcatcgggttgagggaaaaggagcgatccgctttgagatggcctcgcgtccgattagctagttggtgaggtaatggcccaccaaggcaacgatcggtagccggactgagaggttgaacggccacattgggactgagacacggcccagactcctacgggaggcagcagtggggaatattgcacaatgggggaaaccctgatgcagcgacgccgcgtggaggaagaaggtcttcggattgtaaactcctgttgttgaggaagataatgacggtactcaacaaggaagtgacggctaactacgtgccagcagccgcggtaaaacgtaggtcacaggcgttgtccggaattactgggtgtaaagggagcgcaggcgggaagacaagttggaagtgaaatccatgggctcaacccatgaactgctttcaaaactgtttttcttgagtagtgcagaggtaggcggaattcccggtgtagcggtggaatgcgtagatatcgggaggaacaccagtggcgaaggcggcctactgggcaccaactgacgctgaggctcgaaagtgtgggtagcaaacaggattagataccctggtagtccacaccgtaaacgatgattactaggtgttggaggattgaccccttcagtgccgcaattaacacaaaagtaatccccctggggagtacgaccgcaaggattaaatcttcaaaagaaattgacgggggcccgcacaagcagtggagtatgtggtttaattcgacgcaacgcgaagaaccttaccaagtcttgacatcccttgacgatgcgggaaacagtatttctcttcggagcaaggagacaggtggtgcatggttgtcgtcagctcgtgtcgtgagatgttgggttaagtcccgcaacgagcgcaacccttatggtcagttactacgcaagaggactctggccagactgccgttgacaaaacggaggaaggtggggatgacgtcaaatcatcatgccctttatgacttgggctacacacgtactacaatggcgttaaacaaagagaagcaagaccgcgaggtggagcaaaactcagaaacaacgtcccagttcggactgcaggctgcaactcgcctgcacgaagtcggaattgctagtaatcgtggatcagcatgccacggtgaatacgttcccgggccttgtacacaccgcccgtca

SEQ ID NO: 435 - DNA, 1378 bp, Artificial Sequence
  Synthetic polymer
agagttttatcctggctcaggacgaacgctggcggcgcgcctaacacatgcaagtcgaacgagcgagagagagcttgctttctcgagcgagtggcgaacgggtgagtaacgcgtgaggaacctgcctcaaagagggggacaacagttggaaacgactgctaataccgcataagcccacggtgccgcatggcacagagggaaaaggagcaatccgctttgagatggcctcgcgtccgattagctagttggtgaggtaatggcccaccaaggcgacgatcggtagccggactgagaggttgaacggccacattgggactgagacacggcccagactcctacgggaggcagcagtggggaatattgcacaatgggggaaaccctgatgcagcgacgccgcgtggaggaagaaggtcttcggattgtaaactcctgttgttggggaagataatgacggtacccaacaaggaagtgacggctaactacgtgccagcagccgcggtaaaacgtaggtcacaagcgttgtccggaattactgggtgtaaagggagcgcaggcgggaagacaagttggaagtgaaatctatgggctcaacccataaactgctttcaaaactgtttttcttgagtagtgcagaggtaggcggaattcccggtgtagcggtggaatgcgtagatatcgggaggaacaccagtggcgaaggcggcctactgggcaccaactgacgctgaggctcgaaagcatgggtagcaaacaaaattagatacccctggtagtccatgccgtaaaagaatgattacatggtgttgggggattgaccccctcagtgccgcagttaacacaaataaataatcccacctggggaggtcgcccgcaaggttgaaactcaaaaggaaattggcgggggcccgcccaagcaggggagtatttgttttaattagaagcaacgcgaagacccttaccaggtttggacatccgaagcataacacagagatgtgtgaaatccttcgggacatcgagacaggtggtgcatggttgtcgtcagctcgtgtcgtgagatgttgggttaagtcccgcaacgagcgcaacccttattgccagttactacgttaagaggactctggcgagactgccgttgacaaaacggaggaaggtggggatgacgtcaaatcatcatgccctttatgacctgggctacacacgtactacaatggcgttaaacaaagagaagcaagaccgcgaggtggagcaaaactcaaaaacaacgtctcagttcagattgcaggctgcaactcgcctgcatgaagtcggaattgctagtaatcgcggatcagcatgccgcggtgaatacgttcccgggccttgcacacaccgcccgtca

SEQ ID NO: 436 - DNA, 1374 bp, Artificial Sequence
  Synthetic polymer
agagtttgatcctggctcaggacgaacgctggcggcgtgcctaacacatgcaagtcgagcgagtgaatctccttcgggagtgaagctagcggcggacgggtgagtaacacgtgggcaacctgcctcatagaggggaatagccttccgaaaggaagattaataccgcataagattgtagcttcgcatgaagtagcaattaaaggagcaatccgctatgagatgggcccgcggcgcattagctagttggtgaggtaacggctcaccaaggcgacgatgcgtagccgacctgagagggtgatcggccacattgggactgagacacggcccagactcctacgggaggcagcagtggggaatattgcacaatgggggaaaccctgatgcagcaacgccgcgtgagtgatgacggccttcgggttgtaaagctctgtcttcagggaagataatgacggtacctgactaagaagcaccggctaaatacgtgccagcagccgcggtaatacgtatggtgcaagcgttatccggatttactgggtgtaaagggtgcgtaggtggcaaggcaagtctgaagtgaaaatccggggctcaaccccggaactgctttggaaactgtttagctagagtacaggagaggtgagtggaattcctagtgtagcggtgaaatgcgtagatattaggaggaacaccagtggcgaaggcggcttactggacgataactgacgctgaggctcgaaagcgtggggagcaaacaggattagataccctggtagtccacgccgtaaacgatgaatactaggtgttgggaagcattgcttctcggtgccgtcgcaaacgcagtaagtattccacctggggagtacgttcgcaagaatgaaactcaaaggaattgacggggacccgcacaagcggtggagcacgtggtttaattcgaagcaacgcgaagaaccttaccaagtcttgacatccttctgaccggtacttaatcgtaccttctcttcggagcaggagtgacaggtggtgcatggttgtcgtcagctcgtgtcgtgagatgttgggttaagtcccgcaacgagcgcaacccttatcctcagtagccagcagtaagatgggcactctggggagactgccagggataacctggaggaaggtggggatgacgtcaaatcatcatgccccttatgacttgggctacacacgtgctacaatggcgtaaacaaagggaagcaaagctgtgaagccgagcaaatctcaaaaataacgtctcagttcggactgtagtctgcaacccgactacacgaagctggaatcgctagtaatcgcagatcagaatgctgcggtgaatacgttcccgggtcttgcacacaccgcccgtca

SEQ ID NO: 437 - DNA, 1391 bp, Artificial Sequence
  Synthetic polymer
agagtttgcttctggctcaggatgaacgctggcggcgtgcttaacacatgcaagtcgaacggaggacccttgacggagttttcggacaacagataggaatccttagtggcggacgggtgagtaacgcgtgagtaacctgccttggagtggggaataacacagtgaaaattgtgctaataccgcataatgcagttatcccgcatggggttgactgccaaagatttatcgctctgagatggactcgcgtctgattagctagttggcggggtaacggcccaccaaggcgacgatcagtagccggactgagaggttggccggccacattgggactgagacacggcccagactcctacgggaggcagcagtggggaatattgggcaatgggcgcaagcctgacccagcaacgccgcgtgaaggaagaaggctttcgggttgtaaacttcttttctcagggacgaaagaaatgacggtacctgaggaataagccacggctaactacgtgccagcagccgcggtaatacgtaggtggcaagcgttatccggatttactgggtgtaaagggcgtgtaggcgggactgcaagtcagatgtgaaaattatgggctcaacccataacctgcatttgaaactgtagttcttgagtgatggagaggcaggcggaattccgtgtgtagcggtgaaatgcgtagatatacggaggaacaccagtggcgaaggcggcctgctggacattaactgacgctgaggcgcgaaagcgtggggagcaaacaggattagataccctggtagtccacgccgtaaacgatggatactaggtgtggggggtctgaccccctccgtgccgcagctaacgcaataagtatcccacctggggagtacgatcgcaaggttgaaactcaaaggaattgacgggggcccgcacaagcggtggagcatgtggtttaattcgaagcaacgcgaagaaccttaccaggtcttgacatcgatctaaaggctccagagatggagagatagctatagagaagacaggtggtgcatggttgtcgtcagctcgtgtcgtgagatgttgggttaagtcccgcaacgagcgcaaccctcatctatagtagccagcattttggatgggcactctatagagaccgccggggataacccggaggaggatggggatgacgtcaaatcatcatgccccttatggcctgggctacacacgtgctacaatggcactaaacaaagtgaagcgagacagtgatgttaagcaaagcacaaaaacagtgtcccagttcggattgtagtctgcaactcgactacatgaagctggaatcgctagtaatcgcgaatcagcatgtcgcggtgaatacgttctcgggccttgcacacaccgcccgtca

SEQ ID NO: 438 - DNA, 1389 bp, Artificial Sequence
  Synthetic polymer
agagtttgatcctggctcaggatgaacgctggcggcgtgcttaacacatgcaagtcgagcgaagcactttggaaagattcttcggatgatttcctttgtgactgagcggcggacgggtgagtaacgcgtgggtaacctgcctcatacagggggataacagttagaaatgactgctaataccgcataagaccacggtaccgcatggtacagtggtaaaaactccggtggtatgagatggacccgcgtctgattaggtagttggtggggtaacggcctaccaagccgacgatcagtagccgacctgagagggtgaccggccacattgggactgagacacggcccagactcctacgggaggcagcagtggggaatattgcacaatggaggaaactctgatgcagcgacgccgcgtgaaggatgaagtatttcggtatgtaaacttctatcagcagggaagaaaatgacggtacctgactaagaagccccggctaactacgtgccagcagccgcggtaatacgtagggggcaagcgttatccggatttactgggtgtaaagggagcgtagacggcacggcaagccagatgtgaaagcccggggctcaaccccgggactgcatttggaactgctgagctagagtgtcggagaggcaagtggaattcctagtgtagcggtgaaatgcgtagatattaggaggaacaccagtggcgaaggcggcttgctggacgatgactgacgttgaggctcgaaagcgtggggagcaaacaggattagataccctggtagtccacgccgtaaacgatgactgctaggtgtcgggtggcaaagccattcggtgccgcagctaacgcaataagcagtccacctggggagtacgttcgcaagaatgaaactcaaaggaattgacggggacccgcacaagcggtggagcatgtggtttaattcgaagcaacgcgaagaaccttaccaagtcttgacatcctgctgaccgttccttaaccggaattttccttcgggacagcagagacaggtggtgcatggttgtcgtcagctcgtgtcgtgagatgttgggttaagtcccgcaacgagcgcaacccctatttccagtagccagcagtcagatgggcactctggagagactgccggggataacccggaggaaggtggggatgacgtcaaatcatcatgccccttatgatttgggctacacacgtgctacaatggcagttacaaagagaagcgaaactgtgaagtggagcaaacctcaaaaaggctgtctcagttcggattgtagtctgcaactcgactacatgaagctggaatcgctagtaatcgcagatcagaatgctgcggtgaatacgttcccgggtcttgcacacaccgcccgtca

SEQ ID NO: 439 - DNA, 1375 bp, Artificial Sequence
  Synthetic polymer
agagtttgatcctggctcaggacgaacgctggcggcgtgcctaacacatgcaagtcgaacggacgaggaggagcttgcttctccaagtcagtggcggacgggtgagtaacgcgtgagtaacctgcccttcagagggggataacgtctggaaacggacgctaataccgcatgacatatttccatcgcatggtggagatatcaaaggagcaatccgctgaaggatggactcgcgtccgattagatagttggcggggtaacggcccaccaagtcgacgatcggtagccggactgagaggttgaacggccacattgggactgagacacggcccagactcctacgggaggcagcagtgggggatattgcacaatgggcgaaagcctgatgcagcaacgccgcgtgagggaagacggttttcggattgtaaacctctgttctaagtgacgaacaaatgacggtagcttaggagaaagccccggctaactacgtgccagcagccgcggtaatacgtagggggcaagcgttgtccggaattactgggtgtaaagggagcgcaggcggagaagcaagtcagtggtgaaaacgatgggcttaactcatcgactgccattgaaactgtttcccttgagtgaagtagaggcaggcggaattccgagtgtagcggtgaaatgcgtagatattcggaggaacaccagtggcgaaggcggcctgctgggctttaactgacgctgaggctcgaaagtgtggggagcaaacaggattagataccctggtagtccacactgtaaacgatgattactaggtgtggggggtctaaccccctccgtgccggagttaacacaataagtaatccacctggggagtacgaccgcaaggttgaaactcaaaggaattgacgggggcccgcacaagcagtggagtatgtggtttaattcgacgcaacgcgaagaaccttaccaggtcttgacatccaactaacgaagcagagatgcattaggtgcccttcggggaaagttgagacaggtggtgcatggttgtcgtcagctcgtgtcgtgagatgttgggttaagtcccgcaacgagcgcaacccttgtgattagttgctacgcaagagcactctaatcagactgccgttgacaaaacggaggaaggtggggacgacgtcaaatcatcatgcccttatgacctgggctacacacgtactacaatggtcgttaacagagggaagcaataccgcgaggtggagcaaaaccctaaaaacggtctcagttcagattgtaggctgcaactcgcctacatgaagttggaattgctagtaatcgcggatcagcatgccgcggtgaatacgttcccgggccttgcactcaccgcccgtca

SEQ ID NO: 440 - DNA, 1392 bp, Artificial Sequence
  Synthetic polymer
agagtttgatcctggctcaggatgaacgctggcggcgtgcttaacacatgcaagtcgaacgggaattactttattgaaacttcggtcgatttaatttaattctagtggcggacgggtgagtaacgcgtgggtaacctgccttatacagggggataacagtcagaaatggctgctaataccgcataagcgcacagagctgcatggctcagtgtgaaaaactccggtggtataagatggacccgcgctggattagcttgttggtggggtaacggcccaccaaggcgacgatccatagccggcctgagagggtgaacggccacattgggactgagacacggcccagactcctacgggaggcagcagtggggaatattgcacaatgggggaaaccctgatgcagcgacgccgcgtgagcgaagaagtatttcggtatgtaaagctctatcagcagggaagatagtgacggtacctgactaagaagctccggctaaatacgtgccagcagccgcggtaatacgtatggagcaagcgttatccggatttactgggtgtaaagggagtgtaggtggccaggcaagtcagaagtgaaagcccggggctcaaccccgggactgcttttgaaactgcagggctagagtgcaggaggggcaagtggaattcctagtgtagcggtgaaatgcgtagatattaggaggaacaccagtggcgaaggcggcttgctggactgtaactgacactgaggctcgaaagcgtggggagcaaacaggattagataccctggtagtccacgccgtaaacgatgaatactaagtgtcgggtcacataagtgctccgggtgccgcagcaagctgcaataagtattccacatggggagtacgttcgcaagaatgaaactcaaaggaattgacggggacccgcacaagcggtggagcatgtggtttaatttgaagcaacgcgaagaaccttaccaagtcttgacatcctcttgaccggtcagtaatgtgaccttttcttcggaacaagagtgacaggtggtgcatggttgtcgtcagctcgtgtcgtgagatgttgggttaagtcccgcaacgagcgcaacccttatccttagtagccagcagtccggctgggcactctagggagactgccagggataacctggaggaaggtggggatgacgtcaaatcatcatgccccttatgacttgggctacacacgtgctacaatggcgtaaacaaagtgaagcgagagtgtgagcttaagcaaatcacaaaaataacgtctcagttcggattgtagtctgcaactcgactacatgaagctggaatcgctagtaatcgcagatcagaatgctgcggtgaatacgttcccgggtcttgcacacaccgcccgtca

SEQ ID NO: 441 - DNA, 1385 bp, Artificial Sequence
  Synthetic polymer
ttcgcccttagagtttgatcctggctcaggatgaacgctggcggcgtgcttaacacatgcaagtcgagcggagataaattgaaagcttgcttttaatttatcttagcggcggacgggtgagtaacgtgtgggcaacctgcctcatacagagggataatcatgtgaaaacgtgactaataccgcatgtcgtttcgggagggcatcctcctgaaagaaaaggagcaatccggtatgagatgggcccgcatctgattagctagttggtgagataacagcccaccaaggcgacgatcagtagccgacctgagagggtgatcggccacattgggactgagacacggcccaaactcctacgggaggcagcagtggggaatattgcacaatgggggaaaccctgatgcagcaacgccgcgtgaaggaagacggttttcggattgtaaactcctgttgttgaggaagataatgacggtactcaacaaggaagtgacggctaactacgtgccagcagccgcggtaaaacgtaggtcacaagcgttgtccggaattactgggtgtaaagggagcgcaggcgggaagacaagttggaagtgaaatccatgggctcaacccatgaactgctttcaaaactgtttttcttgagtagtgcagaggtaggcggaattcccggtgtagcggtggaatgcgtagatatcgggaggaacaccagtggcgaaggcggcctactgggcaccaactgacgctgaggctcgaaagtgtgggtagcaaacaggattagataccctggtagtccacactgtaaacgatgattactaggtgttggaggattgaccccttcagtgccgcagttaacacaataagtaatccacctggggagtacgaccgcaaggttgaaactcaaaggaattgacgggggcccgcacaagcagtggagtatgtggtttaatttgacgcaacgcgaagaaccttaccaagtcttgacatcctgcgacggacatagaaatatgtttttccttcgggacgcagagacaggtggtgcatggttgtcgtcagctcgtgtcgtgagatgttgggttaagtcccgcaacgagcgcaacccttatggtcagttactacgcaagaggactctggccagactgccgttgacaaaacggaggaaggtggggatgacgtcaaatcatcatgccctttatgacttgggctacacacgtactacaatggcgttaaacaaagagaagcaagaccgcgaggtggagcaaaactcagaaacaacgtcccagttcggactgcaggctgcaactcgcctgcacgaagtcggaattgctagtaatcgcagatcagcatgctgcggtgaatacgttcccgggccttgcacacaccgcccgtca

SEQ ID NO: 442 - DNA, 1397 bp, Artificial Sequence
  Synthetic polymer
ttcgcccttagagtttgatcctggctcaggatgaacgctggcggcgtgcctaacacatgcaagtcgagcgagaagctgatgacagatacttcggttgaaggagtcagtggaaagcggcggacgggtgagtaacgcgtaggcaacctgccccttgcacagggatagccattggaaacgatgattaaaacctgataacaccatttggttacatgagcagatggtcaaagatttatcggcaaaggatgggcctgcgtctgattagctagttggtaaggtaacggcttaccaaggcgacgatcagtagccggactgagaggttgaccggccacattgggactgagacacggcccagactcctacgggaggcagcagtggggaatattgggcaatgggcgcaagcctgacccagcaacgccgcgtgaaggaagaaggctttcgggttgtaaacttcttttatcagggacgaagcaagtgacggtacctgatgaataagccacggctaactacgtgccagcagccgcggtaatacgtaggtggcaagcgttatccggatttactgggtgtaaagggcgtgtaggcgggagtgcaagtcagatgtgaaaactatgggctcaacccatagcctgcatttgaaactgtacttcttgagtgctggagaggcaatcggaattccgtgtgtagcggtgaaatgcgtagatatacggaggaacaccagtggcgaaggcggattgctggacagtaactgacgctgaggcgcgaaagcgtggggagcaaacaggattagataccctggtagtccacgccgtaaacgatggatactaggtgtggggggtctgaccccctccgtgccgcagttaacacaataagtatcccacctggggagtacgatcgcaaggttgaaactcaaaggaattgacgggggcccgcacaagcggtggagtatgtggtttaattcgaagcaacgcgaagaaccttaccagggcttgacatcccggtgaccgctgtagagatacagttttcccttcggggacgccggtgacaggtggtgcatggttgtcgtcagctcgtgtcgtgagatgttgggttaagtcccgcaacgagcgcaacccttattgttagttgctacgcaaaagcactctagcgagactgccgttgacaaaacggaggaaggtggggacgacgtcaaatcatcctgccccttatgtcctgggccacacacgtactacaatggcggtaaacagagggaagcaaagccgcgaggtggagcaaatccctaaaagccgtcccagttcggattgcaggctgaaacccgcctgcatgaagttggaatcgctagtaatcgcggatcagcatgccgcggtgaatacgttcccgggccttgcacacaccgcccgtca

SEQ ID NO: 443 - DNA, 1405 bp, Artificial Sequence
  Synthetic polymer
ttcgcccttagagtttgatcctggctcaggatgaacgctggcggcgtgcctaacacatgcaagtcgaacggagttcttaaggaatgcgacttcggtcaaatgacttttgaacttagtggcggacgggtgagtaacgcgtgagcaacctgcctttcagagggggataacatttggaaacagatgctaataccgcataagattacagtaccgcatgatacagtgatcaaaggagcaatccgctgaaagatgggctcgcgtccgattagatagttggtgaggtaacggctcaccaagtcgacgatcggtagccggactgagaggttgaacggccacattgggactgagacacggcccagactcctacgggaggcagcagtgggggatattgcgcaatgggggaaaccctgacgcagcaacgccgcgtgaaggatgaaggtcttcggattgtaaacttcttttattaaggacgaagaaagtgacggtacttaatgaataagctccggctaactacgtgccagcagccgcggtaatacgtagggagcaagcgttgtccggatttactgggtgtaaagggagcgcaggcgggatagcaagtcagctgtgaaaactatgggctcaacccataaactgcagttgaaactgttattcttgagtggagtagaggcaagcggaattccgagtgtagcggtgaaatgcgtagatattcggaggaacaccagtggcgaaggcggcttgctgggctctaactgacgctgaggctcgaaagtgtggggagcaaacaggattagataccctggtagtccacactgtaaacgatgattgataggtgtggggggtctgtccccctccgttgccggagcaaacgcaataagcactccacctggggagtacgatcgcaagattgaaactcaaaggaattgacgggggcccgcacaagcggtggagcatgtggtttaattcgaagcaacgcgaagaaccttcccaaggcttgacctccctctgacgtatgcagagatgtatattttcttcggaacagaggagacaggtggtgcatggttgtcgtcagctcgtgtcgtgagatgttgggttaagtcccgcaacgagcgcaacccttatctttagtagccagcataaagatgggcactctaaagagactgccgtggataacacggaggaaggtggggatgacgtcaaatcatcatgccccttatgtcttgggcaacacacgtgctacaatggacggaacaaagtgaggcaaagccgcgaggtggagcgaagcacaaaaacccgttctcagttcggattgtagtctgcaactcgactacatgaagctggaatcgctagtaatcgcgaatcagaatgtcgcggtgaatacgttcccgggccttgcacacaccgcccgtca

SEQ ID NO: 444 - DNA, 1391 bp, Artificial Sequence
  Synthetic polymer
agagtttgatcctggctcaggatgaacgctggcggcgtgcttaacacatgcaagtcgagcgaagcactttggaaagattcttcggatgatttcctttgtgactgagcggcggacgggtgagtaacgcgtgggtaacctgcctcatacagggggataacagttagaaatgactgctaataccgcataagaccacggtaccgcatggtacagtggtaaaaactccggtggtatgagatggacccgcgtctgattaggtagttggtggggtaacggcctaccaagccgacgatcagtagccgacctgagagggtgaccggccacattgggactgagacacggcccagactcctacgggaggcagcagtggggaatattgcacaatggaggaaactctgatgcagcgacgccgcgtgaaggatgaagtatttcggtatgtaaacttctatcagcagggaagaaaatgacggtacctgactaagaagccccggctaactacgtgccagcagccgcggtaatacgtagggggcaagcgttatccggatttactgggtgtaaagggagcgtagacggcacggcaagccagatgtgaaagcccggggctcaaccccgggactgcatttggaactgctgagctagagtgtcggagaggcaagtggaattcctagtgtagcggtgaaatgcgtagatattaggaggaacaccagtggcgaaggcggcttactggacgatgactgacgctgaggctcgaaagcgtggggagcaaacaggattagataccctggtagtccacgccgtaaacgatgaatactaggtgtcggggagcacagctcttcggtgccgcagcaaacgcagtaagtattccacctggggagtacgttcgcaagaatgaaactcaaaggaattgacggggacccgcacaagcggtggagcatgtggtttaattcgaagcaacgcgaagaaccttaccaagtcttgacatccttctgacagagtatgtaatgtactttcccttcggggcaggagtgacaggtggtgcatggttgtcgtcagctcgtgtcgtgagatgttgggttaagtcccgcaacgagcgcaacccttatccttagtagccagcacgcagtggtgggcactctggggagactgccagggataacctggaggaaggtggggatgacgtcaaatcatcatgccccttatgagcagggctacacacgtgctacaatggcgtaaacaaagggaggcagaaccgcgaggtcgagcaaatcccaaaaataacgtctcagttcggattgtagtctgcaactcgactacatgaagccggaatcgctagtaatcgcgaatcagaatgtcgcggtgaatacgttcccgggtcttgcactcaccgcccgtca

SEQ ID NO: 445 - DNA, 1389 bp, Artificial Sequence
  Synthetic polymer
agagtttgatcctggctcaggatgaacgctggcggcgtgcttaacacatgcaagtcgaacgggaaaccttttattgaagcttcggcagatttagctggtttctagtggcggacgggtgagtaacgcgtgggtaacctgccttgtacagggggataacagttggaaacggctgctaataccgcataagcgcacggcatcgcatgatgcagtgtgaaaaactccggtggtatgagatggacccgcgtctgattagcttgttggcggggtaacggcccaccaaggcgacgatcagtagccgacctgagagggtgaccggccacattgggactgagacacggcccagactcctacgggaggcagcagtggggaatattgcacaatggaggaaactctgatgcagcgacgccgcgtgagtgaagaagtagttcgctatgtaaagctctatcagcagggaagatagtgacggtacctgactaagaagctccggctaaatacgtgccagcagccgcggtaatacgtatggagcaagcgttatccggatttactgggtgtaaagggagtgtaggtggccaggcaagtcagaagtgaaagcccggggctcaaccccgggactgcttttgaaactgcagggctagagtgcaggaggggcaagtggaattcctagtgtagcggtgaaatgcgtagatattaggaggaacaccagtggcgaaggcggcttgctggactgtaactgacgttgaggctcgaaagcgtggggagcaaacaggattagataccctggtagtccacgccgtaaacgatgaatactaggtgtcggggagcaaagctcttcggtgccgccgcaaacgcaataagtattccacctggggagtacgttcgcaagaatgaaactcaaaggaattgacggggacccgcacaagcggtggagcatgtggtttaattcgaagcaacgcgaagaaccttaccaagccttgacatcccattgacagagcatgtaatgtgctttcccttcggggcagtggtgacaggtggtgcatggttgtcgtcagctcgtgtcgtgagatgttgggttaagtcccgcaacgagcgcaacccctatcttcagtagccagcggtttggccgggcactctggagagactgccagggataacctggaggaaggtggggatgacgtcaaatcatcatgccccttatggcttgggctacacacgtgctacaatggcgtaaacaaagggaagcgagcctgcgagggggagcaaatcccaaaaataacgtctcagttcggattgtagtctgcaacccgactacatgaagctggaatcgctagtaatcgcgaatcagaatgtcgcggtgaatacgttcccgggtcttgcacacaccgcccgtca

SEQ ID NO: 446 - DNA, 1375 bp, Artificial Sequence
  Synthetic polymer
ttagagtttgatcctggctcaggacgaatgctggcggcacgcttaacacatgcaagtcgaacgagagaagagaagcttgcttttctgatctagtggcggacgggtgagtaacacgtgagcaatctgcctttcagagggggataccgattggaaacgatcgttaataccgcataatataattgaaccgcatgatttgattatcaaagatttatcgctgaaagatgagctcgcgtctgattagctagttggtaaggtaacggcttaccaaggcgacgatcagtagccggactgagaggttgatcggccacattgggactgagacacggcccagactcctacgggaggcagcagtggggaatattgcacaatggaggaaactctgatgcagcgatgccgcgtgagggaagaaggttttaggattgtaaacctctgtcttcagggacgaaaaaagacggtacctgaggaggaagctccggctaactacgtgccagcagccgcggtaatacgtagggagcgagcgttgtccggaattactgggtgtaaagggagcgtaggcgggatcgcaagtcagatgtgagaactatgggcttaacccataaactgcatttgaaactgtggttcttgagtgaagtagaggtaagcggaattcctagtgtagtggtgaaatgcgtagatattaggaggaacatcagtggcgaaggcggcttactgggctttaactgacgctgaggctcgaaagcgtggggagcaaacaggattagataccctggtagtccacgccgtaaacgatgattactaggtgtggggggactgaccccttccgtgccgcagcaaacgcaataagtaatccacctggggagtacgaccgcaaggttgaaactcaaaggaattgacgggggcccgcacaagcagtggagtatgtggattaattcgaagcaacgcgaagaaccttaccagggcttgacatccaactaacgaagcggagatgcattaggtgcccttcggggaaagttgagacaggtggtgcatggttgtcgtcagctcgtgtcgtgagatgttgggttaagtcccgcaacgagcgcaacccctattgttagttgctacgcaagagcactctagcgagactgccgttgacaaaacggaggaaggtggggacgacgtcaaatcatcatgccccttatgtcctgggctacacacgtaatacaatggcatttaacagagggaagcaaaaccgcgaggtagagcaaatccctaaaaggtgtctcagtttggattgcaggctgcaactcgcctgcgtgaagtcggaattgctagtaatcgcggatcagcatgccgcggtgaatacgttcccgggccttgcacacaccgcccgtca

SEQ ID NO: 447 - DNA, 1366 bp, Artificial Sequence
  Synthetic polymer
atcctggctcaggacgaacgctggcggcgtgcctaacacatgcaagtcgagcgaatgaagttccttcgggaacggatttagcggcggacgggtgagtaacacgtgggcaacctgcctcatagaggggaatagccttccgaaagggagattaataccgcataagattgtagtaccgcatggtacagcaattaaaggagcaatccgctatgagatgggcccgcggcgcattagctggttggtgaggtaacggctcaccaaggcgacgatgcgtagccgacctgagagggtgatcggccacattgggactgagacacggcccagactcctacgggaggcagcagtggggaatattgcacaatgggggaaaccctgatgcagcaacgccgcgtgagtgatgacggccttcgggttgtaaagctctgtcttcagggacgataatgacggtacctgaggaggaagccacggctaactacgtgccagcagccgcggtaatacgtagggggcaagcgttatccggatttactgggtgtaaagggagcgtagacggcaaggcaagtctgatgtgaaaacccagggcttaaccctgggactgcattggaaactgtctggctcgagtgccggagaggtaagcggaattcctagtgtagcggtgaaatgcgtagatattaggaagaacaccagtggcgaaggcggcttactggacggtaactgacgttgaggctcgaaagcgtggggagcaaacaggattagataccctggtagtccacgccgtaaacgatgaatgctaggtgttggggagcaaagctcttcggtgccgccgcaaacgcattaagcattccacctggggagtacgttcgcaagaatgaaactcaaaggaattgacggggacccgcacaagcggtggagcatgtggtttaattcgaagcaacgcgaagaaccttacctggtcttgacatccctatgaataacgggcaatgccgttagtacttcggtacataggagacaggtggtgcatggttgtcgtcagctcgtgtcgtgagatgttgggttaagtcccgcaacgagcgcaacccttatctttagtagccagcagtaagatgggcactctagagagactgccggggataacccggaggaaggtggggatgacgtcaaatcatcatgccccttatgaccagggctacacacgtgctacaatggcgtaaacaaagagaagcgaagtcgtgaggcagagcgaatctcaaaaataacgtctcagttcggattgtagtctgcaactcgactacatgaagctggaatcgctagtaatcgcagatcagaatgctgcggtgaatacgttcccgggtcttgtacacaccgcccgtca

SEQ ID NO: 448 - DNA, 1391 bp, Artificial Sequence
  Synthetic polymer
agagtttgatcctggctcaggatgaacgctggcggcgtgcttaacacatgcaagtcgaacgggaattactttattgaaacttcggtcgatttaatttaattctagtggcggacgggtgagtaacgcgtgggtaacctgccttatacagggggataacagtcagaaatggctgctaataccgcataagcgcacagagctgcatggctcagtgtgaaaaactccggtggtataagatggacccgcgtctgattagctggttggcagggtaacggcctaccaaggcaacgatcagtagccggtctgagaggatgaacggccacattggaactgagacacggtccaaactcctacgggaggcagcagtggggaatattgcacaatgggggaaaccctgatgcagcaacgccgcgtgagtgaagaagtatttcggtatgtaaagctctatcagcagggaagataatgacggtacctgactaagaagctccggctaaatacgtgccagcagccgcggtaatacgtatggagcaagcgttatccggatttactgggtgtaaagggtgcgtaggtggcagtgcaagtcagatgtgaaaggccggggctcaaccccggagctgcatttgaaactgctcggctagagtacaggagaggcaggcggaattcctagtgtagcggtgaaatgcgtagatattaggaggaacaccagtggcgaaggcggcctgctggactgttactgacactgaggcacgaaagcgtggggagcaaacaggattagataccctggtagtccacgccgtaaacgatgaatacaaggtgtcggggccgtataggctccggtgccgccgctaaacgcaggtaagtattccacctggggagtacgttcgcaagaatgaaactcaaaggaattgacggggacccgcacaagcggtggagcatgtggtttaattcgaagcaacgcgaagaaccttacctgctcttgacatcccggtgaccggcatgtaacgatgccttttcttcggaacaccggtgacaggtggtgcatggttgtcgtcagctcgtgtcgtgagatgttgggttaagtcccgcaacgagcgcaacccttatcttcagtagccagcattttggatgggcactctggagagactgccagggataacctggaggaaggtggggatgacgtcaaatcatcatgccccttatgagcagggctacacacgtgctacaatggcgtaaacaaagggaagcgagcctgcgagggtaagcaaatctcaaaaataacgtctcagttcggattgtagtctgcaactcgactacatgaagctggaatcgctagtaatcgcggatcagcatgtcgcggtgaatatgttcccgggtcttgtacacaccgcccgtca

SEQ ID NO: 449 - DNA, 1380 bp, Artificial Sequence
  Synthetic polymer
agagtttgatcctggctcaggatgaacgctggcggcgtgcttaacacatgcaagtcgaacgagagaagatcggtgcttgcactgatccaatcgagtggcggacgggtgagtaacgcgtgggtaacctgcctcatacaggggaataacagttggaaacggctgctaaaaccgcataagcgcacagtatcgcatgatacagtgtgaaaaactccggtggtatgagatggacccgcgtctgattagctagttggtgaggtaacggcccaccaaggcaacgatcagtagccggcctgagagggtgaacggccacattgggactgagacacggcccaaactcctacgggaggcagcagtggggaatattgcacaatgggggaaaccctgatgcagcgacgccgcgtgagtgatgaagtatttcggtatgtaaagctctatcagcagggaagataatgacggtacctgactaagaagcaccggctaaatacgtgccagcagccgcggtaatacgtatggtgcaagcgttatccggatttactgggtgtaaagggtgcgtaggtggtgagacaagtctgaagtgaaaatccggggcttaaccccggaactgctttggaaactgcctgactagagtacaggagaggtaagtggaattcctagtgtagcggtgaaatgcgtagatattaggaggaacaccagtggcgaaggcggcttgctggacgatgactgacgttgaggctcgaaagcgtggggagcaaacaggattagataccctggtagtccacgccgtaaacgatgactgctaggtgtcgggtggcaaagccattcggtgccgcagctaacgcaataagcagtccacctggggagtacgttcgcaagaatgaaactcaaaggaattgacggggacccgcacaagcggtggagcatgtggtttaattcgaagcaacgcgaagaaccttacctgatcttgacatcccgatgaccgcttcgtaatggaagcttttcttcggaacatcggtgacaggtggtgcatggttgtcgtcagctcgtgtcgtgagatgttgggttaagtcccgcaacgagcgcaacccctatcttcagtagccagcaggttaagctgggcactctggagagactgccagggataacctggaggaaggtggggatgacgtcaaatcatcatgccccttatgaccagggctacacacgtgctacaatggcgtaaacaaagagaagcgaactcgcgagggtaagcaaatctcaaaaataacgtctcagttcggattgtagtctgcaactcgactacatgaagctggaatcgctagtaatcgcagatcagaatgctgcggtgaatacgttcccgggtcttgtactcaccgcccgtca

SEQ ID NO: 450 - DNA, 1376 bp, Artificial Sequence
  Synthetic polymer
agagtttgatcctggctcaggatgaacgctggcggcgtgcctaacacatgcaagtcgaacggacttacattgaagcctagcgatatgtaagttagtggcggacgggtgagtaacgcgtgggtaacctgccttgtactgggggacaacagttggaaacgactgctaataccgcataagcgcacagcttcgcatgaagcagtgtgaaaaactccggtggtacaagatggacccgcgtctgattagctggttggtgaggtaacggcccaccaaggcgacgatcagtagccggcctgagagggtgaacggccacattgggactgagacacggcccaaactcctacgggaggcagcagtggggaatattgcacaatgggggaaaccctgatgcagcgacgccgcgtggaggaagaaggtcttcggattgtaaactcctgttgttgaggaagataatgacggtactcgacaaggaagtgacggctaactacgtgccagcagccgcggtaaaacgtaggtcacaagcgttgtccggaattactgggtgtaaagggagcgcaggcgggaagacaagttggaagtgaaatctatgggctcaacccataaactgctttcaaaactgtttttcttgagtagtgcagaggtaggcggaattcccggtgtagcggtggaatgcgtagatatcgggaggaacaccagtggcgaaggcggcctactgggcaccaactgacgctgaggctcgaaagtgtgggtagcaaacaggattagataccctggtagtccacaccgtaaacgatgattactaggtgttggaggattgaccccttcagtgccgcagttaacacaataagtaatccacctggggagtacgaccgcaaggttgaaactcaaaggaattgacgggggcccgcacaagcggtggattatgtggtttaattcgaagcaacgcgaagaaccttaccagggcttgacatcctactaacgaagtagagatacatcaggtgcccttcggggaaagtagagacaggtggtgcatggttgtcgtcagctcgtgtcgtgagatgttgggttaagtcccgcaacgagcgcaacccctattgttagttgctacgcaagagcactctagcgagactgccgttgacaaaacggaggaaggtggggacgacgtcaaatcatcatgccccttatgtcctgggctacacacgtaatacaatggcggtcaacagagggatgcaaagccgtaaggtggagcgaacccctaaaagccgtcccagttcagattgtgggctgcaacccgcccacatgaagtcggaatcgctagtaatcgcggatcagcatgccgcggtgaatacgttcccgggccttgcactcaccgcccgtca

SEQ ID NO: 451 - DNA, 1393 bp, Artificial Sequence
  Synthetic polymer
agagtttgatcctggctcaggatgaacgctggcggcgtgcttaacacatgcaagtcgagcgaagcactttggaaagattcttcggatgatttcctttgtgactgagcggcggacgggtgagtaacgcgtgggtaacctgcctcatacagggggataacagttagaaatgactgctaataccgcataagaccacggtaccgcatggtacagtggtaaaaactccggtggtatgagatggacccgcgtctgattaggtagttggtggggtaacggcctaccaagccgacgatcagtagccgacctgagagggtgaccggccacattgggactgagacacggcccagactcctacgggaggcagcagtggggaatattgcacaatggaggaaactctgatgcagcgacgccgcgtgaaggatgaagtatttcggtatgtaaacttctatcagcagggaagaaaatgacggtacctgactaagaagccccggctaactacgtgccagcagccgcggtaatacgtagggggcaagcgttatccggatttactgggtgtaaagggagcgtagacggcacggcaagccagatgtgaaagcccggggctcaaccccgggactgcatttggaactgctgagctagagtgtcggagaggcaagtggaatacctagtgtagcggtgaaatgcgtagatattaggaggaacaccagtggcgaaggcggcttactggacggcaactgacgttgaggctcgaaagcgtggggagcaaacaggattagataccctggtagtccacgccgtaaacgatgaatactaggtgttgggggacaaagtccttcggtgccgccgcaaacgcattaagtattccacctggggagtacgttcgcaagaatgaaactcaaaggagttgacggggacccgcacaagcggtggagcatgtggtttaattcgaagcaacgcgaagaaccttaccaagtcttgacatcgattcgacgggactgtaatgagttctttcccttcggggacgaagaagacaggtggtgcatggttgtcgtcagctcgtgtcgtgagatgttgggttaagtcccgcaacgagcgcaacccttatcttcagtagccagcaagtgaagttgggcactctggagagactgccagggacaacctggaggaaggtggggatgacgtcaaatcatcatgccccttatgacttgggctacacacgtgctacaatggcgtaaacaaagggaagcagccctgtgaaggtgagcaaatcccaaagataacgtctcagttcggattgtagtctgcaactcgactacatgaagctggaatcgctagtaatcgcgaatcagaatgtcgcggtgaatacgttcccgggtcttgcactcaccgcccgtca

SEQ ID NO: 452 - DNA, 1389 bp, Artificial Sequence
  Synthetic polymer
agagtttgatcctggctcaggatgaacgctggcggcgtgcttaacacatgcaagtcgaacgaagcaccttgatttgattcttcggatgaagatcctggtgactgagtggcggacgggtgagtaacgcgtgggtaacctgcctcatacagggggataacagttagaaatgactgctaataccgcataagaccacagcaccgcatggtgcaggggtaaaaactccggtggtatgagatggacccgcgtctgattaggtagttggtggggtaacggcctaccaagccgacgatcagtagccgacctgagagggtgaccggccacattgggactgagacacggcccaaactcctacgggaggcagcagtggggaatattgcacaatgggcgaaagcctgatgcagcaacgccgcgtgagcgatgaaggccttcgggtcgtaaagctctgtcctcaaggaagataatgacggtacttgaggaggaagccccggctaactacgtgccagcagccgcggtaatacgtagggggctagcgttatccggaattactgggcgtaaagggtgcgtaggtggtttcttaagtcagaggtgaaaggctacggctcaaccgtagtaagcctttgaaactgggaaacttgagtgcaggagaggagagtggaattcctagtgtagcggtgaaatgcgtagatattaggaggaacaccagttgcgaaggcggctctctggactgtaactgacactgaggtacgaaagcgtggggagcaaacaggattagataccctggtagtccacgcggtaaacgatgaatgctaggtgtcgggtgacgaagtcattcggtgccgccgcaaacgcattaagcattccacctggggagtacgttcgcaaggatgaaactcaaaggaattgacggggacccgcacaagcggtggagcatgtggtttaattcgaagcaacgcgaagaaccttaccaagtcttgacatccctctgaccggaacttaaccgttcctttccttcggagcaggagtgacaggtggtgcatggttgtcgtcagctcgtgtcgtgagatgttgggttaagtcccgcaacgagcgcaacccttatctttagtagccagcggtccggccgggcactctagagagactgccagggataacctggaggaaggcggggatgacgtcaaatcatcatgccccttatgacttgggctacacacgtgctacaatggcgtaaacaaagggaagcaaagctgtgaagccgagcaaatctcaaaaataacgtctcagttcggactgtagtctgcaacccgactacacgaagctggaatcgctagtaatcgcagatcagaatgctgcggtgaatacgttcccgggtcttgtacacaccgcccgtca

SEQ ID NO: 453 - DNA, 1395 bp, Artificial Sequence
  Synthetic polymer
agagtttgatcctggctcaggatgaacgctggcggcgtgcctaacacatgcaagtcgaacgaagctcttgcgacagattccttcgggatgaagatgcttgagacttagtggcggacgggtgagtaacgcgtgggtaacctgccctgtactggggggcaacagttagaaatgactgctaataccgcataagcctacggagtcgcatggctcagtaggaaaaattccggtggtacaggatgggcccgcgtctgattagctagttggtgaggtaatggctcaccaaggcgacgatcagtagccggcttgagagagtgaacggccacattgggactgagacacggcccaaactcctacgggaggcagcagtggggaatattgcacaatgggggaaaccctgatgcagcaacgccgcgtgagtgaagaagtatttcggtatgtaaagctctatcagcagggaagataatgacggtacctgactaagaagctccggctaaatacgtgccagcagccgcggtaatacgtatggagcaagcgttatccggatttactgggtgtaaagggtgcgtaggtggcagtgcaagtcagatgtgaaaggccggggctcaaccccggagctgcatttgaaactgctcggctagagtacaggagaggcaggcggaattcctagtgtagcggtgaaatgcgtagatattaggaggaacaccagtggcgaaggcggcctgctggactggtactgaccctgaggcacgaaagcgtggggaacaaaccggattagaacccctggtaatcccacgccttaaacgatgaatattaggtgtcggggccgtataggcttcggtgccgtagcaaacgcagtaagcattccacctggggagtacgttcgcaagaatgaaactcaaaaggaattgacggggacccgcacaagcggtggagcatgtggtttaatttgaagcaacgcgaagaaccttaccaagtcttgacatccccctgaccggaacataaccgttcctttccttcgggacaggggagacaggtggtgcatggttgtcgtcagctcgtgtcgtgagatgttgggttaagtcccgcaacgagcgcaacccctatcctcagtagccagcatttaaggtgggcactctgtggagactgccagggataacctggaggaaggcggggatgacgtcaaatcatcatgccccttatgatttgggctacacacgtgctacaatggcgtaaacaaagggaagcgagcctgcgagggtaagcaaatcccaaaaataacgtcccagttcggattgtagtctgcaactcgactccatgaagctggattcgctagtaatcgcgcatcagccatggcgcggtgaatacgttcccgggccttgcacacaccgcccgtca

SEQ ID NO: 454 - DNA, 1389 bp, Artificial Sequence
  Synthetic polymer
agagtttgatcctggctcaggatgaacgctggcggcgtgcctaacacatgcaagtcgaacgaagcaccttttgagattcttcggatgatcgatcggtgactgagtggcggacgggtgagtaacgcgtgggtaacctgccctgtacagggggataacagctggaaacggctgctaataccgcataagcgcacgagaagacatctccttgtgtgaaaaactccggtggtacaggatgggcccgcgtctgattagctggttggcagggtaacggcctaccaaggcaacgatcagtagccggtctgagaggatgaaaggccacattggaactgagacacggtccaaactcctacgggaggcagcagtggggaatactgcacaatgggggaaaccctgatgcagcaacgccgcgtgagtgaagaagtatttcggtatgtaaagctctatcagcagggaagataatgacggtacctgactaagaagctccggctaaatacgtgccagcagccgcggtaatacgtatggagcaagcgttatccggatttactgggtgtaaagggtgcgtaggtggcagtgcaagtcagatgtgaaaggccggggctcaaccccggagctgcatttgaaactgcatagctggagtacaggagaggcaggcggaattcctagtgtagcggtgaaatgcgtagatattaggaggaacaccagtggcgaaggcggcctgctggactgttactgacactgaggcacgaaagcgtggggagcaaacaggattagataccctggtagtccacgccgtaaacgatgaatactaggtgtcggggccgtataggctccggtgccgccgctaacgcagtaagtattccacctggggagtacgttcgcaagaatgaaactcaaaggaattgacggggacccgcacaagcggtggagcatgtggtttaattcgaagcaacacgaagaaccttaccaggtcttgacatccttctgaccgcaccttaatcggtgctttccttcgggacagaagagacaggtggtgcatggttgtcgtcagctcgtgtcgtgagatgttgggttaagtcccgcaacgagcgcaacccttatgaatagttactaacgcgtaaaggcgaggactctattgagactgccggggacaactcggaggaaggtggggacgacgtcaaatcatcatgccccttatgacctgggctacacacgtgctacaatggcgaccacaaagggaagcgaattcgtaaggaagagcgaatcccaaaaaagtcgtcccagttcggattgtgggctgcaacccgcccacatgaagttggagttgctagtaatcgcgaatcagcatgtcgcggtgaatacgttcccgggccttgcacacaccgcccgtca

SEQ ID NO: 455 - DNA, 1392 bp, Artificial Sequence
  Synthetic polymer
agagtttgatcctggctcaggatgaacgctggcggcgtgcttaacacatgcaagtcgagcgaagcactttgctttgatttcttcgggatgaagagcttagtgactgagcggcggacgggtgagtaacgcgtgggtaacctgcctcatacagggggataacagttagaaatgactgctaataccgcataaggccacagcaccgcatggtgcaggggtaaaaactccggtggtatgagatggacccgcgtctgattaggtagttggcggggtaacggcccaccaagccgacgatcagtagccgacctgagagggtgaccggccacattgggactgagacacggcccaaactcctacgggaggcagcagtggggaatattgggcaatgggcgcaagcctgacccagcaacgccgcgtgaaggaagaaggctttcgggttgtaaacttcttttgtcagggacgaaacaaatgacggtacctgacgaataagccacggctaactacgtgccagcagccgcggtaatacgtaggtggcaagcgttatccggatttactgggtgtaaagggcgtgtaggcgggagtgcaagtcagatgtgaaaattatgggctcaacccataacctgcatttgaaactgtacttcttgagtactggagaggcaggcggaattccgtgtgtagcggtgaaatgcgtagatatacggaggaacaccagtggcgaaggcggcctgctggacagcaactgacgctgaggcgcgaaagcgtggggagcaaacaggattagataccctggtagtccacgctgtaaacgatggatactaggtgtggggggactgaccccctccgtgccgcagttaacacaataagtatcccacctggggagtacgatcgcaaggttgaaactcaaaggaattgacgggggcccgcacaagcggtggagtatgtggtttaattcgaagcaacgcgaagaaccttaccagggcttgacatcccggtgaccggactagagatagtcctttcccttcggggacgccggtgacaggtggtgcatggttgtcgtcagctcgtgtcgtgagatgttgggttaagtcccgcaacgagcgcaacccttatggtcagttactacgcaagaggactctggccagactgccgttgacaaaacggaggaaggtggggatgacgtcaaatcatcatgccctttatgacttgggctacacacgtactacaatggcgttaaacaaagagaagcaagaccgcgaggtggagcaaaactcagaaacaacgtcccagttcggactgcaggctgcaactcgcctgcacgaagtcggaattgctagtaatcgcagatcagcatgctgcggtgaatacgttcccgggccttgcacaaagcgcccgtca

SEQ ID NO: 456 - DNA, 1398 bp, Artificial Sequence
  Synthetic polymer
agagtttgatcctggctcaggatgaacgctagctacaggcttaacacatgcaagtcgaggggcagcatggtcttagcttgctaaggccgatggcgaccggcgcacgggtgagtaacacgtatccaacctgccgtctactcttggacagccttctgaaaggaagattaatacaagatggcatcatgagtccgcatgttcacatgattaaaggtattccggtagacgatggggatgcgttccattagatagtaggcggggtaacggcccacctagtcttcgatggataggggttctgagaggaaggtcccccacattggaactgagacacggtccaaactcctacgggaggcagcagtgaggaatattggtcaatgggcgagagcctgaaccagccaagtagcgtgaaggatgactgccctatgggttgtaaacttcttttataaaggaataaagtcgggtatgcatacccgtttgcatgtactttatgaataaggatcggctaactccgtgccagcagccgcggtaatacggaggatgcgagcgttatccggatttattgggtttaaagggtgcgtaggcggcacgccaagtcagcggtgaaatttccgggctcaacccggactgtgccgttgaaactggcgagctagagtgcacaagaggcaggcggaatgcgtggtgtagcggtgaaatgcatagatatcacgcagaaccccgattgcgaaggcagcctgctagggtgcgacagacgctgaggcacgaaagcgtgggtatcgaacaggattagataccctggtagtccacgcagtaaacgatgaatactaactgtttgcgatacaatgtaagcggtacagcgaaagcgttaagtattccacctggggagtacgccggcaacggtgaaactcaaaggaattgacgggggcccgcacaagcggaggaacatgtggtttaattcgatgatacgcgaggaaccttacccgggctcaaacgcagggggaatgtcggtgaaagccggcagctagtaatagtcacctgcgaggtgctgcatggttgtcgtcagctcgtgccgtgaggtgtcggcttaagtgccataacgagcgcaacccctatcgacagttactaacgggtgaagccgaggactctgtcgagactgccggcgcaagacgcgaggaaggtggggatgacgtcaaatcagcacggcccttacgtccggggcgacacacgtgttacaatggcaggtacagaaggcagccagtcagcaatgacgcgcgaatcccgaaaacctgtctcagttcggattggagtctgcaacccgactccatgaagctggattcgctagtaatcgcgcatcagccatggcgcggtgaatacgttcccgggccttgcactcaccgcccgtca

SEQ ID NO: 457 - DNA, 1373 bp, Artificial Sequence
  Synthetic polymer
agagtttgatcctggctcaggacgaacgctggcggcgtgcctaacacatgcaagtcgagcgagtggagttcttcggaacaaagctagcggcggacgggtgagtaacacgtgggcaacctgcctcatagaggggaatagcctcccgaaagggagattaataccgcataagattgtagcttcgcatgaagtagcaattaaaggagcaatccgctatgagatgggcccgcggcgcattagctagttggtaaggtaacggcttaccaaggcgacgatcagtagccgacctgagagggtgaacggccacattgggactgagacacggcccagactcctacgggaggcagcagtggggaatattgcacaatgggggaaaccctgatgcagcgacgccgcgtgagggaagaagtatctcggtatgtaaacttctatcagcagggaagatagtgacggtacctgactaagaagccccggctaactacgtgccagcagccgcggtaatacgtagggggcaagcgttatccggatttactgggtgtaaagggagcgtagacggaatggcaagtctgatgtgaaaggccggggctcaaccccgggactgcattggaaactgtcaatctagagtaccggaggggtaagtggaattcctagtgtagcggtgaaatgcgtagatattaggaggaacaccagtggcgaaggcggcttactggacggtaactgacgttgaggctcgaaagcgtggggagcaaacagaagtagataccctggtagtccacgccgtaaacgatgaataataggtgtaggggttgtcctgacctgttgccccgccgctaacgcataaagtattccacgtggggattacggtcgcaagattaaaactcaaaggaattgacgggggcccgcacgagcagtggagtatgtggtttatttgacagcaacgcgaagcaccttaccaggtcttgacatccaactaacgaagcagagatgcgttaggtgcccttcggggaaagttgagacaggtggtgcatggttgtcgtcagctcgtgtcgtgagatgttgggttaagtcccgcaacgagcgcaacccttattgccagttcctacgttaagaggactttggcgagactgccgttgacaaaacggaggaaggtggggatgacgtcaaatcatcatgccccttatgacctgggctacacacgtactacaatggcgttaaacaaagagaagcaagaccgcgaggtggagcaaatctcaaaaacaacgtctcagttcagattgcaggctgcaactcgcctgcatgaagtcggaattgctagtaatcgcggatcagcatgccgcggtgaatacgttcccgggccttgcacacaccgcccgtca

SEQ ID NO: 458 - DNA, 1393 bp, Artificial Sequence
  Synthetic polymer
agagtttgatcctggctcaggatgaacgctggcggcgtgcttaacacatgcaagtcgaacgaagcatttgcgacagatttcttcgggatgaagttgcttatgactgagtggcggacgggtgagtaacgcgtgggtaacctgccttgtactgggggatagcagctggaaacggctggtaataccgcataagcgcacaatgttgcatgacatggtgtgaaaaactccggtggtataagatggacccgcgtctgattagctagttggtgagataacagcccaccaaggcgacgatcagtagccgacctgagagggtgaccggccacattgggactgagacacggcccagactcctacgggaggcagcagtggggaatattgcacaatggaggaaactctgatgcagcgacgccgcgtgagtgaagaagtaattcgttatgtaaagctctatcagcagggaagatagtgacggtacctgactaagaagctccggctaaatacgtgccagcagccgcggtaatacgtatggagcaagcgttatccggatttactgggtgtaaagggagtgtaggtggccatgcaagtcagaagtgaaaatccggggctcaaccccggaactgcttttgaaactgtaaggctggagtgcaggaggggtgagtggaattcctagtgtagcggtgaaatgcgtagatattaggaggaacaccagtggcgaaggcggctcactggactgtaactgacactgaggcacgaaagcatgggtagcaaacaggattagataccctggtagtccatgcccgtaaacgatgattactaggtgtggggggactgaccccttccgtgccgcagttaacacaataagtaatccacctggggagtacggccgcaaggttgaaactcaaaggaattgacgggggcccgcacaagcagtggagtatgtggtttaattcgaagcaacgcgaagaaccttaccaggtcttgacatcctgagaatccttaagagattagggagtgccttcgggaactcagagacaggtggtgcatggttgtcgtcagctcgtgtcgtgagatgttgggttaagtcccgcaacgagcgcaacccttatctttagtagccagcggtcaggccgggcactctagagagactgccagggataacctggaggaaggcggggatgacgtcaaatcatcatgccccttatgacttgggctacacacgtgctacaatggcgtaaacaaagggaagcgagcctgcgagggggagcaaatcccaaaaataacgtctcagttcggattgtagtctgcaactcgactacatgaagctggaatcgctagtaatcgcgaatcagaatgtcgcggtgaatacgttcccgggtcttgcacacaccgcccgtca

SEQ ID NO: 459 - DNA, 1393 bp, Artificial Sequence
  Synthetic polymer
ttcgcccttagagtttgatcctggctcaggacgaacgctggcggcgtgcctaacacatgcaagtcgagcgagaatttcgtaacggattccttcggggagaagatacggaaggaaagcggcggacgggtgagtaacgcgtgagtaacctgcctatcagagggggacaacatttcgaaagggatgctaataccgcataatattgttttaccgcatgatagaacaatcaaagatttatcgctgatagatggactcgcgtctgattagatagttggtggggtaaaggcctaccaagtcgacgatcggtagccgaactgagaggttgatcggccacattgggactgagacacggcccagactcctacgggaggcagcagtggggaatattgcacaatgggggaaaccctgatgcagcgacgccgcgtggaggaagaaggtcttcggattgtaaactcctgttgttggggaagataatgacggtacccaacaaggaagtgacggctaactacgtgccagcagccgcggtaaaacgtaggtcacaagcgttgtccggaattactgggtgtaaagggagcgcaggcgggaagacaagttggaagtgaaatctatgggctcaacccataaactgctttcaaaactgtttttcttgagtagtgcagaggtaggcggaattcccggtgtagcggtggaatgcgtagatatcgggaggaacaccagtggcgaaggcggcctactgggcaccaactgacgctgaggctcgaaagtgtgggtagcaaacaggattagataccctggtagtccacaccgtaaacgatgattactaggtgttggaggattgaccccttcagtgccgcagttaacacaataagtaatccacctggggagtacgaccgcaaggttgaaactcaaaggaattgacgggggcccgcacaagcagtggagtatgtggtttaattcgacgcaacgcgaagaaccttaccaagtcttgacatcccttgacagacatagaaatatgtaatctcttcggagcaaggagacaggtggtgcatggttgtcgtcagctcgtgtcgtgagatgttgggttaagtcccgcaacgagcgcaacccttatggtcagttactacgcaagaggactctggccagactgccgttgacaaaacggaggaaggtggggatgacgtcaaatcatcatgccctttatgacttgggctacacacgtactacaatggcgttaaacaaagagaagcaagaccgcgaggtggagcaaaactcagaaacaacgtcccagttcggactgcaggctgcaactcgcctgcacgaagtcggaattgctagtaatcgtggatcagcatgccacggtgaatacgttcccgggccttgtacacaccgcccgtca

SEQ ID NO: 460 - DNA, 1379 bp, Artificial Sequence
  Synthetic polymer
agagtttgatcctggctcaggatgaacgctggcggcgtgcctaacacatgcaagtcgaacggaatttacatgaagcctagcgattgtaaatttagtggcggacgggtgagtaacgcgtgggtaacctgccttgtactgggggacaacagttggaaacgactgctaataccgcataagcgcacagcttcgcatgaagcagtgtgaaaaacttcggtggtacaagatggacccgcgtctgattagctggttggtgaggtaacggcccaccaaggcgacgatcagtagccggcctgagagggtgaacggccacattgggactgagacacggcccaaactcctacgggaggcagcagtggggaatattgcacaatgggggaaaccctgatgcagcaacgccgcgtgagtgaagaagtatttcggtatgtaaagctctatcagcagggaagataatgacggtacctgactaagaagcaccggctaaatacgtgccagcagccgcggtaatacgtatggtgcaagcgttatccggatttactgggtgtaaagggtgcgtaggtggtgagacaagtctgaagtgaaaatccggggcttaaccccggaactgctttggaaactgcctgactagagtacaggagaggtaagtggaattcctagtgtagcggtgaaatgcgtagatattaggaggaacatcagtggcgaaggcggcttactggactgaaactgacactgaggcacgaaagcgtggggagcaaacaggattagataccctggtagtccacgccgtaaacgatgaatactaggtgtcggggccgtagaggcttcggtgccgcagccaacgcagtaagtattccacctggggagtacgttcgcaagaatgaaactcaaaggaattgacggggacccgcacaagcggtggagcatgtggtttaattcgaagcaacgcgaagaaccttacctggtcttgacatccttctgaccggtccttaaccggacctttccttcgggacaggagagacaggtggtgcatggttgtcgtcagctcgtgtcgtgagatgttgggttaagtcccgcaacgagcgcaacccctatctttagtagccagcatttgaggtgggcgctctagagagactgccagggataacctggaggaaggtggggacgacgtcaaatcatcatgccccttatgatctgggcgacacacgtgctacaatggcggtcacagagtgaggcgaacccgcgagggggagcaaaccacaaaaaggccgtcccagttcggactgtagtctgcaacccgactacacgaagctggaatcgctagtaatcgcgaatcagaatgtcgcggtgaatacgttcccgggtcttgcactcaccgcccgtca

SEQ ID NO: 461 - DNA, 1395 bp, Artificial Sequence
  Synthetic polymer
agagtttgatcctggctcaggatgaacgctagcggcaggcctaacacatgcaagtcgaggggcagcgggattgaagcttgcttcaattgccggcgaccggcgcacgggtgcgtaacgcgtatgcaacctacccataacagggggataacactgagaaattggtactaatatcccataacatcatgaggggcatcccttttggttgaaaactccggtggttatggatgggcatgcgttgtattagctggttggtgaggtaacggctcaccaaggcgacgatacatagggggactgagaggttaaccccccacattggtactgagacacggaccaaactcctacgggaggcagcagtgaggaatattggtcaatggacgcaagtctgaaccagccatgccgcgtgcaggatgacggctctatgagttgtaaactgcttttgtacgagggtaaacccggatacgtgtatccggctgaaagtatcgtacgaataaggatcggctaactccgtgccagcagccgcggtaatacggaggattcaagcgttatccggatttattgggtttaaagggtgcgtaggcggtttgacaagttagaggtgaaataccggtgcttaacaccggaactgcctctaatactgttgagctagagagtagttgcggtaggcggaatgtatggtgtagcggtgaaatgcttagagatcatacagaacaccgattgcgaaggcagcttaccaaactatatctgacgttgaggcacgaaagcgtggggagcaaacaggattagataccctggtagtccacgcagtaaacgatgataactcgctgtcggcgatacacagtcggtggctaagcgaaagcgataagttatccacctggggagtacgttcgcaagaatgaaactcaaaggaattgacgggggcccgcacaagcggaggaacatgtggtttaattcgatgatacgcgaggaaccttacccgggcttgaaagttactgacgattctggaaacaggatttcccttcggggcaggaaactaggtgctgcatggttgtcgtcagctcgtgccgtgaggtgtcgggttaagtcccataacgagcgcaacccctaccgttagttgccatcaggtcaagctgggcactctggcgggactgccggtgtaagccgagaggaaggtggggatgacgtcaaatcagcacggcccttacgtccggggctacacacgtgttacaatggtaggtacagagggcagctactcagtgatgggatgcaaatctcgaaagcctatctcagttcggattggaggctgaaactcgactacatgaagctggaatcgctagtaatcgcgaatcagaatgtcgcggtgaatacgttcccgggtcttgcactcaccgcccgtca

SEQ ID NO: 462 - DNA, 1482 bp, Artificial Sequence
  Synthetic polymer
ttagagtttgatcctggctcaggacgaacgctggcggcgtgcctaacacatgcaagtcgaacggacgagagggagcttgctccctcaagttagtggcggacgggtgagtaacgcgtgagtaacctgcctttcagaggggaataacattctgaaaagaatgctaataccgcataacatcgtagtatcgcatggtacagcgatcaaaggagcaatccgctgaaagatggactcgcgtccgattagctagttggcgggataaaggcccaccaaggcgacgatcggtagccggactgagaggttgatcggccacattgggactgagacacggcccagactcctacgggaggcagcagtgggggatattgcacaatgggggaaaccctgatgcagcaacgccgcgtgaaggaagaaggtcttcggattgtaaacttctgtcctcagggaagataatgacggtacctgaggaggaagctccggctaactacgtgccagcagccgcggtaatacgtagggagcgagcgttgtccggatttactgggtgtaaagggtgcgtaggcggatctgcaagtcagtagtgaaatcccagggcttaaccctggaactgctattgaaactgtgggtcttgagtgaggtagaggcaggcggaattcccggtgtagcggtgaaatgcgtagagatcgggaggaacaccagtggcgaaggcggcctgctgggccttaactgacgctgaggcacgaaagcatgggtagcaaacaggattagataccctggtagtccatgccgtaaacgatgattactaggtgtgggtggtctgaccccatccgtgccggagttaacacaataagtaatccacctggggagtacggccgcaaggttgaaactcaaaggaattgacgggggcccgcacaagcagtggagtatgtggtttaattcgaagcaacgcgaagaaccttaccaggtcttgacatcctgctaacgaggtagagatacgttaggtgcccttcggggaaagcagagacaggtggtgcatggttgtcgtcagctcgtgtcgtgagatgttgggttaagtcccgcaacgagcgcaacccctgctattagttgctacgcaagagcactctaataggactgccgttgacaaaacggaggaaggtggggacgacgtcaaatcatcatgccccttatgacctgggctacacacgtactacaatggccgtcaacagagagaagcgaaactgcgaagtggagcaaaactctaaaagcggtcccagttcggatcgtaggctgcaacccgcctacgtgaagttggaattgctagtaatcgcggatcatcatgccgcggtgaatacgttcccgggccttgtacacaccgcccgtcacaccatgggagccggtaatacccgaagtcagtagtctaaccgcaaggggggacgctgccgaaggtaggattggcgactggggtgaagtcgtaacaaggtaaccgta

SEQ ID NO: 463 - DNA, 1395 bp, Artificial Sequence
  Synthetic polymer
agagtttgatcctggctcaggatgaacgctggcggcgtgcttaacacatgcaagtcgaacgaagcactttatttgatttccttcgggactgattattttgtgactgagtggaggacgggtgagtaacgcgtgggtaacctgccttgtacagggggataacagttggaaacggctgctaataccgcataagcgcacagcatctcatgatgcagtgtgaaaaactccggtggtataagatggacccgcgtaggattagatagttggtgaggtaacggctcaccaagtcaacgatctgtagccgaactgagaggatgatcggccgcattgggactgagacaccgcccatactcctacaggaggcagcagtgaggaatattgcgcaatgggggcaaccctgacgcagcaacgccgcgtgcaggaagaacgtcttctgattgtaaactgttgtcgcaagggaagaagacagtgacggtaccttgtgagaaagtcacggctaactacgtgccagcagccgcggtaatacgtaggtgacaagcgttgtccggatttactgggtgtaaagggcgcgtaggcggactgtcaagtcagtcgtgaaataccggggcttaaccccggggctgcgattgaaactgacagccttgagtatcggagaggaaagcggaattcctagtgtagcggtgaaatgcgtagatattaggaggaacaccagtggcgaaggcggctttctggacgacaactgacgctgaggcgcgaaagtgtggggagcaaacaggattagataccctggtagtccacaccgtaaacgatggatactaggtgtaggaggtatcgaccccttgtgtccctcagttaacacaataagtatcccacctggggagtacgtccgcaaggttgaaattcaaaggaattgacgggggcccgcccaagcagtggagtatgtggtttaattggaagcaacgcgaagacccttacctgggcttgacatccttggaatcgagtagagatacttgagttccttcgggaatcaggtgacaggtggtgcatggttgtcttcagctcgtgtcgtgagatgttgggttaattcccgcaacgagcgcaacccctattgtcagttcccatcattaagttgggcactctggcgagactgccggtgacaaatcggaggaaggtggggacgacgtcaaatcatcatgccccttatgcccagggctacacacgtactacaatggcggataccaaagtgcagcgaaaccgtgaggtggagcgaatcacaaaactcggtctcagttcagattgcagtctgcaactcgcctgcatgaagttggaattgctagtaatcgcggatcagaatgccgcggtgaatacgttcccgggccttgcactcaccgcccgtca

SEQ ID NO: 464 - DNA, 1367 bp, Artificial Sequence
  Synthetic polymer
agagttagatcctggctcaggatgaattttggcggcgtgcttaacacatgcaagtcgaacgattaacccgccctcgggcggttatagagtggcgaacgggtgagtaacacgtgaccaacctgccccttgctccgggacaacccagggaaacctcggctaataccggatactccgcgcagcccgcatggggggcgcgggaaagcccagacggcaagggatggggtcgcggcccattaggtagacggcggggtaacggcccaccgtgcccgcgatgggtagccgggttgagagaccgatcggccacattgggactgagatacggcccagactcctacgggaggcagcagtggggaattttgcgcaatgggggaaaccctgacgcagcaacgccgcgtgcgggacgaaggccttcgggttgtaaaccgctttcagcagggaatatagtgaaggtacctgcagaagaagctccggctaactacgtgccagcagccgcggtaatacgtagggagcgagcgttatccggattcattgggcgtaaagcgcgcgtaggcggcccgtcaagcggggtttcaaatccaggggctcaacctctggccggaccccgaactgtcgggctcgagtgcggtagaggaaggtggaattcccagtgtagcggtgaaatgcgcagatattgggaagaacaccgatagcgaaggcagccttctgggccgccactgacgctgaggcgcgaaagctaggggagcgaacaggattagataccctggtagtcctagccgtaaacgatgggcactaggtgtgggggagcatctcctccgtgccgcagccaacgcattaagtgccccgcctggggagtacggccgcaaggctagaactcaaaggaattgacgggggcccgcacaagcagcggagcatgtggcttaattcgaagcaacgcgaagaaccttaccagggcttgacatccgggtgaagcggcggagacgccgtggccgagaggagcccggacaggtggtgcatggctgtcgtcagctcgtgccgtgaggtgttgggttaagtcccgcaacgagcgcaacccccgtcgcgtattgccagcaggtagagctgggcactcgcgcgagactgccggcgtcaagccggaggaaggtggggacgacgtcaagtcatcatgccccttatgccctgggctgcacacgtgctacaatggccggcacaacgggttgcgaccccgcgagggggagcggatccctcaaagccggccccagttcggaccgcaggctgcaacccgcctgcgcgaagccggagttgctagtaatcgcggatcagcacgccgcggtgaatacgttcccgggccttgcacacaccgcccgtca

SEQ ID NO: 465 - DNA, 1377 bp, Artificial Sequence
  Synthetic polymer
agagtttgatcctggctcaggacgaacgctggcggcgtgcctaacacatgcaagtcgagcgagtgaatctccttcgggagtgaagctagcggcggacgggtgagtaacacgtgggcaacctgcctcatagaggggaatagcctttcaaaaggaagattaataccgcataagattgtagcttcgcatgaagtagcaattaaaggagcaatccgctatgagatgggcccgcggcgcattagctagttggtgaggtaacggctcaccaaggcgacgatgcgtagccgacctgagagggtgatcggccacattgggactgagacacggcccagactcctacgggaggcagcagtggggaatattgcacaatgggggaaaccctgatgcagcaacgccgcgtgagtgaagaagtatctcggtatgtaaagctctatcagcagggaagaaaatgacggtacctgactaagaagccccggctaactacgtgccagcagccgcggtaatacgtagggggcaagcgttatccggaattactgggtgtaaagggtgcgtaggtggtatggcaagtcagaagtgaaaacccagggcttaaccctgggactgcattggaaactgtctggctcgagtgccggagaggtaagcggaattcctagtgtagcggtgaaatgcgtagatattaggaagaacaccagtggcgaaggcggcttactggacggtaactgacgttgaggctcgaaagcgtggggagcaaacaggattagataccctggtagtccacgccgtaaacgatgaatgctaggtgttggggagcaaagctcttcggtgccgcccgcaaacgcattaagcattccaccctggggagtacgttcgcaagaatgaaactcaaaggaattgacggggacccgcacaagcggtggagcatgtggtttaattcgaagcaacgcgaagaaccttaccaagtcttgacatccttctgaccggtacttaaccgtaccttctcttcggagcaggagtgacaggtggtgcatggttgtcgtcagctcgtgtcgtgagatgttgggttaagtcccgcaacgagcgcaacccttatctttagtagccagcggttcggccgggcactctagagagactgccagggataacctggaggaaggcggggatgacgtcaaatcatcatgccccttatgacttgggctacacacgtgctacaatggcgtaaacaaagggaagcaaagctgtgaagccgagcaaatctcaaaaataacgtctcagttcggactgtagtctgcaacccgactacacgaagctggaatcgctagtaatcgcagatcagaatgctgcggtgaatacgttcccgggtcttgcactcaccgcccgtca

SEQ ID NO: 466 - DNA, 1369 bp, Artificial Sequence
  Synthetic polymer
agagtttgatcctggctcaggacgaacgctggcggcgcgcctaacacatgcaagtcgaacgagcgagagagagcttgctttctcgagcgagtggcgaacgggtgagtaacgcgtgaggaacctgcctcaaagagggggacaacagttggaaacgactgctaataccgcataagcccacggctcggcattgagcagagggaaaaggagcaatccgctttgagatggcctcgcgtccgattagctagttggtgaggtaatggcccaccaaggcgacgatcggtagccggactgagaggttgaacggccacattgggactgagacacggcccagactcctacgggaggcagcagtggggaatattgcacaatgggggaaaccctgatgcagcgacgccgcgtggaggaagaaggtcttcggattgtaaactcctgttgttggggaagataatgacggtacccaacaaggaagtgacggctaactacgtgccagcagccgcggtaaaacgtaggtcacaagcgttgtccggaattactgggtgtaaagggagcgcaggcgggaagacaagttggaagtgaaatctatgggctcaacccataaactgctttcaaaactgtttttcttgagtagtgcagaggtaggcggaattcccggtgtagcggtggaatgcgtagatatcgggaggaacaccagtggcgaaggcggcctactgggcaccaactgacgctgaggctcgaaagtgtgggtagcaaacaggattagataccctggtagtccacaccgtaaacgatgattactaggtgttggaggattgaccccttcagtgccgcagttaacacaataagtaatccacctggggagtacgaccgcaaggttgaaactcaaaggaattgacgggggcccgcacaagcagtggagtatgtggtttaattcgacgcaacgcgaagaaccttaccaagtcttgacatcccttgacaggcatagaaatatgttttctcttcggagcaaggagacaggtggtgcatggttgtcgtcagctcgtgtcgtgagatgttgggttaagtcccgcaacgagcgcaacccttatggtcagttactacgcaagaggactctggccagactgccgttgacaaaacggaggaaggtggggacgacgtcaaatcatcatgccccttacgctccgggctacacacgtactacaatggtgagaacaaagggaagctaagccgcgaggcggagcgaaccccataaaaatcatcccagttcggactgcaggctgcaactcgcctgcacgaagttggaattgctagtaatcgcggatcagcatgccgcggtgaatacgttcccgggctttgcactcaccgcccgtca

SEQ ID NO: 467 - DNA, 1370 bp, Artificial Sequence
  Synthetic polymer
agtttgatctggctcaggacgaacgctggcggcacgcttaacacatgcaagtcgaacgagagaagtgaagcttgcttttctgatctagtggcggacgggtgagtaacacgtgagcaatctgcctttcagagggggataccgattggaaacgatcgttaataccgcataacataattgaaccgcatgatttgattatcaaagatttatcgctgaaagatgagctcgcgtctgattagctagttggtaaggtaacggcttaccaaggcgacgatcagtagccggactgagaggttgatcggccacattgggactgagacacggcccagactcctacgggaggcagcagtggggaatattgcacaatggaggaaactctgatgcagcgatgccgcgtgagggaagaaggttttaggattgtaaacctctgtctttggggacgaaaaatgacggtacccaaggaggaagctccggctaactacgtgccagcagccgcggtaatacgtagggagcgagcgttgtccggaattactgggtgtaaagggagcgtaggcgggatcgcaagtcagatgtgaaaactatgggcttaacccataaactgcatttgaaactgtggttcttgagtgaagtagaggtaagcggaattcctagtgtagcggtgaaatgcgtagatattaggaggaacatcagtggcgaaggcggcttactgggctttaactgacgctgaggctcgaaagcgtggggagcaaacaggattagataccctggtagtccacgccgtaaacgatgattactaggtgtggggggactgaccccttccgtgccgcagcaaacgcaataagtaatccacctggggagtacgaccgcaaggttgaaactcaaaggaattgacgggggcccgcacaagcagtggagtatgtggattaattcgaagcaacgcgaagaaccttaccaggtcttgacatcctactaacgagatagagatatgttaggtgcccttcggggaaagtagagacaggtggtgcatggttgtcgtcagctcgtgtcgtgagatgttgggttaagtcccgcaacgagcgcaacccttgctattagttgctacgcaagagcactctaataggactgccgttgacaaaacggaggaaggtggggacgacgtcaaatcatcatgccccttatgacctgggctacacacgtactacaatggacattaacagagggaagcaatacagcgatgtggagcaaacccctaaaaatgttctcagttcagattgcaggctgcaacccgcctgtatgaagatggaattgctagtaatcgcagatcagcatgctgcggtgaatacgttcccgagccttgcactcaccgcccgtca

SEQ ID NO: 468 - DNA, 1491 bp, Artificial Sequence
  Synthetic polymer
agagtttgatcctggctcaggatgaacgctggcggcgtgcttaacacatgcaagtcgaacggggtacccttgacggaggcttcggccaacagagaggactacctagtggcggacgggtgagtaacgcgtgaggaacctgccttggagtggggaataacagcccgaaagggttgctaataccgcataatgcaatatgatcgcatgattgaattgccaaagatttatcgctctgagatggcctcgcgtctgattagctagttggcggggtaacggcccaccaaggcgacgatcagtagccggactgagaggttggccggccacattgggactgagacacggcccagactcctacgggaggcagcagtggggaatattgggcaatgggcgcaagcctgacccagcaacgccgcgtgaaggaagaaggctttcgggttgtaaacttcttttcttgaggacgaagaagtgacggtactcaaggaataagctccggctaactacgtgccagcagccgcggtaatacgtagggagcaagcgttatccggatttactgggtgtaaagggcgtgtaggcgggatggcaagtcagatgtgaaaactatgggctcaacccatagcctgcatttgaaactgtcgttcttgagtgatggagaggcaagcggaattccgtgtgtagcggtgaaatgcgtagatatacggaggaacaccagtggcgaaggcggcttgctggacattaactgacgctgaggcgcgaaagcgtggggagcaaacaggattagataccctggtagtccacgctgtaaacgatggatactaggtgtggggggtctgaccccctccgtgccgcagttaacacaataagtatcccacctggggagtacgatcgcaaggttgaaactcaaaggaattgacgggggcccgcacaagcggtggagtatgtggtttaattcgaagcaacgcgaagaaccttaccagggcttgacatcccggtgaccgatccagagatggatttttcccttcggggacaccggtgacaggtggtgcatggttgtcgtcagctcgtgtcgtgagatgttgggttaagtcccgcaacgagcgcaacccttattgttagttgctacgcaagagcactctagcgagactgccgttgacaaaacggaggaaggtggggacgacgtcaaatcatcatgccccttatgtcctgggctacacacgtactacaatggtggtaaacagagggaggcaagaccgcgaggtggagcaaatccctaaaagccatcccagttcggattgcaggctgaaacccgcctgtatgaagttggaatcgctagtaatcgcggatcagcatgccgcggtgaatacgttcccgggccttgtacacaccgcccgtcacaccatgagagtcgggaacacccgaagtccgtagcctaaccgcaaggggggcgcggccgaaggtgggttcgataattggggtgaagtcgtaacaaggtagccg

SEQ ID NO: 469 - DNA, 1485 bp, Artificial Sequence
  Synthetic polymer
gagagtttgatcctggctcaggacgaacgctggcggcgtgcctaacacatgcaagtcgaacggggttatttgagagcttgcttttggataacctagtggcggacgggtgagtaacgcgtgagtaacctgcctttcagaggggaataacaatctgaaaagattgctaataccgcataacatctaattgtcgcatggcagatagatcaaaggagcaatccgctgagagatggactcgcgtccgattaactagttggaggggtaacggcccaccaaggtgacgatcggtagccggactgagaggttgaacggccacattgggactgagacacggcccagactcctacgggaggcagcagtgggggatattgcacaatgggggaaaccctgatgcagcaacgccgcgtgtgggaagaaggttttcggattgtaaaccactgttcttagcgaagaaacaaatgacggtaactaagaagaaagctccggctaactacgtgccagcaaccgcggtaatacgtagggagcgagcgttgtccggatttactgggtgtaaagggtgcgtaggcgggcccgcaagtcagacgtgaaagccacaggctcaacctgtgaattgcgtttgaaactgtgggtcttgagtgaagtagaggtaggcggaattcccggtgtagcggtgaaatgcgtagagatcgggaggaacaccagtggcgaaggcggcctactgggctttaactgacgctgaggcacgaaagcgtgggtagcaaacaggattagataccctggtagtccatgctgtaaacgatgattactaggtgtggggggtctgaccccctccgtgccggagttaacacaataagtaatccacctggggagtacggccgcaaggctgaaactcaaaggaattgacgggggcccgcacaagcagtggagtatgtggtttaattcgaagcaacgcgaagaaccttaccaggtcttgacatccaactaacgaagtagagatacattaggtgcccttcggggaaagttgagacaggtggtgcatggttgtcgtcagctcgtgtcgtgagatgttgggttaagtcccgcaacgagcgcaacccttgtcattagttgctacgcaagagcactctaatgagactgccgttgacaaaacggaggaaggtggggacgacgtcaaatcatcatgccccttatgacctgggctacacacgtactacaatggccgtcaacagagagaagcgaaacagcgatgtggagcaaaactctaaaaacggtcccagttcggattgtaggctgaaactcgcctgcatgaagttggaattgctagtaatcgcggatcagcatgccgcggtgaatacgttcccgggccttgtacacaccgcccgtcacaccatgggagccggtaatacccgaagtcagtagtctaaccgcaaggagggcgctgccgaaggtaggattggcgactggggtgaagtcgtaacaaggtagccg

SEQ ID NO: 470 - DNA, 1495 bp, Artificial Sequence
  Synthetic polymer
agagtttgatcatggctcaggatgaacgctggcggcgtgcttaacacatgcaagtcgaacgaagcactttaacggattccttcgggttgaagttattgtgactgagtggcggacgggtgagtaacgcgtgggtaacctgcctcatacagggggataacagttagaaatgattgctaataccgcataagcgcacagtatcgcatgatacggtgtgaaaagccgagacggtatgagatggacccgcgtctgattagctagttggtgaggtaacggcccaccaaggcgacgatcagtagccgacctgagagggtgaccggccacattgggactgagacacggcccaaactcctacgggaggcagcagtggggaatattgcacaatgggggaaaccctgatgcagcgacgccgcgtgaaggaagaagtatttcggtatgtaaacttctatcagcagggaagaaaatgacggtacctgactaagaagccccggctaactacgtgccagcagccgcggtaatacgtagggggcaagcgttatccggatttactgggtgtaaagggagcgtaggcggcgatgcaagtcagaagtgaaagcccggggctcaactccgggactgcttttgaaactgtattgctagattgcaggagaggtaagtggaattcctagtgtagcggtgaaatgcgtagatattaggaggaacaccagtggcgaaggcggcttactggactgtaaatgacgctgaggctcgaaagcgtggggagcaaacaggattagataccctggtagtccacgccgtaaacgatgaatactaggtgtcagggagcacagctctttggtgccgcagcaaacgcaataagtattccacctggggagtacgttcgcaagaatgaaactcaaaggaattgacggggacccgcacaagcggtggagcatgtggtttaattcgaagcaacgcgaagaaccttaccaagtcttgacatcccggtgaccgttccgtaatggggacttctcttcggagcactggagacaggtggtgcatggttgtcgtcagctcgtgtcgtgagatgttgggttaagtcccgcaacgagcgcaacccttatctttagtagccagcggtatggccgggcactctagagagactgccagggataacctggaggaaggtggggatgacgtcaaatcatcatgccccttatgatttgggctacacacgtgctacaatggcgtaaacaaagggaagcgatcatgtgagtgtgagcaaatctcaaaaataacgtctcagttcggattgtagtctgcaactcgactacatgaagctggaatcgctagtaatcgcgaatcagaatgccacggtgaatacgttcccgggccttgtacacaccgcccgtcacaccatgggagtcggaaatgcccgaagccagtgacctaaccgaaagggaggagctgtcgaaggtggagccggtaactggggtgaagtcgtaacaaggtagccgta

SEQ ID NO: 471 - DNA, 1492 bp, Artificial Sequence
  Synthetic polymer
agagtttgatcctggctcaggacgaacgctggcggcgtgcttaacacatgcaagtcgaacggagcacccttgattgaggtttcggccaaatgataggaatgcttagtggcggactggtgagtaacgcgtgaggaacctgccttccagagggggacaacagttggaaacgactgctaataccgcatgacgcatgaccggggcatcccggacatgccaaagattttatcgctggaagatggcctcgcgtctgattagctagatggcagggtaacggcctaccatggcgacgatcagtagccggactgagaggttgaccggccacattgggagtgagatacggcccagactcctacgggaggcagcagtggggaatattgggcaatggacgcaagtctgacccagcaacgccgcgtgaaggaagaaggctttcgggttgtaaacttcttttgtcagggaacagtagaagagggtacctgacgaataagccacggctaactacgtgccagcagccgcggtaatacgtaggtggcaagcgttgtccggatttactgggtgcaaagggcgtgtagccgggtgtgtaagtcagatgtgaaatctggaggctcaacctccaaactgcatttgaaactgcgcatcttgagtatcggagaggtaatcggaattcctagtgtagcggtgaaatgcgtagatattaggaagaacaccagtggcgaaggcggattactggacgacaactgacggtgaggcgcgaaagcgtggggagcaaacaggattagataccctggtagtccacgctgtaaacgatcaatactaggtgtgcggggactgaccccctgcgtgccgcagttaacacaataagtattgcacctggggagtacgatcgcaaggttgaaactcaaaggaattgacgggggcccgcacaagcggtggattatgtggtttaattcgaagcaacgcgaagaaccttaccaggacttgacatcctactaacgaagtagagatacattaggtgcccttcggggaaagtagagacaggtggtgcatggttgtcgtcagctcgtgtcgtgagatgttgggttaagtcccgcaacgagcgcaacccctattgttagttgctacgcaagagcactctagcgagactgccgttgacaaaacggaggaaggtggggacgacgtcaaatcatcatgccccttatgtcctgggctacacacgtaatacaatggcggttaacagagggaagcaaagccgcgaggcagagcaaacccctaaaagccgtcccagttcggattgcaggctgcaacccgcctgcatgaagtcggaatcgctagtaatcgcggatcagcatgccgcggtgaatacgttcccgggccttgtacacaccgcccgtcacaccatgagagtcgggaacacccgaagtccgtagcctaaccgcaaggggggggcggccgaaggtgggttcgataattggggtgaagtcgtaacaaggtagcc

SEQ ID NO: 472 - DNA, 1353 bp, Artificial Sequence
  Synthetic polymer
gatgaacgctggcggcgtgcttaacacatgcaagtcgaacggagagcatatgacagaggattcgtccaatggaatatgtttcttagtggcggacgggtgagtaacgcgtgaggaacctgccttggagtggggaataacaggtggaaacatctgctaataccgcatgatgcagttgggtcgcatggctctgactgccaaagatttatcgctctaagatggcctcgcgtctgattagctagttggcggggtaacggcccaccaaggcgacgatcagtagccggactgagaggttggccggccacattgggactgagacacggcccagactcctacgggaggcagcagtggggaatattgggcaatgggcgcaagcctgacccagcaacgccgcgtgaaggaagaaggccctcgggttgtaaacttcttttcttagggacgaagcaagtgacggtacctaaggaataagccacggctaactacgtgccagcagccgcggtaatacgtaggtggcaagcgttatccggatttactgggtgtaaagggcgtgtaggcgggagtgtaagtcagatgtgaaaactatgggctcaacccatagcctgcatttgaaactgcatttcttgagtactggagaggcagacggaattcctagtgtagcggtgaaatgcgtagatattaggaggaacaccagtggcgaaggcggtctgctggacagcaactgacgccgaggcgcgaaagcgtggggagcaaacaggattagataccctggtagtccacgctgtaaacgatggatactaggtgtggggggtctgaccccctccgtgccgcagttaacacaataagtatcccacctggggagtacgatcgcaaggttgaaactcaaaggaattgacgggggcccgcacaagcggtggagtatgtggtttaattcgaagcaacgcgaagaaccttaccagggcttgacatcctactaacgaggtagagatacgttaggtgcccttcggggaaagtagagacaggtggtgcatggttgtcgtcagctcgtgtcgtgagatgttgggttaagtcccgcaacgagcgcaacccttattgttagttgctacgcaagagcactctagcgagactgccgttgacaaaacggaggaaggtggggacgacgtcaaatcatcatgccccttatgtcctgggccacacacgtactacaatggtggttaacagagggaagcaatcccgcgaggaggagcaaatccctaaaagccatcccagttcggatcgcaggctgcaacccgcctgcgtgaagttggaatcgctagtaatcgcggatcagcatgccgcggtgaatacgttcccgggcct

SEQ ID NO: 473 - DNA, 1479 bp, Artificial Sequence
  Synthetic polymer
gagagtttgatcctggctcaggatgaacgctggcggcgtgcctaacacatgcaagtcgagcgagaagctcttgacggattcttcggatgacggagagagtggaaagcggcggacgggtgagtaacgcgtgggcaacctgcctctcacagagggatagccattggaaacgatgattaaaacctcataacactgcattttcacatggagaagcagtcaaagatttatcggtgagagatgggcccgcgtctgattagctggttggtgaggtaacggctcaccaaggcgacgatcagtagccgacctgagagggtgatcggccacattggaactgagacacggtccaaactcctacgggaggcagcagtggggaatattgcacaatgggcgaaagcctgatgcagcaacgccgcgtgaaggaagaaggccttcgggtcgtaaacttctgtccaaggggaagaagaactgacggtacccaaggaggaagccccggctaactacgtgccagcagccgcggtaatacgtagggggcaagcgttatccggaattattgggcgtaaagagtgcgtaggtggcaccttaagcgcagggtttaaggcaatggctcaaccattgttcgccctgcgaactggggggcttgagtgcaggagaggaaagcggaattcctagtgtagcggtgaaatgcgtagatattaggaggaacaccagtggcgaaggcggctttctggactgtaactgacactgaggcacgaaagcgtggggagcaaacaggattagataccctggtagtccacgccgtaaacgatgagcactaggtgtcggggtcgcaagacttcggtgccggagttaacgcattaagtgctccgcctggggagtacgcacgcaagtgtgaaactcaaaggaattgacggggacccgcacaagcagcggagcatgtggtttaattcgaagcaacgcgaagaaccttaccaggacttgacatccctctgaccggttcttaatcggacctttcttcggacagaggagacaggtggtgcatggttgtcgtcagctcgtgtcgtgagatgttgggttaagtcccgcaacgagcgcaacccttgctgttagttgccatcattcagttgggcactctaacgggactgccggggacaactcggaggaaggtggggatgacgtcaaatcatcatgccccttatgttctgggctacacacgtgctacaatggccggtacagaaagcagcgaagtcgtgaggcggagcaaatctcgaaaaccggtcccagttcggactgcaggctgcaactcgcctgcacgaagccggagttgctagtaatcgcggatcagaatgccgcggtgaatgcgttcccgggtcttgtacacaccgcccgtcacaccatggaagttgggggtgcccgaagccggcaggagaatatgctgtcgaaggcaaaaccaatgactggggtgaagtcgtaacaaggtagccg

SEQ ID NO: 474 - DNA, 1497 bp, Artificial Sequence
  Synthetic polymer
gagagtttgatcctggctcaggatgaacgctggcggcgtgcttaacacatgcaagtcgaacgaagcatttagaacagattatttcggtatgaagttctttatgactgagtggcggacgggtgagtaacgcgtgggtaacctgccttgtactgggggatagcagctggaaacggctggtaataccgcataagcgcacaatgttgcatgacatggtgtgaaaaactccggtggtataagatggacccgcgtctgattagctagttggtgagataacagcccaccaaggcgacgatcagtagccgacctgagagggtgaccggccacattgggactgagacacggcccagactcctacgggaggcagcagtggggaatattgcacaatggaggaaactctgatgcagcgacgccgcgtgagtgaagaagtaattcgttatgtaaagctctatcagcagggaagatagtgacggtacctgactaagaagctccggctaaatacgtgccagcagccgcggtaatacgtatggagcaagcgttatccggatttactgggtgtaaagggagtgtaggtggccatgcaagtcagaagtgaaaatccggggctcaaccccggaactgcttttgaaactgtaaggctggagtgcaggaggggtgagtggaattcctagtgtagcggtgaaatgcgtagatattaggaggaacatcagtggcgaaggcggcttactggactgaaactgacactgaggcacgaaagcgtggggagcaaacaggattagataccctggtagtccacgccgtaaacgatgaatactaggtgtcggggcccgtagaggcttcggcgccgcagccaacgcagtaagtattccacctggggagtacgttcgcaagaatgaaactcaaaggaattgacggggacccgcacaagcggtggagcatgtggtttaattcgaagcaacgcgaagaaccttacctggtcttgacatccttctgaccggtccttaaccggacctttccttcgggacaggagtgacaggtggtgcatggttgtcgtcagctcgtgtcgtgagatgttgggttaagtcccgcaacgagcgcaacccctatctttagtagccagcatataaggtgggcactctagagagactgccagggataacctggaggaaggtggggacgacgtcaaatcatcatgccccttatgaccagggctacacacgtgctacaatggcgtaaacagagggaagcagcctcgtgagagtgagcaaatcccaaaaataacgtctcagttcggattgtagtctgcaactcgactacatgaagctggaatcgctagtaatcgcgaatcagaatgtcgcggtgaatacgttcccgggtcttgtacacaccgcccgtcacaccatgggagtcagtaacgcccgaagtcagtgacccaaccgtaaggagggagctgccgaaggcgggaccgataactggggtgaagtcgtaacaaggtagccg

SEQ ID NO: 475 - DNA, 1478 bp, Artificial Sequence
  Synthetic polymer
gagagtttgatcctggctcaggacgaacgctggcggcgtgcctaacacatgcaagtcgaacggagcttgaggggcttgcccttcaagcttagtggcggacgggtgagtaacgcgtgagtaacctgcctctcagagggggataacgttctgaaaaggacgctaataccgcatgacatcccggggccgcatggccctgggatcaaaggagcaatccgctgagagatggactcgcgtccgattagctagttggtgagataaaggcccaccaaggcgacgatcggtagccggactgagaggttgaacggccacattgggactgagacacggcccagactcctacgggaggcagcagtgggggatattgcacaatggagggaactctgatgcagcaacgccgcgtgagggaagaaggtcttcggattgtaaacctttgtcctcagggaagataatgacggtacctgaggaggaagctccggctaactacgtgccagcagccgcggtaatacgtagggagcaagcgttgtccggatttactgggtgtaaagggtgcgtaggcggaactgcaagtcagtggtgaaatctgagggctcaaccctcaaactgccattgaaactgtggttcttgagtgaagtagaggtaggcggaattcccggtgtagcggtggaatgcgtagagatcgggaggaacaccagtggcgaaggcggcctactgggctttaactgacgctgaggcacgaaagcatgggtagcaaacaggattagataccctggtagtccatgccgtaaacgatgattactaggtgtggggggtctgaccccctccgtgccggagttaacacaataagtaatccacctggggagtacggccgcaaggttgaaactcaaaggaattgacgggggcccgcacaagcagtggagtatgtggtttaattcgacgcaacgcgaagaaccttaccaggtcttgacatccaactaacgaggtagagatacgtcaggtgcccttcggggaaagttgagacaggtggtgcatggttgtcgtcagctcgtgtcgtgagatgttgggttaagtcccgcaacgagcgcaacccttgtgattagttgctacgaaagagcactctaatcagactgccgttgacaaaacggaggaaggtggggatgacgtcaaatcatcatgccctttatgacctgggctacacacgtactacaatggccgtaaacagagagaggcgacaccgcgaggtgaagcgaaaccctaaaaacggtctcagttcggattgtaggctgcaacccgcctacatgaagttggaattgctagtaatcgcggatcagcatgccgcggtgaatacgttcccgggccttgtacacaccgcccgtcacaccatgggagccggtaatacccgaagtcagtagtctaaccgcaaggggggcgctgccgaaggtaggattggcgactggggtgaagtcgtaacaaggtagccg

SEQ ID NO: 476 - DNA, 1477 bp, Artificial Sequence
  Synthetic polymer
gagagtttgatcctggctcaggatgaacgctggcggcgtgcctaacacatgcaagtcgagcgagaagctcatcacagatgcttcggttgaagtgatgagtggaaagcggcggacgggtgagtaacgcgtaggcaacctgccctttgcagagggatagcctcgggaaaccgggattaaaacctcatgacacctcttaaagacatctttgagaggtcaaagatttatcggcaaaggatgggcctgcgtctgattagctagttggtggggtaacggcctaccaaggcgacgatcagtagccgacctgagagggtgatcggccacattggaactgagacacggtccaaactcctacgggaggcagcagtggggaatattgcacaatgggggaaaccctgatgcagcaacgccgcgtgaaggaagaaggcctttgggtcgtaaacttctgttctaagggaagataatgacggtaccttaggagcaagtcccggctaactacgtgccagcagccgcggtaatacgtagggggcaagcgttatccggaattattgggcgtaaagagtacgtaggtggttacctaagcacgaggtataaggcaatggcttaaccattgttcgccttgtgaactgggctgcttgagtgcaggagaggaaagcggaattcctagtgtagcggtgaaatgcgtagatattaggaggaacaccagtggcgaaggcggctttctggactgtaaccgacactgaggtacgaaagcgtggggagcaaacaggattagataccctggtagtccacgccgtaaacgatgagcactaggtgtcggggtcgcaagacttcggtgccgcagttaacgcaataagtgctccgcctggggagtacgttcgcaagaatgaaactcaaaggaattgacggggacccgcacaagcagcggagcatgtggtttaattcgaagcaacgcgaagaaccttaccaggacttgacatccctctgacagccttttaatcgaggttttctacggacagaggagacaggtggtgcatggttgtcgtcagctcgtgtcgtgagatgttgggttaagtcccgcaacgagcgcaacccttgtcattagttgccagcagtaagatgggcactctagtgagactgccgtggataacacggaggaaggtggggatgacgtcaaatcatcatgccccttatgttctgggctacacacgtgctacaatggccggtacagagagaagcgagactgcgaagtggagcgaaactcaaaagccggtcccagttcggattgcaggctgcaactcgcctgcatgaagtcggagttgctagtaatcgcagatcagaatgctgcggtgaatgcgttcccgggtcttgtacacaccgcccgtcacaccatggaagttgggggcgcccgaagttggcagataaatatgttacctaaggcgaaatcaatgactggggtgaagtcgtaacaaggtagccg

SEQ ID NO: 477 - DNA, 1475 bp, Artificial Sequence
  Synthetic polymer
gagagtttgatcctggctcaggacgaacgctggcggcgcgcctaacacatgcaagtcgaacgagcgagagagagcttgctttcttgagcgagtggcggacgggtgagtaacgcgtgaggaacctgcctcaaagagggggacaacagttggaaacgactgctaataccgcataagcccacaggtcggcatcgaccagagggaaaaggagcaatccgctttgagatggcctcgcgtccgattagctagttggtgaggtaatggcccaccaaggcgacgatcggtagccggactgagaggttgaacggccacattgggactgagacacggcccagactcctacgggaggcagcagtggggaatattgcacaatgggggaaaccctgatgcagcgacgccgcgtggaggaagaaggtcttcggattgtaaactcctgttgttgaggaagataatgacggtactcaacaaggaagtgacggctaactacgtgccagcagccgcggtaaaacgtaggtcacaagcgttgtccggaattactgggtgtaaagggagcgcaggcgggaagacaagttggaagtgaaatctatgggctcaacccataaactgctttcaaaactgtttttcttgagtagtgcagaggtaggcggaattcccggtgtagcggtggaatgcgtagatatcgggaggaacaccagtggcgaaggcggcctactgggcaccaactgacgctgaggctcgaaagtgtgggtagcaaacaggattagataccctggtagtccacaccgtaaacgatgattactaggtgttggaggattgaccccttcagtgccgcagttaacacaataagtaatccacctggggagtacgaccgcaaggttgaaactcaaaggaattgatgggggcccgcacaagcagtggagtatgtggtttaattcgaagcaacgcgaagaaccttaccaggtcttgacatcctactaacgagatagagatatgttaggtccttcgggaagtagagacaggtggtgcatggttgtcgtcagctcgtgtcgtgagatgttgggttaagtcccgcaacgagcgcaacccttgctattagttgctacgcaagagcactctaataggactgccgttgacaaaacggaggaaggtggggacgacgtcaaatcatcatgccccttatgacctgggctacacacgtactacaatggacattaacagagggaagcaatacagcgatgtggagcaaacccctaaaaaatgttctcagttcagattgcaggctgcaacccgcctgtatgaagatggaattgctagtaatcgcagatcagcatgctgcggtgaatacgttcccgggccttgtacacaccgcccgtcacaccatgggagccggtaatacccgaagtcagtagtctaaccgcaaggaggacgctgccgaaggtaggattggcgactggggtgaagtcgtaacaaggtagccg

SEQ ID NO: 478 - DNA, 1487 bp, Artificial Sequence
  Synthetic polymer
agagtttgatcctggctcaggatgaacgctagcgacaggcttaacacatgcaagtcgaggggcatcggggagtagcaatactctgccggcgaccggcgcacgggtgagtaacgcgtatgtaacctgccttatacagggggatagcccatggaaacgtggattaatatcccatagtactgagagaccgcatggtttttcagttaaagcttcggtggtataagatggacatgcgtcctattaggtagttggtagggtaacggcctaccaagccaatgataggtaggggttctgagaggaaggtcccccacactggtactgagacacggaccagactcctacgggaggcagcagtgaggaatattggtcaatgggcggaagcctgaaccagccaagtcgcgtgaaggatgactgccctatgggttgtaaacttcttttgtaatgggagaataaggattacgtgtaatccgatggctgtactttacgaataagcatcggctaactccgtgccagcagccgcggtaatacggaggatgcgagcgttatccggatttattgggtttaaagggtgcgtaggcggttgtgtaagttagtggtcaaatgtcatggctcaaccttggcttgccattaaaactgcacgactcgagtacagacgaggtaggcggaataagttaagtagcggtgaaatgcatagatataacttagaactccgatagcgaaggcagcttaccagactgtaactgacgctgatgcacgagagcatgggtagcgaacaggattagataccctggtagtccatgccgtaaacgatgctcactggctctgtgcgacacattgtacggggtcaagcgaaagtattaagtgagccacctggggagtacgtcggcaacgatgaaactcaaaggaattgacgggggcccgcacaagcggaggaacatgtggtttaattcgatgatacgcgaggaaccttacctaggtttaaatgtagtctgcatgacgtagaaatatgtctttccttcgggaccgattacaaggtgctgcatggttgtcgtcagctcgtgccgtgaggtgtcgggttaagtcccataacgagcgcaacccctatctttagttgccatcaggtcaagctgggcactctaaagagactgccaccgtaaggtgagaggaaggcggggatgacgtcaaatcagcacggcccttacacctagggctacacacgtgttacaatggccggtacagagggcagctacttggtgacaagatgcgaatctcgaaagccggtcgtagttcggattggagtctgtaacccgactccatgaagttggattcgctagtaatcgcgcatcagccatggcgcggtgaatacgttcccgggccttgtacacaccgcccgtcaagccatggaagccgggggtgcctgaagtccgtaactgcaaggatcggcctagggcaaaactggtaactggggctaagtcgtaacaaggtagccg

SEQ ID NO: 479 - DNA, 1493 bp, Artificial Sequence
  Synthetic polymer
gagagtttgatcctggctcaggatgaacgctggcggcgtgcctaacacatgcaagtcgaacgaagcacttataacgattccttcgggagaagaaatatgtgactgagtggcggacgggtgagtaacgcgtgggtaacctgccttatacagggggataacagttggaaatgactgctaataccgcataagcgcacggtctcgcatgagatagtgtgaaaaactccggtggtataagatggacccgcgtctgattagctagttggtggggtaacggctcaccaaggcgacgatcagtagccgacctgagagggtgatcggccacattgggactgagacacggcccaaactcctacgggaggcagcagtggggaatattgcacaatgggggaaaccctgatgcagcaacgccgcgtgaaggaagaagtatctcggtatgtaaacttctatcagcagggaagaaaatgacggtacctgactaagaagctccggctaaatacgtgccagcagccgcggtaatacgtatggagcaagcgttatccggatttactgggtgtaaagggagcgtaggcggttatgcaagtccgatgtgaaagcccggggcttaaccccgggactgcattagaaactgtgtaactagagtgtcggagaggtaagtggaattcctagtgtagcggtgaaatgcgtagatattaggaggaacaccagtggcgaaggcggcttactggacgataactgacgctgaggctcgaaagcgtggggagcaaacaggattagataccctggtagtccacgccgtaaacgatgaatactaggtgttggggagcaaagctcttcggtgccgcagcaaacgcaataagtattccacctggggagtacgttcgcaagaatgaaactcaaaggaattgacggggacccgcacaagcggtggaacatgtggtttaattcgaagcaacgcgaagaaccttaccaagtcttgacatctggatgactggtgcgtaatggcacctttcctacgggacatccaagacaggtggtgcatggttgtcgtcagctcgtgtcgtgagatgttgggttaagtcccgcaacgagcgcaacccttatccttagtagccagcagtaagatgggaactctagggagactgccggagacaatccggaggaaggtggggatgacgtcaaatcatcatgccccttatgacttgggctacacacgtgctacaatggcgtaaacaaagggaagcgagaccgcgaggttaagcaaatctcaaaaataacgtctcagttcggattgtagtctgcaactcgactacatgaagctggaatcgctagtaatcgcgaatcagcatgtcgcggtgaatacgttcccgggtcttgtacacaccgcccgtcacaccatgggagtcgataacgcccgaagccggtgactcaaccgaaaggagagagccgtcgaaggcgggatggataactggggtgaagtcgtaacaaggtagccg

SEQ ID NO: 480 - DNA, 1352 bp, Artificial Sequence
  Synthetic polymer
gatgaacgctggcggcgtgcttaacacatgcaagtcgaacggagagcgtatgacagaggattcgtccaatggattacgtttcttagtggcggacgggtgagtaacgcgtgaggaacctgccttggagtggggaataacacagtgaaaattgtgctaataccgcatgaagcagttgggtcgcatggctctgactgccaaagatttatcgctctgagatggcctcgcgtctgattagctagttggtggggcaacggcccaccaaggcgacgatcagtagccggactgagaggttggccggccacattgggactgagacacggcccagactcctacgggaggcagcagtggggaatattgggcaatgggcgcaagcctgacccagcaacgccgcgtgaaggaagaaggccctcgggttgtaaacttcttttgtcagggacgaagcaagtgacggtacctgacgaataagccacggctaactacgtgccagcagccgcggtaatacgtaggtggcaagcgttatccggatttactgggtgtaaagggcgtgtaggcgggatggcaagtcagatgtgaaacccatgggctcaacccatggcctgcatttgaaactgtcgttcttgagtactggagaggcagacggaattcctagtgtagcggtgaaatgcgtagatattaggaggaacaccagtggcgaaggcggtctgctggacagcaactgacgctgaggcgcgaaagcgtggggagcaaacaggattagataccctggtagtccacgctgtaaacgatggatactaggtgtggggggactgaccccctccgtgccgcagttaacacaataagtatcccacctggggagtacgatcgcaaggttgaaactcaaaggaattgacgggggccagcacaagcggtggagtatgtggtttaattcgaagcaacgcgaagaaccttaccagggcttgacatcccggcaaccggactagagatagtcttttcccttcggggacgccggtgacaggtggtgcatggttgtcgtcagctcgtgtcgtgagatgttgggttaagtcccgcaacgagcgcaacccttattgttagttgctacgcaagagcactctagcgagactgccgttgacaaaacggaggaaggcggggacgacgtcaaatcatcatgccccttatgtcctgggccacacacgtactacaatggtggttaacagagggaggcaagactgcgaagtggagcaaatccctaaaagccatctcagttcggattgcaggctgcaacccgcctgcatgaagttggaatcgctagtaatcgcggatcagcatgccgcggtgaatacgttccctggcct

SEQ ID NO: 481 - DNA, 1474 bp, Artificial Sequence
  Synthetic polymer
gagagtttgatcctggctcaggacgaacgctggcggcgcgcctaacacatgcaagtcgaacgagagagaaggagcttgcttcttcgatcgagtggcgaacgggtgagtaacgcgtgaggaacctgcctcatacagggggatagcagttggaaacgactggtaaaaccgcataagcgcacggtgtcgcatgacacagtgtgaaaacactccggtggtattgagatggacccgcgtctgattagctagttggtgaggtaacggcccaccaaggcaacgatcagtagccggcctgagagggtgaacggccacattgggactgagacacggcccagactcctacgggaggcagcagtggggaatattgcacaatgggggaaaccctgatgcagcgacgccgcgtggaggaagaaggtcttcggattgtaaactcctgttgttgaggaagataatgacggtactcaacaaggaagtgacggctaactacgtgccagcagccgcggtaaaacgtaggtcacaagcgttgtccggaattactgggtgtaaagggagcgcaggcgggaagacaagttggaagtgaaatctatgggctcaacccataaactgctttcaaaactgtttttcttgagtagtgcagaggtaggcggaattcccggtgtagcggtggaatgcgtagatatcgggaggaacaccagtggcgaaggcggcctactgggcaccaactgacgctgaggctcgaaagtgtgggtagcaaacaggattagataccctggtagtccacaccgtaaacgatgattactaggtgttggaggattgaccccttcagtgccgcagttaacacaataagtaatccacctggggagtacgaccgcaaggtcgaaactcaaaggaattgacgggggcccgcacaagcagtggagtatgtggtttaattcgacgcaacgcgaagaaccttaccaagtcttgacatcctgcgacatgcatagaaatatgtatttccttcgggacgcagagacaggtggtgcatggttgtcgtcagctcgtgtcgtgagatgttgggttaagtcccgcaacgagcgcaacccttactgtcagttactacgcaagaggactctggcaggactgccgttgacaaaacggaggaaggtggggatgacgtcaaatcatcatgccctttatgacttgggctacacacgtactacaatggcgttaaacaaagagaagcaagaccgcgaggtggagcaaaactcagaaacaacgtcccagttcggactgcaggctgcaactcgcctgcacgaagtcggaattgctagtaatcgtggatcagcatgccacggtgaatacgttcccgggccttgtacacaccgcccgtcacaccatgagagccggggggacccgaagtcggtagtctaaccgcaaggaggacgccgccgaaggtaaaactggtgattggggtgaagtcgtaacaaggtagccg

SEQ ID NO: 482 - DNA, 1483 bp, Artificial Sequence
  Synthetic polymer
gagagtttgatcctggctcaggacgaacgctggcggcgtgcctaacacatgcaagtcgaacggactgatcttggtgcttgcaccgggagaaagttagtggcggacgggtgagtaacgcgtgagtaacctgcctttcagagggggataacgttttgaaaagaacgctaataccgcatgaaatcaaggaaccgcatggctttttgatcaaaggagcaatccgctgagagatggactcgcgtccgattagccagttggcggggtaacggcccaccaaagcgacgatcggtagccggactgagaggttgaacggccacattgggactgagacacggcccagactcctacgggaggcagcagtgggggatattgcacaatgggggaaaccctgatgcagcaacgccgcgtgagggaagacggttttcggattgtaaacctctgtccttggtgacgataatgacggtagccaaggaggaagctccggctaactacgtgccagcagccgcggtaatacgtagggagcaagcgttgtccggatttactgggtgtaaagggtgcgtaggcggattggcaagtcagtagtgaaatccatgggcttaacccatgacgtgctattgaaactgttgatcttgagtgaagtagaggtaagcggaattcccggtgtagcggtgaaatgcgtagagatcgggaggaacaccagtggcgaaggcggcttactgggctttaactgacgctgaggcacgaaagcatgggtagcaaacaggattagataccctggtagtccatgccgtaaacgatgattactaggtgtggggggactgaccccttccgtgccggagttaacacaataagtaatccacctggggagtacggccgcaaggttgaaactcaaaggaattgacgggggcccgcacaagcagtggagtatgtggtttaattcgaagcaacgcgaagaaccttaccaggtcttgacatccaactaacgagatagagatatgttaggtgcccttcggggaaagttgagacaggtggtgcatggttgtcgtcagctcgtgtcgtgagatgttgggttaagtcccgcaacgagcgcaacccttgtgattagttgctacgcaagagcactctaatcagactgccgttgacaaaacggaggaaggtggggacgacgtcaaatcatcatgccctttatgacctgggctacacacgtactacaatggccgctaacagagggaagcaatactgcgaagtggagcaaaaccctaaaagcggtcccagttcggatcgcaggctgaaacccgcctgcgtgaagttggaattgctagtaatcgcggatcagcatgccgcggtgaatacgttcccgggccttgtacacaccgcccgtcacaccatgggagccggtaatacccgaagtcagtagtctaaccgcaagggggacgctgccgaaggtaggattggcgactggggtgaagtcgtaacaaggtagccg

SEQ ID NO: 483 - DNA, 1491 bp, Artificial Sequence
  Synthetic polymer
gagtttgatcctggctcaggatgaacgctggcggcgtgcttaacacatgcaagtcgaacggagtgctcttgacagaggattcgtccaatggatagagttacttagtggcggacgggtgagtaacgcgtgaggaacctgcctttgagtggggaataacagttggaaacaattgctaataccgcataaagcagctgggccgcatggctcaggctgccaaagatttatcgctcttagatggcctcgcgtctgattagctggttggtgaggtaacggcccaccaaggcgacgatcagtagccggactgagaggttggccggccacattgggactgagacacggcccagactcctacgggaggcagcagtggggaatattgggcaatgggcgcaagcctgacccagcaacgccgcgtgaaggaagaaggctttcgggttgtaaacttcttttatcagggacgaatagatgacggtacctgatgaataagccacggctaactacgtgccagcagccgcggtaatacgtaggtggcaagcgttatccggatttactgggtgtaaagggcgtgtaggcgggactgcaagtcagatgtgaaaaccagaggctcaacctctggcctgcatttgaaactgtagttcttgagtactggagaggcagacggaattcctagtgtagcggtgaaatgcgtagatattaggaggaacaccagtggcgaaggcggtctgctggacagcaactgacgctgaggcgcgaaagcgtggggagcaaacaggattagataccctggtagtccacgctgtaaacgatggatactagggtgtgggggggtctgaccccctccgtgccgcagttaacacaataagtatcccacctggggagtacgatcgcaaggttgaaactcaaaggaattgacgggggcccgcacaagcggtggagtatgtggtttaattcgaagcaacgcgaagaaccttaccagggcttgacatggagaggaccgggctagagatagttctttcccttcggggacctctcacacaggtggtgcatggttgtcgtcagctcgtgtcgtgagatgttgggttaagtcccgcaacgagcgcaacccttattgttagttgctacgcaagagcactctagcgagactgcagttgacaaaacggaggaaggtggggacgacgtcaaatcatcatgccccttatgtcctgggccacacacgtactacaatggtggtcaacagagggaagcaaaaccgcgaggtggagcaaatccctaaaagccatcccagttcggattgcaggctgcaactcgcctgtatgaagttggaatcgctagtaatcgcggatcagcatgccgcggtgaatacgttcccgggccttgtacacaccgcccgtcacaccatgagagtcgggaacacccgaagtccgtagcctaacagcaatgggggcgcggccgaaggtgggttcgataattggggtgaagtcgtaacaatgtaac

SEQ ID NO: 484 - DNA, 1497 bp, Artificial Sequence
  Synthetic polymer
gagagtttgatcctggctcaggatgaacgctggcggcgtgcttaacacatgcaagtcgaacgaagcatttaagacggattctttcgggatgaagacttttatgactgagtggcggacgggtgagtaacgcgtgggtaacctgcctcacacagggggatagcagttggaaacggctgataataccgcataagcgcacagtaccgcatggtacagtgtgaaaaactccggtggtgtgagatggacccgcgtctgattagcttgttggcagggtaacggcctaccaaggcaacgatcagtagccgacctgagagggtgaccggccacattgggactgagacacggcccagactcctacgggaggcagcagtggggaatattgcacaatggaggaaactctgatgcagcgacgccgcgtgagtgaagaagtaattcgttatgtaaagctctatcagcagggaagatagtgacggtacctgactaagaagctccggctaaatacgtgccagcagccgcggtaatacgtgtggagcaagcgttatccggatttactgggtgtaaagggagtgtaggtggcatcacaagtcagaagtgaaagcccggggctcaaccccgggactgcttttgaaactgtggagctggagtgcaggagaggcaagtggaattcctagtgtagcggtgaaatgcgtagatattaggaggaacaccagtggcgaaggcggcttgctggactgtaactgacactgaggctcgaaagcgtggggagcaaacaggattagataccctggtagtccacgccgtaaacgatgaattctaggtgtcggggagcacaagctcttcggtgccgccgcaaacgcaataagtattccacctggggagtacgttcgcaagaatgaaactcaaaggaattgacggggacccgcacaagcggtggagcatgtggtttaattcgaagcaacgcgaagaaccttaccaaatcttgacatcccgatgaccgttccgtaatgggaacttcccttcggggcatcggtgacaggtggtgcatggttgtcgtcagctcgtgtcgtgagatgttgggttaagtcccgcaacgagcgcaacccttaccttcagtagccagcagttcggctgggcactctggagggactgccagggataacctggaggaaggtggggatgacgtcaaatcatcatgccccttatgatttgggctacacacgtgctacaatggcgtaaacaaagggaagcgagcctgcgagggtaagcaaatctcaaaaataacgtctcagttcggattgtagtctgcaactcgactacatgaagctggaatcgctagtaatcgcgaatcagaatgtcgcggtgaatacgttcccgggtcttgtacacaccgcccgtcacaccatgggagttggtaacgcccgaagtcagtgacctaaccgtaaggaaggagctgccgaaggcgggactgataactggggtgaagtcgtaacaaggtagccg

SEQ ID NO: 485 - DNA, 1475 bp, Artificial Sequence
  Synthetic polymer
gagagtttgatcctggctcaggacgaacgctggcggcacgcttaacacatgcaagtcgaacgagagaagaggagcttgcttttctgatctagtggcggacgggtgagtaacacgtgagcaatctgcctttcagagggggataccgattggaaacgatcgttaataccgcataacataattgaaccgcatgatttgattatcaaagatttatcgctgaaagatgagctcgcgtctgattagctagttggtaaggtaacggcttaccaaggcgacgatcagtagccggactgagaggttgatcggccacattgggactgagacacggcccagactcctacgggaggcagcagtggggaatattgcacaatggaggaaactctgatgcagcgatgccgcgtgagggaagaaggttttaggattgtaaacctctgtcttcagggacgaaaaaagacggtacctgaggaggaagctccggctaactacgtgccagcagccgcggtaatacgtagggagcgagcgttgtccggaattactgggtgtaaagggagcgtaggcgggatcgcaagtcagatgtgaaaactatgggcttaacccataaactgcatttgaaactgtggttcttgagtgaagtagaggtaagcggaattcctagtgtagcggtgaaatgcgtagatattaggaggaacatcagtggcgaaggcggcttactgggctttaactgacgctgaggctcgaaagcgtggggagcaaacaggattagataccctggtagtccacgccgtaaacgatgattactaggtgtggggggactgaccccttccgtgccgcagcaaacgcaataagtaatccacctggggagtacgaccgcaaggttgaaactcaaaggaattgacgggggcccgcacaagcagtggagtatgtggattaattcgaagcaacgcgaagaaccttaccaggtcttgacatcgtatgcatagctcagagatgagtgaaatctcttcggagacatatagacaggtggtgcatggttgtcgtcagctcgtgtcgtgagatgttgggttaagtcccgcaacgagcgcaacccttactgttagttgctacgcaagagcactctagcaggactgccgttgacaaaacggaggaaggtggggatgacgtcaaatcatcatgccccttatgacctgggcctcacacgtactacaatggctgtaaacagagggatgcaaagccgcgaggtggagcgaacccctaaaagcagtcttagttcggattgtaggctgcaacccgcctacatgaagtcggaattgctagtaatcgcagatcagcatgctgcggtgaatacgttcccgggccttgtacacaccgcccgtcacgccatgggagtcggtaacacccgaagcctgtagtctaaccgcaaggaggacgcagtcgaaggtgggattgatgactggggtgaagtcgtaacaaggtagccg

SEQ ID NO: 486 - DNA, 1494 bp, Artificial Sequence
  Synthetic polymer
agagtttgatcctggctcaggatgaacgctggcggcgtgcttaacacatgcaagtcgaacggagtgctcatgacggagttttcggacaacggattgggttacttagtggcggacgggtgagtaacgcgtgaggaacctgcctcggagtggggaataacacaccgaaaggtgtgctaataccgcataatgcagttgggtcgcatgactctgactgccaaagatttatcgctctgagatggcctcgcgtctgattagctagtaggcggggtaacggcccacctaggcgacgatcagtagccggactgagaggttgaccggccacattgggactgagacacggcccagactcctacgggaggcagcagtggggaatattgggcaatgggcgcaagcctgacccagcaacgccgcgtgaaggaagaaggctttcgggttgtaaacttcttttgtcagggacgaaacaaatgacggtacctgacgaataagccacggctaactacgtgccagcagccgcggtaatacgtaggtggcaagcgttatccggatttactgggtgtaaagggcgtgtaggcgggactgcaagtcaggtgtgaaaaccaggggctcaacctctggcctgcatttgaaactgtagttcttgagtgctggagaggcaatcggaattccgtgtgtagcggtgaaatgcgtagatatacggaggaacaccagtggcgaaggcggattgctggacagtaactgacgctgaggcgcgaaagcgtggggagcaaacaggattagataccctggtagtccacgccgtaaacgatggatactaggtgtggggggactgaccccctccgtgccgcagttaacacaataagtatcccacctggggagtacgatcgcaaggttgaaactcaaaggaattgacgggggcccgcacaagcggtggagtatgtggtttaattcgaagcaacgcgaagaaccttaccagggcttgacatcctactaacgaagcagagatgcataaggtgcccttcggggaaagtagagacaggtggtgcatggttgtcgtcagctcgtgtcgtgagatgttgggttaagtcccgcaacgagcgcaacccctattgttagttgctacgcaagagcactctagcgagactgccgttgacaaaacggaggaaggtggggacgacgtcaaatcatcatgccccttatgtcctgggccacacacgtactacaatggtggtaaacagagggaagcaagaccgcgaggtggagcaaatccctaaaagccatcccagttcggattgcaggctgaaacccgcctgtatgaagttggaatcgctagtaatcgcggatcagcatgccgcggtgaatacgttcccgggccttgtacacaccgcccgtcacaccatgagagtcgggaacacccgaagtccgtagcctaaccgcaaggagggcgcggccgaaggtgggttcgataattggggtgaagtcgtaacaaggtagccg

SEQ ID NO: 487 - DNA, 1494 bp, Artificial Sequence
  Synthetic polymer
gagagtttgatcctggctcaggatgaacgctggcggcgtgcttaacacatgcaagtcgaacgaagcactttatttgatttccttcgggactgattattttgtgactgagtggcggacgggtgagtaacgcgtgggtaacctgccttgtacagggggataacagttggaaacggctgctaataccgcataagcgcacagcatcgcatgatgcagtgtgaaaaactccggtggtataagatggacccgcgttggattagctagttggtgaggtaacggcccaccaaggcgacgatccatagccgacctgagagggtgaccggccacattgggactgagacacggcccaaactcctacgggaggcagcagtggggaatattgcacaatgggcgaaagcctgatgcagcgacgccgcgtgagcgaagaagtatttcggtatgtaaagctctatcagcagggaagataatgacggtacctgactaagaagctccggctaaatacgtgccagcagccgcggtaatacgtatggagcaagcgttatccggatttactgggtgtaaagggagtgtaggtggccatgcaagtcagaagtgaaaatccggggctcaaccccggaactgcttttgaaactgtgaggctagagtgcaggaggggtgagtggaattcctagtgtagcggtgaaatgcgtagatattaggaggaacaccagtggcgaaggcggctcactggactgtaactgacactgaggctcgaaagcgtggggagcaaacaggattagataccctggtagtccacgccgtaaacgatgaatactaggtgtcggggcccaaaagggcttcggtgccgcagcaaacgcaataagtattccacctggggagtacgttcgcaagaatgaaactcaaaggaattgacggggacccgcacaagcggtggagcatgtggtttaattcgaagcaacgcgaagaaccttaccaagtcttgacatcccactgaccggacagtaatgtgtcctttccttcgggacagtggtgacaggtggtgcatggttgtcgtcagctcgtgtcgtgagatgttgggttgagtcccgcaacgagcgcaacccctatccttagtagccagcagtaagatgggcactctagggagactgccagggataacctggaggaaggtggggatgacgtcaaatcatcatgccccttatgacttgggctacacacgtgctacaatggcgtaaacaaagtgaagcgaagtcgtgaggccaagcaaatcacaaaaataacgtctcagttcggattgtagtctgcaactcgactacatgaagctggaatcgctagtaatcgcagatcagaatgctgcggtgaatacgttcccgggtcttgtacacaccgcccgtcacaccatgggagtcgaaaatgcccgaagtcggtgacctaacgcaagaaggagccgccgaaggcaggtttgataactggggtgaagtcgtaacaaggtagccg

SEQ ID NO: 488 - DNA, 1490 bp, Artificial Sequence
  Synthetic polymer
gagagtttgatcctggctcaggatgaacgctagcggcaggcctaacacatgcaagtcgaggggcagcgggattgaagcttgcttcatcgccggcgaccggcgcacgggtgcgtaacgcgtatgcaacctacccagaacagggggataacactgagaaattggtactaatatcccataacatcataaggggcatcccttttggttgaaaactccggtggttctggatgggcatgcgttgtattagctagttggtgaggtaacggctcaccaaggcaacgatacatagggggactgagaggttaaccccccacattggtactgagacacggaccaaactcctacgggaggcagcagtgaggaatattggtcaatggacgcaagtctgaaccagccatgccgcgtgcaggaagacggctctatgagttgtaaactgcttttgtactagggtaaactcagatacgcgtatctgactgagagtatagtacgaataaggaccggctaactccgtgccagcagccgcggtaatacggagggtccaagcgttattcggatttattgggtttaaagggtgcgtaggcggttagataagttagaggtgaaataccagtgcttaacaccggaactgcctctaatactgtttagctagagaatagttgcggtaggcggaatgtatggtgtagcggtgaaatgcttagagatcatacagaacaccgattgcgaaggcagcttaccaagctatttctgacgttgaggcacgaaagcgtggggagcaaacaggattagataccctggtagtccacgcagtaaacgatgataactcgctgtcggcgatacacagtcggcggctaagcgaaagcgataagttatccacctggggagtacgttcgcaagaatgaaactcaaaggaattgacgggggcccgcacaagcggaggaacatgtggtttaattcgatgatacgcgaggaaccttacccgggcttgaaagttactgacgattctggaaacaggatttcccttcggggcaggaaactaggtgctgcatggttgtcgtcagctcgtgccgtgaggtgtcgggttaagtcccataacgagcgcaacccctaccgttagttgccatcaggtcaagctgggcactctgacgggactgccggtgtaagccgagaggaaggtggggatgacgtcaaatcagcacggcccttacgtccggggctacacacgtgttacaatggtaggtacagagggcagctaccctgcgaagggatgcgaatctcgaaagcctatctcagttcggatcggaggctgaaacccgcctccgtgaagttggattcgctagtaatcgcgcatcagccatggcgcggtgaatacgttcccgggccttgtacacaccgcccgtcaagccatggaagctgggggtgtctgaagttcgtgaccgcaaggagcgacctagggcaaaaccggtgactggggctaagtcgtaacaaggtagccg

SEQ ID NO: 489 - DNA, 1492 bp, Artificial Sequence
  Synthetic polymer
gagagtttgatcctggctcaggataaacgctagcggcaggcctaacacatgcaagtcgaggggcagcggaagaagtagcttgctacttctgccggcgaccggcgcacgggtgcgtaacgcgtatgcaacctacctttaacagggggataatccgaagaaatttggtctaataccccataatatttcagaaggcatcttttgaggttgaaaactccggtggttaaagatgggcatgcgttgtattagctagatggtgaggtaacggctcaccattgcgatgatacatagggggactgagaggtttcccccccacactggtactgagacacggaccagactcctacgggaggcagcagtgaggaatattggtcaatggacgcaagtctgaaccagccatgccgcgtgcaggatgaaggtgctatgcattgtaaactgcttttgtacgagggtaaattcagatacgtgtatctgtttgaaagtatcgtacgaataaggatcggctaactccgtgccagcagccgcggtaatacggaggatccgagcgttatccggatttattgggtttaaagggtgcgtaggcggtttgataagttagaggtgaaagctcgatgctcaacatcgaaattgcctctgatactgtcagactagagtgtagttgcggaaggcggaatgtgtggtgtagcggtgaaatgcttagatatcacacagaacaccgattgcgaaggcagctttccaagctattactgacgctgaggcacgaaagcgtgggtagcgaacaggattagataccctggtagtccacgccgtaaacgatgataactcgttgccggcgatatagtgtcggtgactaagcgaaagcgataagttatccacctggggagtacgttcgcaagaatgaaactcaaaggaattgacgggggcccgcacaagcggaggaacatgtggtttaattcgatgatacgcgaggaaccttacccgggcttgaaagttagcgacggatcctgaaaggggtcttctcttcggagcgcgaaactaggtgctgcatggttgtcgtcagctcgtgccgtgaggtgtcgggttaagtcccataacgagcgcaacccctactgttagttgccagcatgtcaagatgggcactctagcaggactgccggtgtaagccgagaggaaggtggggatgacgtcaaatcagcacggcccttacgtccggggcgacacacgtgttacaatggtcggtacagagggtagctacctggtgacaggatgccaatctcgaaagccgatctcagttcggattggaggctgaaactcgcctccatgaagttggattcgctagtaatcgcgcatcagccatggcgcggtgaatacgttcccgggccttgtacacaccgcccgtcaagccatgggagttgggggtgcctgaagtacgtgaccgcaaggagcgtcctagggcaaaaccgatgactggggctaagtcgtaacaaggtagccg

SEQ ID NO: 490 - DNA, 1478 bp, Artificial Sequence
  Synthetic polymer
agagtttgatcctggctcaggatgaacgctggcggcgtgcctaacacatgcaagtcgagcgagaagtcatggatggaatcttcggaggaaagaaatgatggaaagcggcggacgggtgagtaacgcgtaggtaacctgccccatacagagggatagccactggaaacggtgattaatacctcatgacactttctcttcgcatggagaggaggtcaaagatttatcggtatgggatggacctgcgtctgattagcttgttggtggggtaacggcctaccaaggcgacgatcagtagccgacctgagagggtgatcggccacattggaactgagacacggtccaaactcctacgggaggcagcagtggggaatattgcacaatgggggaaaccctgatgcagcaacgccgcgtgaaggaagaaggcctttgggtcgtaaacttctgttctgagggaagaagaaagtgacggtacctcaggagaaagccccggctaactacgtgccagcagccgcggtaatacgtagggggcaagcgttgtccggaattattgggcgtaaagagtacgtaggcggtttgctaagcgcaaggtgaaaggcagtggcttaaccattgtaagccttgcgaactgacagacttgagtgcaggagaggaaagcggaattcctagtgtagcggtgaaatgcgtagatattaggaggaacaccggtggcgaaggcggctttctggactgtaactgacgctgaggtacgaaagcgtggggagcaaacaggattagataccctggtagtccacgccgtaaacgatgagcactaggtgtcgggatcgtaggatttcggtgccgcagttaacgcattaagtgctccgcctggggagtacgcacgcaagtgtgaaactcaaaggaattgacggggacccgcacaagcagcggagcatgtggtttaattcgaagcaacgcgaagaaccttaccaggacttgacatccctctgacagagccttaaccggctccttcttcggacagaggagacaggtggtgcatggttgtcgtcagctcgtgtcgtgagatgttgggttaagtcccgcaacgagcgcaacccttgtcattagttactaacattaagttgaggactctaatgagactgccggggacaactcggaggaaggtggggatgacgtcaaatcatcatgccccttatgttctgggctacacacgtgctacaatggccggtacaaagagaagcaagaccgcgaggtggagcgaaactcaaaaaccggtcccagttcggactgcaggctgcagctcgcctgcacgaagttggagttgctagtaatcgcggatcagaatgccgcggtgaatgcgttcccgggccttgtacacaccgcccgtcacaccatggaagttgggggcgcccgaagttggtcgagaaatagattacctaaggcgaaaccaatgactggggtgaagtcgtaacaaggtagcc

SEQ ID NO: 491 - DNA, 1496 bp, Artificial Sequence
  Synthetic polymer
gagagtttgatcctggctcagattgaacgctggcggcatgccttacacatgcaagtcgaacggcagcgggggagcttgctcctgccggcgagtggcgaacgggtgagtaatgcatcggaacgtgtcctgttgtgggggataactgatcgaaagatcagctaataccgcatgagacctgagggtgaaagcgggggatcgaaagacctcgcgcgacaggagcggccgatgtctgattagctagttggtgagataaaagcttaccaaggcgacgatcagtagctggtctgagaggatgatcagccacattgggactgagacacggcccagactcctacgggaggcagcagtggggaattttggacaatgggggaaaccctgatccagccatgccgcgtgcgggatgaaggccttcgggttgtaaaccgcttttgtcagagacgaaaagggacgtacgaataatgcgtcccgctgacggtatctgaagaataagcaccggctaactacgtgccagcagccgcggtaatacgtagggtgcaagcgttaatcggaattactgggcgtaaagggtgcgcaggcggctgtgcaagacagatgtgaaatccccgggcttaacctgggaactgcatttgtgactgcacggctagagtttgtcagaggagggtggaattccgcgtgtagcagtgaaatgcgtagatatgcggaagaacaccaatggcgaaggcagccctctgggacatgactgacgctcatgcacgaaagcgtggggagcaaacaggattagataccctggtagtccacgccctaaacgatgtcagctgattgttcgggaagcaattcctgggtaaccaagccaacgcgtgaagctgaccgcctgggaagtacggtcgcaagattaaaactcaaaggaattgacggggacccgcacaagcggtggatgatgtggattaattcgacgcaacgcgaaaaaccttacctagccttgacatgtcaggaatccggatgaaagtctggagtgcccgcaagggagcctgaacacaggtgctgcatggctgtcgtcagctcgtgtcgtgagatgttgggttaagtcccgcaacgagcgcaacccttgtcatcagttgctacgcaagagcactctgatgagaccgccggtgacaaaccggaggaagatggggatgacgtcaagtcctcatggcccttacggctagggcctcacacgtcatacaatggtcggaacagagggcagcgaagccgggaggcggagctaatcccagaaaaccgatcgtagtccggattgcagtctgcaactcgaccgcatgaagtcggaatcgctagtaatcgcggatcagcatgccgcggtgaatacgttcccgggtcttgtacacaccgcccgtcacaccatgagagtcgggaacacccgaagtccgtagcctaacagcaatgggggcgcggccgaaggtgggttcgataattggggtgaagtcgtaacaaggtagccg

SEQ ID NO: 492 - DNA, 1522 bp, Artificial Sequence
  Synthetic polymer
gagagtttgatcctggctcaggacgaacgctggcggcgtgcctaacacatgcaagtcgaacggagaattttatttcggtagaattcttagtggcgaacgggtgagtaacgcgtaggcaacctgccctttagacggggacaacattccgaaaggagtgctaataccggatgtgatcatcttgccgcatggcaggatgaagaaagatggcctctacaagtaagctatcgctaaaggatgggcctgcgtctgattagctagttggtagtgtaacggactaccaaggcgatgatcagtagccggtctgagaggatgaacggccacattgggactgagacacggcccaaactcctacgggaggcagcagtggggaatcttccgcaatggacgaaagtctgacggagcaacgccgcgtgaacgatgaaggtcttcggattgtaaagttctgtgatccgggacgaaggcatcaattgagaatattgattgatgttgacggtaccggaaaagcaagccacggctaactacgtgccagcagccgcggtaatacgtaggtggcaagcgttgtccggaattattgggcgtaaagcgcgcgcaggcggccgtgcaagtccatcttaaaagcgtggggcttaaccccatgaggggatggaaactgcagggctggagtgtcggaggggaaagtggaattcctagtgtagcggtgaaatgcgtagagattaggaagaacaccggtggcgaaggcgactttctagacgacaactgacgctgaggcgcgaaagcgtggggagcaaacaggattagataccctggtagtccacgccgtaacgatggatactaggtgtaggaggtatcgaccccttctgtgccggagttaacgcaataagtatcccgcctgggaagtacgatcgcaagattaaaactcaaaggaattgacgggggcccgcacaagcggtggagtatgtggtttaattcgacgcaacgcgaagaaccttaccaagccttgacattgatcgcaatctgcagaaatgcggagttcctcttcggaggacgagaaaacaggtggtgcacggctgtcgtcagctcgtgtcgtgagatgttgggttaagtcccgcaacgagcgcaacccctatcttctgttgccagcacgtaaaggtgggaactcaggagagaccgccgcggacaacgcggaggaaggcggggatgacgtcaagtcatcatgccccttatggcttgggctacacacgtactacaatgggtgcaaacaaagagaagcgaagtcgcgagacggagcggacctcataaacgcactcccagttcagattgcaggctgcaacccgcctgcatgaagtaggaatcgctagtaatcgcgggtcagcataccgcggtgaatacgttcccgggccttgtacacaccgcccgtcacactatgagagtcagagacacccaaagccggtgggataaccgaaagggatcagccgtctaaggtggagctgatgattggagtgaagtcgtaacaaggtagccg

SEQ ID NO: 493 - DNA, 1477 bp, Artificial Sequence
  Synthetic polymer
gagagtttgatcctggctcaggatgaacgctggcggcgtgcctaacacatgcaagtcgagcgagaagctttgaactgacgcttcggttgatgatcaaagtggaaagcggcggacgggtgagtaacgcgtaggcaacctgccctttgcagagggatagcctcgggaaaccgggattaaaacctcataacgcacaaccgggacatcttggatgtgccaaagatttatcggcagaggatgggcctgcgtctgattagttagttggtggggtaacggcctaccaaggcgacgatcagtagccgacctgagagggtgatcggccacattggaactgagacacggtccaaactcctacgggaggcagcagtggggaatattgcacaatgggggaaaccctgatgcagcaacgccgcgtgaaggatgaaggcccttgggtcgtaaacttctgttctaggggaagatagtgacggtaccttaggagcaagtcccggctaactacgtgccagcagccgcggtaatacgtagggggcaagcgttatccggaattattgggcgtaaagagtacgtaggtggttacctaagcaaggggtttaaggcaatggcctaactattgttcgccccttgaactgggctacttgagtgcaggagaggaaagcggaattcctagtgtagcggtgaaatgcgtagatattaggaggaacaccagtggcgaaggcggctttctggactgtaactgacactgaggtacgaaagcgtggggagcaaacaggattagataccctggtagtccacgccgtaaacgatgagcactaggtgtcggggtcgcaagacttcggtgccgcagttaacgcaataagtgctccgcctggggagtacgttcgcaagaatgaaactcaaaggaattgacggggacccgcacaagcagcggagcatgtggtttaattcgaagcaacgcgaagaaccttaccagggcttgacatcttcctgacagacccttaaacgggtccttcttcggacaggaaagacaggtggtgcatggttgtcgtcagctcgtgtcgtgagatgttgggttaagtcccgcaacgagcgcaacccttgctgttagttgccatcattaagttgggcactctaacgggactgccggggataactcggaggaaggtggggatgacgtcaaatcatcatgccccttatgttctgggctacacacgtgctacaatggccggtacaaagagaagcgagaccgcgaggtggagcgaatctcaaaagccggtcccagttcggattgcaggctgcaactcgcctgcatgaagtcggagttgctagtaatcgcgaatcagaatgtcgcggtgaatgcgttcccgggtcttgtacacaccgcccgtcacaccatggaagttgggggcgcccgaagttggcaggcaaatatgttacctaaggcgaaaccaatgactggggtgaagtcgtaacaaggtagccg

SEQ ID NO: 494 - DNA, 1491 bp, Artificial Sequence
  Synthetic polymer
gagagtttgatcctggctcaggataaacgctagcggcaggcctaacacatgcaagtcgaggggcagcagggaagtagcttgctacttctgctggcgaccggcgcacgggtgcgtaacgcgtatgcaacctacctttaacagggggataatccgaagaaatttggtctaataccccataatattgattaaggcatcttgatcagttgaaagttccgacggttaaagatgggcatgcgttgtattagctagttggtgaggtaacggctcaccaaggcgacgatacatagggggactgagaggttttccccccacactggtactgagacacggaccagactcctacgggaggcagcagtgaggaatattggtcaatggacgcaagtctgaaccagccatgccgcgtgcaggatgaatgtgctatgcattgtaaactgcttttgtacgagggtaaaaacaggtacgtgtacctggttgaaagtatcgtacgaataagggtcggctaactccgtgccagcagccgcggtaatacggaggacccgagcgttatccggatttattgggtttaaagggtgcgtaggcggattggtaagttagaggtgaaagctcagcgcttaacgttgaaactgcctctgatactgtcggtctagagtatagttgcggaaggcggaatgtgtggtgtagcggtgaaatgcttagatatcacacagaacaccgattgcgaaggcagctttccaagctatcactgacgctgaggcacgaaagcgtggggagcgaacaggattagataccctggtagtccacgccgtaaacgatgataactcgctgcaggcgatacacagtctgtgacttagcgaaagcgttaagttatccacctggggagtacgttcgcaagaatgaaactcaaaggaattgacgggggcccgcacaagcggaggaacatgtggtttaattcgatgatacgcgaggaaccttacccgggcttgaaagttagcgacggatcctgaaaggggtcttctcttcggagcgcgaaactaggtgctgcatggttgtcgtcagctcgtgccgtgaggtgtcgggttaagtcccataacgagcgcaacccctactgttagttaccagcacgtcatggtgggcactctagcaggactgccggtgtaagccgagaggaaggtggggatgacgtcaaatcagcacggcccttacgtccggggcgacacacgtgttacaatggtcggtacagagggtcgctaccctgtgaagggatgccaatctcgaaagccgatctcagttcggattggaggctgaaactcgcctccatgaagttggattcgctagtaatcgcgcatcagccatggcgcggtgaatacgttcccgggccttgtacacaccgcccgtcaagccatgggagttgggggtgcctgaagtacgtgaccgcaaggagcgtcctagggcaaaactgatgactggggctaagtcgtaacaaggtagccg

SEQ ID NO: 495 - DNA, 1492 bp, Artificial Sequence
  Synthetic polymer
gagagtttgatcctggctcaggataaacgctagcggcaggcctaacacatgcaagtcgaggggcatcggatagagtagcttggtactcttgccggcgaccggcggacgggtgcgtaacgcgtatgcaacctaccttcaacagggggataatccgaagaaatttggtctaataccccataatattccgacaggcatctgttggagttgaaagcttcggtggttggagatgggcatgcgttgtattagctagatggtgaggtaacggctcaccatggcgatgatacatagggggactgagaggttttccccccacactggtactgagacacggaccagactcctacgggaggcagcagtgaggaatattggtcaatggacggaagtctgaaccagccatgccgcgtgcaggatgaatgtgctatgcattgtaaactgcttttgtacgagggtaaacacagatacgcgtatctgcttgaaagtatcgtacgaataaggatcggctaactccgtgccagcagccgcggtaatacggaggatccgagcgttatccggatttattgggtttaaagggtgcgtaggctgttttttaagttagaggtgaaagctcgacgctcaacgtcgaaattgcctctgatactgagagactggagtgtagttgcggaaggcggaatgtgtggtgtagcggtgaaatgcttagatatcacacagaacaccgattgcgaaggcagctttccaagctattactgacgctgaggcacgaaagcgtggggagcgaacaggattagataccctggtagtccacgcagtaaacgatgataactcgttgccggcgatacacagtcggtgacttagcgaaagcgttaagttatccacctggggagtacgttcgcaagaatgaaactcaaaggaattgacgggggcccgcacaagcggaggaacatgtggtttaattcgatgatacgcgaggaaccttacccgggcttgaaagttagcgacggaccgagaaatcggtcttcccttcggggcgcgaaactaggtgctgcatggttgtcgtcagctcgtgccgtgaggtgtcgggttaagtcccataacgagcgcaacccctaccgttagttgccatcaggtcaagctgggcactctagcgggactgccggtgtaagccgagaggaaggtggggatgacgtcaaatcagcacggcccttacgtccggggcgacacacgtgttacaatggccggtacagagggtagctacctggtgacaggatgccaatctcgaaagccggtctcagttcggattggaggctgaaactcgcctccatgaagttggattcgctagtaatcgcgcatcagccatggcgcggtgaatacgttcccgggccttgtacacaccgcccgtcaagccatgggagttgggggtgcctgaagtacgtgaccgcaaggagcgtcctagggcaaaaccgatgactggggctaagtcgtaacaaggtagccg

SEQ ID NO: 496 - DNA, 1492 bp, Artificial Sequence
  Synthetic polymer
gagagtttgatcctggctcaggacgaacgctggcggcgtgcttaatacatgcaagtcgaacgaagctgcatataggaagccttcgggtggaatagatgtagacttagtggcggacgggtgagtaacgcgtgagcaacctgcccataagagggggacaacagttggaaacgactgctaataccgcataagaccacgctatcgcatgatagaggggtcaaagaaatatcgcttatggatgggctcgcgtcccattaggtagttggtgaggtaacggcccaccaagccgacgatgggtagccgacctgagagggtgatcggccacattggaactgagacacggtccaaactcctacgggaggcagcagtagggaatattgggcaatgggggcaaccctgacccagcaacgccgcgtgagggaagaaggtctctggattgtaaacctctgtcctatgggacgaagaagtgacggtaccataggaggaagctccggctaactacgtgccagcagccgcggtaatacgtagggagcgagcgttgtccggaattactgggcgtaaagggtgcgtaggcggcctggtaagtcagatgtgaaatacccgtgctcaacatggggggtgcatctgatactgttaggcttgagtgcaggagaggaaagcggaattcctagtgtagcggtgaaatgcgtagatattaggaggaacaccagtggcgaagcggctttctggactgtaactgacgctgaggcacgaaagcgtggggagcaaacaggattagataccctggtagtccacgctgtaaacgatggatactaggtgtgggggtcaaaagacttctgtgccgcagcaaacgcaataagtatcccgcctggggagtacgaccgcaaggttgaaactcaaaggaattgacgggggcccgcacaagcagcggagcatgtggtttaattcgaagcaacgcgaagaaccttaccaaggcttgacatcctctgacgaatgtagagatacattttcccttcggggcagagagacaggtggtgcatggttgtcgtcagctcgtgtcgtgagatgttgggttaagtcccgcaacgagcgcaacccttatcaatagttgccagcacttcgggtgggaactctattgagactgccggggacaactcggaggaaggtggggacgacgtcaaatcatcatgccccttatgtcttgggctacacacgtgctacaatggccggtacaaagggcagcgaacctgcaaaggcaagcgaatctcaaaaagccggtctcagttcggattgtgggctgcaacccgcccacatgaagtcggagtcgctagtaatcgcgaatcagcatgtcgcggtgaatgcgttcccgggccttgtacacaccgcccgtcacaccacggaagttgggggcgcccgaagccgatgtcctaaccgcaaggagggagtcgtcgaaggtgaaaccaatgactggggtgaagtcgtaacaaggtagccg

SEQ ID NO: 497 - DNA, 1373 bp, Artificial Sequence
  Synthetic polymer
  misc_feature (7)..(7): n is a, c, g, or t
  misc_feature (154)..(154): n is a, c, g, or t
  misc_feature (360)..(360): n is a, c, g, or t
  misc_feature (366)..(366): n is a, c, g, or t
  misc_feature (913)..(914): n is a, c, g, or t
  misc_feature (943)..(943): n is a, c, g, or t
  misc_feature (1040)..(1040): n is a, c, g, or t
gacgagnggcggacgggtgagtaatgtctgggaaactgcctgatggagggggataactactggaaacggtagctaataccgcataacgtcgcaagaccaaagtgggggaccttcgggcctcatgccatcagatgtgcccagatgggattagctngttggtggggtaacggctcaccaaggcgacgatccctagctggtctgagaggatgaccagccacactggaactgagacacggtccagactcctacgggaggcagcagtggggaatattgcacaatgggcgcaagcctgatgcagccatgccgcgtgtatgaagaaggccttcgggttgtaaagtactttcagtgaggaggaaggcntgatgnttaatacgcatcgcgattgacgttactcacagaagaagcaccggctaactccgtgccagcagccgcggtaatacggagggtgcaagcgttaatcggaattactgggcgtaaagcgcacgcaggcggtctgttaagtcagatgtgaaatccccgggctcaacccgggaactgcatttgaaactggcaggcttgagtctcgtagaggggggtagaattccaggtgtagcggtgaaatgcgtagagatctggaggaataccggtggcgaaggcggccccctggacgaagactgacgctcaggtgcgaaagcgtggggagcaaacaggattagataccctggtagtccacgccgtaaacgatgtcgacttggaggttgtgcccttgaggcgtggcttccggagctaacgcgttaagtcgaccgcctggggagtacggccgcaaggttaaaactcaaatgaattgacgggggcccgcacaagcggtggagcatgtggtttaattcgatgcaacgcgaagaaccttacctggccttgacatccagagaacttnncagagatgctttggtgccttcgggaactntgagacaggtgctgcatggctgtcgtcagctcgtgttgtgaaatgttgggttaagtcccgcaacgagcgcaacccttatcctttgttgccagcggtncggccgggaactcaaaggagactgccggtgataaaccggaggaaggtggggatgacgtcaagtcatcatggcccttacggccagggctacacacgtgctacaatggcgcatacaaagagaagcgacctcgcgagagcaagcggacctcataaagtgcgtcgtagtccggattggagtctgcaactcgactccatgaagtcggaatcgctagtaatcgtggatcagaatgccacggtgaatacgttcccgggccttgtacacaccgcccgtcacaccatgggagtgggttgcaaaagaagtaggtagcttaaccttcgggagggcgcttaccac

SEQ ID NO: 498 - DNA, 1466 bp, Artificial Sequence
  Synthetic polymer
gacgaacgctggcggcacgcctaacacatgcaagtcgaacggacttaaaagagcttgcttttttaagttagtggcggacgggtgagtaacacgtgagcaacctgcctctgagagggggatagcttctggaaacggatggtaataccccataaaatataaatatcgcatgatagatatatcaaagaaattcgctcagagatgggctcgcgtctgattagatagttggtgaggtaacggctcaccaagtcgacgatcagtagccggactgagaggttgaacggccacattgggactgagacacggcccagactcctacgggaggcagcagtggggaatattgcacaatggagggaactctgatgcagcgatgccgcgtggaggaagaaggttttcggattgtaaactccttttatcagggacgataatgacggtacctgaagaaaaagctccggcttaactacgtgccagcagccgcggtaatacgtagggagcgagcgttgtccggaattactgggtgtaaagggagcgtaggcgggatagcaagtcagatgtgaaaactatgggctcaacctgtagattgcatttgaaactgttgttcttgagtgaagtagaggtaagcggaattcctagtgtagcggtgaaatgcgtagatattaggaggaacatcggtggcgaaggcggcttactgggcttttactgacgctgaggctcgaaagcgtggggagcaaacaggattagataccctggtagtccacgctgtaaacgatgattactaggtgtggggggactgaccccttccgtgccgcagttaacacaataagtaatccacctggggagtacgaccgcaaggttgaaactcaaaggaattgacgggggcccgcacaagcagtggagtatgtggtttaattcgaagcaacgcgaagaaccttaccaggtcttgacatcgtatgaatagactagagatagttgaaatcccttcggggacatatagacaggtggtgcatggttgtcgtcagctcgtgtcgtgagatgttgggttaagtcccgcaacgagcgcaacccttaccattagttgctacgcaagagcactctaatgggactgccgttgacaaaacggaggaaggtggggatgacgtcaaatcatcatgccccttatgacctgggctacacacgtactacaatggcaataaaacagagggaagcaaaacagcgatgtggagcaaatcccgaaaaattgtctcagttcagattgcaggctgaaactcgcctgcatgaagtcggaattgctagtaatcgcagatcagcatgctgcggtgaatacgttcccgggccttgtacacaccgcccgtcacaccatgggagtcggtaacacccgaagccgatagtctaacctgcaaaggaggacgtcgtcgaaggtgggattgatgactggggtgaagtcgtaacaaggtagccgtatcggaagg

SEQ ID NO: 499 - DNA, 1399 bp, Artificial Sequence
  Synthetic polymer
ttcgcccttagagttcgatcctggctcaggacgaacgctggcggcgtgcctaacacatgcaagtcgaacggaacttttttagaagattctttcgggatgattttgattaagtttagtggcggacgggtgagtaacgcgtgagtaacctgcctttgagaggggaataacaatctgaaaagattgctaataccgcgtaacatatatttgtcgcatggcagatatatcaaagattttatcgctcaaagatggactcgcgtccgattagttagttggtgaggtaacggctcaccaagaccgcgatcggtagccggactgagaggttgaacggccacattgggactgagacacggcccagactcctacgggaggcagcagtgggggatattgcgcaatgggggcaaccctgacgcagcaacgccgcgtgaaggatgaaggttttcggattgtaaacttcttttattaaggacgaaaaatgacggtacttaatgaataagctccggctaactacgtgccagcagccgcggtagtacgtagggagcaagcgttgtccggatttactgggtgtaaagggtgcgtaggcggctttgcaagtcagatgtgaaatctatgggctcaacccataaactgcatttgaaactgtagagcttgagtgaagtagaggcaggcggaattccccgtgtagcggtgaaatgcgtagagatggggaggaacaccagtggcgaaggcggcctgctgggctttaactgacgctggggcacgaaagcgtgggtagcaaacaggattagataccctggtagtccgcgctgtaaacgatgattactaggtgtggggggtctgaccccttccgtgccggagttaacacaataagtaatccacctggggagtacggccgcaaggttgaaactcaaaggaattgacgggggcccgcacaagcagtggagtatgtggtttaattcgaagcaacgcgaagaaccttaccaggtcttgacatccaactaacgagatagagatatgtcaggtgcccttcggggaaagttgagacaggtggtgcatggttgtcgtcagctcgtgtcgtgagatgttgggttaagtcccgcaacgagcgcgacccttgctattagttgctacgcaagagcactctaataggactgccgttgacaaaacggaggaaggtggggacgacgtcaaatcatcatgccccttatgacctgggctacacacgtactacaatggacgtcaacagagggaagcaaaacagcgatgtggagcaaacccttaaaaacgttctcagttcagagggcaggctgcaacccgcctgcatgaagtcggaattgctagtaatcgcggatcagcatgccgcggtgaatacaaagccgggccttgcacacaccgcccgtca

SEQ ID NO: 500 - DNA, 1461 bp, Artificial Sequence
  Synthetic polymer
gacgaacgctggcggcacgcctaacacatgcaagtcgaacggagatattagcttcggttaatatcttagtggcggacgggtgagtaacacgtgagcaacctgcctctaagaacgggatagcttctggaaacggatggtaataccgtataatgtattgggaaggcatctttctaataccaaagatttatcgcttagagatgggctcgcgtctgattagctagatggtgaggtaacggcccaccatggcgacgatcagtagccggactgagaggttgaacggccacattgggactgagacacggcccagactcctacgggaggcagcagtgggggatattgcacaatgggggaaaccctgatgcagcgatgccgcgtggaggaagaaggttttcggattgtaaactcctgtcgtaagggacgaagaagtgacggtaccttacaagaaagctccggctaactacgtgccagcagccgcggtaatacgtagggagcgagcgttgtccggaattactgggtgtaaagggagcgtaggcgggatggtaagtcagatgtgaaaactatgggctcaacccatagactgcatttgaaactgctgttcttgagtgaagtagaggtaagcggaattcctagtgtagcggtgaaatgcgtagatattaggaggaacatcggtggcgaaggcggcttactgggcttttactgacgctgaggctcgaaagcgtggggagcaaacaggattagataccctggtagtccacgctgtaaacgatgattactaggtgtggggggactgaccccttccgtgccgcagttaacacaataagtaatccacctggggagtacggccgcaaggctgaaactcaaaggaattgacgggggcccgcacaagcagtggagtatgtggtttaattcgaagcaacgcgaagaaccttaccaggtcttgacatcgagtgacgtacctagagataggtatttccttcgggacacaaagacaggtggtgcatggttgtcgtcagctcgtgtcgtgagatgttgggttaagtcccgcaacgagcgcaacccttaccattagttgctacgcaagagcactctaatgggactgccgttgacaaaacggaggaaggtggggatgacgtcaaatcatcatgccccttatgacctgggctacacacgtactacaatggcaatgaaacagagggaagcaagacagcgatgtggagcgaatcccaaaaaattgtcccagttcagattgcaggctgcaactcgcctgcatgaagtcggaattgctagtaatcgcagatcagcatgctgcggtgaatacgttcccgggccttgtacacaccgcccgtcacaccatgggagtcggtaacacccaaagccggtcgtctaaccttcgggaggacgccgtctaaggtgggattgatgactggggtgaagtcgtaacaaggtagccgtatcggaagg

SEQ ID NO: 501 - DNA, 1460 bp, Artificial Sequence
  Synthetic polymer
gatgaacgctggcggcgtgcttaacacatgcaagtcgaacgagaaagcaccttcgggtgtgagtagagtggcgaacgggtgagtaacacgtgagcaacctgcctctcacttcggaataactcagggaaacctgtgctaataccggatactccgtacattccgcatgctatgtacgggaaagccttgtgcggtgagagatgggctcgcggcccattaggtagttggtggggtaacggcctaccaagccgacgatgggtagccgggttgagagaccgaccggccacattgggactgagacacggcccagactcctacgggaggcagcagtggggaattttgcgcaatgggggaaaccctgacgcagcaacgccgcgtgcgggatgaaggccttcgggttgtaaaccgctttcagtagggaagaaaatgacggtacctacagaagaagctccggctaactacgtgccagcagccgcggtaatacgtagggagcgagcgttatccggatttattgggcgtaaagcgcgcgtaggcgggctattaagtcaggtgttaaagcccggggctcaaccccggcccgcacctgaaactggtagtcttgagtctggtaggggaaagtggaattcccagtgtagcggtgaaatgcgcagatattgggaagaacaccagtggcgaaggcggctttctaggccacgactgacgctgaggcgcgaaagctaggggagcaaacaggattagataccctggtagtcctagccgtaaacgatgaatactaggtgtgggggagtaatctcttccgtgccgcagctaacgcattaagtattccgcctggggagtacggccgcaaggctaaaactcaaaggaattgacggggacccgcacaagcagcggagcatgtggcttaattcgaagcaacgcgaagaaccttacctgggcttgacatataggtgaagctgtggaaacacggtggccgaaaggagcctatacaggtggtgcatggctgtcgtcagctcgtgtcgtgagatgttaggttaagtcctgcaacgagcgcaacccttgtcgtatgttaccagcattcagttggggactcatacgagactgccggcgtcaagccggaggaaggtgggggcgacgtcaagtcatcatgccccttatgtccagggctgcacacgtgctacattggccggtacaacgggctgcgaactcgcgagagtaagcgaatcccttaaagccggtcctagttcggattggaggctgcaacccgcctccatgaagtcggagttgctagtaatcgcggatcagcatgccgcggtgaatacgttcccgggtcttgtacacaccgcccgtcacaccacccgagtcgtctgcacccgaagtcgctggcccaacccttgtggagggaggcgccgaaggtgtggagggtaaggggggtgaagtcgtaacaaggtagccgtacgggaacg

SEQ ID NO: 502 - DNA, 1449 bp, Artificial Sequence
  Synthetic polymer
gatgaacgctggcggcgtgcttaacacatgcaagtcgagcgaagcagttaagaagattcttcggatgaatcttaactgactgagcggcggacgggtgagtaacgcgtgggtgacctgccccatacccgggggataacagctggaaacggctgctaataccgcataagcgcacagagccgcatggctcggtgtgaaaaactccggtggtatgggatgggcccgcgtctgattaggcagttggcggggtaacggcccaccaaaccgacgatcagtagccggcctgagagggcgaccggccacattgggactgagacacggcccagactcctacgggaggcagcagtgggggatattgcgcaatgggggcaaccctgacgcagcaacgccgcgtgaaggatgaaggttttcggattgtaaacttcttttattaaggacgaaacttgacggtacttaatgaataagctccggctaactacgtgccagcagccgcggtaatacgtagggagcaagcgttgtccggatttactgggtgtaaagggtgcgtaggcggctttgcaagtcagatgtgaaatctatgggctcaacccataaactgcatttgaaactgtagagcttgagtgaagtagaggcaggcggaattccccgtgtagcggtgaaatgcgtagagatggggaggaacaccagtggcgaaggcggcctgctgggctttaactgacgctgaggcacgaaagcgtgggtagcaaacaggattagataccctggtagtccacgctgtaaacgatgattactaggtgtggggggtctgaccccttccgtgccggagttaacacaataagtaatccacctggggagtacggccgcaaggttgaaactcaaaggaattgacgggggcccgcacaagcagtggagtatgtggtttaattcgaagcaacgcgaagaaccttaccaggtcttgacatccaactaacgaagtagagatacattaggtgcccttcggggaaagttgagacaggtggtgcatggttgtcgtcagctcgtgtcgtgagatgttgggttaagtcccgcaacgagcgcaacccttgctattagttgctacgcaagagcactctaataggactgccgttgacaaaacggaggaaggtggggacgacgtcaaatcatcatgccccttatgacctgggctacacacgtactacaatggatgttaacagagggaagcaagacagcgatgtggagcaaacccctaaaaacattctcagttcagattgcaggctgcaacccgcctgcatgaagatggaattgctagtaatcgcggatcagcatgccgcggtgaatacgttcccgggccttgtacacaccgcccgtcacaccatgggagccggtaatacccgaagtcagtagtccaacctcgtgaggacgctgccgaaggtaggattggcgactggggtg

SEQ ID NO: 503 - DNA, 1460 bp, Artificial Sequence
  Synthetic polymer
gatgaacgctggcggcgtgcttaacacatgcaagtcgaacgggaattactttattgaaacttcggtcgatttaatttaattctagtggcggacgggtgagtaacgcgtgggtaacctgccttgtacagggggataacagtcagaaatgactgctaataccgcataagcgcacaggaccgcatggtccggtgtgaaaaactccggtggtataagatggacccgcgttggattagctagttggcagggtaacggcctaccaaggcgacgatccatagccggcctgagagggtgaacggccacattgggactgagacacggcccagactcctacgggaggcagcagtggggaatattgggcaatgggcgcaagcctgacccagcaacgccgcgtgagggaagaaggttttcggattgtaaacctctgtcgcagaagacgaaggaagtgacggtatttctgtgaggaagccccggctaactacgtgccagcagccgcggtaatacgtagggggcgagcgttgtccggaattactgggcgtaaagggtgcgtaggcggttaattaagttggatgtgaaattcccgggcttaacttgggagctgcattcaaaactggttaactagagttcaggagagggaagcggaattcctagtgtagcggtgaaatgcgtagatattaggaggaacaccggtggcgaaggcggctttctggactgacactgacgctgaggcacgaaagcgtggggagcaaacaggattagataccctggtagtccacgctgtaaacgatgaatactaggtgtagggggtatgaactccctctgtgccgcagcaaacgcaataagtattccgcctggggagtacggccgcaaggttgaaactcaaaggaattgacgggggcccgcacaagcagcggagcatgtggtttaattcgacgcaacgcgaagaaccttaccaaggcttgacatctacttaagctcatggaaacatgaggtcccttcgggggaagtaagacaggtggtgcatggttgtcgtcagctcgtgtcgtgagatgttgggttaagtcccgcaacgagcgcaacccctgttgccagttaccagcaagtaaagttggggactctggtgagactgccggggacaactcggaggaaggtggggacgacgtcaaatcatcatgccccttatgtcttgggctacacacgtgctacaatggctgtaacaaagggaagcgaccttgtaagaggaagcggatctcagaaaagcagtcccagttcggattgtgggctgcaacccgcccacatgaagtcggagttgctattttatcgcggatcagcatgccgcggtgaatacgttcccgggccttgtacacaccgcccgtcacaccatgggagttgggagcgcccgaagccggtatcctaacctgaaaaggagggagccgtcgaaggtgagaccaatgactggggtg

SEQ ID NO: 504 - DNA, 1484 bp, Artificial Sequence
  Synthetic polymer
ctggctcaggacgaacgctggcggcgtgcctaacacatgcaagtcgaacgaagttaaacgctgatgatttagcttgctattgattcttgtttagcttagtggcggacgggtgagtaacgcgtgagcaacctgcctttcagagggggataacgtttggaaacgaacgctaataccgcatgatatgatcgaaccgcatggtttgatgatcaaaggagcaatccgctgaaagatgggctcgcgtccgattaggtagttggcggggtaacggcccaccaagccgacgatcggtagccggactgagaggttgaacggccacattgggactgagacacggcccagactcctacgggaggcagcagtgagggatattggtcaatgggggaaaccctgaaccagcaacgccgcgtgagggaagacggttttcggattgtaaacctctgtcctctgtgaagataatgacggtagcagaggaggaagctccggctaactacgtgccagcagccgcggtaatacgtagggagcaagcgttgtccggatttactgggtgtaaagggtgcgtaggcgggcttgcaagtcagaagtgaaatctatgggcttaacccataaactgcttttgaaactgtaagtcttgagtgaagtagaggtaggcggaattcccggtgtagcggtgaaatgcgtagagatcgggaggaacaccagtggcgaaggcggcctactgggctttaactgacgctgaggcacgaaagcgtgggtagcaaacaggattagataccctggtagtccacgctgtaaacgatgattactaggtgtgggtggactgaccccatccgtgccggagttaacacaataagtaatccacctggggagtacggccgcaaggctgaaactcaaaggaattgacgggggcccgcacaagcagtggagtatgtggattaattcgatgcaacgcgaagaaccttaccaggtcttgacatcccgctaacgaggtagagatacgttaggtgcccttcggggaaagcggagacaggtggtgcatggttgtcgtcagctcgtgtcgtgagatgttgggttaagtcccgcaacgagcgcaacccttacggttagttgctacgcaagagcactctagccggaccgccgttgacaaaacggaggaaggtggggatgatgtcaaatcatcatgccccttatgacctgggcctcacacgtactacaatggccgttaacagagggaagcaaagccgcgaggcagagcgaaaccccaaaaacggtctcagttcggatcgtaggctgcaacccgcctgcgtgaagttggaattgctagtaatcgcggatcagcatgccgcggtgaatacgttcccgggccttgtacacaccgcccgtcacaccatgggagccggtaatgcccgaagtcagtagcctaaccgcaaggagggcgctgccgaaggtaggattggcgactggggtgaagtcgtaacaaggtaacc

SEQ ID NO: 505 - DNA, 1476 bp, Artificial Sequence
  Synthetic polymer
agagtttgattatggctcaggatgaacgctggcggcgtgcctaacacatgcaagtcgagcgagaagctgatgacagatacttcggttgaaggagtcagtggaaagcggcggacgggtgagtaacgcgtaggcaacctgccctttgcacagggatagccattggaaacgatgattaaaacctgataacaccatttggttacatgagcagatggtcaaagatttatcggcaaaggatgggcctgcgtctgattagctagttggtaaggtaacggcttaccaaggcgacgatcagtagccgacctgagagggtgaacggccacattggaactgagacacggtccaaactcctacgggaggcagcagtggggaatattgcacaatgggcgaaagcctgatgcagcaacgccgcgtgaaggaagaaggccttcgggtcgtaaacttctgtccttggggaagaagaactgacggtacccaaggaggaagccccggctaactacgtgccagcagccgcggtaatacgtagggggcaagcgttatccggaattattgggcgtaaagagtacgtaggtggcaacctaagcgcagggtttaaggcaatggctcaaccattgttcgccctgcgaactgggatgcttgagtgcaggagaggaaagcggagttcctagtgtagcggtgaaatgcgtagatattaggaggaacaccagtggcgaaggcggctttctggactgtaactgacactgaggtacgaaagcgtggggagcaaacaggattagataccctggtagtccacgccgtaaacgatgagcactaggtgtcggggtcgcaagacttcggtgccgtagttaacgcattaagtgctccgcctggggagtacgcacgcaagtgtgaaactcaaaggaattgacggggacccgcacaagcagcggagcatgtggtttaattcgaagcaacgcgaagaaccttaccaggacttgacatccctctgacagacccttaatcgggtttttctacggacagaggagacaggtggtgcatggttgtcgtcagctcgtgtcgtgagatgttgggttaagtcccgcaacgagcgcaacccttgccattagttgccagcagtaagatgggcactctagtgggactgccggggacaactcggaggaaggtggggatgacgtcaaatcatcatgccccttatgttctgggctacacacgtgctacaatggccggtacagaaagcagcgaagtcgtgaggcggagcaaatctcgaaaaccggtcccagttcggactgcaggctgcaactcgcctgcacgaagccggagttgctagtaatcgcggatcagaatgccgcggtgaatgcgttcccgggtcttgtacacaccgcccgtcacaccatggaagttgggggtgcccaaagccggcaaggaaatatgctgtctaaggcaaaaccaatgactggggtgaagtcgtaacaaggtaac

SEQ ID NO: 506 - DNA, 1464 bp, Artificial Sequence
  Synthetic polymer
gatgaacgctggcggcgtgcctaacacatgcaagtcgaacggttaaggcggcttcggccgcgaataaagtggcgaacgggtgagtaacgcgtgaccgaccttccccccgcaccgggacaaccgcgggaaaccgcggctgataccgggtactccggggccttcgcatgagggccccgggaaagctccggcggcgggggatggggtcgcgtcccatcaggtagtaggcggggcaacggcccacctagccgacgacgggtagccgggttgagagaccgaccggccacattgggactgagatacggcccagactcctacgggaggcagcagtggggaattttgcgcaatgggggcagccctgacgcagcaacgccgcgtgcgggacgacggccttcgggttgtaaaccgctttcagcagggaagaacctctgacggtacctgcagaagaagccccggctaactacgtgccagcagccgcggtaatacgtagggggcgagcgttatccggaatgattgggcgtaaagcgcgcgcaggcggccgctcaagcgggacctctaaccccggggctcaaccccgggccgggtcccgaactgggcggctcgagtgcggtaggggagagcggaattccaagtgtagcggtgaaatgcgcagatatttggaagaacaccgatggcgaaggcagctctctgggccgtcactgacgctgaggcgcgaaagccgggggagcgaacaggattagataccctggtagtcccggccgtaaacgatgggcgctaggtgtggggggacattccctccgtgccgcagccaacgcattaagcgccccgcctggggagtacggcggcaacgctaaaactcaaaggaattgacgggggcccgcacaagcagcggagcatgtggcttaattcgaagcaacgcgaagaaccttaccagggcttgacatccgggtgaagcggcggagacgccgtggccgagaggagcccggacaggtggtgcatggctgtcgtcagctcgtgccgtgaggtgttgggttaagtcccgcaacgagcgcaacccccgtcgcgtgttgccagcaggcaaagctgggcactcgcgcgtgactgccggcgtcaagccggaggaaggtggggacgacgtcaagtcatcatgccccttatgccctgggctgcacacgtgctacaatggccggcacaacgggttgcgaccccgcgagggggagcggatccctcaaagccggccccagttcggaccgcaggctgcaacccgcctgcgcgaagccggagttgctagtaatcgcggatcagcacgccgcggtgaatacgttcccgggccttgtacacaccgcccgtcacaccacccgagtcgtctgcacccgaagccgccggccgaacccgcaaggggcggaggcgtcgaaggtgtggagggtgaggggggtgaagtcgtaacaaggtagccgtaccggaagg

SEQ ID NO: 507 - DNA, 1507 bp, Artificial Sequence
  Synthetic polymer
agagtttgatcctggctcagattgaacgctggcggcaggcctaacacatgcaagtcgaacggtaacagaaagcagcttgctgctttgctgacgagtggcggacgggtgagtaatgtctgggaaactgcctgatggagggggataactactggaaacggtagctaataccgcataacgtcgcaagaccaaagagggggaccttcgggcctcttgccatcggatgtgcccagatgggattagctagtaggtggggtaacggctcacctaggcgacgatccctagctggtctgagaggatgaccagccacactggaactgagacacggtccagactcctacgggaggcagcagtggggaatattgcacaatgggcgcaagcctgatgcagccatgccgcgtgtatgaagaaggccttcgggttgtaaagtactttcagcggggaggaagggagtaaagttaatacctttgctcattgacgttacccgcagaagaagcaccggctaactccgtgccagcagccgcggtaatacggagggtgcaagcgttaatcggaattactgggcgtaaagcgcacgcaggcggtttgttaagtcagatgtgaaatccccgggctcaacctgggaactgcatctgatactggcaagcttgagtctcgtagaggggggtagaattccaggtgtagcggtgaaatgcgtagagatctggaggaataccggtggcgaaggcggccccctggacgaagactgacgctcaggtgcgaaagcgtggggagcaaacaggattagataccctggtagtccacgccgtaaacgatgtcgacttggaggttgtgcccttgaggcgtggcttccggagctaacgcgttaagtcgaccgcctggggagtacggccgcaaggttaaaactcaaatgaattgacgggggcccgcacaagcggtggagcatgtggtttaattcgatgcaacgcgaagaaccttacctggtcttgacatccacggaagttttcagagatgagaatgtgccttcgggaaccgtgagacaggtgctgcatggctgtcgtcagctcgtgttgtgaaatgttgggttaagtcccgcaacgagcgcaacccttgtcctttgttgccagcgggcaaagccgggaactcaaaggagactgccagtgacaaactggaggagggcagggatgacgtcaagtcatcatggcccttacggtcagggctacacacgtgctacaatggggcgtacagagggaggcgagcccgcgagggggagtggaacccagaaagcgtcccgcagttcggattggagtctgcaactcggctccatgaagtcggaatcgctagtaatcgcggatcagaatgccgcggtgaatacgttcccgggccttgtacacaccgcccgtcacaccatgggagtgaattgcaccagaagtagttagcctaaccgcgaggggggcgattaccacggtgtggtttatgactggggtgaagtcgtaacaaggtaaccgta

SEQ ID NO: 508 - DNA, 1461 bp, Artificial Sequence
  Synthetic polymer
  misc_feature (688)..(688): n is a, c, g, or t
gacgaacgctggcggcacgcctaacacatgcaagtcgaacggagaatattggatttattcattattcttagtggcggacgggtgagtaacacgtgagcaacctgcctctaagagagggatagcttctggaaacggatggtaatacctcataacataatcataccgcatggtgagattatcaaagatttattacttagagatgggctcgcgtctgattagctagatggtgaggtaacggcccaccatggcgacgatcagtagccggactgagaggttgaacggccacattgggactgagacacggcccagactcctacgggaggcagcagtggggaatattgcacaatggggggaaccctgatgcagcgatgccgcgtggaggaagaaggttttcggattgtaaactcctgtcttaagggacgataatgacggtaccttaggaggaagctccggctaactacgttcccagcagccgcggtaatacgtagggagcgagcgttgtccggaattactgggtgtaaagggagcgtaggcgggattgcaagtcagatgtgaaaactatgggcttaacccatagactgcatttgaaactgtagttcttgagtgaagtagaggtaagcggaattcctagtgtagcggtgaaatgcgtagatattaggaggaacatcggtggcgaaggcggcttacngggcttttactgacgctgaggctcgaaagcgtggggagcaaacaggattagataccctggtagtccacgctgtaaacgatgattactaggtgtggggggactgaccccttccgtgccgcagttaacacaataagtaatccacctggggagtacgaccgcaaggttgaaactcaaaggaattgacgggggcccgcacaagcagtggagtatgtggtttaattcgaagcaacgcgaagaaccttaccaggtcttgacatcgagtgacgagctaagagattagctttcctttcgaggcacgaagacaggtggtgcatggttgtcgtcagctcgtgtcgtgagatgttgggttaagtcccgcaacgagcgcaacccttaccattagttgctacgcaagagcactctaatgggactgccgttgacaaaacggaggaaggtggggatgacgtcaaatcatcatgccccttatgacctgggctacacacgtactacaatggcaattaacaaagagcagcaaagccgcgaggtggagcgaatctccaaaaattgtcccagttcagattgcaggctgcaactcgcctgcatgaagtcggaattgctagtaatcgtagatcagcatgctacggtgaatacgttcccgggccttgtacacaccgcccgtcacaccatgggagtcggtaacacccgaagtcggtagtctaacagcaatgaggacgccgccgaaggtgggattgatgactggggtgaagtcgtaacaaggtagccgtatcggaagg

SEQ ID NO: 509 - DNA, 1460 bp, Artificial Sequence
  Synthetic polymer
gatgaacgctggcggcgtgcttaacacatgcaagtcgaacgattaacccttcttcggaaggtcataaagtggcgaacgggtgagtaacacgtgaccaacctgcctctcacattgggataacttagagaaatctaagctaataccaaatactcttgatctgccgcatgacagaccaaggaaagctttcgcggtgagagatggggtcgcggcccattaggtagttggtggggtagaggcctaccaagccgatgatgggtagccgggttgagagaccgaccggccacattgggactgagatacggcccagactcctacgggaggcagcagtggggaattttgcgcaatgggcgaaagcctgacgcagcaacgccgcgtgcgggatgacggccttcgggttgtaaaccgctttcagtgggaaagataatgacggtacccacacaagaagctccggctaaatacgtgccagcagccgcggtaatacgtatggagcaagcgttatccggatttattgggcgtaaagcgcgcgtaggcggcttgttaagcaaggtcttaaatcttggggctcaacctcaagccggatcttgaactggcaggctcgagtatggtagaggaaagtggaattcccagtgtagcggtggaatgcgcagatattgggaagaacaccgatggcgaaggcagctttctgggccattactgacgctgaggtgcgaaagctaggggagcaaacaggattagataccctggtagtcctagccgtaaacgatgggcactaggtgtggggaggatagcctttccgtgccgcagctaacgcattaagtgccccgcctggggagtacggccgcaaggctaaaactcaaaggaattgacgggggcccgcacaagcagcggagcatgtggcttaattcgaagcaacgcgaagaaccttaccagggcttgacatataggtgaagcggtggaaacaccgtggccgaaaggagcctatacaggtggtgcatggctgtcgtcagctcgtgtcgtgagatgttgggttaagtcccgcaacgagcgcaacccctgttgcatgttgccagcattaagttggggactcatgcgagactgccggcgttaagccggaggaaggtggggatgacgtcaagtcatcatgccctttatgtcctgggctgcacacgtgctacaatggccggtacaacgggctgcgaactcgcgagagcaagcgaatcccttaaaaccggtcccagttcggattgcaggctgcaattcgcctgcatgaagtcggagttgctagtaatcgcggatcagcatgccgcggtgaatacgttcccgggccttgtacacaccgcccgtcacaccactcgagttgtctgcacccgaagtcgctggcctaaccttttggagggaggcgccgaaggtgtggagggtaagagggggtgaagtcgtaacaaggtagccgtaccggaagg

SEQ ID NO: 510 - DNA, 1483 bp, Artificial Sequence
  Synthetic polymer
gatgaacgctggcggcgtgcttaacacatgcaagtcgaacggaactcctatgaacgaggtttcggccaagtgaataggatgtttagtggcggacgggtgagtaacgcgtgagtaacctgccttggagtggggaataacacagtgaaaattgtgctaataccgcataatgcatttggatcgcatgattctgaatgccaaagatttatcgctctgagatggactcgcgtctgattagctagttggcggggcaacggcccaccaaggcgacgatcagtagccggactgagaggttggccggccacattgggactgagacacggcccagactcctacgggaggcagcagtggggaatattgggcaatgggcgcaagcctgacccagcaacgccgcgtgaaggaagaaggctttcgggttgtaaacttcttttgtcagggacgaagcaagtgacggtacctgacgaataagccacggctaactacgtgccagcagccgcggtaatacgtaggtggcaagcgttatccggatttactgggtgtaaagggcgtgtaggcgggaaagcaagtcagatgtgaaaactgtgggctcaacccacagcctgcatttgaaactgtttttcttgagtactggagaggcagatggaattcctagtgtagcggtgaaatgcgtagatattaggaggaacaccagtggcgaaggcgatctgctggacagcaactgacgctgaggcgcgaaagcgtggggagcaaacaggattagataccctggtagtccacgctgtaaacgatggatactaggtgtggggggtctgaccccctccgtgccgcagttaacacaataagtatcccacctggggagtacgatcgcaaggttgaaactcaaaggaattgacgggggcccgcacaagcggtggagtatgtggtttaattcgaagcaacgcgaagaaccttaccagggcttgacatcccgaggcccggcttagagataagcctttctcttcggagacctcggtgacaggtggtgcatggttgtcgtcagctcgtgtcgtgagatgttgggttaagtcccgcaacgagcgcaacccttattgttagttgctacgcaagagcactctagcgagactgccgttgacaaaacggaggaaggtggggacgacgtcaaatcatcatgccccttatgtcctgggccacacacgtactacaatggtggtcaacagagggaagcaatactgtgaagtggagcaaacccctaaaagccatcccagttcggatcgcaggctgcaacccgcctgcgtgaagttggaatcgctagtaatcgcggatcagcatgccgcggtgaatacgttcccgggccttgtacacaccgcccgtcacaccatgagagtcgggaacacccgaagtccgtagtctaaccgcaagggggacgcggccgaaggtgggttcgataattggggtgaagtcgtaacaaggtagccgtatcggaagg

SEQ ID NO: 511 - DNA, 1504 bp, Artificial Sequence
  Synthetic polymer
gacgaacgctggcggcgtgcttaacacatgcaagtcgaacgaagcagcttaacggaactcttcggagggaagataagttgactgagtggcggacgggtgagtaacgcgtgagcaacctgcccataagagggggataacagttggaaacgactgctaataccgcataagaccacattaccgcatggtagaggggtcaaagaaattcgcttatggaggggctcgcgtcccattaggtagttggtagggtaaaggcctaccaagccgacgatgggtagccgacctgagagggtgatcggccacactggaactgagacacggtccagactcctacgggaggcagcagtggggaatattgggcaatgggcgcaagcctgacccagcaacgccgcgtgagggaagaaggccttcgggttgtaaacctctgtcctatgggaagaagaaagtgacggtaccataggaggaagctccggctaactacgtgccagcagccgcggtaatacgtagggagcaagcgttgtccggaattactgggcgtaaagggtgcgtaggcggttgtttaagtcagatgtgaaatacccgggcttaacccgggggctgcatctgatactggataactagagtgcaggagaggaaagtggaattcctagtgtagcggtggaatgcgtagatattaggaggaacaccagtggcgaaggcgactttctggactgtaactgacgctgaggcacgaaagtatgggtagcaaacaggattagataccctggtagtccatactgtaaacgatgaatactaggtgtgggggacaatagtcttccgtgccgcagccaacgcaataagtattccgcctggggagtacggtcgcaagactgaaactcaaaggaattgacgggggcccgcacaagcagcggagcatgtggtttaattcgaagcaacgcgaagaaccttaccaaggcttgacatcccggtgaccggcatagagatatgccttctcttcggagcaccggtgacaggtggtgcatggttgtcgtcagctcgtgtcgtgagatgttgggttaagtcccgcaacgagcgcaacccttgttactagttgccagcatttcggatgggaactctagtgagactgccggggataactcggaggaaggtggggatgacgtcaaatcatcatgccctttatgtcttgggctacacacgtgctacaatggtcggtacaaagagcggcgagctcgtaagagtaagcgaatctcataaagccggtctcagttcagattgtgggctgcaacccgcccacatgaagtcggagttgctagtaatcgcggatcagcatgccgcggtgaatgcgttcccgggccttgtacacaccgcccgtcacaccatggaagttgggggcgcccgaagccgatggcctaaccgcaaggagggagtcgtcgaaggtgaaaccaatgactggggtgaagtcgtaacaaggtagccgtatcggaaggtgcggctggatcacctcctt

SEQ ID NO: 512 - DNA, 1496 bp, Artificial Sequence
  Synthetic polymer
agagtttgatcctggctcaggatgaacgctggcggcgtgcctaacacatgcaagtcgaacgaagcagttttggtgaagttttcggatggaaccggaattgactgagtggcggacgggtgagtaacgcgtgggtaacctgcctcatacagggggataacagttagaaatgactgctaataccgcataagcgcacgggaccgcatggtccggtgtgaaaagcccagacggtatgagatggacccgcgtctgattagctggttggtggggtaacggcccaccaaggcgacgatcagtagccgacctgagagggtgaccggccacattgggactgagacacggcccaaactcctacgggaggcagcagtgggggatattgcacaatggggggaaccctgatgcagcgacgccgcgtgagtgaagaagtatttcggtatgtaaagctctatcagcagggaagagaatgacggtacctgactaagaagccccggctaactacgtgccagcagccgcggtaatacgtagggggcaagcgttatccggaattactgggtgtaaagggtgcgtaggtggcagggcaagtcagaagtgaaaacccggggcttaactccgggactgcttttgaaactgtccagctggagtgcaggagaggtaagcggaattcctagtgtagcggtgaaatgcgtagatattaggaggaacatcagtggcgaaggcggcttactggactgaaactgacactgaggcacgaaagcgtggggagcaaacaggattagataccctggtagtccacgccgtaaacgatgaatactaggtgtcggggccgtagaggcttcggtgccgcagcaaacgcattaagtattccacctggggagtacgttcgcaagaatgaaactcaaaggaattgacggggacccgcacaagcggtggagcatgtggtttaattcgaagcaacgcgaagaaccttacctggtcttgacatccccttgaccgctccttaatcggagttttccttcgggacaagggtgacaggtggtgcatggttgtcgtcagctcgtgtcgtgagatgttgggttaagtcccgcaacgagcgcaacccctatctttagtagccagcatgtaaaggtgggcactctagagagactgccakggagaacctggaggaaggtggggacgacgtcaaatcatcatgccccttatgaccagggctacacacgtgctacaatggcgtaaacaaagggaagcgaccctgtgaaggcaagcaaatcccaaaaataacgtcacagttcggattgtagtctgcaactcgactacatgaagctggaatcgctagtaatcgcgaatcagaatgtcgcggtgaatacgttcccgggtcttgtacacaccgcccgtcacaccatgggagtcagtaacgcccgaagtcagtgacctaaccgcgagggaggagctgccgaaggcgggaccgataactggggtgaagtcgtaacaaggtaaccgta

SEQ ID NO: 513 - DNA, 1480 bp, Artificial Sequence
  Synthetic polymer
gatgaacgctagcggcaggcttaacacatgcaagtcgaggggcagcgagatcaaagcttgctttgattgtcggcgaccggcgcacgggtgcgtaacgcgtatgcaacctacccactacagggggataacactgagaaatcggtactaataccccataatatcttggaaggcatctttcgaggttgaaaactccggtggtagtggatgggcatgcgttgtattagctggttggtgaggtaacggctcaccaaggcgacgatacatagggggactgagaggttaaccccccacattggtaccgagacacggaccaaactcctacgggaggcagcagtgaggaatattggtcaatggacgcaagtctgaaccagccatgccgcgtgcaggaagacggctctatgagttgtaaactgcttttgtatgagggtaaacccgggtacgtgtacccggctgaaagtatcatacgaataaggatcggctaactccgtgccagcagccgcggtaatacggaggatccaagcgttatccggatttattgggtttaaagggtgcgtaggcggtttgataagttagaggtgaaatgttagggcttaaccctgaaactgcctctaatactgttgagctagagagtagttgcggtaggcggaatgtatggtgtagcggtgaaatgcttagagatcatacagaacaccgattgcgaaggcagcttaccaaactatatctgacgttgaggcacgaaagcgtggggagcaaacaggattagataccctggtagtccacgcagtaaacgatgataactcgctgtcggcgatacacggtcggtggctaagcgaaagcgataagttatccacctggggagtacgttcgcaagaatgaaactcaaaggaattgacgggggcccgcacaagcggaggaacatgtggtttaattcgatgatacgcgaggaaccttacccgggcttgaaagttagtgacgattctggaaacaggatttcccttcggggcacgaaactaggtgctgcatggttgtcgtcagctcgtgccgtgaggtgtcgggttaagtcccataacgagcgcaacccctaccgttagttgccatcaggtcaagctgggcactctggcgggactgccggtgtaagccgagaggaaggtggggatgacgtcaaatcagcacggcccttacgtccggggctacacacgtgttacaatggtaggtacagagggcagctaccctgtgaagggatgcgaatctcgaaagcctatctcagttcggattggaggctgaaacccgcctccatgaagttggattcgctagtaatcgcgcatcagccatggcgcggtgaatgcgttcccgggccttgtacacaccgcccgtcaagccatgggagctgggggtgcctgaagttcgtgaccgcaaggagcgacctagggcaaaaccggtgactggggctaagtcgtaacaaggtagccgtaccggaagg

SEQ ID NO: 514 - DNA, 1472 bp, Artificial Sequence
  Synthetic polymer
gacgaacgctggcggcgtgcttaacacatgcaagtcgaacggagagcgtggaaggcaacggaagcgctcttagtggcggacgggtgcgtaacgcgtgagcaatctatcctgcggagggggataacatctggaaacagatgctaataccgcatgagaccacagcctcgcatgagggaggggtcaaaggagaaatccgcggcagggtgagctcgcgtcccattagatagttggtgaggtaacggcccaccaagtcaacgatgggtagccgatctgagaggatgaccggccacattggaactgagaaacggtccagactcctacgggaggcagcagtggggaatattgggcaatgggcgaaagcctgacccagcaacgccgcgtgagggaagaaggttttcggatcgtaaacctctgttgtgggggacgaggagatgacggtaccccacgaggaagctccggctaactacgtgccagcagccgcggtaatacgtagggagcgagcgttgtccggaatgactgggcgtaaagggcgcgtaggcggcctggcaagtttggagtgaaagccccattttcaaggtggggactgctttgaagactgcgaggcttgagtgagggagaggatagcggaattcccggtgtagcggtgaaatgcgtagagatcgggaggaacaccagtggcgaaggcggctatctggacctagactgacgctgaggcgcgaaagcgtggggagcaaacaggattagataccctggtagtccacgctgtaaacgatggatgctaggtgtaggaggtatcgaccccttctgtgccggagtaaacacaataagcatcccgcctggggagtacggccgcaaggttgaaactcaaaggaattgacgggggcccgcacaagcagcggagcatgtggtttaattcgaagcaacgcgaagaaccttaccaggtcttgacatccaattaaagctgcggaaaggcagtgtctcttcggaggaattgagacaggtggtgcatggttgtcgtcagctcgtgtcgtgagatgttgggttaagtcccgcaacgagcgcaacccttgcgattggttgctaacagggaagctgagaactccaataggactgccggggacaactcggaggaaggtggggacgacgtcaaatcatcatgccccttatgacctgggctacacacgtgctacaatggccactacaaagaggagcgaacccgtaagggggagcagatctgagaaaagtggtcccagttcggattgtgggctgcaacccgcccacatgaagtcggagttgctagtaatcgcggatcagcatgccgcggtgaatacgttcccgggccttgtacacaccgcccgtcacaccatgggagttgggagcacccgaagcctgtgagctaacgcaagaggcagcagtcgaaggtgagaccaatgactggggtgaagtcgtaacaaggtagccgtatcggaagg

SEQ ID NO: 515 - DNA, 1491 bp, Artificial Sequence
  Synthetic polymer
gagtttgattatggctcaggacgaacgctggcggcgtgcctaacacatgcaagtcgaacgagaaacccatttgtgatcccttcggggtgaactgttgggtggaaagtggcggacgggcgagtaacgcgtgagtaacctgcccataagagggggataatccttggaaacgaggactaataccgcatattgaaattttatggcatcatagaattttgaaagatttatcgcttatggatggactcgcgtcagattagctagttggtgaggtaacggctcaccaaggcgacgatctgtagccgaactgagaggttgatcggccgcattgggactgagacacggcccagactcctacgggaggcagcagtggggaatattgcgcaatgggggaaaccctgacgcagcaacgccgcgtgcaggaagaaggtcttcggattgtaaactgttgtcgcaggggaagaagacagtgacggtaccctgcgagaaagtcacggctaactacgtgccagcagccgcggtaatacgtaggtgacaagcgttgtccggatttactgggtgtaaagggcgcgtaggcgggatagcaagtcagtcgtgaaatgccgaggcttaacctcggagctgcgattgaaactgttattcttgagtatcggagaggaaagcggaattcctagtgtagcggtgaaatgcgtagatattaggaggaacaccagtggcgaaggcggctttctggacgacaactgacgctgaggcgcgaaagtgtggggagcaaacaggattagataccctggtagtccacaccgtaaacgatggatactaggtgtaggaggtatcgaccccttctgtgccgcagttaacacaataagtatcccacctggggagtacgaccgcaaggttgaaactcaaaggaattgacgggggcccgcacaagcagtggagtatgtggtttaattcgaagcaacgcgaagaaccttgcctgggcttgacatcccgatgaccggtgtagagatacaccttcccttcggggcatcggtgacaggtggtgcatggttgtcgtcagctcgtgtcgtgagatgttgggttaagtcccgcaacgagcgcaacccctattgtcagttgccatcattcagttgggcactctggcgagactgccggtgacaaatcggaggaaggtggggacgacgtcaaatcatcatgccccttatgcccagggctacacacgtactacaatggccggcaacaaagtgcagcaataccgtgaggcggagcgaatcacaaaacccggtctcagttcagattgcaggctgcaactcgcctgcatgaagttggaattgctagtaatcgcgaatcagaatgtcgcggtgaatacgttcccgggccttgtacacaccgcccgtcacaccatgagagtcgataacacccgaagcctgtgagctagccgtaaggaggcagcagtcgaaggtggggttgatgattggggtgaagtcgtaacaaggt

SEQ ID NO: 516 - DNA, 1459 bp, Artificial Sequence
  Synthetic polymer
gatgaacgctggcggcgtgcttaacacatgcaagtcgaacgattaacccaccttcgggtggttataaagtggcgaacgggtgagtaacacgtgaccaacctaccccttacattgggataactcagagaaatctgtgctaataccaaatactccggataaatcgcatggtttttccgggaaagcttttgcggtaagggatggggtcgcggcctattaggtagttggtggggtaacggcctaccaagcctgcgataggtagccgggttgagagactgatcggccacattgggactgagatacggcccagactcctacgggaggcagcagtggggaattttgcgcaatgggggaaaccctgacgcagcgacgccgcgtgcgggatgacggccttcgggttgtaaaccgctttcagtgggaaagattatgacggtacccacagaagaagctccggctaactacgtgccagcagccgcggtaatacgtagggagcatgcgttatccggatttattgggcgtaaagcgcgcgtaggcggcttgttaagcaagatctcaaatctgggggctcaacctccagccggattttgaactggcaggctcgagtttggtagaggaaagtggaattcccagtgtagcggtgaaatgcgcagatattgggaagaacaccgatggcgaaggcagctttctgggccataactgacgccgaggtgcgaaagctaggggagcaaacaggattagataccctggtagtcctagccgtaaacgatgggcactaggtgtggggagacattctttccgtgccgcagctaacgcattaagtgccccgcctggggagtacggccgcaaggctaaaactcaaaggaattgacgggggcccgcacaagcagcggagcatgtggcttaattcgaagcaacgcgaagaaccttaccagggcttgacatgattgtgaagcagtggaaacactgtggccgaaaggagcaatcacaggtggtgcatggctgtcgtcagctcgtgtcgtgagatgttgggttaagtcccgcaacgagcgcaacccctgtcgtatgttgccagcatttagttggggactcgtacgagactgccggcgttaagccggaggaaggtggggacgacgtcaagtcatcatgccctttatgtcctgggctgcacacgtgctacaatggccggtacaacgggctgcgaagtcgcgagaccaagcgaatcccttaaagccggtcccagttcggattgtaggctgcaattcgcctacatgaagtcggagttgctagtaatcgcggatcagcatgccgcggtgaatacgttcccgggccttgtacacaccgcccgtcacaccactcgagttgtctgcacccgaagtcgccggcctaaccatttggagggaggcgccgaaggtgtggagggtaagagggggtgaagtcgtaacaaggtagccgtaccggaagg

SEQ ID NO: 517 - DNA, 1368 bp, Artificial Sequence
  Synthetic polymer
agcttgcttctttgccggcgagcggcggacgggtgagtaatgtctgggaaactgcctgatggagggggataactactggaaacggtagctaataccgcataacgtcgcaagaccaaagagggggaccttcgggcctcttgccatcggatgtgcccagatgggattagcttgttggtgaggtaacggctcaccaaggcgacgatccctagctggtctgagaggatgaccagccacactggaactgagacacggtccagactcctacgggaggcagcagtggggaatattgcacaatgggcgcaagcctgatgcagccatgccgcgtgtatgaagaaggccttcgggttgtaaagtactttcagtcaggaggaaggtggtgagcttaatacgctcatcaattgacgttactgacagaagaagcaccggctaactccgtgccagcagccgcggtaatacggagggtgcaagcgttaatcggaattactgggcgtaaagcgcacgcaggcggtctgtcaagtcggatgtgaaatccccgggctcaacctgggaactgcattcgaaactggcaggctagagtctcgtagagggaggtagaattccaggtgtagcggtgaaatgcgtagagatctggaggaataccggtggcgaaggcggcctcctggacgaagactgacgctcaggtgcgaaagcgtggggagcaaacaggattagataccctggtagtccacgccgtaaacgatgtcgacttggaggctgtgcccttgaggcgtggcttccggagctaacgcgttaagtcgaccgcctggggagtacggccgcaaggttaaaactcaaatgaattgacgggggcccgcacaagcggtggagcatgtggtttaattcgatgcaacgcgaagaaccttacctggtcttgacatccagagaatcctgcagagatgcgggagtgccttcgggaactctgagacaggtgctgcatggctgtcgtcagctcgtgttgtgaaatgttgggttaagtcccgcaacgagcgcaacccttatcctttgttgccagcggttaggccgggaactcaaaggagactgccagtgataaactggaggaaggtggggatgacgtcaagtcatcatggcccttacgaccagggctacacacgtgctacaatggcgcatacaaagagaagcgaacttgcgagagtaagcggacctcataaagtgcgtcgtagtccggattggagtctgcaactcgactccatgaagtcggaatcgctagtaatcgcggatcagaatgccgcggtgaatacgttcccgggccttgtacacaccgcccgtcacaccatgggagtgggttgcaaaagaagtaggtagcttaac

SEQ ID NO: 518 - DNA, 1454 bp, Artificial Sequence
  Synthetic polymer
gatgaacgctggcggcgtgcttaacacatgcaagtcgaacggagctgctatgaaggaggattcgtccaacggaatagtatgcttagtggcggacgggtgagtaacgcgtggggaacctgcctgggagtggggaataacacatggaaacgtgtgctaataccgcataatgcagttgggccgcatggctctgactgccaaagatttatcgctcttagatggcctcgcgtctgattagctagttggtggggtaacggcctaccaaggcgacgatcagtagccggactgagaggttgaccggccacattgggactgagacacggcccagactcctacgggaggcagcagtggggaatattgggcaatgggcgcaagcctgacccagcaacgccgcgtgaaggaagaaggctttcgggttgtaaacttcttttgtcagggacgaagcaagtgacggtacctgacgaataagccacggctaactacgtgccagcagccgcggtaatacgtaggtggcgagcgttatccggatttactgggtgtaaagggcgtgtaggcgggactgcaagtcaggtgtgaaaaccaggggctcaacctctggcctgcatttgaaactgtagttcttgagtgctggagaggcaatcggaattccgtgtgtagcggtgaaatgcgtagatatacggaggaacaccagtggcgaaggcggattgctggacagtaactgacgctgaggcgcgaaagcgtggggagcaaacaggattagataccctggtagtccacgccgtaaacgatggatactaggtgtggggggactgaccccctccgtgccgcagctaacgcaataagtatcccacctggggagtacgatcgcaaggttgaaactcaaaggaattgacgggggcccgcacaagcggtggagtatgtggtttaattcgaagcaacgcgaagaaccttaccagggcttgacatcctactaacgaagcagagatgcataaggtgcccttcggggaaagtagagacaggtggtgcatggttgtcgtcagctcgtgtcgtgagatgttgggttaagtcccgcaacgagcgcaacccttattgttagttgctacgcaagagcactctagcgagactgccgttgacaaaacggaggaaggtggggacgacgtcaagtcatcatgccccttatgtcctgggccacacacgtactacaatggcggttaacaaagagaagcaataccgcgaggtggagcaaatctcaaaaagccgtcccagttcggatcgcaggctgcaacccgcctgcgtgaagttggaatcgctagtaatcgcggatcagcatgccgcggtgaatacgttcccgggccttgtacacaccgcccgtcacaccatgagagtcgggaacacccgaagtccgtagcctaaccgcaaggggggcgcggccgaaggtgggttcgataattggggtg

SEQ ID NO: 519 - DNA, 1473 bp, Artificial Sequence
  Synthetic polymer
gcaggcttaacacatgcaagtcgaggggcagcatgaaagtagcaatacttttgatggcgaccggcggacgggtgcgtaacgcgtatgcaacctaccctttacagggggataacactgagaaatcggtactaataccccataatattctgggaggcatctttcggagttgaaagctttggtggtaaaggatgggcatgcgttgtattagctagttggtaaggtaacggcttaccaaggcgacgatacatagggggactgagaggttaaccccccacattggtactgagacacggaccaaactcctacgggaggcagcagtgaggaatattggtcaatggacggaagtctgaaccagccatgccgcgtgcaggaagacggctctatgagttgtaaactgcttttgtacgagggtaaacgcagatacgtgtatctgcctgaaagtatcgtacgaataaggatcggctaactccgtgccagcagccgcggtaatacggaggatccaagcgttatccggatttattgggtttaaagggtgcgtaggcggtttagtaagtcagcggtgaaattttggtgcttaacaccaaacgtgccgttgatactgctgggctagagagtagttgcggtaggcggaatgtatggtgtagcggtgaaatgcttagagatcatacagaacaccgattgcgaaggcagcttaccaaactatatctgacgttgaggcacgaaagcgtggggagcaaacaggattagataccctggtagtccacgcagtaaacgatgatagctcgttgtcggcgatacacagtcggtgactaagagaaatcgataagctatccacctggggagtacgttcgcaagaatgaaactcaaaggaattgacgggggcccgcacaagcggaggaacatgtggtttaattcgatgatacgcgaggaaccttacccgggcttgaaagttactgacgattctggaaacaggatttcccttcggggcaggaaactaggtgctgcatggttgtcgtcagctcgtgccgtgaggtgtcgggttaagtcccataacgagcgcaacccctactgatagttgccatcagagcgtttgagcgatcaaacaagctgggcactctatcgggactgccggtgtaagccgagaggaaggtggggatgacgtcaaatcagcacggcccttacgtccggggcgacacacgtgttacaatggtaggtacagagggcagccacccagtgatggggagcgaatctcgaaagcctatctcagttcggattggaggctgaaactcgcctccatgaagttggattcgctagtaatcgcgcatcagccatggcgcggtgaatacgttcccgggccttgtacacaccgcccgtcaagccatgggagttgggggtgcctgaagttcgtgaccgaaaggagcgacctagggcaaaaccgatgactggggctaagtcgtaacaaggtagccgtac

SEQ ID NO: 520 - DNA, 1440 bp, Artificial Sequence
  Synthetic polymer
gacgaacgctggcggcgtgcctaacacatgcaagtcgagcgaatgaagttccttcgggaacggatttagcggcggacgggtgagtaacacgtgggcaacctgcctcatagaggggaatagccttccgaaagggagattaataccgcataagattgtaatgccgcatggcatagcaattaaaggagcaatccgctatgagatggacccgcgtcgcattagctagttggtgaggtaacggctcaccaaggcgacgatgcgtagccgacctgagagggtgatcggccacattgggactgagacacggcccagactcctacgggaggcagcagtggggaatattgcacaatgggggaaaccctgatgcagcgacgccgcgtgagcgaagaagtatttcggtatgtaaagctctatcagcagggaagaagaaatgacggtacctgactaagaagcaccggctaaatacgtgccagcagccgcggtaatacgtatggtgcaagcgttatccggatttactgggtgtaaagggagcgcaggcggtacggcaagtctgatgtgaaagcccggggctcaaccccggtattgcattggaaactgtcggactagagtgtcggaggggtaagtggaattcctagtgtagcggtgaaatgcgtagatattaggaggaacaccagtggcgaaggcgacttactggacgataactgacgctgaggctcgaaagcgtggggagcaaacaggattagataccctggtagtccacgctgtaaacgatgaatactagctgttggggggcattgctcttcagtggcgcagcaaacgcaataagtattccacctggggagtacgttcgcaagaatgaaactcaaaggaattgacggggacccgcacaagcggtggagcatgtggtttaattcgaagcaacgcgaagaaccttaccaagtcttgacatcccgatgaccgttccgcaatgggagcttctcttcggagcatcggagacaggtggtgcatggttgtcgtcagctcgtgtcgtgagatgttgggttaagtcccgcaacgagcgcaacccttatctttagtagccagcagtacggctgggcactctagagagactgccagggataacctggaggaaggcggggatgacgtcaaatcatcatgccccttatgacttgggctacacacgtgctacaatggcgtaaacaaagggaagcaaaaccgtgaggtcgagcaaatctcaaaaataacgtctcagttcggactgtagtctgcaacccgactacacgaagctggaatcgctagtaatcgcagatcagaatgctgcggtgaatacgttcccgggtcttgtacacaccgcccgtcacaccatgggagttggtaatgcccgaagtcagtgacccaaccgtaaggagggagctgccgaaggcaggatcgataactggggtg

SEQ ID NO: 521 - DNA, 1416 bp, Artificial Sequence
  Synthetic polymer
catgcaagtcgaacggcaacacaaaagagcttgctctttgggtggcgagtggcggacgggtgagtaatatctgggaaactgcccaatggtgggggataactattggaaacgrtagctaataccgcataatgtttcacaaccaaagtgggggaccttactggcctcatgccattggatgtgcccagatgagattagctagtaggtgaggtaatggctcacctaggcaacgatctctagctggtctgagaggatgatcagccacactggaactgagacacggtccagactcctacgggaggcagcagtgggggatattgcacaatgggcgcaagcctgatgcagctatgccgcgtgtatgaagaaggctttcgagttgtaaagtactttcagcgggaaggaaaaaagtaagcctaatatgcttactaattgacattactcgcagaagaagcaccggctaactccgtgccagcagccgcggtaatacggagggtgcaagcgttaatcggaattactgggcgtaaagcgcacgcaggtggtttgttaagtcagatgtgaaatccccgggctcaacctgggaattgcatttgcaactggcaagcttgagtctcgtagaggggggtagaattccaggtgtagcggtgaaatgcgtagagctctggaggaataccggtggcgaaggcgaccccctggacgaagactgacactcaggtgcgaaagcgtggggagcaaacaggattagataccctggtagtccatgccgtaaacgatgtcgacttggaagttgtatccttgagatgtgatttccgaagctaacgcgttaagtcgaccgcctggggagtacggccgcaaggttaaaactcaaatgaattgacgggggcccgcacaagcggtggagcatgtggtttaattcgatgcaacgcgaagaaccttacctggccttgacatccagagaatattttggaaatagaatagtgctttcgagaactctgagacaggtgctgcatggctgtcgtcagctcgtgttgtgaaatgttgggttaagtcccgcaacgagcgcaacccttatcctttgttgccagcggtttagccgggaactcaaaggagactgccggtgataaaccggaggaaggtggggatgacgtcaagtcatcatggcccttacggccagggctacacacgtgctacaatggcatatacaaagagaagcaatctcgcaagagcaagcagatctcataaagtatgtcgtagtccggattggagtctgcaactcgactccatgaagtcggaatcgctagtaatcgtagatcagagtgttacggtgaatacgttcccgggccttgtacacaccgcccgtcacaccatgggagtgggttgcaaaagaagtaggtagcttaaccttatggagggcacttacca

SEQ ID NO: 522 - DNA, 1506 bp, Artificial Sequence
  Synthetic polymer
agagtttgatcctggctcaggacgaacgctggcggcacgcttaacacatgcaagtcgaacggagaatatttggtttactaagtattcttagtggcggacgggtgagtaacacgtgagcaacctgcctttgagagagggatagcttctggaaacggatggtaatacctcataacgtagttttaccgcatgatgagactaccaaagatttatcactcaaagatgggctcgcgtctgattagctagatggtgaggtaacggcccaccatggcgacgatcagtagccggactgagaggttgaacggccacattgggactgagacacggcccagactcctacgggaggcagcagtggggaatattgcacaatgggggaaaccctgatgcagcgatgccgcgtggaggaagaaggttttcggattgtaaactcctgtcttaaaggacgataatgacggtactttaggaggaagctccggctaactacgtgccagcagccgcggtaatacgtagggagcgagcgttgtccggaattactgggtgtaaagggagcgtaggcgggatggcaagtcagatgtgaaaactatgggctcaacccatagactgcatttgaaactgttgttcttgagtgaagtagaggtaagcggaattcctggtgtagcggtgaaatgcgtagatatcaggaggaacaccggtggcgaaggcggcttactgggcttttactgacgctgaggctcgaaagcgtggggagcaaacaggattagataccctggtagtccacgctgtaaacgatgattactaggtgtggggggactgaccccttccgtgccgcagttaacacaataagtaatccacctggggagtacggccgcaaggttgaaactcaaaggaattgacgggggcccgcacaagcagtggagtatgtggtttaattcgaagcaacgcgaagaaccttaccaggtcttgacatcgtatgcataacttagagataagtgaaatcccttcggggacatatagacaggtggtgcatggttgtcgtcagctcgtgtcgtgagatgttgggttaagtcccgcaacgagcgcaacccttacctttagttgctacgcaagagcactctaaagggactgccgttgacaaaacggaggaaggtggggatgacgtcaaatcatcatgccccttatgacctgggctacacacgtactacaatggcaatcaacaaagagcagcgagacagtgatgtggagcgaatctcaaaaaattgtcccagttcagattgcaggctgcaactcgcctgcatgaagtcggaattgctagtaatcgcggatcagcatgccgcggtgaatacgttcccgggccttgtacacaccgcccgtcacaccatgggagtcggtaacacccgaagtcggtagtctaacagcaatgaggacgccgccgaaggtgggattgatgactggggtgaagtcgtaacaaggtagccgtatcggaaggtgcggctggatcacctcctttct

SEQ ID NO: 523 - DNA, 1364 bp, Artificial Sequence
  Synthetic polymer
agagtttgatcctggctcaggatgaacgctggcggcgtgcctaacacatgcaagtcgagcgatttacttcggtaaagagcggcggacgggtgagtaacgcgtgggtaacctgccctgtacacacggataacataccgaaaggtatgctaatacgagataaaatacttttatcgcatggtagaagtatcaaagcttttgcggtacaggatggacccgcgtctgattagctagttggtaaggtaacggcttaccaaggcgacgatcagtagccgacctgagagggtgatcggccacattggaactgagacacggtccaaactcctacgggaggcagcagtggggaatattgcacaatgggcgaaagcctgatgcagcaacgccgcgtgagcgatgaaggccttcgggtcgtaaagctctgtcctcaaggaagataatgacggtacttgaggaggaagccccggctaactacgtgccagcagccgcggtaatacgtagggggctagcgttatccggaattactgggcgtaaagggtgcgtaggtggtttcttaagtcagaggtgaaaggctacggctcaaccgtagtaagcctttgaaactggggaactggagtgcaggagaggagagtggaattcctagtgtagcggtgaaatgcgtagatattaggaggaacaccagttgcgaaggcggctctctggactgtaactgacactgaggcacgaaagcgtggggagcaaacaggattagataccctggtagtccacgccgtaaacgatgattactaggtgtcgcggaacgaagttctgcggtgccgtcgcaaacgcaataagtaatccacctggggagtacgttcgcaagaatgaaactcaaaggaattgacggggacccgcacaagcggtggagcatgtggtttaattcgaagcaacgcgaagaaccttacccggccttgacatcctcccgaatgtagagcaatgtctgcagcctttcggggcgggagagacaggtggtgcatggttgtcgtcagctcgtgtcgtgagatgttgggttaagtcccgcaacgagcgcaacccctgccgtcagtagccagcaggtaaagctgggcactctgatgggacagcctgggataaccaggaggaaggcggggacgacgtcaaatcatcatgccccttatggccggggctacacacgtgctacaatggcgtaaacagagggaagcgagccagcgatgttaagcaaagcctaaaaataacgcctcagttcggattggagtctgcaacccgactccatgaagctggattcgctagtaatcgcgcatcagccacggcgcggtgaatacgttcccgggccttgcacacaccgcccgtca

SEQ ID NO: 524 - DNA, 1538 bp, Artificial Sequence
  Synthetic polymer
ttgaacatgagagtttgatcctggctcaggatgaacgctggcggcgtgcttaacacatgcaagtcgaacgaagcatttaggattgaagttttcggatggatttcctatatgactgagtggcggacgggtgagtaacgcgtggggaacctgccctatacagggggataacagctggaaacggctgctaataccgcataagcgcacagaatcgcatgattcagtgtgaaaagccctggcagtataggatggtcccgcgtctgattagctggttggtgaggtaacggctcaccaaggcgacgatcagtagccggcttgagagagtgaacggccacattgggactgagacacggcccaaactcctacgggaggcagcagtggggaatattgcacaatgggggaaaccctgatgcagcgacgccgcgtgagtgaagaagtatttcggtatgtaaagctctatcagcagggaagaaaacagacggtacctgactaagaagccccggctaactacgtgccagcagccgcggtaatacgtagggggcaagcgttatccggaattactgggtgtaaagggtgcgtaggtggcatggtaagtcagaagtgaaagcccggggcttaaccccgggactgcttttgaaactgtcatgctggagtgcaggagaggtaagcggaattcctagtgtagcggtgaaatgcgtagatattaggaggaacaccagtggcgaaggcggcttactggactgtcactgacactgatgcacgaaagcgtggggagcaaacaggattagataccctggtagtccacgccgtaaacgatgaatactaggtgtcggggccgtagaggcttcggtgccgcagcaaacgcagtaagtattccacctggggagtacgttcgcaagaatgaaactcaaaggaattgacggggacccgcacaagcggtggagcatgtggtttaattcgaagcaacgcgaagaaccttacctggtcttgacatcccaatgaccgaaccttaaccggttttttctttcgagacattggagacaggtggtgcatggttgtcgtcagctcgtgtcgtgagatgttgggttaagtcccgcaacgagcgcaacccctatctttagtagccagcatttaaggtgggcactctagagagactgccagggataacctggaggaaggtggggacgacgtcaaatcatcatgccccttatggccagggctacacacgtgctacaatggcgtaaacaaagggaagcgaagtcgtgaggcgaagcaaatcccagaaataacgtctcagttcggattgtagtctgcaactcgactacatgaagctggaatcgctagtaatcgtgaatcagaatgtcacggtgaatacgttcccgggtcttgtacacaccgcccgtcacaccatgggagtcagtaacgcccgaagtcagtgacccaaccgcaaggagggagctgccgaaggtgggaccgataactggggtgaagtcgtaacaaggtagccgtatcggaaggtgcggctggatcacctcctttct

SEQ ID NO: 525 - DNA, 1490 bp, Artificial Sequence
  Synthetic polymer
agagtttgatcctggctcaggacgaacgctggcggcgtgcctaacacatgcaagtcggacggagttattagagtgaagttttcggatggagcgaagataacttagtggcggacgggtgagtaacgcgtgagtaacctgcccattagagggggataacgttctgaaaagaacgctaataccgcataatatatttagttcgcatgaactgaatatcaaaggagcaatccgctgatggatggactcgcgtccgattagcttgttggtgagataacagcccaccaaggcgacgatcggtagccggactgagaggttgaacggccacattgggactgagacacggcccagactcctacgggaggcagcagtgggggatattgcgcaatgggggaaaccctgacgcagcaacgccgcgtgaatgaggaaggtcttcggattgtaaaattcttctgtcgaggacgaaacaaatgacggtactcgatgaataagctccggctaactacgtgccagcagccgcggtaatacgtagggagcgagcgttgtccggatttactgggtgtaaagggtgcgtaggcggcttaacaagtcagatgtgaaatgtatgggctcaacccatgaactgcatttgaaactgtcgagcttgagtgaagtagaggcaggcggaattccctgtgtagcggtgaaatgcgtagagatagggaggaacaccagtggcgaaggcggcctgctgggctttaactgacgctgaggcacgaaagcgtgggtagcaaacaggattagataccctggtagtccacgctgtaaacgatgattactaggtgtgggtggtctgaccccatccgtgccgcagttaacacaataagtaatccacctggggagtacggccgcaaggttgaaactcaaaggaattgacgggggcccgcacaagcagtggagtatgtggtttaattcgaagcaacgcgaagaaccttaccgggtcttgacatcccgatgacggctttagagatagagcttttcttttgaacatcggagacaggtggtgcatggttgtcgtcagctcgtgtcgtgagatgttgggttaagtcccgcaacgagcgcaacccttgctgttagttgctacgtaagagcactctaacaggactgccgttgacaaaacggaggaaggtggggacgacgtcaaatcatcatgccccttatgatccgggccacacacgtactacaatggccataaacagagggaagcaaagctgcgaggcagagcaaaaccctaaaaatggtcccagttcagattgtaggctgcaactcgcctacatgaaggtggaattgctagtaatcgcgaatcagaatgtcgcggtgaatacgttcccgggccttgtgcacaccgcccgtcacaccatgggagccggtaatacccgaagtcagtagtttaaccgcaaggagagcgctgccgaaggtaggattggcgactggggtgaagtggtaacaaggtaacc

SEQ ID NO: 526 - DNA, 1399 bp, Artificial Sequence
  Synthetic polymer
ttcgcccttagagtttgatcctggcgcaggatgaacgctggcggcgtgcttaacacatgcaagtcgaacgagaatcagtggaacaaggattcgtctgagggaagctgaggaaagtggcggacgggtgagtaacgcgtgagcaatctgccttggagtggggaataacggctggaaacagccgctaataccgcatgatgcatctgagtcgcatggtttggatgccaaagattttatcgctctgagatgagctcgcgtctgattagccagttggcggggtaatggcccaccaaggcgacgatcagtagccggactgagaggttggccggccacattgggactgagacacggcccagactcctacgggaggcagcagtggggaatattgggcaatgggcgcaagcctgacccagcaacgccgcgtgaaggaagaaggctttcgggttgtaaacttcttttattcgggacgaagaaagtgacggtaccgaatgaataagccacggctaactacgtgccagcagccgcggtaatacgtaggtggcaagcgttatccggatttattgggtgtaaagggcgtgtaggcgggaatgcaagtcagatgtgaaaactcagggctcaaccctgagcctgcatttgaaactgtatttcttgagtgctggagaggcaatcggaattccgtgtgtagcggtgaaatgcgtagatatacggaggaacaccagtggcgaaggcggattgctggacagtaactgacgctgaggcgcgaaagcgtggggagcaaacaggattagataccctggtagtccacgccgtaaacgatggatactaggtgtggggggactgatcccctccgtgccgcagctaacgcaataagtatcccacttggggagtacgattgcaaggttgaaactcaaaggaatagacgggggcccgcacaagcggtggagtatgtggtttaattcgaagcaacgtgaagaaccttagcagggcttgacatcctactaaggaggtagagatacgttaggtgcccttcggggaaagtagagacaggtggtgcatggttgttgtcagctcgtgtcgtgagatgttgggttaagtcccgcaacgagcgcaacccttattgttagttgctacgcaagagcactctagcgagactgccgttgacaaaacggaggaaggtggggacgacgttaaatcatcatgccccttacgtcgtgggccacacacgtactacaatggcggccaacaaagagaggggagaccgcgaggtggagcaaatctcaaaaagccgtcccagttcgggtcgcaggctgcaacccgcctgcgtgaagttggaatcgctagtaatcgcggatcagcatgccgcggtgaataaaagcccggcccttgcacacaccgcccgtca

SEQ ID NO: 527 - DNA, 1386 bp, Artificial Sequence
  Synthetic polymer
agagtttgatcctggctcaggatgaacgctggcggcgtgcctaacacatgcaagtcgagcgagaagctgatgacagatacttcggttgaaggagtcagtggaaagcggcggacgggtgagtaacgcgtaggcaacctgccctttgcacagggatagccattggaaacgatgattaaaacctgataacaccatttggttacatgagcagatggtcaaagatttatcggcaaaggatgggcctgcgtctgattagctagttggtaaggtaacggcttaccaaggcgacgatcagtagccgacctgagagggtgaacggccacattggaactgagacacggtccaaactcctacgggaggcagcagtggggaatattgcacaatgggcgaaagcctgatgcagcaacgccgcgtgaaggaagaaggccttcgggtcgtaaacttctgtccttggggaagaagaactgacggtacccaaggaggaagccccggctaactacgtgccagcagccgcggtaatacgtaggtggcaagcgttgtccggaattactgggtgtaaagggagcgcaggcgggaagccaagtcagctgtgaaaactacgggcttaacttgtagactgcagttgaaactggttttcctgagtgaagtagaggttggcggaattcctagtgtagcggtgaaatgcgtagatattaggaggaacaccagtggcgaaggcggctttctggactgtaactgacactgaggtacgaaagcgtggggagcaaacaggattagataccctggtagtccacgccgtaaacgatgagcactaggtgtcggagtcgcaagacttcggtgccgtagttaacgcattaagtgctccgcctggggagtacgcacgcaagtgtgaaactcaaaggaattgacggggacccgcacaagcagcggagcatgtggtttaattcgaagcaacgcgaagaaccttaccaggacttgacatccctctgacagacccttaatcgggtttttctacggacagaggagacaggtggtgcatggttgtcgtcagctcgtgtcgtgagatgttgggttaagtcccgcaacgagcgcaacccttgccattagttgccagcagtaagatgggcactctagtgggactgccggggacaactcggaggaaggtggggatgacgtcaaatcatcatgccccttatgttctgggctacacacgtgctacaatggccggtacagaaagcagcgaagtcgtgaggcggagcaaatctcgaaaaccggtcccagttcggactgcaggctgcaactcgcctgcacgaagccggagttgctagtaatcgcggatcagaatgccgcggtgaatgcgttcccgggtcttgcacacaccgcccgtca

SEQ ID NO: 528 - DNA, 1401 bp, Artificial Sequence
  Synthetic polymer
ttcgcccttagagtttgatcctggctcaggacgaacgctggcggcgtgcctaacacatgcaagtcgaacgagaatctatggaaagaggcttcggccgatagaaatagaggacagtggcggacgggtgagtaacgcgtgagcaacctgcccttcggagggggacaacagttggaaacgactgctaataccgcatgacgtcgcactatggcatcatagagcgaccaaagatttatcgccgaaggatgggctcgcgtctgattagatagttggtgaggtaacggctcaccaagtcgacgatcagtagccggactgagaggttgaacggccacattgggactgagatacggcccagactcctacgggaggcagcagtggggaatattgggcaatgggggcaaccctgacccagcgacgccgcgtgaaggaagaaggctttcgggttgtaaacttctttgactagggacgaaaaagatgacggtacctagaaaacaagccacggctaactacgtgccagcagccgcggtaatacgtaggtggcaagcgttgtccggatttactgggtgtaaagggcgcgtaggcgggatagcaagtcaggagtgaaatctatgggcttaacccataaactgcttttgaaactgttattcttgagtatcggagaggcaggcggaattcctagtgtagcggtgaaatgcgtagatattaggaggaacaccagtggcgaaggcggcctgctggacgacaactgacgctgaggcgcgaaagcgtggggagcaaacaggattagataccctggtagtccacgctgtaaacgatgagtactaggtgtggggggactgaccccttccgtgccggagttaacgcaataagtgatccacctggggagtacgttcgcaagaatgaaactcaaaggaattgacggggacccgcacaagcggtggagcatgtggtttaattcgaagcaacgcgaagaaccttacctggtcttgacatccccctgacgcaggagtaatgtcttgtttccttcgggacaggggagacaggtggtgcatggttgtcgtcagctcgtgtcgtgagatgttgggttaagtcccgcaacgagcgcaacccctatcttcagtagccagcattaaagatgggcactctggagagactgccagggacaacctggaggaaggtggggatgacgtcaaatcatcatgccccttatggccagggctacacacgtgctacaatggcgtaaacaaagggaagcgaacatgtgagtgcaagcaaatctcaaaaataacgtctcagttcggattgtagtctgcaactcgactacatgaagctggaatcgctagtaatcgcgaatcagaatgtcgcggtgaatacgttcccgggtcttgcacacaccgcccgtca

SEQ ID NO: 529 - DNA, 1365 bp, Artificial Sequence
  Synthetic polymer
agagtttgatcctggctcaggatgaacgctggcggcgtgcctaacacatgcaagtcgagcgatttacttcggtaaagagcggcggacgggtgagtaacgcgtgggtaacctgccctgtacacacggataacataccgaaaggtatgctaatacaagataaaatacttttatcgcatggtagaagtatcaaagcttttgcggtacaggatggacccgcgtctgattagctagttggtaaggtaacggcttaccaaggcgacgatcagtagccgacctgagagggtgatcggccacattggaactgagacacggtccaaactcctacgggaggcagcagtggggaatattgcacaatgggcgaaagcctgatgcagcaacgccgcgtgagcgatgaaggccttcgggtcgtaaagctctgtcctcaaggaagataatgacggtacttgaggaggaagccccggctaactacgtgccagcagccgcggtaatacgtagggggctagcgttatccggaattactgggcgtaaagggtgcgtaggtggtttcttaagtcagaggtgaaaggctacggctcaaccgtagtaagcctttgaaactggggaacttgagtgcaggagaggcaagtggaattcctagtgtagcggtgaaatgcgtagatattaggaggaacaccagtggcgaaggcggcttgctggactgtaactaacgttgaggctcgaaagcgtggggagcaaacaggattagataccctggtagtccacgccgtaaacgatgatcactaggtgtcggtgggtatggacccatcggtgccgcagcaaacgcagtaagtgatccacctgggggagtacgttcgcaagaatgaaactcaaaggaattgacggggacccgcacaagcggtggagcatgtggtttaattcgaagcaacgcgaagaaccttaccaagtcttgacatcccgttgacgagtgagtaacgtcactttcccttcggggcaatggagacaggtggtgcatggttgtcgtcagctcgtgtcgtgagatgttgggttaagtcccgcaacgagcgcaacccctattcttagtagccagcgagtaaagtcgggcactctaaggagactgccggggacaacctggaggaaggtggggatgacgtcaaatcatcatgccccttatgatttgggctacacacgtgctacaatggcgtaaacaaagggaagcgagcctgtgaaggtaagcgaaactcagaaataacgtctcagttcggattgtagtctgcaactcgactacatgaagctggaatcgctagtaatcgcggatcagaatgccgcggtgaatacgttcccgggtcttgcacacaccgcccgtca

SEQ ID NO: 530 - DNA, 1352 bp, Artificial Sequence
  Synthetic polymer
agagtttgatcctggctcaggatgaacgctggcggcgtgcctaacacatgcaagtcgagcgatttacttcggtaaagagcggcggacgggtgagtaacgcgtgggtaacctgccctgcacacacggataacataccgaaaggtatgctaatacgagataaaatacttttatcgcatggtagaagtatcaaagcttttgcggtacaggatggacccgcgtctgattagctagttggtagggtaacggcttaccaaggcgacgatcagtagccgacctgagagggtgatcggccacattggaactgagacacggtccaaactcctacgggaggcagcagtggggaatattgcacaatgggcgaaagcctgatgcagcaacgccgcgtgagcgatgaaggccttcgggtcgtaaagctctgtcctcaaggaagataatgacggtacttgaggaggaagccccggctaactacgtgccagcagccgcggtaatacgtagggggctagcgttatccggaattactgggcgtaaagggtgcgtaggtggtttccttagtcagaggtgaaagggtacggctcaaccgtaataagcctttgaggctggggaacttgagtgcaggagaggagagtggaattcctagtgtagcggtgaaatgcgtagatattaggaggaacaccagttgcgaaggcggctctctggactgtaactgacactgaggcacgaaagcgtggggagcaaacaggattagataccctggtagtccacgccgtaaacgatgagtaagagctgtcggaggttaccccctttcagatggcacagctaacgcattaaagtactccccttgggaagtacgctcgcaagaatgaaactcaaaaaaattgacggggacccgcacaataagcggagcatgtggtttaattcgaagcaacgcgaagaaccttacctaaagcttgacatccttttgaccgatgcctaatcgcatctttcccttcggggacagaagtgacaggtggtgcatggttatcgtcacctcgtgtcgtgagatgttgggttaagtcccgcaacgagcgcaacccttatctttagtagccagcatgtaagatgggcactctagagagactgccagggataacctggaggaaggtggggatgacgtcaaatcatcatgccccttatgaccagggctacacacgtgctacaatggcgtaaacaaagggaagcgaccacgtgagtgtaagcgaatcccaaaaataacgtctcagttcggattgtagtctgcaactcgacaagagggaagctggaatcgctagtaatcgcgaatcagaatgtcgcggtgaatacgttcccgggtcttg

SEQ ID NO: 531 - DNA, 1489 bp, Artificial Sequence
  Synthetic polymer
agagtatgatcctggctcagaacgaacgctggcggcgtgcctaacacatgcaagtcgaacggaactatgatgattgattcttcggatgattgacttttagtttagtggcggacgggtgagtaacgcgtgagtaacctgcctctgagagtggaataacgttttgaaaagaacgctaataccgcataacgcatagaagccgcatgacatttatgccaaagattttatcgctcggagatggactcgcgtccgattagttagttggtgaggtaacggctcaccaagaccgcgatcggtagccggactgagaggttgaacggccacattgggactgagacacggcccagactcctacgggaggcagcagtgggggatattgcgcaatgggggcaaccctgacgcagcaacgccgcgtgaaggatgaaggttttcggattgtaaacttcttttatcaaggacgaaatctgacggtacttgatgaataagctccggctaactacgtgccagcagccgcggtaatacgtagggagcaagcgttgtccggatttactgggtgtaaagggtgcgtaggcggcttggtaagtcagatgtgaaatctatgggctcaacccataaactgcatttgaaactatcgagcttgagtgaagtagaggcaggcggaattccctgtgtagcggtgaaatgcgtagagatagggaggaacaccagtggcgaaggcggcctgctggactttaactgacgctgaggcacgaaagcgtgggtagcaaacaggattagataccctggtagtccacgctgtaaacgatgattactaggtgtggggggactgaccccttccgtgccggagttaacacaataagtaatccacctggggagtacggccgcaaggttgaaactcaaaggaattgacgggggcccgcacaagcagtggagtatgtggtttaattcgaagcaacgcgaagaaccttaccaggtcttgacatccaactaacgaagtagagatacatcaggtgcccttcggggaaagttgagacaggtggtgcatggttgtcgtcagctcgtgtcgtgagatgttgggttaagtcccgcaacgagcgcaacccttgctattagttgctacgcaagagcactctaataggactgccgttgacaaaacggaggaaggtggggacgacgtcaaatcatcatgccccttatgacctgggctacacacgtactacaatggtcatcaacagagggaagcaaaatagcgatatggagcaaacccctaaaaatggtctcagttcagattgcaggctgcaacccgcctgcatgaagtcggaattgctagtaatcgcggatcagcatgccgcggtgaatacgttcccgggccttgtacacaccgcccgtcacaccatgggagccggtaatacccgaagtcagtagcttaacctttggagagcgctgccgaaggtaggattggcgactggggtgaagtcgtaacaaggtaacc

SEQ ID NO: 532 - DNA, 1393 bp, Artificial Sequence
  Synthetic polymer
agagtttgatcctggctcaggatgaacgctggcggcgtgcttaacacatgcaagtcgaacgaagcgcttaggacggattacttcggtttgaagttctatttgactgagtggcggacgggtgagtaacgcgtgggtaacctgcctcatacagggggataacagttagaaatgactgctaataccgcataagcgcacaggaccgcatggtccggtgtgaaaaactccggtggtatgagatggacccgcgtctgattagctggttggtgaggtaacggcccaccaaggcgacgatcagtagccggcctgagagggtgaacggccacattgggactgagacacggcccaaactcctacgggaggcagcagtggggaatattgcacaatgggggaaaccctgatgcagcgacgccgcgtgaaggaagaagtatctcggtatgtaaacttctatcagcagggaagaaaatgacggtacctgactaagaagccccggctaactacgtgccagcagccgcggtaatacgtagggggcaagcgttatccggatttactgggtgtaaagggagcgtaggcggtttagcaagtcagaagtgaaagcccggggctcaactccgggactgcttttgaaactgttgaactagattgcaggagaggtaagtggaattcctagtgtagcggtgaaatgcgtagatattaggaggaacaccagtggcgaaggcggcttactggactgtaaatgacgctgaggctcgaaagcgtggggagcaaacaggattagataccctggtagtccacgccgtaaacgatgaatactaggtgtcagggagcaaagctctttggtgccgcagcaaacgcaataagtattccacctggggagtacgttcgcaagaatgaaactcaaaggaattgacggggacccgcacaagcggtggagcatgtggtttaattcgaagcaacgcgaagaaccttaccaagtcttgacatcccggtgaccagagggtaatgcctctttctcttcggagcactggagacaggtggtgcatggttgtcgtcagctcgtgtcgtgagatgttgggttaagtcccgcaacgagcgcaacccttatctttagtagccagcgagtaaagtcgggcactctagagggactgccggggacaacccggaggaaggcggggacgacgtcaaatcatcatgccccttatggccggggctacacacgtgctacaatggcgcgcacagagggaggcgagcgggcgaccgtgagcgaagcccggaaagcgcgcccctgttcggattgcagcctgcaactcggctgcatgaagccggaatcgctagtaatcgcggatcagaacgccgcggtgaatacgttcccgggtcttgcacacaccgcccgtca

SEQ ID NO: 533 - DNA, 1400 bp, Artificial Sequence
  Synthetic polymer
ttcgcccttagagtttgatcctggctcaggatgaacgctggcggcgtgcttaacacatgcaagtcgaacggagcacccctgaaggagttttcggacaactgtatgggaatgcttagtggcggacgggtgagtaacgcgtgagcaacctgccttggagtggggaataacagctggaaacagctgctaataccgcataatatgtctgaaccgcatggctctggacatcaaagatttatcgctctgagatggactcgcgtctgattagctagttggtggggcaacggcccaccaaggcgacgatcagtagccggactgagaggttggccggccacattgggactgagacacggcccagactcctacgggaggcagcagtggggaatattgggcaatgggcgcaagcctgacccagcaacgccgcgtgaaggaagaaggctttcgggttgtaaacttcttttctcagggacgaagcaagtgacggtacctgaggaataagccacggctaactacgtgccagcagccgcggtaatacgtaggtggcaagcgttatccggatttactgggtgtaaagggcgtgtaggcggggacgcaagtcagatgtgaaaaccacgggctcaacctgtggcctgcatttgaaactgtgtttcttgagtactggagaggcagacggaattcctagtgtagcggtgaaatgcgtagatattaggaggaacaccagtggcgaaggcggtctgctggacagcaactgacgctgaggcgcgaaagcgtggggagcaaacaggattagataccctggtagtccacgctgtaaacgatggatactaggtgtggggggactgaccccctccgtgccgcagttaacacaataagtatcccacctggggagtacgatcgcaaggttgaaactcaaaggaattgacgggggcccgcacaagcggtggagtatgtggtttaattcgaagcaacgcgaagaaccttaccagggcttgacatcccggtgaccgctctagagatagagttttcccttcggggacactggtgacaggtggtgcatggttgtcgtcagctcgtgtcgtgagatgttgggttaagtcccgcaacgagcgcaacccttattgttagctgctacgcaagagcactctagcgagactgccgttgacaaaacggaggaaggtggggacgacgtcaaatcatcatgccccttatgtcctgggccacacacgtactacaatggtggtcaacagagggaagcaaaaccgcgaggtggagcaaatccctaaaagccatcccagttcggatcgcaggctgcaacccgcctgcgtgaagttggaatcgctagtaatcgcggatcagcatgccgcggtgaatacgttcccgggccttgcacacaccgcccgtca

SEQ ID NO: 534 - DNA, 1406 bp, Artificial Sequence
  Synthetic polymer
ttagagtttgatcctggctcaggatgaacgctggcggcgtgcctaacacatgcaagtcgaacgggtgtacggggaggaaggcttcggccggaaaacctgtgcatgagtggcggacgggtgagtaacgcgtgggcaacctggcctgtacagggggataacacttagaaataggtgctaataccgcataacgggggaagccgcatggcttttccctgaaaactccggtggttgatgatgggcatgcgttgtattagctggttggtgaggtaacggctcaccaaggcgacgatacatagggggactgagaggttaaccccccacattggtactgagacacggaccaaactcctacgggaggcagcagtgaggaatattggtcaatggacgcaagtctgaaccagccatgccgcgtgcaggatgacggctctatgagttgtaaactgcttttgtacgagggtaaaccccgatacgtgtattgggttgaaagtatcgtacgaataaggatcggctaactccgtgccagcagccgcggtaatacggaggatccgagcgttatccggatttattgggtttaaagggtgcgtaggcggtttgataagttagaggtgaaatgtcggggctcaaccccgaaactgcctctaatactgttggactagagaatagttgcggtaggcggaatgtatggtgtagcggtgaaatgcttagagatcatacagaacaccgattgcgaaggcagcttaccaaactatatctgacgttgaggcacgaaagcgtgggtagcaaacaggattagataccctggtagtccacgcagtaaacgatgataactcgttgtcggcgatacacagtcggtgactaagcgaaagcgataagttatccacctggggagtacgttcgcaagaatgaaactcaaaggaattgacgggggcccgcacaagcggaggaacatgtggtttaattcgatgatacgcgaggaaccttacccgggcttgaaagttagcgacgacgcttgaaagagcgtttcccttcggggcgcgaaactaggtgctgcatggttgtcgtcagctcgtgccgtgaggtgtcgggttaagtcccataacgagcgcaacccctactgttagttgccatcaggtgatgctgggcactctagcgggactgccggtgtaagccgagaggaaggtggggatgacgtcaaatcagcacggcccttacgtccggggccacacacgtgttacaatggtaggtacagagggcagctaccctgcgaaggggtgcgaatctcgaaagcctatctcagttcggattggaggctgaaacccgcctccatgaagttggattcgctagtaatcgcgcatcagccatggcgcggtgaatacgttcccgggccttgcacacaccgcccgtca

SEQ ID NO: 535 - DNA, 1364 bp, Artificial Sequence
  Synthetic polymer
agagtttgatcctggctcaggatgaacgctggcggcgtgcctaacacatgcaagtcgagcgatttactttggtaaagagcgggggatgggtgagttacgcgtgggtaacctgccctgtacacacggataacataccgaaaggtatgataatacgagataaaatacttttatcgcatggtagaagtatcaaagctcttgcggtacaggatggacccgcgtctgattagctagttggtaaggtaacggcttaccaaggcgacgatcagtagccgacctgagagggtgatcggccacattggaactgagacacggtccaaactcctacgggaggcagcagtggggaatattgcacaatgggcgaaagcctgatgcagcaacgccgcgtgagcgatgaaggccttcgggtcgtaaagctctgtcctcaaggaagataatgacggtacttgaggaggaagccccggctaactacgtgccagcagccgcggtaatacgtagggggctagcgttatccggaattactgggcgtaaagggtgcgtaggtggtttcttaagtcagaggtgaaaggctacggctcaaccgtagtaagcctttgaaactggggaacttgagtgcaggagaggagagtggaattcctagtgtagcggtgaaatgcgtagatattaggaggaacaccagttgcgaaggcggcctgctggaccgcgactgacgttgaggctcgaaagcgtggggagcgaacaggattagataccctggtagtccacgccgtaaacgatgattactaggtgtcggggagcagagactgcccggtgccggcgcaaacgcaataagtagtccacctgggaagtacgtccgcaaggatgaaactcaaaggaattgacggggacccgcacaagcggtggagcatgtggtttaattcgaagcaacgcgaagaaccttacctggccttgacatcccggtgaatgcagggtaatgcctgcagcctttcggggcagcggagacaggtggtgcatggttgtcgtcagctcgtgtcgtgagatgttgggtcaagtcccgcaacgagcgcaacccctgcccctagtagccagcacgtaaaggtgggcactctagggggactgccggggacaacccggaggagggcggggacgacgtcaaatcatcatgccccttatggccagggctacacacgtgctacaatggcgtgcacagagggaagcaaagcggcgacgccaagcaaagcccggaaagcacgcctcagttcggattgcagcctgcaactcggctgcatgaagccggaatcgctagtaatcgcggatcagaacgccgcggtgaatacgttcccgggtcttgaacacaccgcccgtca

SEQ ID NO: 536 - DNA, 1382 bp, Artificial Sequence
  Synthetic polymer
ctggctcaggatgaacgctggcggcgtgcttaacacatgcaagtcgaacgaagcggatggaacggaggacttcggtacgaagttccatttgactgagtggcggacgggtgagtaacgcgtgggtaacctgcctcatacagggggataacagttagaaatgactgctaataccgcataagcgcacggaaccgcatggttttgtgtgaaaaactccggtggtatgagatggacccgcgtctgattagctggttggcggggtaacggcccaccaaggcgacgatcagtagccggcctgagagggtgaacggccacattgggactgagacacggcccaaactcctacgggaggcagcagtgggggatattgcacaatgggggaaaccctgatgcagcgacgccgcgtgaaggaagaagtatctcggtatgtaaacttctatcagcagggaagaaaatgacggtacctgaccaagaagccccggctaactacgtgccagcagccgcggtaatacgtagggggcaagcgttatccggatttactgggtgtaaagggagcgtaggcggcgacgcaagtcagaagtgaaagcccggggctcaactccgggactgcttttgaaactgcgttgctagattgcgggagaggcaagtggaattcctagtgtagcggtgaaatgcgtagatattaggaggaacaccagtggcgaaggcggcttgctggaccgtgaatgacgctgaggctcgaaagcgtggggagcaaacaggattagataccctggtagtccacgccgtaaacgatgaatactaggtgtcagggggcaaggccccctggtgccgcagcaaacgcaataagtattccacctggggagtacgttcgcaagaatgaaactcaaaggaattgacggggacccgcacaagcggtggagcatgtggtttaattcgaagcaacgcgaagaaccttaccaagtcttgacatcccgatgacgggggcgtaatggccctttcccctcggggcattggagacaggtggtgcatggttgtcgtcagctcgtgtcgtgagatgttgggttaagtcccgcaacgagcgcaacccttactttcagtagccagcgggttaggccgggcactctggagggactgccagggacaacctggaggaaggtggggatgacgtcaaatcatcatgccccttatgacttgggctacacacgtgctacaatggcgtaaacaaagggaggcgagcgagcgatcgtaagcaaatctcaaaaataacgtctcagttcggatcgtagtctgcaactcgactacgtgaagctggaatcgctagtaatcgcgaatcagcatgtcgcggtgaatacgttcccgggtcttgtacacaccgcccgtca

SEQ ID NO: 537 - DNA, 1395 bp, Artificial Sequence
  Synthetic polymer
ttagagtttgatcctggctcaggacgaacgctggcggcgtgcctaacacatgcaagtcgaacggagctagatgctgaggacgtagcttgctattgaatcttgtttagcttagtggcggacgggtgagtaacgcgtgagcaacctacctttcagagggggataacgtttggaaacgaacgctaataccgcatgatattattgggcagcattgcctgataatcaaaggagcaatccgctgaaagatgggctcgcgtccgattaggtagttggcggggtaacggcccaccaagccgacgatcggtagccggactgagaggttgaacggccacattgggactgagacacggcccagactcctacgggaggcagcagtgagggatattggtcaatgggggaaaccctgaaccagcaacgccgcgtgagggaagacggttttcggattgtaaacctctgtcctctgtgaagatgatgacggtagcagaggaggaagctccggctaactacgtgccagcagccgcggtaatacgtagggagcaagcgttgtccggatttactgggtgtaaagggtgcgtaggcggctttgcaagtcagaagtgaaatctatgggcttaacccataaactgcttttgaaactgcagggcttgagtgaagtagaggtaggcggaattcccggtgtagcggtgaaatgcgtagagatcgggaggaacaccagtggcgaaggcggcctactgggctttaactgacgctgaggcacgaaagcgtgggtagcaaacaggattagataccctggtagtccacgctgtaaacgatgatttctaggtgggggtggactgaccccctccgtgccggagttaacacaataagtaatccacctggggagttcggccgcaaggctgaaactcaaaggaattgacgggggcccgcacaagcggcggagtatgtggtttaattcgaagcaacgcgaggaaccttaccaggccttgacatgggatgcgaagatgcagagatgcatcggcggtcaacatccacacaggtggtgcatggttgtcgtcagctcgtgtcgtgagatgttgggtcaagtcccgcaacgagcgcaacccttgtggcatgttgctaacaggaaaagctgaggactcatgccagactgccggtgacaaaccggaggaaggtggggatgacgtcaaatcatcacgccccttatgaccagggctacacacgtgctacaatggcgtaaacaaagggaagcgaacatgtgggtgcaagcgaatcccaaaaataacgtctcagttcggattgtagtctgcaactcgactacatgaagctggaatcgctagtaatcgcgaatcagaatgtcgcggcgaatacgttcccgggtcttgcactcaccacccgtca

SEQ ID NO: 538 - DNA, 1375 bp, Artificial Sequence
  Synthetic polymer
gctcaggatgaacgctggcggcgtgcctaacacatgcaagtcgaacgggtgtacgggatggaaggctccggccggaagccccgtgcatgagtggcggacgggtgagtaacgcgtgggcaacctgccctgtacagggggacaacacttagaaataggtgctaataccgcataacggggggagccgcatggcacccccctgaaaactccggtggtatgagatggacccgcgtctgattagctagttggcggggtaacggcccaccaaggcagcgatcagtagccggcctgagagggtggacggccacattgggactgagacacggcccaaactcctacgggaggcagcagtgggggatattgcacaatggggggaaccctgatgcagcgacgccgcgtgaaggaagaagtatctcggtatgtaaacttctatcagcagggaagaaaatgacggtacctgactaagaagccccggctaactacgtgccagcagccgcggtaatacgtagggggcaagcgttatccggatttactgggtgtaaagggagcgtaggcggcagtgcaagtcagaagtgaaagcccggggctcaactccgggactgcttttgaaactgtacagcttgattgcaggagaggcaagtggaattcctagtgtagcggtgaaatgcgtagatattaggaggaacaccagtggcgaaggcggcttgctggactgtaaatgacgctgaggctcgaaagcgtggggagcaaacaggattagataccctggtagtccacgccgtaaacgatgaatactaggtgtcagggggcgaagccctttggtgccggagcaaacgcattaagtattccacctggggagtacgttcgcaagaatgaaactcaaaggaattgacggggacccgcacaagcggtggagcatgtggtttaattcgaagcaacgcgaagaaccttaccaggtcttgacatcccgatgacgaaggcgtaacggccttttccctgcggggcattggagacaggtggtgcatggttgtcgtcagctcgtgtcgtgagatgttgggttaagtcccgcaacgagcgcaacccctaccttcagtagccagcggatagagccgggcactctggagggactgccagggacaacctggaggaaggtggggatgacgtcaaatcatcatgccccttatgatctgggctacacacgtgctacaatggcgtaaacaaagggaagcgaccgtgcgagcgcaagcaaatcccagaaataacgtcccagttcggattgcagtctgcaactcggctgcatgaagctggaatcgctagtaatcgcggatcagaatgccgcggtgaatacgttcccgggtcttgcacacaccgcccgtca

SEQ ID NO: 539 - DNA, 1364 bp, Artificial Sequence
  Synthetic polymer
agagtttgatcctggctcaggatgaacgctggcggcgtgcctaacacatgcaagtcgagcgatttacttcggtaaagagcggcggacgggtgagtaacgcgtgggtaacctgccctgtacacacggataacataccgaaaggtatgctaatacgggataaaatatttttatcgcatggtagaaatatcaaagcttttgcggtacaggatggacccgcgtctgattagctagttggtaaggtaacggcttaccaaggcgacgatcagtagccgacctgagagggtgatcggccacattggaactgagacacggtccaaactcctacgggaggcagcagtggggaatattgcacaatgggcgaaagcctgatgcagcaacgccgcgtgagcgatgaaggccttcgggtcgtaaagctctgtcctcaaggaagataatgacggtacttgaggaggaagccccggctaactacgtgccagcagccgcggtaatacgtagggggctagcgttatccggaattactgggcgtaaagggtgcgtaggtggtttcttaagtcagaggtgaaaggctacggctcaaccgtagtaagcctttgaaactggggaacttgagtgcaggagaggagagtggaattcctagtgtagcggtgaaatgcgtagatattaggaggaacaccagttgcgaaggcggctctctggactgtaactgacactgaggcacgaaagcgtggggagcaaacaggattagatacccaggtagtccacgccgtaaacgatgagtactagctgtcggaggttacccccttcggtggcgcagctaacgcattaagtactccgcctgggaagtacgctcgcaagagtgaaaatcaaaaggaaatagacggggacccgcacaagtagcggagcatgtggtttaattcgaagcaacgcgaagaaccttacctaagcttgacatccttttgaccgatgcctaatcgcgtttttcccttcggggacagaagtgacaggtggtgcatggttgtcgtcagctcgtgtcgtgagatgttgggttaagtcccgcaacgagcgcaacccttgcctttagttgccagcattaagttgggcactctagagggactgccagggataacctggaggaaggtggggatgacgtcaaatcatcatgccccttatgcttagggctacacacgtgctacaatggcgtaaacaaagggaaacgaaggagtgatccggagcaaatctcagaaataacgtctcagttcggattgtagtctgcaactcgactacatgaagctggaatcgctagtaatcgcggatcagcatgccgcggtgaatacgttcccgggccttgcactcaccgcccgtca

SEQ ID NO: 540 - DNA, 1374 bp, Artificial Sequence
  Synthetic polymer
agagtttgatcctggctcaggacgaacgctggcggcgtgcgtaacacatgcaagtcgagcgagtggagtttttctgaacaaatctagcggcggacgggtgagtaacgcgtgggcaacctgcctcatacaggggaatagccttccaaaagggagattaatacctcataatattgtatcttcccatgaagtaacaattaaaggagtaatccgctatgatatgggcccgcggcgcattacctagtaggtgaggtaacgggtcaccacggccaccatgcgtaaccaacctgagagggtgatcggccacgttgggactgatacacagtccaaactcctacggaaggcagcagtggggaatattgcacaatgggggaaaccctgatccagcaaccccgcgtgagtgatgacgtctttcgggttgtaaagctctgtcttcagggacgataatgacggtacctgaggaggaagccccggctaactacgtgccagcagccgcggtaatacgtaggtggcgagcgttgtccggatttactgggcgtaaagggagcgtaggcggacttttaagtgagatgtgaaatacttgggctcaacttgagtgctgcatttcaaactggaagtctagagtgcaggagaggagaatggaattcctagtgtagcggtgaaatgcgtagagattaggaagaacaccagtggcgaaggcgattctctggactgtaactgacgctgaggctcgaaagcgtggggagcaaacaaaagtagataccctggtagtccacgccgtaaacgatgaatactaggtgtaggggttgtcatgacctctgtgccgccgctaacagcattaattattccgcggtggggagtacggtcgcaagattaaaactcaaaggaattgacgggggcccgcacacgcagcggagcatgtggttataattagaagcaacgcgaagcaccttccctagacttgacatctcgggcattacccttaatcgggaaagttctttcggggacaggaagacaggtggtgcatggttgtcgtcagctcttgtggtgagatgttgggttaagtcccgcaaggagcgcaccccttattgttagttgctaccatttagttgagcattctagcgagaccgcccgggttaaccgggaggaaggtggggaggacgtcaaatcttcatcccccttatgtctagggctccccacgtgctccaatggcaagtccaaagagaagcaagcccgtgaggtggagcaaaactcaaaaacttgtctcagttcggattgtaggctgaaactcgcctacatgaagctggagttgctagtaatcgcgaatcagcatgtcgcggtgaatacgttcccgggccttgcactcaccgcccgtca

SEQ ID NO: 541 - DNA, 1395 bp, Artificial Sequence
  Synthetic polymer
agagtttgatcctggctcaggatgaacgctggcggcgtgcttaacacatgcaagtcgaacggggcacccctgaaggagttttcggacaactgaagggaatgcttagtggcggacgggtgagtaacgcgtgagtaacctgccttggagtggggaataacagttggaaacagctgctaataccgcatgatgcagttgagtcgcatggctctgactgccaaagatttatcgctctgagatggactcgcgtctgattagctagttggcggggtaacggcccaccaaggcgacgatcagtagccggactgagaggttggccggccacattgggactgagacacggcccagactcctacgggaggcagcagtggggaatattgggcaatgggcgcaagcctgacccagcaacgccgcgtgaaggaagaaggctttcgggttgtaaacttcttttctcagggacgaagaaagtgacggtacctgaggaataagccacggctaactacgtgccagcagccgcggtaatacgtaggtggcaagcgttatccggatttactgggtgtaaagggcgtgtaggcgggagtgcaagtcagatgtgaaaaccacgggctcaacctgtggcctgcatttgaaactgtacttcttgagtactggagaggcagacggaattcctagtgtagcggtgaaatgcgtagatattaggaggaacaccagtggcgaaggcggtctgctggacagcaactgacgctgaggcgcgaaagcgtggggagcaaacaggattagataccctggtagtccacgctgtaaacgatggatactaggtgtggggggactgaccccctccgtgccgcagttaacacaataagtatcccacctggggagtacgatcgcaaggttgaaactcaaaggaattgacgggggcccgcacaagcggtggagcatgtggtttaattcgaagcaacgcgaagaaccttaccaggccttgacatcccggtgacagcatatgtaacgtatgttcccttcggggcagcggagacaggtggtgcatggttgtcgtcagcttgtgtcgtgagatgttgggttaagtcccgcaacgagcgcaacccctatccccagtagccagcgggtaaagccgggcactctgtggagactgccagggacaacctggaggaaggtggggatgacgtcaaatcatcatgccccttatggtctgggctacacacgtgctacaatggcgtaaacagagggaagcgagatggtgacatggagcaaatcccaaaaataacgtctcagttcggattgtagtctgcaacccggctacatgaagctggaatcgctagtaatcgcggatcagaatgccgcggtgaatacgttcccgggtcttgcacacaccgcccgtca

SEQ ID NO: 542 - DNA, 1385 bp, Artificial Sequence
  Synthetic polymer
agtttgatcctggctcaggatgaacgctggcggcgtgcttaacacatgcaagtcgaacggggcacccccaaaggagttttcggacaactgcggggaatgcctagtggcggacgggtgagtaacgcgtgagcaacctgccttggagtggggaataacagatggaaacatctgctaataccgcatgatgcagttgggccacatggctctgactgccaaagatttatcgctctgagatgggctcgcgtctgattagctagttggcggggcaacggcccaccaaggcgacgatcagtagccggactgagaggttggccggccacattgggactgagacacggcccagactcctacgggaggcagcagtggggaatattgggcaatgggcgcaagcctgacccagcaacgccgcgtgaaggaagaaggctttcgggttgtaaacttcttttctcagggacgaacagatgacggtacctgaggaataagccacggctaactacgtgccagcagccgcggtaatacgtaggtggcaagcgttatccggatttactgggtgtaaagggcgtgtaggcggggacgcaagtcagatgtgaaaaccacgggctcaacctgtggcctgcatttgaaactgtgtttcttgagtactggagaggcagacggaattcctagtgtagcggtgaaatgcgtagatattaggaggaacaccagtggcgaaggcggtctgctggacagcaactgacgctgaggcgcgaaagcgtggggagcaaacaagggtagataccctggtagtccacgctgtaaacgaccataatgggtgggggggactgaccccctccgtgccgcagttaacacaataagtatcccgcggggggagtacgatggcgaggtggaaactcaaaggagttgacgggggcccgcacaagcggtggagtatgtggtttaattagaagcaacgcgaagaaccttaccagggcgtggcatcccgaggcccggtgtagagatacacctttatcttcggagacctcggtgacaggtggtgcatggttgtcgtcagctcgtgtcgtgagaggttgggttaagtcccgcaacgagcgcaacccttattgttagttggtaggcaagagcactctagcgagactgccgttgacaaaacggaggaaggtggggacgacgtcaaatcatcatgccccttatgtcctgggccacacacgtactacaatggtggttaacagagggaagcaatactgtgaagtggagcaaatccctaaaagccatcccagttcggatcgcaggctgcaacccgcctgcatgaagttggaatcgctagtaatcgcggatcagcatgccgcggtgaatacgttccggggccttgcacacaccgcccgtca

SEQ ID NO: 543 - DNA, 1467 bp, Artificial Sequence
  Synthetic polymer
agagtttgacctggctcagaacgaacgctggcggcacgcttaacacatgcaagtcgaacggagaatttttggtttactggaaattcttagtggcggacgggtgagtaacacgtgagcaacctgcctctgagagagggatagcttctggaaacggatggtaatacctcataacgtatacttaaggcatcttaggtataccaaagattcatcactcagagatgggctcgcgtctgattagatagttggtgaggtaacggctcaccaagtcgacgatcagtagccggactgagaggttgaacggccacattgggactgagacacggcccagactcctacgggaggcagcagtggggaatattgcacaatggggggaaccctgatgcagcgatgtcgcgtggtttccccccggccttcggattgtaaactcctgtcttaaaggacgataatgacggtactttaggaggaagctccggctaactacgtgccagcagccgcggtaatacgtagggagcgagcgttgtccggaattactgggtgtaaagggagcgtaggcgggatggcaagtcagatgtgaaaactatgggctcaacccatagactgcatttgaaactgttgttcttgagtgaagtagaggtaagcggaattcctggtgtagcggtgaaatgcgtagatatcaggaggaacatcggtggcgaaggcggcttactgggcttttactgacgctgaggctcgaaagcgtggggagcaaacaggattagataccctggtagtccacgctgtaaacgatgattactaggtgtggggggactgaccccttccgtgccgcagttaacacaataagtaatccacctggggagtacggccgcaaggttgaaactcaaaggaattgacgggggcccgcacaagcagtggagtatgtggtttaattcgaagcaacgcgaagaaccttaccaggtcttgacatcgtatgcataccatagagatatgggaaacctcttcggaggcatatagacaggtggtgcatggttgtcgtcagctcgtgtcgtgagatgttgggttaagtcccgcaacgagcgcaacccttacctttagttgctacgcaagagcactctaaagggactgccgttgacaaaacggaggaaggtggggatgacgtcaaatcatcatgccccttatgacctgggctacacacgtactacaatggcaatcaacaaagagcagcaagacagtgatgtggagcgaatctcaaaaaattgtcccagttcagattgcaggctgcaactcgcctgcatgaagtcggaattgctagtaatcgcggatcagcatgccgcggtgaatacgttcccgggccttgtacacaccgcccgtcacaccatgggagtcggtaacacccgaagtcggtagtctccacaatgaggacgccgccgaaggtgggattgatgcttcaaaagtcgtaacaaggtaacc

SEQ ID NO: 544 - DNA, 1344 bp, Artificial Sequence
  Synthetic polymer
agagtttgatcctggctcaggatgaacgctggcggcgtgcttaacacatgcaagtcgaacggaaaggccctgcttgcagggtgctcgagtggcggacgggtgagtaacgcgtgagtaacctgccttggagtggggaataacacatcgaaagatgtgctaataccgcataatgcagttgggccgcatggctctgactgccaaagatttatcgctctgagatggactcgcgtctgattagctggttggcggggtaacggcccaccaaggcgacgatcagtagccggactgagaggttgaccggccacattgggactgagacacggcccagactcctacgggaggcagcagtggggaatattgggcaatgggcgcaagcctgacccagcaacgccgcgtgaaggaagaaggctttcgggttgtaaacttcttttatcagggacgaagcaagtgacggtacctgatgaataagccacggctaactacgtgccagcagccgcggtaatacgtaggtggcaagcgttatccggatttactgggtgtaaagggcgtgtaggcgggagtgcaagtcagttgtgaaaactatgggctcaacccatagcctgcatttgaaactgtccttcttgagtgctggagaggcaatcggaattcccgtgtgtagcggtgaaatgcgtagatatacggaggaacaccagtggcgaaggcggattgctggacagtaactgacgctgaggcgcgaaagcgtggggagcaaacaggattagataccctggtagtccacgccgtaaacgacgtaaaagggggtgtggggggtctgaccccatccgagccacagttacaacaataagtatcccacgtggggagtacggttgcaaggttgtaactcaaagggaattgacgggggcccgcacaagcggtggagtatgtggtttaattcttagcaacgagaagaaccttaccagggcttgacatcccggtgaccgctgtagagatacagttttcccttcggggacaccggtgacaggtggtgcatggttgtagtcagctcgtgtcgtgagatgttgggttaagtcccgcaacgagcgcaacccttattgttagttgctacgcaagagcactctagcgagactgccgttgacaaaacggaggaaggtggggacgacgtcaaatcatcatgccccttatgtcctgggccacacacgtactacaatggcggtaaacagagggaagcaaagccgcgaggtggagcaaatccctaaaagccgtcccagttcggattgcaggctgaaacccgcctgcatgaagttggaatcgctagtaatcgcggatcagcatgccgcggtgaat

SEQ ID NO: 545 - DNA, 1448 bp, Artificial Sequence
  Synthetic polymer
gcatgcctaacacatgcaagtcgaacggagattacttcggtaatcttagtggcgaacgggtgagtaacgcgtgggcaacctaccctctagatggggacaacatcccgaaaggggtgctaataccgaatgtgacagcaatctcgcatgaggatgctgtgaaagatggcctctatttataagctatcgctagaggatgggcctgcgtctgattagctagttggtggggtaacggcctaccaaggcgatgatcagtagccggtctgagaggatgaacggccacattgggactgagacacggcccagactcctacgggaggcagcagtggggaatcttccgcaatgggcgaaagcctgacggagcaatgccgcgtgagtgatgaaggaattcgttccgtaaagctcttttgtttatgacgaatgtgcaggttgtgaataatgacttgtaatgacggtagtaaacgaataagccacggctaactacgtgccagcagccgcggtaatacgtaggtggcgagcgttgtccggaattattgggcgtaaagagcatgtaggcggttttttaagtctggagtgaaaatgcggggctcaaccccgtatggctctggatactggaagacttgagtgcaggagaggaaaggggaattcccagtgtagcggtgaaatgcgtagatattgggaggaacaccagtggcgaaggcgcctttctggactgtgtctgacgctgagatgcgaaagccagggtagcgaacgggattagataccccggtagtcctggccgtaaacgatgggtataggtgtaggaggtatgaccccttctgtgccggagttaacgcaataagtaccccgcctgggggaggaaggtccggcaaaggatggaaactcaaaggaattgaacgggggcccgcacaagcggtggagtatgggtttattgacgaaagcgaaggaccttacccaaggcttgacattgaaagaccgctccagagatggaggtttcccttcggggacatgaaaacaggtggtgcatggcttgtcgtcagcttgtgtcgtgagatgttgggttaagtcccgcaacgagcgcaacccctatcctatgttaccagcgggtaatgccggggactcataggagactgccaaggacaacttggaggaaggcggggatgacgtcaagtcatcatgccccttatgtcttgggctacacacgtactacaatggtcggcaacagagggaagcgaagccgtgaggcagagcaaaccccagaaacccgatctcagttcggattgcaggctgcaactcgcctgcatgaagtcggaatcgctagtaatcgcaggtcagcatactgcggtgaatacgttcccgggccttgtacacaccgcccgtcacaccacgaaagttggtaacacccgaagccggtggggtgaccgtaaggagtccagccgtctaaggtgggg

SEQ ID NO: 546 - DNA, 1362 bp, Artificial Sequence
  Synthetic polymer
agagtttgatcctggctcaggatgaactctggcggcgtgcctaacacatgtaagtcgagcgatttacttcggtaaagagcggcggacgggtgagtaacgcgtgggtaacctgccctgtacacacggataacataccgaaaggtatgctaatacgagataaaatacttttatcgcatggtagaagtatcaaagcttttgcggtacaggatggacccgcgtctgattagctagttggtaaggtaacggcttaccaaggcgacgatcagtagccgacctgagagggtgatcggccacattggaactgagacacggtccaaactcctacgggaggcagcagtggggaatattgcacaatgggcgaaagcctgatgcagcaacgccgcgtgagcgatgaaggccttcgggtcgtaaagctctgtcctcaaggaagataatgacggtacttgaggaggaagccccggctaactacgtgccagcagccgcggtaatacgtagggggctagcgttatccggaattactgggcgtaaagggtgcgtaggtggtttcttaagtcagaggtgaaaggctacggctcaaccgtagtaagcctttgaaactggggaacttgagtgcaggagaggagagtggaattcctagtgtagcggtgaaatgcgtagatattaggaggaacaccagttgcgaaggcggctctctggactgtaactgacactgaggcacgaaagcgtggggagcaaacaggattaggtaccctggtagtccacgcggtaaacgatgattactaggtgtcggggggctagagcccttcggtgccgtcgcaaacgcaataagtaatccacctggggagtacgttcgcaagaatgaaactcaaaggaattgacggggacccgcacaagcggtggagcatgtggtttaattcgaagcaacgcgaagaaccttacctgaccttgacatcccaatgaccggacagtaatgtgtccttcccttcggggcattggagacaggtggtgtatggttgtcgtcagctcgtgtcgtgagatgttgggttaagtcccgcaacgagcgcaacccctatccttagtagccagcataaagatgggaactctagggagactgccggggataacccggaggaaggcggggacgacgtcaaatcatcatgccccttatggccagggctacacacgtgctacaatggcgtaaacaaagggaagcgaagccgtgaggtggagcaaatcccaaaaataacgtcccagttcggattgtagtctgcaactcgactacatgaagctggaatcgctagtaatcgcagatcagaacgctgcggtgaatacgttcccgggtcttgtacacaccgcccgtca

SEQ ID NO: 547 - DNA, 1406 bp, Artificial Sequence
  Synthetic polymer
ttcgcccttagagtttgatcctggctcaggacgaacgctggcggcgtgcttaacacatgcaagtcgaacggagcacccctgaaggagttttcggacaacggatgggaatgcttagtggcggactggtgagtaacgcgtgaggaacctgccttccagagggggacaacagttggaaacgactgctaataccgcatgatgcgttggagccgcatgactccgacgtcaaagatttatcgctggaagatggcctcgcgtctgattagctagttggtgaggtaacggcccaccaaggcgacgatcagtagccggactgagaggttggccggccacattgggactgagacacggcccagactcctacgggaggcagcagtggggaatattgggcaatgggcgcaagcctgacccagcaacgccgcgtgaaggaagaaggccctcgggttgtaaacttcttttattcgggacgaaacaaatgacggtaccgaatgaataagccacggctaactacgtgccagcagccgcggtaatacgtaggtggcaagcgttatccggatttactgggtgtaaagggcgtgtaggcgggagagcaagtcagacgtgaaattccagggctcaaccctggaactgcgtttgaaactgttcttcttgagtgatggagaggcaggcggaattccgtgtgtagcggtgaaatgcgtagatatacggaggaacaccagtggcgaaggcggcctgctggacattaactgacgctgaggcgcgaaagcgtggggagcaaacaggattagataccctggtagtccacgctgtaaacgatggatactaggtgtggggggtctgaccccctccgtgccgcagctaacgcaataagtatcccacctggggagtacgatcgcaaggttgaaactcaaaggaattgacgggggcccgcacaagcggtggagtatgtggtttaattcgaagcaacgcgaagaaccttaccagggcttgacatcccgctgaccggtgtagagatacacttttcccttcggggacagcggtgacaggtggtgcatggttgtcgtcagctcgtgtcgtgagatgttgggttaagtcccgcaacgagcgcaacccttatcttcagtagccagcgagtaaagttggccactctggagagactgccgtggataaccacggaggaaggtggggatgacgtcaaatcatcatgccccttatgttttgggctacacacgtgctacaatggctgaaacagagtgaggcgaacccgcgagggggagcaaatcacaaaaaagcggcctcagttcggattgtagtctgcaactcgactgcatgaagctggaatcgctagtaatcgcggatcagaatgccgcggtgaatacgttcccgggtcttgcactcaccgcccgtca

SEQ ID NO: 548 - DNA, 1402 bp, Artificial Sequence
  Synthetic polymer
agagtttgatcctggctcaggacgaacgctggcggcgtgcctaacacatgcaagtcgaacggagttgaaagagcttgctttttcaactgagtggcggacgggtgagtaacgcgtgagtaacctgcctttcagagggggataacgtttggaaacgaacgctaataccgcataagctggtagggccgcatggtccagccagaaaaggagcaatccgctgaaagatggactcgcgtccgattagctagttggtggggtaaaggcccaccaaggcgacgatcggtagccggactgagaggtcgaacggccacattgggactgagacacggcccagactcctacgggaggcagcagtgggggatattgcacaatggaggaaactctgatgcagcaacgccgcgtgagggaagaaggttttcggattgtaaacctctgtcttcggtgacgataatgacggtagccgaggaggaagctccggctaactacgtgccagcagccgcggtaatacgtagggagcgagcgttgtccggaattactgggtgtaaagggtgcgtaggcgggaaagcaagtcaggcgtgaaaactatcggcttaactggtagactgcgtttgaaactgtttttcttgagtgaagtagaggtaggcggaattcccggtgtagcggtggaatgcgtagagatcgggaggaacaccagtggcgaaggcggcctactgggctttaactgacgctgaggcacgaaagcatgggtagcaaacaggattagataccctggtagtccatgccgtaaacgatgattactaggtgtggggggtctgaccccttccgtgccggagttaacacaataagtaatccacctggggagtacggccgcaaggctgaaactcaaaggaattgacgggggcccgcacaagcagtggagtatgtggtttaattcgaagcaacgcgaagaaccttaccaggtcttgacatccaactaagatttaagagattagattgtgcccttcggggaaagttgagacaggtggtgcatggttgtcgtcagctcgtgtcgtgagatgttgggttaagtcccgcaacgagcgcaacccctattgctagttgctacgcaagagcactctagcgagactgccgttgacaaaacggaggaaggtggggatgatgtcaaatcatcatgccccttatgacctgggctacacacgtactacaatggccgttaacaacgggaagcaaagccgcgaggtggagcgaacccccaaaaacggtctcagttcagattgcaggctgcaacccgcctgcatgaagtcggaattgctagtaatcgcggatcagcatgccgcggtgaatacgttcccgggccttgtacacaccgcccgtcacaccatgggagccggtaatacccgaagtc

SEQ ID NO: 549 - DNA, 1362 bp, Artificial Sequence
  Synthetic polymer
ttagagtttgatcctggctcaggacgaacgctggcggcgtgcttaacacatgcaagtcgaacggagcaccttcgaaagagacttcggtcaatggaaaagaatgcttagtggcggacgggtgagtaacgcgtgagtaacctgccttggagtggggaataacagctggaaacagctgctaataccgcataatgcagttgggtcgcatggctctgactgccaaagatttatcgctctgagatggactcgcgtctgattagctagttggtggggcaacggcccaccaaggcgacgatcagtagccggactgagaggttggccggccacattgggactgagatacggcccagactcctacgggaggcagcagtggggaatattgggcaatgggcgaaagcctgacccagcaacgccgcgtgaaggaagaaggctttcgggttgtaaacttcttttgacagggaagagcagaagacggtacctgtcgaataagccacggctaactacgtgccagcagccgcggtaatacgtaggtggcaagcgttgtccggatttactgggtgtaaagggcgtgtaggcgggactgcaagtcagatgtgaaaaccatgggctcaacctatggcctgcatttgaaactgtagttcttgagtactggagaggcagacggaattcctagtgtagcggtgaaatgcgtagatattaggaggaacaccagtggcgaaggcggtctgctggacagcaactgacgctgaggcgcgaaagcgtggggagcaaacaggattagataccctggtagtccacgctgtaaacgatggatactaggtgtggggggactgacccccctccgtgccgcagttaacacaataagtatcccacctggggagtacgatcgcaaggttgaaactcaaaggaattgacgggggcccgcacaagcggtggagtatgtggtttaattcgaagcaacgcgaagaaccttaccagggcttgacatcccgatgaccggcatagagatatgcttttctcttcggagacatcggtgacaggtggtgcatggttgtcgtcagctcgtgtcgtgagatgttgggttaagtcccgcaacgagcgcaacccttattgttagttgctacgcaagagcactctagcgagactgccgttgacaaaacggaggaaggtggggacgacgtcaaatcatcatgccccttatgtcctgggccacacacgtactacaatggtggtcaacagagggaagcaataccgcgaggtggagcaaatccctaaaagccatcccagttcggatcgcgaggctgcaacccgcctgcgtgaaagttggaaatcgctagtaatcgcggatcagcgtgccgcggtgaa

SEQ ID NO: 550 - DNA, 1402 bp, Artificial Sequence
  Synthetic polymer
ttcgcccttagagtttgatcctggctcaggatgaacgctggcggcgtgcctaacacatgcaagtcgaacggagcacccctgaaggagttttcggacaactgatgggaatgcttagtggcggacgggtgagtaacgcgtgagcaacctgccttggagtggggaataacagctggaaacagctgctaataccgcataatatgtctgaaccgcatggctctggacatcaaagatttatcgctctgagatggactcgcgtctgattagctagttggtggggcaacggcccaccaaggcgacgatcagtagccggactgagaggttggccggccacattgggactgagacacggcccagactcctacgggaggcagcagtggggaatattgggcaatgggcgcaagcctgacccagcaacgccgcgtgaaggaagaaggctttcgggttgtaaacttcttttgtcagggacgaagcaagtgacggtacctgacgaataagccacggctaactacgtgccagcagccgcggtaatacgtaggtggcaagcgttatccggatttattgggtgtaaagggcgtgtaggcgggaatgcaagtcagatgtgaaaactatgggctcaacccatagcctgcatttgaaactgtatttcttgagtgctggagaggcaatcggaattccgtgtgtagcggtgaaatgcgtagatatacggaggaacaccagtggcgaaggcggattgctggacagtaactgacgctgaggcgcgaaagcgtggggagcaaacaggattagataccctggtagtccacgccgtaaacgatggatactaggtgtggggggggtggaccccctccgtgccggcagctaacgcagtaagtatcccacctggggggtgcgatcgcaaggtggaaactcaaaggaattgacgggggcccgcacaagcggtggagtatgtggtttaatttgacgcaacgcgaagaaccttaccagggcttgacatcctactaatgaaccagagatggattaggtgcccttcggggaaagtagagacaggtggtgcatggttgtcgtcagctcgtgtcgtgagatgttgggttgagtcccgcaacgagcgcaacccctattgttagttgctacgcaagagcactctagcgagactgccgttgacaaaacggaggaaggtggggaggacgtcaaatcatcatgccccttacgtcctgggccacacacgtactacaatggcggccaacaaagagaggcaaagccgcgaggtggagcaaatctcaaaaagccgtcccagttcggatcgcaggctgcaacccgcctgcgtgaagttggaatcgctagtaaccgcggatcagcatgccgcggtgaatacgttcccgggccttgcacacaccgcccgtca

SEQ ID NO: 551 - DNA, 1406 bp, Artificial Sequence
  Synthetic polymer
ttcgcccttagagtttgatcctggctcaggacgaacgctggcggcgtgcctaacacatgcaagtcgaacggagatacccgctgatgaggtacttcggtaatgattcttggatatcttagtggcggacgggtgagtaacgcgtgagcaacctgcctttcagagggggataacgtttggaaacgaacgctaataccgcatgatattattgagctgcatggcttgataatcaaaggagcaatccgctgaaagatgggctcgcgtccgattaggtagttggcggggcaacggcccaccaagccgacgatcggtagccggactgagaggttgaacggccacattgggactgagacacggcccagactcctacgggaggcagcagtgagggatattggtcaatgggggaaaccctgatgcagcaacgccgcgtgagtgacgaaggtcttcggattgtaaaactctgttcttggtgaagataatgacggtagccaaggagaaagctccggctaactacgtgccagcagccgcggtaatacgtagggagcaagcgttgtccggatttactgggtgtgaagggtgcgtaggcggctttgcaagtcagaagtgaaatccatgggcttaacccatgaactgcttttgaaactgtgaggcttgagtgaagtagaggtaggcggaattcccggagtagcggtgaaatgcgtagagatcgggaggaacaccagtggcgaaggcggcctactgggctttaactgacgctgaggcacgaaagcatgggtagcaaacaggattagataccctggtagtccatgccgtaaacgatgattactaggtgtggggggtctgaccccctccgtgccggagttaacacaataagtaatccacctggggagtacggccgcaaggttgaaactcaaaggaattgacgggggcccgcacaagcagtggagtatgtggtttaattcgaagcaacgcgaagaaccttaccaggtcttgacatccctctgaccgccctagagatagggaatcccttcggggcaggggtgacaggtggtgcatggttgtcgtcagctcgtgtcgtgagatgttgggttaagtcccgcaacgagcgcaacccctgcccgcagtagccagcacgttgtggtgggcactctgcggggactgccggggacaacccggaggaaggcggggacgacgtcaaatcatcatgccccttatggcctgggcgacacacgtgctacaatggccgtaaacagagagaagcaataccgcgaagtggagccaaactccaaaaacggtcccagttcggattgcaggctgaaactcgcctgcatgaagttggaattgctagtaatcgcggatcagcatgccgcggtgaatacgttcccgggccttgcactcaccgcccgtca

SEQ ID NO: 552 - DNA, 1492 bp, Artificial Sequence
  Synthetic polymer
agagtttgatggtggctcagattgaacgctggcggcaggcctaacacatgcaagtcggacggtagcacaggggagcttgctccccgggtgacgagtggcggacgggtgagtaatgtctgggaaactgcccggtggagggggataactactggaaacggtagctaataccgcataacgtcttcggaccaaagtgggggaccttcgggcctcacgccaccggatgtgcccagatgggattagctggtaggtggggtaacggctcacctaggcgacgatccctagctggtctgagaggatgaccagccacactggaactgagacacggtccagactcctacgggaggcagcagtggggaatattgcacaatgggcgcaagcctgatgcagccatgccgcgtgtatgaagaaggccttcgggttgtaaagtactttcagtcaggaggaagggtgtgaaattaatactttcatgcattgacgttactgacagaagaagcaccggctaactccgtgccagcagccgcggtaatacggagggtgcaagcgttaatcggaattactgggcgtaaagcgcacgcaggcggtttgttaagtcagatgtgaaatccccgggctcaacctgggaactgcatttgaaactggcaagcttgagtcttgtagaggggggtagaattccaggtgtagcggtgaaatgcgtagagatctggaggaataccggtggcgaaggcggccccctggacaaagactgacgctcaggtgcgaaagcgtggggagcaaacaggattagataccctggtagtccacgccgtaaacgatgtcgacttggaggctgttcccttgaggagtggcttccggagctaacgcgttaagtcgaccgcctggggagtacggccgcaaggttaaaactcaaatgaattgacgggggcccgcacaagcggtggagcatgtggtttaattcgatgcaacgcgaagaaccttacctactcttgacatccagagaatttagcagagatgctttagtgccttcgggaactctgagacaggtgctgcatggctgtcgtcagctcgtgttgtgaaatgttgggttaagtcccgcaacgagcgcaacccttatcctttgttgccagcacgtaatggtgggaactcaaaggagactgccggtgataaaccggaggaaggtggggatgacgtcaagtcatcatggcccttacgagtagggctacacacgtgctacaatggcgcatacaaagagaagcgacctcgcgagagcaagcggacctcataaagtgcgtcgtagtccggattggagtctgcaactcgactccatgaagtcggaatcgctagtaatcgtaaatcagaatgttacggtgaatacgttcccgggccttgtacacaccgcccgtcacaccatgggagtgggttgcaaaagaagtagatagcttaaccttcgggagggcgtttaccactttgtgattcatgactggggtgaagtcgt

SEQ ID NO: 553 - DNA, 1393 bp, Artificial Sequence
  Synthetic polymer
tagtggcgaacgggtgagtaacgcgtgggcaacctgccctctagatggggacaacatcccgaaaggggtgctaataccgaatgtgacagcaatctcgcatgaggatgctgtgaaagatggcctctatttataagctatcactagaggatgggcctgcgtctgattagctagttggtggggtaacggcctaccaaggcgatgatcagtagccggtctgagaggatgaacggccacattgggactgagacacggcccagactcctacgggaggcagcagtggggaatcttccgcaatgggcgaaagcctgacggagcaatgccgcgtgagtgatgaaggaattcgttccgtaaagctcttttgtttatgacgaatgtgcaggttgtgaataatgacttgtaatgacggtagtaaacgcaataagccacggctaactacgtgccagcagccgcggtaatacgtaggtggcgagcgttgtccggaattattgggcgtaaagagcatgtaggcggttttttaagtctggagtgaaaatgcggggtctcaaccccgtatggctctggatactggaagacttgagtgcaggagaggaaaggggaattcccagtgtagcggtgaaatgcgtagatattgggaggaacaccagtggcgaaggcgcctttctggactgtgtctgacgctgagatgcgaaagccagggtagcgaacgggattagataccccggtagtcctggccgtaaacgatgggtactaggtgtaggagtgttatcgaccccttctgtgtccggagtttaacgcaataagtaccccgtcctgggagtacgtcagcaaggatgaaactccaaggaattgaccggcggcccgcacaagcggtggagtatgtagtttaatttgacgcaacgcgaagaaccttaccaaggcttgacattgaatgaccgcttcagagatgaagctttcccttcggggacatgaaaacaggtggtgcatggctgtcgtcagctcgtgtcgtgagatgttgggttaagtcccgcaacgagcgcaacccctatcctatgttaccagcgggtaatgccggggactcataggagactgccaaggacaacttggaggaaggcggggatgacgtcaagtcatcatgccccttatgtcttgggctacacacgtactacaatggtcggcaacagagggaagcgaagccgtgaggcagagcaaaccccagaaacccgatctcagttcggattgcaggctgcaactcgcctgcatgaagtcggaatcgctagtaatcgcaggtcagtcatactgcggtgaatacgttcccgggtcctgttacacaccgtcccgtcacaccacgaaagttggttaacacccgaagtccggtggggttaaccgtaaggag

SEQ ID NO: 554 - DNA, 1397 bp, Artificial Sequence
  Synthetic polymer
ttcgcccttagagtttgatcctgggctcaggatgaacgctggcggcgtgcttaacacatgcaagtcgaacgagaaccatcggatcgaggattcgtccaagtgaaggtggggaaagtggcggacgggtgagtaacgcgtgagcaatctgccttggagtggggaataacggctggaaacagccgctaataccgcatgatacagctgggaggcatctccctggctgtcaaagatttatcgctctgagatgagctcgcgtctgattagctagttggcggggtaacggcccaccaaggcgacgatcagtagccggactgagaggttggccggccacattgggactgagacacggcccagactcctacgggaggcagcagtggggaatattgggcaatgggcgcaagcctgacccagcaacgccgcgtgaaggaagaaggctttcgggttgtaaacttcttttgtcagggacgaagcaagtgacggtacctgacgaataagccacggctaactacgtgccagcagccgcggtaatacgtaggtggcaagcgttatccggatttattgggtgtaaagggcgtgtaggcgggaatgcaagtcagatgtgaaaactatgggctcaacccatagcctgcttttgaaactgtatttcttgagtgctggagaggcaatcggaattccgtgtgtagcggtgaaatgcgtagatatacggaggaacaccagtggcgaaggcggattgctggacagtaactgacgctgaggcgcgaaagcgtggggagcaaacaggattagataccctggtagtccacgccgtaaacgaaggataattgggtggggggggggggaccccctccgtgccgcagctaacgcagtaagtttcccaccgggggggtgcgatcgcaaggttgaaactcaaaggaatggacgggggcccgcacaagcggtggagtatgtggtttaattggacgcaacgcgaggaaccttaccagggctggacatcttattaacgaaccagagatggattaggtgcccttcggggaaagtagagacaggtggtgcatggttgtcgtcagctcgtgtcgtgagatgttgggttaagtcccgcaacgagcgcaacccctattgttagttgctacgcaagagcactctagcgagactgccgttgacaaaacggaggaaggtggggacgacgtcaaatcatcatgccccttacgtcctgggccacacacgtactacaatggcggccaacaaagagaggcaaagccgcgaggtggagcaaatctcaaaaagccgtcccagttcggatcgcaggctgcaacccgcctgcgtgaagttggaatcgctagtaatcgcggatcagcatgccgcggtgaatacgttcccgggccttgcacacaccgccc

SEQ ID NO: 555 - DNA, 1390 bp, Artificial Sequence
  Synthetic polymer
agagtttgatcctggctcaggatgaacgctggcggcgtgcctaacacatgcaagtcgagcgagaagctgatgacagatacttcggttgaaggagtcagtggaaagcggcggacgggtgagtaacgcgtaggcaacctgccctttgcacagggatagccattggaaacgatgattaaaacctgataacaccatttggttacatgagcagatggtcaaagatttatcggcaaaggatgggcctgcgtctgattagctagttggtaaggtaacggcttaccaaggcgacgatcagtagccgacctgagagggtgaacggccacattggaactgagacacggtccaaactcctacgggaggcagcagtggggaatattgcacaatgggcgaaagcctgatgcagcaacgccgcgtgaaggaagaaggccttcgggtcgtaaacttctgtccttggggaagaagaactgacggtacccaaggaggaagccccggctaactacgtgccagcagccgcggtaatacgtagggggcaagcgttatccggaattattgggcgtaaagagtacgtaggtggcaacctaagcgcagggtttaaggcaatggctcaaccattgttcgccctgcgaactgggatgcttgagtgcaggagaggaaagcggaattcctagtgtagcggtgaaatgcgtagatattaggaggaacaccagttgcgaaggcggctctctggactgtaactgacactgaggcacgaaagcgtggggagcaaacaggattagataccctggtagtccacgccgtaaacgatgagtactagctgtcggaggttacccccttcggtggcgcagctaacgcattaagtactccgcctgggaagtacgctcgcaagagtgaaactcaaaggaattgacggggacccgcacaagtagcggagcatgtggtttaattcgaagcaacgcgaagaaccttacctaagcttgacatccttttgaccgatgcctaatcgcatctttcccttcggggacagaagtgacaggtggtgcatggttgtcgtcagctcgtgtcgtgagatgttgggttaagtcccgcaacgagcgcaacccttgcctttagttgccagcattaagttgggcactctagagggactgccagggataacctggaggaaggtggggatgacgtcaaatcatcatgccccttatgcttagggctacacacgtgctacaatgggtggtacagagggcagccaagtcgtgaggcggagctaatcccttaaagccattctcagttcggattgtaggctgaaactcgcctacatgaagctggagttactagtaatcgcagatcagaatgctgcggtgaatgcgttcccgggtcttgcacacaccgcccgtca

SEQ ID NO: 556 - DNA, 1407 bp, Artificial Sequence
  Synthetic polymer
gaacgctggcggcgtgcttacacatgcaagtcgaacgagaaagcaccttcgggtgtaagtagagtggcgaacgggtgagtaacacgtgagcaacctgcctttcacatcgggataactcagggaaacttgtgctaataccgaatactccgtacaatccgcatgctttgtacgggaaagctttcgcggtgaaagatgggctcgcggcccattaggtagttggtggggtaacggcctaccaagccgacgatgggtagccgggttgagagaccgaccggccacattgggactgagacacggcccagactcctacgggaggcagcagtggggaattttgcgcaatgggcgaaagcctgacgcagcaacgccgcgtgcgggatgaaggccttagggttgtaaaccgctttcagtagggaagaaactgacggtacctacagaagaagcaccggctaaatacgtgccagcagccgcggtaatacgtatggtgcgagcgttatccggatttattgggcgtaaagcggcgcgtaggcgggctattaagtcaggtgtcaaagcccggggctcaaccccggcccgcacctgaaactggtagtcttgagtctggtaggggaaagtggaattcccagtgtagcggtgaaatgcgcagatattgggaagaacaccggtggcgaaggcggctttctgggccacgactgacgctgaggcgcgaaagctaggggagcaaacaggattagataccctggtagtcctagccgtaaacgagtgaatactaggtgtgggggattaagatcttccgtgccgcaagctaacgcattaagtattccgcctggggagtacggccgcaaggctaaaactcaaaggaattgacggggacccgcacaagcagcggagcatgtggcttaattcgaagcaacgcgaagaaccttacctgggcttgacatataggtgaagcggtggaaacatcgtggccgaaaggagcctacacaggtggtgcatggctgtcgtcagctcgtgtcgtgagatgtttggttaagtccagcaacgagcgcaacccttgtcgtatgttgccagcattaagttggggactcatacgagactgccggcgtcaagccggaggaaggtggggacgacgtcaagtcatcatgccccttatgtccagggctgcacacgtgctacattggccggcacaacgggctgcgaactcgcgagagtaagcgaatcccttaaaaccggtcccagttcggattggaggctgcaacccgcctccatgaagtcggagttgctagtaatcgcggatcagcatgccgcggtgaatacgttcccgggtcttgtacacaccgcccgtcacaccacccgagtcgtctgcacccgaagtcgctggcccaaccttttaggagggaggcgccgaag

SEQ ID NO: 557 - DNA, 1508 bp, Artificial Sequence
  Synthetic polymer
  misc_feature (20)..(21): n is a, c, g, or t
ttcgcccttagagtttgatnntggctcaggacgaacgctggcggcgtgcctaacacatgcaagtcgaacggggatacgcgctgaacgaggtagcttgctattgaattcttgcatatcctagtggcggacgggtgagtaacgcgtgagcaacctgcctttcagagggggataacgtttggaaacgaacgctaataccgcatgagactacggcatcgagtggtgcagtggccaaaggagcaatccgctgaaagatgggctcgcgtccgattagatagttggcggggtaacggcccaccaagtcgacgatcggtagccggactgagaggttggacggccacattgggactgagacacggcccagactcctacgggaggcagcagtgagggatattggtcaatgggggaaaccctgaaccagcaacgccgcgtgagggaagacggttttcggattgtaaacctctgtcctctgtgaagataatgacggtagcagaggaggaagctccggctaactacgtgccagcagccgcggtaatacgtagggagcgagcgttgtccggatttactgggtgtaaagggtgcgtaggcggctttgcaagtcagaagtgaaatccatgggcttaacccatgaactgcttttgaaactgcagggcttgagtgaagtagaggtaggcggaattcccggtgtagcggtgaaatgcgtagagatcgggaggaacaccagtggcgaaggcggcctactgggctttaactgacgctgaagcacgaaagcgtgggtagcaaacaggattagataccctggtagtccacgccgtaaacgatgattactaggtgtggggggtctgaccccctccgtgccggagttaacacaataagtaatccacctggggagtacggccgcaaggctgaaactcaaaggaattgacgggggcccgcacaagcagtggagtatgtggattaattcgaagcaacgcgaagaaccttaccaggtcttgacatcccgctaacgaagtagagatacattaggtgcctttcggggaaagcggagacaggtggtgcatggttgtcgtcagctcgtgtcgtgagatgttgggttaagtcccgcaacgagcgcaacccttactgttagttgctacgcaagagcactctagcaggaccgccgttgacaaaacggaggaaggtggggatgatgtcaaatcatcatgccccttatgacctgggcctcacacgtactacaatggccgccaacagagggaagcaaagccgcgaggcagagcaaaaccctaaaagcggtctcagttcggatcgcaggctgcaacccgcctgcgtgaagttggaattgctagtaatcgcggatcagcatgccgcggtgaatacgttcccgggccttgtacacaccgcccgtcacaccatgggagccggtaatacccgaagtcagtagtctaaccgcaaggggggcgctgccgaaggtaggattggcgactggggtgaagtcgtaacaaggtaaccgt

SEQ ID NO: 558 - DNA, 1466 bp, Artificial Sequence
  Synthetic polymer
ttgatcctggctagggacgaacgctggcggcacgcctaacacatgcaagtcgaacggagatatatgcttcggtatatatcttagtggcggacgggtgagtaacacgtgagtaacctgcctttaagagagggatagcttctagaaatagatggtaatacctcataatatagcgaaatcgcatggttttgctatcaaagatttatcgcttagagatggactcgcgtctgattagatagttggtgaggtaacggctcaccaagtcgacgatcagtagccggactgagaggttgaacggccacattgggactgagacacggcccagactcctacgggaggcagcagtggggaatattgcacaatgggggaaaccctgatgcagcgatgccgcgtggaggaagaaggttttcggattgtaaactccttttatcagggacgataatgacggtacctgaagaaaaagctccggctaactacgtgccagcagccgcggtaatacgtagggagcgagcgttgtccggaattactgggtgtaaagggagcgtaggcgggacggcaagtcagatgtgaaaactatgggctcaacctatagaccgcatttgaaactgctgttcttgagtgaggtagaggtaagcggaattcctggtgtagcggtgaaatgcgtagagatcaggaggaacatcggtggcgaaggcggcttactgggcctttactgacgctgaggctcgaaagcgtggggagcaaacaggattagataccctggtagtccacgctgtaaacgatgattactaggtgtggggggactgaccccttccgtgccgcagttaacacaataagtaatccacctggggagtacggccgcaaggttgaaactcaaaggaattgacgggggcccgcacaagcagtggagtatgtggtttaattcgaagcaacgcgaagaaccttaccaggtcttgacatcgagtgacgtactcagagatgagtatttccttcgggacacaaagacaggtggtgcatggttgtcgtcagctcgtgtcgtgagatgttgggttaagtcccgcaacgagcgcaacccttatcattagttgctacgcaagagcactctaatgagactgccgttgacaaaacggaggaaggtggggacgacgtcaaatcatcatgccccttatgacctgggctacacacgtactacaatggcaataaaacagagggaagcaagacagcgatgtggagcaaatcccgaaaaattgtctcagttcagattgcaggctgcaactcgcctgcatgaagtcggaattgctagtaatcgcagatcagcatgctgcggtgaatacgttcccgggccttgtacacaccgcccgtcacaccatgggagtcggtaacacccaaagtcggttgtctaacagtaatgaggacgccgcctaaggtgggattgatgactggggtgaagtcgtaacaaggtagccgta

SEQ ID NO: 559 - DNA, 1476 bp, Artificial Sequence
  Synthetic polymer
tagagtttgatcatggctcaggatgaacgctggcggcgtgcttaacacatgcaagtcgaacgagaatccagggaaggagttttcggacaacggaactggaggaaagtggcggacgggtgagtaacgcgtgagcaatctgccttggagtggggaataacacaacgaaagctgtgctaataccgcatgatgcagcagggaggcatctcctggctgccaaagatttatcgctctgagatgagctcgcgtctgattagctagttggtggggcaacggcccaccaaggcgacgatcagtagccggactgagaggttggccggccacattgggactgagacacggcccagactcctacgggaggcagcagtggggaatattgggcaatgggcgcaagcctgacccagcaacgccgcgtgaaggaagaaggctttcgggttgtaaacttcttttgagagggacgaaacaaatgacggtacctcttgaataagccacggctaactacgtgccagcagccgcggtaatacgtaggtggcaagcgttatccggatttattgggtgtaaagggcgtgtaggcgggattgcaagtcagatgtgaaaactatgggcttaacccatagcctgcatttgaaactgtagttcttgagtgctggagaggcaatcggaattccgtgtgtagcggtgaaatgcgtagatatacggaggaacaccagtggcgaaggcggattgctggacagtaactgacgctgaggcgcgaaagcgtggggagcaaacaggattagataccctggtagtccacgccgtaaacgatggatactaggtgtggggggactgaccccctccgtgccgcagctaacgcaataagtatcccacctggggagtacgatcgcaaggttgaaactcaaaggaattgacgggggcccgcacaagcggtggagtatgtggtttaattcgacgcaacgcgaagaaccttaccagggcttgacatcctgctaacgaagtagagatacatcaggtgcccttcggggaaagcagagacaggtggtgcatggctgtcgtcagctcgtgtcgtgagatgttgggttaagtcccgcaacgagcgcaacccttgttgctagttgctacgcaagagcactctagcgagactgccgttgacaaaacggaggaaggtggggacgacgtcaagtcatcatgccccttatgtcctgggccacacacgtactacaatggcggtcaacaaagagaggcaaagccgcgaggtggagcaaatctcaaaaagccgtcccagttcggattgcaggctgcaacccgcctgcatgaagttggaatcgctagtaatcgcggatcagcatgccgcggtgaatacgttcccgggccttgtacacaccgcccgtcacaccatgagagtcgggaacacccgaagtccgtagcctaaccgcgaggggggcgcggccgaaggtgggttcgataattggggtgaag

SEQ ID NO: 560 - DNA, 1477 bp, Artificial Sequence
  Synthetic polymer
agtttgatcatggctcaggatgaacgctggcggcgtgcttaacacatgcaagtcgaacggggtacccttgaaggagacttcggtcaacggaaaggaatacctagtggcggacgggtgagtaacgcgtgaggaacctgccttggagtggggaataacagttggaaacagctgctaataccgcatgaagcagttgagtcgcatggctctgactgccaaagatttatcgctctgagatggcctcgcgtctgattagctagttggtggggtaaaggcctaccaaggcgacgatcagtagccggactgagaggttggccggccacattgggaytgagacacggcccagactcctacgggaggcagcagtggggaatattgggcaatgggcgcaagcctgacccagcaacgccgcgtgaaggaagaaggctttcgggttgtaaacttcttttatcagggacgataatgacggtacctgatgaataagccacggctaactacgtgccagcagccgcggtaatacgtaggtggcaagcgttatccggatttactgggtgtaaagggcgtgtaggcgggactgcaagtcagatgtgaaaactatgggctcaactcatagcctgcatttgaaactgtagttcttgagtactggagaggcaggcggaattccgtgtgtagcggtgaaatgcgtagatatacggaggaacaccagtggcgaaggcggcctgctggacagcaactgacgctgaggcgcgaaagcgtggggagcaaacaggattagataccctggtagtccacgctgtaaacgatggatactaggtgtggggggtctgaccccctccgtgccgcagttaacacaataagtatcccacctggggagtacgatcgcaaggttgaaactcaaaggaattgacgggggcccgcacaagtggtggagtatgtggtttaattcgaagcaacgcgaagaaccttaccagggcttgacatggaggtgaccgctctagagatagggcttcctcttcggaggcacctcacacaggtggtgcatggttgtcgtcagctcgtgtcgtgagatgttgggttaagtcccgcaacgagcgcaacccttgttgttagttgctacgcaagagcactctagcgagactgccgttgacaaaacggaggaaggtggggacgacgtcaaatcatcatgccccttatgtcctgggccacacacgtactacaatggtggtcaacagagggaggcaataccgcgaggtggagcaaacccctaaaagccatcccagttcggattgcaggctgcaacccgcctgcatgaagttggaatcactagtaatcgcggatcagcatgccgcggtgaatgcgttctcgggccttgtacacaccgcccgtcacaccatgagagtcgggaacacccgaagtccgtagcctaaccgcaaggggggcgcggccgaaggtgggctcgataattggggtgaagtcgtaa

SEQ ID NO: 561 - DNA, 1400 bp, Artificial Sequence
  Synthetic polymer
agagtttgatcctttctcggattgaacgctggcggcaggcctaacacatgcaagtctagcggtaacagggagtagcttgctactccgctgacgagcggcggacgggtgagtaatgtctggggatctgcctgatggagggggataactactggaaacggtagctaataccgcataacgtcgcaagaccaaagagggggacctccgggcctcttgccatcggatgaacccagatgggattagctagtaggtggggtaatggctcacctaggcgacgatccctagctggtctgagaggatgaccagccacactggaactgagacacggtccagactcctacgggaggcagcagtggggaatattgcacaatgggcgcaagcctgatgcagccatgccgcgtgtgtgaagaaggccttcgggttgtaaagcactttcagcgaggaggaaggcattaaggttaataaccttggtgattgacgttactcgcagaagaagcaccggctaactccgtgccagcagccgcggtaatacggagggtgcaagcgttaatcggaattactgggcgtaaagcgcacgcaggcggtttgttaagtcggatgtgaaatccccgggctcaacctgggaactgcattcgaaactggcaagcttgagtcttgtagaggggggtagaattccaggtgtagcggtgaaatgcgtagagatctggaggaataccggtggcgaaggcggccccctggacaaagactgacgctcaggtgcgaaagcgtggggagcaaacaggattagataccctggtagtccacgccgtaaacgatgtcgacttggaggttgtgcccttgaggcgtggcttccggagctaacgcgttaagtcgaccgcctggggagtacggccgcaaggttaaaactcaaatgaattgacgggggcccgcacaagcggtggagcatgtggtttaattcgatgcaacgcgaagaaccttacctactcttgacatccagagaactttccagagatggattggtgccttcgggaactctgagacaggtgctgcatggctgtcgtcagctcgtgttgtgaaatgttgggttaagtcccgcaacgagcgcaacccttatcctttgttgccagcggttcggccgggaactcaaaggagactgccagtgataaactggaggaaggtggggatgacgtcaagtcatcatggcccttacgagtagggctacacacgtgctacaatggcgcatacaaagagaagcgacctcgcgagagcaagcggacctcataaagtgcgtcgtagtccggattggagtctgcaactcgactccatgaagtcggaatcgctagtaatcgtagatcagaatgctacggtgaatacgttcccgggccttgcactcaccgcccgtc

SEQ ID NO: 562 - DNA, 1360 bp, Artificial Sequence
  Synthetic polymer
gcctaacacatgcaagtcgaacggtaacaggaagcagcttgctgctttgctgacgagtggcggacgggtgagtaatgtctgggaaactgcctgatggagggggataactactggaaacggtagctaataccgcataacgtcgcaagcacaaagaggaggaccttagggccttttgccatcggatgtgcccacgtgcgattagctagtaggtggggtaacggctcaccaaggcgacgatccctagctggtctgagaggatgaccagcaacactggaactgagacacggtccagactcctacgggaggcagcagtggggaatattgcacaatgggcgcaagcctgatgcagccatgccgcgtgtatgaagaaggccttcgggttgtaaagtactttcagcggggaggaagggagttaagttaatacctttccacattgacgttacccgcagaagaagcaccggctaactccgtgccagcagccgcggtaatacggagggtgcaagcgttaatcggaattactgggcgtaaagcgcacgcaggcggtttgttaagtcagatgtgaaatccccgggctcaacctgggaactgcttctgaaactggaaagcttgagtctcgtagaggggggtagaattcctagtgtagcggtgaaatgcgtagagatctggaggaataccggtggcgaaggcggccccctggacgaagactgacgctcaggtgcgaaagcgtggggagcaaacaggattagataccctggtagtccacgccgtaaacgatgtagacttggaggttgtgtccttgaagcgtgacttccggagctaacgcgttaagtcgtccgcctggggagtacggccgcaaggttaaaactcaaatgaattgacgggggccgcacaagcggtggagcatgtggtttaattcgatgcaacgcgaagaaccttacctggtcttgacatccagggaagtgttcagagatgagagtgtgccctcgggagccctgagacaggtgctgcatggctgtcgtcagctcgtgttgtgaaatgttgggttaagtcccgcaacgagcgcaacccttatcctttgttgccagcagtccggccgggcactctaaggagactgccagtgataaactggaggaaggtggggatgacgtcaagtcatcatggcccttacgaccagggctacacacgtgctacaatggcccatacaaagagtagcgaactcgcgagagggagcggacctcataaagtgcgtcgtagtccggattggagtctgcaactcgactccatgaagtcggaatcgctagtaatcgtggatcagaatgccacggtgaatacgttcccgggccttgtacacaccgcccgt

SEQ ID NO: 563 - DNA, 1365 bp, Artificial Sequence
  Synthetic polymer
agagtttgatcctggctcaggatgaacgctggcggcgcgcctaacacatgcaagtcgaacggcacccatcttcggatggaagcgagtggcgaacggctgagtaacacgtggagaacctgccccctcccccgggatagccgcccgaaaggacgggtaataccggataccccggggggccgtatggcaccccggctaaagccccgacgggaggggatggctccgcggcccatcaggtagacggcggggtgacggcccaccgtgccgacaacgggtagccgggttgagagaccgaccggccagattgggactgagacacggcccagactcctacgggaggcagcagtggggaatcttgcgcaatggggggaaccctgacgcagcgacgccgcgtgcgggacggaggccttcgggtcgtaaaccgctttcagcagggaagagtcaagactgtacctgcagaagaagccccggctaactacgtgccagcagccgcggtaatacgtagggggcgagcgttatccggattcattgggcgtaaagcgcgcgtaggcggcccggcaggccgggggtcgaagcggggggctcaaccccccgaagcccccggaacctccgcggcttgggtccggtaggggagggtggaacacccggtgtagcggtggaatgcgcagatatcgggtggaacaccggtggcgaaggcggccctctggaccgagaccgacgctgaggcgcgaaagctgggggagcgaacaggattagataccctggtagtcccagccgtaaacgatggacgctaggtgtggggggacgatccccccgtgccgcagccaacgcattaagcgtcccgcctggggagtacggccgcaaggctaaaactcaaaggaattgacgggggcccgcacaagcagcggagcatgtggcttaattcgaagcaacgcgaagaaccttaccagggcttgacatatgggtgaagcgggggagaccccgtggccgagaggagcccatacaggtggtgcatggctgtcgtcagctcgtgtcgtgagatgttgggttaagtcccgcaacgagcgcaacccccgccgcgtgttgccatcgggtgatgccgggaacccacgcgggaccgccgccgtcaaggcggaggagggcggggacgacgtcaagtcatcatgccccttatgccctgggctgcacacgtgatacaatggccggtacagaaggcagcaaccacgcaagtgcaagcaaatctcaaaaagccggtctcagttcggattgtgggctgcaacccgcccacatgaagttggaatcgctagtaatcgcaggtcagcatactgcggtgaatacgttcccgggccttgcactcaccgcccgtca

SEQ ID NO: 564 - DNA, 1390 bp, Artificial Sequence
  Synthetic polymer
agagtttgatcctggctcaggacgaacgctggcggcgtgcctaacacatgcaagtcgaacggaactgttttgaaagatttcttcggaatgaatttgatttagtttagtggcggacgggtgagtaacgcgtgagtaacctgccttcaagagggggataacattctgaaaagaatgctaataccgcataatatatcggaaccacatggttctgatatcaaagattttatcgcttgaagatggactcgcgtccgattagttagttggtgaggtaacggctcaccaagaccgcgatcggtagccggactgagaggttgaacggccacattgggactgagacacggcccagactcctacgggaggcagcagtgggggatattgcgcaatgggggcaaccctgacgcagcaacgccgcgtgaaggatgaaggttttcggattgtaaacttcttttattaaggacgaaatttgacggtacttaatgaataagctccggctaactacgtgccagcagccgcggtaatacgtagggagcaagcgttgtccggatttactgggtgtaaagggtgcgtaggcggctttgcaagtcagatgtgaaatctatgggctcaacccataaactgcatttgaaactgtagagcttgagtgaagtagaggcaggcggaattccccgtgtagcggtgaaatgcgtagagatggggaggaacaccagtggcgaaggcggcctgctgggctttaactgacgctgaggcacgaaagcgtgggtagcaaacaggattagataccctggtagtccacgctgtaaacgatgattaataggtgtggggggtctgaccccttctgttccggagttaacacaataagtgatccaactggggaatacgaccgcgaggttgaaactcagaggaaatggcgggggcccgcacaagcggtggagtatgtggtttaattagaaacaacacgaagagcctaaccaggtcttgacatccaactaacgaagtagagatacattaggtgcccttcggggaaagcagagacaggtggtgcatggttgtcgtcagctcgtgtcgtgagaggttgggttaagtcccgcaacgagcgcaacccctattgtgagttgctacgcaagagcactctaacgagactgccgttgacaaaacggaggaaggtggggacgacgtcaaatcatcatgccccttatatcctgggctacacaagtaatacaatggcggtcaacagagggatgcaaagccgcgaggcagagcgaacccctaaaagccgtcccagttcggatcgtgggctgcaacctgcccacgtgaagtcggaatcgctagtaatcgcggatcagcatgccgcggtgaatacgttcccgggccttgcacacaccgcccgtca

SEQ ID NO: 565 - DNA, 1411 bp, Artificial Sequence
  Synthetic polymer
agagtttgatcctggctcaggatgaacgctggcggcatgcctaacacatgcaagtcgaacggagattgcttcggtaatcttagtggcgaacgggtgagtaacgcgtaggcaacctgccctttagatggggacaacattccgaaaggggtgctaataccgaatgtgacggaagtatcgcatgacacttccgtgaaagatggcctctacatgtaagctatcgctaaaggatgggcctgcgtctgattagctagttggtgcggtaacggcgcaccaaggcgacgatcagtagccggtctgagaggatgaacggccacattgggactgagacacggcccagactcctacgggaggcagcagtggggaatcttccgcaatgggcgaaagcctgacggagcaatgccgcgtgagtgatgaagggattcgtcccgtaaagctctgttgtcaaggacgaatgtgcatactgcgaatagttgtatgtaatgacggtacttgacgaggaagccacggctaactacgtgccagcagccgcggtaatacgtaggtggcgagcgttgtccggaattattgggcgtaaagagcatgtaggcggttttttaagtccggagtgaaaatgcggggctcaaccccgtatggctctggatactgaaagacttgagtgcaggagaggaaaggggaattcccagtgtagcggtgaaatgcgtagatattgggaggaacaccagtggcgaaggcgcctttctggactgtgtctgacgctgagatgcgaaagccagggtagcgaacgggattagataccccggtagtcctggccgtaaacgatgggtactaggtgtaggaggtatcgaccccttctgtgccggagttaacgcaataagtaccccgcctggggagtacgtccgcaaggatgaaactcaaaggaattgacgggggcccgcacaagcggtggagtatgtggtttaattcgacgcaacgcgaagaaccttaccaaggcttgacattgattgaaagacatagagatatgtccctctcttcggagacaagaaaacaggtggtgcatggctgtcgtcagctcgtgtcgtgagatgttgggttaagtcccgcaacgagcgcaacccctatcctatgttaccagcacgtgatagtggggactcataggagactgccaaggacaacttggaggaaggcggggatgacgtcaagtcatcatgctccttatgtcttgggctacacacgtactacaatggtcggcaacagagggaagcgaagccgcgaggcagagcaaaccccagaaacccgatctcagttcggattgcaggctgcaactcgcctgcatgaagtcggaatcgctagtaatcgcaggtcagcatactgcggtgaatacgttcccgggccttgcacacaccgcccgtca

SEQ ID NO: 566 - DNA, 1395 bp, Artificial Sequence
  Synthetic polymer
ttcgcccttagagtttgatcctggctcaggatgaacgctggcggcgtgcttaacacatgcaagtcgaacggagtttatatgattgaggattcgtccaaatgattataaacttagtggcggacgggtgagtaacgcgtgagtaacctgccttggagtggggaataacacagagaaatttgtgctaataccgcataatgcatttgtatcgcatggtactgaatgccaaagatttatcgctctgagatggactcgcgtctgattagctagttggcggggtaacggcccaccaaggcgacgatcagtagccggactgagaggttggccggccacattgggactgagacacggcccagactcctacgggaggcagcagtggggaatattgggcaatgggcgcaagcctgacccagcaacgccgcgtgaaggaagaaggctttcgggttgtaaacttcttttatcagggacgaacaaatgacggtacctgatgaataagccacggctaactacgtgccagcagccgcggtaatacgtaggtggcaagcgttatccggatttactgggtgtaaagggcgtgtaggcgggattgcaagtcagatgtgaaaaccacgggctcaacctgtggcctgcatttgaaactgtagttcttgagtactggagaggcagacggaattcctagtgtagcggtgaaatgcgtagatattaggaggaacaccagtggcgaaggcggtctgctggacagcaactgacgctgaggcgcgaaagcgtggggagcaaacaggattagataccctggtagtccacgctgtaaacgatggatactaggtgtggggggtctgaccccctccgtgccgcagttaacacaataagtatcccacctggggagtacgatcgcaaggttgaaactcaaaggaattgacgggggcccgcacaagcggtggagtatgtggtttaattcgaagcaacgcgaagaaccttaccagggcttgacatcccgatgaccggcctagagataggctttctcttcggagcatcggtgacaggtggtgcatggttgtcgtcagctcgtgtcgtgagatgttgggttaagtcccgcaacgagcgcaacccctattgttagttgctacgcaagagcactctagcgagactgccgttgacaaaacggaggaaggtggggacgacgtcaaatcatcatgccccttatgtcctgggctacacacgtactacaatggtggtcaacagagggaagcaataccgcgaggtggagcaaacccctaaaagccatctcagttcggattgcaggctgcaacacgcctgcatgaagctggaattgctagtaatcgtggatcagcaagccacggtgaatacgttcccgggccttgcacacaccgcccgtca

SEQ ID NO: 567 - DNA, 1400 bp, Artificial Sequence
  Synthetic polymer
agagtttgatcctggctcagattgaacgctggcggcaggcctaacacatgcaagtcgaacggtaacaggaagcagcttgctgcttcgctgacgagtggcggacgggtgagtaatgtctgggaaactgcctgatggagggggataactactggaaacggtagctaataccgcataacgtcgcaagaccaaagagggggaccttcgggcctcttgccatcggatgtgcccagatgggactagcttgttggtggggtaacggctcaccaaggcgacgatccctagctggtctgagaggatgaccagccacactggaactgagacacggtccagactcctacgggaggcagcagtggggaatattgcacaatgggcgcaagcctgatgcagccatgccgcgtgtatgaagaaggccttcgggttgtaaagtactttcagcggggaggaagggagtaaagttaatacctttgctcattgacgttacccgcagaagaagcaccggctaactccgtgccagcagccgcggtaatacggagggtgcaagcgttaatcggaattactgggcgtaaagcgcacgcaggcggtttgttaagtcagatgtgaaatccccgggctcaacctgggaactgcatctgatactggcaagcttgagtctcgtagaggggggtagaattccaggtgtagcggtgaaatgcgtagagatctggaggaataccggtggcgaaggcggccccctggacgaagactgacgctcaggtgcgaaagcgtggggagcaaacaggattagataccctggtagtccacgccgtaaacgatgtcgacttggaggttgtgcccttgaggcgtggcttccggagctgacgcgttaagtcgaccgcctggggagtacggccgcaaggttaaaactcaaatgaattgacgggggcccgcacaagcggtggagcatgtggtttaattcgaagcaacgcgaagaaccttacctacacttgacatcccttgcattacccttaatcggggaaatctcttcggagacaaggtgacaggtggtgcatggttgtcgtcagctcgtgtcgtgagatgttgggttaagtcccgcaacgagcgcaacccctattgttagttgctaccattaagttgagcactctagcgagactgcctgggttaaccaggaggaaggtggggacgacgtcaagtcatcatggcccttacgaccagggctacacacgtgctacaatggcgcatacaaagagaagcgacctcgcgagagcaagcggacctcataaagtgcgtcgtagtccggattggagtctgcaactcgactccatgaagtcggaatcgctagtaatcgtggatcagaatgccacggtgaatacgttcccgggccttgcacacaccgcccgtca

SEQ ID NO: 568 - DNA, 1407 bp, Artificial Sequence
  Synthetic polymer
agagtttgatcctggctcaggacaaacgctggcggcatgcctaacacatgcaagtcgaacggggtttcttcggaaacctagtggcgaacgggtgagtaacgcgtaggcaacctgccccctagacggggacaacattccgaaaggagtgctaataccggatgtgaagcccctcccgcatgggaggggcctgaaagatggcctctatttataagctatcgctagaggatgggcctgcgtctgattagctagtaggtggggtaacggcctaactaggcgacgatcagtagccggtctgagaggatgaacggccacattgggactgagacacggcccagactcctacgggaggcagcagtggggaatcttccgcaatgggcgcaagcctgacggagcaatgccgcgtgagtgatgaagggattcgtcccgtaaagctctgttgtccatgacgaacggtgcgagggtgaacaatcctagcaagtgacggtagtggacgaggaagccacggctaactacgtgccagcagccgcggtaatacgtaggtggcgagcgttgtccggaattattgggcgtaaagagcatgtaggcggtcttttaagtccggagtgaaaatgcggggctcaaccccgtatggctccggatactgggaggcttgagtgcaggagaggaaaggggaattcccagtgtagcggtgaaatgcgtagatattgggaggaacaccagtggcgaaggcgcctttctggactgtgtctgacgctgagatgcgaaagccagggtagcgaacgggattagataccccggtagtcctggccgtaaacgatgggaactaggtgtaggaggtatcgaccccttctgtgccggagttaacgcaataagttccccgcctggggagtacggccgcaaggttgaaactcaaaggaattgacgggggcccgcacaagcggtggattgtgtggattaattcgacgcaacgcgaagaaccttaccagggcttgacattgagtgacagtgctagagataacaccttcccttcggggacacgaaaacaggtggtgcatggctgtcgtcagctcgtgtcgtgagatgttgggttaagtcccgcaacgagcgcaacccctatcctatgttaccatcattcagttggggactcatgggagattgccagggacaacctggaggaaggcggggatgacgtcaagtcatcatgccccttatgtcctgggcttcacacgtaatacaatggccggcaacagagggaagcgtagccgcgaggcagagccaaccccagaaacccggtcccagttcggatcgcaggctgcaacccgcctgcgtgaagttggaatcgctagtaatcgcaggtcagcatactgcggtgaatacgttcccgggccttgcacacaccgcccgtca

SEQ ID NO: 569 - DNA, 1375 bp, Artificial Sequence
  Synthetic polymer
agagtttgatcctggctcaggatgaacgctggcggcgtgcttaacacatgcaagtcgaacggacggcggagagcttgctctccaaagttagtggcggacgggtgagtaacgcgtgggtaacctgcctcatacagggggatagcagttagaaatgaccgataataccgcataagcgcacagtgtcgcatgacacagtgtgaaaaactccggtggtatgagatggacccgcgttggattagatagttggcggggtaacggcccaccaagtcgacgatcagtagccggactgagaggttggccggccacattgggactgagacacggcccagactcctacgggaggcagcagtggggaatattgggcaatgggcgcaagcctgacccagcaacgccgcgtgaaggaagaaggctttcgggttgtaaacttcttttatcagggacgaagaaagtgacggtacctgatgaataagccacggctaactacgtgccagcagccgcggtaatacgtaggtggcaagcgttatccggatttactgggtgtaaagggcgtgtaggcgggacagcaagtcagatgtgaaaactatgggctcaactcatagcctgcatttgaaactgttgttcttgagtgctggagaggcaatcggaattccgtgtgtagcggtgaaatgcgtagatatacggaggaacaccagtggcgaaggcggattgctggacagtaactgacgctgaggcgcgaaagcgtggggagcaaacaggattagataccctggtagtccacgctgtaaaagatggatactaggggtgggggggtctgaccccctccgggccgcagttaacacaataagtatcccacctggggagtacgatcgcaaggttgaaactcaaaggaattgacgggggcccgcacaagcggtggagtatgtggtttaattcgaagcaacgcgaagaacctttccagggcttgacatccctgtgaccggtatagagatatacctttacattcggggacagcggagacaggtggtgcatggttgtcgtcagctcgtgtcgtgagatgttgggttaagtcccgcaacgagcgcaacccctattgttagttgctacgcaagagcactctagcgagactgccgttgacaaaacggaggaaggtggggacgacgtcaaatcatcatgccccttatgtcctgggctacacacgtactacaatggtggacaacagagggaggcaaaaccgcgaggtggagcaaacccctaaaagccatcccagttcggatcgcaggctgcaacccgcctgcgtgaagttggaatcgctagtaatcgcggatcagcatgccgcggtgaatacgttcccgggccttgcacacaccgccggtca

SEQ ID NO: 570 - DNA, 1369 bp, Artificial Sequence
  Synthetic polymer
agagtttgatcctggctcaggacgaacgctggcggcacgcctaacacatgcaagtcgaacggagatattttggtttactgagatatcttagtggcggacgggtgagtaacacgtgagcaacctgcctctgagagaggggatagcttctggaaacggatggtaatacctcataacataacgaagccgcatgactttgttatcaaagatttatcactcagagatgggctcgcgtctgattagatagttggtgaggtaacggctcaccaaggcgacgatcggtagccggactgagaggttgaacggccacattgggactgagacacggcccagactcctacgggaggcagcagtgggggatattgcgcaatgggggaaaccctgacgcagcaatgccgcgtggaggattgaaggtcttcggattgtaaactccttttgtcagggaagataatgacggtacctgacgaataagctccggctaactacgtgccagcagccgcggtaatacgtagggagcaagcgttgtccggatttactgggtgtaaagggtgcgtaggcggctttgcaagtcagctgtgaaatctgtgggctcaacccacaaattgcagttgaaactgtagagcttgagtgaagtagaggtaggcggaattcccagtgtagcggtgaaatgcgtagagattgggaggaacaccagtggcgaaggcggcctactgggctttaactgacgctgaggcacgaaagcatgggtagcaaacaggattagataccctggtagtccatgccgtaaacgatgattactaggtgtggggggattgaccccttccgtgccgcagttaacacaataagtaatccacctggggagtacggccgcaaggttgaaactcaaaggaattgacgggggcccgcacaagcagtggagtatgtggtttaattcgaagcaacgcgaagaaccttaccaggtcttgacatcgagtgacgtatccagagatggatattccctacggggcacgaagacaggtggtgcatggttgtcgtcagctcgtgtcgtgagatgttgggttaagtcccgcaacgagcgcaacccttgctgttagttgctacgcaagagcactctaacaggactgccgttgataaaacggaggaaggtggggacgacgtcaaatcatcatgccccttatgacctgggctacacacgtactacaatggccgtaaacaaagggaagcaaaggagcgatccggagcaaaccccaaaaaacggtcccagttcagattgtaggctgcaacccgcctacatgaagttggaattgctagtaatcgcagatcagcatgctgcggtgaatacgttcccgggccttgcactcaccgcccgtca

SEQ ID NO: 571 - DNA, 1373 bp, Artificial Sequence
  Synthetic polymer
agagtttgatcctggctcaggacgaacgctggcggcacgcctaacacatgcaagtcgaacggacgagagagaagcttgcttttctcaagttagtggcggacgggtgagtaacacgtgagcaacctgcctttaagagggggatagcttctggaaacggatggtaataccccataacatatgccgatggcatcttcggcatatcaaatgatttatcgcttagagatgggctcgcgtctgattagatagttggtgaggtaacggctcaccaagtcgacgatcagtagccggactgagaggttgaacggccacattgggactgagacacggcccagactcctacgggaggcagcagtggggaatattgcacaatgggggaaaccctgatgcagcgatgccgcgtggaggaagaaggttttcggattgtaaactccttttatcagggacgataatgacggtacctgaagaaaaagctccggctaactacgtgccagcagccgcggtaatatgtagggagcgagcgttgtccggaattactgggtgtaaagggagcgtaggcgggacggtaagtcaggtgtgaaatatacgtgctcaacatgtagactgcacttgaaactgctgttcttgagtgaagtagaggtaagcggaattcctagtgtagcggtgaaatgcgtagatattaggaggaacatcggtggcgaaggcggcttactgggcttttactgacgctgaggctcgaaagcgtggggagcaaacaggattagataccctggtagtccacgctgtaaacgatgattactaggtgtggggggactgaccccttccgtgccgcagctaacgcaataagtaatccacctggggagtacggccgcaaggttgaaactcaaaggaattgacgggggcccgcacaagcagtggagtatgtggtttaattcgaagcaacgcgaagaaccttaccaggtcttgacatcgtatgcatagcatagagatatgtgaaatcctttcggggacatatagacaggtggtgtatggttgtcgtcagctcgtgtcgtgagatgttgggttaagtcccgcaacgagcgcaacccttaccattagttgctacgcaagagcactctaatgggactgccgttgacaaaacggaggaaggtggggatgacgtcaaatcatcatgccccttatgacctgggctacacacgtactacaatggcaattaacaaagagcagcgaagcggtgacgtggagcgaatctccaaaaattgtcccagttcggattgcaggctgcaactcgcctgcatgaagtcggaattgctagtaatcgcggatcagcatgccgcggtgaatacgttcccgggccttgtacacaccgcccgtca

SEQ ID NO: 572 - DNA, 1410 bp, Artificial Sequence
  Synthetic polymer
agagtttgatcctggctcaggacgaacgctggcggcatgcctaacacatgcaagtcgaacggagattacttcggtaatcttagtggcgaacgggtgagtaacgcgtgggcaacctgccctctagatggggacaacatcccgaaaggggtgctaataccgaatgtgacagcaatctcgcatgaggatgctgtgaaagatggcctctatttataagctatcgctagaggatgggcctgcgtctgattagctagttggtggggtaacggcctaccaaggcgatgatcagtagccggtctgagaggatgaacggccacattgggactgagacacggcccagactcctacgggaggcagcagtggggaatcttccgcaatgggcgaaagcccgacggagcaatgccgcgtgagtgatgaaggaattcgttccgtaaagctcttttgtttatgacgaatgtgcaggttgtgaataatgacttgtaatgacggtagtaaacgaataagccacggctaactacgtgccagcagccgcggtaatacgtaggtggcgagcgttgtccggaattattgggcgtaaagagcatgtaggcggttttttaagtctggagtgaaaatgcggggctcaaccccgtatggctctggatactggaagacttgagtgcaggagaggaaaggggaattcccagtgtagcggtgaaatgcgtagatattgggaggaacaccagtggcgaaggcgcctttctggactgtgtctgacgctgagatgcgaaagccagggtagcgaacgggattagataccccggtagtcctggccgtaaacgatgggtactaggtgtaggaggtatcgaccccttctgtgccggagttaacgcaataagtaccccgcctggggagtacgtccgcaaggatgaaactcaaaggaattgacgggggcccgcacaagcggtggagtatgtggtttaattcgacgcaacgcgaagaaccttaccaaggcttgacattgaatgaccgcttcagagatgaagctttcccttcggggacatgaaaacaggtggtgcatggctgtcgtcagctcgtgtcgtgagatgttgggttaagtcccgcaacgagcgcaacccctatcctatgttaccagcgggtaatgccggggactcataggagactgccaaggacaacttggaggaaggcggggatgacgtcaagtcatcatgccccttatgtctagggcctcacacgtcatacaatggtcggaacagagggtagcgaaactgcgaagtggagccaatcccagaaaaccgatcgtagtccggattgcagtctgcaactcgactgcacgaagctggaatcgctagtaatcgcgaatcagaatgtcgcggtgaatacgttcccgggtcttgtacacaccgcccgtca

SEQ ID NO: 573 - DNA, 1392 bp, Artificial Sequence
  Synthetic polymer
agagtttgatcctggctcaggatgaacgctggcggcgtgcttaacacatgcaagtcaaacgaaacaccttatttgattttcttcggaactgaagatttggtgattgagtggcggacgggtgagtaacgcgtgggtaacctgccctgtacagggggataacagtcagaaatgactgctaataccgcataagaccacagcgccgcatggtgcaggggtaaaaactccggtggtacaggatggacccgcgtctgattagctggttggtgaggtaacggctcaccaaggcgacgatcagtagccggcttgagagagtgaacggccacattgggactgagacacggcccaaactcctacgggaggcagcagtggggaatattgcacaatgggggaaaccctgatgcagcgacgccgcgtgagtgaagaagtatctcggtatgtaaagctctatcagcagggaagaaaatgacggtacctgactaagaagccccggctaactacgtgccagcagccgcggtaatacgtagggggcaagcgttatccggaattactgggtgtaaagggtgcgtaggtggtatggcaagtcagaagtgaaaacccagggcttaactctgggactgcttttgaaactgtcagactggagtgctggagaggtaagtggaattcctagtgtagcggtgaaatgcgtagatattaggaggaacaccagtggcgaaggcggcttactggacagtgactgacgttgaggctcgaaagcgtggggagcaaacaggattagataccctggtagtccacgccgtaaacgatgactactaggtgtcgggtagcaaagctattcggtgccgcagcaaacgcaataagtagtccacctggggagtacgttcgcaagaatgaaactcaaaggaattgacggggacccgcacaagcggtggagcatgtggtttaattcgaagcaacgcgaagaaccttacctgatcttgacatcccgatgccagctccgtaatgggagcctttcttcggaacatcggagacaggtggtgcatggttgtcgtcagctcgtgtcgtgagatgttgggttaagtcccgcaacgagcgcaacccctatctttagtagccagcatttaaggtgggcactctagagagactgccagggataacctggaggaaggtggggatgacgtcaaatcatcatgcccctcatgaccagggctacacacgtgctacaatggcgtaaacaaagggaagcaaagctgtgaggccgagcaaatcccaaaaataacgtctcagttcggattgtagtttgcaactcgactacatgaagctggaatcgctagtaatcgcgaatcagaatgtggcggtgaatacgttcccgggtcttgcactcaccgcccgtca

SEQ ID NO: 574 - DNA, 1383 bp, Artificial Sequence
  Synthetic polymer
agagtttgatctggctcaggacgaacgctggcggcgcgcctaacacatgcaagtcgaacggagctatgttgaaagcttgctggatatatagcttagtggcggacgggtgagtaacacgtgagtaacctgcctttcagagtggaataacgtttggaaacgaacgctaataccgcataacgtcagaggacggcatcgttctttgaccaaagatttatcgctgaaagatgggctcgcggccgattaggtagttggtgagataacagcccaccaagccgacgatcggtagccggactgagaggttgatcggccacattgggactgagacacggcccagactcctacgggaggcagcagtgggggatattgcacaatggggggaaccctgatgcagcgacgccgcgtgagggaagacggttttcggattgtaaacctctgtctttagggacgaaaaaaatgacggtacctaaagaggaagccacggctaactacgtgccagcagccgcggtaatacgtaggtggcaagcgttgtccggaattactgggtgtaaagggagcgtaggcggggaggcaagttgaatgtttaaactatcggctcaactgatagtcgcgttcaaaactgccactcttgagtgcagtagaggtaggcggaattcctagtgtagcggtgaaatgcgtagatattaggaggaacatcagtggcgaaggcggcttactggacgataactgacgttgaggctcgaaagcgtggggagcaaacaggattagataccctggtagtccacgccgtaaacgatgactactaggtgtcggggtacaaagtacttcggtgccgcagccaacgcaataagtagtccacctggggagtacgttcgcaagaatgaaactcaaaggaattgacggggacccgcacaagcggtggagcatgtggtttaattcgaagcaacgcgaagaaccttacctggtcttgacatctccctgaccggacagtaatgtgtcctttccttcgggacagggaagacaggtggtgcatggttgtcgtcagctcgtgtcgtgagatgttgggttaagtcccgcaacgagcgcaacccctatcttcagtagccagcaagtaaagttgggcactctggagagactgccagggataacctggaggaaggtggggacgacgtcaaatcatcatgccccttatgaccagggctacacacgtgctacaatggcgtaaacaaagggaagcaagcatgtgagtgtgagcaaatcccaaaaataacgtctcagttcggattgtagtctgcaactcgactacatgaagctggaatcgctagtaatcgcgaatcagaatgtcgcggtgaatacgttcccgggtcttgcacacaccgcccgtca

SEQ ID NO: 575 - DNA, 1369 bp, Artificial Sequence
  Synthetic polymer
agagtttgatcctggctcaggatgaacgctggcggcgcgcctaacacatgcaagtcgaacggtgaagaggagcttgctcctcggatcagtggcggacgggtgagtaacacgtgagcaacctggctctaagagggggacaacagttggaaacgactgctaataccgcataacgtatcgggatggcatcttcctgataccaaagattttatcgcttagagatgggctcgcgtctgattagatagttggcggggtaacggcccatcaagtcgacgatcagtagccggactgagaggttgatcggccacattgggactgagacacggcccagactcctacgggaggcagcagtgggggatattggacaatgggggcaaccctgatccagcgacgccgcgtgagggaagaaggttttcggattgtaaacctctgttgacggagaaaaaaatgatggtatccgtttagaaagccacggctaactacgtgccagcagccacggtaatacgtaggtggcaagcgttgtccggaattactgggtgtaaagggagtgtaggcgggatcttaagtcagaagtgaaaattacgggctcaactcgtaacctgcttttgaaactgagattcttgagtgaagtagaggcaagcggaattcctagtgtagcggtgaaatgcgtagatattaggaggaacaccagtggcgaaggcggcttgctgggctttcactgacgctgaggctcgaaagcgtggggagcaaacaggattagataccctggtagtccacgccgtaaacgatgattactaggtgtggggggattgaccccttccgtgccggagtaaacacaataagtaatccacctggggagtacgaccgcaaggttgaaactcaaaggaattgacgggggcccgcacaagcagtggagtatgtggtttaattcgacgcaacgcgaagaaccttaccaggtcttgacatccagcaaaagcctaagagattaggcgtcccttcgggggtgctgagacaggtggtgcatggttgtcgtcagctcgtgtcgtgagatgttgggttaagtcccgcaacgagcgcaacccttattgttagttgctaccatttagttgagcactctagcgagactgcccgggttaaccgggaggaaggtgggacgacgtcaaatcatcatgccccttatgtcctgggctacacacgtaatacaatggtggccaacagagggaagcaagactgcgaagtggagcaaatccctaaaagccatctcagttcggattgcaggctgcaactcgcctgcatgaagctggaattgctagtaatcgcggatcagcatgccgcggtgaatacgttcccgggccttgcactcaccgcccgt

SEQ ID NO: 576 - DNA, 1373 bp, Artificial Sequence
  Synthetic polymer
agagtttgatcctggctcaggatgaacgctggcggcgtgcctaacacatgcaagtcgagcgatgaaatttccttcgggaaatggattagcggcggacgggtgagtaacacgtgggtaacctgcctcatagtgggggatagccttccgaaagggagattaataccgcataacatcattagatggcatcatttagtgatcaaaggatttattcgctatgagatggacccgcgtcgcattagctagttggtaaggtaatggcttaccaaggcgacgatgcgtagccgacctgagagggtgatcggccacattgggactgagacacggcccagactcctacgggaggcagcagtggggaatattgcacaatgggggaaaccctgatgcagcaacgccgcgtgagtgatgacggccttcgggttgtaaagctctgtcttcagggacgataatgacggtacctgaggaggaagccacggctaactacgtgccagcagccgcggtaatacgtaggtggcgagcgttgtccggatttactgggcgtaaagggagcgtaggcggacttttaagtgagatgtgaaatacccgggctcaacttgggtgctgcatttcaaactggaagtctagagtgcaggagaggagaatggaattcctagtgtagcggtgaaatgcgtagagattaggaagaacaccagtggcgaaggcgattctctggactgtaactgacgctgaggctcgaaagcgtggggagcaaacaggattagataccctggtagtccacgccgtaaacgatgaatactaggtgtaggggttgtcatgacctctgtgccgccgctaacgcattaagtattccgcctggggagtacggtcgcaagattaaaactcaaaggaattgacgggggcccgcacaagcagcggagcatgtggtttaattcgacgcaacgcgaagaaccttacctagacttgacatcttctgcattacccttaatcggggaagttccttcgggaacagaatgacaggtggtgcatggttgtcgtcagctcgtgtcgtgagatgttgggttaagtcccgcaacgagcgcaacccttattgttagttgctaccatttagttgagcactctagcgagactgcccgggttaaccgggaggaaggtggggatgacgtcaaatcatcatgccccttatgtctagggctacacacgtgctacaatggccggtacagaaagacgcgataccgcgaggtggagcaaaactttaaaaccggtctcagttcggattgtaggctgaaactcgcctacatgaagctggagttactagtaatcgcgaatcagcatgtcgcggtgaatacgttcccgggccttgtacacaccgcccgtca

SEQ ID NO: 577 - DNA, 1399 bp, Artificial Sequence
  Synthetic polymer
agtttgatcctggctcagattgaacgctggcggcaggcctaactcatgtcagtcaaacggtaacaggaaacatcttgctgtttcactgacgagtggcggacgggtgagtaatgtctgggaaactgcctgatggagggggataactactggaaacggtagctaataccgcataacgtcgcaagaccaaagagggggaccttcgggcctcttgccatcggatgtgcccagatgggattagcttgttggtggggtaacggctcacctaggcgacgatccctagctggtctgagaggatgaccagccacactggaactgagacacggtccagactcctacgggaggcagcagtggggaatattgcacaatgggcgcaagcctgatgcagccatgccgcgtgtatgaagaaggccttcgggttgtaaagtactttcagcggggaggaagggagtaaagttaatacctttgctcattgacgtttcccgcagaagaagcaccggctaactccgtgccagcagccgcggtaatacggagggtgcaagcgttaatcggaattactgggcgtaaagcgcacgcaggcggtttgttaagtcagatgtgaaatccccgggctcaacctgggaactgcatctgatactggcaagcttgagtctcgtagaggggggtagaattccaggtgtagcggtgaaatgcgtagagatctggaggaataccggtggcgaaggcggccccctggacgaagactgacgctcaggtgcgaaagcgtggggagcaaacaggattagataccctggtagtccacgccgtaaacgatgtcgacttggaggttgtgcccttgaggcgtggcttccggagctaacgcgtcaagtcgacctcctggggagtacggccgcaaggttaaaactcaaatgaattgacgggggcccgcacaagcggtggagcatgtggtttaattcgacgcaacgcgaagaaccttacctggtcttgacatccacagaactttccagagatggattggtgccttcgggaactgtgagacaggtgttgcatggctgtcgtcagctcgtgttttgaaatgttgggttaagtcccgcaacgagcgcaatccttatcctccgttgccagaggttcggccgggaactcaaaggagactcccagtgataaattggaggaaggtggggatgacgtcaagtcatcatggcctttccgtccagggttacacacgtgttacaatggcgcatacaaagagaagggacctatcgagagcaagcggacctcataaagtgcgttgtagtccggattggagtttgcaactagagtacaagaagtcggaatcgctagtaatcgtggatcagaatgccacggtgaatacgttcccggtcctagcacacaacgcccgtca

SEQ ID NO: 578 - DNA, 1379 bp, Artificial Sequence
  Synthetic polymer
agagtttgatcctggctcaggacgaacgctggcggcgcgcctaacacatgcaagtcgaacgaggttgagaggagcttgcttttcttgacttagtggcgaacgggtgagtaacgcgtgaggaacctgcctcaaagagggggacaacagttggaaacgactgctaataccgcataagcccacagctccgcatggagcagagggaaaaggagcaatccgctttgagatggcctcgcgtccgattagctagttggtgaggtaacggcccaccaaggcgacgatcggtagccggactgagaggttgaacggccacattgggactgagacacggcccagactcctacgggaggcagcagtggggaatattgcacaatgggggaaaccctgatgcagcgacgccgcgtggaggaagaaggtcttcggattgtaaactcctgttgttggggaagataatgacggtacccaacaaggaagtgacggctaactacgtgccagcagccgcggtaaaacgtaggtcacaagcgttgtccggaattactgggtgtaaagggagcgcaggcgggaagacaagttggaagtgaaatctatgggctcaacccataaactgctttcaaaactgtttttcttgagtagtgcagaggtaggcggaattcccggtgtagcggtggaatgcgtagatatcgggaggaacaccagtggcgaaggcggcctactgggcaccaactgacgctgaggctcgaaagtgtgggtagcaaaccaggattagataccctggtagtccacaccgtaaacgatgattactaggtggttgggggatttacccccccaagtcccccagttaacacaataagaaatccactggggggagtgggacggcagggttgaaattaaaaggtattggcggggggcccgcacaagcagtggagtatgtggtttatattagacgcaacgagaacacccttaccaagtcttgacatcctgcgaggatggtggagacagtattttctttcgggacgcagagacaggtggtgcatggttgtcatcagatcgtgtcgtgaagattttgggttaagtcccgccacgagcgcaacccttatggtcgattggtacgcaagaggactctgcccagactgccgttgacaaaagggaggaaggtggggaggacgtcaaatcatcatgccctttatgacgtgggctacacacgtactacaatggcgtttaacaaagagaagcgataccgcgaggtggagcaaaactcagaaacaacgtcccagttcggactgcaggctgcaactcgcctgcacgaagtcggaattgctagtaatcgcagatcagcatgctgcggtgaatacgttcccgggccttgtacacaccgcccgtca

SEQ ID NO: 579 - DNA, 1390 bp, Artificial Sequence
  Synthetic polymer
agagtttgatcctggctcaggatgaacgctggcggcgtgcctaacacatgcaagtcgaacgaagcaccttttgagattcttcggatgattgattggtgactgagtggcggacgggtgagtaacgcgtgggtaacctgccctgtacagggggataacagttggaaacggctgctaataccgcataagcgcacgagaggacatcctctagtgtgaaaaactccggtggtacaggatgggcccgcgtctgattagctggttggtggggtaacggcctaccaaggcgacgatcagtagccggtctgagaggatgaacggccacattggaactgagacacggtccaaactcctacgggaggcagcagtggggaatattgcacaatggggggaaccctgatgcagcaacgccgcgtgagtgaagaagtatttcggtatgtaaagctctatcagcagggaagataatgacggtacctgactaagaagctccggctaaatacgtgccagcagccgcggtaatacgtatggagcaagcgttatccggatttactgggtgtaaagggtgcgtaggtggcagtgcaagtcagatgtgaaaggccggggctcaaccccggagctgcatttgaaactgtatagctagagtacaggagaggcaggcggaattcctagtgtagcggtgaaatgcgtagatattaggaggaacaccagtggcgaaggcggcctgctggactgttactgacactgaggcacgaaagcgtggggagcaaacaggattagataccctggtagtccacgccgtaaacgatgaatactaggtgtcggggccgtataggcttcggtgccgtcgcaaacgcagtaagtattccacctggggagtacgttcgcaagaatgaaactcaaaggaattgacggggacccgcacaagcggtggagcatgtggtttaattcgaagcgacgcgaagaaccttaccagatcttgacatcggcatgaccggtgtttcaatgacacttttccttcgggacatgctagacaggtggtgcatggttgtcgtcagctcgtgtcgtgagatgttgggttaagtcccgcaacgagcgcaacccctatctttagtagccagcaagtcaagttgggcactctggagagactgcccgggataaccgggaggaagatggggatgacgtcaaatcatcatgccccttacgatctgggctacacacgtgctacaatggcggatacaaagggatgcaaagccgtgaggccaagcgaaccccaaaaagtccgtctcagttcggattgtagtctgcaactcgactacatgaagctggaatcgctagtaatcgcgaatcagaacgtcgcggtgaatacgttcccgggtcttgcactcaccgcccgtca

SEQ ID NO: 580 - DNA, 1405 bp, Artificial Sequence
  Synthetic polymer
agagtttgatcctggctcaggacgaacgctggcggcatgcctaacacatgcaagtcgaacggagattacttcggtaatcttagtggcgaacgggtgagtaacgcgtgggcaacctgccctctagatggggacaacatcccgaaaggggtgctaataccgaatgtgacagcaatctcgcatgaggatgctgtgaaagatggcctctatttataagctatcgctagaggatgggcctgcgtctgattagctagttggtggggtaacggccaaccaaggcgatgatcagtagccggtctgagaggatgaacggccacattgggactgagacacggcccagactcctacgggaggcagcagtggggaatcttccgcaatgggcgaaagcctgacggagcaatgccgcgtgagtgatgaaggaattcgttccgtaaagctcttttgtttatgacgaatgtgcagattgtgaataatgatttgtaatgacggtagtaaacgaataagccacggctaactacgtgccagcagccgcggtaatacgtaggtggcgagcgttgtccggaattattgggcgtaaagagcatgtaggcggttttttaagtctggagtgaaaatgcggggctcaaccccgtatggctctggatactggaagacttgagtgcaggagaggaaaggggaattcccagtgtagcggtgaaatgcgtagatattgggaggaacaccagtggcgaaggcgcctttctggactgtaactgacactgaggctcgaaagccaggggagcgaacgggattagataccccggtagtcctggccgtaaacgatgattactaggtgtggggggactgaccccttccgtgccggagttaacacaataagtaatccacctgggaagtacgatcgcaaggttgaaactcaaaggaattgacgggggcccgcacaagcagtggagtatgtggtttaattcgacgatacgcgaagaaccttaccaggtcttgacatccaactaacgaagcagagatgcattaggtgcctttcggggaaagttgagacaggtggtgcatggttgtcgtcagctcgtgtcgtgagatgttgggttaagtcccgcaacgagcgcaacccctacggttagttgctacgcaagagcactctaacaggactgccgttgataaaacggaggaaggtggggatgacgtcaaatcatcatgccctttatgacctgggctacacacgtactacaatggccgctaacagagggttacaatggagcgatccggagtcaatccctaaaagcggtcccagttcagattgcaggctgcaactcgcctgtatgaagttggaattgctagtaatcgcagatcagcatgctgcggtgaatacgttcccgggccttgtacacaccgcccgtca

SEQ ID NO: 581 - DNA, 1383 bp, Artificial Sequence
  Synthetic polymer
  misc_feature (426)..(426): n is a, c, g, or t
agagtttgatcctggctcaggatgaacgctggcggcgtgcctaacacatgcaagtcgaacgtagaatattggatttattcattattctgagtggcggacgggtgagtaacacctgcgcacccttcctataagaaaggcatagcttctcgaaacggatggtaatacctcataacataatcacaccacacggtgatattatcaacgatttattacttagagatgtgctctcgtctgattaactagatgatgaggtaactgcccaccatggcgatgatcagtagccggactgagaggttgaacggccacattgggaatgcgacgccgcccatcctcctacgggacggcagctagtggaggaatattgcaacaatgggggaacaccctgatgcagcgatgccgcgtggagagaagaaggttttcggagtngtacattcttgtacttaagggacgataatgacggtaccttaggaggaagctccggctaactacgtgccagcagccgcggtaatacgtagggagcgagcgttgtccggaattactgggtgtaaagggagcgcaggcgggattgcaagtcagatgtgaaaactatgggcttaacccatagactgcatttgaaactgtagttcttgagtgaagtagaggcaagcggaattcctagtgtagcggtgaaatgcgtagatattaggaggaacatcggtggcgagggcggcttactgggcttttactgacgctgaggctcgaaagcgtggggagcaaacaggattagataccctggtagtccacgctgtaaacgatgattactgggtgtggggggtctgaccccctccgttccggagttaacgccataagccattcccctggggaggacggccgccagggtgaaaattaaaggaattgacgggggcccgccccagccgtggattatgtggtttaatttgaagcaacgggaagaacctttccagggtttgacatcctactaacgaagtagagatacatccggtgccctttggggaaagtagagaccggtggtgcatggttgttgtcagcttgtgttgtgagaagttgggttaagtcccgccacgagcgccacccctattgttaggtggtaagcaagaaccctttagcgaggctgccgttgacaaaacggagggaggggggggaggcgtcaaattatcctgccccttatgttctgggccaccccagtaattcaatgggtgtcaacagagggaggcaaagccgtaagggcggaagtgaaccctctaaaagccgtcccagttcagattgtgggctgcaacccgcccacatgaagtcggaatcgctagtagtggcggatcagcatgccgcggtgaatacgttcccgggccttgcactaaccgcccgtca

SEQ ID NO: 582 - DNA, 1384 bp, Artificial Sequence
  Synthetic polymer
gatcctggctcaggatgaacgctgcgggcgtgcttaacacatgcaagtcgaacgaagttttttgattgaagccttcgggcagattttaaaaaacttagtggcggacgggtgagtaacgcgtgggtaacctgcctcatacagggggataacagttagaaatgactgctaataccgcataagcgcacagcatcacatgatgccgtgtgaaaaactccggtggtatgagatggacccgcgtctgattagcttgttggtgaggtaacggcccaccaaggcgacgatcagtagccggcctgagagggtgaccggccacattgggactgagacacggcccaaactcctacgggaggcagcagtggggaatattgcacaatgggggaaaccctgatgcagcaacgccgcgtgaaggacgacgtatttcggtatgtaaacttctatcagcagggaagaaaatgacggtacctgactaagaagccccggctaactacgtgccagcagccgcggtaatacgtagggggcaagcgttatccggatttactgggtgtaaagggagcgtaggcggcgaggcaagtcagaagtgaaaacccagggctcaactctgggattgcttttgaaactgctttgcttgatttcaggagaggtaagcggaattcctagtgtagcggtgaaatgcgtagatattaggaggaacaccagtggcgaaggcggcttactggactgacaatgacgctgaggctcgaaagcgtggggagcaaacaggattagataccctggtagtccacgccgtaaacgatgaatactaggtgtcggggtacataagtacttcggtgccgcagctaacgcaataagtattccacctggggagtacgttcgcaagaatgaaactcaaaggaattgactgggacccgcacaagcggtggagcatgtggtttaattcgaagcaacgcgaagaaccttaccaagtcttgacatcccactgaccgttccttatccggaattttccttcgggacagtggtgacaggtggtgcatggttgtcgtcagctcgtgtcgtgagatgttgggttaagtcccgcaacgagcgcaacccctattttcagtagccagcaggtaaagctgggcactctggagagactgccggggataacccggaggaaggcggggatgacgtcaaatcatcatgccccttatgatttgggctacacacgtgctacaatggtggtaacaaagtgaggcgaacctgcgagggcaagcaaatcacaaaaaagccatcccagttcggattgtagtctgcaactcgactacatgaagctggaatcgctagtaatcgcgaatcagaatgtcgcggtgaatacgttcccgggtcttgcactcaccgcccgtca

SEQ ID NO: 583 - DNA, 1396 bp, Artificial Sequence
  Synthetic polymer
agagtttgatcctggctcaggatgaacgctagcgacaggcctaacacatgcaagtcgaggggcatcggggatgtagcaatacatccgccggcgaccggcgcacgggtgagtaacacgtatgcaaccaacccgtaacagggagataacccggggaaatccggactaatatcccatggtatcacgtttccgcatggaactgtgattaaatttacgaaggttacggacgggcatgcgctccattagccagttggcggggtaacggcccaccaaagccacgatggataggggttctgagaggaaggtcccccacattggaactgagacacggtccaaactcctacgggaggcagcagtgaggaatattggtcaatggacggaagtctgaaccagccaagtcgcgtgaaggaagacagtcggtaagatcgtaaacttcttttatcagggagtaaccgccgctacgcgtagcggcctgcaagtacctgaagaaaaagcatcggctaactccgtgccagcagccgcggtaatacggaggatgcgagcgttatccggatttattgggtttaaagggtgcgtaggcgggatgccaagtcagcggtgaaaactccgggctcaacccggaccccgccgttgaaactggtaacctagagagtattggaagtaagcggaatgcgtggtgtagcggtgaaatgcatagatatcacgcagaaccccgattgcgaaggcagcttactacactaccactgacgctgaagcacgaaagcgtgggtatcaaacaggattagataccctggtagtccacgcagtaaacgatgaatactaactgtttgcgatacacagtaagcggtactgcgaaagcgttaagtattccacctggggagtacgccggcaacggtgaaactcaaaggaattgacgggggcccgcacaagcggaggaacatgtggtttaattcgatgatacgcgaggaaccttacccgggctcaaacgacgggggactaccggtgaaagccggtatccagctatggccgccgtcgaggtgctgcatggttgtcgtcagctcgtgccgtgaggtgtcggcttaagtgccataacgagcgcaacccctatcgacagttactaacaagtagtgttgaggactctgtcgagactgccagcgcaagctgcgaggaaggcggggatgacgtcaaatcagcacggcccttacgtccggggcgacacacgtgttacaatggcaggaacagaaggcagcaacatagcaatatgaagccaatccccaaaccctgcctcagttcggattggagtctgcaacccgactccatgaagctggattcgctagtaatcgcgcatcagccatggcgcggtgaataaattcccgggccttgcacacaccgcccgtca

SEQ ID NO: 584 - DNA, 1370 bp, Artificial Sequence
  Synthetic polymer
agagtttgatcctggctcaggacgaacgctggcggcgcgcctaacacatgcaagtcgaacgagcgagagatagcttgctttctcgagcgagtggcgaacgggtgaggaacgcgtgaggaacctgcctcggagagggggacaacagttggaaacaactgctaataccgcataagcccacggctcggcatcgcgcagagggaaaaggagcaatccgctttgagacggcctcgcgtccgattacctagctggagaggtaacggcccaccaaggcaacgatcggtagccggaatgagaggttaaacggccacattgagactgagacacggcccagactcctacgggaggcagcagtggggaatattgcacaatgggggaaaccatgatgcagcgacgctgcgtggaggaagaaggtcttcggattgtaaactcctgttgttgaggaggataatgacggtactcaacaaggaagtgacggctaactacgtgccagcagccgcggtaaaacgtaggtcacaagcgttgtccggaattactgggtgtaaagggagcgcaggcgggagaacaagttggaagtgaaatccatgggctcaacccatgaactgctttcaaaactgtttttcttgagtagtgcagaggtaggaggaattcccggtgtagcggtggaatgagtagatatcgggaggaacaccagtggcgaaggcggcctactgggcaccaactgacgctgaggctcgaaagtgtgggtagcaaacaggattagataccgtggtagtccacaccgtaaacgatgattagtaggtgtgggaggattgaccccttcagtgccgcagttaacacaataagtaatccgcctggggagtacgaccgcaaggttgaaactcaaaggaattgacgggggcccgcacaagcagtggagtatgtggtttaattcgacgcaacgcgaagaaccttacccagtcttgacatcccttgacgatgctggaaacagtatttctcttcggagcaaggagacaggtggtgcatggttgttgtcagctcgtgtcgtgagatgttgggttaagtcccgcaccgagcgcaacccttatggtcagttagtacgcaagaggactctggccagactgccgttgacaaaacggaggaaggtggggatgacgtcaaatcatcatgccctttatgacttgggctacacacgtactacaatggtgttaaacaaagagaagcaagaccgcgaggcggagcaaaactcagaaacaacgtcccagttcggactgcaggctgcaactcgcctgcacgaagtcggaattgctagtaatcgtggatcagcatgccacggtgaatacgttcccgggccttgcacacaccgcccgtca

SEQ ID NO: 585 - DNA, 1386 bp, Artificial Sequence
  Synthetic polymer
gtttgatcctggctcaggacgaacgctggcggcgtgcttaacacatgcaagtcgaacggagcgcctatgatagagacttcggtcaatggattaggttgcttagtggcggactggtgagtaacgcgtgaggaacctgcctttcagagggggacaacagttggaaacgactgctaataccgcatgatatgtaactggggcatcccggatacatcaaagatttatcgctgaaagatggcctcgcgtctgattagatagttggtggggtaacggcctaccaagtcgacgatcagtagccggactgagaggttgaccggccacattgggactgagatacggcccagactcctacgggaggcagcagtggggaatattgggcaatggacgcaagtctgacccagcaacgccgcgtgaaggaagaaggctttcgggttgtaaacttcttttaagggggaagagcagaagacggtaccccttgaataagccacggctaactacgtgccagcagccgcggtaatacgtaggtggcaagcgttgtccggatttactgggtgtaaagggcgtgtagccgggtcggcaagtcagatgtgaaatccacgggcttaactcgtgaactgcatttgaaactgttgatcttgagtatcggagaggtaatcggaattccttgtgtagcggtgaaatgcgtagatataaggaagaacaccagtggcgaaggcggattactggacgacaactgacggtgaggcgcgaaagcgtggggagcaaacaggattagataccctggtagtccacgctgtaaacgatggatactaggtgtgcggggactgaccccctgcgtgccgcagttaacacaataagtatcccacctggggagtacgatcgcaaggttgaaactcaaaggaattgacgggggcccgcacaagcggtggattatgtggtttaattcgaagcaacgcgaagaaccttaccagggcttgacatcctactaacgaagtagagatacatcaggtgcccttcggggaaagtagagacaggtggtgcatggttgtcgtcagctcgtgtcgtgagatgttgggttaagtcccgcaacgagcgcaacccctattgttagttgctacgcaagagcactctagcgagactgccgttgacaaaacggaggaaggtggggacgacgtcaaatcatcatgccccttatgtcctgggctacacacgtaatacaatggcggtcaacagagggatgcaaagccgcgaggcagagcgaacccccaaaagccgtcccagttcggattgcaggctgcaacccgcctgcatgaagtcggaatcgctagtaatcgcggatcagcatgccgcggtgaatacgttcccgggccttgcacacaccgcccgtca

SEQ ID NO: 586 - DNA, 1367 bp, Artificial Sequence
  Synthetic polymer
agagtttgatcctggctcaggacgaacgctggcggcgcgcctaacacatgcaagtcgaacgagagagaaggagcttgcttcttcgatcgagtggcgaacgggtgagtaacgcgtgaggaacctgcctcaaagagggggacaacagttggaaacgactgctaataccgcataagcccacgggtcggcatcgaccagagggaaaaggagcaatccgctttgagatggcctcgcatccgattagctagttggtgaggtaacggcccaccaaggcgacgatcggtagccggactgagaggttgaacggccacattgggactgagacacggcccagactcctacgggaggcagcagtggggaatattgcacaatgggggaaaccctgatgcagcgacgccgcgtggaggaagaaggtcttcggattgtaaactcctgttgttgaggaagataatgacggtactcaacaaggaagtgacggctaactacgtgccagcagccgcggtaaaacgtaggtcacaagcgttgtccggaattactgggtgtaaagggagcgcaggcgggaagacaagttggaagtgaaatccatgggctcaacccatgaactgctttcaaaactgtttttcttgagtagtgcagaggtaggcggaattcccggtgtagcggtggaatgcgtagatatcgggaggaacaccagtggcgaaggcggcctgctgggcaccaactgacgctgaggctcgaaagtgtgggtagcaaacaggattagataccctggtagtccacgccgtaaacgatgggcactaggtgtggggggatacgccctccgtgccgaagctaacgcattaagtgccccgcctggggagtacggccgcaaggctaaaactcaaaggaattgacgggggcccgcacaagcagcggagcatgtggctcaattcgaagcaacgcgaagaaccttaccaggtcttgacatcgagtgacgagctaagagattagctttcctttcgaggcacgaagacaggtggtgcatggttgtcgtcagctcgtgtcgtgagatgttgggttaagtcccgcaacgagcgcaacccttaccattagttgctacgcaagagcactctaatgggactgccgttgacaaaacggaggaaggtggggatgacgtcaaatcatcatgccccttatgacctgggctacacacgtactacaatggcaattaacaaagagcagcaaagccgcgaggtggagcgaatctccaaaaattgtcccagttcagattgcaggctgcaactcgcctgcatgaagtcggaattgctagtaatcgtagatcagcatgctacggtgaatacgttcccgggccttgcacacaccgcccgtca

SEQ ID NO: 587 - DNA, 1393 bp, Artificial Sequence
  Synthetic polymer
agagtttgatcctggctcaggatgaacgctggcggcgtgcttaatacatgcaagtcgagcgaagcacctgattttgatttcttcggaatgatgaatcttgtgactgagcggcggacgggtgagtaacgcgtgggtaacctgcctcatacagggggataacagttagaaatgactgctaataccgcataagaccacggtaccgcatggtacagtggtaaaaactccggtggtatgagatggacccgcgtctgattaggtagttggtggggtaacggcccaccaagccgacgatcagtagccgacctgagagggtgaccggccacattgggactgagacacggcccaaactcctacgggaggcagcagtggggaatattgcacaatgggcgaaagcctgatgcagcgacgccgcgtgaaggatgaagtatttcggtatgtaaacttctatcagcagggaagaaaatgacggtacctgactaagaagccccggctaactacgtgccagcagccgcggtaatacgtagggggcaagcgttatccggatttactgggtgtaaagggagcgtagacggctttgcaagtctgatgtgaaaacccggggctcaaccccgggactgcattggaaactgtggagctagagtgtcggagaggtaagtggaattcctagtgtagcggtgaaatgcgtagatattaggaggaacaccagtggcgaaggcggcttactggacggtaactgacgttgaggctcgaaagcgtggggagcaaacaggattagataccctggtagtccacgccgtaaacgatgattgctaggtgtaggtgggtatggacccatcggtgccgcagctaacgcaataagcaatccacctggggagtacgttcgcaagaatgaaactcaaaggaattgacggggacccgcacaagcggtggagcatgtggtttaattcgaagcaacgcgaagaaccttaccaagtcttgacatcccttcgaccggtccgtaacggggccttctcttcggagcggaggagacaggtggtgcatggttgtcgtcagctcgtgtcgtgagatgttgggttaagtcccgcaacgagcgcaacccttattcttagtagccagcatttaaggtgggaactctaaggagactgccggggataacccggaggaaggtggggatgacgtcaaatcatcatgccccttatgatttgggctacacacgtgctacaatggcgtaaacaaagggaagcgagatggtgacattgagcaaatcccaaaaataacgtcccagttcggtctgtagtctgcaacccgactacacgaagctggaatcgctagtaatcgcggatcagaatgccgcggtgaatacgttcccgggtcttgcacacaccgcccgtca

SEQ ID NO: 588 - DNA, 1374 bp, Artificial Sequence
  Synthetic polymer
agagtttgatcctggctcaggacgaacgctggcggcgtgcctaacacatgcaagtcgagcgatgaaattttcttcggaaaatagattagcggcggacgggtgagtaacacgtgggtaacctgccctatagagagggatagccttccgaaagggagattaatacctcataatatcctagtatcgcatgatacatggattaaaggagcaatccgctataggatggacccgcggcgcattagctagttggtgaggtaacggctcaccaaggcgacgatgcgtagccgacctgagagggtgatcggccacattgggactgagacacggcccagactcctacgggaggcagcagtggggaatattgcacaatgggggaaaccctgatgcagcaacgccgcgtgagtgatgacggccttcgggttgtaaagctctgtcttcagggacgataatgacggtacctgaggaggaagccacggctaactacgtgccagcagccgcggtaatacgtaggtggcgagcgttgtccggatttactgggcgtaaagggagcgtaggcggacttttaagtgagatgtgaaatacccgggctcaacttgggtgctgcatttcaaactggaagtctagagtgcaggagaggagaatggaattcctagtgtagcggtgaaatgcgtagagattaggaagaacaccagtggcgaaggcgattctctggactgtaactgacgctgaggctcgaaagcgtggggagcaaacaggattagataccctggtagtccacgccgtaaacgatgaatactaggtgtaggggttgtcatgacctctgtgccgccgctaacgcattaagtattccgcctggggagtacggtcgcaagattaaaactcaaaggaattgacgggggcccgcacaagcagcggagcatgtggtttaattcgaagcaacgcgaagaaccttacctagacttgacatctcctgaattacccgtaactggggaagccacttcggtggcaggaagacaggtggtgcatggttgtcgtcagctcgtgtcgtgagatgttgggttaagtcccgcaacgagcgcaacccttattgttagttgctaccattaagttgagcactctagcgagactgcctgggttaaccaggaggaaggtggggatgacgtcaaatcatcatgccccttatgtgtagggctacacacgtgctacaatggcaagtacagagagacgcaaaaccgtgaggtcaagcaaatcccttaaaacttgtcccagttcggattgtaggctgaaactcgcctacatgaagccggagttgctagtaatcgcgaatcagaatgtcgcggtgaatacgttcccgggtcttgcactcaccgcccgtca

SEQ ID NO: 589 - DNA, 1381 bp, Artificial Sequence
  Synthetic polymer
ttcgcccttagagtttgatcctggctcaggacgaacgctggcggcgtgcctaacacatgcaagtcgagcgagtggagttcttcggaacaaagctagcggcggacgggtgagtaacacgtgggcaacctgcctcatagaggggaatagcctcccgaaagggagattaataccgcataagattgtagcttcgcatgaagtagcaattaaaggagcaatccgctatgagatgggcccgcggcgcattagctagttggtgaggtaacggctcaccaaggcgacgatgcgtagccgacctgagagggtgatcggccacattgggactgagacacggcccagactcctacgggaggcagcagtggggaatattgcacaatgggggaaaccctgatgcagcaacgccgcgtgagtgatgacggccttcgggttgtaaagctctgtcttcagggacggtaatgacggtacctgaggaggaagccacggctaactacgtgccagcagccgcggtaatacgtaggtggcgagcgttgtccggatttactgggcgtaaagggagcgtaggcggacttttaagtgagatgtgaaatacctgggctcaacttgggtgctgcatttcaaactggaagtctagagtgcaggagaggagaatggaattcctagtgtagcggtgaaatgcgtagagattaggaagaacaccagtggcgaaggcgattctctggactgtaactgacgctgaggctcgaaagcgtggggagcaaacaggattagataccctggtagtccacgccgtaaacgatgaatactaggtgtaggggttgtcatgacctctgtgccgccgctaacgcattaagtattccgcctggggagtacggtcgcaagattaaaactcaaaggaattgacgggggcccgcacaagcagcggagcatgtggtttaattcgaagcaacgcgaagaaccttacctagacttgacatctcctgcattacccttaatcggggaagttccttcggggacaggaagacaggtggtgcatggttgtcgtcagctcgtgtcgtgagatgttgggttaagtcccgcaacgagcgcaacccttattgttagttgctaccatttagttgagcactctagcgagactgcccgggttaaccgggaggaaggtggggatgacgtcaaatcatcatgccccttatgtctagggctacacacgtgctacaatgggtggtacagagggcagccaagtcgtgaggccgagctaatcccttaaagccattctcagttcggattgtaggctgaaactcgcctacatgaagctggagttactagtaatcgcagatcagaatgctgcggtgaatgcgttcccgggtcttgtactcaccgcccgtca

SEQ ID NO: 590 - DNA, 1376 bp, Artificial Sequence
  Synthetic polymer
ttagagtttgatcctggctcaggacgaacgctggcggcgtgcctaacacatgcaagtcgagcgaatgaagttccttcgggaacggatttagcggcggacgggtgagtaacacgtgggcaacctgcctcatagaggggaatagccttccgaaagggagattaataccgcataagattgtagtaccgcatggtacagcaattaaaggagcaatccgctatgagatgggcccgcggcgcattagctagttggtgaggtaacggctcaccaaggcgacgatgcgtagccgacctgagagggtgatcggccacattgggactgagacacggcccagactcctacgggagccagcagtggggaatattgcacaatgggggaaaccctgatgcagcaacgccgcgtgagtgatgacggccttcgggttgtaaagctctgtcttcagggacgataatgacggtacctgaggaggaagccacggctaactacgtgccagcagccgcggtaatacgtaggtggcgagcgttgtccggatttactgggcgtaaagggagcgtaggcggatttttaagtgagatgtgaaatactcgggcttaacctgagtgctgcatttcaaactggaagtctagagtgcaggagaggagaagggaattcctagtgtagcggtgaaatgcgtagagattaggaagaacaccagtggcgaaggcgcttctctggactgtaactgacgctgaggctcgaaagcgtggggagcaaacaggattagataccctggtagtccacgccgtaaacgatgaatactaggtgtaggggttgtcatgacctctgtgccgccgctaacgcattaagtattccgcctggggagtacggtcgcaagattaaaactcaaaggaattgacgggggcccgcacaagcagcggagcatgtggtttaattcgaagcaacgcgaagaaccttacctagacttgacatctcctgcattactcttaatcgaggaagtcccttcggggacaggatgacaggtggtgcatggttgtcgtcagctcgtgtcgtgagatgttgggttaagtcccgcaacgagcgcaacccttattgttagttgccatcattaagttggccactttagagggactcccagggataacctggaggaagggggggaggacgtcaattcttcatcccccttatgcttagggctccacacgtgttccaatgggtggtccagaggccagccaagtcgtgaggccgagttattcccttaaacccattctcagttcggattgtaggctgaaactcgcctacatgaagctggagttattagtaatcgcagatcagaatgctgcggtgaatacgttcccgggtcttgtacacaccgcccgtca

SEQ ID NO: 591 - DNA, 1392 bp, Artificial Sequence
  Synthetic polymer
agagtttgatcctggctcaggacgaacgctggcggcatgctttacacatgcaagtcgaacggcagcgcgggagcttgctcctggcggcgagtggcgcacgggtgagtaatacatcggaacgtgtccttgagtgggggataactgtccgaaaggacagctaataccgcatgagacctgagggtgaaagcgggggatcgcaagacctcgcgctcgaggagcggccgatgcccgattagctagttggtgaggtaaaggctcaccaaggcgacgatcggtagctggtctgagaggacgaccagccacactgggactgagacacggcccagactcctacgggaggcagcagtggggaattttggacaatgggggcaaccctgatccagccatgccgcgtgcaggatgaaggtcttcggattgtaaactgcttttgtcagggacgaaaagggaagctcgaataaagctttctgctgacggtacctgaagaataagcaccggctaactacgtgccagcagccgcggtaatacgtagggtgcgagcgttaatcggaattactgggcgtaaagcgtgcgcaggcggttctgtaagatagatgtgaaatccccgggctcaacctgggaattgcatatatgactgcaggacttgagtttgtcagaggagggtggaattccaagtgtagcagtgagatgcgtagatatttggaagaacaccgatggcgaaggcagccctctgggacatgactgacgctcatgcacgaaagcgtggggagcaaacaggattagataccctggtagtccacgccctaaacgatgtctactagttgttggggactgaggtccttggtaacgcagctaacgcgtgaagtagaccgcctggggagtacggtcgcaagattaaaactcaaaggaattgacggggacccgcacaagcggtggatgatgtggattaattcgatgcaacgcgaaaaaccttacctagccttgacatgccaggaatccctgagagattagggagtgcccgaaagggaatctggacacaggtgctgcatggctgtcgtcagctcgtgtcgtgagatgttgggttaagtcccgcaacgagcgcaacccttgtcattagttgctacgaaagggcactctaatgagactgccggtgacaaaccggaggaaggtggggatgacgtcaagtcctcatggcccttatggctagggcctcacacgtcatacaatggtcggaacagagggaagcgaagccgcgaggcggagcgaatcccagaaaaccgatcgtagtccggattgcagtctgcaactcgactgcatgaagtcggaatcgctagtaatcgcggatcagcatgccgcggtgaatacgttcccgggtcttgtacacaccgcccgtca

SEQ ID NO: 592 - DNA, 1360 bp, Artificial Sequence
  Synthetic polymer
agagtttgatcctggctgaggatgaacgctggcggcgtgcctaacacatgccttttgaacgaagcacctggatcgaatttcttcgggaatgattttcttgtgacttagtggcggacgggtgagtaacgcgtgggtaacctgccctgtacagggggacaacagccggaaacagctgctaataccccataagcgcacggtatcgcatgatacagtgtgaaaagccgagacggtacaggatggacccgcgtctgattagatagttggtggggtaacggcctaccaagtcaacgatcagtagccggcctgagagggtgaacggccacattggaactgagacacggtccaaactcctacgggaggcagcagtggggaatattgcacaatgggggaaaccctgatgcagcgacgccgcgtgaaggaagaagtatttcggtatgtaaacttctatcagcagggaagaaaatgacggtacctgactaagaagtcccggctaactacgtgccagcagccgcggtaatacgtagggggcaagcgttatccggatttactgggtgtaaagggagcgtaggcggcatggcaagccagatgtgaaaggccggggctcaaccccgggactgcatttggaactgtcaggcttgagtgttggagaggtaagcggaattcctagtgtagcggtgaaatgcgtagatattaggaggaacaccagtggcgaaggcggcttactggacaataactgacgctgaggctcgaaagcgtggggagcaaacaggattagataccctggtagtccacgccgtaaacgatgaatactaggtgtcggggagcgacagctcttcggtgccgcagcaaacgcagtaagtattccacctggggagtacgttcgcaagaatgaaactcaaaggaattgacggggacccgcacaagcggtggagcatgtggtttaattcgaagcaacgcgaagaaccttaccaaatcttgacatcccggtgacaaagcatataaagtgctctttctacggaacgccggtgacaggtggtgcatggttgtcgtcagctcgtgtcgtgagatgttgggttaagtcccgcaacgagcgcaacccctattttcagtagccagcggtcaggccgggcactctggagagactgccggggacaacccggaggaaggcggggatgacgtcaaaccatcatgccccttatgatttgggctacacacgtgctacaatggcgtaaacaaagggaagcagccctgtgaaagtgagcaaatcccaaaaataacgtcccagttcggattgtagtctgcaacccgactacatgaagctgcaatcaagagtaatcgcagatcagaatgctgcggtgaa

SEQ ID NO: 593 - DNA, 1370 bp, Artificial Sequence
  Synthetic polymer
agagtttgatcctggctcaggatgaacgctggcggcatgcctaacacatgcaagtcgaacggagttaatcggagcttgctttgattaacttagtggcggacgggtgagtaacacgtgagcaacctgcctctcagagaggaatagcttccggaaacggatggtaatacctcataacatattttttcggcatcgaagagatatcaaagatttatcgctgagagatgggctcgcgtctgattagctagttggtaaggtaacggcttaccaaggcgacgatcagtagccggactgagaggttgaacggccacattgggactgagacacggcccagactcctacgggaggcagcagtggggaatattgcacaatgggcgaaagcctgatgcagcaatgccgcgtgagggaagaaggtcttcggattgtaaacctctgtcataagggaagaagaaagactgtaccttagaaggaagctccggctaactacgtgccagcagccgcggtaatacgtagggagcgagcgttatccggaattactgggtgtaaagggagtgtaggcgggattgtaagtcagatgtgaaaactatgggctcaactcatagactgcatttgaaactgcgattcttgagtgaggtagaggtaagcggaattcctggtgtagcggtgaaatgcgtagagatcaggaggaacatcggtggcgaaggcggcttactgggcctttactgacgctgaggctcgaaagcgtggggagcaaacaggattagataccctggtagtccacgccgtaaacgatgattactaggtgtggggggactgaccccttccgtgccgcagttaacacaataagtaatccacctggggagtacggccgcaaggttgaaactcaaaggaattgacgggggcccgcacaagcagtggagtatgtggtttaattcgaagcaacgcgaagaaccttaccaggtcttgacatcgagtgacgaactaagagattagttttcccttcggggcacgaagacaggtggtgcatggttgtcgtcagctcgtgtcgtgagatgttgggttaagtcccgcaacgagcgcaacccttatcattagttgctacgcaagagcactctaatgagactgccgttgacaaaacggaggaaggtggggatgacgtcaaatcatcatgccccttatgacctgggctacacacgtactacaatggcattcaacagagggaagcaaaacagcgatgtggagcaaatcctcaaaaaatgtcccagttcagattgcaggctgcaactcgcctgcatgaagtcggaattgctagtaatcgcagatcagcatgctgcggtgaatacgttcccgggccttgtacacaccgcccgtca

SEQ ID NO: 594 - DNA, 1369 bp, Artificial Sequence
  Synthetic polymer
agagtttgatcctggctcaggacgaacgctggcggcgtgcctaacacatgcaagtcgaacggacttaattcttcggagttaagttagtggcggacgggtgagtaacgcgtgagtaacctgcctttgagagtggaataacagtctgaaaagactgctaataccgcataatgtattttggtcgcatgacttaaataccaaagattttatcgctcaaagatggactcgcgtccgattagatagttggtgaggtaacggcccaccaagtcgacgatcggtagccggactgagaggttgaacggccacattgggactgagacacggcccagactcctacgggaggcagcagtgggggatattgcacaatgggggaaaccctgatgcagcaacgccgcgtgagggaagaaggttttcggattgtaaacctctgtccttggtgaagataatgacggtagccaaggaggaagctccggctaactacgtgccagcagccgcggtaatacgtagggagcaagcgttgtccggatttacagggtgtaaagggtgcgtaggcggctaagcaagtcaggcgtgaaaactatgggcttaacccatagcctgcgtttgaaactgcatagcttgagtgaagtagaggcagatggaattcccggtgtagcggtggaatgcgtagagatcgggaggaacaccagtggcgaaggcggtctgctgggctttaactgacgctgaggcacgaaagtgtggggagcaaacaggattagataccctggtagtccacactgtaaacgatgattactaggtgtggggggactgaccccctccgtgccggagttaacacaataagtaatccacctggggagtacggccgcaaggttgaaactcaaaggaattgacgggggcccgcacaagcagtggagtatgtggtttaattcgacgcaacgcgaagaaccttaccaggtcttgacatccaactaacgaggtagagatacgttaggtgcccttcggggaaagttgagacaggtggtgcatggttgtcgtcagctcgtgtcgtgagatgttgggttaagtcccgcaacgagcgcaacccttgtttttagttgctacgtaagagcactctaaagagactgccgttgacaaaacggaggaaggtggggacgacgtcaaatcatcatgccctttatgacctgggctacacacgtactacaatggccgttaacagagggaagcaataccgcgaggtggagcaaaaccctaaaaacggtcccagttcagattgtaggctgcaactcgcctatatgaagttggaattgctagtaatcgcggatcagcatgccgcggtgaatacgttcccgggccttgcactcaccgcccgtca

SEQ ID NO: 595 - DNA, 1394 bp, Artificial Sequence
  Synthetic polymer
gagtttgatcctggctcaggatgaacgctagcggcaggcctaacacatgcaagtcgaggggcagcgagaatgaagcttgcttcatttgtcggcgaccggcgcacgggtgcgtaacgcgtatgtaacctaccttaaacaggggcataacactgagaaattggtactaattccccataacactttgggaggcatcttctggagttgaaagttccggcggtttaagatggacatgcgttgtattagatagttggtgaggtaacggctcaccaagtcgacgatacatagggggactgagaggttaaccccccacattggtactgagacacggaccaaactcctacgggaggcagcagtgaggaatattggtcaatggacgcaagtctgaaccagccatgccgcgtgcaggatggcggctctacgagttgtaaactgcttttgtatgagggtaaacttagatacgtgtatctaactgaaagtatcatacgaataaggatcggctaactccgtgccagcagccgcggtaatacggaggatccaagcgttatccggatttattgggtttaaagggtgcgtaggcggtttgataagttagaggtgaaagctcggggctcaactccggaactgcctctaatactgttgaactagagagtagatgcggtaggcggaatgtatggtgtagcggtgaaatgcgtagagatcatacagaacaccgattgcgaaggcagcttaccaaactatatctgacgttgaggcacgaaagcgtggggagcaaacaggattagataccctggtagtccatgcagtaaacgatgatagctcgttgtcggcgatacacagtcggtgacttagagaaatcgataagctatccacctggggagtacgttcgcaagaatgaaactcaaaggaattgacgggggcccgcacaagcggaggaacatgtggtttaattcgatgatacgcgaggaaccttacccgggcttgaaagttattgacgattctggaaacaggatttcccttcggggcaagaaactaggtgctgcatggttgtcgtcagctcgtgccgtgaggtgtcgggttaagtcccataacgagcgcaacccttgctgttagttgccatcaggttaagctgggcactctaacgggactgcctctgtaaggaggaggaaggtgaggatgacgtcaaatcagcacggcccttacgtccggggcgacacacgtgttacaatggtaggtacagagggcagccacccagcgatggggagcaaatctcgaaagcctatctcagttcggattggaggctgaaactcgcctccatgaagttggattcgctagtaatcgcgcatcagccatggcgcggtgaatacgttcccgggccttgcactcaccgcccgtca

SEQ ID NO: 596 - DNA, 1398 bp, Artificial Sequence
  Synthetic polymer
ttcgcccttagagtttgatcctggctcaggatgaacgctggcggcgtgcttaacacatgcaagtcgaacggagagctattgacggagttttcggacaacagatatagtttcttagtggcggacgggtgagtaacgcgtgaggaacctgcctttgagaggggaataacacagagaaatttgtgctaataccgcataaagcagttgggtcgcatggctctgactgccaaagattttatcgctcttagatggcctcgcgtctgattagctagttggtgaggtaacggcccaccaaggcgacgatcagtagccggactgagaggttgaccggccacattgggactgagacacggcccagactcctacgggaggcagcagtggggaatattgggcaatgggcgcaagcctgacccagcaacgccgcgtgaaggaagaaggctttcgggttgtaaacttcttttataagggacgataatgacggtaccttatgaataagctccggctaactacgtgccagcagccgcggtaatacgtagggagcaagcgttatccggatttactgggtgtaaagggcgtgtaggcgggaaagcaagtcagatgtgaaaactatgggctcaacccatagcctgcatttgaaactgtttttcttgagtgttggagaggcaatcggaattcctagtgtagcggtgaaatgcgtagatattaggaggaacaccagtggcgaaggcggattgctggacgacaactgacggtgaggcgcgaaagcgtggggagcaaacaggattagataccctggtagtccacgctgtaaacgatgaatactaggtgtgcggggactgaccccctgcgtgccgcagctaacgcaataagtattccacctggggagtacgatcgcaaggttgaaactcaaaggaattgacgggggcccgcacaagcggtggattatgtggtttaattcgaagcaacgcgaagaaccttaccagggcttgacatcctgctaacgaagtagagatacatcaggtgcccttcggggaaagcagagacaggtggtgcatggttgtcgtcagctcgtgtcgtgagatgttgggttaagtcccgcaacgagcgcaacccctattgttagttgctacgcaagagcactctagcgagactgccgttgacaaaacggaggaaggtggggacgacgtcaaatcatcatgccccttatgtcctgggctacacacgtaatacaatggcggtcaacagagggatgcaaaaccgcaaggtggagcgaacccctaaaagccgtcccagttcagattgtgggctgcaacccgcccacatgaagtcggaatcgctagtaatcgcggatcagcatgccgcggtgaatacgttcccgggccttgcactcaccgcccgtca

SEQ ID NO: 597 - DNA, 1375 bp, Artificial Sequence
  Synthetic polymer
agagtttgatcctggctcaggatgaacgctggcggcatgcctaacacatgcaagtcgaacggacaagagagcttcggttttcttgttagtggcggacgggtgagtaacgcgtgaggaacctgcctttaagagggggataacgtcttgaaaaggacgctaataccgcatgatattgatttagcacatgctttagcaatcaaaggagcaatccgcttaaagatggactcgcgtccgattagatagttggtgaggtaacggctcacaaagtcgacgatcggtagccgggctgagaggccgaacggccacattgggactgagacacggcccagactcctacgggaggcagcagtgagggatattggtcaatgggggaaaccctgaaccagcaacgccgcgtgagggaagacggttttcggattgtaaacctctgtcctctgtgaagaaacaaatgacggtaacagaggaggaagctccggctaactacgtgccagcagccgcggtaatacgtagggagcaagcgttgtccggatttactgggtgtaaagggtgcgtaggcggctgagcaagtcaggagtgaaatacatgggcttaacccatgaactgcttttgaaactgttcagcttgagtgaagtagaggtaggcggaattcccggtgtagcggtgaaatgcgtagagatcgggaggaacaccagtggcgaaggcggcctactgggctttaactgacgctgaggcacgaaagcatgggtagcaaacaggattagataccctggtagtccatgccgtaaacgatgattactaggtgtggggggactgaccccttccgtgccgcagttaacacaataagtaatccacctggggagtacgaccgcaaggttgaaactcaaaggaattgacgggggcccgcacaagcagtggagtatgtggattaattcgatgcaacgcgaagaaccttaccaggtcttgacatctgactaacgaagcagagatgcattaggtgcccttcggggaaagtcaagacaggtggtgcatggttgtcgtcagctcgtgtcgtgagatgttgggttaagtcccgcaacgagcgcaacccttactgtcagttgctacgcaagagcactctgacaggactgccgttgacaaaacggaggaaggtggggacgatgtcaaatcatcatgccctttatgacctgggcctcacacgtactacaatggtcgtaaacagagggaagcgaaggagcgatccggaacaaatccccaaaagcgatcccagttcggattgcaggctgcaactcgcctacatgaagtcgggattgctagtaatcgcggatcagcatgccgcggtgaatacgttcccgggccttgcacacaccgcccgtca

SEQ ID NO: 598 - DNA, 1421 bp, Artificial Sequence
  Synthetic polymer
agagtttgatcctggctcaggacgaacgctggcggcgtgcctaatacatgcaagtcgaacgcttctttcctcccgagtgcttgcactcaattggaaagaggagtggcggacgggtgagtaacacgtgggtaacctacccatcagagggggataacacttggaaacaggtgctaataccgcataacagtttatgccgcatggcataagagtgagaggcgcttccgggtgtcgctgatggatggacccgcggtgcattagctagttggtgaggtaacggctcaccaaggccacgatgcatagccgacctgagagggtgatcggccacactgggactgagacacggcccagactcctacgggaggcagcagtagggaatcttcggcaatggacgaaagtctgaccgagcaacgccgcgtgagtgaagaaggttttcggatcgtaaaactctgttgttagagaagaacaaggacgttagtaactgaacgtcccctgacggtatctaaccagaaagccacggctaactacgtgccagcagccgcggtaatacgtaggtggcaagcgttgtccggatttattgggcgtaaagcgagcgcaggcggtttcttaagtctgatgtgaaagcccccggctcaaccggggagggtcattggaaactgggagacttgagtgcagaagaggagagtggaattccatgtgtagcggtgaaatgcgtagatatatggaggaacaccagtggcgaaggcggctctctggtctgtaactgacgctgaggctcgaaagcgtggggagcaaacaggattagataccctggtagtccacgccgtaaacgatgagttgctaattgttggaagggtttccgcccttcagtgctgcaaccaaacgcatttagcactccgcctgggggagtacgcccgcaagttgaaactcaaggaaatgacgggggccccgcacaagcggtggagcatgtggtttaattcgaagcaacgcgaagaaccttaccaggtcttgacatcctttgaccactctagagatagagctttcccttcggggacaaagtgacaggtggtgcatggttgtcgtcagctcgtgtcgtgagatgttgggttaagtcccgcaacgagcgcaacccttattgttagttgccatcatttagttgggcactctagcgagactgccggtgacaaaccggaggaaggtggggatgacgtcaaatcatcatgccccttatgactgggctacacacgtgctacaatgggaagtacaacgagtcgctagaccgcgaggtcatgcaaatctcttaaagcttctctcagttcggattgcaggctgcaactcgcctgcatgaagccggaatcgctagtaatcgcggatcagcacgccgcggtgaatacgttcccgggccttgtacacaccgcccgtca

SEQ ID NO: 599 - DNA, 1403 bp, Artificial Sequence
  Synthetic polymer
agagtttgttcctggctcagattgaacgctggcggcaggcctaacacatgcaagtcgaacggtaacagaaagcagcttgctgctttgctgacgagtggcggacgggtgagtaatgtctgggaaactgcctgatggagggggataactactggaaacggtagctaataccgcataacgtcgcaagaccaaagagggggaccttcgggcctcttgccatcggatgtgcccagatgggattagcttgttggtggggtaacggctcaccaaggcgacgatccctagctggtctgagaggatgaccagccacactggaactgagacacggtccagactcctacgggaggcagcagtggggaatattgcacaatgggcgcaagcctgatgcagccatgccgcgtgtatgaagaaggccttcgggttgtaaagtactttcagcggggaggaagggagtaaagttaatacctttgctcattgacgttacccgcagaagaagcaccggctaactccgtgccagcagccgcggtaatacggagggtgcaagcgttaatcggaattactgggcgtaaagcgcacgcaggcggtttgttaagtcagatgtgaaatccccgggctcaacctgggaactgcatctgatactggcaagcttgagtctcgtagaggggggtagaattccaggtgtagcggtgaaatgcgtagagatctggaggaataccggtggcgaaggcggccccctggacaaagactgacgctcaggtgcgaaagcgtggggagcaaacaggattagataccctggtagtccacgctgtaaacgatgtcgatttggagggttgtgcccctcgaggcgtggcttccggagctaacgcgttaaatcgaccgcctggggagtacggccgcaaggttaaaactcaaatgaattgacgggggcccgcacaagcggtggagcatgtggtttaattcgatgcaacgcgaagaaccttacctactcttgacatccagagaactttccagagatggattggtgccttcgggaactctgagacaggtgctgcatggctgtcgtcagctcgtgttgtgaaatgttgggttaagtcccgcaacgagcgcaacccttatcctttgttgccagcgattcggtcgggaactcaaaggagactgccggtgataaaccggaggaaggtggggatgacgtcaagtcatcatggcccttacgagtagggctacacacgtgctacaatggcatatacaaagggcggcaagctagcgatagtgagcgaatcccataaagtatgtcgtagtccggattggagtctgcaactcgactccatgaagtcggaatcgctagtaatcgcggatcagaatgccgcggtgaatacgttcccgggccttgcacacaccgcccgtca

SEQ ID NO: 600 - DNA, 1362 bp, Artificial Sequence
  Synthetic polymer
agagtttgatcctggctcaggatgaacgctggcggcgtgcctaacacatgcaagtcgagcgatcttcttcggaagagagcggcggacgggtgagtaacgcgtgggtaacctgccctgtacacacggataacataccgaaaggtatgctaatacgagataatatacttttatcgcatggtagaagtatcaaagcttttgcggtacaggatggacccgcgtctgattagctagttggtgaggtaacggctcaccaaggcgacgatcagtagccgacctgagagggtgatcggccacattggaactgagacacggtccaaactcctacgggaggcagcagtggggaatattgcacaatgggcgaaagcctgatgcagcaacgccgcgtgagcgatgaaggccttcgggtcgtaaagctctgtcctcaaggaagataatgacggtacttgaggaggaagccccggctaactacgtgccagcagccgcggtaatacgtagggggctagcgttatccggaattactgggcgtaaagggtgcgtaggtggtttcttaagtcagaggtgaaaggctacggctcaaccgtagtaagcctttgaaactgggaaacttgagtgcaggagaggaaagtggaattcctagtgtagcggtgaaatgcgtagatattaggaggaacaccagttgcgaaggcggctctctggactgtaactgacactgaggcacgaaagcgtggggagcaaacaggattagataccctggtagtccacgccgtaaacgatgagtactagctgtcggaggttacccccttcggtggcgcagctaacgcaataagtaatccacctggggagtacgttcgcaagaatgaaactcaaaggaattgacggggacccgcacaagcggtggagcatgtggtttaattcgaagcaacgcgaagaaccttaccaaatcttgacatccctctgacagactgtgtaatgcagttttccttcgggacagaggagacaggtggtgcatggttgtcgtcagctcgtgtcgtgagatgttgggttaagtcccgcaacgagcgcaacccttgtctttagtagccagcaattcggatgggaactctagagagactgccagggataacctggaggaaggtggggatgacgtcaaatcatcatgccccttatgaccagggctacacacgtgctacaatggcgtaaacaaagggaagcgaccctgcgaaggtgagcaaagctcaaaaataacgtcccagttcggattgtagtctgcaacccgactacatgaagctggaatcgctagtaatcgcgaatcagaatgtcgcggtgaatacgttctccgggtcttgcacacaccgcccgtca

SEQ ID NO: 601 - DNA, 1400 bp, Artificial Sequence
  Synthetic polymer
ttcgcccttagagtttgatcctggctcaggacgaacgctggcggcgtgcctaacacatgcaagtcgaacgaagctctgcgatacaagacttcggtcaagttgaacggatgacttagtggcggacgggtgagtaacgcgtgaggaacctgcctttcagtgggggacaacagttggaaacgactgctaataccgcataatgtattctgaccgcatgatcggaataccaaagatttattgctgaaagatggcctcgcgtctgattagatagttggtgaggtaacggctcaccaagtcgacgatcagtagccgggctgagaggttgaacggccacattgggactgagatacggcccagactcctacgggaggcagcagtggggaatattgggcaatgggggaaaccctgacccagcaacgccgcgtgaaggaagaaggctttcgggttgtaaacttcttttaccagggacgaaggacgtgacggtacctggagaaaaagccacggctaactacgtgccagcagccgcggtaatacgtaggtggcaagcgttgtccggatttactgggtgtaaagggcgtgtaggcggagaagcaagtcagaagtgaaatccatgggcttaacccatgaactgcttttgaaactgtttcccttgagtatcggagaggcaggcggaattcctagtgtagcggtgaaatgcgtagatattaggaggaacaccagtggcgaaggcggcctgctggacgacaactgacgctgaggcgcgaaagcgtggggagcaaacaggattagataccctggtagtccacgctgtaaacgatgaatactaggtgtgggaggactgaccccttccgtgccgcagttaacacaataagtattccacctggggagtacgatcgcaagattgaaactcaaaggaattgacgggggcccgcacaagcagtggattatgtggtttaattcgacgcaacgcgaagaaccttaccgggatttgacatcctactaacgaagcagagatgcattaggtgcccttcggggaaagtagagacaggtggtgcatggttgtcgtcagctcgtgtcgtgagatgttgggttaagtcccgcaacgagcgcaacccctattgttagttgctacgcaagagcactctagcgagactgccgttgacaaaacggaggaaggcggggacgacgtcaaatcatcatgccccttatgacttgggctacacacgtgctacaatggcgtaaacaaagagaagcgagcctgcgagggggagcaaatctcaaaaataacgtctcagttcggactgtagtctgcaactcgactacacgaagctggaatcgctagtaatcgcgaatcagaatgtcgcggtgaatacgttcccgggtcttgcactcaccgcccgtca

SEQ ID NO: 602 - DNA, 1371 bp, Artificial Sequence
  Synthetic polymer
agtttgatgttggctcaagacgaaagctggcggcgcgcctcatgcttgctagtcgaaagaagttggagagagcttgctctttttgatttagtggcgaacggctgagtaacgcgtgaggaacctgcctcaaagagggggacaacagttggaaacgactgctaataccgcataagcccacagctccgcatggagcagagggaaaaggagcaatccgctttgagatggcctcgcgtccgattagctagttggtgaggtaacggcccaccaaggcgacgatcggtagccggactgagaggttgatcggccacattgggactgagacacggcccagactcctacgggaggcagcagtggggaatattgcacaatgggggaaaccctgatgcagcgacgccgcgtggaggaagaaggtcttcggattgtaaactcctgttgttggggaagataatgacggtacccaacaaggaagtgacggctaactacgtgccagcagccgcggtaaaacgtaggtcacaagcgttgtccggaattactgggtgtaaagggagcgcaggcgggaagacaagttggaagtgaaatctatgggctcaacccataaactgctttcaaaactgtttttcttgagtagtgcagaggtaggcggaattcccggtgtagcggtggaatgcgtagatatcgggaggaacaccagtggcgaaggcggcctactgggcaccaactgacgctgaggctcgaaagtgtgggtagcaaacaggattagataccctggtagtccacactgtaaacgatgattactaggtgtttgggggattgaccccctcagtgccgcagttaacacaataagtaatccacctggggagtacgaccgcaaggttgaaactcaaaggaattgacgggggcccgcacaagcagtggagtatgtggtttaattcgacgcaacgcgaagaaccttaccaagtcttgacatcctgcgacggtgctagaaatagtactttccttcgggacgcagagacaggtggtgcatggttgtcgtcagctcgtgtcgtgagatgttgggttaagtcccgcaacgagcgcaacccctatggtcagttactacgcaagaggactctggccagactgccgttgacaaaacggaggaaggtggggatgacgtcaaatcatcatgccctttatgacttgggctacacacgtactacaatggcgtttaacaaagagaagcgaagtcgcgaggcagagcaaaactcagaaacaacgtcccagttcggactgcaggctgcaactcgcctgcacgaagtcggaattgctagtaatcgcagatcagcatgctgcggtgaatacgttcccgggccttgcactcaccgcccgtca

SEQ ID NO: 603 - DNA, 1374 bp, Artificial Sequence
  Synthetic polymer
agagtttgatcctggctcaggatgaacgctggcggcgtgcttaacacttgcaagtcgaacgaagcacttgaatggaattcttcggaaggaagctcgagtgactgagtggcggacgggtgagtaacgcgtgggtaacctgcctcatacagggggataacagttagaaatgactgctaataccgcataagcacacgtgatcgcatgatcgagtgtgaaaaactccggtggtatgagatggacccgcgtctgattagctagttggtggggtaacggcccaccaaggcgacgatcagtagccggcctgagagggcgaacggccacattgggactgagacacggcccacactcctacgggaggcagcagtggggaacattgcacaatgggggaaaccctgatgcagcgacgccgcgtgaaggatgaagtatttcggtatgtaaacttctatcagcagggaagaaaatgacggtacctgactaagaagccccggctaactacgtgccagcagccgcggtaatacgtagggggcaagcgttatccggatttactgggtgtaaagggagcgtagacggcagtgcaagtctgaagtgaaagcccggggctcaaccccgggactgctttggaaactgtgcagctagagtgtcggagaggcaagcggaattcctagtgtagcggtgaaatgcgtagatattaggaggaacaccagtggcgaaggcggcttactggacggtaactgacgttgaggctcgaaagcgtggggagcaaacaggattagataccctggtagtccacgccgtaaacgatgaatactaggtgtcggggtgcaaagcagttcggtgccgcagcaaacgcaataagtattccacctggggagtacgttcgcaagaatgaaactcaaaggaattgacggggacccgcacaagcggtggagcatgtggtttaattcgaagcaacgcgaagaaccttaccaagtcttgacgtctgcctgaccgttccttaaccggaactttccttcgggacaggcaagacaggtggtgcatggttgtcgtcagctcgtgtcgtgagatgttgggttaagtcccgcaacgagcgcaacccctatccttagtagccagcagtccggctgggcactctagggagactgccggggataacccggaggaaggcggggacgacgtcaaatcatcatgccccttatgatttgggctacacacgtgctacaatggcgtaaacaaagggaagcgaagcggtgacgcttagcaaatctcaaaaataacgtcccagttcggactgcagtctgcaactcgactgcacgaagctggaatcgctagtaatcgcgaatcagaatgtcgcggtgaatacgttcccgggtcttg

SEQ ID NO: 604 - DNA, 1411 bp, Artificial Sequence
  Synthetic polymer
ttcgcccttagagtttgatcctggctcaggacgaacgctggcggcgtgcctaacacatgcaagtcgaacgaagcactgtggatagagacttcggtcaattgaaactttgacttagtggcggacgggtgagtaacgcgtgaggaacctgcctttcagagggggacaacagttggaaacgactgctaataccgcatgacacagcgagatcgcatggtcttgctgtcaaagatttatcgctgaaagatggcctcgcgtctgtttagatagttggtgaggtaacggcccaccaagtcaacgatcagtagccggactgagaggttgaacggccacattgggactgagatacggcccagactcctacgggaggcagcagtggggaatattgggcaatgggggaaaccctgacccagcaacgccgcgtgaaggaagaaggctttcgggttgtaaacttcttttaccagggacgaagaacgtgacggtacctggagaaaaagccacggctaactacgtgccagcagccgcggtaatacgtaggtggcaagcgttgtccggatttactgggtgtaaagggcgtgtaggcggagaagcaagtcagaagtgaaatccatgggcttaacccatgaactgcttttggaactgtttcccttgagtatcggagaggcaggcggaattcctagtgtagcggtgaaatgcgtagatattaggaggaacaccggtggcgaaggcggctttctggactgcaactgacactgaggcacgaaagcgtggggagcaaacaggattagataccctggtagtccacgccgtaaacgatgaatactaggtgttgggggtttcgataccttcggtgccgcagttaacacaataagtattccgcctggggagtacggccgcaaggttgaaactcaaaggaattgacgggggcccgcacaagcagcggagcatgtggtttaattcgaagcaacgcgaaaaaccttaccagaacttgacatcccgatgaatgtattggaagcaatgcaggcttacgcaagtaagacatcggtgacaggtggtgcatggttgtcgtcagctcgtgtcgtgagatgttgggttaagtcccgcaacgagcgcaacccttattgttagttaccagcgggtaaagccggggactctaacgagactgccgtggataacacggaggaaggtggggatgacgtcaaatcatcatgccccttacgttctgggctacacacgtgctacaatggtctgtaacaaagagacgcaaagccgcaaggtggagcaaacctcaaaaaccggatcccagttcagattgtgggctgcaacccgcccacatgaagacggagttgctagtaatcgcgaatcagcatgtcgcggtgaatgcgttcccgggccttgtacacaccgcccgtca

SEQ ID NO: 605 - DNA, 1388 bp, Artificial Sequence
  Synthetic polymer
agagtttgatcctggctcaggatgaacgctggcggcgtgcctaacacatgcaagtcgagcgagaaattttcaaatgaagcttcggtagattttggagatggaaagcggcggacgggtgagtaacgcgtaggcaacctgccctttgcagagggatagccattggaaacgatgattaaaacctcataacacctcattatcacatggtagagaggtcaaagatttatcggcaaaggatgggcctgcgtctgattagctagttggtggggtaacggctcaccaaggcgacgatcagtagccgacctgagagggtgatcggccacattggaactgagacacggtccaaactcctacgggaggcagcagtggggaatattgcacaatgagcgaaagcctgatgcagcaacgccgcgtgaaggatgaaggtcttcggatcgtaaacttctgtcctatgggaagataatgacggtaccataggaggaagccccggctaactacgtgccagcagccgcggtaatacgtagggggcgagcgttatccggaattattgggcgtaaagagtgcgtaggtggtaacttaagcgcggggtttaaggcaatggcttaaccattgttcgccctgcgaactggcatacttgagtgcaggagaggaaagcggaattcctagtgtagcggtgaaatgcgtagatattaggaggaacaccagtggcgaaggcggctttctggactgaaactgacactgaggcacgaaagtgtggggagcaaacaggattagataccctggtagtccacaccgtaaacgatgagcactagggtgtcgggggagcaatccttccggtgccggaagtaacgcattaagtgctccgcttgggaaggacgtacgcaagtatgaagctcaaaggaattgaccggggacccgcacaagcagcggagcatgtggtttaaattggaagcaacgcggaagaaccttaccagggcttgacatccctgtgacagacccttaaccgggtccttcttcggacagaggagacaggtggtgcatggttgtcgtcagctcgtgtcgtgagatgttgggttgagtcccgcaacgagcgcaacccttgtcattagttgccatcattaagttgggcactctagtgagactgccggggataactcggaggaaggtggggatgacgtcaaatcatcatgccctatatgtcctgggctacacacgtactacaatggatgtaacagagggaagcgaagtagtgatactaagcgaaacccaaaaagcattcacagttcggattgaaggctgaaattcgccttcatgaagccggaattgctagtaatggcaggtcagcatactgccgtgaatacgttcccgggccttgcactcaccgcccgtca

SEQ ID NO: 606 - DNA, 1388 bp, Artificial Sequence
  Synthetic polymer
agagtttgatcctggctcaggatgaacgctggcggcgtgcttaacacatgcaagtcgaacgggaaatatttcattgagacttcggtggatttgatctatttctagtggcggacgggtgagtaacgcgtgggtaacctgccttatacagggggataacagtcagaaatggctgctaataccgcataagcgcacagagctgcatggctcagtgtgaaaaactccggtggtataagatggcctcgcgtctgattagctagttggaggggtaacggcccaccaaggcgacgatcagtagccggactgagaggttgaccggccacattgggactgagatacggcccagactcctacgggaggcagcagtggggaatattgggcaatggacgcaagtctgacccagcaacgccgcgtgaaggaagaaggctttcgggttgtaaacttcttttaagggggaagagcagaagacggtaccccttgaataagccacggctaactacgtgccagcagccgcggtaatacgtaggtggcaagcgttgtccggatttactgggtgtaaagggcgtgtagccgggtcggcaagtcagatgtgaaatctggaggctcaacctccaaactgcatttgaaactgccggtcttgagtatcggagaggtaatcggaattccttgtgtagcggtgaaatgcgtagatataagggagaacaccagtggcgaaggcggattactggacgacaactgacggtgaggcgcgaaagcgtggggggcaaacaggattagataccctggtagtccacgctgtaaacgatcaatactaggtgtgcggggactgaccccctgcgtgccgcagttaacacaataagtattgcacctggggagtacgatcgcaaggttgaaactcaaaggaattgacgggggcccgcacaagcggtggattatgtggtttaattcgaagcaacgcgaagaaccttaccagggcttgacatcctactaatgaagcagagatgcattaagtgcccttctgggaaagtagagacaggtggtgcatggttgtcgtcagctcgtgtcgtgagatgttgggttaagtcccgcaacgagcgcaacccctattgttagttgctacgcaagagcactctagcgagactgccgttgacaaaacggaggaaggtggggacgacgtcaaatcatcatgccccttatgtcctgggctacacacgtaatacaatggcggtaaacagagggatgcgaatccgcgaggaggagcgaacccccaaaagctgtctcagttcggatcgcaggctgcaacccgcctgcgtgaagtcggaatcgctagtaatcgcggatcagcatgccgcggtgaatacgttcccgggccttgcactcaccgcccgtca

SEQ ID NO: 607 - DNA, 1382 bp, Artificial Sequence
  Synthetic polymer
ttcgcccttagagtttgatcctggctcaggatgaacgctggcggcgtgcttaacacatgcaagtcgagcgagaaaagttcttcggaacttttctagcggcggacgggtgagtaacacgtgggcaacctgcctcatagaggggaatagcctcccgaaagggagattaataccgcataagattgtagcttcgcatgaagtagcaattaaaggagcaatccgctatgagatgggcccgcggcgcattagctagttggtgaggtaacggctcaccaaggcgacgatgcgtagccgacctgagagggtgatcggccacattgggactgagacacggcccagactcctacgggaggcagcagtggggaatattgcacaatgggggaaaccctgatgcagcaacgccgcgtgagtgatgacggccttcgggttgtaaagctctgtcttcagggacgataatgacggtacctgaggaggaagccacggctaactacgtgccagcagccgcggtaatacgtaggtggcgagcgttgtccggatttactgggcgtaaagggagcgtaggcggaacttttaagtaagaatgtgaaatacccgggctcaacttgggtgttgcatttcaaactggaagtctagagtgcaggagaggagaatggaattcctagtgtagcggtgaaatgcgtagagattaggaagaacaccagtggcgaaggcgattctctggactgtaactgacgctgaggctcgaaagcgtggggagcaaacaggattagataccctggtagtccacgccgtaaacgatgaatactaggtgtaggggcccccaagcctctgtgccgccgctaacgcattaagtattcccccctggggagtacggtcgcaagattaaaactcaaaggaattgacggggacccgcacaagcagcggagcatgtggtttaattcgaagcaacgcgaagaaccttacctaggcttgacatgtcctgaattaccagtaatgtgggaagtcccttcggggacaggaacacaggtggtgcatggttgtcgtcagctcgtgtcgtgagatgttgggttaagtcccgcaacgagcgcaacccttattgttagttggtaccattaagttgaccactctagcgagactgcccgggttaaccgggaggaaggtggggatgacgtcaaatcatcatgccccttatgtctagggctacacacgtgctacaatggcaagtacaaagagaagcaatactgcgaagtggagcaaaactcaaaaacttgtctcagttcggattgtaggctgaaactcgcctacatgaagctggagttgctagtaatcgcgaatcagaatgtcgcggtgaatacgttcccgggtcttgcactcaccgcccgtca

SEQ ID NO: 608 - DNA, 1419 bp, Artificial Sequence
  Synthetic polymer
agagtttgatcctggctcaggatgaacgctggcggcgtgcctaatacatgcaagtcgagcgagaatttagggaatgacgcttcggtagattttcctaaaggaaagcggcgaacgggtgagtaacgcgtgagcaacctgccccggagtgggggacaacagttggaaacgactgctaataccgcatgacatatactaacggcatcgttggtatatcaaagatttattgctctgggatgggctcgcgtctgattagttagttggtgaggtaacggctcaccaaggcagcgatcagtagccgacctgagagggtgatcggccacattggaactgagacacggtccagactcctacgggaggcagcagtggggaatattgcacaatgggcgaaagcctgatgcagcaacgccgcgtgagcgatgaaggcctttgggtcgtaaagctctgtgatcggggacgaacggtccgtaagtcaatactttatggaagtgacggtacccgaatagcaagccacggctaactacgtgccagcagccgcggtaatacgtaggtggcaagcgttgtccggaattattgggcgtaaagcgcgcgcaggcggctttctaagtccatcttaaaagtgcggggcttaaccccgtgatgggatggaaactggaaagctggagtatcggagaggaaagtggaattcctagtgtagcggtgaaatgcgtagagattaggaagaacaccggtggcgaaggcgactttctggacgacaactgacgctgaggcgcgaaagcgtggggagcaaacaggattagataccctggtagtccacgccgtaaacgatgaatactaggtgtaggaggtatcgaccccttctgtgccggagttaacacaataagtattccgcctgggaagtacgatcgcaagattaaaactcaaaggaattgacgggggcccgcacaagcggtggagtatgtggtttaatttgacgcaacgcgaagaaccttaccaggtcttgacattgatcgccattcacagaaatgtgaagttctccttcgggagacgagaaaacaggtggtgcacggctgtcgtcagctcgtgtcgtgagatgttgggttaagtcccgcaacgagcgcaacccctatcttatgttaccagcacgttatggtggggagtcatgagagaccgccgcggacaacgcggaggaaggtggggatgacgtcaagtcatcatgccccttatgacctgggctacacacgtactacaatgggtgtcaacaaagagaagcgaaaccgcgaggtggagcgaacctcaaaaacacacccccagttcagattgcaggctgcaacccgcctgcatgaagtaggaatcgctagtaatcgcgggtcagcataccgcggtgaatacgttcccgggccttgtacacaccgcccgtca

SEQ ID NO: 609 - DNA, 1400 bp, Artificial Sequence
  Synthetic polymer
ttcgcccttagagttcctttctggctcaggatgaacgctggcggcgtgcttaacacatgcaagtcgaacggagagcttctgatagaggattcgtccaattgaagaagtttcttagtggcggacgggtgagtaacgcgtgagtaacctgccttggagtggggaataacacagtgaaaattgtgctaataccgcataatgcatttgtatcgcatggtactgaatgccaaagatttatcgctctgagatggactcgcgtctgattagctagttggcggggtaacggcccaccaaggcgacgatcagtagccggactgagaggttagccggccacattgggactgagacacggcccagactcctacgggaggcagcagtggggaatattgggcaatgggcgcaagcctgacccagcaacgccgcgtgaaggaagaaggctttcgggttgtaaacttcttttgtcagggacgaacaaatgacggtacctgacgaataagccacggctaactacgtgccagcagccgcggtaatacgtaggtggcaagcgttatccggatttactgggtgtaaagggcgtgtaggcgggatcgcaagtcagatgtgaaaaccacgggctcaacctgtggcctgcatttgaaactgtagttcttgagtactggagaggcagacggaattcctagtgtagcggtgaaatgcgtagatatcaggaggaacaccagtggcgaaggcggtctgctggacagcaactgacgctgaggcgcgaaagcgtggggagcaaacaggattagataccctggtagtccacgctgtaaacgatggatactaggtgtggggggtctgaccccctccgtgccgcaggtaacccaatagggtatcccgcgtggggagtagggtcgcaaggttgaaactcaaaggaattggggggggaccgcacgagcgggagagtatgtggtttaattcgaagcaacgcgaagaaccttaccagggcttggcatcccgaggcccgggtgtagagatagagctttctctttggagacgtcggtgacaggtagggcatggttgtggtcagctcgtgtcgggagatgtggggttaagtcccgcaacgagcgcaacccctattgttagttgctacgcaagagcactctagcgagactgccgttgacaaaacggaggaaggtggggaggacgtcaaatcatcatgccccttatgtcctgggctacacacgtactacaatggtggttaacagagggaagcaatgccgcgagggggagcaaacccctaaaagccatcccagttcggatggcaggctgcaacccgcctgcgtgaagttggaatcgctagtaatcgcagatcagcatgctgcggggaatacgttcccgggtcttgcacacaccgcccgtca

SEQ ID NO: 610 - DNA, 1387 bp, Artificial Sequence
  Synthetic polymer
agagtttgattctggctcaggatgaacgctggcggcgtgcctaacacatgcaagtcgagcgagaaatcttggaatgagacttcggttaagtgaagagatggaaagcggcggacgggtgagtaacgcgtaggcaacctgccttatgcagagggatagccattggaaacgatgattaaaacctcataatgccattttatcacatggtgagatggtcaaagatttatcggcataagatgggcctgcgtctgattagctagttggtggggtaacggcctaccaaggcgacgatcagtagccgacctgagagggtgatcggccacattggaactgagacacggtccaaactcctacgggaggcagcagtggggaatattgcacaatgggcgaaagcctgatgcagcaacgccgcgtgagcgaagaaggtcttcggatcgtaaagctctgtccttggggaagataatgacggtacccttggaggaagccccggctaactacgtgccagcagccgcggtaatacgtagggggcaagcgttatccggaattattgggcgtaaagagtgcgtaggtggttacctaagcagggggtgaaaggcactggcttaaccaatgtcagccccctgaactgggtaccttgagtgcgggagaggaaagcggaattcctagtgtagcggtgaaatgcgtagatattaggaggaacaccagtggcgaaggcggctttctggactgttactgacactgaggcacgaaagtgtggggagcaaacaggattagataccctggtagtccacaccgtaaacgatgagcactaggtgtcggggtcgcaagacttcggtgccccagttaacgcattatgtgctccgccggggggagtacgtacgcaagttatgaaactcaaaggaattgacggggacccgcacaagcagcggagcatgtggtttaattcgaagcaacgcgaagaaccttaccaggacttgtcatccctctgaaacccctgataacgaaggggcctcttcggacagaggagacaggtggtgcatggttgtcgtcagctggtgtcgtgagatgttgggttaagtcccgcaacgagcgcaacccttgctgttagttgccatcattaagttgggcactctaacgggactgccggggataactgggaggaaggtggggatgacgtcaaatcatcatgccccttatgttctgggctacacacgtgctacaagggtcggtacaaagagcagcaagacggggagggggagcaaatctcaaaaaccgatcccagttcggattgcaggctgcaactcgcctgcatgaagttggagttgctagtaatcgcggatcagaatgccgcggtgaatacgttcccgggccttgcacacaccgcccgtca

SEQ ID NO: 611 - DNA, 1398 bp, Artificial Sequence
  Synthetic polymer
agagtttgatcctggctcaggatgaacgctggcggcgtgcttaacacttgcaagtcgagcgaagcacttgaacctgattcttcggatgaaagttcatttgactgagcggcggacgggtgagtaacgcgtgggtaacctgcctcatacaggggggtaacagttaaaaatgactgctaataccgcataagaccacggtaccgcatggtacagtggtaaaaactccggtggtatgagatggacccgcgtctgattaggtagttggtgaggtaacggctcaccaagccgacgatcagtagccgacctgagagggtgaccggccacattgggactgagacacggcccagactcctacgggaggcagcagtggggaatattgcacaatggaggaaactctgatgcagcgacgccgcgtgaaggatgaagtatttcggtatgtaaacttctatcagcagggaagaaaatgacggtacctgactaagaagccccggctaactacgtgccagcagccgcggtaatacgtagggggcaagcgttatccggatttactgggtgtaaagggagcgtagacggcatggcaagccagatgtgaaagcccggggctcaaccccgggactgcatttggaactgctgagctagagtgtcggagaggcaagtggaattcctagtgtagcggtgaaatgcgtagatattaggaggaacaccagtggcgaaggcggcttgctggacgatgactgacgttgaggctcgaaagcgtggggagcaaacaggataagataccttggtaattccacgccgtaaacgaaggacttttaggtgtcggggtagcaaagctatttcggtgccgcagcccaacgcaaataaagtagtccccctgggggagtcgtttcgcaagaaagaaactcaaaggaattgacggggacccgcacaagcggtggagcatgtggtttaattcgaagcaacgcgaagcaccttacctgatcttgacatccctctgaccgttccttaatcggagctttcattcgggacagaggagacaggtggtgcatggttgtcgtcagctcgtgtcgtgagatgttgggttaagtcccgcaacgagcgcaactcctatcttcagtagccagcggcaaggccgggcactctggagagactgccagggataacctggaggaaggtggggaagacgtcaaatcatcatgccccttacgacctgggctacacacgtgctacaatgggtacaacaaagagacgcgagaccgcaaggtggagcaaaactcagaaaagtactctcagttcagattgtgggctgcaacccgcccacatgaagttggagttgctagtaatcgcggatcagcatgccgcggtgaatacgttcccgggcctcgcacacaccgcccgtca

SEQ ID NO: 612 - DNA, 1403 bp, Artificial Sequence
  Synthetic polymer
agagtttgatcctggctcagattgaacgctggcggcaggcctaacacatgcaagtcgaacggtaacaggaagcagcttgctgcttcgctgacgagtggcggacgggtgagtaatgtctgggaaactgcctgatggagggggataactactggaaacggtagctaataccgcataacgtcgcaagaccaaagagggggaccttcgggcctcttgccatcggatgtgcccagatgggattagcttgttggtggggtaacggctcaccaaggcgacgatccctagctggtctgagaggatgaccagccacactggaactgagacacggtccagactcctacgggaggcagcagtggggaatattgcacaatgggcgcaagcctgatgcagccatgccgcgtgtatgaagaaggccttcgggttgtaaagtactttcagcggggaggaagggagtaaagttaatacctctgctcattgacgttacccgcagaagaagcaccggctaactccgtgccagcagccgcggtaatacggagggtgcaagcgttaatcggaattactgggcgtaaagcgcacgcaggcggtttgttaagtcagatgtgaaatccccgggctcaacctgggaactgcatctgatactggcaagcttgagtctcgtagaggggggtagaattccaggtgtagcggtgaaatgcgtagagatctggaggaataccggtggcgaaggcggccccctggacgaagactgacgctcaggtgcgagagcgtggggagcacacaaaaggagatcccttggtagtccccgccgtaaacgcacttaaaagggaggttgtgcccctgaggagaggcttccggagctaacgcgataagtcgacccgcttggggagtacggccgccagggttaaaactcaaatgaattgacgggggcccgcacaagcggtggagcatgtggtttaattcgatgcaacgcggagaaccttacctggtcttgacatctacggaagttttcagagatgagaatgtgccttcgggaaccgtgagacaggtgctgcatggctgtcgtcagctcgtgttgtgaaatgttgggttaagtcccgcaacgagcgcaacccttatcctttgttgccagcggtccggccgggaactcaaaggagactgccagtgataaactggaggaaggtggggatgacgtcaagtcatcatggcccttacgaccagggctacacacgtgctacaatggcgcatacaaagagaagcgacctcgcgagagcaagcggacctcataaagtgcgtcgtagtccggattggagtctgcaactcgactccatgaagtcggaatcgctagtaatcgtggatcagaatgccacggtgaatacgatcccgggccttgcactcaccgcccgtca

SEQ ID NO: 613 - DNA, 1372 bp, Artificial Sequence
  Synthetic polymer
agagtttgatcctggctcaggacgaacgctggcggcgtgcctaacacatgcaagtcgagcgagggagctccttcgggagcaacctagcggcggacgggtgagtaacacgtgggcaacctgccttgaagagggggatagcctcccgaaagggagattaataccgcataacatcggattaccgcatggtgaaccgattaaaggagtaatccgcttcaagatgggcccgcggcgcattagctagttggtgaggtaacggctcaccaaggcgacgatgcgtagccgacctgagagggtgatcggccacattgggactgagacacggcccagactcctacgggaggcagcagtggggaatattgcacaatgggggaaaccctgatgcagcaacgccgcgtgagtgatgaaggccttcgggttgtaaagctctgtcttcagggacgataatgacggtacctgaggaggaagccacggctaactacgtgccagcagccgcggtaatacgtaggtggcaagcgttgtccggatttactgggcgtaaagggagtgtaggcggatacttaagtcagatgtgaaatacccgggctcaacttgggtgctgcatttgaaactgggtatctagagtgcaggagaggaaagtggaattcctagtgtagcggtgaaatgcgtagagattaggaagaacaccagtggcgaaggcgactttctggactgtaactgacgctgaggctcgaaagcgtggggagcaaacaggattagataccctggtagtccacgccgtaaacgatgggtactaggtgggggaggtatcaactccttcctgtcacgccgttaacacagataagtaccccgcctggggagtacggtcgcatgatttaaactcaaaggaattgacgggggcccgcacaagcagcggagcatgtggtttaattcaaagcaacgcgaagaaccttacctagacttgacatctcctgaattacccttaatcggggaagcccttcggggcaggaagacaggtggtgcatggttgtcgtcagctcgtgtcgtgagatgttgggttaagtcccgcaacgagcgcaacccctattgttagttgctaccattaagttgagcactctagcgagactgcccgggtgaaccgggaggaaggtggggatgacgtcaaatcatcatgccccttatgtctagggctacacacgtgctacaatggcgagtacaacgagacgcaatgccgcgaggtggagcaaaactcaaaaactcgtcccagttcggattgcaggctgaaactcgcctgcatgaagccggagttgctagtaatcgcgaatcagagtgtcgcggtgaatacgttcccgggccttgtactcaccgcccgtca

SEQ ID NO: 614 - DNA, 1394 bp, Artificial Sequence
  Synthetic polymer
agagtttgatcctggctcaggatgaacgctggcggcgtgcctaacacatgcaagtcgaacggagttcttaaggaatgcgacttcggtcaaatgacttttgaacttagtggcggacgggtgagtaacgcgtgagcaacctgcctttcagagggggataacatttggaaacagatgctaataccgcataagattacagtaccgcatgatacagtgatcaaaggagcaatccgctgaaagatggacccgcgttggattagctagttggcagggcagcggcctaccaaggcgacgatccatagccggcctgagagggtgaacggccacattgggactgagacacggcccagactcctacgggaggcagcagtggggaatattgcacaatgggggaaaccctgatgcagcgacgccgcgtgaaggaagaagtatctcggtatgtaaagctctatcagcagggaagataatgacggtacctgactaagaagctccggctaaatacgtgccagcagccgcggtaatacgtatggagcaagcgttatccggatttactgggtgtaaagggtgcgtaggtggcagtgcaagtcagatgtgaaaggccggggctcaaccccggagctgcatttgaaactgctcggctagagtacaggagaggcaggcggaattcctagtgtagcggtgaaatgcgtagatattaggaggaacaccagtggcgaaggcggcctgctggactgttactgacactgaggcacgaaagcgtggggagcaaacaggattagataccctggtagtccacgccgtaaacgatgaatactaggtgtcggggccgtataggcttcggtgccgccgctaacgcagtaagtattccacctggggagtacgttcgcaagaatgaaactcaaaggaattgacggggacccgcacaagcggtggagcatgtggtttaattcgaagcaacgcgaagaaccttaccaggtcttgacatccttctgaccgcaccttaatcggtgctttccttcgggacagaagagacaggtggtgcatggttgtcgtcagctcgtgtcgtgagatgttgggttaagtcccgcaacgagcgcaacccctatcttcagtagccagcaggttaagctgggcactctggagagactgccagggataacctggaggaaggtggggacgacgtcaaatcatcatgccccttatgatttgggctacacacgtgctacaatggcgtaaacaaagggaagcgagagggcgacctggagcaaatcccaaaaataacgtcccagttcggactgtagtctgcaacccgactacacgaagctggaatcgctagtaatcgcagatctgaatgctgcggtgaatacgttcccgggccttgcactcaccgcccgtca

SEQ ID NO: 615 - DNA, 1365 bp, Artificial Sequence
  Synthetic polymer
agagtttgatcctggctcaggatgaacgctggcggcgtgcttaacacatgcaagtcgaacggataaaccacttcggtggacatagagtggcgaacgggtgagtaacacgtgcccaacctgccccccgcaccgggatacccccgggaaaccgggatcaataccggatgacgcgggaaggccgcatggccttcccgccaaagcccaggcggcgggggatgggggcgcggcccatcaggttgacggcggggtgacggcccaccgtgcctactacgggtagccgggttgagagaccgatcggccacattgggactgagatacggcccagactcctacgggaggcagcagtggggaattttgcgcaatgggggaaaccctgacgcagcaacgccgcgtgcgggacgaaggccttcgggttgtaaaccgctttcagcagggaagaccatgacggtacctgcagaagaagccccggctaactacgtgccagcagccgcggtaatacgtagggggcgagcgttatccggattcattgggcgtaaagcgcgcgcaggcggccgatcaagcggaacctctaatcccggggctcaaccccgcggccgggttccgaactggtcggctcgagttcggtagaggagggtggaattcccggtgtagcggtggaatgcgcagatatcgggaagaacaccgatggcgaaggcagccctctgggccgacactgacgctgaggcgcgaaagctgggggagcgaacaggattagataccctggtagtcccagccgtaaacgatgggcgctaggtgtgggggggccgtccccccgtgccgcagccaacgcattaagcgccccgcctggggagtacggccgcaaggctaaaactcaaaggaattgacgggggcccgcacaagcagcggagcatgtggcttaattcgaagcaacgcgaagaaccttaccagggcttgacaccaccgtgaagcgcgggagaccgcgtggccggaaggagcggtgacaggtggtgcatggctgtcgtcagctcgtgtcgtgagatgttgggttaagtcccgcaacgagcgcaacccctgccccgtgttgccagcattcagttggggactcgcgggggactgccggcgtcaagccggaggaaggtggggacgacgtcaagtcatcatgccccttatgccctgggctgcacacgtgctacaatggccggtacaacgggttgcgacctggcgacaggaagcggatccctcaaagccggccccagttcggatcggaggctgcaacccgcctccgtgaagccggagttgctagtaatcgcggatcagcatgccgcggtgaatacgttccctgggccttgtacacaccgcccgtca

SEQ ID NO: 616 - DNA, 1393 bp, Artificial Sequence
  Synthetic polymer
agagtttgatcctggctcaggatgaacgctggcggcgtgcttaacacatgcaagtcgaacgaagcatttgcgacagattctttcgggatgaagatgcttatgactgagtggcggacgggtgagtaacgcgtgggtaacctgccttatacagggggatagcagttggaaacgactggtaataccgcataagcgcacggtatcgcatgatacagtgtgaaaaactgaggtggtataagatggacccgcgtctgattagctagttggtgaggtaacggcccaccaaggcgacgatcagtagccgacctgagagggtgaccggccacattgggactgagacacggcccagactcctacgggaggcagcagtggggaatattgcacaatggaggaaactctgatgcagcgacgccgcgtgagtgaagaagtagttcgctatgtaaagctctatcagcagggaagatagtgacggtacctgactaagaagctccggctaaatacgtgccagcagccgcggtaatacgtatggagcaagcgttatccggatttactgggtgtaaagggagtgtaggtggcatcgcaagtcagaagtgaaagcccggggctcaaccccgggactgcttttgaaactgcggagctagagtgcaggaggggcaagtggaattcctagtgtagcggtgaaatgcgtagatattaggaggaacaccagtggcgaaggcggcttgctggactgtaactgacactgaggctcgaaagcgtggggagcaaacaggattagataccctggtagtccacgccgtaaacgatgaatactaggtgtcggggcacataagtgcttcggtgccgcagcaaacgcaataagtattccacctggggaatacgttcgcaagaatgaaactcaaaggaattgacggggacccgcacaagcggtggagcatgtggtttaattcgaagcaacgcgaagaaccttacctgctcttgacatcccattcgatagagggtaatgcctctagcccttcgggggaatggagacaggtggtgcatggttgtcgtcagctcgtgtcgtgagatgttgggttaagtcccgcaacgagcgcaacccctatcttcagtagccagcggtttggccgggcactctggggagactgccagggataacctggaggaaggcggggatgacgtcaaatcatcatgccccttatgatttgggctacacacgtgctacaatggcgtaaacaaagggaagcagacctgtgaaggcgagcaaatcccaaaaataacgtcccagttcggactgcagtctgcaactcgactgcacgaagctggaatcgctagtaatcgcggatcagaatgccgcggtgaatacgttcccgggtcttgtacacaccgcccgtca

SEQ ID NO: 617 - DNA, 1376 bp, Artificial Sequence
  Synthetic polymer
agagtttgatctggctcaggacgaacgctggcggcgtgcctaacacatgcaagtcgagcggagacaagagatagcttgctagatcttgttttagcggcggacgggtgagtaacgcgtgagcaacctctctctcagtggggaataacacagggaaacttgtactaataccgcatgagaccacggtaccgcatggtacaggggtcaaagatttatcgctgagaggtgggctcgcgtctgattagatagttggtgaggtaacggctcaccaagtcgacgatcagtagccgacctgagagggtgatcggccacattggaactgagacacggtccaaactcctacgggaggcagcagtggggaatattgcacaatgggcgaaagcctgatgcagcaacgccgcgtgagcgatgaaggccttcgggtcgtaaagctctgtcctcaaggaagataatgacggtacttgaggaggaagccccggctaactacgtgccagcagccgcggtaatacgtagggggctagcgttatccggaattactgggcgtaaagggtgcgtaggtggtttcttaagtcagaggtgaaaggctacggctcaaccgtagtaagcctttgaaactgggaaacttgagtgcaggagaggagagtggaattcctagtgtagcggtgaaatgcgtagatattaggaggaacaccagtggcgaaggcggcttactggacgataactgacgttgaggctcgaaagcgtggggagcaaacaggattagataccctggtagtccacgccgtaaacgatgaatactaggtgttgggaggcaaaagcctttcggtgccgcagctaacgcaataagtattccacctggggagtacgttcgcaagaatgaaactcaaaggaattgacggggacccgcacaagcggtggagcatgtggtttaattcgaagcaacgcgaagaaccttaccaaatcttgacatccctctgacaaactgtgtaaagcagtcttcttcggacagaggtgacaggtggtgcatggttgtcgtcagctcgtgtcgtgagatgttgggttaagtcccgcaacgagcgcaacccttgtctttagtagccagcatttcggatgggcactctagagagactgccagggataacctggaggaaggtggggatgacgtcaaatcatcatgccccttatgatttgggctacacacgtgctacaatggcgtaaacaaagggaagcgaccctgtgaaggcaagcaaatcccaaaaataacgtctcagttcggattgtagtctgcaactcgactacatgaagctggaatcgctagtaatcgcgaatcagaatgtcgcggtgaatacgttcccgggtcttgcacacaccgcccgtca

SEQ ID NO: 618 - DNA, 1349 bp, Artificial Sequence
  Synthetic polymer
tttgatcctggctcaggacgaaacgcgggcggcgtgcttaacacatacaagtcgagcgatgaagcttcttcggaagtggattagcggcggacgggtgagtaacacgtgggtaacctgccttatagtggggaatagcctttcgaaaggaagattaataccgcataagattgtagtttcgcatgaaacagcaattaaaggagcaattcgctataagatggacccgcggcgcattagctagttggtgaggtaacggctcaccaaggcgacgatgcgtagccgacctgagagggtgatcggccacattgggactgagacacggcccagactcctacgggaggcagcagtggggaatattgcacaatgggggaaaccctgatgcagcaacgccgcgtgagtgatgacggtcttcggattgtaaagctctgtctttagggacgataatgacggtacctaaggaggaagccacggctaactacgtgccagcagccgcggtaatacgtaggtggcaagcgttgtccggatttactgggcgtaaagggagcgtaggcggatttttaagtgggatgtgaaatacccgggctcaacctgggtgctgcattccgaactggaagtctagagtacaggaggggaaagcggaattcctagtgtagcggtgaaatgcgtagagattaggaagaacaccagtggcgaaggcggctttctggactgtaactgacgctgaggctcgaaagcgtggggagcaaacaggattagataccctggtagtccacgccgtaaacgatgaatactaggtgtaggggttgtcatgacctctgtgccgccgctaacgcattaagtattccgcctggggagtacggtcgcaagattaaaactcaaaggaattgacgggggcccgcacaagcagcggagcatgtggtttaattcgaagcaacgcgaagaaccttacctagacttgacatctcctgcattactcttaatcgaggaagttccttcgggaacaggaagacaggtggtgcatggttgtcgtcagctcgtgtcgtgagatgttgggttaagtcccgcaacgagcgcaacccctattgttagttgctaccattaagttgagcactctagcgagactgcccgggttaaccgggaggaaggtggggatgacgtcaaatcatcatgccccttatgtctagggcgacacacgtgttacaatggcggccacagagggaagctacccggcgacgggatgcggatatcgaaaagccgtcccagttcggactggagtctgcaacccgactccaggaagttggattcgctagtaatcgcgaatcagccatggcgcggtgaatacgttcccgggc

SEQ ID NO: 619 - DNA, 1392 bp, Artificial Sequence
  Synthetic polymer
agagtttgatcctggctcaggatgaacgctggcggcgtgcttaacacatgcaagtcgaacgaagcatttaagacagattttttcggaatgacgttttaaatgactgagtggcggacgggtgagtaacgcgtgggcaacctgccctgtacagggggataacagtcagaaatgactgctaataccgcataagaccacagtgctgcatggcacagtggtaaaactccggtggtacaggatgggcccgcgtctgattagctggttggtgaggtaacggctctaccaaggcaacgatcagtagccggcttgagagagtggacggccacattgggactgagacacggcccaaactcctacgggaggcagcagtggggaatattgcacaatggggggaaccctgatgcagcgacgccgcgtgagtgaagaagtatctcggtatgtaaagctctatcagcagggaagaaaatgacggtacctgactaagaagccccggctaactacgtgccagcagccgcggtaatacgtagggggcaagcgttatccggaattactgggtgtaaagggtgcgtaggtggtgtggcaagtcagaagtgaaaacccggggcttaactccgggattgcttttgaaactgtcagactggagtgcaggagaggtaagcggaattcctagtgtagcggtgaaatgcgtagatattaggaggaacatcagtggcgaaggcggcttactggactgaaactgacactgaggcacgaaagcgtggggagcaaacaggattagataccctggtagtccacgccgtaaacgatgaatactaggtgtcagggccgtagaggcttcggtgccgcagcaaacgcagtaagtattccacctggggagtacgttcgcaagaatgaaactcaaaggaattgacggggacccgctcaagcggtggagcatgtggtttaattcgaagcaacgcgaagaaccttacctggtcttgacatcctcatgacggttccttaatcgggactttccttcgggacaggagagacaggtggtgcatggttgtcgtcagctcgtgtcgtgagatgttgggttaagtcccgcaacgagcgcaacccctatctttagtagccagcatgtaaggtgggcactctagagagactgccagggataacctggaggaaggtggggacgacgtcaaatcatcatgccccttatgaccagggctacacacgtgctacaatggcgtcaacagagggaagcgatgccgtgaggttcagcaaatcccaaaaataacgtcacagttcggattgtagtctgcaactcgactacatgaagctggaatcgctagtaatcgcgaatcagaatgtcgcggtgaatacgttcccgggtcttgcactcaccgcccgtca

SEQ ID NO: 620 - DNA, 1394 bp, Artificial Sequence
  Synthetic polymer
agagtttgatcctggctcaggatgaacgctggcggcgtgcttaacacatgcaagtcgaacgaagcaccttattagattttcttcgggaatgaagatatggtgactgagtggcggacgggtgagtaacgcgtgggtaacctgcctcatacagggggatagcagttggaaacgactggtaataccgcataagcgcacggtatcgcatgatacagtgtgaaaaactccggtggtatgagatggacccgcgtctgattagctagttggtaaggtaacggcttaccaaggcgacgatcagtagccgacctgagagggtgaccggccacattgggactgagacacggcccagactcctacgggaggcagcagtggggaatattgcacaatggaggaaactctgatgcagcgacgccgcgtgagtgaagaagttattcgtaatgtaaagctctatcagcagggaagatagtgacggtacctgactaagaagctccggctaaatacgtgccagcagccgcggtaatacgtatggagcaagcgttatccggatttactgggtgtaaagggagtgtaggtggctgtgcaagtcagaagtgaaagcccggggctcaaccccgggactgcttttgaaactgtatagctagagtgcaggaggggcaagtggaattcctagtgtagcggtgaaatgcgtagatattaggaggaacaccagtggcgaaggcggcttgctggactgtaactgacactgaggctcgaaagcgtggggagcaaacaggattagataccctggtagtccacgccgtaaacgatgaatactaggtgtcggggctcgtatagagcttcggtgccgcagcaaacgcaataagtattccacctggggagtacgttcgcaagaatgaaactcaaaggaattgacggggacccgcacaagcggtggagcatgtggtttaattcgaagcaacgcgaagaaccttaccaggtcttgacatcccgatgaccgactcttaaccgagtcttttcttcggaacatcggagacaggtggtgcatggttgtcgtcagctcgtgtcgtgagatgttgggttaagtcccgcaacgagcgcaacccctgtccttagtagccagcagttcggttgggcactctggggagactgccagggataacctggaggaaggtggggatgacgtcaaatcatcatgccccttatgatctgggctacacacgtgctacaatggtgataacaaagggaagcgaaactgcgaggtggagcaaatcccagaaaagtcatctcagttcggattgtagtctgcaactcgactacatgaagctggaatcgctagtaatcgcgaatcagaatgtcgcggtgaatacgttcccgggtcttgcacacaccgcccgtca

SEQ ID NO: 621 - DNA, 1452 bp, Artificial Sequence
  Synthetic polymer
gatgaacgctggcggcgtgcttaacacatgcaagtcgaacggaacgctacggatggagttttcggacaacagaagtagttgtttagtggcggacgggtgagtaacgcgtgaggaacctgccttggagaggggaataacagttggaaacgactgctaataccgcatgatacagtggagtcgcatggctctgttgtcaaagatttatcgctctgagatggcctcgcgtctgattagctagtaggtggggtaaaggcccacctaggcgacgatcagtagccggactgagaggttgaccggccacattgggactgagaaacggcccagactcctacgggaggcagcagtggggaatattgggcaatgggcgcaagcctgacccagcaacgccgcgtgaaggaagaaggttttcggattgtaaacttcttttatgagggacgaagagagtgacggtacctcatgaataagccacggctaactacgtgccagcagccgcggtaatacgtaggtggcaagcgttatccggatttactgggtgtaaagggcgtgtaggcgggactgcaagtcaggcgtgaaattccagggctcaaccctggaactgcgtttgaaactgtagttcttgagtgatggagaggcaggcggaattccgagtgtagcggtgaaatgcgtagatattcggaggaacaccagtggcgaaggcggcctgctggacattaactgacgctgaggcgcgaaagcgtggggagcaaacaggattagataccctggtagtccacgctgtaaacgatgaatactaggtgtggggggactgaccccttccgtgccgcagttaacacaataagtattccacctggggagtacgatcgcaaggttgaaactcaaaggaattgacgggggcccgcacaagcggtggagtatgtggtttaattcgaagcaacgcgaagaaccttaccagggcttgacatggggacgaccggcacagagatgtgctttctcttcggagcgagtcccacacaggtggtgcatggttgtcgtcagctcgtgtcgtgagatgttgggttaagtcccgcaacgagcgcaacccctattgttagttgctacgcaagagcactctagcgagactgccgttgacaaaacggaggaaggtggggacgacgtcaaatcatcatgccccttatgtcctgggctacacacgtactacaatggtggccaacagagggaagcaagacagtgatgtggagcaaacccctaaaagccatcccagttcggattgcaggctgaaactcgcctgtatgaagttggaatcgctagtaatcgcggatcagcatgccgcggtgaatacgttcccgggccttgtacacaccgcccgtcacaccatgagagtcgggaacacccgaagtccgtagcctaactgcaaagggggcgcggccgaaggtgggtttgataattagggtg

SEQ ID NO: 622 - DNA, 1481 bp, Artificial Sequence
  Synthetic polymer
gtttgatcctggctcaggatgaacgctggcggcgtgcttaacacatgcaagtcgaacggagatagttttgtagcaatataaagctattttagtggcggacgggtgagtaacgcgtgaggaacctgcctcggagtgggggataacacattgaaaggtgtgctaataccgcatgacatatcgggatcgcatgatgctgatatcaaagatttatcgctctgagatggcctcgcgtctgattagctagttggtggggtaacggcccaccaaggcttcgatcagtagccggactgagaggttggccggccacattgggactgagatacggcccagactcctacgggaggcagcagtggggaatattgggcaatgggcgcaagcctgacccagcaacgccgcgtgaaggaagaaggccctcgggttgtaaacttcttttgtcggggacgaaacaaatgacggtacccgacgaataagccacggctaactacgtgccagcagccgcggtaatacgtaggtggcaagcgttatccggatttactgggtgtaaagggcgtgtaggcgggagtgcaagtcagatgtgaaaattatgggctcaacccataacctgcatttgaaactgtatttcttgagtgatggagaggcaggcggaattccgtgtgtagcggtgaaatgcgtagatatacggaggaacaccagtggcgaaggcggcctgctggacattaactgacgctgaggcgcgaaagcgtggggagcaaacaggattagataccctggtagtccacgctgtaaacgatggatactaggtgtggggggtctgaccccctccgtgccgcagttaacacaataagtatcccacctggggagtacgatcgcaaggttgaaactcaaaggaattgacgggggcccgcacaagcggtggagtatgtggtttaattcgaagcaacgcgaagaaccttaccagggcttgacatcctactaacgaagcagagatgcattaggtgcccttcggggaaagtagagacaggtggtgcatggttgtcgtcagctcgtgtcgtgagatgttgggttaagtcccgcaacgagcgcaacccttattgttagttgctacgcaagagcactctagcgagactgccgttgacaaaacggaggaaggtggggacgacgtcaaatcatcatgccccttatgtcctgggccacacacgtactacaatggcggttaacagagggaagcaagaccgcgaggtggagcaaatccctaaaaaccgtcccagttcggattgcaggctgaaactcgcctgtatgaagttggaatcgctagtaatcgcggatcagcatgccgcggtgaatacgttcccgggccttgtacacaccgcccgtcacaccatgagagtcgggaacacccgaagtccgtagcctaactttaacgagggggcgcggccgaaggtgggcttggtaattggggtgaagtcgtaacaaggtagccg

SEQ ID NO: 623 - DNA, 1535 bp, Artificial Sequence
  Synthetic polymer
gagtttgatcctggctcagattgaacgctggcggcaggcctaacacatgcaagtcgaacggtaacaggaaacagcttgctgtttcgctgacgagtggcggacgggtgagtaatgtctgggaaactgcctgatggagggggataactactggaaacggtagctaataccgcataacgtcgcaagaccaaagagggggaccctcgggcctcttgccatcggatgtgcccagatgggattagcttgttggtggggtaacggctcaccaagacagacgatcctctattgctgaccgtctgcagagggcgcacatgtagcgtcgagctacagtcactggaactgagacacggtccagactcctacgggaggcagcagtggggaatattgcacaatgggcgcaagcctgatgcagccatgccgcgtgtatgaagaaggccttcgggttgtaaagtacttttcagcggggaggaagggagtaaagttaatacctttgctcattgacgttacccgcagaagaagcaccggctaactccgggccagcagccgcggtaatacggagggtgcaagcgttaatcggaattactgggcgtaaagcgcacgcaggcggtttgttaagtcagatgtgaaatccccgggctcaacctgggaactgcatctgatactggcaagcttgagtctcgtagaggggggtagaattccaggtgtagcggtgaaatgcgtagagatctggaggaataccggtggcgaaggcggccccctagacgaagactgacgctcaggtgcgaaagcgtggggggcaaacaggattagataccctggtagtccacgccgtaaacgatgtcgacttggaggttgtgcccttgaggcgtggcttccggagctaacgcgttaagtcgaccgcctggggagtacggccgcaaggttaaaactcaaatgaattgacgggggcccgcacaagcggtggagcatggtggtttaattcgatgcaacgcgaagaaccttacctggtcttgacatccacggaagttttcggagatgagaatgtgccttcgggaaccgtgagacaggtgctgcatggctgtcgtcagctcgtgttgtggaaatgttgggttaagtcccgcaacgagcgcaacccttatcctttgttgccagcggtccgcgccgggaatgcagtcaaaggagactgccagttggataaactggcagggaggattggggatgacgtcaagctatcatcatggcccttacgaccattgggctacacacgtgctacaatggcgcatacgaagagaagcgacctcgcgagagcaaacggacctcataaagtgcgtcgtagtccggattggagtctgcaactcgactccatgaagtcggaatcgctagtaatcgtggatcagaatgccacggtgaatacgttcccgggccttgtacacaccgcccgtcacaccatgggagtgggttgcaaaagaagtaggtagcttaaccttcgggagggcgcttaccactttgtgattcatgactggggtgaagtcgtaaca

SEQ ID NO: 624 - DNA, 1358 bp, Artificial Sequence
  Synthetic polymer
gatgaacgctggcggcgtgcttaacacatgcaagtcgaacggggtgctcatgacggaggattcgtccaacggattgagttacctagtggcggacgggtgagtaacgcgtgaggaacctgccttggagaggggaataacactccgaaaggagtgctaataccgcatgatgcagttgggtcgcatggctctgactgccaaagatttatcgctctgagatggccccgcgtctgattagctagtaggcggggtaacggcccacctaggcgacgatcagtagccggactgagaggttgaccggccacattgggactgagacacggcccagactcctacgggaggcagcagtggggaatattgggcaatgggcgcaagcctgacccagcaacgccgcgtgaaggaagaaggctttcgggttgtaaacttcttttgtcggggacgaaacaaatgacggtacccgacgaataagccacggctaactacgtgccagcagccgcgataatacgtaggtggcaagcgttatccggatttactgggtgtaaagggcgtgtaggcgggattgcaagtcagatgtgaaaactgggggctcaacctccagcctgcatttgaaactgtagttcttgagtgctggagaggcaatcggaattccgtgtgtagcggtgaaatgcgtagatatacggaggaacaccagtggcgaaggcggattgctggacagtaactgacgctgaggcgcgaaagcgtggggagcaaacaggattagataccctggtagtccacgccgtaaacgatggatactaggtgtggggggtctgaccccctccgtgccgcagttaacacaataagtatcccacctggggagtacgatcgcaaggttgaaactcaaaggaattgacggggacccgcacaagcggtggagcatgtggtttaattcgaagcaacgcgaagaaccttaccaggtcttgacatcccgatgaaaaacccgtaacggggttccctcttcggagcatcggagacaggtggtgcatggttgtcgtcagctcgtgtcgtgagatgttgggttaagtcccgcaacgagcgcaacccttattcttagtagccagcaggtaaggctgggcactctaaggagactgccggggataacccggaggaaggtggggatgacgtcaaatcatcatgccccttatgatctgggctacacacgtgctacaatggcgtaacaaagagaagcgagcctgcgagggtgagcaaatcccaaaaataacgtcccagttcggactgtagtctgcaacccgactacacgaagctggaatcgctagtaatcgcgaatcagaaatgtcgcggtgaaatacgttcccgggtct

SEQ ID NO: 625 - DNA, 1371 bp, Artificial Sequence
  Synthetic polymer
agagtttgatcctggctcaggacgaacgctggcggcgtgcttaacacatgcaagtcgagcgatgaaattttcttcgggaaatggattagcggcggacgggtgagtaacacgtgggtaacctgccctatagagagggatagccttccgaaaggaagattaatacctcataatatcctagtatcgcatgatgcatggattaaaggagcaatccgctatgagatgggcccgcggcgcattagctagttggtgaggtaacggctcaccaaggcgacgatgcgtagccgacctgagagggcgatcggccacattgggactgagacacggcccagactcctacgggaggcagcagtggggaatattgcacaatgggggaaaccctgatgcagcaacgccgcgtgagtgatgacggccttcgggttgtaaagctctgtcttcagggacgataatgacggtacctgaggaggaagccacggctaactacgtgccagcagccgcggtaatacgtaggtggcgagcgttgtccggatttactgggcgtaaagggagcgtaggcggacttttaagtgagatgtgaaatacccgggctcaacttgggtgctgcatttcaaactggaagtctagagtgcaggagaggagaatggaattcctagtgtagcggtgaaatgcgtagagattaggaagaacaccagtggcgaaggcgactctctggactgtaactgacgctgaggctcgaaagcgtggggagcaaacaggattagataccctggtagtccacgccgtaaacgatgaatactaagtgtgggggtttcacacctccgtgccgccgctaacgcattaagtattccgcctggggagtacggtcgcaagattaaaactcaaaggaattgacggggacccgcacaagtagcggagcatgtggtttaattcgaagcaacgcgaagaaccttacctacacttgacatcccttgcattactcttaatcgaggaaatcccttcggggacaaggtgacaggtggtgcatggttgtcgtcagctcgtgtcgtgagatgttgggttaagtcccgcaacgagcgcaacccttgtcgttagttactaccattaagttgaggactctagcgagactgcctgggttaaccaggaggaaggtggggatgacgtcaaatcatcatgccccttatgtgtagggctacacacgtgctacaatggctggtacagagagatgcaataccgcgaggtggagccaaacttaaaaaccagtctcagttcggattgtaggctgaaactcgcctacatgaagctggagttactagtaatcgcgaatcagaatgtcgcggtgaatacgttcccgggccttgtactcaccgcccgtca

SEQ ID NO: 626 - DNA, 1345 bp, Artificial Sequence
  Synthetic polymer
gacgaacgctggcggcgtgcctaacacatgcaagtcgaacggagttaagagagcttgctcttttaacttattggcggacgggtgagtaacgcgtgagtaacctgcctttcacaggggaataacattctgaaaagaatgctaataccgcatgagatcgtagtatcgcatggtacagcgaccaaaggagcaatccgctgaaagatggactcgcgtccgattagctagttggtgagataaaggcccaccaagccgacgatcagtagccggactgagagggtgaccggccacattgggactgagacacggcccagactcctacgggaggcagcagtggggaatattgcacaatggaggaaactctgatgcagcgacgccgcgtgagtgaagaagtatttcggtatgtaaagctctatcaccagggaagacagtgacggtacctgactaataagctccggctaaatacgtgccagcagccgcggtaatacgtatggagcaagcgttatccggatttactgggtgtaaagggagtgtaggtggtatcacaagtcagaagtgaaagcccggggctcaaccccgggactgcttttgaaactgtggaactggagtgcaggagaggtaagtggaattcctagtgtagcggtgaaatgcgtagatattaggaggaacaccagtggcgaaggcggcttactggactgtaactgacactgaggctcgaaagcgtggggagcaaacaggattagataccctggtagtccacgccgtaaacgatgaatactaggtgtcggggctcataagagcttcggtgccgcagcaaacgcaataagtattccacttggggagtacgttcgcaagaatgaaactcaaaggaattgacggggacccgcacaagcggtggagcatgtggtttaattcgaagcaacgcgaagaaccttaccaggtcttgacatcctgccaacgaggtagaggtacgttaggtgcccttcgcggaaagcagagacaggtggtgcatggttgtcgtcagctcgtgtcgtgagatgttgggttaagtctcgcaacgagcgcaacccctatcctcagtagccagcaggtaaagctgggcactctgtggagactgccagggataacctggaggaaggtggggatgatgtcaaatcatcatgccccttatgacttgggctacgacacgtgctacaatggcgtaaacaaagtgaagcgagagtgtgagcttaagcaaatcacaaaaataacgtctcagttcggattgtagtctgcaactcgactacatgaagctggaatcgctagtaatcgcgaatcagaatgtcgcggtgaatacgttcccgggtct

SEQ ID NO: 627 - DNA, 1347 bp, Artificial Sequence
  Synthetic polymer
agagtttgatcctggctcaggatgaacgctggcggcgtgcttaacacatgcaagtcgaacgattaatccgccctcgggcggttatagagtggcgaacgggtgagtaacacgtgaccaacctgccccttgctccgggataacccagggaaacctcggctaataccggatactccgcgcagcccgcatgggcggcgcgggaaagcccagacggcaagggatggggtcgcggcccattaggtagacggcggggtaacggcccaccgtgcccgcgatgggtagccgggttgagagaccgatcggccacattgggactgagatacggcccagactcctacgggaggcagcagtggggaattttgcgcaatgggggaaaccctgacgcagcaacgccgcgtgcgggacgaaggccttcgggttgtaaaccgctttcagcagggaatatcgtgaaggtacctgcagaagaagctccggctaactacgtgccagcagccgcggtaatacgtagggagcgagcgttatccggattcattgggcgtaaagcgcgcgtaggcggcccgtcaagcggggtttcaaatccaggggctcaacctctggccggaccccgaactggcgggctcgagtgcggtagaggaaggtggaattcccagtgtagcggtgaaatgcgcagatattgggaagaacaccgatggcgaaggcagccttctgggccgccactgacgctgaggcgcgaaagctaggggagcgaacaggattagataccctggtagtcctagccgtaaacgatgggcactaggtgtgggggagcatctcctccgtgccgcagccaacgcattaagtgccccgcctggggagtacggccgcaaggctaaaactcaaaggaattgacgggggcccgcacaagcagcggagcatgtggcttaattcgaagcaacgcgaagaaccttacctagacttgacatgtcctgaattaccagtaatgtgggaagttccttcgggaacaggaacacaggtggtgcatggttgtcgtcagctcgtgtcgtgagatgttgggttaagtcccgcaacgagcgcaacccttattgttagttgccatcattaagttgggcactctagcgagactgcccgggttaaccgggaggaaggtggggatgacgtcaaatcatcatgcctcttatgtctagggctacacacgtgctacaatggtcggtacaataagacgcaagcccgcgagggggagcaaaactggaaaaccgatctcagttcggattgtaggctgaaactcgcctacatgaagctggagttgctagtaatcgagaatcagcatgtcgcggtgaatacgttcccggg

SEQ ID NO: 628 - DNA, 1376 bp, Artificial Sequence
  Synthetic polymer
agagtttgatcctggctcaggacgaacgctggcggcgtgcctaacacatgcaagtcgagcgagtgaatctccttcgggagtgaagctagcggcggacgggtgagtaacacgtgggcaacctgcctcatagaggggaatagccttccgaaaggaagattaataccgcataagattgtagcttcgcatgaagtagcaattaaaggagcaatccgctatgagatgggcccgcggcgcattagctagttggtgaggtaacggctcaccaaggcgacgatgcgtagccgacctgagagggtgatcggccacattgggactgagacacggcccagactcctacgggaggcagcagtggggaatattgcacaatgggggaaaccctgatgcagcaacgccgcgtgagtgatgacggccttcgggttgtagagctctgtcttcagggacgataatgacggtacctgaggaggaagccacggctaactacgtgccagcagccgcggtaatacgtaggtggcgagcgttgtccggatttactgggcgtaaagggagcgtaggcggacttttaagtgagatgtgaaatacccgggctcaacttgggtgctgcatttcaaactggaagtctagagtgcaggagaggagaatggaattcctagtgtagcggtgaaatgcgtagagattaggaggaacaccagtggcgaaggcggcctgctggactgttactgacactgaggcacgaaagcgtggggagcaaacaggattagataccctggtagtccacgccgtaaacgatgaacactaggtgtcggggccgtataggcttcggtgccgtcgcaaacgcagtaagtattccacctggggagtacgttcgcaagaatgaaactcaaaggaattgacggggacccgcacaagcggtggagcatgtggtttaattcgaagcaacgcgaagaaccttaccaggtcttgacatccttctgaccgctccgtaatgggagctttccttcgggacagaagagacaggtggtgcatggttgtcgtcagctcgtgtcgtgagatgttgggttaagtcccgcaacgagcgcaacccctatcttcagtagccagcaggttaagctgggcactctggagagactgccagggataacctggaggaaggtggggacgacgtcaaatcatcatgccccttatgatctgggcgacacacgtgctacaatggcggtcacaaagtgaggcaaacccgcgagggggagcaaaccacaaaaaggccgtcccagttcggactgtagtctgcaacccgactacacgaagctggaatcgctagtaatcgcgaatcagaatgtcgcggtgaatacgttctcgggccttgcactcaccgcccgtca

SEQ ID NO: 629 - DNA, 1413 bp, Artificial Sequence
  Synthetic polymer
agagtttgatcctggctcaggacgaacgctggcggcatgcctaacacatgcaagtcgaacggagaatcatttcggtgattcttagtggcgaacgggtgagtaacgcgtaggcaacctgccctttggatggggacaacattccgaaaggagtgctaataccgaatgtgacggttttctcgcatgagataatcgtgaaagatggcctctacatgtaagctatcgccaaaggatgggcctgcgtctgattagctagttggtggggtaacggctcaccaaggcgacgatcagtagccggtctgagaggatgaacggccacattgggactgagacacggcccagactcctacgggaggcagcagtggggaatcttccgcaatgggcgaaagcctgacggagcaatgccgcgtgagtgatgaaggttttcggaccgtaaagctcttttgtttatgacgaacgtgcctgctgtgaacaatggtgggtaatgacggtagtaaacgaataagccacggctaactacgtgccagcagccgcggtaatacgtaggtggcgagcgttgtccggaattattgggcgtaaagagcatgtaggcggtcctttaagtctggagtgaaaatgcggggctcaaccccgtatggctttggatactgggggacttgagtgcaggagaggaaaggggaattcccagtgtagcggtgaaatgcgtagatattgggaggaacaccagtggcgaaggcgcctttctggactgtgtctgacgctgagatgcgaaagccagggtagcgaacgggattagataccccggtagtcctggccgtaaacgatgggtactaggtgtaggaggtatcgacccctcctgtgccggagttaacgcaataagtaccccgcctggggagtacgtcggcaacgatgaaactcaaaggaattgacgggggcccgcacaagcggtggagtatgtggtttaattcgacgcaacgcgaagaaccttaccaaggcttgacattgattgaccgctccagagatggagctttcccttcggggacatgaaaacaggtggtgcatggctgtcgtcagctcgtgtcgtgagatgttgggttaagtcccgcaacgagcgcaacccctatcctatgttaccagcgggtaatgccggggactcataggagactgccaaggacaacttggaggaaggcggggatgacgtcaagtcatcatgccccttatgtcttgggctacacacgtactacaatggtcggcaacagagggaagcgaagccgcgaggcagagcaaaccccagaaacccgatctcagttcggatcgcaggctgcaacccgcctgcgtgaagtcggaatcgctagtaatcgcaggtcagcatactgcggtgaatacgttcccgggccttgtacacaccgcccgtca

SEQ ID NO: 630 - DNA, 1352 bp, Artificial Sequence
  Synthetic polymer
gacgaacgctggcggcgtgcttaacacatgcaagtcgaacggagcacccctgattgaggtttcggccaaatgatgggaatgcttagtggcggactggtgagtaacgcgtgaggaacctgcctttcagagggggacaacagctggaaacggctgctaataccgcatgacacatcgaaggggcatccctttgatgtcaaagatttatcgctgaaagatggcctcgcgtctgattagctagttggtgaggtaacggcccaccaaggcgacgatcagtagccggactgagaggttgaccggccacattgggactgagatacggcccagactcctacgggaggcagcagtggggaatattgggcaatggacgcaagtctgacccagcaacgccgcgtgaaggaagaaggctttcgggttgtaaacttcttttgtcagggaacagtagaagagggtacctgacgaataagccacggctaactacgtgccagcagccgcggtaatacgtaggtggcaagcgttgtccggatttactgggtgtaaagggcgtgcagccgggcaggcaagtcagatgtgaaatctggaggcttaacctccaaactgcatttgaaactgtctgtcttgagtatcggagaggtaaccggaattccttgtgtagcggtgaaatgcgtagatataaggaagaacaccagtggcgaaggcgggttactggacgacaactgacggtgaggcgcgaaagcgtggggagcaaacaggattagataccctggtagtccacgctgtaaacgatggatactaggtgtgcggggactgaccccctgcgtgccggagttaacacaataagtatcccacctggggagtacgatcgcaaggttgaaactcaaaggaattgacgggggcccgcacaagcggtggattatgtggtttaattcgaagcaacgcgaagaaccttaccagggcttgacatcctactaacgaagtagagatacatcaggtgcccttcggggaaagtagagacaggtggtgcatggttgtcgtcagctcgtgtcgtgagatgttgggttaagtcccgcaacgagcgcaacccttatggtcagttactacgtaagaggactctggccagactgccgttgacaaaacggaggaaggtggggatgacgtcaaatcatcatgccctttatgacttgggctacacacgtactacaatggcgttaaacaaagagaagcaagaccgcgaggtggagcaaaactcagaaacaacgtcccagttcggactgcaggctgcaactcgcctgcacgaagtcggaattgctagtaatcgtggatcagcatgccacggtgaatacgttcccgggcct

SEQ ID NO: 631 - DNA, 1391 bp, Artificial Sequence
  Synthetic polymer
agagtttgatcctggctcaggatgaacgctggcggcgtgcctaacacatgcaagtcgagcgagaattccttaactgattctccggatgattttaaggaaggaaagcggcggacgggtgagtaacgcgtaggcaacctgcctctcacagagggatagccactggaaacggtgattaaaacctcataacgccactctgagacatctcagaatggccaaagatttatcggtgagagatgggcctgcgtctgattagctggttggcggggtaacggcccaccaaggcgacgatcagtagccgacctgagagggtgatcggccacattggaactgagacacggtccaaactcctacgggaggcagcagtggggaatattgcacaatgggggaaaccctgatgcagcgacgccgcgtgagcgaagaagtatttcggtatgtaaagctctatcagcagggaagaaaaatgacggtacctgactaagaagcaccggctaaatacgtgccagcagccgcggtaatacgtatggtgcaagcgttatccggatttactgggtgtaaagggagcgcaggcggtcaagcaagtctgatgtgaaagcccggggctcaaccccggtactgcattggaaactgttggactagagtgtcggaggggtaagtggaattcctagtgtagcggtgaaatgcgtagatattaggaggaacaccagtggcgaaggcggcttactggacgataactgacgctgaggctcgaaagcgtggggagcaaacaggattagataccctggtagtccacgctgtaaacgatgaatactaggtgtcggggagcacagcttcccggtgccgcagcaaacgcaataagtattccacctggggagtacgttcgcaagaatgaaactcaaaggaattgacggggacccgcacaagcggtggagcatgtggtttaattcgaagcaacgcgaagaaccttaccaagtcttgacatcccggtgacaaactgtgtaatgcagtcttacttcggtacaccggtgacaggtggtgcatggttgtcgtcagctcgtgtcgtgagatgttgggttaagtcccgcaacgagcgcaacccctattcttagtagccagcgggtaaggccgggcactctagggagactgccagggataacctggaggaaggtggggatgacgtcaaatcatcatgccccttatgacttgggctacacacgtgctacaatggcgtaaacaaagagaagcgagcctgcgagggggagcaaatctcaaaaataacgtctcagttcggactgtagtctgcaactcgactacacgaagctggaatcgctagtaatcgcgaatcagaatgtcgcggtgaatacgttcccgggtcttgtacacaccgcccgtca

SEQ ID NO: 632 - DNA, 1361 bp, Artificial Sequence
  Synthetic polymer
agagtttgatcctggctcaggatgaacgctggcggcgtgcctaacacatgcaagtcgagcgatttacttcggtaaagagcggcggacgggtgagtaacgcgtgggtaacctgccctatacacacggataacataccgaaaggtatgctaatacgggataacataagagattcgcatggatttcttatcaaagcttttgcggtataggatggacccgcgtctgattagctagttggtaaggtgacggcttaccaaggcgacgatcagtagccgacctgagagggtgatcggccacattggaactgagacacggtccaaactcctacgggaggcagcagtggggaatattgcacaatgggcgaaagcctgatgcagcaacgccgcgtgagcgatgaaggccttcgggtcgtaaagctctgtcctcaaggaagataatgacggtacttgaggaggaagccccggctaactacgtgccagcagccgcggtaatacgtagggggctagcgttatccggaattactgggcgtaaagggtgcgtaggtggtttcttaagtcagaggtgaaaggctacggctcaaccgtagtaagcctttgaaactgagaaacttgagtgcaggagaggagagtagaattcctagtgtagcggtgaaatgcgtagatattaggaggaataccagttgcgaaggcggctctctggactgtaactgacactgaggcacgaaagcgtggggagcaaacaggattagataccctggtagtccacgccgtaaacgatgagtactagctgtcggaggttacccccttcggtggcgcagctaacgcattaagtactccgcctgggaagtacgctcgcaagagtgaaactcaaaggaattgacggggacccgcacaagtagcggagcatgtggtttaattcgaagcaacgcgaagaaccttaccaggtcttgacataccagtgaccgtcctagagataggattttcccttcggggacaatggatacaggtggtgcatggttgtcgtcagctcgtgtcgtgagatgttgggttaagtcccgcaacgagcgcaacccctgtcgttagttgccagcattcagttggggactctaacgagactgcctgggttaaccaggaggaaggtggggatgacgtcaaatcatcatgccccttatgtgtagggctacacacgtgctacaatggctggtacagagagatgcaataccgcgaggtggagccaaacttaaaaaccagtctcagttcggattgtaggctgaaactcgcctacatgaagctggagttactagtaatcgcgaatcagaatgtcgcggtgaatacgttcccgggtcttgcacacaccgcccgtca

SEQ ID NO: 633 - DNA, 1353 bp, Artificial Sequence
  Synthetic polymer
gatgaacgctggcggcgtgcttaacacatgcaagtcgagcgaagcgcttatgaaagattcttccgatgaattcatttgtgactgaacggcggacgggtgaataacgcgtgggtaacctgcctcatacagggggataacagttggaaaccactgctaataccgcataagcccacagtaccgcatggtaccgtgtgaaaaactccggtggtatgaaatggacccccctccgaatagctggttggtgaagtaacggcccaccaaggcgacgatcagtagccgacctgagagggtgaccggccacattgggactgagacacggcccagactcctacgggaggcagcagtggggaatattacacaatggaggaaactctgatgcagcgacgccgcgtgagtgaagaagtagttcgctatgtaaagctctatcagcagggaagatagtgacggtacctgactaagaagctccggctaaatacgtgccagcagccgcggtaatacgtatggagcaagcgttatccggatttactgggtgtaaagggagtgtaggtggccaggcaagtcagaagtgaaagcccggggctcaaccccgggactgcttttgaaactgcagggctagagtgcaggaggggcaagtggaattcctagtgtagcggtgaaatgcgtagatattaggaggaacaccagtggcgaaggcggcttgctggactgtaactgacactgaggctcgaaagcgtggggagcaaacaggattagataccctggtagtccacgccgtaaacgatgaatactaggtgtcggggcacataagtgcttcggtgccgcagcaaacgcaataagtattccacctggggagtacgttcgcaagaatgaaactcaaaggaattgacggggacccgcacaagcggtggagcatgtggtttaattcgaagcaacgcgaagaaccttaccaagtcttgacatcccactgaccggacagtaatgtgtccttcccttcggggcagtggagacaggtggtgcatggttgtcgtcagctcgtgtcgtgagatgttgggttaagtcccgcaacgagcgcaacccttatccttagtagccagcagttcggctgggcactctagggagactgccagggataacctggaggaaggtggggatgacgtcaaatcatcatgccccttatgacttgggctacacacgtgctacaatggcgtaaacaaagtgaagcaaagctgtgaagccaagcaaatcacaaaaataacgtctcagttcggattgtagtctgcaactcgactacatgaagctggaatcgctagtaatcgcagatcagaatgccgcggtgaatacgttcccgggtct

SEQ ID NO: 634 - DNA, 1382 bp, Artificial Sequence
  Synthetic polymer
agagtttgcttctagctcaggacgaacgctggcggcgtgcctaacacatgcaagtcgaacggagtcggccccgcaagggactgacttagtggcgaacgggtgagtaacgcgtgagcaacctgcctttcagtgggggacaacagttggaaacgactgctaataccgcataaagcattttgaccgcatgatcgagatgccaaagatttattgctgaaagatgggctcgcgtctgattagatagttggtgaggtaacggcccaccaagtcgacgatcagtagccggactgagaggttgaacggccacattgggactgagatacggcccagactcctacgggaggcagcagtggggaatattgggcaatgggggaaaccctgacccagcaacgccgcgtgaaggaagaaggctttcgggttgtaaacttcttttaccagggacgaagaaagtgacggtacctggagaaaaagccacggctaactacgtgccagcagccgcggtaatacgtaggtggcaagcgttgtccggatttactgggtgtaaagggcgtgtaggcggagatgcaagtcagatgtgaaatcctcgggcttaacccgggaactgcatttgaaactgtatcccttgagtatcggagaggcaggcggaattcctagtgtagcggtgaaatgcgtagatattaggaggaacaccagtggcgaaggcggcctgctggacgacaactgacgctgaggcgcgaaagcgtggggagcaaacaggattagataccctggtagtccacgctgtaaacgatgaatactaggtgtgggggggactgaccccttccgtgccgcagttaacacaataagtattccacctggggaagtacgaccgcaaagttgaaactcaaaggaattgacgggggcccgcacaagcagtggattatgtggtttaattcgacgcaacgcgaagaaccttaccgggatttgacatcctgctaacgaagtagagatacattaggtgcccttcggggaaagtagagacaggtggtgcatggttgtcgtcagctcgtgtcgtgagatgttgggttaagtcccgcaacgagcgcaacccttatcgtccgttactaacgcgtagaggcgaggactcagacgagaccgccggggacaactcggaggaaggtggggacgacgtcaaatcatcatgccccttacgacctgggctacacacgtgctacaatgggtacaacaaagagaagcgagaccgcaaggtggagcaaaactcagaaaagtactctcagttcagattgtgggctgcaacccgcccacatgaagttggagttgctagtaatcgcggatcagcatgccgcggtgaatacgttcccgggccttgcactcaccgcccgtca

SEQ ID NO: 635 - DNA, 1390 bp, Artificial Sequence
  Synthetic polymer
ttcgcccttagagtttgattctggctcaggacgaacgctggcggcgtgcctaacacatgcaagtcgaacggagatgctgaatttcggtttggtatcttagtggcgcacgggtgagtaacgcgtgaacaacttgaccttcagagggggataacagcgagaaatcggtgctaataccgcatgagaccacaattccacatggagaaggggtcaaaggagcaatccgctgaaggagaggttcgcgtcccattaggtagttggcgggataacagcccaccaagccgacgatgggtagccgagctgagaggctgatcggccacactggaactgagacacggtccagactcctacgggaggcagcagtggggaatattgggcaatgggcgcaagcctgacccagcaacgccgcgtgagggaagaaggttttcggattgtaaacctctgtcgcagaagacgaaggaagtgacggtattctgtgaggaagccccggctaactacgtgccagcagccgcggtaatacgtagggggcgagcgttgtccggaattactgggcgtaaagggtgcgtaggcggttgattaagttggatgtgaaatacccgggcttaacttggggggtgcattcaaaactggttaactagagtacaggagagggaagcggaattcctcgtgtagcggtgaaatgcgtagatattaggaggaacaccggtggcgaaggcggctttctggactgacactgacgctgaggcacgaaagcgtggggagcaaacaggattagataccctggtagtccacgctgtaaacgatgaatactaggtgtagggggtatgaactccctctgtgccgcagcaaacgcaataagtattccgcctggggagtacggccgcaaggttgaaactcaaaggaattgacgggggcccgcacaagcagcggagcatgtggtttaattcgacgcaacgcgaagaaccttaccaaggcttgacatctacttaaactcatggaaacatgaggtcccttcgggggaagtaagacaggtggtgcatggttgtcgtcagctcgtgtcgtgagatgttgggttaagtcccgcaacgagcgcaacccctgttgccagttaccagcaagtaaagttggggactctggtgagactgccggggacaactcggaggaaggtggggacgacgtcaaatcatcatgccccttatgtcttgggctacacacgtgctacaatgggtggtacagagggcagccaagtcgtgaggcggagctaatcccttaaagccattctcagttcggattgtaggctgaaactcgcctacatgaagctggagttactagtaatcgcagatcagaatgctgcggtgaatgcgttcccgggtcttgtacacaccgcccgtca

SEQ ID NO: 636 - DNA, 1356 bp, Artificial Sequence
  Synthetic polymer
ctaacacatgcaagtcgaggggcagcacggaagtagcttgctacttttggtggcgaccggcgcacgggtgcgtaacgcgtatgcaacctacccataacagggagataacactgagaaattggtactaataccccataacatcagatgaggcatctcatttggttgaaagttccggcggttatggatgggcatgcgttgtattagctagttggtgaggtaacggctcaccaaggcgacgatacatagggggactgagaggttaaccccccacattggtactgagacacggaccaaactcctacgggaggcagcagtgaggaatattgtcaatggacgcaagtctgaaccagccatgccgcgtgcaggatgacggctctatgagttgtaaactgcttttgtataagggtaaacccaggtacgtgtacctgactgaaagtactatacgaataaggatcggctaactccgtgccagcagccgcggtaatacggaggatccaagcgttatccggatttattgggtttaaagggtgcgtaggcggtttgataagttagaggtgaaataccggggctcaactccggaactgcctctaatactgttgaactagagagtagttgctgtgggcggaatgtatggtgtagcggtgaaatgcttagagatcatacagaacaccgattgcgaaggcagctcacaaaactatatctgacgttgaggcacgaaagcgtggggagcaaacaggattagataccctggtagtccacgcagtaaacgatgataactcgctgtcggcgatacacagtcggtggccaagcgaaagcgataagttatccacctggggagtacgtccgcaagaatgaaactcaaaggaattgacgggggcccgcacaagcggaggaacatgtggtttaattcgatgatacgcgaggaaccttacccgggcttgaactgcaggagaacgattcagagatgatgaggtccttcgggactcctgtggaggtgctgcatggttgtcgtcagctcgtgccgtgaggtgtcggcttaagtgccataacgagcgcaacccttgcgcgtagttgccatcaggttatgctgggcactctgcgcggactgccaccgcaaggtgtgaggaaggtggggatgacgtcaaatcagcacggcccttacgtccggggctacacacgtgttacaatgggtggtacagagagccggccgcatgcaaatgcggtccaatccttaaagccgtcctcagttcggattggggtctgcaacccgaccccatgaagctggattcgctagtaatcgcgcatcagccatggcgcggtgaatacgttcccgggccttgtactcaccgcccgtca

SEQ ID NO: 637 - DNA, 1390 bp, Artificial Sequence
  Synthetic polymer
agagtttgatcctggctcaggatgaatgctggcggcgtgcttaacacatgcaagtcgaacgaagcacttatgattgagatttcggttgattgactaagtgacttagtggcggacgggtgagtaacgcgtgggtaacctgcctcgtacagggggataacagttagaaatgactgctaataccgcataacccgctaaggtcgcatgacctagacggaaaagatttatcggcaagggatgggcctgcgtctgattagttagttggtggggtaacggcctaccaaggcgacgatcagtagccgacctgagagggtgatcggccacattggaactgagacacggtccaaactcctacgggaggcagcagtggggaatattgcacaatgggcgaaagcctgatgcagcaacgccgcgtgaaggaagaaggcctttgggtcgtaaacttctgttctaagggaagaaaaaggacggtaccttaggagcaagtcccggctaactacgtgccagcagccgcggtaatacgtagggggcaagcgttatccggaatcattgggcgtaaagagtacgtaggtggttacctaagcaaggggtttaaggcaatggctcaaccattgttcgccccttgaactgggctacttgagtgcaggagaggaaagcggaattcctagtgtagcggtgaaatgcgtagatattaggaggaacaccagttgcgaaggcggctctctggactgtaactgacactgaggcacgaaagcgtggggagcaaacaggattagataccctggtagtccacgccgtaaacgatgagtactagctgtcggaggttacccccttcggtggcgcagctaacgcattaagtactccgcctgggaagtacgctcgcaagagtgaaactcaaaggaattgacggggacccgcaccagcggtggagcatgtggtttaattcgaagcaacgcgaagaaccttaccaagtcttgacatcccattgaccggaacttaaccgttccttcccttcggggcaatggagacaggtggtgcatggttgtcgtcagctcgtgtcgtgagatgttgggttaagtcccgcaacgagcgcaacccctattcttagtagccagcacatgaaggtgggcactctgagaagactgccagggataacctggaggaaggtggggatgacgtcaaatcatcatgccccttatgacttgggctacacacgtgctacaatggcgtaaacaaagggaagcagaaccgcgaggtcgagcaaatcccaaaaataacgtctcagttcggattgtagtctgcaactcgactacatgaagctggaatcgctagtaatcgcggatcagaatgccgcggtgaatacgttcccgggtcttgcacacaccgcccgtca

SEQ ID NO: 638 - DNA, 1353 bp, Artificial Sequence
  Synthetic polymer
gatgaacgctggcggcgtgcttaacacatgcaagtcgaacgaagcatttagaacggattatttcggtatgaagtttctttatgactgagcggcggacgggtgagtaacgcgtgggtaacctgccttgtactgggggatagcagctggaaacggctggtaataccgcataagcgcacaatgttgcatgacatggtgtgaaaaactccggtggtataagatggacccgcgtctgattagctagttggtgagataacagcccaccaaggcgacgatcagtagccgacctgagagggtgaccggccacattgggactgagacacggcccagactcctacgggaggcagcagtggggaatattgcacaatggaggaaactctgatgcagcgacgccgcgtgagtgaagaagtaattcgttatgtaaagctctatcagcagggaagatagtgacggtacctgactaagaagctccggctaaatacgtgccagcagccgcggtaatacgtatggagcaagcgttatccggatttactgggtgtaaagggagtgtaggtggccatgcaagtcagaagtgaaaatccggggctcaaccccggaactgcttttgaaactgtaaggctggagtgcaggaggggtgagtggaattcctagtgtagcggtgaaatgcgtagatattaggaggaacaccagtggcgaaggcggctcactggactgtaactgacactgaggctcgaaagcgtggggagcaaacaggattagataccctggtagtccacgccgtaaacgatgaatactaggtgtcggggcccataagggcttcggtgccgcagcaaacgcaataagtattccacctggggagtacgttcgcaagaatgaaactcaaaggaattgacgggggcccgcacaagcggtggagtatgtggtttaattcgaagcaacgcgaagaaccttaccagggcttgacatcctactaacgaagcagagatgcattaggtgcccttcggggaaagtagagacaggtggtgcatggttgtcgtcagctcgtgtcgtgagatgttgggttaagtcccgcaacgagcgcaacccttattgttagttgctacgcaagagcactctagcgagactgccgttgacaaaacggaggaaggcggggacgacgtcaaatcatcatgccccttatgtcctgggctacacacgtactacaatggtggtaaacagagggaagcaagaccgcgaggtggagcaaatccctaaaagccatcccagttcggattgcaggctgaaacccgcctgtatgaagttggaatcgctagtaatcgcggatcagcatgccgcggtgaatacgttcccgggcct

SEQ ID NO: 639 - DNA, 1367 bp, Artificial Sequence
  Synthetic polymer
agagtttgatcctggctcaggatgaacgctgacagaatgcttaacacatgcaagtctacttgatccttcgggtgatggtggcggacgggtgagtaacgcgtaaagaacttgccttgcagtctgggacaacgtctggaaacggacgctaataccggatattatgattggatcgcatgatttgattatgaaagctatatgcgctgcgagagagctttgcgtcccattagttagttggtgaggtaacggctcaccaagacgatgatgggtagccggcctgagagggtgaacggccacaaggggactgagacacggcccttactcctatgggaggcagcagtggggaatattgggcaatgggggaaaccctgacccagcaacgccgcgtgaaggaagaaggccttcgggttgtaaacttcttttaccagggacgaagaacgtgacggtacctggagaaaaagccacggctaactacgtgccagcagccgcggtaatacgtaggtggcaagcgttgtccggatttactgggtgtaaagggcgtgtaggcggagctgcaagtcagatgtgaaatctaggggctcaacccctaaactgcatttgaaactgtagcccttgagtatcggagaggcaagcggaattcctagtgtagcggtgaaatgcgtagatattaggaggaacaccagtggcgaaggcggcttgctggacgacaactgacgctgaggcgcgaaagcgtggggagcaaacaggattagataccctggtagtccacgctgtaaacgatgaatactaggtgtgggaggactgaccccttccgtgccgcagttaacacaataagtattccacctggggagtacgaccgcaaggttgaaactcaaaggaattgacgggggcccgcacaagcagtggattatgtggtttaattcgacgcaacgcgaagaaccttacctaggcttgacatccttctgaccgaggactaatctcctctttccctccggggacagaagtgacaggtggtgcatggttgtcgtcagctcgtgtcgtgagatgttgggttaagtcccgcaacgagcgcaacccctatcattagttgccatcattaagttgggcactctaatgagactgccgcggacaacgcggaggaaggtggggatgacgtcaaatcatcatgcccctcatgtcttgggctacacacgtgctacaatggccggtacagagggcagcgaccacgcaagtgcaagcaaatctcaaaaagccggtctcagttcggattgtgggctgcaacccgcccacatgaagttggaatcgctagtaatcgcaggtcagcatactgcggtgaatacgttcccgggtcttgtacacaccgcccgtca

SEQ ID NO: 640 - DNA, 1383 bp, Artificial Sequence
  Synthetic polymer
ttcgcccttagagtttgatcctggctcaggacgaacgctggcggcacgcctaacacatgcaagtcgaacggagaaaatgatttcggttgtcttcttagtggcggacgggtgagtaacacgtgaggaacctgcctctgagagtgggatagcttctggaaacggatggtaataccgcataacatagcgaaaccgcatgattttgctatcaaagtatttcgctcagagatggcctcgcgtctgattagataattggtgaggtaacggctcaccaagtcgacgatcagtagccggactgagaggttgaacggccacattgggactgagacacggcccagactcctacgggaggcagcagtgggggatattgcacaacgggggaaaccctgatgcagcgatgccgcgtggaggaagaaggttttcggattgtaaactcctgtcgtaagggaagaggaaggactgtaccttacaagaaagctccggctaactacgcgccagcagccgcggcaacacgtagggagcgagcgttgtccggaatgactgggtgtaaagggagcgtaggcgggatggcaagtcagatgtgaaacctgagggctcaaccttcagactgcatttgaaactgctgttcttgagtgaagtagaggtaagcggaattcctggtgtagcggtgaaatgcgtagagatcaggaggaacatcggtggcgaaggcggcttactgggcttttactgacgctgaggctcgaaagtgtggggagcaaacaggattagataccctggtagtccacgccgtaaacgatgaatgctaggtgttggggagcaaagctcttcggtgccgccgcaaacgcattaagcattccacctggggagtacgttcgcaagaatgaaactcaaaggaattgacggggacccgcacaagcggtggagcatgtggtttaattcgaagcaacgcgaagaaccttaccaggtcttgacatcccgatgaccggcccgtaacggggccttctcttcggagcattggagacaggtggtgcatggttgtcgtcagctcgtgtcgtgagatgttgggttaagtcccgcaacgagcgcaacccctgtccttagtagccagcaggttaagctgggcactctagggagactgccagggataacctggaggaaggcggggatgacgtcaaatcatcatgccccttatgatttgggctacacacgtgctacaatggcgtaaacaaagggaagcgaccctgcgaaggcaagcaaatcccaaaaataacgtcccagttcagactgcaggctgcaacccgcctgcacgaagctggaatcgctagtaatcgcagatcagaatgctgcggtgaatacgttcccgggtcttgcacacaccgcccgtca

SEQ ID NO: 641 - DNA, 1378 bp, Artificial Sequence
  Synthetic polymer
agagtttgatcctggctcaggacgaacgctggcggcgcgcctaacacatgcaagtcgaacgagcgagagggagcttgctttctcgagcgagtggcgaacgggtgagtaacgcgtgaggaacctgcctcaaagagggggacaacagttggaaacgactgctaataccgcataagcccacgacccggcatcgggtagagggaaaaggagcaatccgctttgagatggcctcgcgtccgattagctagttggtgaggtaatggcccaccaaggcgacgatcggtagccggactgagaggttgaacggccacattgggactgagacacggcccagactcctacgggaggcagcagtggggaatattgcacaatgggggaaaccctgatgcagcgacgccgcgtggaggaagaaggtcttcggattgtaaactcctgttgttgaggaagataatgacggtactcaacaaggaagtgacggctaactacgtgccagcagccgcggtaaaacgtaggtcacaagcgttgtccggaattactgggtgtaaagggagcgcaggcgggaaggcaagttggaagtgaaatccatgggctcaacccatgaactgctttcaaaactgtttttcttgagtagtgcagaggtaggcggaattcccggtgtagcggtggaatgcgtagatatcgggaggaacaccagtggcgaaggcggcctactgggcaccaactgacgctgaggctcgaaagtgtgggtagcaaacaggattagataccctggtagtccacgccgtaaacgatggatactaggtgtgggaggtattgaccccttccgtgccgcagttaacacattaagtatcccacctggggagtacgaccgcaaggttgaaactcaaaggaattgacgggggcccgcacaagcagtggagtatgtggtttaattcgaagcaacgcgaagaaccttacctggtcttgacatcccgatgaccggtctagagatagacttttctcttcggagacatcggtgacaggtggtgcatggttgtcgtcagctcgtgtcgtgagatgttgggttaagtcccgcaacgagcgcaacccttattgttagttgatacatttagttgatcactctagcgagactgccgttgacaaaacggaggaaggtggggacgacgtcaaatcatcatgccccttatgtcctgggctacacacgtaatacaatggcggtcaacagagggatgcaaaatcgcaagatggagcgaacccctaaaagccgtcccagttcagattgtgggctgcaacccgcccacatgaagtcggaatcgctagtaatcgcggatcagcatgccgcggtgaatacgttcccgggccttgtacacaccgcccgtca

SEQ ID NO: 642 - DNA, 1393 bp, Artificial Sequence
  Synthetic polymer
agagtttgatcctggctcaggatgaacgctggcggcgtgcttaacacatgcaagtcgaacgagaaccattggatcgaggattcgtccaagtgaaggtggggaaagtggcggacgggtgagtaacgcgtgagcaatctgccttggagtggggaataacggctggaaacagccgctaataccgcatgatacagctgggaggcatctccctggctgtcaaagatttatcgctctgagatgagctcgcgtctgattagctagttggcggggtaacggcccaccaaggcgacgatcagtagccggactgagaggttggccggccacattgggactgagacacggcccagactcctacgggaggcagcagtggggaatattgggcaatgggcgcaagcctgacccagcaacgccgcgtgaaggaagaaggctttcgggttgtaaacttcttttgtcagggacgaagcaagtgacggtacctgacgaataagccacggctaactacgtgccagcagccgcggtaatacgtaggtggcaagcgttatccggatttattgggtgtaaagggcgtgtaggcgggaatgcaagtcagatgtgaaaactatgggctcaacccatagcctgcatttgaaactgtatttcttgagtgctggagaggcaatcggaattccgtgtgtagcggtgaaatgcgtagatatacggaggaacaccagtggcgaaggcggattgctggacagtaactgacgctgaggcgcgaaagcgtggggagcaaacaggattagataccctggtagtccacgccgtaaacgatggatactaggtgtcggggggcacagccccccggtgccgcagcaaacgcagtaagtattccacctggggagtacgttcgcaagaatgaaactcaaaggaattgacggggacccgcacaagcgatggagcatgtggtttaattcgaagcaacgcgaagaaccttaccaagccttgacatcccggcgccagtgcatgtaatgtgcattttcttcggaacgccggagacaggtggtgcatggttgtcgtcagctcgtgtcgtgagatgttgggttaagtcccgcaacgagcgcaacccctgtccttagtagccagcatttcgggggggcactctagggagactgccagggataacctggaggaaggcggggatgacgtcaaatcatcatgccccttatggccggggctacacacgtgctacaatggcgtaaacaaagggaagcgagagagtgatcttaagcgaaactcaaaaataacgtcccagttcggattgcagtctgcaactcgactgcatgaagctggaatcgctagtaatcgcggatcagaatgccgcggtgaatacgttcccgggtcttgtactcaccgcccgtca

SEQ ID NO: 643 - DNA, 1366 bp, Artificial Sequence
  Synthetic polymer
agagtttgatcctggctcaggacgaacgctggcggcacgcttaacacatgcaagtcgaacggagaattttgagtttacttaaaattcttagtggcggacgggtgagtaacacgtgagcaacccgcctttgagagagggatagcttcgggaaactgatggtaatacctcataacgtatatttaaggcatcttagatataccaaagatttatcactcaaagatgggctcgcgtctgattagctagttggtgaggtaacggctcaccaaggcgacgatcagtagccggactgagaggttgaacggccacattgggactgagacacggcccagactcctacgggaggcagcagtggggaatattgcacaatgggcgaaagcctgatgcagcaacgccgcgtgagcgatgaaggccttcgggtcgtaaagctctgtcctcaaggaagataatgacggtacttgaggaggaagccccggctaactacgtgccagcagccgcggtaatacgtagggggctagcgttatccggaattactgggcgtaaagggtgcgtaggtggtttcttaagtcagaggtgaaaggctacggctcaaccgtagtaagcctttgaaactgggaaacttgagtgcaggagaggagagtggaattcctagtgtagcggtgaaatgcgtagatattaggaggaacaccagttgcgaaggcggctctctgggctttaactgacgctgaggctcgaaagcgtggggagcaaacaggattagataccctggtagtccacgctgtaaacgatgattactaggtgtggggggactgaccccttccgtgccggagcaaacgcaataagtaatccacctggggagtacggccgcaaggttgaaactcaaaggaattgacgggggcccgcacaagcagtggagtatgtggtttaattcgaagcaacgcgaagaaccttaccaggtcttgacatcgagtgaataactaagagattagttagtccttcgggacacgaagacaggtggtgcatggttgtcgtcagctcgtgtcgtgagatgttgggttaagtcccgcaacgagcgcaacccttatcattagttgctacgcaagagcactctagtgagactgccgttgacaaaacggaggaaggtggggatgacgtcaaatcatcatgccccttatgacctgggctacacacgtactacaatgtcaattaacagagggcagcaatacagcgatgtaaagcgaaaccctaaaaattgtctcagttcggattgcaggctgcaactcgcctgcatgaagtcggaattgctagtaatcgcggatcagcatgccgcggtgaatacgttcccgggctttgtactcaccgcccgtca

SEQ ID NO: 644 - DNA, 1399 bp, Artificial Sequence
  Synthetic polymer
ttcgcccttagagtttgattctggctcaggatgaacgctggcggcatgcttaacacatgcaagtcgaacgagaaccattggatcgaggattcgtccaagtgaaggtggggaaagtggcggacgggtgagtaacgcgtgagcaatctgccttggagtggggaataacggctggaaacagccgctaataccgcatgatacagctgggaggcatctccctggctgtcaaagatttatcgctctgagatgagctcgcgtctgattggctagttggcggggtaacggcccaccaaggcgacgatcagtagccggactgagaggttggccggccacattgggactgagacacggcccagactcctacgggaggcagcagtggggaatattgggcaatgggcgcaagcctgacccagcaacgccgcgtgaaggaagaaggctttcgggttgtaaacttcttttgtcagggacgaagcaagtgacggtacctgacgaataagccacggctaactacgtgccagcagccgcggtaatacgtaggtggcaagcgttatccggatttattgggtgtaaagggcgtgtaggcgggaatgcaagtcagatgtgaaaactatgggctcaacccatagcctgcatttgaaactgtatttcttgagtgctggagaggcaatcggaattccgtgtgtagcggtgaaatgcgtagatatacggaggaacaccagtggcgaaggcggattgctggacagtaactgacgctgaggcgcgaaagcgtggggagcaaacaggattagataccctggtagtccacgccgtaaacgatggatactaggtgtggggggactgaccccctccgtgccgcagctaacgcaataagtatcccacctggggagtacgatcgcaaggttgaaactcaaaggaattgacgggggcccgcacaagcggtggagtatgtggtttaattcgacgcaacgcgaagaaccttaccagggcttgacatcctactaacgaaccagagatggattaggtgcccttcggggaaagtagagacaggtggtgcatggttgtcgtcagctcgtgtcgtgagatgttgggttaagtcccgcaacgagcgcaacccctattgttagttgctacgcaagagcactctagcgagactgccgttgacaaaacggaggaaggtggggacgacgtcaaatcatcatgccccttacgtcctgggccacacacgtactacaatggacggtacaacgagaagcgaacctgcgaaggcaagcggatctcttaaagccgttctcagttaggactgtaggctgcaactcgcctacacgaagctggaatcgctagtaatcgcggatcagcacgccgcggtgaatacatgcccgggccttgtacacaccgcccgtca

SEQ ID NO: 645 - DNA, 1394 bp, Artificial Sequence
  Synthetic polymer
agagtttgatcctggctcaggatgaacgctggcggcgtgcttaacacatgcaagtcgaacgaagcatttgcgacggattctttcgggatgaagatgcttatgactgagtggcggacgggtgagtaacgcgtgggtaacctgccttatacagggggatagcagttggaaacgactggtaataccgcataagcgcacggtatcgcatgatacagtgtgaaaaactgaggtggtataagatggacccgcgtctgattagctagttggtgaggtaacggcccaccaaggcgacgatcagtagccggctcgagagagtgaacggccacattgggactgagacacggcccaaactcctacgggaggcagcagtggggaatattgcacaatgggggaaaccctgatgcaacgacgccgcgtgagtgaagaagtatctcggtatgtaaagctctatcagcagggaagaaaatgacggtacctgactaagaagccccggctaactacgtgccagcagccgcggtaatacgtagggggcaagcgttatccggaattactgggtgtaaagggtgcgtaggtggtatggcaagtcagaagtgaaaacccagggcttaactctgggactgcttttgaaactgtcagactggagtgcaggagaggtaagcggaattcctagtgtagcggtgaaatgcgtagatattaggaggaacatcagtggcgaaggcggcttactggactgaaactgacactgaggcacgaaagcgtggggagcaaacaggattagataccctggtagtccacgccgtaaacgatgaatactaggtgtcggggccgcagaggcttcggtgccgcaagccaacgcagtaagtattccacctggggagtaggttcgcaagaatgaaactcaaagggattgacggggacccgcacaagcggtggagcatgtggtttaattcgaagcaacgcgaagaaccttacctggtcttgacatccttctgaccggtccttaaccggacctttccttcgggacaggagtgacaggtggtgcatggttgtcgtcagctcgtgtcgtgagatgttgggttaagtcccgcaacgagcgcaacccctatctttagtagccagcatttcaggtgggcactctagagagactgccagggataacctggaggaaggtggggacgacgtcaaatcatcatgccccttatgaccagggctacacacgtgctacaatggcgttaaacaaagagaagcaagaccgcgaggtggagcaaaactcaaaaacaacgtctcagttcagattgcaggctgcaactcgcctgcatgaagtcggaattgctagtaatcgcggatcagcatgccgcggtgaatacgttcccgggccttgcacacaccgcccgtca

SEQ ID NO: 646 - DNA, 1353 bp, Artificial Sequence
  Synthetic polymer
gatgaacgctggcggcgtgcttaacacatgcaagtcgaacgggaattactttattgaaacttcggtcgattttaatttaattctagtggcggacgggtgagtaacgcgtgggtaacctgccttatacagggggataacagtcagaaatggctgctaataccgcataagcgcacagtaccacatggtacagtgtgaaaaactccggtggtatgagatggacccgcgtctgattagctagttggtgaggtaacggcccaccaaggcgacgatcagtagccgacctgagagggtgaccggccacattgggactgagacacggcccagactcctacgggaggcagcagtggggaatattgcacaatggaggaaactctgatgcagcgacgccgcgtgagtgaagaagtagttcgctatgtaaagctctatcagcagggaagatagtgacggtacctgactaagaagctccggctaaatacgtgccagcagccgcggtaatacgtatggagcaagcgttatccggatttactgggtgtaaagggagtgtaggtggccaggcaagtcagaagtgaaagcccggggctcaaccccgggactgcttttgaaactgcagggctagagtgcaggaggggcaagtggaattcctagtgtagcggtgaaatgcgtagatattaggaggaacaccagtggcgaaggcggcttgctggactgtaactgacactgaggctcgaaagcgtggggagcaaacaggattagataccctggtagtccacgccgtaaacgatgaatactaggtgtcggggcacataagtgcttcggtgccgcagcaaacgcaataagtattccacctggggagtacgttcgcaagaatgaaactcaaaggaattgacggggacccgcacaagcggtggagcatgtggtttaattcgaagcaacgcgaagaaccttaccaagtcttgacatcccactgaccggacagtaatgtgtccttcccttcggggcagtggagacaggtggtgcatggttgtcgtcagctcgtgtcgtgagatgttgggttaagtcccgcaacgagcgcaacccttatccttagtagccagcagttcggctgggcactctagggagactgccagggataacctggaggaaggtggggatgacgtcaaatcatcatgccccttatgacttgggctacacacgtgctacaatggcgtaaacaaagtgaagcgagagtgtgagcttaagcaaatcacaaaaataacgtctcagttcggattgtagtctgcaactcgactacatgaagctggaatcgctagtaatcgcagatcagaatgctgcggtgaatacgttcccgggtct

SEQ ID NO: 647 - DNA, 1373 bp, Artificial Sequence
  Synthetic polymer
agagtttgatcctggctcaggacgaacgctggcggcgtgcctaacacatgcaagtcgaacggggtagagagcttcggttttctacttagtggcgaacgggtgagtaacgcgtgagaaacctgcctttcagtgggggacaacagttggaaacgactgctaataccgcataaagttatttgggggcatcccctcataaccaaagatttattgctgaaagatggtctcgcgtctgattagctagttggtgaggtaacggctcaccaaggcgacgatcagtagccggtctgagaggatgaacggccacattgggactgagatacggcccagactcctacgggaggcagcagtggggaatattgggcaatggggggaaccctgacccagcaacgccgcgtgaaggaagaaggccttcgggttgtaaacttcttttagtagggacgaacaaagtgacggtacctacagaaaaagcaacggctaactacgtgccagcagccgcggtaatacgtaggttgcaagcgttgtccggatttactgggtgtaaagggcgtgtaggcggagatgcaagttgggagtgaaatccaggggctcaacccctgaactgcttccaaaactgtatcccttgagtatcggagagacaagcggaattcctagtgtagcggtgaaatgcgtagatattaggaggaacaccagtggcgaaggcggcttgctggacgacaactgacgctgaggctcgaaagtgtggggagcaaacaggattagataccctggtagtccacactgtaaacgatgattactaggtgtgggaggtctgaccccttccgtgccgcagttaacgcaataagtaatccacctggggagtacgaccgcaaggttgaaactcaaaggaattgacgggggcccgcacaagcagtggattatgtggtttaattcgaagcaacgcgaagaaccttaccaggtcttgacatccaactaacgaactagagatagattaggtgcccttcggggaaagttgagacaggtggtgcatggttgtcgtcagctcgtgtcgtgagatgttgggttaagtcccgcaacgagcgcaacccctgccattagttgctacgcaagagcactctaatgggaccgctaccgacaaggtggaggaaggtggggacgacgtcaaatcatcatgccccttatgacctgggctacacacgtaatacaatggccgttaacagaaggaagcgaaggcgcgagccggagcaaacccccaaaaacggtctcagttcggattgcaggctgcaactcgcctgcatgaagtcggaattgctagtaatcgcggatcagcatgccgcggtgaatacgttcccgggccttgcactcaccgcccgtca

SEQ ID NO: 648 - DNA, 1398 bp, Artificial Sequence
  Synthetic polymer
ttcgcccttagagtttgatcctggctcaggatgaacgctggcggcgtgcctaacacatgcaagtcgaacgaagcactgtcgaatgaggattcgtctgaatttggcatcgacttagtggcggacgggtgagtaatgcgtgagcaacctgcctttcagagggggacaacgactggaaacggtcgctaataccgcatgatatgttcggatggcatcatctgaacatcaaagatttatcgctgaaagatgggctcgcgtctgattagatagttggtgaggtaacggctcaccaagtcgacgatcagtagccggactgagaggttgaccggccacattgggactgagatacggcccagactcctacgggaggcagcagtggggaatattgggcaatgggcgcaagcctgacccagcaacgccgcgtgaaggaagaaggctttcgggttgtaaacttcttttaagtgggaagagtagaagacggtaccacttgaataagccacggctaactacgtgccagcagccgcggtaatacgtaggtggcaagcgttgtccggatttactgggtgtaaagggcgtgcagccgggcatgcaagtcagatgtgaaatctcagggcttaaccctgaaactgcatttgaaactgtatgtcttgagtgccggagaggtaatcggaattccttgtgtagcggtgaaatgcgtaggtataaggaagaacaccagtggcgaaggcggattactggacggtaactgacggtgaggcgcgaaagcgtggggagcgaacaggattagataccctggtagtccacgctgtaaacgatggatactaggtgtgcggggactgaccccctgcgtgccgcagttaacacaataagtatcccacctggggagtacgatcgcaaggttgaaactcaaaggaattgacgggggcccgcacaagcggtggattatgtggtttaattcgaagcaacgcgaagaaccttaccaggtcttgacatcctgctaacgaagtagagatacattaggtgcccttcggggaaagcagagacaggtggtgcatggttgtcgtcagctcgtgtcgtgagatgttgggttaagtcccgcaacgagcgcaacccctattgttggttgctacgcaagagcactctagcgagactgccgttgacaaaacggaggaaggtggggacgacgtcaaatcatcatgccccttatgacctgggctacacacgtaatacaatggcggtcaacaaagggatgcaaagccgcgaggcagagcgaaccccaaaaagccgtcccagttcggatcgcaggctgcaacccgcctgcgtgaagtcggaatcgctagtaatcgtgggtcagcataccacggtgaatacgttcccgggccttgcactcaccgcccgtca

SEQ ID NO: 649 - DNA, 1369 bp, Artificial Sequence
  Synthetic polymer
agagtttgatcctggctcaggacgaacgctggcggcacgcctaacacatgcaagtcgaacggacgcggaggaagcttgcttcttccaagttagtggcggacgggtgagtaacacgtgagcaacctgcctttaagagggggatagcttctggaaacggatggtaataccccataacatatactgatggcatcttcagtatatcaaagatttatcgcttagagatgggctcgcgtctgattagatagttggtgaggtaacggctcaccaagtcgacgatcagtagccggactgagaggttgaacggccacattgggactgagacacggcccagactcctacgggaggcagcagtggggaatattgcacaatgggggaaaccctgatgcagcgatgccgcgtggaggaagaaggttttcggatcgtaaactccttttatcagggacgataatgacggtacctgaagaaaaagctccggctaactacgtgccagcagccgcggtaatacgtagggagcaagcgttgtccggatttactgggtgtaaagggtgcgtaggcggctaggcaagtcagatgtgaaatgtatgggctcaacccatgcactgcatttgaaactgtctggcttgagtgaagtagaggtaggcggaattccctgtgtagcggtgaaatgcgtagagatagggaggaacaccagtggcgaaggcggcctactgggctttaactgacgctgaggcacgaaagcgtgggtagcaaacaggattagataccctggtagtccacgccgtaaacgatgattactaggtgtggggggtctgaccccctccgtgccgcagttaacacaataagtaatccacctggggagtacggccgcaaggttgaaactcaaaggaattgacgggggcccgcacaagcagtggagtatgtggtttaattcgaagcaacgcgaagaaccttaccaggtcttgacatcgagtgacgtacctagagataggtatttccttcgggacacgaagacaggtggtgcatggttgtcgtcagctcgtgtcgtgagatgttgggttaagtcccgcaacgagcgcaacccttactgttagttgctacgcaagagcactctagcaggactgccgttgacaaaacggaggaaggtggggacgacgtcaaatcatcatgccccttatgacctgggctacacacgtactacaatggtcgttaacagagggaagcaatacagcgatgtggagcaaacccctaaaaacggtctcagttcagattgcaggctgcaatccgcctgcatgaagtcggaattgctagtaatcgcggatcagcatgccgcggtgaatacgttcccgggccttgcacacaccgcccgtca

SEQ ID NO: 650 - DNA, 1381 bp, Artificial Sequence
  Synthetic polymer
ttcgcccttagagtttgatcctggctcaggacgaacgctggcggcgtgcttaacacatgcaagtcgaacggggttaatgttttcggatattaacttagtggcgaacgggtgagtaacgcgtgaggaacctgcctttcagtgggggacaacagttggaaacgactgctaataccgcatgatactattgagggacatcccttgatagtcaaagctttatgtgctgaaagatggcctcgcgtctgattagctagttggaggggtaacggcccaccaaggcgacgatcagtagccggactgagaggttgaccggccacattgggactgagatacggcccagactcctacgggaggcagcagtggggaatattgggtaatgggcgcaagcctgacccagcaacgccgcgtgaaggaagaaggctttcgggttgtaaacttcttttagcagggacgaagaacgtgacggtacctgcagaaaaagcaacggctaactacgtgccagcagccgcggtaatacgtaggttgcaagcgttgtccggaattactgggtgtaaagggcgtgtaggcggagatgcaagttgggagtgaaatccatgggctcaacccatgaactgctttcaaaactgcatcccttgagtatcggagaggcaagcggaattcctagtgtagcggtgaaatgcgtagatattaggaggaacaccagtggcgaaggcggcttgctggacgacaactgacgctgaggcgcgaaagcgtggggagcaaacaggattagataccctggtagtccacgccgtaaacgatgagcactaggtgtcggggccgcaaggtttcggtgccgcagttaacgcattaagtgctccgcctggggagtacgcacgcaagtgtgaaactcaaaggaattgacggggacccgcacaagcagcggagcatgtggtttaattcgaagcaacgcgaagaaccttaccagggcttgacatccttctgaccggaacttaaccgttgctttcttcggacagaagtgacaggtggtgcatggttgtcgtcagctcgtgtcgtgagatgttgggttaagtcccgcaacgagcgcaacccttgtcgttagttactaacattcagttgaggactctaatgagactgccgtggataacacggaggaaggtggggatgacgtcaaatcatcatgccccttatgtcctgggctacacacgtgctacaatggtcggtacaaagagacgcgagacagtgatgtggagcaaatctcaaaagccgatcccagttcggattgcaggctgcaactcgcctgcatgaagtcggagttgctagtaatcgtggatcagaatgccacggtgaatgcgttcccgggtcttgcacacaccgcccgtca

SEQ ID NO: 651 - DNA, 1373 bp, Artificial Sequence
  Synthetic polymer
agagtttgatcctggctcaggacgaacgctggcggcgcgcctaacacatgcaagtcgaacgagagagagggagcttgcttccttgatcgagtggcgaacgggtgagtaacgcgtgaggaacctgcctcaaagagggggacaacagttggaaacgactgctaataccgcataagcccacgacccggcatcgggaagagggaaaaggagcaatccgctttgagatggcctcgcgtccgattagctagttggtgaggtaatggcccaccaaggcgacgatcggtagccggactgagaggttgaacggccacattgggactgagacacggcccagactcctacgggaggcagcagtggggaatattgcacaatgggggaaaccctgatgcagcgacgccgcgtggaggaagaaggtcttcggattgtaaactcctgttgttgaggaagataatgacggtactcaacaaggaagtgacggctaactacgtgccagcagccgcggtaaaacgtaggtcacaagcgttgtccggaattactgggtgtaaagggagcgcaggcgggcgatcaagttggaagtgaaatccatgggctcaacccatgaactgctttcaaaactggtcgtcttgagtagtgcagaggtaggcggaattcccggtgtagcggtggaatgcgtagatatcgggaggaacaccagtggcgaaggcggcctactgggcaccaactgacgctgaggctcgaaagtgtgggtagcaaacaggattagataccctggtagtccacaccgtaaacgatgattactaggtgttggggaggattgaccctctcagtgccgcagttaacacaataagtaaatccacctggggagtacgaccgccaaggttgaaactcaaaggaattgacaggggcccgcacaagcagtggagtatgtggtttaattcgacgcaacgcgaagaaccttaccaagtcttgacatcctctgacgaacgtagaaatacgttttctcttcggagcagagagacaggtggtgcatggttgtcgtcagctcatgtcgtgagatgttgggttaagtcccgcaacgagcgcaacccttatggtcagttactacgcaagaggactctggccagactgccgttgacaaaacggaggaaggtggggatgacgtcaaatcatcatgccccttatggcctgggctacacacgtactacaatggcgtctacaaagagcggcaagcctgtgaaggcaagcgaatctcataaaggacgtctcagttcggattgaagtctgcaacccgacttcatgaagtcggaattgctagtaatcgtggatcagcatgccacggtgaatacgttcccgggccttgcacacaccgcccgtca

SEQ ID NO: 652 - DNA, 1386 bp, Artificial Sequence
  Synthetic polymer
agagtttgatcctggctcaggatgaacgctggcggcgtgcctaatacatgcaagtcgagcgagaagctcatgatggattcttcggatgacagattgagcggaaagcggcggacgggtgagtaacgcgtaggcaacctgcccttcacagagggatagcctcgggaaaccgggattaaaacctcataatgccgagacaagacatcttgattcggccaaagatttatcggtgaaggatgggcctgcgtctgattagttagttggtggggtaacggcctaccaaggcgacgatcagtagccgatctgagagggtgatcggccacattggaactgagacacggtccaaactcctacgggaggcagcagtggggaatattgcacaatgggggaaaccctgatgcagcaacgccgcgtgaaggaagaaggtcttcggatcgtaaacttctgtccttggggaagaaacaaatgacggtacccttggaggaagccccggctaactacgtgccagcagccgcggtaatacgtagggggcaagcgttatccggaattattgggcgtaaagagtacgtaggcggttctttaagcgcagggtttaaggctatggctcaaccatagttcgccctgtgaactgggggacttgagtatcggagaggaaagcggaattcctagtgtagcggtgaaatgcgtagatattaggaggaacaccagtggcgaaggcggctttctggacgaatactgacgctgaggtacgaaagcgtggggagcaaacaggattagataccctggtagtccacgccgtaaacgatgagcactaggtgtcggggccgcaaggtttcggtgccgcagttaacgcattaagtgctccgcctggggagtacgcacgcaagtgtgaaactcaaaggaattgacggggacccgcacaagcagcggagcatgtggtttaattcgaagcaacgcgaagaaccttaccagggcttgacatccttctgaccggaacttaaccgttcctttcttcggacagaagtgacaggtggtgcatggttgtcgtcagctcgtgtcgtgagatgttgggttaagtcccgcaacgagcgcaacccttgtcgttagttactaacattcagttgaggactctaatgagactgccgtggataacacggaggaaggtggggatgacgtcaaatcatcatgccccttatgtcctgggctacacacgtgctacaatggtcggtacaaagagaagcgagacagcgatgtggagcaaatctcaaaagccgatcccagttcggattgcaggctgcaactcgcctgcatgaagtcggagttgctagtaatcgtggatcagaatgccacggtgaatgcgttcccgggtcttgcactcaccgcccgtca

SEQ ID NO: 653 - DNA, 1370 bp, Artificial Sequence
  Synthetic polymer
gatgaacgctagcgacaggcctaacacatgcaagtcgaggggcagcggagaggtagcaatacctttgccggcgaccggcgcacgggtgagtaacacgtatgcaatccacctgtaacagggggataacccggagaaatccggactaataccccataatatgggcgttccgcatggagagctcattaaagagagcaattttggttacagacgagcatgcgctccattagccagttggcggggtaacggcccaccaaagcgacgatggataggggttctgagaggaaggtcccccacattggaactgagacacggtccaaactcctacgggaggcagcagtgaggaatattggtcaatggtcggcagactgaaccagccaagtcgcgtgagggaagacggccctacgggttgtaaacctcttttgtcggagagtaaagtacgctacgcgtagtgtattgcaagtatccgaagaaaaagcatcggctaactccgtgccagcagccgcggtaatacggaggatgcaagcgttatccggatttattgggtttaaagggtgcgtaggcggcacgccaagtcagcggtgaaatttccgggctcaacccggactgtgccgttgaaactggcgagctagagtacacaagaggcaggcggaatgcgtggtgtagcggtgaaatgcatagatatcacgcagaaccccgattgcgaaggcagcctgctagggtgaaacagacgctgaggcacgaaagcgtgggtatcgaacaggattagataccctggtagtccacgcagtaaacgatgaatactaactgtttgcgatacaatgtaagcggtacagcgaaagcgttaagtattccacctggggagtacgccggcaacggtgaaactcaaaggaattgacgggggcccgcacaagcggaggaacatgtggtttaattcgatgatacgcgaggaaccttacccgggctcaaacgcagggggaatgtcggtgaaagccggcagctagtaatagtcacctgcgaggtgctgcatggttgtcgtcagctcgtgccgtgaggtgtcggcttaagtgccataacgagcgcaacccctatggacagttactaacgggtgaagccgaggactctgtctagactgccggcgcaagccgcgaggaaggtggggatgacgtcaaatcagcacggcccttacgtccggggcgacacacgtgttacaatggcaggtacagaaggctagcctagtcagcgaatgacgcgcgaatcccgaaaactctgtctcaagttcggattggagtctgcaaacccgactccatgagagctggaattcgctagtaatcgcgcttcagccatggcgcggtaaatacgttcccgggcct

SEQ ID NO: 654 - DNA, 1375 bp, Artificial Sequence
  Synthetic polymer
ttagagtttgatcctggctcaggacgaacgctggcggcgtgcctaacacatgcaagtcgagcgagtggatttccttcgggattgaagctagcggcggacgggtgagtaacgcgtgagcaacctgtcccaaacagggggataagataccgaaaggtgttctaataccgcatgagaccacagggccacatggcgcaggggtcaaaggaggaatccggtttggggtgggctcgcgtccgattaggtagttggtgaggtaacggcccaccaagccgacgatcggtagccgacctgagagggtgatcggccacattgggactgagacacggcccagactcctacgggaggcagcagtggggaatattgcacaatgggggaaaccctgatgcagcaacgccgcgtgagtgatgacggccttcgggttgtaaagctctgtcttcagggacgataatgacggtacctgaggaggaagccacggctaactacgtgccagcagccgcggtaatacgtaggtggcgagcgttgtccggatttactgggcgtaaagggagcgtaggcggacttttaagtgagatgtgaaatacccgggctcaacttgggtgctgcatttcaaactggaagtctagagtgcaggagaggagaatggaattcctagtgtagtggtgaaatgcgtagagattaggaagaacaccagtggcgaaggcgattctctggactgtaactgacgctgaggctcgaaagcgtggggagcaaacaggattagataccctggtagtccacgccgtaaacgatgaatactaggtgtaggggttgtcatgacctctgtgccgccgctaacgcattaagtattccgcctggggagtacggtcgcaagattaaaactcaaaggaattgacgggggcccgcacaagcagcggagcatgtggtttaattcgaagcaacgcgaagaaccttacctagacttgacatctcctgaattacccgtaactggggaagtcgcttcggcgacaggaagacaggtggtgcatggttgtcgtcagctcgtgtcgtgagatgttgggttaagtcccgcaacgagcgcaacccctattgttagttgctaccatttagttgagcactctagcgagactgcccgggttaaccgggaggaaggtggggatgacgtcaaatcatcatgccccttatgtctagggctacgcacgtgctacaatggcaagtacaaagagaagcaagaccgcgaggtggagcaaaactcaaaaacttgtctcagttcggattgtaggctgaaactcgcctacatgaagctggagttgctagtaatcgcgaatcagcatgtcgcggtgaatacgttcccgggccttgcactcaccgcccgtca

SEQ ID NO: 655 - DNA, 1364 bp, Artificial Sequence
  Synthetic polymer
gatgaacgctggcggcctgcttaacacatgccagtccaacgaagcatttgccacagatttcctcggaatgaaatttgcttatgactgaatggcggacgggtgaataacgcgtgggtaacctgcccttgtactgggggaatagcagctggaaacggctggtaataccgcataagcgcacaatgttgcatgacatggtgtgaaaaactccggtggtataagatggacccgcgtctgattagctagttggtgagataacagcccaccaaggcgacgatcagtagccgacctgagagggtgaccggccacattgggactgagacacggcccagactcctacgggaggcagcagtggggaatattgcacaatggaggaaactctgatgcagcgacgccgcgtgagtgaagaagtaattcgttatgtaaagctctatcagcagggaagatagtgacggtacctgactaagaagctccggctaaatacgtgccagcagccgcggtaatacgtatggagcaagcgttatccggatttactgggtgtaaagggaggtgtaggtggccatgcaagtcagaagtgaaaatccggggctcaaccccggaactgcttttgaaactgtaaggctagagtgcaggaggggtgagtggaattcctagtgtagcggtgaaatgcgtagatattaggaggaacaccagtggcgaaggcggctcactggactgtaactgacactgaggctcgaaagcgtggggagcaaacaggattagataccctggtagtccacgccgtaaacgatgaatactaggtgtcggggcccataagggcttcggtgccgcagcaaacgcaataagtattccacctggggagtacgttcgcaagaatgaaatcaaaaggaattgacggggacccgcacaagcggtggagcatgtggtttaattcgaagcaaacgcgaagaaccttaccaagtcttgacatcctcttgaccggtcagtaatgtgacctttccttcgggacaagagtgacaggtggtgcatggttgtcgtcagctcgtgtcgtgagatgttgggttaagtcccgcaacgagcgcaacccctatccttagtagccagcagtaagatgggcactctagggagactgccagggataacctggaggaaggtggggatgacgtcaaatcatcatgccccttatgacttgggctacgcacgtgctacgatggcgtaaacgaaagtgaagcgaagtcgtgaggccaagcgaaatcgcgaaaaataacgtctcggttcggattgtagtctgcgaactcgactacataaagctggaaatcgctaggaatcgcggatcggaatgctgcggtaatacgtttcccgggtct

SEQ ID NO: 656 - DNA, 1370 bp, Artificial Sequence
  Synthetic polymer
agagtttgatcctggctcaggatgaacgctggcggcatgcctaacacatgcaagtcgaacggagttaatcggagcttgctttgattaacttagtggcggacgggtgagtaacacgtgagcaacctgcctctcagagaggaatagcttccggaaacggatggtaatacctcataacatattttttcggcatcgaagagatatcaaagatttatcgctgagagatgggctcgcgtctgattagctagttggtaaggtaacggcttaccaaggcgacgatcagtagccggactgagaggttgaacggccacattgggactgagacacggcccagactcctacgggaggcagcagtggggaatattgcacaatgggcgaaagcctggtgcagcaatgccgcgtgagggaagaaggtcttcggattgtaaacctctgtcataagggaagaaacaagactgtaccttagaaggaagctccggctaactacgtgccagcagccgcggtaatacgtagggagcgagcgttatccggaattactgggtgtaaagggagtgtaggcgggattgtaagtcagatgtgaaaactatgggctcaactcatagactgcatttgaaactgcgattcttgagtgaagtagaggtaagcggaattcctagtgtagcggtgaaatgcgtagatattaggaggaacatcagtggcgaaggcggcttactgggctttaactgacgctgaggctcgaaagcgtggggagcaaacaggattagataccctggtagtccacgctgtaaacgatgattactaggtgtggggggactgaccccttccgtgccggagcaaacgcaataagtaatccacctggggagtacggccgcaaggttgaaactcaaaggaattgacgggggcccgcacaagcagtggagtatgtggtttaattcgaagcaacgcgaagaaccttaccaggtcttgacatcgagtgaataactaagagattagttagtccttcgggacacgaagacaggtggtgcatggttgtcgtcagctcgtgtcgtgagatgttgggttaagtcccgcaacgagcgcaacccttatcattagttgctacgcaagagcactctagtgagactgccgttgacaaaacggaggaaggtggggatgacgtcaaatcatcatgccccttatgacctgggctacacacgtaatacaatggccgttaacagagggaagcaatactgcgaagtggagcaaaaccctaaaaacggtcccagttcggatcgtaggctgcaacccgcctgcgtgaagttggaattgctagtaatcgcggatcagcatgccgcggtgaatacgttcccgggccttgcactcaccgcccgtca

SEQ ID NO: 657 - DNA, 1407 bp, Artificial Sequence
  Synthetic polymer
agagtttgatcctggctcaggacgaacgctggcggcatgcctaacacatgcaagtcgaacggagaatagtttcgattattcttagtggcgaacgggtgagtaacgcgtaggcaacctgccctttggatggggacaacattccgaaaggagtgctaataccgaatgtgacggtcttatcgcatgatttgaccgtgaaagatggcctctacatgtaagctatcgccaaaggatgggcctgcgtctgattagctagttggtggggtaacggctcaccaaggcgacgatcagtagccggtctgagaggatgaacggccacattgggactgagacacggcccagactcctacgggaggcagtagtggggaatctttcgcaatgggcgaaagcctgacggagcaatgccgcatgagtgatgaaggttttcggaccgtaaagctcttttgtttatgacgaacgtgcttgatgtgaataatgttgagtaatgacggtagtaaacgaataagccacggctaactacgtgccagcagccgcggtaatacgtaggtggcgagcgttgtccggaattattgggcgtaaagagcatgtaggcggtcttttaagtccggagtgaaaatgcggggctcaaccccgtatggctttggatactgggagacttgagtgcaggagaggaaaggggaattcccagtgtagcggtgaaatgcgtagatattgggaggaacaccagtggcgaaggcgcctttctggactgtgtctgacgctgagatgcgaaagccagggtagcgaacgggattagataccccggtagtcctggccgtaaacgatgggtactaggtgtaggaggtatcgacccctcctgtgccggagttaacacaataagtattccacctggggagtacgaccgcaaggttgaaactcaaaggaattgacgggggcccgcacaagcagtggagtatgtggtttaattcgaagcaacgcgaagaaccttaccaggacttgacatcctactaacgaagtagagatacattaggtgcccttcggggaaagtagagacaggtggtgcatggttgtcgtcagctcgtgtcgtgagatgttgggttaagtcccgcaacgagcgcaacccttacggttagttgctacgcaagagcactctagccggactgccgttgacaaaacggaggaaggtggggacgacgtcaaatcatcatgccccttatgtcctgggctacacacgtactacaatggcggtaacagagggaggcaatacagcgatgtggagcaaatccctaaaagccgccccagttcagattgcaggctgaaactcgcctgcatgaagtcggaattgctagtaatcgcggatcagcatgccgcggtgaatacgttcccgggccttgcacacaccgcccgtca

SEQ ID NO: 658 - DNA, 1384 bp, Artificial Sequence
  Synthetic polymer
agagtttgatcctggctcaggataaacgctggcggcgtgcttaacacatgcaagtcgaacgggaaatatttcattgagacttcggtggatttgatctatttctagtggcggacgggtgagtaacgcgtgggtaacctgccttatacagggggataacagtcagaaatggctgctaataccgcataagcgcacagagctgcatggctcagtgtgaaaaactccggtggtataagatggacccgcgttggattagcttgttggtggggtaacggctcaccaaggcgacgatccatagccggcctgagagggtgaacggccacattgggactgagacacggcccagactcctacgggaggcagcagtggggaatattgcacaatggaggaaactctgatgcagcgacgccgcgtgagtgaagaagtagttcgctatgtaaagctctatcagcagggaagatagtgacggtacctgactaagaagctccggctaaatacgtgccagcagccgcggtaatacgtatggagcaagcgttattcggatttactgggtgtaaagggagtgtaggtggcatcgcaagtcagaagtgaaagcccggggctcaaccccgggactgcttttgaaactgcggagctagagtgcaggaggggcaagtggaattcctagtgtagcggtgaaatgcgtagatattaggaggaacaccagtggcgaaggcggcttgctggactgtaactgacactgaggctcgaaagcgtggggagcaaacaggattagataccctggtagtccacgccgtaaacgatgaatactaggtgtcggggcacaaaagtgcttcggtgccgcagcaaacgcaataagtattccacctggggagtacgttcgcaagaatgaaactcaaaggaattgacggggacccgcacaagcggtggagcatgtggtttaattcgaagcaacgcgaagaaccttacctgatcttgacatcccgctgaccgtcctttaatcgggattttccttcgggacagcggagacaggtggtgcatggttgtcgtcagctcgtgtcgtgagatgttgggttaagtcccgcaacgagcgcaacccctattgttagttgctacgaaagagcactctagcgagactgccgttgacagaacggaggaaggcggggacgacgtcaaatcatcatgccccttatgtcctgggctacacacgtaatacaatggcggtcaacagagggaagcaagagagcgatctggagcaaatccctaaaagccgtctcagttcggattgtaggctgcaactcgcctgcatgaagctggaattgctagtaatcgcggatcagcaagccgcggtgaatacgttcccgggccttgtacacaccgcccgtca

SEQ ID NO: 659 - DNA, 1365 bp, Artificial Sequence
  Synthetic polymer
agagtttgatcctggctcaggacgaacgctggcggcacgcctaacacatgcaagtcgaacggtgacgagagcttcggctctctgaacagtggcggacgggtgagtaacacgtgagcaacctgcctatcagagggggacaacagttggaaacgactgctaataccgcataacgtattcgggaggcatcttctgaataccaaagattttttcgctgatagatgggctcgcgtctgattagatagttggtgaggtaacggcccaccaagtcgacgatcagtagccggactgagaggttgaacggccacattgggactgagacacggcccagactcctacgggaggcagcagtgggggatattggacaatgggggaaaccctgatccagcgatgccgcgtgagggaagaaggttttcggattgtaaacctctgtgaaaggggacgataatgacggtacccttttagaaagccacggctaactacgtgccagcagccgcggtaatacgtaggtggcgagcgttgtccggaattactgggtgtaaagggagtgtaggcgggagagcaagtcagaagtgaaaattatgggcttaacccataacctgcttttgaaactgttcttcttgagtgaagtagaggcaagcggaattcctagtgtagcggtgaaatgcgtagatattaggaggaacaccagtggcgaaggcggcttgctgggcttttactgacgctgaggctcgaaagcgtggggagcaaacaggattagataccctggtagtccacgccgtaaacgatgattactaggtgtggggagttgaacctttccgtgccggagttaacacaataagtaatccacctggggagtacgaccgcaaggttgaaactcaaaggaattgacgggggcccgcacaagcagtggagtatgtggtttaattcgaagcaacgcgaagaaccttaccaggtcttgacatcaagtgaagagtccagagatgggctcgtccttcgggacacgaagacaggtggtgcatggttgtcgtcagctcgtgtcgtgagatgttgggttaagtcccgcaacgagcgcaacccttactattagttgctacgcaagagcactctaataggactgccgttgacaaaacggaggaaggtggggatgacgtcaaatcatcatgccctttatgacctgggctacacacgtactacaatggcatttaacaaagagcagcaaaaccgcgaggtggagcaaatctccaaaaaatgtctcagttcagattgcaggctgcaactcgcctgcatgaagtcggaattgctagtaatcgtaggtcagaatactacggtgaatacgttcccgggccttgcactcaccgcccgtca

SEQ ID NO: 660 - DNA, 1370 bp, Artificial Sequence
  Synthetic polymer
agagtttgatcctggctcagattgaacgctggcggcaggcttaatacatgcaagtcgaacggtaacagcagaaaagcttgcttttttggctgacgagtggcggacgggtgagtaatacctaggaaactgcctaaacgagggggataacatttggaaacgagtgctaataccgcataatactgagaagtcaaaggttggtttaccaatcgcgtttagatgtgcctaggagggattagctagttggtggggtaaaggcctaccaaggcgatgatctctagctggtctgagaggatgaccagccacactggaactgagacacggtccagactcctacgggaggcagcagtagggaatattgcacaatgggggaaaccctgatgcagcaacgccgcgtgaaggaagaaggcctttgggtcgtaaacttctgttctaagggaagatagtgacggtaccttaggagcaagtcccggctaactacgtgccagcagccgcggtaatacgtagggggcgagcgttatccggaattattgggcgtaaagagtgcgtaggtggttacctaagcaaggggtataaggcaatggcttaaccattgttcgccccttgaactgggctacttgagtgcaggagaggaaagcggaattcctagtgtagcggtgaaatgcgtagatattaggaggaacaccagtggcgaaggcggctttctggactgtaactgacactgaggcacgaaagcgtggggagcaaacaggattagataccctggtagtccacgccgtaaacgatgatcatttggtttttggggtccgcaagattttggtgccgcagttaacgcaataagtgctcagcctggggaggtacgtacgcaaggtatgaaactcaagggaattgtcggggggcccgcacaagcagtggagtatgtggtttaattcgaagcaacgcgaagaaccttaccaggtcttgacatcgtatgcatagtctagagatagatgaagtctcttcggagacatatagacaggtggtgcatggttgtcgtcagctcgtgtcgtgagatgttgggttaagtcccgcaacgagcgcaacccttattgctagttactacgaaagaggactctagcgagactgccgttgacaaaacggaggaaggtggggatgacgtcaaatcatcatgccccttatgacctgggcaacacacgtactacaatggctgtaaacaaagtgaaccgaaaccgcgaggtagaggaaaccacaaaaagcagtctcagttcggattgtaggctgcaaatagcctacatgaagccggaattgctagtaatcgcggatcagcatgccgcggtgaatacgttcccgggccttgtaaaagccgcccgtca

SEQ ID NO: 661 - DNA, 1370 bp, Artificial Sequence
  Synthetic polymer
agagtttgatcctggctcaggacgaacgctggcggcgcgcctaacacatgcaagtcgaacgagcgagagggagcttgctttctcgagcgagtggcgaacgggtgagtaacgcgtgaggaacctgcctcaaagagggggacaacagttggaaacgactgctaataccgcataagcccacggctcggcatcgagcagggggaaaaggagcaatccgctttgagatggcctcgcgtccgattagctagttggtgaggtaacggcccaccaaggcaacgatcggtagccggactgagaggttgaacggccacattgggactgagacacggcccagactcctacgggaggcagcagtggggaatattgcacaatgggggaaaccctgatgcagcgacgccgcgtggaggaagaaggtcttcggattgtaaactcctgttgttgaggaagataatgacggtactcaacaaggaagtgacggctaactacgtgccagcagccgcggtaaaacgtaggtcacaagcgttgtccggaattactgggtgtaaagggagcgcaggcgggagaacaagttggaagtgaaatccatgggctcaacccatgaactgctttcaaaactgtttttcttgagtagtgcggaggtagatggaattcccggtgtagcggtggaatgcgtagatatcgggaggaacaccagtggcgaaggcggtctactgggcaccaactgacgctgaggctcgaaagcatgggtagcaaacaggattagataccctggtagtccatgccgtaaacgatgattactaggtgttgggggattgaccccctcagtgccgcagttaacacaataagtaatccacctggggagtacgaccgcaaggttgaaactcaaaggaattgacgggggcccgcacaagcagtggagtatgtggtttaattcgacgcaacgcgaagaaccttaccaagtcttgacatcccttgacgatgctggaaacagtatttctcttcggagcaaggagacaggtggtgcatggttgtcgtcagctcgtgtcgtgagatgttgggttaagtcccgcaacgagcgcaacccttatggtcagttactacgcaagaggactctggccagactgccgttgacaaaacggaggaaggtggagatgacgtcaagccatcatgccccttatgtcttgggctacacacgtactacaatggtcggcaacagagggaagcgaagccgtgaggcagagcaaaccccagaaacccgatctcagttcggattgcaggctgcaactcgcctgcatgaagtcggaatcgctagtaatcgcaggtcagcatactgcggtgaatacgttcccgggccttgcacacaccgcccgtca

SEQ ID NO: 662 - DNA, 1391 bp, Artificial Sequence
  Synthetic polymer
agagtttgatcctggctcaggacgaacgctggcggcgtgcttaacacatgcaagtcgaacgaagcattttgaaggaattcttcggaaggaattcaacttgacttagtggcggacgggtgagtaacgcgtgagcaacctgcctacaagagggggacaacagttggaaacgactgctaataccgcataagaccacgctatcgcatggtagagaggtcaaagatttatcgcttgtagatgggctcgcgtctgattagctggttggtgaggtaatggctcaccaaggcaacgatcagtagccgacctgagagggtgatcggccacactggaactgagacacggtccagactcctacgggaggcagcagtggggaatattgggcaatgggggcaaccctgacccagcaacgccgcgtgagggaagaaggttttcggattgtaaacctctgtccttggggacgaagaagtgacggtacccaaggaggaagctccggctaactacgtgccagcagccgcggtaatacgtagggagcgagcgttgtccggaattactgggcgtaaagggtgcgtaggcggtttggtaagtcagatgtgaaatacccgggcttaacccgggggctgcatctgatactgtcagacttgagtgcaggagaggaaagcggaattcctagtgtagcggtgaaatgcgtagatattaggaggaacaccagtggcgaaggcggctttctggactgtaactgacgctgaggcacgaaagcgtggggagcaaacaggattagataccctggtagtccacgccgtaaacgatggatactaggtgtaggcatcataagatgtctgtgccgcagcaaacgcattaagtatcccgcctggggagtacgaccgcaaggttgaaactcaaaggaattgacgggggcccgcacaggcagcggagcatgttgtttaatttgaagcaacgcgaagaaccttaccatgtcttgacatcgatctaatcctctagagatagagagtgccttcgggcaagagaagacaggtggtgcatggttgtcgtcagctcgtgtcgtgagatgttgggttaggtcccgcaacgagcgcaacccttatggtcagttactaacaagtaatggtgaggactctgacaagactgccggggacaactcggaggaaggtggggaggacgtcaaatcatcatgccccttatgacatgggctacaaacgtgctacaatggtggttacaaagaggagcgagcgtgtaagcgtaagcggatctcaaaaaagccatctcagttcggattgtgggctgcaacccgcccacatgaagttggagttgctagtaatcgcggatcagaatgccgcggtgaatacgttcccgggccttgcacacaccgcccgtca

SEQ ID NO: 663 - DNA, 1402 bp, Artificial Sequence
  Synthetic polymer
ttcgcccttagagtttgatcctggctcaggacgaacgctggcggcgtgcctaacacatgcaagtcgaacggagatatccgctgatgaagtacttcggtaatgattcttggatatcttagtggcggacgggtgagtaacgcgtgagcaacctgcccttcagagggggataacgtttggaaacgaacgctaataccgcatgatattattgagctgcatggcttgataatcaaaggagcaatccgctgaaagatgggctcgcgtccgattaggtagttggcggggcaacggcccaccaagccgacgatcggtagccggactgagaggttgaacggccacattgggactgagacacggcccagactcctacgggaggcagcagtgagggatattggtcaatgggggaaaccctgaaccagcaacgccgcgtgagggaagacggttttcggattgtaaacctctgtcctctgtgaagataatgacggtagcagaggaggaagctccggctaactacgtgccagcagccgcggtaatacgtagggagcaagcgttgtccggatttactgggtgtaaagggtgcgtaggcggctttgcaagtcagaagtgaaatccatgggcttaacccatgaactgcttttgaaactgcagagcttgagtggagtagaggtaggcggaattcccggtgtagcggtgaaatgcgtagagatcgggaggaacaccagtggcgaaggcggcctgctgggctttaactgacgctgaggcacgaaagcgtgggtagcaaacaggattagataccctggtagtccacgctgtaaacgatgattactaggtgtgggtggactgaccccatccgtgccggagttaacacaataagtaatccacctggggagtacgaccgcaaggttgaaactcaaaggaattgacgggggcccgcacaagcagtggagtatgtggattaattcgatgcaacgcgaagaaccttaccaggtcttgacatcccgctaacgaagtagagatacattaggtgcccttcggggaaagcggagacaggtggtgcatggttgtcgtcagctcgtgtcgtgagatgttgggttaagtcccgcaacgagcgcaacccttactgttagttgctacgcaagagcactctagcaggaccgccgttgacaaaacggaggaaggtggggatgatgtcaaatcatcatgccccttatgacctgggcctcacacgtactacaatggccattaacagagggaggcaaagccgcgaggcagagcaaaaccccaaaaatggtctcagttcggatcgtaggctgaaacccgcctgcgtgaagttggaattgctagtaatcgcggatcagcatgccgcggtgaatacgttcccgggccttgcacacaccgcccgtca

SEQ ID NO: 664 - DNA, 1356 bp, Artificial Sequence
  Synthetic polymer
gatgaacgctagctacaggcttaacacatgcaagtcgaacgaagcatttaagacagattacttcggtttgaagtcttttatgactgagtggcggacgggtgagtaacgcgtgggtaacctgcctcatacagggggatagcagctggaaacggctggtaataccgcataagcgcacggtatcgcatgatacagtgtgaaaaactccggtggtatgagatggacccgcgtctgattagctggttggtgaggtaacggcccaccaaggcgacgatcagtagccgacctgagagggtgaccggccacattgggactgagacacggcccagactcctacgggaggcagcagtggggaatattgcacaatggaggaaactctgatgcagcgacgccgcgtgagtgaagaagtagttcgctatgtaaagctctatcagcagggaagatagtgacggtacctgactaagaagctccggctaaatacgtgccagcagccgcggtaatacgtatggagcaagcgttatccggatttactgggtgtaaagggagtgtaggtggccaggcaagtcagaagtgaaagcccggggctcaaccccgggactgcttttgaaactgcagggctagagtgcaggaggggcaagtggaattcctagtgtagcggtgaaatgcgtagatattaggaggaacaccagtggcgacggcggcttgctggactgtaactgacactgaggctcgaaagcgtggggagcaaacaggattagataccctggtagtccacgccgtaaacgatgaatactaggtgtcggggcacataagtgcttcggtgccgcagcaaacgcaataagtattccacctggggagtacgttcgcaagaatgaaactcaaaggaattgacggggacccgcacaagcggtggagcatgtggtttaattcgaagcaacgcgaagaaccttaccaagtcttgacatcccactgaccggacagtaatgtgtccttcccttcggggcagtggagacaggtggtgcatggttgtcgtcagctcgtgtcgtgagatgttgggttaagtcccgcaacgagcgcaacccttatccttagtagccagcatttcaggtgggcactctagggagactgccagggataacctggaggaaggtgggatgacgtcaaatcatcatgccccttatgacttgggctacacacgtgctacaatggcgtaaacaaagtgaagcaaagctgtgaagccaagcaaatcacaaaaaataacgtctcagttcggattgtagtctgcaactcgactacatgaaagctggaaatcgctagtaatcgcagatcagaaatgctgcggtgaaatacgttcccggg

SEQ ID NO: 665 - DNA, 1324 bp, Artificial Sequence
  Synthetic polymer
tttgatcctggctcaggatgaacgctggcggcgtgcctaacacatgcaagtcgagcgatctcttcggagagagcggcggacgggtgagtaacgcgtgggtaacctgccctgtacacacggataacataccgaaaggtatgctaatacgggataatatataagagtcgcatgacttttatatcaaagatttttcggtacaggatggacccgcgtctgattagcttgttggcggggtaacggcccaccaaggcgacgatcagtagccgacctgagagggtgatcggccacattggaactgagacacggtccaaactcctacgggaggcagcagtggggaatattgcacaatgggcgcaagcctgatgcagcaacgccgcgtgagcgatgaaggccttcgggtcgtaaagctctgtcctcaaggaagataatgacggtacttgaggaggaagccccggctaactacgtgccagcagccgcggtaatacgtaggtggcgagcgttatccggatttactgggcgtaaagggagcgtaggcggatgattaagtgggatgtgaaatacccgggctcaacttgggtgctgcattccaaactggttatctagagtgcaggagaggagagtggaattcctagtgtagcggtgaaatgcgtagagattaggaagaacaccagtagcgaaggcggctttctggactgtaactgacgctgaggcacgaaagcgtggggagcaaacaggattagataccctggtagtccacgctgtaaacgatgagtactaggtgtcggaggttacccccttcggtgccgcagctaacgcattaagtactccgcctggggagtacgcacgcaagtgtgaaactcaaaggaattgacggggacccgcacaagtagcggagcatgtggtttaattcgaagcaacgcgaagaaccttacctaggcttgacatccttctgaccgaggactaatctcctctttccctccggggacagaagtgacaggtggtgcatggttgtcgtcagctcgtgtcgtgagatgttgggttaagtcccgcaacgagcgcaacccttgtctttagttgccatcattaagttgggcactctagagagactgccagggataacctggaggaaggtggggatgacgtcaaatcatcatgccccttatgcctagggctacacacgtgctacaatgggtggtacagagggcaaccaaaccgtgaagtggagcaaatcccttaaagccattctcagttcggattgtaggctgaaactcgcctacatgaagctggagtaaaaagtaatcgcagatcagaatgctgcggtgaa

SEQ ID NO: 666 - DNA, 1368 bp, Artificial Sequence
  Synthetic polymer
agagtttgatcctggctcaggacgaacgctggcggcacgcctaacacatgcaagtcgaacggagaatttaggtttacttgaattcttagtggcggacgggtgagtaacacgtgagcaacctgcctttgagagagggatagcttctggaaacggatggtaatacctcataacatatatttaaggcatcttagatatatcaaagatttatcactcaaagatgggctcgcgtctgattagctagatggtgaggtaacggcccaccatggcaacgatcagtagccggactgagaggttgaacggccacattgggactgagacacggcccagactcctacgggaggcagcagtggggaatattgcacaatgggggaaaccctgatgcagcgatgccgcgtggaggaagaaggttttcggattgtaaactcctgtcttaagggacgataatgacggtaccttaggaggaagctccggctaactacgtgccagcagccgcggtaatacgtagggagcgagcgttgtccggaattactgggtgtaaagggagcgtaggcgggatggcaagtcagatgtgaaaactatgggctcaacccatagactgcatttgaaactgttgttcttgagtgaagtagaggtaagcggaattcctagtgtagcggtgaaatgcgtagatattaggaggaacatcggtggcgaaggcggcttactgggcttttactgacgctgaggctcgaaagcgtggggagcaaacaggattagataccctggtagtccacgctgtaaacgatgattactaggtgtggggggactgaccccttccgtgccgcagttaacacaataagtaatccacctggggagtacggccgcaaggttgaaactcaaaggaattgacgggggcccgcacaagcagtggagtatgtggtttaattcgaagcaacgcgaagaaccttaccaggtcttgacatcgtatgcataacatagagatatgtgaaatcccttcggggacatatagacaggtggtgcatggttgtcgtcagctcgtgtcgtgagatgttgggttaagtcccgcaacgagcgcaacccttactattagttgctacgcaagagcactctaataggactgccgttgacaaaacggaggaaggtggggatgacgtcaaatcatcatgccccttatgacctgggctacacacgtactacaatggcaattaacaaagaggagcgaaatcgcgaggtggagcaaatctccaaaaattgtcccagttcagattgcaggctgaaactcgcctgcatgaagtcggaattgctagtaatcgcagatcagcatgctgcggtgaatacgttcccgggccttgcacacaccgcccgtca

SEQ ID NO: 667 - DNA, 1351 bp, Artificial Sequence
  Synthetic polymer
  misc_feature (735)..(735): n is a, c, g, or t
gatgaacgctggcggcgtgcttaacacatgcaagtcgaacgggaaacatttcattgaggcttcggcggatttgatctgtttctagtggcggacgggtgagtagcgcgtgggtaacctgccttatactgggggataacagccagaaatggatgctaataccgcataagcgcacagaaccgcatggttccgtgtgaaaaactccggtggtataagatggacccgcgttggattagctagttggcagggcagcggcccaccaaggcgacgatcagtagccggcctgagagggtgaacggccacattgggactgagacacggcccaaactcctacgggaggcagcagtggggaatattgcacaatgggggaaaccctgatgcagcgacgccgcgtgagtgatgaagtatttcggtatgtaaaactctatcagcagggaagataatgacggtacctgactaagaagcaccggctaaatacgtgccagcagccgcggtaatacgtatggtgcaagcgttatccggatttactgggtgtaaagggtgcgtaggtggtatggcaagtcagaagtgaaaggctggggctcaaccccgggactgcttttgaaactgtcaaactagagtacaggagaggaaagcggaattcctagtgtagcggtgaaatgcgtagatattaggaggaacaccagtggcgaaggcggctttctggactgaaactgacactgaggcacgaaagcgtgnggagcaaacaggattagataccctggtagtccacgccgtaaacgatgaatactaggtgtcgggcagcatagctgttcggtgccgcagcaaacgcattaagtattccacctggggagtacgttcgcaagaatgaaactcaaaggaattgacggggacccgcacaagcggtggagcatgtggtttaattcgaagcaacgcgaagaaccttaccaggtcttgacatcccgatgaccgcttcttaatcgaagcttttcttcggaacatcggagacaggtggtgcatggttgtcgtcagctcgtgtcgtgagatgttgggttaagtcccgcaacgagcgcaacccctattttcagtagccagcattttggatgggcactctggagagactgcccgggataaccgggaggaaggtggggatgacgtcaaatcatcatgccccttatgatctgggctacacacgtgctacaatggctgttacagagagaagcgaatccgcgaggaagagcaaacctcaaaaaggcagtctcagttcggattgtagtctgcaactcgactacatgaagctggaatcgctagtaatcgcgaatcagaatgtcgcggtgaatacgttcccgggtct

SEQ ID NO: 668 - DNA, 1346 bp, Artificial Sequence
  Synthetic polymer
gatgaacgctggcggcgtgcttaacacatgcaagtcgaacgaagatgccggagtgcttgcactttggcagactgagtggcggacgggtgagtaacgcgtgggtaacctgccttatacagggggataacagttggaaacgactgctaataccgcataagcgcacggtatcgcatgatacagtgtgaaaaactccggtggtataagatggacccgcgtctgattagcttgttggtgaggtaacggcccaccaaggcgacgatcagtagccggcctgagagggtgaacggccacattgggactgagacacggcccaaactcctacgggaggcagcagtggggaatattgcacaatgggggaaaccctgatgcagcgacgccgcgtgagtgatgaagtatttcggtatgtaaaactctatcagcagggaagataatgacggtacctgactaagaagcaccggctaaatacgtgccagcagccgcggtaatacgtatggtgcaagcgttatccggatttactgggtgtaaagggtgcgtaggtggtatggcaagtcagaagtgaaaggctggggctcaaccccgggactgcttttgaaactgtcaaactagagtacaggagaggaaagcggaattcctagtgtagcggtgaaatgcgtagatattaggaggaacaccagtggcgaaggcggctttctggactgaaactgacactgaggcacgaaagcgtggggagcaaacaggattagataccctggtagtccacgccgtaaacgatgaatactaggtgtcgggcagcatagctgttcggtgccgcagcaaacgcattaagtattccacctggggagtacgttcgcaagaatgaaactcaaaggaattgacggggacccgcacaagcggtggagcatgtggtttaattcgaagcaacgcgaagaaccttaccaagtcttgacatcccactgaccggacagtaatgtgtccttcccttcggggcagtggagacaggtggtgcatggttgtcgtcagctcgtgtcgtgagatgttgggttaagtcccgcaacgagcgcaacccttatccttagtagccagcagttcggctgggcactctagggagactgccagggataacctggaggaaggtggggatgacgtcaaatcatcatgccccttatgacttgggctacacacgtgctacaaatggcgtaaacaaagtgaagcgagagtgtgagcttaagcaaatcaacaaaaaataacgtctcagttcggattgtagtctgcaaactcgactacatgaagctggaatcgctagtaatcgcaaatcagaaatgctgcggtaaatacgttcccgggtc

SEQ ID NO: 669 - DNA, 1450 bp, Artificial Sequence
  Synthetic polymer
gatgaacgctagcggcaggcttaacacatgcaagtcgaggggcagcataatgaagtagcaatacggaattgatggcgaccggcgcacgggtgcgtaacgcgtatgaaacctacctctaacagggggataacactgagaaattggtactaataccccataacacttcggagggcatcctctggggttgaaagttccggcggttagagatggacatgcgttgtattagctagatggtgaggtaatggctcaccatggcggcgatacatagggggactgagaggttaaccccccacattggtactgagacacggaccaaactcctacgggaggcagcagtgaggaatattggtcaatggacgcaagtctgaaccagccatgccgcgtgcaggatgacggctctatgagttgtaaactgcttttgtacaagggtaaacctcggtacgtgtaccgagctgaaagtactgtacgaataaggatcggctaactccgtgccagcagccgcggtaatacggaggatccaagcgttatccggatttattgggtttaaagggtgcgtaggcggattgataagttagaggtgaaagctcggggctcaactccggaactgcctctaatactgttaatctagagagtagatgcggtaggcggaatgtatggtgtagcggtgaaatgcttagagatcatacagaacaccgattgcgaaggcagcttaccaaactatgtctgacgttgaggcacgaaagcgtggggagcaaacaggattagataccctggtagtccacgcagtaaacgatgatagctcgttgtcggcgatacacagtcggtgacttagagaaatcgataagctatccacctggggagtacgttcgcaagaatgaaactcaaaggaattgacgggggcccgcacaagcggaggaacatgtggtcttaattcgatgatacgcgaggaaccttacccgggcttgaaagttagtgacggacttggaaacaggtcttcccttcggggcacgaaactaggtgctgcatggttgtcgtcagctcgtgccgtgaggtgtcgggttaagtcccataacgagcgcaacccctactgatagttgccatcaggttaagytgggcactctatcgggactgcctctgtaakgaggagggtggggatgacgtcaaatcagcacggcccttacgtccggggcgacacacgtgttacaatggtaggtacagagggcagccacccagcgatggggagcaaatctcgaaagcctatytcagttcggattggaggctgaaactcgcctccatgaagttggattcgctagtaatcgcgcatcagccatggcgcggtgaatacgttcccgggccttgtacacaccgcccgtcaagccatgggagccgggggtgcctgaagttcgtgaccgcaaggagcgacctagggcaaaactggtgactggggcta

SEQ ID NO: 670 - DNA, 1385 bp, Artificial Sequence
  Synthetic polymer
agagtttgatcctggctcaggatgaacgctggcggcgtgcttaacacatgcaagtcgaacgaagcactcaggagcgacttcggtcaatcctgtttgacttagtggcggacgggtgagtaacgcgtgaggaacctgcctcgcagtggggaataacagttggaaacgactgctaataccgcataatgcagagagatcgcatggtctttctgccaaagatttatcgctgtgggatggcctcgcgtctgattagctagttggtgaggtaacggcccaccaaggcgacgatcagtagccggactgagaggttgatcggccacattgggactgagacacggcccagactcctacgggaggcagcagtggggaatattgggcaatgggcgcaagcctgacccagcaacgccgcgtgaaggaagaaggctttcgggttgtaaacttcttttattagggacgataatgacggtacctattgaataagctccggctaactacgtgccagcagccgcggtaatacgtagggagcaagcgttatccggatttactgggtgtaaagggcgtgtaggcgggactgcaagtcagatgtgaaaactatgggctcaactcatagcctgcatttgaaactgtagttcttgagtgctggagaggcaaatggaactcctagtgtagcggtgaaatgcgtagatattaggaagaacaccagtggcgaaggcgatttgctggacagtaactgacgctgaggcgcgaaagtgtggggagcaaacaggattagataccctggtagtccacaccgtaaacgatggatactaggtgtggggggtctaaccccctccgtgccgcagttaacacattaagtatcccacctggggagtacgatcgcaaggttgaaactcaaaggaattgacgggggcccgcacaagcggtggagcatgtggtttgattcgaagcaacgcgaagaaccttaccaagtcttgacatccccttgaaaaaccagtaatgtggttccctcttcggagcaagggagacaggtggtgcatggttgtcgtcagctcgtgtcgtgagatgttgggttaagtcccgcaacgagcgcaacccttatcctcagtagccagcagtaagatgggcactctgtggagactgccagggataacctggaggaaggcggggatgacgtcaaatcatcatgccccttatgatttgggctacacacgtgctacaatggcgtaaacaaagggaagcgagaccgcgaggtggagcaaatcccaaaaataacgtctcagttcggattgcaggctgcaactcgactgcgcgaagctggaatcgctagtaatcgcggatcagaatgccgcggtgaatacgttcccgggtcttgcacacaccgcccgtca

SEQ ID NO: 671 - DNA, 1370 bp, Artificial Sequence
  Synthetic polymer
agagtttgatcctggctcaggacgaacgctggcggcgtgcctaacacatgcaagtcgagcgagtggagttcttcggaacaaagctagcggcggacgggtgagtaacacgtgggcaacctgcctcatagaggggaatagcctcccgaaagggagattaataccgcataagattgtagcttcgcatgaagtagcaattaaaggagcaatccgctatgagatgggcccgcggcgcattagctagttggtgaggtaacggctcaccaaggcgacgatgcgtagccgacctgagagggtgatcggccacattgggactgagacacggcccagactcctacgggaggcagcagtggggaatattgcacaatgggggaaaccctgatgcagcaacgccgcgtgagtgatgacggcctcgggttgtaaagctctgtcttcagggacgataatgacggtacctgaggaggaagccacggctaactacgtgccagcagccgcggtaatacgtaggtggcgagcgttgtccggatttactgggcgtaaagggagcgtaggcggacttttaagtgagatgtgaaatacccgggctcaacttaggtgctgcatttcaaactggaagtctagagtgcaggagaggagaatggaattcctagtgtagcggtgaaatgcgtagagattaggaagaacaccagtggcgaaggcgattctctggactgtaactgacgctgaggctcgaaagcgtggggagcaaacaggattagataccctggtagtccacgccgtaaacgatgaatactaggtgtaggggttgtcatgacctctgtgccgccgttaacgcattaagtattccgcctggggagtacggtcgcaagattaaaactcaaaggaattgacgggggcccgcacaagcagcggagcatgtggtttaattcgaagcaacgcgaagaaccttacctacacttgacatcccttgcattactcttaatcgaggaaatcccttcggggacaaggtgacaggtggtgcatggttgtcgtcagctcgtgtcgtgagatgttgggttaagtcccgcaacgagcgcaacccttgtcgttagttactaccattaagttgaggactctagcgagactgcctgggttaaccaggaggaaggtggggatgacgtcaaatcatcatgccccttatgtgtagggctacacacgtgctacaatggctggtacagagagatgcaataccgcgaggtggagcaaaactttaaaaccagtctcagttcggattgtaggctgaaactcgcctacatgaagctggagttactagtaatcgcgaatcagaatgtcgcggtgaatacgttcccgggtcttgcactcaccgcccgtca

SEQ ID NO: 672 - DNA, 1339 bp, Artificial Sequence
  Synthetic polymer
gacgaacgctggcggcgcgcctaacacatgcaagtcgaacggagtcaagaggagcttgcttttcttgacttagtggcgaacgggtgagtaacgcgtgggtaacctgccttgtactgggggatagcagctggaaacggctggtaataccgcataagcgcacaatgttgcatgacatggtgtgaaaaactccggtggtataagatggacccgcgtctgattagctagttggtgagataacagcccaccaaggcgacgatcagtagccgacctgagagggtgaccggccacattgggactgagacacggcccagactcctacgggaggcagcagtggggaatattgcacaatggaggaaactctgatgcagcgacgccgcgtgagtgaagaagtaattcgttatgtaaagctctatcagcagggaagatagtgacggtacctgactaagaagctccggctaaatacgtgccagcagccgcggtaatacgtatggagcaagcgttatccggatttactgggtgtaaagggagtgtaggtggccatgcaagtcagaagtgaaaatccggggctcaaccccggaactgcttttgaaactgtaaggctagagtgcaggaggggtgagtggaattcctagtgtagcggtgaaatgcgtagatattaggaggaacaccagtggcgaaggcggctcgctggactgtaactgacactgaggctcgaaagcgtggggagcaaacaggattagataccctggtagtccacgccgtaaacgatgaatactaggtgtcggggcccataagggcttcggtgccgcagcaaacgcaataagtattccacctggggagtacgttcgcaagaatgaaactcaaaggaattgacggggacccgcacaagcggtggagcatgtggtttaattcgaagcaacgcgaagaaccttaccaagtcttgacatcctcttgaccggtcagtaatgtgacctttccttcgggacaagagtgacaggtggtgcatggttgtcgtcagctcgtgtcgtgagatgttgggttaagtcccgcaacgagcgcaacccctatccttagtagccagcagtaagatgggcactctagggagactgccagggataacctggaggaaggtggggatgacgtcaaatcatcatgccccttatgacttgggctacacacgtgctacaatggcgtaaacaaagtgaagcgaagtcgtgaggccaagcaaatcacaaaaataacgtctcagttcggattgtagtctgcaactcgactacatgaagctggaatcgctagtaatcgcggatcagaatgccgcggtgaatacgttcccgggtct

SEQ ID NO: 673 - DNA, 1390 bp, Artificial Sequence
  Synthetic polymer
ttcgcccttagagtttgatcctggctcaggacgaacgctggcggcgtgcctaacacatgcaagtcgaacggagatgtttatttcggtagatatcttagtggcgcacgggtgagtaacgcgtgaataacctgacccgaagagggggataacacctggaaacaagtgctaataccgcataagaccacggaccggcatcggtcagaggtcaaaggaggaatccgctttgggaggggttcgcgtcccattaggtagttggtgaggtaacggtccaccaagccgacgatgggtagccgagctgagaggctgatcggccacactggaactgagacacggtccagactcctacgggaggcagcagtggggaatattgggcaatgggcgcaagcctgacccagcaacgccgcgtgagggaagaaggttttcggattgtaaacctctgtcgcaggggacgaaggaagtgacggtaccctgtaagaaagccccggctaactacgtgccagcagccgcggtaatacgtagggggcgagcgttgtccggaattactgggcgtaaagggagcgtaggcggtcgattaagttagatgtgaaacccccgggcttaacttggggactgcatctaatactggttgacttagagtacaggagagggaagcggaattcctagtgtagcggtgaaatgcgtagatattaggaggaacaccagtggcgaagccggctttctggactgacactgacgctgaggctcgaaagcgtggggagcaaacaggattagataccctggtagtccacgctgtaaacgatgaatactaggtgtagggggtatcaactccctcttgtgccgcagcaaacgcaataagtattccgcctggggagtacggccgcaaggttgaaactcaaaggaattgacgggggcccgcacaagcagcggagcatgtggtttaattcgacgcaacgcgaagaaccttaccaaggcttgacatctacttaaagtcatggaaacatgatgtctcttcggaggaagtaagacaggtggtgcatggttgtcgtcagctcgtgtcgtgagatgttgggttaagtcccgcaacgagcgcaacccctgttgccagttaccagcacgtaaaggtggggactctggtaagactgccggggacaactcggaggaaggtggggacgacgtcaaatcatcatgccccttatgtcttgggctacacacgtgctacaatggctataacaaagggaagcgaccccgtaaggggaagcggatctcagaaaagcagtctcagttcggattgtgggctgcaacccgcccacatgaagttggagttgctagtaatcgcggatcagcatgccgcggtgaatacgttcccgggccttgcactcaccgcccgtca

SEQ ID NO: 674 - DNA, 1335 bp, Artificial Sequence
  Synthetic polymer
gacgaacgctggcggcacgcctaacacatgcaagtcgaacggagaaaatgatttcggttattttcttagtggcggacgggtgagtaacacgtgaggaacctgcctctgagagtgggatagcttctggaaacggatggtaataccgcataacatagcgaaaccgcatgattttgctatcaaagtatttcgctcagagatggcctcgcgtctgattagatagttggtgaggtaacggctcaccaagtcgacgatcagtagccggactgagaggttgaacggccacattgggactgagacacggcccagactcctacgggaggcagcagtgggggatattgcacaatgggggaaaccctgatgcagcgatgccgcgtggaggaagaaggttttcggattgtaaactcctgtcgtaagggaagagaaaggactgtaccttacaagaaagctccggctaactacgtgccagcagccgcggtaatacgtagggagcgagcgttgtccggaatgactgggtgtaaagggagcgtaggcgggatggcaagtcagatgtgaaacctgagggctcaaccttcagactgcatttgaaactgctgttcttgagtgaagtagaggtaagcggaattcctggtgtagcggtgaaatgcgtagagatcaggaggaacatcggtggcgaaggcggcttactgggcttttactgacgctgaggctcgaaagcgtggggagcaaacaggattagataccctggtagtccacgctgtaaacgatgattactaggtgtggggggattgaccccttccgtgccgcagttaacacaataagtaatccacctggggagtacgaccgcaaggttgaaactcaaaggaattgacgggggcccgcacaagcagtggagtatgtggtttaattcgaagcaacgcgaagaaccttaccaggtcttgacatcgagtgacgtatccagagatggatatttccttcgggacacaaagacaggtggtgcatggttgtcgtcagctcgtgtcgtgagatgttgggttaagtcccgcaacgagcgcaacccttatcattagttgctacgcaagagcactctaatgagactgccgttgacaaaacggaggaaggtggggatgacgtcaaatcatcatgccccttatgacctgggctacacacgtactacaatggcgatcgaacagagggaagcaagacagcgatgtggagccgatcccaaaaaatcgccccagttcagattgcaggctgcaaactcgcctgcatgaaagttcggaaattgctagttaatcgcagaatcagcttgctgcggtaattacgtttcccgggcct

SEQ ID NO: 675 - DNA, 1387 bp, Artificial Sequence
  Synthetic polymer
agagtttgatcctggctcaggatgaacgctggcggcgtgcttaacacatgcaagtcgaacggggcacccccaaaggagttttcggacaactgcggggaatgcctagtggcggacgggtgagtaacgcgtgagcaacctgccttggagtggggaataacagatggaaacatctgctaataccgcataatgcagttgggccacatggctctgactgccaaagatttatcgctctgagatgggctcgcgtctgattagctagttggtggggcaacggcccaccaaggcgacgatcagtagccggactgagaggttggccggccacattgggactgagacacggcccagactcctacgggaggcagcagtggggaatattgggcaatgggcgcaagcctgacccagcaacgccgcgtgaaggaagaaggctttcgggttgtaaacttcttttctcagggacgaacagatgacggtacctgaggaataagccacggctaactacgtgccagcagccgcggtaatacgtaggtggcaagcgttatccggatttactgggtgtaaagggcgtgtaggcggggacgcaagtcagatgtgaaaaccacgggctcaacctgtggcctgcatttgaaactgtgtttcttgagtactggagaggcagacggaattcctagtgtagcggtgaaatgcgtagatattaggaggaacaccagtggcgaaggcggtctgctggacagcaactgacgctgaggcgcgaaagcgtggggagcaaacaggattagataccctgrtagtccacgctgtaacgatggatactaggtgtggggggactgaccccctcmgtgccgcagttaacacaataagtatcccacctggggagtacgatcgcaaggttgaaactcaaaggaattgacgggggcccgcacaagcggtggagtatgtggtttaattcgaagcaacgcgaagaaccttaccagggcttgacatcccggcgaccggtgtagagatacactttcttcttcggaagcgccggtgacaggtggtgcatggttgtcgtcagctcgtgtcgtgagatgttgggttaagtcccgcaacgagcgcaacccttattgttagttgctacgcaagagcactctagcgagactgccgttgacaaaacggaggaaggtggggacgacgtcaaatcatcatgccccttatgtcctgggccacacacgtactacaatggtggccaacagagggaagcaaaaccgcgaggtggagcaaatccctaaaagccatcccagttcggatcgcaggctgcaacccgcctgcgtgaagttggaatcgctagtaatcgcggatcagcatgccgcggtgaatacgttcccgggccgtgtacacaccgcccgtc

SEQ ID NO: 676 - DNA, 1392 bp, Artificial Sequence
  Synthetic polymer
agagtttgcttctggctcaggacgaacgctggcggcgtgcctaacacatgcaagtcgaacgaagctctgcgatacaagacttcggtcaagttgaacggatgacttagtggcggacgggtgagtaacgcgtgaggaacctgcctttcagtggggacaacagttggaaacgactgctaataccgcataatgtattctgaccgcatgatcggaataccaaagatttattgctgaaagatggcctcgcgtctgattagatagttggtgaggtaacggctcaccaagtcgacgatcagtagccggactgagaggttgaacggccacattgggactgagatacggcccagactcctacgggaggcagcagtggggaatattgggcaatgggggaaaccctgacccagcaacgccgcgtgaaggaagaaggctttcgggttgtaaacttcttttaccagggacgaaggacgtgacggtacctggagaaaaagccacggctaactacgtgccagcagccgcggtaatacgtaggtggcaagcgttgtccggatttactgggtgtaaagggcgtgtaggcggagaagcaagtcagaagtgaaatccatgggcttaacccatgaactgcttttgaaactgtttcccttgagtatcggagaggcaggcggaattcctagtgtagcggtgaaatgcgtagatattaggaggaacaccagtggcgaaggcggcctgctagacgacaactgacgctgaggcgcgaaagcgtggggagcaaacaggattagataccctggtagtccacgctgtaaacgatgaatactaggtgtgggaggactgaccccttccgtgccgcagcaaacgcaataagtattccacctggggagtacgttcgcaagaatgaaactcaaaggaattgacggggacccgcacaagcggtggagcatgtggtttaattcgaagcaacgcgaagaaccttaccaggtcttgacatcccactgaccgctctttaatcggagcttttcttcggaacagtggtgacaggtggtgcatggttgtcgtcagctcgtgtcgtgagatgttgggttaagtcccgcaacgagcgcaacccctatttccagtagccagcagtaagatgggaactctggagagactgccggggataacccggaggaaggtggggacgacgtcaaatcatcatgccccttatgatctgggctacacacgtgctacaatggcgttcacaaagggaagcgatactgtgaggtggagcaaaccccaaaaaggacgtctcagttcggattgtagtctgcaactcgactacatgaagctggaatcgctagtaatcgcgaatcagaatgtcgcggtgaatacattcccgggtcttgcactcaccgcccgtca

SEQ ID NO: 677 - DNA, 1341 bp, Artificial Sequence
  Synthetic polymer
agagtttgatcctggctcaggacgaacgctggcggcgtgcctaacacatgcaagtcgaacggaagcaaagatttcggtttttgctttagtggcgaacgggtgagtaacgcgtgaggaacctgcctttcagtgggggacaacagttggaaacgactgctaataccgcataatgcttttgagtggcatcacttaaaagccaaagatttattgctgaaagatggcctcgcgtctgattagctagttggcggggtaacggcccaccaaggcgacgatcagtagccggtctgagaggatgaacggccacattgggactgagatacggcccagactcctacgggaggcagcagtggggaatattgggcaatgggggaaaccctgacccagcaacgccgcgtgaaggaagaaggccttcgggttgtaaacttcttttaccaggggcgaaagaaatgacggtacctggagaaaaagcaacggctaactacgtgccagcagccgcggtaatacgtaggttgcgagcgttgtccggatttactgggtgtaaagggcgtgtaggcggagatgcaagttgggagtgaaatccatgggctcaacccatgagctgcttccaaaactgtatcccttgagtatcggagaggcaagcggaattcctagtgtagcggtgaaatgcgtagatattaggaggaacaccagtggcgaaggcggcttgctggacgacaactgacgctgaggcgcgaaagcgcggggagcaaacaggattagataccctggtagtccacgctgtaaacgatgaatactaggtgtgggaggactgaccccttccgtgccgcagttaacacaataagtattccgcctggggagtacgaccgcaaggttgaaactcaaaggaattgacgggggcccgcacaagcagtggattatgtggtttaattcgacgcaacgcgaagaaccctaccaggacttgacatccaactaacgaagtagagatacattaggtgcccttcggggaaagttgagacaggtggtgcatggttgtcgtcagctcgtgtcgtgagatgttgggttaagtcccgcaacgagcgcaacccttattgccagttactacgttaagaggactctggcgagactgccgttgacaaaacggaggaaggtggggatgacgtcaaatcatcatgccctttatgacctgggctacacacgtactacaatggcgttaaacaaagagaagcaagaccgcgaggtggagcaaaactcaaaaacaacgtcccagttcggactgcaggctgcaactcgcctgcacgaagtcggaattgctagtaatcgtggatcagcatgccacggtga

SEQ ID NO: 678 - DNA, 1410 bp, Artificial Sequence
  Synthetic polymer
agagtttgatcctggctcaggatgaatgctggcggcgtgcctaacacatgcaagtcgagcgagaattccttaactgattctccggatgattttaaggaaggaaagcggcggacgggtgagtaacgcgtaggcaacctgcctctcacagagggatagccactggaaacggtgattaaaacctcataacgccactccgggacatcccggaatggccaaagatttatcggtgagagatgggcctgcgtctgattagctggttggcggggtaacggcccaccaaggcgacgatcagtagccgacctgagagggtgatcggccacattggaactgagacacggtccaaactcctacgggaggcagcagtggggaatattgcacaatgggcgaaagcctgatgcagcaacgccgcgtgaaggatgaaggccttcgggtcgtaaacttctgttataagggaagaacgactttagtaggaaatggctaaagtgtgacggtaccttatgagaaagccacggctaactacgtgccagcagccgcggtaatacgtaggtggcaagcgttatccggaattattgggcgtaaagagcgcgcaggtggttgattaagtctgatgtgaaagcccacggcttaaccgtggagggtcattggaaactggtcgacttgagtgcagaagagggaagtggaattccatgtgtagcggtgaaatgcgtagagatatggaggaacaccagtggcgaaggcggcttcctggtctgcaactgacactgaggcgcgaaagcgtggggagcaaacaggattagataccctggtagtccacgccgtaaacgatgagcactaggtgtcggggtcgcaagacttcggtgccgcagttaacgcaataagtgctccgcctggggagtacgtacgcaagtatgaaactcaaaggaattgacggggacccgcacaagcagcggagcatgtggtttaattcgaagcaacgcgaagaaccttaccagggcttgacatccctctgacaggtccttaaccggacccttcttcggacagaggagacaggtggtgcatggttgtcgtcagctcgtgtcgtgagatgttgggttaagtcccgcaacgagcgcaacccttgctgttagttgccatcattaagttgggcactctaacgggactgccggggataactcggaggaaggtggggatgacgtcaaatcatcatgccccttatgttctgggctacacacgtgctacaatggtggttacaaagaggagcgagcatgcaaatgtaagcggatctcaaaaaagccatcccagttcggattgtgggctgcaacccgcccacatgaagttggagttgctagtaatcgcggatcagcatgccgcggtgaatacgttcccgggccttgcacacaccgcccgtca

SEQ ID NO: 679 - DNA, 1396 bp, Artificial Sequence
  Synthetic polymer
agagtttgatcctggctcaggatgaacgctggcggcgtgcttaacacatgcaagtcgaacgaagcatttacgacagatttcttcggaatgaagttgtttatgactgagtggcggacgggtgagtaacgcgtgggtaacctgcctcatacagggggatagcagctggaaacggctggtaataccgcacaagcgcacagtatcgcatgatatagtgtgaaaaactccggtggtatgagatggacccgcgtctgattagctagttggtgaggtaacggcccaccaaggcgacgatcagtagccgacctgagagggtgaccggccacattgggactgagacacggcccagactcctacgggaggcagcagtggggaatattgcacaatggaggaaactctgatgcagcgacgccgcgtgagtgaagaagtatttcggtatgtaaagctctatcagcagggaagatagtgacggtacctgactaagaagctccggctaaatacgtgccagcagccgcggtaatacgtatggagcaagcgttatccggatttactgggtgtaaagggagtgtaggtggcatcgcaagtcagaagtgaaagcccggggctcaaccccgggactgcttttgaaactgcggagctagagtgcaggaggggtgagtggaattcctagtgtagcggtgaaatgcgtagatattaggaggaacaccagtggcgaaggcggctcactggactgtaactgacactgaggctcgaaagcgtggggagcaaacaggattagataccctggtagtccacgccgtaaacgatgaatactaggtgtcggggctcataagagcttcggtgccgcagcaaacgcaataagtattccacctggggagtacggccgcaaggttgaaactcaaaggaattgacgggagcccgcacaagcagtggagtatgtggtttaattcgacgcaacgcgaaaaaccttaccaaggattgacatccacggaatcggacgtaatggtctgagtgcctcttcggaggaatcgtgagacaggtggtgcatggttgtcgtcagctcgtgtcgtgagatgttgggttaagtcccgcaacgagcgcaacccttatccttagtagccagcagtaagatgggcactctagggagactgccagggataacctggaggaaggtggggatgacgtcaaatcatcatgccccttatgacttgggctacacacgtgctacaatggcgtaaacaaagtgacgcgagagtgtgagcttaagcaaatcacaaaaataacgtctcagttcggattgtagtctgcaactcgactacatgaagctggaatcgctagtaatcgcagatcagaatgctgcggtgaatacgttcccgggtcttgcacacaccgcccgtca

SEQ ID NO: 680 - DNA, 1380 bp, Artificial Sequence
  Synthetic polymer
agagtttgatcctggctcaggatgaacgctggcggcgtgcctaacacatgcaagtcgaacggacttttgatgaaacctagtgatttgaaagttagtggcggacgggtgagtaacgcgtgggtaacctgccctataccgggggataacacttagaaataggtgctaataccgcataagcgcacggagtcgcatgactttgtgtgaaaaactccggtggtataggatggacccgcgtctgattagctagttggtgaggtaacggcccaccaaggcgacgatcagtagccggcctgagagggtgaccggccacattgggactgagacacggcccaaactcctacgggaggcagcagtggggaatattgcacaatgggggaaaccctgacccagcaacgccgcgtgaaggaagaaggctttcgggttgtaaacttcttttaccagggacgaaggacgtgacggtacctggagaaaaagcaacggctaactacgtgccagcagccgcggtaatacgtaggttgcaagcgttgtccggatttactgggtgtaaagggcgtgtaggcggagaagcaagttgggagtgaaatccatgggctcaacccatgaactgctctcaaaactgtttcccttgagtatcggagaggcaagcggaattcctagtgtagcggtgaaatgcgtagatattaggaggaacaccagtggcgaaggcggcttgctggacgacaactgacgctgaggcgcgaaagcgtggggagcaaacaggattagataccctggtagtccacgctgtaaacgatgaatactaggtgtgggagggactgaccccttccgtgccgcagttaacacaataagtattccacctggggagtacgaccgcaaggtggaaactcaaaggaattgacgggggcccgcacaagcagtggattatgtggtttaattcgacgcaacgcgaagaaccttaccaggatttgacatcccactaacgaagtagagatacattaggtgcccttcggggaaagtggagacaggtggtgcatggttgtcgtcagctcgtgtcgtgagatgttgggttaagtcccgcaacgagcgcaacccctattgttagttgctacgcaagagcactctagcgagactgccgttgacaaaacggaggaaggcggggacgacgtcaaatcatcgtgccccttatgtcctgggctacacacgtaatacaatggcggtcaacagagggaggcaataccgcgaggtggagcaaatccctaaaaattgtcccagttcagattgtaggctgcaactcgcctacatgaagtcggaattgctagtaatcgcagatcagcatgctgcggtgaatacgttcccgggccttgcacacaccgcccgtca

SEQ ID NO: 681 - DNA, 1371 bp, Artificial Sequence
  Synthetic polymer
agagtttgatcctggctcaggatgaacgctggcggcgtgcttaacacatgcaagtcgagcgagaaaagttcttcggagcttttttagcggcggacgggtgagaaacacgtgggcaacctgcctcatagaggggaatagccttccgaaaggaagattaataccgcataacattgttgaaaggcatcttttaacaatcaaaggagcaatccgctatgagatgggcccgcggcgcattagctagttggtgaggtaacggctcaccaaggcgacgatcagtagccggtctgagaggatgaacggccacattggaactgagacacggtccaaactcctacgggaggcagcagtggggaatattgcacaatgggggaaaccctgatgcagcaacgccgcgtgagtgaagaagtatttcggtatgtaaagctctatcagcagggaagataatgacggtacctgactaagaagctccggctaaatacgtgccagcagccgcggtaatacgtatggagcaagcgttatccggatttactgggtgtaaagggtgcgtaggtggcagtgcaagtcagatgtgaaaggccggggctcaaccccggagctgcatttgaaactgcatagctagagtacaggagaggcaggcggaattcctagtgtagcggtgaaatgcgtagatattaggaggaacaccagtggcgaaggcggcctgctggactgttactgacactgaggcacgaaagcgtggggagcaaacaggattagataccctggtagtccacgccgtaaacgatgaatactaggtgtcggggccgtataggcttcggtgccgtcgcaaacgcagtaagtattccacctggggagtacgttcgcaagaatgaaactcaaaggaattgacggggacccgcacaagcggtggagcatgtggtttaattcgaagcaacgcgaagaaccttaccaggtcttgacatccttctgaccactccgtaatgggagtcttccttcgggacagaagagacaggtggtgcatggttgtcgtcagctcgtgtcgtgagatgttgggttaagtcccgcaacgagcgcaacccttattgttagttgatacatttagttgatcgctctagcgagactgccgttgacaaaacggaggaaggtggggacgacgtcaaatcatcatgccccttatgatctgggcgacacacgtgctacaatggcggtcacaaagtgaggcaaacctgcgagggggagcaaaccacaaaaaggccgtcccagttcggactgtagtctgcaacccgactacacgaagctggaatcgctagtaatcgcgaatcagaatgtcgcggtgaatacgttcccgggtcttgcactcaccgcccgtca

SEQ ID NO: 682 - DNA, 1386 bp, Artificial Sequence
  Synthetic polymer
ttcgcccttagagtttgatcctggctcaggatgaacgctggcggcgtgcttaacacatgcaagtcgagcgagaaaagttcttcggagcttttctagcggcggacgggtgagtaacacgtgggcaacctgcctcatagaggggaatagccttccgaaaggaaggttaataccgcataacattgttgaaaggcatcttttaacaatcaaaggagcaatccgctatgagatgggcccgcggcgcattagctagttggtgaggtaacggctcaccaaggcgacgatgcgtagccgacctgagtgggtgatcggccacattggaactgagacacggtccagactcctacgggaggcagcagtagggaatattgggcaatgggcgcaagcctgacccagcaacgccgcgtgagggaagaaggttttcggattgtaaacctctgtcctatgtgacgaaggaagtgacggtagcataggaggaagccccggctaactacgtgccagcagccgcggtaatacgtagggggcgagcgttgtccggaattactgggcgtaaagggtgcgtaggcggtttggtaagttggatgtgaaatacccgggcttaacttgggggctgcatccaatactgtcggacttgagtgcaggagaggaaagcggaattcctagtgtagcggtgaaatgcgtagatattaggaggaacaccggtggcgaaggcggctttctggactgtaactgacgctgaggcacgaaagcgtggggagcaaacaggattagataccctggtagtccacgccgtgaacgatgaatactaggtgtagggggtatagactccctctgtgccgcagcaaacgcaataagtattccgcctggggagtacggccgcaaggttgaaactcaaaggaattgacgggggcccgcacaagcagcggagcatgtggtttaattcgacgcaacgcgaaaaaccttaccaagacttgacatcctactaaactcatggaaacatgaggtgacttcggtcgagtagagacaggtggtgcatggttgtcgtcagctcgtgtcgtgagatgttgggttaagtcccgcaacgagcgcaacccctgttgccggttaccagcgagtaaagtcggggactccggtgagactgccgaggacaactcggaggaaggtggggacgacgtcaaatcatcatgccccttacgtcttgggctacacacgtgctacaatggctgtaacaaagggaagcgacagcgtaagctgaagcggatctcgaaaaggcagtcccagttcggattgtgggctgcaacccgcccacatgaagtcggagttgctagtaatcgcggatcagcatgccgcggtgaatacgttcccgggccttgcactcaccgcccgtca

SEQ ID NO: 683 - DNA, 1367 bp, Artificial Sequence
  Synthetic polymer
ttgatcctggctcaggacgaacgctgccggcacgcctaacacatgcaagtcgaacggagctgtttttggtttactgagacggcttagtggcggacgggtgagtaacacgtgggcaacctgcctttgagagagggatagcttttggaaacgaatggtaatacctcataacatagcgataccgcatggtaatgctatcaaagatttatcactcaaagatgggctcgcgtctgattagatagttggtgaggtaacggcccaccaagtcgacgatcagtagccggactgagaggttgaacggccacattgggactgagacacggcccagactcctacgggaggcagcagtggggaatattgcacaatggaggaaactctgatgcagcgatgccgcgtggaggaagaaggtcttcggattgtaaactcctgtcttaaaggacgataatgacggtactttaggaggaagctccggctaactacgtgccagcagccgcggtaaaacgtaggtggcgagcgttatccggatttactgggcgtaaagggagcgtaggcggatgattaagtgggatgtgaaatacccgggctcaacttgggtgctgcattccaaactggttatctagagtgcaggagaggagagtggaattcctagtgtagcggtgaaatgcgtagagattaggaagaacaccagtggcgaaggcgactctctggactgtaactgacgctgaggctcgaaagcgtggggagcaaacaggattagataccctggtagtccacgccgtaaacgatgaatactaggtgtgggggtttcaacacctccgtgccgccgctaacgcattaagtattccgcctggggagtacggtcgcaagataaaactcaaaggaattgatggggacccgcacaagtagcggagcatgtggtttaattcgaagcaacgcgaagaaccttacctacacttgacatcccttgcattactcttaatcgaggaaatcccttcggggacaaggtgacaggtggtgcatggttgtcgtcagctcgtgtcgtgagatgttgggttaagtcccgcaacgagcgcaacccttgtcgttagttactaccattaagttgaggactctagcgagactgcctgggttaaccaggaggaaggtggggatgacgtcaaatcatcatgccccttatgtgtagggctacacacgtgctacaatggctggtacagagagatgcaataccgcgaggtggagccaaactttaaaaccagtctcagttcggattgtaggctgaaactcgcctacatgaagctggagttactagtaatcgcgaatcagaatgtcgcggtgaatacgttcccgggtcttgcactcaccgcccgtca

SEQ ID NO: 684 - DNA, 1393 bp, Artificial Sequence
  Synthetic polymer
ttagagtttgatcctggctcaggatgaactctggcggcgtgcttaacacatgcaagtcgaacggaggacccttgacagagttttcggacgatggagaggaatccttagtggcggacgggtgagtaacgcgtgagcaatctaccttggagtggggaataacacagtgaaaactgtgctaataccgcataatacaactgtgtcgcatggcagtggttgtcaaagatttatcgctctgagatgagctcgcgtctgattagctagtaggcggggtaaaggcccacctaggcgacgatcagtagccggactgagaggttggccggccacattgggactgagacacggcccagactcctacgggaggcagcagtggggaatattgggcaatgggcgcaagcctgacccagcaacgccgcgtgaaggaagaaggctttcgggctgtaaacttcttttatgagggacgaaggaagtgacggtacctcatgaataagccacggctaactacgtgccagcagccgcggtaatacgtaggtggcgagcgttatccggatttactgggtgtaaagggcgtgtaggcgggattgcaagtcagatgtgaaaactatgggctcaacccatagcctgcatttgaaactgtagttcttgagtgctggagaggcaatcggaattccgtgtgtagcggtgaaatgcgtagatatacggaggaacaccagtggcgaaggcggattgctggacagtaactgacgctgaggcgcgaaagcgtggggagcaaacaggattagataccctggtagtccacgccgtaaacgatggataataggtgtggggggtctgaccccctccgtgccgcagttaacacaataagtatcccacctggggagtacgatcgcaaggttgaaactcaaaggaattgacgggggcccgcacaagcggtggagtatgtggtttaattcgaagcaacgcgaagaaccttaccagggcttgacatcctgctaacgaaacagagatgtattaggtgcccttcggggaaagcagagacaggtggtgcatggttgtcgtcagctcgtgtcgtgagatgttgggttaagtcccgcaacgagcgcaacccttattgttagttgctacgcaagagcactctagcgagactgccgttgacaaaacggaggaaggtggggacgacgtcaaatcatcatgccccttatgtcctgggctacacacgtaatacaatggcggtcaacagagggatgcaaaaccgtgaggtggagcgaacccctaaaagccgtcccagttcagatcgcagtctgcaacccgactgcgtgaagtcggaatcgctagtaatcgcggatcagcatgccgcggtgaatacgttcccgggccttgcacaaaccgcccgtca

SEQ ID NO: 685 - DNA, 1371 bp, Artificial Sequence
  Synthetic polymer
agagtttgatcctggctcaggatgaacgctggcggcgtgcttaacacatgcaagtcgaacggacgatgaagagcttgcttttcagagttagtggcggacgggtgagtaacgcgtgggtaacctgcctcatacagggggatagcagctggaaacggctgataaaaccgcataagcgcacagcatcgcatgatgcagtgtgaaaaactccggtggtatgagatggacccgcgtctgattagcttgttggtgaggtaagggcccaccaaggcgacgatcagtagccggcctgagagggtgaccggccacattgggactgagacacggcccaaactcctacgggaggcagcagtggggaatattgcacaatgggggaaaccctgatgcagcgacgccgcgtgaaggaagaagtatctcggtatgtaaacttctatcagcagggaagataatgacggtacctgactaagaagccccggctaactacgtgccagcagccgcggtaatacgtagggggcaagcgttatccggatttactgggtgtaaagggagcgtaggcggcggagcaagtcagaagtgaaagcccggggctcaaccccgggacggcttttgaaactgccctgcttgatttcaggagaggtaagcggaattcctagtgtagcggtgaaatgcgtagatattaggaggatcaccagtggcgaaggcggcttactggactgacaatgacgctgaggctcgaaagcgtggggagcaaacaggattagataccctggtagtccacgccgtaaacgatgaatactaggtgtcgggggccaaaaggcttccggtgccgcagcaaacgcaataagtattccacctggggagtacgttcgcaagaatgaaactcaaaggaattgacggggacccgcacaagcggtggagcatgtggtttaattcgaagcaacgcgaagaaccttaccaggccttgacatcccggtgaccgtcccgtaatggggacctctcttcggagcaccggtgacaggtggtgcatggttgtcgtcagctcgtgtcgtgagatgttgggttaagtcccgcaacgagcgcaacccttacggttagttgatacgcaagatcactctagccggactgccgttgacaaaacggaggaaggtggggacgacgtcaaatcatcatgccccttatgacctgggctacacacgtactacaatggcagtcatacagagggaagcaaaaccgcgaggtggagcaaatccctaaaagctgtcccagttcagattgtagtctgcaacccgactacacgaagctggaatcgctagtaatcgcgaatcagcatgtcgcggtgaatacgttcccgggtcttgcactcaccgcccgtca

SEQ ID NO: 686 - DNA, 1504 bp, Artificial Sequence
  Synthetic polymer
tagagtttgatcatggctcagattgaacgctggcggcaggcctaacacatgcaagtcgaacggtaacaggaatcagcttgctgattcgctgacgagtggcggacgggtgagtaatgtctgggaaactgcctgatggagggggataactactggaaacggtagctaataccgcataacgtcgcaagaccaaagagggggaccttcgggcctcttgccatcggatgtgcccagatgggattagctagtaggtggggtaatggctcacctaggcgacgatccctagctggtctgagaggatgaccagccacactggaactgagacacggtccagactcctacgggaggcagcagtggggaatattgcacaatgggcgcaagcctgatgcagccatgccgcgtgtatgaagaaggccttcgggttgtaaagtactttcagcgaggaggaaggtgttgtggttaataaccacagcaattgacgttactcgcagaagaagcaccggctaactccgtgccagcagccgcggtaatacggagggtgcaagcgttaatcggaattactgggcgtaaagcgcacgcaggcggtttgttaagtcagatgtgaaatccccgggctcaacctgggaactgcatttgaaactggcaagcttgagtctcgtagaggggggtagaattccaggtgtagcggtgaaatgcgtagagatctggaggaataccggtggcgaaggcggccccctggacgaagactgacgctcaggtgcgaaagcgtggggagcaaacaggattagataccctggtagtccacgctgtaaacgatgtcgacttggaggttgtgcccttgaggcgtggcttccggagctaacgcgttaagtcgaccgcctggggagtacggccgcaaggttaaaactcaaatgaattgacgggggcccgcacaagcggtggagcatgtggtttaattcgaagcaacgcgaagaaccttaccaggccttgacatccaatgaactttctagagatagattggtgccttcgggaacattgagacaggtgctgcatggctgtcgtcagctcgtgtcgtgagatgttgggttaagtcccgtaacgagcgcaacccttatcctttgttgccagcgattcggtcgggaactcaaaggagactgccagtgataaactggaggaaggtggggatgacgtcaagtcatcatggcccttacgagtagggctacacacgtgctacaatggcatatacaaagagaagcgacctcgcgagagcaagcggacctcataaagtatgtcgtagtccggattggagtctgcaactcgactccatgaagtcggaatcgctagtaatcgtagatcagaatgctacggtgaatacgttcccgggccttgtacacaccgcccgtcacaccatgggagtgggttgcaaaagaagtaggtagcttaaccttcgggagggcgcttaccactttgtgattcatgactggggtgaagtcgtaacaaggtaacc

SEQ ID NO: 687 - DNA, 1365 bp, Artificial Sequence
  Synthetic polymer
agagtttgatcctggctcaggatgaacgctggcggcgcgcctaacacatgcaagtcgaacggcacccaccctcgggtggaagcgagtggcgaacggctgagtaacacgtggagaacccgccccctcctccgggatagcctcgggaaaccgtgggtaataccggatgaccccgcagggccgcatggccccgcgggcaaagcccagacgggaggggatggctccgcggcccatcaggtagacggcggggtgacggcccaccgtgccgacgacgggtagccgggttgagagaccgaccggccagattgggactgagacacggcccagactcctacgggaggcagcagtggggaatcttgcgcaatggggggaaccctgacgcagcgacgccgcgtgcgggacgaaggccctcgggtcgtaaaccgctttcagcagggatgagacaagacggtacctgcagaagaagccccggctaactacgtgccagcagccgcggtaatacgtagggggcgagcgttatccggattcattgggcgtaaagcgcgcgtaggcggcccggcaggcagggggtcaaatggcggggctcaaccccgtcccgccccctgaaccgccgggctcgggtccggtaggggagggtggaacacccggtgtagcggtggaatgcgcagatatcgggtggaacaccggtggcgaaggcggccctctgggccgagaccgacgctgaggcgcgaaagctgggggagcgaacaggattagataccctggtagtcccagccgtaaacgatggacgctaggtgtggggggacgatccctccgtgccgcagccaacgcattaagcgtcccgcctggggagtacggccgcaaggctaaaactcaaaggaattgacgggggcccgcacaagcagcggagcatgtggcttaattcgaagcaacgcgaagaaccttaccagggcttgacatcaccgtgagccggcggagacgccggggccgaaaggagcggtgacaggtggtgcatggctgtcgtcagctcgtgtcgtgagatgttgggttaagtcccgcaacgagcgcaacccccgccgtatgttgccatcgggtaatgccgggcactcgtacgggaccgccggagccaatccggaggaaggcggggacgacgtcaagtcatcatgcccctcatgccctgggctgcacacgtgctacaatggccggtacaacgggccgccacgccgcgaggcggagcgaatccctcaaagccggccccagttcggatcgcaggctgcaacccgcctgcgtgaagccggagttgctagtaatcgcggatcagcatgccgcggtgaatacgttcccgggccttgcactcaccgcccgtca

SEQ ID NO: 688 - DNA, 1350 bp, Artificial Sequence
  Synthetic polymer
ttcgcccttagagtttgatcctggctcaggatgaacgctggcggcgtgcttaacacatgcaagtcgagcgagaaaagttcttcggagcttttctagcggcggacgggtgagtaacacgtgggcaacctgcctcatagaggggaatagccttccgaaaggaagattaataccgcataacattgttgaaaggcatcttttaacaatcaaaggagcaatccgctatgagatgggcccgcggcgcattagctagttggtgaggtaacggcccaccaagtcgacgataggtagccgatctgagaggatgaacggccacattggaattgagaacggtccagactcctacgggaggcagcagtggggaatattgggcaatggaggaaactctgacccagcaacgccgcgtgaatgaagaaggtcttcggattgtaaagttctgtgatgggggacgaagaaagtgacggtaccccaatagcaagccacggctaactacgtgccagcagccgcggtaatacgtaggtggcaagcgttgtccggaattattgggcgtaaagagcatgtaggcggttttttaagtctggagtgaaaatgcggggctcaaccccgtatggctctggatactggaagacttgagtgcaggagaggaaaggggaattcccagtgtagcggtgaaatgcgtagatattgggaggaacaccagtggcgaaggcgcctttctggactgtgtctgacgctgagatgcgaaagccagggtagcgaacaggattagataccctggtagtccacgccgtaaacgatgaatactaggtgtaggggccccaagcctctgtgccgccgctaacgcattaagtattccgcctggggagtacggtcgcaagattaaaactcaaaggaattgacggggacccgcacaagcagcggagcatgtggtttaattcgaagcaacgcgaagaaccttacctagacttgacatgtcctgaattaccagtaatgtgggaagttccttcgggaacaggaacacaggtggtgcatggttgtcgtcagctcgtgtcgtgagatgttgggttaagtcccgcaacgagcgcaacccttattgttagttggtaccattaagttgaccactctagcgagactgcccgggttaaccgggaggaaggtggggatgacgtcaaatcatcatgccccttatgtctagggctacacacgtgctacaatggcaagtacaaagagaagcaatactgtgaagtggagcaaaactcaaaaacttgtctcagttcggattgtaggctgaaactcgcctacatgaagctggagttgctagtaatcgcgaatcagaatgtcgcggtgaatacg

SEQ ID NO: 689 - DNA, 1374 bp, Artificial Sequence
  Synthetic polymer
agagtttgatcctggctcaggacgaacgctggcggcgtgcctaacacatgcaagtcgagcgatgaagttccttcgggaacggattagcggcggacgggtgagtaacacgtgggcaacctgccttatagaggggaatagccttccgaaaggaagattaataccgcataagattgtagcttcgcatgaagtagcaattaaaggagcaatccgctataagatgggcccgcggcgcattagctagttggtgaggtaacggctcaccaaggcgacgatgcgtagccgacctgagagggtgatcggccacattgggactgagacacggcccagactcctacgggaggcagcagtggggaatattgcacaatgggggaaaccctgatgcagcaatgccgcgtgagtgatgacggccttcgggttgtaaagctctgtcttcagggacgataatgacggtacctgaggaggaagccacggctaactacgtgccagcagccgcggtaatacgtaggtggcaagcgttgtccggatttactgggcgtaaagggagcgtaggcggatttttaagtgagatgtgaaatacccgggcttaacttgggtgctgcatttcaaactggaagtctagagtgcaggagaggagaagggaattcctagtgtagcggtgaaatgcgtagagattaggaagaacaccagtggcgaaggcgcttctctggactgtaactgacgctgaggctcgaaagcgtggggagcaaacaggattagataccctggtagtccacgccgtaaacgatgaatactaggtgtaggggttgtcatgacctctgtgccgccgctaacgcattaagtattccgcctggggagtccggtcgcaagattaaaactcaaaggaattgacggggacccgcacaagtagcggagcatgtggtttaattcgaagcaacgcgaagaaccttacctaagcttgacatcccactgatctctccctaatcggagatttcccttcggggacagtggtgacaggtggtgcatggttgtcgtcagctcgtgtcgtgagatgttgggttaagtcccgcaacgagcgcaacccttgcctttagttgccagcattaagttgggcactctagagggactgccgaggataactcggaggaaggtggggatgacgtcaaatcatcatgccccttatgcttagggctacacacgtgctacaatgggtggtacagagggttgccaaaccgtgaggtggagctaatcccttaaagccattctcagttcggattgtaggctgaaactcgcctacatgaagctggagttactagtaatcgcagatcagaatgctgcggtgaatgcgttcccgggtcttgtactcaccgcccgtca

SEQ ID NO: 690 - DNA, 1328 bp, Artificial Sequence
  Synthetic polymer
agagtttgatcctggctcaggatgaacgctggcggcgtgcctaacacatgcaagtcgagcgaacttcttcggaagtgagcggcggacgggtgagtaacgcgtgggtaacctgccctatacacacggataacgtaccgaaaggtacgctaatacgagataacatgtttttatcgcatggtaaaaatatcaaagctccggcggtataggatggacccgcgtctgattagctagttggtaaggtaacggcttaccaaggcgacgatcagtagccgacctgagagggtgatcggccacattggaactgagacacggtccaaactcctacgggaggcagcagtggggaatattgcacaatgggcgaaagcctgatgcagcaacgccgcgtgagcgatgaaggccttcgggtcgtaaagctctgtcctcaaggaagataatgacggtacttgaggaggaagccccggctaactacgtgccagcagccgcggtaatacgtagggggctagcgttatccggaattactgggcgtaaagggtgcgtaggtggtttcttaagtcagaggtgaaaggctacggctcaaccgtagtaagcctttgaaactgggaaacttgagtgcaggagaggagagtagaattcctagtgtagcggtgaaatgcgtagatattaggaggaataccagttgcgaaggcggctctctggactgtaactgacactgaggcacgaaagcgtggggagcaaacaggattagataccctggtagtccacgccgtaaacgatgagtactagctgtcggaggttacccccttcggtggcgcagctaacgcattaagtactccgcctgggaagtacgctcgcaagagtgaaactcaaaggaattgacggggacccgcacaagtagcggagcatgtggtttaattcgaagcaacgcgaagaaccttaccaagtcttgacatctgcctgaccgttccttaaccgggaccttccttcgggacaggcaagacaggtggtgcatggttgtcgtcagctcgtgtcgtgagatgttgggttaagtcccgcaacgagcgcaacccctatccttagtagccagcacatgaaggtgggcactctgaggagactgccagggataacctggaggaaggcggggatgacgtcaaatcatcatgccccttatgatttgggctacacacgtgctacaatggcgtaaacaaagggaagcgagtctgcgagggtaagcaaatctcaaaaataacgtcccagttcggactgcagtctgcaactcgactgcacgaagctggaatcgctagtaatcgcagatcggaatgccgcggtga

SEQ ID NO: 691 - DNA, 1388 bp, Artificial Sequence
  Synthetic polymer
ttcgcccttagagtttgatcctggctcaggacgaacgctggcggcgtgcctaacacatgcaagtcgaacggagatgtttatttcggtagacatcttagtggcgcacgggtgagtaacgcgtgaataacctgacccgaagagggggataacacctggaaacaagtgctaataccgcataagaccacggaccggcatcggtcagaggtcaaaggaggaatccgctttgggaggggttcgcgtcccattaggtagttggtgaggtaacggcccaccaagccgacgatgggtagccgagctgagaggctgatcggccacactggaactgagacacggtccagactcctacgggaggcagcagtggggaatattgggcaatgggcgcaagcctgacccagcaacgccgcgtgagggaagaaggttttcggattgtaaacctctgtcgcaggggacgaaggaagtgacggtaccctgtaagaaagccccggctaactacgtgccagcagccgcggtaatacgtagggggcgagcgttgtccggaattactgggcgtaaagggagcgtaggcggtcgattaagttagatgtgaaacccccgggcttaacttggggactgcatctaatactggttgacttagagtacaggagagggaagcggaattcctagtgtagcggtgaaatgcgtagagattaggaagaacaccagtggcgaaggcgattctctggactgtaactgacgctgaggctcgaaagcgtggggagcaaacaggattagataccctggtagtccacgccgtaaacgatgaatactaggtgtaggggccccaagcctctgtgccgccgctaacgcattaagtattccgcctggggagtacggtcgcaagattaaaactcaaaggaattgacgggggcccgcacaagcagcggagcatgtggtttaattcgacgcaacgcgaagaaccttaccaggtcttgacatccacttaaacttacagagatgtaaggtgtgcttgcacaaagtgagacaggtggtgcatggttgtcgtcagctcgtgtcgtgagatgttgggttaagtcccgcaacgagcgcaacccttatcttcagttactaacgcgtaaaggtgaggactctgaagagactgccggggacaactcggaggaaggtggggacgacgtcaaatcatcatgccccttatgacctgggctacacacgtgctacaatggccacgacagagagaagcgaaatcgcaaggtagagcggaactcaaaaaagtggtcccagttcggattgtgggctgcaacccgcccacatgaagtcggagttgctagtaatcgcggatcagcatgccgcggtgaatacgttcccgggccccttgcacacaccgcccgtca

SEQ ID NO: 692 - DNA, 1356 bp, Artificial Sequence
  Synthetic polymer
gatgaacgctggcggcgtgcttaacacacgcaagtcgaacgaaagcatttaagacagattacttcggtttcgaagtcttttatgactgagcggcggacgggtgagtaacgcgtgggtaacctgcctcatacagggggatagcagctggaaacggctggtaataccgcataagcgcacggtatcgcatgatacagtgtgaaaaactccggtggtatgagatggacccgcgtctgattagctggttggtggggtaatggcccaccaaggcgacgatcagtagccgacctgagagggtgaccggccacattgggactgagacacggcccagactcctacgggaggcagcagtggggaatattgcacaatggaggaaactctgatgcagcgacgccgcgtgagtgaagaagtagtccgctatgtaaagctctatcagcagggaagatagtgacggtacctgactaagaagctccggctaaatacgtgccagcagccgcggtaatacgtatggagcaagcgttatccggatttactgggtgtaaagggagtgtaggtggccatgcaagtcagaagtgaaaatccggggctcaaccccggaactgcttttgaaactgtaaggctagagtgcaggaggggtgagtggaattcctagtgtagcggtgaaatgcgtagatattaggaggaacaccagtggcgaaggcggctcactggactgtaactgacactgaggctcgaaagcgtggggagcaaacaggattagataccctggtagtccacgccgtaaacgatgaatactaggtgtcggggcccataagggcttcggtgccgcagcaaacgcaataagtattccacctggggagtacgttcgcaagaatgaaactcaaaggaattgacggggacccgcacaagcggtggagcatgtggtttaattcgaagcaacgcgaagaaccttaccaagtcttgacatcctcttgaccggccagtaatgtgacctttccttcgggacaagagagacaggtggtgcatggttgtcgtcagctcgtgtcgtgagatgttgggttaagtcccgcaacgagcgcaacccctatccttagtagccagcagtaagatgggcactctagggagactgccagggataacctggaggaaggtggggatgacgtcaaatcatcatgccccttatgacttgggctacacacgtgctacaatggcgtaaacaaagtgaagcgaagtcgtgaggccaagcaaatcacaaaaataacgtctcagttcggattgtagtctgcaactcgactacatgaagctggaatcgctagtaatcgcagatcagaatgctgcggtgaatacgttcccgggtct

SEQ ID NO: 693 - DNA, 1430 bp, Artificial Sequence
  Synthetic polymer
agagtttgatcmtggctcaggatgaacgctggggcgtgcttaacacatgcaagtcgaacggttttctgaggaagcttgctttttcagaagatagtggcggacgggtgagtaacgcgtgggtaacctgccccatacagggggatagcagttggaaacgactggtaagaccgcataagcgcacagcaccgcatggtgcagtgtgaaaagctccggtggtatgggatggacccgcgtctgattagcttgttggcggggtaacggcccaccaaggcgacgatcagtagccggcctgagagggtgaacggccacattgggactgagacacggcccaaactcctacgggaggcagcagtggggaatattgcacaatgggggaaaccctgatgcagcgacgccgcgtgagtgaagaagtatttcggtatgtaaagctctatcagcagggaagataatgacggtacctgactaagaagcaccggctaaatacgtgccagcagccgcggtaatacgtatggtgcaagcgttatccggatttactgggtgtaaagggtgcgtaggtggcaaggcaagtccgaagtgaaaatccggggctcaaccccggaactgctttggaaactgtttagctggagtacaggagaggtaagtggaattcctagtgtagcggtgaaatgcgtagatattaggaggaacaccagtggcgaaggcgacttactggactgctactgacactgaggcacgaaagcgtggggagcaaacaggattagataccctggtagtccacgccgtaaacgatgaatactaggtgttggggcccaaagggctycggtgccgtcgcaaacgcattaagtattccacctggggagtacgttcgcaagaatgaaactcaaaggaattgacggggacccgcacaagcggtggagcatgtggtttaattcgaagcaacgcgaaaaaccttaccaagtcttgacatcctgatgacgatcctttaaccgggatttctcttcggagcatcagagacaggtggtgcatggttgtcgtcagctcgtgtcgtgagatgttgggttaagtcccgcaacgagcgcaacccctatttccagtagccagcagtaagatgggcactctggagagactgccggggataacccggaggaaggtggggatgacgtcaaatcatcatgccccttatgatttgggctacacacgtgctacaatggcagttacaaagagaagcgaccctgtgaaggtgggcaaacctcaaaaaggctgtctcagttcggattgtagtctgcaactcgactacatgaagctggaatcgctagtaatcgcagatcagcatgctgcggtgaatacgttgcccgggtcttgtacacaccgcccgtcacaccatgggagtcggaaacgcctgaagtcagtgacccaaccgtaaggaggga

SEQ ID NO: 694 - DNA, 1384 bp, Artificial Sequence
  Synthetic polymer
ttagagtttgatccttgctcaggatgaacgctggcggcgtgcttaacacatgccagtcgaacgaagcacttcataaagctcgctttattaagtgacttagtggcggacgggtgagtaacgcgtgggtaacctgccttccaccgggggataacagctagacatgactgctaactaccgcataaaacagcagagtcgcatgactcaactgtcaaagatttatcggtgtaagatggacccgcgcctgattagctagttggcggggcaacggcctacccaaggcgacgatcagtagccggcctgagagggtgaacggccacattgggactgagacacggcccaaactcctacgggaggcagcagtgggggatattgcgcaatgggggcaaccctgacgcagcaacgccgcgtgaaggatgaaggttttcggattgtaaacttcttttattaaggacgaaaaatgacggtacttaatgaataagctccggctaactacgtgccagcagccgcggtaatacgtagggagcaagcgttgtccggatttactgggtgtaaagggtgcgtaggcggctttgcaagtcagatgtgaaatctatgggctcaacccataaactgcatttgaaactgtagagcttgagtgaagtagaggcaggcggaattccccgtgtagcggtgaaatgcgtagagatggggaggaacaccagtggcgaaggcggcctgctgggctttaactgacgctgaggcacgaaagcgtgggtagcaaacaggattagataccctggtagtccacgctgtaaacgatgattactaggtgtggggggtctgaccccttccgtgccggagttaacacaataagtaatccacctggggagtacggccgcaaggttgaaactcaaaggaattgacgggggcccgcacaagcagtggagtatgtggtttaattcgaagcaacgcgaagaaccttaccaggtcttgacatccaactaacgaagtagagatacattaggtgcccttcggggaaagttgagacaggtggtgcatggttgtcgtcagctcgtgtcgtgagatgttgggttaagtcccgcaacgagcgcaacccttgctattagttgctacgcaagagcactctaataggactgccgttgacaaaacggaggaaggtggggacgacgtcaaatcatcatgccccttatgacctgggctacacacgtactacaatggatgtaaacagagggaagcaagacagtgatgtggagcaaacccctaaaaacattctcagttcagattgcaggctgcaacccgcctgcatgaagatggaattgctagtaatcgcggatcagcatgccgcggtgaatacgttcccgggccttgtactcaccgcccgtca

SEQ ID NO: 695 - DNA, 1401 bp, Artificial Sequence
  Synthetic polymer
ttcgcccttagagtttgatcctggctcaggatgaacgctggcggcgtgcttaacacatgcaagtcgaacggaactcttatgatagagacttcggtcaattgagtttgagtttagtggcggacgggtgagtaacgcgtgaggaacctgcctcggagtggggaataacacagtgaaaattgtgctaataccgcataatatgtctgtatcgcatggtactggacatcaaagatttatcgctctgagatggcctcgcgtctgattagctagttggtagggtaacggcctaccaaggcgacgatcagtagccggactgagaggttggccggccacattgggactgagacacggcccagactcctacgggaggcagcagtggggaatattgggcaatgggcgcaagcctgacccagcaacgccgcgtgaaggaagaaggctttcgggttgtaaacttcttttgtcagggacgaacagatgacggtacctgacgaataagccacggctaactacgtgccagcagccgcggtaatacgtaggtggcaagcgttatccggatttactgggtgtaaagggcgtgtaggcgggattgcaagtcagatgtgaaaactcggggctcaacctcgagcctgcatttgaaactgtagttcttgagtgtcggagaggcaatcggaattccgtgtgtagcggtgaaatgcgtagatatacggaggaacaccagtggcgaaggcggattgctggacgataactgacgctgaggcgcgaaagcgtggggagcaaacaggattagataccctggtagtccacgctgtaaacgagggatactaggtgtggggggactgaccccctccgtgccgcagttaacacaataagtatcccacctggggagtacgatcgcaaggttgaaactcaaaggaattgacgggggcccgcacaagcggtggagtatgtggtttaattcgaagcaacgcgaagaaccttaccagggcttgacatcccggcgaccggcctagagataggcttttaccttcgggtggggcggtgacagaaaatgcatggttgtcgtcagctcgtgtcgtgagatgttgggttaagtcccgcaacgagcgcaacccttacggtcagttactacattaagttgaggactctggccggactgccgttgacaaaacggaggaaggtggggacgacgtcaaatcatcatgccccttacgttctgggctacacacgtactacaatggcgaaaacaaagggaagcgatatcgcgagatggagcaaaccccataaaaatcgtcccagttcagactgcaggctgcaactcgcctgcacgaagttggaattgctagtaatcgcggatcagcatgccgcggtgaatacgttcccgggctttgcactcaccacccgtca

SEQ ID NO: 696 - DNA, 1394 bp, Artificial Sequence
  Synthetic polymer
agagtttgatcctggctcagattgaacgctggcggcatgctttacacatgcaagtcgaacggcagcacagggagcttgctcccgggtggcgagtggcgcacgggtgagtaatacatcggaacgtgtcctatagtgggggataactagtcgaaagactagctaataccgcatgagacctgagggtgaaagcaggggatcgcaagaccttgcgctattggagcggccgatgcccgattagctagttggtgaggtaaaggctcaccaaggcgacgatcggtagctggtctgagaggacgaccagccacactgggactgagacacggcccagactcctacgggaggcagcagtggggaattttggacaatgggggcaaccctgatccagccatgccgcgtgcaggatgaaggtcttcggattgtaaactgcttttgtcagggacgaaaaggactgtgctaataccacggtctgctgacggtacctgaagaataagcaccggctaactacgtgccagcagccgcggtaatacgtagggtgcaagcgttaatcggaattactgggcgtagagcgtgcgcaggcggttctgtaagacagatgtgaaatccccgggcttaacctgggaattgcatttgtgactgcaggactagagttcatcagaggggggtggaattccaagtgtagcagtgaaatgcgtagatatttggaagaacaccaatggcgaaggcagccccctgggatgcgactgacgctcatgcacgaaagcgtggggagcaaacaggattagataccctggtagtccacgccctaaacgatgtctactggttgttggggttttttaaccctggtaacgaagctaacgcgtgaagtagaccgcctggggagtacggtcgcaagattaaaactcaaaggaattgacggggacccgcacaagcggtggatgatgtggattaattcgatgcaacgcgaaaaaccttacctagccttgacatgccaggaatcctgaagagattcgggagtgcccgcaagggaatctggacacaggtgctgcatggctgtcgtcagctcgtgtcgtgagatgttgggttaagtcccgcaacgagcgcaacccttgtcactagttgctacgcaagagcactctagtgagactgccggtgacaaaccggaggaaggtggggaggacgtcaagtcctcatggcccttatggctagggcctcacacgtcatacaatggcgtaaacaaagagaagcgaacctgtgaaggtgggcaaatctcaaaaataacgtctcagttcggattgtagtctgcaactcgactacatgaagctggaatcgctagtaatcgcgaatcagaatgtcgcggtgaatacgttcccgggtcttgtacacaccgcccgtca

SEQ ID NO: 697 - DNA, 1398 bp, Artificial Sequence
  Synthetic polymer
ttcgcccttagagtttgatcctggctcaggatgaacgctggcggcgtgcttaacacatgcaagtcgaacggagctgcattgaaagaggattcgtccaatggatatgtacgcttagtggcggacgggtgagtaacgcgtgaggaacctgccttggagtggggaataacagttggaaacagctgctaataccgcatgacgcatagatacggcatcgtatatatgccaaagatttatcgctctgagatggcctcgcgtctgattaggcagttggcggggtaacggcccaccaaaccgacgatcagtagccggactgagaggttggccggccacattgggactgagacacggcccagactcctacgggaggcagcagtggggaatattgggcaatgggcgcaagcctgacccagcaacgccgcgtgaaggaagaaggctttcgggttgtaaacttcttttatgagggacgaaaacatgacggtacctcatgaataagccacggctaactacgtgccagcagccgcggtaatacgtaggtggcaagcgttatccggatttattgggtgtaaagggcgtgtaggcgggattgcaagtcagatgtgaaaaccagaggctcaacctctggcctgcatttgaaactgtagttcttgagtgctggagaggcaatcggaattccgtgtgtagcggtgaaatgcgtagatatacggaggaacaccagtggcgaaggcggattgctggacagtaactgacgctgaggcgcgaaagcgtggggagcaaacaggattagataccctggtagtccacgccgtaaacgatggatactaggtgtggggggactgaccccctccgtgccgcagcaaacgcaataagtatcccacctggggagtacgatcgcaaggttgaaactcaaaggaattgacgggggcccgcacaagcggtggagtatgtggtttaattcgatgcaacgcgaagaaccttaccagggcttgacatcctgctaacgaagtagagatacatcaggtgcccttcggggaaagcagagacaggtggtgcatggttgtcgtcagctcgtgtcgtgagatgttgggttaagtcccgcaacgagcgcaacccttattgttagttgctacgcaagagcactctagcgagactgccgttgacaaaacggaggaaggtggggacgacgtcaaatcatcatgccccttatgtcctgggcgacacacgtactacaatggcggtcaacagagagaggcaaagccgcgaggcagagcaaaacttgaaaagccgtcccagttcggatcgcaggctgcaacccgcctgcgtgaagttggaatcgctagtaatcgcggatcagcatgccgcggtgaatacgttcccgggccttgcactcaccgcccgtca

SEQ ID NO: 698 - DNA, 1371 bp, Artificial Sequence
  Synthetic polymer
agagtttgatcctggctcaggatgaacgctggcggcgtgcttaacacatgcaagtcgaacggaggacccttgacggagttttcggacaacagataggaatccttagtggcggacgggtgagtaacgcgtgaggaacctgccttggagaggggaataacacagagaaatttgtgctaataccgcatgatgcagttgggtcgcatggctctgactgccaaagatttatcgctctgagatggcctcgcgtctgattaggtagttggtggggtaacggcccaccaagccgacgatcagtagccggactgagaggttgaccggccacattgggactgagacacggcccagactcctacgggaggcagcagtggggaatattgggcaatgggcgcaagcctgacccagcaacgccgcgtgaaggaagaaggctttcgggttgtaaacttcttttattaaggacgaaacaaatgacggtacttaatgaataagctccggctaactacgtgccagcagccgcggtaatacgtagggagcaagcgttatccggatttactgggtgtaaagggcgtgtaggcgggaaagcaagtcagatgtgaaacccagtggctcaaccactggcctgcatttgaaactgtttttcttgagtgatggagaggcaggcggaattccgtgtgtagcggtgaaatgcgtagatatacggaggaacaccagtggcgaaggcggcctgctggacattaactgacgctgaggcgcgaaagcgtggggagcaaacaggattagataccctggtagtccacgctgtaaacgatggatactaggtgtggggggactgaccccttccgtgccgcagttaacacaataagtatcccacctggggagtacgatcgcaaggttgaaactcaaaggaattgacgggggcccgcacaagcggtggagtatgtggtttaattcgaagcaacgcgaagaaccttaccagggcttgacatcccggtgaccggtctagagatagacttttcccttcggggacaccggtgacaggtggtgcatggttgtcgtcagctcgtgtcgtgagatgttgggttaagtcccgcaacgagcgcaacccctattgttagttgctacgcaagagcactctagcgagactgccgttgacaaaacggaggaaggtggggacgacgtcaaatcatcatgccccttatgtcctgggccacacacgtactacaatggcggtcaacagagggaagcaataccgcgaggtggagcaaacccctaaaagccgtcccagttcggattgcaggctgcaactcgcctgtatgaagttggaatcgctagtaatcgcggatcagcatgccgcggtgaatacgttcccgggcc

SEQ ID NO: 699 - DNA, 1344 bp, Artificial Sequence
  Synthetic polymer
tttagtggcggacgggtgagtaacgcgtgaggaacctgccttggagaggggaataacacagagaaatttgtgctaataccgcataacgcatgggtgccgcatggtaccaatgccaaagattctatcgctctgagatggcctcgcgtctgattaggcagttggcggggtaacggcccaccaaaccgacgatcagtagccggactgagaggttggccggccacattgggactgagacacggcccagactcctacgggaggcagcagtggggaatattgggcaatgggcgcaagcctgacccagcaacgccgcgtgaaggaagaaggctttcgggttgtaaacttcttttattcgggacgaagaaagtgacggtaccgaatgaataagccacggctaactacgtgccagcagccgcggtaatacgtaggtggcaagcgttatccggatttactgggtgtaaagggcgtgtaggcgggagtgcaagtcagatgtgaaaactatgggctcaacccatagcctgcatttgaaactgtacttcttgagtactggagaggcaggcggaattccgtgtgtagcggtgaaatgcgtagatatacggaggaacaccagtggcgaaggcggcctgctggacagcaactgacgctaaggcgcgaaagcgtgggtagcaaacaggattagataccctggtagtccacgctgtaaacgatcgatactaggtgtggggggactgaccccttccgtgccgcagctaacgcaataagtatcgcacctggggagtacgatcgcaaggttgaaactcaaaggaattgacgggggcccgcacaagcggtggagtatgtggtttaattcgaagcaacgcgaagaaccttaccagggcttgacatcctgctaacgaaatagagatatatcaggtgcccttcggggaaagcagagacaggtggtgcatggttgtcgtcagctcgtgtcgtgagatgttgggttaagtcccgcaacgagcgcaacccttattgttagttgctacgcaagagcactctagcgagactgccgttgacaaaacggaggaaggtggggacgacgtcaaatcatcatgccccttatgtcctgggctacacacgtactacaatggcggtcaacagagggaggcaaagccgtgaggtggagcaaacccctaaaagccgtcccagttcggattgcaggctgaaacccgcctgtatgaagttggaatcgctagtaatcgcggatcagcatgccgcggtgaatacgttcccgggccttgtacacaccgcccgtcacaccatgagagtcgggaacacccgaagtccgtagcctgactttaacgagggggc

SEQ ID NO: 700 - DNA, 1380 bp, Artificial Sequence
  Synthetic polymer
agagtttgatcctggctcaggatgaacgctggcggcgtgcctaacacatgcaagtcgaacgaagcaccagatcggaatcttcggaggaagatctggtgactgagtggcggacgggtgagtaacgcgtgggtaacctgccctgtacagggggataacagttggaaacggctgctaataccgcataagcgcacgaagggacatccctttgtgtgaaaaactccggtggtacaggatgggcccgcgtctgattagctggttggcagggtaacggcctaccaaggcgacgatcagtagccggtctgagaggatgaacggccacattggaactgagacacggtccaaactcctacgggaggcagcagtggggaatattgcacaatgggggaaaccctgatgcagcaacgccgcgtgagtgaagaagtatctcggtatgtaaagctctatcagcagggaagataatgacggtacctgactaagaagctccggctaaatacgtgccagcagccgcggtaatacgtatggagcaagcgttatccggatttactgggtgtaaagggtgcgtaggtggcggtgcaagtcagatgtgaaaggccggggctcaaccccggagctgcatttgaaactgcatggctggagtacaggagaggcaggcggaattcctagtgtagcggtgaaatgcgtagatattaggaggaacaccagtggcgaaggcggcctgctggactgttactgacactgaggcacgaaagcgtggggagcaaacaggattagataccctggtagtccacgccgtaaacgatgaatactaggtgttggcaaccaaaggttgtcagtgccgccgcaaacgcattaagtattccacctggggagtacgttcgcaagaatgaaactcaaaggaattgacgggggcccgcacaagcagtggagtatgtggtttaattcgaagcaacgcgaagaaccttaccaggtcttgacatcgagtgacgagctaagagattagctttcctttcgaggcacgaagacaggtggtgcatggttgtcgtcagctcgtgtcgtgagatgttgggttaagtcccgcaacgagcgcaacccttaccattagttgctacgcaagagcactctaatgggactgccgttgacaaaacggaggaaggtggggatgacgtcaaatcatcatgccccttatgacctgggctacacacgtactacaatggcaattaacaaagagcagcaaagccgcaaggtggagcgaatctccaaaaattgtcccagttcagattgcaggctgcaactcgcctgcatgaagtcggaattgctagtaatcgtagatcagcatgctacggtgaatacgttcccgggccttgcacacaccgcccgtca

SEQ ID NO: 701 - DNA, 1368 bp, Artificial Sequence
  Synthetic polymer
tcaggacgaacgctggcggcgtgcttaacacatgcaagtcgaacgagaatctactgaaagagttttcggacaatggaagtagaggaaagtggcggacgggtgagtaacgcgtgaggaacctgccttgaagagggggacaacagttggaaacggctgctaataccgcataagcgcacgaggggacatccccttgtgtgaaaaactccggtggtacaggatgggcccgcgtctgattagctggttggtggggtaacggcccaccaaggcgacgatcagtagccggtctgagaggatgaacggccacattggaactgagacacggtccaaactcctacgggaggcagcagtggggaatattgcacaatgggggaaaccctgatgcagcaacgccgcgtgagtgaagaagtatttcggtatgtaaagctctatcagcagggaagataatgacggtacctgactaagaagctccggctaaatacgtgccagcagccgcggtaatacgtatggagcaagcgttatccggatttactgggtgtaaagggtgcgtaggtggcagtgcaagtcagatgtgaaaggccggggctcaaccccggagctgcatttgaaactgcatagctagagtacaggagaggcaagcggaattcctagtgtagcggtgaaatgcgtagatattaggaggaacaccagtggcgaaggcggcttgctggactgttactgacactgaggcacgaaagcgtggggagcaaacaggattagataccctggtagtccacgccgtaaacgatgaatactaggtgtcggggccgtataggcttcggtgccgccgcaaacgcagtaagtattccacctggggagtacgttcgcaagaatgaaactcaaaggaattgacgggggcccgcacaagcagtggagtatgtggtttaattcgaagcaacgcgaagaaccttaccaggtcttgacatcgtatgcatagtctagagatagatgaaacctcttcggaggcatatagacaggtggtgcatggttgtcgtcagctcgtgtcgtgagatgttgggttaagtcccgcaacgagcgcaacccttacctttagttgctacgcaagagcactctaaagggactgccgttgacaaaacggaggaaggtggggatgacgtcaaatcatcttgccccttatgacctgggctacacacgtactacaatggcaattaacaaagagaagcaagacagtgatgtggagcaaatctcgaaaaattgtcccagttcagattgcaggctgcaactcgcctgcatgaagtcggaattgctagtaatcgtggatcagcatgccacggtgaatacgttcccgggccttgcacacaccgcccgtca

SEQ ID NO: 702 - DNA, 1478 bp, Artificial Sequence
  Synthetic polymer
agagtttgatcctggctcaggatgaacgctggcggcgtgcctaacacatgcaagtcgagcgagatactgttgaacagagattcgtcaacggaatacagtggaaagcggcggacgggtgagtaacgcgtaggcaacctgccccttacacagggatagccattggaaacgatgattaaaacctgatgacacctaatgatgacatcttcactaggtcaaagatttatcggtaagggatgggcctgcgtctgattagatagttggtgaggtaacggcccaccaagtcaacgatcagtagccgacctgagagggtgatcggccacattggaactgagacacggtccaaactcctacgggaggcagcagtggggaatattgcacaatgggggaaaccctgatgcagcaacgccgcgtgaaggaagaaggtcttcggattgtaaacttctgtccttgaggaagataatgacggtactcttggaggaagccccggctaactacgtgccagcagccgcggtaatacgtagggggcaagcgttatccggaattattgggcgtaaagagtgcgtaggtggttacctaagcagggggtgaaaggcactggcttaaccaatgtcagccccctgaactgggctacttgagtgcaggagaggaaagtggaattcctagtgtagcggtgaaatgcgtagatattaggaggaacaccagtggcgaargcgactttctggactgttactgacactgaggcacgaaagtgtggggagcaaacaggattagataccctggtagtccacaccgtaaacgatgagcactaggtgtcgggggagcaattcctcggtgccgcagttaacgcattaagtgctccgcctggggagtacgtacgcaagtatgaaactcaaaggaattgacggggacccgcacaagcagcggagcatgtggtttaattcgaagcaacgcgaagaaccttaccaggtcttgacatccctctgaaactcctgataacgaaggagccctcttcggagcagaggagacaggtggtgcatggttgtcgtcagctcgtgtcgtgagatgttgggttaagtcccgcaacgagcgcaacccttgccgatagttgccatcattaagttgggcactctatcgggactgccggggacaactcggaggaaggtggggatgacgtcaaatcatcatgccccttatgatctgggctacacacgtgctacaatggtcggtacaaaaggcagcgatcccgtgagggggagcaaatcccaaaaaccggtcccagttcggattgtaggctgcaactcgcctacatgaagtcggagttgctagtaatcgtggatcagaatgccacggtgaatgcgtttccgggtcttgtacacaccgcccgtcacaccacggaagttgggggtgcccgaagttggcaggcaaatatgttacctaaggcaaaaccgatgactggggtgaagtcgtaacaaggtaac

SEQ ID NO: 703 - DNA, 1367 bp, Artificial Sequence
  Synthetic polymer
agagtttgatcctggctcaggatgaacgctggcggcgtgcttaacacgtgcaagtcgagcgagaaaagttcttcggagcttttctagcggcggacgggtgagtaacacgtgggcaacctgcctcatagaggggaatagccttccgaaaggaagattaataccgcataacattgttgaaaggcatcttttaacaatcaaaggagcaatccgctatgagatgggcccgcggcgcattagctagttggtgaggtaacggctcaccaaggcgacgatgcgtagccgacctgagagggtgatcggccacattgggactgagacacggcccagactcctacgggaggcagcagtggggaatattgcacaatgggggaaaccctgatgcagcaacgccgcgtgagtgatgacggtcttcggattgtaaagctctgtctttagggacgataatgacggtacctaaggaggaagccacggctaactacgtgccagcagccgcggtaatacgtaggtggcaagcgttgtccggatttactgggcgtaaagggagcgtaggcggatttttaagtgggatgtgaaatacccgggctcaacctgggtgctgcattccaaactggaagtctagagtacaggaggggaaagcggaattcctagtgtagcggtgaaatgcgtagagattaggaagaacaccagtggcgaaggcggctttctggactgtaactgacgctgaggctcgaaagcgtggggagcaaacaggattagataccctggtagtccacgccgtaaacgatgaatactaggtgtaggggttgtcatgacctctgtgccgccgctaacgcattaagtattccgcctggggagtacggtcgcaagattaaaactcaaaggaattgacgggggcccgcacaagcagcggagcatgtggtttaattcgaagcaacgcgaagaaccttacctagacttgacatctcctgcattactcttaatagaggaagttccttcgggaacaggaagacaggtggtgcatggttgtcgtcagctcgtgtcgtgagatgttgggttaagtcccgcaacgagcgcaacccctattgttagttgctacgcaagagcactctagcgagactgccgttgacaaaacggaggaaggtggggacgacgtcaaatcatcatgccccttatgtcctgggctacacacgtaatacaatggcggtcaacagagggatgcaaaatcgcaagatggagcgaacccctaaaagccgtcccagttcagattgtgggctgcaacccgcccacatgaagtcggaatcgctagtaatcgcggatcagcatgccgcggtgaatacgttcccgggccttgcactcaccgcccgtca

SEQ ID NO: 704 - DNA, 1348 bp, Artificial Sequence
  Synthetic polymer
gatgaacgctggcggcgtgcctaacacatgcaagtcgagcgggaaatcttggaattgattcttcggaggaatgaagagatggagagcggcggacgggtgagtaacgcgtaggcaacctgccctttgcagagggatagccactggaaacggtgattaaaacctcataatactgaaggttcacatggacatttggtcaaagatttatcggcaaaggatgggcctgcgtctgattagctagttggtgaggtaacggctcaccaaggcaacgatcagtagccgacctgagagggtaatcggccacattggaactgagacacggtccaaactcctacgggaggcagcagtggggaatattgcacaatgggggaaaccctgatgcagcaacgccgcgtgaaggaagaaggcctttgggtcgtaaacttctgtcctaagggaagataatgacggtacctttggaggaagccccggctaactacgtgccagcagccgcggtaatacgtagggggcgagcgttatccggaattattgggcgtaaagagttcgtaggcggttttttaagcgcggggtgaaaggcaatggcttaaccattgttagccctgcgaactgggagacttgagtgcaggagaggaaagcggaattcctagtgtagcggtgaaatgcgtagatattagggggaacaccagtggcgaaggcggctttctggactgtaactgacgctgaggaacgaaagtgtggggagcaaacaggattagataccctggtagtccacaccgtaaacgatgagcactaggtgtcggggtcgcaagacttcggtgccggagttaacgcattaagtgctccgcctggggagtacgcacgcaagtgtgaaactcaaaggaattgacggggacccgcacaagcagcggagcatgtggtttaattcgaagcaacgcgaagaaccttaccaggacttgacatccctctgaaagctctgataacgaagagccctctacggacagaggagacaggtggtgcatggttgtcgtcagctcgtgtcgtgagatgttgggttaagtcccgcaacgagcgcaacccttgtcattagttgccagcatttagttgggcactctagtgagactgccggggacaactcggaggaaggtggggatgacgtcaaatcatcatgccccttatgttctgggctacacacgtgctacaatggtcggtacaaagagaagcgagactgtgaagtggagcaaatctcaaaaaccgatcccagttcggattgtaggctgcaactcgcctacatgaagtcggagttgctagtaatcgcggatcagaatgccgcggtgaatgcgttcccgggtct

SEQ ID NO: 705 - DNA, 1370 bp, Artificial Sequence
  Synthetic polymer
agagtttgatcctggctcaggacgaacgctggcggcgtgcttaatacatgcaagtcgaacggaagttatgttttcggatgtaactttagtggcgaacgggtgagtaacgcgtgaacaacctgactcagagtgggggataacaacgggaaactgttgctaataccgcataagaccacgaccccgcatggggatggggtcaaagatttatcgctttgagaggggttcgcgtcccattaggtagttggaggggtaacggcccaccaagccgacgatgggtagccgagctgagaggctgatcggccacactggaactgagacacggtccagactcctacgggaggcagcagtagggaatattgggcaatgggcgcaagcctgacccagcaacgccgcgtgagggaagaaggttttcggattgtaaacctctgtcctatgtgacgaaggaagtgacggtagcataggaggaagccccggctaactacgtgccagcagccgcggtaatacgtagggggcgagcgttgtccggaattactgggcgtaaagggtgcgtaggcggtctggtaagttggatgtgaaatacccgggcttaacttgggtgctgcatccaatactgtcggacttgagtgcaggagaggaaagcggaattcctagtgtagcggtgaaatgcgtagatattaggaggaacaccagtggcgaargcggctttctggactgtaactgacgctgagcacgaaagcgtggggagcaaacaggattagataccctggtagtccacgccgtaacgatgaatactaggtgtagggggtatagactccctctgtgccgcagcaaacgcaataagtattccgcctggggagtacggccgcaaggttgaaactcaaaggaattgacgggggcccgcacaagcagcggagcatgtggtttaattcgacgcaacgcgaagaaccttaccaaggcttgacatcctgctaaactcatggaaacatgaggtgacttcggtcgagcagagacaggtggtgcatggttgtcgtcagctcgtgtcgtgagatgttgggttaagtcccgcaacgagcgcaacccctgttgccagttaccagcgagtaaagtcggggactctggtgagactgccggggacaactcggaggaaggtggggacgacgtcaaatcatcatgccccttacgtcttgggctacacacgtgctacaatggctgtaacaaagggaagcgacagcgtaagctgaagcggatctcataaaggcagtcccagttcggattgtgggctgcaacccgcccacatgaagtcggagttgctagtaatcgcggatcagcatgccgcggtgaatacgttcccgggccttgtacacaccgcc

SEQ ID NO: 706 - DNA, 1348 bp, Artificial Sequence
  Synthetic polymer
gacgaacgctggcggcgtgcttaacacatgcaagtcgaacgagaatcactggaaggagttttcggacaacggaaggtgaggacagtggcggacgggtgagtaacgcgtgaggaacctgcctttcagagggggacaacagttggaaacgactgctaataccgcatgacacatagagatcgcatggtttttatgtcaaagatttatcgctgaaagatggcctcgcgtctgattagctagttggtgaggtaacggcccaccaaggcgacgatcagtagccggactgagaggttgaccggccacattgggactgagatacggcccagactcctacgggaggcagcagtggggaatattgggcaatgggcgcaagcctgacccagcaacgccgcgtgaaggaagaaggctttcgggttgtaaactcctgttgttgaggaagataatgacggtactcaacaaggaagtgacggctaactacgtgccagcagccgcggtaaaacgtaggtcacaagcgttgtccggaattactgggtgtaaagggagcgcaggcgggagaacaagttggaagtgaaatccatgggctcaacccatgaactgctttcaaaactgtttttcttgagtagtgcagaggtaggcggaattcccggtgtagcggtggaatgcgtagatatcgggaggaacaccagtggcgaaggcggcctactgggcaccaactgacgctgaggctcgaaagtgtgggtagcaaacaggattagataccctggtagtccacaccgtaaacgatgattactaggtgttggaggattgaccccttcagtgccgcagttaacacaataagtaatccacctggggagtacgaccgcaaggttgaaactcaaaggaattgacgggggcccgcacaagcagtggagtatgtggtttaattcgacgcaacgcgaagaaccttaccaagtcttgacatcccttgacgatgctggaaacagcatttctcttcggagcaaggagacaggtggtgcatggttgtcgtcagctcgtgtcgtgagatgttgggttaagtcccgcaacgagcgcaacccttatggtcagttactacgtaagaggactctggccagactgccgttggcaaaacggaggaaggtggggatgacgtcaaatcatcatgccctttatgacttgggctacacacgtactacaatggcgttaaacaaagagaagcgagaccgcgaggtggagcaaaactcagaaacgaacgtcccggttcggactgcggagctgcgactcgcctgcacgaagtcggaattgctagtaatcgtgaatcagcgtgccacggtgaaatacgttcccgggcctt

SEQ ID NO: 707 - DNA, 1392 bp, Artificial Sequence
  Synthetic polymer
ttcgcccttagagtttgatcctggctcaggacgaacgctggcggcgtgcttaacacatgcaagtcgagcgaagcacttggaaccgatccttcgggtgaagctccatttgactgagcggcggacgggtgagtaacgcgtgggtaacctgcctcatacaggggaataacagtttgaaaagactgctaatgccgcataagcgcacagggccgcatggcctggtgtgaaaaactccggtggtatgagatggacccgcgtccgattagctagttggtgaggtaacggcccaccaaggcgacgatcggtagccggactgagaggttgaacggccacattgggactgagacacggcccagactcctacgggaggcagcagtggggaatattgcacaatgggggaaaccctgatgcagcgacgccgcgtggaggaagaaggtcttcggattgtaaactcctgttgttggggaagataatgacggtacccaacaaggaagtgacggctaactacgtgccagcagccgcggtaaaacgtaggtcacaagcgttgtccggaattactgggtgtaaagggagcgcaggcgggcgatcaagttggaagtgaaatccatgggctcaacccatgaactgctttcaaaactgattgtcttgagtagtgcagaggtaggcggaattcccggtgtagcggtggaatgcgtagatatcgggaggaacaccagtggcgaaggcggcctactgggcaccaactgacgctgaggctcgaaagtgtgggtagcaaacaggattagataccctggtagtccacaccgtaaacgatgattactaggtgttggaggattgaccccttcagtgccgcagttaacacaataagtaatccacctggggagtacgaccgcaaggttgaaactcaaaggaattgacgggggcccgcacaagcagtggagtatgtggtttaattcgacgcaacgcgaagaaccttaccaagtcttgacatcccttgacgatgctggaaacagtatttctcttcggagcaaggagacaggtggtgcatggttgtcgtcagctcgtgtcgtgagatgttgggttaagtcccgcaacgagcgcaacccttatggtcagttactacgcaagaggactctggccagactgccgttgacaaaacggaggaaggtggggatgacgtcaaatcatcatgccctttatgacttgggctacacacgtactacaatggcgttaaacaaagagaagcaagaccgcgaggtggagcaaaactcagaaacaacgtcccagttcggactgcaggctgcaactcgcctgcacgaagtcggaattgctagtaatcgcagatcagcatgctgcggtgaatacgttcccgggccttgcacacaccgcccgtca

SEQ ID NO: 708 - DNA, 1374 bp, Artificial Sequence
  Synthetic polymer
agagtttgatcctggctcaggatgaacgctggcggcgtgcttaacacatgcaagtcgagcgagaaaagttcttcggagcttttctagcggcggacgggtgagtaacacgtgggcaacctgcctcatagaggggaatagcctttcgaaaggaagattaataccgcataacattgttgaaaggcatcttttaacaatcaaaggagcaatccgctatgagatgggcccgcggcgcattagctagttggtgaggtaacggctcaccaaggcgacgatgcgtagccgacctgagagggtgatcggccacattggaactgagacacggtccagactcctacgggaggcagcagtggggaatattgggcaatgggggaaaccctgacccagcaacgccgcgtgaaggaagaaggctttcgggttgtaaacttcttttaccagggacgaagaaagtgacggtacctggagaaaaagccacggctaactacgtgccagcagccgcggtaatacgtaggtggcaagcgttgtccggatttactgggtgtaaagggcgtgtaggcggagctgcaagtcagatgtgaaatctccgggcttaacccgggaactgcatttgaaactgtagcccttgagtatcggagaggcaggcggaattcctagtgtagcggtgaaatgcgtagatattaggaggaacaccagtggcgaaggcggcctgctggacgacaactgacgctgaggcgcgaaagcgtggggagcaaacaggattagataccctggtagtccacgctgtaaacgatgaatactaggtgtggggggactgaccccttccgtgccgcagttaacacaataagtattccacctggggagtacgatcgcaagattgaaactcaaaggaattgacgggggcccgcacaagcagtggagtatgtggtttaattcgacgcaacgcgaagaaccttacctagacttgacatgtcctgaattaccagtaatgtgggaagttccttcgggaacaggaacacaggtggtgcatggttgtcgtcagctcgtgtcgtgagatgttgggttaagtcccgcaacgagcgcaacccttattgttagttggtaccattaagttgaccactctagcgagactgcccgggttaaccgggaggaaggtggggatgacgtcaaatcatcatgccccttatgtctagggctacacacgtgctacaatggcaagtacaaagagaagcaatactgtgaagtggagcaaaactcaaaaacttgtctcagttcggattgtaggctgaaactcgcctacatgaagctggagttgctagtaatcgcgaatcagaatgtcgcggtgaatacgttcccgggtcttgcacacaccgcccgtca

SEQ ID NO: 709 - DNA, 1372 bp, Artificial Sequence
  Synthetic polymer
agagtttgatcctggctcaggacgaacgctggcggcgtgcctaacacatgcaagtcgaacggagaaaagaagcttgcttcttttcttagtggcggacgggtgagtagcgcgtgagtaacctgcctttcagagggggataacgttctgaaaagatcgctaataccgcatgagactacagaatcacatgattcagtggtcaaaggagcaatccgctgaaagatggactcgcgtccgattagatagttggcggggtaacggcccaccaagtcgacgatcggtagccggactgagaggttgaacggccacattgggactgagacacggcccagactcctacgggaggcagcagtgagggatattcggcaatgggggaaaccctgaccgagcaacgccgcgtgagggatgacggttttcggattgtaaacctctgtcctctgtgaagataatgacggtagcagaggaggaagctccggctaactacgtgccagcagccgcggtaatacgtagggagcgagcgttgtccggatttactgggtgtaaagggtgcgtaggcggacttgcaagtcagaagtgaaatccacgggcttaacctgtgaactgcttttgaaactgttagtcttgagtgaagtagaggtaggcggaattcccggtgtagcggtgaaatgcgtagagatcgggaggaacaccagtggcgaaggcggcctactgggctttaactgacgctgaggcacgaaagtgtgggtagcaaacaggattagataccctggtagtccacactgtaaacgatgattactaggtgtggggggtctaaccccctccgtgccggagttaacacaataagtaatccacctggggagtacggccgcaaggctgaaactcaaaggaattgacgggggcccgcacaagcagtggagtatgtggattaattcgaagcaacgcgaagaaccttaccaggtcttgacatccaactaacgaagtagagatacattaggtgcccttcggggaaagttgagacaggtggtgcatggttgtcgtcagctcgtgtcgtgagatgttgggttaagtcccgcaacgagcgcaacccctactgttagttgctacgcaagagcactctagcaggactgccgttgacaaaacggaggaaggtggggacgacgtcaaatcatcatgccctttatgacctgggcctcacacgtactacaatggtcgttaacagagggaagcaataccgcgaggtggagcaaaaccctaaaaacgatctcagttcggattgtaggctgcaactcgcctacatgaagttggaattgctagtaatcgcggatcagcatgccgcggtgaatacgttcccgggccttgcactcaccgcccgtca

SEQ ID NO: 710 - DNA, 1367 bp, Artificial Sequence
  Synthetic polymer
ttagagtttgatcctggctcaggacgaacgctggcggcacgcctaacacatgcaagtcgaacggagaaaatgatttcggttattttcttagtggcggacgggtgagtaacacgtgaggaacctgcctttgagagtgggatagcttctggaaacggatggtaataccgcataacatagtgaaaccgcatgattttgctatcaaagtatttcgctcagagatggcctcgcgtctgattagatagttggtgaggtaacggctcaccaagtcgacgatcagtagccggactgagaggttgaacggccacattgggactgagacacggcccagactcctacgggaggcagcagtgggggatattgcacaatgggggaaaccctgacgcagcgacgccgcgtggaggaagaaggtcttcggattgtaaactcctgttgttgaggaagataatgacggtactcaacaaggaagtgacggctaactacgtgccagcagccgcggtaaaacgtaggtcacaagcgttgtccggaattactgggtgtaaagggagcgcaggcgggaagacaagttggaagtgaaatccatgggctcaacccatgaactgctttcaaaactgtttttcttgagtagtgcagaggtaagcggaattcccggtgtagcggtggaatgcgtagatatcgggaggaaacaccagtggcgaaggcggcctactgggcaccaactgacgctgaggctcgaaagtgtgggtagcaaacaggattagataccctggtagtccacaccgtaaacgatgattactaggtgttggaggattgaccccttcagtgccgcagttaacacaataagtaatccacctggggagtacgaccgcaaggttgaaactcaaaggaattgacgggggcccgcacaagcagtggagtatgtggtttaattcgacgcaacgcgaagaaccttaccaagtctagacatcccttgacgatgctggaaacagtatttctcttcggagcaaggagacaggtggtgcatggttgtcgtcagctcgtgtcgtgagatgttgggttaagtcccgcaacgagcgcaacccttatggtcagttactacgcaagaggactctggccagactgccgttgacaaaacggaggaaggtggggatgacgtcaaatcatcatgccccttacgacctgggctacacacgtgctacaatgggtacaacaaagagacgcgaggccgcaaggtggagccaaactcagaaaagtactctcagttcagattgtgggctgcaacccgcccacatgaagttggagttgctagtaatcgcggatcagcatgccgcggtgaatacgttcccgggccttgcacacaccgcccgtca

SEQ ID NO: 711 - DNA, 1364 bp, Artificial Sequence
  Synthetic polymer
agagtttgcttctggctcaggacgaacgctggcggcacgcctaacacatgcaagtcgaacggacgagaggaagcttgcttcctcttgttagtggcggacgggtgagtaacacgtgagcaacctgcctctgagagagggatagcttctggaaacggatggtaatacctcataacatagtgaaatcgcatgattttgttatcaaagaaattcgctcagagatgggctcgcgtccgattagatagttggtgaggtaacggctcaccaagtcgacgatcagtagccggactgagaggttgaacggccacattgggactgagacacggcccagactcctacgggaggcagcagtggggaatattgcacaatgggggaaaccctgatgcagcgatgccgcgtggaggaagaaggttttcggattgtaaactccttttatcagggacgataatgacggtacctgaagaaaaagctccggctaactacgtgccagcagccgcggtaatacgtagggagcgagcgttgtccggaattactgggtgtaaagggagcgtaggcgggacggcaagtcagatgtgaaaactgagggctcaaccttcagactgcatttgaaactgctgttcttgagtgaagtagaggtaagcggaattcctagtgtagcggtgaaatgcgtagatattaggaggaacatcggtggcgaaggcggcttactgggcttttactgacgctgaggctcgaaagcgtggggagcaaacaggattagataccctggtagtccacgctgtaaacgatgattactaggtgtgggggcgtcaagcttccgtgccggagttaacacaataagtaatccacctggggagtacggccgcaaggttgaaactcaaaggaattgacgggggcccgcacaagcagtggagtatgtggtttaattcgaagcaacgcgaagaaccttaccaggtcttgacatcgtgcgcatagactagagatagatgaagtccttcgggacgcatagacaggtggtgcatggttgtcgtcagctcgtgtcgtgagatgttgggttaagtcccgcaacgagcgcaacccttacgattagttgctacgcaagagcactctaataggactgccgttgacaaaacggaggaaggtggggatgacgtcaaatcatcatgccccttatgacctgggcgacacacgtactacaatggcaatgacagagggaagcaagtcagtgatgaggagcaaacccctaaacattgtcccagttcggattgcaggctgcaactcgcctgcatgaagctggaatcgctagtaatcgcggatcagaatgccgcggtgaatacgttcccgggtcttgcacacaccgcccgtca

SEQ ID NO: 712 - DNA, 1353 bp, Artificial Sequence
  Synthetic polymer
gcgtgcctaacacatgcaagtcgaacgaagctccttgaagtgcgacttcggtcaaacggagaggaagacttagtggcgaacgggtgagtaacgcgtgaggaacctgcctttcagtgggggacaacagttggaaacgactgctaataccgcataacatacggagaccgcatgatttccgtatcaaagatttattgctgaaagatggcctcgcgtctgattagatagttggtgaggtaacggctcaccaagtcgacgatcagtagccggactgagaggttgaacggccacattgggactgagatacggcccagactcctacgggaggcagcagtggggaatattgggcaatgggggaaaccctgacccagcaacgccgcgtgaaggaagaaggctttcgggttgtaaacttcttttaccggggacgaagaaagtgacggtacccggagaaaaagccacggctaactacgtgccagcagccgcggtaatacgtaggtggcaagcgttgtccggatttactgggtgtaaagggcgtgtaggcggagattcaagtcaggagtgaaatctatgggcttaacccataaactgcttttgaaactgaatcccttgagtatcggagaggcaggcggaattcctagtgtagcggtgaaatgcgtagatattaggaggaacaccagtggcgaaggcggcctgctggacgacaactgacgctgaggcgcgaaagcgtggggagcaaacaggattagataccctggtagtccacgctgtaaacgatgaatactaggtgtggggggactgaccccctccgtgccgcagttaacacaataagtattccgcctggggagtacggccgcaaggttgaaactcaaaggaattgacgggggcccgcacaagcagcggagcatgtggtttaattcgacgcaacgcgaagaaccttaccaggtcttgacatccagtaaaacttgtagagatataaggtgtcttcggacatactgagacaggtggtgcatggttgtcgtcagctcgtgccgtgagatgttgggttaagtcccgcaacgagcgcaacccttacggtcggttgctacgaaagagcactccggccggactgccgttgacaaaacggaggaaggtggggacgacgtcaaatcatcatgccccttacgtttcgggctacacacgtactacaatggcgaatacaaagagaagcgaagtcgcgaggctgagcaaaactcaaaaaaatcgtcccagttcagactgcaggctgcaactcgcctgcacgaagttggaattgctagtaatcgcggatcagcatgccgcggtgaatacgttcccgggctttgcactcaccgcccgtca

SEQ ID NO: 713 - DNA, 1379 bp, Artificial Sequence
  Synthetic polymer
agagtttgatcctggctcaggacgaacgctggtggcacgcctaacacatgcaagtcgaacgaggttacattgaagcttgctttgaagtaacctagtggcggacgggtgagtaacacgtgaggaacctgccttacagagggggataccgtctggaaacggacgttaataccgcataagatgacgaatccgcatgcttttgtcataaaagatttatcgccgtaagatggcctcgcgtctgattagatagttggtgaggtaacggcccaccaagtcgacgatcagtagccggactgagaggttgaacggccacattgggactgagacacggcccagactcctacgggaggcagcagtggggaatattgcacaatggaggaaactctgatgcagcgatgccgcgtgagggaagaaggttttaggattgtaaacctctgacttcagggacgataatgacggtacctgaggaggaagctccggctaactacgtgccagcagccgcggtaatacgtagggagcgagcgttgtccggaattactgggtgtaaagggagtgtaggcgggactgcaagtcagatgtgaaaactatgggcttaacccatagactgcatttgaaactgtagttcttgagtgaagtagaggtaagcggaattcctagtgtagcggtgaaatgcgtagatattaggaggaacatcagtggcgaaggcggcttactgggcttttactgacgctgaggctcgaaagcgtggggagcaaacaggattagataccctggtagtccacgccgtaaacgatgattactaggtgtcgggtggcagagccattcggtgccgcagcaaacgcagtaagtattccacctggggagtacgttcgcaagaatgaaactcaaaggaattgacggggacccgcacaagcggtggagcatgtggtttaattcgaagcaacgcgaagaaccttaccaagtcttgacatccctctgaccggtccttaaccgggcctttccttcgggacaggggagacaggtggtgcatggttgtcgtcagctcgtgtcgtgagatgttgggttaagtcccgcaacgagcgcaacccctatccccagtagccagcatttaggatgggcactctgaggagactgccagggataacctggaggaaggcggggatgacgtcaaatcatcatgccccttatgatttgggctacacacgtgctacaatggcgtaaacaaagggaagcagagcggtgacgccgagcaaatcccaaaaataacgtcccagttcggactgcagtctgcaactcgactgcacgaagctggaatcgctagtaatcgcggatcagaatgccgcggtgaatacgttcccgggtcttgcacacacagcccgtca

SEQ ID NO: 714 - DNA, 1375 bp, Artificial Sequence
  Synthetic polymer
agagtttgatcctggctcaggatgaacgctggcggcgtgcttaacacatgcaagtcgagcgagaaaagttcttcggagcttttctagcggcggacgggtgagtaacacgtgggcaacctgcctcatagaggggaatagcctttcgaaaggaagattaataccgcataatattgttgaaaggcatcttttaacaattaaaggagcaatccgctatgagatgggcccgcggcgcattagctagttggtgaggtaacggctcaccaaggcgacgatgcgtagccgacctgagagggtgatcggccacattgggactgagacacggcccagactcctacgggaggcagcagtggggaatattgggcaatgggcgcaagcctgacccagcaacgccgcgtgagggaagaaggttttcggattgtaaacctctgtcgcaggggacgaaggaagtgacggtaccctgtaagaaagccccggctaactacgtgccagcagccgcggtaatacgtagggggcgagcgttgtccggaattactgggcgtaaagggagcgtaggcggtcgattaagttagatgtgaaacccccgggcttaacttggggactgcatctaatactggttgacttagagtacaggagagggaagcggaattcctagtgtagcggtgaaatgcgtagatattaggaggaacaccagtggcgaaggcggctttctggactgacactgacgctgaggagcgaaagctgggggagcgaacaggattagataccctggtagtcccagccgtaaacgatgaacagtaggtgtggggggagaagccccccgtgccgaagctaacgcattaagtggccccacctggggagaacggtcgcaagattaaaactcaaaggaattgacggggacccgcacaaaacagcggagcatgtggtataattagaagcaacgcgaagaaccttacctagtcttgacatgtcctggattaccagtaatgtgggaagttccatcgggaacaggaacacaggtggtgcatggttgtcgtcagctcgtgtcgtgagatgttgggttaagtcccgcaacgagcgcaacccttattgttagttggtaccattaagttgaccactctagcgagactgcccgggttaaccgggaggaaggtggggatgacgtcaaatcatcatgccccttatgtctagggctacacacgtgctacaatggcaagtacaaagagaagcaatactgtgaagtggagcaaaactcaaaaacttgtctcagttcggattgtaggctgaaactcgcctacatgaagctggagttgctagtaatcgcgaatcagaatgtcgcggtgaatacgttcccgggtcttgcacacaccgcccgtca

SEQ ID NO: 715 - DNA, 1360 bp, Artificial Sequence
  Synthetic polymer
caggacgaacgctggcggcgcgcctaacacatgcaagtcgaacgagcgagagagggtttgctttctcgagcgagtggcgaacgggtgagtaacgcgtgaggaacctgcctcaaagagggggacaaccgttggaaacgactgctaaataccgcataagcccacgacccggcatcgggaagaggggaaaaggagcaatccgctttgagatggcctcgcgtccgattagctagttggtgaggtaacggcccaccaaggcaacgatcggcagccggactgagaggttgaacggccacattgggactgagacacggcccagactcctacgggaggcagcagtggggaatattgcacaatgggggaaaccctgatgcagcgacgccgcgtggaggaagaaggtcttcggattgtaaactcctgttgttgaggaagatattgacggtactcaacaaggaagtgacggctaactacgtgccagcagccgcggtaaaacgtaggtcacaagcgttgtccggaattactgggtgtaaagggagcgcaggcgggaagacaagttggaagtgaaatccatgggctcaacccatgaactgctttcaaaactgtttttcttgagtagtgcagaggtaggcggaattcccggtgtagcggtggaatgcgtagatatcgggaggaacaccagtggcgaaggcggcctactgggcaccaactgacgctgaggctcgaaagtgtgggtagcaaacaggattagataccctggtagtccacaccgtaaacgatgatatactaggtgttggaggattgaccccttcagtgccgcagttaacaacaatgagtaatcccacctggggagtgcgaccgcaaggttgtaaactcaaaggaattgacgggggcccgcacaagcagtagagtatgtggttttaattcgacgcgacgcgaagaacgttatcaagttttgacatcctgggaggataatggaaacagtattttcattcgggacgcagagacaggtggtgcatggttgtcgtcagctcgtgtcgggagatgttgggttaagtcccgcaacgagcgctacccttatggtcaggtagtacgcaagaggactctggccagactgccgttgacaaaacggaggaaggtggggagggcgtcaaatcatcatgccctttatgacttgggctacacacgtactacaatggcgttaaacaaagagaagcaagaccgcgaggtggagcaaaactcagaaacaacgtcccagttcggactgcaggctgcaactcgcctgcacgaagtcggaattgctagtaatcgtggatcagcatgccacggagaatacgttcccgggccttgtacacaccgcccgtca

SEQ ID NO: 716 - DNA, 1423 bp, Artificial Sequence
  Synthetic polymer
atgcaagtcgagcgatttacttcggtgaagagcggcgtccgggtgagtaacgcgtgggtcccctgcctcatacacatggataacataccgaacggtatgctaatactggataatataagagattcacatggatttcttatcaaagctccggcggtatcagacgaaaccgcgtctgattagctagttggtaaggtaatggcttaccaaggcgactatgaatacccgacctgacagggtgatccgccacattggaactgagacacggtccaaactcctacgggaggcagcagtggggaatattgcacaatgggcgaaagcctgatgcagcaacgccgcgtgagtgatgaaggccttcgggtcgtaaaactctgtcctcaaggaagataatgacggtacttgaggaggaagccccggctaactacgtgccagcagccgcggtaatacgtagggggctagcgttatccggatttactgggcgtaaagggtgcgtaggtggttttttaagtcaggagtgaaaggctacggctcaaccgtggtaagctcttgaaactggaaaacttgagtgcaggagaggaaagtggaattcctagtgtagcggtgaaatgcgtagatattaggaggaacaccagtagcgaaggcggctttctggactgtaactgacactgaggcacgaaagcgtggggagcaaacaggattagataccctggtagtccacgccgtaaacgatgagtactaggtgtcgggggttaccccccccggtgccgcacgtaacgcattaagtactccgcctggggagtacgctcgcaagagtgaaactcaaaggaattgacggggacccgcacaagtagcggagcatgtggtttaattcgaagcaacgcgaaaaaccttacctaggcttgacatccttttgaccgatgcctaatcgcatttttcccttcggggacagaagtgacaggtggttcatggtcgtcgtcagctcgtgtcgtgagatgttgggttaagtcccgcaacgagcgcaatccttgcctttagttgccagcattaagttgggcactctagagggactgccagggataacctggaggaaggtggggatgacgtcaaatcatcatgccccttatacttagggctacacacgtgctacaatgggtggtacagagggcagccaagtcgtgaggccgagctaatcccttaaatgccattctcagttcggattgtaggctgaaactcgcctacatgaagctggagttactagtaatcgcagatcagaatgctgcggtgaatgcgttcccgggtcttgtacacaccgcccgtcacaccacggaagttgggggcgcccgaagccacttagctaacccttttgggaagcgagtgtcgaaggtgaaatcaataactggggtgaagtcgtaacaaggtagccgta

SEQ ID NO: 717 - DNA, 1356 bp, Artificial Sequence
  Synthetic polymer
gatgaacgctggcggcgtgcttaacacatgcaagtcgaacgaagcatttaagacggattacttcggtttgaagtcttttatgactgagtggcggacgggtgagtaacgcgtgggtaacctgcctcatacagggggatagcagctggaaacggctgataataccacataagcgcacagtaccacatggtacagtgtgaaaaactccggtggtatgagatggacccgcgtctgattagctagttggtgaggtaacggcccaccaaggcgacgatcagtagccgacctgagagggtgaccggccacattgggactgagacacggcccagactcctacgggaggcagcagtggggaatattgcacaatggaggaaactctgatgcagcgacgccgcgtgagtgaagaagtagttcgctatgtaaagctctatcagcagggaagatagtgacggtacctgactaagaagctccggctaaatacgtgccagcagccgcggtaatacgtatggagcaagcgttatccggatttactgggtgtaaagggagtgtaggtggccaggcaagtcagaagtgaaagcccggggctcaaccccgggactgcttttgaaactgcagggctagagtgcaggaggggcaagtggaattcctagtgtagcggtgaaatgcgtagatattaggaggaacaccagtggcgaaggcggcttgctggactgtaactgacactgaggctcgaaagcgtggggagcaaacaggattagataccctggtagtccacgctgtaaacgatgaatactaggtgtcggggcacataagtgcttcggtgccgcagcaaacgcaataagtattccacctggggagtacgttcgcaagaatgaaactcaaaggaattgacggggacccgcacaagcggtggagcatgtggtttaattcgaagcaacgcgaagaaccttaccaagtcttgacatcctcttgaccggtcagtaatgtgaccttttcttcggaacaagagtgacaggtggtgcatggttgtcgtcagctcgtgtcgtgagatgttgggttaagtcccgcaacgagcgcaacccctattcttagtagccagcatataaggtgggcactctaggaagactgccagggataacctggaggaaggtggggatgacgtcaaatcatcatgccccttatgacttgggctacacacgtgctacaatggcgtaaacaaagtgaagcgagagtgtgagcttaagcaaatcacaaaaataacgtctcagttcggattgtagtctgcaactcgactacatgaagctggaaatcgctagtaatcgcgaaatcagaaatgtcgcggtgaaatacgttcccggg

SEQ ID NO: 718 - DNA, 1374 bp, Artificial Sequence
  Synthetic polymer
ctggctcaggatgaacgctggcggcgtgcctaacacatgcaagtcgagcgagaagctgatgacagatacttcggttgaaggagtcagtggaaagcggcggacgggtgagtaacgcgtaggcaacctgccctttgcacagggatagccattggaaacgatgattaaaacctgataacaccatttggttacatgagcagatggtcaaagatttatcggcaaaggatgggcctgcgtctgattagctagttggtaaggtaacggcttaccaaggcgacgatcagtagccgacctgagagggtgaacggccacattggaactgagacacggtccaaactcctacgggaggcagcagtggggaatattgcacaatgggcgaaagcctgatgcagcaacgccgcgtgaaggaagaaggccttcgggtcgtaaacttctgtccttggggaagaagaactgacggtacccaaggaggaagccccggctaactacgtgccagcagccgcggtaatacgtagggggcaagcgttatccggaattattgggcgtaaagagtacgtaggtggcaacctaagcgcagggtttaaggcaatggctcaaccattgttcgccctgcgaactgggatgcttgagtgcaggagaggaaagcggaattcctagtgtagcggtgaaatgcgtagatattaggaggaacaccagtggcgaaggcggctttctggactgtaactgacactgaggtacgaaagcgtggggagcaaacaggattagataccctggtagtccacgccgtaaacgatgagcactaggtgtcggggtcgcaagacttcggtgccgtagttaacgcattaagtgctccgcctggggagtacgcacgcaagtgtgaaactcaaaggaattgacggggacccgcacaagcagcggagcatgtggtttaattcgaagcaacgcgaagaaccttacaggacttgacatccctctgacagacccttaatcgggtttttctacggacagaggagacaggtggtgcatggttgtcgtcagctcgtgtcgtgagatgttgggttaagtcccgcaacgagcgcaacccttatccttagtagccagcacttcgggtgggcactctagggagactgccagggataacctggaggaaggtggggatgacgtcaaatcatcatgccccttatggcttgggctacacacgtgctacaatggcgtaacaaagggaagcgaacccgtgagggggggcaaatcccaaaaataacgtcccagttcggactgtagtctgcaacccgactacacgaagctggaatcgctagtaatcgcgaatcagaatgtcgcggtgaataagttcccgggtcttgtacacaccgcccgtca

SEQ ID NO: 719 - DNA, 1397 bp, Artificial Sequence
  Synthetic polymer
agagtttgatcctggctcaggacgaacgctggcggcgtgcctaacacatgcaagtcgagcgagtggagttcttcggaacaaagctagcggcggacgggtgagtaacacgtgggcaacctgcctcatagaggggaatagcctcccgaaagggagattaataccgcataagattgtagcttcgcatgaagtagcaattaaaggagcaatccgctatgagatgggcccgcggcgcattagctagttggtgaggtaacggctcaccaaggcgacgatgcgtagccgacctgagagggtgatcggccacattgggactgagacacggcccagactcctacgggaggcagcagtagggaatcttcggcaatgggggcaaccctgaccgagcaacgccgcgtgagtgaagaaggttttcggatcgtaaagctctgttgtaagagaagaacgtgtgtgagagtggaaagttcacacagtgacggtaacttaccagaaagggacggctaactacgtgccagcagccgcggtaatacgtaggtcccgagcgttgtccggatttactgggcgtaaagggagcgtaggcggacttttaagtgagatgtgaaatacccgggctcaacttgggtgctgcatttcaaactggaagtctagagtgcaggagaggagaatggaattcctagtgtagcggtgaaatgcgtagagattaggaagaacaccagtggcgaaggcgattctctggactgtaactgacgctgaggctcgaaagcgtggggagcaaacaggattagataccctggtagtccacgccgtaaacgatgaatactaggtgtaggggttatcatgacctctgtgccgccgctaacgcattaagtattccgcctggggagtacggtcgcaagattaaaactcaaaggaattgacgggggcccgcacaagcagcggagcatgtggtttaattcgaagcaacgcgaagaaccttacctagacttgacatctcctgcattacccttaatcggggaagttccttcgggaacaggaagacaggtggtgcatggttgtcgtcagctcgtgtcgtgagatgttgggttaagtcccgcaacgagcgcaacccttattgttagttgctaccatttagttgagcactctagcgagactgcccgggttaaccgggaggaaggtggggatgacgtcaaatcattatgccccttatgtctagggctacacacgtgctacaatggcaagtacaaagagaagcaagaccgcgaggtggagcaaaactcaaaaacttgtctcagttcggattgtaggctgaaactcgcctacatgaagctggagttgctagtaatcgcgaatcagcatgtcgcggtgaatacgttcccgggccttgcactcaccgcccgtca

SEQ ID NO: 720 - DNA, 1360 bp, Artificial Sequence
  Synthetic polymer
agagtttgatcctggctcaggatgaacgctggcggcgtgcctaacacatgcaagtcgagcgattctcttcggagaagagcggcggacgggtgagtaacgcgtgggtaacctgccctgtacacacggataacataccgaaaggtatgctaatacgggataacatataagagtcgcatgacttttatatcaaagatttttcggtacaggatggacccgcgtctgattagcttgttggcggggtaacggcccaccaaggcgacgatcagtagccgacctgagagggtgatcggccacattggaactgagacacggtccaaactcctacgggaggcagcagtggggaatattgcacaatgggcgcaagcctgatgcagcaacgccgcgtgagcgatgaaggccttcgggtcgtaaagctctgtcctcaaggaagataatgacggtacttgaggaggaagccccggctaactacgtgccagcagccgcggtaatacgtagggggctagcgttatccggatttactgggcgtaaagggagcgtaggcggatgattaagtgggatgtgaaatacccgggctcaacttgggtgctgcattccaaactggttatctagagtgcaggagaggagagtggaattcctagtgtagcggtgaaatgcgtagagattaggaagaacaccagtggcgaaggcgactctctggactgtaactgacgctgaggctcgaaagcgtggggagcaaacaggattagataccctggtagtccacgccgtaaacgatgaatactaggtgtgggggtttcaacacctccgtgccgccgctaacgcattaagtattccgcctggggagtacggtcgcaagattaaaactcaaaggaattgacggggacccgcacaagtagcggagcatgtggtttaattcgaagcaacgcgaagaaccttacctacacttgacatcccttgcattactcttaatcgaggaaatcccttcggggacaaggtgacaggtggtgcatggttgtcgtcagctcgtgtcgtgagatgttgggttaagtcccgcaacgagcgcaacccttgtcgttagttactaccattaagttgaggactctagcgagactgcctgggttaaccaggaggaaggtggggatgacgtcaaatcatcatgccccttatgtgtagggctacacacgtgctacaatggctggtacagagagatgcaataccgcgaggtggagccaaacttaaaaaccagtctcagttcggattgtaggctgaaactcgcctacatgaagctggagttactagtaatcgcgaatcagaatgtcgcggtgaatacgttcccgggtcttgcactcaccgcccgtca

SEQ ID NO: 721 - DNA, 1349 bp, Artificial Sequence
  Synthetic polymer
agagtttgattctggctcaggatgaacgctggcggcgtgcctaacacatgcaagtcgagcgggatcttctggattgaagcttcggtagattgaaggaagtgagagcggcggacgggtgagtaacgcgtaggcaacctgccctttgcagagggatagccattggaaacgatgattaaaacctcataacaccgggaaaagacatcttttttcggtcaaagatttatcggcaaaggatgggcctgcgtctgattagctggttggtgaggtaacggctcaccaaggcgacgatcagtagccgacctgagagggtgatcggccacattggaactgagacacggtccaaactcctacgggaggcagcagtggggaatattgcacaatgggcgaaagcctgatgcagcaacgccgcgtgagtgaagaaggtcttcggattgtaaaactctgtccttggggaagaagaactgacggtacccttggaggaagccccggctaactacgtgccagcagccgcggtaatacgtagggggcaagcgttatccggaattattgggcgtaaagagtgcgtaggtggttacctaagcagagggtgaaaggcaatggctcaaccattgttagccccctgaactgggctacttgagtgcaggagaggaaagcggaattcctagtgtagcggtgaaatgcgtagatattaggaggaacaccagtggcgaaggcggctttctggactgtaactgacactgaggcacgaaagtgtggggagcaaacaggattagataccctggtagtccacaccgtaaacgatgagcactaggtgtcggggtcgcaagacttcggtgccgcagttaacgcattaagtgctccgcctggggagtacgtacgcaagtatgaaactcaagggaattgacggggacccgcacaagcagcggagcatgtggtttaattcgaagcaacgcgaagaaccttaccaggacttgacatcccgatgaccggtccttaaccgggccttctcttcggagcatcggtgacaggtggtgcatggttgtcgtcagctcgtgtcgtgagatgttgggttaagtcccgcaacgagcgcaacccttgtcattagttgccatcattcagttgggcactctagtgagactgccggggacaactcggaggaaggtggggatgacgtcaaatcatcatgccccttatgttctgggctacacacgtgctacaatggttggtacaaagagaagcaataccgtgaggtggagcaaatctcaaaaaccaatcccagttcggaatgtaggctgcaactcgcctacatgaagttggagttgctagtaatcgtggatcagaatgccacg

SEQ ID NO: 722 - DNA, 1392 bp, Artificial Sequence
  Synthetic polymer
agagtttgatcctggctcaggatgaacgctggcggcgtgcctaacacatgcaagtcgagcgagaagccattgactgattcttcggatgaaggaaatggtggaaagcggcggacgggtgagtaacgcgtaggcaacctgccccttacagagggatagccattggaaacgatgattaaaacctcataacgcagaggagtcacatggtttttctgccaaagatttatcggtaagggatgggcctgcgtctgattagctggttggtgaggtaacggctcaccaaggcgacgatcagtagccgacctgagagggtgatcggccacattggaactgagacacggtccaaactcctacgggaggcagcagtggggaatattgcacaatgggcgaaagcctgatgcagcaacgccgcgtgaaggaagaaggccttcgggtcgtaaacttctgtcctaggggaagaagaactgacggtacccttggaggaagccccggctaactacgtgccagcagccgcggtaatacgtagggggcaagcgttatccggaattattgggcgtaaagagtgcgtaggtggctttttaagcgcagggtttaaggcaatggcccaaccattgttcgccctgcgaactggaaggcttgagtgcaggaggggtaagcggaattcctagtgtagcggtgaaatgcgtagatattaggaggaacaccggtggcgaaggcggcttactggactgtaactgacgttgaggctcgaaagcgtggggagcaaacaggattagataccctggtagtccacgccgtaaacgatgattaccaggtgtcggggttccaaggaactccggtgccggcgcaaacgcattaagtaatccacctggggagtacgttcgcaagaatgaaactcaaaggaattgacggggacccgcacaagcggtggagcatgtggtttaattcgaagcaacgcgaagaaccttacccggccttgacatctgactgacgtatgggcaatgccatatttccttcgggacagtcaagacaggtggtgcatggttgtcgtcagctcgtgtcgtgagatgttgggttaagtcccgcaacgagcgcaacccctgtttccagtagccagcaggtaaagctggggactctggagagactgcccgggataaccgggaggaaggcggggatgacgtcaaatcatcatgccccttatggccggggctacacacgtgctacaatggccggtacagagcgaagcgatgccgagaggcggagcgaaccgcaaaaagccggtctcagtacggactggggtctgcaactcgaccccacgaagttggaatcgctagtaatcgcgcatcagcatgccacggtgaatacgttcccgggccttgtacacaccgcccgtca

SEQ ID NO: 723 - DNA, 1400 bp, Artificial Sequence
  Synthetic polymer
agagtttgatcctggctcagattgaacgctggcggcaggcctaacacatgcaagtcgaacggtaacagaaagcagcttgctgctttgctgacgagtggcggacgggtgagtaatgtctgggaaactgcctgatggagggggataactactggaaacggtagctaataccgcataacgtcgcaagaccaaagagggggaccttcgggcctcttgccatcggatgtgcccagatgggattagctagtaggtggggtaacggctcacctaggcgacgatccctagctggtctgagaggatgaccagccacactggaactgagacacggtccagactcctacgggaggcagcagtggggaatattgcacaatgggcgcaagcctgatgcagccatgccgcgtgtatgaagaaggccttcgggttgtaaagtactttcagcggggaggaagggagtaaagttaatacctttgctcattgacgttacccgcagaagaagcaccggctaactccgtgccagcagccgcggtaatacggagggtgcaagcgttaatcggaattactgggcgtaaagcgcacgcaggcggtttgttaagtcagatgtgaaatccccgggctcaacctgggaactgcatctgatactggcaagcttgagtctcgtagaggggggtagaattccaggtgtagcggtgaaatgcgtagagatctggaggaataccggtggcgaaggcggccccctggacgaagactgacgctcaggtgcgaaagcgtggggagcaaacaggattagataccctggtagtccacgccgtaaacgatgtcgacttggaggttgtgcccttgaggcgtggcttccggagctaacgcgttaagtcgaccgcctggggagtacggccgcaaggttaaaactcaaatgaattgacgggggcccgcacaagcggtggagcatgtggtttaattcgatgcaacgcgaagaaccttacctggtcttgacatccacggaagttttcagagatgagaatgtgccttcggggacaggaagacaggtggtgcatggttgtcgtcagctcgtgtcgtgagatgttgggttaagtcccgcaacgagcgcaacccttattgttagttgctaccatttagttgagcactctagcgagactgcccgggttaaccgggaggaaggtggggatgacgtcaagtcatcatggcccttacgaccagggctacacacgtgctacaatggcatatacaaagagaagcgacctcgcgagagcaagcggacctcataaagtatgtcgtagtccggattggagtctgcaactcgactccatgaagtcggaatcgctagtaatcgtagatcagaatgctacggtgaatacgttcccgggccttgtacacaccgcccgtca

SEQ ID NO: 724 - DNA, 1504 bp, Artificial Sequence
  Synthetic polymer
agagtttgatcctggctcagagtgaacgctggcggtaggcctaacacatgcaagtcgaacggcagcacagaggagcttgctccttgggtggcgagtggcggacgggtgaggaatacatcggaatctactctgtcgtgggggataacgtagggaaacttacgctaataccgcatacgacctacgggtgaaagcaggggaccttcgggccttgcgcgattgaatgagccgatgtcggattagctagttggcggggtaaaggcccaccaaggcgacgatccgtagctggtctgagaggatgatcagccacactggaactgagacacggtccagactcctacgggaggcagcagtggggaatattggacaatgggcgcaagcctgatgcagccatgccgcgtgtatgaagaaggccttcgggttgtagagtactttcagcggggaggaaggtgttgaggttaataacctcagcaattgacgttacccgcagaagaagcaccggctaactccgtgccagcagccgcggtaatacggagggtgcaagcgttaatcggaattactgggcgtaaagcgcacgcaggcggtctgtcaagtcggatgtgaaatccccgggctcaacctgggaactgcattcgaaactggcaggctggagtcttgtagaggggggtagaattccaggtgtagcggtgaaatgcgtagagatctggaggaataccggtggcgaaaggcggccccctggacaaagactgacgctcaggtgcgaaagcgtggggagtaaacaggattagataccctggtagtccacgctgtaaacgatgtcgacttagaggttgttcccttgaggagtggcttccggagctaacgcgttaagtcgaccgcctggggagtacggccgcaaggttaaaactcaaatgaattgacgggggcccgcacaagcggtggagcatgtggtttaattcgatgcaacgcgaagaaccttacctactcttgacatccagagaacttagcagagatgctttggtgccttcgggaactctgagacaggtgctgcatggctgtcgtcagctcgtgttgtgaaatgttgggttaagtcccgcaacgagcgcaacccttatcctttgttgccagcggtccggccgggaactcaaaggagactgccagtgataaactggaggaaggtggggatgacgtcaagtcatcatggcccttacgagtagggctacacacgtgctacaatggcgtatacaaagagaagcgacctcgcgagagcaagcggacctcataaagtatgtcgtagtccggattggagtctgcaactcgactccatgaagtcggaatcgctagtaatcgtggatcagaatgccacggtgaatacgttcccgggccttgtacacaccgcccgtcacaccatgggagtgggttgcaaaagaagtaggtagcttaaccttcgggagggcgcttaccactttgtgattcatgactggggtgaagtcgtaacaaggtagcc

SEQ ID NO: 725 - DNA, 1354 bp, Artificial Sequence
  Synthetic polymer
gatgaacgctggcggcgtgcttaacacatgcaagtcgaacgaagcatttagaacagattatttcggtatgaagttctttatgactgagcggcggacgggtgagtaacgcgtgggtaacctgccttgtactgggggatagcagctggaaacggctggtaataccgcataagcgcacaatgttgcatgacatggtgtgaaaaactccggtggtataagatggacccgcgtctgattagctagttggtgagataacagcccaccaaggcgacgatcagtagccgacctgagagggtgaccggccacattgggactgagacacggcccagactcctacgggaggcagcagtggggaatattgcacaatggaggaaactctgatgcagcgacgccgcgtgagtgaagaagtaattcgttatgtaaagctctatcagcagggaagatagtgacggtacctgactaagaagctccggctaaatacgtgccagcagccgcggtaatacgtatggagcaagcgttatccggatttactgggtataaagggagtgtaggtggccatgcaagtcagaagtgaaaatccggggctcaaccccggaactgcttttgaaactgtaaggctagagtgcaggaggggtgagtggaattcctagtgtagcggtgaaatgcgtagatattaggaggaacaccagtggcgaaggcggctcactggactgtaactgacactgaggctcgaaagcgtggggagcaaacaggattagataccctggtagtccacgccgtaaacgatgaatactaggtgtcggggcccataagggcttcggtgccgcagcaaacgcaataagtattccacctggggagtacgttcgcaagaatgaaactcaaaggaattgacggggacccgcacaagcggtggagcatgtggtttaattcgaagcaacgcgaaaaaccttaccaagtcttgacatcctgatgacggttccttaaccggaacttttcttcggaacatcagagacaggtggtgcatggttgtcgtcagctcgtgtcgtgagatgttgggttaagtcccgcaacgagcgcaacccctatttccagtagccagcagtaagatgggcactctggagagactgccggggataacccggaggaaggtggggatgacgtcaaatcatcatgccccttatgatttgggctacacacgtgctacaatggcagttacaaagagaagcaaacctgtgaaggcgagcaaacctcaaaaaggctgtctcagttcggattgtagtctgcaactcgactacatgaagctggaatcgctagtaatcgcagatcagcatgctgcggtgaatacgttcccgggtct

SEQ ID NO: 726 - DNA, 1411 bp, Artificial Sequence
  Synthetic polymer
agagtttgatcctggctcaggacgaacgctggcggcatgcctaacacatgcaagtcgaacggagattacttcgataatcttagtggcgaacgggtgagtaacgcgtaggcaacctgccctctagatggggacaacatcccgaaaggggtgctaataccgaatgtgacaagttttccgcatggaagacttgtgaaagatggcctctatttataagctatcgctagaggatgggcctgcgtctgattagctagttggtggggtaacggctcaccaaggcgatgatcagtagccgatctgagaggatgaacggccacattgggagtgagacacggcccagactcctacgggaggcagcagtggggaatcttccgcaatgggcgaaagcctgacggagcaatgccgcgtgagtgatgaaggaattcgttccgtaaagctcttttgtttatgacgaatgtgcgagttgtgaataatgacttgtaatgacggtagtaaacgaataagccacggctaactacgtgccagcagccgcggtaatacgtaggtggcgagcgttgtccggaattattgggcgtaaagagcatgtaggcggtcgtttaagtctggagtgaaaatgcggggctcaaccccgtatagctctggatactggaggacttgagtgcaggagaggaaaggggaattcccagtgtagcggtgaaatgcgtagatattgggaggaacaccagtggcgaaggcgcctttctggactgtgtctgacgctgagatgcgaaagccagggtagcgaacgggattagataccccggtagtcttggccgtaaacgatgggtactaggtgtaggaggtatcgaccccttctgtgccggagttaacgcaataagtaccccgcctggggagtacgtccgcaaggatgaaactcaaaggaattgacgggggcccgcacaagcggtggagtatgtggtttaattcgacgcaacgcgaagaaccttaccaaggcttgacattgaatgaccgcttcagagatgaggctttcccttcggggacatgaaaacaggtggtgcatggctgtcgtcagctcgtgtcgtgagatgttgggttaagtcccgcaacgagcgcaacccctatcctatgttaccagcgggtaatgccggggactcataggagactgccaaggacaacttggaggaaggcggggatgacgtcaagtcatcatgccccttatgtcttgggctacacacgtactacaatggtcgacaacagagggaagcaaagccgcgaggcagagcaaaccccagaaactcgatctcagttcggattgcaggctgcaactcgcctgcatgaagtcggaatcgctagtaatcgcaggtcagcatactgcggtgaatacgttcccgggccttgcactcaccgcccgtca

SEQ ID NO: 727 - DNA, 1357 bp, Artificial Sequence
  Synthetic polymer
gacgaacgctggcggcgtgcttaacacatgcaagtcgaacggagcacccttgaatgaggtttcggccaaaggaaaggaatgcttagtggcggactggtgagtaacgcgtgaggaacctgcctttcagagggggacaacagctggaaacggctgctaataccgcatgacgcattcggatggcatcatctgaatgccaaagatttatcgctgaaagatggcctcgcgtctgattagatagttggcggggtaacggcccaccaagtcgacgatcagtagccggactgagaggttgaccggccacattgggactgagatacggcccagactcctacgggaggcagcagtggggaatattgggcaatgggcgcaagcctgacccagcaacgccgcgtgaaggaagaaggctttcgggttgtaaacttcttttaagagggaagagcagaagacggtacctcttgaataagccacggctaactacgtgccagcagccgcggtaatacgtaggtggcaagcgttgtccggatttactgggtgtaaagggcgtgcagccgggtgcgcaagtcagatgtgaaatctcagggctcaaccctgaaactgcatttgaaactgtgcatcttgagtgccggagaggtactcggaattccttgtgtagcggtgaaatgcgtagatataaggaagaacaccagtggcgaaggcggattactggacggtaactgacggtgaggcgcgaaagcgtggggagcaaacaggattagataccctggtagtccacgctgtaaacgatcaatactaggtgtgcggggactgaccccctgcgtgccggagttaacacaataagtattgcacctggggagtacgatcgcaaggttgaaactcaaaggaattgacgggggcccgcacaagcggtggattatgtggtttaattcgaagcaacgcgaagaaccttaccaggtcttgacatcctgctaacgaagtagagatacatcaggtgcccttcggggaaagcagagacaggtggtgcatggttgtcgtcagctcgtgtcgtgagatgttgggttaagtcccgcaacgagcgcaacccttatctttagtagccagcggttcggccgggcactctagagagactgccagggataacctggaggaaggcggggatgacgtcaaatcatcatgccccttatgacttgggctacacacgtgctacaatggcgtaaacaaagggaagcaaagctgtgaagccgagcaaatctcaaaaataacgtctcagttcggactgtagtctgcaacccgactacacgaagctggaatcgctagtaatcgcagatcagaatgctgcggtgaatacgctcccgggtct

SEQ ID NO: 728 - DNA, 1340 bp, Artificial Sequence
  Synthetic polymer
gatgaacgctggcggcgtgcctaacacatgcaagtcgaacggaatttacatgaagcctagcgattgtaaatttagtggcggacgggtgagtaacgcgtgggtaacctgccttgtactgggggacaacagttggaaacggctgctaataccgcatgacgcattcggatggcatcatctgaatgccaaagatttatcgctgaaagatggcctcgcgtctgattagatagttggcggggtaacggcccaccaagtcgacgatcagtagccggactgagaggttgaccggccacattgggactgagatacggcccagactcctacgggaggcagcagtggggaatattgggcaatgggcgcaagcctgacccagcaacgccgcgtgaaggaagaaggctttcgggttgtaaacttcttttaagagggaagagcagaagacggtacctcttgaataagccacggctaactacgtgccagcagccgcggtaatacgtaggtggcaagcgttgtccggatttactgggtgtaaagggcgtgcagccgggtgcgcaagtcagatgtgaaatctcagggctcaaccctgaaactgcatttgaaactgtgcatcttgagtgccggagaggtaatcggaattccttgtgtagcggtgaaatgcgtagatataaggaagaacaccagtggcgaaggcggattactggacggtaactgacggtgaggcgcgaaagcgtggggagcaaacaggattagataccctggtagtccacgctgtaaacgatcaatactaggtgtgcggggactgaccccctgcgtgccggagttaacacaataagtattgcacctggggagtacgatcgcaaggttgaaactcaaaggaattgacgggggcccgcacaagcggtggattatgtggtttaattcgaagcaacgcgaagaaccttaccaggtcttgacatcctgctaacgaagtagagatacatcaggtgcccttcggggaaagcagagacaggtggtgcatggttgtcgtcagctcgtgtcgtgagatgttgggttaagtcccgcaacgagcgcaacccctattgttagttgctacgcaagagcactctagcgagactgccgttgacaaaacggaggaaggtggggacgacgtcaaatcatcatgccccttatgacctgggctacacacgtaatacaatggcggagaacaaagggatgcaaagccgcgaggcagagcgaaccccaaaaagccgtcccagttcggatcgcaggctgcaacccgcctgcgtgaagtcggaatcgctagtaatcgtgggtcagcataccacggtgaatacgttcccgggcct

SEQ ID NO: 729 - DNA, 1355 bp, Artificial Sequence
  Synthetic polymer
gatgaacgctggcggcgtgcttaacacatgcaagtcgaacgaagcatttaaaacggattttttcggaatgaagttttttatgactgagtggcggacgggtgagtaacgcgtgggtaacctgcctcacacagggggatagcagttggaaacgactggtaataccgcataagcgcacagcttcgcatgaagcggtgtgaaaaactccggtggtgtgagatggactcgcgtctgattaggtagttggtgaggtaacggcccaccaagccgacgatcagtagccgacctgagagggtgaccggccacattgggactgagacacggcccagactcctacgggaggcagcagtggggaatattgcacaatggaggaaactctgatgcagcgacgccgcgtgagtgaagaagtatttcggtatgtaaagctctatcagcagggaagacagtgacggtacctgactaagaagctccggctaaatacgtgccagcagccgcggtaatacgtatggagcaagcgttatccggatttactgggtgtaaagggagtgtaggtggtatcacaagtcagaagtgaaagcccggggctcaaccccgggactgcttttgaaactgtggaactggagtgcaggagaggtaagtggaattcctagtgtagcggtgaaatgcgtagatattaggaggaacaccagtggcgaaggcggcttactggacgattactgacgctgaggctcgaaagcgtggggagcaaacaggattagataccctggtagtccacgccgtaaacgatgaatactaggtgtcgggaggcattgcctttcggtgccgccgcaaacgcattaagtattccacctggggagtacgttcgcaagaatgaaactcaaaggaattgacggggacccgcacaagcggtggagcatgtggtttaattcgaagcaacgcgaagaaccttaccaagtcttgacatcccgatgacagagcatgtaatgtgctttctcttcggagcatcggtgacaggtggtgcatggttgtcgtcagctcgtgtcgtgagatgttgggttaagtcccgcaacgagcgcaacccctatcctcagtagccagcaggtaaagctgggcactctgtggagactgccagggataacctggaggaaggtggggatgacgtcaaatcatcatgccccttatgacttgggctacacacgtgctacaatggcgtaaacaaagtgaagcgagagtgtgagcttaagcaaatcacaaaaataacgtctcagttcggattgtagtctgcaacccgactacatgaagctggaatcgctagtaatcgcgaatcagaatgtcgcggtgaatacgttcccgggtct

SEQ ID NO: 730 - DNA, 1399 bp, Artificial Sequence
  Synthetic polymer
ttcgcccttagagtttgatcctggctcaggacgaacgctggcggcatgcctaacacatgcaagtcgaacggaactttttcaaatgatttcttcggaatgaagttggctaagtttagtggcggacgggtgagtaacgcgtgagtaacctgccttcgagaggggaataacaatctgaaaagattgctaataccgcataacatatcgttatcgcatggtgatgatatcaaagattttatcgctcgaagatggactcgcgtccgattagttagttggtgaggtaacggctcaccaagaccacgatcggtagccggactgagaggttgaacggccacattgggactgagacacggcccagactcctacgggaggcagcagtgggggatattgcgcaatgggggcaaccctgacgcagcaatgccgcgtgaaggatgaaggttttcggattgtaaacttcttttattaaggacgaacaatgacggtacttaatgaataagctccggctaactacgtgccagcagccgcggtaatacgtagggagcaagcgttgtccggatttactgggtgtaaagggtgcgtaggcggctttgcaagtcagatgtgaaacctatgggctcaacccataaactgcatttgaaactgtagagcttgagtgaagtagaggtaggcggaattccccgtgtagcggtgaaatgcgtagagatggggaggaacaccagtggcgaaggcggcctactgggctttaactgacgctgaggcacgaaagcgtgggtagcaaacaggattagataccctggtagtccacgctgtaaacgatgaatactaggtgtgggaggactgaccccttccgtgccgcagttaacacaataagtattccacctggggagtacgaccgcaaggttgaaactcaaaggaattgacgggggcccgcacaagcagtggagtatgtggtttaattcgaagcaacgcgaagaaccttaccaggtcttgacatccaactaacgaagtagagatacattaggtgcccttcggggaaagttgagacaggtggtgcatggttgtcgtcagctcgtgtcgtgagatgttgggttaagtcccgcaacgagcgcaacccttgctattagttgctacgcaagagcactctaataggactgccgttgacaaaacggaggaaggtggggaggacgtcaaatcatcatgccccttatgacctgggctacacacgtactacaatggatgttaacagagggaagcaatacagcgatgtggagcaaacccccaaaaacattctcagttcagattgcaggctgcaacccgcctgcatgaagtcggaattgctagtaatcgcggatcagcatgccgcggtgaatacgttcccgggccttgcactcaccgcccgtca

SEQ ID NO: 731 - DNA, 1395 bp, Artificial Sequence
  Synthetic polymer
agagtttgatcctggctcaggatgaacgctggcggcgtgcttaacacatgcaagtcgaacggaacacccttgaaggagttttcggataactgataggactgtttagtggcggacgggtgagtaacgcgtgagcaacctgccttggagtggggaataacagctggaaacagctgctaataccgcataatatgtctgaaccgcatggctctggacatcaaagatttatcgctctgagatggactcgcgtctgattagctagttggtggggcaacggcccaccaaggcgacgatcagtagccggactgagaggttggccggccacattgggactgagacacggcccagactcctacgggaggcagcagtggggaatattgggcaatgggcgcaagcctgacccagcaacgccgcgtgaaggaagaaggctttcgggttgtaaacttcttttctcagggacgaagcaagtgacggtacctgaggaataagccacggctaactacgtgccagcagccgcggtaatacgtaggtggcaagcgttatccggatttactgggtgtaaagggcgtgtaggcggggacgcaagtcagatgtgaaaaccacgggctcaacctgtggtctgcatttgaaactgtgtttcttgagtactggagaggcagacggaattcctagtgtagcggtgaaatgcgtagatattaggaggaacaccagtggcgaaggcggtctgctggacagcaactgacgctgaggcgcgaaagcgtggggagcaaacaggattagataccctggtagtccacgctgtaaacgatggatactaggtgtggggggactgactccctccgtgccgcagttaacacaataagtatcccacctggggagtacgatcgcaaggttgaaactcaaaggaattgacgggggcccgcacaagcggtggagtatgtggtttaattcgaagcaacgcgaagaaccttaccaggtcttgacatcctcctgaatgaagggtaatgccttcaggccttcgggacaggagagacaggtggtgcatggttgtcgtcagctcgtgtcgtgagatgttgggttaagtcccgcaacgagcgcaacccctatccttagtagccagcaggtagagccgggcactctagggagactgccggggataacccggaggaaggtggggatgacgtcaaatcatcatgccccttatgatctgggctacacacgtgctacaatggcgtaaacaaagggaagcgagacggcgacgttaagcaaaccccagaaaaggcgccccagttcggattgcagcctgcaactcggctgcatgaagccggaatcgctagtaatcgcggatcagaatgccgcggtgaatacgttcccgggtcttgcacacaccgcccgtca

SEQ ID NO: 732 - DNA, 1375 bp, Artificial Sequence
  Synthetic polymer
agagtttgatcctggctcaggatgaacgctggcggcatgcctaacacatgcaagtcgaacggagttaatcggagcttgctttgattaacttagtggcggacgggtgagtaacacgtgagcaacctgcctctcagagaggaatagcttccggaaacggatggtaatacctcataatatattttttcggcatcgaagagatatcaaagatttatcgctgagagatgggctcgcgtctgattagctagttggtaaggtaacggcttaccaaggcgacgatcagtagccggactgagaggttgaacggccacattgggactgagacacggcccagactcctacgggaggcagcagtggggaatattgcacaatgggcggaagcctgatgcagcaatgccgcgtgagggaagaaggtcttcggattgtaaacctctgtcataagggaagaaacaagactgtaccttagaaggaagctccggctaactacgtgccagcagccgcggtaatacgtagggagcgagcgttatccggaattactgggtgtaaagggagtgtaggcgggattgtaagtcagatgtgaaaactatgggctcaactcatagactgcatttgaaactgcgattcttgagtgaagtagaggtaagcggaattcctagtgtagcggtgaaatgcgtagatattaggaggaacaccagtggcgaaggcggcttgctggacgacaactgacgctgaggcgcgaaagcgtggggagcaaacaggataagataccctggtagtccacgctgtaaacgatgaatactaggtgtgggaggacgggccccttccgtgccgcagttaacacaataagtattccacctggggagtacgaccgcaaggttgaaactcaaaggaattgacgggggcccgcacaagcagtggattatgtggtttaatttgacgcaacgcgaagaaccttaccaggatttgacatcccactaacgaagtagagatacattaggtgcccttcggggaaagtggagacaggtggtgcatggttgtcgtcagctcgtgtcgtgagatgttgggttaagtcccgcaacgagcgcaacccctattgttagttgctacgcaagagcactctagcgagactgccgttgacaaaacggaggaaggcggggacgacgtcaaatcatcatgccccttatgtcctgggctacacacgtaatacaatggtggttaacagagggaagcaatacagtgatgtggagcaaatccctaaaagccatctcagttcggattgcaggctgcaactcgcctgcatgaagctggaattgctagtaatcgcggatcagcatgccgcggtgaatacgatcccgggccttgtactcaccgcccgtca

SEQ ID NO: 733 - DNA, 1368 bp, Artificial Sequence
  Synthetic polymer
agagtttgatcctggctcaggacgaacgctggcggcacgcctaacacatgcaagtcgaacggagaatttaggtttacttgaattcttagtggcggacgggtgagtaacacgtgagcaacctgcctttgagagaggaataatttctggaaacggattgtaatacctcataacatagcgaaatcgcatgattatgctatcaaagatttatcactcaaagatgggctcgcgtctgattagatagttggtgaggtaacggcccaccaagtcgacgatcagtagccggactgagaggttgaacggccacattgggactgagacacggcccagactcctacgggaggcagcagtggggaatattgcacaatgggggaaaccctgatgcagcgatgccgcgtggaggaagaaggttttcggattgtaaactcctgtcttaaaggacgataatgacggtactttaggaggaagctccggctaactacgtgccagcagccgcggtaatacgtagggagcgagcgttgtccggaattactgggtgtaaagggagcgtaggcgggattgcaagtcagatgtgaaaggcggaggcttaacctccgagctgcatttgaaactgtagttcttgagtgaagtagaggcaagcggaattcctggtgtagcggtgaaatgcgtagatatcaggaggaacaccggcggcgaaggcggcttgctgggcttttactgacgctgaggctcgaaagcgtggggagcaaacaggattagataccctggtagtccacgctgtaaacgatgattactaggtgtggggggactgaccccttccgtgccgcagttaacacaataagtaatccacctggggagtacggccgcaaggttgaaactcaaaggaattgacgggggcccgcacaagcagtggagtatgtggtttaattcgaagcaacgcgaagaaccttaccaggtcttgacatcggatgcatagtttagagataaatgaaatttcttcggaaacatctagacaggtggtgcatggttgtcgtcagctcgtgtcgtgagatgttgggttaagtcccgcaacgagcgcaacccttacctttagttgctacgcaagagcactctaaagggactgccgttgacaaaacggaggaaggtggggatgacgtcaaatcatcatgccccttatgacctgggctacacacgtactacaatggcaatcaacaaagagcagcaaaaccgcaaggcggagcgaatctcaaaaaattgtcccagttcggattgcaggctgcagctcgcctgcatgaagtcggaattgctagtaatcgcggatcagcatgccgcggtgaatacgttcccgggccttgcacacaccgcccgtca

SEQ ID NO: 734 - DNA, 1394 bp, Artificial Sequence
  Synthetic polymer
agagtttgatcctggctcaggatgaacgctggcggcgtgcttaacacatgcaagtcgaacgaagcatatttatcagattccttcgggaagaagatttatatgactgagtggcggatgggtgagtaacgcgtgggtaacctgcctcacacagggggatagcagatggaaacggctgataataccgcataagcgcacagcttcgcatgaagcggtgtgaaaaactccggtggtgtgagatggacccgcgtctgattagcttgttggcggggtaacggcccaccaaggcgacgatcagtagccgacctgagagggtgaccggccacattgggactgagacacggcccagactcctacgggaggcagcagtggggaatattgcacaatggaggaaactctgatgcagcgacgccgcgtgagtgaagaagtaattcgttatgtaaagctctatcagcagggaagacagtgacggtacctgactaagaagctccggctaaatacgtgccagcagccgcggtaatacgtatggagcaagcgttatccggatttactgggtgtaaagggagtgtaggtggcatcacaagtcagaagtgaaagcccggggctcaaccccgggactgcttttgaaactgtggggctggagtgcaggagaggcaagtggaattcctagtgtagcggtgaaatgcgtagatattaggaggaacaccagtggcgaaggcggcttgctggactgtaactgacactgaggctcgaaagcgtggggagcaaacaggattagataccctggtagtccacgccgtaaacgatgaatactaggtgtcggggcccaaaagggcttcggtgccgcagcaaacgcaataagtattccacctggggagtacgttcgcaagaatgaaactcaaaggaattgacggggacccgcacaagcggtggagcatgtggtttaattcgaagcaacgcgaagaaccttaccaagtcttgacatccctctgacagagtatgtaatgtacttttccttcgggacagaggaggcaggtggtgcatggttgtcgtcagctcgtgtcgtgagatgttgggttaagtcccgcaacgagcgcaacccctatccttagtagccagcacgtaacggtgggcactctagggagactgccagggataacctggaggaaggtggggatgacgtcaaatcatcatgccccttatgacttgggctacacacgtgctacaatggcgtaaacaaagtgaagcgagagtgtgagcttaagcaaatcacagaaataacgtctcagttcggattgtagtctgcaactcgactacatgaagctggaatcgctagtaatcgcgaatcagaatgtcgcggtgaatacgttaccgggtcttgcacacaccgcccgtca

SEQ ID NO: 735 - DNA, 1362 bp, Artificial Sequence
  Synthetic polymer
agagtttgatcctggctcaggacgaacgctggcggcgtgcctaacacatgcaagtcgagcgatttacttcggtaaagagcggcggacgggtgagtaacgcgtgggtaacctgccctgtacacacggataacataccgaaaggtatgctaatacgagataatatacttttatcgcatggtagaagtatcaaagcttttgcggtacaggatggacccgcgtctgattagctagttggtaaggtaacggcttaccaaggcgacgatcagtagccgacctgagagggtgatcggccacattggaactgagacacggtccaaactcctacgggaggcagcagtggggaatattgcacaatgggcgaaagcctgatgcagcaacgccgcgtgagcgatgaaggccttcgggtcgtaaagctctgtcctcaaggaagataatgacggtacttgaggaggaagccccggctaactacgtgccagcagccgcggtaatacgtagggggctagcgttatccggaattactgggcgtaaagggtgcgtaggtggtttcttaagtcagaggtgaaaggctacggctcaaccgtagtaagcctttgaagctgggaaacttgagtgcaggagaggagagtggaattcctagtgtagcggtgaaatgcgtagatattaggaggaacaccggtggcgaaggcggcctgctggacgatgactgacgctgaggctcgaaagcgtggggagcaaacaggattagataccctggtagtccacgccgtaaacgatgaatactaggtgtcggggggcacggctccccggtgccgcagcaaacgcagtaagtattccacctggggagtacgttcgcaagaatgaaactcaaaggaattgacggggacccgcacaagcggtggagcatgtggtttaattcgaagcaacgcgaagaaccttaccaggccttgacatcgatctgacagagcatgtaacgtgctttcccttcggggcagagaagacaggtggtgcatggttgtcgtcagctcgtgtcgtgagatgttgggttaagtcccgcaacgagcgcaacccttgcccctagtagccagcacccagggtgggcactctaaggggacggccggggacaacccggaggaaggcggggacgacgtcaaatcatcatgccccttatggcctgggctacacacgtgctacaatggcgcacacaaagggatgcgaggccgcgaggcggagcgaagcccagagaaggcgccccagttcggactgcagtctgcaacccgactgcacgaagccggaatcgctagtaatcgcagatcagaatgctgcggtgaatacgaaaccgggtcttgcactcaccgcccgtca

SEQ ID NO: 736 - DNA, 1376 bp, Artificial Sequence
  Synthetic polymer
agagtttgatcctggctcaggatgaacgctggcggcgtgcttaacacatgcaagtcgaacggacgatgaagagcttgcttttcagagttagtggcggacgggtgagtaacgcgtgggtaacctgcctcatacaggggaatagcagctggaaacggctgataaaaccgcataagcgcacagcatcgcatgatgcagtgtgaaaaactccggtggtatgagatggacccgcgtctgattagcttgttggtgaggtaacggcccaccaaggcgacgatcagtagccggcctgagagggtgaccggccacattgggactgagacacggcccaaactcctacgggaggcagcagtggggaatattgcacaatgggggaaaccctgatgcagcgacgccgcgtgaaggaagaagtatctcggtatgtaaacttctatcagcagggaagataatgacggtacctgactaagaagccccggctaactacgtgccagcagccgcggtaatacgtagggggcaagcgttatccggatttactgggtgtaaagggagcgtaggcggcggagcaagtcagaagtgaaagcccggggctcaaccccgggacggcttttgaaactgccctgcttgatttcaggagaggtaagcggaattcctagtgtagcggtgaaatgcgtagatattaggaggaacaccagtggcgaaggcggcttgctggacgatgactgacgttgaggctcgaaagcgtggggagcaaacaggattagataccctggtagtccacgccgtaaacgatgactgctaggtgtcgggtggcaaagccattcggtgccgcagctaacgcaataagcagtccacctggggagtacgttcgcaagaatgaaactcaaaggaattgacggggacccgcacaagcggtggagcatgtggtttaattcgaagcaacgcgaagaaccttacctgatcttgacatcccgatgaccgcttcgtaatggaaggttttcttcggaacatcggtgacaggtggtgcatggttgtcgtcagctcgtgtcgtgagatgttgggttaagtcccgcaacgagcgcaacccctatcttcagtagccagcaagttaagttgggcactctggagagactgccagggataacctggaggaaggtggggatgacgtcaaatcatcatgccccttatgaccagggctacacacgtgctacaatggcgtaaacaaagagaagcgaacccgcgagggcaagcaaatctcaaaaataacgtctcagttcggattgtagtctgcaactcgactacacgaagctggaatcgctagtaatcgcagatcagaatgctgcggtgaatacgttcccgggtcttgcactcaccgcccgtca

SEQ ID NO: 737 - DNA, 1378 bp, Artificial Sequence
  Synthetic polymer
agagtttgatcctggctcaggacgaacgctggcggcgcgcctaacacatgcaagtcgaacggagctatgttgaaagcttgctggatatatagcttagtggcggacgggtgagtaacacgtgagtaacctgcctttcagagtggaataacgtttggaaacgaacgctaataccgcataacgtcagaggacggcatcgttctttgaccaaagatttatcgctgaaagatgggctcgcggccgattaggtagttggtgagataacagcccaccaagccgacgatcggtagccggactgagaggttgatcggccacattgggactgagacacggcccagactcctacgggaggcagcagtgggggatattgcacaatggggggaaccctgatgcagcgacgccgcgtgagggaagacggttttcggattgtaaacctctgtctttagggacgaaaaaaatgacggtacctaaagaggaagccacggctaactacgtgccagcagccgcggtaatacgtaggtggcaagcgttgtccggaattactgggtgtaaagggagcgtaggcggggaggcaagttgaatgtttaaactatcggctcaactgatagtcgcgttcaaaactgccactcttgagtgcagtagaggtaggcggaattcctagtgtagcggtgaaatgcgtagatattaggaggaacaccagtagcgaaggcggctttctggactgtaactgacgctgaggcacgaaagcgtggggagcaaacaggattagataccctggtagtccacgctgtaaacgatgagtactaggtgtcggaggttacccccttcggtgccgcagctaacgcattaagtactccgcctggggagtacgcacgcaagtgtgaaactcaaaggaattgacggggacccgcacaagtagcggagcatgtggtttaattcgaagcaacgcgaagaaccttaccagggcttgacatcccggtgaccggtctagagatagacttttcccttcggggacaccggtgacaggtggtgcatggttgtcgtcagctcgtgtcgtgagatgttgggttaagtcccgcaacgagcgcaacccctattgttagttgctacgcaagagcactctagcgagactgccgttgacaaaacggaggaaggtggggacgacgtcaaatcatcatgccccttatgtcctgggccacacacgtactacaatggcggtcaacagagggaagcaataccgcgaggtggagcaaacccctaaaagccgtcccagttcggattgcaggctgcaactcgcctgtatgaagttggaatcgctagtaatcgcggatcagcatgccgcggtgaatacgttcccgggccttgcactcaccgcccgtca

SEQ ID NO: 738 - DNA, 1385 bp, Artificial Sequence
  Synthetic polymer
agagtttgatcctggctcaggatgaacgctggcggcgtgcctaacacatgcaagtcgagcgggatctttttaaatgacgcttcggttgattttaaaaagtgagagcggcggacgggtgagtaacgcgtaggcaacctgccctttgcagagggatagccattggaaacgatgattaaaacctcataatgccattaagagacatctcttgatggccaaagatttatcggcaaaggatgggcctgcgtctgattagctagttggtggggtaacggcctaccaaggcgacgatcagtagccgacctgagagggtgatcggccacattggaactgagacacggtccaaactcctacgggaggcagcagtggggaatattgcacaatgggcgaaagcctgatgcagcaacgccgcgtgaaggaagaaggtcttcggattgtaaacttctgtccttagggaagataatgacggtacctttggaggaagccccggctaactacgtgccagcagccgcggtaatacgtagggggcaagcgttatccggaattattgggcgtaaagagtgcgtaggtggttacctaagcagggggtgaaaggcaatggctcaaccattgttagccccctgaactgggctacttgagtgcaggagaggaaagcggaattcctagtgtagcggtgaaatgcgtagatattaggaggaacaccagtggcgaaggcggctttctggactgttactgacactgaggcacgaaagtgtggggagcaaacaggattagataccctggtagtccacaccgtaaacgatgagcactaggtgtcggggtcgcaaggcttcggtgccgcagttaacgcattaagtgctccgcctggggagtacgtacgcaagtatgaaactcaaaggaattgacggggacccgcacaagcagcggagcatgtggtttaattcgaagcaacgcgaagaaccttaccaggacttgacatcccgatgaccggttcttaaccgaaccttctcttcggagcatcggtgacaggtggtgcatggttgtcgtcagctcgtgtcgtgagatgttgggttaagtcccgcaacgagcgcaacccttgccattagttgccatcattaagttgggcactctagtgggactgccggggataactcggaggaaggtggggatgacgtcaaatcatcatgccccttatgttctgggctacacacgtgctacaatggtcggtacaaagagcagcaatctcgtgagaaggagcaaatctcaaaagccgatcccagttcggattgtaggctgcaactcgcctacatgaagttggagttgctagtaatcgcggatcagaatgccgcggtgaatgcgttcccgggtcttgcactcaccgcccgtca

SEQ ID NO: 739 - DNA, 1395 bp, Artificial Sequence
  Synthetic polymer
agagtttgatcctggctcaggacgaactttggcggcgtgcttaacacatgcaagtcgaacgagaatctgtggaaagaggattcgtccaattgaagcagaggacagtggcggacgggtgagtaacgcgtgaggaacctgcctttcagagggggacaacagttggaaacgactgctaataccgcatgacacattgaggtcgcatggccttaatgtcaaagatttatcgctgaaagatggcctcgcgtctgattagctagttggtgaggtaacggcccaccaaggcgacgatcagtagccggactgagaggttgaacggccacattgggactgagatacggcccagactcctacgggaggcagcagtggggaatattgggcaatgggcgcaagcctgacccagcaacgccgcgtgaaggaagaaggctttcgggttgtaaacttcttttgtcagggacgagtagaagacggtacctgacgaataagccacggctaactacgtgccagcagccgcggtaatacgtaggtggcaagcgttgtccggatttactgggtgtaaagggcgtgtagccgggagggcaagtcagatgtgaaatccacgggcttaactcgtgaactgcatttgaaactgttcttcttgagtatcggagaggcaatcggaattcctagtgtagcggtgaaatgcgtagatattaggaggaacaccagtggcgaaggcggattgctggacgacaactgacggtgaggcgcgaaagcgtggggagcaaacaggattagataccctggtagtccacgctgtaaacgatgaatactaggtgtgcggggactgaccccctgcgtgccgcagttaacacaataagtattccacctggggagtacgatcgcaaggttgaaactcaaaggaattgacgggggcccgcacaagcggtggattatgtggtttaattcgaagcaacgcgaagaaccttaccagggcttgacatcctgctaacgagatagagatatgttaggtgcccttcggggaaagtagagacaggtggtgcatggttgtcgtcagctcgtgtcgtgagatgttgggttaagtcccgcaacgagcgcaacccctgttcttagtagccagcacgtagtggtgggcactctagggagactgccagggtgaacctggaggaaggtggggatgacgtcaaatcatcatgccccttatgacttgggctacacacgtgctacaatggcgtaaacaaagggaagcgagagcgtgagtttgagcaaatcccaaaaataacgtctcagttcggattgtagtctgcaactcgactacatgaagctggaatcgctagtaatcgcgaatcagaatgtcgcggtgaatacgttcccgggtcttgcacacaccgcccgtca

SEQ ID NO: 740 - DNA, 1354 bp, Artificial Sequence
  Synthetic polymer
gatgaacgctggcggcgtgcctaacacatgcaagtcgaacgaggtaaatgagatgaagttttcggatggattcttatttaccgagtggcggacgggtgagtaacgcgtgggtaacctgcctcatacagggggataacgattggaaacgattgctaataccgcataagcgcacagtaccacatggtacagtgtgaaaaactccggtggtatgagatggacccgcgtctgattagctagttggtgaggtaacggcccaccaaggcaacgatcagtagccgacctgagagggtgaccggccacattgggactgagacacggcccagactcctacgggaggcagcagtgggggatattgcacaatggaggaaactctgatgcagcgacgccgcgtgagtgaagaagtatttcggtatgtaaagctctatcagcagggaagaaaatgacggtacctgactaagaagccccggctaactacgtgccagcagccgcggtaatacgtagggggcaagcgttatccgggtttactgggtgtaaagggagtgtaggtggccaggcaagtcagaagtgaaagcccggggctcaaccccgggactgcttttgaaactgcagggctagagtgcaggaggggcaagtggaattcctagtgtagcggtgaaatgcgtagatattaggaggaacaccagtggcgaaggcggcttgctggactgtaactgacactgaggctcgaaagcgtggggagcaaacaggattagataccctggtagtccacgccgtaaacgatgaatactaggtgtcggggcacataagtgcttcggtgccgcagcaaacgcaataagtattccacctggggagtacgttcgcaagaatgaaactcaaaggaattgacggggacccgcacaagcggtggagcatgtggtttaattcgaagcaacgcgaagaaccttaccaagtcttgacatcccactgaccggacagtaatgtgtccttcccttcggggcagtggagacaggtggtgcatggttgtcgtcagctcgtgtcgtgagatgttgggttaagtcccgcaacgagcgcaacccttatccttagtagccagcattttaggtgggcactctagggagactgccagggataacctggaggaaggtggggatgacgtcaaatcatcatgccccttatgacttgggctacacacgtgctacaatggcgtaaacaaagtgaagcaaagctgtgaagccaagcaaatcacaaaaataacgtctcagttcggattgtagtctgcaactcgactacatgaagctggaatcgctagtaatcgcagaatcagaatgctgcggtgaaatacgttcccgggtct

SEQ ID NO: 741 - DNA, 1367 bp, Artificial Sequence
  Synthetic polymer
agagtttgatcttggctcaggacgaacgctggcggcgtgcttaacacatgcaagtcgaacgaagcatttgcgacagattctttcgggatgaagatgcttatgactgagtggcggacgggtgagtaacgcgtgggtaacctgccttatacagggggatagcagttggaaacgactggtaataccgcataagcgcacggtatcgcatgatacagtgtgaaaaactgaggtggtataagatggacccgcgtctgattagctagttggtgaggtaacggcccaccaaggcgacgatcagtagccgacctgagagggtgaccggccacattgggactgagacacggcccagactcctacgggaggcagcagtggggaatattgcacaatggaggaaactctgatgcagcgacgccgcgtgagtgaagaagtagttcgctatgtaaagctctatcagcagggaagatagtgacggtacctgactaagaagctccggctaaatacgtgccagcagccgcggtaatacgtatggagcaagcgttatccggatttactgggtgtaaagggagagtaggtggcatcgcaagtcagaagtgaaagcccggggctcaaccccgggactgcttttgaaactgcggagctagagtgcaggaggggcaagtggaattcctagtgtagcggtgaaatgcgtagatattaggaggaacaccagtggcgaaggcggcttgctggactgtaactgacactgaggctcgaaagcgtgggaagcaaacaggattagataccctggtagtccacgccgtaaacggatgaattactaggtgtcgggggcacataagtgcttcggggccgcagcaaacgcaaataagtattccaccctggggagtacgttcgcaagaatgaaactcaaaggaattgacggggacccgcacaagcggtggagcatgtggtttaattcgaagcaacgcgaagaaccttaccaagtcttgacatccttctgaccggacagtaatgtgtccttcccttcggggcagaagagacaggtggtgcatggttgtcgtcagctcgtgtcgtgagatgttgggttaagtcccgcaacgagcgcaacccttatccttagtagccagcaggtaaagctgggcactctagggagactgccagggataacctggaggaaggtggggatgacgtcaaatcatcatgccccttatgacttgggctacacacgtgctacaatggcgtaaacaaagtgaagcgagagtgtgagcttaagcaaatcacaaaaataacgtctcagttcggattgtagtctgcaactcgactacatgaagctggaatcgctagtaatcgcagatcagaatgctgcggtgaat

SEQ ID NO: 742 - DNA, 1384 bp, Artificial Sequence
  Synthetic polymer
ttagagtttgatcctggctcaagacgacctttggcggcgtgcctaacacatgcaagtcgaacggaactgttgtgaaatatttcttcagaatgaatttgatttagtttagtggcggacgggtgagtaacgcgtgagtctcctgccttcaggagggggataacattctgagaagaatgctactaccgcatgatatatcggaaccaggtggttttgatatcaaagattttatcgcttgaagatggactcgcgtccgattagttagttggtgaggtaacggctcaccaaaaccgcgatcggtagccggactgagaggttgaacggccacattgggactgagacacggcccagactcctacgggaggcagcagtgggggatattgcgcaatgggggcaaccctgacgcagcaacgccgcgtgaaggatgaaggttttcggattgtaaacttcttttattaagggcgaaaaatgacggtacttaatgagtaagctccggctaactacgtgccagcagccgcggtaatacgtagggagcaagcgttgtccggatttactgggtgtaaagggtgcgtaggcggctttgcaagtcagatgtgaaatctatgggctcaacccataaactgcatttgaaactgtagagcttgagtgaagtagaggcaggcggaattccccgtgtagcggtgaaatgcgtagagatggggaggaacaccagtggcgaaggcggcctgctgggctttaactgacgctgaggctcgaaagcgtgggtagcaaacaggattagataccctggtagtccacgctgtaaacgatgattattagggtgtggggggacacggtctttcggtgccgcagcaaacgcagtaactattccacctggggagtacgttcgcaggaaggaaattcaaaggaattgacggggacccgcacaagcggtggagcatgtggtttaattcgaagcaacgcgaagacccttaccaattcttgacttcctgctgaccggtgagtaatgtcatctttccttcgggccagcagagacaggtggtgcatggttgtcgtcagctcgtgacgtgagatgttgggttaagtcccgcaacgagcgcaacccttattgtcagtagccagcatttcggatgggcactctgatgagactgccagggataacctggaggaaggtggggatgacgtcaaatcatcatgccccttatgacttgggctacacacgtgctacaatggcgtaaacaaagggaagcgagcccgcgagggggagcaaatcccaaaaataacgtcccagttcggattgtagtctgcaacccgactacatgaagctggaatcgctggtaatcgcggatcagcatgccgcggtgaatacgttcccgggtcttgcaca

SEQ ID NO: 743 - DNA, 1364 bp, Artificial Sequence
  Synthetic polymer
gatgaacgctagcggcaggcctaacacatgcaagtcgaggggcatcgggattgaagcttgcttcaattgccggcgaccggcgcacgggtgcgtaacgcgtatgtaacctacctataacaggggcataacactgagaaattggtactaattccccataatattcggagaggcatctctccgggttgaaaactccggtggttatagatggacatgcgttgtattagctagttggtgaggtaacggctcaccaaggcaacgatacatagggggactgagaggttaaccccccacactggtactgagacacggatcagactcctacgggaggcagcagtgaggaatattggtcaatggacgcaagtctgaaccagccatgccgcgtgcaggaagacggctctatgagttgtaaactgcttttgtacgagggtaaactcacctacgtgtaggtgactgaaagtatcgtacgaataaggatcggctaactccgtgccagcagccgcggtaatacggaggattcaagcgttatccggatttattgggtttaaagggtgcgtaggcggtttgataagttagaggtgaaatcccggggcttaactccggaactgcctctaatactgttagactagagagtagttgcggtaggcggaatgtatggtgtagcggtgaaatgcttagagatcatacagaacaccgattgcgaaggcagcttaccaaactatatctgacgttgaggcacgaaagcgtggggagcaaacaggattagataccctggtagtccacgcagtaaacgatgataactcgttgtcggcgatacacagtcggtgagtaagcgaaagcgataagttatccacctggggagtacgttcgcaagaatgaaactcaaaggaattgacgggggcccgcacaagcggaggaacatgtggtttaattcggtgatacgcgaggaaccttacccgggcttgaaagttactgacgattctggaaacaggatttccctttggggcaggaaaataggtgctgcatggttgtcgtcagctcgtgccgtgaggtgtcgggttaagtcccataacgagcgcaacccctaccgttagttgccatcaggtcaagctgggcactctggcgggactgccggtgtaagccgagaggaaggtgaggatgacgtcaaatcagcacggcccttacgtccgggggtacacacgtgttacaatggtaggtacagagggtcgctactccgtgaggagatgccaatctcgaaagcctatctcagttcggattggaggctgaaacccgcctccacgaagttggattcgctagtaatcgcgcatcagccatggcgcggtgaataaattcccgggccttgcaca

SEQ ID NO: 744 - DNA, 1341 bp, Artificial Sequence
  Synthetic polymer
gacgaacgctggcggcacgcttaacacatgcaagtcgaacgaaacaagataagcttgcttttctgatctattggaggacgggtgagtaacacatgagcgatctgcctttcagagggggataccgattggaaacgatcgttaataccgcgtaacataattgaaccgcatgatttgattatcacatatttatcgctgaaagatgacctcggcgtctgattagactagttggctagagtaacggcttaccggggcgacgatcactagccggactgacaggttgatcggccacattgggactgacacacgggccacactcctacgggaggcagcagtggggaatattgcacaatggaggaaactctgatgcaccgatgccgcgtgagggaagaaggttttaggattgaaaacctctgttttcagggaagaaaaaagacggtacctgaggaggaagctccggctaactacgtgccagcagccgcggtaatacgtagggagcgagcgttgtccggaattactgggtgtaaagggagcgtaggcgggatcgcaagtcagatgtgaaaactatgggcttaacccataaactgcatttgaaactgtggttcttgagtgcagtagaggtaagcggaattcctagtgtagcggtgaaatgcgtagatattaggaggaacatcagtggcgaaggcggcttactgggctgtaactgacgctgaggctcgaaagcgtggggagcaaacaggattagataccctggtagtccacgccgtaaacgatgattagtaggtgtggggggtctgaccccttccgtgccgcagcaaacacaataagtaatccacctggggagtgcgaccgcaagactgaaactcaaaggaattgacgggggcccgcacaagcactggagtatttggtttaattagaagcaacgcgaagaacctttccaggtcttgccatcgtattcatagctcagagatgagtgtaatctgttctgagacatatagacaggtggtgcatgttagttgtcatctcgtgtcgtgagatgttgggttaagtcccgcaccgagcgcaacccttattgttagttgatacgcaagagcactctagcaggactgccgtggacaaaacggaggaaggtggggatgacgtcaaatcatcatgccccttatgacttgggcctcacacgtactacaatggcggtcaccagagggaggcaaagacgcgtggtggagcgaacccctaaaaacagtcttagttcggattgtaggctgcaacccgcctacatgaagtcggaattgctagtaatcgcagatcagcatgttgcggtgaataagttcccgggccttgcac

SEQ ID NO: 745 - DNA, 1378 bp, Artificial Sequence
  Synthetic polymer
ttagagtttgatcctggctcaagatgaactctggcggcgtgcctaacacatgcaagtcgaacgaagcaccttaccggattcttcggatgaaagtttggtgactgagtggcggacgggtgagtaacgcgtgggtaacctgccctgtacagggggataacagctggaaacggctgctaataccgcataagcgcacgaggagacatctccttgtgtgaaaaactccggtggtacaggatgggcccgcgtctgattagctggttggcagggtaacggcctaccaaggcaacgatcagtagctggtctgagaggatgaacggccacattggaactgagacacggtccacactcctacgggaggcagcagtggggaatattgcacaatggggggaaaccctgatgcagcaacgccgcgtgagtgaagaagtatttcggtatgtaaagctctatcagcagggaagataatgacggtacctgactaagaagctccggctaaatacgtgccagcagccgcggtaatacgtatggagcaagcgttatccggatttactgggtgtaaagggtgcgtaggtggcagtgcaagtcagatgtgaaaggccggggctcaaccccggagctgcatttgaaactgctcggctagagtacaggagaggcaggcggaattcctagtgtagcggtgaaatgcgtagatattaggaggaacaccagtggcgaaggcggcctgctggactgttactgacactgagacacgaaagcgtggggagcaaacaggattagataccctggtagtccacgccgtaaacgatgaatactaggtgtcggggccgtataggcttcggtgccgccgctaacgcagtaagtattccacctggggagtacgttcgcaagaatgaaactcataggaattgacggggacccgcacaagcggtggagcatgtggtttaattcgaagcaacgcgaagaaccttaccaggtcttgacatccttctgaccggtacttaaccgtaccttctcttcggagcaggagtgacaggtggtgcatggttgtcgtcagctcgtgtcgtgagatgttgggttaagtcccgcaacgagcgcgacccttatctttagtagccagcggttcggccgggcactctagagagactgccagggataacctggaggaaggcggggatgacgtcaaatcatcatgccccttatgacttgggctacacacgtgctacaatggcgtaaacaaagggaggcaaagctgtgaagctgagcaaatctcaaaaataacgtctcagttcggactgtagtctgcaacccgactacacgaagctggaatcgctagtaatcgcagatcagaatgctgcggtgaatacgttcccgggtcttgcac

SEQ ID NO: 746 - DNA, 1360 bp, Artificial Sequence
  Synthetic polymer
gatgaacgctggcggcgtgcttaacacatgcaagtcgaacgggaattactttattgaaacttcggtggatttaatttaattctagtggcggacgggtgagtaacgcgtgggtaacctgccttatacagggggataacagtcagaaatggctgctaataccgcataagcgcacagagctgcatggctcagtgtgaaaaactccggtggtataagatggacccgcgttggattagctagttggtggggtaacggcccaccaaggcgacgatccatagccggcctgagagggtgaacggccacattgggactgagacacggcccagactcctacgggaggcagcagtggggaatattgcacaatgggggaaaccctgatgcagcgacgccgcgtgcaggaagaaggtcttcggattgtaaactgttgtcgcaagggaagaagacagtgacggtaccttgtgagaaagtcacggctaactacgtgccagcagccgcggtaatacgtaggtgacaagcgttgtccggatttactgggtgtaaagggcgcgtaggcggactgtcaagtcagtcgtgaaataccggggcttaaccccggggctgcgattgaaactgacagccttgagtatcggagaggaaagcggaattcctagtgtagcggtgaaatgcgtagatattaggaggaacaccagtggcgaaggcggctttctggacgacaactgacgctgaggcgcgaaagtgtggggagcaaacaggattagataccctggtagtccacaccctaaacgatggatactaggtgtaggaggtatcgaccccctctgtgccgcagttaacacaataagtatcccacctggggagtacgaccgcaaggttgaaactcagaggaattgacgggggcccgcacaagcagtggagtatgtggtttaattcgaagcaacgcgaagaaccttacctgggcttgacatccctggaatcgagtagagatacttgagtgccttcgggaatcaggtgacaggtggtgcatggttgtcgtcagctcgtgtcgtgagatgttgggttaagtcccgcaacgagcgcaacccctattgtcagttgccatcattaagttgggcactctggcgagactgccggtgacaaatcggaggaaggtggggaggacgtcaaatcatcatgccccttatgcccagggctacacacgtactacaatggccgataacaaagtgcagcgaaaccgtgaggtggagcgaatcacaaaactcggtctcagttcagattgcaggctgcaactcgcctgcatgaagttggaattgctagtaatcgcggatcagaatgccgcggtgaatacgttcccgggccttgcaca

SEQ ID NO: 747 - DNA, 1358 bp, Artificial Sequence
  Synthetic polymer
agagttggatccttgctcaggacgaacgctggcggcgtgcctaacacatgcaagtcgaacggaactgttttgaaagatttcttcggaatgaatttgatttagtttagtggcggacgggtgagtaacgcgtgagtaacctgccttcaagagggggataacattctgaaaagaatgctaataccgcatggcatactggaaccacatggttttgatatcaaagattttatcgcttgaagatggactcgcgtccgattagttagttggtgaggtaacggctcaccaagaccgcgatcggtagccggactgagaggttgaacggccacattgggactgagacacggcccagactcctacgggaggcagcagtgggggatattgcgcaatgggggcaaccctgacgcagcaacgccgcgtgaaggatgaaggttttcggattgtaagcttcttttattaaggacgaaaaatgacggtacttaatgaataagctccggctaactacgtgccagcagccgcggtaatacgtagggagcaagcgttgtccggatttactgggtgtaaagggtgcgtaggcggctttgcaagtcagatgtgaaatctatgggctcaacccataaactgcatttgaaactgtagagcttgagtgaagtagaggcaggcggaattccccgtgtagcggtgaaatgcgtagagatggggaggaacaccagtggcgaaggcggcctgctgggctttaactgacgctgaggcacgaaagcgtgggtagcaaacaggattagataccctggtagtccacgctgtaaacgatgaataataggtgtggggggtgtgtaccccctccgtgccgggaggtaacacaataagttatcccacctggggagtgcggccgcaaggtggaaaatcaaaagaattgacggggggccgcacaagcagcggagtatgtggctttatttgaagcaacgcgaagaaccttaccaggtcttgacatccaactaacgaagtagagatacattaggtgcccttcggggaaagatgagacaggtggtgcatggttgtcgtcagctcgtgtcgtgagatgttgggttaagtcccgcaacgagcgcaacccttgctattagttgctacgcaagagcactctaataggactgccgttgacaaaacggaggaaggtgggggggacgtcaaatcatcatgccccttatgacctggggtacacacgtactacaatggatgttaacagagggaagcaagacagtgatgtggagcaaacccctaaaaacattctcagttcagattgcaggctgcaacccgcctgcatgaagatggatttgtttgttttcgcgggtctgcatgccgcggtg

SEQ ID NO: 748 - DNA, 1332 bp, Artificial Sequence
  Synthetic polymer
gatgaactctggcggcgcgcctaacacatgcaagtcgaacggcacctgccctcgggcagaagcgagtggcgaacggctgagtaacacgtggagaacctgccccctcccccgggatagccgcccgaaaggacgggtaataccggataccccggggtgccgcatggcaccccggctaaagcgcggaggggaggggatggctccgcggcccatcctgtagacggcggggtgacggcccaccgtgccgacaacgggtagccgggttgagagaccgaccggccagattgggactgagacacggcccagactcctacgggaggcagcagtggggaatcttgcgcaatggggggaaccctgacgcagcgacgccgcgtgcgggacggaggccttcgggtcgtaaaccgctttcagcagggaagagtcaagactgtacctgcagaagaagccccggctaactacgtgccagcagccgcggtaatacgtagggggcgagcgttatccggattcattgggcgtaaagcgcgcgtaggcggcccggcaggccgggggtcgaagcggggggctcaaccccccgaagcccccggaacctccgcggcttgggtccggtaggggagggtggaacatccggtgtagcggtggaatgcgcagatatcgggtggaacaccggtggcgaaggcggccctctgggccgagaccgacgctggggcgcgaaagctgggggagcgaaaaggattagataccctggtagtcccagccgtaaaggatgacggtagggtgtgggggggcgttccccccgtgccgcagccaacgcattaagcgtcccgcctggggagtacggccgcaaggctaaaactcaaaggaattgacgggggcccgcacaagcagcggagcatgtggtttaatttgaagcaacgcgaagaaccttaccagggcttgacatatgggtgaagcgggggagaccccgtggccgagtgtagcccatacaggtggtgcatggctgtcgtcagctcgtgtcgtgagatgttgggttaagtcccgcaacgagcgcaacccccgccgcgtgttgccatcgggtgatgccgggaacccacgcgggaccgccgccgtcaaggcggaggagggcggggacgacgtcaagtcatcatgccccttatgccctgggctgcacacgtgctacaatggccggtacagagggatgccaccccgcgagggggagcggatcccggaaagccggccccagttcggattgggggctgcaacccgcccccatgaagtcggagttgctagtaatcgcggatcagcatgccgcggtgaatgcgttcccgggccttgtac

SEQ ID NO: 749 - DNA, 1341 bp, Artificial Sequence
  Synthetic polymer
tggcggcgcgcctaacacatgcaagtcgaacgagcgagagagagcttgctttctcgagcgagtggcgaacgggtgagtaacgcgtgaggaacctgcctcaaagagggggacaacagttggaaacgactgctaataccgcataagcctacgggtcggcatcgaccagagggaaaaggagcaatccgctttgagatggcctcgcgtccgattagctggttggtgaggtaacggcccaccaaggcgacgatcggtagccggactgagaggttgaacggccacattgggactgagacacggcccagactcctacgggaggcagcagtggggaatattgcacaatgggggaaaccctgatgcagcgacgccgcgtggaggaagaaggtcttcggattgtaaactcctgttgttggggaagataatgacggtacccaacaaggaagtgacggctaactacgtgccagcagccgcggtaaaacgtaggtcacaagcgttgtccggaattactgggtgtaaagggagcgcaggcgggaagacaagttggaagtgaaatctatgggctcaacccataaactgctttcaaaactgtttttcttgagtagtgcagaggtaggcggaattcccggtgtagcggtggaatgcgtagatatcgggaggaacaccagtggcgaaggcggcctactgggcaccaactgacgctgaggctcgaaagtgtgggtagcaaacagaattagatcccctggtagttccccccgtaaaacgaccttaaagggtgttggaggattgaccccttccgtgccgcagttaacacaaataagtaatccctctggggagtacgaccgcaaggttgaaactcaaaggaattcacgggggcccgcacaagcagtggagtatgtggtttaattcgacgcaacgcgaagaaccttaccaagtcttgacatcccttgacagacatagaaatatgtattctcttcggagcaaggagacaggtggtgcatggttgtcgtcagctcgtgtcgtgagatgttgggttaagtcccgcaacgagcgcaacccttatggtcagttactacgcaagaggactctggccagactgccgttgacaaaacggaggaaggtggggatgacgtcaaatcatcatgccctttatgacttgggctacacacgtactacaatggcgttaaacaaagagaagcaagaccgcgaggtggagcaaaactcagaaacaacgtcccagttcggactgcaggctgcaactcgcctgcacgaagtcggaattgctagtaatcgtggatcagcatgccacggtgaatacgttcccgggccttgcacacagcgcccgtc

SEQ ID NO: 750 - DNA, 1362 bp, Artificial Sequence
  Synthetic polymer
gatgaacgctggcggcgtgcttaacacatgcaagtcgaacgaagcggtctggttgaagccttcgggcggaaaccagactgactgagtggcggacgggtgagtaacgcgtgggcaacctgcctcacacagggggataacagctagaaatggctgctaataccgcataagcgcacagcatggcatcatgcagtgtgaaaaactccggtggtgtgagatgggcccgcgtctgattaggtagttggtgaggtaacggcccaccaagccgacgatcagtagccgacctgagagggtgaccggccacattgggactgagacacggcccaaactcctacgggaggcagcagtggggaatattgcacaatgggggaaaccctgatgcagcgacgccgcgtgaaggaagaagtatctcggtatgtaaacttctatcagcagggaagaagaatgacggtacctgactaagaagccccggctaactacgtgccagcagccgcggtaatacgtagggggcaagcgttatccggatttactgggtgtaaagggagcgtaggcggcgatgcaagtcagaagtgaaagcccagggcttaaccgtgggactgcttttgaaactgtgttgctggattgccggagaggtaagtggaattcctagtgtagcggtgaaatgcgtagatattaggaggaacaccagtggcgaaggcggcttactggacggtgaatgacgctgaggctcgaaagcgtggggagcaaacaaaaatagctcccctggtagtcccaccccgtaaccgatgcctacaaggtgtcggggcccaaaagggtcccggtgccgcagcaaacgcaataagtattccacctggggagtacgttcgcaagtatgaaactcaaaggaattgacggggacccgcacaagcggtggagcatgtggtttaatttgaagcaacgcgaagaaccttaccaagtcttgacatctggacgaccggggcgtaacggtcctttcccttcggggcgtccaagacaggtggtgcatggttgtcgtcagctcgtgtcgtgagatgttgggttaagtcccgcaacgagcgcaacccttatatccagtagccagcaggtaaagctgggcactctggatagactgccagggataacctggaggaaggtggggatgacgtcaaatcatcatgccccctatggggtgggctacacacgtgctacaatggtgataacagagtgaggcagcgccgtgaggctgagcgaatcacaaaaaaatcatctcagttcggattgtagtctgcaactcgactacatgaagctggaatcgctagtaatcgcgaatcagaatgtcgcggtgaatacgttcccgggtcttgcaca

SEQ ID NO: 751 - DNA, 1362 bp, Artificial Sequence
  Synthetic polymer
gacgaacgctggcggcgtgcctaacacatgcaagtcgaacgaagctctgtgatacaagacttcggtcaagttgaacggatgacttagtggcggacgggtgagtaacgcgtgaggaacctgcctttcagtgggggacaacagttggaaacgactgctaataccgcataatgtattctgaccgcatgatcggaataccaaagatttattgctgaaagatggcctcgcgtctgattagatagttggtgaggtaacggctcaccaagtcgacgatcagtagccggactgagaggttgaacggccacattgggactgagatacggcccagactcctacgggaggcagcagtggggaatattgggcaatgggggaaaccctgacccagcaacgccgcgtgaaggaagaaggctttcgggttgtaaacttcttttaccagggacgaaggacgtgacggtacctggagaaaaagccacggctaactacgtgccagcagccgcggtaatacgtaggtggcaagcgttgtccggatttactgggtgtaaagggcgtgtaggcggagaagcaagtcagaagtgaaatccatgggcttaacccatgaactgcttttgaaactgtttcccttgagtatcggagaggcaggcggaattcctagtgtagcggtgaaatgcgtagatattaggaggaacaccagtggcgaaggcggcctgctggacgacaactgacgctgaggcgcgaaagcgtggggagcaaacaggattagataccctggtagtccacgctgtaaacgatgaatactaggtgtgggaggactgaccccctccgtgccgcagttaacacaataagtattccacctggggagtacgatcgcaagattgaaactcaaaggaattgacggggacccgcacaagcggtggagcatgtggtttaattcgaagcaacgcgaagaaccttaccaagtcttgacatcccgatgacagagtatgtaatgtactttcccttcggggcatcggtgacaggtggtgcatggttgtcgtcagctcgtgtcgtgagatgttgggttaagtcccgcaacgagcgcaacccccgttcttagtagccagcggttcggccgggcactctagggagactgccagggataacctggaggaaggcggggaggacgtcaaatcatcatgccccctatgacttgggctacacacgtgctacaatggcgtaaacaaagggaagcggagccgtgaggccgagcaaatctcaaaaataacgtctcagttcggactgtagtctgcaacccgactacacgaagctggaatcgctagtaatcgcagatcagaatgctgcggtgaataaaatcccgggtcttgcaca

SEQ ID NO: 752 - DNA, 1343 bp, Artificial Sequence
  Synthetic polymer
  misc_feature (1164)..(1164): n is a, c, g, or t
gacgaacgctggcggcgtgcctaacacatgcaagtcgaacgaagctttgaggagcttgctttttaaagcttagtggcggacgggtgagtaacgcgtgagcaacctgcctctcagaggggaataacgttttgaaaagaacgctaataccgcataacacatcggaaccgcatgattctgatatcaaaggagcaatccgctgagagatgggctcgcgtccgattagttagttggtgaggtaacggctcaccaagactacgatcggtagccggactgagaggttgatcggccacattgggactgagacacggccaagactcctacgggaggcagcagtgggggatattgcgcaatgggggaaaccctgacgcagcaacgccgcgtgaaggaagaaggtcttcggattgtaaacttcttttgtcagggacgaagaaagtgacggtacctgacgaataagctccggctaactacgtgccagcagccgcggtaatacgtagggagcgagcgttgtccggatttactgggtgtaaagggtgcgtaggcggccgagcaagtcagttgtgaaaactatgggcttaacccataacgtgcaattgaaactgtccggcttgagtgaagtagaggtaggcggaattcccggtgtagcggtgaaatgcgtagagatcgggaggaacaccagtggcgaaggcggcctactgggctttaactgacgctgaggcacgaaagcatgggtagcaaacaggattagataccctggtagtccatgccgtaaacgatgattactaggtgtggggggagtgactccttccgtgccgcagttaacacaataagtaatccacctggggagtacggccgcaaggttgaaactcaaaggaattgacgggggcccgcacaagcagtggagtatgtggtttaatttgaagcaacgcgaagaaccttaccaggtcttgacatcctgagaatccttaagagattagggagtgccttcgggaactcagagacaggtggtgcatggttgtcgtcagctcgtgtcgtgagatgttgggttaagtcccgcaacgagcgcaacccttgctattagttgctacgcaagagcactctaataggactgccgttgacaaaacggaggaaggtggggaggacgtcaaatcatcatgccccttaggncctgggctacacacgtactacaatggccattaacagagggaagcaaaaccgcgaggcagagcaaacccctaaaaatggtcccagttcggattgtaggctgcaacccacctccatgaagttggaattgttagtaatcgcggatcagcatgccgcggtgaataagttcccgggccttgcac

SEQ ID NO: 753 - DNA, 1337 bp, Artificial Sequence
  Synthetic polymer
ctggcggcgtgcttaacacatgcaagtcgaacgagagaagattggtgcttgcactgatccgatcgagtggcggacgggtgagtaacgcgtgggtaacctgcctcatacaggggaataacagttggaaacggctgctaaaaccgcataagcgcacggtatcgcatgatacagtgtgaaaaactccggtggtatgagatggacccgcgtctgattagctagttggtgaggtaacggcctaccaaggcaacgatcagtagccggcctgagagggtgaacggccacattgggactgagacacggcccaaactcctacgggaggcagcagtggggaatgttgcacaatgggggaaaccctgatgcagcgacgccgcgtgagtgatgaagtatttcggtatgtaaagctctatcagcagggaagataatgacggtacctgactaagaagcaccggctaaatacgtgccagcagccgcggtaatacgtatggtgcaagcgttatccggatttacttggtgtaaagggtgcgtaggtggtgagacaagtctgaagtgaaaatccggggcttaaccccggaactgctttggaaactgcctgactagagtacaggagaggtaagtggaattcctagtgtagcggtgaaatgcgtagatattaggaggaacaccagtggcgaaggcgacttactggactgctactgacactgaggcacgaaagcgtggggagcaaacaggattagataccctggtagtccacgccgtaaacgatgaataatgggtgtcggagcccaaagggcttcggtgccgcagccaacgcaataagtattccacctggggagtacgttcgcaagaatgaaactcaaaggaattgacggggacccgcacaagcggtggagcatgtggtttaattcgaagcaacgcgaagaaccttaccaagtcttgacatcctgctgaccgttccttaaccggaactttccttcgggacagcagagacaggtggtgcttggttgtcgtcagctcgtgtcgtgagatgttgggttaagtcccgcaacgagcgcaacccctatttccagtagccagcagttagatgggcactctggagagactgccggggataacccggaggaaggtggggatgacgtcaaatcatcatgccccttatgatttgggctacacacgtgctacaatggcagttacaaagagaagcgaaactgtgaagtggagcaaacctcaaaaaggctgtctcagttcggattgtggtctgcaactcgactacatgaagctggaatcgctagtaatcgcagatcagaatgctgcggtgaatacgttcccgggtcttgcac

SEQ ID NO: 754 - DNA, 1367 bp, Artificial Sequence
  Synthetic polymer
gacgaactctggcggcgtgcttaacacatgcaagtcgaacgaaaagagggaaagagcttgctctttccggaattgagtggcaaacgggtgagtaacacgtaaacaacctgccttcaggatggggacaacagacggaaacgactgctaataccgaataagttccaagggccgcatggcccatggaagaaaaggtggcctctacctgtaagctatcgcctgaagaggggcccgcgtctgattagctggttggcagggtaacggcctaccaaggcaacgatcagtagccggtctgagaggatgaacggccacattggaactgagacacggtccaaactcctacgggaggcagcagtggggaatattgcacaatgggggaaaccctgatgcagcaacgccgcgtgagtgaagaagtatttcggtatgtaaagctctatcagcagggaagataatgacggtacctgactaagaagctccggctaaatacgtgccagcagccgcggtaatacgtatggagcaagcgttatccggatttactgggtgtaaagggtgcgtaggtggcagtgcaagtcagatgtgaaaggccggggctcaaccccggagctgcatttgaaactgctcggctagagtacaggagaggcaggcggaattcctagtgtagcggtgaaatgcgtagatattaggaggaacaccagtggcgaaggcggcctgctggactgttactgacactgaggcacgaaagcgtggggagcaaacaggattagataccctggtagtccacgccgtaaacgatgaatactaggtgtctgggagcacagctcttaggtgccgccgcaaacgcattaagtattccacctggggagtacgttcgcaagaatgaaactcaaaggaattgacggggacccgcacaagcggtggagcatgtggtttaattcgaagcaacgcgaagaaccttaccaaatcttgacatccctctgaccgggacttaaccgtccctttccttcgggacaggggagacaggtggtgcatggttgtcgtcagctcgtgtcgtgagatgttgggttaagtcccgcaacgagcgcaacccctatccttagtagccagcatgtaaaggtgggcactctgaggagactgccagggataacctggaggaaggcggggatgacgtcaaatcatcatgccccttatgatttgggctacacacgtgctacaatggcgtaaacaaagggaagcgaacccgcgagggtgggcaaatctcaaaaataacgtcccagttcggactgcagtctgcaactcgactgcacgaagctggaatcgctagtaatcgcggatcagaatgccgcggtgaatacgttcccgggtcttgcaca

SEQ ID NO: 755 - DNA, 1340 bp, Artificial Sequence
  Synthetic polymer
gacgaacgctggcggcgcgcctaacacatgcaagtcgaacgagcgagagagagcttgctttctcgagcgagtggcgaacgggtgagtaacgcgtgaggaacctgcctcaaagagggggacaacagttggaaacgactgctaataccgcataagcccacagctcggcatcgagcagagggaaaaggagcaatccgctttgagatggcctcgcgtccgattagctagttggtgaggtaatggcccaccaaggcgacgatcggtagccggactgagaggttgaacggccacattgggactgagacacggcccagactcctacgggaggcagcagtggggaatattgcacaatgggggaaaccctgatgcagcgacgccgcgtggaggaagaaggtcttcggattgtaaactcctgttgttgaggaagataatgacggtactcaacaaggaagtgacggctaactacgtgccagcagccgcggtaaaacgtaggtcacaagcgttgtccggaactactgggtgtaaagggagcgcaggcgggaagacaagttggaagtgaaatccatgggctcaacccatgaactgctttcaaaactgtttttcttaagtagtgcagaggtaggcggaattcccggtgtagcggtggaatgcgtagatatcgggaggaacaccagtggcgaaggcggcctactgggcaccaactgacgctgaggctcgaaagtgtgggtagcaaacaaaagtagataccctggtagtccccactgtaaagatgaatttattaggtgttggaggagggaccccttcagtgccgcaggtaaacacaaaaaagtaatccacccggggagtaggaccgcaaggttgaaactcaaaggaatgacggggggcccgcacaagcagtggagtatgtggtttaattcgacgcaacgcgaagaaccttaccaagtcttgacatcctgcgacgcacatagaaatatgtgtttccttcgggacgcagagacaggtggtgcatggttgtcgtcagctcgtgtcgtgagatgttgggttaagtcccgcaacgagcgcaacccttatggtcagttattacgcaagaggactctggccagactgccgttgacaaaacggaggaaggtggggaggacgtcaaatcatcatgccctctatgacttgggctacacacgtactacaatggcgttaaacaaagagaagcaagaccgcgaggtggagcaaaactcagaaacaacgtcccagttcggactgcaggctgcaactcgcctgcacgaagtcggaattgctagtaatcgcagatcagcatgctgcggtgaatacgttcccgggccttgcac

SEQ ID NO: 756 - DNA, 1340 bp, Artificial Sequence
  Synthetic polymer
gacgaactctggcggcgtgcctaacacatgcaagtcgaacggagattcaggagcttgctcctgaatcttagtggcggacgggtgagtaacgcgtgagtaacctgcctttcagagggggataacgttctgaaaagaacgctaataccgcatgagactacagagctgcatggctcagtggtcaaaggagcactccgctgaaagatggactcgcgtccgattagatagtaggcggggtaacggcccacctagtcgacgatcggtagccggactgagaggttgaacggccacattgggactgagacacggcccacactcctacgggaggcagcagtgagggatattcggcaatgggggaaaccctgaccgagcaacgccgcgtgagggaagacggttttcggattgtaaacctctgtcctctgtgaagatgatgacggtaacagaggaggaagctccggctaactacgtgccagcagccgcggtaatacgtagggagcgagcgttgtccggatttactgggtgtaaagggtgcgtaggcggattggcaagtcagaagtgaaatccatgggcttaacccatgaactgctttgaaactgttagtcttgagtgaagtagaggtaggcggaattcccggtgtagcggtgaaatgcgtagagatcgggaggaacaccagtggcgaaggcggcctactgggctttaactgacgctgaggcacgaaagtgtgggtagcaaacaggattagataccctggtagtccacactgtaaacgatgattactaggtgtggggggtctaaccccctccgtgccggagttaacacaataagtaatccacctggggagtacgaccgcaaggttgaaactcaaaggaattgacgggggcccgcacaagcagtggagtatgtggattaattcgaagcaacgcgaagaaccttaccgggtcttgacatccaactaacgaagtagagatacattaggtgcccttcggggaaagttgagacaggtggtgcatggtcgtcgtcagctcgtgtcgtgagatgttgggttaagtcccgcaacgagcgcaacccttgtgattagttgctacgcaagagcactctaatcagactgccgttgacaaaacggaggaaggtggggacgacgtcaaatcatcatgccctttatgacctgggcctcacacgtactacaatggtcgttaacagagggaagcaataccgcgaggtggagcaaagccccaaaaacgatctcagttcggattgtaggctgcaactcgcctacatgaagttggaattgctagtaatcgcggatcagcatgccgcggtgaatacgttcccgggccttgtac

SEQ ID NO: 757 - DNA, 1340 bp, Artificial Sequence
  Synthetic polymer
gacgaacgctggcggcgcgcctaacacatgcaagtcgaacgagagagagggagcttgcttcctcaatcgagtggcgaacgggtgagtaacgcgtgaggaacctgcctcaaagagggggacaacagttggaaacgactgctaataccgcataagcccacgggtcggcatcgaccagagggaaaaggagcaatccgctctgagatggcctcgcgtccgattagctagttggtgaggtaacggcccaccaaggcaacgatcggtagccggactgagaggttgaacggccacattgggactgagacacggcccagactcctacgggaggcagcagtggggaatattgcacaatgggggaaaccctgatgcagcgacgccgcgtggaggaagaaggtcttcggattgtaaactcctgttgttgaggaagataatgacggtactcaacaaggaagtgacggctaactacgtgccagcagccgcggtaaaacgtaggtcacaagcgttgtccggaattactgggtgtaaagggagcgcaggcgggaagacaagttggaagtgaaatccatgggctcaacccatgaactgctttcaaaactgtttttcttgagtagtgcagaggtaggcggaattcccggggtagcggtggaatgcgtaaatatcggggaggaacaccagtggcgaaggcggcctactggggcaccaactgacgctgaggctcggaagtggggggagcaaacaggattaaataccctggtagccccaacccgtaaacgatgattattaggtgttggaggagtgaccccctcagtgccgcagttaacacaataagtaatccacctggggagtacgaccgcaaggttgaaactcaaaggaattgacgggggcccgcacaagcagtggagtatgtggtttaatttgacgcaacgcgaagaaccttaccaagtcttgacatcccttgacgatgctggaaacagtatttctttttggagcaaggagacaggtggtgcatggttgtcgtcagctcgtgtcgtgagatgttgggttaagtcccgcaacgagcgcaacccttctggtcagttattacgcaagaggactctggccagactgccgttgacaaaacggaggaaggtggggaggacgtcaaatcatcatgccctttatgacttgggctacacacgtactacaatggcgttaaacaaagagaagcaagaccgcgagggggagcaaaactcagaaacaacgtcccagttcggactgcaggctgcaactcgcctgcacgaagtcggaattgctagtaatcgtggatcagcatgccacggtgaatacgttcccgggccttgcac

SEQ ID NO: 758 - DNA, 1352 bp, Artificial Sequence
  Synthetic polymer
gacgaacgctggcggcgtgcctaacacatgcaagtcgaacggaactgttttgaaagatttcttcggaatgaatttgatttagtttagtggcggacgggtgagtaacgcgtgagtaacctgccttcaagagggggataacattctgaaaagaatgctaataccgcatgacatatcggaatcacatgattttgatatcaaagattttatcgcttgaagatggactcgcgtccgattagttagttggtgaggtaacggcccaccaaggcgacgatcggtagccggactgagaggttgaacggccacattgggactgagacacggcccagactcctacgggaggcagcagtggggaatattgcacaatgggggaaaccctgatgcagcgacgccgcgtggaggaagaaggtcttcggattgtaaactcctgttgttggggaagataatgacggtacccaacaaggaagtgacggctaactacgtgccagcagccgcggtaaaacgtaggtcacaagcgttgtccggaattactgggtgtaaagggagcgcaggcgggaagacaagttggaagtgaaatctatgggctcaacccataaactgctttcaaaactgtttttcttgagtagtgcagaggtaggcggaattcccggtgtagcggtggaatgcgtagatatcgggaggaacaccagtggcgaaggcggcctactgggcaccaactgacgctgaggctcgaaagtgtgggtagcaaacaggattagataccctggtagtccacaccgtaaacgatgattactaggtgttggaggattgaccccttcagtgccgcagttaacacaataagtaatccacctggggagtacgaccgcaaggttgaaactcaaaggaattgacgggggcccgcacaagcagtggagtatgtggtttaattcgacgcaacgcgaagaaccttaccaagtcttgacatcccttgacaggcatagaaatatgttttctcttcggagcaaggagacaggtggtgcatggttgtcgtcagctcgtgtcgtgagatgttgggttaagtcccgcaacgagcgcaacccttatggtcagttactacgcaagaggactctggccagactgccgttgacaaaacggaggaaggtggggatgacgtcaaatcatcatgccctttatgacttgggctacacacgtactacaatggcgttaaacaaagagaagcgagaccgcgaggtggagcaaaactcagaaacaacgtcccagttcggactgcaggctgcaactcgcctgcacgaagtcggaattgctagtaatcgtggatcagcatgccacggtgaatacgttcccgggccttgcac

SEQ ID NO: 759 - DNA, 1342 bp, Artificial Sequence
  Synthetic polymer
gacgaactctggcggcgcgcctaacacatgcaagtcgaacgagagatgaagagcttgctcttcaaatcgagtggcgaacgggtgagtaacgcgtgaggaacctgcctcaaagagggggacaacagttggaaacgactgctaataccgcataagcccacggctcggcatcgagcagagggaaaaggagcaatccgctttgagatggcctcgcgtccgattagctagttggtgaggtaacggcccaccaaggcgacgatcggtagccggactgagaggttgaacggccacattgggactgagacacggcccagactcctacgggaggcagcagtggggaatattgcacaatgggggaaaccctgatgcagcgacgccgcgtggaggaagaaggtcttcggattgtaaactcctgttgttgaggaagataatgacggtactcaacaaggaagtgacggctaactacgtgccagcagccgcggtaaaacgtaggtcacaagcgttgtccggaattactgggtgtaaagggagcgcaggcgggagaacaagttggaagtgaaatccatgggctcaacccatgaactgctttcaaaactgtttttcttgagtagtgcagaggtaggcggaattcccggtgtagcggtggaatgcgtagatatcgggaggaacaccagtggcgaaggcggcctactgggcaccaactgacgctgaggctcgaaagtgtgggtagcaaacaaaattagaaaccctggtagtccaccccctaaaacgaagataattaggggtaggagggattgaccccttcagggccgcagttaaacataataagtataccacctggggagtaggaccgcaaggttgaaaatcaaaggaattgaccgggggcccccacaagcagtggagtaagtggtttaatttgacgcaacgcgaagaaccttaccaagtcttgacatcccttggcgaacatagaaatatgttttctcttcggagcaaggagacaggtggtgcatggttgtcgtcagctcgtgtcgtgagatgttgggttaagtcccgcaacgagcgcaacccttatggtcagttactacgcaagaggactctggccagactgccgttgacaaaacggaggaaggtggggatgacgtcaaatcatcatgccctttatgacttgggctacacacgtactacaatggcgttaaacaaagagaagcaagaccgcgaggtggagcaaaactcagaaacaacgtcccagttcggactgcaggctgcaactcgcctgcacgaagtcggaattgctagtaatcgtggatcagcatgcctcggtgaatacgttcccgggccttgcaca

SEQ ID NO: 760 - DNA, 1342 bp, Artificial Sequence
  Synthetic polymer
gacgaacgctggcggcgtgcctaacacatgcaagtcgaacggagttgaaaggagcttgcttttttcaactcagtggcggacgggtgagtaacgcgtgagtaacctgcctttcagagggggataacgttctgaaaagaacgctaataccgcataagattgtagcttcgcatggagcagcaatcaaaggagcaatccgctgaaagatggactcgcgtccgattagatagttggcggggtaacggcccaccaagtcgacgatcggtagccggactgagaggttgatcggccacattgggactgagacacggcccagactcctacgggaggcagcagtgagggatattgggcaatgggggaaaccctgacccagcaacgccgcgtgagggatgacggttttcggattgtaaacctctgtcctctgtgaagatagtgacggtagcagaggaggaagctccggctaactacgtgccagcagccgcggtaatacgtagggagcaagcgttgtccggatttactgggtgtaaagggtgcgtaggcggattggcaagtcagaagtgaaatccatgggcttaacccatgaactgcttttggaactgttagtcttgagtgaagtagaggtaggcggaattcccggtgtagcggtgaaatgcgtagagatcgggaggaacaccagtggcgaaggcggcctactgggctttaactgacgctgaggcacgaaagtgtgggtagcaaacaggattagataccctggtagtccacactgtaaacgaggattactaggggggggggtgtacccccctccgtgcctgagttaacacaataagtaatccacctggggagtacgaccgcaaggttgaaactcaaaggaattgacgggggcccgcacaagcagtggagtatgtggtttaatttgacgcaacgcgaagaaccttaccaggtcttgacatccaactaacgaagcagagatgcattaggtgcccttcggggaaagatgagacaggtggtgcatggttgtcgtcagctcgtgtcgtgagatgttgggttaagtcccgcaacgagcgcaacccttgtgattagttgctacgcaagagcactctaatcagaccgccgttgacaaaacggaggaaggtggggaggacgtcaaatcatcatgccctttatgacctgggctacacacgtactacaatggtcgttaacagagggaagcaataccgcgaggtggagcaaaaccctaaaaacggtctcagttcagattgtaggctgcaactcgcctacatgaagttggaattgctagtaatcgcggatcagcatgccgcggtgaataaaatcccgggccttgcac

SEQ ID NO: 761 - DNA, 1343 bp, Artificial Sequence
  Synthetic polymer
agagtttgatcctggttcaggatgaacgctggcggcgtgcctaacacatgcaagtcgaacggacttacattgaagcctagcgatatgtaagttagtggcggacgggtgagtaacgcgtgggtaacctgccttgtactgggggacaacagttggaaacgactgctaataccgcataagcgcacagcttcgcatgacacagtgtgaaaacactccggtggtatgagatggacccgcgtctgattagctagttggtgaggtaacggcccaccaaggcgacgatcagtagccggcctgagagggtgaacggccacattgggactgagacacggcccaaactcctacgggaggcagcagtggggaatattgcacaatgggggaaaccctgatgcagcgacgccgcgtgagtgatgaagtatttcggtatgtaaagctctatcagcagggaagataatgacggtacctgactaagaagcaccggctaaatacgtgccagcagccgcggtaatacgtatggtgcaagcgttatccggatttactgggtgtaaagggtgcgtaggtggcaaggcaagtctgaagtgaaaatccggggctcaaccccggaactgctttggaaactgtttagctggagtacaggagaggtaaatggaattcctagtgtaacggtgaaatgcgtagatattaggaggaacaccagtggcgaaggcgacttactggactgctactgacactgaggcacgaaagcgtggggagcaaacaggattagataccctggtagtccacgccgtaaacgatgaatactaggtgttgggttccaaaggaactcggtgccgtcgcaaacgcattaagtattccacctggggagtacgttcgcaagaatgaaactcaaaggaattgacggggacccgcacaagcggtggagcatgtggtttaattcgaagcaacgcgaaaaaccttaccaagtcttgacatcctgatgacggttccttaaccggaacttctcttcggagcatcagagacaggtggtgcatggttgtcgtcagctcgtgtcgtgagatgttgggttaagtcccgcaacgagcgcaacccctatttccagtagccagcagtaagatgggcactctggagagactgccggggataacccggaggaaggtggggatgacgtcaaatcatcatgccccctatgatttgggctacacacgtgctacaatggcagttacaaagagaagcaaacctgtgaaggcgagcaaacctcaaaaaggctgtctcagttcggattgtagtctgcaactcgactacatgaagctggaatcgctagtaatcgcagatcagcatgctgcggt

SEQ ID NO: 762 - DNA, 1347 bp, Artificial Sequence
  Synthetic polymer
gacgaacgctggcggcgtgcctaacacatgcaagtcgaacggactgatttgagagcttgctcttgatgaaagttagtggcggacgggtgagtaacgcgtgagtaacctgcctttcagagggggataacattctgaaaaggatgctaataccgcataacatcttagtatcgcatggtattgagatcaaaggagcaatccgctggaagatggactcgcgtccgattagctagttggcgggataaaggcccaccaaggcgacaatcggtagccggactgagaggttgaacggccacattgggactgagacacggcccagactcctacgggaggcagcagtgggggatattgcacaatgggggaaaccctgatgcagcaacgccgcgtgaaggatgaaggttttcggattgtaaacttctgttcttagtgacgataatgacggtagctaagaagaaagctccggctaactacgtgccagcagccgcggtaatacgtagggagcgagcgttgtccggatttactgggtgtaaagggtgcgtaggcggcagagcaagtcaggcgtgaaagccatgggcttaacccatgaactgcgcttgaaactgttttgcttgagtgaagtagaggcaggcggaattcccggtgtagcggtgaaatgcgtagagatcgggaggaacaccagtggcgaaggcggcctgctgggctttaactgacgctgaggcacgaaagcatgggtagcaaacaggattagataccctggtagtccatgccgtaaacgatgattactaggtgtggggggtctgaccccctccgtgccggagttaacacaataagtaatccacctggggagtacggccgcaaggttgaaactcaaaggaattgacgggggcccgcacaagcagtggagtatgtggtttaatttgaagcaacgcgaagaaccttaccaggtcttgacatccgactaacgaagtagagatacattaggtgcccttcggggaaagtcgagacaggtggtgcatggttgtcgtcagctcgtgtcgtgagatgttgggttaagtcccgcaacgagcgcaacccttgtccttagttgctacgcaagagcactctaaggagactgccgttgacaaaacggaggaaggtggggaggacgtcaaatcatcatgccccttatgacctgggctacacacgtactacaacggccatcaacagagggaagcaaagccgtgaggtagagcaaacccctaaaaatggtcccagttcagattgtaggctgcaactcgcctacatgaagtcggaattgctagtaatcgcggatcagaatgccgcggtgaatacgttcccgggccttgcaca

SEQ ID NO: 763 - DNA, 1348 bp, Artificial Sequence
  Synthetic polymer
aacacatgcaagtcgaacggagcacccttgactgaggtttcggccaaatgataggaatgcttagtggcggactggtgagtaacgcgtgaggaacctgccttccagagggggacaacagttggaaacgactgctaataccgcatgatatatttgaggggcatcccttggatatcaaagatttatcgctggaagatggcctcgcgtctgattagctagatggtggggtaacggcccaccatggcgacgatcagtagccggactgagaggttgaccggccacattgggactgagatacggcccagactcctacgggaggcagcagtggggaatattgggcaatgggcgcaagcctgacccagcaacgccgcgtgaaggaagaaggctttcgggttgtaaacttcttttgtcagggaacagtagaagagggtacctgacgaataagccacggctaactacgtgccagcagccgcggtaatacgtaggtggcaagcgttgtccggatttactgggtgtaaagggcgtgcagccgggctggtaagtcagatgtgaaatctggaggctcaacctccaaactgcatttgaaactgctggtcttgagtaccggagaggttatcggaattccttgtgtagcggtgaaatgcgtagatataaggaagaacaccagtggcgaaggcggataactggacggcaactgacggtgaggcgcgaaagcgtggggagcaaacaggattagataccctggtagtccacgctgtaaacgatggatactaggtgtgcggggactgaccccctgtgtgccgcagcaaacgcattaagtattccacctggggagtacgttcgcaagaatgaaactcaaaggaattgacggggacccgcacaagcggtggagcatgtggtttaattcgaagcaacgcgaagaaccttaccagtccttgacatccaactgaccgaccagtaacgtggtcttctcttcggagcagttgagacaggtggtgcatggttgtcgtcagctcgtgtcgtgagatgttgggttaagtcccgcaacgagcgcaacccctatccttagtagccagcagtaagatgggaactctagggagactgccggggataacccggaggaaggtggggacgacgtcaaatcatcatgccccttatgggctgggctacacacgtgctacaatggtgctaacagagtgaggcgagactgtgaagttaagcaaatcacaaaaatggcatctcagttcggattgtagtctgcaactcgactacatgaagctggaatcgctagtaatcgcagatcagaatgctgcggtgaatacgttcccgggtcttgcacacacggcccgtc

SEQ ID NO: 764 - DNA, 1331 bp, Artificial Sequence
  Synthetic polymer
gacgaacgctggcggcacgcctaacacatgcaagtcgaacggagaaaatgatttcggttattttcttagtggcggacgggtgagtaacacgtgaggaacctgcctttgagagtgggatagcttctggaaacggatggtaataccgcataacatagcgaaaccgcatgattttgctatcaaagtatttcgctcagagatggcctcgcgtctgattagatagttggtgaggtaacggctcaccaagtcgacgatcagtagccggactgagaggttgaacggccacattgggactgagacacggcccagactcctacgggaggcagcagtgggggatattgcacaatgggggaaaccctgatgcagcgatgccgcgtggaggaagaaggttttcggattgtaaactcctgtcgtaagggaagagaaaggactgtaccttacaagaaagctccggctaactacgcgccagcagccgcggtaatacgtagggagcgagcgttgtccggaatgactgggtgtaaagggagcgtaggcgggatggcaagtcagatgtgaaacctgagggctcaaccttcagactgcatttgaaactgctgttcttgagtgaagtagaggtaagcggaattcctggtgtagcggtgaaatgcgtagagatcaggaggaacatcggtggcgaaggcggcttactgggcttttactgacgctgaggctcgaaagcgtggggagcaagcaggattagataccctggtagtccacgctgtaaacgaggatttttaggggggggggggatggccccttccgcccgccattaacccaataagtaatccactggggggtacgaccgcgagggtggaactcaaaagaaatggcggggggccgcacaagcagtggagtatgtggtttaatttgaagcaacgcgaagaaccttacccggtcttgacatcgagtgacgtatccagagatggatatttcctttgggacacaaagacaggtggtgcatggttgtcgtcagctcgtgtcgtgagatgttgggttaagtcccgcaacgagcgcaacccttatcattagttgctacgcaagagcactctaatgagactgccgttacaaaacggaggaaggtggggatgacgtcaaatcatcatgccccttatgacctgggctacacacgtactacaatggcgatcgaacagagggaagcaagacagcgatgtggagccaatcccaaaaaatcgccccagttcagattgcaggctgcaactcgcctgcatgaagtcggaattgctagtaatcgcagatcagcatgctgcggtgaatacgttcccgggccttgcaca

SEQ ID NO: 765 - DNA, 1340 bp, Artificial Sequence
  Synthetic polymer
gacgaacgctggcggcgcgcctaacacatgcaagtcaaacgagagatgaggagcttgctcttcaaatcgagtggcgaacgggtgagtaacgcgtgaggaacctgcctcaaagagggggacaacagttggaaacgactgctaataccgcataagcccacggctcggcatcgagcagagggaaaaggagtgatccgctttgagatggcctcgcgtccgattagctggttggtgaggtaacggcccaccaaggcgacgatcggtagccggactgagaggttgaacggccacattgggactgacacaccgcccacactcctacgggaggcagcggtggggaatattgcacagtgggggaaaccctgatgcaccgacgccgcgtggaggaagaaggtcttcggattgtaaaactcctgttgttgaggaagataatgacggtactcaacaaggaagtgacggctaactacgtgccagcagccgcggtaaaacgtaggtcacaagcgttgtccggaattactgggtgtaaagggagcgcaggcggaccggcaagttggaagtgaaaactatgggctcaacccataaattgctttcaaaactgctggccttgagtagtgcagaggtaggtggaattcccggtgtagcggtggaatgcgtagatatcgggaggaacaccagtggcgaaggcgacctactgggcaccaactgacgctgaggctcgaaagcatgggtagcaaacaggattagataccctggtagtccatgccgtaaacgatgattactaggtgttggaggattgaccccttcagtgccgcagttaacacaataagtaatccacctggggagtacgaccgcaaggttgaaactcaaaggaattgacgggggcccgcacaagcagtggagtatgtggtttaattcgaagcaacgcgaagaaccttaccaggtcttgacatccgatgcatagtgcagagatgcatgaagtccttcgagacatcgagacaggtggtgcatggttgtcgtcagctcgtgtcgtgagatgttgggttaagtcccgcaacgagcgcaacccttattgccagttactacgcaagaggactctggcgagactgccgttgacaaaacggaggaaggtggggatgacgtcaaatcatcatgccctttatgacctgggctacacacgtactacaatggcgtttaacaaagagaagcaagaccgcgaggtggagcaaaactcaaaaacaacgtctcagttcagattgcaggctgcaactcgcctgcatgaagtcggaattgctagtaatcgcggatcagcatgccgcggtgaatacgttcccgggccttgtaca

SEQ ID NO: 766 - DNA, 1343 bp, Artificial Sequence
  Synthetic polymer
gaacgctggcggcacgcttaacacatgcaagtcgaacgagagaagagaagcttgcttttctgatctagtggcggacgggtgagtaacacgtgagcaatctgcctttcagagggggataccgattggaaacgatcgttaataccgcataatataattgaaccgcatgatttgattatcaaagatttatcgctgaaagatgagctcgcgtctgattagctagttggtaaggtaacggcttaccaaggcgacgatcagtagccggactgagaggttgatcggccacattgggactgagacacggcccagactcctacgggaggcagcagtggggaatattgcacaatggaggaaactctgatgcagcgatgccgcgtgagggaagaaggttttaggattgtaaacctctgtcttcagggacgaaaaaagacggtacctgaggaggaagctccggctaactacgtgccagcagccgcggtaatacgtaggtggcaagcgttgtccggaattattgggcgtaaagcgcgcgcaggcggcttcttaagtccatcttaaaagtgcggggcttaaccccgtgatgggatggaaactgggaggctggagtatcggagaggaaagtggaattcctagtgtagcggtgaaatgcgtagagattaggaagaacaccggtggcgaaggcgactttctggacgacaactgacgctgaggcgcgaaagcgtggggagcaaacaggattagataccctggtagtccacgccgtaaacgatgaatactaggtgtaggaggtatcgaccccttctgtgccggagctaacacaataagtattccgcctgggaagtacgatcgcaagattaaaactcaaaggaattgacgggggcccgcacaagcggtggagtatgtggtttaattcgacgcaacgcgaagaaccttaccaggtcttgacattgactgcaatcccgggaaatcgggagttcccttcggggacaggaaaacaggtggtgcacggctgtcgtcagctcgtgtcgtgagatgttgggttaagtcccgcaacgagcgcaacccctatcttatgttgccagcacgtaatggtgggaactcatgagagaccgccgcggacaacgcggaggaaggcggggatgacgtcaagtcatcatgccccttatgacctgggctacacacgtactacaatgggtgtcaacaaagagaagcgatggggcgacccggagcaaacctcaaaaacacacccccagttcagattgcaggctgcaacccgcctgcatgaagcaggaatcgctagtaatcgcgggtcagcataccgcggtgaatacgttcccgggccttgcaca

SEQ ID NO: 767 - DNA, 1345 bp, Artificial Sequence
  Synthetic polymer
gacgaacgctggcggcgcgcctaacacatgcaagtcgaacgagagagagggagcttgcttcctcaatcgagtggcgaacgggtgagtaacgcgtgaggaacctgcctcaaagagggggacaacagttggaaacgactgctaataccgcataagcccacaggtcggcatcgaccagagggaaaaggagcaatccgctttgagatggcctcgcgtccgattagctagttggtgaggtaatggcccaccaaggcgacgatcggtagccggactgagaggttgaacggccacattgggactgagacacggcccagactcctacgggaggcagcagtggggaatattgcacaatgggggaaaccttgatgcagcgacgccgcgtggaggaaagaaggtcttcggattgtaaactcctgttgttgaggaaggataatgacggtactcaacaaggaagtgacggctaactacgtgccagcagccgcggtaaaacgtaggtcacaagcgttgtccggaattactgggtgtaaagggagcgcaggcgggaagacaagttggaagtgaaatctatgggctcaacccaataaactgctttcaaaactgtttttcttgagtagtgcagaggtaggcggaattcccggtgtagcggtggaatgcgtagatatcgggaggaacaccagtggcgaaggcggcctactgggcaccaactgacgctgaggctcgaaagtgtgggtagcaaacaggagtagataccctggtagtccacaccgtaaacgatgcttaaagggtgttggaggattgaccccttcagtcccgcagttaacacaataaagtaatccacctggggagtacggccgccaaggtggaaaatcaaaaggaattgacgggggcccgcacaagcagtggagtatgtgggttaaatttgacgcaacgcgaagaaccttaccaagtcttgacatcctgcgacggacatagaaatatgtctttccttcgggacgcagagacaggtggtgcatggtggtcgtcagctcgtgtcgtgagatgttgggttaagtcccgcaacgagcgcaacccttactgtcagttactacgcaagaggactctggcaggactgccgttgacaaaacggaggaaggtggggatgacgtcaaatcatcatgccctttatgacttgggctacgcacgtactacaacggcgttaaacaaagagaagcaagaccgcgaggtggagcaaaactcagaaacaacgtcccagttcggactgcaggctgcaactcgcctgcacgaagtcggaattgctagtaatcgtggatcagcatgccacggtgaatacgttcccgggtcttgcaca

SEQ ID NO: 768 - DNA, 1355 bp, Artificial Sequence
  Synthetic polymer
gacaaacgctggcggcgtgcctaacacatgcaagtcgagcggggattgcggaagtgcttgcacagaagcaattctagcggcggacgggtgagtaacgcgtgagcaagctgtccttcacagggggataacacttggaaacaggtgctaataccgcataagaccacacagccgcatggcagagaggtcaaaggagaaatccggtgaagggtgcgctcgcgtcccattagatagttggcggggtaacggcccaccaagtcgacgatgggtagccgacctgagagggtgatcggccacactgggactgagacacggcccagactcctacgggaggcagcagtggggaatattgggcaatgggcgaaagccttacccagcaacgccgcgtgagggaagaaggttttcggattgtaaacctctgtcctgggggacgaaggaagtgacggtaccccgggaggaagccccggctaactacgtgccagcagccgcggtaatacgtagggggcgagcgttgtccggaattattgggcgtaaagggcgcgtagacggctgtgtaagttataggtgaaagcccaactttcaaggttggaactgcctgtaatactgcatggcttgagtgcaggagagggaagcggaattcctagtgtagcggtgaaatgcgtagatattaggaggaacaccagtggcgaaggcggctttctggactgtaactgacgttgaggcgcgaaagcgtggggagcaaacaggattagataccctggtagtccacgctgtaaacgatggatgctaggtgtgggaggtatcgaccccttccgtgccggagttaacgcaataagcatcccgcctggggagtacggccgcaaggttgaaactcaaaggaattgacgggggcccgcacaagcagcggagcatgtggtttaattcgaagcaacgcgaagaaccttaccagggcttgacatctgcttaaagcggtggaaacaccgtgtcccttcgggggaagcaagacaggtggtgcatggttgtcgtcagctcgtgtcgtgagatgttgggttaagtcccgcaacgagcgcaacccttatttccagttactaacaggtgaggctgaggactctggagagaccgccggggacaactcggaggaaggtggggacgacgtcaaatcatcatgccccttatgttctgggccacacacgtgctacaatggtgactacaaagagaagcgagaccgtaaggtggagcggatctcaaaaaagtcatcccagttcggattgtgggctgcaacccgcccacatgaagtcggagttgctagtaatcgcggatcagcatgccgcggtgaatacgttcccgggccttgcaca

SEQ ID NO: 769 - DNA, 1359 bp, Artificial Sequence
  Synthetic polymer
gacgaacgctggcggcgtgcttaacacatgcaagtcgaacgggagaggatgaggaaatgcttcggcatggatacatccgatctagtggcggacgggtgagtaacgcgtgagcaccctgtcctgcacagggggataacactgagaaatcagtgctaataccgcatgagaccacagtatcacatggtacaggggtcaaaggagaaatccggtgcagggtgggctcgcgtcccattagctagttggtagggtaaaggcctaccaaggcgacgatgggtagccggactgagaggttggccggccacactgggactgagacacggcccagactcctacgggaggcagcagtggggaatattgggcaatgggcgaaagcctgacccagcaacgccgcgtgaaggaagaaggtctttggattgtaaacttttgtcctatgggaagaaggaagtgacggtaccatgggaggaagccccggctaactacgtgccagcagccgcggtaatacgtagggggcgagcgttgtccggatttactgggtgtaaagggtgcgtaggcggctttgcaagtcagatgtgaaatctatgggctcaacccatagcctgcatttgaaactgcagagcttgagtgaagtagaggcaggcggaattccccgtgtagcggtgaaatgcgtagagatggggaggaacaccagtggcgaaggcggcctgctgggctttaactgacgctgaggcacgaaagcgtgggtagcaaacaggattagataccctggtagtccacgctgtaaacgatgattactagggtgtggggggtctgaccccttccgtgccggagttaacacaataagtaatccacctggggagtacggccgcaaggttgaaactcaaaggaattgacgggggcccgcacaagcagtggagtatgtggtttaattcgaagcaacgcgaagaaccttaccaggtcttgacatcctactaacgagatagagatatgttaggtgcccttcggggaaagtagagacaggtggtgcatggttgtcgtcagctcgtgtcgtgagatgttgggttaagtcccgcaacgagcgcaacccttgctattagttgctacgcaagagcactctaataggactgccgttgacaaaacggaggaaggtggggacgacgtcaaatcatcatgccccttatgacctgggctacacacgtactacaatggacattaacagagggaagcaatacagtgatgtggagcaaacccctaaaaatgttctcagttcagattgcaggctgcaacccgcctgtatgaagatggaattgctagtaatcgcagatcagcatgctgcggtgaatacgttcccgggccttgtac

SEQ ID NO: 770 - DNA, 1345 bp, Artificial Sequence
  Synthetic polymer
gatgaacgctggcggcgcgcctaacacatgcaagtcgaacggcacccctctccggagggaagcgagtggcgaacggctgagtaacacgtggagaacctgccccctcccccgggatagccgcccgaaaggacgggtaataccggataccccggggtgccgcatggcaccccggctaaagccccgacgggaggggatggctctgcggcccatcaggtagacggcggggtgacggcccaccgtgccgacaacgggtagccgggttgagagaccgaccggccagattgggactgagacacggcccagactcctacgggaggcagcagtggggaatcttgcgcaatggggggaaccctgacgcagcgacgccgcgtgcgggacggaggccttcgggtcgtaaaccgctttcagcagggaagagtcaagactgtacctgcagaagaagccccggctaactacgtgccagcagccgcggtaatacgtagggggcgagcgttatccggattcattgggcgtaaagcgcgcgtaggcggcccggcaggccgggggtcgaagcggggggctcaaccccccgaagcccccggaacctccgcggcttgggtccggtaggggagggtggaacacccggtgtagcggtggaatgcgcagatatcgggtggaacaccggtggcgaaggcggccctctgggccgagaccgacgctgaggcgcgaaagctgggggagcgaacaggattagataccctggtagtcccagccgtaaacgatggacgctaggtgtggggggacgatccccccgtgccgcagccaacgcattaagcgtcccgcctggggagtacggccgcaaggctaaaactcaaaggaattgacgggggcccgcacaagcagcgaagcatgtggcttaattcgaagcaacgcgaagaaccttaccagggcttgacatatgggtgaagcgggggagaccccgtggccgagaggagcccatacaggtggtgcatggctgtcgtcagctcgtgtcgtgagatgttaggttaagtcccgcaacgagcgcaacccccgccgcgtgttgccatcgggtgatgccgggaacccacgcgggaccgccgccgtcaaggcggaggagggcggggaggacgtcaagtcatcatgccccttatgccctgggctgcacacgtgctacaatggccggtacagagggatgccacctcgcgagggggagcggatcccggaaagccggccccagttcggattggggggtgcaacccgcccccacgaagtcggagttgctagtaatcgcggatcagcatgccgcggtgaataaaaggccgggccttgcactctccgcccgtca

SEQ ID NO: 771 - DNA, 1378 bp, Artificial Sequence
  Synthetic polymer
agagtttgcttctggctcaggatgaacgctggcggcgtgcttaacacatgcaagtcgaacggagaacccttgacggagttttcggacaacggataggaattcttagtggcggacgggtgagtaacgcgtgaggaacctgccttggagaggggaataacacagagaaatttgtgctaataccgcataatgcagttgggtcgcatggctctgactgccaaagattttatcgctctgagatggcctcgcgtctgattagctagttggtggggcaacggcccaccaaggcgacgatcagtagccggactgagaggttgaccggccacattgggactgagacacggcccagactcctacgggaggcagcagtggggaatattgggcaatgggcgcaagcctgacccagcaacgccgcgtgaaggaagaaggctttcgggttgtaaacttcttttattaaggacgaagcaatgacggtacttaatgaataagctccggctaactacgcgccagcagccgcggtaatacgtagggagcaagcgttatccggatttactgggtgtaaagggcgtgtaggcgggagtgcaagtcagatgtgaaaactatgggctcaacccatagcctgcatttgaaactgtacttcttgagtactggagaggcaggcggaattccgtgtgtagcggtgaaatgcgtagatatacggaggaacaccagtggcgaaggcggcctgctggacagcaactgacgctgaggcgcgaaagcgtggggagcaaacaggattagataccctggtagtccacgctgtaaacgatggatactaggtgtggggggactgaccccttccgtgccgcagttaacacagtaagtatcccacctggggagtacgatcgcaaggttgaaactcaaaggaattgacgggggcccgcacaagcggtggagtatgtggtttaatttgaagcaacgcgaagaaccttaccagggcttgacatcccggcgaccggtgtagagatacaccttctttttttgaagcgccggtgacaggtggtgcatggttgtcgtcagctcgtgtcgtgagatgttgggttaagtcccgcaacgagcgcaacccctattgttagttgttacgcaagagcactctagcgagactgccgttgacaaaacggaggaaggtggggaggacgtcaaatcatcatgccccttatgtcttgggctacacacgtactacaatggcggtaaacagagggaagcaagaccgcgaggtggagcaaacccctaaaagccgtcccagttcggattgcaggctgcaacccgcctgtatgaagttggaatcgctagtaatcgcggatcagcatgccgcggtgaatacgttcccgggccttgcaca

SEQ ID NO: 772 - DNA, 1374 bp, Artificial Sequence
  Synthetic polymer
ttcgcccttagagttcctttctggctcaggacgaacgctggcggcgcgcctaacacatgcaagtcgaacgagcgagagagagcttgctttctcgagcgagtggcgaacgggtgagtaacgcgtgaggaacctgcctcaaagagggggacaacagttggaaacgactgctaataccgcataagcccacgggtcggcatcgaccagagggaaaaggagcaatccgctttgagatggcctcgcgtccgattagctagttggtgaggtaacggcccaccaaggcaacgatcggtagccggactgagaggttgaacggccacattgggactgagacacggcccagactcctacgggaggcagcagtggggaatattgcacaatgggggaaaccctgatgcagcgacgccgcgtggaggaagaaggtcttcggattgtaaactcctgttgttgaggaagataatgacggtactcaacaaggaagtgacggctaactacgtgccagcagccgcggtaaaacgtaggtcacaagcgttgtccggaattactgggtgtaaagggagcgcaggcgggaagacaagttggaagtgaaatccatgggctcaacccatgaactgctttcaaaactgtttttcttgagtagtgcagaggtaggcggaattcccggtgtagcggtggaatgcgtagatatcgggaggaacaccagtggcgaaggcggcctactgggcaccaactgacgctgaggctcgaaagtgtgggtagcaaacaagattagataccctggtagtccacactgtaaacgatgaatgctaggtgtagggggtatcgaccccttctgtgccgcagtcaacacaataagcattctgcctggggagtacggccgcaaggttgaaactcaaaggaattgacgggggcccgcacaagcagcggagcatgtggtttaatttgacgcaacgcgaagaaccttaccaggtcttgacatccacttaaacttacagagatgtaaggtgtgcttgcacaaagtgagacaggtggtgcatggttgtcgtcagctcgtgtcgtgagatgttgggttaagtcccgcaacgagcgcaacccttatcttcagttactaacgcgtagaggtgaggactctgaagagactgccggggacaactcggaggaaggtggggaggacgtcaaatcatcatgccccttatgacctgggctacacacgtgctacaatggccacgacagagagaagcgaaatcgcaaggtagggcggaactcaaaaaagtggtcccagttcggattgtgggctgcaacccgcccacacgaagtcggagttgctagtaatcgcggatcagcatgccgcggtgaataagttcccgggccttgtac

SEQ ID NO: 773 - DNA, 1373 bp, Artificial Sequence
  Synthetic polymer
ttagagtttgatcctggctcaagatgaactctggcggcgtgcctaacacatgcaagtcgaacgaagcaccttttaagattcttcggatgattgatcggtgactgagtggcggacgggtgagtaacgcgtgggtaacctgccctgtacagggggataacagttggaaacggctgctaataccgcataagcgcacgagaggacatcctcttgtgtgaaaaactccggtggtacaggatgggcccgcgtctgattagctggttggcagggtaacggcctaccaaggcgacgatcagtagccggtctgagaggatgaacggccacactggaactgagacacggtccaaactcctacgggaggcagcagtggggaatattgcacaatgggggaaaccctgatgcagcaacgccgcgtgagtgaagaagtatttcggtatgtaaagctctatcagcagggaagataatgacggtacctgactaagaagctccggctaaatacgtgccagcagccgcggtaatacgtatggagcaagcgttatccggatttactgggtgtaaagggtgcgtaggtggcagtgcaagtcagatgtgaaaggccggggctcaaccccggagctgcatttgaaactgcatagctagagtacaggagaggcaggcggaattcctagtgtagcggtgaaatgcgtagatattaggaggaacaccagtggcgaaggcggcctgctggactgttactgacactgaggcacgaaagcgtggggagcaaacaggattagataccctggtagtccacgccgtaaacgatgaatactaggtgtcggggccgtataggcttcggtgccgtcgcaaacgcagtaagtattccacctggggagtacgttcgcaagaatgaaactcaaaggaattgacggggacccgcacaagcggtggagcatgtggtttaattcgaagcagcgcgaagaaccttaccagggcttgacatccctctgacagatccttaaacggatttttcttcggacagaggagacaggtggtgcatggttgtcgtcagctcgtgtcgtgagatgttgggttaagtcccgcaacgagcgcaacccttgtcattagttgccagcagtaagatgggcactctagtgagactgccggggataactcggaggaaggtggggatgacgtcaaatcatcatgccccttatgttctgggctacacacgtgctacaatggccggtacagagagaagccagaccgcgaggtggagcaaaactcaaaagccggtcccagttcggattgcaggctgcaactcgcctgcatgaagtcggagttgctagtaatcgcagatcagaatgctgcggtgaatgcgttcccgggtcttgcac

SEQ ID NO: 774 - DNA, 1357 bp, Artificial Sequence
  Synthetic polymer
ttagagtttgatcctggctcaagatgaacgctggcggcgcgcctaacacatgcaagtcgaacggcacccctcctcggagggaagcgagtggcgaacggctgagtaacacgtggagaacctgccccctcccccgggatagccgcccgaaaggacgggtaataccggataccccggggtgccgcatggcaccccggctaaagccccgacgggaggggatggctccgcgccccatcaggtagacggtggggtgacggccctccgtgccgacagggggtagcggggttgaaaaacagaccggccagattgggactgagacacggcccacactcctaagggaggcagcagtggggaatcttgcgcagtggggggaacctggacccagcaacgctgcgtgcgggacgggaggccttcggggtcgtaaaccgctttcagcagggaagagtcaagactgtacctgcagaagaagccccggctaactacgtgccagcagccgcggtaatacgtagggggcgagcgttatccggattcattgggcgtaaagcgcgcgtaggcgccccggcaggccgggggtcgaagcggggggctcaaccccccgaagcccccggaacctccgcggcttgggtccggtaggggagggtggaacacccggtgtagcggtggaatgcgcagatatcgggtggaacaccggtggcgaaggcggccctctgggccgagaccgacgctgaggcgcgaaagctgggggagcgaacaggattagataccctggtagtcccagccgtaaacgatggacgctaggtgtggggggacgatccccccgtgccgcagccaacgcattaagcgtcccgcctggggagtacggccgcaaggctaaaactcaaaggaattgacgggggcccgcacaagcagcggagcatgtggcttaattcgaagcaacgcgaagaaccttaccagggcttgacatatgggtgaagcgggggagaccccgtggccgagaggagcccatacaggtggtgcatggctgtcgtcagctcgtgtcgtgagatgttgggttaagtcccgcaacgagcgcaacccccgccgcgtgttgccatcgggtgatgccgggaacccacgcgggaccgccgccgtcaaggcggaggagggcggggacgacgtcaagtcatcatgccccttatgccctgggctgcacacgtgctacaatggccggtacagagggatgccaccccgcgagggggagcggatcccggaaagccggccccagttcggattgggggctgcaacccgcccccatgaagtcggagttgctagtaatcgcggatcagcatgccgcggtgaatgcgttcccgggccttgcaca

SEQ ID NO: 775 - DNA, 1384 bp, Artificial Sequence
  Synthetic polymer
gacgaacgctggcggcgtgcctaacacatgcaagtcgaacggagaattttatttcggtagaattcttagtggcgaacgggtgagtaacgcgtaggcaacctgccctttagacggggacaacattccgaaaggagtgctaataccggatgtgatcatcgtgccgcatggcaggatgaagaaagatggcctctacaagtaagctatcgctaaaggatgggcctgcgtctgattagctagttggtagtgtaacggactaccaaggcgatgatcagtagccggtctgagaggatgaacggccacattgggactgagacacggcccaaactcctacgggaggcagcagtggggaatcttctgcaatggacgaaagtctgacggagcaacgccgcgtgagtgatgaaggatttcggtctgtaaagctctgttgtttatgacgaacgtgcagtgtgtgaacaatgcattgcaatgacggtagtaaacgaggaagccacggctaactacgtgccagcagccgcggtaatacgtaggtggcgagcgttgtccggaattattgggcgtaaagagcatgtaggcggcttaataagtcgagcgtgaaaatgcggggctcaaccccgtatggcgctggaaactgttaggcttgagtgcaggagaggaaaggggaattcccagtgtagcggtgaaatgcgtagatattgggaggaacaccagtggcgaaggcgcctttctggctgtgtctgacgctgagatgcgaaagccagggtagcgaacaagattcgataccccggtggtcctggccgtaaacgacccctaatgggtgtaggaggaatcgaccccttctgtgccggagttaaggcaataagaaccccgcctggggagtacggccgcaaggttgaaactcaaaggaatagacgggggcccgcccaagcggtggagtatgtggtttaattcgacgcaacgcgaagaaccttaccaaggcttgacattgattgaacgctctagagatagagctttcccttcagggacaagaaaacaggtggtgcatggctgtcgtcagctcgtgtcgtgagatgttgggttaagtcccgcaacgagcgcaacccctatcctatgttaccagcaagtaaagttggggactcatgggagactgccagggacaacctggaggaaggcggggaggacgtcaagtcatcatgccccctatgtcttgggctacacacgtactacaatggtcggaaacagagggaagagaagccgcgaggcagagcaaaccccagaaacccgatctcagttcggatcgcaggctgcaacccgcctgcgtgaagtcggaatcgctagtaatcgcaggtcagcatactgcggtgaataaaatcccgggccttgcaca

SEQ ID NO: 776 - DNA, 1371 bp, Artificial Sequence
  Synthetic polymer
ttagagtttgatcctggctcaggacgaacggctggcggcgcgcctaacacatgcaagtcgaacgagagatgaggagcttgctcttcaaatcgagtggcgaacgggtgagtaacgcgtgaggaacctgcctcaaagagggggacaacagttggaaacgactgctaataccgcataagcccacggctcggcatcgagcagggggaaaaggagcaatccgctttgagatggcctcgcgtctgattagctagttggtgaggtaacggcccaccaaggcgacgatcggtagccggactgagaggttgaacggccacattgggactgagacacggcccagactcctacgggaggcagcagtggggaatattgcacaatggggggaaccctgatgcagcgacgccgcgtggaggaagaaggtcttcggattgtaaactcctgttgttgaggaagataatgacggtactcaacaaggaagtgacggctaactacgtgccagcagccgcggtaaaacgtaggtcacaagcgttgtccggaattactgggtgtaaagggagcgcaggcgggagaacaagttggaagtgaaatccatgggctcaacccatgaactgctttcaaaactgtttttcttgagtagtgcagaggtaggtggaattcccggtgtagcggtggaatgcgtagatatcgggaggaacaccagtggcgaaggcggcctactgggcaccaactgacgctgaggctcgaaagtgtgggtagcaaacaggattagataccctggtagtccacaccgtaaacgatgaaaaagggtgttggaggattgaccccttcagggccgcagttaacacaataagtaatccacttggggagtacgaccgcaaggttgaaactcaaaggaattgacgggggcccgcacaagcagtggagtatgtggtttaattcgacgcaacgcgaagaaccttaccaagtcttgacatcccttgacgatgctggaaacagcatttctcttcggagcaaggagacaggtggtgcatggttgtcgtcagctcgtgtcgtgagatgttgggttaagtcccgcaacgagcgcaacccttatggtcagttactacgcaagaggactctggccagactgccgttgacaaaacggaggaaggtggggatgacgtcaaatcatcatgccctttatgacttgggctacacacgtactacaatggcgttaaacaaagagaagcaagaccgcgaggaggagcaaaactcagaaacaacgtcccagttcggactgcaggctgcaactcgcctgcacgaagtcggaattgctagtaatcgtggatcagcatgccacggtgaatacgttcccgggccttgcacacaccgcccgtc

SEQ ID NO: 777 - DNA, 1354 bp, Artificial Sequence
  Synthetic polymer
gacgaacgctggcggcgtgcctaacacatgcaagtcgaacggaactgttttgaaagatttcttcggaatgaatttgatttagtttagtggcggacgggtgagtaacgcgtgagtaacctgccttcaagagggggataacattctgaaaaggatgctaataccgcatacgcccacggctcggcatcgagcagagggaaaaggagcaatccgctttgagatggcctcgcgtccgattagctagttggtgaggtaacggcccaccaaggcgacgatcggtagccggactgagaggttgaacggccacattgggactgagacacggcccagactcctacgggaggcagcagtggggaatattgcacaatgggggaaaccctgatgcagcgacgccgcgtggaggaagaaggtcttcggattgtaaactcctgttgttgaggaagataatgacggtactcaacaaggaagtgacggctaactacgtgccagcagccgcggtaaaacgtaggtcacaagcgttgtccggaattactgggtgtaaagggagcgcaggcgggagaacaagttggaagtgaaatccatgggctcaacccatgaactgctttcaaaactgtttttcttgagtagtgcagaggtaggcggaattcccggtgtagcggtggaatgcgtagatatcgggaggaacaccagtggcgaaggcggcctactgggcaccaactgacgctgaggctcgaaagtgtggatagcaaacaggattagataccctggtagtccacaccgtaaacgatgattactaggtgttggaggattgaccccttcagtgccgcagttaacacaataagtaatccacctggggagtacgaccgcaaggttgaaactcaaaggaattgacgggggcccgcacaagcagtggagtatgtggtttaattcgacgcaacgcgaagaaccttaccaagtcttgacatcccttgacgatgctggaaacagtatttctcttcggagcaaggagacaggtggtgcatggttgtcgtcagctcgtgtcgtgagatgttaggttaagtcccgcaacgagcgcaacccttatggtcagttactacgcaagaggactctggccagactgccgttgacaaaacggaggaaggtggggatgacgtcaaatcatcatgccctttatgacttgggctacacacgtactacaatggcgttaaacaaagagaagcaagaccgcgaggtggagcaaaactcagaaacaacgtcccagttcggactgcaggctgcaactcgcctgcacgaagtcggaattgctagtaatcgtggatcagcatgccacggtgaatacgttcccgggccttgcaca

SEQ ID NO: 778 - DNA, 1363 bp, Artificial Sequence
  Synthetic polymer
gatgaacgctggcggcgtgcctaacacatgcaagtcgaacggagttcttaaggaatgcgacttcggtcaaatgacttttgaacttagtggcggacgggtgagtaacgcgtgagcaacctgcctttcagagggggataacatttggaaacagatgctaataccgcataagattacagtaccgcatgatacagtgatcaaaggagcaatccgctgaaagatgggctcgcgtccgattagatagttggtgaggtaacggctcaccaagtcgacgatcggtagccggactgagaggttgaacggccacattgggactgagacacggcccagactcctacgggaggcagcagtggggaatattgcacaatgggcgaaagcctgatgcagcaacgccgcgtgagggaagacggttttcggattgtaaacctctgttttcggtgacgaacaaatgacggtaaccgagtaggaagccacggctaactacgtgccagcagccgcggtaatacgtaggtggcaagcgttatccggaattactgggtgtaaagggagcgcaggcgggatagcaagtcagctgtgaaaactatgggctcaacccataaactgcagttgaaactgttattcttgagtggagtagaggcaagcggaattccgagtgtagcggtgaaatgcgtagatattcggaggaacaccagtggcgaaggcggcttgctgggctctaactgacgttgaggctcgaaagcgtggggagcaaacaggattagataccctggtagtccacgccgtaaacgaagaaggctaggtgttggggagcaaagcttttcggtgccgccgcaaacgcattaagcattccacctggggagtacgttcgcaagaatgaaactcaaaggaattgacggggacccgcacaagcggtggagcatgtggtttaattcgaagcaacgcgaagaaccttaccaggtcttgacatcccgatgaccggcccgtaacggggcgttctcttctgagcattggagacaggtggtgcatggttgtcgtcagctcgtgtcgtgagatgttgggttaagtcccgcaacgagcgcaacccttatcctcagtagccagcaggtaaagctgggcactctgtggagactgccagggataacctggaggaaggtggggatgacgtcaaatcatcatgccccttatgatctgggctacacacgtgctacaatggcgtaaacaaagggaggcaaagccgcgaggtggagcaaatcccaaaaataacgtctcagttcggactgcagtctgcaactcgactgcacgaagctggaatcgctagtaatcgcgaatcagaatgtcgcggtgaatacgttcccgggtcttgcac

SEQ ID NO: 779 - DNA, 1334 bp, Artificial Sequence
  Synthetic polymer
gaactctggcggcgcgcctaacacatgcaagtcgaacgagagagagggagcttgcttcctcgatcgagtggcgaacgggtgagtaacgcgtgaggaacctgcctcaaagagggggacaacagttggaaacgactgctaataccgcataagcccacaacccggcatcgggaagagggaaaaggagtaatccgctttgagatggcctcgcgtccgattagctagttggtgaggtaacggcccaccaaggcgacgatcggtagccggactgagaggttgaacggccacattgggactgagacacggcccagactcctacgggaggcagcagtggggaatattgcacaatgggggaaaccctgatgcagcgacgccgcgtggaggaagaaggtcttcggattgtaaactcctgttgttgaggaagataatgacggtactcaacaaggaagtgacggctaactacgtgccagcagccgcggtaaaacgtaggtcacaagcgttgtccggaattactgggtgtaaagggagcgcaggcgggcgatcaagttggaagtgaaatccatgggctcaacccatgaactgctttcaaaactggtcgtcttgagtagtgcagaggtaggcggaattcccggtgtagcggtggaatgcgtagatatcgggaggaacaccagtggcgaaggcggcctactgggcaccaactgacgctgaggcttgaaagtgtgggtagcaaacaggattagataccctggtagtccacaccgtaaacgaggatacttaggtgttgggagattgaccctctcagtgccgcagttaacccaataagtaatccacctggggagtacgaccgcaaggttgaaactcaaaggaattgacgggggcccgcacaagcagtggagtatgtggtttaattcgacgcaacgcgaagaaccttaccaagtcttgacgtcccttgacgatgctggaaacagtatttctcttcggagcaaggagacaggtggtgcatggttgtcgtcagctcgtgtcgtgagatgttgggttaagtcccgcaacgagcgcaacccttatggtcagttactacgcaagaggactctggccagactgccgttgacaaaacggaggaaggtggggatgacgtcaaatcatcatgccctttatgacttgggctacacacgtactacaatggcgttaaacaaagagaagcaagaccgcgaggtggagcaaaactcagaaacaacgtcccagttcggactgcaggctgcaactcgcctgcacgaagtcggaattgctagtaatcgtggatcagcatgccacggtgagtacgttcccgggccttgcac

SEQ ID NO: 780 - DNA, 1379 bp, Artificial Sequence
  Synthetic polymer
ttagagtttgatcctggctcaagacgaactctggcggcgtgcctaacacatgcaagtcgaacggaactgttttgaatgatttcttcggagagaatttgatttactttaggggcggacgggtgagtagcgcgtgacccccccgccttcgagagggagataacattcagaaaagagtgctaataccgcatgacatatcagaaccacgtggttctgatatcaaagattttatcgcttgaagatggactcgcgtccgattagttaggtggcgaggtaacggctcaccaagaccgcgatcggtagccggactgagaggttgaacggccacattgggactgagacacggcccagactcctacgggaggcagcagtgggggatattgcgcaatgggggcaaccctgacgcagcaacgccgcgtgaaggatgaaggttttcggattgtaaacttcttttattaaggacgaaaattgacggtacttaatgaataagctccggctaactacgtgccagcagccgcggtaatacgtagggagcaagcgttgtccggatttactgggtgtaaagggtgcgtaggcggctttgcaagtcagatgtgaaatctatgggctcaacccataaactgcatttgaaactgtagagcttgagtgaagtagaggcaggcggaattccccgtgtagcggtgaaatgcgtagagatggggaggaacaccagtggcgaaggcggcctgctgggctttaactgacgctgaggcacgaaagcgtgggtagcaaacaggattagataccctggtagtccacgctgtaaacgatgattagtaggtgtggggggtgttaccccttccgtgccggagttaacacaataagtaatccacctggggagtacggccgcaaggttgaaactcaaaggaattgacgggggcccgcacaagcagtggagtatgtggtttaattggaagcaacgcgacgaaccttaccaggtcttgacatccaactaatgaagtagagatacattaggtgcccttcggggaaagttgagacaggtggtgcatggttgtcgtcagctcgtgtcgtgagatgttgggttaagtcccgcaacgagcgcaacccttgttattagttggtacgcaagagcactctaataggactgccgttgacaaaacggaggaaggtggggacgacgtcaaatcatcatgccccttacgacctgggctacacacgtactacaatggatgttaacagagggaagcaagacagcgatgtggagcaaacccctaaaaacattctcagttcagattgcaggctgcaacccgcctgcatgaagatggaattgctagtaatcgcggatcagcatgccgcggtgaatacgttcccgggccttgcac

SEQ ID NO: 781 - DNA, 1449 bp, Artificial Sequence
  Synthetic polymer
gacgagcggcggacgggtgagtaatgtctgggaaactgcctggcggccgcgggaattcgattggaaacggtagctaataccgcataacgtcgcaagaccaaagagggggaccttcgggcctcttgccatcagatgtgcccagatgggattagctagtaggtggggtaatggctcacctaggcgacgatccctagctggtctgagaggatgaccagccacactggaactgagacacggtccagactcctacgggaggcagcagtggggaatattgcacaatgggcgcaagcctgatgcagccatgccgcgtgtatgaagaaggccttcgggttgtaaagtactttcagcggggaggaaggtgctgaggttaataacctcagcaattgacgttacccgcagaagaagcaccggctaactccgtgccagcagccgcggtaatacggagggtgcaagcgttaatcggaattactgggcgtaaagcgcacgcaggcggtctgtcaagtcggacgtgaaatccccgggctcaacctgggaactgcattcgaaactggcaggctagagtcttgtagaggggggtagaattccaggtgtagcggtgaaatgcgtagagatctggaggaataccggtggcgaaggcggccccctggacaaagactgacgctcaggtgcgaaagcgtggggagcaaacaggattagataccctggtagtccacgccgtaaacgatgtctactagccgttggggcctttgaggctttagtggcgcagctaacgcgataagtagaccgcctggggagtacggtcgcaagactaaaactcaaatgaattgacgggggcccgcacaagcggtggagcatgtggtttaattcgatgcaacgcgaagaaccttacctggtcttgacatacagagaactttccagagatggattggtgccttcgggaactctgatacaggtgctgcatggctgtcgtcagctcgtgtcgtgagatgttgggttaagtcccgcaacgagcgcaacccttttccttacttgccatcgggtcatgccgggaactttaaggatactgccagtgacaaaccggaggaaggtggggatgacgtcaagtcatcatggcccttacggccagggctacacacgtactacaatggtggggacagagggctgcaaactcgcgagagtaagccaatcccagaaaccccatctcagtccggattggagtctgcaactcgactccatgaagtcggaatcgctagtaatcgcagatcagcactgctgcggtgaatacgttcccgggccttgtacacaccgcccgtcacaccatgggggtttgttgcaccagaagcaggtagcttaaccttcgggagggcgcttgccacggtgtggccgatgactggggtgaagtcgtaacaaggtaaccgtaggggaacctgcggttggatcacctcctta

SEQ ID NO: 782 - DNA, 1404 bp, Artificial Sequence
  Synthetic polymer
agagtttgatcctggctcaagacgaacgcttgcggcacgcttaacacatgcaagtcgaacggagaacattgagcttgcttaatgttcttagtggcggacgggtgagtaacacgtgagtaacctgcctctgagagtgggatagcttctggaaacggatggtaataccgcataacatcatggattcgcatgtttctgtgatcaaagatttatcgcttagagatggactcgcgtctggttagctagttggtaaggtaacggcccaccaaacctacgatcagtagccggtctgagaggatgaacggccacactggaactgagacacggtccagactcctacgggaggcagcagtggggaatcttccgcaatgggcgaaagcctgacggagcaacgccgcgtgagtgatgacggccttcgggttgtaaagctctgtgatcggggacgaacggtccgtaagctaataccttatggaagtgacggtacccgaatagcaagccacggctaactacgtgccagcagccgcggtaatacgtaggtggcaagcgttgtccggaattattgggcgtaaagcgcgcgcaggcggctttctaagtccatcttaaaagtgcggggcttaaccccgtgatgggatggaaactgggaagctggagtatcggagaggaaagtggaattcctagtgtagcggtgaaatgcgtagagattaggaagaacaccggtggcgaaggcgactttctggacgacaactgacgctgaggcgcgaaagcgtggggagcaaacaggattagataccctggtagtccacgccgtaaacgatgaatactaggtgtaggaggtatcgaccccttctgtgccggagctaacacaataagtattccgcctgggaagtacgatcgcaagattaaaactcaaaggaattgacgggggcccgcacaagcggtggagtatgtggtttaattcgacgcaacgcgaagaaccttaccaggtcttgacattgatcgccattcacagaaatgtgaagttctccttcgggagacgagaaaacaggtggtgcacggctgtcgtcagctcgtgtcgtgagatgttgggttaagtcccgcaacgagcgcaacccctatcttatgttaccagcacgttatggtggggactcatgagagaccgccgcggacaacgcggaggaaggtggggatgacgtcaagtcatcatgccccttatgacctgggctacacacgtactacaatgggtgtcaacaaagagaagcgaaaccgcgaggtggagcgaacctcaaaaacacacccccagttcagattgcaggctgcaacccgcctgcatgaagtaggaatcgctagtaatcgcgggtcagcataccgcggtgaatacgttcccgggccttgcactcaacgcccgtc

SEQ ID NO: 783 - DNA, 1381 bp, Artificial Sequence
  Synthetic polymer
ttagagtttgatcctggctcaagatgacctttggcggcgtgcttaacacatgcaagtcgaacggagcacccctgacggagttttcggacaacgaaagggaatgcttagtggcggacgggtgagtaacgcgtgagtaacctgccttggagtggggaataacagccggaaacggctgctaataccgcatgatgtatctggatcgcatggttctggataccaaagatttatcgctctgagatggactcgcgtctgattagctagttggtgaggtaatggctcaccaaggcgacgatcagtagccggactgagaggttggccggccacattgggactgagacacggcccagactcctacgggaggcagcagtggggaatattgggcaatgggcgaaagcctgacccagcaacgccgcgtgaaggaagaaggccctcgggttgtaaacttcttttgtcagggacgaagcaagtgacggtacctgacgaataagccacggctaactacgtgccagcagccgcggtaatacgtaggtggcaagcgttatccggatttactgggtgtaaagggcgtgtaggcgggagtgcaagtcagatgtgaaaactatgggctcaacccatagcctgcatttgaaactgtacttcttgagtgatggagaggcaggcggaattccctgtgtagcggtgaaatgcgtagatatagggaggaacaccagtggcgaaggcggcctgctggacattaactgacgctgaggcgcgaaagcgtggggagcaaacaggattagataccctggtagtccacgccgtaaacgatggatactaggtgtggggggtctgaccccctccgtgccgcagttaacacaataagtatcccacctggggagtacgatcgcagggttgaaactcaaaggaattgacgggggcccgcacaagcggtggagtatgtggtttaattcgaagcaacgcgaagaaccttaccaggacttgacatcctactaacgaagcagagatgcataaggtgcccttcggggaaagtagagacaggtggtgcatggttgtcgtcagctcgtgtcgtgagatgttgggttaagtcccgcaacgagcgcaacccttattgttagttgctacgcaagagcactctagcgagactgccgttgacaaaacggaggaaggtggggacgacgtcaaatcatcatgccccttacgtcctgggccacacacgtactacaatggcggtcaacagagggaagcaaagccgcgaggtggagcaaatccctaaaagccgtcccagttcggattgcaggctgaaactcgcctgtatgaagtcggaatcgctagtaatcgcggatcagcatgccgcggtgaatacgttcccgggccttgcaca

SEQ ID NO: 784 - DNA, 1338 bp, Artificial Sequence
  Synthetic polymer
gacgaacgctggcggcgcgcctaacacatgcaagtcgaacgagcgagagagagcttgctttctcgagcgagtggcgaacgggtgagtaacgcgtgaggaacctgcctcaaagagggggacaacagttggaaacgactgctaataccgcataagcccacggctcggcatcgagcagagggaaaaggagcaatccgctttgagatggcctcgcgtccgattagctagttggtgaggtaacggcccaccaaggcaacgatcggtagccggactgagaggttgaacggccacattgggactgagacacggcccagactcctacgggaggcagcagtggggaatattgcacaatgggggaaaccctgatgcagcgacgccgcgtggaggaagaaggtcttcggattgtaaactcctgttgttggggaagataatgacggtacccaacaaggaagtgacggctaactacgtgccagcagccgcggtaaaacgtaggtcacaagcgttgtccggaattactgggtgtaaagggagcgcaggcgggaagacaagttggaagtgaaatctatgggctcaacccataaactgctttcaaaactgtttttcttgagtagtgcagaggtaggcggaattcccggtgtagcggtggaatgcgtagatatcgggaggaacaccagtggcgaaggcggcctactgggcaccaactgacgctgaggctcgaaagtgtgggtagcaaacaggattagataccctggtagtccacaccgtaaacgacaataaaggggtgttggaggattgaccccctcagcgccgcagttaacacaataagtaatccacctggggagtgcgaccgcaagggtgaaacttaaaggaattgacgggggcccgcacaagcagtggagtatgtggtttaattcgacgcaacgcgaagaaccttaccaagtcttgacatccctcgacaggcatagaaatatgttttttttttggagcaaggagacaggtggtgcatggttgtcgtcagctcgtgtcgtgagatgttaggttaagtcccgcaacgagcgcaacccctatggtcagttattacgcaagaggactctggccagactgccgttgacaaaacggaggaagggggggaggacgtcaaatcatcatgccccttatgacttggggtacacacgtactacaatggcgttaaacaaagagaagcgagaccgcgagggggagcaaaactcagaaacaacgtcccagttcggagtgcaggctgcaactcgcctgcacgaagtcggaattgctagtaatcgtggatcagcatgccacggtgaatacgttcccgggccttgcaca

SEQ ID NO: 785 - DNA, 1358 bp, Artificial Sequence
  Synthetic polymer
  misc_feature (754)..(754): n is a, c, g, or t
gatgaacgctggcggcgtgcctaacacatgcaagtcgaacgaagcaccttttgagattcttcggatgatcgatcggtgactgagtggcggacgggtgagtaacgcgtgggtaacctgccctgtacggggggataacagctggaaacggctgctaataccgcataagcgcacgaggagacatctctttgtgtgaaaaactccggtggtacaggatgggcccgcgtctgattagctggttggcagggtaacggcctaccaaggcgacgatcagtagccggtctgagaggatgaacggccacattggaactgagacacggtccaaactcctacgggaggcagcagtggggaatattgcacaataggggaaaccctgatgcagcaacgccgcgtgagtgaagaagtatttcggtatgtaaagctctatcagcagggaagataatgacggtacctgactaagaagctccggctaaatacgtgccagcagccgcggtaatacgtatggagcaagcgttatccggatttactgggtgtaaagggtgcgtaggtggcagtgcaagtcagatgtgaaaggccggggctcaaccccggagctgcatttgaaactgctcggctagagtacaggagaggcaggcggaattcctagtgtagcggtgaaatgcgtagatattaggaggaacaccagtggcgaaggcggcctgctggactgttactgacactgaggcacgaaagcgtggggagccaacaggattagatnccctggtagtcccccccgtaaacaatgaaatactaggtgtcggggccgtataggctccggtgccgccgcaaacccagtaagtattccacctggggagtacgttcgcaagaatgaaactcaaaggaattgacggggacccgcacaagcggtggagcatgtggtttaattcgaagcaacgcgaagaaccttaccaggtcttgacatccttctgaccgcaccttaatcggtgctttccttcgggacagaagagacaggtggtgcatggttgtcgtcagctcgtgtcgtgagatgttgggttaagtcccgcaacgagcgcaacccctatcttcagtagccagcaggtaaggctgggcactctggtgagactgccgaggacaactcggaggaaggtggggacgacgtcaaatcatcatgccccttacgtcttgggctacacacgtgctacaatggctgtaacaaagggaagcgacagcgtaagctgaagcggatctcgaaaaggcagtcccagttcggattgtgggctgcaacccgcccacatgaagtcggagttgctagtaatcgcggatcagcatgccgcggtgaatacgttcccgggccttgcaca

SEQ ID NO: 786 - DNA, 1360 bp, Artificial Sequence
  Synthetic polymer
gatgaacgctggcggcgtgcttaacacatgcaagtcgaacgaaacaccttatttgattttcttcggaactgaagatttggtgattgagtggcggacgggtgagtaacgcgtgggtaacctgccctgtacaggggggataacagtcagaaatgactgctaataccgcataagaccacagcaccgcatggtgcaggggtaaaaacttcggtggtacaggatggacccgcgtctgattagctggttggtgaggtaacggctcaccaaggcgatgatcagtagccggcttgagagagtgaacggccacattgggactgagacacggcccaaactcctacgggaggcagcagtggggaatattgcacaatgggggaaaccctgatgcagcgacgccgcgtgagtgaagaagtatctcggtatgtaaagctctatcagcagggaagaaaatgacggtacctgactaagaagccccggctaactacgtgccagcagccgcggtaatacgtagggggcaagcgttatccggaattactgggtgtaaagggtgcgtaggtggtatggcaagtcagaagtgaaaacccagggcttaactctgggactgcttttgaaactgtcagactggagtgcaggagaggtaagcggaattcctagtgtagcggtgaaatgcgtagatattaggaggaacatcagtggcgaaggcggcttactggactgaaactgacactgaggcacgaaagcgtggggagcaaacaggattagataccctggtagtccacgccgtaaacgatgaatactaggtgtcggggccgtagaggcttcggtgccgcagctaacgcagtaagtattccacctggggagtacgttcgcaagaatgaaactcaaaggaattgacggggacccgcacaagcggtggagcatgtggtttaattcgaagcaacgcgaagaaccttacctggtcttgacatccttctgaccggtccttaaccggacctttccttcgggacaggagagacaggtggtgcatggttgtcgtcagctcgtgtcgtgagatgttgggttaagtcccgcaacgagcgcaacccctatctttagtagccagcatttcaggtgggcactctagagagactgccagggataacctggaggaaggtggggacgacgtcaaatcatcatgccccttatgaccagggctacacacgtgctacaatggcgtaaacaaagggaagcgagattgtgagatagagcaaatcccaaaaataacgtcccagttcggactgtagtctgcaacccgactacacgaagctggaatcgctagtaatcgcggatcagaatgccgcggtgaatacgttcccgggtcttgcac

SEQ ID NO: 787 - DNA, 1358 bp, Artificial Sequence
  Synthetic polymer
gatgaacgctggcggcgtgcctaacacatgcaagtcgaacgaagcgccttttgagattcttcggatgatcgattggtgactgagtggcggacgggtgagtaacgcgtgggtaacctgccctgtacaggggggataacagctggaaacggctgctaataccgcataagcgcacgaggagacatctcctagtgtgaaaaactccggtggtacaggatgggcccgcgtctgattagctggttggcagggtaacggcctaccaaggcaacgatcagtagccggtctgagaggatgaacggccacattggaactgagacacggtccaaactcctacgggaggcagcagtggggaatattgcacaatgggggaaaccctgatgcagcaacgccgcgtgagtgaagaagtatttcggtatgtaaagctctatcagcagggaagataatgacggtacctgactaagaagctccggctaaatacgtgccagcagccgcggtaatacgtatggagcaagcgttatccggatttactgggtgtaaagggtgcgtaggtggcagtgcaagtcagatgtgaaaggccggggctcaaccccggagctgcatttgaaactgctcggctagagtacaggagaggcaggcggaattcctagtgtagcggtgaaatgcgtagatattaggaggaacaccagtggcgaaggcggcctgctggactgtaactgacactgaggctcgaaagcgtggggagcaaacaggattagataccctggtagtccacgccgtaaacgaaggaataataggtgtcggggcccataagggcttcggtgccgcagcaaacgcaataagtattccacctggggagtacgttcgcaagaatgaaactcaaaggaattgacggggacccgcacaagcggtggagcatgtggtttaattcgaagcaacgcgaagaaccttaccaagttttgacatcccactgaccggacagtaatgtgtcctttccttcgggacagtggtgacaggtggtgcatggttgtcgtcagctcgtgtcgtgagatgttgggttaagtcccgcaacgagcgcaacccctatccttagtagccagcagtaagatgggcactctagggagactgccagggataacctggaggaaggtggggatgacgtcaaatcatcatgccccctatgacttgggctacacacgtgctacaatggcgtaaacaaagtgaagcgaagtcgtgaggccaagcaaatcacaaaaataacgtctcagttcggattgtagtctgcaactcgactacatgaagctggaatcgctagtaatcgcagatcagaatgctgcggtgaataaaatcccgggtcttgcaca

SEQ ID NO: 788 - DNA, 1359 bp, Artificial Sequence
  Synthetic polymer
agagtttgattctggctcaggacgaacgctggcggcgcgcctaacacatgcaagtcgaacgagcgagagagagcttgctttctcgagcgagtggcgaacgggtgagtaacgcgtgaggaacctgcctcaaagagggggacaacagttggaaacgactgctaataccgcataagcccacgggtcggcatcgaccagagggaaaaggagcaatccgctttgagatggcctcgcgtccgattagctagttggtgaggtaatggcccaccaaggcgacgatctgtagccggactgagaggttgaacggccacattgggactgagacacggcccagactcctacgggaggcagcagtggggaatattgcacaatgggggaaaccttgatgcagcgacgccgcgtggaggaagaaggtcttcggattgtaaactcctgttgttggggaagataatgacggtacccaacaaggaagtgacggctaactacgtgccagcagccgcggtaaaacgtaggtcacaagcgttgtccggaattactgggtgtaaagggagcgcaggcgggaagacaagttggaagtgaaatctatgggctcaacccataaactgctttcaaaactgtttttcttgagtagtgcagaggtaggcggaattcccggtgtagcggtggaatgcgtagatatcgggaggaacaccagtggcgaaggcggcctactgggcaccaactgacgctgaggctcgaaagtgtgggtagcaaacaggattagataccctggtagtccacaccgtaaacgatgataattaggtgtgggaggatggccccctccagtcccgcagtaaacacaataaagaaatccacctggggagtaggacggcaaggtggaaactcaaagaaatagacgggggcccgcccaaccagtggagtatgtggtttaatttgacgcaacgcgaagaaccttaccaagtcttgacatcccttgccagacatagaaatatgtaatctcttcggagcaaggagacaggtggtgcatggtggtcgtcagctcgtgtcgtgagatgttgggttaagtcccgcaacgagcgcaacccttatggtcagttactacgcaagaggactctggccagactgccgttgacagaacggaggaaggtggggatgacgtcaaatcatcatgccctttatgacttgggctacacacgtactacaatggcgttaaacaaagagaagcaagaccgcgaggtggagcaaaactcagaaacaacgtcccagttcggactgcaggctgcaactcgcctgcacgaagtcggaattgctagtaatcgtggatcagcatgccacggtgaataaaatcccgggccttgcaca

SEQ ID NO: 789 - DNA, 1330 bp, Artificial Sequence
  Synthetic polymer
agagttcgattctggctcaggatgaacgctggcggcgcgcctaacacatgcaagtcgaacggcacctatcttcggatagaagcgagtggcgaacggctgagtaacacgtggagaacctgccccctcccccgggatagccgcccgaaaggacgggtaataccggataccccggggtgccgcatggcaccccggctaaagccccgacgggaggggatggctccgcggcccatcaggtagacggcggggtgacggccccaccgtgccgacaacgggtagccgggttgagagaccgaccggccagattgggactgagacacggcccagactcctacgggaggcagcagtggggaatcttgcgcaatggggggaaccctgacgcagcgacgccgcgtacgggacggaggccttcgggtcgtaaaccgctttcagcagggaagagtcaagactgtacctgcagaagaagccccggctaactacgtgccagcagccgcggtaatacgtagggggcgagcgttatccggattcattgggcgtaaagcgcgcgcaggcggcccggcaggccgggggtcgaagcggggggctcaaccccccgaagcccccggaacctccgcggcttgggtccggtaggggagggtggaacacccggtgtagcggtggaatgcgcagatatcgggtggaacaccggtggcgaaggcggccctctgggccgagaccgacgctgaggcgcgaaagctgggggagcgaaaaggattagataccctggtagtcccagccgtaaaccctttaggggggtgtggggggacgatccccccgtgccgcagccaacgcattaagcgtcccgcctggggagtacggccgcaaggctaaaaatcaaaagaattgacgggggcccgcacaagcagcggagcatgtggtttaatttgaagcaacgcgaagaaccttaccagggcttgacatatgggtgaagcgggggagaccccgtggccgagaggagcccatacaggtggtgcatggctgtcgtcagctcgtgtcgtgagatgttgggttaagtcccgcaacgagcgcaaccccccccgcgtgttgccatcgggtgatgccgggaacccacgcgggaccgccgccgtcaaggcggaggagggcggggaggacgccaagtcatcatgccccttatgccctgggctgcacacgtgctacaatggccggtacagagggatgccaccccgcgagggggagcggatcccggaaagccggccccagttcggattggggggtgcaacccgcccccacgaagtcggagttgctagtaatcgcggatcagcatgccgcggtg

SEQ ID NO: 790 - DNA, 1337 bp, Artificial Sequence
  Synthetic polymer
gacgaacgctggcggcgcgcctaacacatgcaagtcgaacgagcgagagagagcttgctttctcaggcgaggggcaaacgggtgagtaacgcgtgaggaacctgcctcagagagggggacaacggatggaaacgactgctaataccgcataagcccgcaggtcggcatccaccagagggaaaaggagcagtccgctttgagatggcctcgcgtccgattaactagttggtgaggtaacggcccaccacggcgacgatcggtagccggactgagaggatgaacggccacattgggactgacacgcgacccagactcctacgggaggcagcagtggggaatattgcacaatgggggaaaccctgatgcagcgacgccgcgtggaggaagaaggtcttcggattgtaaactcctgttgttgaggaagataatgacggtactcaacaaggaagtgacggctaactacgtgccagcagccgcggtaaaacgtaggtcacaagcgttgtccggaattactgggtgtaaagggagcgcaggcgggaagacaagttggaagtgaaatctatgggctcaacccataaactgttttcaaaactgtctttcttgagtagtgcagaggtaggcggaattcccggtgtagcggtggaatgcgtagatatcgggaggaacaccagtggcgaaggcggcctactgggcaccaactgacgctgaggctcgaaagtgtgggtagcaaacaagattagatcccctggtagtccacaccctaaacgatccttactaggggttggaggatggaccccttcagtgccgcagttaacacaataagtaatccacccggggagtacgaccgcaaggttgaaactcaaaggaattgacgggggcccgcacaagcagtggagtatgtggtttaatttgacgcaacgcgaagaaccttaccaagtcttgacatcctgcgacgatgctggaaacagtattttccttcgggacgcagagacaggtggtgcatggttgtcgtcagctcgtgtcgtgagatgttgggttaagtcccgcaacgagcgcaacccttactgtcagttactacgcaagaggactctggcaggactgccgttgacaaaacggaggaaggtggggaggacgtcaaatcatcatgccccctatgacttgggctacacacgtactacaatggcgttaaacaaagagaagcaagaccgcgaggtggagcaaaactcagaaacaacgtcccagttcggactgcaggctgcaactcgcctgcacgaagtcggaattgctagtaatcgtggatcagcatgccacggtgaatacgttcccgggccttgcac

SEQ ID NO: 791 - DNA, 1363 bp, Artificial Sequence
  Synthetic polymer
gacgaacgctggcggcgtgcttaatacatgcaagtcgaacgaagatgctgcgaggaagttttcggacggaatcgcagtagactgagtggcggacgggtgagtaacgcgtgagcaacctgcctacaagagggggataacagctggaaacggctgctaataccgcataagaccacgttttcgcatggaagaggggtcaaaggaggaatccgcttgtagatgggctcgcgtcccattagctagttgggagggtaaaggcctaccaaggcgacgatgggtagccgacctgagagggtgatcggccacactggaactgagacacggtccagactcctacgggaggcagcagtagggaatattgggcaatgggggaaaccctgacccagcaacgccgcgtgagggaagaaggttttcggattgtaaacctctgtcctatgggacgaaggaagtgacggtaccataggaggaagctccggctaactacgtgccagcagccgcggtaatacgtagggagcgagcgttgtccggaattactgggcgtaaagggtgcgtaggcggtattttaagtcgcatgtgaaatactcgggcttaacccgggggctgcatgcgaaactggggtactagagtgcaggagaggtaagcggaattcctagtgtagcggtgaaatgcgtagatattaggaggaacaccagtggcgaaggcggcttactggactgtaactgacgctgaggcacgaaagcgtggggagcaaacaggattagataccctggtagtccacgctgtaaaacgatggatactaggtgtaggggtcgaaaaggcttctgtgccggagcaaacgcaataagtatcccgcctggggagtacgaccgcaaggttgaaactcaaaggaattgacgggggcctgcacaagcagcggagcatgtggtttaattcgaagcaacgcgaagaaccttaccaaggcttgacatcctctgacgaacatagagatatgttttcccttcggggcagagagacaggtggtgcatggttgtcgtcagctcgtgtcgtgagatgttgggttaagtcccgcaacgagcgcaacccttgtagctagttgccagcgagtaaagtcgggaactctaggtagactgccggggacaactcggaggaaggtggggacgacgtcaaatcatcatgccccttatgatctgggcgacacacgtgctacaatggcggtcacaaagtgaggcaaacccgcgagggggagcaaaccacaaaaaggccgtcccagttcggactgtagtctgcaacccgactacacgaagctggaatcgctagtaatcgcgaatcagaatgtcgcggtgaatacgctcccgggtcttgcaca

SEQ ID NO: 792 - DNA, 1373 bp, Artificial Sequence
  Synthetic polymer
ttagagtttgatcctggctcaagatgaacgctggcggcgcgcctaacacatgcaagtcaaacgattaaagcaccttcgggtgtgtataaagtggcgaacggctgagtaacacgtgggcaacctgcccctcgctcaggggatagcctcgggaaaccgggggtaatacctgataatccgtacttcccgcatgggttgtacggcaaagcccagacggcgagggatgggcccgcggcctgttagcttgttggtggggtaacggcctaccaaggcgacgatgggtagccgggttgagagaccgaccggccagattgggactgagacacggcccagactcctacgggaggcagcagtggggaatcttgcgcaatgggcgaaagcctgacgcagcgacgccgcgtgcgggatgaaggccttcgggtcgtaaaccgctttcagcagggacgaggcgaaagtgacggtacctgcagaagaagccccggctaactacgtgccagcagccgcggtaatacgtagggggcgagcgttatccggattcattgggcgtaaagcgctcgtaggcggtccattaggtcggaggtcaaatcccggggctcaaccccggtccgcccccgataccggtggacttgagtgtggtaggggaaagcggaattcccggtgtagcggtggaatgcgcagatatcgggaagaacaccggtggcgaaggcggctttctgggccatcactgacgctgaggagcgaaagttgggggagcgaacaggattagataccctggtagtcccagccgtaaacgatggacgctaggtgtggggggacgatccctccgtgccgcagctaacgcattaagcgtcccgcctggggagtacggccgcaaggctaaaactcaaaggaattgacgggggcccgcacaagcagcggagcatgtggcttaattcgaagcaacgcgaagaaccttaccagggcttgacatgtgcgtgaagccggggagacccggtggccgagaggagcgcacacaggtggtgcatggctgtcgtcagctcgtgtcgtgagatgttgggttaagtcccgcaacgagcgcaacccctgccgtatgttgccagcacttcgggtgggcacccgtacgggaccgccggcgtcaagccggaggaaggtggggacgacgtcaagtcatcatgccccttatgccctgggctgcacacgtgctacaatggccggcacaacgggctgcgaaccagcgatggtaagcgaatcccttaaagccggtcccagttcggactgggggctgcaacccgcccccacgaagtcggagttgctagtaatcgcggatcagcacgccgcggtgaatgtgttcccgggccttgtacacagcgcccgtc

SEQ ID NO: 793 - DNA, 1359 bp, Artificial Sequence
  Synthetic polymer
gatgaacgctggcggcgtgcttaacacatgcaagtcgaacgaagcatttaagacagattacttcggtttgaagtcttttatgactgagtggcggacgggtgagtaacgcgtgggtaacctgcctcatacagggggatagcagctggaaacggctggtaataccgcataagcgcacagtaccacatggtacagtgtgaaaaactccggtggtatgagatggacccgcgtctgattagctagttggcggggtaacggcccaccaaggcgacgatcagtagccgacctgagagggtgaccggccacattgggactgagacacggcccagactcctacgggaggcagcagtggggaatattgcacaatggaggaaactctgatgcagcgacgccgcgtgtgtgaagaagtagttcgctatgtaaagctctatcagcagggaagatagtgacggtacctgactaagaagctccggctaaatacgtgccagcagccgcggtaatacgtatggagcaagcgttatccggatttactgggtgtaaagggagtgtaggtggccaggcaagtcagaagtgaaagcccggggctcaaccccgggactgcttttgaaactgcagggctagagtgcaggaggggcaagtggaattcctagtgtagcggtgaaatgcgtagatattaggaggaacaccagtggcgaaggcggcttgctggactgtaactgacactgaggctcgaaagcgtggggagcaaacaggattagataccctggtagtccacgccgtaaacgatgaataataggtgtcggggcacataagtgctccggtgccgcagcaaacgcaataagtattccacctggggagtacgttcgcaagaatgaaactcaaaggaaaagacgggggcccgcacaagcagtggagtatgtggtttaatttgacgcaacgcgaagaaccttaccaagtcttgacatccctcgacaggcatagaaatatgttttctcttcggagcaaggagacaggtggtgcatggttgtcgtcagctcgtgtcgtgagatgttgggttaagtcccgcaacgagcgcaacccctatctttagtagccagcggtcaggccgggcactctagagagactgccagggataacctggaggaaggtggggatgacgtcaaatcatcatgccccttatgagcagggctacacacgtgctacaatggcgtaaacaaagggaggcagaaccgcgaggtcgagcaaatcccaaaaataacgtctcagttcggattgtagtctgcaactcgactacatgaagctggaatcgctagtaatcgcgaatcagaatgtcgcggtgaatacgttcccgggtcttgtaca

SEQ ID NO: 794 - DNA, 1358 bp, Artificial Sequence
  Synthetic polymer
ttagagtttgatcctggctcaagacgaacgctggcggcgcgcctaacacatgcaagtcgaacggagaagaggagcttgctcctcggaacagtggcggacgggtgagtaacacgtgagcaacctggctctaagagggggacaacagttggaaacgactgctaataccgcataacgtatcgggatggcatcttcctgataccaaatattttatcgcttagagatgggctcgcgtctgattagatagttggcggggtaacggcccaccaagtcgacgatcagtagccggactgagaggttgaacggccacattgggactgagacacggcccagactcctacgggaggcagcagtgggggatattggacaatgggggcaaccctgatccagcgacgccgcgtgagggaagaaggttttcggattgtaaacctctgttgacggagaaaaaaatgatggtatccgtttagaaagccacggctaactacgtgccagcagccgcggtaatacgtaggtggcaagcgttgtccggaattactgggtgtaaagggagtgtaggcgggatatcaagtcagaagtgaaaattacgggctcaactcgtaacctgcttttgaaactgacattcttgagtgaagtagaggcaagcggaattcctagtgtagcggtgaaatgcgtagatattaggaggaacaccagtggcgaaggcggcttgctgggcttttactgacgctgaggctcgaaagcgtggggagcaaacaggattagataccctggtagtccacgccgtaaacgatgattactaggtgtggggggattgaccccttccgtgccggagtaaacacaataagtaatccacctggggagtacgaccgcaaggttgaaactcaaaggaattgacgggggcccgcacaagcagtggagtatgtggtttaattcgacgcaacgcgaagaaccttaccaggtcttgacatcaagtgacagtctaagagattaggccttcccttcggggacacaaagacaggtggtgcatggttgtcgtcagcttgtgtcgtgagatgttgggttaagtcccgcaacgagcgcaacccctattgttagttgctacgcaagagcactctagcgagactgccgttgacaaaacggaggaaggtggggacgacgtcaaatcatcatgccccttatatcctgggctacacacgtaatacaatggcggtcaacagagggatgcaaagccgcgaggcagagcgaacccctaaaagccgtcccagttcggatcgtgggctgcaacccgcccacgtgaagtcggaatcgctagtaatcgcggatcagcatgccgcggtgaatacgttcccgggccttgcaca

SEQ ID NO: 795 - DNA, 1361 bp, Artificial Sequence
  Synthetic polymer
agagtttgattctggctcaggacgaacgctggcggcgtgcctaacacatgcaagtcgaacggaactgttttgaaagatttcttcggaatgaatttgatttagtttagtggcggacgggtgagtaacgcgtgagtaacctgccttcaagagggggataacattctgaaaagaatgctaataccgcatgacatatcggaaccacatggttctaatatcaaagattttatcgcttgaagatggactcgcgtccgattagttagttggtgaggtaacggctcaccaagaccgcgatcggtagccggactgagaggttgaacggccacattgggactgagacacggcccagactcctacgggaggcagcagtgggggatattgcgcaatgggggcaaccctgacgcagcaacgccgcgtgaaggatgaaggttttcggattgtaaacttcttttattaaggacgaaaattgacggtacttaatgaataagctccggctaactacgtgccagcagccgcggtaatacgtagggagcaagcgttgtccggatttactgggtgtaaagggtgcgtaggcggctttgcaagtcagatgtgaaatctatgggctcaacccataaactgcatttgaaactgtagagcttgagtgaagtagaggcaggtggaatcccccgtgtagcggtgaaatgcgtagagatggggaggaacaccagtggcgaaggcggcctgctgggctttaactgacgctgaggcacgaaagcgtgggtagcaaacaggattagataccctggtagtccacgctgtaaacgaccattaaacgaagtgtggggggtctgaccccttccctgccggagttaacacaataagtaatccacctggggagtacggccgcaaggttgaaactcaaaggaattgacgggggcccgcacaagcagtggagtatgtggtttaattcgaagcaacgcgaagaaccttaccaggtcttgacatccaactaacgaagtagagatacattaggtgcccttcggggaaagttgagacaggtggtgcatggttgtcgtcagctcgtgtcgtgagatgttgggttaagtcccgcaacgagcgcaacccttgctattagttgctacgcaagagcactctaataggactgccgttgacaaaacggaggaaggtggggaggacgtcaaatcatcatgccccttatgacctgggctacacacgtactacaatggatgttaacagagggaagcaagacagtgatgtggagcaaatccctaaaaacattctcagttcagattgcaggctgcaacccgcctgcatgaagatggaattgctagtaatcgcggatcagcatgccgcggtgaata

SEQ ID NO: 796 - DNA, 1361 bp, Artificial Sequence
  Synthetic polymer
ttagagtttgatcctggctcaagacgacctctggcggcacgcttaacacatgcaagtcgaacggagaatatcgaagcttgctttgatattcttagtggcggacgggtgagtaacacgtgagtaacctgcctctgagagtgggatagcttctggaaacggatggtaataccgcatgaaatcatagtatcgcatggtacaatgatcaaagatttatcgctcagagatggactcgcgtctgattagctagttggtaaggtaacggcttaccaaggcgacgatcagtagccggactgagaggttgatcggccacattgggactgagacacggcccacactcctacgggaggcagcagtggggaatattgcacaatgggggaaaccctgatgcagggaggcaaaaaaaaaggaagaaggttttcggattgtaaactcctgttgaagtggacaataatgacggtactcttttagaaagctccggctaactacgtgccagcagccgcggtaatacgtagggagcgagcgttgtccggaattactgggtgtaaagggagcgtaggcgggacggcaagtcagatgtgaaaactatgggctcaacccatagactgcatttgaaactgttgttcttgagtgaggtagaggtaagcggaattcctggtgtagcggtgaaatgcgtagagatcaggaggaacatcggtggcgaaggcggcttactgggcctttactgacgctgaggctcgaaagcgtggggagcaaacaagattagatacccctggtagttccacgccgtaaaccgatgattactaggtgtgggggggctgaccccttccgtgccgcagttaacacaataagtaatcccacctggggagacgggccgcagggttgaaattcaaaggaattgacgggggcccgcacaagcagtggagtatgtggtttaattcgaagcaacgcgaagaaccttaccaggtcttgacatcgagtgacgtacctagagataggtattttcttcggaacacaaagacaggtggtgcatggttgtcgtcagctcgtgtcgtgagatgttgggttaagtcccgcaacgagcgcaacccttaccattagttgctacgcaagagcactctaatgggactgccgttgacaaaacggaggaaggtggggatgacgtcaaatcatcatgccccttatgacctgggctacacacgtactacaatggcaatataacagagggaagcaatacagcgatgtggagcaaatccccaaaaattgtcccagttcagattgcaggctgcaactcgcctgcatgaagtcggaattgctagtaatcgcagatcagcatgctgcggtgaatacgttcccgggccttg

SEQ ID NO: 797 - DNA, 1355 bp, Artificial Sequence
  Synthetic polymer
agagtttgattctggctcaggacgaacgctggcggcgcgcctaacacatgcaagtcgaacgagcgagagagagcttgctttctcaagcgagtggcgaacgggtgagtaacgcgtgaggaacctgcctcaaagagggggacaacagttggaaacgactgctaataccgcataagcccacgggtcggcatcgaccagagggaaaaggagcaatccgctttgagatggcctcgcgtccgattagctagttggtgaggtaatggcccaccaaggcgacgatcggtagccggactgagaggttgaacggccacattgggactgagacacggcccagactcctacgggaggcagcagtggggaatattgcacaatgggggaaaccctgatgcagcgacgccgcgtggaggaagaaggtcttcggattgtaaactcctgttgttgaggaagataatgacggtactcaacaaggaagtgacggctaactacgtgccagcagccgcggtaaaacgtaggtcacaagcgttgtccggaattactgggtgtaaagggagcgcaggcgggaagacaagttggaagtgaaatctatgggctcaacccataaactgctttcaaaactgtttttcttgagtagtgcagaggtaggcggaattcccggtgtagcggtggaatgcgtagatatcgggaggaacaccagtggcgaaggcggcctactgggcaccaactgacgctgaggctcgaaagtgtgggtagcaaacaagagtagataccctggtagtccacaccgtaaacgaccctaagggggtggaggggggacccccttcagtgccgcagttaacacaataagtaatacacctggggagtacgaccgcaagggtgaaactcaaaggaaatgacggggggccgcacaagcagtggagtatgtggtttaattcgacgcaacgcgaagaaccttaccaagtcttgacatcctgcgacgtgcatagaaatatgtatttccttcgggacgcagagacaggtggtgcatggttgtcgtcagctcgtgtcgtgagatgttgggttaagtcccgcaacgagcgcaacccttactgtcagttactacgcaagaggactctggcaggactgccgttgacaaaacggaggaaggtggggaggacgtcaaatcatcatgccctttatgacttgggctacacacgtactacaatggcgttaaacaaagagaagcaagaccgcgaggtggagcaaaactcagaaacaacgtcccagttcggactgcaggctgcaactcgcctgcacgaagtcggaattgctagtaatcgtggatcagcatgccacggtgaatacgatcccgggccttgcac

SEQ ID NO: 798 - DNA, 1376 bp, Artificial Sequence
  Synthetic polymer
ttagagtttgatcctggctcaagatgaacgctggcggcgtgcctaacacatgcaagtcgagcgagaatcttttaacggacgcttcggttgaagttaagagtggaaagcggcggacgggtgagtaacgcgtaggcaacctgccccttgcagagggatagcctcgggaaaccgggattaaaaccacataaatcctttttatcgcatgatagagaggacaaagatttatcggcgagggatgggcctgcgtctgattagttagttggtggggtaacggcctaccaaggcgacgatcagtagccgacctgagagggtgaacggccacattggaactgagacacggtccaaactcctacgggaggcagcagtggggaatcttgcacaatgggcgaaagcctgatgcagcaacgccgcgtgagcgaagaaggcctttgggtcgtaaagctctgtcggtagggaagaaggaagtgatggtacctaccgaggaagccccggctaactacgtgccagcagccgcggtaatacgtagggggcgagcgttatccggaattattgggcgtaaagagtacgtaggcggttttttaagcgaggggtataaggcagcggcttaactgctgttggcccctcgaactggaggacttgagtgtcggagaggaaagcggaactcctagtgtagcggtgaaatgcgtagagattaggaggaacaccagtggcgaaggcggctttctggacgacaactgacgctgaggtacgaaagcgtggggagcaaacaggattagataccctggtagtccacgccgtaaacgatgagcactaggtgtcgggttcgcaagaattcggtgccggagttaacgcaataagtgctccgtctggggagtacgcacgcaagtgtgaaactcaagggaattgacggggacccgcacaagcagcggagcatgtggtttaattcgaagcaacgcgaagaaccttaccagggcttgacatccctctgacaggaccttaatcggttttttctacggacagaggagacaggtggtgcatggttgtcgtcagctcgtgtcgtgagatgttgggttaagtcccgcaacgagcgcaacccttgtcattagttgccagcagtaagatggggactctaatgagactgccgtggataacacggaggaaggtggggatgacgtcaaatcatcatgccccttatgtcctgggctacacacgtgctacaatggtcggaacagagagaggcgagaccgtgaggtggagcaaaactcaaaaaccgatcccagttcggattgcaggctgcaacccgcctgcatgaagtcggagttgctagtaatcgcagatcagaatgctgcggtgaatgcgttcccgggtcttgcaca

SEQ ID NO: 799 - DNA, 1369 bp, Artificial Sequence
  Synthetic polymer
gatgaacgctggcggcgtgcttaacacatgcaagtcgaacgaagcatttagaacggattacttcggtttgaagttctttatgactgagtggcggacgggtgagtaacgcgtgggtaacctgccttgtactgggggatagcagctggaaacggctggtaataccgcataagcgcacaatgttgcatgacatggtgtgaaaaactccggtggtataagatggacccgcgtctgattagctagttggtgagataacagcccaccaaggcgacgatcagtagccgacctgagagggtgaccggccacattgggactgagacacggcccagactcctacgggaggcagcagtggggaatattgcacaatggaggaaactctgatgcagcgacgccgcgtgagtgaagaagtaattcgttatgtaaagctctatcagcagggaagatagtgacggtacctgactaagaagctccggctaaatacgtgccagcagccgcggtaatacgtatggagcaagcgttatccggatttactgggtgtaaagggagtgtaggtggccatgcaagtcagaagtgaaaatccggggctcaaccccggaactgcttttgaaactgtaaggctagagtgcaggaggggtgagtggaattcctagtgtagcggtgaaatgcgtagatattaggaggaacaccagtggcgaaggcggctcactggactgtaactgacactgaggctcgaaagcgtggggagcaaacaggattagataccctggtagtccacgccgtaaacgatgaataaaaggtgtcggggcccatcaggggtttcggtgccgcagcaaacgcaataagtattccccctggggaggacgttcgcaagaaagaaattcaaaggaattgacgggggcccgcaccagcggtggggcatgtggtttaatttgaagcaacgcgaagaaccttaccaagtcttgacatcccactgaccggacagtaatgtgtcatttccttcgtgacagtggagacaggtggtgcatggttgtcgtcagctcgtgtcgtgagatgttgggttaagtcccgcaacgagcgcaacccctatccttagtagccagcagtaagatgggcactctagggagagtgccagggataacctggaggaagggggggaggacgtcaaatcatcatgccccctatgacttgggctacacacgtgctacaatggcgtaaacaaagagaagcgaagtggtgaggccaagcaaatcacaaaaataacgtctcagttcggattgtagtctgcaactcgactacatgaagctggaatcgctagtaatcgcagatcagaatgatgcggtgaaaacgttcccgggtcttgcactcaccgccc

SEQ ID NO: 800 - DNA, 1338 bp, Artificial Sequence
  Synthetic polymer
gacgaacgctggcggcgcgcctaacacatgcaagtcgaacgagagatgaggagcttgctcttcaaatcgagtggcgaacgggtgagtaacgcgtgaggaacctgcctcaaagagggggacaacagttggaaacgactgctaataccgcataagcccacggctcggcatcgagcagagggaaaaggagcaatccgctttgagatgacctcgcgtccgattagctagttggtgaggtaacggcccaccaaggcgacgatcggtagccggactgagaggttgaacggccacattgggactgagacacggcccagactcctacgggaggcagcagtggggaatattgcacaatgggggaaaccctgatgcagcgacgccgcgtggaggaagaaggtcttcggattgtaaactcctgttattgaggaagataatgacggtactcaacaaggaagtgacggctaactacgtgccagcagccgcggtaaaacgtaggtcacaagcgttgtccggaattactgggtgtaaagggagcgcaggcgggagaacaagttggaagtgaaatccatgggctcaacccatgaactgctttcaaaactgtttttcttgagtagtgcagaggtaggcggaattcccggtgtagcggtggaatgcgtagatatcgggaggaacaccagtggcgaaggcggcctactgggcaccaactgacgctgaggctcgaaagtgtgggtagcaaacaggattagataccctggtagtccacaccgtaaacgatgattattaggtgttggaggattgaccccttcagtgccgcagttaacacaataagtaatccacctggggagtacgaccgcaaggttgaaactcaaaggaattgacgggggcccgcacaagcagcggagtatgtggtttaattcgacgcaacgcgaagaaccttaccaagtcttgacatcctgcgacgcacatagaaatatgtgtttccttctggacgcagagacaggtggtgcatggttgtcgtcagctcgtgtcgtgagatgttgggttaagtcccgcaacgagcgcaacccttatggtcagttactacgcaagaggactctggccagactgccgttgacaaaacggaggaaggtggggaggacgtcaaatcatcatgccccctatgacttggggtacacacgtactacaatggcgttaaacaaagagaagcaagaccgcgagggggagcaaaactcagaaacaacgtcccagttcggactgcaggctgcaactcgcctgcacgaagtcggaattgctagtaatcgtggatcagcatgccacggtgaatacaatgccgggccttgcaca

SEQ ID NO: 801 - DNA, 1488 bp, Artificial Sequence
  Synthetic polymer
agttcgattatggctcaggatgaacgctggcggcgtgcttaacacatgcaagtcgaacggggtacccttgacagagacttcggtcaattgataggaatacctagtggcggacgggtgagtaacgcgtgaggaacctgccttggagtggggaataacagttagaaatagctgctaataccgcataatgcagtggggtcgcatggtcctgctgccaaaaatttatcgctctgagatggcctcgcgtccgattagatagttggcggggtaacggcccaccaagtcgacgatcggtagccggactgagaggttggccggccacattgggactgagacacggcccagactcctacgggaggcagcagtggggaatattgggcaatgggcgcaagcctgacccagcaacgccgcgtgaaggaagaaggccctcgggttgtaaacttcttttattcgggacgaagaagtgacggtaccgaatgaataagccacggctaactacgtgccagcagccgcggtaatacgtaggtggcaagcgttatccggatttactgggtgtaaagggcgtgtaggcgggactgcaagtcagatgtgaaaaccatgggctcaacccatggcctgcatttgaaactgtagttcttgagtgatggagaggcaggcggaattccgtgtgtagcggtgaaatgcgtagatatacggaggaacaccagtggcgaaggcggcctgctggacattaactgacgctgaggcgcgaaagcgtggggagcaaacaggattagataccctggtagtccacgctgtaaacgatggatactaggtgtggggggtctgaccccctccgtgccgcagccaacgcaataagtatcccacctggggagtacgatcgcaaggttgaaactcaaaggaattgacgggggcccgcacaagcggtggagtatgtggtttaattcgaagcaacgcgaagaaccttaccagggcttgacatcccggtgaccggtatagagatatacctttccttcgggacaccggtgacaggtggtgcatggttgtcgtcagctcgtgtcgtgagatgttgggttaagtcccgcaacgagcgcaacccttattgttagttgctacgcaagagcactctaacgagactgccgttgacaaaacggaggaaggtggggacgacgtcaaatcatcatgccccttacgtcctgggccacacacgtactacaatggcggtcaacagagcgaggcaaagccgcgaggcggagcgaatcgctaaaagccgtcccagttcggattgcaggctgcaacccgcctgcatgaagttggaatcgctagtaatcgcggatcagcatgccgcggtgaatacgttcccgggccttgtacacacaccgcccgtcacaccatgagagtcgggaacacccgaagtccgtagcctgaccgcaaggggggcgcggccgaaggtgggttcgataattggggtgaagtcgtaacaaggtaacc

SEQ ID NO: 802 - DNA, 1483 bp, Artificial Sequence
  Synthetic polymer
gattctggctcaggacgaacgctgcggcgtgcctaacacatgcaagtcgaacggaactatgttaaaggatttcttcggaatgaaagtgatatagtttagtggcggacgggtgagtaacgcgtgagtaacctgcctctaagagggtgataacaatctgaaaagattgctaataccgcataacatatcgaaatcgcatggttttgatatcaaagattttatcgcttagagatggactcgcgtccgattagttagttggtgaggtaacggctcaccaagactgcgatcggtagccggactgagaggttgaacggccacattgggactgagacacggcccagactctaacgggaggcagcagtgggggatattgcgcaatgggggcaaccctgacgcagcaacgccgcgtgaaggatgaaggttttcggattgtaaacttcttttattaaggacgaaaaatgacggtacttaatgaataagctccggctaactacgtgccagcagccgcggtaatacgtagggagcaagcgttgtccggatttactgggtgtaaagggtgcgtaggcggctttgcaagtcagatgtgaaatctatgggctcaacccataaactgcatttgaaactgtagagcttgagtgaagtagaggcaggcggaattccccgtgtagcggtgaaatgcgtagagatggggaggaacaccagtggcgaaggcggcctgctgggctttaactgacgctgaggcacgaaagcgtgggtagcaaacaggattagataccctggtagtccacgctgtaaacgatgattactaggtgtggggggtctgaccccttccgtgccggagttaacacaataagtaatccacctggggagtacggccgcaaggttgaaactcaaaggaattgacgggggcccgcacaagcagtggagtatgtggtttaattcgaagcaacgcgaagaaccttaccaggtcttgacatccaactaacgaagtagagatacattaggtgcccttcggggaaagttgagacaggtggtgcatggttgtcgtcagctcgtgtcgtgagatgttgggttaagtcccgcaacgagcgcaacccttgctattagttgctacgcaagagcactctaataggactgccgttgacaaaacggaggaaggtggggacgacgtcaaatcatcatgccccttatgacctgggctacacacgtactacaatggccataaacagagggaagcaagatagcgatatggagcaaacccctaaaaatggtcccagttcagattgcaggctgcaacccgcctgcatgaagtcggaattgctagtaatcgcggatcagcatgccgcggtgaatacgttcccgggccttgtacacaccgcccgtcacaccatgggagccggtaatacccgaagtcagtagtccaaccacgtgaggacgctgccgaaggtaggattggcgactggggtgaagtcgtaacaaggtaccc

SEQ ID NO: 803 - DNA, 1497 bp, Artificial Sequence
  Synthetic polymer
agttcgatcctggctcaggacgaacgctggcggcgtgcctaacacatgcaagtcgaacggggttatgcgctgaacggaaggtgcttgcacaggaagttcttgtataacctagtggcggacgggtgagtaacgcgtgagcaacctgcctttcagagggggataacgttctgaaaagaacgctaataccgcatgagaccacgactccacatggagaagcggtcaaaggagcaatccgctgaaagatgggctcgcgtccgattagatagttggcggggtaacggcccaccaagtcgacgatcggtagccggactgagaggttgaacggccacattgggactgagacacggcccagactcctacgggaggcagcagtgagggatattggtcaatgggggaaaccctgaaccagcaacgccgcgtgagggaagacggttttcggattgtaaacctctgtcctctgtgaagataatgacggtagcagaggaggaagctccggctaactacgtgccagcagccgcggtaatacgtagggagcgagcgttgtccggatttactgggtgtaaagggtgcgtaggcgggtaggcaagtcagaagtgaaatccatgggcttaacccatgaactgcttttgaaactgtttatcttgagtgaagtagaggtaggcggaattcccggtgtagcggtgaaatgcgtagagatcgggaggaacaccagtggcgaaggcggcctactgggctttaactgacgctgaagcacgaaagcatgggtagcaaacaggattagataccctggtagtccatgccgtaaacgatgattactaggtgtggggggactgaccccctccgtgccggagttaacacaataagtaatccacctggggagtacgaccgcaaggttgaaactcaaaggaattgacgggggcccgcacaagcagtggagtatgtggattaattcgacgcaacgcgaagaaccttaccaggtcttgacatcctactaacgaggcagagatgcgtcaggtgcccttcggggaaagtagagacaggtggtgcatggttgtcgtcagctcgtgtcgtgagatgttgggttaagtcccgcaacgagcgcaacccttactgttagttgctacgcaagagcactctagcaggactgccgttgacaaaacggaggaaggtggggacgacgtcaaatcatcatgccccttatgacctgggcctcacacgtactacaatggccatgaacagagggaagcaaagccgcgaggtggagcaaaaccctaaaaatggtctcagttcggattgtaggctgcaacccgcctgcatgaagttggaattgctagtaatcgcggatcagcatgccgcggtgaatacgttcccgggccttgtacacaccgcccgtcacaccatgggagccggtaatacccgaagtcagtagcctaaccgcaaggagggcgctgccgaaggtaggattggcgactggggtgaagtcgtaacaaggtagcc

SEQ ID NO: 804 - DNA, 1385 bp, Artificial Sequence
  Synthetic polymer
catgcaagtcgaacggcacccacccccgggtggaagcgagtggcgaacggctgagtaacacgtgaccaacctgcccggctctcggggatagccgcgggaaaccgcgggtaatacccggcgaacccgcccggacgcatgtccgggcgggcgaagctttcgcggagccggatggggtcgcggcccatcaggtagacggcggggtgacggcccaccgtgcctacaacgggtagccgggttgagagaccgaccggccagattgggactgagacacggcccagactcctacgggaggcagcagtggggaatcttgcgcaatgggggcaaccctgacgcagcgacgccgcgtgcgggacgaaggccttcgggtcgtaaaccgctttcagcagggacgagtcaagacggtacctgcagaagaagccccggctaactacgtgccagcagccgcggtaatacgtagggggcgagcgttatccggattcattgggcgtaaagcgcgcgtaggcggccgcgtaggcggggggtcaaatcccggggctcaaccccggtccgccccccgaaccccgcggctcgggtccggtaggggagggtggaattcccggtgtagcggtggaatgcgcagatatcgggaggaacaccggtggcgaaggcggccctctgggccgagaccgacgctgaggcgcgaaagctgggggagcgaacaggattagataccctggtagtcccagccgtaaacgatggacgctaggtgtggggggagagtccctccgtgccgcagccaacgcattaagcgtcccgcctggggagtacggccgcaaggctaaaactcaaaggaattgacgggggcccgcacaagcagcggagcatgtggcttaattcgaagcaacgcgaagaaccttaccagggcttgacatgctagtgaagccggggagacccggtggccgagaggagctagcacaggtggtgcatggctgtcgtcagctcgtgtcgtgagatgttgggttaagtcccgcaacgagcgcaacccccgccgcatgttgccagcaggtagagctgggcacccatgcgggaccgccggcgccaagccggaggagggcggggacgacgtcaagtcatcatgccccttatgccctgggctgcacacgtgctacaatggccggtacagcgggatgcgatggcgcgagccggagcggatccctcaaagccggccccagttcggattgggggctgcaacccgcccccatgaagtcggagttgctagtaatcgcggatcagcatgccgcggtgaatgcgttcccgggccttgtacacaccgcccgtcacaccacccgagtcgtctgcacccgaagccgccggcccaacccgttcgcgggagggaggcgtcgaag

SEQ ID NO: 805 - DNA, 1386 bp, Artificial Sequence
  Synthetic polymer
acacatgcaagtcgaacggcacccacctccgggtggaagcgagtggcgaacggctgagtaacacgtggagaacctgccccctcctccgggatagccgcgggaaaccgcgggtaataccggatgacgcccgggaagcgcatgctgcccgggccaaagcccagacgggaggggatggctccgcggcccatcaggtagacggcggggtgacggcccaccgtgccgacaacgggtagccgggttgagagaccgaccggccagattgggactgagacacggcccagactcctacgggaggcagcagtggggaatcttgcgcaatgggggaaaccctgacgcagcgacgccgcgtgcgggacgaaggccttcgggtcgtaaaccgctttcagcagggacgagacaagacggtacctgcagaagaagccccggctaactacgtgccagcagccgcggtaatacgtagggggcgagcgttatccggattcattgggcgtaaagcgcgcgtaggcggccgcgtaggcggggggtcaaatcccggggctcaaccccggtccgccccccgaaccccgcggctcgggtccggtaggggagggtggaacacccggtgtagcggtggaatgcgcagatatcgggtggaacaccggtggcgaaggcggccctctgggccgagaccgacgctgaggcgcgaaagctgggggagcgaacaggattagataccctggtagtcccagccgtaaacgatggacgctaggtgtggggggacgatccctccgtgccgcagccaacgcattaagcgtcccgcctggggagtacggccgcaaggctaaaactcaaaggaattgacgggggcccgcacaagcagcggagcatgtggcttaattcgaagcaacgcgaagaaccttaccagggcttgacatatgggtgaagcgggggagaccccgtggccgagaggagcccatacaggtggtgcatggctgtcgtcagctcgtgtcgtgagatgtttggttaagtccagcaacgagcgcaacccccgccgcatgttgccagcaggtagagctgggcacccatgcgggaccgccggcgccaagccggaggagggcggggacgacgtcaagtcatcatgccccttatgccctgggctgcacacgtgctacaatggccggtacaacgggatgcgatggcgcgagccggagcggatccctcaaagccggccccagttcggattgggggctgcaacccgcccccatgaagtcggagttgctagtaatcgcggatcagcatgccgcggtgaatgcgttcccgggccttgtacacaccgcccgtcacaccacccgagtcgtctgcacccgaagccgccggcccaaccctttcgggagggaggcgtcgaag

SEQ ID NO: 806 - DNA, 1485 bp, Artificial Sequence
  Synthetic polymer
gattctggctcaggatgaacgctggcggcgtgcttaacacatgcaagtcgaacggagtgcctttgatagaggattcgtccaatagaggaggttacttagtggcggacgggtgagtaacgcgtgagcaatctgccttggagtggggaataacagctggaaacagctgctaataccgcatgatacagttgggtcgcatggctctgactgtcaaagatttatcgctctgagatgagctcgcgtctgattagctagttggtggggtaacggctcaccaaggcgacgatcagtagccggactgagaggttggccggccacattgggactgagacacggcccagactcctacgggaggcagcagtggggaatattgggcaatgggcgcaagcctgacccagcaacgccgcgtgaaggaagaaggctttcgggttgtaaacttcttttatcagggacgaagcaagtgacggtacctgatgaataagccacggctaactacgtgccagcagccgcggtaatacgtaggtggcaagcgttatccggatttactgggtgtaaagggcgtgtaggcgggactgcaagtcagatgtgaaacccatgggctcaacccatggcctgcatttgaaactgtagttcttgagtactggagaggcagacggaattcctagtgtagcggtgaaatgcgtagatattaggaggaacaccagtggcgaaggcggtctgctggacagcaactgacgctgaggcgcgaaagcgtggggagcaaacaggattagataccctggtagtccacgctgtaaacgatggatactaggtgtggggggtctgaccccctccgtgccgcagttaacacaataagtatcccacctggggagtacgatcgcaaggttgaaactcaaaggaattgacgggggcccgcacaagcggtggagtatgtggtttaattcgaagcaacgcgaagaaccttaccagggcttgacatcccggtgaccggcctagagataggcttttcccttcggggacaccggtgacaggtggtgcatggttgtcgtcagctcgtgtcgtgagatgttgggttaagtcccgcaacgagcgcaacccctattgttagttgctacgcaagagcactctagcgagactgccgttgacaaaacggaggaaggtggggacgacgtcaaatcatcatgccccttatgtcctgggccacacacgtactacaatggtggtcaacagagggaagcaagaccgcgaggtggagcaaatccctaaaagccatcccagttcggattgcaggctgcaacccgcctgcatgaagttggaatcgctagtaatcgcggatcagcatgccgcggtgaatacgttcccgggccttgtacacaccgcccgtcacaccatgagagtcgggaacacccgaagtccgtagcctaaccgcaaggggggcgcggccgaaggtgggttcgataattggggtgaagtcgtaacaaggtatcc

SEQ ID NO: 807 - DNA, 1501 bp, Artificial Sequence
  Synthetic polymer
agtttgatcctggctcagattgaacgctggcggaacgctttacacatgcaagtcgaacggtaacgaggaggaaagcttgctttcctctgtcgacgagtggcgaacgggtgagtaagacatcggaacgtatccgctcgtgggggacaacttcccgaaaggggagctaataccgcatgagatccgaggatgaaagagggggacccgcgagggcctctcgcgagcggagcggccgatgactgattagctagttggtaaggtaaaggcttaccaaggcgacgatcagtagctggtctgagaggacgaccagccacactgggactgagacacggcccagactcctacgggaggcagcagtggggaattttggacaatgggcgcaagcctgatccagctattccgcgtgtgggaagacggccttcgggttgtaaaccacttttgtagagaacgaaaagtctattgataataccgatagatgatgacggtactctaagaataagcaccggctaactacgtgccagcagccgcggtaatacgtagggtgcgagcgttaatcggaattactgggcgtaaagggtgtgcaggcggttttgcaagatggatgtgaaagccccgggcttaacctgggaaagccatacatgactgcaagactagagtgcgtcagaggggggtggaattccaagtgtagcagtgaaatgcgtagatatttggaagaacaccgatggcgaaggcagccccctgggacgcaactgacgctcatacacgaaagcgtggggagcaaacaggattagataccctggtagtccacgccctaaacgatgtcaactagttgttgggaggtaaaactttcagtaacgcagctaacgcgagaagttgaccgcctgggaagtacggtcgcaagactaaaactcaaaggaattgacggggacccgcacaagcggtggatgatgtggattaattcgatgcaacgcgaaaaaccttacctacccttgacatggcagacaactccttgtaatgaggagggctcgcaagaggatctgcacacaggtgctgcatggctgtcgtcagctcgtgtcgtgagatgttgggttaagtcccgcaacgagcgcaacccttgtcactagttgctacgaaagggcactctagtgagactgccggtgacaaaccggaggaaggtggggatgacgtcaagtcctcatggcccttatgggtagggcttcacacgtcatacaatggtcggaacagagggcagcgaagccgagaggcggagcaaatcccagaaaaccgatcgtagtccggattgcagtctgcaactcgactgcatgaagtcggaatcgctagtaatcgcggatcagcatgccgcggtgaatacgttcccgggtcttgtacacaccgcccgtcaaacaatgggagtggtgtttaccagaagtcgttagcctaaccgcaaggagggcggcgaccacggtgagcaccgtgactaatgttaagtcgtaacaaggtaccc

SEQ ID NO: 808 - DNA, 1355 bp, Artificial Sequence
  Synthetic polymer
gatgaacgctagcggcaggcctaacacatgcaagtcgaggggcagcatttttatagcaatataaaagatggcgaccggcgcacgggtgcgtaacgtgtatgtaacctaccttaaacagggggataacaccgagaaattggtactaataccccataatactattggaggcatctccgatggttgaaagttccggcggtttaagatggacatgcgttgtattagttagttggtgaggtaacggctcaccaaggcgacgatacatagggggactgagaggttaaccccccacattggtactgagacacggaccaaactcctacgggaggcagcagtgaggaatattggtcaatggacgcaagtctgaactagccatgccgcgtgcaggatgacggctctatgagttgtaaactgcttttgtacgagggtaatatcggatacgtgtatccgcttgaaagtatcgtacgaataaggatcggctaactccgtgccagcagccgcggtaatacggaggatccaagcgttatccggatttattgggtttaaagggtgcgtaggcggttttataagttagaggtgaaaattcggggctcaactccggacgtgcctctaatactgtatgactagagaatagatgcggtaggcggaatgtatggtgtagcggtgaaatgcgtagagatcatacaggacaccgattgcgaaggcagcttaccaaactatatctgacgttgaggcacgaaagcgtggggagcaaacaggattagataccctggtagtccacgcagtaaacgatgatagctcgttgtcggcgatacacagtcggtgactaagagaaatcgttaagctatccacctggggagtacgttcgcaagaatgaaactcaaaggaattgacgggggcccgcacaagcggaggaacatgtggtttaactcgatgatacgcgaggaaccttacccgggcttgaaagttactgactaatctggaaacaggttatcccttcggggcaggaaactaggtgctgcatggttgtcgtcagctcgtgccgtgaggtgtcgggttaagtcccataacgagcgcaacccttgctgttagttgccatcaggttaagctgggcactctaacgggactgccggtgcaagccggaggaaggtggggatgacgtcaaatcagcacggcccttacgtccggggctacacacgtgttacaatggtaggtacagagggcagctagccagtaatggcatgcgaatctcgaaagcctatctcagttcggattggaggctgaaacccgcctccatgaagttggattcgctagtaatcgcgcatcagccatggcgcggtgaatacgttcccgggcct

SEQ ID NO: 809 - DNA, 1525 bp, Artificial Sequence
  Synthetic polymer
taagagtttgatcctggctcaggacgaacgctggcggcgcgcctaacacatgcaagtcgaacggagttgttttggagaagcccttcggggtggaactgattcaacttagtggcggacgggtgagtaacacgtgagcaacctgccttacagaggggaataacgtttggaaacgaacgctaataccgcataacataacggaatcgcatggttttgttatcaaagattatatcgctgtaagatgggctcgcgtctgattagatagttggtgaggtaatggctcaccaagtcgacgatcagtagccggactgagaggttgaacggccacattgggactgagacacggcccagactcctacgggaggcagcagtggggaatattgcacaatgggggaaaccctgatgcagcgacgccgcgtgaaggaagaaggccttcgggttgtaaacttctgtcttcagggacgataatgacggtacctgaggaggaagctccggctaactacgtgccagcagccgcggtaatacgtagggagcgagcgttgtccggaattactgggtgtaaagggagcgtaggcgggattgcaagttgaatgtgaaatctatgggcttaacccataaactgcgttcaaaactgcagttcttgagtgaagtagaggcaggcggaattcctagtgtagcggtgaaatgcgtagatattaggaggaacaccagtggcgaaggcggcctgctgggctttaactgacgctgaggctcgaaagcgtgggtagcaaacaggattagataccctggtagtccacgccgtaaacgatgattactaggtgtaggggggtcaaccttctgtgccggagttaacacaataagtaatccacctggggagtacgaccgcaaggttgaaactcaaaggaattgacgggggcccgcacaagcagtggagtatgtggtttaattcgaagcaacgcgaagaaccttaccaggtcttgacatccaactaacgaagtagagatacattaggtgcccttcggggaaagttgagacaggtggtgcatggttgtcgtcagctcgtgtcgtgagatgttgggttaagtcccgcaacgagcgcaacccttacatttagttgctacgcaagagcactctagatggactgccgttgacaaaacggaggaaggtggggatgacgtcaaatcatcatgccccttatgacctgggctacacacgtactacaatggctattaacagagggaagcaaaacagtgatgtggagcaaacccctaaaaatagtctcagttcggattgtaggctgcaactcgcctacatgaagccggaattgctagtaatcgcggatcagcatgccgcggtgaatacgttcccgggccttgtacacaccgcccgtcacaccatgagagttggcaacacccgaagtcagtagtctaaccgcaaggaggacgctgccgaaggtggggttgatgattagggtgaagtcgtaacaaggtagccgtatcggaaggtgcggctggatcacctcctttct

SEQ ID NO: 810 - DNA, 1378 bp, Artificial Sequence
  Synthetic polymer
  misc_feature (1356)..(1356): n is a, c, g, or t
ttagagttgatcctggctccggatgaactctggcggcgtgcttaacacatgcaagtcgaacggacgatgaagagcttgctcttcagagttagtggcggacgggtgagtaacgcgtgggtaacctgcctcatacagggggatagcagctggaaacggctgataaaaccgcataagcgcacagcatcgcatgatgcagtgtgaaaaactccggtggtatgagacggacccgcgtctgattagctggttggtgaggtaacggcccaccaaggcgacgatcagtagccggcctgagagggtgaccggccacattgggactgagacacggcccaaactcctacgggaggcagcagtggggaatattgcacaatgggggaaaccctgatgcagcgacgccgcgtgaaggaagaagtatctcggtatgtaaacttctatcagcagggaagataatgacggtacctgactaagaagccccggctaactacgtgccagcagccgcggtaatacgtagggggcaagcgttatccggatttactgggtgtagagggagcataggcggcggagcaagtcagaagtgaaagcccggggctcaaccccgggacggcttttgaaactgccctgcttgatttcaggagaggtaagcggaattcctagtgtagcggtgaaatgcgtagatattaggaggaacaccagtggcgaaggcggcttactggactgacaatgacgctgaggctcgaaagcgtggggagcaaacaggattagataccctggtagtccacgccgtaaacgatgaatactgggtgtcggggctcataagagcttcggtgccgcagcaaacgcaataagtattccacctggggagtacgttcgcaagaatgaaactcaaaggaattgacggggacccgcacaagcggtggagcatgtggtttaattcgaagcaacgcgaagaaccttaccaggtcttgacatcccggtgaccgtcccgtaatggggacctctcttcggagcaccggtgacaggtggtgcatggttgtcgtcagctcgtgtcgtgagatgttgggttaagtcccgcaacgagcgcaacccctatgttcagtagccagcaggtaaagccgggcactctggacagactgccggggataacccggaggaaggcggggatgacgtcaaatcatcatgccccttacggcctgggctacacacgtgctacaatggcgtaaacaaagggaagcgagagggtgacctggagcgaatcccaaaaataacgtcccagttcggactgtagtctgcaacccgactacacgaagctggaatcgctagtaatcacgaatcagcatgtcgcggtgaatacgttcccgnggtctagtacacaccgcccgtc

SEQ ID NO: 811 - DNA, 1356 bp, Artificial Sequence
  Synthetic polymer
acgaacgctggcggcgtgcctaatacatgcaagtcgaacgctggagcttgctccagagtggcgaacgggtgagtaacacgtgggtaacctgcccatcagaaggggataacacttggaaacaggtgctaataccgtataacaatcgaccgcatggtttgatttgaaaggcgttcgtgtcgctgatggatggacccgcggtgcattagctagttggtgaggtaacggctcaccaaggccacgatgcatagccgacctgagagggtgatcggccacattgggactgagacacggcccaaactcctacgggaggcagcagtagggaatcttcggcaatgggggcaaccctgaccgagcaacgccgcgtgagtgaagaaggttttcggatcgtaaagctctgttgtaagtcaagaacgagtgtgaggaaattcacactgtgacggtagcttaccagaaagggacggctaactacgtgccagcagccgcggtaatacgtaggtggcaagcgttgtccggatttattgggcgtaaagcgagcgcaggcggtttcttaagtctgatgtgaaagcccccggctcaaccggggagggtcattggaaactgggagacttgagtgcagaagaggagagtggaattccatgtgtagcggtgaaatgcgtagatatatggaggaacaccagtggcgaaggcggctctctggtctgtaactgacgctgaggctcgaaagcgtggggagcgaacaggattagataccctggtagtccacgccgtaaacgatgagtgctaagtgttggagggtttcccccttcagtgctgcagctaacgcattaagcactccgcctggggagtacgaccgcaaggttgaaactcaaaggaattgacgggggcccgcacaagcggtggagcatgtggtttaattcgaagcaacgcgaagaaccttaccaggtcttgacatcctttgaccactctagagatagagcttccccttcgggggcaaagtgacaggtggtgcatggttgtcgtcagctcgtgtcgtgagatgttgggttaagtcccgcaacgagcgcaacccttattgttagttgccatcgttcagttgggcactctagcaagactgccggtgacaaaccggaggaaggtggggatgacgtcaaatcatcatgccccttatgacctgggctacacacgtgctacaatgggaagtacaacgagttgcgaagtcgcgaggctaagctaatctcttaaagcttctctcagttcggattgcaggctgcaactcgcctgcatgaagccggaatcgctagtaatcgcggatcagcacgccgcggtgaatacgttcccgggccttgcacacaccgc

SEQ ID NO: 812 - DNA, 1411 bp, Artificial Sequence
  Synthetic polymer
agagtttgatcctggctcaggacgaacgctggcggcatgcctaacacatgcaagtcgaacggagattatttcggtaatcttagtggcgaacgggtgagtaacgcgtaggcaacctgccctttagttggggacaacatcccgaaaggggtgctaataccgaatgtgacagtttttccgcatgggattactgtgaaagatggcctctatttataagctatcgctaaaggatgggcctgcgtctgattagctagttggtggggtaacggcctaccaaggcgacgatcagtagccggtctgagaggatgaacggccacattgggactgagacacggcccagactcctacgggaggcagcagtggggaatcttccgcaatgggcgaaagcctgacggagcaatgccgcgtgagtgatgaagggattcgttccgtaaagctcttttgtttatgacgaatgtgcagactgtgaataatggtttgtaatgacggtagtaaacgaataagccacggctaactacgtgccagcagccgcggtaatacgtaggtggcgagcgttgtccggaattattgggcgtaaagagcatgtaggcggttttttaagtccggagtgaaaatgcggggctcaaccccgtatggctctggatactggaagacttgagtgcaggagaggaaaggggaattcccagtgtagcggtgaaatgcgtagatattgggaggaacaccagtggcgaaggcgcctttctggactgtgtctgacgctgagatgcgaaagccagggtagcgaacgggattagataccccggtagtcctggccgtaaacgatgggtactaggtgtaggaggtatcgaccccttctgtgccggagttaacgcaataagtaccccgcctggggagtacgtccgcaaggatgaaactcaaaggaattgacgggggcccgcacaagcggtggagtatgtggtttaattcgacgcaacgcgaagaaccttaccaaggcttgacattgagtgaccgctctagagatagagctttcccttcggggacacgaaaacaggtggtgcatggctgtcgtcagctcgtgtcgtgagatgttgggttaagtcccgcaacgagcgcaacccctatcctatgttaccaacacgtaatggtggggactcataggagactgccaaggacaacttggaggaaggcggggatgacgtcaagtcatcatgccccttatgtcttgggctacacacgtactacaatggtcgacaacagagggaagcgaagccgcgaggcagagcaaaccccagaaactcgatctcagttcggatcgcaggctgcgacccgcctgcgtgaagtcggaatcgctagtaatcgcaggtcagcatactgcggtgaatatattcccggggcgcttgtacacaccgcccgt

SEQ ID NO: 813 - DNA, 1350 bp, Artificial Sequence
  Synthetic polymer
gagtttgatcctggctcaggacgaacgctggcggcgtgcctaacacatgcaagccgaacggagttaagcccttcgggacttaacttagtggcgaacgggtgagtaacgcgtgagaaacctgcctttcagtgggggacaacagttggaaacgactgctaataccgcatgacacttcttgagggcatccttgagaagtcaaagctttatgtgctgaaagatggtctcgcgtctgattagctagttggtggggtaacggcccaccaaggcgacgatcagtagccggtctgagaggatgaacggccacattgggactgagacacggcccagactcctacgggaggcagcagtggggaatattgcacaatgggggaaaccctgatgcagcgacgccgcgtggagaaagaaggtcttcggattgtaaactcctgttgttgaggaagataatgacggtactcaacaaggaagtgacggctaactacgtgccagcagccgcggtaaaacgtaggccacaagcgttgtccggaattactgggtgtaaagggagcgcaggcgggaaagcaagttggaagtgaaatccatgggctcaacccatgaactgctttcaaaactgtttttcttgagtagtgcagaggtaggcggaattcccggtgtagcggtggaatgcgtagatatcgggaggaacaccagtggcgaaggcggtctactgggcaccaactgacgctgaggctcgaaagtgtgggtagcaaacaggattagataccctggtagtccacactgtaaacgatgattactaggtgttggaggattgaccccttcagtgccgcagttaacacaataagtaatccacctggggagtacgaccgcaaggttgaaactcaaaggaattgacgggggcccgcacaagcagtggagtatgtggtttaattcgacgcaacgcgaagaaccttaccaagtcttgacatcctgcgacggtgctggaaacagtactttccttcgggacacagagacaggtggtgcatggttgtcgtcagctcgtgtcgtgagatgttgggttaagtcccgcaacgagcgcaacccttatggtcagttactacgcaagaggactctggccagactgccgttgacaaaacggaggaaggtggggatgacgtcaaatcatcatgccctttatgacttgggctacacacgtactacaatggcgttaaacaaagagaagcgagaccgcgaggtggagcaaaactcagaaacaacgtcccagttcggactgcaggctgcaactcgcctgcacgaaggcggagttgctagtaatcgcagatcagcatgctgcggtgaatacgttcccgggccttg

SEQ ID NO: 814 - DNA, 1332 bp, Artificial Sequence
  Synthetic polymer
gcgcctgacacatgcaagtcgaacgagagagaggaagcttgcttcctcaatcgagtggcgaacgggtgagtaacgcgtgaggaacctgcctcaaagagggggacaacagttggaaacgtctgctaataccgcataagcccacaggtcggcatcgaccagagggaaaaggagcaatccgctttgagatggcctcgcgtccgattagctggttggtgaggtaatggcccaccaaggcgacgatcggtagccggactgagaggttgaacggccacattgggactgagacacggcccagactcctacgggaggcagcagtggggaatattgcacaatgggggaaaccctgatgcagcgacgccgcgtggaggaagaaggtcttcggattgtaaactcctgttgttgaggaagataatgacggtactcaacaaggaagtgacggctaactacgtgccagcagccgcggtaaaacgtaggtcacaagcgttgtccggaattactgggtgtaaagggagcgcaggcgggaagacaagttggaagtgaaatctatgggctcaacccataaactgctttcaaaactgtttttcttgagtagtgcagaggtaggcggaattcccggtgtagcggtggaatgcgtagatatcgggaggaacaccagtggcgaagtcgtcctactgggcaccaactgacgctgaggctcgcaagtgtgggtaccaaacaggattagataccctggtagtccacaccgtaaacgatgattactaggtgttggaggatcgaccccttcagtgccgcagttaacacaataagtaatccacatggggagtacgacagcaaggttgaaaatcaaaggaattgacgggggccagcacaagcagtggagtatctggtttaattagacgcaactcgaagaaccttaccaagtcttgacatcctgcgacgcacatagaaatatgtgtttccttcgggacgcagagacagctggtgcatgattgtcgtcagctcgcgtcgtgagatgatgggttaagtcccgcaatgagcgcaacccttactgtcagttaatacgcaagaggactctggcaggactgccgtcgacacaacggaggaaggtggggatgacgtcaaatcatcatgccctttatgacttgggctacacacgtactacaatggcgttagacaaagagaagcaagaccgagaggtggagcaaaagtcagaaacaacgtcccagttcggaagcaggagcaactcgcctgcacgaagtcggaattgctagtaatcttggatcagcatgccacggagaatacgttcccgggccttgtacacaccgcccgtca

SEQ ID NO: 815 - DNA, 1358 bp, Artificial Sequence
  Synthetic polymer
gcctaacacatgcaagtcgaacggtaacaggaagaagcttgctgctttgctgacgagtggcggacgggtgagtaatgtttgggaaactgcctgatggagggggataactactggaaacggtagctaataccgcataacgtcgcaagaccaaagagggggaccttctggccccttgccatcggatgtgcccagatgggattagcttgttggtggggtaacggctcaccaaggcgacgatccctagctggtctgagaggatgaccagccacactggaactgagacacggtccagactcctacgggaggcagcagtggggaatattgcacaatgggcgcaagcctgatgcagccatgccgcgtgtatgaagaaggccttcgggttgtaaagtactttcagcggggaggaagggagtaaagttaatacctttgctcattgacgttacccgcagaagaagcaccggctaactccgtgccagcagccgcggtaatacggagggtgcaagcgttgatcggaattactgggcgtaaagcgcacgcaggcggtctgtcaagtcggatgtgaaatccccgggctcaacctgggaactgcatccgaaactggcaggctagagtcttgtagaggggggtagaattccaggtgtagcggtgaaatgcgtagagatctggaggaataccggcggcgaaggcggccccctggacaaagactgacgctcaggtgcgaaagcgtggggagcaaacaggattagataccctggtagtccacgccgtaaacgatgtcgacttggaggttgtgcccttgaggcgtggcttccggagctaacgcgttaagtcgaccgcctggggagtacggccgcaaggttaaaactcaaatgaattgacgggggcccgcacaagcggtggagcatgtggtttaattcgatgcaacgcgaagaaccttacctactcttgacatccagagaacttagcagagatgctttggtgccttcgggaactctgagacagatgctgcatggctgtcgtcagctcgtgttgtgaaatgttgggttaagtcccgcaacgagcgcaacccttatcctttgttgccagcggtccggccgggaactcaaaggagactgccagtgataaactggaggaaggtggggatgacgtcaggtcatcatggcccttacgagtagggctacacacgtgctacaatggcatatacaaagagaagcgacctcgcgagagcaagcggacctcataaagtatgtcgtagtccggattggagtctgcaactcgactccatgaagtcggaatcgctagtaatcgtggatcagaatgccacggtgaatacgttcccgggccttgtacactccgcc

SEQ ID NO: 816 - DNA, 1454 bp, Artificial Sequence
  Synthetic polymer
gatgaacgctggcggcgtgcttaacacatgcaagtcgaacgaagcagttttgaagaagccttcgggtggaattgagattgactgagtggcggacgggtgagtaacgcgtgggtaatctgcctcatacagggggataacagttagaaatgactgctaataccgcataagcgcacagagctgcatggctcggtgtgaaaaactccggtggtatgagatgagcccgcgtctgattaggtagttggtgaggtaacggcccaccaagccgacgatcagtagccgacctgagagggtgatcggccacattgggactgagacacggcccaaactcctacgggaggcagcagtggggaatattgcacaatgggggaaaccctgatgcagcgacgccgcgtgaaggaagacgtatttcggtatgtaaacttctatcagcagggaagataatgacggtacctgactaagaagccccggctaactacgtgccagcagccgcggtaatacgtagggggcaagcgttatccggatttactgggtgtaaagggagcgtaggcggcttggtaagtcagaagtgaaagcccagggcttaaccctgggactgcttttgaaactgccaggcttgattgccggagaggtaagtggaattcctagtgtagcggtgaaatgcgtagatattaggaggaacaccagtggcgaaggcggcttactggacggtcaatgacgctgaggctcgaaagcgtggggagcaaacaggattagataccctggtagtccacgccgtaaacgatgaatactaggtgtcggggtcctaaaggacttcggtgccgcagcaaacgcaataagtattccacctggggagtacgttcgcaagaatgaaactcaaaggaattgacggggacccgcacaagcggtggagcatgtggtttaattcgaagcaacgcgaagaaccttaccaagtcttgacatccccctgaccggtccgtaatgggacctttccttcgggacaggggagacaggtggtgcatggttgtcgtcagctcgtgtcgtgagatgttgggttaagtcccgcaacgagcgcaacccttatcttcagtagccagcggccaggccgggcactctggagagactgccagggataacctggaggaaggtggggatgacgtcaaatcatcatgccccttatgatttgggctacacacgtgctacaatggtgacaacaaagtgaggcagcgccgtgaggctgagcgaatcacaaaaaagtcatctcagttcggattgtagtctgcaactcgactacatgaagctggaatcgctagtaatcgcgaatcagaatgtcgcggtgaatacgttcccgggtcttgtacacaccgcccgtcacaccatgggagttggaaatgcccgaagtcagtgacccaaccgcaaggagggagctgccgaaggtggagccgatgactggggtg

SEQ ID NO: 817 - DNA, 1370 bp, Artificial Sequence
  Synthetic polymer
agagtttgatcctggctcaggcacgaacgctggcggcgcgcctaacacatgcaagtcgaacgagagagagggagcttgcttcctcaatcgagtggcgaacgggtgagtaacgcgtgaggaacctgcctcaaagagggggacaacagttggaaacgactgctaataccgcataagcccacggctcggcatcgagcagagggaaaaggagcaatccgctttgagatggcctcgcgtccgattagctagttggtgaggtaatggcccaccaaggcgacgatcggtagccggactgagaggttgaacggccacattgggactgagacacggcccagactcctacgggaggcagcagtggggaatattgcacaatgggggaaaccctgatgcagcgacgccgcgtggaggaagaaggtcttcggattgtaaactcctgttgttgaggaagataatgacggtactcaacaaggaagtgacggctaactacgtgccagcagccgcggtaaaacgtaggtcacaagcgttgtccggaattactgggtgtgaagggagcgcaggcgggaagacaagttggaagtgaaatctatgggctcaacccataaactgctttcaaaactgtttttcttgagtagtgcagaggtaggcggaatcccggtgtagcggtggaatgcgtagatatcgggaggaacaccagtggcgaaggcggcctactgggcaccaactgacgctgaggctcgaaagtgtgggtagcaaacaggattagataccctggtagtccacaccgtaacgatgattactaggtgttggaggattgaccccttcagttccgcagttaacacaatcagtaatccacatggggagtacgaccgcaaggttgcaaatcaaaggaattgacgggggcccgcacaagcagtggagtatctggtttgattagactcaacgtcgaagaaccttaccaagtcttgacatcctgcgacgcacatagaaatatgtgtttccttcggtacgcagagacagctggtgcatgattgtcgtcagctcgcgtcgtgagatgttgggttaagtcccgcaatgagcgcaacccttattgtcatttaatacgcaagaggaatcttgcaggagttccgtcgacacatcggaggaaggtggggatgacgtcagatcatcatgccctttatgactcgggttacacacgtactacaatggccttagacaaagagaagcaagaccgtgaggtggagcaaaagtcagcaactacgtcccagcttcgtaagcaggatcaactcgcttgcacgaagtcggagattgctagttatcttggatcagcatgccacggagaatacgttcccgggccttgtacacaccgcccgtca

SEQ ID NO: 818 - DNA, 1397 bp, Artificial Sequence
  Synthetic polymer
agagtttgatcctggctcaggctgaacgctatcggcaggcctaacacatgcaagtcgaggggcagcatttgtgtagcaatacacaagatggcgaccggcgcacgggtgcgtaacgcgtatgtaacctaccttaaacagggggataacactgagaaatcggtactaataccccataatacttctgaaggcatctttaggagttgaaagttccggcggtttaagatggacatgcgttgtattagctggttggtgaggtaacggctcaccaaggcgacgatacatagggggactgagaggttaaccccccacattggtactgagacacggaccaaactcctacgggaggcagcagtgaggaatattggtcaatggacgcaagtctgaaccagccatgccgcgtgcaggatgacggctctatgagttgtaaactgcttttgtacgagggtaaacgcagatacgcgtatctgtctgaaagtatcgtacgaataaggatcggctaactccgtgccagcagccgcggtaatacggaggatccaagcgttatccggatttattgggtttaaagggtgcgtaggcggttttataagttagaggtgaaaattcggggctcaactccggacgtgcctctaatactgtatgactagagattagatgcggtaggcggaatgtatggtgtagcggtgaaatgcgtagagatcatacagaacaccgattgcgaaggcagcttaccaaactacatctgacgttgaggcacgaaagcgtggggagcaaacaggattagataccctggtagtccaagcagtaaactatgatagctcattgtcggcgatacaatgtcggtgactaagagcaatcgataaggtatccacttggggagtacgttcgcaagaatgaaactcaaaggaattgacgggtccccgcacaagcggaggtacatgtggtataattcgatgatacgcgaggaacgttacccgggcttgaaagatactgacgaatgtggtcacaggttctccattcggggcaggaaactaggtgctgcatgctagtcgtcagctcgtgccgtgaggtatcgggttaagtcccataacgagcgcaacccttggtgttacttgccatcaggtgaaactggtcattctaacgggactcccggtccaagccggaggaaggtggggatgacgtcaaatcagcacggcccttacgtccggggttacacacgtgctacaatggtaggtacagaggacagctacccgttgacggggtgataatctcgaaagcatatatcaattcggattggaggctgaaacccgcctccatgaatttggattcgtttagtaatcgcagcatcagcccatggacgcggagaatacgttcctcgggccttgtacacaccgcccgtc

SEQ ID NO: 819 - DNA, 1391 bp, Artificial Sequence
  Synthetic polymer
agagtttgatcctggctcacgacgaacgctggcggcgtgcctaacacatgcaagtcgaacggaactgttttgaaagatttcttcggaatgaatttgatatagtttagtggcggacgggtgagtaacgcgtgagtaacctgcctccgagaggggaataacaatctgaaaagattgctaataccgcatgatatagtgaagtcgcatggcattactatcaaagatttatcgctcggagatggactcgcgtccgattagctagttggtggggtaacggcctaccaaggcgacgatcggtagccggactgagaggttgaacggccacattgggactgaggcacggcccagactcctacgggaggcagcagtgggggatattgcgcaatgggggcaaccctgacgcagcaacgccgcgtgaaggatgaaggttttcggattgtaaacttcttttattaaggacgaaaaaatgacggtacttaatgaataagctccggctaactacgtgccagcagccgcggtaatacgtagggagcaagcgttgtccggatttactgggtgtaaagggtgcgtaggcggctttgcaagtcagatgtgaaatctatgggctcaacccataaactgcatttgaaactgtagagcttgagtgaagtagaggcaggcggaattccccgtgtagcggtgaaatgcgtggagatggggaggaacaccagtggcgaaggcggcctgctgggctttaactgacgctgaggcacgaaagcgtgggtagcaaacaggattagataccctggtagtccacgctgtaaacgatgattactaggtgtggggggtctgaccccttccgtgccggagttaacacaataagtaatccacctggggagtacggccgcaaggttgaaactcaaaggaattgacgggggcccgcacaagcagtggagtatgtggtttaattcgaagcaacgcgaagaaccttaccaggtcttgacatccaactaacgaagtagagatacattaggtgcccttcggggaaagttgagacaggtggtgcatggttgtcgtcagctcgtgtcgtgagatgttgggttaagtcccgcaacgagcgcaacccttgctattagttgctacgcaagagcactctaataggactgccgttgacaaaacggaggaaggtggggacgacgtcaaatcatcatgccccttatgacatgggctacacacgtattacaatggacgttaacagagggaagcaatacagcgatgtggagcaaacccctaaaaacgttctcagttcagattgcaggctgcaacccgcctgcatgaagtcggaattgttagtaatcgcggatcagcatgccgcggtgaatacgttcaccgggcccttgtacacaccgcccgtc

SEQ ID NO: 820 - DNA, 1367 bp, Artificial Sequence
  Synthetic polymer
gagtttgatcctggctcaggacgaacgctggcggcgcgcctaacacatgcaagtcgaacgagcgagagagagcttgctttctcgagcgagtggcgaacgggtgagtaacgcgtgaggaacctgcctcaaagagggggacaacagttggaaacgactgctaataccgcataagcccacagctcggcatcgagcagagggaaaaggagtgatccgctttgagatggcctcgcgtccgattagctggttggtgaggtaacggcccaccaaggcaacgatcggtagccggactgagaggttgaacggccacattgggactgagacacggcccagactcctacgggaggcagcagtggggaatattgcacaatgggggaaaccctgatgcagcgacgccgcgtggaggaagaaggtcttcggattgtaaactcctgttgttgaggaagataatgacggtactcaacaaggaagtgacggctaactacgtgccagcagccgcggtaaaacgtaggtcacaagcgttgtccggaattactgggtgtaaagggagcgcaggcgggaaagcaagttggaagtgaaatccatgggctcaacccatgaactgctttcaaaactgtttttcttgagtagtgcagaggtaggcggaattcccggtgtagcggtggaatgcgtagatatcgggaggaacaccagtggcgaaggcggcctactgggcaccaactgacgctgaggatcgaaagtgtgggtagcgaacaggattagataccctggtagtccacactgtaaacgatgattactaggtgtaggaggattgaccccttcagtgccgcagttaacacaataagtaatccacgtggggagtacgaccgcaaggttgaaactcaaaggaattgacgggggcccgcacaagcagtggagtatgtggtttaattcgacgcaacgcgaagaaccttaccaactcttgacatcctgagacggtgctggaaacagtactttccttcgggacgcagagacaggtggtgcatggtagtcgtcagctcgtgtcgtgagatgttgggttaagtcccgcaacgagcgcaacccttatggtcagttactacgcaagaggactccggccagactgccgttgacaaaacggaggaaggtggggatgacgtcaaatcatcatgccctttatgacttgggctacacacgtactacaatggcgttaaacaaagagaagcgagaccgcgaggtggagcaaaactcagaaacaacgtcccagttcggactgcaggctgcaactcgcctgcacgaagtcggaattgctagtaatcgcagatcagcatgctgcggtgaatacgttcccgggccttgtacacaccgcccgt

SEQ ID NO: 821 - DNA, 1378 bp, Artificial Sequence
  Synthetic polymer
  misc_feature (626)..(626): n is a, c, g, or t
ttcgcccttagagtttgatcctggctcaggcacgaacgctggcggcgcgcctaacacatgcaagtcgaacgagcgagagagagcttgctttctcaagcgagtggcgaacgggtgagtaacgcgtgaggaacctgcctcaaagagggggacaacagttggaaacgactgctaataccgcataagcccacagctcggcatcgagcagagggaaaaggagtgatccgctttgagatggcctcgcgtccgattagctagttggtgaggtaacggcccaccaaggcgacgatcggtagccggactgagaggttgaacggccacattgggactgagacacggcccagactcctacgggaggcagcagtggggaatattgcacaatgggggaaaccctgatgcagcgacgccgcgtggaggaagaaggtcttcggattgtaaactcctgttgttgaggaagataatgacggtactcaacaaggaagtgacggctaactacgtgccagcagccgcggtaaaacgtaggtcacaagcgttgtccggaattactgggtgtaaagggagcgcaggcgggaaagcaagttggaagtgaaatccatgggctcaacccatgaactgctttcaaaactgtntttcttgagtagtgcagaggtaggcggaattcccggtgtagcggtggaatgcgtagatatcgggaggaacaccagtggcgaaggcgggctactgggcaccaactgacgctgaggatcgaaagtgtgggtaccaaacaggattagatacctggtagtccacactgtaaacgatgattactaggtgctggaggattgaccccttcagtgccgcagttaacacaataagtaatccacatggggagtacgaccgcaaggttgaaaatcaaaggaattgacgggggcccgcacaagcagtggagtatgtggtttgattcgacgcaacgtgaagaaccttaccaagtcttgacatcctgcgacggtgttggaaacagtagtttccttcgggacgcagagacaggtggtgcatggttgtccgtcagctcgcgtcgtgagatgttgggttaagtcccgcaatgagcgcaacccttatggtcagttaatacgcaagaggaatctggccagagtgccgctgacacaacggaggaaggtggggatgacgtcaaatcatcatgccctttatgacttgggttacacacgtactacaatggcgttagacaaagagaagagagaccgtgaggtggagcaaaagtcagaaacaacgtcccacttcggaatgcaggagcaactcgcttgcacgaagtcggaattgctagttatctcagatcagcatgatgcggagaatatgttcccgggccttgtacacaccgcccgtc

SEQ ID NO: 822 - DNA, 1492 bp, Artificial Sequence
  Synthetic polymer
agagtttgatcctggctcaggacgaacgctggcggcgtgcttaacacatgcaagtcgaacgggactactatgaaggagttttcggacaacggagtagtagtttagtggcggactggtgagtaacgcgtgaggaacctgcctttcagagggggacaacagctggaaacggctgctaataccgcatgaagcattgctgggacatcccgggaatgccaaagatttatcgctgaaagatggcctcgcgtctgattagctagttggtgaggtaacggcccaccaaggcgacgatcagtagccggactgagaggttgaccggccacattgggactgagatacggcccagactcctacgggaggcagcagtggggaatattgggcaatgggcgaaagcctgacccagcaacgccgcgtgaaggaagaaggctttcgggttgtaaacttctttgacaggggaagagtagaagacggtaccctgaaaacaagccacggctaactacgtgccagcagccgcggtaatacgtaggaggcaagcgttgtccggatttactgggtgtaaagggcgtgcagccgggaaggcaagtcagatgtgaaatccgtgggcttaacccacgaactgcatttgaaactgcttttcttgagtatcggagaggtaatcggaattcctagtgtagcggtgaaatgcgtagatattaggaagaacaccagtggcgaaggcggattactggacgacaactgacggtgaggcgcgaaagcgtggggagcaaacaggattagataccctggtagtccacgctgtaaacgatcaatactaggtgtgcggggactgaccccctgcgtgccggagttaacacaataagtattgcacctagggagtacgatcgcaaggttgaaactcaaaggaattgacgggggcccgcacaagcggtggattatgtggtttaattcgaagcaacgcgaagaaccttaccaggacttgacatcctactaacgaggtagagatacgtcaggtgcccttcggggaaagtagagacaggtggtgcatggttgtcgtcagctcgtgtcgtgagatgttgggttaagtcccgcaacgagcgcaacccctattgttagttgctacgcaagagcactctagcgagactgccgttgacaaaacggaggaaggtggggacgacgtcaaatcatcatgccccttatgtcctgggccacacacgtaatacaatggcggtcaacagagggatgctaagccgtgaggtggagcgaacccctaaaagccgtctcagttcggatcgcaggctgcaactcgcctgcgtgaagtcggaatcgctagtaatcgcggatcagcatgccgcggtgaatacgttcccgggccttgtacacaccgcccgtcacaccatgagagtcgggaacacccgaagtccgtagcctaactgcaaagagggcgcggccgaaggtgggttcgataattggggtgaagtcgtaacaaggtaaccgt

SEQ ID NO: 823 - DNA, 1366 bp, Artificial Sequence
  Synthetic polymer
gagtttgatcctggctcaggacgaacgctggcggcgcgcctaacacatgcaagtcgaacgagagagaggaagcttgcttcctcaatcgagtggcgaacgggtgagtaacgcgtgaggaacctgcctcaaagagggggacaacagttggaaacgactgctaataccgcataagcccacagctcggcatcgagcagagggaaaaggagcaatccgctttgagatggcctcgcgtccgattagctggttggtgaggtaatggcccaccaaggcgacgatcggtagccggactgagaggttgaacggccacattgggactgagacacggcccagactcctacgggaggcagcagtggggaatattgcacaatgggggaaaccctgatgcagcgacgccgcgtggaggaagaaggtcttcggattgtaaactcctgttgttgaggaagataatgacggtactcaacaaggaagtgacggctaactacgtgccagcagccgcggtaaaacgtaggtcacaagcgttgtccggaattactgggtgtaaagggagcgcaggcgggaagacaagttggaagtgaaatctatgggctcaacccataaactgctttcaaaactgtttttcttgagtagtgcagaggtaggcggaattcccggtgtagcggtggaatgcgtagatatcgggaggaacacagtggcgaaggcggcctactgggcaccaactgacgctgaggctcgaaagtgtgggtagcaaacaggattagataccgtgtaagtccacacggtaaacgatgagtagtaggtgttggaggattgaccccttcagtgccgcagttaacacgataagtaatccacctggggagtacgaccgcaaggttgagactcaaaggaattgacgggggcccgcacaagcagtggagtatgtggtataattcgacgcaacgcgaagaaccataccaagtgtggacatcccttgacgaacatagaaatatggtttctcttcggagcaaggagacaggtggtgcatggttgtcgtcagctcgtgtcgtgagatgttgggttaagtcccgcaacgagcgcaacccttactgtcagttactacgcaagaggactctggcaggactgccgttgacaaaacggaggaaggtggggatgacgtcaaatcatcatgccctttatgacttgggctacacgcgtactacaatggcgttaaacaaagagaagcaagaccgcgaggtggagcaaaactcagaaaccacctcccagttcggactgcaggctgcaactcgcctgcacgaagtcggaattgctagtaatcgtggatcagcacgccacggtgaatacgttcccgggccttgacacaccgcccgtc

SEQ ID NO: 824 - DNA, 1385 bp, Artificial Sequence
  Synthetic polymer
  misc_feature (730)..(730): n is a, c, g, or t
  misc_feature (787)..(787): n is a, c, g, or t
agtttgatcctggctcagattcaacgctggcggcatgctttacacatgcaagtcgaacggcagcacagggagcttgctcccgggtggcgagtggcgcacgggtgagtaatacatcggaacgtgtcctgttgtgggggataactgctcgaaagggtggctaataccgcatgagacctgagggtgaaagcgggggatcgcaagacctcgcgcaattggagcggccgatgcccgattagctagttggtgaggtaaaggctcaccaaggcgacgatcggtagctggtctgagaggacgaccagccacactgggactgagacacggcccagactcctacgggaggcagcagtggggaattttggacaatgggggcaaccctgatccagccatgccgcgtgcaggatgaaggccttcgggttgtaaactgcttttgtcagggacgaaaaggaccgtgttaataccatggtctgctgacggtacctgaagaataagcaccggctaactacgtgccagcagccgcggtaatacgtagggtgcaagcgttaatcggaattactgggcgtaaagcgtgcgcaggcggttctgtaagacagatgtgaaatccccgggctcaacctgggaattgcatttgtgactgcaggactagagttcatcagaggggggtggaatccaagtgtagcagtgaaatgcgtagatatttggaagaacaccaatggcgaaggcagccccctgngatgcgactgacgctcatgcacgaaagcgtggggagcaaacaggatagataccctgntagtccacgccctagacgatgtctaatggttgttggggtttttcaaccgtggtaatgaagctcacgcatgaagtagaccgcttggggagtacgttcgcaagagtataattcaaaggaattgacggggacccgcacaaacggtggatgatgtggactaagttgatgacacgcgcaaaaccttacctagccttgacatgtcaggaatcgtgaagagattcgggagtgccggcaagggaatttggagacaggtgctgcatggctgtagtcagctcgtgtcgtgagatgatgggttaagtcccgctacgagcgcaaccggtgtcattagcttctaagcaagagcactgtagtgagctgcgcggagccaaaccggaggaaggtggggatgaggtcaagtcctcatggccctgatggagagggcgtgacacgtcatacaatgctcgggtcatgagggcagtgatagccacaaggtggagcaaatatcagaaaaccgatcataccctggaatgcagtattcaactgggctgcatgaagtaggaagtgggtagtaatcgcggatcagcattcgacggtgaataggttcccaggtcttgtacacacc

SEQ ID NO: 825 - DNA, 1388 bp, Artificial Sequence
  Synthetic polymer
  misc_feature (779)..(779): n is a, c, g, or t
gagtttgatcctggctcaggacgaacgctggcggcgtgcctaacacatgcaagtcgaacggagttatttgaaatgattctttcgggatgattttcttttaacttagtggcggacgggtgagtaacgcgtgagtaacctgcctccgagtggggaataacagtctgaaaagactgctaataccgcataacataacgaagtcgcatggctttgttatcaaagatttatcgcttggagatggactcgcgtccgattagttagttggtgaggtaacggctcaccaagaccacgatcggtagtcggactgagaggttgaacggccacattgggactgagacacggcccagactcctacgggaggcagcagtgggggatattgcgcaatgggggaaaccctgacgcagcaacgccgcgtgaaggatgaaggtcttcggattgtaaacttcttttattaaggacgaaaacatgacggtacttaatgaataagctccggctaactacgtgccagcagccgcggtaatacgtagggagcaagcgttgtccggatttactgggtgtaaagggtgcgtaggcggctttgcaagtcagatgtgaaatctatgggctcaacccatagcctgcatttgaaactgtgaggcttgagtgaagtagaggcaggcggaattccccgtgtagcggtgaatgcgtacagatggggaggaacaccagtggcgaaggcggcctgctgggctttaactgacgctgaggcacgaaagcgtgggtagcgaacaggattagatacnctggtagtccacgctgtaaacgatgattactaggtgtggggggtctgaccccttccgtgccggagttaacacaataagtaatccacctggggagtacggccgcaaggttgaaactcaaaggaattgacgggggcccgcacaagcagtggagtatgtggtttaattcgaagcaacgcgaagaaccttaccaggtcttgacatccaactaacgaagtagagatacattaggtgcccttcggggaaagttgagacaggtggtgcatggttgtcgtcagctcgtgtcgtgagatgttgggttaagtcccgcaacgagcgcaacccttgctattagttgctacgcaagagcactctaataggactgccgttgacaaaacggaggaaggtggggacgacgtcaaatcatcatgccccttatgacctgggctacacacgtactacaatggacgttaacagagggaagcaatacagcgatgtggggcaaacccctaaaaacgttctcagttcagattgcaggctgcaacccgcctgcatgaagatgggattgctagtaatcgcagatcagcatgctgcggtgaatacgttcccgggccacttgtacacaccgcccgt

SEQ ID NO: 826 - DNA, 1481 bp, Artificial Sequence
  Synthetic polymer
gatgaacgctggcggcgtgcttaacacatgcaagtcgaacgagaatcaacggattgaggattcgtccaaatgaagttgaggaaagtggcggacgggtgagtaacgcgtgaggaacctgcctcggagtgggggataacagttggaaacagctgctaataccgcataatgcagtgagatcgcatgatcttactgccaaagatttatcgctctgagatggcctcgcgtctgattagctagttggcggggtaacggcccaccaaggcgacgatcagtagccggactgagaggttggccggccacattgggactgagacacggcccagactcctacgggaggcagcagtggggaatattgggcaatgggcgcaagcctgacccagcaacgccgcgtgaaggaagaaggctttcgggttgtaaacttcttttgtcagggacgaacaaatgacggtacctgacgaataagccacggctaactacgtgccagcagccgcggtaatacgtaggtggcaagcgttatccggatttattgggtgtaaagggcgtgtaggcgggactgcaagtcagatgtgaaaaccacgggctcaacctgtggcctgcatttgaaactgtagttcttgagtgtcggagaggcaatcggaattccgtgtgtagcggtgaaatgcgtagatatacggaggaacaccagtggcgaaggcggattgctggacgataactgacgctgaggcgcgaaagcgtggggagcaaacaggattagataccctggtagtccacgccgtaaacgatggatactaggtgtggggggactgaccccctccgtgccgcagttaacacagtaagtatcccacctggggagtacgatcgcaaggttgaaactcaaaggaattgacgggggcccgcacaagcggtggagtatgtggtttaattcgaagcaacgcgaagaaccttaccaggacttgacatcctactaacgaagcagagatgcattaggtgcccttcggggaaagtagagacaggtggtgcgtggttgtcgtcagctcgtgtcgtgagatgttgggttaagtcccgcaacgagcgcaacccctattgttagttgctacgcaagagcactctagcgagactgccgttgacaaaacggaggaaggtggggacgacgtcaaatcatcatgccccttatgtcctgggccacacacgtactacaatggcggttaacaaagagaggcaataccgcgaggtggagcaaatctcaaaaagccgtcccagttcggattgcaggctgcaacccgcctgcatgaagttggaatcgctagtaatcgcggatcagcatgccgcggtgaatacgttcccgggccttgtacacaccgcccgtcacaccatgagagtcgggaacacccgaagtccgtagcctaaccgcaaggggggcgcggccgaaggtgggttcgataattggggtgaagtcgtaacaaggtagccgtatcggaagg

SEQ ID NO: 827 - DNA, 1365 bp, Artificial Sequence
  Synthetic polymer
ttgatcctggctcagattgaacgctggcggcaggcctaacacatgcaagtcgggcggtagagaagcttgcttctcacgagcggcggacgggtgagtaatgtatggggatctgcctgatggagggggataactactggaaacggtagctaataccgcataatgtcttcggaccaaagcggttcgtcgcgccatcagatgaacccatatgggattagcttgtaggtgaggtaatggctcacctaggcgacgatccctagctggtctgagaggatgatcagccacactgggactgagacacggtccagactcctacgggaggcagcagtggggaatattgcacaatgggcgcaagcctgatgcagccatgccgcgtgtatgaagaaggcctttgggttgtaaagtactttcagcgaggaggaaggtgttgtgcaatcgcagcaattgacgttactcgcagaagaagcaccggctaactccgtgccagcagccgcggtaatacggagggtgcaagcgttaatcggaattactgggcgtaaagcgcacgcaggcggtctgtcaagtcggatgtgaaatccccgggctcaacctgggaactgcattcgaaactggcaggctagagtcttgtagaggggggtagaattccaggtgtagcggtgaaatgcgtagagatctggaggaataccggtggcgaaggcggccccctggacaagactgacgctcaggtgcgaaagcgtggggagcaaacaggattagataccctggtagtccacgctgtaaacgatgtcgacttggaggttgtgcccttgaggcgtggcttccggagctaacgcgttaagtcgaccgcctggggagtacggccgcaaggttaaaactcaaatgaattgacgggggcccacacaagcggtggagcatgtggtttaattcgatgcaacgcgaagaaccttacctactcttgacatccagagaatttagcagagatgctttagtgccttcgggaactctgagacaggtgctgcatggctgtcgtcagctcgtgttgtgaaatgttgggttaagtcccgcaacgagcgcaacccttatcctttgttgccagcgcgtaatggtgggaactcaaaggagactgccggtgataaaccggaggaaggtggggatgacgtcaagtcatcatggcccttacgagtagggctacacacgtgctacaatggcatatacaaagagaagcgaactcacgagagcaagcggacctcataaagtatgtcgtagtccggattggagtctgcaactcgactccatgaagtcggaatcgctagtaatcgtagatcagaatgctacggtgaatacgttcccgggccttgtactcactgc

SEQ ID NO: 828 - DNA, 1493 bp, Artificial Sequence
  Synthetic polymer
gagtttgatcctggctcaggacgaacgctggcggcgtgcttaacacatgcaagtcgaacgagaatcatatgacggagttttcggacaactgagtatgaggacagtggcggactggtgagtaacgcgtgaggaacctgcctttcagagggggacaacagttggaaacgactgctaataccgcatgacacatagagatcgcatggtttttatgtcaaagatttatcgctgaaagatggcctcgcgtcccattagctagttggcgggataaaagcccaccaaggcaacgatgggtagccggactgagaggttgaccggccacattgggactgagatacggcccagactcctacgggaggcagcagtggggaatattgggcaatggacgcaagtctgacccagcaacgccgcgtgaaggaagaaggctttcgggttgtaaacttcttttgtcagggaagagtagaagacggtacctgacgaataagccacggctaactacgtgccagcagccgcggtaatacgtaggtggcaagcgttgtccggatttactgggtgtaaagggcgtgtagccgggtgtgtaagtcagatgtgaaatctggaggctcaacctccaaactgcatttgaaactgcgcatcttgagtgtcggagaggtaatcggaattccttgtgtagcggtgaaatgcgtagatataaggaagaacaccagtggcgaaggcggattactggacgataactgacggtgaggcgcgaaagcgtggggagcaaacaggattagataccctggtagtccacgctgtaaacgatcaatactaggtgtgcggggactgaccccctgcgtgccgcagttaacacaataagtattgcacctggggagtacgatcgcaaggttgaaactcaaaggaattgacgggggcccgcacaagcggtggattatgtggtttaattcgaagcaacgcgaagaaccttaccagggcttgacatcctactaacgaagtagagatacatcaggtgcccttcggggaaagtagagacaggtggtgcatggttgtcgtcagctcgtgtcgtgagatgttgggttaagtcccgcaacgagcgcaacccctattgttagttgctacgcaagagcactctagcgagactgccgttgacaaaacggaggaaggtggggacgacgtcaaatcatcatgccccttatgtcctgggctacacacgtaatacaatggcgatcaacagagggatgcaaagccgcgaggtggagcaaatccccaaaagtcgtctcagttcggattgcaggctgcaactcgcctgcatgaagtcggaatcgctagtaatcgcggatcagcaagccgcggtgaatacgttcccgggccttgtacacaccgcccgtcacaccatgagagtcgggaacacccgaagtccgtagcctaaccgcaaggagggcgcggccgaaggtgggttcgataattggggtgaagtcgtaacaaggtagccgtag

SEQ ID NO: 829 - DNA, 1482 bp, Artificial Sequence
  Synthetic polymer
agagtttgatcatggctcaggacgaacgctggcggcgtgcctaacacatgcaagtcgaacggggatacgttttcggatgtattctagtggcgtacgggtgagtaacgcgtgagcgacctgacctaaagagggggataacatcgagaaatcgatgctaataccgcataagaccacggtatcgcatgatacagaggtcaaaggagtaatccgctttgggaggggctcgcgtcccattagatagtaggcggggtaatggcccacctagtcaacgatgggtagccgagctgagaggctgatcggccacactggaactgagacacggtccagactcctacgggaggcagcagtggggaatattgggcaatgggcgaaagcctgacccagcaacgccgcgtgagggaagaaggttttcggattgtaaacctctgttgcagatgacgaagaaagtgacggtaatctgtgaggaagccccggctaactacgtgccagcagccgcggtaatacgtagggggcgagcgttgtccggaattactgggcgtaaagggtgcgtaggcggttaattaagttggatgtgaaatacccgggcttaacctggggggtgcattcaaaactggttaactagagttcaggagagggaagcggaattcctagtgtagcggtgaaatgcgtagatattaggaggaacaccagtggcgaaggcggctttctggactgacactgacgctgaggcacgaaagcgtggggagcaaacaggattagataccctggtagtccacgcggtaaacgatgaatactaggtgtagggggtatcaactccctctgtgccgcagctaacgcaataagtattccgcctggggagtacggccgcaaggttgaaactcaaaggaattgacgggggcccgcacaagcagcggagcatgtggtttaattcgacgcaacgcgaagaaccttaccaaggcttgacatcctgctaaaaccatagagatatggtgtcccttcgggggagcagagacaggtggtgcatggttgtcgtcagctcgtgtcgtgagatgttgggttaagtcccgcaacgagcgcaacccctgttgccagttaccagcacgtaatggtgggaactctggtgagactgccggggacaactcggaggaaggtggggacgacgtcaaatcatcatgccccttatgtcttgggctacacacgtgctacaatggctgtaacaaagggaagcgacagcgagagctgaagcggatctcagaaaagcagtcccagttcggattgtgggctgcaacccgcccacatgaagtcggagttgctagtaatcgcggatcagcatgccgcggtgaatacgttcccgggccttgtacacaccgcccgtcacaccatgggagttgggagcgcccgaagccggtatcctaaccgtaaggagggagccgtctaaggtgagaccaatgactggggtgaagtcgtaacaaggtaaccgta

SEQ ID NO: 830 - DNA, 1357 bp, Artificial Sequence
  Synthetic polymer
gatgaacgctggcggcgtgcttaacacatgcaagtcgaacggagtgctcatgacagaggattcgtccaatggattgagttacttagtggcggacgggtgagtaacacgtgaggaacctgcctcggagtggggaataacacaacgaaagctgtgctaataccgcatgatacagttgggtcgcatgactctgactgtcaaagatttatcgctctgagatggcctcgcgtctgattagctagttggcggggtaacggcccaccaaggcgacgatcagtagccggactgagaggttgaccggccacattgggactgagacacggcccagactcctacgggaggcagcagtggggaatattgggcaatgggcgcaagcctgacccagcaacgccgcgtgaaggaagaaggctttcgggttgtaaacttcttttctcagggacgaagcaagtgacggtacctgaggaataagccacggctaactacgtgccagcagccgcggtaatacgtaggtggcaagcgttatccggatttactgggtgtaaagggcgtgtaggcgggatcgcaagtcagatgtgaaaactggaggctcaacctccagcctgcatttgaaactgtggtccttgagtactggggaggcagacggaattcctagtgtagcggtgaaatgcgtagatattaggaggaacaccagtggcgaaggcggtctgctggacagcaactgacgctgaggcgcgaaagcgtggggagcaaacaggattagataccctggtagttcacgctgtaaacgatggatactaggtgtggggggtgtgaccccctccgtgccgcagttaacacaataagtatcccacctggggagtacgatcgcaaggttgaaactcaaaggaattgacgggggcccgcacaagcggtggagtatgtggtttaatttgaagcaacgcgaagaaccttaccagggcttgacatcccgagggccggtctagagatagacctttctcttcggagacctcggtgacaggtggtgcatggttgtcgtcagctcgtgtcgtgagatgttgggttaagtcccgcaacgagcgcaacccctattgttagttgctacgcaagagcactctagcgagactgccgttgacaaaacggaggaaggtggggaggacgtcaaatcatcatgccccttatgtcttgggccacacacgtactacaatggtggttaacagagggaggcaagaccgtgaggtggagcaaatccctaaaagccatcccagttcggattgcaggctgcaacccgcctgcatgaagttggaatcgctagtaatcgcggatcagcatgccgcggtgaaaaaggtcccgggccttgcac

SEQ ID NO: 831 - DNA, 1466 bp, Artificial Sequence
  Synthetic polymer
ggcaggcctacacatgcaagtcgagcggtagcacagagagcttgctctcgggtgacgagcggcggacgggtgagtaatgtctgggaaactgcctgatggagggggataactactggaaacggtagctaataccgcataatgtcgcaagaccaaagagggggaccttcgggcctcttgccatcagatgtgcccagatgggattagctagtaggtggggtaatggctcacctaggcgacgatccctagctggtctgagaggatgaccagccacactggaactgagacacggtccagactcctacgggaggcagcagtggggaatattgcacaatgggcgcaagcctgatgcagccatgccgcgtgtgtgaagaaggccttcgggttgtaaagcactttcagcgaggaggaaggcattaaggttaataaccttagtgattgacgttactcgcagaagaagcacggctaactccgtgccagcagccgcggtaatacggagggtgcaagcgttaatcggaattactgggcgtaaagcgcacgcaggcggtctgtcaagtcggatgtgaaatccccgggctcaacctgggaactgcattcgaaactggcaggctagagtcttgtagaggggggtagaattccaggtgtagcggtgaaatgcgtagagatctggaggaatagcggtggcgagggcggccccctggacaaagactgacgctcagtgcgaaagcgtggggagcaacaggattaataccctggtagtcgacgccgtaacgatgtcgacttggaaggttgttcccttgaggagtgcttcccgcatctaacgcgttaagtccgaccgcctgtggagtacggccgcaaggttaaaactcaaatgaattgacgggggcccgcacaagcggtggagcatgtggtttaatttgatgcaacgcgaagaaccttacttggtcttgacatccacagaacttagcagagatgctttggttccttcgggaactgtgagacaggtttgcatggctgtcgtcagctcgtgttgagaaatgttgggttaagtcacgcaacgagcgcaacccctatcctttgttgccagcggtccggccgggaactcaaaggagactgccagtgataaactggaggaaggtggggatgacgtcaagtcatcatggcccttacgaccagggttacacacgtgctacaatggcgcatacaaagagaagcgaactcgagagagcaagcggacctcataaagtgcgtcgtagtccggattggagtctgcaactcgactccatgaagtcggaatcgctagtaatcgtagatcagaatgatacggtgagtacgttcccgggccttgtacacaccgcccgtcacaccatgggagtgggttgcaaaagaagtaggtagcttaaccttcgggagggcgcttaccactttgtgattcatgactggggtgaagtcgtaacaaggtaaccgta

SEQ ID NO: 832 - DNA, 1503 bp, Artificial Sequence
  Synthetic polymer
agagtttgatcctggctcagattgaacgctggcggcaggcctaacacatgcaagtcgaacggtaacaggaagcagcttgctgcttcgctgacgagtggcggacgggtgagtaatgtgtgggaaactgcctgatggagggggataactactggaaacggtagctaataccgcataacgtcgcaagaccaaagagggggaccttcgggcctcttgccatcggatgtgcccagatgggattagctagtaggtggggtaacggctcacctaggcgacgatccctagctggtctgagaggatgaccagccacactggaactgagacacggtccagactcctacgggaggcagcagtggggaatattgcacaatgggcgcaagcctgatgcagccatgccgcgtgtatgaagaaggccttcgggttgtaaagtactttcagcggggaggaaggtgttgaggttaataacctcagcaattgacgttacccgcagaagaagcaccggctaactccgtgccagcagccgcggtaatacggagggtgcaagcgttaatcggaattactgggcgtaaagcgcacgcaggcggtctgtcaagtcggatgtgaaatccccgggctcaacctgggaactgcattcgaaactggcaggctagagtcttgtagaggggggtggaattccatgtgtagcggtgaaatgcgtagagatctggaggaataccggtggcgaaggcggccccctggactgagactgacgctcaggtgcgaaagcgtggggagcaaacaggattagataccctggtagtccacgccgtaaacgatgtctgcttggaggttgtggccttgaggcctggcttccggagctaacgcgttaagtcgaccgcctggggagtacgggcgcaagggttaaactccaatgaattgacggggggccccacaagcgggggaacatggggtttaattccatgcaacccgaaaaaccttacctactcttgacctccatagaacttccctaaaatggattgttgccttccggaactctgagacaggggctgcatgggtgtcgtcagctcgtgttgtgaaaagttgggttaagtcccgcaacgagcgcaacccttatcctttgttgccagcggttaggccgggaactctaaggagactgccagtgataaactggaggaaggtggggatgacgtcaagtcatcatggcccttacgagtagggctacacacgtgctacaatggcgcatacaaagagaagcgacatcgcgagagcaagctgacctcataaagtgcgtctcagtccggattggagtctgcaactcgactccatgaagtcggaatcgctagtaatcgtggatcagaatgccacggtgaatacgttcccgggccttgtacacaccgcccgtcacaccatgagagtgtgttacacaagaagtaggtaggcttaaccttcttggagggccgcttaccacttttgtgattcaatgactgggggtgaagtcgtaacaag

SEQ ID NO: 833 - DNA, 1361 bp, Artificial Sequence
  Synthetic polymer
acgaacgctggcggcgtgcctaatacatgcaagtcgaacgctcgagtgcttgcactcaaggagtggcggacgggtgagtaacacgtgggtaacctacccatcagagggggataacacttggaaacaggtgctaataccgcataacagtttagccgcatggcataagaggaaaggcgttcgtgtcgctgatggatggacctgcggtgcattagctagttggtgaggtaacggctcaccaaggccacgatgcatagccgacctgagagggtgatcggccacactgggactgagacacggcccagactcctacgggaggcagcagtagggaatcttcggcaatggacgaaagtctaaccgagcaacgccgcgtgagtgaagaaggttttcggatcgtaaaactctgttgttagagaagaacaaggacgttgtaaaacgtcccctgacggtatctaaccagaaagccacggctaactacgtgccagcagccgcggtaatacgtaggtggcaagcgttgtccggatttattgggcgtaaagcgagcgcaggcggtttcttaagtctgatgtgaaagcccccggctcaaccggggagggtcattggaaactgggagacttgagtgcagaagaggagagtggaattccatgtgtagcggtgaaatgcgtagatattaggaggaacaccagtagcgaaggcggctttctggactgtaactgacactgaggcacgaaagcgtggggagcaaacaggattagataccctggtagtccacgcgtaaacgatgagtactaggtgtcgggggttaccccctcggtgccgcagctaacgcattaagtactccgcctggggagtacgctcgcaagagtgaaactcaaaggaattgacgggggcccgcacaagcggtggagcatgtggtttaattcgaagcaacgcgaagaaccttaccaggtcttgacatcctttgaccactctagagatagagctttcccttcggggacaaagtgacaggtggtgcatggttgtcgtcagctcgtgtcgtgagatgttgggttaagtcccgcaacgagcgcaacccttattgttagttgccatcatttagttgggcactctagcgagactgccggtgacaaaccggaggaaggtggggatgacgtcaaatcatcatgccccttatgacctgggctacacacgtgctacaatgggaagtacaacgagttgcgaagtcgcgaggctaagctaatctcttaaagcttctctcagttcggattgtaggctgcaactcgcctacatgaagccggaatcgctagtaatcgcggatcagcacgccgcggtgaatacgttcccgggccttgcactcaccgccc

SEQ ID NO: 834 - DNA, 1388 bp, Artificial Sequence
  Synthetic polymer
ttagagtttgatcctggctcaagacgaacgctggcggcgtgcttaacacatgcaagtcgaacggagtgctcatgacagaggtttcggccaatggattgagttacttagtggcggactggtgagtaacgcgtgaggaacctgcctttcagagggggacaacagctggaaacggctgctaataccgcatgacgcatcgatggggcatcccgttgatgtcaaatattttatcgctgaaagatggcctcgcgtctgattagctagttggtgaggtaacggcccaccaaggcgacgatcagtagccggactgagaggttgaccggccacattgggactgagatacggcccagactcctacgggaggcagcagtggggaatattgggcaatggacgcaagtctgacccagcaacgccgcgtgaaggaagaaggctttcgggttgtaaacttcttttgtcagggaacagtagaagagggtacctgacgaataagccacggctaactacgtgccagcagccgcggtaatacgtaggtggcaagcgttgtccggatttactgggtgtaaagggcgtgtagccggagagacaagtcagatgtgaaatccgcgggctcaacccgcgaactgcatttgaaactgtttcccttgagtatcggagaggtaaccggaattcctagtgtagcggtgaaatgcgtagatattaggaagaacaccagtggcgaaggcgggttactggacgacaactgacggtgaggcgcgaaagcgtggggagcaaacaggattagataccctggtagtccacgctgtaaacgatcaatactaggtgtgcggggactgaccccctgcgtgccgcagttaacacaataagtattgcacctggggagtacgatcgcaaggttgagactcaaaggaattgacgggggcccgcacaagcggtggattatgtggtttaattcgaagcaacgcgaagaaccttaccagggcttgacatcctactaacgaagtagagatacatcagttgcccttcggggaaagtagagacaggtggtgcatggttgtcgtcagctcgtgtcgtgagatgttgggttaagtcccgcaacgagcgcaacccctattgttagttgctacgcaagagcactctagcgagactgccgttgacaaaacggaggaaggtggggacgacgtcaaatcatcatgccccttatgtcctgggctacacacgtaatacaatggcggtcaacagagggatgcaaagccgcgaggcagagcgaacccctaaaagccgtcccagttcggattgcaggctgcaacccgcctgcatgaaatcggaatcgctagtaatcgcggatcagcatgccgcggtgaatacgttcccgggccttgcacacaccgccc

SEQ ID NO: 835 - DNA, 1488 bp, Artificial Sequence
  Synthetic polymer
  misc_feature (1472)..(1472): n is a, c, g, or t
gtttgattatggctcaggacgaacgctggcggcgtgcttaacacatgcaagtcgaacggagcacccctgaatgaggtttcggccaaaggaagggaatgcttagtggcggactggtgagtaacgcgtgaggaacctgcctttcagagggggacaacagttggaaacgactgctaataccgcatgacacatgaatggggcatcccattgatgtcaaagatttatcgctgaaagatggcctcgcgtcccattagctagtaggcggggtaacggcccacctaggcgacgatgggtagccggactgagaggttgaccggccacattgggactgagatacggcccagactcctacgggaggcagcagtggggaatattgggcaatggacgcaagtctgacccagcaacgccgcgtgaaggaagaaggctttcgggttgtaaacttcttttgtcagggaacagtagaagagggtacctgacgaataagccacggctaactacgtgccagcagccgcggtaatacgtaggtggcaagcgttgtccggatttactgggtgtaaagggcgtgcagccgggctggcaagtcaggcgtgaaatcccagggctcaaccctggaactgcgtttgaaactgctggtcttgagtaccggagaggtcatcggaattccttgtgtagcggtgaaatgcgtagatataaggaagaacaccagtggcgaaggcggatgactggacggcaactgacggtgaggcgcgaaagcgtggggagcaaacaggattagataccctggtagtccacgctgtaaacgatcaatactaggtgtgcggggactgaccccctgcgtgccgcagttaacacaataagtattgcacctggggagtacgatcgcaaggttgaaactcaaaggaattgacgggggcccgcacaagcggtggattatgtggtttaattcgaagcaacgcgaagaaccttaccagggcttgacatcctactaacgaagtagagatacattaggtgcccttcggggaaagtagagacaggtggtgcatggttgtcgtcagctcgtgtcgtgagatgttgggttaagtcccgcaacgagcgcaacccctattgttagttgctacgcaagagcactctagcgagactgccgttgacaaaacggaggaaggtggggacgacgtcaaatcatcatgccccttatgtcctgggctacacacgtaatacaatggcggttaacagagggatgcaaatccgcgaggaggagcgaacccccaaaagccgtcccagttcggatcgcaggctgcaacccgcctgcgtgaagtcggaatcgctagtaatcgcggatcagcatgccgcggtgaatacgttcccgggccttgtacacaccgcccgtcacaccatgagagtcgggaacacccgaagtccgtagcctaaccgcaaggggggcgcggccgaaggtgggttcgataattggggtgaantcgtaacaaggtaccc

SEQ ID NO: 836 - DNA, 1297 bp, Artificial Sequence
  Synthetic polymer
catgttcaaagctccggcggtacaggatggacccgcgtctgattagctagttggtgaggtaatggctcaccaaggcgacgatcagtagccgacctgagagggtgatcggccacattggaactgagacacggtccaaactcctacgggaggcagcagtggggaatattgcacaatgggcgaaagcctgatgcagcaacgccgcgtgagcgatgaaggccttcgggtcgtaaagctctgtcctcaaggaagataatgacggtacttgaggaggaagccccggctaactacgtgccagcagccgcggtaatacgtagggggctagcgttatccggatttactgggcgtaaagggtgcgtaggcggtcttttaagtcaggagtgaaaggctacggctcaaccgtagtaagctcttgaaactggaggacttgagtgcaggagaggagagtggaattcctagtgtagcggtgaaatgcgtagatattaggaggaacaccagtagcgaaggcggctctctggactgtaactgacgctgaggcacgaaagcgtggggagcaaacaggattagataccctggtagtccacgccgtaaacgatgagtactagctgtcggaggttaccccttcggtggcgtagctaacgcattaagtactccgcctggggagtacgctcgcaagagtgaaactcaaaggaattgacggggacccgcacaagtagcggagcatgtggtttaattcgaagcaatgcgaagaaccttacctaagcttgacatcttttgaccgatgcctaatcgcatttttcccttcggggacagaatgacaggtggtgtatggttgtcgtcagctcgtgtcgtgagatgttgggttaagtcccgcaacgagcgcaacccttacctttagttgctacaagagcactctaaagggactgccgttgacaaaacggaggaaggtggggatgacgtcaaatcatcatgccccttatgacctgggctacacacgtactacaatggcaattacaaagagaagcgagacggtgacgtggagcgaatctcaaaaattgtcccagttcagattgcaggctgcaactcgcctgcatgaagtcggaattgctagtaatcgcggatcagcatgccgcggtgaatacgttcccgggccttgtacacaccgcccgccacaccatgggagtcggtaacacccgaagccggtagtctaacagcatgaggacgccgccgaaggtggggtcggtgactgggactaagtcgtaacaaggtaggtgtaccggaaggtgcggctggatcacct

SEQ ID NO: 837 - DNA, 1362 bp, Artificial Sequence
  Synthetic polymer
gatgaacgcttgtggcgtgcttaacacatgcaagtcgaacgaagcacattgattagagatcttcggattaaagagagatgtgacttagtggcggacgggtgagtaacgcgtgggtaacctgccttatacggggggataacagttagaaatgactgctaataccgcataacccgctagtaccgcatggtacggacggaaaagatgtatcggtataagatggacccgcgtctgattagctagttggtggggtaaaggcctaccaaggcgacgatcagtagccgacctgagagggtgatcggccacattgggactgagacacggcccaaactcctacgggaggcagcagtggggaatattgcacaatgggggaaaccctgatgcagcgacgccgcgtgaaggaagaagtatttcggtatgtaaacttctatcagcagggaagaaagtgacagtacctgactaagaagccccggctaactacgtgccagcagccgcggtaatacgtagggggcaagcgttatccggatttactgggtgtaaagggagcgtaggtggcgatgcaagccagaagtgaaaacccggggctcaaccccgaggactgcttttggaactgtgttgctggagtgcaggagaggtaagtggaattcctagtgtagcggtgaaatgcgtagatattaggaggaacaccggtggcgaaggcggcttactggactgtaactgacactgaggctcgaaagcgtggggagcaaacaagattagataccctggtagtccacgccgtaaacgatgaatactaggtgttggggagcaaagctcctcggtgccgtcgcaaacgcaataagtattccacctggggagtacgttcgcaagaatgaaactcaaaggaattgacggggacccgcacaagcggtggagcatgtggtttaattcgaagcaacgcgaagaaccttaccaagtcttgacatcccactgaccggtccgtaatgtggccttctcttcggagcagtggagacaggtggtgcatggttgtcgtcagctcgtgtcgtgagatgttgggttaagtcccgcaacgagcgcaacccttatctttagtagccagcaagtgaagttgggcactctagagagactgccggggataacccggaggaaggtggggatgacgtcaaatcatcatgccccttatgatttgggctacacacgtgctacaatggcgtaaacaaagagaagcgaaagggtgacttggagcgaatctcaaaaataacgtctcagttcgggttgtagtctgcaactcgactacatgaagctggaatcgctagtaatcgcgaatcagaatgtcgcggtgaatacgttcccgggtcttgcaca

SEQ ID NO: 838 - DNA, 1476 bp, Artificial Sequence
  Synthetic polymer
gtttgattctggctcaggacgaacgctggcggcgtgcttaacacatgcaagtcgaacggacgaagccccttcgggggccgagttagtggcggacgggtgagtaacgcgtgagcaacctgcccataagagggggataacatcgggaaaccgatgctaataccgcataagaccacgatagcacatgctaatgaggtcaaaggagcaatccgcttatggaggggctcgcgtcccattaggtagatggtgaggtaacggcccaccatgccgacgatgggtagccggactgagaggttgaacggccacactgggactgagacacggcccagactcctacgggaggcagcagtggggaatattgggcaatgggggaaaccctgacccagcaacgccgcgtgaaggaagaaggttttcggattgtaaacttctgtcctaagggaagaaagaaatgacggtaccttaggaggaagccccggctaactacgtgccagcagccgcggtaatacgtagggggcaagcgttgtccggaattattgggcgtaaagggtgcgtaggcggccgatcaagtcaggtgtgaaagacccgtgcttaacatgggggttgcacttgaaactggttggcttgagtatgggagaggcaagcggaattcccggtgtagcggtgaaatgcgtagagatcgggaggaacaccagtggcgaaggcggcttgctggaccaaaactgacgctgaggcacgaaagcgtgggtagcaaacaggattagataccctggtagtccacgccgtaaacgatggatactaggtgtagggggtttaacaccttctgtgccggagcaaacgcaataagtatcccgcctggggagtacgatcgcaagattgaaactcaaaggaattgacgggggcccgcacaagcagcggagcatgtggtttaattcgaagcaacgcgaagaaccttaccaaggcttgacatcccctgacagacatagaaatatgttatctcttcggagcagggagacaggtggtgcatggttgtcgtcagctcgtgtcgtgagatgttgggttaagtcccgcaacgagcgcaacccctacatttagttaccagcgggtaaagccggggactctagatggactgccggggacaactcggaggaaggtggggacgacgtcaaatcatcatgccccttatgtcttgggctacacacgtgctacaatggccgttacaaagggaagcgagtgcgtaagcaggagcggaacccataaaagcggtcccagttcggattgtgggctgcaacccgcccacatgaagtcggagttgctagtaatcgcgaatcagcatgtcgcggtgaatgcgttcccgggccttgtacacaccgcccgtcacaccacggaagttgggagcacccgaagccggtggcttaaccgcaaggagagagccgtcgaaggtgagatcaatgactggggtgaagtcgtaacaaggtaacc

SEQ ID NO: 839 - DNA, 1355 bp, Artificial Sequence
  Synthetic polymer
agagtttgatcttggctcaggatgaacgctggcggcgtgcttaacacatgcaagtcgaacgaagcggtctggttgaagcctccgggcggaaaccagactgactgagtggcggacgggtgagtaccgcgtgggcaacctgcctcacacagggggataacagctagaaatggctgctaataccacataagcgcacagcatggcatcatgcagtgtgaaaaactccggtggtgtgagatgggcccgcgtctgattaggtagttggtgaggtaacggcccaccaagccgacgatcagtagccgacctgagagggtgaccggccacattgggactgagacacggcccaaactcctacgggaggcagcagtggggaatattgcacaatgggggaaaccctgatgcagcgacgccgcgtgaaggaagaagtatctcggtatgtaaacttctatcagcagggaagaagaatgacggtacctgactaagaagccccggctaactacgtgccagcagccgcggtaatacgtagggggcaagcgttatccggatttactgggtgtaaagggagcgtaggcggcgatgcaagtcagaagtgaaagcccagggcttaaccgtgggactgcttttggaactgtgttgctggattgccggagaggtaagtggaattcctagtgtagcggtgaaatgcgtagatattaggaggaacaccagtggcgaaggcggcttactggacggtaaatgacgctgaggctcgaaagcgtggggagcaaacaggattagataccctggtagtccacgccgtaaacgatgaatactaggtgtcggggcccaaaagggttccggtgccgcagcaaacgcaataagtattccacctggggagtacgttcgcaagaatgaaactcaaaggaattgacggggacccgcacaagcggtggagcatgtggtttaattcgaagcaacgcgaagaaccttaccaagtcttgacatctggacgaccggggcgtaacggtcctttcccttcggggcgtccaagacaggtggtgcatggttgtcgtcagctcgtgtcgtgagatgatgggttaagtcccgcaacgagcgcaacccttatatccagtagccagcaggtaaagctgggcactctggatagactgccagggataacctggaggaaggtggggatgacgtcaaatcatcatgccccctatgatttgggctacacacgtgctacaatggtgataacagagtgaggcagcgccgtgaggctgagcgaatcacaaaaaaatcatctcagttcggattgtagtctgcaactcgactacatgaagctggaatcgctagtaatcgcgaatcagaatgtcgcg

SEQ ID NO: 840 - DNA, 1397 bp, Artificial Sequence
  Synthetic polymer
gacgaacgctggcggcgtgcctaacacatgcaagtcgaacggagaattttatttcggtagaattcttagtggcgaacgggtgagtaacgcgtaggcaacctaccctttagacggggacaacattccgaaaggagtgctaataccggatgtgatcatcgtgccgcatggcaggatgaagaaagatggcctctacaagtaagctatcgctaaaggatgggcctgcgtctgattagctagttggtagtgtaacggactaccaaggcgatgatcagtagccggtctgagaggatgaacggtcacattgggactgagacacggcccaaactcctacgggaggcagcagtggggaatcttccgcaatggacgaaagtctgacggagcaacgccgcgtgagtgatgaaggatttcggtctgtaaagctctgatgtttatgacgaacgtgcagtgtgtgaacaatgcattgcaatgacggtagtaaacgaggaagccacggctaactacgtgccagcagccgcggtaatacgtaggtggcgagcgttgtccggaattattgggcgtaaagagcatgtaggcggcttaataagtcgagcgtgaaaatgcggggctcaaccccgtatggcgctggaaactgttaggcttgagtgcaggagaggaaaggggaatttccagtgtagcggtgaaatgcgtagatattgggaggaacaccagtggcgaaggcgcctttctggactgtgtctgacgctgagatgcgaaagccagggtagcgaacgggattagataccccggtagtcctggccgtaaacgatgggtactaggtgtaggaggtatcgaccccttctgtgccggagttaacgcaataagtacccccgcctggggagtacggccgcaaggttgaaactcaaaggaattgacgggggcccgcacaagcggtggagtatgtggtttaattcgacgcaacgcgaagaaccttaccaaggcttgacattgagcgccatacccagagatgggtagttcccttcggggacgtgaaaacaggtggtgcatggctgtcgtcaactcgtgtcgtgagatgttgggttaagtcccgcaacgagcgcaacccctatcctatgttaccagcaagtaaagttggggactcatgggagactgccagggacaacctggaggaaggcggggatgacgtcaagtcatcatgccccttatgtcttgggctacacacgtactacaatggtcggaaacagagggaagcgaagccgcgaggcagagcaaaccccagaaacccgatctcagttcggatcgcaggctgcaacccgcctgcgtgaagtcggaatcgctagtaatcgcaggtcagcatactgcggtgaatacgttcccgggccttgcacacagcgcccgtc

SEQ ID NO: 841 - DNA, 1506 bp, Artificial Sequence
  Synthetic polymer
agagtttgatcatggctcagattgaacgctggcggcaggcctaacacatgcaagtcgagcggtagcacagagagcttgctctcgggtgacgagcggcggacgggtgagtaatgtctgggaaactgcctgatggagggggataactactggaaacggcagctaataccgcataacgtcgcaagaccaaagagggggaccttcgggcctcttgccatcagatgtgcccagatgggattagctagtaggtggggtaatggctcacctaggcgacgatccctagctggtctgagaggatgaccagccacactggaactgagacacggtccagactcctacgggaggcagcagtggggaatattgcacaatgggcgcaagcctgatgcagccatgccgcgtgtatgaagaaggccttcgggttgtaaagtactttcagcgaggaggaaggcattgtggttaataaccgcagtgattgacgttactcgcagaagaagcaccggctaactccgtgccagcagccgcggtaatacggagggtgcaagcgttaatcggaattactgggcgtaaagcgcacgcaggcggtctgtcaagtcggatgtgaaatccccgggctcaacctgggaactgcattcgaaactggcaggctagagtcttgtagaggggggtagaattccaggtgtagcggtgaaatgcgtagagatctggaggaataccggtggcgaaggcggccccctggacaaagactgacgctcaggtgcgaaagcgtggggagcaaacaggattagataccctggtagtccacgccgtaaacgatgtcaactagccgttgggagccttgagctcttagtggcgcagctaacgcattaagttgaccgcctggggagtacggccgcaaggttaaaactcaaatgaattgacgggggcccgcacaagcggtggagcatgtggtttaattcgaagcaacgcgaagaaccttaccaggccttgacatccaatgaactttccagagatggattggtgccttcgggagcattgagacaggtgctgcatggctgtcgtcagctcgtgtcgtgagatgttgggttaagtcccgtaacgagcgcaacccttgtccttagttgccagcacataatggtgggaactctaaggagaccgccggtgacaaaccggaggaaggtggggatgacgtcaagtcatcatggcccttacgaccagggctacacacgtactacaatggtagggacagagggctgcaaacccgcgagggtaagccaatcccagaaaccctatctcagtccggattggagtctgcaactcgactccatgaagtcggaatcgctagtaatcgcagatcagcattgctgcggtgaatacgttcccgggccttgtacacaccgcccgtcacaccatgggagtttgttgcaccagaagcaggtagcttaaccttcgggagggcgcttgccacggtgtggccgatgactggggtgaagtcgtaacaaggtaaccgta

SEQ ID NO: 842 - DNA, 1485 bp, Artificial Sequence
  Synthetic polymer
attgaacgctggcggcatgccttacacatgcaagtcgaacggcagcgcgggagcttgctcctggcggcgagtggcgaacgggtgagtaatacatcggaacgtgtccgtttgtgggggacaaccagccgaaaggttggctaataccgcataagacctgagggtgaaagccggggaccgcaaggcctggcgcagacggagcggccgatgattgattagcttgttggcggggtaaaggcccaccaaggcgacgatcaatagctggtctgagaggacgaccagccacactggaactgagacacggtccagactcctacgggaggcagcagtggggaattttggacaatgggggcaaccctgatccagccatgccgcgtgcgggaagaaggccttcgggttgtaaaccgcttttgtcagggacgaaaagggacgggttaagagctagttccgctgacggtacctgaagaataagcaccggctaactacgtgccagcagccgcggtaatacgtagggtgcaagcgttaatcggaattactgggcgtaaagcgtgcgcaggcggttgggtaagacagatgtgaaatccccgggcttaacctgggaactgcatttgtgactgtccgactggagtacgtcagaggggggtggaattccgcgtgtagcagtgaaatgcgtagatatgcggaagaacaccgatggcgaaggcagccccctgggacgcaactgacgctcatgcacgaaagcgtggggagcaaacaggattagataccctggtagtccacgccctaaacgatgtctgccggttgttggggatttctatcttcagtaacgaagctaacgcgtgaagcagaccgcctggggagtacggtcgcaagattaaaactcaaaggaattgacggggacccgcacaagcggtggatgatgtggattaattcgatgcaacgcgaaaaaccttacctagccttgacatgtcaggaatgcttcgtaaatgaggcagtgcccgcaagggaacctgagcacaggtgctgcatggctgtcgtcagctcgtgtcgtgagatgttgggttaagtcccgcaacgagcgcaacccttgtcatcagttgctacgaaagggcactctgatgagactgccggtgacaaaccggaggaaggtggggatgacgtcaagtcctcatggcccttatggctagggcctcacacgtcatacaatggtcggaacagagggcagcgaagccgcgaggtgaagccaatcccagaaaaccgatcgtagtccggattgcagtctgcaactcgactgcatgaagtcggaatcgctagtaatcgcggatcagcatgccgcggtgaatacgttcccgggtcttgtacacaccgcccgtcacaccatgggagtggggttcaccagaaggcgtttgcccaaccgcaaggaaggcggcgcccacggtgggtttcatgactggggtgaagtcgtaacaaggtagtcgtaccggaagg

SEQ ID NO: 843 - DNA, 1460 bp, Artificial Sequence
  Synthetic polymer
gacgaacgctggcggcgtgcttaacacatgcaagtcgaacgggagaggatgaggaaatgcttcggcatggagacatccgatctagtggcggacgggtgagtaacgcgtgagcaacctgtcctgcacagggggataacactgagaaatcagtgctaataccgcatgagaccacagtatcacatggtacaggggtcaaaggagaaatccggtgcagggtgggctcgcgtcccattagctagttggtagggtaaaggcctaccaaggcgacgatgggtagccggactgagaggttggccggccacactgggactgagacacggcccagactcctacgggaggcagcagtggggaatattgggcaatgggcgaaagcctgacccagcaacgccgcgtgaaggaagaaggtctttggattgtaaacttttgtcctatgggaagaaggaagtgacggtaccatgggaggaagccccggctaactacgtgccagcagccgcggtaatacgtagggggcgagcgttgtccggaattactgggcgtaaagggcgcgcaggcggccgatcaagttagatgtgaaatacccgggcttaacctgggaactgcatttaaaactggttggctaggagtgcaggagagggaagcggaattcctagtgtagcggtgaaatgcgtagatattaggaggaacaccagtggcgaaggcggctttctggactgtaactgacgctgaggcgcgaaagcgtggggagcgaacaggattagataccctggtagtccacgctgtaaacgatgaatactaggtgtagggggtatcgaccccccctgtgccggagcaaacgcaataagtattccgcctggggagtacggccgcaaggttgaaactcaaaggaattgacgggggcccgcacaagcagcggagcatgtggtttaattcgaagcaacgcgaagaaccttaccaggtcttgacatccctcgaagtgcatagagatatgtacgtccttcgggacgaggagacaggtggtgcatggttgtcgtcagctcgtgtcgtgagatgttgggttaagtcccgcaacgagcgcaacccctacagttagttaccagcgggtaaagccggggactctaacaggactgccgtggataacacggaggaaggtggggacgacgtcaaatcatcatgctccttatgacctgggctacacacgtgctacaatggccggtacaaagagaagcgagaccgtaaggtggagcggatctcaaaaaaccggtcccagttcggattgtgggctgcaacccgcccacatgaagttggagttgctagtaatcgcgaatcagcatgtcgcggtgaatgcgttcccgggccttgtacacaccgcccgtcacaccatgggagttgggagcgcccgaagtcgttgaggtaacccgcaagggagccaggcgccgaaggtgagaccgataactggggtg

SEQ ID NO: 844 - DNA, 1452 bp, Artificial Sequence
  Synthetic polymer
gacgaacgctggcggcgtgcttaacacatgcaagtcgaacggagcacccttgactgaggtttcggccaaatgataggaatgcttagtggcggactggtgagtaacgcgtgaggaacctgccttccagagggggacaacagttggaaacgactgctaataccgcatgacgcatgaccggggcatcccggacatgccaaagatttatcgctggaagatggcctcgcgtctgattagctagatggtggggtaacggcccaccatggcgacgatcagtagccggactgagaggttgaccggccacattgggactgagatacggcccagactcctacgggaggcagcagtggggaatattgggcaatgggcgcaagcctgacccagcaacgccgcgtgaaggaagaaggctttcgggttgtaaacttcttttgtcagggaacagtagaagagggtacctgacgaataagctccggctaactacgtgccagcagccgcggtaatacgtagggagcgagcgttgtccggatttactgggtgtaaagggcgtgcagccgggctggtaagtcagatgtgaaatccgtgggctcaacccacgaactgcatttgaaactgctggtcttgagtaccggagaggttatcggaattccttgtgtagcggtgaaatgcgtagatataaggaagaacaccagtggcgaaggcggataactggacggcaactgacggtgaggcgcgaaagcgtggggagcaaacaggattagataccctggtagtccacgctgtaagcgatggatactaggtgtgcggggactgaccccctgcgtgccgcagttaacacaataagtatcccacctggggagtacgatcgcaaggttgaaactcaaaggaattgacgggggcccgcacaagcggtggagtatgtggtttaattcgaagcaacgcgaagaaccttaccaggacttgacatccaactaacgaagcagagatgcattaggtgcccttcggggaaagttgagacaggtggtgcatggttgtcgtcagctcgtgtcgtgagatgttgggttaagtcccgcaacgagcgcaacccttattgttagttgctacgcaagagcactctagcgagactgccgttgacaaaacggaggaaggtggggacgacgtcaaatcatcatgccccttatgtcctgggccacacacgtactacaatggtggttaacagagggaagcaataccgcgaggtggagcaaatccctaaaagccatcccagttcggattgcaggctgaaacccgcctgtatgaagttggaatcgctagtaatcgcggatcagcatgccgcggtgaatacgttcccgggccttgtacacaccgcccgtcacaccatgagagtcgggaacacccgaagtccgtagcctaaccgcaaggagggcgcggccgaaggtgggttcgataattggggtg

SEQ ID NO: 845 - DNA, 1348 bp, Artificial Sequence
  Synthetic polymer
gattgaacgctggcggcaggcctaacacatgcaagtcgagcggtaagagagcttgctctcgacgagcggcggacgggtgagtaatgtctgggaaactgcctgatggagggggataactactggaaacggtagctaataccgcataatgtcgcaagaccaaagtggttcgtcatgccatcggatgtgcccagatgggattagctagtaggtggggtaacggctcacctaggcgacgatccctagctggtctgagaggatgaccagccacactggaactgagacacggtccagactcctacgggaggcagcagtggggaatattgcacaatgggcgcaagcctgatgcagccatgccgcgtgtatgaagaaggccttcgggttgtaaagtactttcagcggggaggaagggagtaaagtaatctttgctcttgacgttacccgcagaagaagcaccggctaactccgtgccagcagccgcggtaatacggagggtgcaagcgttaatcggaattactgggcgtaaagcgcacgcaggcggtttgttaagtcagatgtgaaatccccgggctcaacctgggaactgcatctgatactggcaagcttgagtctcgtagaggggggtagaattccaggtgtagcggtgaaatgcgtagagatctggaggaataccggtggcgaaggcggctccctggacgagactgacgctcaggtgcgaaagcgtggggagcaaacaggattagataccctggcagtccacgccgtaaacgatgtcgacttggaggttgtgcccttgaggtgtgacttccggagctaacgcgttaagtcgaccgcctggggagtacggccgcaaggttaaaactcaaatgaattgacgggggcccgcacaagcggtggagcatgtggtttaattcgatgcaacgcgaagaaccttacctggtcttgacatccacggaagttttcagagatgagaatgtgccttcgggaaccgtgagacaggtgctgcatggctgtcgtcagctcgtgttgtgaaatgttgggttaagtcccgcaacgagcgcaacccttatcctttgttgccagcggtccggccgggaactcaaaggagactgccagtgataaactggaggaaggtggggatgacgtcaagtcatcatggcccttacgaccagggctacacacgtgctacaatggcgcatacaaagagaagcgacctcgcgagagcaagcggacctcataaagtgcgtcgtagtccggattggagtctgcaactcgactccatgaagtcggaatcgctagtaatcgtggatcagaatgccacggtgaatacgttcccgggccttgtacacac

SEQ ID NO: 846 - DNA, 1475 bp, Artificial Sequence
  Synthetic polymer
agagtttgatcctggctcaggacgaacgctggcggcacgcttaacacatgcaagtcgaacggagaacttttggtttactgagagttcttagtggcggacgggtgagtaacacgtgagcaacctgcctctgagagagggatagcttctggaaacggatggtaatacctcatgacataactgaagggcatcctttggttatcaaagattcatcactcagagatgggctcgcgtctgattaggtagatggtgaggtaacggcccaccatgccgacgatcagtagccggactgagaggttgaacggccacattgggactgagacacggcccagactcctacgggaggcagcagtggggaatattgcacaatgggggaaaccctgatgcagcgatgccgcgtggaggaagaaggttttcggattgtaaactcctgtcttaaaggacgataatgacggtactttaggaggaagctccggctaactacgtgccagcagccgcggtaatacgtagggagcgagcgttgtccggaattactgggtgtaaagggagcgtaggcgggatggcaagtcaggtgtgaaaactatgggctcaacccatagactgcacttgaaactgttgttcttgagtgaagtagaggtaagcggaattcctagtgtagcggtgaaatgcgtagatattaggaggaacaccggcggcgaaggcggcttactggacagtaactgacgttgaggctcgaaagcgtggggagcaaacaggattagataccctggtagtccacgccgtaaacgatgaataccaggtgttggcgcccacagggcgtcagtgccgccgcaaacgcaataagtattccacctggggagtacgttcgcaagaatgaaactcaaaggaattgacggggacccgcacaagcggtggagcatgtggtttaattcgaagcaacgcgaagaaccttaccaaatcttgacatcccggtgaccgtcctttaacagggacctcccttcggggcaccggagacaggtggtgcatggttgtcgtcagctcgtgtcgtgagatgttgggtcaagtcccgcaacgagcgcaacccttgtcctcagtagccagcggtacggccgggcactctggggagaccgccagggacaacctggaggaagatggggatgacgtcaaatcatcatgccccttatgatttgggctacacacgtgctacaatggcgcctgacaaagtgaagcgaacccgcgagggcaggcaaatcacaaaaacggcgtcccagttcggactgaaggctgcaacccgccttcacgaagctggaatcgctagtaatcgcggatcagaatgccgcggtgaatacgttcccgggtcttgtacacaccgcccgtcacaccatgggagtctgcaacacccgaagtcagtgacctaaccgcaagggaggagctgccgaaggtggggccgataactggggtgaagtcgtaacaaggta

SEQ ID NO: 847 - DNA, 1362 bp, Artificial Sequence
  Synthetic polymer
gacgaacgctggcggcgtgcttaacacatgcaagtcgaacggagtgctcatgacagaggtttcggccaatggattgagttacttagtggcggactggtgagtaacgcgtgaggaacctgcctttcagagggggacaacagctggaaacggctgctaataccgcatgacgcatcgatggggcatcccgttgatgtcaaagattttatcgctgaaagatggcctcgcgtctgattagctagttggtgaggtaacggcccaccaaggcgacgatcagtagccggactgagaggttgaccggccacattgggactgagatacggcccagactcctacgggaggcagcagtggggaatattgggcaatggacgcaagtctgacccagcaacgccgcgtgaaggaagaaggctttcgggttgtaaacttcttttgtcagggaacagtagaagagggtacctgacgaataagccacggctaactacgtgccagcagccgcggtaatacgtaggtggcaagcgttgtccggatttactgggtgtaaagggcgtgtagccggagagacaagtcagatgtgaaatccgcgggcccaacccgcgaactgcatttgaaactgtttcccttgagtatcggagaggtaaccggaattcctagtgtagcggtgaaatgcgtagatattaggaagaacaccagtggcgaaggcgggttactggacgacaactgacggtgaggcgcgaaagcgtggggagcaaacaggattagataccctggtagtccacgctgtaaaacgatcaatactaggtgtgcgggggactgaccccccgcgtgccgcagctaacacaataagtattgcactggggagtacgatcgcaaagttgaaactcaaaggaattgacggagagccgcacaagcggtggagcatgtggtttaattcgaagcaacgcgaagaaccttaccaagtcttgacatcccactgaaaacactttaaccggtgtccctcttcggagcagtggagacaggtggtgcatggttgtcgtcagctcgtgtcgtgagatgttgggttaagtcccgcaacgagcgcaacccttatccttagtagccagcaagtaaagttgggcactctggggagactgccagggataacctggaggaaggtggggaggacgtcaaatcatcatgccccctatgatttgggctacacacgtgctacaatggcgtaaacaaagggaagcaaaggagcgatccggagcaaaccccaaaaataacgtctcagttcggattgcaggctgcaactcgcctgcatgaagctggaatcgctagtaatcgcgaatcagaatgtcgcggtgaataagttcccgggtcttgcac

SEQ ID NO: 848 - DNA, 1390 bp, Artificial Sequence
  Synthetic polymer
agagtttgatcctggctcaggatgaacgctagcggcaggcttaacacatgcaagtcgaggggcatcgaggagtagcaatactctgtcggcgaccggcggacgggtgcgtaacgcgtatgcaacctaccctttacagggggataacactgagaaattggtactaataccccataatattccgagaggcatctcttggggttgaaagctatcgtggtaaaggatgggcatgcgttgtattagctagttggtaaggtaacggctcaccaaggcgacgatacatagggggactgagaggttaaccccccacattggtactgagacacggaccaaactcctacgggaggcagcagtgaggaatattggtcaatgggcggaagcctgaaccagccatgccgcgtgcaggaagacggctctatgagttgtaaactgcttttgtacgagggtaaacgcagatacgtgtatctgcctgaaagtatcgtacgaataaggatcggctaactccgtgccagcagccgcggtaatacggaggatccaagcgttatccggatttattgggtttaaagggtgcgtaggcggtttagtaagtcagcggtgaaattttggtgcttaacaccaaacgtgccgttgatactgctgagctagagagtagttgcggtaggcggaatgtatggtgtagcggtgaaatgcttagagatcatacagaacaccgattgcgaaggcagcttaccaaactatatctgacgttgaggcacgaaagcgtggggagcaaacaggattagataccctggtagtccacgcagtaaacgatgatagctcgttgtcggcgatacacagtcggtgactaagagaaatcgataagctatccacctggggagtacgttcgcaagaatgaaactcaaaggaattgacgggggcccgcacaagcggaggaacatgtggtttaattcgatgatacgcgaggaaccttacccgggcttgaaagttactgacgattctggaaacaggatttcccttcggggcaggaaactaggtgctgcatggttgtcgtcagctcgtgccgtgaggtgtcgggttaagtcccataacgagcgcaacccctactgatagttgccatcaggttaagctgggcactctatcgggactgccggtgtaagccgagaggaaggtggggatgacgtcaaatcagcacggcccttacgtccggggcgacacacgtgttacaatggtaggtacagagggcagccacccagtgatggggagcgaatctcgaaagcctatctcagttcggattggaggctgaaactcgcctccatgaagttggattcgctagtaatcgcgcatcagccatggcgcggtgaatacgttcccgggccttgtacacaccgcccgt

SEQ ID NO: 849 - DNA, 1378 bp, Artificial Sequence
  Synthetic polymer
agagtttgattctggctcaggatgaacgctggcggcgtgcctaacacatgcaagtcgaacgaagtgcttttgatgaagctttggcggatttaaaagtatcttagtggcggacgggtgagtaacgcgtgggtaacctgccttatacagggggataacagtcagaaatgactgctaataccgcataagcgcacagagctgcatggctcagtgtgaaaagccgagacggtataagatggacccgcgtctgattagctggttggtaaggtaacggcttaccaaggcgacgatcagtagccggcctgagagggtgaccggccacattgggactgagacacggcccaaactcctacgggaggcagcagtggggaatattgcacaatgggcgaaagcctgatgcagcaacgccgcgtgaaggatgaagtatttcggtatgtaaacttctatcagcagggaagataacgacggtacctgactaagaagccccggctaactacgtgccagcagccgcggtaatacgtagggggcaagcgttatccggatttactgggtgtaaagggagcgcaggcggcagcgcaagtcagaagtgaaagcccggggcttaactccgggactgcttttgaaactgtgcggctagatttcaggagaggtaagcggaattcctagtgtagcggtgaaatgcgtagatattaggaggaacaccagtggcgaaggcggcttactggactgataatgacgctgaggctcgaaagcgtggggagcaaacaggattagataccctggtagtccacgccgtaaacgatgaatactaggtgtcggggtccaaaaggacttcggtgccgcagcaaacgcaataagtattccacctggggagtacgttcgcaagaatgaaactcaaaggaattgacggggacccgcacaagcggtggagcatgtggtttaatttgaagcaacgcgaagaaccttaccaagtcttgacatccctctgacctgtgagtaacgtcacccttccttcgggacagaggagacaggtggtgcatggttgtcgtcagctcgtgtcgtgagatgttgggttaagtcccgcaacgagcgcaacccctattgtcagtagccagcaggtgaagctgggcactctgatgagactgccggggataacccggaggaaggcggggaggacgtcaaatcatcatgccccttatgatttgggttacacacgtgctacaatggtggtaacaaagtgaagcgagccagtgatggggagccaagcacagaaaagccatcccagttcggattggagtgtgcaactcgactacatgaagctggaatcgctagtaatcgcgaatcagaatgtcgcggtgaaaaagttcccgggtcttgcaca

SEQ ID NO: 850 - DNA, 1496 bp, Artificial Sequence
  Synthetic polymer
agagtttgatcatggctcaggatgaacgctggcggcgtgcttaacacatgcaagtcgaacggagcacccaagaaggagttttcggacaacagactggaatgcttagtggcggacgggtgagtaacgcgtgaggaacctgcctcggagtggggaataacacagtgaaaattgtgctaataccgcatgatgcagttatatcgcatggtattgactgccaaagatttatcgctctgagatggcctcgcgtctgattagcttgttggcggggtaacggcccaccaaggcgacgatcagtagccggactgagaggttgaccggccacattgggactgagacacggcccagactcctacgggaggcagcagtggggaatattgggcaatgggcgcaagcctgacccagcaacgccgcgtgaaggaagaaggctttcgggttgtaaacttcttttaagagggacgaaacaaatgacggtacctcttgaataagccacggctaactacgtgccagcagccgcggtaatacgtaggtggcgagcgttatccggatttactgggtgtaaagggcgtgtaggcgggactgcaagtcaggcgtgaaaaccaagggctcaacccttggcctgcgtttgaaactgtagttcttgagtgatggagaggcaggcggaattccgtgtgtagcggtgaaatgcgtagatatacggaggaacaccagtggcgaaggcggcctgctggacattaactgacgctgaggcgcgaaagcgtggggagcaaacaggattagataccctgstagtccacgctgtaaacgatggatactaggtgtggggggtctgaccccctccgtgccggagttaacacaataagtatcccacctggggagtacgatcgcaaggttgaaactcaaaggaattgacgggggcccgcacaagcggtggagtatgtggtttaattcgaagcaacgcgaagaaccttaccagggcttgacatcctgctaacgaagtagagatacattaggtgcccttcggggaaagcagagacaggtggtgcatggttgtcgtcagctcgtgtcgtgagatgttgggttaagtcccgcagcgagcgcgacccttatcgctagttgctacgcaagagcactctagcgagactgccgttgacaaaacggaggaaggtggggacgacgtcaaatcatcatgccccttatgtcctgggctacacacgtactacaatggcggcgaacagagggaagcaatatcgcgagatggagcaaatccctaaaagccgtcccagttcggattgcaggctgaaacccgcctgtatgaagttggaatcgctagtaatcgcggatcagcatgccgcggtgaatacgttcccgggccttgtacacaccgcccgtcacaccatgagagtcgggaacacccgaagtccgtagcttaacagcaatgagggcgcggccgaaggtgggttcgataattggggtgaagtcgtaacaaggtagccgta

SEQ ID NO: 851 - DNA, 1498 bp, Artificial Sequence
  Synthetic polymer
agagtttgatcatggctcaggatgaacgctggcggcgtgcttaacacatgcaagtcgaacggagaacccctgaacgagttttcggacaagtgatgggaattcttagtggcggacgggtgagtaacgcgtgaggaacctgccttggagaggggaataacacagagaaatttgtgctaataccgcatgaagcagttatatcgcatggtattgactgccaaagatttatcgctctgagatggcctcgcgtctgattagcttgttggcggggtaacggcccaccaaggcgacgatcagtagccggactgagaggttggccggccacattgggactgagacacggcccagactcctacgggaggcagcagtggggaatattgggcaatgggcgcaagcctgacccagcaacgccgcgtgaaggaagaaggctttcgggttgtaaacttcttttatgtaggacgaaacaaatgacggtactacatgaataagctccggctaactacgtgccagcagccgcggtaatacgtagggagcaagcgttatccggatttactgggtgtaaagggcgtgtaggcgggaaagcaagtcagatgtgaaaactatgggctcaacccatagcctgcatttgaaactgtttttcttgagtactggagaggcaggcggaattccgtgtgtagcggtgaaatgcgtagatatacggaggaacaccagtggcgaaggcggcctgctggacagcaactgacgctaaggcgcgaaagcgtggggagcaaacaggattagataccctggtagtccacgctgtaaacgatcgatactaggtgtggggggactgaccccctccgtgccgcagcaaacgcaataagtatcgcacctggggagtacgatcgcaaggttgaaactcaaaggaattaacgggggcccgcacaagcggtggagtatgtggtttaattcgaagcaacgcgaagaaccttaccagggcttgacatcccgctaacgagatagagatatgttaggtgcccttcggggaaagcggagacaggtggtgcgtggttgtcgtcagctcgtgtcgtgagatgttgggttaagtcccgcaacgagcgcaacccctctcgctagttgctacgcaagagcactctagcgagactgccgttgacaaaacggaggaaggtggggacgacgtcaaatcatcatgccccttatgtcctgggccacacacgtactacaatggcggtcaacagagggaagcaaaaccgtgaggtggagcaaacccctaaaagccgtcccagttcggattgcaggctgcaacccgcctgtatgaagttggaatcgctagtaatcgcggatcagcatgccgcggtgaatacgttcccgggccttgtacacaccgcccgtcacaccatgagagtcgggaacacccgaagtccgtagcctaactttcacgagggggcgcggccgaaggtgggttcgataattggggtgaagtcgtaacaaggtaaccgta

SEQ ID NO: 852 - DNA, 1350 bp, Artificial Sequence
  Synthetic polymer
gacgaacgctggcggcgcgcctaacacatgcaagtcgaacggagttgtgttgaaagcttgctggatatacaacttagtggcggacgggtgagtaacacgtgagtaacctgcctctcagagtggaataacgtttggaaacgaacgctaataccgcataacgtgagaagagggcatcctctttttaccaaagatttatcgctgagagatgggctcgcggccgattaggtagttggtgagataacagcccaccaagccgacgatcggtagccggactgagaggttgatcggccacattgggactgagacacggcccagactcctacgggaggcagcagtgggggatattgcacaatgggggaaaccctgatgcagcgacgccgcgtgagggaagacggttttcggattgtaaacctctgtctttagggacgaaaaaatgacggtacctaaggaggaagccacggctaactacgtgccagcagccgcggtaacacgtaggtggcaagcgttgtccggaattactgggtgtaaagggagcgtaggcggggagacaagttgaatgtctaaactatcggcttaactgatagtcgcgttcaaaactatcactcttgagtgcagtagaggtaggcggaattcctagtgtagcggtgaaatgcgtagatattaggaggaacaccagtggcgaaggcggcctactgggctgtaactgacgctgaggctcgaaagcgtgggtagcaaacaggattagataccctggtagtccacgccgtaaacgatggattactaggtgtggggaggcaaagcttttcggtgccgcagcaaacgcaataagcagtccacctggggagtacgttcgcaagaatgaaactcaaaggaatagacggggacccgcacaagcggtggagcatgtggtttaattcgaagcaacgcgaagaaccttacctgcccttgacatccggctgaccggcgagtaatgtcgcctttccttcgggacagccgagacaggtggtgcatggttgtcgtcagctcgtgtcgtgagatgttgggttaagtcccgcaacgagcgcaacccttatctttagtagccagcatttcggatgggcactctagagagactgccaaggataacctggaggaaggtggggaggacgtcaaatcatcatgccccttatgggcagggctacacacgtgctacaatggcgtaaacaaagggaggcagacctgcgagggtgagcaaatcccaaaaataacgtctcagttcggattgtagtctgcaactcgactacatgaagctggaatcgctagtaatcgcgaatcagaatgtcgcggtgaaaaagttcccgggtcttgcac

SEQ ID NO: 853 - DNA, 1381 bp, Artificial Sequence
  Synthetic polymer
ttagagtttgatcctggctcaagacgaactcttgcggcgtgcttaacacatgcaagtcgaacggagcacccttgactgaggtttcggccaaatgataggaatgcttagtggcggactggtgagtaacgcgtgaggaacctgccttccagagggggacaacagttggaaacgactgctaataccgcatgacgcatgaccggggcatcccgggcatgtcaaatattttatcgctggaagatggcctcgcgtctgattaactagatggtggggtaacggcccaccatggcgacgatcagtagccggactgagaggttgaccggccacattgggactgagatacggcccagactcctacgggaggcagcagtggggaatattgggcaatggacgcaagtctgacccagcaacgccgcgtgaaggaagaaggctttcgggttgtaaacttcttttgtcagggaagagtagaagacggtacctgacgaataagccacggctaactacgtgccagcagccgcggtaatacgtaggtggcaagcgttgtccggatttactgggtgtaaagggcgtgcagccgggccggcaagtcagatgtgaaatctggaggcttaacctccaaactgcatttgaaactgtaggtcttgagtaccggagaggttatcggaattccttgtgtagcggtgaaatgcgtagatataaggaagaacaccagtggcgaaggcggataactggacggcaactgacggtgaggcgcgaaagcgtggggagcaaacaaaattagataccctggtagtccacgctgtaaaacgaaggatactaggtgtgcggggactgaccccctgcggcccgcagtaaacacaataagtatcccacttggggagtacgatcgcaaggttgaaactcaaaggaattgacgggggcccgcacaagcggtggattatgtggtttaattcgaagcaacgcgaagaaccttaccagggcttgacatcctactaacgaagtagagatacatcaggtgcccttcggggaaagtagagacaggtggtgcatggttgtcgtcagctcgtgtcgtgagatgttgggttaagtcccgcaacgagcgcaacccctattgttagttgctacgcaagagcactctagcgagactgccgttgacaaaacggaggaaggtggggacgacgtcaaatcatcatgccccttatgtcctgggctacacacgtaatacaatggcggtcaacagagggaggcaaagccgcgaggcagagcaaacccccaaaagccgtcccagttcggatcgcaggctgcaacccgcctgcgtgaagtcggaatcgctagtaatcgcggatcagcatgccgcggtgaatacgttcccgggccttgcaca

SEQ ID NO: 854 - DNA, 1491 bp, Artificial Sequence
  Synthetic polymer
cgctggcggcatgcctaacacatgcaagtcgaacggagattacttcggtaatcttagtggcgaacgggtgagtaacgcgtaggcaacctgccctttagatggggacaacattccgaaagggatgctaataccgaatgtgaagcagacatcgcatgatgactgtttgaaagatggcctctacaagtaagctatcgctaaaggatgggcctgcgtctgattagctagttggtacggtaacggcgtaccaaggcgatgatcagtagccggtctgagaggatgaacggccacattgggactgagacacggcccagactcctacgggaggcagcagtggggaatcttccgcaatgggcgaaagcctgacggagcaatgccgcgtgagtgatgaaggaattcgttccgtaaagctctgttgtctatgacgaatgtgctgattgtgaataatgattagtaatgacggtagtagacgaggaagccacggctaactacgtgccagcagccgcggtaatacgtaggtggcgagcgttgtccggaattattgggcgtaaagagcatgtaggcggttttttaagtctggagtgaaaatgcggggctcaaccccgtatggctctggatactggaagacttgagtgcaggagaggaaaggggaattcccagtgtagcggtgaaatgcgtagatattgggaggaacaccagtggcgaaggcgcctttctggactgtgtctgacgctgagatgcgaaagccagggtagcgaacggaattagataccccggtagtcctggccgtaaacgatgggtactaggtgtaggaggtatcgaccccttctgtgccggagttaacgcaataagtaccccgcctggggagtacgtccgcaaggatgaaactcaaaggaattgacgggggcccgcacaagcggtggagtatgtggtttaattcgacgcaacgcgaagaaccttaccaaggcttgacattgaatgacgatcttagagataagattttcccttcggggacatgaaaacaggtggtgcatggctgtcgtcagctcgtgtcgtgagatgttgggttaagtcccgcaacgagcgcaacccctatcctatgttaccagcgagtaaagtcggggactcataggagactgccaaggacaacttggaggaaggcggggatgacgtcaagtcatcatgccccttatgccttgggctacacacgtactacaatggtcgacaacagagggaagcgaagccgcgaggcagagcaaaccccagaaactcgatctcagttcggattgcaggctgcagctcgcctgcatgaagtcggaatcgctagtaatcgcaggtcagcatactgcggtgaatacgttcccgggccttgtacacaccgcccgtcacgccacgaaagttggtaacacccgaagccggtggggtaaccgaaaggagccagccgtctaaggtggggccgatgattggggtgaagtcgtaacaaggtagccgtag

SEQ ID NO: 855 - DNA, 1357 bp, Artificial Sequence
  Synthetic polymer
ctggcggcgtgcttaacacatgcaagtcgaacgaagaactagagaggaattcttcggaaggaatttttagttacttagtggcggacgggtgagtaacgcgtgagcaacctgcccataagagggggataacagctggaaacggctgctaataccgcataagaccacattgccacatggcagaggggtcaaagatttatcgcttatggatgggctcgcgtctgattagctagttggtagggtaacggcctaccaaggcgacgatcagtagccgacctgagagggtgatcggccacactggaactgagacacggtccagactcctacgggaggcagcagtggggaatattgggcaatgggggaaaccctgacccagcaacgccgcgtgagggaagaaggctttcgagttgtaaacctctgtcctatgggaagaagaaagtgactgtaccataggaggaagctccggctaactacgtgccagcagccgcggtaatacgtagggagcaagcgttgtccggaattactgggcgtaaagggtgcgtaggcggcgcagttagtcagaagtgaaatatcggggcttaactccgggactgcttctgatactgctgtgctcgagtgcaggagaggtaagtggaattcctagtgtagcggtgaaatgcgtagatattaggaggaacaccagtggcgaaggcgacttactggactgtaactgacgctgaggcacgaaagcgtgggtagcaaacaggattagataccctggtagtccacgctgtaaacgatgaaattcttaggtgtgggggtcataagacttttgttccgggagcaaacgcaaataagtattcccgcctggggagtacggccgcaaggctgaaactcaaaggaattgacgggggcccgcacaagcagcggagcatgtggtttaattcgaagcaacgcgaagaaccttaccaaggcttgacatcccgatgaccggcgtagagatacgccttctcttcggagcatcggtgacaggtggtgcatggttgtcgtcagctcgtgtcgtgagatgttgggttaagtcccgcaacgagcgcaacccctattgttagttgccagcatttcggatgggaactctaatgagactgccggggataactcggaggaaggtggggacgacgtcaaatcatcatgccctttatgtcttgggctacacacgtgctacaatggtcggtacaaagagcagcgaactcgtaagagtaagcgaatctcaaaaagccggtctcagttcggattgtgggctgcaacccgcccacatgaagtcggagttgctagtaatcgcggatcagcatgccgcggtgaatgcgttcccgggccttgcaca

SEQ ID NO: 856 - DNA, 1496 bp, Artificial Sequence
  Synthetic polymer
agagtttgatcatggctcaggatgaacgctggcggcgtgcttaacacatgcaagtcgaacggggtacccttgacggagttttcggacaacagataggactacctagtggcggacgggtgagtaacgcgtgaggaacctgccttggagaggggaataacacagagaaatttgtgctaataccgcatgaagcagttgggtcgcatggctcagactgccaaagatttatcgctctgagatggcctcgcgtctgattaggtagttggcggggtaacggcccaccaagccgacgatcagtagccggactgagaggttggccggccacattgggactgagacacggcccagactcctacgggaggcagcagtggggaatattgggcaatgggcgcaagcctgacccagcaacgccgcgtgaaggaagaaggctttcgggttgtaaacttcttttatgagggacgaaggaagtgacggtacctcatgaataagctccggctaactacgtgccagcagccgcggtaatacgtagggagcaagcgttatccggatttactgggtgtaaagggcgtgtaggcgggaaagcaagtcagatgtgaaaaccaggggctcaacctctggcctgcatttgaaactgtttttcttgagtgatggagaggcaggcggaattccgtgtgtagcggtgaaatgcgtagatatacggaggaacaccagtggcgaaggcggcstgctggacattaactgacgctgaggcgcgaaagcgtggggagcaaacaggattagataccctggtagtccacgctgtaaacgatcgatactaggtgtggggggactgaccccttccgtgccgcagctaacgcaataagtatcgcacctggggagtacgatcgcaaggttgaaactcaaaggaattgacgggggcccgcacaagcggtggagtatgtggtttaattcgaagcaacgcgaagaaccttaccagggcttgacatcctgctaacgagatagagatatgttaggtgcccttcggggaaagcagagacaggtggtgcatggttgtcgtcagctcgtgtcgtgagatgttgggttaagtcccgcaacgagcgcaacccttgctattagttgctacgcaagagcactctaataggactgccgttgacaaaacggaggaaggtggggacgacgtcaaatcatcatgccccttatgacctgggctacacacgtactacaatggccgtaaacagagggacgcaatacagcgatgtggagcaaacccctaaaagcggtctcagttcagattgcaggctgcaacccgcctgcatgaagtcggaattgctagtaatcgcggatcagcatgccgcggtgaatacgttcccgggccttgtacacaccgcccgtcacaccatgggagccggtaatacccgaagtcagtagttcaaccgcaaggagagcgctgccgaaggtaggattggcgactggggtgaagtcgtaacaaggtaaccgta

SEQ ID NO: 857 - DNA, 1474 bp, Artificial Sequence
  Synthetic polymer
agttcgatcctggctcaggatgaacgctggcggcgtgcctaacacatgcaagtcgagcgagaaactcatgacagaagcttcggttgaagtcatgggtggaaagcggcggacgggtgagtaacgcgtaggcaacctgccctttgcagagggatagcctcgggaaaccgggattaaaacctcatgatgccgtgtgaagacatcttcatatggtcaaagatttatcggcaaaggatgggcctgcgtctgattagctggttggtggggtaacggcttaccaaggcgacgatcagtagccgacctgagagggtgatcggccacattggaactgagacacggtccaaactcctacgggaggcagcagtggggaatattgcacaatgggggaaaccctgatgcagcaacgccgcgtgaaggaagaaggcctttgggtcgtaaacttctgttctgagggaagaaagtgacggtacctcaggagcaagtcccggctaactacgtgccagcagccgcggtaatacgtagggggcaagcgttatccggaattattgggcgtaaagagtacgtaggtggttacctaagcacggggtataaggcaatggctcaaccattgtttgccttgtgaactgggctacttgagtgcaggagaggaaagcggaattcctagtgtagcggtgaaatgcgtagatattaggaggaacaccagtggcgaaggcggctttctggactgtaactgacactgaggtacgaaagcgtggggagcaaacaggattagataccctggtagtccacgccgtaaacgatgagcactaggtgtcggggtcgtaagacttcggtgccgcagttaacgcaataagtgctccgcctggggagtacgttcgcaagaatgaaactcaaaggaattgacggggacccgcacaagcagcggagcatgtggtttaattcgaagcaacgcgaagaaccttaccagggcttgacatccctctgacatacctgtaatggggtatttctacggacagaggagacaggtggtgcatggttgtcgtcagctcgtgtcgtgagatgttgggttaagtcccgcaacgagcgcaacccttgtcattagttgccagcagtaagatgggcactctaatgagactgccggggacaactcggaggaaggtggggatgacgtcaaatcatcatgccccttatgttctgggctacacacgtgctacaatggtcggtacagagaggaagcgaactcgtgagggggagcgaatctataaaaccgatcccagttcggattgcaggctgcaactcgcctgcatgaagtcggagttgctagtaatcgcagatcagaatgctgcggtgaatgcgttcccgggtcttgtacacaccgcccgtcacaccatggaagttgggggcgcccgaagttggcagagaaatatgttacctaaggcgaaatcaatgactggggtgaagtcgtaacaaggtaccc

SEQ ID NO: 858 - DNA, 1455 bp, Artificial Sequence
  Synthetic polymer
gatgaacgctggcggcgtgcctaacacatgcaagccgaacgaagcgccttgagagattcttcggatgatcttatggtgactgagtggcggacgggtgagtaacgcgtgggtaacctgccctgtacagggggacaacagctagaaatggctgctaataccgcataagcgcacaggaagacatcttccagtgtgaaaaactccggtggtacaggatgggcccgcgtctgattagcttgttggcggggtaacagcccaccaaggcgacgatcagtagccggtctgagaggatgaacggccacattggaactgagacacggtccaaactcctacgggaggcagcagtggggaatattgcacaatggggggaaccctgatgcagcaacgccgcgtgagtgaagaagtatttcggtatgtaaagctctatcagcagggaagataatgacggtacctgactaagaagctccggctaaatacgtgccagcagccgcggtaatacgtatggagcaagcgttatccggatttactgggtgtaaagggtgcgtaggcggcgcggcaagtcagatgtgaaagaccggggctcaaccccggggctgcatttgaaactgcggtgctcgagtccaggagaggcaggcggaattcctagtgtagcggtgaaatgcgtagatattaggaggaacaccagtggcgaaggcggcctgctggactggtactgacgctgaggcacgaaagcgtggggagcaaacaggattagataccctggtagtccacgccgtaaacgatgaatactaggtgtcggggccgtaaaggtctcggtgctgcagctaacgcagtaagtattccacctggggagtacgttcgcaagaatgaaactcaaaggaattgacggggacccgcacaagcggtggagcatgtggtttaattcgaagcaacgcgaagaaccttaccaggtcttgacatccttctgaccgttctttaaccggaactttccttcgggacagaagagacaggtggtgcatggttgtcgtcagctcgtgtcgtgagatgttgggttaagtcccgcaacgagcgcaacccttattcttagttgccagcacgtaaaggtgggcactctaaggagactgtcggtgacaaaccggaggaaggtggggatgacgtcaaatcatcatgccctttatgccctgggctacacacgtgctacaatggcctgcacaacgggtttgcgaagtcgtgaggcggagctaatcccttaaaacaggtctcagttcggattgcaggctgcaactcgcctgcatgaagccggaatcgctagtaatcgcgaatcagcacgtcgcggtgaatacgttcccgggccttgtacacaccgcccgtcacaccacgaaagctggcaacacccgaagccggtggcttaacctgtaaaggagagagccgtctaaggtggggctggtgattggggtg

SEQ ID NO: 859 - DNA, 1499 bp, Artificial Sequence
  Synthetic polymer
agagtttgatcatggctcaggatgaacgctggcgacgtgcttaacacatgcaagtcgaacggagtgtacttttattgaggattcgtctgatttagctgtacacttagtggcggacgggtgagtaacgcgtgggtaacctgcctcatacagggggatagcagctggaaacggctgataaaaccgcataagcgcacactatcgcatgatagagtgtgaaaaactccggtggtatgagatggacccgcgtctgattagcttgttggtgaggtaacggcccaccaaggcgacgatcagtagccggcctgagagggtgaacggccacattgggactgagacacggcccaaactcctacgggaggcagcagtggggaatattgcacaatgggggaaaccctgatgcagcgacgccgcgtgaaggacgacgtatttcggtatgtaaacttctatcagcagggaagaataagtgacggtacctgactaagaagccccggctaactacgtgccagcagccgcggtaatacgtagggggcaagcgttatccggatttactgggtgtaaagggagcgtaggcggcgcgtcaagtcagaagtgaaagcccggggctcaactccgggactgctattgaaactgtcgtgcttgatttcaggagaggtaagcggaattcctagtgtagcggtgaaatgcgtagatattaggaggaacaccagtggcgaaggcggcttactggactgacaatgacgctgaggctcgaaagcgtggggagcaaacaggattagataccctggtagtccacgccgtaaacgatgaatactaggtgttggggggcataagctcttcggtgccggcgcaaatgcattaagtattccacctggggagtacgttcgcaagaatgaaactcaaaggaattgacggggacccgcacaagcggtggagcatgtggtttaattcgaagcaacgcgaagaaccttaccaggccttgacatctctctgaccggtcagtaatgtgacctttccttcgggacagagatgacgggtggtgcatggttgtcgtcagctcgtgtcgtgagatgttgggttaagtcccgcaacgagcgcaacccctatattcagtagccagcaattcggatgggcactctggatagactgccggggacaacccggaggaaggcggggatgacgtcaaatcatcatgccccttacggcctgggctacacacgtgctacaatggcgtaaacaaagggaagcgaaagggtgacctggagcgaatctcaaaaataacgtctcagttcggactgtagtctgcaactcgactacacgaagctggaatcgctagtaatcgcgaatcagcatgtcgcggtgaatacgttcccgggtcttgtacacaccgcccgtcacaccatgggagttggaaatgcccgaagtcagtgacccaaccgtaaggagggagctgccgaaggtggagccgatgactggggtgaagtcgtaacaaggtagccgta

SEQ ID NO: 860 - DNA, 1509 bp, Artificial Sequence
  Synthetic polymer
agagtttgatcctggctcaggacgaacgctggcggcgtgcctaacacatgcaagtcgaacggagtagttgggagcttgcttctgactgcttagtggcggacgggtgagtaacgcgtgagtaacctgcctttcagagggggataacgttttgaaaagaacgctaataccgcatgacatcgcgaagccgcatggttttgtgatcaaaggagcaatccgctgaaagatggactcgcgtccgattagccagttggcggggtaacggcccaccaaagcaacgatcggtagccggactgagaggttgaacggccacattgggactgagacacggcccagactcctacgggaggcagcagtgggggatattgcacaatgggggaaaccctgatgcagcaacgccgcgtgaaggaagaaggtcttcggattgtaaacttttgtccttggtgaagataatgacggtagccaaggaggaagctccggctaactacgtgccagcagccgcggtaatacgtagggagcgagcgttgtccggatttactgggtgtaaagggtgcgtaggcggaagagcaagtcagtagtgaaatccatgggcttaacccgtgaactgctattgaaactgttcttcttgagtgaagtagaggtaggcggaattcccggtgtagcggtgaaatgcgtagagatcgggaggaacaccagtggcgaaggcggcctactgggctttaactgacgctgaggcacgaaagcatgggtagcaaacaggattagataccctggtagtccatgccgtaaacgatgattactaggtgtggggggactgaccccttccgtgccgcagttaacacaataagtaatccacctggggagtacggccgcaaggttgaaactcaaaggaattgacgggggcccgcacaagcagtggagtatgtggtttaattcgaagcaacgcgaagaaccttaccaggtcttgacatccaactaacgaagtagagatacatcaggtgcccttcggggaaagttgagacaggtggtgcatggttgtcgtcagctcgtgtcgtgagatgttgggttaagtcccacaacgagcgcaacccttgtgattagttgctacgcaagagcactctaatcagactgccgttgacaaaacggaggaaggtggggacgacgtcaaatcatcatgccctttatgacctgggctacacacgtactacaatggccatcaacagagggaagcaagaccgcgaggtggagcaaaaccctaaaaatggtcccagttcggattgcaggctgcaacccgcctgcatgaagttggaattgctagtaatcgcggatcagcatgccgcggtgaatacgttcccgggccttgtacacaccgcccgtcacaccatgggagccggtaatacccgaagtcagtagtttaaccgcaaggaggacgctgccgaaggtaggattggcgactggggtgaagtcgtaacaaggtagccgtatcggaaggtgcggctggatcacctcctt

SEQ ID NO: 861 - DNA, 1385 bp, Artificial Sequence
  Synthetic polymer
catgcaagtcgagcgagatgaatcccttcggggaggactctagcggcggacgggtgagtaacacgtgggcaacctgcctcatagtgggggatagcctcccgaaagggagattaataccgcatatactctcgatgctacatggcatttagaggaaaggagcaatccgctatgagatgggcccgcggcgcattagctagttggtgaggtaacggctcaccaaggcgacgatgcgtagccgacctgagagggtgatcggccacattggaactgagacacggtccagactcctacgggaggcagcagtggggaatattgcgcaatgggggaaaccctgacgcagcaacgccgcgtgagtgatgaaggtcttcggattgtaaagctctgtcttctgggacgatgatgacggtaccagaggaggaagccacggctaactacgtgccagcagccgcggtaatacgtaggtggcaagcgttgtccggatttactgggcgtaaagggtgcgtaggcggatttttaagtgggatgtgaaatacccgggctcaacttgggtgctgcattccaaactggaaatctagagtgcaggagaggagaatggaattcctagtgtagcggtgaaatgcgtagagattaggaagaacaccagtggcgaaggcgattctctggactgtaactgacgctgaggcacgaaagcgtgggtagcaaacaggattagataccctggtagtccacgccgtaaacgatgaatactaggtgtaggaggtatcgactccttctgtgccgcagttaacacaataagtattccgcctggggagtacgatcgcaagattaaaactcaaaggaattgacgggggcccgcacaagcagcggagcatgtggtttaattcgaagcaacgcgaagaaccttacctggacttgacataccctgcatagcgcagagatgcgtgaagtcccttcggggacagggatacaggtggtgcatggttgtcgtcagctcgtgccgtgagatgttaggttaagtcctgcaacgagcgcaacccctattgtcagttgccatcattaagttgggcactctgacgagactgcccgggttaaccgggaggaaggcggggatgacgtcaaatcatcatgccccttatgtccagggctacacacgtgctacaatggtgagtacaacgagatgcaagaccgcgaggtggagccaaactcataaaactcatcccagttcggattgcaggctgcaactcgcctgcatgaagctggagttgctagtaatcgcgaatcagaatgtcgcggtgaatacgttcccgggccttgtacacaccgcccgtcacaccatgagagctggcaacacccgaagtccgtgaggtaaccgttaaggagccagc

SEQ ID NO: 862 - DNA, 1510 bp, Artificial Sequence
  Synthetic polymer
agagtttgatcatggctcaggacgaacgctggcggcgtgcttaatacatgcaagtcgaacggaggcagagacttcggtttctgtcttagtggcgaacgggtgagtaacgcgtgaataacctgactcaaagagggggataacaatcggaaacgattgctaataccgcataagaccacaacaccgcatgatgaaggggtcaaagagatatcgctttgagaggggttcgcgtcccattaggtagttggaggggtaacggcccaccaagccaacgatgggtagccgagctgagaggctgatcggccacactggaactgagacacggtccagactcctacgggaggcagcagtagggaatattgggcaatgggcgcaagcctgacccagcaacgccgcgtgagggaagaaggttttcggattgtaaacctctgtcctatgtgacgaaggaagtgacggtagcataggaggaagccccggctaactacgtgccagcagccgcggtaatacgtagggggcgagcgttgtccggaattactgggcgtaaagggtgcgtaggcggtttggtaagttggatgtgaaatacccgggcttaacttgggggctgcatccaatactgctgaacttgagtgcaggagaggaaagcggaattcctagtgtagcggtgaaatgcgtagatattaggaggaacaccggtggcgaaggcggctttctggactgtaactgacgctgaggcacgaaagcgtggggagcaaacaggattagataccctggtagtccacgctgtaaacgatgaatactaggtgtagggggtatagactccctctgtgccgcagctaacgcaataagtattccgcctggggagtacggccgcaaggttgaaactcaaaggaattgacgggggcccgcacaagcagcggagcatgtggtttaattcgacgcaacgcgaaaaaccttaccaagacttgacatcctactaaactcatggaaacatgaggtgacttcggtcgagtagagacaggtggtgcatggttgtcgtcagctcgtgtcgtgagatgttgggttaagtcccgcaacgagcgcaacccctgttgccagttaccagcgagtaaagtcggggactctggtgagactgccgtggagaacacggaggaaggtggggacgacgtcaaatcatcatgccccttacgtcttgggctacacacgtgctacaatggctgtaacaaagggaagcgacatcgtaagatgaagcagatctcataaaggcagtcccagttcggattgtgggctgcaacccgcccacatgaagtcggagttgctagtaatcgcggatcagcatgccgcggtgaatacgttcccgggccttgtacacaccgcccgtcacaccatgggagttgagagcgcccgaagccaatagtctaaccgcaaggaggacgttgtctaaggtgagatcaatgactggggtgaagtcgtaacaaggtagccgtatcggaaggtgcggctggatcacctcctt

SEQ ID NO: 863 - DNA, 1405 bp, Artificial Sequence
  Synthetic polymer
tcgccttagagttgatctggctcagattgaacgctggcggcaggcttaatacatgcaagtcgaacggtaacagcaaaaaagcttgcttttttggctgacgagtggcggacgggtgagtaatacctaggaagctgcctaaacgagggggataacacctggaaacgggtgctaataccgcatgataccgcaaggtcaaaggttggtttaccaatcgcgtttagatgcgcctaggagggattagctagttggtggggtaacggctcaccaaggcgatgatcagtagccggtctgagaggatgaacggccacattgggactgagacacggcccagactcctacgggaggcagcagtggggaatcttccgcaatgggcgaaagcctgacggagcaatgccgcgtgagtgatgaagggattcgtcccgtaaagctctgttgtatatgacgaatgtgcagattgtgaataatgatttgtaatgacggtagtatacgaggaagccacggctaactacgtgccagcagccgcggtaatacgtaggtggcgagcgttgtccggaattattgggcgtaaagagcatgtaggcggttttttaagtctggagtgaaaatgcggggctcaaccccgtatggctctggatactggaagacttgagtgcaggagaggaaaggggaattcccagtgtagcggtgaaatgcgtagatattgggaggaacaccagtggcgaaggcgcctttctggactgtgtctgacgctgagatgcgaaagccagggtagcgaacgggattagataccccggtagtcctggccgtaaacgatgggtactaggtgtgggaggtatcgaccccttccgtgccggagttaacgcaataagtaccccgcctggggagtacgtccgcaaggatgaaactcaaaggaattgacgggggcccgcacaagcggtggagtatgtggtttaattcgacgcaacgcgaagaaccttaccaaggcttgacattgattgaaagacctagagataggtccctctcttcggagacaagaaaacaggtggtgcatggctgtcgtcagctcgtgtcgtgagatgttgggttaagtcccgcaacgagcgcaacccctatcctatgttaccagcgggtaatgccggggactcataggagactgccaaggacaacttggaggaaggcggggatgacgtcaagtcatcatgccccttatgtcttgggctacacacgtactacaatggtcggcaacagagggaagcaaagccgcgaggcagagcaaaccccagaaacccgatctcagttcggattgcaggctgcaactcgcctgcatgaagtcggaatcgctagtaatcgcaggtcagcatactgcggtgattactatcccgggcgttgtactcaccgcccgtca

SEQ ID NO: 864 - DNA, 1461 bp, Artificial Sequence
  Synthetic polymer
tgaacgctggcggcaggcctaacacatgcaagccgagcggataagaggagcttgctcctggattcagcggcggacgggtgagtaatgcctaggaatctgcctggtagtgggggacaacgtttcgaaaggaacgctaataccgcatacgtcctacgggagaaagcaggggaccttcgggccttgcgctatcagatgagcctaggtcggattagctagttggtgaggtaatggctcaccaaggcgacgatccgtaactggtctgagaggatgatcagtcacactggaactgagacacggtccagactcctacgggaggcagcagtggggaatattggacaatgggcgaaagcctgatccagccatgccgcgtgtgtgaagaaggtcttcggattgtaaagcactttaagttgggaggaagggttgtagattaatactctgcaattttgacgttaccgacagaataagcaccggctaactctgtgccagcagccgcggtaatacggagggtgcaagcgttaatcggaattactgggcgtaaagcgcacgcaggcggtctgtcaagtcggatgtgaaatccccgggctcaacctgggaactgcattcgaaactggcaggctagagtcttgtagaggggggtagaattccaggtgtagcggtgaaatgcgtagagatctggaggaataccggtggcgaaggcggccccctggacaaagactgacgctcaggtgcgaaagcgtggggagcaaacaggattagataccctggtagtccacgccgtaaacgatgtcgacttggaggttgcgcccttgaggcgtggcttccggagctaacgcgttaagtcgaccgcctggggagtacggccgcaaggttaaaactcaaatgaattgacgggggcccgcacaagcggtggagcatgtggtttaattcgatgcaacgcgaagaaccttacctggccttgacatccacggaatttggcagagatgccttagtgccttcgggaaccgtgagacaggtgctgcatggctgtcgtcagctcgtgttgtgaaatgttgggttaagtcccgcaacgagcgcaacccttatcctttgttgccagcacgtaatggtgggaactcaaaggagactgccggtgataaaccggaggaaggtggggatgacgtcaagtcatcatggcccttacgaccagggctacacacgtgctacaatggtttatacaaagagaagcaaatctgcaaagacaagcaaacctcataaagtaaatcgtagtccggactggagtctgcaactcgactccacgaagtcggaatcgctagtaatcgtggatcagaatgccacggtgaatacgttcccgggccttgtacacaccgcccgtcacaccatgggagtgggttgcaaaagaagcagatttcctaaccttgaaaaaggaaggcgtctaccactttgtgattcatgactggggtg

SEQ ID NO: 865 - DNA, 1343 bp, Artificial Sequence
  Synthetic polymer
  misc_feature (914)..(916): n is a, c, g, or t
ggacgaacgctggcggcgtgcctaacacatgcaagtcgaacggggatactttgatttcggttgaagtattctagtggcgaacgggtgagtaacgcgtgaacaacctgacctaaagagggggataacgtcgagaaatcggtgctaataccgcataagaccacgatgccgcatggcaatggggtcaaagatttattgctttaggaggggttcgcgtcccattaggtagatggcggggtaaaggcccaccatgccgacgatgggtagccgagctgagaggctgatcggccacactggaactgagacacggtccagactcctacgggaggcagcagtggggaatattgggcaatgggcgcaagcctgacccagcaacgccgcgtgagggaagaaggctttcgggttgtaaacctctgtcgcaagggacgaagaagtgacgctaccttgtgaggaagccccggctaactacgtgccagcagccgcggtaatacgtagggggcgagcgttgtccggaattactgggcgtaaagggagcgtaggcggtcttttaagttggatgtgaaatacccgggcttaacttggggggtgcattcaaaactgggggactagagtacaggagagggaagcggaattcctagtgtagcggtgaaatgcgtagatattaggaggaacaccagtggcgaaggcggctttctggactgacactgacgctgaggctcgaaagcgtggggagcaaacaggattagataccctggtagtccacgctgtaaacgatgaatactaggtgtagggggtatcaactccctctgtgccgcagcaaacgcaataagtattccgcctggggagtacggccgcaaggttgaaactcaaaggaattgacgggggcccgcacaagcagcggagcatgtggtttaatnnnacgcaacgcgaagaaccttaccaaggcttgacatcctactaaacccatagagatatggggtggcttcggccgagtagagacaggtggtgcatggttgtcgtcagctcgtgtcgtgagatgttgggttaagtcccgcaacgagcgcaacccctgttgccagttaccagcaagtaaagttggggactctggtgagactgccggggacaactcggaggaaggtggggacgacgtcaaatcatcatgccccttatgtcttgggctacacacgtgctacaatggctgtaacaaagggaagcgaccttgtaagaggaagcggatctcagaaaagcagtcccagttcggattgtgggctgcaacccgcccacatgaagtcggagttgctagtaatcgcggatcagcatgccgcggtgaatacgttcccgggcct

SEQ ID NO: 866 - DNA, 1393 bp, Artificial Sequence
  Synthetic polymer
acgggggtctttgctctttgccggcgagcggcggagggtgagaagtgtctgggaaactgcctgatggagggggatatcttctggaaacggtatctaataccgcataacgtcacaagaccaaagagggggaccttcggccctcttgccatcatatgtgcccagatgggattagctagtagggggggtagcggctcacctaggagactatccctaggtggtctgagaggatgaccagccactctggaactgacacacggtccagactcctacgggaggcagcagtggaaaatattgcacagtgggcgcaagcctgatgcacccgtgccgcgtgtatgaaaaaggccttcggtttgtaaagtattttccgcggagaagaaggtgttgaggttaataacctcagcatttgacgttacccgcaaaaaaagccccggctatctccgtgccagcacccgcggtaattacggagggtgcaagcgttaatcagaattactgggcgtaaagcgcacgcaggcggtctgtcaagtcggatgtgaaatcccccggggctcaaccctgggaactgcattcgaaactggcaggctagagtcttgtagaggggggtagaattccaggtgtagcggtgaaatgcgtagagatctggaggaataccggtggcgaaggcggccccctggacaaagactgacgctcaggtgcgaaagcgtggggagcaaacaggattagataccctggtagtccacgccgtaaacgatgtcgacttggaggttgtgcccttgaggcgtggcttccggagctaacgcgttaagtcgaccgcctgggagagtacggccgcaaggttaaaactcaaatgaattgacgggggcccgcacaagcggtggagcatgtggtttaattcgatgcaacgcgaagaaccttacctactcttgacatccagagaacttagcagagatggtttggtgccttcgggaactctgagacaggtgctgcatggctgtcgtcagctcgtgttgtgaaatgttgggttaagtcccgcaacgagcgcaacccttatcctttgttgccagcggtccggccgggaactcaaaggagactgccagtgataaactggaggaaggtggggatgacgtcaagtcatcatggcccttacgagtagggctacacacgtgctacaatggcgcatacaaagagaagcgacctcgcgagagcaagcggacctcataaagtgcgtcgtagtccggattggagtctgcaactcgactccatgaagtcggaatcgctagtaatcgtagatcagaatgctacggtgaatacgttcccgggccttgtacacaccgcccgtcacaccatgggagtgggttgcaaaagaagtaggtagcttaaccttcgggagggcgct

SEQ ID NO: 867 - DNA, 1421 bp, Artificial Sequence
  Synthetic polymer
  misc_feature (3)..(3): n is a, c, g, or t
acncatgcaagtcgaacggtagcacagaggagcttgctcttcgggtgacgagtggcggacgggtgagtaatgtctgggaaactgcctgatggagggggataactactggaaacggtagctaataccgcataacgtcgcaagaccaaagagggggaccttcgggcctcttgccatcagatgtgcccagatgggattagctagtaggcggggtaacggcccacctaggcgacgatccctagctggtctgagaggatgaccagccacactggaactgagacacggtccagactcctacgggaggcagcagtggggaatattgcacaatgggcgcaagcctgatgcagccatgccgcgtgtgtgaagaaggccttcgggttgtaaagcactttcagcggggaggaaggcggtacggttaataaccgtgctgattgacgttacccgcagaagaagcaccggctaactccgtgccagcagccgcggtaatacggagggtgcaagcgttaatcggaattactgggcgtaaagcgcacgcaggcggtctgtcaagtcggatgtgaaatccccgggctcaacctgggaactgcattcgaaactggcaggctggagtctcgtagagggaggtagaattccaggtgtagcggtgaaatgcgtagagatctggaggaataccggtggcgaaggcggcctcctggacgaagactgacgctcaggtgcgaaagcgtggggagcaaacaggattagataccctggtagtccacgctgtaaacgatgtcgatttgggaggttgtgcccttgaggcgtggcttccggagctaacgcgttaaatcgaccgcctggggagtacggccgcaaggttaaaactcaatgaatttgacgggggcccgcacaagcggtggagcatggtggtttaattcgatgcaacgcgaagaaccttacctggtcttgacatccacagaacttgccagagatggcttggtgccttcgggaactgtgagacaggtgctgcatggctgtcgtcagctcgtgttgtgaaatgttgggttaagtcccgcaacgagcgcaacccttatcctttgttgccagcggtccggccgggaactcaaaggagactgccagtgataaactggaggaaggtggggatgacgtcaagtcatcatggcccttacgaccagggctacacacgtgctacaatggcgcatacaaagagaagcgacctcgcgagagcaagcggacctcataaagtgcgtcgtagtccggattggagtctgcaactcgactccatgaagtcggaatcgctagtaatcgtgaatcagaatgtcacggtgaatacgttcccgggccttgtacacaccgcccgtcacaccatgggagtgggttgcaaaagaagtaggtagcttaaccttcgggagggcgcttaccac

SEQ ID NO: 868 - DNA, 1463 bp, Artificial Sequence
  Synthetic polymer
attgaacgctggcggcaggcctaacacatgcaagtcgagcggtaacaggggaagcttgcttcccgctgacgagcggcggacgggtgagtaatgtatggggatctgcccgatagagggggataactactggaaacggtggctaataccgcataatctcttaggagcaaagcaggggaccttcgggccttgcgctgtcggatgaacccatatgggattagctagtaggtggggtaatggctcacctaggcgacgatccctagctggtctgagaggatgaccagccacactggaactgagacacggtccagactcctacgggaggcagcagtggggaatattgcacaatgggcgcaagcctgatgcagccatgccgcgtgtatgaagaaggccttcgggttgtaaagtactttcagcgaggaggaaggcattaaggttaataaccttggtgattgacgttactcgcagaagaagcaccggctaactccgtgccagcagccgcggtaatacggagggtgcaagcgttaatcggaattactgggcgtaaagcgcacgcaggcggtttgttaagtcagatgtgaaatccccgggctcaacctgggaactgcatttgaaactggcaagcttgagtcttgtagaggggggtagaattccaggtgtagcggtgaaatgcgtagagatctggaggaataccggtggcgaaggcggccccctggacaaagactgacgctcaggtgcgaaagcgtggggagcaaacaggattagataccctggtagtccacgctgtaaacgatgtcgacttggaggttgttcccttgaggagtggcttccggagctaacgcgttaagtcgaccgcctggggagtacggccgcaaggttaaaactcaaatgaattgacgggggcccgcacaagcggtggagcatgtggtttaattcgatgcaacgcgaagaaccttacctactcttgacatccagagaacttagcagagatgctttggtgccttcgggaactctgagacaggtgctgcatggctgtcgtcagctcgtgttgtgaaatgttgggttaagtcccgcaacgagcgcaacccttatcctttgttgccagcggtccggccgggaactcaaaggagactgccagtgataaactggaggaaggtggggatgacgtcaagtcatcatggcccttacgagtagggctacacacgtgctacaatggcatatacaaagagaagcgacctcgcgagagcaagcggacctcataaagtatgtcgtagtccggattggagtctgcaactcgactccatgaagtcggaatcgctagtaatcgtagatcagaatgctacggtgaatacgttcccgggccttgtacacaccgcccgtcacaccatgggagtgggttgcaaaagaagtaggtagcttaaccttcgggagggcgcttaccactttgtgattcatgactggggtga

SEQ ID NO: 869 - DNA, 1358 bp, Artificial Sequence
  Synthetic polymer
ggatgaacgctggcggcgtgcctaacacatgcaagtcgagcgagaaatttgaaaatgaagcttcggtagatttttcgaatggaaagcggcggacgggtgagtaacgcgtaggcaacctgccttatgcagagggatagccattggaaacgatgattaaaacctcataataccagatgatcacatggttaactggtcaaagatttatcggcataagatgggcctgcgtctgattagctagttggtggggtaacggcctaccaaggcgacgatcagtagccgacctgagagggtgatcggccacattggaactgagacacggtccaaactcctacgggaggcagcagtggggaatattgcacaatgggcgaaagcctgatgcagcaacgccgcgtgaaggaagaaggtcttcggatcgtaaacttctgtcctatgggaagataatgacggtaccattggaggaagccccggctaactacgtgccagcagccgcggtaatacgtagggggcaagcgttatccggaattattgggcgtaaagagtgcgtaggtggtaacttaagcgcggggtttaaggcaatggctcaaccattgttcgccctgcgaactgggatacttgagtgcaggagaggaaagcggaattcctagtgtagcggtgaaatgcgtagatattaggaggaacaccagtggcgaaggcggctttctggactgaaactgacactgaggcacgaaagtgtggggagcaaacaggattagataccctggtagtccacaccgtaaacgatgagcactaggtgtcggggtcgcaagacttcggtgccgcagttaacgcattaagtgctccgcctggggagtacgtacgcaagtatgaaactcaaaggaattgacggggacccgcacaagcagcggagcatgtggtttaattcgaagcaacgcgaagaaccttaccaggacttgacatctccttgacagatccttaatcggatccttcttcggacaaggatgacaggtggtgcatggttgtcgtcagctcgtgtcgtgagatgttgggttaagtcccgcaacgagcgcaacccttgtcgttagttgccagcagtaagatgggcactctaatgagactgccggggataactcggaggaaggtggggatgacgtcaaatcatcatgccccttatgttctgggctacacacgtgctacaatggtcggtacaaagagcagcaaagtcgtgaggcggagcaaatctcaaaagccgatcccagttcggattgtaggctgcaactcgcctacatgaagtcggagttgctagtaatcgcagatcagaatgctgcggtgaatgcgttcccgggtcttgtactcaccgc

SEQ ID NO: 870 - DNA, 1511 bp, Artificial Sequence
  Synthetic polymer
acgaacgctggcggcatgcctaacacatgcaagtcgaacggaggaaactcaacattaagaattttaatgcgccaagcggtaaaaattatgagcgaagcgaataatttttactacgcaaataagcagactaacaattcactgcttgagttaatcggaacattggagtttttaatgttgagtttccttagtggcgaacgggtgagtaacgcgtaggcaacctgccctctagatggggacaacattccgaaaggggtgctaataccgaatgtgatccttcttccgcatgaaggaaggatgaaagatggcctctacatgtaagctatcgctagaggatgggcctgcgtctgattagctagttggtgaggtaacggctcaccaaggcgacgatcagtagccggtctgagaggatgaacggccacattgggactgagacacggcccagactcctacgggaggcagcagtggggaatcttccgcaatgggcgaaagcctgacggagcaatgccgcgtgagtgatgaagggattcgtcccgtaaagctctgttgtctgtgacgaatgtgcagattgtgaataatgatctgtaatgacggtagcagacgaggaagccacggctaactacgtgccagcagccgcggtaatacgtaggtggcgagcgttgtccggaattattgggcgtaaagagcatgtaggcggttttttaagtctggagtgaaaatgcggggctcaaccccgtatggctctggatactggaagacttgagtgcaggagaggaaaggggaattcccagtgtagcggtgaaatgcgtagatattgggaggaacaccagtggcgaaggcgcctttctggactgtgtctgacgctgcgatgcgaaagccagggtagcgaacgggattagataccccggtagtcctggccgtaaacgatgggtactaggtgtaggaggtatcgaccccttctgtgccggagttaacgcaataagtaccccgcctggggagtacgtccgcaaggatgaaactcaaaggaattgacgggggcccgcacaagcggtggagtatgtggtttaattcgacgcaacgcgaagaaccttaccaaggcttgacattgaatgaccgctctagagatagagctttcccttcggggacatgaaaacaggtggtgcatggctgtcgtcagctcgtgtcgtgagatgttgggttaagtcccgcaacgagcgcaacccctatcctatgttaccagcgagtaatgtcggggactcataggagactgccaaggacaacttggaggaaggcggggatgacgtcaagtcatcatgccccttatgtcttgggctacacacgtactacaatggtcggcaacagagggaagcgaagccgcgaggcagagcaaaccccagaaacccgatctcagttcggatcgcaggctgcaacccgcctgcgtgaagtcggaatcgctagtaatcgcaggtcagcatactgcggtgaatacgttcccgggccttgtacacaccgcc

SEQ ID NO: 871 - DNA, 1506 bp, Artificial Sequence
  Synthetic polymer
acgaacgctggcggcatgcctaacacatgcaagtcgaacggagattgctcaacatcaagtttttcaaacttgacgacagcgataaaatttatgagcgaagcgaataaattttatcacgcaaataagcatgactaataatcatcaaatgtgagattgaaggatttgatgttgagcaatcttagtggcgaacgggtgagtaacgcgtaggcaacctgccctttagatggggacaacattccgaaaggggtgctaataccgaatgtgattactctctcgcatgagagagtaatgaaagatggcctctacatgtaagctatcgctaaaggatgggcctgcgtctgattagctagttggtggggtaacggctcaccaaggcgacgatcagtagccggtctgagaggatgaacggccacattgggactgagacacggcccagactcctacgggaggcagcagtggggaatcttccgcaatgggcgaaagcctgacggagcaatgccgcgtgagtgatgaaggaattcgttccgtaaagctctgttgttaaggacgaatgtgcaggttgcgaacagttacctgtaatgacggtacttaacgaggaagccacggctaactacgtgccagcagccgcggtaatacgtatgtggcgagcgttgtccggaattattgggcgtaaagagcatgtaggcggttttttaagtcccggagtgaaaatgcggggctcaaccccgtatggctctggatactggaagacttgagtgcaggagaggaaaggggaattcccagtgtagcggtgaaatgcgtagatattgggaggaacaccagtggcgaaggcgcctttctggactgtgtctgacgctgagatgcgaaagccagggtagcgaacgggattagatacccccggtagtcctggccgtaaacgatgggtactaggtgtaggaggtatcgaccccttctgtgccggagttaacgcaataagtaccccgcctggggagtacgtccgcaaggatgaaactcaaaggaattgacgggggcccgcacaagcggtggagtatgtggtttaattcgacgcaacgcgaagaaccttaccaaggcttgacattgagtgaccgctctagagatagagcttctccttagggagcacgaaaacaggtggtgcatggctgtcgtcagctcgtgtcgtgagatgttgggttaagtcccgcaacgagcgcaacccctatcctatgttaccagcgggtaatgccggggactcataggagactgccaaggacaacttggaggaaggcggggatgacgtcaagtcatcatgccccttatgtcttgggctacacacgtactacaatggtcggcaacagagggaagcgaagccgcgaggcagagcaaaccccagaaacccgatctcagttcggattgcaggctgcaactcgcctgcatgaagtcggaatcgctagtaatcgcaggtcagcatactgcggtgaatacgttcccgggccttgtacacaccgc

SEQ ID NO: 872 - DNA, 1432 bp, Artificial Sequence
  Synthetic polymer
gatgaacgctggcggcgtgcttaacacatgcaagtcgaacggttaaaccgccctcgggcggacatagagtggcgaacgggtgagtaacacgtgaccaacctgccccccgcagcgggataacgcggcgaaagcctcgctaataccgcatactccggcagggccgcatggccccgccgggaaagccttgcgcggcgggggatggggtcgcggcccatcaggtagtaggcggggtgacggcccacctagctttcgacgggtagccgggctgagaggccgaccggccacattgggactgagatacggcccagactcctacgggaggcagcagtggggaattttgcgcaatggggggaaccctgacgcagcaacgccgcgtgcgggaagaaggccttcgggttgtaaaccgctttcagcagggacgaattccgacggtacctgcagaagaagccccggctaactacgtgccagcagccgcggtaatacgtagggggcgagcgttatccggattcattgggcgtaaagcgcgcgtaggcggcgcgtcaagcgggacctctaaccccggggctcaaccccgggccgggtcccggactggcgcgctcgagtgcggtagaggcgagtggaattcccggtgtagcggtggaatgcgcagatatcgggaagaacaccgatggcgaaggcagctcgctgggccgccactgacgctgaggcgcgaaagctgggggagcgaacaggattagataccctggtagtcccagccgtaaacgatgggcgctaggtgtggggggccccgccccccgtgccgcagccaacgcattaagcgccccgcctggggagtacggccgcaaggctaaaactcaaaggaattgacgggggcccgcacaagcagcggagcatgtggcttaattcgaagcaacgcgaagaaccttaccagggcttgacatgcgcatgaagccggggagacccggtggccgagaggagtgcgcgcaggtggtgcatggctgtcgtcagctcgtgtcgtgagatgttgggttaagtcccgcaacgagcgcaacccctgccccgtgttgccagcattgagttggggactcgcgggggactgccggcgtcaagccggaggaaggtggggacgacgtcaagtcatcatgccccttatgccctgggctgcacacgtgctacaatggccggtacagagggctgccaccccgcgagggggagcgaatcccgcaaagccggccccagttcggatcggaggctgcaacccgcctccgtgaagtcggagttgctagtaatcgcggatcggcacgccgcggtgaatacgttcccgggccttgtacacaccgcccgtcacaccacccgagtcgtctgcacccgaagccgccggccgaacccgaaaggggcggaggcgtcgaaggtgtggagggtaaggggggtg

SEQ ID NO: 873 - DNA, 1365 bp, Artificial Sequence
  Synthetic polymer
ggcggcgtgccctaacaccatgcaagtcgagacgagggagattccccttccggggatgaacctagaccggcggaccgggtgagtaacacgtgggcaaccctgaccttatagagggggatagaccttccggaaggaagattaataccgcataaccattacatttttcgcatgaagaaggtaattaaaggagtaattccgctataagatgggacccgcggcgcattagactagttggtgaggtaacggctcaccaaggacgacgatgcgtagaccgacctgagagggtgatcggccacattgggactgagacacggcccagactcctacgggaggcagcagtggggaatattgcacaatgggggaaaccctgatgcagcaacgccgcgtgagtgatgaaggtcttcggatcgtaaagctctgtcttcagggacgataatgacggtacctgaggaggaagaccacggctaactacgtgccagcagccgcggtaatacgtaggtggcgagcgttgtccggatttactgggcgtaaagggagcgtaggcggatttttaagtgagatgtgaaatacccgggctcaacttgggtgctgcatttcaaactggaagtctagagtgcaggagaggagagtggaattcctagtgtagcggtgaaatgcgtagagattaggaagaacaccagtggcgaaggcggctctctggactgtaactgacgctgaggctcgaaagcgtggggagcaaacaggattagataccctggtagtccaacgccgtaaacgatgaatactaggtgtaggggttgtcatgacctctgtgccgccgcaaacgcattaagtattccgcctggggagtacggtcgcaagattaaaactcaaaggaattgacgggggcccgcacaagcagcggagcatgtggtttaattcgaagcaacgcgaagaaccttacctagacttgacatctcctgaattactcttaatcgaggaagtcccttcggggacaggaagacaggtggtgcatggttgtcgtcagctcgtgtcgtgagatgttgggttaagtcccgcaacgagcgcaacccttattgttagttgctaccattaagttgagcactctagcaagactgcccgggttaaccgggaggaaggtggggatgacgtcaaatcatcatgccccttatgtctagggctacacacgtgccccacaatggcaagtacaaaaagatgcaataccgcaaggtggagctaaacttaaaaacttgtctcagttcggattgtaggctgaaactcgcctacatgaagctggagttgctagtaatcgcgaatcagaatgtcgcggtgaatacgttcccgggccttgtacacaccgcccgt

SEQ ID NO: 874 - DNA, 1436 bp, Artificial Sequence
  Synthetic polymer
gacgaacgctggcggcgtgcctaacacatgcaagtcgaacgaagcttttgatttcggttgagagcttagtggcggacgggtgagtaacgcgtgagtaacctgccttacagagggggataacgtctggaaacggacgctaataccgcatgacatttctttgtcacatggtaaagaaatcaaaggagcaatccgctgtaagatggactcgcgtccgattagctagatggtgagataacagcccaccatggcgacgatcggtagccggactgagaggttgaacggccacattgggactgagacacggcccagactcctacgggaggcagcagtgggggatattgcacaatggaggaaactctgatgcagcaacgccgcgtgaaggatgaaggtcttcggattgtaaacttttgtacttggggacgataatgacggtacccaagcagcaagctccggctaactacgtgccagcagccgcggtaatacgtagggagcaagcgttgtccggatttactgggtgtaaagggtgcgtaggcggctatgcaagtcagttgtgaaaactatgggctcaacccatagcctgcaattgaaactgcgtggcttgagtgaagtagaggtaggtggaattcccggtgtagcggtgaaatgcgtagagatcgggaggaacaccagtggcgaaggcgacctactgggctttaactgacgctgaggcacgaaagcatgggtagcaaacaggattagataccctggtagtccatgccgtaaacgatgattactaggtgtggggggtctgaccccctccgtgccggagttaacacaataagtaatccacctggggagtacgaccgcaaggttgaaactcaaaggaattgacgggggcccgcacaagcagtggagtatgtggtttaattcgaagcaacgcggagaaccttacctagacttgacatctcctgaatagcgtagagatacgtgaagcccttcggggcaggaagacaggtggtgcatggttgtcgtcagctcgtgtcgtgagatgttgggttaagtcccgcaacgagcgcaacccttatcattagttgctaccattaagttgagcactctagtgagactgcccgggttaaccgggaggaaggcggggatgacgtcaaatcatcatgccccttatgtctagggctacacacgtgctacaatggtgagaacaacgagatgcaataccgcgaggtggagccaaacttgaaaactcatcccagttcggattgtaggctgaaattcgcctacatgaagttggagttgctagtaatcgcgaatcagaatgtcgcggtgaatacgttcccgggccttgtacacaccgcccgtcacaccatgagagctggtaacacccgaagtccgtgaggtaacctttatggggccagcggccgaaggtgggattgataattggggtg

SEQ ID NO: 875 - DNA, 1387 bp, Artificial Sequence
  Synthetic polymer
gctcaggacgaacgctggcggcgtgcctaatacatgcaagtcgtacgcttctttttccaccggagcttgctccaccggaaaaagaagagtggcgaacgggtgagtaacacgtgggtaacctgcccatcagaaggggataacacttggaaacaggtgctaataccgtataacaatcgaaaccgcatggttttgatttgaaaggcgctttcgggtgtcgctgatggatggacccgcggtgcattagctagttggtgaggtaacggctcaccaaggccacgatgcatagccgacctgagagggtgatcggccacattgggactgagacacggcccaaactcctacgggaggcagcagtagggaatcttcggcaatggacgaaagtctgaccgagcaacgccgcgtgagtgaagaaggttttcggatcgtaaaactctgttgttagagaagaacaaggatgagagtaactgttcatcccttgacggtatctaaccagaaagccacggctaactacgtgccagcagccgcggtaatacgtaggtggcaagcgttgtccggatttattgggcgtaaagcgagcgcaggcggtttcttaagtctgatgtgaaagcccccggctcaaccggggagggtcattggaaactgggagacttgagtgcagaagaggagagtggaattccatgtgtagcggtgaaatgcgtagatatatggaggaacaccagtggcgaaggcggctctctggtctgtaactgacgctgaggctcgaaagctggggagcaaacaggattagataccctggtagttcacgccgtaaacgatgagtggtaagtgttggagggtttccgcccttcagtgctgcagctaacgcattaagcactccgcctggggagtacgaccgcaaggttgaaactcaaaggaattgacgggggcccgcaccagcggtggagcatgtggtttaatttgaagcaacgcgaagaaccttaccaggttttgacatcctttgacccctttagagatagaggtttccctttgggggcaaagtgacaggtggtgcatggttgttgtcagcttgtgttgtgagatgttgggttaagtcccgcaacgagcgcaacccttattgttagttgccatcattcagttgggcactttagcaagactgccggtgacaaaccggaggaaggtggggaagacgtcaaatcatcatgccccttatgacctggggtacacacgtggtacaatgggaagtacaacgagttgggaagtcgcgagggtaaggtaattttttaaaggttttttcagtttggattgccgggtgcaacttgcctgcctgaagccggaattggttgtaattgcggatcagcccggcgcggtgaattcgtttcccggcctt

SEQ ID NO: 876 - DNA, 1519 bp, Artificial Sequence
  Synthetic polymer
agagtttgatcctggctcaggatgaacgctagcggcaggcctaacacatgcaagtcgaggggcagcacggtgtagcaatacactggtggcgaccggcgcacgggtgcgtaacgcgtatgcaacctacccataacagggggataacactgagaaattggtactaataccccataacatcaggaccggcatcggttctggttgaaaactccggtggttatggatgggcatgcgttgtattagctggttggtgaggtaacggctcaccaaggcaacgatacatagggggactgagaggttaaccccccacattggtactgagacacggaccaaactcctacgggaggcagcagtgaggaatattggtcaatggacgcaagtctgaaccagccatgccgcgtgcaggaagacggctctatgagttgtaaactgcttttgtacgagggtaaacgctcttacgtgtaagagcctgaaagtatcgtacgaataaggatcggctaactccgtgccagcagccgcggtaatacggaggatccaagcgttatccggatttattgggtttaaagggtgcgtaggcggtttgataagttagaggtgaaataccggtgcttaacaccggaactgcctctaatactgttggactagagagtagttgcggtaggcggaatgtatggtgtagcggtgaaatgcttagagatcatacagaacaccgattgcgaaggcagcttaccaaactatatctgacgttgaggcacgaaagcgtggggagcaaacaggattagataccctggtagtccacgcagtaaacgatgataactcgctgtcggcgatacacggtcggcggctaagcgaaagcgataagttatccacctggggagtacgttcgcaagaatgaaactcaaaggaattgacgggggcccgcacaagcggaggaacatgtggtttaattcgatgatacgcgaggaaccttacccgggcttgaaagttactgacgattctggaaacaggatttcccttcggggcaggaaactaggtgctgcatggttgtcgtcagctcgtgccgtgaggtgtcgggttaagtcccataacgagcgcaacccctaccgttagttgccatcaggtcaagctgggcactctggcgggactgccggtgtaagccgagaggaaggtggggatgacgtcaaatcagcacggcccttacgtccggggctacacacgtgttacaatggtaggtacagagggcagctacccagtgatgggatgcgaatctcgaaagcctatctcagttcggatcggaggctgaaacccgcctccgtgaagttggattcgctagtaatcgcgcatcagccatggcgcggtgaatacgttcccgggccttgtacacaccgcccgtcaagccatggaagctgggggtgcctgaagttcgtgaccgcaaggagcgacctagggcaaaaccggtgactggggctaagtcgtaacaaggtagccgtaccggaaggtgcggctggaacacctcctttct

SEQ ID NO: 877 - DNA, 1507 bp, Artificial Sequence
  Synthetic polymer
tagagtttgatcctggctcagaacgaacgctggcggcaggcctaacacatgcaagtcgagcggtagcacaggggagcttgctccccgggtgacgagcggcggacgggtgagtaatgtctgggaaactgcctgatggagggggataactactggaaacggtagctaataccgcataacgtcgcaagaccaaagagggggaccttcgggcctcttgccatcagatgtgcccagatgggattagctagtaggtggggtaatggctcacctaggcgacgatccctagctggtctgagaggatgaccagccacactggaactgagacacggtccagactcctacgggaggcagcagtggggaattttggacaatgggcgcaagcctgatccagcaatgccgcgtgagtgaagaaggccttcgggttgtaaagctcttttgtcagggaagaaacggtagaggctaatatcctttgctaatgacggtacctgaagaataagcaccggctaactacgtgccagcagccgcggtaatacgtagggtgcaagcgttaatcggaattactgggcgtaaagcgtgcgcaggcggttttgtaagtctgacgtgaaatccccgggctcaacctgggaactgcattcgaaactggcaggctagagtcttgtagaggggggtagaattccaggtgtagcggtgaaatgcgtagagatctggaggaataccggtggcgaaggcggccccctggacaaagactgacgctcaggtgcgaaagcgtggggagcaaacaggattagataccctggtagtccacgctgtaaacgatgtcgatttggaggttgtgcccttgaggcgtggcttccggagctaacgcgttaaatcgaccgcctggggagtacggccgcaaggttaaaactcaaatgaattgacgggggcccgcacaagcggtggagcatgtggtttaattcgatgcaacgcgaagaaccttacctggtcttgacatccacagaacttagcagagatgctttggtgccttcgggaactgtgagacaggtgctgcatggctgtcgtcagctcgtgttgtgaaatgttgggttaagtcccgcaacgagcgcaacccttatcctttgttgccagcggttaggccgggaactcaaaggagactgccagtgataaactggaggaaggtggggatgacgtcaagtcatcatggcccttacgaccagggctacacacgtgctacaatggcatatacaaagagaagcgacctcgcgagagcaagcggacctcataaagtatgtcgtagtccggattggagtctgcaactcgactccatgaagtcggaatcgctagtaatcgtagatcagaatgctacggtgaatacgttcccgggccttgtacacaccgcccgtcacaccatgggagtgggttgcaaaagaagtaggtagcttaaccttcgggagggcgcttaccactttgtgattcatgactggggtgaagtcgtaacaaggtagccgta

SEQ ID NO: 878 - DNA, 1517 bp, Artificial Sequence
  Synthetic polymer
tataaattaagagtttgatcctggctcaggatgaacgctggcggcgtgcttaacacatgcaagtcgagcgagaaactacatgcagacacttcggtagaagcgagtagcggaaagcggcggacgggtgagtaacgcgtaggcaacctgcccttcacagaggtatagcctcgggaaaccgggattaaaaccacataaaatcataggttcgcatgaaccaaaggtcaaagatttatcggtgaaggatgggcctgcgtctgattagctggttggtagggtaaaagcctaccaaggcgacgatcagtagccgacctgagagggtgatcggccacattggaactgagacacggtccaaactcctacgggaggcagcagtgggggatattgcacaatgggggaaaccctgatgcagcaacgccgcgtgaggtatgaaggcctttgggttgtaagcctctgtcctaggggaagaaaaaaatgacggtacccgaggaggaagccccggctaactacgtgccagcagccgcggtaatacgtagggggcaagcgttatccggaattattgggcgtaaagagtgcgtaggtggtctactaagcgcgaggtgaaaggcaatggctcaaccattgttagccttgcgaactggcagacttgagtgcaagagaggaaagcggaattcctagtgtagcggtgaaatgcgcagatattaggaggaacaccggcggcgaaggcggctttctggattgtaactgacactgaggcacgaaagcgtgggtagcaaacaggattagataccctggtagtccacgccgtaaacgatgagcactaggtgtcgggacatgagtctcggtgccgcagttaacgcaataagtgctccgcctggggagtacgcacgcaagtgtaaaactcaaaggaattgacggggacccgcacaagcagcggagcatgtggtttaattcgaagcaacgcgaagaaccttaccaagacttgacatccctctgacgtacccttaatcgggtatttcttcggacagaggagacaggtggtgcatggttgtcgtcagctcgtgtcgtgagatgttgggttaagtcccgcaacgagcgcaacccttgtctttagttgccatcattaagttgggcactctaaagagactgccggggaaactcggaggaaggtggggatgacgtcaaatcatcatgccccttatgtcttgggctacacacgtgctacaatggccggtacaaagagaagcgataccgcaagggggagcaaatcttaaaaaccggtcccagttcggattgcaggctgcaactcgcctgcatgaagtcggagttgctagtaatcgcagatcagaatgctgcggtgaatgcgttcccgggtcttgtacacaccgcccgtcacaccatggaagttgggggcgcccgaagttggtcgacaatagattacctaaggcgaaatcaatgactggggtgaagtcgtaacaaggtagccgtatcggaaggtgcggctggatcacctcctttct

SEQ ID NO: 879 - DNA, 1371 bp, Artificial Sequence
  Synthetic polymer
gattgaacgctggcggcaggcctaacacatgcaagtcgagcggcagcacaagtgagtttactcatgaggtggcgagcggcggacgggtgagtaatgcctagggatctgcccagtcgagggggataacagttggaaacgactgctaataccgcatacgccctacgggggaaagagggggaccttcgggcctcttgccatcggatgtgcccagatgggattagctagtaggtggggtaacggctcacctaggcgacgatccctagctggtctgagaggatgaccagccacactggaactgagacacggtccagactcctacgggaggcagcagtggggaatattgcacaatgggcgcaagcctgatgcagccatgccgcgtgtatgaagaaggccttcgggttgtaaagtactttcagcggggatgaagggagtaaagttaatacctttgctcattgacgttacccgcagaagaagcaccggctaactccgtgccagcagccgcggtaatacggagggtgcaagcgttaatcggaattactgggcgtaaagcgcacgcaggcggtttgttaagtcagatgtgaaatccccgggctcaacctgggaactgcatctgatactggcaggcttgagtctcgtagaggggggtagaattccaggtgtagcggtgaaatgcgtagagatctggaggaataccggtggcgaaggcggcccctggacgaagactgacgctcaggtgcgaaagcgtggggagcaaacaggattagataccctggtagtccacgccgtaaacgatgtcgacttggaggttgtgccctgaggcgtggcttccggagctaacgcgttaagtcgaccgcctggggagtacggccgcaaggttaaaactcaaatgaattgacgggggcccgcacaagcggtggagcatgtggtttaattcgatgcaacgcgaagaaccttacctggtcttgacatccacggaagttttcagagatgagaatgtgccttcgggaaccgtgagacaggtgctgcatggctgtcgtcagctcgtgttgtgaaatgttgggttaagtcccgcaacgagcgcaacccttatcctttgttgccagcggtccggccgggaactcaaaggagactgccagtgataaactggaggaaggtggggatgacgtcaagtcatcatggcccttacgaccagggctacacacgtgctacaatggcgcatacaaagagaagcgacctcgcgagagcaagcggacctcataaagtgcgtcgtagtccggattggagtctgcaactcgactccatgaagtcggaatcgctagtaatcgtggatcagaatgccacggtgaatacgttcccgggcctgtacacacc

SEQ ID NO: 880 - DNA, 1315 bp, Artificial Sequence
  Synthetic polymer
gatatcaaagattttatcgcttgaagatggactcgcgtccgattagttagttggtgaggtaacggctcaccaagaccgcgatcggtagccggactgagaggttgaacggccacattgggactgagacacggcccagactcctacgggaggcagcagtgggggatattgcgcaatgggggcaaccctgacgcagcaacgccgcgtgaaggatgaaggttttcggattgtaaacttcttttattaaggacgaaacttgacggtacttaatgaataagctccggctaactacgtgccagcagccgcggtaatacgtagggagcaagcgttgtccggatttactgggtgtaaagggtgcgtaggcggctttgcaagtcagatgtgaaatctatgggctcaacccataaactgcatttgaaactgtagagcttgagtgaagtagaggcaggcggaattccccgtgtagcggtgaaatgcgtagagatggggaggaacaccagtggcgaaggcggcctgctgggctttaactgacgctgaggcacgaaagcgtgggtagcaaacaggattagataccctggtagtccacgctgtaaacgatgattactaggtgtggggggtctgaccccttccgtgccggagttaacacaataagtaatccacctggggagtacggccgcaaggttgaaactcaaaggaattgacgggggcccgcacaagcagtggagtatgtggtttaattcgaagcaacgcgaagaaccttaccaggtcttgacatccaactaacgaagtagagatacattaggtgcccttcggggaaagttgagacaggtggtgcatggttgtcgtcagctcgtgtcgtgagatgttgggttaagtcccgcaacgagcgcaacccttgctattagttgctacgcaagagcactctaataggactgccgttgacaaaacggaggaaggtggggacgacgtcaaatcatcatgccccttatgacctgggctacacacgtactacaatggatgttaacagagggaagcaagacagcgatgtggagcaaacccctaaaaacattctcagttcagattgcaggctgcaacccgcctgcatgaagatggaattgctagtaatcgcggatcagcatgccgcggtgaatacgttcccgggccttgtacacaccgcccgtcacaccatgggagccggtaatacccgaagtcagtagtccaacctcgtgaggacgctgccgaaggtaggattggcgactggggtgaagtcgtaacaaggtagccgtatcggaaggtgcggctggatcacctcctttct

SEQ ID NO: 881 - DNA, 1455 bp, Artificial Sequence
  Synthetic polymer
ggcggcatgctttacacatgcaagtcgaacggcagcacagggagcttgctcctgggtggcgagtggcgcacgggtgagtaatacatcggaacgtgtcctattgtgggggataactgtcggaaagggtggctaataccgcataagacctgagggtgaaagcgggggatcgcaagacctcgcgcaattggagcggccgatgcccgattagctagttggtgaggtaatagcttaccaaggcgacgatcggtagctggtctgagaggacgaccagccacactgggactgagacacggcccagactcctacgggaggcagcagtggggaattttggacaatgggggcaaccctgatccagccatgccgcgtgcaggatgaaggtcttcggattgtaaactgcttttgtcagggacgaaaaggattgtgctaataccatgatctgctgacggtacctgaagaataagcaccggctaactacgtgccagcagccgcggtaatacgtagggtgcaagcgttaatcggaattactgggcgtaaagcgtgcgcaggcggttctgtaagacagatgtgaaatccccgggctcaacctgggaattgcatttgtgactgcaggactagagttcatcagaggggggtggaattccaagtgtagcagtgaaatgcgtagatatttggaagaacaccaatggcgaaggcagccccctgggatgcgactgacgctcatgcacgaaagcgtggggagcaaacaggattagataccctggtagtccacgccctaaacgatgtctactggttgttggggattaatatccttggtaacgaagctaacgcgtgaagtagaccccctggggagagcggtcgcaagattaaaactcaaaggaattgacggggacccgcacaagcggtggatgatgtggattaattcgatgcaacgcgaaaaaccttacgtagccttgacatgccaggaatcctgaagagatttgggagtgcccgcaagggaatctggacacaggtgctgcatggctgtcgtcagctcgtgtcgtgagatgttgggttaagtcccgcaacgagcgcaacccttgtcattagttgctacgcaagagcactctaatgagactgccggtgacaaaccggaggaaggtggggatgacgtcaagtcctcatggcccttatggctagggcctcacacgtcatacaatggtcggaacagagggcagcgaagccgcgaggtggagcaaatcccagaaaaccgatcgtagtccggattgcagtctgcaactcgactgcatgaagtcggaatcgctagtaatcgcggatcagcatgccgcggtgaatacgttcccgggtcttgtacacaccgcccgtcacaccatgggagtggggttcaccagaagacgtttgtctaaccgtaaggaaggacggcgtccacggtgggtttcatgactggggtgaagtcgt

SEQ ID NO: 882 - DNA, 1494 bp, Artificial Sequence
  Synthetic polymer
  misc_feature (816)..(816): n is a, c, g, or t
agagtttgatcatggctcaggacgaacgctggcggcgtgcctaacacatgcaagtcgaacggagttaagcgctgaatggagcttcggcggaattcttgcttagcttagtggcggacgggtgagtaacgcgtgagtaacctgcctctgagaggggaataacgttctgaaaagatcgctaataccgcataacatattgaagtcgcatggctttgatatcaaagattttatcgctcggagatggactcgcgtccgattagctagttggcggggtaacggcccaccaaggcgacgatcggtagccggactgagaggttgatcggccacattgggactgagacacggcccagactcctacgggaggcagcagtgggggatattgcgcaatgggggcaaccctgacgcagcaacgccgcgtgaaggaagacggttttcggattgtaaacttcttttgtcagggacgaagaatgacggtacctgacgaataagctccggctaactacgtgccagcagccgcggtaatacgtagggagcaagcgttgtccggatttactgggtgtaaagggtgcgtaggcggctttgtaagtcagatgtgaaatctatgggctcaacccataaactgcatttgaaactatagagcttgagtgaagtagaggcaggcggaattccctgtgtagcggtgaaatgcgtagagatagggaggaacaccagtggcgaaggcggcctgctgggctttaactgacgctgaggcacgaaagcgtgggtagcaaacaggattagataccctggtagtccacgctgtaaacgatgattactagntgtggggggactgaccccttccgtgccggagttaacacaataagtaatccacctggggagtacggccgcaaggttgaaactcaaaggaattgacgggggcccgcacaagcagtggagtatgtggtttaattcgaagcaacgcgaagaaccttaccgggtcttgacatccaactaacgaagtagagatacattaggtgcccttcggggaaagttgagacaggtggtgcatggttgtcgtcagctcgtgccgtgagatgttgggttaagtcccgcaacgagcgcaacccttgctattagttgctacgcaagagcactctaataggactgccgttgacaaaacggaggaaggtggggacgacgtcaaatcatcatgccccttatgacccgggctacacacgtactacaatggccgttaacagagggaggcaatatagcgatatggagcaaacccctaaaaacggtctcagttcagattgcaggctgcaacccgcctgcatgaagtcggaattgctagtaatcgcggatcagcatgccgcggtgaatacgttcccgggccttgtacacaccgcccgtcacaccatgggagccggtaatacccgaagtcagtagcctaacgcaagagggcgctgccgaaggtaggattggcgactggggtgaagtcgtaacaaggtagccgta

SEQ ID NO: 883 - DNA, 1452 bp, Artificial Sequence
  Synthetic polymer
gacgaacgctggcggcgtgcttaacacatgcaagtcgaacgagaatctgtggatagagacttcggtcaattgaagtagaggacagtggcggactggtgagtaacgcgtgaagaacctgcctttcagagggggacaacagttggaaacgactgctaataccgcataacgtgccgaagtcgcatggctttggtaccaaagattttatcgctgaaagatggcttcgcgtctgattagctagttggtagggtaacggcctaccaaggcgacgatcagtagccggactgagaggttgaccggccacattgggactgagatacggcccagactcctacgggaggcagcagtggggaatattgggcaatggacgcaagtctgacccagcaacgccgcgtgaaggaagaaggctttcgggttgtaaacttcttttgtcgaggaagagtagaagacggtactcgacgaataagccacggctaactacgtgccagcagccgcggtaatacgtaggtggcaagcgttgtccggatttactgggtgtaaagggcgtgtagccgggaagataagtcagatgtgaaatctggaggctcaacctccaaactgcatttgaaactgtctttcttgagtgtcggagaggtaatcggaattccttgtgtagcggtgaaatgcgtagatataaggaagaacaccagtggcgaaggcggattactggacgataactgacggtgaggcgcgaaagcgtggggagcaaacaggattagataccctggtagtccacgctgtaaacgatggatactaggtgtgcggggactgaccccctgcgtgccgcagttaacacaataagtatcccacctggggagtacgatcgcaaggttgaaactcaaaggaattgacgggggcccgcacaagcggtggattatgtggtttaattcgaagcaacgcgaagaaccttaccaggacttgacatcctactaacgaagtagagatacatcaggtgcccttcggggaaagtagagacaggtggtgcatggttgtcgtcagctcgtgtcgtgagatgttgggttaagtcccgcaacgagcgcaacccctattgttagttgctacgcaagagcactctagcgagactgccgttgacaaaacggaggaaggtggggacgacgtcaaatcatcatgccccttatgtcctgggttacacacgtaatacaatggcggttaacagagggatgcaatactgcgaagtggagcgaacccctaaaagccgtctcagttcggattgtaggctgcaactcgcctgcatgaagtcggaatcgctagtaatcgcggatcagcatgccgcggtgaatacgttcccgggccttgtacacaccgcccgtcacaccacgagagtcgggaacacccgaagcctgtagcctaaccgcaaggagggcgcagtcgaaggtgggtttgataattggggtg

SEQ ID NO: 884 - DNA, 1318 bp, Artificial Sequence
  Synthetic polymer
ggcagtggcgaacggctgagtaacacgtgggcaacctgcccccctccccgggacagcctcgggaaaccgtgggtaataccggatgagccgccccctccgcatgggaggggcgggaaagctccggcggggggggatgggcccgcggcctgttagctagttggcggggcaacggcccaccaaggcgactatgggtagctgggttgagagaccgaccagccagattgggactgagacacggcccagactcctacgggaggcagcagtggggaatcttgcgcaatgggcggaagcctgacgcagcgacgccgcgtgcgggaggaaggccctcgggtcgtaaaccgctttcagcagggacgaggccgcaaggtgacggtacctgcagaagaagccccggctaactacgtgccagcagccgcggtaatacgtagggggcgagcgttatccggattcattgggcgtaaagcgctcgtaggcggcctgccaggtcgggagtcaaatgcgggggcccaacccccggccgctcccgataccggcgggcttgagtttggtaggggaaggcggaattcccggtgtagcggtggaatgcgcagatatcgggaagaacaccggtggcgaaggcggccttctgggccacgactgacgctgaggagcgaaagctgggggagcgaacaggattagataccctggtagtcccagccgtaaacgatggacactaggtgtgggggggacgcccctccgtgccgcagccaacgcattaagtgtcccgcctggggagtacggccgcaaggctaaaactcaaaggaattgacgggggcccgcacaagcagcggagcatgtggcttaattcgatgcaacgcgaagaaccttaccagggcttgacatcttggtgaagcggcggagacgccgtggccgagaggagccaagacaggtggtgcatggctgtcgtcagctcgtgtcgtgagatgttgggttaagtcccgcaacgagcgcaacccccgtcgcatgttgccagcggtccggccgggcacccatgcgagaccgccggcgtcaagccggaggagggcggggacgacgtcaagtcatcatgccccttatgccctgggctgcacacgtgctacaatggccggcacagcgggctgccaggcggcgacgccgagcgaatccccaaagccggccccagttcggaccgggggctgcaacccgcccccgcgaagtcggagttgctagtaatcgcggatcagcacgccgcggtgaatgcgttcccgggccttgtacacaccgcccgtcacaccacccgagtcgactgcacccgaagtcg

SEQ ID NO: 885 - DNA, 1315 bp, Artificial Sequence
  Synthetic polymer
agcggcggacgggtgagtaagatctgggcaacctgccttgtagaggggaatagccttccgaaaggaagattaataccgcataatattgcagcttcgcatggagcagtaattaaaggagcaatccgctacaagatgggcccgcggcgcattagctagttggtgaggtaacggctcaccaaggcgacgatgcgtagccgacctgagagggtgatcggccacattgggactgagacacggcccagactcctacgggaggcagcagtggggaatattgcacaatgggggaaaccctgatgcagcaacgccgcgtgagtgatgaaggttttcggatcgtaaagctctgtcttcagggacgataatgacggtacctgaggaggaagccacggctaactacgtgccagcagccgcggtaatacgtaggtggcgagcgttgtccggatttactgggcgtaaagggagcgtaggcggacttgtaagtgagatgtgaaatacccgggctcaacttgggtgctgcatttcaaactggaagtctagagtgcaggagaggagagtggaattcctagtgtagcggtgaaatgcgtagagattaggaagaacaccagtggcgaaggcgactctctggactgtaactgacgctgaggctcgaaagcgtggggagcaaacaggattagataccctggtagtccacgccgtaaacgatggatactaggtgtgggaggtatcaactccttccgtgccgccgttaacacattaagtatcccgcctggggagtacggtcgcaagattaaaactcaaaggaattgacgctagcccgcacaagcagcggagcatgtggtttaattcgaagcaacgcgaagaaccttacctagacttgacatctcctgcattactcttaatcgaggaagtctcttcggagacaggatgacaggtggtgcatggttgtcgtcagctcgtgtcgtgagatgttgggttaagtcccgcaacgagcgcaacccttattgttagttgctaccatttagttgagcactctagcgagactgcccgggttaaccgggaggaaggtgggggtgacgtcaaatcatcatgccccttatgtctagggctacacacgtgctacaatggcaagtacaacgagatgcaataccgcgaggtggagctaaactataaaacttgtctcagttcggattgtaggctgaaactcgcctacatgaagctggagttgctagtaatcgcgaatcagcatgtcgcggtgaatacgttcccgagccttgtacacaccgcccgtcacaccatgagagttggcaatacccaaagt

SEQ ID NO: 886 - DNA, 1497 bp, Artificial Sequence
  Synthetic polymer
agagtttgatcctggctcaggacgaacgctggcggcgtgcctaacacatgcaagtcgaacggagttacttgtttagatcccttcggggtgacgaacttttaacttagtggcggacgggtgagtaacgcgtgagtaacctgcctctgagaggggaataacgttctgaaaagatcgctaataccgcataacatatcgaagtcgcatggctttggtatcaaagattttatcgctcggagatggactcgcgtccgattagcttgttggcggggtaacggcccaccaaggcgacgatcggtagccggactgagaggttgatcggccacattgggactgagacacggcccagactcctacgggaggcagcagtgggggatattgcgcaatgggggcaaccctgacgcagcaacgccgcgtgaaggaagacggttttcggattgtaaacttcttttgtcagggacgaaatttgacggtacctgacgaataagctccggctaactacgtgccagcagccgcggtaatacgtagggagcaagcgttgtccggatttactgggtgtaaagggtgcgtaggcggctttgtaagtcagatgtgaaatctatgggctcaacccataaactgcatttgaaactatagagcttgagtgaagtagaggcaggcggaattccctgtgtagcggtgaaatgcgtagagatagggaggaacaccagtggcgaaggcggcctgctgggctttaactgacgctgaggcacgaaagcgtgggtagcaaacaggattagataccctggtagtccacgctgtaaacgatgattactaggtgtggggggactgaccccttccgtgccggagttaacacaataagtaatccacctggggagtacggccgcaaggttgaaactcaaaggaattgacgggggcccgcacaagcagtggagtatgtggtttaattcgaagcaacgcgaagaaccttaccgggtcttgacatccaactaacgaagtagagatacattaggtgcccttcggggaaagttgagacaggtggtgcatggttgtcgtcagctcgtgtcgtgagatgttgggttaagtcccgcaacgagcgcaacccttgcctttagttgccatcattcagttgggcactctagagggactgccggggataacccggaggaaggcggggatgacgtcaaatcatcatgccccttatgttctgggcgacacacgtgctacaatggccggcacaacgggatgcaagcaggcgactgtgagcgaaaccccaaagccggtcccagttcggactgcaggctgaaacccgcctgcatgaagtcggaattgctagtaatcgcggatcagcatgccgcggtgaatacgttcccgggccttgtacacaccgcccgtcacaccatgggagccggtaatacccgaagtcagtagcctaacgcaagagggcgctgccgaaggtaggattggcgactggggtgaagtcgtaacaaggtaaccgta

SEQ ID NO: 887 - DNA, 1496 bp, Artificial Sequence
  Synthetic polymer
agagtttgatcctggctaaggatgaacgctggcggcgtgcctaacacatgcaggtcgaacggagttattatcatgaagtcttcggatggattgataatagcttagtggcggacgggtgagtaacgcgtgggtaacctacctcatactgggggataacagctggaaacagctgctaaaaccgcataagatcgtagtgccgcatggcatagcgattaaatattttataggtgtgagatgggcccgcgtctgattagctagttggtgaggtaaaggctcaccaaggcgacgatcagtagccggcttgagagagtgaccggccacattgggactgagacacggcccaaactcctacgggaggcagcagtggggaatattgcacaatgggggaaaccctgatgcagcgacgccgcgtgagtgaagaagtgcttcggcatgtaaagctctatcagcagggaagaagatgacggtacctgactaagaagccccggctaactacgtgccagcagccgcggtaatacgtagggggcaagcgttatccggatttactgggtgtaaagggagcgtaggtggtgcggcaagtcagatgtgaaaacccggggctcaaccccgggactgcatttgaaactgtcgtgctagagtgcaggagaggtaagtggaattcctagtgtagcggtgaaatgcgtagatattaggaggaacaccagtggcgaaggcggcttactggactgtaactgacactgaggctcgaaagcgtggggagcaaacaggattagataccccggtagtccacgccgtaaacgatgaatactaggtgtcgggggtcaaaagaccttcggtgccgtcgctaacgcaataagtattccacctggggagtacgttcgcaagaatgaaactcaaaggaattgacggggacccgcacaagcggtggagcatgtggtttaattcgaagcaacgcgaagaaccttaccaggtcttgacatcccgatgaccggcccgtaacggggccttccctacggggcaacggagacaggtggtgcatggttgtcgtcagctcgtgtcgtgagatgttgggttaagtcccgcaacgagcgcaacccttatccttagtagccagcaggtaaagctgggcactctagggagactgccagggacaacctggaggaaggtggggatgacgtcaaatcatcatgccccttatgatctgggctacacacgtgctacaatggcggccacaaagggaagcgaccctgtgaaggtgagcaaatcccaaaaaagccgtcccagttcggattgtagtctgcaactcgactacatgaagccggaatcgctagtaatcgcgaatcagcatgtcgcggtgaatacgttcccgggtcttgtacacaccgcccgtcacaccatgggagtcggaaatgcccgaagtcagtgacccaacccggtagggagggagctgccgaaggtggagccggtgactggggtgaagtcgtaacaaggtagcc

SEQ ID NO: 888 - DNA, 1436 bp, Artificial Sequence
  Synthetic polymer
agagtttgatcatggctcagagcgaacgctggcggcaggcttaacacatgcaagtcgaacgggcgcttcggtgctagtggcagacgggtgagtaacacgtgggaacgtacctttcggttcggaataattcagggaaacttggactaataccggatacgcccttcgggggaaagatttatcgccgatagatcggcccgcgtctgattagctagttggtgaggtaacggctcaccaaggcaacgatcagtagccgacctgagagggtgatcggccacattggaactgagacacggtccaaactcctacgggaggcagcagtggggaatattgcacaatgggcgaaagcctgatgcagcaacgccgcgtgaaggatgaaggctttcgggtcgtaaacttctgtccttggggaagaaaaaaatgacggtacccatggaggaagccccggctaactacgtgccagcagccgcggtaatacgtagggggcgagcgttatccggaattattgggcgtaaagagtgcgtaggtggttacctaagcgcagggtttaaggcaacggctcaaccattgttcgccttgcgaactgggctacttgagtgcaggagaggaaagcggaattcctagtgtagcggtgaaatgcgtagatattaggaggaacaccagtggcgaaggcggcttttctggactgtaactgacactgaggcacgaaagcgtggggagcaaacaggattagataccctggtagtccacgccgtaaacgatgagcactaggtgtcggggtcgcaagacttcggtgccgcagttaacgcattaagtgctccgcctggggagtacgcacgcaagtgtgaaactcaaaggaattgacggggacccgcacaagcagcggagcatgtggtttaattcgaagcaacgcgaagaaccttaccagaacttgacatccttctgacaacaccttaatcggtgtcttccttcgggacagaagagacaggtggtgcatggttgtcgtcagctcgtgtcgtgagatgttgggttaagtcccgcaacgagcgcaacccttgtcattagttgccatcattaagttgggcactctagtgagactgccggggacaactcggaggaaggtggggatgacgtcaaatcatcatgccccttatgttctgggctacacacgtgctacaatggccggtacagaaagcagcgaaaccgcgaggtggagccaatctcaaaaaccggtcccagttcggactgcaggctgaaactcgcctgcacgaagttggagttgctagtaatcgcagatcagaatgctgcggtgaatgcgttcccgggtcttgtacacaccgcccgtcacaccacggaagttgggggtgcccgaagttggtcgagaaatagattacctaaggcaaaatcaatgactggggtgaagtcgtaacaaggtaacc

SEQ ID NO: 889 - DNA, 1372 bp, Artificial Sequence
  Synthetic polymer
tgaacgctggcggcaggcctaacacatgcaagtcgaacggtagcacagagagcttgctctcgggtgacgagtggcggacgggtgagtaatgtctggggatctgcccggcagagggggataaccactggaaacggtggctaataccgcataacctcgcaagagcaaagagggggaccttatggcctctcgctgccggatgaacccagatgggattagctagtaggcggggtaacggctcacctaggcgacgatccctagctggtctgagaggatgaccagccacactggaactgagacacggtccagactcctgcgggaggcagcagtggggaatattgcacaatgggcgcaagcctgatgcagccatgccgcgtgtatgaagaaggccttcgggttgtaaagtactttcagcggggaggaagtgtcgcgggttaatacccggcggcattgacgttacccgcagaagaagcaccggctaactccgtgccagcagccgcggtaatacggagggtgcaagcgttaatcggaattactgggcgtaaagcgcacgcaggcggtctgacaagtcagatgtgaaatccccgggcttaacctgggaactgcatttgaaactgtcaggctggagtcttgtagaggggggcagaattccaggtgtagcggtgaaatgcgtagagatctggaggaataccggtggcgaaggcggccccctggacaaagactgacgctcaggtgcgaaagcgtggggagcaaacaggattagataccctggtagtccgcgccgtaaacgatgtcgacttggaggctgttcccgtgaggagtggcttccggagctaacgcgttaagtcgaccgcctggggagtacggccgcaaggttaaaactcaaatgaattgacgggggcccgcacaagcggtggagcatgtggtttaattcgatgcaacgcgaagaaccttacctggccttgacatccacggaactgtgcagagatgcgcgggtgccttcgggagccgtgagacaggtgctgcatggctgtcgtcagctcgtgttgtgaaatgttgggttaagtcccgcaacgagcgcaacccttatcctttgttgccagcgattgggtcgggaactcaaaggagactgccggtgataaaccggaggaaggtggggatgacgtcaagtcatcatggcccttacggccagggctacacacgtgctacaatggcgcatacaaagagaagcgacctcgcgagagcaagcggacctcataaagtgcgtcgtagtccggatcggagtctgcaactcggctccgtgaagtcggaatcgctagtaatcgtggatcagaatgccacggtgaatacgttcccgggccttgtacacaccgcc

SEQ ID NO: 890 - DNA, 1462 bp, Artificial Sequence
  Synthetic polymer
aacgctggcggcaggcctaacacatgcaagtcgagcggtaacacagaggagcttgctccttgggtgacgagcggcggacgggtgagtaatgcctggggatctgcccgatagagggggataactacgggaaactgtagctaataccgcataacgtctacggaccaaagtgggggctcttcggacctcatgctatcggatgaacccaggtgggattagctagttggtgaggtaatggctcaccaaggcgacgatctctaactggtttgagagaatgaccagtcacactggaactgagacacggtccagactcctacgggaggcagcagtggggaatattgcacaatgggcgcaagcctgatgcagccatgccgcgtgtgtgaagaaggccttcgggttgtaaagcactttcagcgaggaggaaaggttggtagctaataactgccagctgtgacgttactcgcagaagaagcaccggctaactccgtgccagcagccgcggtaatacggagggtgcaagcgttaatcggaattactgggcgtaaagcgcacgcaggcggtttgttaagtcagatgtgaaatccccgagctcaacttgggaactgcatttgaaactggcaagctagagtcttgtagaggggggtagaattccaggtgtagcggtgaaatgcgtagagatctggaggaataccggtggcgaaggcggccccctggacaaagactgacgctcaggtgcgaaagcgtggggagcaaacaggattagataccctggtagtccacgctgtaaacgatgtcgatttggaggttgtgcccttgaggcgtggcttccggagctaacgcgttaaatcgaccgcctggggagtacggccgcaaggttaaaactcaaatgaattgacgggggcccgcacaagcggtggagcatgtggtttaattcgatgcaacgcgaagaaccttacctactcttgacatccacagaactttccagagatggattggtgccttcgggaactctgagacaggtgctgcatggctgtcgtcagctcgtgttgtgaaatgttgggttaagtcccgcaacgagcgcaacccttatcctttgttgccagcgattcggtcgggaactcaaaggagactgccggtgataaaccggaggaaggtggggatgacgtcaagtcatcatggcccttacgagtagggctacacacgtgctacaatggcatatacaaagggcggcaagctagcgatagtgagcgaatcccataaagtatgtcgtagtccggattggagtctgcaactcgactccgtgaagtcggaatcgctagtaatcgcaaatcagaatgttgcggtgaatacgttcccgggccttgtacacaccgcccgtcacaccatgggagtgggttgcaccagaagtagatagcttaaccttcgggagggagtttaccacggtgtgattcatgactggggtgaa

SEQ ID NO: 891 - DNA, 1375 bp, Artificial Sequence
  Synthetic polymer
cctggctcaggacgaacgctggcggcgtgcttaacacatgcaagtcgaacggagcacccttgattgaggtttcggccaaatgataggaatgcttagtggcggactggtgagtaacgcgtgaggaacctgcctctcagagggggacaacagttggaaacgactgctaataccgcatgacacattcgggcggcatcgcctggatgtcaaagattttatcgctgagagatggcctcgcgtctgattagctagttggtgaggtaacggcccaccaaggcgacgatcagtagccggactgagaggttgaccggccacattgggactgagatacggcccagactcctacgggaggcagcagtggggaatattgggcaatggacgcaagtctgacccagcaacgccgcgtgaaggaagaaggctttcgggttgtaaacttcttttgtcagggaagagcagaagacggtacctgacgaataagccacggctaactacgtgccagcagccgcggtaatacgtaggtggcaagcgttgtccggatttactgggtgtaaagggcgtgcagccgggccggcaagtcagatgtgaaatccacgggcttaacccgtgaactgcatttgaaactgttggtcttgagtatcggagaggtaatcggaattccttgtgtagcggtgaaatgcgtagatataaggaagaacaccagtggcgaaggcggattactggacgacaactgacggtgaggcgcgaaagcgtggggagcaaacaggattagataccctggtagtccacgctgtaaacgatggatactaggtgtgcggggactgaccccctgcgtgccgcagttaacacaataagtatcccacctggggagtacgatcgcaaggttgaaactcaaaggaattgacgggggcccgcacaagcggtggattatgtggtttaattcgaagcaacgcgaagaaccttaccaggacttgacatcctactaacgaagtagagatacattaggtgcccttcggggaaagtagagacaggtggtgcatggttgtcgtcagctcgtgtcgtgagatgttgggttaagtcccgcaacgagcgcaacccctattgttagttgctacgcaagagcactctagcgagactgccgttgacaaaacggaggaaggtggggacgacgtcaaatcatcatgccccttatgtcctgggctacacacgtaatacaatggcggtcaacagagggatgcaaagccgcgaggcagagcgaacccctaaaagccgtcccagttcggatcgcaggctgcaacccgcctgcgtgaagtcggaatcgctagtaatcgcggatcagcatgccgcggtgaatacgttcccgggccttgcacacaccgcc

SEQ ID NO: 892 - DNA, 1388 bp, Artificial Sequence
  Synthetic polymer
cctggctcatgatgaacgctagcgacaggcctaacacatgcaagtcgaggggcagcgggtgaggtagcaatacctttgccggcgaccgtgcgcacgggctgagtaacacgtatgcaatccacctgtaacagggggataacccggagaaatccggactaataccccataatatgggctctccgcatggagggtccattaaagagagcaattttggttacagacgagcatgcgctccattagccagttggcggggtagcggcccaccaaagcgacgatggataggggttctgagaggaaggtcccccacattggaactgagacacggtccaaactcctacgggaggcagcagtgaggaatattgatcaatgttcggcagactgaaccagccaagtcgcgtgagggaagacggccctacggcttgtaaacctcttttgtcggagagtaaagtacgctacgtgtagcgtattgcaagtatccgaagaaaaagcatcggctaactccgtgccagcagccgcggtaatacggaggatgcaagcgttatccggatttattgggtttaaagggtgcgtaggcggtacgccaagtcagcggtgaaattttcgggctcaacccggactgtgccgttgaaactggcgagctagagtgcacaagaggcaggcggaatgcgtggtgtagcggtgaaatgcatagatatcacgcagaacctcgattgcgaaggcagcctgctagggtgcgacagacgctgaggcacgaaagcgtgggtatcgaacaggattagataccctggtagtccacgcagtaaacgatgaatactaactgtttgcgatacaatgtaagcggtacagcgaaagcgttaagtattccacctggggagtacgccggcaacggtgaaactcaaaggaattgacgggggcccgcacaagcggaggaacatgtggtttaattcgatgatacgcgaggaaccttacccgggctcaaacgcagggggaatatatatgaaagtatatagctagcaatagtcacctgcgaggtgctgcatggttgtcgtcagctcgtgccgtgaggtgtcggcttaagtgccataacgagcgcaacccctatcgacagttactaacgggtcaagccgaggactctgtcgagactgccggcgcaagccgcgaggaaggtggggatgacgtcaaatcagcacggcccttacgtccggggcgacacacgtgttacaatggcaggtacagaaggcagccagtcagcaatgacgcgcgaatcccgaaaacctgtctcagttcggattggagtctgcaacccgactccatgaagctggattcgctagtaatcgcgcatcagccatggcgcggtgaatacgttcccgggccttgtacacaccgcc

SEQ ID NO: 893 - DNA, 1379 bp, Artificial Sequence
  Synthetic polymer
cctggctcacattgaacgctggcggcatgctttacacatgcaagtcgaacggcagcgaggggagcttgctccctggcggcgagtgacgcacggatgagtaatacatcggaacgtgacttctagtggggcagaactgcccgaaaggacagctaataccgccggagacctgagggtgaaagcgggggatcgcaagacctcgcgctgtaagagcggccgatgtccgattagctagttggtgaggtaaaggctcaccaaggcgacgatcggtagctggtctgagaggacgaccagccacactgggactgagacacggcccagactcctacggcaggcagcagtgggaaattttggacaatgggggcaaccctgatccagccatgccgcgtgcaggatgaaggtcttcggattgtaaactgcttttgtcagggacgaaaagggatgcgataacaccgcattccgctgacggtacctgaagaataagcaccggctaactacgtgccagcagccgcggtaatacgtagggtgcaagcgttaatcggaattactgggcgtaaagcgtgcgcaggcggttctgtaagatagatgtgaaatccccgggctcaacctgggaattgcatatatgactgcaggacttgagtttgtcagaggagggtggaattccacgtgtagcagtgaaatgcgtagatatgtggaaaaacaccgatggcgaaggcagccctctgggacatgactgacgctcatgcacgaaagcgtggggagcaaacaggattagataccctggtagtccacgccctaaacgatgtctactagttgttggggacgatagtccttggtaacgcagctaacgcgtgaagtagcccgcctggggagtacgctcgcaagattaaaactcaaaggaattgacggggacccgcacaagcggtggatgatgtggattaattcgatgcaacgcgaaaaaccttacctagccttgacatgccaggaaggtctgagagatcagaccgtgcccgcaagggaatctggacacaggtgctgcatggcagtcgtcagctcgtgtcgtgagatgttgggttaagtcccgcaacgagcgcaacccttgtcattagttgctacgaaagggcactctaatgagactgccggtgacaaaccggaggaaggtggggatgacgtcaagtcctcatggcccttatggctagggcctcacacgtcatacaatggtcggaacagagggaagcgaagccgcgaggtgaagccaatcccagaaaaccgatcgtagtccggattgcagtctgcaactcgactgcatgaagtcggaatcgctagtaatcgcggatcagcatgccgcggtgaatacgttcccgggtcttgtacacaccgcc

SEQ ID NO: 894 - DNA, 1377 bp, Artificial Sequence
  Synthetic polymer
cctggctcaggatgaacgctggcggcgtgcttaacacatgcaagtcgaacgaagcacttaagattgattcttcggatgaagtcttttgtgactgagtggcggacgggtgagtaacgcgtgggtaacctgcctcatacagggggataacagttagaaatgactgctaataccgcataagcgcacagggctgcatggcctggtgtgaaaaactccggtggtatgagatggacccgcgtctgattagctagttggtgaggtaacggcccaccaaggcgacgatcagtagccgacctgagagggtgatcggccacattgggactgagacacggcccaaactcctacgggaggcagcagtggggaatattgcacaatgggggaaaccctgatgcagcgacgccgcgtgaaggaagaagtatttcggtatgtaaacttctatcagcagggaagaaaatgacggtacctgactaagaagccccggctaactacgtgccagcagccgcggtaatacgtagggggcaagcgttatccggatttactgggtgtaaagggagcgtaggcggtcagacaagtcagaagtgaaagcccggggctcaactccgggactgcttttgaaactgcctgactagattgcaggaaaggtaagtggaattcctagtgtagcggtgaaatgcgtagatattaggaggaacaccagtggcgaaggcggcttactggactgtaaatgacgctgaggctcgaaagcgtggggagcaaacaggattagataccctggtagtccacgccgtaaacgatgaatactaggtgttggggagcacagctcttcggtgccgcagtaaacgcaataagtattccacctggggagtacgttcgcaagaatgaaactcaaaggaattgacggggacccgcacaagcggtggagcatgtggtttaattcgaagcaacgcgaagaaccttaccaagtcttgacatcccggtgaccagagggtaatgcctctttctcttcggagcatcggagacaggtggtgcatggttgtcgtcagctcgtgtcgtgagatgttgggttaagtcccgcaacgagcgcaacccttatctttagtagccagcggttcggccgggcactctagagagactgccagggataacctggaggaaggtggggatgacgtcaaatcatcatgccccttatgacttgggctacacacgtgctacaatggcgtctacaaagagcggcaagcctgtgaaggcaagcgaatctcataaaggacgtctcagttcggattgaagtctgcaacccgacttcatgaagctggaatcgctagtaatcgcgaatcagcatgtcgcggtgaatacgttctcgagcgttgtacacaccgcccg

SEQ ID NO: 895 - DNA, 1378 bp, Artificial Sequence
  Synthetic polymer
cctggctcaggatgaacgctggcggcgtgcttaacacatgcaagtcgaacgaagcatttgcgacagatttcttcgggatgaagttgcttatgactgagtggcggacgggtgagtaacgcgtgggtaacctgccttgtactgggggataacagctggaaacggctggtaataccgcataagcgcacaatgttgcatgacatggtgtgaaaaactccggtggtataagatggacccgcgtctgattagctagttggtgagataacagcccaccaaggcgacgatcagtagccgacctgagagggtgaccggccacattgggactgagacacggcccagactcctacgggaggcagcagtggggaatattgcacaatggaggaaactctgatgcagcgacgccgcgtgagtgaagaagtaattcgttatgtaaagctctatcagcagggaagatagtgacggtacctgactaagaagctccggctaaatacgtgccagcagccgcggtaatacgtatggagcaagcgttatccggatttactgggtgtaaagggagtgtaggtggccatgcaagtcagaagtgaaaatccggggctcaaccccggaactgcttttgaaactgtaaggctggagtgcaggaggggtgagtggaattcctagtgtagcggtgaaatgcgtagatattaagaggaacaccagtggcgaaggcggctcactggactgtaactgacactgaggcttgaaagcgtggggagcaaacaggattaaataccttggttgtccacgccgtaaacgatgaatattaggtgtcggggcccatatgggcttcggtgccgcagcaaacgcaataagtattccacctggggagtacgttcccaagaatgaaactcaaaggaattgacggggacccgcacaagcggtggagcatgtggtgtaattcgaagcaacgcgaagaaccttaccaagtcttgacatcccactgaccggacagtaatgtgtcctttccttcgggacagtggtgacaggtggtgcatggtcgtcgtcagctcgcgtcgtgagatgttgggttaagttccgcaacgagcgcaacccctatccttagtagccagcagtaagatgggcactctagggagactgccagggataacctggaggaaggtggggatgacgtcaaatcatcatgccccttatgacttgggctacacacgtgctacaatggcgtaaacaaagtgaagcgaagtcgtgaggtcaagcaaatcacaaaaataacgtctcagttcggattgtagtctgcaactcgactacatgaagctggaatcgctagtaatcgcagatcagaatgctgcggtgaatacgttcccgggtcttgttacaccgcccg

SEQ ID NO: 896 - DNA, 1378 bp, Artificial Sequence
  Synthetic polymer
cctggctcaggatgaacgctagcgacaggcctaacacatgcaagtcgaggggcatcaggtatcagcttgctgatacgctggcgaccggcgcacgggtgagtaacgcgtatggaatctgtctgtaacagggggataacccggagaaattcggactaataccccatgccgccggttttttgcatgaaaggccggcgaaagggtaaccggttacaggtgatcatgcgttccattagctggttggcggggtaacggcccaccaaggcgacgatggataggggttctgagaggaaggtcccccacactggtactgagacacggaccagactcctacgggaggcagcagtgaggaatattggtcaatgggcggaagcctgaaccagccaagtcgcgtgaaggaagactgccctacgggttgtaaacttcttttgtatgggagtaaaagagtccacgtgtggctattgcaagtaccatacgaataagcatcggctaactccgtgccagcagccgcggtaatacggaggatgcgagcgttatccggatttattgggtttaaagggtgcgtaggcggccctataagtcagcggtgaaatgttccggctcaaccgggaaactgccgttgaaactgtaggactagagtccacaagaggtatgcggaatgcgtggtgtagcggtgaaatgcatagatatcacgcagaaccccgattgcgaaggcagcatactggggtgaaacagacgctgaagcacgaaagcgtgggtatcgaacaggattagataccctggtagtccacgccgtaaacgatgaatactaactgtttgcgatatacagtaagcggtacagcgaaagcgttaagtattccacctggggagtacgccggcaacggtgaaactcaaaggaattgacgggggcccgcacaagcggaggaacatgtggtttaattcgatgatacgcgaggaaccttacccgggctcaaacgcaggaggaatgcgtatgaaagtacgcagctagcaatagccgcctgcgaggtgctgcatggttgtcgtcagctcgtgccgtgaggtgtcggcttaagtgccataacgagcgcaacccttatcgatagttactaccaggtgaagctgaggactcaatcgagactgccagcgtaagctgcgaggaaggtggggatgacgtcaaatcagcacggcccttacgtccggggcgacacacgtgttacaatggcagggacagcgagtagccaggcagcaatgccgcgccaatctcgaaaccctgtcccagttcggatcggagtctgcaactcgactccgtgaagctggattcgctaggaatcgcgcatcagccatggcgcggtgaatacgttcccgagcgttgtacacaccg

SEQ ID NO: 897 - DNA, 1375 bp, Artificial Sequence
  Synthetic polymer
cctggctcagtatgaacgctagcgacaggcttaacacatgcaagtcgaggggcagcattcggtagcaatactgagatggcgaccggcgcacgggtgagtaacgcgtatgtaacctgcctgatacaggggcatagcccatggaaacgtggattaattccccatactacttttgtgaggcatcttatgagagtgaaatcttcggggtatcagatggacatgcgtcctattaggcagttggcggggtaacggcccaccaaaccgatgataggtaggggttctgagaggaaggtcccccacattggaactgagacacggtccaaactcctacgggaggcagcagtgaggaatattggtcaatgggcgatagcctgaaccagccaagtcgcgtgagggatgactgccctatgggttgtaaacctcttttataagggaagaataagttctacgagtagaatgatgcctgtaccttatgaataagcatcggctaactccgtgccagcagccgcggtaatacggaggatgcgagcgttatccggatttattgggtttaaagggtgcgtaggcggtatattaagttagtggttaaacgtcagagctaaactttgatttgccattaatactggtttacttgagtacagacgaggtaggcggaataagttaagtagcggtgaaatgcatagatataacttagaactccgatagcgaaggcagcttaccagactgtaactgacgctgaagcacgagagcgtgggtagcgaacaggattagataccctggtagtccacgccgtaaacgatgctcactggttctgtgcgacatacagtacgggattaagcgaaagtattaagtgagccacctggggagtacgtcggcaacgatgaaactcaaaggaattgacgggggcccgcacaagcggaggaacatgtggtttaattcgatgatacgcgaggaaccttacctgggtttaaatgggaaatgccttagttggaaacagctattctcttcggagcgtttttcaaggtgctgcatggttgtcgtcagctcgtgccgtgaggtgtcgggttaagtcccataacgagcgcaacccttatctttagttgccatcaggtaatgctgggcactctaaagagactgccgccgtaaggtgagaggaaggtggggatgacgtcaaatcagcacggcccttacacccagggctacacacgtgttacaatggccggtacagagggccgctaccccgtgaggggatgccaatctcaaaagccggtcgtagttcggattggagtctgtaacccgactccatgaagttggattcgctagtaatcgcgcatcagccatggcgcggtgaatacgttcccgggccttgtacacaccg

SEQ ID NO: 898 - DNA, 1436 bp, Artificial Sequence
  Synthetic polymer
gatgaacgctggcggcatgcctaacacatgcaagtcgagcgagttgatcccttcggggtgaagctagcggcggacgggtgagtaacacgtgggcaacctgcctcatagaggggaatagccttccgaaaggaagattaataccgcataagattgtagcttcgcatgaagcagcaattaaaggagcaatccgctatgagatgggcccgcggcgcattagctagttggtgaggtaacggctcaccaaggcgacgatgcgtagccgacctgagagggtgatcggccacattgggactgagacacggcccagactcctacgggaggcagcagtggggaatattgcacaatgggggaaaccctgatgcagcaatgccgcgtgagtgatgacggccttcgggttgtaaagctctgtcttcggggacgataatgacggtacccgaggaggaagccacggctaactacgtgccagcagccgcggtaatacgtaggtggcaagcgttgtccggatttactgggcgtaaagggagcgtaggcggacttttaagtgagatgtgaaatacccgagctcaacttgggtgctgcatttcaaactggaagtctagagtgcaggagaggagaagggaattcctagtgtagcggtgaaatgcgtagagattaggaagaacaccagtggcgaaggcgcttctctggactgtaactgacgctgaggctcgaaagcgtggggagcaaacaggattagataccctggtagtccacgccgtaaacgatgaatactaggtgtaggggttgtcatgacctctgtgccgccgctaacgcattaagtattccgcctggggagtacggtcgcaagattaaaactcaaaggaattgacgggggcccgcacaagcagcggagcatgtggtttaattcgaagtaacgcgaagaaccttacctagacttgacatgtcctgaattaccagtaatgtgggaagtcccttcggggacaggaacacaggtggtgcatggttgtcgtcagctcgtgtcgtgagatgttgggttaagtcccgcaacgagcgcaacccttattgttagttggtaccattaagttgaccactctagcgagactgcccgggttaaccgggaggaaggtggggatgacgtcaaatcatcatgccccttatgtctagggctacacacgtgctacaatggcaagtacaaagagatgcaataccgcgaggtggagccaaactcaaaaacttgtctcagttcggattgtaggctgaaactcgcctacatgaagccggagttgctagtaatcgcgaatcagaatgtcgcggtgaatacgttcccgggtcttgtacacaccgcccgtcacaccatgagagttggcaatacccgaagtccgtgagctaacgcgcaagcgaggcagcggccgaaggtagggtcagcgattggggtg

SEQ ID NO: 899 - DNA, 1374 bp, Artificial Sequence
  Synthetic polymer
cctggctcacgatgaacgctggcggcgtgcctaacacatgcaagtcgagcggataacagggaagtgcttgcacggaactgtttttagcggcggacgggtgagtaacgcgtgaacaagctgtccttcacagggggataacacttggaaacaggtgctaataccgcataagaccacaggggtgcatgctccaggggtcaaaggagcaatccggtgaagggtgcgttcgcgtcccattagatagttggcggggcaacggcccaccaagtcgacgatgggtagccgacctgagagggtgatcggccacactgggactgagacacggcccagactcctacgggaggcagcagtggggaatattgggcaatgggcgaaagccttacccagcaacgccgcgtgagggaagaaggttttcggattgtaaacctctgtcctgggggacgaaggaagtgacggtaccccgggaggaagccccggctaactacgtgccagcagccgcggtaatacgtagggggcgagcgttgtccggaattattgggcgtaaagggcgcgtagacggctgagtaagttactggtgaaagcccagcttttaaggctggaattgccggtaatactgttcagcttgagtgcaggagagggaagcggaattcctagtgtagcggtgaaatgcgtagatattaggagaaccaccattggcgaaggcggctttctggactgtaactgacgttgaggcccgaaagcgtgggaagcaaacaggattagataccttggtagtccacgccgtaaacgatggatgctaggtgtgggaggtatcgaccccttccgtgccgcagttaacgcaataagcatcccgcctggggagtacggccgcaaggttgaaactcaaaggaattgacgggggcccgcacaagcagcggagcatgtggtttaattcgacgcaacgcgaagaaccttaccaggacttgacatctgattaagcttgtggaaacacaaggtcccttcgggggaatcaagacaggtggtgcatggttgtcgtcagctcgtgtcgtgagatgttgggttaagtcccgcaacgagcgcaacccttatttccagttactaacaggcagtgctgaggactctggagagaccgccggggacaactcggaggaaggtggggacgacgtcaaatcatcatgccccttatgttctgggctacacacgtgctacaatggtgactacaaagagaagcgaaatcgtaaggtagagcggatctcaaaaaagtcatctcagttcggattgtgggctgcaacccgcccacatgaagtcggagttgctagtaatcgcggatcagcatgccgcggtgaatacgttcccgggccttgtacacaccgcccg

SEQ ID NO: 900 - DNA, 1375 bp, Artificial Sequence
  Synthetic polymer
cctggctcaggacgaacgctggcggcgtgcctaacacatgcaagtcgaacggaacttattaaatgaagtcttcggatgggttttggtaagtttagtggcggacgggtgagtaacgcgtgagtaacctgccttcaagaggggaataacgttctgaaaagaacgctaataccgcataacatacggatgtcgcatggcaaccgtatcaaagattttatcgcttgaagatggactcgcgtccgattagccagttggcggggtaacggcccaccaaagcgacgaccggtagccggactgagaggttgaacggccacattgggactgagacacggcccagactcctacgggaggcagcagtgggggatattgcgcaatgggggcaaccctgacgcagcaacgccgcgtgaacgatgaaggtcttcggattgtaaagttcttttattaaggacgaagaagtgacggtacttaatgaataagctccggctaactacgtgccagcagccgcggtaatacgtagggagcaagcgttgtccggatttactgggtgtaaagggtgcgtaggcggcagagcaagtcagatgtgaaatccgtgggcttaacccacgaactgcatttgaaactgttctgcttgagtgaagtagaggcaggcggaattccctgtgtagcggtgaaatgcgtagagatagggaggaacaccagtggcgaaggcggcctgctgggctttaactgacgctgaggcacgaaagcgtgggtagcaaacaggattagataccctggtagtccacgccgtaaacgatgattactaggtgtggggggtctgaccccctccgtgccgcagttaacacaataagtaatccacctggggagtacggccgcaaggttgaaactcaaaggaattgacgggggcccgcacaagcagtggagtatgtggtttaattcgaagcaacgcgaagaaccttaccaggtcttgacatccaactaacgaggtagagatacattaggtgcccttcggggaaagttgagacaggtggtgcatggttgtcgtcagctcgtgtcgtgagatgttgggttaagtcccgcaacgagcgcaacccttgctattagttgctacgcaagagcactctaataggactgccgttgacaaaacggaggaaggtggggacgacgtcaaatcatcatgccccttatgacctgggctacacacgtactacaatggccatcaacagagggaagcaaagcagcgatgcagagcaaacccctaaaaatggtcccagttcagattgcaggctgcaactcgcctgtatgaagtcggaattgctagtaatcgcggatcagcatgccgcggtgaatacgttcccgggccttgtacacaccgccc

SEQ ID NO: 901 - DNA, 1381 bp, Artificial Sequence
  Synthetic polymer
cctggctcagattgaacgctggcggcatgctttacacatgcaagtcgaacggcagcacagggagcttgctcccgggtgacgagtggcgcacgggtgagtaatacatcggaacgtgtcctgttgtgggggataactgctcgaaagggtggctaataccgcatgagacctgagggtgaaagcgggggatcgcaagacctcgcgcaattggagcggccgatgcccgattagctagttggtgaggtaaaggctcaccaaggcgacgatcggtagctggtctgagaggacgaccagccacactgggactgagacacggcccagactcctacgggaggcagcagtggggaattttggacaatgggggcaaccctgatccagccatgccgcgtgcaggatgaaggccttcgggttgtaaactgcttttgtcagggacgaaaaggaccgtgttaataccatggtctgctgacggtacctgaagaataagcaccggctaactacgtgccagcagccgcggtaatacgtagggtgcaagcgttaatcggaattactgggcgtaaagcgtgcgcaggcggttctgtaagacagatgtgaaatccccgggcttaacctgggaattgcatttgtgactacaggactagagttcatcagaggggggtggaattccaagtgtagcagtgaaatgcgtagatatttggaagaacaccaatggcgaaggcagccccctgggatgcgactgacgctcatgcacgaaagcgtggggagcaaacaggattagataccctggtagtccacgccctaaacgatgtctactggttgttggggttttttaaccttggtaacgaagctaacgcgtgaagtagaccgcctggggagtacggtcgcaagattaaaactcaaaggaattgacggggacccgcacaagcggtggatgatgtggattaattcgatgcaacgcgaaaaaccttacctagccttgacatgccaggaatcctgaagagattcgggagtgcccgcaagggaatctggacacaggtgctgcatggctgtcgtcagctcgtgtcgtgagatgttgggttaagtcccgcaacgagcgcaacccttgtcactagttgctacgcaagagcactctagtgagactgccggtgacaaaccggaggaaggtggggatgacgtcaagtcctcatggcccttatggctagggcctcacacgtcatacaatggtcggaacagagggcagcgaagccgcgaggtggagcaaatcccagaaaaccgatcgtagtccggattgcagtctgcaactcgactgcatgaagtcggaatcgcaaggaatcgcggatcagcatgccgcggtgaatacgtccctaaatggtgtacacaccgcccg

SEQ ID NO: 902 - DNA, 1374 bp, Artificial Sequence
  Synthetic polymer
cctggctcaggatgaacgctggcggcgtgcttaacacatgcaagtcgaacggaggacccctgacggagttttcggacaacagatgggaatccttagtggcggacgggtgagtaacgcgtgaggaacctgccttggagaggggaataacacagagaaatttgtgctaataccgcatgatgcagttgggtcgcatggctctgactgccaaagattttatcgctctgagatggcctcgcgtctgattaggtagttggtggggcaacggcccaccaagccgacgatcagtagccggactgagaggttgaccggccacattgggactgagacacggcccagactcctacgggaggcagcagtggggaatattgggcaatgggcgcaagcctgacccagcaacgccgcgtgaaggaagaaggctttcgggttgtaaacttcttttattggggacgaaacaaatgacggtacccattgaataagctccggctaactacgtgccagcagccgcggtaatacgtagggagcaagcgttatccggatttactgggtgtaaagggcgtgtaggcgggagtgcaagtcagatgtgaaaactatgggctcaacccatagcctgcatttgaaactgtacttcttgagtactggagaggcaggcggaattccgtgtgtagcggtgaaatgcgtagatatacggaggaacaccagtggcgaaggcggcctgctggacagcaactgacgctgaggcgcgaaagcgtggggagcaaacaggattagataccctggtagtccacgctgtaaacgatggatactaggtgtggggggactgaccccctccgtgccgcagttaacacaataagtatcccacctggggagtacgatcgcaaggttgaaactcaaaggaattgacgggggcccgcacaagcggtggagtatgtggtttaattcgaagcaacgcgaagaaccttaccagggcttgacatcccggtgaccgctctagagatagagtttttccttcgggaacaccggtgacaggtggtgcatggttgtcgtcagctcgtgtcgtgagatgttgggttaagtcccgcaacgagcgcaacccttattgttagttgctacgcaagagcactctagcgagactgccgttgacaaaacggaggaaggtggggacgacgtcaaatcatcatgccccttatgtcctgggctacacacgtactacaatggcggttaacagagggaagcaataccgcgaggtggagcaaacccctaaaagccgtcccagttcggattgcaggctgcaacccgcctgtatgaagttggaatcgctagtaatcgcggatcagcatgccgcggtgaatacgttcccggaccgggtacacaccg

SEQ ID NO: 903 - DNA, 1465 bp, Artificial Sequence
  Synthetic polymer
ggacgaacgctggcggcatgcctaacacatgcaagtcgaacggagattatttcggtaatcttagtggcgaacgggtgagtaacgcgtaggcaacctgccctttagttggggacaacatcccgaaaggggtgctaataccgaatgtgatcacatttccgcatggaattgtgatgaaagatggcctctatttataagctatcgctaaaggatgggcctgcgtctgattagctagttggtggggtaacggctcaccaaggcgatgatcagtagccggtctgagaggatgaacggccacattgggactgagacacggcccagactcctacgggaggcagcagtggggaatcttccgcaatgggcgaaagcctgacggagcaatgccgcgtgagtgatgaaggaattcgttccgtaaagctcttttgtttatgacgaatgtgcagactgtgaataatggtttgtaatgacggtagtaaacgaataagccacggctaactacgtgccagcagccgcggtaatacgtaggtggcgagcgttgtccggaattattgggcgtaaagagcatgtaggcggttttttaagtccggagtgaaaatgcggggctcaaccccgtatggctctggatactggaagacttgagtgcaggagaggaaaggggaattcccagtgtagcggtgaaatgcgtagatattgggaggaacaccagtggcgaaggcgcctttctggactgtgtctgacgctgagatgcgaaagccagggtagcgaacgggattagataccccggtagtcctggccgtaaacgatgggtactaggtgtaggaggtatcgaccccttctgtgccggagttaacgcaataagtaccccgcctggggagtacgtccgcaaggatgaaactcaaaggaattgacgggggcccgcacaagcggtggagtatgtggtttaattcgacgcaacgcgaagaaccttaccaaggcttgacattgagtgaccgccatagagatatggctttcccttcggggacacgaaaacaggtggtgcatggctgtcgtcagctcgtgtcgtgagatgttgggttaagtcccgcaacgagcgcaacccctatcctatgttaccagcgggtaatgccggggactcataggagactgccaaggacaacttggaggaaggcggggatgacgtcaagtcatcatgccccttatgtcttgggctacacacgtactacaatggtcgacaacagagggaagcgaagccgcgaggcagagcaaaccccagaaactcgatctcagttcggatcgcaggctgcaacccacctgcgtgaagtcggaatcgctagtaatcgcaggtcagcatactgcggtgaatacgttcccgggccttgtacacaccgcccgtcacaccacgaaagttggtaacacccgaagccggtggggtaacctttaaggagccagccgtctaaggtggggccga

SEQ ID NO: 904 - DNA, 1358 bp, Artificial Sequence
  Synthetic polymer
gatgaacgctagcggcaggcttaacacatgcaagtcgaggggcagcatggtttgtagcaatacaaactgatggcgaccggcgcacgggtgcgtaacgcgtatgcaacctacccgtaacagggggataacattgagaaatcggtactaataccccataacatcatgaaaggcatctttcgtggttgaaaatttcgatggttacggatgggcatgcgttgtattagctagttggtaaggtaacggcttaccaaggcgacgatacatagggggactgagaggttaaccccccacattggtactgagacacggaccaaactcctacgggaggcagcagtgaggaatattggtcaatggacggaagtctgaaccagccatgccgcgtgcaggacgacggctctatgagttgtaaactgcttttgtattagggtaaacacctctacgtgtaggggcttgaaagtataatacgaataaggatcggctaactccgtgccagcagccgcggtaatacggaggatccaagcgttatccggatttattgggtttaaagggtgcgtaggcggtttgataagttagaggtgaaataccggtgctcaacaccggaactgcctctaatactgttgaactagagagtagttgcggtaggcggaatgtatggtgtagcggtgaaatgcttagagatcatacagaacaccgattgcgaaggcagcttaccaaactatatctgacgttgaggcacgaaagcgtggggagcaaacaggattagataccctggtagtccacgcagtaaacgatgataactcgttgtcggcgatacacagtcggtgactaagcgaaagcgataagttatccacctggggagtacgttcgcaagaatgaaactcaaaggaattgacgggggcccgcacaagcggaggaacatgtggtttaattcgatgatacgcgaggaaccttacccgggcttgaaagttatcgacgattctgggaacaggatttcccttcggggcgagaaactaggtgctgcatggttgtcgtcagctcgtgccgtgaggtgtcgggttaagtcccataacgagcgcaacccctaccgttagttgccatcaggtgaagctgggcactctggcgggactgccggtgtaagccgagaggaaggtggggatgacgtcaaatcagcacggcccttacgtccggggccacacacgtgttacaatggtaggtacagagggcagctacccagcgatgggatgcgaatctcgaaagcctatctcagttcggattggaggctgaaacccgcctccatgaagttggattcgctagtaatcgcgcatcagccatggcgcggtgaatacgttcccgggcct

SEQ ID NO: 905 - DNA, 1480 bp, Artificial Sequence
  Synthetic polymer
ggctcaggatgaacgctggcggcgtgcttaacacatgcaagtcgaacggagagcccatgaaggagttttcggacaactgactgggtttcttagtggcggacgggtgagtaacgcgtgagtaacctgccttggagtggggaataacagcccgaaagggttgctaataccgcataatgcatttgagctgcatggctctgaatgccaaagatttatcgctctgagatggactcgcgtctgattagctagttggcggggcaacggcccaccaaggcgacgatcagtagccggactgagaggttggccggccacattgggactgagacacggcccagactcctacgggaggcagcagtggggaatattgggcaatgggcgcaagcctgacccagcaacgccgcgtgaaggaagaaggctttcgggttgtaaacttcttttaagagggacgaataaagtgacggtacctcttgaataagccacggctaactacgtgccagcagccgcggtaatacgtaggtggcaagcgttatccggatttactgggtgtaaagggcgtgtaggcgggattgcaagtcaggcgtgaaaactgggggctcaacctccagcctgcgtttgaaactgtagttcttgagtgatggagaggcaagcggaattccgtgtgtagcggtgaaatgcgtagatatacggaggaacaccagtggcgaaggcggcttgctggacattaactgacgctgaggcgcgaaagcgtggggagcaaacaggattagataccctggtagtccacgctgtaaacgatggatactaggtgtggggggtctgaccccctccgtgccgcagttaacacaataagtatcccacctggggagtacgatcgcaaggttgaaactcaaaggaattgacgggggcccgcacaagcggtggagtatgtggtttaattcgaagcaacgcgaagaaccttaccagggcttgacatcctactaacgaaccagagatggattaggtgcccttcggggaaagtagagacaggtggtgcatggttgtcgtcagctcgtgtcgtgagatgttgggttaagtcccgcaacgagcgcaacccttattgttagttgctacgcaagagcactctagcgagactgccgttgacaaaacggaggaaggtggggacgacgtcaaatcatcatgccccttatgtcctgggccacacacgtactacaatggcggttaacagagggaggcaaaaccgcgaggtggagcaaatccctaaaagccgtcccagttcggattgcaggctgaaacccgcctgtatgaagttggaatcgctagtaatcgcggatcagcatgccgcggtgaatacgttcccgggccttgtacacaccgcccgtcacaccatgagagtcgggaacacccgaagtccgtagcctaacagcaatgagggcgcggccgaaggtgggttcgataattggggtgaagtcgtaaaaaggtagcc

SEQ ID NO: 906 - DNA, 1476 bp, Artificial Sequence
  Synthetic polymer
ggctcaggatgaacgctggcggcgtgcttaacacatgcaagtcgaacggagagccattgaaagaggattcgtccaattgatatggtttcttagtggcggacgggtgagtaacgcgtgagtaacctgccttggagtggggaataacacagagaaatttgtgctaataccgcataatgcagttgggtcgcatggctctgactgccaaagatttatcgctctgagatggactcgcgtctgattagctagttggcggggtaacggcccaccaaggcgacgatcagtagccggactgagaggttggccggccacattgggactgagacacggcccagactcctacgggaggcagcagtggggaatattgggcaatgggcgcaagcctgacccagcaacgccgcgtgaaggaagaaggctttcgggttgtaaacttcttttctcagggacgaagaaagtgacggtacctgaggaataagccacggctaactacgtgccagcagccgcggtaatacgtaggtggcaagcgttatccggatttactgggtgtaaagggcgtgtaggcgggactgcaagtcagatgtgaaaactcagggctcaaccctgagcctgcatttgaaactgtagttcttgagtactggagaggcagacggaattcctagtgtagcggtgaaatgcgtagatattaggaggaacaccagtggcgaaggcggtctgctggacagcaactgacgctgaggcgcgaaagcgtggggagcaaacaggattagataccctggtagtccacgctgtaaacgatggatactaggtgtggggggtctgaccccctccgtgccgcagttaacacaataagtatcccacctggggagtacgatcgcaaggttgaaactcaaaggaattgacgggggcccgcacaagcggtggagtatgtggtttaattcgaagcaacgcgaagaaccttaccagggcttgacatcccgaggcccggtgtagagatacacctttctcttcggagacctcggtgacaggtggtgcatggttgtcgtcagctcgtgtcgtgagatgttgggttaagtcccgcaacgagcgcaacccttattgttagttgctacgcaagagcactctagcgagactgccgttgacaaaacggaggaaggtggggacgacgtcaaatcatcatgccccttatgtcctgggctacacacgtactacaatggtggttaacagagggaggcaaagccgcgaggcagagcaaacccctaaaagccatcccagttcggatcgcaggctgcaacccgcctgcgtgaagttggaatcgctagtaatcgcggatcagcatgccgcggtgaatacgttcccgggccttgtacacaccgcccgtcacaccatgagagtcgggaacacccgaagtccgtagcctaaccgcaaggagggcgcggccgaaggtgggttcgataattggggtgaagtcgtaacaaggta

SEQ ID NO: 907 - DNA, 1460 bp, Artificial Sequence
  Synthetic polymer
ctcaggatgaacgctggcggcgtgcttaacacatgcaagtcgaacgaagcatttacgacagatcttttcggagtgaagttgtttatgactgagtggcggacgggtgagtaacgcgtgggtaacctgcctcatacagggggatagcagctggaaacggctggtaataccgcataagcgcacagaatcgcatgattcagtgtgaaaaactccggtggtatgagatggacccgcgtctgattagctagttggtgaggtaacggcccaccaaggcgacgatcagtagccgacctgagagggtgaccggccacattgggactgagacacggcccagactcctacgggaggcagcagtggggaatattgcacaatggaggaaactctgatgcagcgacgccgcgtgagtgaagaagtaattcgttatgtaaagctctatcagcagggaagatagtgacggtacctgactaagaagctccggctaaatacgtgccagcagccgcggtaatacgtatggagcaagcgttatccggatttactgggtgtaaagggagtgtaggtggcatcacaagtcagaagtgaaagcccggggctcaaccccgggactgcttttgaaactgtggagctagagtgcaggaggggcaagtggaattcctagtgtagcggtgaaatgcgtagatattaggaggaacaccagtggcgaaggcggcttgctggactgtaactgacactgaggctcgaaagcgtggggagcaaacaggattagataccctggtagtccacgccgtaaacgatgaatactaggtgtcgggggtcaaaagaccttcggtgccgcagcaaacgcaataagtattccacctggggagtacgttcgcaagaatgaaactcaaaggaattgacggggacccgcacaagcggtggagcatgtggtttaattcgaagcaacgcgaagaaccttaccaagtcttgacatcccactggcgtaccagtaatgtggtatttccttcgggacagtggtgacaggtggtgcatggttgtcgtcagctcgtgtcgtgagatgttgggttaagtcccgcaacgagcgcaacccttatccttagtagccagcaggtgaagctgggcactctagggagactgccagggataacctggaggaaggtggggatgacgtcaaatcatcatgccccttatgacttgggctacacacgtgctacaatggcgtaaacaaagtgaagcgaaaccgtgaggtcaagcaaatcacaaaaataacgtctcagttcggattgtagtctgcaactcgactacatgaagctggaatcgctagtaatcgcagatcagaatgctgcggtgaatacgttcccgggtcttgtacacaccgcccgtcacaccatgggagtcggaaatgcccgaagtctgtgacctaacgtaagaaggagcagccgaaggcaggtctgataactggggtg

SEQ ID NO: 908 - DNA, 1334 bp, Artificial Sequence
  Synthetic polymer
gatgaacgctggcggcgcgcctaacacatgcaagtcgaacggttaaagcacctccgggtgtgaataaagtggcgaacggctgagtaacacgtgggcaacctgcccctcgctccgggacagcctcgggaaaccgtgggtaataccggatactccgcggcccccgcatgggggcggcgggaaagcccagacggcgagggatgggcccgcggcctgttagctagttggtggggcaacggcccaccaaggcgattatgggtagctgggttgagagaccgaccagccagattgggactgagacacggcccagactcctacgggaggcagcagtggggaatcttgcgcaatgggcgaaagcctgacgcagcgacgccgcgtgcgggacgaaggccttcgggtcgtaaaccgctttcagcagggacgagggggcaacctgacggtacctgcagaagaagccccggctaactacgtgccagcagccgcggtaatacgtagggggcgagcgttatccggattcattgggcgtaaagcgctcgtaggcggtccgttaggtcgggagtcaaatccgggggctcaacccccgcccgctcccgataccggcggacttgagtttggtaggggaaggcggaattccaagtgtagcggtggaatgcgcagatatttggaagaacaccggtggcgaaggcggccttctgggccacaactgacgctgaggagcgaaagctaggggagcgaacaggattagataccctggtagtcctagccgtaaacgatgggcactaggtgtggggggagcctccctccgtgccgcagctaacgcattaagtgccccgcctggggagtacggccgcaaggctaaaactcaaaggaattgacgggggcccgcacaagcagcggagcatgtggcttaattcgaagcaacgcgaagaaccttaccagggcttgacatctaggtgaagcggcggaaacgccgtggccgagaggagcctagacaggtggtgcatggctgtcgtcagctcgtgtcgtgagatgttgggttaagccccgcaacgagcgcaaccctcgtcgcatgttgccagcggttcggccgggcacccatgcgagaccgccggcgtcaagccggaggaaggtggggatgacgtcaagtcatcatgccccttatgtcctgggctgcacacgtgctacaatggccggcacagagggctgccaggcggcgacgccgagcgaatccccaaagccggccccagttcggattggaggctgcaacccgcctccatgaagtcggagttgctagtaatcgcggatcagcacgccgcggtgaatgcgttcccgggcct

SEQ ID NO: 909 - DNA, 1436 bp, Artificial Sequence
  Synthetic polymer
ttgattctggctcaggacgaacgctggcggcacgcctaacacatgcaagtcgaacggtgacagggagcttgctcccttgatcagtggcggacgggtgagtaacacgtgagcaacctgcctatcagagggggacaacagttggaaacgactgctaataccgcataacgtattcgggaggcatcttctgaataccaaagatttatcgctgatagatgggctcgcgtctgattagatagttggtgaggtaacggcccaccaagtcgacgatcagtagccggactgagaggttgaacggccacattgggactgagacacggccccagactcctacgggaggcagcaggtgggggatattggacaatgggggaaaccctgatccagcgatgccgcgtgagggaagaaggttttcggattgtaaacctctgtggacagtgacgataatgacggtagctgtttagaaagccacggctaactacgtgccagcagccgcggtaatacgtaggtggcgagcgttgtccggaattactgggtgtaaagggagtgtaggcgggagagcaagtcagaagtgaaaattatgggcttaacccataacctgcttttgaaactgtttttcttgagtgaggcagaggcaagcggaattcctagtgtagcggtgaaatgcgtagatattaggaggaacaccagtggcgaaggcggcttgctgggcctttactgacgctgaggctcgaaagcgtggggagcaaacaggattagataccctggtagtccacgccgtaaacgatgattactaggtgtggggagttgaacctttccgtgccggagttaacacaataagtaatccacctggggagtacgaccgcaaggttgaaactcaaaggaattgacgggggcccgcacaagcagtggagtatgtggtttaattcgaagcaacgcgaagaaccttaccaggtcttgacatcgagtgaagatggtagagatatcatcgtccttcgggacacgaagacaggtggtgcatggttgtcgtcagctcgtgtcgtgagatgttgggttaagtcccgcaacgagcgcaacccttactattagttgctacgcaagagcactctaataggactgccgttgataaaacggaggaaggtggggatgacgtcaaatcatcatgccctttatgacctgggctacacacgtactacaatggcgtttaacaaagagcagcgaaaccgcgaggtggagcaaatctccaaaaaacgtctcagttcagattgcaggctgcaactcgcctgcatgaagtcggaattgctagtaatcgtaggtcagcatactacggtgaatacgttcccgggccttgtacacaccgcccgtcaaaccatgagagttggcaacacccgaagtcggtagtctaaccgcaaggaggacgccgccgaaggtggggttgatga

SEQ ID NO: 910 - DNA, 1496 bp, Artificial Sequence
  Synthetic polymer
agagtttgatcctggctcaggacgaacgctggcggcgtgcctaacacatgcaagtcgaacgagaaattcttgtgtgaacccttcggggggaactttaggatggaaagtggcggacgggcgagtaacgcgtgagtaacctgcccataagagggggataatccttggaaacgaggactaataccgcatattgaagcgaaatcgcatggttttgctttgaaagatttatcgcttatggatggactcgcgtcagattagctggttggtgaggtaacggctcaccaaggcgacgatctgtagccgaactgagaggttgatcggccgcattgggactgagacacggcccagactcctacgggaggcagcagtggggaatattgcgcaatgggggaaaccctgacgcagcaacgccgcgtgcaggaagaaggtcttcggattgtaaactgttgtcgcaggggaagaagacagtgacggtaccctgtgagaaagtcacggctaactacgtgccagcagccgcggtaatacgtaggtgacaagcgttgtccggatttactgggtgtaaagggcgcgtaggcggactgtcaagtcagtcgtgaaataccggggcttaaccccggggctgcgattgaaactgacagccttgagtatcggagaggaaagcggaattcctagtgtagcggtgaaatgcgtagatattaggaggaacaccagtggcgaaagcggctttctggacgacaactgacgctgaggcgcgaaagtgtggggagcaaacaggattagataccctggtagtccacaccgtaaacgatggatactaggtgtaggaggtatcgaccccttctgtgccgcagttaacacaataagtatcccacctggggagtacgaccgcaaggttgaaactcaaaggaattgacgggggcccgcacaagcagtggagtatgtggtttaattcgaagcaacgcgaagaaccttacctgggcttgacatcccgatgaccggtgtagagatacaccttcccttcggggcatcggtgacaggtggtgcatggttgtcgtcagctcgtgtcgtgagatgttgggttaagtcccgcaacgagcgcaacccctattgtcagttgccatcattaagttgggcactctggcgagactgccggtgacaaatcggaggaaggtggggacgacgtcaaatcatcatgccccttatgcccagggctacacacgtactacaatggccggcaacaaagtgcagcaataccgtgaggtggagcgaatcacaaaacccggtctcagttcagattgcaggctgcaactcgcctgcatgaagttggaattgctagtaatcgcgaatcagaatgtcgcggtgaatacgttcccgggccttgtacacaccgcccgtcacaccatgagagtcgataacacccgaagcctgtgagctaaccgcaagggggcagcagtcgaaggtggggttgatgattggggtgaagtcgtaacaaggtaacc

SEQ ID NO: 911 - DNA, 1506 bp, Artificial Sequence
  Synthetic polymer
agagtttgatcctggctcagattgaacgctggcggaacgctttacacatgcaagtcgaacggtaacagcgaggaaagcttgcttttttcggctgacgagtggcgaacgggtgagtaatacatcggaacgtgtccgctcgtgggggacaaccatccgaaaggatggctaataccgcatgagttctacggaagaaagagggggacctgcttgcaggcctctcgcgagcggagcggccgatgactgattagccggttggtgaggtaacggctcaccaaagcaacgatcagtagctggtctgagaggacgaccagccacactgggactgagacacggcccagactcctacgggaggcagcagtggggaattttggacaatgggcgcaagcctgatccagctattccgcgtgtgggatgacggccctcgggttgtaaaccactttagtagagaacgaaaaggagctatcgaataaatagctctgctgacggtactctaagaataagcaccggctaactacgtgccagcagccgcggtaatacgtagggtgcgagcgttaatcggaattactgggcgtaaagggtgtgcaggcggctgagtaagacagatgtgaaatccccgggcttaacctgggaaccgcatatgtgactgcttggctagagtgcgtcagagggaggtggaattccacgtgtagcagtgaaatgcgtagatatgtggaagaacaccgatggcgaaagcagcctcctgggacgcaactgacgctcatacacgaaagcgtggggagcaaacaggattagataccctggtagtccacgccctaaacgatgtcaactagttgttggggattaaattcctcagtaacgcagccaacgcgtgaagttgaccgcctgggaagtacggtcgcaagactaaaactcaaaggaattgacggggacccgcacaagcggtggatgatgtggattaattcgatgcaacgcgaaaaaccttacctacccttgacatgtcagagaagcttttgtaatgagagtgtgcccgcaagggcgtctgaacacaggtgctgcatggctgtcgtcagctcgtgtcgtgagatgttgggttaagtcccgcaacgagcgcaacccttgtcactagttgctacgaaagggcactctagtgagactgccggtgacaaaccggaggaaggtggggatgacgtcaagtcctcatggcccttatgggtagggcttcacacgtcatacaatggtcggaacagagggcagccaacccgtgagggggagcaaatcccagaaaaccgatcgtagtccggattgcagtctgcaactcgactgcatgaagtcggaatcgctagtaatcgcggatcagcatgccgcggtgaatacgttcccgggtcttgtacacaccgcccgtcaaacaatgggagtggtgtttaccagaagtcgttagcctaaccgcaaggagggcggcgaccacggtgagcaccgtgactaatgttaagtcgtaacaaggtaacc

SEQ ID NO: 912 - DNA, 1469 bp, Artificial Sequence
  Synthetic polymer
agagtttgatcctggctcaggacgaacgctggcggcgcgcctaacacatgcaagtcgaacggtgaagaggagcttgctcctcggatcagtggcggacgggtgagtaacacgtgagcaacctgcctttcagagggggacaacagttggaaacgactgctaataccgcataatgtgccgagggggcatccctttggtaccaaagatttatcgctgaaagatgggctcgcgtctgattagatagttggtgaggtaacggcccaccaagtcgacgatcagtagccggactgagaggttgatcggccacattgggactgagacacggcccagactcctacgggaggcagcagtgggggatattggacaatgggggaaacccttatccagcgacgccgcgtgagggaagaaggttttcggattgtaaacctctgtcagcggggacgataatgacggtacccgcggaggaagccacgactaactacgtgccagcagccgcggtaatacgtaggtggcaagcgttgtccggaattactgggtgtaaagggagcgtaggcggggtttcaagtcagaagtgaaaattacgggctcaactcgtaacctgcttttgaaactgaaactcttgagtgaagtagaggcaagcggaattcctagtgtagcggtgaaatgcgtagatattaggaggaacaccagtggcgaaggcggcttgctgggcttttactgacgctgaggctcgaaagcgtggggagcaaacaggattagataccctggtagtccacgccgtaaacgatgattactaggtgtggggggattgaacccttccgtgccggagttaacacaataagtaatccacctggggagtacgaccgcaaggttgaaactcaaaggaattgacgggggcccgcacaagcagtggagtatgtggattaattcgatgcaacgcgaagaaccttaccaggtcttgacatcaagtgcaaggactagagatagttccctctcttcggagacacgaagacaggtggtgcatggttgtcgtcagctcgtgtcgtgagatgttgggttaagtcccgcaacgagcgcaacccttatgattagttgctacgcaagagcactctgatcagactgccgttgacaaaacggaggaaggtggggatgaggtcaaatcatcatgccccttacgacctgggcctcacacgtactacaatggcgtttaacaaagagcagcaaaaccgcgaggtggagcaaatctccaaaaaacgtctcagttcggattgtaggctgcaacccgcctacatgaagtcggaattgctagtaatcgtggatcagcatgccacggtgaatacgttcccgggccttgtacacaccgcccgtcaaaccatgagagttggcaacacccgaagcctgtagcttaaccgcaaggatggcgcagtcgaaggtggggtcgatgattagggttaagtcgtaacaaggtaacc

SEQ ID NO: 913 - DNA, 1494 bp, Artificial Sequence
  Synthetic polymer
agagtttgatcctggctcaggacgaacgctggcggcgtgcctaacacatgcaagtcgagcggagccaattatcagatcccttcggggtgacgatgaggaagcttagcggcggacgggtgagtaacgcgtgagtaacctgcccataagagggggataacacattgaaaagtgtgctaataccgcatattgaattagaatcgcatgattttagtttgaaagatttatcgcttatggatggactcgcgtctgattagatagttggtgaggtaacggctcaccaagtcgacgatcagtagccgaactgagaggttgatcggccacattgggactgagacacggcccagactcctacgggaggcagcagtgggggatattgcgcaatgggggaaaccctgacgcagcaacgccgcgtgaaggaagaaggttttcggatcgtaaacttctgttcttagggaagaagaaagtgacggtacctaaggagcaagccacggctaactacgtgccagcagccgcggtaatacgtaggtggcaagcgttgtccggatttactgggtgtaaagggcgcgtaggcgggatatcaagtcagtcgtgaaataccggggctcaactccggggctgcgattgaaactgatattcttgagtatcggagaggaaagcggaattcctagtgtagcggtgaaatgcgtagatattaggaggaacaccagtggcgaaggcggctttctggacgacaactgacgctgaggcgcgaaagtgtggggagcaaacaggattagataccctggtagtccacaccgtaaacgatggatactaggtgtaggaggtatcgaccccttctgtgccgcagttaacacaataagtatcccacctggggagtacgaccgcaaggttgaaactcaaaggaattgacgggggcccgcacaagcagtggagtatgtggtttaattcgaagcaacgcgaagaaccttacctgggcttgacatcccgacgacaggcatagagatatgcccttctacggacgtcggtgacaggtggtgcatggttgtcgtcagctcgtgtcgtgagatgttgggttaagtcccgcaacgagcgcaacccttattgtcagttgccatcattcagttgggcactctggcgagactgccggtgacaaatcggaggaaggtggggacgacgtcaaatcatcatgccccttatgtccagggctacacacgtactacaatggccggaaacaaagtgcagcaataccgtgaggtggagcgaatcacaaaacccggtctcagttcagattgcaggctgcaactcgcctgcatgaaggtggaattgctagtaatcgcgaatcagaatgtcgcggtgaatacgttcccgggccttgtacacaccgcccgtcacaccatgagagtcgataacacccgaagcctgtgagctaacctttcagggggcagcagtcgaaggtggggttgatgattggggtgaagtcgtaacaaggtaacc

SEQ ID NO: 914 - DNA, 1479 bp, Artificial Sequence
  Synthetic polymer
agagtttgatcctggctcaggacgaacgctggcggcgtgcctaacacatgcaagtcgaacggggcgaagggagcttgctccccgagcctagtggcggacgggtgagtaacgcgtgagtaacctgcctctcagagggggataacgatctgaaaagatcgctaataccgcataacatatttgcatcgcatggtgtggatatcaaaggagcaatccgctgagagatggactcgcgtccgattagctagttggaggggtaatggcccaccaaggcgacgatcggtagccggactgagaggttgaacggccacattgggactgagacacggcccagactcctacgggaggcagcagtgggggatattgcacaatgggggaaaccccgatgcagcaacgccgcgtgtgggaagaaggttttcggattgtaaaccactgttcttcgtgaagaaacaaatgacggtagcgaagaagaaagctccggctaactacgtgccagcagccgcggtaatacgtagggagcgagcgttgtccggatttactgggtgtaaagggtgcgtaggcggccctgcaagtcagacgtgaaagccccaggctcaacctgggaattgcgtttgaaactgtggggcttgagtgaagtagaggtaggcggaattcccggtgtagcggtgaaatgcgtagagatcgggaggaacaccagtggcgaaggcggcctactgggctttaactgacgctgaggcacgaaagcgtgggtagcaaacaggattagataccctggtagtccatgctgtaaacgatgattactaggtgtggggggcctgaccccctccgtgccggagttaacacaataagtaatccacctggggagtacggccgcaaggctgaaactcaaaggaattgacgggggcccgcacaagcagtggagtatgtggtttaattcgaagcaacgcgaagaaccttaccaggtcttgacatccaactaacgaagtagagatacattaggtgcccttcggggaaagttgagacaggtggtgcatggttgtcgtcagctcgtgtcgtgagatgttgggttaagtcccgcaacgagcgcaacccttgtcattagttgctacgcaagagcactctagtgagactgccgttgacaaaacggaggaaggtggggacgacgtcaaatcatcatgccccttatgacctgggctacacacgtactacaatggccgttaacagagagaggcaaaacagcgatgtggagcaaaactctaaaaacggtcccagttcggattgtaggctgaaacccgcctgcatgaagttggaattgctagtaatcgcggatcagcatgccgcggtgaatacgttcccgggccttgtacacaccgcccgtcacaccatgggagccggtaatacccgaagtcagtagtctaaccgcaaggagggcgctgccgaaggtaggattggcgactggggtgaagtcgtaacaaggtaacc

SEQ ID NO: 915 - DNA, 1526 bp, Artificial Sequence
  Synthetic polymer
agagtttgatcctggctcagattgaacgctggcggcaggcctaacacatgcaagtcgaacggtaacaggaagcagcttgctgcttcgctgacgagtggcggacgggtgagtaatgtctgggaagctgcctgatggagggggataactactggaaacggtagctaataccgcataatgtcgcaagaccaaagagggggaccttcgggcctcttgccatcggatgtgcccagatgggattagcttgttggtggggtaacggctcaccaaggcgacgatccctagctggtctgagaggatgaccagccacactggaactgagacacggtccagactcctacgggaggcagcagtggggaatattgcacaatgggcgcaagcctgatgcagccatgccgcgtgtatgaaggaggccttcgggttgtaaagtactttcagcggggaggaagggagtaaaaagttactgaccctttaggcttgttgacgttacacggcagaagaagtaccgtctaagtaccgatgaccgttatcttccagcggtaatacggagggtgcaagcgttaatcggaattactgggcgtatagcgcacgcaggcggtttgttaagtcagatgtgaaatccccgggctcaacctgggaactgcatctgatactggcaagcttgagtctcttagaggggggtagaattccaggtgtagcggtgaaatgcgtaggagatctggaggaataccggttgcgaaggcggcccccttggacgaagactgacgttcaggtgcgaaagcgtggggagcaaacaggattagatacccttgtagtccacgccgtaaacgatgtcgacttgggaggttgtgcccttgaggcgtgggcttccggagctaccgcgtttaagtcgaccgccttggggagtacggcccgcaggttaaaactcaaatgaatttgacgggggcccgcacaagcggtggcagccatgtggtttattcgaatgcacgcgaagaagcttacttggtcttgacattcacggaagtttcagagatgagaatgtgcctttcagggaccgtgagacaggtgctgcgtggctgtcgtcagctcgtgttgtgaaatgttgggttaagtcccgcaacgagcgcaaccttatcctttgttgccagcggtccggccgggaactcaaaggagactgccagtgataaactggaggaaggtggggatgacgtcaagtcatcatggcccttacgaccagggctacacacgtgctacaatggcgcatacaaagagaagcgacctcgcgagagcaagcggacctcataaagtgcgtcgtagtccggattggagtctgcaactcgactccatgaagtcggaatcgctagtaatcgtggatcagaatgccacggtgaatacgttcccgggccttgtacacaccgcccgtcacaccatgggagtgggttgcaaaagaagtaggtagcttaaccttcgggagggcgcttaccactttgtgattcatgactggggtgaagtcgtaacaaggtagccgt

SEQ ID NO: 916 - DNA, 1477 bp, Artificial Sequence
  Synthetic polymer
agagtttgatcctggctcaggatgaacgctggcggcgtgcctaacacatgcaagtcgagcgagaagctctcgacggatacttcggttgagggagagagtggaaagcggcggacgggtgagtaacgcgtaggcaacctgccttatgcacagggatagccattggaaacgatgattaaaacctgataacactgcattttcacatggaaaagcagtcaaagatttatcggcataagatgggcctgcgtctgattagctagttggtggggtaacggctcaccaaggcaacgatcagtagccgacctgagagggtgatcggccacattggaactgagacacggtccaaactcctacgggaggcagcagtggggaatattgcacaatgggcgaaagcctgatgcagcaacgccgcgtgaaggaagaaggccttcgggtcgtaaacttctgtccttggggaagaagaactgacggtacccaaggaggaagccccggctaactacgtgccagcagccgcggtaatacgtagggggcaagcgttatccggaattattgggcgtaaagagtgcgtaggtggctttttaagcgcagggtttaaggcaatggcccaaccattgttcgccctgcgaactgaatagcttgagtgcaggagaggaaagcggaattcctagtgtagcggtgaaatgcgtagatattaggaggaacaccagtggcgaaggcggctttctggactgtaactgacactgaggcacgaaagtgtggggagcaaacaggattagataccctggtagtccacaccgtaaacgatgagcactaggtgtcggggtcgcaagacttcggtgccggagttaacgcattaagtgctccgcctggggagtacgtacgcaagtatgaaactcaaaggaattgacggggacccgcacaagcagcggagcatgtggtttaattcgaagcaacgcgaagaaccttaccaggacttgacatcctcctgacgtatccgtaatgggatattccttcggacaggagagacaggtggtgcatggttgtcgtcagctcgtgtcgtgagatgttgggttaagtcccgcaacgagcgcaacccttgccattagttgccatcattaagttgggcactctagtgggactgccggggacaactcggaggaaggtggggatgacgtcaaatcatcatgccccttatgttctgggctacacacgtgctacaatggccggtacagaaagcagcgaagtcgcgaggcggagcaaatctcaaaaaccggtcccagttcggactgcaggctgcaacccgcctgcacgaagccggagttgctagtaatcgcgaatcagaatgtcgcggtgaatgcgttcccgggtcttgtacacaccgcccgtcacaccatggaagttgggggtgcccaaagccggcaagcaaatatgctgtctaaggcaaaaccaatgactggggtgaagtcgtaacaaggtaacc

SEQ ID NO: 917 - DNA, 1489 bp, Artificial Sequence
  Synthetic polymer
agagtttgatcctggctcaggatgaacgctggcggcgtgcttaacacatgcaagtcgaacggggtacccatgacagaggcttcggccaattgattggaatacctagtggcggacgggtgagtaacgcgtgaggaacctgccttggagtggggaataacggttggaaacagccgctaataccgcataatatatctgtgtcgcatggcactggatatcaaagatttatcgctctgagatggcctcgcgtctgattagctagttggtggggtaacggctcaccaaggcgacgatcagtagccggactgagaggttggccggccacactgggactgagacacggcccagactcctacgggaggcagcagtggggaatattgggcaatgggcgcaagcctgacccagcaacgccgcgtgaaggaagaaggctttcgggttgtaaacttcttttgtcagggacgataatgacggtacctgacgaataagccacggctaactacgtgccagcagccgcggtaatacgtaggtggcaagcgttatccggatttactgggtgtaaagggcgtgtaggcgggactgcaagtcagatgtgaaaactatgggctcaacccatagcctgcatttgaaactgtagttcttgagtactggagaggcaggcggaattccgtgtgtagcggtgaaatgcgtagatatacggaggaacaccagtggcgaaggcggcctgctggacagcaactgacgctgaggcgcgaaagcgtggggagcaaacaggattagataccctggtagtccacgctgtaaacgatggatactaggtgtgcggggtctgaccccctgcgtgccgcagctaacgcaataagtatcccacctggggagtacgatcgcaaggttgaaactcaaaggaattgacgggggcccgcacaagcggtggagtatgtggtttaattcgaagcaacgcgaagaaccttaccagggcttgacatcccggtgaccgctctagagatagagttttcccttcggggacgccggtgacaggtggtgcatggttgtcgtcagctcgtgtcgtgagatgttgggttaagtcccgcaacgagcgcaacccttattgttagttgctacgcaagagcactctagcgagactgccgttgacaaaacggaggaaggtggggacgacgtcaaatcatcatgccccttatgtcctgggccacacacgtactacaatggtggccaacagagggaggcaataccgcgaggtggagcaaacccctaaaagccatcccagttcggatcgcaggctgcaacccgcctgcgtgaagttggaatcgctagtaatcgcggatcagcatgccgcggtgaatacgttcccgggccttgtacacaccgcccgtcacaccatgagagtcgggaacacccgaagtccgtagcctaaccgcaaggggggcgcggccgaaggtgggttcgataattggggtgaagtcgtaacaaggtaacc

SEQ ID NO: 918 - DNA, 1359 bp, Artificial Sequence
  Synthetic polymer
agtcgaacgaagttactagagcttgctttagtaacttagtggcggacgggtgagtaacacgtgagcaacctgcctttaagagagggatagcttctggaaacggatggtaatacctcataaaataaagatatggcatcatatttttatcaaagatttatcgcttaaagatgggctcgcggctgattagctagatggtgaggtaatggctcaccatggcgacgatcagtagccggactgagaggttgaacggccacattgggactgagacacggcccagactcctacgggaggcagcagtgggggatattgcacaatggagggaactctgatgcagcgatgccgcgtggaggaagaaggttttcggattgtaaactcctgtcttcggggacgataatgacggtacccgaagaggaagctccggctaactacgtgccagcagccgcggtaatacgtagggagcaagcgttgtccggaattactgggtgtaaagggagcgtaggcgggatagcaagtcaggtgtgaaaactatgggctcaacccatagattgcacttgaaactgctgttcttgagtgaagtagaggtaagcggaattcctagtgtagcggtgaaatgcgtagatattaggaggaacatcagtggcgaaggcggcttactgggcttttactgacgctgaggctcgaaagcgtggggagcaaacaggattagataccctggtagtccacgccgtaaacgatgattactaggtgtggggggactgaccccttccgtgccgcagttaacacaataagtaatccacctggggagtacggccgcaaggctaaaactcaaaggaattgacgggggcccgcacaagcagtggagtatgtggtttaattcgaagcaacgcgaagaaccttaccgggtcttgacatcgagtgacgtactaagagattagtacacccttcggggcacaaagacaggtggtgcatggttgtcgtcagctcgtgtcgtgagatgttgggttaagtcccgcaacgagcgcaacccttgccattagttgctacgcaagagcactttaatgggactgccgttgacaaaacggaggaaggtggggacgacgtcaaatcatcatgccccttatgacctgggctacacacgtactacaatggcaattaacagagggaagctaagcagtgatgtggagcgaacccctaaaaattgtctcagttcggattgtaggctgcaactcgcctacatgaagtcggaattgctagtaatcgcagatcagcatgctgcggtgaatacgttcccgggccttgtacacaccgcccgtcacaccatgggagtcggtaacacccgaagcccagtagtctaacctt

SEQ ID NO: 919 - DNA, 1382 bp, Artificial Sequence
  Synthetic polymer
tttgatcctggctcagattgaacgctggcggcaggcctaacacatgcaagtcgaatgggcggtagcacagagagcttgctctcgggtgacgagtggcggacgggtgagtaatgcatggggagctgcccaatcgggggggataccagctggaaacggctgctaataccgcatacgccctgagggggaaaggtggggaccttcgggcctaccgcgattggatgcacacatgtgggattagctagttggtgaggtaacggctcaccaaggcgacgatccctagctggtctgagaggatgaccagccacactggaactgagacacggtccagactcctacgggaggcagcagtggggaatattgcacaatgggcgcaagcctgatgcagccatgccgcgtgtatgaagaaggccttcgggttgtaaagtactttcagcggggaggaaggtgttgtggttaataaccgcagcaattgacgttacccgcagaagaagccccggctaactccgtgccagcagccgcggtaatacggagggtgcaagcgttaatcggaattactgggcgtaaagcgcacgcaggcggtctgtcaagtcggatgtgaaatccccggggtcaacctgggaactgcattcgaaactggcaggctagagtcttgtagaggggggtagaattccaggtgtagcggtgaaatgcgtagagatctggaggaataccggtggcgaaggcggccccctggacaaagactgacgctcaggtgcgaaagcgtggggagcaaacaggattagataccctggtagtccacgccgtaaacgatgtcgacttggaggttgtgcccttgaggcgtggcttccggagctaacgcgttaagtcgaccgcctggggagtacggccgcaaggttaaaactcaaatgaattgacgggggcccgcacaagcggtggagcatgtggtttaattcgatgcaacgcgaagaaccttacctacttttgacatccagagaactttccagagatggattggtgccttcgggaactctgagacaggtgctgcatggctgtcgtcagctcgtgttgtgaaatgttgggttaagtcccgcaacgagcgcaacccttatcctttgttgccagcggttaggccgggaactcaaaggagactgccagtgataaactggaggaaggtggggatggggtcaagtcatcatggcccttacgagtagggctacacacgtgctacaatggcgcatacaaagagaagcgacctcgcgagaacaagcggacctcataaagtgcgtcgtagtccggattggagtctgcaactcgactccatgaagtcggaatcgctagtaatcgtagatcagaatgctacggtgaatacgttcccgggcctt

SEQ ID NO: 920 - DNA, 1512 bp, Artificial Sequence
  Synthetic polymer
gacgaacgctggcggcgtgcctaatacatgcaagtcgaacgcttcttttctaccgagtgcttgcactcacttgaaaagaggagtggcggacgggtgagtaacacgtgggtaacctgcccatcagagggggataacacttggaaacaggtgctaataccgcataatagtcgacaccgcatggtgttgatttgaaagacgctttcgggtgtcactgatggatggacccgcggtgcattagctagttggtgaggtaacggctcaccaaggccatgatgcatagccgacctgagagggtgatcggccacactgggactgagacacggcccagactcctacgggaggcagcagtagggaatcttcggcaatggacgaaagtctgaccgagcaacgccgcgtgagtgaagaaggttttcggatcgtaaaactctgttgttagagaagaacaagtgggagagtaactgctcccgccttgacggtatctaaccagaaagccacggctaactacgtgccagcagccgcggtaatacgtaggtggcaagcgttgtccggatttattgggcgtaaagcgagcgcaggcggtttcttaagtctgatgtgaaagcccccggctcaaccggggagggtcattggaaactgggagacttgagtgcagaagaggagagtggaattccatgtgtagcggtgaaatgcgtagatatatggaggaacaccagtggcgaaggcgactctctggtctgtaactgacgctgaggctcgaaagcgtggggagcaaacaggattagataccctggtagtccacgccgtaaacgatgagtgctaagtgttggagggtttccgcccttcagtgctgcagctaacgcattaagcactccgcctggggagtacgaccgcaaggttgaaactcaaaggaattgacgggggcccgcacaagcggtggagcatgtggtttaattcgaagcaacgcgaagaaccttaccaggtcttgacatcctttgaccactctagagatagagctttcccttcggggacaaagtgacaggtggtgcatggttgtcgtcagctcgtgtcgtgagatgttgggttaagtcccgcaacgagcgcaacccttattgttagttgccatcattcagttgggcactctagcgagactgccggtgacaaaccggaggaaggtggggatgacgtcaaatcatcatgccccttatgacctgggctacacacgtgctacaatgggaagtacaacgagtcgctaggccgcgaggtcatgcaaatctcttaaagcttctctcagttcggattgtaggctgcaactcgcctacatgaagccggaatcgctagtaatcgcggatcagcacgccgcggtgaatacgttcccgggccttgtacacaccgcccgtcacaccacgaaagtttgtaacacccgaagtcggtgaggtaaccttttggagccagccgcctaaggtgggatagatgattggggtgaagtcgtaacaaggtagccgtatcggaagg

SEQ ID NO: 921 - DNA, 1441 bp, Artificial Sequence
  Synthetic polymer
ctaatacatgcaagtcgtacgcttctttttccaccggagcttgctccaccggaaaaagaagagtggcgaacgggtgagtaacacgtgggtaacctgcccatcagaaggggataacacttggaaacaggtgctaataccgtataacaatcgaaaccgcatggttttgatttgaaaggcgctttcgggtgtcgctgatggatggacccgcggtgcattagctagttggtgaggtaacggctcaccaaggccacgatgcatagccgacctgagagggtgatcggccacattgggactgagacacggcccaaactcctacgggaggcagcagtagggaatcttcggcaatggacgaaagtctgaccgagcaacgccgcgtgagtgaagaaggttttcggatcgtaaaactctgttgttagagaagaacaaggatgagagtaactgttcatcccttgacggtatctaaccagaaagccacggctaactacgtgccagcagccgcggtaatacgtaggtggcaagcgttgtccggatttattgggcgtaaagcgagcgcaggcggtttcttaagtctgatgtgaaagcccccggctcaaccggggagggtcattggaaactgggagacttgagtgcagaagaggagagtggaattccatgtgtagcggtgaaatgcgtagatatatggaggaacaccagtggcgaaggcggctctctggtctgtaactgacgctgaggctcgaaagcgtggggagcaaacaggattagataccctggtagtccacgccgtaaacgatgagtgctaagtgttggagggtttccgcccttcagtgctgcagctaacgcattaagcactccgcctggggagtacgaccgcaaggttgaaattcaaaggaattgacgggggcccgcccaagcggtggagcatgtggtttaattggaagcaacgggaagaaccttaccaggtcttgacatcctttgaccactctagagatagagcttccccttcgggggcaaagtgacaggtggtgcatggttgtggtcagctggtgtcgtgagatgttgggttaagtcccgcaacgagcgcaacccttattgttagttgccaccattcagttgggcattctagcaagactgccggtgacaaaccggaggaaggtggggatgacgtcaaatcttcatgccccttatgccctgggctacacacgtgttccaatgggaagtacaacgagttgggaagtcgggaggttaagttaatttcttaaagcttttttcagttcggattgcaggctgcaattcgcctgcaggaagccggaatcgttagtaatcggggatcaccacgccgcggtgaatacgttcccggcccttgtccacaccgcccgtcacaccaggagagtttgtaccaccggaagtcggtgaggtacccttttggagccagccgcctaag

SEQ ID NO: 922 - DNA, 1456 bp, Artificial Sequence
  Synthetic polymer
gatgaacgctggcggcgtgcttaacacatgcaagtcgaacgaagcacmwwaracrgamatcttcggawggaagwhtdwkgtgactgagtggcggacgggtgagtaacgcgtgggtaacctgccgtatacagggggataacagttagaaatgactgctaataccgcataagcgcacagagtcgcatgactcggtgtgaaaaactycggtggtatacgatggacccgcgtctgattaggtagttggyggggtaacggcccaccaagcccgcgatcagtagccgacctgagagggtgaccggccacattgggactgagacacggcccaaactcctacgggaggcagcagtggggaatattgcacaatgggggaaaccctgatgcagcgacgccgcgtgagcgaagaagtatttcggtatgtaaagctctatcagcagggaagaaaatgacggtacctgactaagaagccccggctaactacgtgccagcagccgcggtaatacgtagggggcaagcgttatccggatttactgggtgtaaagggagcgtagacggcatagtaagtctgatgtgaaaggcgggggctcaacccctggactgcattggaaactattaagctggagtgtcggagaggtaagtggaattcctagtgtagcggtgaaatgcgtagatattaggaggaacaccagtggcgaaggcggcttactggacgatcactgacgttgaggctcgaaagcgtggggagcaaacaggattagataccctggtagtccacgccgtaaacgatgtatactaggtgtcggggggcaaagcccttcggtgccgcagcaaacgcaataagtataccacctggggagtacgttcgcaagaatgaaactcaaaggaattgacggggacccgcacaagcggtggagcatgtggtttaattcgaagcaacgcgaagaaccttaccaagtcttgacatccttctgaccggtccgtaacggggccttcccttcggggcagragagacaggtggtgcatggttgtcgtcagctcgtgtcgtgagatgttgggttaagtcccgcaacgagcgcaacccttatccttagtagccagcaagtgargttgggcactctagggagactgccagggataacctggaggaaggtggggatgacgtcaaatcatcatgccccttatgatttgggctacacacgtgctacaatggcgtaaacaaagggaggcgaagccgygaggtgaagcaaatcccaaaaataacgtctcagttcggattgtagtctgcaactcgactacatgaagctggaatcgctagtaatcgcgaatcagaatgtcgcggtgaatacgttcccgggtcttgtacacaccgcccgtcacaccatgggagtcggatatgcccgaagcctgtgacccaaccgaaaggagggagcagtcgaaggtggagccgataactggggtg

SEQ ID NO: 923 - DNA, 1353 bp, Artificial Sequence
  Synthetic polymer
  misc_feature (937)..(937): n is a, c, g, or t
ttcgcccttagagtttgatcctggctcaggacgaacgctggcggcgtgcctaacacatgcaagtcgagcgaatgaaattccttcgggaacggatttagcggcggacgggtgagtaacacgtgggcaacctgcctcatagaggggaatagccttccgaaagggagattaataccgcataagattgtagtaccgcatggtacagcagttaaaggagcaatccgctatgagatgggcccgcggcgcattagctagttggtgaggtaacggctcaccaaggcgacgatgcgtagccgacctgagagggtgatcggccacattgggactgagacacggcccagactcctacgggaggcagcagtggggaatattgcacaatgggggaaaccctgatgcagcaacgccgcgtgggtgatgacggccttcgggttgtaaagctctgtcttcagggacgataatgacggtacctgaggaggaagccacggctaactacgtgccagcagccgcggtaatacgtaggtggcgagcgttgtccggatttactgggcgtaaagggagcgtaggcggatttttaagtgagatgtgaaatactcgggcttaacctgagtgctgcatttcaaactggaagtctagagtgcaggagaggagaagggaattcctagtgtagcggtgaaatgcgtagagattaggaagaacaccagtggcgaaggcgcttctctggactgtaactgacgctgaggctcgaaagcgtggggagcaaacagaagtagataccctggtagtcctagccgtaaacgatgggggtaataggggaagggggaaaaagttaccttatgtgtcgcaagctaacgcattaagtacccccgcctggggaggacggtcgcaagggtgaaatcaaagggaattggcggggggccgcacaaagcggtggagcacaagntttaattagaagcaaagcgaagaaccttaccagggctcgacatatgcctgacgttttttggaaacagttaacttctcttgagacaggtagacaggtggtgcctgattgtcgtcagctcgtgtcgtgagatgttggggtaagtcccgcaacgagcgcaacccctgttcttagttgccatcacgtcaaggtgggcactctaaggagactgccggtgacaaacaggaagagggaggggaggacgtcaaatcctcatgccccttatgttctgggctacacacgtgctacaatggcctgtacaacgggttgcgaaggggtgacctggagcaaatcctctaaaacaggtctcagttcggattgcaggctgcaactcgcctgcatgaagtcggaatcgctagtaatcgtggatcagcatgccg

SEQ ID NO: 924 - DNA, 1457 bp, Artificial Sequence
  Synthetic polymer
gaacgctagcgacaggcctaacacatgcaagtcgaggggcagcgaagaggtagcaatacctttgtcggcgaccggcgcacgggtgagtaacacgtatgcaatccacctgtaacagggggataacccggagaaatccggactaataccccataatatgggcgctccgcatggagagcccattaaagagagcaattttggttacagacgagcatgcgctccattagccagttggcggggtaacggcccaccaaagcgacgatggataggggttctgagaggaaggtcccccacattggaactgagacacggtccaaactcctacgggaggcagcagtgagggaatatgggtcaatggccggcagactgaccagcccaagtcccggggaggaaggacggcccacggggtggtaacccttttttgtcggagagtaaagtacgctacgtgtagtgtattgcaagtatccgaagaaaaaagcatcggctaaactccgtgcccagcagcggcggtaatacggaggatgcaagcgttatcccggatttattgggtttaaagggtgcgtaagcggcacgcccagtcagcggtgaaatttccgggctcaacccggagtgtgccgtgaaactggcgagctagagtacacaagaggcaggcggaatgcgtggtgtagcggtgaaatgcatagatatcacgcagaaccccgattgcgaaggcagcctgctagggtgaaacagacgctgaggcacgaaagcgtgggtatcgaacaggattagataccctggtagtccacgcagtaaacgatgaatactaactgtttgcgatacaatgtaagcggtacagcgaaagcgttaagtattccacctggggagtacgccggcaacggtgaaactcaaaggaattgacgggggcccgcacaagcggaggaacatgtggtttaattcgatgatacgcgaggaaccttacccgggctcaaacgcagggggaatatatatgaaagtatatagctagcaatagtcacctgcgaggtgctgcatggttgtcgtcagctcgtgccgtgaggtgtcggcttaagtgccataacgagcgcaacccctatcgacagttactaacgggtcaagccgaggactctgtcgagactgccggcgcaagccgcgaggaaggtggggatgacgtcaaatcagcacggcccttacgtccggggcgacacacgtgttacaatggcaggtacagaaggcagccagtcagcaatgacgcgcgaatcccgaaaacctgtctcagttcggattggagtctgcaacccgactccatgaagctggattcgctagtaatcgcgcatcagccatggcgcggtgaatacgttcccgggccttgtacacaccgcccgtcaagccatggaagccgggagtacctgaagcatgcaaccgcaaggagcgtacgaaggtaataccggtaactggggcta

SEQ ID NO: 925 - DNA, 1448 bp, Artificial Sequence
  Synthetic polymer
gctttacacatgcaagtcgaacggtaacgtggggcggagcttgctccgccccgacgacgagtggcgaacgggtgagtaatacatcggaacgtgtccgctcgtgggggacaaccagccgaaaggttggctaataccgcatgagttctacggaagaaagagggggacccgcaagggcctctcgcgggcggagcggccgatgactgattagccggttggtgaggtaacggctcaccaaagcaacgatcagtagctggtctgagaggacgaccagccacactgggactgagacacggcccagactcctacgggaggcagcagtggggaattttggacaatgggggaaaccctgatccagctattccgcgtgtgggatgaaggccctcgggttgtaaaccacttttgtagagaacgaaaagacaccatcgaataaatggtgttgctgacggtactctaagaataagcaccggctaactacgtgccagcagccgcggtaatacgtagggtgcgagcgttaatcggaattactgggcgtaaagggtgcgcaggcggttgagtaagacagatgtgaaatccccgagcttaactcgggaatggcatatgtgactgctcgactagagtgtgtcagagggaggtggaattccacgtgtagcagtgaaatgcgtagatatgtggaagaacaccgatggcgaaggcagcctcctgggacataactgacgctcaggcacgaaagcgtggggagcaaacaggattagataccctggtagtccacgccctaaacgatgttaactagttgttgggatgtaacaatctcagtaacgcagccaacgcgagaagttaaccgcctgggaagtacggtcgcaagactaaaactcaaaggaattgacggggacccgcacaagcggtggatgatgtggattaattcgatgcaacgcgaaaaaccttacctacccttgacatgtcaggaagctcttgtaatgagagcgtgcccgcaagggagcctgaacacaggtgctgcatggctgtcgtcagctcgtgtcgtgagatgttgggttaagtcccgcaacgagcgcaacccttgtcactagttgctacgaaagggcactctagtgagactgccggtgacaaaccggaggaaggtggggatgacgtcaagtcctcatggcccttatgggtagggcttcacacgtcatacaatggtcggtacagagggttgccaagccgcgaggtggagccaatcccagaaaaccgatcgtagtccggatcgcagtctgcaactcgactgcgtgaagtcggaatcgctagtaatcgcggatcagaatgccgcggtgaatacgttcccgggtcttgtacacaccgcccgtcacaccatgggagtgggttctaccagaagtggctagtctaaccgcaaggaggacggtcaccacggtaggattcatgactggggtgaa

SEQ ID NO: 926 - DNA, 1438 bp, Artificial Sequence
  Synthetic polymer
gcttgcggcgtgcttaacacatgcaagtcgaacgaagcatttgcgacagatttcttcgggatgaagttgcttatgactgagtggcggacgggtgagtaacgcgtgggtaacctgccttgtactgggggatagcagctggaaacggctggtaataccgcataagcgcacaatgttgcatgacatggtgtgaaaaactccggtggtataagatggacccgcgtctgattagctagttggtgagataacagcccaccaaggcgacgatcagtagccgacctgagagggtgaccggccacattgggactgagacacggcccagactcctacgggaggcagcagtggggaatattgcacaatggaggaaactctgatgcagcgacgccgcgtgagtgaagaagtaattcgttatgtaaagctctatcagcagggaagatagtgacggtacctgactaagaagctccggctaaatacgtgccagcagccgcggtaatacgtatggagcaagcgttatccggatttactgggtgtaaagggagtgtaggtggccatgcaagtcagaagtgaaaatccggggctcaaccccggaactgcttttgaaactgtaaggctagagtgcaggaggggtgagtggaattcctagtgtagcggtgaaatgcgtagatattaggaggaacaccagtggcgaaggcggctcactggactgtaactgacactgaggctcgaaagcgtggggagcaagcaggattagataccctggtagtccacgccgtaaacgatgaatactaggtgtcggggcccaaaagggcttcggtgccgcagcaaacgcaataagtattccacctggggagtacgttcgcaagaatgaaactcaaaggaattgacggggacccgcacaagcggtggagcatgtggtttaattcgaagcaacgcgaagaaccttaccaagtcttgacatcccactgaccggacagtaatgtgtcctttccttcgggacagtggagacaggtggtgcatggttgtcgtcagctcgtgtcgtgagatgttgggttaagtcccgcaacgagcgcaacccctatccttagtagccagcagtaagatgggcactctagggagactgccagggataacctggaggaaggtggggatgacgtcaaatcatcatgccccttatgacttgggctacacacgtgctacaatggcgtaaacaaagggaagcgagcccgcgagggggagcaaatcccaaaaataacgtctcagttcggattgtagtctgcaactcgactacatgaagctggaatcgctagtaatcgcgaatcagaatgtcgcggtgaatacgttcccgggtcttgtacacaccgcccgtcacaccatgggagtcagtaacgcccgaagtcagtgacccaaccgtaaggagggagctgccgaaggtgggaccgat

SEQ ID NO: 927 - DNA, 1464 bp, Artificial Sequence
  Synthetic polymer
gatcctggctcaggatgaacgctggcggcgcgcctaacacatgcaagtcgagcggcaccctgcttcggcaggaagcgagcggcgaacggctgagtaacacgtgaccaacctgccctgcgcacggggacagccgcgggaaaccgcgggtgatacccggtggccccggggggacgcatgtccccagcgggcatagctccggcggcgcgggatggggtcgcggcccatcaggtagttggtagggtgacggcctaccaagccgactacgggtagccgggttgagagaccgaccggccagattgggactgagacacggcccagactcctacgggaggcagcagtggggaatcttgcgcaatggggggaaccctgacgcagcgacgccgcgtgcgggatggaggccttcgggtcgtgaaccgctttcagcagggacgagactgacggtacctgcagaagaagccccggctaactacgtgccagcagccgcggtaatacgtagggggcgagcgttatccggattcattgggcgtaaagcgcgcgtaggcggccgcgcaggcggggggtcaaatcccggggctcaaccccgggccgccccccgaaccgcgcggcttgggtccggcaggggagggtggaacgcccggtgtagcggtggaatgcgcagatatcgggcggaacaccggtggcgaaggcggccctctgggccggcaccgacgctgaggcgcgagagccgggggagcgaacaggattagataccctggtagtcccggccgtaaacgatggacgctaggtgtggggacgttggagtctccgtgtgccgcagccaacgcattaagcgtcccgcctggggagtacggccgcaaggctaaaactcaaaggaattgacgggggcccgcacaagcagcggagcatgtggcttaattcgaagcaacgcgaagaaccttacccgcgcttgacatggcggtgaagcggcggagacgccgtggccgagaggagccgccacaggtggtgcatggctgtcgtcagctcgtgtcgtgagatgttgggttaagtcccgcaacgagcgcaacccccgccgcgtgttgccatcgggtgatgccgggaacccacgcgggaccgccgccgccaaggcggaggagggcggggacgacgtcaagtcatcatgccccttatgcgcggggctgcacacgtgctacaatggcaggtacagagggttgccaccccgcgagggggagcggatcccgaaagcctgccccagttcggaccgggggctgcaacccgcccccgcgaagtcggagttgctagtaatcgcggatcagcatgccgcggtgaatgcgttcccgggccttgtacacaccgcccgtcacaccacccgagtcgtctgcacccgaagccgccggcccaacctcgtgagggaggcgtcgaaggtgtggagggcgaggggggtgaagtcgtaacaaggtagccgta

SEQ ID NO: 928 - DNA, 1459 bp, Artificial Sequence
  Synthetic polymer
gacgaacgctggcggcgtgcctaacacatgcaagtcgaacggagatatgcgctgaacggaagacagcttgctggaagaagttcttgtatatcttagtggcggacgggtgagtaacacgtgagtaacctgccgaagagagtggaataacgttccgaaaggaacactaataccgcatgacacttcgttaccgcatggtgatgaagtcaaaggagcaatccgctcttcgatggactcgcgtccgattagatagttggtgaggtaacggctcaccaagtcgacgatcggtagccgggctgagaggctgaacggccacattgggactgagacacggcccagactcctacgggaggcagcagtgaggaatattggtcaatgggggaaaccctgaaccagcaacgccgcgtgagggaagacggttttcggattgtaaacccctgtcctctgtgaagataatgacggtagcagaggaggaagctccggctaactacgtgccagcagccgcggtaatacgtagggagcaagcgttgtccggatttactgggtgtaaagggtgcgtaggcggctatgcaagtcaggagtgaaatctatgggcttaacccataaactgcttttgaaactgtatagcttgagtgatgtggaggtaggcggaattcccggtgtagcggtggaatgcgtagagatcgggaggaacaccagtggcgaaggcggcctactgggcattaactgacgctgaagcacgaaagcgtgggtagcaaacaggattagataccctggtagtccacgctgtaaacgatgattactaggtgtggggggactgaccccttccgtgccggagttaacacaataagtaatccacctggggagtacggtcgcaagactgaaactcaaaggaattgacgggggcccgcacaagcagtggagtatgtggattaattcgaagcgacgcgaagaaccttaccaggtcttgacatggggatgatcggtgtagagatacacttttccttcgggacatcccacacaggtggtgcatggttgtcgtcagctcgtgtcgtgagatgttgggttaagtcccgcaacgagcgcaacccttactgttagttgctacgcaagagcactctagcaggactgccgttgacaaaacggaggaaggtggggatgatgtcaaatcatcatgccccttatgacctgggcctcacacgtactacaatggccgttaacaacgggaagcaatatggtgacatggagcaaaaccccaaaaacggtctcagttcggattgtaggctgaaacccgcctgcatgaagttggaattgctagtaatcgcggatcagcatgccgcggtgaatacgttcccgggccttgtacacaccgcccgtcacaccatgggagccggtaatacccgaagtcagtagcctaaccgcaaggagggcgctgccgaaggtaggattggcgactggggtg

SEQ ID NO: 929 - DNA, 1441 bp, Artificial Sequence
  Synthetic polymer
tgaacgctggcggcaggcctaacacatgcaagtccagcgttttcacaagagagcttgctctctgggtgacgagcggcggacgggtgagtaatgtctgggaaactgcctgatggagggggataactactggaaacggtagctaataccgcatgatgtcttcggaccaaagtgggggaccttcgggccttacgccatcagatgtgcccagatgggattagctagtaggtggggtaatggctcacctaggcgacgatccctagctggtctgagaggatgaccagccacactggaactgagacacggtccagactcctacgggaggcagcagtggggaatattgcacaatgggcgcaagcctgatgcagccatgccgcgtgtatgaagaaggccttcgggttgtaaagtactttcagcggggaggaagggagtaaagttaatacctttgctcattgacgttacccgcagaagaagcaccggctaactccgtgccagcagccgcggtaatacggagggtgcaagcgttaatcggaattactgggcgtaaagcgcacgcaggcggtttgttaagtcagatgtgaaatccccgggctcaacctgggaactgcatctgatactggcaagcttgagtctcgtagaggggggtagaattccaggtgtagcggtgaaatgcgtagagatctggaggaataccggtggcgaaggcggccccctggacgaaagaatgacgctcaggtgcgaaagcgtggggagcaaacaggattagataccctggtagtccacgccgtaaacgatgtcgatttggaggttgtgcccttgaggcgtggcttccggagctaacgcgttaaatcgaccgcctggggagtacggccgcaaggttaaaactcaaatgaattgacgggggcccgcacaagcggtggagcatgtggtttaattcgatgcaacgcgaagaaccttacctggtcttgacatccacagaactttccagagatggattggtgccttcgggaactgtgagacaggtgctgcatggctgtcgtcagctcgtgttgtgaaatgttgggttaagtcccgcaacgagcgcaacccttatcctttgttgccagcggtccggccgggaactcaaaggagactgccagtgataaactggaggaaggtggggatgacgtcaggtcatcatggcccttacgaccagggctacacacgtgctacaatggcatatacaaagagaagcgacctcgcgagagcaagcggacctcataaagtatgtcgtagtccggattggagtctgcaactcgactccatgaagtcggaatcgctagtaatcgtagatcagaatgctacggtgaatacgttcccgggccttgtacacaccgcccgtcacaccatgggagtgggttgcaaaagaagtaggtagcttaaccttcgggagggcgcttaccac

SEQ ID NO: 930 - DNA, 1415 bp, Artificial Sequence
  Synthetic polymer
gcgcctaacacatgcaagtcgaacgagagagaagaagcttgcttcttcgatcgagtggcgaacgggtgagtaacgcgtgaggaacctgcctcaaagagggggacaacagttggaaacgactgctaataccgcataagcccacgggatcggcatcgacctgagggaaaaggagcaatccgctttgagatggcctcgcgtccgattagctagttggtgaggtaacggcccaccaaggcgacgatcggtaaccggactgagaggttgaacggccgcattgggactgagacacggaccagactcctacaggaggcagcagtggggaatattgcacaatgggggaaaccctgatgcagcgacgccgcgtggaggaagaaggtcttcggattgtaaactcctgttgttgaggaagataatgacggtactcaacaaggaagtgacggctaactacgtgccagcagccgcggtaaaacgtatgtcacaagcgttgtccggaattactgggtgaaaagggagcgcaggcgggaagacaagttggaagtgaaatctatgggctcaacccataaactgctttcaaaactgtttttcttgagtagtgcagaggtaggcggaattcccggtgtagcggcggaatgcgtagatatcgggaggaacaccagtggtgaaggcggcctactgggcaccaactgacgctgaggctcgaaagtgtgggtagcaaacaggattagataccctggtagtccacgccgtaaacgatgattactaggtgttggaggattgaccccttcagtgccgcagttaacacaataagtaatccacctggggagtacgaccgcaaggttgaaactcaaaggaattgacgggggcccgcacaagcagtggagtatgtggtttaattcgacgcaacgcgaagaaccttaccaagtcttgacatcgtgagatgatgctagaaatagtattttccttcgggacgcagagacaggtggtgcatggttgtcgtcagctcgtgtcgtgagatgttgggttaagtcccgcaacgagcgcaacccttatggtcagttactacagcaagaggactctggccagactgccgttgacaaaacggaggaaggtggggatgacgtcaaatcatcatgccctttatgacttgggctacacacgtactccaatggcgttaaacaaagagaagcaagaccgcgaggtggagcaaaactcagaaacaacgtcccagttcggactgcaggttgcaactcgcctgcacgaagtcggaattgctagtaatcgtggatcagcatgccacggtgaatacgttcccgggccttgtacacaccgcccgtcaccccatgagagccggggggacccgaagtcggtagtctacccgcaaggaggccgccgccgaaggtaaaactggtgattgg

SEQ ID NO: 931 - DNA, 1464 bp, Artificial Sequence
  Synthetic polymer
attgaacgctggcggcaggcctaacacatgcaagtcgagcggcagcggggggaagcttgcttccccgccggcgagcggcggacgggtgagtaatgtctgggaaactgcctgatggagggggataactactggaaacggtagctaataccgcatgatgtcgcaagaccaaagtgggggaccttcgggcctcacgccatcggatgtgcccagatgggattagctagtaggtggggtaatggctcacctaggcgacgatccctagctggtctgagaggatgaccagccacactgggactgagacacggcccagactcctacgggaggcagcagtgggcaatattgcacaatgggcgcaagcctgatgcagccatgccgcgtgtgtgaagaaggccttcgggttgtaaagcactttcagcgaggaggaagggttgggtgttaatagcatccagcattgacgttactcgcagaagaagcaccggctaactccgtgccagcagccgcggtaatacggagggtgcaagcgttaatcggaattactgggcgtaaagcgcacgcaggcggttgattaagtcagatgtgaaatccccgagctcaacttgggaactgcatttgaaactggtcagctagagtcttgtagaggggggtagaattccaggtgtagcggtgaaatgcgtagagatctggaggaataccggtggcgaaggcggccccctggacaaagactgacgctcaggtgcgaaagcgtggggagcaaacaggattagataccctggtagtccacgctgtaaacgatgtcgacttggaggttgtgcccttgaggcgtggcttccggagctaacgcgttaagtcgaccgcctggggagtacggccgcaaggttaaaactcaaatgaattgacgggggcccgcacaagcggtggagcatgtggtttaattcgatgcaacgcgagacccttacctactcttgacatccacggaatttagcagagatgctttagtgccttcgggaaccgtgagacaggtgctgcatggctgtcgtcagctcgtgttgtgaaatgttgggttaagtcccgcaacgagcgcaacccttatcctttgttgccagcgcgtaatggcgggaactcaaaggagactgccggtgataaaccggaggaaggtggggatgacgtcaagtcatcatggcccttacgagtagggctacacacgtgctacaatggcgtatacaaagagaagctaacctgcgaaggcatgcggacctcataaagtacgtcgtagtccggattggagtctgcaactcgactccatgaagtcggaatcgctagtaatcgtagatcagaatgctacggtgaatacgttcccgggccttgtacgcaccgcccgtcacaccatgggagtgggttgcaaaagaagtaggtagcttaaccttcgggagggcgcttaccactttgtgattcatgactggggtg

SEQ ID NO: 932 - DNA, 1477 bp, Artificial Sequence
  Synthetic polymer
tcaggacgaacactggcggcgtgcctaatacatgcaagtcgaacgctttttctttcaccggagcttgctccaccgaaagaaaaagagtggcgaacgggtgagtaacacgtgggtaacctgcccatcaaaaggggataacacttggaaacaggtgctaataccgtataacactattttccgcatggaagaaagttgaaaggcgcttttgcgtcactgatggatggacccgcggtgcattatctagttggtgaggtaacggctcaccaaggccacgatgcatagccgaactgagggggtgatcggccacactgggactgaaacacggcccagactcctacgggaggcagcagtagggaatcttccgcaatggacgaaagtctgaccgaacaacgccgcgtgagtgaagaagggtttcggatcgtaaaactctgttgttagagaagaacaaggatgaaagtagaacgttcatcccttgacggtatctaaccagaaagccacggctaactacgtgccagcagccgcggtaatacgtaggtggcaagcgttgtccggatttattgggcgtaaagcgagcgcaggcggtttcttaagtctgatgtgaaagcccccggctcaaccggggagggtcattggaaactgggagacttgagtgcagaagaggagagtggaattccatgtgtagcggtgaaatgcgtagatatatggaggaacaccagtggcgaaggcggctctctggtctgtaactgacgctgaggctcgaaagcgtggggagcgaacaggattagataccctggtagttcacgccgtaaacgatgagtggtaagtgttggagggttttcgcccttcagcgctgcagcatacgcattaagcacttcgcctggggagtacgaccgcaaggttgaaactcaaaggaattgacgggggcccgcacaagcggtggagcatgtggtttaatttgaagcaacgcgaagaaccctaccaggtcttgacatcctttgaccactttagagatagagattcccctttgggggcaaagtgacaggtggtgcatggttgttgtcagctcgtgttgtgagatgttgggttaagtcccgcaacgagggcaacccttattgttagttgccatcatttagttgggcactttagcgagactgccggtgacaaaccggaggaaggtggggaagacgtcaaatcatcatgccccttatgacctgggctacacacgtggtacaatgggaagtacaacgagttgggaagtcgcgagggtaaggtaattttttaaagcttttttcagtttggattgtaggctgcaacttgcctacatgaagccggaattggtagtaattgcggatcagcacgccgcggtgaatacgtttccgggccttgtacaccccgcccgtcaccccccgagagtttgtaacacccgaagtcggtgaggtaacctttttggagccagccgcctaaggtgggatagatg

SEQ ID NO: 933 - DNA, 1419 bp, Artificial Sequence
  Synthetic polymer
ctaacacatgcaagtcgaacgagagagaaggatcttgcttcttcgatcgagtggcgaacgggtgagtaacgcgtgaggaacctgcctcaaagagggggacaacagttggaaacgactgctaataccgcataagcccacgggtcggcatcgatctgagggaaaaggagcaatccgctttgagatggcctcgcgtccgattagctagttggtgaggtaacggcccaccaaggcgacgatcggtagccggactgagaggttgaacggccacattgggactgagacacggcccagactcctacgggaggcggcagtggggaatattgcacaatgggggaaaccctgatgcagcgacgccgcgtggaggaagaaggtcttcggattgtaaactcctgttgttgaggaagataatgacggtactcaacaaggaagtgacggctaactacgtgccagcagccgcggtaaaacgtaggtcacaagcgttgtccggaattactgggtgtaaagggagcgcaggcgggaagacaagttggaagtgaaatctatgggctcaacccataaactgctttcaaaactgtttttcttgagtagtgcagaggtaggcggaattcccggtgtagcggtggaatgcgtagatatcgggaggaacaccagtggcgaaggcggcctactgggcaccaactgacgctgaggctcgaaagtgtgggtagcaaacaggattagataccctggtagtccacaccgtaaacgatgattactaggtgttgaaggattgacccccttcagtcccgcagttaacccaatagtaattccactggggagtaggacggcaagttgaaacttcaaggaaatggacgggggccccgcacaagcagtgaagtatgtgttttatttggcggcacggggaagacccttaccaagtcttgacatcctgcgacgatgctagaaatagtattttctttcgggacgcagagacaggtggtgcatggtggtcgtcagctcgtgtcgtgagatgttgggttaagtcccgcaacgagcgcaacccttatggtcagttactacgcaagaggactctggccagactgccgttgacaaaacggaggaaggtggggatgacgtcaaatcatcatgccctttatgacttgggctacacacgtactacaatggcgttaaacaaagagaagcaagaccgcgaggtggagcaaaactcagaaacaacgtcccagttcggactgcaggctgcaactcgcctgcacgaagtcggaattgctagtaatcgtggatcagcatgccacggtgaatacgttcccgggccttgtacacaccgcccgtcacaccatgagagccggggggacccgaagtcggtagtctaaccgcaaggaggacgccgccgaaggtaaaactggtgattggggtgaagtc

SEQ ID NO: 934 - DNA, 1416 bp, Artificial Sequence
  Synthetic polymer
cctaacacatgcaagtcgaacggcacccctctccggagggaagcgagtggcgaacggctgagtaacacgtggagaacctgccccctcccccgggatagccgcccgaaaggacgggtaataccggataccccggggtgccgcatggcaccccggctaaagccccgacgggaggggatggctccgcggcccatcaggtagacggcggggtgacggcccaccgtgccgacaacgggtagccgggttgagagaccgaccggccagattgggactgagacacggcccagactcctacgggaggcagcagtggggaatcttgcgcaatggggggaaccctgacgcagcgacgccgcgtgcgggacggaggccttcgggtcgtaaaccgctttcagcagggaagagtcaagactgtacctgcagaagaagccccggctaactacgtgccagcaaccgcggtaatacgtagggggcgagcgttatccggattcattgggcgtaaagcgcgcgtaggcggcccggcaggccgggggtcgaagcggggggctcaaccccccgaagcccccggaacctccgcggcttgggtccggtaggggagggtggaacacccggtgtagcggtggaatgcgcagatatcgggtggaacaccggtggcgaaggcggccctctgggccgagaccgacgctgaagcgcgaaagctgggggagcgaacaggatttagataccctggtagtcccagccgtaaacgatggacgctaggtgtggggggacgatccccccgtgccgcagccaacgcattaagcgtcccgcctggggagtacggccgcaaggctaaaactcaaaggaattggcgggggcccactcaagcagcggagcatgtggcttaattcgaagcaacgcgaagaaccttaccagggcttgacatatgggtgaagcgggggagactctgtggccgagaggagcccatacaggtggtgcatggctgtcgtcagctcgtgtcgtgagatgttgggttaagtcccgcaacgagcgcaaccctcgccgcgtgttgccatcgggtgatgccgggaacccacgcgggaccgccgccgtcaaggcggaggagggcggggacgacgtcaagtcatcatgccccttatgccctgggctgcacacgtgctacaatggccggtacagagggatgccaccccgcgagggggagcggatcccggaaagccggccccagttcggattgggggctgcaacccgcccccatgaagtcggagttgctagtaatcgcggatcagcatgccgcggtgaatgcgttcccgggctttgtacactccgcccgtctctcctcccgagtcgtctgctcccgaagtcgccggccctaccgtcaaggggggaggctctgaaggtgtggagggtgaggggggtgaagtc

SEQ ID NO: 935 - DNA, 1452 bp, Artificial Sequence
  Synthetic polymer
gattgaacgctggcggcatgctttacacatgcaagtcgaacggcagcatagagagcttgctctctgatggcgagtggcgaacgggtgagtaatacatcggaacgtgtcctgttgtgggggataactactcgaaagagtggctaataccgcataagacctgcgggtgaaagtgggggaccttcgggcctcgcgcagttggagcggccgatgactgattagctagttggtggggtaaaggcctaccaaggcgacgatcagtagctggtctgagaggacgaccagccacattgggactgagacacggcccaaactcctacgggaggcagcagtggggaattttggacaatgggggcaaccctgatccagccatgccgcgtgcaggatgaaggtcttcggattgtaaactgcttttgtcagggacgaaaagggatgcgataacaccgcattccgctgacggtacctgaagaataagcaccggctaactacgtgccagcagccgcggtaatacgtagggtgcaagcgttaatcggaattactgggcgtaaagcgtgcgcaggcggttctgtaagatagatgtgaaatccccgggctcaacctgggaattgcatatatgactgcaggacttgagtttgtcagaggagggtggaattccacgtgtagcagtgaaatgcgtagatatgtggaagaacaccgatggcgaaaggcagccctctgggacatgactgacgctcatgcacgaaagcgtggggagcaaacaggattagataccctggtagtccacgccctaaacgatgtctactagttgttggggacgatagtccttggtaacgcagctaacgcgtgaagtagaccgcctggggagtacggtcgcaagattaaaactcaaaggaattgacggggacccgcacaagcggtggatgatgtggattaattcgatgcaacgcgaaaaaccttacctagccttgacatgccaggaaggcctgagagatcaggccgtgcccgcaagggaatctggacacaggtgctgcatggctgtcgtcagctcgtgtcgtgagatgttgggttaagtcccgcaacgagcgcaacccttgtcattagttgctacgaaagggcactctaatgagactgccggtgacaaaccggaggaaggtggggatgacgtcaagtcctcatggcccttatggctagggcctcacacgtcatacaatggtcggaacagagggaagcgaagccgcgaggtgaagccaatcccagaaaaccgatcgtagtccggattgcagtctgcaactcgactgcatgaagtcggaatcgctagtaatcgcggatcagcatgccgcggtgaatacgttcccgggtcttgtacacaccgcccgtcacaccatgggagtggggttcaccagaagacgtttgcccaaccgaaaggaaggcggcgtccacggtgggcttcatgac

SEQ ID NO: 936 - DNA, 1454 bp, Artificial Sequence
  Synthetic polymer
ctggcggcgtgcctaacacatgcaagtcgaacgagaatctttggaatgattctttcgggatgaattccaaagaggaaagtggcggacgggcgagtaacgcgtgagtaacctgcccataagagggggataatccatggaaacgtggactaataccgcatattgtagttaagttgcatgacttgattatgaaagatttatcgcttatggatggactcgcgtcagattagatagttggtgaggtaacggctcaccaagtcaacgatctgtagccgaactgagaggttgatcggccgcattgggactgagacacggcccagactcctacgggaggcagcagtggggaatattgcgcaatgggggcaaccctgacgcagcaacgccgcgtgcaggaagaaggtcttcggattgtaaactgttgtcgcaagggaagaagacagtgacggtaccttgtgagaaagtcacggctaactacgtgccagcagccgcggtaatacgtaggtgacaagcgttgtccggatttactgggtgtaaagggcgcgtaggcggactgtcaagtcagtcgtgaaataccggggcttaaccccggggctgcgattgaaactgacagccttgagtatcggagaggaaagcggaattcctagtgtagcggtgaaatgcgtagatattaggaggaacaccagtggcgaaggcggctttctggacgacaactgacgctgaggcgcgaaagtgtggggagcaaacaggattagataccctggtagtccacaccgtaaacgatggatactaggtgtaggaggtatcgaccccttctgtgccgcagttaacacaataagtatcccacctggggagtacgaccgcaaggttgaaactcaaaggaattgacgggggcccgcacaagcagtggagtatgtggtttaattcgaagcaacgcgaagaaccttacctgggcttgacatccctggaatcgagtagagatacttgagtgccttcgggaatcaggtgacaggtggtgcatggttgtcgtcagctcgtgtcgtgagatgttgggttaagtcccgcaacgagcgcaacccctattgtcagttgccatcattaagttgggcactctggcgagactgccggtgacaaatcggaggaaggtggggacgacgtcaaatcatcatgccccttatgcccagggctacacacgtactacaatggccgataacaaagtgcagcgaaaccgtgaggtggagcgaatcacaaaactcggtctcagttcagattgcaggctgcaactcgcctgcatgaagttggaatcgctagtaatcgcagatcagaatgctgcggtgaatacgttcccgggtcttgtacacaccgcccgtcacaccatgggagtcagcaacgcccgaagtcagtgactcaaccgcaaggagagagctgccgaaggcggggcaggtaactggggtgaagtc

SEQ ID NO: 937 - DNA, 1441 bp, Artificial Sequence
  Synthetic polymer
gcctaacacatgcaagtcgaggggcaacatggtatcagcttgctgatactgatggcgaccggcgcacgggtgagtaacgcgtatgtaatctacctgtaacagagggataacccggagaaatccggactaatacctcatagcacatattattcgcatgaattttatgttaaagaaactcggttacagatgaacatgcgttccattatctagttggcggggttacggcccaccccggcaacaatgggtaggggttctgagaggaaggtcccccccactgtgactgagacacggaccacactcctacgggaggcggcagtgaggaatattgtgcactgggcggaagcctgagccacccacgtcgcgtgtaggagaacagccctacgggttgtgaactccttttacctgggaataacgggcgctacgtgtagcgctgtgcaagtaccgggagaataagcatcggctaattccgtgccagcagccgcggtaatacggaagatgcgagcgttatccggatttattgggtttaaagggtgcgtaggcggaagaataagtcagcggtgaaatgcttcagctcaactggagaattgccgatgaaactgtttttctagagtataaaagaggtatgcggaatgcgtggtgtagcggtgaaatgcatagatatcacgcagaaccccgattgcgaaggcagcatactgggctataactgacgctgaagcacgaaagcgtgggtatcgaacaggattagataccctggtagtccacgccgtaaacgatgaatactaactgtttgcgatataatgtaagcggtacagcgaaagcgttaagtattccacctggggagtacgccggcaacggtgaaactcaaaggaattgacgggggcccgcacaagcggaggaacatgtggtttaattcgatgatacgcgaggaaccttacccgggctcaaacgacaggggaataatcccgaaaaggattagccagcaatggtcgctgtcgaggtgctgcatggttgtcgtcagctcgtgccgtgaggtgtcggcttaagtgccataacgagcgcaacccttaccggtagttactaacaggtcaagctgaggactctaccgggactgccagcgcaagctgcgaggaaggtggggatgacgtcaaatcagcacggcccttacgtccggggcgacacacgtgttacaatggcaggtacagagagtcgcgtcgtagcaatacgtagccaatcccgaaaacctgtctcagttcggatcggagtctgcaactcgactccgtgaagctggattcgctagtaatcgcgcatcagccatggcgcggtgaatacgttcccgggccttgtacacaccgcccgtcaagccatgggagccgggagtacctgaagtatgcaaccgcaaggagcgtcctagggtaatactggtgactggggctaagtcgta

SEQ ID NO: 938 - DNA, 1403 bp, Artificial Sequence
  Synthetic polymer
cgctggcggcgcgcctaacacatgcaagtccaactttagatgaggagcttgctcttcacatcgagtggcgaacgggtgagtaacgcgtgaggaacctgcctcaaagagggggacaacagttggaaacgactgctaataccgcataagcccacggctcggcatcgagcagagggaaaaaggagcaatccgctttgagatggcctcgcgtccgattagctagttggtgaggtaacggcccaccaaggcgacgatcggtagccggactgagaggttgaacggccacattgggactgacacacggcccatactcctacgggaggcagcagtggggaatattgcacaatgggggaaaccctgatgcagcgacgccgcgtggaggaagaaggtcttcggattgtaaactcctgttgttgaggaagataatgacggcactcaacaaggaagtgactgctaactacgtgccagcagccgcggtaaaacgtatgtcacaagcgttgtccggaattactgggtgtaaagggagcgcaggcgggagaacaagttggaagtgaaatccatgggctcaacccatgaactgctttcaaaactgtttttcttgagtagtgcagaggtaggcggaattcccggtgtagcggtggaatgcgtagatatcgcgaggaacaccagtggcgaaggcggcctactgggcaccaactgacgctgaggctcgaaagtgtgggtagcaaacaggattagataccgtggtagtccactccgtaaacgatgattattaggtgttggaggattgaccccttcagtgccgcagttaacaacaataagtaatccacatggggagtacgaccgcaaggttgaaactcaaaggaattgacgggggcccgcacaagcagtggagtatgtggtttaattcgacgcaacgcgaagaaccttaccaagtcttgacatcccttgacgaacatagaaatatgttttctgttcggagcaaggagacaggtggtgcatggttgttgtcagctcgtgtcgtgagatgttgggttaagtcccgcaacgagcgcaacccttatggtcagtttctacgcaagaggactttggccagactgccgttgacaaaacggaggaaggtggggatgacgtcaaatcatcatgccctttatgacttgggctacacacgtactacaatggcgttaaacaaagagaagcaagaccgcgaggtggagcaaaactcagaaacaacgtcccagtttggattgcaggctgcaactcgcatgcgcgaagtcggaattgatagtaatcgtggatcagcatgccacggtgaatacgttcccgggctttgtacactccgcccgtcacaccatgagagccggggggaccggaagtcggtagtctaaccgcaaggaggacgccgc

SEQ ID NO: 939 - DNA, 1449 bp, Artificial Sequence
  Synthetic polymer
tcagattgaacgctggcggcatgctttacacatgcaagtcgaacgggagcgcggggagcttgctccctggcggcgagtggcgcacgggtgagtaatacatcggaacgtgtcttctagtgggggataactgcccgaaagggcagctaataccgcatgagacctgagggtgaaagcgggggatcgcaagacctcgcgctggaagagcggccgatgtccgattagctagttggtgaggtaaaggctcaccaaggcgacgatcggtagctggtctgagaggacgaccagccacactgggactgagacacggcccagactcctacgggaggcagcagtggggaattttggacaatgggggcaaccctgatccagccatgccgcgtgcaggatgaaggtcttcggattgtaaactgcttttgtcagggacgaaaagggatgcgataacaccgcattccgctgacggtacctgaagaataagcaccggctaactacgtgccagcagccgcggtaatacgtagggtgcaagcgttaatcggaattactgggcgtacagcgtgcgcaggcggttctgtaacatagatgtgaaatccccgggctcaccctgggaattgcatatatgactgcaggacttgagtttgtcagaggagggtggaattccacgtgtagcagtgaaatgcgtagatatgtggaagaacaccgatggcgaaggcagccctctgggacatgactgacgctcatgcacgaaagcgtggggagcaaacaggattagataccctggtagtccacgccctaaacgatgtctactagttgttgggccgcatggcttagtaacacagctaacgcgagaagttgaccgcctggggagtacggtcgcaagattaaaactcaaaggaattgacggggacccgcacaagcggtggatgatgtggattaattcgatgcaacgcgaaaaaccttacctagccttgacatgccaggaatcctgatgaaagtcgggagtgcccgcaagggaatctggacacaggtgctgcatggctgtcgtcagctcgtgtcgtgagatgttgggttaagtcccgcaacgagcgcaacccttgtcactagttgctacgcaagagcactctagtgaaactgccggtgacaaaccggaggaaggtggggatgacgtcaagtcctcatggcccttatggctagggcctcacacgtcatacaatggtcggaacagagggcagcgaagccgtgaggcggagccaatcccagaaaaccgatcgtagtccggattgcactctgcaactcgagtgcatgaagtcggaatcgctagtaatcgcggatcagcatgccgcggtgaatacgttcccgggtcttgtacacaccgcccgtcacaccatgggagtggggttcaccagaaggcgtttgcctaaccttcgggagggcggcgaccacggtgggtttcat

SEQ ID NO: 940 - DNA, 1451 bp, Artificial Sequence
  Synthetic polymer
gaacgctggcggcgtgcttaacacatgcaagtcgagcggagcactttggaaagattcttcggatgatttcctttgtgactgagcggcggacgggtgagtaacgcgtgggtaacctgcctcatacagggggataacagttagaaatgactgctaataccgcataagaccacggtaccgcatggtacagtggtaaaaactccggtggtatgagatggacccgcgtctgattaggtagttggtggggtaacggcctaccaagccgacgatcagtagccgacctgagagggtgaccggccacattgggactgagacacggcccagactcctacgggaggcagcagtggggaatattgcacaatggaggaaactctgatgcagcgacgccgcgtgaaggatgaagtatttcggtatgtaaacttctatcagcagggaagaaaatgacggtacctgactaagaagccccggctaactacgtgccagcagccgcggtaatacgtagggggcaagcgttatccggaattactgggtgtaaagggtgcgtaggtggtatggcaagtcagaagtgaaaacccagggcttaactctgggactgcttttgaaactgtcagactggagtgcaggagaggtaagcggaattcctagtgtagcggtgaaatgcgtagatattaggaggaacatcagtggcgaaggcggcttactggactgaaactgacactgaggcacgaaagcgtggggagcaaacaggattagataccctggtagtccacgctgtaaacgatgaatactaggtgttggtgggcaaagcccatcggtgccgccgcaaacgcaataagtattccacctggggagtacgttcgcaagaatgaaactcaaaggaattgacggggacccgcacaagcggtggagcatgtggtttaattcgaagcaacgcgaagaaccttaccaagtcttgacatcgtgatgaccggaacttaaccgttccttcccttcggggcatcatagacaggtggtgcatggttgtcgtcagctcgtgtcgtgagatgttgggttaagtcccgcaacgagcgcaacccttatcctcagtagccagcagtaagatgggaactctgaggagactgccagggataacctggaggaaggtggggatgacgtcaaatcatcatgccccttatgatttgggctacacacgtgctacaatggcgtaaacaaagggaagcgatagggtgacctggagcaaatcccaaaaataacgtcccagttcggactgtagtctgcaacccgactacacgaagctggaatcgctagtaatcgcagatcagaatgctgcggtgaatacgttcccgggtcttgtacacaccgcccgtcacaccatgggagtcagcaacgcccgaagtcagtgactcaaccgcaaggagagagctgccgaaggcggggcaggtaactggggtgaa

SEQ ID NO: 941 - DNA, 1513 bp, Artificial Sequence
  Synthetic polymer
tccgaacggagagtttgatcctggctcaggatgaacgctggcggcgtgcctaacacatgcaagtcgaacgattaaagcgccttcgggcgtgtatagagtggcgaacgggtgagtaacacgtgaccaacctacccttctcttcgggacaaccttgggaaaccgaggctaataccgaatactccggcgagtgcgcatgcactcaccgggaaagctttcgcggagaaggatggggtcgcggcccatcaggtagacggcggggtagcggcccaccgtgcttttgacgggtagccgggttgagagaccgaccggccacattgggactgagatacggcccagactcctacgggaggcagcagtggggaattttgcgcaatgggggaaaccctgacgcagcaacgccgcgtgcgggatgaaggccttcgggtcgtaaaccgctttcagcagggaagaaattcgacggtacctgcagaagaagccccggctaactacgtgccagcagccgcggtaatacgtagggggcgagcgttatccggattcattgggcgtaaagcgcgcgtaggcggccgcctaagcgggacctctaaccttggggctcaacctcaagccgggttccgaactgggtggctcgagtttggtagaggaagatggaattcccggtgtagcggtggaatgcgcagatatcgggaagaacaccgatggcgaaggcagtcttctgggccataactgacgctgaggcgcgaaagctaggggagcaaacaggattagataccctggtagtcctagccgtaaacgatgggcactaggtgtggggagatactctttccgtgccgaagcaaacgcattaagtgccccgcctggggagtacggccgcaaggctaaaactcaaaggaattgacgggggcccgcacaagcagcggagcatgtggcttaattcgaagcaacgcgaagaaccttaccagggcttgacatgcgcatgaagccggggaaactcggtggccgaaaggagtgcgcgcaggtggtgcatggctgtcgtcagctcgtgtcgtgagatgttgggttaagtcccgcaacgagcgcaacccctgtcctgtgttgccagcattcagttggggactcgcaggagactgccggcgtcaagccggaggaaggtggggacgacgtcaagtcatcatgccccttatgccctgggctgcacacgtgctacaatggccggcacaacgggctgctacctggcgacaggaagcgaatcccttaaagccggtcccagttcggatcggaggctgcaacccgcctccgtgaagtcggagttgctagtaatcgcggatcagcatgccgcggtgaatacgttcccgggccttgtacacaccgcccgtcacaccacccgagtcgtctgcacccgaagccgccggccgaacccatttgggacggaggcgtcgaaggtgtggagggtaaggggggtgaagtcgtaacaaggtagccgtaccggaaggtgcggctggatcacctcctttct

SEQ ID NO: 942 - DNA, 1438 bp, Artificial Sequence
  Synthetic polymer
cgctggcggcgtgcttaacacatgcaagtcgaacggagcacccttgattgaggcttcggccaaatgataggaatgcttagtggcggactggtgagtaacgcgtgaggaacctgcctttcagagggggacaacagttggaaacgactgctaataccgcatgacgcattttgatcgcatggtcgaaatgccaaagatttatcgctgaaagatggcctcgcgtctgattagttagttggtgaggtaacggcccaccaaggcgacgatcagtagccggactgagaggttgaccggccacattgggactgagatacggcccagactcctacgggaggcagcagtggggaatattgggcaatgggcgcaagcctgacccagcaacgccgcgtgaaggaagaaggctttcgggttgtaaacttcttttaagtgggaagagtagaagacggtaccacttgaataagccacggctaactacgtgccagcagccgcggtaatacgtaggtggcaagcgttgtccggatttactgggtgtaaagggcgtgcagccgggcatgcaagtcagatgtgaaatctcagggcttaaccctgaaactgcatttgaaactgtatgtcttgagtgccggagaggtaatcggaattccttgtgtagcggtgaaatgcgtagatataaggaagaacaccagtggcgaaggcggattactggacggtaactgacggtgaggcgcgaaagcgtggggagcgaacaggattagataccctggtagtccacgctgtaaacgatggatactaggtgtgcggggactgaccccctgcgtgccgcagttaacacaataagtaatccacctggggagtacgaccgcaaggttgaaactcaaaggaattgacgggggcccgcacaagcagtggagtatgtggtttaattcgacgcaacgcgaagaaccttaccaagtcttgacatcccttgacgaacatagaaatatgttttctcttcggagcaaggagaccggtggtgcatggttgtcgtcagctcgtgtcgtgagatgttgggttaagtcccgcaacgagcgcaacccttatggtcagttactacgcaagaggactctggccagactgccgttgacaaaacggaggaaggtggggatgacgtcaaatcatcatgccctttatgacttgggctacacacgtactacaatggcgttaaacaaagagaagcaagaccgcgaggtggagcaaaactcagaaacaacgtcccagttcggactgcaggctgcaactcgcctgcacgaagtcggaattgctagtaatcgtggatcagcatgccacggtgaatacgttcccgggccttgtacacaccgcccgtcacaccatgagagccggggggacccgaagtcggtagtctaaccgcaaggaggacgccgccgaaggtaaaactggtgattgg

SEQ ID NO: 943 - DNA, 1443 bp, Artificial Sequence
  Synthetic polymer
gcatgctttacacatgcaagtcgaacggcagcgcggggagcttgctccctggcggcgagtggcgcacgggtgagtaatacatcggaacgtgtcttctagtgggggataactgcccgaaagggcagctaataccgcatgagacctgagggtgaaagcgggggatcgcaagacctcgcgctggaagagcggccgatgtccgattagctagttggtgaggtaaaggctcaccaaggcgacgatcggtagctggtctgagaggacgaccagccacactgggactgagacacggcccagactcctacgggaggcagcagtggggaattttggacaatgggggcaaccctgatccagccatgccgcgtgcaggatgaaggtcttcggattgtaaactgcttttgtcagggacgaaaagggatgcgataacaccgcattccgctgacggtacctgaagaataagcaccggctaactacgtgccagcagccgcggtaatacgtagggtgcaagcgttaatcggaattactgggcgtaaagcgtgcgcaggcggttctgtaagatagatgtgaaatccccgggctcaacctgggaattgcatatatgactgcaggacttgagtttgtcagaggagggtggaattccacgtgtagcagtgaaatgcgtagatatgtggaagaacaccgatggcgaaggcagccctctgggacatgactgacgctcatgcacgaaagcgtggggagcaaacaggattagataccctggtagtccacgccctaaacgatgtctactagttgttggggacgatagtccttggtaacgcagctaacgcgtgaagtagaccgcctgcggagtacggtcgcaagattaaaactcaaaggaattgacggggacccgcacaagcggtggatgatgtggattaattcgatgcaacgagaaacactttatatagcctcgacatgtcaggaaggtgtgagatatcagcctgcgtccgcaagggaatctgcacacaggtcatgcatgggtgtcgtcaggtcgtgtgatgagatgttgggttaagtcccgcaacgagcccaacccttgtcattagatcatatgaaagggcactctaatgagactgccggtgacaaaccggaggaaggtggggatgacgtcaagtcatcatggcccttatggttagggcttcacacgtcatacaatggtcggaacagagggaagcgaagccgcgaggtgaagccaatcccagaaaaccgatcgtagtccggattgcagtctgcaactcgactgcatgaagtcggaatcgctagtaatcgcggatcagcatgccgcggtgaatacgttcccgggtcttgtacacaccgcccgtcacaccatgggagtggggttcaccagatgacgtttgtccaaccgaaaggaagacgtcgtccacggtgggcttcatgactggggtg

SEQ ID NO: 944 - DNA, 1498 bp, Artificial Sequence
  Synthetic polymer
agagtttgatcctggctcaggacgaacgctggcggcgcgcctaacacatgcaagtcgaacggggtattactacttaatccttcgggaagcggtggtgatacctagtggcggacgggtgagtaacacgtgaggaacctgccttacagagggggataccgtctggaaacggacgttaataccgcatgacatatacggaccgcatggtctgtatatcaaagatttatcgctgaaaggtggcctcgcgtctgattagatagttggtgaggtaacggcccaccaagtcgacgatcagtagccggactgagaggttgaacggccacattgggactgagatacggcccagactcctacgggaggcagcagtggggaatattgggcaatgggggaaaccctgacccagcaacgccgcgtgaaggaagaaggctttcgggttgtaaacttcttttaccagggacgaagaaagtgacggtacctggagaaaaagccacggctaactacgtgccagcagccgcggtaatacgtaggtggcaagcgttatccggatttactgggtgtaaagggcgtgtaggcgggctagcaagtcagatgtgaaaactatgggctcaacccatagcctgcatttgaaactgttggtcttgagtgctggagaggcaatcggaattccgtgtgtagcggtgaaatgcgtagatatacggaggaacaccagtggcgaaggcggattgctggacagtaactgacgctgaggcgcgaaagcgtggggagcaaacaggattagataccctggtagtccacgccgtaaacgatggatactaggtgtggggggtctgaccccctccgtgccgcagttaacacaataagtatcccacctggggagtacgatcgcaaggttgaaactcaaaggaattgacgggggcccgcacaagcggtggagtatgtggtttaattcgatgcaacgcgaagaaccttacctggtcttgacatcccgatgacaagctgtgtaaagcagcctctcttcggagcatcggtgacaggtggtgcatggttgtcgtcagctcgtgtcgtgagatgttgggttaagtcccgccaaacgagcgcaacccttgtctttagtagccagcatttaggatgggcactctagagagactgccagggataacctggaggaaggtggggatgacgtcaaatcatcatgccccttatgatttgggctacacacgtgctacaatggcgtaaacaaagagaagcgagggagtgatccggagcaaatctcaaaaataacgtctcagttcggattgtagtctgcaactcgactacatgaagctggaatcgctagtaatcgcgaatcagaatgtcgcggtgaatacgttcccgggtcttgtacacaccgcccgtcacaccatgggagtaggtaatgcccgaagtcggtgacctaaccgtaaggaaggagccgccgaaggcaggacttataactggggtgaagtcgtaacaaggtagccgt

SEQ ID NO: 945 - DNA, 1447 bp, Artificial Sequence
  Synthetic polymer
tttaacatgagagtttgatcctggctcaggatgaacgctggcggcgtgcttaacacatgcaagtcgagcgaagcatttttaatgaagttttcggatggatttagatttgacttagcggcggacgggtgagtaacgcgtgggtaacctgccttatactgggggataacagttagaaatgactgctaataccgcataagcgcacagtgccgcatggcacggtgtgaaaaactccggtggtgtaagatggacccgcgtctgattaggtagttggtagggtaacggcctaccaagccgacgatcagtagccgacctgagagggtgaccggccacattgggactgagacacggcccaaactcctacgggaggcagcagtggggaatattgcacaatgggcgaaagcctgatgcagcgacgccgcgtgagtgaagaagtatttcggtatgtaaagctctatcagcagggaagaaaatgacggtacctgactaagaagccccggctaactacgtgccagcagccgcggtaatacgtagggggcaagcgttatccggatttactgggtgtaaagggagcgtagacggtttagcaagtctgaagtgaaagcccggggctcaaccccggtactgctttggaaactgttagacttgagtgcaggagaggtaagtggaattcctagtgtagcggtgaaatgcgtagatattaggaggaacaccagtggcgaaggcggcttactggactgtaactgacgttgaggctcgaaagcgtggggagcaaacaggattagataccctggtagtccacgccgtaaacgatgaatactaggtgtcggggagcaaagctcttcggtgccgccgcaaacgcattaagtattccacctggggagtacgttcgcaagaatgaaactcaaaggaattgacggggacccgcacaagcggtggagcatgtggtttaattcgaagcaacgcgaagaaccttaccaagtcttgacatccccctgaccggcacgtaacggtgcctttccttcgggacaggggagacaggtggtgcatggttgtcgtcagctcgtgtcgtgagatgttgggttaagtcccgcaacgagcgcaacccttatccttagtagccagcagtcagatgggaactctagggagactgccagggataacctggaggaaggtggggatgacgtcaaatcatcatgccccttatgatttgggctacacacgtgctacaatggcgtaaacaaagggaagcgaaaccgcgaggtcaagcaaatcccaaaaataacgtctcagttcggattgtagtctgcaactcgactacatgaagctggaatcgctagtaatcgcgaatcagaatgtcgcggtgaatacgttcccgggtcttgtacacaccgcccgtcacaccatgggagtcgataacgcccgaagtcagtgacccaaccgcaaggag

SEQ ID NO: 946 - DNA, 1423 bp, Artificial Sequence
  Synthetic polymer
tggcggcgtgcgtaacccatgcaagtcgaacgatcagatttccttcggggaagaagcgagtggcggacgggtgagtaacgcgtgaacaaccaaccctatacagggggacaacagctggaaacggctgctaataccgcataagaccacaaggccgcatggccaaggggtcaaaggagcaatccggtataggacgggttcgcgtcccattagctagtaggcggggtaaaggcccacctaggcgacgatgggtagccgagctgagaggctgaccggccacactgggactgagatacggcccagactcctacgggaggcagcaggggggaatattgggcaatgggggaaaccctgacccagcaacgccgcgtgaaggaagaaggccttcgggttgtaaacttctgtgacaggggacgaaggaagtgacggtaccctgagaggaagctccggcaaactacgtgccagcagccgcggtaatacgtagggagcgagcgttgtccggaattactaggcgtaaagggcgcgtaggcggtagatcaagtcgcatgtgaaatacccgggctcaacctggggggtgcatgcgaaactggaatacttgagtgcggtagaggaaagtggaattcctagtgtagcggtgaaatgcgtagatattaggaggaacaccagtggcgaaggcgactttctgggccgtaactgacgctgaggcgcgaaagcgtggggagcaaacaggattagataccctggtagtccacgccgtaaacgatgaatgctaggtgtagggggtatcgaccccctctgtgccgcagctaacgcaataagcattccgcctggggagtacggccgcaaggttgaaactcaaaggaattgacgggggcccgcacaagcagcggagcatgttgtttaattcgacgcaacgcgaagaaccttaccagggcttgacatccaatggatcctgtggaaacacgggagtgcccttcggggaacattgagacaggtggtgcatggttgtcgtcagctcgtgtcgtgagatgttgggttaagtcccgcaacgagcgcaacccttatggtcagttgccagcacgtaaaggtgggaactctgacaagactgccgtggataacacggaggaaggtggggacgacgtcaaatcatcatgctccttatgtcctgggctacaaacgtgctacaatggccgtgacaaagggaagcgaacccgcaagggggagcggaaccgaaaaaagcggtctcagttcggattgtgggctgcaacccgcccacatgaagttggagttgctagtaatcgcggatcagaatgccgcggtgaatgcgttcccgggccttgtacacaccgcccgtcacaccatgggagttggtagcacccaaagccaatgagccaaccggaagggggcagctgtctaaggtgagacc

SEQ ID NO: 947 - DNA, 1447 bp, Artificial Sequence
  Synthetic polymer
gaacgctggcggcgtgcttaacacatgcaagtcgaacggagcacccttgacggagttttcggacaactgataggaatgcttagtggcggactggtgagtaacgcgtgaggaacctgcctttcagagggggacaacagttggaaacgactgctaataccgcatgatacatttgagcggcatcgcttgaatgtcaaagattttatcgctgaaagatggcctcgcgtctgattagctagttggcggggtaacggcccaccaaggcgacgatcagtagccggactgagaggttgaccggccacattgggactgagatacggcccagactcctacgggaggcagcagtggggaatattgggcaatggacgcaagtctgacccagcaacgccgcgtgaaggaagaaggctttcgggttgtaaacttcttttaagggggaacagaagaagagggtacctcttgaataagccacggctaactacgtgccagcagccgcggtaatacgtaggtggcaagcgttgtccggatttactgggtgtaaagggcgtgtagccggggagacaagtcagatgtgaaatctggaggctcaacctccaaactgcatttgaaactgtttctcttgagtatcggagaggtaatcggaattcctagtgtagcggtgaaatgcgtagatattaggaagaacaccagtggcgaaggcggattactggacgacaactgacggtgaggcgcgaaagcgtggggagcaaacaggattagataccctggtagtccacgctgtaaacgatcaatactaggtgtgcggggactgaccccctgcgtgccgcagttaacacaataagtattgcacctggggagtacgatcgcaaggttgaaactcaaaggaattgacgggggcccgcacaagcggtggattatgtggtttaattcgaagcaacgcgaagaaccttaccagggcttgacatcctactaacgaagtagagatacattaggtgcccttcggggaaagtagagacaggtggtgcatggttgtcgtcagctcgtgtcgtgagatgttgggttaagtcccgcaacgagcgcaacccctattgttagttgctacgcaagagcactctagcgagactgccgttgacaaaacggaggaaggtggggacgacgtcaaatcatcatgccccttatgtcctgggctacacacgtaatacaatggcggtcaacaaagggatgcaaagccgcgaggcagagcaaacccccaaaagccgtcccagttcggatcgcaggctgcaacccgcctgcgtgaagtcggaatcgctagtaatcgcggatcagcatgccgcggtgaatacgttcccgggccttgtacacaccgcccgtcacaccatgagagccggggggacccgaagtcgatagtctaaccgcaaggaggacgtcgccgaaggtaaaactggtgaatggg

SEQ ID NO: 948 - DNA, 1450 bp, Artificial Sequence
  Synthetic polymer
gaacgctggcggcgtgcttaacacatgcaagtcgaacgaagcactctatttgattttcttcggaaatgaagattttgtgactgagtggcggacgggtgagtaacgcgtgggtaacctgcctcatacagggggataacagttggaaacgactgctaataccgcataagcgcacaggattgcatgatccggtgtgaaaaactccggtggtatgagatggacccgcgtctgattagccagttggcagggtaacggcctaccaaagcgacgatcagtagccgacctgagagggtgaccggccacattgggactgagacacggcccaaactcctacgggaggcagcagtggggaatattgcacaatgggggaaaccctgatgcagcgacgccgcgtgagtgaagaagtagttcgctatgtaaagctctatcagcagggaagatagtgacggtacctgactaagaagctccggctaaatacgtgccagcagccgcggtaatacgtatggagcaagcgttatccggatttactgggtgtaaagggagtgtaggtggccaggcaagtcagaagtgaaagcccggggctcaaccccgggactgcttttgaaactgcagggctagagtgcaggaggggcaagtggaattcctagtgtagcggtgaaatgcgtagatattaggaggaacaccagtggcgaaggcggcttgctggactgtaactgacactgaggctcgaaagcgtggggagcaaacaggattagataccctggtagtccgcgccgtaaacgatgaatactaggtgtcggggcacataagtgctccggtgccgcagcaaacgcaataagtattccacctggggagtacgttcgcaagaatgaaactcaaaggaattgacggggacccgcacaagcggtggagcatgtggtttaattcgaagcaacgcgaagaaccttaccaagtcttgacatcctcttgaccggtcagtaatgtgaccttttcttcggaacaagagtgacaggtggtgcatggttgtcgtcagctcgtgtcgtgagatgttgggttaagtcccgcaacgagcgcaacccttatccttagtagccagcagtccggctgggcactctagggagactgccagggataacctggaggaaggtggggatgacgtcaaatcatcatgccccttatgacttgggctacacacgtgctacaatggcgtaaacaaagtgaagcgagagtgtgagcttaagcaaatcacaaaaataacgtctcagttcggattgtagtctgcaacttgactacatgaagctggaatcgctagtaatcgcagatcagaatgctgcggtgaatacgttcccgggtcttgtacacaccgcccgtcacaccatgggagtcggaaatgcccgaagtcggtgacctaatgtaagaaggagccgccgaaggcaggtctgataactggggt

SEQ ID NO: 949 - DNA, 1441 bp, Artificial Sequence
  Synthetic polymer
ctcaggatgaacgctggcggcgtgcttaacacatgcaagtcgaacggaggacccttgacggagtttttggacaactgataggaatccttagtggcggacgggtgagtaacgcgtgaggaacctgccttggagtggggaataacagctggaaacagctgctaataccgcatgatgcatttgggtcgcatgattctgaatgccaaagatttatcgctctgagatggcctcgcgtctgattagctagttggtggggtaacggcccaccaaggcgacgatcagtagccggactgagaggttggccggccacattgggactgagacacggcccagactcctacgggaggcagcagtggggaatattgggcaatgggcgcaagcctgacccagcaacgccgcgtgaaggaagaaggccctcgggttgtaaacttcttttatccgggacgaagcaagtgacggtacctgatgaataagccacggctaactacgtgccagcagccgcggtaatacgtaggtggcgagcgttatccggatttactgggtgtaaagggcgtgtaggcgggaaggcaagtcagacgtgaaaaccacgggctcaacctgtggcctgcgtttgaaactgtttttcttgagtgatggagaggcaggcggaattccgtgtgtagcggtgaaatgcgtagatatacggaggaacaccagtggcgaaggcggcctgctggacattaactgacgctgaggcgcgaaagcgtggggagcaaacaggattagataccctggtagtccacgccgtaaacgatggatactaggtgtggggggtctgaccccctccgtgccgcagttaacacaataagtatcccacctggggagtacgatcgcaaggttgaaactcaaaggaattgacgggggcccgcgcaagcggtggagtatgtggtttaattcgaagcaacgcgaagaaccttaccagggcttgacatcctactaacgaagcagagatgcattaggtgcccttcggggaaagtagagacaggtggtgcatggttgtcgtcagctcgtgtcgtgagatgttgggttaagtcccgcaacgagcgcaacccttattgttagttgctacgcaagagcactctagcgagactgccgttgacaaaacggaggaaggtggggacgacgtcaaatcatcatgccccttatgtcctgggccacacacgtactacaatggcggtcaacagagggaagcaaatccgcgaggaggagcaaatccccaaaagccgtcccagttcggattgcaggctgcaactcgcctgtatgaagtcggaatcgctagtaatcgcggatcagcatgccgcggtgaatacgttcccgggccttgtacacaccgcccgtcacaccatgagagtcgggaacacccgaagtccaaagcctaaccgcaaggagggcgcggccgaaggtg

SEQ ID NO: 950 - DNA, 1427 bp, Artificial Sequence
  Synthetic polymer
aacgctggcggcgtgcctaacacatgcaagtcgaacgaagctttgaggtgcttgctttttaaagcttagtggcggacgggtgagtaacgcgtgagcaacctgcctctcagagggggataacgttttgaaaagaacgctaataccgcataagcccacgacccggcatcgggtagagggaaaaggagcaatccgctttgagatggcctcgcgtccgattagctagttggtgaggtaacggcccaccaaggcgacgatcggtagccggactgagaggttgaacggccacattgggactgagacacggcccagactcctacgggaggcagcagtggggaatattgcacaatgggggaaaccctgatgcagcgacgccgcgtggaggaagaaggtcttcggattgtaaactcctgttgttgaggaagataatgacggtactcaacaaggaagtgacggctaactacgtgccagcagccgcggtaaaacgtatgtcacaagcgttgtccggaattactgggtgtaaagggagcgcaggcgggaagacaagttggaagtgaaatccatgggctcaacccatgaactgctttcaaaactgtttttcttgagtagtgcagaggtaggcggaattcccggtgtagcggtggaatgcgtagatatccggaggaacaccagtggcgaaggcggcctactgggcaccaactgacgctgaggctcgaaagtgtgggtagcaaacaggattagataccctggtagtccacactgtaaacgatgattagtaggtgttggaggattgaccccttcagtgccgcagttaacacaataagtaatccacctggggagtacgaccgcaaggttgaaactcaaaggaattgacgggggtccgcacaagcagtggagtatgtggtttaattcgacgcaacgcgaagaaccttaccaagtcttgacatcccttgacgatactggaaacagtatttctcttcggagcaaggagacaggtggtgcatggttgttgtcagctcgtgtcgtgagatgttgggttaagtcccgcaacgagcgcaacccttatggtcagttactatgcaagaggactctggccagactgccgttgacaaaacggaggaaggtggggatgacgtcaaatcatcatgccctttatgacttgggctacacacgtactacaatggcgttaaacaaagagaagcaagaccgcgaggtggagcaaaactcagaaacaacgtcccagttcggactgcaggctgcaactcgcctgcacgaagtcggaattgctagtaatcgcagatcagcatgctgcggtgaatacgttcccgggccttgtacacaccgcccgtcacaccatgagagccggggggacccgaagtcggtagtctaaccgcaaggaggacgccgccgaaggtaaaactggtgattgg

SEQ ID NO: 951 - DNA, 1417 bp, Artificial Sequence
  Synthetic polymer
tgaacgctggcggcgtgcttaacacatgcaagtcgaacgattaacccaaacttcggtttggttataaagtggcgaacgggtgagtaacacgtgaccaacctgccttctagatcgggataactcaaggaaacttgtgctaataccggatactccggagcaatcgcatggtagcttcgggaaagcttttgcgctagaagatggggtcgcagcctattaggtagttggtggggtagaggcctaccaagcctgcgataggtagccgggttgagagactgatcggccacattgggactgagatacggcccagactcctacgggaggcagcagtggggaattttgcgcaatgggggcaaccctgacgcagcaacgccgcgtgcgggatgaaggtcttcggattgtaaaccgctttcagtagggaataagtatgaaggtacctacagaagaagcaccggctaaatacgtgccagcagccgcggtaatacgtatggtgcaagcgttatccggaatcattgggcgtaaagcgcgcgtaggcggcttgttaagcaggaatttaaatcttagggctcaaccttaagtcggttcctgaactggcaggctcgagtgcggtagaggaaggtggaattcccagtgtagcggtgaaatgcgcagatattgggaagaacaccgatggcgaaggcagccttctgggccgccactgacgctgaggcgcgaaagctaggggagcgaacaggattagataccctggtagtcctagccgtaaacgatgggcactaggtgtggggaggaattctctccgtgccgcagctaacgcattaagtgccccgcctggggagtacggccgcaaggctaaaactcaaaggaattgacgggggcccgcacaagcagcggagcatgtggcttaattcgaagcaacgcgaagaaccttaccagggcttgacatataggtgagcctgtagaaatacaggggccgaaaggagcctatacaggtggtgcatggctgtcgtcagctcgtgtcgtgagatgttgggttaagtcccgcaacgagcgcaacccctgttgtatgttgccagcattaaggtggggactcatacaagactgccggcgtcaagccggaggaaggtggggatgacgtcaagtcatcatgccccttatgccctgggctgcacacgtgctacaatggctggtacaacgagctgcgaagtcgcgagaccaagcgaatctcttaaaaccagtcccagttcggattgcaggctgcaattcgcctgcatgaagtcggagttgctagtaatcgcggatcagcatgccgcggtgaatacgttcccgggccttgtacacaccgcccgtcacaccactcgagtcgtctgcacccgaagtcgctggcctaacccttttagggaaggaggcgccgaaggtgtgg

SEQ ID NO: 952 - DNA, 1428 bp, Artificial Sequence
  Synthetic polymer
ctaacacatgcaagtcgaacggggttacactaggtgcttgcaccatgtggaacctagtggcggacgggtgagtaacgcgtgagcaacctgcctttcagagggggataacaacgggaaaccgttgctaataccgcatgataccggatgatggcatcatcgaccggtcaaaggagcaatccgctgaaagatgggctcgcgtcccattaggtagttggtggggtaaaggcctaccaagccgacgatgggtagccggactgaaaggttgatcggccactttggaactgacacacggcccaaactcctacgggaggcagcagtggggaatattgggaaatggggaaaaccctgacccagcaacgccgcgtggaggaaaaaggtcttcggattgtaaactcctgtccttagggaataaacaaatgacggtacctgatgaggaagctccggctaactacgtgccagcagccgcggtaatacgtagggagcgagcgttgtccggaattactgggcgtaaagggtgcgtaggcggtctgaaaagtcggatgtgaaatccccgtgcttaacatgggagctgcattcgaaactttcggacttgagtgtcggagaggtaagcggaattcccggtgtagcggtgaaatgcgtagatatcgggaggaacaccagtggcgaaggcggcttactggacgacaactgacgctgaggcacgaaagcgtggggagcaaacaggattagataccctggtagtccacgccgtaaacgatggatactaggtgtaggaggtaacacccctcctgtgccgcagccaacgcaataagtatcccgcctggggagtacgatcgcaagattgaaactcaaaggaattgacgggggcccgcacaagcagcggagcatgtggtttaattcgaagcaacgcgaagaaccttaccaagacttgacatcccttgacaggcatggaaacatgctttcccttcggggcaaggagacaggtggtgcatggttgtcgtcagctcgtgtcgtgagatgttgggttaagtcccgcaacgagcgcaacccttacacttagttaccagcgggtaaagccggggactctaagtggactgccggggacaactcggaggaaggtggggacgacgtcaaatcatcatgccccttatgtcttgggctacacacgtgctacaatggccgttacaaagagcagcgagagggtaacctggagcgaaactcaaaaaagcggtcccagttcggattgtgggctgcaacccgcccacatgaagtcggagttgctagtaatcgcggatcagcgtgccgcggtgaatgcgttcccgggccttgtacacaccgcccgtcacaccatgggagttgggagcacccgaagccggtgacttaaccgcaaggagagagccgtcgaaggtgagatcaataactagggtg

SEQ ID NO: 953 - DNA, 1438 bp, Artificial Sequence
  Synthetic polymer
gcggcgtgcctaacacatgcaagtcgaatgtagctttgaggagcttgctttttaaagcttagtggcggacgggtgagtaacgcgtgagcaacctgcctctcagagggggataacgttttgaaaagaacgctaataccgcataacatatcggaaccgcatgattctgatatcaaaggagcaatccgctgagagatgggctcgcgtccgattagttagttggtgaggtaacggctcaccaagactacgatcggtagccggactgagaggttgatcggccacattgggactgagacacggcccagactcctacgggaggcagcagtgggggatattgcgcaatgggggaaaccctgacgcagcaacgccgcgtgaaggaagaaggtcttcggattgtaaacttcttttgtcagggacgaagaaagtgacggtacctgacgaataagctccggctaactacgtgccagcagccgcggtaatacgtagggagcgagcgttgtccggatttactgggtgtaaagggtgcgtaggcggccgagcaagtcagttgtgaaaactatgggcttaacccataacgtgcaattgaaactgtccggcttgagtgaagtagaggtaggcggaattcccggtgtagcggtgaaatgcgtagagatcgggaggaacaccagtggcgaaggcggcctactgggctttaactgacgctgaggcacgaaagcatgggtagcaaacaggattagataccctggtagtccacgccgaaaacgatgattgctaggtgtaggtgggtatggaccccatcggggccccaactaacgcaataaagcaatcccacctggggagtacgttccgcaagaatgaaactcaaaggaatttacggggacccgcacaagcggtggagcatgtggtttaatttcgaagcaacgcgaagaaccttaccaggtcttgacatcccgatgaaaaacccgtaacggggttccctcttcggagcatcggagacaggtggtgcatggttgtcgtcagctcgtgtcgtgagatgttgggttaagtcccgcaacgagcgcaacccttattcttagtagccagcaggtaaagctgggcactctaaggagactgccggggataacccggaggaaggtggggatgacgtcaaatcatcatgccccttatgatctgggctacacacgtgctacaatggcgtaacaaagggaagcgagcctgcgagggtgagcaaatcccaaaaataacgtcccagttcggactgtagtctgcaacccgactacacgaagctggaatcgctagtaatcgcgaatcagaatgtcgcggtgaatacgttcccgggtcttgtacacaccgcccgtcacaccatgggagtcggaaatgcccgaagtctgtgactcaaccgcaaggagagagcagccgaaggcaggtctgataaatgggg

SEQ ID NO: 954 - DNA, 1389 bp, Artificial Sequence
  Synthetic polymer
agagtttgatcctggctcaggacgaacgctggcggcgtgcctaacacatgcaagtcgagcgatgaaagagaagtggcggtcttcggaccaaagcatttctggattagcggcggacgggtgagtaacacgtgagcaacctgcctatcacatcgggatagcctcgggaaactgggattaataccgaatgaaacatattgataaccttatcgaaatgtcaaagatttatcggtgatagatgggctcgcgtctgattagctagttggtgagataaaagcccaccaaggcaatgatcagtagccggcctgagagggtgatcggccacattgggactgagacacggcccaaactcctacgggaggcagcagtggggaatattgcacaatggagggaactctgatgcagcgacgccgcgtgagcgaagaaggaattcgtttcgtaaagctctgtcttcagggacgataatgacggtacctgaggaggaagccacggctaactacgtgccagcagccgcggtaatacgtaggtggcgagcgttgtccggatttactgggcgtaaagggagcgtaggtggatttttaagtgagatgtgaaatactcgggcttaacctgagtgctgcatttcaaactggaagtctagagtgcaggagaggagaagggaattcctagtgtagcggtgaaatgcgtagagattaggaagaacaccagtggcgaaggcgcttctctggactgtaactgacgctgaggctcgaaagcgtggggagcaaacaggattagataccctggtagtccacgccgtaaacgaagaataataggtgtagggggtgtttgaccctctgtgtccccgctaacgtataaagtattccgcctggggagtacggtcgcaagattaaaactcaaaggaatagacgggggcccgcacaagcagcggagcatgtggtttaatttgaagcaacgcgaagaaccttacctagacttgacatctcctgcattactcttaatcgaggaagtcccttcggggacaggatgacaggtggtgcatggttgtcgtcagctcgtgtcgtgagatgttgggttaagtcccgcaacgagcgcaacccctattgttagttgccatcattaagttgggcactctagcgagactgcctgggttaaccgggaggaaggtggggaggacgtcaaatcatcatgccccccatgtctagggctacacacgtgctacaatggtcggtacaataagacgcaagcccgcgagggggagcaaaactggaaaaccgatctcagttcggattgtaggctgaaactcgcctacatgaagctggagttgctagtaatcgcgaatcagcatgtcgcggtgaataaaaaaccgggccttgtacacaccgcccgtca

SEQ ID NO: 955 - DNA, 1431 bp, Artificial Sequence
  Synthetic polymer
tggctcaggacgaacgctggcggcgcgcctaacacatgcaagtcgaacgagcgagagagagcttgctttcttgagcgagtggcgaacgggtgagtaacgcgtgaggaacctgcctcaaagagggggacaacagttggaaacgactgctaataccgcataagcccacggctcggcatcgagcagagggaaaaggagcaatccgctttgagatggcctcgcgtccgattagctagttggtgaggtaacggcccaccaaggcgacgatcggtagccggactgagaggttgaacggccacattgggactgagacacggcccagactcctacgggaggcagcagtggggaatattgcacaatgggggaaaccctgatgcagcgacgccgcgtggaggaagaaggtcttcggattgtaaactcctgttgttgaggaagataatgacggtactcaacaaggaagtgacggctaactacgtgccagcagccgcggtaaaacgtaggtcacaagcgttgtccggaattactgggtgtaaagggagcgcaggcgggaagacaagttggaagtgaaatccatgggctcaacccatgaactgctttcaaaactgtttttcttgagtagtgcagaggtaggcggaattcccggtgtagcggtggaatgcgtagatatcgggaggaacaccagtggcgaaggcggcctactgggcatcaactgacgctgaggctcgaaagtgtgggtagcaaacaggattagataccctggtagtccacactgtaaacgatgattactaggtgttggaggattgaccccttcagtgccgcagttaacacaataagtaaatccacctggggagtacgaccgcaagggttgaactcaaagggatttgacgggggccccgcacaagcagtggagtatgtggtttaattccacgcaacccgaaaaaccttacccagtcttgacttcctgcgacccccataaaaatatgtgtttccttcggaacgcagagacaggtggtgcatggttgttgtcagctcgtgtcatgagatgttgggttaagtctcgcaacgagcgcaacccttatggtcagttagtacgcaagaggactctgaccagacggccgttgacaaaacggaggaaggtggggatgacgtcaaatcatcatgccctttatgacttgggttacacacgtactacaatggcgttaaacaaagagaagcaagaccgcgaggtggagcaaaactcagaaacaacgtcccagttcggactgcaggctgcaactcgcctgcacgaagtcggaattgctagtaatcgcagatcagcatgctgcggtgaatacgttcccgggccttgtacacaccgcccgtcacaccatgagagccggggggacccgaagtcggtagtctaaccgcaaggaggacgccgccgaaggtaaaact

SEQ ID NO: 956 - DNA, 1365 bp, Artificial Sequence
  Synthetic polymer
catgcaagtcgaacggtagcacagaggagcttgctccttgggtgacgagtggcggacgggtgagtaatgtctggggatctgcccgatagagggggataaccactggaaacggtggctaataccgcataacgtcgcaagaccaaagagggggaccttcgggcctctcactatcggatgaacccagatgggattagctagtaggcggggtaatggcccacctaggcgacgatccctagctggtctgagaggatgaccagccacactggaactgagacacggtccagactcctacgggaggcagcagtgggggaattttcactacaattgcgcgcaagcttgatgccagacatgccgctggtatgaagaaggccttcgggtgttaaagtactttcagcggggggggaaggcgatgtggttataaccgcgtcgattgacgttacccgcagaagaagcaccggctaactccgtgccagcagccgcggtaatacggagggtgcaagcgttaatcggaattactgggcgtaaagcgcacgcaggcggtctgttaagtcagatgtgaaatccccgggcttaacctgggaactgcatttgaaactggcaggcttgagtctcgtagaggggggtagaattccaggtgtagcggtgaaatgcgtagagatctggaggaataccggtggcgaaggcggccccctggacgaagactgacgctcaggtgcgaaagcgtggggagcaaacaggattagataccctggtagtccacgccgtaaacgatgtcgacttggaggttgttcccttgaggagtggcttccggagctaacgcgttaagtcgaccgcctggggagtacggccgcaaggttaaaactcaaatgaattgacgggggcccgcacaagcggtggagcatgtggtttaattcgatgcaacgcgaagaaccttacctactcttgacatccagcgaacttggcagagatgccttggtgccttcgggaacgctgagacaggtgctgcatggctgtcgtcagctcgtgttgtgaaatgttgggttaagtcccgcaacgagcgcaacccttatcctttgttgccagcgattcggtcgggaactcaaaggagactgccggtgataaaccggaggaaggtggggatgacgtcaagtcatcatggcccttacgagtagggctacacacgtgctacaatggcgcatacaaagagaagcgacctcgcgagagcaagcggacctcacaaagtgcgtcgtagtccggatcggagtctgcaactcgactccgtgaagtcggaatcgctagtaatcgtggatcagaatgccacggtgaatacgttcctgggccttgtacacaccgcccgtcacacca

SEQ ID NO: 957 - DNA, 1438 bp, Artificial Sequence
  Synthetic polymer
tggctcaggatgaacgctagcggcaggcttaacacatgcaagtcgaggggcagcataatggtagtaatactattgatggcgaccggcggacgggtgcgtaacgcgtatgcaacctaccctttacagggggataacactgagaaatcggtactaataccccataatattctgggaggcatctttcggagttgaaagctttggtggtaaaggatgggcatgcgttgtattagctagttggtaaggtaacggcttaccaaggcgacgatacatagggggactgagaggttaaccccccacattggtactgagacacggaccaaactcctacgggaggcagcagtgaggaatattggtcaatggacggaagtctgaaccagccatgccgcgtgcaggaagacggctctatgagttgtaaactgcttttgtacgagggtaaacgcagatacgtgtatctgcctgaaagtatcgtacgaataaggatcggctaactccgtgccagcagccgcggtaatacggaggatccaagcgttatccggatttattgggtttaaagggtgcgtaggcggtttagtaagtcagcggtgaaattttggtgcttaacaccaaacgtgccgttgatactgctgggctagagagtagttgcggtaggcggaatgtatggtgtagcggtgaaatgcttagagatcatacagaacaccgattgcgaaggcagcttaccaaactatatctgacgttgaggcacgaaagcgtggggagcaaacaggattagataccctggtagtccacgcagtaaacgatgatagctcgttgtcggcgatacacagtcggtgactaagagaaatcgataagttattcacgtggggagtacgttcgcaagaatgaaactcaaaggaattgacgggggcctgcacaagcggaggaacatgtggtttaatttgatgatacgcgaggaacattacccgggcttgaaagttactgacgattctggaaacaggattttcccttcggggcaggaaattaggtgctgcatggttgttgtcagctcgtgccgtgaggtgtcgggttaagtcccataacgagcgcaacccctactgatagttgccatcggagcgtttgagcgatcaaacaagctgggcactctatcgggactgccggtgtaagctgagaggaaggtggggatgacgtcaaatcagcacggcccttacttctggggcgacacacgtgttacaatggtaggtacagagggcagccagccattgatggggagcgaatctcgaaagcctatttcagttcggattggagggtgaaactcgcctccatgaagttggatttgctagtaatcgcgcatcagccatggcgcggtgaatacgttcccggcccttgtacacccctcccgtcaaaccatgggatttgggggtgcctgaagttcgtgaccgaa

SEQ ID NO: 958 - DNA, 1439 bp, Artificial Sequence
  Synthetic polymer
ggctcaggatgaacgctaacgacaggcttaacagcatgcaagtcgaggggcatcatgaggtagcaataccttgatggcgaccggcgcacggctgagtaacgcgtatgcaacctgcctgataccggggcatagcccatggaaacgtgtgattaacaccccagtagtacttttatcctgcctgggatgggagttaaatgttcaaggtatcggatgggcatgcctcctattagttaattggcggggtaacagaccacccagacgatgatatgtaggggttctgagaagaaggtcccccacattggaactgagacacggtcctcactcctacgggaggcaacagtgatgaatattgttcaatggacgtaagatcagagccatgcaagtcgcgtgatgggagactgccctatggcttgtaaacctcttttataatggaagaataaattctacgtgtacaatgatgcctgtaccttatgaataatcatctgctaactccgtgccaccagccgcggtaatactgaggatgctagcgttatccggatttattggatttaaagggtgcgtaggcggtttattatcttagtggttagaatatttgagctaaactcaattgtgccattatatactggtaaactggagtacagacgaggtaggcgggataagttaagtagcggtgaaatgcatagatataacttagaactccgatagcgaaggcagcttaccagactgtaactgacgctgatgcacgagagcgtgggtagcgaacaggattagataccctggtagtccacgccgtaaacgatgctcactggttctgtgcgatatattgtacgggattaagcgaaagtactaagtgagccacctggggagtacgtcggcaacgatgaaactcaaaggaattgacgggggcccgcacaagcggaggaacatgtggtttaattcgatgatacgcgaggaaccttacctgggtttaaatgggaaatgccgtatttggaaacagatattctcttcggagcgtttttcaaggtgctgcatggttgtcgtcagctcgtgccgtgaggtgtcgggttaagtcccataacgagcgcaacccttaccgttagttgctagcatgtaatgatgagcactctaacgggactgccaccgtaaggtgagaggaaggcggggatgacgtcaaatcagcacggcccttacacccagggctacacacgtgttacaatggccggtacagagggccgctaccaggtgactggatgccaatctcaaaagccggtcgtagttcggattggagtctgtaacccgactccatgaagttggattcgctagtaatcgcgcatcagccatggcgcggtgaatacgttcccgggccttgtacacaccgcccgtcaagccatggaagccgggggtgcctgaagtccgtaaccgcgaggatcggcctaggg

SEQ ID NO: 959 - DNA, 1467 bp, Artificial Sequence
  Synthetic polymer
gacgaacgctggcggcatgcctaacacatgcaagtcgaacggagactatttcggtagtcttagtggcgaacgggtgagtaacgcgtgggcaacctgccctctagatggggacaacatcccgaaaggggtgctaataccgaatgtgacggtttatccgcatggacgaaccgtgaaagatggcctctacatgtaagctatcgctagaggatgggcctgcgtctgattagctagttggtagggtaacggcctaccaaggcgacgatcagtagccggtctgagaggatgaacggccacattgggactgagacacggcccagactcctacgggaggcagcagtggggaatcttccgcaatgggcgaaagcctgacggagcaatgccgcgtgagtgatgaaggaattcgttccgtaaaactcttttgtttatgacgaatgtgcagattgtgaataattatttgtaatgacggtagtaaacgaataagccacggctaactacgtgccagcagccgcggtaatacgtaggtggcgagcgttgtccggaattattgggcgtaaagagcatgtaggcggtttcttaagtctggagtgaaaatgcggggctcaaccccgtatggctctggatactgggagacttgagtgcaggagaggaaaggggaattcccagtgtagcggtgaaatgcgtagatattgggaggaacaccagtggcgaaggcgcctttctggactgtgtctgacgctgagatgcgaaagccagggtagcgaacgggattagataccccggtagtcctggctgtaaacgatgggtactaggtgtaggaggtatcgacccctcctgtgccggagttaacgcaataagtaccccgcctggggagtacgtccgcaaggatgaaactcaaaggaattgacgggggcccgcacaagcggtggagtatgtggtttaattcgacgcaacgcgaagaaccttaccaaggcttgacattgagtgaccgccatagagatatggctttcccttcggggacacgaaaacaggtggtgcatggctgtcgtcagctcgtgtcgtgagatgttgggttaagtcccgcaacgagcgcaacccctatcctatgttaccagcgggtaatgccggggattcataggagactgccaaggacaacttggaggaaggcggggatgacgtcaagtcatcatgccccttatgtcttgggctacacacgtactacaatggtcggcaacagagggaagagaagccgtgaggcagagcaaaccccagaaatccgatctcagtttggattgcaggctgcaactcgcctgcatgaagtcggaatcgctagtaatcgcaggtcagcatattgcggtgaatacgttcccgggccttgtacacaccgcccgtcacaccacgaaagttggtaacaccggaagccggtggggtaaccgaaaggagccagccgtctaaggtggggccgatgat

SEQ ID NO: 960 - DNA, 1429 bp, Artificial Sequence
  Synthetic polymer
tgcttaacacatgcaagtcgaacgagagaagatcggtgcttgcactgatccgatcgagtggcggacgggtgagtaacgcgtgggtaacctgcctcatacaggggaataacagttggaaacggctgctaaaaccgcataagcgcacagtatcgcatgatacagtgtgaaaaactccggtggtatgagatggacccgcgtctgattagctagttggtgaggtaacggcccaccaaggcaacgatcagtagccggcctgagagggtgaacggccacattgggactgagacacggcccaaactcctacgggaggcagcagtggggaatattgcacaatgggggaaaccctgatgcagcgacgccgcgtgagtgatgaagtatttcggtatgtaaagctctatcagcagggaagataatgacggtacctgactaagaagcaccggctaaatacgtgccagcagccgcggtaatacgtatggtgcaagcgttatccggatttactgggtgtaaagggtgcgtaggtggtgagacaagtctgaagtgaaaatccggggcttaaccccggaactgctttggaaactgcctgactagagtacaggagaggtaagtggaattcctagtgtagcggtgaaatgcgtagatattaggaggaacaccagtggcgaaggcgacttactggactgctactgacactgaggcacgaaagcgtggggagcaaacaggattagataccctggtagtccacgccgtaaacgatgaatactaggtgtcggggagcattgctcttcggtgccgcagcaaacgcaataagtattccacctggggagtacgttcgcaagaatgaaactcaaaggaattgacggggacccgcacaagcggtggagcatgtggtttaattcagaagcaacgcgaagaaccttaccaagtctcgacatcccgatgacagagtatgtaatgtactttctcttcggagcatcggtgacaggtggtgcatggttgtcgtcagctcgtgtcgtgagatgttgggttaagtcccgcaacgagcgcaacccctgtccttagtagccagcggttcggccgggcactctagggagattgccagggataacctggaggaaggcggggatgacgtcaaatcatcatgccccttatgacctgggctacacacgtgctacaatggcgtaaacaaagggaagcaaagccgtgaggccgagcaaatctcaaaaataacgtctcagttcggactgtagtccgcaacccgactacacgaagctggaatcgctagtaatcgcagatcagaatgttgcggtgaatacgttcccgggtcttgcacacaccgcccgtcacaccatgggagtcggaaatgcccgaagtcagtgacccaaccgcaaggagggagctgccgaaggcaggttcgataactggggtgaag

SEQ ID NO: 961 - DNA, 1455 bp, Artificial Sequence
  Synthetic polymer
gcgggcctaacacatgcaagtcgaacggtaacaggaagaatcttgcttctttgctgacgagtggcggacgggtgagtaatgtctgggaaactgcctgatggagggggataactactggaaacggtagctaataccgcataacgtcgcaagaccaaagagggggaccctcgggcctcttgccatcggatgtgcccagatgggattagctagtaggtggggtaacggctcacctaggcgacgatccctagctggtctgagaggatgaccagccacactggaactgagacacggtccagactcctacgggaggcagcagtggggaatattgcacaatgggcgcaagcctgatgcagccatgccgcgtgtatgaagaaggccttcgggttgtaaagtactttcagcggggaggaagggagtaaagttaatacctttgtcatgacgttccacccgcagaagaagcaccggctactctgtgccccagcagccgcggtaatacggagggtgcaagcgttaatcggaattactgggcgtaaagcgcacgcaggcggtttgtttagtcagatgtgaaatccccgggctcaacctgggaactgcatctgatactggcaagcttgagtctcgtagaggggggtagaatgccaggtgtagcggtgaaatgcgtagagatctggacgaataccggtggcgaaggcggctcgctggacgaagactgacgctcaggtgcgaaagcgtggggagcaaacaggattagataccctggtagtccacgccgtaaacgatgtcgacttggaggttgtgcccttgaggcgtggcttccggagctaacgcgttaagtcgaccgcctggggagtacggccgcaaggttaaaactcaaatgaattgacgggggcccgcacaagcggtggagcatgtggtttaattcgatgcaacgcgaagaaccttacctggtcttgacatccacagaactttccagagatggattggtgccttcgggaactgtgagacaggtgctgcatggctgttgtcagctcgtgttgtgaaatgttgggttaagtcccgcaacgagcgcaacccttatcctttgttgccagcggtccggccgggaactcaaaggagactgccagtgataaactggaggaaggtggggatgacgtcaagtcatcatggcccttacgaccagggctacacacgtgctacaatggcgcatacaaagagaagcgacctcgcgagagcaagcggacctcataaagtgcgtcgtagtccggattggagtctgcaactcgaccccatgaagtcggaatcgctagtaatcgtggatcagaatgccacggtgaatacgttcccgggccttgtacacaccgcccgtcacaccatgggagtgggttgcaaaagaagtaggtagcttaaccttcgggagggcgcttaccactttgtgattcatgactggggtgaagt

SEQ ID NO: 962 - DNA, 1446 bp, Artificial Sequence
  Synthetic polymer
gaacgctggcggcgtgcttaacacatgcaagtcgaacggaacacccttgattgaggtttcggccaaatgataggaatgtttagtggcggactggtgagtaacgcgtgaagaacctgcctttcagagggggacaacagttggaaacgactgctaataccgcatgacatatattgaccgcatggttgatgtatcaaagatttatcgctgaaagatggcttcgcgtctgattagctagttggtgaggtaacggcccaccaaggcgacgatcagtagccggactgagaggttgaccggccacattgggactgagatacggcccagactcctacgggaggcagcagtggggaatattgggcaatggacgcaagtctgacccagcaacgccgcgtgaaggaagaaggctttcgggttgtaaacttcttttgtcagggaagagtagaagacggtacctgacgaataagccacggctaactacgtgccagcagccgcggtaatacgtaggtggcaagcgttgtccggatttactgggtgtaaagggcgtgtagccgggttcgtaagtcagatgtgaaatctggaggctcaacctccaaactgcatttgaaactgcggatcttgagtatcggagaggtcatcggaattcctagtgtagcggtgaaatgcgtagatattaggaggaacaccagtggcgaaggcggatgactggacgacaactgacggtgaggcgcgaaagcgtggggagcaaacaggattagataccctggtagtccacgctgtaaacgatggatactaggtgtgcggggactgaccccctgcgtgccgcagttaacacaataagtatcccacctggggagtacgatcgcaaggttgaaactcaaaggaattgacgggggcccgcacaagcggtggattatgtggtttaattcgaagcaacgcgaagaaccttaccagggcttgacatcctactaacgaagtagagatacatcaggtgcccttcggggaaagtagagacaggtggtgcatggttgtcgtcagctcgtgtcgtgagatgttgggttaagtcccgcaacgagcgcaacccctattgttagttgctacgcaagagcactctagcgagactgccgttgacaaaacggaggaaggtggggacgacgtcaaatcatcatgccccttatgtcctgggctacacacgtaatacaatggcgttaaacagagggatgcaaagccgcgaggcagagcgaacccctaaaaggcgtctcagttcggatcgcaggctgcaacccgcctgcgtgaagtcggaatcgctagtaatcgcggatcagcatgccgcggtgaatacgttcccgggccttgtacacaccgcccgtcacaccatgagagtcgggaacacccgaagcccatagcctaaccgcaaggggggcgtggtcgaaggtgggttcgataattggg

SEQ ID NO: 963 - DNA, 1463 bp, Artificial Sequence
  Synthetic polymer
catgcctaacacatgcaagtcgaacggaggttacttcggtaatcttagtggcgaacgggtgagtaacgcgtgggcaacctgccctctagatggggacaacatcccgaaaggggtgctaataccgaatgtgacagcaatctcgcatggggatgctgtgaaagatggcctctatttataagctatcgctagaggatgggcctgcgtctgattagctagttggtggggtaacggcctaccaaggcgatgatcagtagccggtctgagaggatgaacggccacattgggactgagacacggcccagactcctacgggaggcagcagtggggaatcttccgcaatgggcgaaagcctgacggagcaatgccgcgtgagtgatgaaggaattcgttccgtaaagctcttttgtttatgacgaatgtgcaggttgtgaataatgacttgtaatgacggtagtaaacgaataagccacggctaactacgtgccagcagccgcggtaatacgtaggtggcgagcgttgtccggaattattgggcgtaaagagcatgtaggcggttttttaagtctggagtgaaaatgcggggctcaaccccgtatggctctggatactggaagacttgagtgcaggagaggaaaggggaattcccagtgtagcggtgaaatgcgtagatattgggaggaacaccagtggcgaaggcgcctttctggactgtgtctgacgctgagatgcgaaagccagggtagcgaacgggattagataccccggtagtcctggccgtaaacgatgggtactaggtgtaggaggtatcgaccccttctgtgccggagttaacgcaataagtaccccgcctggggagtacgtccgcaaggatgaaactcaaaggaattgacgggggcccgcacaagcggtggagtatgtggtttaattcgacgctacgtgaagaaccttagcgaggcttgacattgaatgtccgcttcagagatgaagctttccattcggggacatgaaagcaggtggtgcatggctgtcgtcatcttgtgtcgtgagatgttggggtaattcccgtaacgagcgcaacccgtatcatatgttaccagcgggtaatgccggggactcataggagtctgccaaggacaacttggaggaaggcggggaaggcgtcaagtcatcatgctccttatgtcttgggctacacacgtaatacaatggtcggcaacagagggaagcgaagccgtgaggcagagcaaaccccagaatcccgatctcatttcggatttcaggctgcaattcgcctgcatgaagtcggaatcggtagtaatcgcaggtcagcattctgcggtgaatacgttcccgggctttgtacacaccgcccgtcacaccacgaaagttggtaacacccgaagccggtggggtaaccgtaaggagccagccgtctaaggtggggccgatgattggggtgaagt

SEQ ID NO: 964 - DNA, 1430 bp, Artificial Sequence
  Synthetic polymer
cggcgcgcctaacacatgcaagtcgaacggagctgttttctctgaagttttcggatggaagagagttcagcttagtggcgaatgggtgagtaacacgtgagcaacctgcctttcagtgggggacaacatttggaaacgaatgctaataccgcataagaccacagtgtcgcatggcacaggggtcaaaggatttatccgctgaaagatgggctcgcgtccgattagctagatggtgaggtaacggcccaccatggcgacgatcggtagccggactgagaggttgaacggccacattgggactgagacacggcccagactcctacgggaggcagcagtggggaatattgcacaatgggggaaaccctgatgcagcgacgccgcgtggaggaagaaggtcttcggattgtaagctgttgtcgcaagggaggaagacagtgacggtaccttgtgagaaagtcacggctaactacgtgccagcagccgcggtaatacgtaggtgacaagcgttgtccggatttactgggtgtaaagggcgcgtaggcggactgtcaagtcagtcgtgaaataccggggcttaaccccggggctgcgattgaaactgacagccttgagtatcggagaggaaagcggaattcctagtgtagcggtgaaatgcgtagatattaggaggaacaccagtggcgaaggcggctttctggactgttactgacactgaggcacgaaagtgtggggagcaaacaggattagataccctggtagtccacaccgtaaacgatgagcactaggtgtcggggtcgcaagacttcggtgccgcagttaacgcattaagtgttccgcctggggagtacgtacgcaagtatgaaactcaaaggaattgacggggacccgcacaagcagcggagcatgtggtttaattcgaagcaacgcgaagaaccttaccaggacttgacatccctctgaaacccctgataacgaaggggcctctacggacagaggagacaggtggtgcatggttgtcgtcagctcgtgtcgtgagatgttgggttaagtcccgcaacgagcgcaacccttgctgttagttgccatcattgagttgggcactctaacgggactgccggggataactcggaggaaggtggggatgacgtcaaatcatcatgccccttatgttctgggctacacacgtgctacaatggtcggtacaaagagcagcaagaccgcgaggtggagcaaatctcaaaaaccgatcccagttcggattgcaggctgcaactcgcctgcatgaagttggagttgctagcaatcgcgaatcagaatgtcgcggtgaatgcgttcccgggtcttgtacacaccgcccgtcacaccacggaagttgggggtgcccaaagttggtcaaaaaatagattacctaaggcaaaaccaatgactgg

SEQ ID NO: 965 - DNA, 1441 bp, Artificial Sequence
  Synthetic polymer
cgctggcggcgtgcctgacacatgcaagtcgagcgaggaatgattggtagcttgctaccggtcatttctagcggcggacgggtgagtaacgcgtgagcaacctgcctttatcagggggataacgcatcgaaagatgtgctaataccgcataagattgtagcttcgcatggagcagcaatcaaaggagcaatccgctgaaagatggactcgcgtccgattagatagttggcggggtaacggcccaccaagtcgacgatcggtagccggactgagaggttgatcggccacattgggactgagacacggcccagactcctacgggaggcagcagtgagggatattgggcaatgggggaaaccctgacccagcaacgccgcgtgagggatgacggttttcggattgtaaacctctgtcctctgtgaagatagtgacggtagcagaggaggaagctccggctaactacgtgccagcagccgcggtaatacgtagggagcaagcgttgtccggatttactgggtgtaaagggtgcgtaggcggattggcaagtcagaagtgaaatccatgggcttaacccatgaactgcttttgaaactgttagtcttgagtgaagtagaggtaggcggaattcccggtgtagcggtgaaatgcgtagagatcgggaggaacaccagtggcgaaggcggcctactgggctttaactgacgctgaggcacgaaagtgtgggtagcaaacaggattagataccctggtagtccacactgtaaacgatgattactaggtgtggggggtctaaccccctccgtgccggagttaacacaataagtaatccacctggggagtacgaccgcaaggttgaaactcaaaggaattgacgggggcccgcacaagcagtggagtatgtggtttaattcgacgcaacgcgaagaaccttaccaggtcttgacatccaactaacgaagcagagatgcattaggtgcccttcggggaaagttgagacaggtggtgcatggttgtcgtcagctcgtgtcgtgagatgttgggttaagtcccgcaacgagcgcaacccttgtgattagttgctacgcaagagcactctaatcagactgccgttgacaaaacggaggaaggtggggacgacgtcaaatcatcatgccctttatgacctgggctacacacgtactacaatggtcgttaacagagggaagcaataccgcgaggtggagcaaaaccctaaaaacggtctcagttcagattgtaggctgcaactcgcctacatgaagttggaattgctagtaatcgcggatcagcatgccgcggtgaatacgttcccgggccttgtacacaccgcccgtcacaccatgggagccggtaatacccgaagtcagtagtttaaccgcaaggagaacgctgccgaaggtaggattggcgactggggtgaagt

SEQ ID NO: 966 - DNA, 1360 bp, Artificial Sequence
  Synthetic polymer
ggctcaggacgaacgctggcggcgtgcttaacacatgcaagtcgagcgaatgaagctccttcgggaacggatttagcggcggacgggtgagtaacacgtgggcaacctgcctcatagaggggaatagccttccgaaagggagattaataccgcataagattgtagtaccgcatggtacagcaattaaaggagtaatccgctatgagatgggcccgcggcgcattagctagttggtgaggtaacggctcaccaaggcgacgatgcgtagccgacctgagagggtgatcggccacattgggactgagacacggcccagactcctacgggaggcagcagtggggaatattgcacaatgggggaaaccctgatgcagcaacgccgcgtgagtgatgacggccttcgggttgtaaagctctgtcttcagggacgataatgacggtacctgaggaggaagccacggctaactacgtgccagcagccgcggtaatacgtaggtggcgagcgttgtccggatttactgggcgtaaagggagcgtaggcggatttttaagtgagatgtgaaatactcgggcttaacctgagtgctgcatttcaaactggaagtctagagtgcaggagaggagaagggaattcctagtgtagcggtgaaatgcgtagagattaggaagaacgccagtggcgaaggcgcttctctggactgtaactgacgctgaggctcgaaagcgtggggagcaaacaagattagataccctggtagtccacgccgtaaacgcccaaaaaggggtgtaggggttgtcatgacctctgtgcccgcgctaacgcattaagtattccgcctggggagtacggtcgcaagattaaaactcaaaagaatggacgggggcccgcaccagcagcggagcatgtggtttaatttgaagcaacgcgaagaaccttacctagacttgacatctcctgcattactcttaataaaaaaagtctcttcggagacaggatgacaggtggtgcatggttgtcgtcagctcgtgtcgtgagatgttgggttaagtcccgcaacgagcgcaacccttattgttagttgccatcattaagttgggcactctagcgagactgcccgggttaaccgggaggaaggtggggatgacgtcaaatcatcatgccccttatgtctagggctacacacgtgctacaatggtcggtacaataagacgcaagcccgcgagggggatcaaaactggaaaaccgatctcagttcggattgtaggctgaagctcgcctacatgaagctggagttgctagtaatcgcgaatcagcatgtggcggtgaataaaaaaccggcccttgcactcaccgcccgtca

SEQ ID NO: 967 - DNA, 1447 bp, Artificial Sequence
  Synthetic polymer
gcttaacacatgcaagtcgaacggagtttgtttttggaagccttcgggtggaagggaataaacttagtggcgaacgggtgagtaacgcgtgagcaaccggtcccaaagagggggacaactttgagaaatcaaggctaataccgcgtaagaccacactgccgcatggcagaggggtcaaaggagaaatccgctttggggagggctcgcgtcccattaggtagttggtgaggtaacggctcaccaagccgacgatgggtagccgtgctgagaggcaggccggccacactggaactgagacacggtccagactcctacgggaggcagcagtggggaatcttgggcaatggggggaaccctgacccagcgacgccgcgtgagggaagaaggtcttcggattgtaaacctttgtgacaggggacgaaggaagtgacggtaccctgagaggaagccccggctaactacgtgccagcagccgcggtaatacgtagggggcgagcgttgtccggaattactgggcgtaaagggcgcgtaggcggttgtgcaagtctgttgtgaaattccggggctcaactccggcagtgcaatggaaactgtacgacttgagtacggcagaggcaagtggaattcccagtgtagcggtgaaatgcacagagattgggaggaacaccagtggcgaaggcgacttgctgggccgaaactgacgctgaggcgcgaaagcgtggggagcaaacaggattagataccctggtagtccacgccgtaaacgatgaatactaggtgtaggtggtatagaagccatctgtgccgcagcgaacgcagtaagtattccgcctggggagtacggccgcaaggttgaaactcaaaggaattgacgggggcccgcacaagcagcggagcatgtggtttaattcgaagcaacgcgaagaaccttaccaggtcttgacatccgactaaagtcatagagatatgatgttccttcgggagagatcgagacaggtggtgcatggttgtcgtcagctcgtgtcgtgagatgttgggttaagtcccgcaacgagcgcaacccctacaaacagttgccagtgcgtaaaggcaggcactctgttaggactgccgtggacaacacggaggaaggtggggacgacgtcaaatcatcatgccccttatgacctgggctacacacgtgctacaatggctgttacaaagagaagcgaagtcgtaaggcggagcggatctcaaaaaggcagtcccagttcggattgtgggctgcaacccgcccacatgaagttggagttgctagtaatcgcgaatcagaatgtcgcggtgaatgcgttcccgggccttgtacacaccgcccgtcacaccatgggagtcgggggcgcccgaagccgctgaggtaacccgcaagggagccaggcgtcgaaggcgaaaccgatgactggggtgaagt

SEQ ID NO: 968 - DNA, 1420 bp, Artificial Sequence
  Synthetic polymer
agtcgaacggaacacccttgacagaggtttcggccaatgaagaggaatgtttagtggcggactggtgagtaacgcgtgaggaacctgcctttcagagggggacaacagttggaaacgactgctaataccgcatgaagcagcgaggggacatccccttgctgtcaaagatttatcgctgaaagatggcctcgcgtctgattagctagttggtggggtaacggcccaccaaggcgacgatcagtagccggactgagaggttgaccggccacattgggactgagatacggcccagactcctacgggaggcagcagtggggaatattgggcaatggacgcaagtctgacccagcaacgccgcgtgaaggaagaaggctttcgggttgtaaacttcttttaacagggaagagaagaagacggtacctgttgaataagccacggctaactacgtgccagcagccgcggtaatacgtaggtggcaagcgttgtccggatttactgggtgtaaagggcgtgtagccgggaaggcaagtcagatgtgaaatctggaggctcaacctccaaactgcatttgaaactgcttttcttgagtatcggagaggtaatcggaattcctttgtgtagcggtgaaatgcgtagatataaggaagaacaccagtggcgaaggcggattactggacgacaactgacggtgaggcgcgaaagcgtggggagcaaacaggattagataccctggtagtccacgctgtaaacgatcaatactaggtgtgcggggactgacccccctgcgtgccgcagttaacacaataagtattgcacctggggagtacgatcgcaaggttgaaactcaaaggaattgacgggggcccgcacaagcggtggattatgtggtttaattcgaagcaacgcgaagaaccttaccaggacttgacatcctactaacgaagtagagatacgtcaggtgcccttcggggaaagtagagacaggtggtgcatggttgtcgtcagctcgtgtcgtgagatgttgggttaagtcccgcaacgagcgcaacccctattgttagttgctacgcaagagcactctagcgagactgccgttgacaaaacggaggaaggtggggacgacgtcaaatcatcatgccccttatgtcctgggctacacacgtaatacaatggcggtcaacagagggatgcaaagccgtgaggcagagcgaacccctaaaagccgtctcagttcggatcgtaggctgcaactcgcctacgtgaagtcggaatcgctagtaatcgcggatcagaatgccgcggtgaatacgttcccgggccttgtacacaccgcccgtcacaccatgagagtcgggaacacccgaagcccgtagcctaactgcaaagagggcgcggtcgaaggtgggttcgataattgggg

SEQ ID NO: 969 - DNA, 1468 bp, Artificial Sequence
  Synthetic polymer
gctggcggcgtgcctaacacatgcaagtcgaacggagttaaattcgacacccgagtatccggccgggaggcggggtgctgggggttggatttaacttagtggcggacgggtgagtaacgcgtgagtaacctgcctttcagagggggataacgttctgaaaagaacgctaataccgcataacatcaatttatcgcatgataggttgatcaaaggagcaatccgctggaagatggactcgcgtccgattagccagttggcggggtaacggcccaccaaagcgacgatcggtagccggactgagaggttgaacggtcacattgggactgagacacggcccagactcctacggggggcagcagtgggggatattgcacaatgggggaaaccctgatgcagcaacgccgcgtgagggaagaaggttttcggattgtaaacctctgttcttagtgacgataatgacggtagctaaggagaaagctccggctaactacgtgccagcagccgcggtaatacgtagggagcgagcgttgtccggatttactgggtgtaaagggtgcgtaggcggcgaggcaagtcaggcgtgaaatctatgggcttaacccataaactgcgcttgaaactgtcttgcttgagtgaagtagaggtaggcggaattcccggtgtagcggtgaaatgcgtagagatcgggaggaacaccagtggcgaaggcggcctactgggttttaactggacgctgaagcacgaaagcatgggtagcaaacagggattagataaccctggtagtccatgccgtaaacgataattactaggtgggggggggtctgacccccttccggtgccccatttaacaccaataaataatccacctggggggtacggccgcaaggttgaaactcaaaggaattgaccgggggcccgcacaagcagtggagtatgtggtttaattcgaagcaacgcgaagaaccttatcaggtcttgacatccgtctaacgaagcagagatgcattaggtgcccttcggggaaaggcgagacaggtggtgcatggttgtcgtcagctcgtgtcgtgagatgttgggttaagtcccgcaacgagcgcaacccttgtttctagttggtacgcaagagcactctagagagactgccgttgacaaaacggaggaaggtggggacgacgtcaaatcatcatgccccttatgacctgggccacacacgtactacaatggctgtaaacagagggaagcaaagccgcgaggtggagcaaaaccctaaaagcagtcccagttcggatcgcaggctgcaacccgcctgcgtgaagtcggaattgctagtaatcgcggatcagcattccgcggtgaatacgttcccgggccttgtacacaccgcccgtcacaccatgggagccggtaatacccgaagccagtagttcaaccgcaaggagagcgctgtcgaaggtaggattggcgactg

SEQ ID NO: 970 - DNA, 1513 bp, Artificial Sequence
  Synthetic polymer
ttcaaacggagagtttgatcctggctcaggatgaacgctggcggcgtgcctaacacatgcaagtcgaacgattaagacggctccggccgtgaatagagtggcgaacgggtgagtaacacgtgaccaacctgccccctaccccgggataacgcaaggaaacctgcgctaataccggatactccttcccctgctcctgcaggggtcgggaaagcccagacggtaggggatggggtcgcggcccattaggtagacggcggggcaacggcccaccgtgcctgcgatgggtagccgggttgagagaccgaccggccacattgggactgagatacggcccagactcctacgggaggcagcagtggggaattttgcgcaatggggggaaccctgacgcagcaacgccgcgtgcgggatgaaggccttcgggttgtaaaccgctttcagcagggaagatagtgacggtacctgcagaagaagccccggctaactacgtgccagcagccgcggtaatacgtagggggcgagcgttatccggattcattgggcgtaaagcgcgcgtaggcggcccgtcaagcggaacctctaacccgagggctcaacccccggtcgggttccgaactggcaggctcgagtttggtagaggaagatggaattcccggtgtagcggtggaatgcgcagatatcgggaagaacaccgatggcgaaggcagtcttctgggccatcaactgacgctgaggcgcgaaagctgggggagcgaacaggattagataccctggtagtcccagccgtaaacgatgggtgctaggtgtggggggatcatccctccgtgccgcagccaacgcattaagcaccccgcctggggagtacggccgcaaggctaaaactcaaaggaattgacgggggcccgcacaagcagcggagcatgtggcttaattcgaagcaacgcgaagaaccttaccagggcttgacatgctagtgaagccggggaaacccggtggccgagaggagctagcgcaggtggtgcatggctgtcgtcagctcgtgtcgtgagatgttgggttaagtcccgcaacgagcgcaacccctatcgtatgttgccagcattgagttggggactcatacgagactgccggcgtcaagccggaggaaggtggggacgacgtcaagtcatcatgccctttatgccctgggctgcacacgtgctacaatggccggtacaacgggccgcgacctggcgacaggaagcgaatccctcaaagccggccccagttcggatcggaggctgcaacccgcctccgtgaagtcggagttgctagtaatcgcggatcagcatgccgcggtgaatacgttcccgggccttgtacacaccgcccgtcacaccacccgagtcgtctgcacccgaagccgccggccgaacccgcaaggggcggaggcgtcgaaggtgtggagggtaaggggggtgaagtcgtaacaaggtagccgtaccggaaggtgcggctggatcacctcctttct

SEQ ID NO: 971 - DNA, 1424 bp, Artificial Sequence
  Synthetic polymer
aacacatgcaagtcgaacggagctgctttgatgaagttttcggatggatttaaaacagcttagtggcggacgggtgagtaacgcgtgggtaacctgcctcacactgggggataacagttagaaatagctgctaataccgcataagcgcacggttccgcatggaacagtgtgaaaaactccagtggtgtgagatggacccgcgtctgattagccagttggcgaggtaacggctcaccaagactacgatcggtagccggactgagaggttgatcggccacattgggactgagacacggcccagactcctacgggaggcagcagtgggggatattgcgcaatgggggaaaccctgacgcagcaacgccacgtgaaggaagaaggtcttcggattgtaaacttcttttgtcagggacgaagaaagtgacggtacctgacgaataagctccggctaactacgtgccagcagccgcggtaatacgtagggagcgagcgttgtccggatttactgggtgtaaagggtgcgtaggcggccgagcaagtcagttgtgaaaactatgggcttaacccataacgtgcaattgaaactgtccggcttgagtgaagtagaggtaggcggaattcccggtgtagcggtgaaatgcgtagagatcgggaggaacaccagtggcgaaggcggcctactgggctttaactgacgctgaggcacgaaagcatgggtagcaaacaggattagataccctggtagtccatgccgtaaacgatgattactaggtgtggggggactgaccccttccgtgccgcagttaacacaataagtaatccacctggggagtacggccgcaaggttgaaactcaaaggaattgacgggggcccgcacaagcagtggagtatgtggtttaattcgaagcaacgcgaagaaccttaccaggtcttgacatcctgagaatccttaagagattagggagtgccttcgggaactcagagacaggtggtgcatggttgtcgtcagctcgtgtcgtgagatgttgggttaagtcccgcaacgagcgcaacccttgctattagttgctacgcaagagcactctaataggactgccgttgacaaaacggaggaaggtggggacgacgtcaaatcatcatgccccttatgacctgggctacacacgtactacaatggccattaacagagggaagcaaaaccgcgaggcagagcaaacccctaaaaatggtcccagttcggattgtaggctgcaacccgcctacatgaagttggaattgctagtaatcgcggatcagcatgccgcggtgaatacgttcccgggccttgtacacaccgcccgtcacaccatgggagccggtaatacccgaagtcagtagtctaacaaaagggaggacgctgccgaaggtaggattggcgactggg

SEQ ID NO: 972 - DNA, 1468 bp, Artificial Sequence
  Synthetic polymer
agagtttgatcctggctcaggacgaacgctggcggcacgcctaacacatgcaagtcgaacggtgaagggagcttgctcccggagcagtggcggacgggtgagtaacacgtgagcaacctgcctttcagagggggacaacagttggaaacgactgctaataccgcataaaataacggaatcgcatgattctgttatcaaaggagaaatccgctgaaagatgggctcgcgtctgattagatagttggtgaggtaacggcccaccaagtcgacgatcagtagccggactgagaggttgaacggccacattgggactgagacgcggcccagactcctacgggaggcagcagtgggggatattggacaatgggggaaaccctgatccagcgatgccgcgtgagggaagaaggttttcggattgtaaacctctgtggacagggacgataatgacggtacctgtcaagaaagccacggctaactacgtgccagcagccgcggtaatacgtaggtggcgagcgttgtccggaattactgggtgtaaagggagtgtaggcgggaaggcaagtcagaagtgaaaattatgggctcaacccataacctgcttttgaaactgtttttcttgagtgaagcagaggcaagcggaattcctagtgtagcggtgaaatgcgtagatattaggaggaacaccagtggcgaaggcggcttgctgggcttttactgacgctgaggctcgaaagcgtggggagcaaacaggattagataccctggtagtccacgccgtaaacgatgattactaggtgtggggggatgaacccttccgtgccggagttaacacaataagtaatccacctggggagtacgaccgcaaggttgaaactcaaaggaattgacggggccccgcacaagcagtggagtatgtggtttaattcgaagcaacgcgaagaaccttaccgggtcttgacatcgagtgcaagctgcagagatgcagtcctctcttcggagacacgaagacaggtggtgcatggttgtcgtcagctcgtgtcgtgagatgttgggttaagtcccgcaacgagcgcaacccttactattagttgctacgcaagagcactctaataggactgccgttgacaaaacggaggaaggtggggatgacgtcaaatcatcatgccctttatgacccgggctacacacgtactacaatggcatttaacaaagagcagcgaagccgcgaggcggagcaaatctccaaaaaatgtctcagttcagattgcaggctgcaactcgcctgcatgaagtcggaattgctagtaatcgtaggtcagcatactacggtgaatacgttcccggggcttgtacacaccgcccgtcaaaccatgagagttggcaacacccgaagtcggtagtctaaccgcaaggaggacgccgccgaaggtggggttgatgattagggttaagtcgtaacaaggtaacc

SEQ ID NO: 973 - DNA, 1435 bp, Artificial Sequence
  Synthetic polymer
gtgcttaacacatgcaagtcgaacgaggcatttaacacagattacttcgggttgaagtcttttatgactgagtggcggacgggtgagtaacgcgtgggtaacctgcctcatacagggggatagcagctggaaacggctggtaataccgcataagcgcacggtatcccatgatacaatgtgaaaaactccggtggtatgagatggacccgcgtctgattatctggttggtgaggtaacggcccaccaaggcgacgatcagtagccgacctgagagggtgaccggccacattgggactgatacacggcccagactcctacgggaggcatcaatggggaatattgcacaatggaggaaactctgatgcaccgacgccgcgtgagtgaacgaagtagttcgctatgtaaagctctatcaccagggaagatagggacggtacctgactaaaaagctccggctaaatacctgccaccagccgcggaaatacgtatggagcaagcgttatccggatttactgggtgtaaagggagtgtaggtggccaggcaagtcacaagtgaaagcccggggctcaaccccgggactgcttttgaaactgcagggctagagtgcaggaggggcaagtggaattcctagtgtagagctgaaatgcgtagatattaggaggaacaccagtggcgaacgcggcttgctggactgtaactgacactgaggctcgaaagcgtggggagcaaacaggattagataccctggtagtccacgccgtaaacgatgaatactaggtgtcggggcacataagtgcttcggtgccgcagcaaacgcaataagtattccacctggggagtacgttcgcaagaatgaaactcaaaggaattgacggggacccgcacaagcggtggagcatgtggtttaattcgaagcaacacgaagaaccttaccaagtcttgacatcccactgaccggacagtaatgtgtccttcccttcggggcagtggagacaggtggtgcatggttgtcgtcagctcgtgtcgtgagatgttgggttaagtcccgcaacgagcgcaacccttattcttagtagccagcagttcggctgggcactctagggagactgccagggataacctggaggaaggtggggatgacgtcaaatcatcatgccctttatgacttgggctacacacgtgctacaatggcgtaaacaaagtgaagcaaagctgtgaagccaagcaaatcacaaaaataacgtctcagttcggattgtagtctgcaactcgactacatgaagctggaatcgctagtaatcgcagatcagaatggtgcggcgaatacgttcccgggtcttgtacactccgcccgtcacaccatgggagtcggaaatgcccgaagtcggtgacctaacgtaagaaggagccgccgaaggcaggtctgataactgg

SEQ ID NO: 974 - DNA, 1487 bp, Artificial Sequence
  Synthetic polymer
agagtttgatcctggctcaggatgaacgctagcggcaggcttaacacatgcaagtcgaggggcagcgaggccgtagcaatacggctgtcggcgaccggcgcacgggtgcgtaacgcgtatgcaacctacccgtaacagggggataacactgagaaattggtactaataccccataatatctcggaaggcatcttctggggttgaaaactctggtggttacggatgggcatgcgttgtattagctagttggtaaggtaacggcttaccaaggcgacgatacatagggggactgagaggttaaccccccacattggtactgagacacggaccaaactcctacgggaggcagcagtgaggaatattggtcaatggacgcaagtctgaaccagccatgccgcgtgcaggaagacggctctatgagttgtaaactgcttttgtattagggtaaactcaggtacgtgtacctgactgaaagtataatacgaataaggatcggctaactccgtgccagcagccgcggtaatacggaggacccaagcgttatccggatttattgggtttaaagggtgcgtaggcggtttgataagttagaggtgaaataccggggcttaactccggaactgcctctaatactgttgaactagagagtagttgcggtaggcggaatgtatggtgtagcggtgaaatgcttagagatcgtacagaacaccgattgcgaaggcagcttaccaaactatatctgacgttgaggcacgaaagcgtggggagcaaacaggattagataccctggtagtccacgcagtaaacgatgataactcgttgtcggcgatacacagtcggtgactaagcgaaagcgataagttatccacctggggagtacgttcgcaagaatgaaactcaaaggaattgacgggggcccgcacaagcggaggaacatgtggtttaattcgatgatacgcgaggaaccttacccgggcttgaaagttatcgacgattctggaaacaggatttcccttcggggcgagaaactaggtgctgcatggttgtcgtcagctcgtgccgtgaggtgtcgggttaagtcccataacgagcgcaacccctaccgttagttgccatcaggtcaagctgggcactctggcgggactgccggtgtaagccgagaggaaggtggggatgacgtcaaatcagcacggcccttacgtccggggctacacacgtgttacaatggtaggtacagagggcagctaccctgcgaagggatgcgaatctcgaaagcctatctcagttcggattggaggctgaaacccgcctccatgaagttggattcgctagtaatcgcgcatcagccatggcgcggtgaatacgttcccgggccttgtacacaccgcccgtcaagccatggaagctgggggtgcctgaagttcgtgaccgcaaggagcgacctagggcaaaaccggtgactggggctaagtcgtaacaaggtaacc

SEQ ID NO: 975 - DNA, 1439 bp, Artificial Sequence
  Synthetic polymer
caggatgaacgctagcgacaggcctaacacatgcaagtcgaggggcagcggagaggtagcaatacctttgccggcgaccggcgcacgggtgagtaacacgtatgcaatccacctgtaacagggggataacccggagaaatccggactaataccccataatatgggcgctccgcatggagagcccattaaagagagcaattttggttacagacgagcatgcgctccattagccagttggcggggtaacggcccaccaaggcgacgatggataggggttctgagaggaaggtcccccacattggaactgagacacggtccaaactcctacgggaggcagcagtgaggaatattggtcaatggtcggcagactgaaccagccaagtcgcgtgagggaagacggccctacgggttgtaaacctcttttgtcggagagtaaagtacgctacgcgtagcgtattgcaagtatccgaagaaaaagcatcggctaactccgtgccagcagccgcggtaatacggaggatgcgagcgttatccggatttattgggtttaaagggtgcgtaggcggcacgccaagtcagcggtgaaatttccgggctcaacccggagtgtgccgttgaaactggcgagctagagtgcacaagaggcaggcggaatgcgtggtgtagcggtgaaatgcatagatatcacgcagaaccccgattgcgaaggcagcctgctagggtgcgacagacgctgaggcacgaaagcgtgggtatcgaacaggattagataccctggtagtccacgcagtaaacgatgaatactaactgtttgcgatacaatgtaagcggtacagcgaaagcgttaagtattccacctggggagtacgccggcaacggtgaaactcaaaggaattgacgggggcccgcacaagcggaggaacatgtggtttaattcgatgatacgcgaggaaccttacccgggctcaaacgcagggggaatgccggtgaaagtcggcagctagcaatagtcgcctgcgaggtgctgcatggttgtcgtcagctcgtgccgtgaggtgtcagcttaagtgccataacgagcgcaacccctattgacagttactaacgggtgaagccgaggactctgtcgagactgccggcgcaagccgcgaggaaggtggggatgacgtcaaatcagcacggcccttacgtccggggctacacacgtgttacaatggggggtacagagggccgctaccacgcgagtggatgccaatcccaaaaacctctctcagttcggactggagtctgcaacccgactccacgaagctggattcgctagtaatcgcgcatcagccacggcgcggtaaatacgttcccgggccttgtacacaccgcccgtcaagccatgggagccgggggtacctgaagtgcgtaaccgcgaggagcgccctagggta

SEQ ID NO: 976 - DNA, 1448 bp, Artificial Sequence
  Synthetic polymer
gcggcatgctttacacatgcaagtcgaacggcaacgcggggagcttgctccctggcggcgagtggcgcacgggtgagtaatacatcggaacgtgtcttctagtgggggataactgcccgaaagggcagctaataccgcatgaaacctgagggtgagagcgggggatcgcaagacctcgcgctggaagagcggccgatgtccgattaactagttggtgaggtaaaggctcaccaaggcgacgatcggtagctggtctgacaagacgaccagccacactgggactgatacacggcccagactcctacgggaggcaccagtggggaattttggacaatgggggcaaccctgatccagccatgccgcgtgcaggatgaaggtcttcggattgtaaactgcttttgtcacggacgaaaagggatgcgataacaccgcattccgctgacggtacctgaagaataagcaccagctaactacgtgccagcagccgcggtaatacgtagggtgcaagcgttaatcggaattactgggcgtaaagcgtgcgcaggcgggcctgtaagattgatgtgaaatccccgggctcaacctgagaattgcatatatgactgcacgacttgagtttgtcagaggagggtggaattccacgtgtagcagtgaaatgcgtagatatgtggaagaacaccgatggcgaaggcagccctctgggacatgactgacgctcatgcacgaaagcgtggggagcaaacaggattagataccctggtagtccacgccctaaacgatgtctactagttgttggggacgatagtccttggtaacgcagctaacgcgtgaagtagaccgcctggggagtacggtcgcaagattaaaactcaaaggaattgacggggacccgcacaagcggtggatgatgtggattaattcgatgcaacgcgaaaaaccttacctagccttgacatgccaggaaggtctgagagatcagaccgtgcccgcaagggaatctggacacaggtgctgcatggctgtcgtcagctcgtgtcgtgagatgttgggttaagtcccgcaacgagcgcaacccttgtcattagttgctacgaaagggcactctaatgagactgccggtgacaaaccggaggaaggtggggatgacgtcaagtcctcatggcccttatggctagggcctcacacgtcatacaatggtcggaacagagggaagcgaagccgcgaggtgaagccaatcccagaaaaccgatcgtagtccggattgcagtctgcaactcgactgcatgaagtcggaatcgctagtaatcgcggatcagcatgccgcggtgaatacgttcccgggtcttgtacacaccgcccgtcacaccaggggagtggggttcaccagaagacgtttgcccaaccgaaaggaaggcggcgtccacggtgggcttcatgactggggtgaa

SEQ ID NO: 977 - DNA, 1487 bp, Artificial Sequence
  Synthetic polymer
ctggcggcgtgcttaacacatgcaagtcgaacgaagcactttatttgatttccttcgggactgattattttgtgactgagtggcgaacgggtgagtaacgcgtaggcaacctgccctttagacggggacaacattccgaaaggagtgctaataccggatgtgatcatcgtgccgcatggcaggatgaagaaagatggcctctacaagtaagctatcgctaaaggatgggcctgcgtctgattagctagttggtagtgtaacggactaccaaggcgatgatcagtagccggtctgagaggatgaacggccacattgggactgagacacggcccaaactcctacgggaggcagcagtggggaatcttccgcaatggacgaaagtctgacggagcaacgccgcgtgagtgatgaaggatttcggtctgtaaagctctgttgtttatgacgaacgtgcagtgtgtgaacaatgcattgcaatgacggtagtaaacgaggaagccacggctaactacgtgccagcagccgcggtaatacgtaggtggcgagcgttgtccggaattattgggcgtaaagagcatgtaggcggcttaataagtcgagcgtgaaaatgcggggctcaaccccgtatggcgctggaaactgttaggcttgagtgcaggagaggaaaggggaattcccagtgtagcggtgaaatgcgtagatattgggaggaacaccagtggcgaaggcgcctttctggactgtgtctgacgctgagatgcgaaagccagggtagcgaacgggattagataccccggtagtcctggccgtaaacgatgggtactaggtgtaggaggtatcgaccccttctgtgccggagttaacgcaataagtaccccgcctggggagtacggccgcaaggttgaaactcaaaggaattgacgggggcccgcacaagcggtggagtatgtggtttaattcgacgcaacgcgaagaaccttaccaaggcttgacattgattgaacgctctagagatagagatttcccttcggggacaagaaaacaggtggtgcatggctgtcgtcagctcgtgtcgtgagatgttgggttaagtcccgcaacgagcgcaacccctatcctatgttaccagcaagtaaagttggggactcatgggagactgccagggacaacctggaggaaggcggggatgacgtcaagtcatcatgccccttatgtcttgggctacacacgtactacaatggtcggaaacagagggaagcgaagccgcgaggcagagcaaaccccagaaacccgatctcagtttggatcgcaggctgcaacccgcctgcgtgaagtcggaatcgctagtaatcgcaggtcagcgtactgcggtgaatacgttcccgggccttgtacacaccgcccgtcacaccacgaaagttggtaacacccgaagccggtgaggtaacctattaggggccagccgtctaaggtggggccgatgattg

SEQ ID NO: 978 - DNA, 1446 bp, Artificial Sequence
  Synthetic polymer
gcggcgtgcttaacacatgcaagtcgaacgaaacaccttatttggttttcttcggaactgaagatttggtgattgagtggcggacgggtgagtaacgcgtgggtaacctaccctgtacagggggataacagtcagaaatgactgctaataccgcataagaccacagcaccgcatggtgcaggggtaaaaactccggtggtacaggatggacccgcgtctgattagctggttggtgaggtaacggcccaccaagccgacgatcagtagccgacctgagagggtgaccggccacattgggactgagacacggcccaaactcctacgggaggcagcagtggggaatattgcacaatgggggaaaccctgatgcagcgacgccgcgtgaaggaagaagtatttcggtatgtaaacttctatcagcagggaagaaaatgacggtacctgactaagaagccccggctaactacgtgccagcagccgcggtaatacgtagggggcaagcgttatccggatttactgggtgtaaagggagcgtaggcggtctgacaagtcagaagtgaaagcccggggctcaacctcgggactgcttttgaaactgccggactagattgcaggagaggtaagtggaattcctagtgtagcggtgaaatgcgtagatattaggaggaacaccagtggcgaaggcggcttactggactgtaaatgacgctgaggctcgaaagcgtggggagcaaacaggattagataccctggtagtccacgccgtaaacgatgaatactaggtgtcagggagcaaagctctttggtgccgcagcaaacgcaataagtattccacctggggagtacgttcgcaagaatgaaactcaaaggaattgacggggacccgcacaagcggtggagcatgtggtttaattcgaagcaacgcgaagaaccttaccaagtcttgacatccctttgaccgcagagtaatgtctgcttcccttcggggcaaaggtgacaggtggtgcatggttgtcgtcagctcgtgtcgtgagatgttgggttaagtcccgcaacgagcgcaacccttaccttcagtagccagcggttcggccgggcactctggagggactgccagggataacctggaggaaggtggggatgacgtcaaatcatcatgccccttatgatttgggctacacacgtgctacaatggcgtaaacaaagggaagcgagagcgtgagcttaagcaaatctcaaaaataacgtctcagttcggattgtagtctgcaactcgactacatgaagctggaatcgctagtaatcgcgaatcagcatgtcgcggtgaatacgttcccgggtcttgtacacaccgcccgtcacaccatgggagttggaaacgcccgaagtcagtgacccaaccgcaaggagggagctgccgaaggcgggtctgataactggggtgaa

SEQ ID NO: 979 - DNA, 1445 bp, Artificial Sequence
  Synthetic polymer
gaacgctagcgacaggcctaacacatgcaagtcgaggggcaacaggtatcagcttgctgatacgctggcgaccggcgcacgggtgagtaacgcgtatgcaatctacctgtaacagggggataacccggagaaatccggcctaataccccataacgatacctatccgcatgaataggcatctaaaggatttccggttacagatgagcatgcgttccattagctagttggcggggtaacagcccaccaaggcgacgatggataggggttctgagaggaaggtcccccacactggtactgagacacggaccagactcctacgggaggcagcagtgaggaatattggtcaatgggcgaaagcctgaaccagccaagtcgcgtgaaggaagacagccctacgggtcgtaaacttcttttgtatgagagtaaaagaggtcacgtgtgacctattgcaagtaccatacgaataagcatcggctaactccgtgccagcagccgcggtaatacggaggatgcgagcgttatccggatttattgggtttaaagggtgcgtaggcggccctataagtcagcggtgaaaattttcggctcaaccgggaaagtgccgttgaaactgtagagctagagtacacaagaggtatgcggaatgcgtggtgtagcggtgaaatgcatagatatcacgcagaaccccgattgcgaaggcagcatactggggtgaaacagacgctgaagcacgaaagcgtgggtatcgaacaggattagataccctggtagtccacgccgtaaacgatgaatactaactgtttgcgatatacagtaagcggtacagcgaaagcgttaagtattccacctggggagtacgccggcaacggtgaaactcaaaggaattgacgggggcccgcacaagcggaggaacatgtggtttaattcgatgatacgcgaggaaccttacccgggctcaaacgcaggcggaatacgtatgaaagtacgtagctagcaatagtctcctgcgaggtgctgcatggttgtcgtcagctcgtgccgtgaggtgtcggcttaagtgccataacgagcgcaacccttatcgatagttactaccaggtaaagctgaggactcaatcgagactgccagcgtaagctgcgaggaaggtggggatgacgtcaaatcagcacggcccttacgtccggggcgacacacgtgttacaatggcagggacaacgagtagccaagcagtaatgccgcgccaatctccaaaccctgtcccagttcggatcggagtctgcaactcgactccgtgaagctggattcgctagtaatcgcgcatcagccatggcgcggtgaatacgttcccgggccttgtacacaccgcccgtcaagccatgggagccgggagtacctgaagtatgcaaccgcaaggagcgtcctagggtaatactggtgactgggg

SEQ ID NO: 980 - DNA, 1345 bp, Artificial Sequence
  Synthetic polymer
ggacgaacgctggcggcgtgtttaacacatgcaagtcgaacggagagtaccaagtagcaatacgcggtattcttagtggcggacgggtgagtaacgcgtgagcaatttgccttagggtggaggataacagcgggaaaccgttgctaataccgcatatgactacggccgggcatccggttgtggtgagaggagcaatccgcccttagatgagctcgcgtcccattaggtagttggcggggtaacggcccaccaagcctgcgatgggtagccggactgagaggttggccggccacactggaactgagacacggtccagactcctacgggaggcagcagtgaagaatattgggcaatgggggaaaccctgacccagcaacgccgcgtgagggaagaaggttctcggattgtaaacctctgtcccatgggaagaaaaaaatgacggtaccatgggaggaagccccggctaactacgtgccagcagccgcggtaatacgtagggggcaagcgttgtccggaattattgggcgtaaagggtgcgtaggcggcccatcaagttggatgtgaaatccccgtgcttaacatgggaattgcattcaaaactgaagggcttgagtgtggaagaggtaagtggaattcccagtgtagcggtgaaatgcgtagatattgggaggaacaccagtggcgaaggcgacttactgggccacaactgacgctgaggcacgaaagcgtggggagcaaacaggattagataccctggtagtccacgctgtaaacgatgattactaggtgtagggggtaacaccccccctgtgccgcagctaacgcaataagtaatccgcctggggagtacggtcgcaagattgaaactcaaaggaattgacgggggcccgcacaaacagcggagcatgtggtttaattcgaagcaacgcgaagaaccttaccaaggcttgacatcctctgaccgccgtggaaacacggaatcccttcggggcagagagacaggtggtgcatggttgtcgtcagctcgtgtcgtgagatgttgggttaagtcccgcaacgagcgcaacccttacacttagttaccagcgggtaaagccggggactctaggtggactgccggggacaactcggaggaaggtggggacgacgtcaaatcatcatgccccttatgtcttgggctacacacgtgctacaatggccgctacaaagagcagcaagggcgtaagccggagcgaaactcataaaagcggtcccagttcggattgtgggctgcaacccgcccacatgaagtcggagttgctagtaatcgcggatcagcatgccgcggtgaatgcgttcccgggcc

SEQ ID NO: 981 - DNA, 1440 bp, Artificial Sequence
  Synthetic polymer
gatgaacgctggcggcgtgcctaacacatgcaagtcgaacgaagcttgacggatgatttcttcggaatgaaacctgatatgacttagtggcggacgggtgagtaacacgtgagcaacctgcctttcagagggggataacggctggaaacggtcgctaataccgcatgacgtgttcggatggcatcatctgaacatcaaagatttatcgctgaaagatgggctcgcgtctgattagatagttggtggggtaacggcctaccaagtctacgatcagtagccggactgagaggttgaacggccacattgggactgagatacggcccagactcctacgggaggcagcagtggggaatattgcacaatgggggaaaccctgatgcagcaacgccgcgtgaaggatgacggttttcggattgtaaacttcttttcttagtgacgaagacagtgacggtagctaaggaataagcatcggctaactacgtgccagcagccgcggtaatacgtaggatgcaagcgttatccggatttactgggtgtaaagggagcgcaggcgggactgcaagttggatgtgaaataccgtggcttaaccacggaactgcatccaaaactgtagttcttgagtgaagtagaggcaagcggaattccgagtgtagcggtgaaatgcgtagatattcggaggaacaccagtggcgaaggcggcttgctgggctttgactgacgttgaggctcgaaagcgtggggagcaaacaggattagataccctggtagtccacgccgtaaacgatgaatactaggtgtcgggtggcaaagccattcggtgccgcagcaaacgcaataagtattccacctggggagtacgttcgcaagaatgaaactcaaaggaattgacggggacccgcacaagcggtggagcatgtggtttaattcgaagcaacgcgaagaaccttacctggtcttgacatccctctgaccgctctttaatcggagctttccttcgggacagaggagacaggtggtgcatggttgtcgtcagctcgtgtcgtgagatgttgggttaagtcccgcaacgagcgcaacccctatctttagtagccagcattttggatgggcactctagagagactgccagggataacccggaggaaggtggggatgacgtcaaatcatcatgccccttatgaccagggctacacacgtgctacaatggcgtaaacaaagggaagcgagcccgcgagggggagcaaatcccaaaaataacgtctcagttcggattgtagtctgcaactcgactacatgaagctggaatcgctagtaatcgcgaatcagaatgtcgcggtgaatacgttcccgggtcttgtacacaccgcccgtcacaccatgggagtcagtaacgcccgaagtcagtgacccaaccgcaaggagggagctgccgaaggtgg

SEQ ID NO: 982 - DNA, 1445 bp, Artificial Sequence
  Synthetic polymer
gcggcgtgcttaacacatgcaagtcgaacggagcacccttgactgaggtttcggccaaatgataggaatgcttagtggcggactggtgagtaacgcgtgaggaacctgcctttcagagggggacaacagttggaaacgactgctaataccgcatgatgcgtagctgggacatcccggatacgccaaagattttatcgctgaaagatggcctcgcgtctgattagatagttggcggggtaacggcccaccaagtcgacgatcagtagccggactgagaggttgaccggccacattgggactgagatacggcccagactcctacgggaggcagcagtggggaatattgggcaatgggcgcaagcctgacccagcaacgccgcgtgaaggaagaaggctttcgggttgtaaacttcttttaagtgggaagagtagaagacggtaccacttgaataagccacggctaactacgtgccagcagccgcggtaatacgtaggtggcaagcgttgtccggatttactgggtgtaaagggcgtgcagccgggcatgcaagtcagatgtgaaatctcagggcttaaccctgaaactgcatttgaaactgtatgtcttgagtgccggagaggtaatcggaattccttgtgtagcggtgaaatgcgtagatataaggaagaacaccagtggcgaaggcggattactggacggtaactgacggtgaggcgcgaaagcgtggggagcgaacaggattagataccctggtagtccacgctgtaaacgatggatactaggtgtgcggggactgaccccctgcgtgccgcagttaacacaataagtatcccacctggggagtacgatcgcaaggttgaaactcaaaggaattgacgggggcccgcacaagcggtggattatgtggtttaattcgaagcaacgcgaagaaccttaccaggtcttgacatcctgctaacgaagtagagatacattaggtgcccttcggggaaagcagagacaggtggtgcatggttgtcgtcagctcgtgtcgtgagatgttgggttaagtcccgcaacgagcgcaacccctattgttagttgctacgcaagagcactctagcgagactgccgttgacaaaacggaggaaggtggggacgacgtcaaatcatcatgtcccttatgatttgggctacacacgtgctacaatggcgtaaacaaagggaagcgaacctgcgagggtaagcaaatcccaaaaataacgtcccagttcggactgcagtctgcaactcgactgcacgaagctggaatcgctagtaatcgcggatcagaatgccgcggtgaatacgttcccgggtcttgtacacaccgcccgtcacaccatgggagtcagtaacgcccgaagtcagtgacctaaccgcaagggaggagctgccgaaggcgggaccgatgactggggtgaag

SEQ ID NO: 983 - DNA, 1442 bp, Artificial Sequence
  Synthetic polymer
cgctggcggcgtgcttaacacatgcaagtcgaacggagtgcccatgacagaggattcgtccaatggattgggttacttagtggcggacgggtgagtaacgcgtgaggaacctgcctcggagtggggaataacacaacgaaagctgtgctaataccgcatgatacagttgggtcgcatgactctgactgtcaaagatttatcgctctgagatggcctcgcgtctgattagctagttggtggggtaacggcccaccaaggcgacgatcagtagccggactgagaggttgaccggccacattgggactgagacacggcccagactcctacgggaggcagcagtggggaatattgggcaatgggcgcaagcctgacccagcaacgccgcgtgaaggaagaaggctttcgggttgtaaacttcttttctcagggacgaagcaagtgacggtacctgaggaataagccacggctaactacgtgccagcagccgcggtaatacgtaggtggcaagcgttatccggatttactgggtgtaaagggcgtgtaggcgggatcgcaagtcagatgtgaaagctggaggctcaacctccagcctgcatttgaaactgtggttcttgagtactggagaggcagacggaattcctagtgtagcggtgaaatgcgtagatattaggaggaacaccagtggcgaaggcggtctgctggacagcaactgacgctgaggcgcgaaagcgtggggagcaaacaggattagataccctggtagtccacgctgtaaacgatggatactaggtgtggggggtctgaccccctccgtgccgcagttaacacaataagtatcccacctggggagtacgatcgcaaggttgaaactcaaaggaattgacgggggcccgcacaagcagtggagtatgtggtttaattcgaagcaacgcgaagaaccttaccaggtcttgacatccaactaacgaagtagagatacattaggtgcccttcggggaaagttgagacaggtggtgcatggttgtcgtcagctcgtgtcgtgagatgttgggttaagtcccgcaacgagcgcaacccttgctattagttgctacgcaagagcactctaataggactgccgttgacaaaacggaggaaggtggggacgacgtcaaatcatcatgccccttatgacctgggctacacacgtactacaatggatgttaacagagggaagcaataccgcgaggaggagcaaacccctaaaaatagtctcagttcggattgcaggctgcaacccgcctgcatgaagccggaattgctagtaatcgcggatcagcatgccgcggtgaatacgttcccgggccttgtacacaccgcccgtcacaccatgagagttggcaacacccgaagccagtagcctaaccgcaaggagggcgctgtcgaaggtggggttgatgatt

SEQ ID NO: 984 - DNA, 1439 bp, Artificial Sequence
  Synthetic polymer
gcttaacacatgcaagtcgaacgaaacaccttatttgattttcttcggaactgaagatttggtgactgagaggcggacgggtgagtaacgcgagggtaacctgccctgtacagggggataacagtcagaaatgactgctaataccgcataagaccacagcaccgcatggagcaagggtaaaaactccggtggtacaggatggacccgcgtctgattagctggttggtgaggtaacggctcaccaaggcgacgatcagtagccggcttgagagagtgaacggccacattgggactgagacacggcccaaactcctacgggaggcagcagtggggaatattgcacaaagggggaaaccctgatgcagcgacgccgcgtgagtgaagaagtatctcggtatgtaaagctctatcagcaaggaagaaaatgacggtacctgactaagaagccccggctaactacgtgccagcagccgcggtaatacgtagggggcaagcgttatccggaattactgggtgtaaagggtgcgtaggtggtatggcaagtcagaagtgaaaacccagggcttaactctgggactgcttttgaaactgtcagactggagtgcaggagaggtaagcggaattcctagtgtagcggtgaaatgcgtagatattaggaggaacatcagtggcgaaggcggcttactggactgaaactgacactgaggcacgaaagcgtggggagcaaacaggattagataccctggtagtccacgccgtaaacgatgaatactaggtgtcggggccgtagaggcttcggtgccgcagccaacgcagtaagtattccacctggggagtacgttcgcaagaatgaaactcaaaggaattgacggggacccgcacaagcggtggagcatgtggtttaattcgaagcaacgcgaagaaccttacctggtcttgacatccttctgaccggcaagtaatgttgcctttccttcgggacagggaagacaggtggtgcatggttgtcgacagctcgtgtcgtgagatgttgggttaagtcccgcaacgagcgcaacccctatctttagtagccagcggttcggccgggcactctagagagactgccagggataacctggaggaaggtggggatgacgtcaaatcatcatgccccttatgagcagggctacacacgtgctacaatggcgtaaacaaagggaggcagaaccgcgaggtcgagcaaatcccaaaaataacgtctcagttcggattgtagtctgcaactcgactacatgaagctggaatcgctagtaatcgcgaatcagaatgtcgcggtgaatacgttcccgggtcttgtacacaccgcccgtcacaccatgggagtcagtaacgcccgaagtcagtgacccaaccgtaaggagggagctgccgaaggtgggaccgataactggggtgaa

SEQ ID NO: 985 - DNA, 1434 bp, Artificial Sequence
  Synthetic polymer
gtgcctaacacatgcaagtcgagcgagaagccattgactgaaacttcggtagaaggatatggtggaaagcggcggacgggtgagtaacgcgtaggcaacctgccccttacagagggatagccattggaaacgatgattaaaacctcataacgcatccccctcacatggaggggatgccaaagattcatcggtaagggatgggcctgcgtctgattagctagttggcggggtaacggcccaccaaggcgacgatcagtagccgacctgagagggtgatcggccacattggaactgagacacggtccaaactcctacgggaggcagcagtggggaatattgcacaatgggcgaaagcctgatgcagcaacgccgcgtgagggatgaaggccttcgggtcgtaaacctctgtccttggggaagaaacaaatgacggtacccatggaggaagccccggctaactacgtgccagcagccgcggtaatacgtagggggcgagcgttatccggaattattgggcgtaaagagtgcgtaggtggttacctaagcgcagggtctaaggcaatggctcaaccattgttcgccctgcgaactgggctacttgagtgcaggagaggaaagcggaattcctagtgtagcggtgaaatgcgtagatattaggaggaacaccagtggcgaaggcggctttctggactgttactgacactgaggcacgaaagcgtggggagcaaacaggattagataccctggtagtccacgccgtaaacgatgagcactaggtgtcggggccgcaaggcttcggtgccgcagttaacgcattaagtgctccgcctggggagtacgcacgcaagtgtgaaactcaaaggaattgacggggacccgcacaagcagcggagcatgtggtttaattcgaagcaacgcgaagaaccttaccaggacttgacatcccactgacagatccctaaccggatccttcttcggacagtggagacaggtggtgcatggttgtcgtcagctcgtgtcgtgagatgttgggttaagtcccgcaacgagcgcaacccttgccattagttgccatcattcagttgggcactctaatgggactgccggggacaactcggaggaaggtggggatgacgtcaaatcatcatgccccttatgttctgggctacacacgtgctacaatggccggtacagcaagaagcaaaaccgcgaggtggagcaaatctcaaaaaccggtcccagttcggactgcaggctgaaacccgcctgcacgaagccggagttgctagtaatcgtggatcagaatgccacggtgaatgcgttcccgggtcttgtacacaccgcccgtcacaccatgggagtcagtaacgcccgaagtcagtgaccgaaccgaaaggacggagctgccgaaggcgggacggatgactggggcga

SEQ ID NO: 986 - DNA, 1446 bp, Artificial Sequence
  Synthetic polymer
gcggcgtgcttaacacatgcaagtcgaacttagcatttacgacagatttcttcggattgaagttgtttatgactgagtggcggacgggtgagtaacgcgtgggtaacctgcctcatacagggggatagcagctggaaacggctggtaataccgcataagcgcacggtatcgcatgatacggtgtgaaaaactccggtggtatgagatggacccgcgtctgattagctggttggtgaggtaacggcccaccaaggcgacgatcagtagccgacctgagagggtgaccggccacattgggactgagacacggcccagactcctacgggaggcagcagtggggaatattgcacaatggaggaaactctgatgcagcgacaccgcgtgagtgaagaagtagttcgctatgtaaagctctatcagcagggaagatagtgacggtacctgactaagaagctccggctaaatacgtgccagcagccgcggtaatacgtatggagcaagcgttatccggatttactgggtgtaaagggagtgtaggtggccaggcaagtcagaagtgaaagcccggggctcaaccccgggactgcttttgaaactgcagggctagagtgcaggaggggcaagtggaattcctagtgtagcggtgaaatgcgtagatattaggaggaacaccagtggcgaaggcggcttgctggactgtaactgacactgaggctcgaaagcgtggggagcaaacaggattagataccgtggtagtgcacgccgtaaacaatgaatactaggtgtcggggcacataagtgcttcggtgccgcagcaaacgcaataagtattccacctggggagtacgttcgcaagaatgaaactcaaaggaattgacggggacccgcacaagcggtggagcatgtggtttaattcgaagcaacgcgaagaaccttaccaagtcttgacatcccactgaccggacagtaatgtgtccttcccttcggggcagtggagacaggtggtgcatggttgtcgtcagctcgtgtcgtgagatgttgggttaagtcccgcaacgagcgcaacccttattcttagtagccagcagttcggctgggcactctagggagactgccagggataacctggaggaaggtggggatgacgtcaaatcatcatgccccttatgaccagggctacacacgtgctacaatggcgtaaacaaagggaagcgaacctgtgaggggaagcaaatctcaaaaataacgtctcagttcggattgtagtctgcaactcgactacatgaagctggaatcgctagtaatcgcgaatcagcatgtcgcggtgaatacgttcccgggtcttgtacacaccgcccgtcacaccatgggagtcagtaacgcccgaagtcagtgacccaaccgtaaggagggagctgccgaaggtgggaccgataactggggtga

SEQ ID NO: 987 - DNA, 1418 bp, Artificial Sequence
  Synthetic polymer
cctaacacatgcaagtcgaacgagagatgaggagcttgctcttcaaatcgagtggcgaacgggtgagtaacgcgtgaggaacctgcctcgaagagggggacaacagttggaaacgactgctaataccgcataagcccacggctcggcatcgagcagagggaaaaggagtgatccgctttgagatggcctcgcgtccgattagctagttggtgaggtaacggcccaccaaggcgacgatcggtagccggactgagaggttgaacggccacattgggactgagacacggcccagactcctacgggaggcggcagtggggaatattgcacaatggggggaaccctgatgcagcgacgccgcgtggaggaagaaggtcttcggattgtaaactcctgttgttgaggaagataatgacggtactcaacaaggaagtgacggctaactacgtgccagcagccgcggtaaaacgtaggtcacaagcgttgtccggaattactgggtgtaaagggagcgcaggcgggagaacaagttggaagtgaaatccatgggctcaacccatgaactgctttcaaaactgtttttcttgagtagtgtagaggtaggcggaattcccggtgtagcggtggaatgcgtagatatcgggaggaacaccagtggcgaaggcggcctactgggcaccaactgacgctgaggctcgaaagtgtgggtagcaaacaggattagataccctggtagtccacaccgtaaacgatgattactaggtgttggaggattgaccccttcagtgccgcagttaacacaataagtaatccacctggggagtacgaccgcaaggttgaaactcaaaggaattgacgggggcccgcacaagcagtggagtatgtggtttaattcgacgcaacgcgaagaaccttaccaagtcttgacatcctgcgacgcacatagaaatatgtgtttccttcgggacgcagagacaggtggtgcatggttgtcgtcagctcgtgtcgtgagatgttgggttaagtcccgcaacgagcgcaacccttatggtcagttactacgcaagaggactctggccagactgccgttgacaaaacggaggaaggtggggatgacgtcaaatcatcatgccctttatgacttgggctacacacgtactacaatggcgttaaacaaagagaagcaagaccgcgaggtggagcaaaactcagaaacaacgtcccagttcggactgcaggctgcaactcgcctgcacgaagtcggaattgctagtaatcgtggatcagcatgccacggtgaatacgttcccgggccttgtacacaccgcccgtcacaccatgagagccggggggacccgaagtcggtagtctaaccgtaaggagggagctgccgaaggtgggaccgataactggggtgaagt

SEQ ID NO: 988 - DNA, 1425 bp, Artificial Sequence
  Synthetic polymer
ggcgcgcctaacacatgcaagtcgaacgagagagagggagcttgcttcctcaatcgagtggcgaacgggtgagtaacgcgtgaggaacctgcctcaaagagggggacaacagttggaaacgactgctaataccgcataagcccacaggtcggcatcgaccagagggaaaaggagcaatccgctttgagatggcctcgcgtccgattagctagttggtgaggtaatggcccaccaaggcaacgatcggtagccggactgagaggttgaacggccacattgggactgagacacggcccagactcctacgggaggcagcagtggggaatattgcacaatgggggaaaccctgatgcagcgacgccgcgtggaggaagaaggtcttcggattgtaaactcctgttgttgaggaagataatgacggtactcaacaaggaagtgacggctaactacgcgccagcagccgcggtaaaacgtaggtcacaagcgttgtccggaattactgggtgtaaagggagcgcaggcgggaagacaagttggaagtgaaatctatgggctcaacccataaactgctttcaaaactgtttttcttgagtagtgcagaggtaggcggaattcccggtgtagcggtggaatgcgtagatatcgggaggaacaccagtggcgaaggcggcctactaggcaccaactgacgctgaggctcgaaagtgtgggtagcaaacaggattagataccctggtagtccacaccgtaaacgatgattactaggtgttggaggattgaccccttcagtgccgcagttaacacaataagtaatccacctggggagtacgaccgcaaggttgaaactcaaaggaattgacgggggcccgcacaagcagtggagtatgtggtttaattcgacgcaacgcgaagaaccttaccaggtcttgacatcccgatgaaaaacccgtaacggggttccctcttcggagcatcggagacaggtggtgcatggttgtcgtcagctcgtgtcgtgagatgttgggttaagtcccgcaacgagcgcaacccttactgtcagttactacgcaagaggactctggcaggactgccgttgacaaaacggaggaaggtggggatgacgtcaaatcatcatgccctttatgacttgggctacacacgtactacaatggcgttaaacaaagagaagcaagaccgcgaggtggagcaaaactcagaaacaacgtcccagttcggactgcaggctgcaactcgcctgcacgaagtcggaattgctagtaatcgtggatcagcatgccacggtgaatacgttcccgggccttgtacacaccgcccgtcacaccatgagagccggggggacccgaagtcggtagtctaaccgcaaggaggacgccgccgaaggtaaaactggtgattggggtgaag

SEQ ID NO: 989 - DNA, 1421 bp, Artificial Sequence
  Synthetic polymer
ctggcggcgcgcctaacacatgcaagtcgaacgagagagaaggagcttgcttcttctatcgaatggggaacgggtgagtaacgcatgaggaacctgcctcacagagggggacaacagttggaaacgactgctaataccgcataagcccacgggtcggcatcgacctgagggaaaaggagtgatccgctttgagatggcctcgcgtccgattagctagttggtgaggtaatggcccaccaaggcgacaatcggtagccggactgagaggttgaacggccaccttgggactgaaacacggcccagactcctacgggaggcagcagtggggaatattgcacaatgggggaaaccctgatgcaacgacgccgcgtggaggaaaaaggtcttcggattgtaaactcctgttgctgaggaagataatagacagtactcaacatggaagtgacggctaactacgtgccagcagccgcggtaaaacgcaggtcacaagcgttgtccggaattactgggtgtaaagggagcgcagagtgtaagacaagttggaagtgaaatctatgggctcaacccataaactgctttcaaaactgtttttcttgagtagtgcagaggtaggcggaattcccggtgtagcggtggaatgcgtagatatcgggaggaacaccagtggcgaaggcggcctactgggcaccaactgacgctgaggctcgaaagtgtgggtagcaaacaggattagataccctggtagtccacaccgtaaacgatgattactaggtgttggaggattgaccccttcagtgccgcagttaacacaataagtaatccacctggggagtacgaccgcaaggttgaaactcaaaggaattgacgggggcccgcacaagcagtggagtatgtggtttaattcgacgcaacgcgaagaaccttaccaagtcttgacatcctgcgacgatactagaaatagtattttccttcgggacgcagagacaggtggtgcatggttgtcgtcagctcgtgtcgtgagatgttgggttaagtcccgcaacgagcgcaacccttatggtcagttactacgcaagaggactctggccagactgccgttgacaaaacggaggaaggtggggatgacgtcaaatcatcatgccctttatgacttgggctacacacgtactacaatggcgttaaacaaagagaagcaagaccgcgaggtggagcaaaactcagaaacaacgtcccagttcggactgcaggctgcaactcgcctgcacgaagtcggaattgctagtaatcgtggatcagcatgccacggtgaatacgttcccgggccttgtacacaccgcccgtcacaccatgagagccggggggacccgaagtcggtagtctaaccgcaaggaggacgccgccgaaggtaaaactggtgattg

SEQ ID NO: 990 - DNA, 1451 bp, Artificial Sequence
  Synthetic polymer
tggctcaggacgaacgctggcggcatgcctaacacatgcaagtcgaacggagattatttcggtaatcttagtggcgaacgggtgagtaacgcgtgggcaacctgccctctagatggggacaacatcccgaaaggggtgctaataccgaatgtgacagcaatctcgcatgagaatgctgtgaaagatggcctctatttataagctatcgctagaggatgggcctgcgtctgattagctagttggtggggtaacggcctaccaaggcgatgatcagtagccggtctgagaggatgaacggccacattgggactgagacacggcccagactcctacgggaggcagcagtggggaatcttccgcaatgggcgaaagcctgacggagcaatgccgcgtgagtgatgaaagaattcgttccgtaaagctcttttgtttatgacgaatgtgcagattgtgaacaatgatctgtaatgacggtagtaaacgaataagccacggctaactacgtgccagcagccgcggtaatacgtaggtggcgagcgttgtccggaattattgggcgtaaagagcatgtaggcggttttttaagtctggagtgaaaatgcggggctcaaccccgtatggctctggatactggaagacttgagtgcaggagaggaaaggggaattcccagtgtagcggtgaaatgcgtagatattgggaggaacaccagtggcaaaggcgcctttctggactgtgtctgacgctgagatgcgaaagccagggtagcgaacgggattagataccccggtagtcctggccgtaaacgatggggtactaggtgtaggaggtatcgacccctttctgtgccggatctaacgcaataagtacaccacttggggagtaagttcgcaaggatgaaagtcaaaggaattgacgggggtcctcacaagcggtggagtatgtggtttaatttgaagcaacgcgaagatcgtttccaaggcttgacattgaatgaccgcatcagagaagaagctttccattcggggacatgaaaacaggtggtgcatggaggtcgtcagattgtgtcgtgagatgatgggttaagtcgcgcaacgagcgcaacccatatcatatgttaccagcgggtaatgccgcggagtcataggagactgccaaggacaacttggaggaaggcggggaggatgtcaagtcatcatgcgcggtcatgtcttgtgggtacacacgtactacaatggtcggcaacagagggaagcgaagcagtgaggcagagcaaaccccagaaatccgatatcagttctgattgcaggatgcaactcgcgatgcatgaagtcggaatggttagtaatcgcaggtcagcatattgcggtgaatacgttcccgggccttgtacacaccgcccgtcacaccacgaaagttggtaacacccgaagccggtggggtaaccgtaagg

SEQ ID NO: 991 - DNA, 1428 bp, Artificial Sequence
  Synthetic polymer
gctggcggcgtgcctaacacatgcaagtcgagcgagaagccttagacggacacttcggtagaagtttgaggtggaaagcggcggacgggtgagtaacgcgtaggcaacctgccctttgcggagggatagcctcgggaaaccgggattaaaacctcataacgccttggagccgcatggcggcgaggccaaagatttatcggcaaaggatgggcctgcgtctgattagttagttggtggggtaacggcccaccaaggcgacgatcagtagccgacctgagagggtgaacggccacattggaactgagacacggtccaaactcctacgggaggcagcagtggggaatattgcgcaatgggggaaaccctgacgcagcaacgccgcgtgagcgaggaaggcctttgggtcgtaaagctctgtcctcagggaagaaggaagtgacggtacctgaggaggaagccccggctaactacgtgccagcagccgcggtaatacgtagggggcgagcgttatccggaattattgggcgtaaagagtacgtaggcggtttcttaagcgcagggtttaagactatggcttaactatagttcgccctgtgaactgggagacttgagtatcggagaggaaagcggaattcctagtgtagcggtgaaatgcgtagatattaggaggaacaccagtggcgaaggcggctttctggacgaaaactgacgctgaggtacgaaagcgtggggagcgaacaggattagataccctggtagtccacgccgtaaacgatgagcactaggtgtcggggtcgcaagacctcggtgccggagttaacgcattaagtgctccgcctggggagtacgcgcgcaagcgtgaaactcaaaggaattgacggggacccgcacaagcagcggagcatgtggtttaattcgaagcaacgcgaagaaccttaccagggcttgacatcctcctgacagggccttaatcggcccgttctacggacaggagagacaggtggtgcatggttgtcgtcagctcgtgtcgtgagatgttgggttaagtcccgcaacgagcgcaacccttgtcgttagttactaacattcagttgaggactctaatgagactgccgtggataacacggaggaaggtggggatgacgtcaaatcatcatgccccttatgtcctgggctacacacgtgctacaatggtcggcacagagagaggcgagaccgcgaggtggagcaaatctcaaaaaccgatcccagttcggatcgcgggctgcaactcgcccgcgtgaagtcggagttgctagtaatcgcggatcagaacgccgcggtgaatgcgttcccgggtcttgtacacaccgcccgtcacaccatggaagttgggggcgcccgaagtcggctaggaaataggctgcctaaggtgaaaccaatgactgg

SEQ ID NO: 992 - DNA, 1436 bp, Artificial Sequence
  Synthetic polymer
cgctggcggcgtgcttaacacatgcaagtcgaacggaactgctatgaaggagttttcggacaacggaatagtatgtttagtggcggacgggtgagtaacgcgtgagtaacctgcctaggagtggggaataacagttggaaacgactgctaataccgcataatgcagcggagtcgcatggctctgctgccaaagatttatcgctcttagatggactcgcgtctgattagctagttggcggggtaacggcccaccaaggcgacgatcagtagccggactgagaggttgaccggccacattgggactgagatacggcccagactcctacgggaggcagcagtggggaatattgggcaatgggcgcaagcctgacccagcaacgccgcgtgaaggaagaaggctttcgggttgtaaacttcttttatgagggacgaaacaaatgacggtacctcatgaataagccacggctaactacgtgccagcagccgcggtaatacgtaggtggcaagcgttatccggatttactgggtgtaaagggcgtgtaggcgggactgcaagtcagatgtgaaaattatgggctcaacccataacctgcatttgaaactgtagttcttgagtgctggagaggcaatcggaattccgtgtgtagcggtgaaatgcgtagatatacggaggaacaccagtggcgaaggccgattgctggacagtaactgacgctgaagcgcgaaagcgtggggaacaaacaggattagataccctggtaatccacgctgtaaacgatgattactagggtgggggggtctgaccccctccgtgccgcagttaacacaataagtatcccacctggggagtacgatcgcaaggttgaaactcaaaggaattgacggggggcccgcacaagcggtggagtatgtggtttaattcgaagcaacgcgaagaaccttaccagggcttgacatcctactaacgaagtagagatacattaggtgcccttcggggaaagtagagacaggtggtgcatggttgtcgtcagctcgtgtcgcgagatgttgggttaagtcccgcaacgagcgcaacccttattgttagttgctacgcaagagcactctagcgagaccgccgttgacaaaacggaggaaggtggggacgacgtcaaatcatcatgccccttatgtcatgggccacacacgtactacaatggcggtcaacagagggaagcaataccgcgaggtggagcaaatccctaaaagccgtcccagttcggattgcaggctgaaacccgcctgtatgaagttggaatcgctagtaatcgcggatcagcatgccgcggtgaatacgttcccgggccttgtacacaccgcccgtcacaccatgagagtcgggaacacccgaagtccgtagcctaaccgcaaggagggcgcggccgaaggtgggttcg

SEQ ID NO: 993 - DNA, 1432 bp, Artificial Sequence
  Synthetic polymer
tgcctaacacatgcaagtcgaacggaacttctttgacatagttcttcggaaggaagttgattaagtttagtggcggacgggtgagtaacgcgtgagtaacctgcctttgacaggggaataacttcccgaaaggaatgctaataccacatgacgcatatttatcgcatggtagatatgccaaagatttatcgctcaaacatggactcgcgtccgattagccagttggcggggtaacggcccaccaaagcgacgatcgatagccggactgaaaggttgaacggccaccttgggactgagacacagcccaaactcctacgggaggcagcagtgggggatattgcgcaatgggggaaaccctgacgcaccaacgccgcgtgaaggatgaaggttttcggattgcagacttcttttattaacgacgaacaatgacggtgctaaatgaataacctccggctaactacgtgccaccagccgcggtaatacgtagggagcaagcgttatccggatttactgggtgtaaagggtgcgtaggcggcttggtaagtcagatgtgaaatgtatgggctcaacccatgcactgcatttgaaactattgagcttgagtgaagtagaggtaggcggaattccctgtgtagcggagacatgcgtagagatagggaggaacaccagtggcgaaggccgcctactgggctttaactgacgctgacgcacgaaagcgtggatagcaaacaggattagatacactgataatccacgctgcagacgatgattactaggtgtggggggtctgacgccttccgtgccggagttatcacaataagtaatccacttggggagtacgacctcaaggttgaaactcaaaggaattgacgggggcccgcacaagcagtggagtatgtggtttaattagaagcaacgcgaagatccttatcaggtcttgacatggagtgtcgaatgtagagatagatttttccttcgggacacaaagacaggtggtgcatggttgttgtcatctcgtgtcgtgagatgttgggttaagtcgagcaacgagctcaacccttgttattagttgttacgcaagagctctataataggactgccgttgacataacggaggaaggtggggacgatgtcaaatcatcacgccctttatgacgtgggctacacacgtactacaatggatgtaaacagagggaagcaaaatagcgatatggagcaaacccataaaagcattctcagttcagattgcaggctgcatctcgcctgtatgaagttggaatttatagtaatcgcggatcagcatgccgcggtgaatacgttcccgggccttgtacacaccgcccgtcaccccatgggagccggtaataccagaagccagtagtttacccttagggagaccgctgtcgaaggtaggattggcgactggggtgaa

SEQ ID NO: 994 - DNA, 1454 bp, Artificial Sequence
  Synthetic polymer
aacgctggcggcgtgcttaacacatgcaagtcgaacgaagcatttaagacggattctttcgggatgaagacttttatgactgagtggcggacgggtgagtaacgcgtgggtaacctgcctcacacagggggatagcagttggaaacggctgataataccgcataagcgcacagtaccgcatggtacagtgtgaaaaactccggtggtgtgagatggacccgcgtctgattagcttgttggcagggtaacggcctaccaaggcaacgatcagtagccgacctgagagggtgaccggccacattgggactgagacacggcccagactcctacgggaggcagcagtggggaatattgcacaatggaggaaactctgatgcagcgacgccgcgtgagtgaagaagtaattcgttatgtaaagctctatcagcagggaagatagtgacggtacctgactaagaagctccggctaaatacgtgccagcagccgcggtaatacgtatggagcaagcgttatccggatttactgggtgtaaagggagtgtaggtggcatcacaagtcagaagtgaaagcccggggctcaaccccgggactgcttttgaaactgtggagctggagtgcaggagaggcaagtggaattcctagtgtagcggtgaaatgcgtagatattaggaggaacaccagtggcgaaggcggcttgctggactgtaactgacactgaggctcgaaagcgtggggagcaaacaggactagataccctggtagtccacgccgtaaacgatgaatactaggtgtcggggctcataagagcttcggtgccgcagcaaacgcaataagtattccacctggggagtacgttcgcaagaatgaaactcaaaggaattgacggggacccgcacaagcggtggagcatgtggtttaattcgaagcaacgcgaagaaccttaccaagtcttgacatcctcttgcccggtcagtaatgtgaccttttcttcggaacaagagtgacaggtggtgcatggttgtcgtcagctcgtgtcgtgagatgttgggttaagtcccgcaacgagcgcaacccctattgtcagtagccagcaggtaaagctgggcactctgatgagactgccagggataacctggaggaaggtggggatgacgtcaaatcatcatgccccttacgatttgggctacacacgtgctacaatggcgtaaacaaagagaagcgagcctgcgagggggagcaaatctcaaaaataacgtctcagttcggattgtagtctgcaactcgactacatgaagctggaatcgctagtaatcgcagatcagaatgctgcggtgaataggttcccgggtcttgtacacaccgcccgtcacaccatgggagtcggaaatgcccgaagccagtgacccaagcgaaagcagggagctgtcgaaggcaggtctgataactggggtga

SEQ ID NO: 995 - DNA, 1454 bp, Artificial Sequence
  Synthetic polymer
ggcggcgtgcctaacacatgcaagtcgaacgaagcacttatgaggattccttcgggatgaaacatttgtgacttagtggcggacgggtgagtaacgcgtgggtaacctgccttatacagggggataacagttagaaatgactgctaataccgcataagcgcacagtctcgcatgggacagtgtgaaaaactaaggtggtataagatggacccgcgtctgattagctagttggtggggtaaaggcctaccaaggcgacgatcagtagccgacctgagagggtgatcggccacattgggactgagacacggcccaaactcctacgggaggcagcagtggggaatattgcacaatgggggaaaccctgatgcagcaacgccgcgtgaaggaagaagtatctcggtatgtaaacttctatcagcagggaagaaaatgacggtacctgactaagaagctccggctaaatacgtgccagcagccgcggtaatacgtatggagcaagcgttatccggatttactgggtgtaaagggagcgtaggcggttatgcaagtcagatgtgaaagcccggggcttaaccccgggactgcatttgaaactgtgtaactagagtgtcggagaggtaagtggaattcctagtgtagcggtgaaatgcgtagatattaggaggaacaccagtggcgaaggcggcttactggacgataactgacgctgaggctcgaaagcgtggggagcaaacaggattagataccctggtagtccacgccgtaaacgatgaatactaggtgttggggagcaaagctcttcggtgccgcagcaaacgcaataagtattccacctggggagtacgttcgcaagaatgaaactcaaaggaattgacggggacccgcacaagcggtggagcatgtggtttaattcgaagcaacgcgaagaaccttaccaagtcttgacatctggatgaccggaccgtaatgggtcctttccttcgggacatccaagacaggtggtgcatggttgtcgtcagctcgtgtcgtgagatgttgggttaagtcccgcaacgagcgcaacccttatccttagtagccagcagtaagatgggcactctagggagactgccggagacaatccggaggaaggtggggatgacgtcaaatcatcatgccccttatgatttgggctacacacgtgctacaatggcgtaaacaaagggaagcaagagggtgacctggagcaaatcccaaaaataacgtcccagttcggactgtagtctgcaacccgactacacgaagctggaatcgctagtaatcgcagatcagaatgctgcggtgaatacgttcccgggtcttgtacacaccgcccgtcacaccatgggagtcagcaacgcccgaagtcagtgactcaaccgcaaggagagagctgccgaaggcggggcaggtaactggggtgaagtcataacaa

SEQ ID NO: 996 - DNA, 1373 bp, Artificial Sequence
  Synthetic polymer
ttagagtttgatcctggctcaggacgaacgctggcggcgtgcctaacacatgcaagtcgagcgaatgaagttccttcgggaacggatttagcggcggacgggtgagtaacacgtgggcaacctgcctcatagaggggaatagccttccgaaagggagattaataccgcataagattgtagtaccgcatggtacagcaattaaaggagcaatccgctatgagatgggcccgcggcgcattagctagttggtgaggtaacggctcaccaaggcgacgatgcgtagccgacctgagagggtgatcggccacattgggactgagacacggcccagactcctacgggaggcagcagtggggaatattgcacaatgggggaaaccctgatgcagcaacgccgcgtgagtgatgacggccttcgggttgtaaagctctgtcttcagggacgataatgacggtacctgaggaggaagccacggctaactacgtgccagcagccgcggtaatacgtaggtggcgagcgttgtccggatttactgggcgtaaagggagcgtaggcggatttttaagtgagatgtgaaatactcgggcttaacctgagtgctgcatttcaaactggaagcctagagtgcaggagaggagaagggaattcctagtgtagcggtgaaatgcgtagagattaggaagaacaccagtggcgaaggcgcttctctggactgtaactgacgctgaggctcgaaagcgtggggagcaaacaggattagataccctggtagtccacgccgtaaacgatgaatactaggtgtaggggttgtcatgacctctgtgccgccgctaacgcattaagtattccgcctggggagtacggtcgcaagattaaaactcaaaggaattgacgggggcccgcacaagcagcggagcatgtggtttaattcgaagcaacgcgaagaaccttaccaggtcttgacatccagttaaacttgtagagatatgaggtcccttcgggggaactgagacaggtggtgcatggttgtcgtcagctcgtgtcgtgagatgttgggttaagtcccgcaacgagcgcaacccttgccaatagttactaacgagtgaagtcgaggactctattgggaccgccggggacaactcggaggaaggtggggacgacgtcaaatcatcatgccccttacgacctgggctacacacgtgctacaatggccgagacagagagcggcgaaggagcgatctggagcgaatctcaaaaaagcggtcacagttcggattgtgggctgcaacccgcccacatgaagcaggagttgctagtaatcgcgaatcagcatgtcgcggtgaatacgttcccgggccttgcacacaccgccc

SEQ ID NO: 997 - DNA, 1442 bp, Artificial Sequence
  Synthetic polymer
aggatgaacgctggcggcgtgcctaacacatgcaagtcgagtgagaaattaatcaatgaatcttcggaagaattgattaatggaaagcggcggacgggtgagtaacgcgtgggcaacctgcctttcacagagggatagccaaaggaaactttgattaaaacctcataaagctggaatagtgcataatataccagccaaagatttatcggtgaaagatgggcccgcgtctgattagctagttggtggggtaacggctcaccaaggcgacgatcagtagccgacctgagagggtgatcggccacattggaactgagacacggtccaaactcctacgggaggcagcagtggggaatattgcacaatgggcgaaagcctgatgcagcaacgccgcgtgaacgaagaaggccttcgggtcgtaaagttctgtccaaagggaagaaaagaatgacggtacctatggaggaagccccggctaaatacgtgccagcagccgcggtaatacgtatggggcaagcgttatccggaattattgggcgtaaagagtgcgtaggtggtggcttaagcgcagggtttaaggcaatggcttaactattgttcgccttgcgaactgggtcacttgagtacaggagaggaaagcggaattcctagtgtagcggtgaaatgcatagatattaggaggaacaccggtggcgaaggcggctttctggactgcaactgacactgaggcacgaaagcgtgggtagcaaacaggattagataccttggtagtccacgccgtaaacgatgagcactaggtgtcggccaataaaggtcggtgccgcagttaacgcattaagtgctccgcctggggagtacgcacgcaagtgtaaaactcaaaggaattgacggggacccgcacaagcagcggagcatgtggtttaattcgaagcaacgcgaagaaccttaccagagcttgacatccctctgacagatccttaatcggatttttcttcggacagaggagacaggtggtgcatggttgtcgtcagctcgtgtcgtgagatgttgggttaagtcccgcaacgagcgcaacccttatcattagttgccatcattaagttgggcactctagtgagactgccggggacaactcggaggaaggtggggatgacgtcaaatcatcatgccccttatgttctgggctacacacgtgctacaatggtcggtacagaaagcagcgaaaccgtgaggtgaagccaatctccaaaaccgatctcagttcggattgtaggctgcaactcgcctacatgaagtcggagttgctagtaatcgcagatcagaatgctgcggtgaatgcgttcccgggtcttgtacacaccgcccgtcacaccatggaagttgggggtgcccgaagttggacaacaaatcgtttacctaaggcaaaaccaatgactggggtgaag

SEQ ID NO: 998 - DNA, 1457 bp, Artificial Sequence
  Synthetic polymer
gatgaacgctggcggcgtgcttaacacatgcaagtcgaacggggtgctcatgacggaggattcgtccaacggattgagttacctagtggcggacgggtgagtaacgcgtgaggaacctgccttggagaggggaataacactccgaaaggagtgctaataccgcatgatgcagttgggtcgcatggctctgactgccaaagatttatcgctctgagatggcctcgcgtctgattagctagtaggcggggtaacggcccacctaggcgacgatcagtagccggactgagaggttgaccggccacattgggactgagacacggcccagactcctacgggaggcagcagtgggggatattgggcaatgggcgcaagcctgacccagcaacgccgcgtgaaggaagaaggctttcgggttgtaaacttcttttgtcggggacgaaacaaatgacggtacccgacgaataagccacggctaactacgtgccagcagccgcggtaatacgtaggtggcaagcgttatccggatttactgggtgtaaagggcgtgtaggcgggattgcaagtcagatgtgaaaactgggggctcaacctccagcctgcatttgaaactgtagttcttgagtgctggagaggcaatcggaattccgtgtgtagcggtgaaatgcgtagatatacggaggaacaccagtggcgaaggcggattgctggacagtaactgacgctgaggcgcgaaagcgtggggagcaaacaggattagataccctggtagtccacgccgtaaacgatggatacttaggggggggggggtcggaccccccctccgtgccgcagttaacacaataaagttatcccacctgggggagtaggatcgcaaggttgaaactcaaagggaattgacggggggcccgcacaagcggtggagtatgtggtttaattcgaagcaacgcgaagaaccttaccagggcttgacatcccactaacgaagcagagatgcattaggtgcccttcggggaaagtggagacaggtggtgcatggtggtcgtcagctcgtgtcgtgagatgttgggttaagtcccgcaacgagcgcaacccttattgttagttgctacgcaagagcactctagcgagactgccgttgacaaaacggaggaaggtggggacgacgtcaaatcatcatgccccttatgtcctgggccacacacgtactacaatggtggttaacagagggaggcaataccgcgaggtggagcaaatccctaaaagccatcccagttcggattgcaggctgaaacccgcctgtatgaagttggaatcgctagtaatcgcggatcagcatgccgcggtgaatacgttcccgggccttgtacacaccgcccgtcacgccatgagagtcgggaacacccgaagtccgtagcctaaccgcaaggagggcgcggccgaaggtgggttcgataatt

SEQ ID NO: 999 - DNA, 1450 bp, Artificial Sequence
  Synthetic polymer
acgctggcggcgtgcctaacacatgcaagtcgagcgagaaatcttggaatgagacttcggttaagtgaagagatggaaagcggcggacgggtgagtaacgcgtaggcaacctgccttatgcagagggatagccattggaaacgatgattaaaacctcataaagccattttatcacatggtgagatggtcaaagatttatcggcataagatgggcctgcgtctgattagctagttggtggggtaacggcctaccaaggcgacgatcagtagccgacctgagagggtgatcggccgcattgggactgagacacggcccagactcctacgggaggcagcagtggggaatattgcgcaatgggggcaaccctgacgcagcaacgccgcgtgcaggaagaaggtcttcggattgtaaactgttgtcgcaagggaagaagacagtgacggtaccttgtgagaaagtcacggctaactacgtgccagcagccgcggtaatacgtaggtgacaagcgttgtccggatttactgggtgtaaagggcgcgtaggcggactgtcaagtcagtcgtgaaataccggggcttaaccccggggctgcgattgaaactgacagccttgagtatcggagaggaaagcggaattcctagtgtagcggtgaaatgcgtagatattaggaggaacaccagtggcgaaggcggctttctggacgacaactgacgctgaggcgcgaaagtgtggggagcaaacaggattagataccctggtagtccacaccgtaaacgatggatactaggtgtaggaggtatcgaccccttctgtgccgcagttaacacaataagtatcccacctggggagtacgaccgcaaggttgaaactcaaaggaattgacgggggcccgcacaagcagtggagtatgtggtttaattcgaagcaacgcgaagaaccttacctgggcttgacatccctggaatcgagtagagatacttgagtgccttcgggaatcaggtgacaggtggtgcatggttgtcgtcagctcgtgtcgtgagatgttgggttaagtcccgcaacgagcgcaacccctattgtcagttgccatcattaagttgggcactctggcgagactgccggtgacaaatcggaggaaggtggggacgacgtcaaatcatcatgccccttatgcccagggctacacacgtactacaatggccgataacaaagtgcagcgaaaccgtgaggtggagcgaatcacaaaactcggtctcagttcagattgcaggctgcaactcgcctgcatgaagttggaattgctagtaatcgcggatcagaatgccgcggtgaatacgttcccgggccttgtacacaccgcccgtcacaccatgagagtcgataacacccgaagcctgtgagctaacctattaggaggcagcagtcgaaggtggggttgatgattggggt

SEQ ID NO: 1000 - DNA, 1428 bp, Artificial Sequence
  Synthetic polymer
gtgcttaacacatgcaagtcgaacgagaatctatggatcttggattcgtccaagtgaagtagaggacagtggcggacgggtgagtaacgcgtgaggaacctgcctcaaagagggggacaacagttggaaacgactgctaataccgcataagcccacgacccggcatcgggaagagggaaaaggagcaatccgctttgagatggcctcgcgtccgattagctagttggtgaggtaacggcccaccaaggcgacgatcggtagccggactgagaggttgaacggccacattgggactgagacacggcccagactcctacgggaggcagcagtggggaatattgcacaatgggggaaaccctgatgcagcgacgccgcgtggaggaagaaggtcttcggattgtaaactcctgttgttgaggaagataatgacggtactcaacaaggaagtgacggctaactacgtgccagcagccgcggtaaaacgtaggtcacaagcgttgtccggaattactgggtgtaaagggagcgcaggcgggaagacaagttggaagtgaaatccatgggctcaacccatgaactgctttcaaaactgtttttcttgagtagtgcagaggtaggcggaattcccggtgtagcggtggaatgcgtagatatcgggaggaacaccagtggcgaaggcggcctactgggcaccaactgacgctgaggctcgaaagtgtgggtagcaaacaggattagataccctggtagtccacaccgtaaacgatgattactaggtgttggaggattgaccccttcagtgccgcagttaacacaataagtaatccacctggggagtacgaccgcaaggttgaaactcaaaggaattgacgggggcccgcacaagcagtggagtatgtggtttaattcgacgcaacgcgaagaaccttaccaagtcttgacatcccttgacgatgctggaaacagtatttctcttcggagcaaggagacaggtggtgcatggttgtcgtcagctcgtgtcgtgagatgttgggttaagtcccgcaacgagcgcaacccttatggtcagttactacgtaagaggactctggccagactgccgttgacaaaacggaggaaggtggggatgacgtcaaatcatcatgccctttatgacttgggctacacacgtactacaatggcgttaaacaaagagaagcaagaccgcgaggtggagcagaactcagaaacaacgtcccagttcggactgcaggctgcaactcgcctgcacgaagtcggaattgctagtaatcgtggatcagcatgccacggtgaatacgttcccgggccttgtacacaccgcccgtcacaccatgagagccggggggacccgaagtcggtagtctaaccgcaaggaggacgccgccgaaggtaaaactggtgattggg

SEQ ID NO: 1001 - DNA, 1442 bp, Artificial Sequence
  Synthetic polymer
tggctcaggatgaacgctagcggcaggcttaacacatgcaagtcgaggggcagcggggagtaccagtactccgccggcgaccggcgcacgggtgcgtaacgcgtatgcaacctacctttaacaggggcataacactgagaaattggtactaattccccataacattctagaaggcatcttcttgggttaaaaactccggtggttaaagatgggcatgcgttgtattacctagttggtgaggtaacggctcaccaaggcgacgatacatagggggactgacaggttaaccccccacattggtactgagacacggaccaaactcctacaggaggcagcaatgaggaatattggtcaatggacgcaagtctgaaccagccatgccgcgtgcacgaagacggctctatgagttgtaaactgcttttgtactatggtaaacgctcttacgtgtaggagcctgaaagtatagtacgaataaagatcggctaactccgtgccatcagccgcggtaatacggaggatccaagcgttatccggatttattgggtttaaagggtgcgtatgcggtttgataagttagaggtgaaataccgaggctcaactccggaactgcctctaatactgttgaactagagagtagttgcggtaggcggaatgtatggtgtagcggtgaaatgcttagagatcatacagaacaccgattgcgaaggcagcttaccaaactatatctgacgttgaggcacgaaagcgtggggagcaaacaggattagatacgttggtagtgcacgcagtaaacgatgataactcgttgtcggcgatacacagtcggtgactaagcgaaagcgataagttatccacctggggagtacgttcgcaagaatgaaactcaaaggaattgacgggggcccgcacaagcggaggaacatgtggtttaattcgatgatacgcgaggaaccttacccgtgcttgaaagttagtgacgattctggaaacaggatttcccttcggggcacgaaactaggtgttgcatggttgtcgtcagctcgtgccgtgaggtgtcgggttaagtcccataacgagcgcaacccctaccgttagttgccatcaggtcaagctgggcactctggcgggactgccggtgtaagccgagaggaaggtggggatgatgtcaaatcagcacggcccttacgtccggggctacacacgtgttacaatggtaggtacagagggccgctaccccgcgaggggatgccaatctcgaaagcctatgtcagttcggatcggaggctgaaacccgcctccgtgaagttggatttggtagtaatcgcgcatcagccatggcgcggtgaatacgttcccgggccttgtacacaccgcccgtcaagccatggaagctgggggtgcctgaagttcgtgaccgcaaggagcgacctagggcaaaaccg

SEQ ID NO: 1002 - DNA, 1447 bp, Artificial Sequence
  Synthetic polymer
gcgtgcttaacacatgcaagtcgaacgaagcatttaagacggattctttcgggatgaagacttttatgactgagtggcggacgggtgagtaacgcgtgggtaacctgcctcacacagggggatagcagttggaaacggctgataataccgcataagcgcacagtaccgcatggtacagtgtgaaaaactccggtggtgtgagatggacccgcgtctgattagcttgttggcagggtaacggcctaccaaggcaacgatcagtagccgacctgagagggtgaccggccacattgggactgagacacggcccagactcctacgggaggcagcagtggggaatattgcacaatggaggaaactctgatgcagcgacgccgcgtgagtgaagaagtaattcgttatgtaaagctctatcagcagggaagatagtgacggtacctgactaagaagctccggctaaatacgtgccagcagccgcggtaatacgtatggagcaagcgttatccggatttactgggtgtaaagggagtgtaggtggcatcacaagtcagaagtgaaagcccggggctcaaccccgggactgcttttgaaactgtggagctggagtgcaggagaggcaagtggaattcctagtgtagcggtgaaatgcgtagatattaggaggaacaccagtggcgaaggcggcttgctggactgtaactgacactgaggctcgaaagcgtggggagcaaacaggattagataccctggtagtccacgccgtaaacgatgaatactaggtgtcggggctcataagagcttcggtgccgcagcaaacgcaataagtattccacctggggagtacgttcgcaagaatgaaactcaaaggaattgacggggacccgcacaagcggtggagcatgtggtttaattcgaagcaacgcgaagaaccttacctgctcttgacatcccgctgaccggacggtaatgcgtccttcccttcggggcagcggagacaggtggtgcatggttgtcgtcagctcgtgtcgtgagatgttgggttaagtcccgcaacgagcgcaacccctatctttagtagccagcggccaggccgggcactctagagagactgccggggataacccggaggaaggtggggatgacgtcaaatcatcatgccccttatgagcagggctacacacgtgctacaatggcgtaaacaaagggaagcgagaccgcgaggtggagcaaatcccaaaaataacgtctcagttcggattgtagtctgcaactcgactacatgaagctggaatcgctagtaatcgcgaatcagaatgtcgcggtgaatacgttcccgggtcttgtacacaccgcccgtcacaccatgggagtcggaaatgcccgaagccagtgacccaaccttttggagggagctgtcgaaggtggagccggtaactggggtgaagtc

SEQ ID NO: 1003 - DNA, 1437 bp, Artificial Sequence
  Synthetic polymer
cttaacacatgcaagtccaacgaagcatttgcgactgatttcttcggattgaagttgcttatgactgagtggcggacgggtgattaacgcgtgggtaacctgcctcacacagggggatagcagtagaaaacggctgataataccgcataagcgcacagtaccgcatggtacagtgtgaaaaactccggtggtgtgagatgcacccgcgtctgattagcttgttggccggctaacggcctaccaaggcaacgatcagaaaccgacctgagagggtgaccggccacattgggactgacacacctcccagactcctacgggaggcaacagtggggaatattgcacaatggaggaaactctgatgcagcgacaccgcgggagtgaagaagtaattcgttatgtaatagctctatcagcagggaagagaatgacggtacctgactaataaactccggcaaaatacatgccagcagccccggtaatacgtatggagcaagcgttatccggatttactgattgtaaagggagtgtaggtggcatcacaagtcagaagtgaaagcccggggctcaaccccgggactgcttttgaaactgtggagctggagtgcaggagaggcaagtggaattcctagtgtagcggtgaaatgcgtagatattaggaggaacaccagtggcgaaggcggcttgctggactgtaactgacactgaggctcgaaagcgtggggagcaaacaggattagataccctggtagtccacgccgtaaacgatgaatactaggtgtcggggctcataagagcttcggtgccgcagcaaacgcaataagtattccacctggggagtacgttcgcaagaatgaaactcaaaggaattgacggggacccgcacaagcggtggagcatgtggtttaattcgaagcaacgcgaagaaccttaccaagtcttgacaccctcttgcccggtcagtaatgtgaccttttcttcggaacaagagtgacaggtggtgcatggttgtcgtcagctcgtgtcgtgagatgttgggttaagtcccgcaacgagcgcaacccctattcttagtagccagcatttaaggtgggcactctaggaagactgccagggataacctggaggaaggtggggatgacgtcaaatcatcatgccccttatgacttgggctacacacgtgctacaatggcgtaaacaaagtgaagcgagagtgtgagcttaagcaaatcacaaaaataacgtctcagttcggattgtagtctgcaactcgactacatgaagctggaatcgctagtaatcgcgaatcagaatgtcgcggtgaatacgttcccgggtcttgtacacaccgcccgtcacaccatgggagtcggaaatgcccgaagtcggtgacctaacgaaagaaggagccgccgaaggcaggtctgataactggggtga

SEQ ID NO: 1004 - DNA, 1509 bp, Artificial Sequence
  Synthetic polymer
gagtttgatcctggctcaggatgaacgctggcggcgtgcctaacacatgcaagttgagcgagaaatcacttaaagaagcttcggtagacttaagagatggagagcagcggacgggtgagtaacgcgtgggaaacctgcccttgacaggaggatagccgagagaaatttcgattaatacttcataaagcagagcattcgcatggatgaactgccaaagaattatcggtcaaggatggtcccgcgtctgattagctggttggtaaggtagcggcttaccaaggcgacgatcagtagccggcctgagagggtgaacggccacattggaactgagacacggtccagactcctacgggaggcagcagtggggaatattgcacaatgggcgaaagcctgatgcagcaacgccgcgtgaaggaagaaggctttcgagtcgtaaacttctgtccaaagggaagaataatgacggtacctttgaagaaagccccggctaactacgtgccagcagccgcggtaatacgtagggggcgagcgttatccggaattactgggcgtaaagagtatgtaggtggttaagtaagcgtagggtttaaggcgacagcccaactgtcgtatgccccgcgaactgtttaacttgagtacaggaggggaaggcggaattcctagtgtagcggtgaaatgcgtagatattaggaggaacaccagtggcgaaggcggccttctggactgtaactgacactgagatacgaaagcgtgggtagcaaacaggattagataccctggtagtccacgccgtaaacgatgagcactaggtgtcgggctcgcaagagttcggtgccggagcaaacgcattaagtgctccgcctggggagtacgcacgcaagtgtgaaactcaaaggaattgacggggacccgcacaagcagcggagcatgtggtttaattcgaagcaacgcgaagaaccttaccaggacttgacatcccactgaaagctcgggtaaagctgagcccttcttcggaacagtggagacaggtggtgcatggttgtcgtcagctcgtgtcgtgagatgttgggttaagtcccgcaacgagcgcaacccttgccgttagttgccatcattaagttgggcactctaatgggactgccggggagaacccggaggaaggcggggatgacgtcaaatcatcatgccccttatgttctgggctacacacgtgctacaatggccgtcacagagggaagcgagagagcgatcttaagcgaaaccaaaaaggcggtcccagttcggactgcaggctgcaactcgcctgcacgaagccggagttgctagtaatcgcggatcagaatgtcgcggtgaatgcgttcccgggtcttgtacacaccgcccgtcacaccatggaagttgggggtgcccaaagtcggtcaagaaaaggtcgcctaaggcaaaaccaatgactggggtgaagtcgtaacaaggtagccgtatcggaaggtgcggctggatcacctcctt

SEQ ID NO: 1005 - DNA, 1421 bp, Artificial Sequence
  Synthetic polymer
gctttacacatgcaagtcgaacggtaacgtggggaggagcttgctccaccccgacgacgagtggcgaacgggtgagtaatacatcggaacgtgtccgctcgtgggggacaaccagccgaaaggttggctaataccgcatgagttctacggaagaaagagggggacccgcaagggcctctcgcgagcggagcggccgatgactgattagcctgttggtgaggtaacggctcaccaaagcaacgatcagtagctggtctgagaggacgaccagccacactgggactgagacacggcccagactcctacgggaggcagcagtggggaattttggacaatgggcgcaagcctgatccagctattccgcgtgtgggatgaaggccctcgggttgtaaaccacttttgtagagaacgaaaagacatcttcgaataaaggatgttgctgacggtactctaagaataagcaccggctaactacgtgccagcagccgcggtaatacgtagggtgcgagcgttaatcggaattactgggcgtaaagggtgcgcaggcggttgagtaagacagatgtgaaatccccgagcttaactcgggaatggcatatgtgactgctcgactagagtgtgtcagagggaggtggaattccacgtgtagcagtgaaatgcgtagatatgtggaagaacaccgatggcgaaggcagcctcctgggacataactgacgctcaggcacgaaagcgtggggagcaaacaggattagataccctggtagtccacgccctaaaggatgttaactagttgttgggatgtaacaatctcagtaacgcagccaacgcgagaagttaaccgcttgggaagtacggtggcaagaataaaactcaaaggaattgacggggacccgcacaagcggtggatgatgtggattaattggatgcaacgcgaaaaaccttacttacccttgacatgtcaggaagcttttgtaatgagagcgtgcctgcaagggagcatgcacacaggtgctgcatggctgttgtcagctagtgtcgtgagatgttgggttaagtcctgcaacgagcgcaacccttgtcattaggtgttacgaaagggcactctagtgagtctgccggtgacaaaccggaggaaggtggggatgacgtcaagtcatcatggcccttatgggttgggcttcacacgtcatacaatggtcggaacagagggcagcgaagccgtgaggtggagccaatcccagaaatccgatcgtagtctggattgcagtctgcaactcgggtgcatgaagtcgcgatatcggtagtaatcgcggatcagcatgccgcggtgaatacgttcccgggtcttgtacacaccgcccgtcaaacaatgggagtggtgtttaccagaagtcgttagcctaaccgcaaggagggcggcg

SEQ ID NO: 1006 - DNA, 1453 bp, Artificial Sequence
  Synthetic polymer
cacatgcaagtcgaacggtaacaggaagcctcttgcttctttgctgacgagtggcggacgggtgagtaatgtctgggaaactgcctgatggagggggataactactggaaatggtagctaataccgcataatgtcgcaagaccaaagagggggaccttcgggcctcttgccatcggatgtgcccagatgggattagctagtaggtggggtaacggctcacctaggcgacgatccctagctggtctgagaggatgaccagccacactggaactgagacacggtccagactcctacgggaggcagcagtggggaatattgcacaatgggcgcaagcctgatgcagccatgccgcgtgtatgaagaaggccttcgggttgtaaagtactttcagcggggaggaagggagtaaagttaatacctttgctcattgacgttacccgcagaagaagcaccggctaactccgtgccagcagccgcggtaatacggagggtgcaagcgttaatcggaattactgggcgtaaagcgcacgcaggcggtttgttaagtcagatgtgaaatccccgggctcaacctgggaactgcatctgatactggcaagcttgagtctcgtagaggggggtggaattccaggtgtagcggtgaaatgcgtagagatctggaggaataccggtggcgaaggcggccccctggacgaagactgacgctcaggtgcgaaagcgtggggagcaaacaggattagataccctggtagtccacgccgtaaacgatgtcgacttggaggttgtgcccttgaggcgtggcttccggaggtaacgcgttaagtcgaccgtctggggagtacgtccgcaaggttaaaagtcaaatgaattgacgggggcccgcacaagcggtggagcatgtggtttaattagatgcaacgcgaagaacgttacttggtcttgacatccacagaactttccagagatggagtggtgcgttcgggaaatgtgagacaggtgctgcatggctgtggtcatcttgtgttgtgaaatggtgggttaagtctcgcaacgagcgcaaccgttatcctttgttgccagcggtccggccgggaactcaaaggagagtgccagtgataaagtggaggaaggtggggatgaggtcaagtcatcatggcccttacgaccagggctacacacgtgctacaatggcgcatacaaagagaagcgacctcgcgagagcaagcggacctcataaagtgagtcgtagtccggattggagtgtgcaactcgactccatgaagtgggaatcgatagtaattgtggatcagaatgccacggtgaatacgttcccggtgccttgtacacaccgacccgtcacaccatgggagtgggttgcaaaagaagtaggtagcttaacattcgggagggcgcttaccactttgtgattcatgactggggtgaagtcataaca

SEQ ID NO: 1007 - DNA, 1452 bp, Artificial Sequence
  Synthetic polymer
ggcggaacgctttacacatgcaagtcgaacggtaacgtggggaggatgttgctccaccccgacgacgagtggggaacgggtgagtagtacatcggaacgtggccgctcgtgggggacagccagccgaaaggttggctaataccggatgagttctacggaagaaagagggggacccgcaagggcctctcacgagcggagcggccgatgactgattagccggttggtgaggtaacggctcaccaaagcaacgatcagtagctggtctgagaggacgaccagccacactgggactgacacacggcccacactcctacgggaggcagcagtggggaattttggacaatgggcgcaagcctgatccagctattccgcgtgtgggatgaaggccctcgggttgtaaaccacttttgtagagaacgaaaagacatcttctaataaaggatgttgctgacggtactctaagaataagcaccggctaactacgtgccagcagccgcggtaatacgtagggtgcgagcgttaatcggaattactgggcgtaaagggtgcgcaggcggttgagtaagacagatgtgaaatccccgagcttaactcgggaatggcatatgtgactgctcgactagagtgtgtcagagggaggtggaattccacgtgtagcagtgaaatgcgtagatatgtggaagaacaccgatggcgaacgcagtctcctgagacataactgacgctcaggcacgaaagcgtgaggagcatacaggattagataccctgctagtccacgcccctaacgatgttaagtagtgtgttgggatgtaacaatctcagtaaggcagccaacgcgagaagttaaccgccctgggaagtacggtcgcaagactaaaactcaaaggaattgaccgcgacccgcacagcgggtggatgatgtggattaattcgatgcaacgcgacaaaccttactctacccttgacatgtcaggaagctgtagtaatgagagcgcgtccgcaagggagcatgaacacaggtggtgcatggttgtcgtcagctcgtgtcgtgagatgttggtttaagtcccgcaacgagccgcaatccttgtcactagttggtatgaaagggcactctagtgagactgccggtgacaaaccggaggaaggtggggatgacgtcaagtcctcatggcccttatgggtagggcttcccccgtcattcaatggtcggaacagagggcagggaagctgtgaggagcagccaatcccagaaaaccgattgtagttcggattgcagtttgcaacttggctgcatgaagttggaatcggtagtaattgcggatcagcatgccgcggtgaatacgttcccgggtcttgtaccccccccccgtcaaccactgggagtggtgtttcccagaagtcgttagcctaaccgcaaggagggcggcgaccccggtgagcaccgtgact

SEQ ID NO: 1008 - DNA, 1458 bp, Artificial Sequence
  Synthetic polymer
gattgaacgctggcggcatgctttacacatgcaagtcgaacggcagcatagagagcttgctctctgatggcgagtggcgaacgggtgagtaatacatcggaacgtgtcctgttgtgggggataactactcgaaagagtagctaataccgcataagacctaagggtgaaagcgggggaccgaaaggcctcgcgcagttggagcggccgatgactgattagctagttggtggggtaaaggcctaccaaggcgacgatcagtagctggtctgagaggacgaccagccacattgggactgagacacggcccaaactcctacgggaggcagcagtggggaattttggacaatgggggcaaccctgatccagccatgccgcgtgcgggaagaaggccttcgggttgtaaaccgcttttgttaggaacgaaaaggtttctgtgaacaacagagattgctgacggtacctaaagaataagcaccggctaactacgtgccagcagccgcggtaatacgtagggtgcgagtgttaatcggaattactgggcgtaaagcgtgcgcaggcggttgggtaagacagatgtgaaatccccgagcttaacttgggaactgcatttgtgactgcctaactagagtatgtcagagggaggtggaattccaagtgtagcagtgaaatgcgtagatatttggaagaacaccgatggcgaaggcagcctcctgggataatactgacgctcatgcacgaaagcgtggggagcaaacaggattagataccctggtagtccacgccctaaacgatgtcaactagttgttgggccgcatggcttagtaacacagctaacgcgagaagttgaccgccgggggagtacggtcgcaagattaaaactcaaaggaattgacggggacccgcacaagcggtggatgatgtggattaattcgatgcaacgcgaaaaaccttacctagccttgacatgccaggaatcctgatgaaagtcgggagtgcccgcaagggaatctggacacaggtgctgcatggctgtcgtcagctcgtgtcgtgagatgttgggttaagtcccgcaacgagcgcaacccttgtcactagttgctacgcaagagcactctagtgaaactgccggtgacaaaccggaggaaggtggggatgacgtcaagtcctcgtggcccttatggctagggcctcacacgtcatacaatggtcggaacagagggcagcgaagccgcgaggcggagccaatcccagaaaaccgatcgtagtccggattgcactctgcaactcgagtgcatgaagtcggaatcgctagtaatcgcggatcagcatgccgcggtgaatacgttcccgggtcttgtacacaccgcccgtcacaccatgggagtggggttcaccagaaggcgtttgcctaaccttcgggagggcggcgaccacggtgggtttcatgactggggtgaa

SEQ ID NO: 1009 - DNA, 1426 bp, Artificial Sequence
  Synthetic polymer
gcgcctaacacatgcaagtcgaacgagagatgaggagcttgctcttcaaatcgagtggcgaacgggtgagtaacgcgtgaggaacctgcctcaaagagggggacaacagttggaaacgactgctaataccgcataagcccacggctcggcatcgagcagagggaaaaggagcaatccgctttgagatggcctcgcgtccgattagctagttggtgaggtaacggcccaccaaggcgacgatcagtagccgacctgagagggtgatcggccacattgggactgagacacggcccagactcctacgggaggcagcagtggggaatattgcacaatgggggaaaccctgatgcagcgacgccgcgtgaaggaagaagtatttcggtatgtaaacttctatcagcagggaagaaaatgacggtacctgactaagaagccccggctaactacgtgccagcagccgcggtaatacgtagggggcaagcgttatccggatttactgggtgtaaagggagcgtaggcggtctgacaagtcagaagtgaaagcccggggctcaactccgggactgcttttgaaactgccggactagattgcaggagaggtaagtggaattcctagtgtagcggtgaaatgcgtagatattaggaggaacaccagtggcgaaggcggcttactggactgtaaatgacgctgaggctcgaaagcgtggggagcaaacaggattagataccctggtagtccacgccgtaaacgatgaatactaggtgttggggagcacagctcttcggtgccgcagcaaacgcaataagtattccacctggggagtacgttcgcaagaatgaaactcaaaggaattgacggggacccgcacaagcggtggagcatgtggtttaattcgaagcaacgcgaagaaccttaccaagtcttgacatcccgatgaccgtcccgtaacgggggcttctcttcggagcatcggtgacaggtggtgcatggttgtcgtcagctcgtgtcgtgagatgttgggttaagtcccgcaacgagcgcaacccttatctttagtagccagcggtacggccgggcactctagagagactgccagggataacctggaggaaggtggggatgacgtcaaatcatcatgccccttatgatttgggctacacacgtgctacaatggcgtaaacaaagggaagcgaaactgtgaagtctagcaaatctcaaaaataacgtctcagttcggattgtagtctgcaactcgactacatgaagctggaatcgctagtaatcgcgaatcagcatgtcgcggtgaatacgttcccgggtcttgtacacaccgcccgtcacaccatgggagttggaaacgcccgaagtcagtgacccaaccgtaaggagggagctgccgaaggcgggtctgataactggggtgaa

SEQ ID NO: 1010 - DNA, 1396 bp, Artificial Sequence
  Synthetic polymer
gacgagtggcgaacgggtgagtaatacatcggaacgtgtccgctcgtgggggacaaccagccgaaaggttggctaataccgcatgagttctacggaagaaagagggggacccgcaagggcctctcgcgagcggagcggccgatgactgattagccggttggtgaggtaacggctcaccaaagcaacgatcagtagctggtctgagaggacgaccagccacactgggactgagacacggcccagactcctacgggaggcagcagtggggaattttggacaatgggcgcaaacctgatccagctattccgcgtgtgggatgaaggccctcgggttgtaaaccacttttgtagagaacgaaaagacatcttcgaataaaggatgttgctgacggtactctaagaataagcaccggctaactacgtgccagcagccgcggtaatacgtagggtgcgagcgttaatcggaattactgggcgtagagggtgcgcaggcggttgagtaagacagatgtgaaatccccgagcttaactcgggaatggcatatgtgactgctcgactagagtgtgtcagaggggggtggaattccacgtgtagcagtgaaatgcgtagatatgtggaagaacaccgatggcgaaagcagcctcctgggacataactgacgctcaggcacgaaaggcgtggggagcaaacaaggattagaataccgtggggattccacggcctaaaggatgttaaatgagttgttgggagggggccgtctcagaaaggccgcccacggcgagaaagttaaccccctggggaagtacggtggcaagactaaaaactcaaaaggaattgacggggaccggcacaagcggtgggatgatgtggattaattcgatgcaacgcgaaaaaccttacttacccttgacatgtcaggaagctcttgtaatgagagcgtgcccgcaagggagcctgaacacaggtgctgcatggctgtcgtcagctcgtgtcgtgagatgttgggttaagtcccgcaacgagcgcaacccttgtcactagttgctacgaaagggcactctagtgagactgccggtgacaaaccggaggaaggtggggatgacgtcaagtcctcatggcccttatgggtagggcttcacacgtcatacaatggtcggaacagagggcagcgaagccgtgaggcggagccaatcccagaaaaccgatcgtagtccggattgcagtctgcaactcgactgcatgaagtcggaatcgctagtaatcgcggatcagcatgccgcggtgaatacgttcccgggtcttgtacacaccgcccgtcaaacaatgggagtggtgtttaccagaagtcgttagcctaaccgcaaggagggcggcgaccacggtgagcaccgtgact

SEQ ID NO: 1011 - DNA, 1375 bp, Artificial Sequence
  Synthetic polymer
ttagagtttgatcctggctcaggacgaacgctggcggcgtgcctaacacatgcaagtcgagcgaatgaagttccttcgggaacggatttagcggcggacgggtgagtaacacgtgggcaacctgcctcatagaggggaatagccttccgaaagggagattaataccgcataagattgtagtaccgcatggtacagcaattaaaggagcaatccgctatgagatgggcccgcggcgcattagctagttggtgaggtaacggctcaccaaggcgacgatgcgtagccgacctgagagggtgatcggccacattgggactgagacacggcccagactcctacgggaggcagcagtggggaattttgggcaatggggggaaccctgacccagcgacgccgcgtgagtgaagaaattcctcggaatgtaaagctctgttgtatgggaagataatgacggtaccatacgaggaagccccggcaaactacgtgccagcagccgcggtaatacgtagggggcaagcgttgtccggaattactgggcgtaaagggagcgtaggcggatttttaagtgagatgtgaaatactcgggcttaacctgagtgctgcatttcaaactggaagtctagagtgcaggagaggagaagggaattcctagtgtagcggtgaaatgcgtagagattaggaagaacaccagtggcgaaggcgattctctggactgtaactgacgctgaggctcgaaagcgtggggagcaaacaggattagataccctggtagtccacgccgtaaacgatgaatactaggtgtaggggttgtcatgacctctgtgccgccgctaacgcactaagtattccgcctggggagtacggtcgcaagattaaaactcaaaggaattgacgggggcccgcacaagcagcggagcatgtggtttaattcgaagcaacgcgaagaaccttacctagacttgacatctcctgcattacccttaatcggggaagttccttcgggaacaggaagacaggtggtgcatggttgtcgtcagctcgtgtcgtgagatgttgggttaagtcccgcaacgagcgcaacccttattgttagttgctaccatttagttgagcactctagcgagactgcccgggttaaccgggaggaaggtggggatgacgtcaaatcatcatgccccttatgtctaggggtacacacgtgctacaatggcaagtacaaagagaagcaagaccgcgaggtggagcaaaactcaaaaacttgtctcagttcggattgtaggctgaaactcgcctacatgaagctggagttgctagtaatcgcgaatcagcatgtcgcggtgaatacgttcccgggccttgcacacaccgcccgtca

SEQ ID NO: 1012 - DNA, 1357 bp, Artificial Sequence
  Synthetic polymer
gaacgggcgagcaacgcaagaggaacccgccacccagagggggacaacagctctccacgactgctaataccgcataagcccacggtgccgcagggcacagagggaaaaggagcaatccgctttgagatggccgcgcgtcagattagctagttggagagggaacggcccaccaaggcaacgatcggtagccggactgagaggttgaacggccacattgggactgagacacggcccagactcctacgggaggcagcagtggggaatattgcacaatgggggaaaccctgatgcagcgacgccgcgaggaggaagaaggtctgcggagtggaaactcctgttgttgaggaagataatgacggaactcaacaaggaagtgacggctaactacgtgccagcagccgcggtaaaacgtacgccacaagcgctgtccggaattactgggtgtaaagggagcgcaggcgggaagacaagttggaagtgaaatccaagggctcaacccatgaactgctttcaaaactgtttttcttgagtagtgcagaggtaggcggaattcccggagtagcggtgaaatgcgtagataacgggaggaacaccagtggcgaaggcggcctactgggcaccaactgacgctgaggctcgaaagtgtgggtagcaaacaggattagataccctggtagtccacactgtaaacgatgattactaggtgttggaggattgaccccttcagtgccgcagttaacacaataagtaatccacctggggagtacgaccgcaaggttgaaactcaaaggaattgacgggggcccgcacaagcagtggagtatgtggtttaattcgacgcaacgcgaagaaccttaccaagtcttgacatcctgcgacggtgctggaaacagtactttccttcgggacgcagagacaggtggtgcatggttgtcgtcagctcgtgtcgtgagatgttgggttaagtcccgcaacgagcgcaacccttatggtcagttactacgcaagaggactctggccagactgccgttgacaaaacggaggaaggtggggatgacgtcaaatcatcatgccctttatgacttgggctacacacgtactacaatggcgttaaacaaagagaagcaagaccgcgaggtggagcaaaactcagaaacaacgtcccagttcggactgcaggctgcaactcgcctgcacgaagtcggaattgctagtaatcgcagatcagcatgctgcggtgaatacgttcccgggccttgtacacaccgcccgtcacaccatgagagccggggggacccgaagtcggtagtctaaccgcaaggaggacgccgccgaaggtaaaactggtgattggggc

SEQ ID NO: 1013 - DNA, 1375 bp, Artificial Sequence
  Synthetic polymer
ttagagtttgatcctggctcagaacgaacgctggtggcgtgttttatacatgcaagtcgagcgaggacaatagcttgctattgagccgagcggcgaacgggtgagtaacgcgtaagcaatctgccccatagtcgggaataaccgcgctaacgtgcggctaatgccggatattgtgtcctaccgcatggtaggttgacgaaagatttatcgctatgggatgagcttgcgtccgattagctagttggtagggtaatggcctaccaaggccacgatcagtagccggcctgagagggtggacggccacactgggactgagacacggcccagactcctacgggaggcagcagtggggaatattgcgcaatgggggaaaccctgatgcagcaacgccgcgtgagtgatgacggccttcgggttgtaaagctctgtcttcagggacgataatgacggtacctgaggaggaagccacggctaactacgtgccagcagccgcggtaatacgtaggtggcgagcgttgtccggatttactgggcgtaaagggagcgtaggcggatttttaagtgagatgtgaaatactcgggcttaacctgagtgctgcatttcaaactggaagtctagagtgcaggagaggagaagggaattcctagtgtagcggtgaaatgcgtagagattaggaagaacaccagtggcgaaggcgcttctctggactgtaactgacgctgaggctcgaaagcgtggggagcaaacaggattagataccctggtagtccacgctgtaaacgatggatactaggtgtgggaggtatcgaccccttccgtgccgcagcaaacgcaataagtatcccgcctggggagtacggtcgcaaggctgaaactcaaaggaattgacgggggcccgcacaagcggtggagcatgtggtttaattcgaagcaacgcgaagaaccttaccaaggcttgacatccccttgacaggtgcagagatgtaccctcctcttcggaggcaagggtgacaggtggtgcatggttgtcgtcagctcgtgtcgtgagatgttgggttaagtcccataacgagcgcaacccttattgttagttgccagcattcagttgggcactctagcgagactgccggtgataaaccggaggaaggtggggatgacgtcaaatcatcatgccccttatgagctgggctacacacgtgctacaatggacggtacaacgggtagcgagggcgcgagccttagcaaatcctaataagccgttctcagttcggattgttctctgcaactcgactccatgaagttggaatcgctagtaatcgcgcatcagcatggcgcgatgaatccgttcccaggccttgcactcaccgcccgtca

SEQ ID NO: 1014 - DNA, 1461 bp, Artificial Sequence
  Synthetic polymer
cgctggcggcgtgcctaatacatgcaagtcgaacttttctttcctcccgagtgcttgcactcaattggaaagaggagtggcggacgggtgagtaacacgtgggtaacctacttttcagagggggataacacttggaaacaggtgctaataccgcataacagtttatgccgcatggcataagagtgaaaggcgctttcgggtgttgctgatggatggacccgcggtgcattagctagttggtgaggtaacggctcaccaaggccacgatgcatagccgacctgagagggtgatcggccacactgggactgagacacggcccagactcctacgggaggcagcagtagggaatcttcggcaatggacgaaagtctgaccgagcaacgccgcgtgagtgaagaaggttttcggatcgtaaaactctgttgttagagaagaacaaggacgttagtaactgaacgtcccctgacggtatctaaccagaaagccacggctaactacgtgccagcagccgcggtaatacgtaggtggcaagcgttgtccggatttattgggcgtaaagcgagcgcaggcggtttcttaagtctgatgtgaaagcccccggctcaaccggggagggtcattggaaactgggagacttgagtgcagaagaggagagtggaattccatgtgtagcggtgaaatgcgtagatatatggaggaacaccagtggcgaaggcggctgtctggtctgtaactgacgctgaggctcgaaagcgtggggagcaaacaggattagataccctggtagtccacgccgtaaacgatgagtgctaagtgttggagggtttccgcccttcagtgctgcagcaaacgcattaagcactccgcctggggagtacgaccgcaaggttgaaactcaaaggaattgacgggggcccgcacaagcggtggagcatgtggtttaattcgaagcaacgcgaagaaccttaccaggtcttgacatcttgcgccaaccctagagatagggcgtttccttcgggaacgcaatgacaggtggtgcatggtcgtcgtcagctcgtgtcgtgagatgttgggttaagtcccgcaacgagcgcaacccttgttactagttgccatcatttagttgggcactctagcgagactgccggtgacaaaccggaggaaggtggggatgacgtcaaatcatcatgccccttatgacctgggctacacacgtgctacaatgggaagtacaacgagtcgctagaccgcgaggtcatgcaaatctcttaaagcttctctcagttcggattgcaggctgcaactcgcctgcatgaagccggaatcgctagtaatcgcggatcagcacgccgcggtgaatacgttcccgggccttgtacacaccgcccgtcacaccacgagagtttgtaacacccgaagtaagagaggtaacctttttggagccagccgcctaaggtggg

SEQ ID NO: 1015 - DNA, 1450 bp, Artificial Sequence
  Synthetic polymer
agtttgatcctggctcaggacgaacgctggcggcgtgcctaacacatgcaagtcgaacggaactattttaaaagatttcttcggaatgattttggcttagtttagtggcggacgggtgagtaacgcgtgagtaacctgccttcaagagggggataacgttctgaaaaggacgctaataccgcataacatatcggaatcgcatggttctgatatcaaagattttatcgcttgaagatggactcgcgtccgattagttagttggtgaggtaacggctcaccaagactgcgatcggtagccggactgagaggttgaacggccacattgggactgagacacggcccagactcctacgggaggcagcagtgggggatattgcgcaatgggggcaaccctgacgcagcaacgccgcgtgaaggatgaaggttttcggattgtaaacttcttttcttaaggacgaaaattgacggtacttaaggaataagctccggctaactacgtgccagcagccgcggtaatacgtagggagcaagcgttgtccggatttactgggtgtaaagggtgcgtaggcggcaatgcaagtcagatgtgaaatctatgggctcaacccataaactgcatttgaaactgcgttgcttgagtgaagtagaggcaggcggaattccccgtgtagcggtgaaatgcgtagagatggggaggaacaccagtggcgaaggcggcctgctgggctttaactgacgctgaggcacgaaagcgtgggtagcaaacaggattagataccctggtagtccacgctgtaaacgatgattactaggtgtggggggtctgaccccttccgtgccggagttaacacaataagtaatccacctggggagtacggccgcaaggttgaaactcaaaggaattgacgggggcccgcacaagcagtggagtatgtggtttaattcgaagcaacgcgaagaaccttaccaggtcttgacatccgactaacgaagtagagatacatcaggtgcccttcggggaaagtcgagacaggtggtgcatggttgtcgtcagctcgtgtcgtgagatgttgggttaagtcccgcaacgagcgcaacccttgctattagttgctacgcaagagcactctaataggactgccgttgacaaaacggaggaaggtggggacgacgtcaaatcatcatgccccttatgacctgggctacacacgtactacaatggccatcaacagagggaagcaaaacagcgatgtggagcaaacccctaaaaatggtctcagttcagattgcaggctgcaacccgcctgcatgaagtcggaattgctagtaatcgcggatcagcatgccgcggtgaatacgttcccgggccttgtacacaccgcccgtcacaccatgggagccggtaatacccgaagtcagtagtccaacctcgtgaggacgctgccgaagg

SEQ ID NO: 1016 - DNA, 1344 bp, Artificial Sequence
  Synthetic polymer
gacgaacgctggcggcgtgcctaacacatgcaagtcgagcggaagtatttgaggagcttgctttttggatactttagcggcggacgggtgagtaacgcgtgagtaacctggcctgtacagggggataacagttagaaatgactgctaataccgcataagaccacagtaccgcatggtacaggggtcaaagatttatcggtacaggatggactcgcgtcccattagctagttggcgggataacagcccaccaaggcgacgatgggtagccgacctgagagggtgatcggccacactgggactgagacacggcccagactcctacgggaggcagcagtggggaatattgggcaatgggcgcaagcctgacccagcaacgccgcgtgaaggaagaaggtcttcggattgtaaacttttgtcgccgggaacgataatgacggtacccggtaagaaagccccggctaactacgtgccagcagccgcggtaatacgtagggggcgagcgttgtccggaattactgggcgtaaagggcgcgtaggcggccggataagttagatgtgaaatccccgggctcaacctgggtgttgcatttaaaactgtctggcttgagtgcaggagaggaaagcggaattcctagtgtagcggtgaaatgcgtagatattaggaggaacatcagtggcgaaggcggctttctggactgtaactgacgctgaagcgcgagagcgtggggagcaaacaggattagatgccctggtagtccacgccgtaaaggatgaatactaggtgtaggggggtatcgaccccctctgtgcgcgcagcaaacgcaataagtattcccgcctggggagtacggccgcaaggttgaaactcaaaggaattgacgggggcccgcacaagcagcggagcatgtggtttaattcgacgcaacgcgaagaaccttaccaagacttgacatcctctgccgcatatagagagatgtgttcccttgggggcagagagacaggtggtgcatggttgtcgtcagctcgtgtcgtgagatgttgggttaagtcccgcaacgagcgcaacccttgtgaacagttgccagtattaagctaggaactgtgttcagactgccgtggacaacacggaggaaggtggggacgacgtcaaatcatcatgccccttacgtcttgggctacacacgtgctacaatggccgtaacagagggcagcgaaagggcaacctggagcgaatctcaaaaaaacggtctcagttcagattgtgggctgcaacccgcccacatgaagacggagttgctagtaatcgcggatcagcatgccgcggtgaatgcgttcccgggcct

SEQ ID NO: 1017 - DNA, 1347 bp, Artificial Sequence
  Synthetic polymer
gagtggcggacgggtgagtaacgcgtgggtaacctacctcatacagggggataacagttagagatgactgctaataccgcataagcgcacagtactgcatggtacagtgtgaaaaactccggtggtatgagatggacccgcgtctgattagctagttggtaaggtaacggcttaccaaggcgacgatcagtagccggcctgagagggtgaacggccacattggaactgagacacggtccaaactcctacgggaggcagcagtggggaatattgcacaatgggggaaaccctgatgcagcgacgccgcgtgagtgaagaagtatttcggtatgtaaagctctatcagcagggaagataatgacggtacctgactaagaagctccggctaaatacgtgccagcagccgcggtaatacgtatggagcaagcgttatccggatttactgggtgtaaagggtgcgtaggtggtatggcaagtcagaagtgaaaacccggggctcaaccccgtggattgcttttgaaactgtcaaactagagtacaggagaggtaagcggaattcctagtgtagcggtgaaatgcgtagatattaggaggaacaccagtggcgaaggcggcttactggactgaaactgacactgaggcacgaaagcgtggggagcaaacaggattagataccctggtagtccacgccgtaaacgatgaatactaggtgtcggggcctataaggcttcggtgccgcagcaaacgcaataagtattccacctggggagtacgttcgcaagaatgaaactcaaaggaattgacggggacccgcacaagcggtggagcatgtggtttaattcgaagcaacgcgaagaaccttaccaggtcttgacatcccactgaccgctctttaaccggagcttttctacggaacagtggtgacaggtggtgcatggttgtcgtcagctcgtgtcgtgagatgttgggttaagtcccgcaacgagcgcaacccctatttccagtagccagcagtaagatgggaactctggagagactgccggggataacccggaggaaggtggggacgacgtcaaatcatcatgccccttatgatctgggctacacacgtgctacaatggtgttcacaaagggaagcgaaactgtgaagtggagcaaaccccaaaaaggacatctcagttcggattgtagtctgcaactcgactacatgaagctggaatcgctagtaatcgcgaatcagaatgtcgcggtgaatacgttcccgagtcttgtacacaccgcccgtcacaccatgggagttgggaatgcccgaagccggtgacctaaccgaaaggaaggagccgtcga

SEQ ID NO: 1018 - DNA, 1335 bp, Artificial Sequence
  Synthetic polymer
gacgaacgctggcggcgtgcctaacacatgcaagtcgaacgaagaattgagagcttgcttttgattcttagtggcggacgggtgagtaacgcgtgagaaacctgcctgtcagagggggataacgtttggaaacgaacgctaataccgcatgacatatgcgaaccgcatggtttgcatatcaaaggagcaatccactgacagatggtctcgcgtccgattagctagttggcgggataacagcccaccaaggcgacgatcggtagccggactgagaggtcgaacggccacattgggactgagacacggcccagactcctacgggaggcagcagtgggggatattgcacaatggaggaaactctgatgcagcaacgccgcgtgagggaagaaggatttcggtttgtaaacctctgtcttcggtgacgaaaatgacggtagccgaggaggaagctccggctaactacgtgccagcagccgcggtaatacgtagggagcaagcgttgtccggaattactgggtgtaaagggtgcgtaggcgggactgcaagtcaggtgtgaaaacggtcggctcaaccgatcgcctgcacttgaaactgtggttcttgagtgaagtagaggtaggcggaattcccggtgtagcggtgaaatgcgtagagattgggaggaacaccagtggcgaaggcggcctactgggctttaactgacgctgaggcacgaaagcatgggtagcaaacaggattagataccctggtagtccatgccgtaaacgatgattactaggtgtgggtggtctgaccccatccgtgccggagttaacacaataagtaatccacctggggagtacggccgcaaggttgaaactcaaaggaattgacgggggcccgcacaagcagtggagtatgtggtttaattcgacgcaacgcgaagaaccttaccaggtcttgacatcccaagaacgaacaagagattgattggtgcccttcggggagcttggagacaggtggtgcatggttgtcgtcagctcgtgtcgtgagatgttgggttaagtcccgcaacgagcgcaacccttgtcattagttgctacgcaagagcactctaatgagactgccgttgacaaaacggaggaaggtggggacgacgtcaaatcatcatgccctttatgacctgggctacacacgtactacaatggccgttaacaacgggacgcgaagccgcgaggcggagcaaaacctcaaaaacggtctcagttcagattgtaggctgcaactcgcctatatgaagtcggaattgctagtaatcgcggatcagcatgccgcggtgaatacgttcccgggcct

SEQ ID NO: 1019 - DNA, 1327 bp, Artificial Sequence
  Synthetic polymer
gacgaacgctggcggcacgcctaacacatgcaagtcgagcggagaattggacttcggtttaattcttagcggcggacgggtgagtaacacgtgagcaacctgcctttaagagagggatagcttctggaaacggatggtaatacctcataaaatatgtttatcgcatggtagacatatcaaagatttatcgcttagagatgggctcgcgtctgattagatagttggtggggtaacggctcaccaagtcgacgatcagtagccggactgagaggttgaacggccacattgggactgagacacggcccagactcctacgggaggcagcagtgggggatattgcacaatggagggaactctgatgcagcgatgccgcgtggaggaagaaggttttcggattgtaaactcctgtctccaaggacgataatgacggtacttggggaggaagctccggctaactacgtgccagcagccgcggtaatacgtagggagcgagcgttgtccggaattactgggtgtaaagggagtgtaggcgggaatgcaagtcagatgtgaaaactatgggcttaacccatagactgcatttgaaactgtgtttcttgagtgaagtagaggtaagcggaattcctagtgtagcggtgaaatgcgtagatattaggaggaacatcagtggcgaaggcggcttactgggcttttactgacgctgaggctcgaaagcgtggggagcaaacaggattagataccctggtagtccacgctgtaaacgatgattactaggtgtggggggactgacccctcccgtgccgcagttaacacaataagtaatccacctggggagtacggccgcaaggttgaaactcaaaggaattgacgggggcccgcacaagcagtggagtatgtggtttaattcgaagcaacgcgaagaaccttaccaggtcttgacatcgcatgcattacccagagatggggaaatccttcgggacatgcagacaggtggtgcatggttgtcgtcagctcgtgtcgtgagatgttgggttaagtcccgcaacgagcgcaacccttacctttagttgctacgcaagagcactctaaagggactgccgttgacaaaacggaggaaggtggggatgacgtcaaatcatcatgccccttatgacctgggctacacacgtactacaatggcaattaacagagggaagcaaaatggtgacatggagcaaaaccccaaaaattgtctcagttcagattgtaggctgcaactcgcctacatgaagtcggaattgctagtaatcgcaggtcagcatactgcggtgaatacgttcccgggcct

SEQ ID NO: 1020 - DNA, 1334 bp, Artificial Sequence
  Synthetic polymer
gatgaacgctggcggcgtgcttaacacatgcaagtcgaaacgaattaaacccgccctcgggcggttatagagaggcgaaacgggtgagtaacacgtgaccaacctgccccctttcaccgggataacccagggaaacctcggctaataccggatactccgggacccccgcatgggggtcccgggaaagcccaggcggcaaggggatggggtcgcggcccattaggtagacggcggggtaacggcccaccgtgcccgcgatgggtagccgggttgagagaccgatcggccacattgggactgagatacggcccagactcctacgggaggcagcagtggggaattttgcgcaatgggggaaaccctgacgcagcaacgccgcgtgcgggacgacggccttcgggttgtaaaccgctttcagcagggaataattttgaaggtacctgcagaagaagctccggctaactacgtgccagcagccgcggtaatacgtagggagcgagcgttatccggaatcattgggcgtaaagcgcgcgtaggcggcccgtcaagcggggtttcaaatccaggggctcaacctctggccggaccccgaactggcgggctcgagtgcggtagaggaaggtggaattcccagtgtagcggtgaaatgcgcagatattgggaagaacaccgatggcgaaggcagccttctgggccgccactgacgctgaggcgcgaaagctaggggagcgaacaggattagataccctggtagtcctagccgtaaacgatgggcactaggtgtggggggacattccctccgtgccgcagcaaacgcattaagtgccccgcctggggagtacggccgcaaggctaaaactcaaaggaattgacgggggcccgcacaagcagcggagcatgtggcttaattcgaagcaacgcgaagaaccttaccagggcttgaaatgcaggtgaagcggcggaaacgccgtggccgagaggagcctgcacaggtggtgcatggctgtcgtcagctcgtgtcgtgagatgttgggttaagtcccgcaacgagcgcaacccctgtcgcgtgttgccagcattcagttggggactcgcgcgagactgccggcgtcaagccggaggaaggtggggacgacgtcaagtcatcatgccccttatgccctgggctgcacacgtgctacaatggccggtacaacgggctgcgacgccgcgaggcggagcgaatccctcaaagccggccccagttcggatcgcaggctgcaattcgcctgcgtgaagccggagttgctagtaatcgcggatcagcatgccgcggtgaatacgttcccgggcct

SEQ ID NO: 1021 - DNA, 1481 bp, Artificial Sequence
  Synthetic polymer
agagtttgattatggctcaggatgaacgctggcggcgtgcctaacacatgcaagtcgagcgagaaactcacgacggatacttcggttgaaggaatgagtggaaagcggcggacgggtgagtaacgcgtaggcaacctgcctcacacagagggatagccattggaaacgatgattaaaacctcataatgccattttatcacatgagaagatggccaaagatttatcggtgtgagatgggcctgcgtctgattagttagttggtgaggtaacggctcaccaaggcaacgatcagtagccgacctgagagggtgatcggccacattggaactgagacacggtccaaactcctacgggaggcagcagtggggaatattgcacaatgggcgaaagcctgatgcagcaacgccgcgtgaaggatgaaggctttcgggtcgtaaacttctgtccttggggaagaaaaaaatgacggtacccatggaggaagccccggctaactacgtgccagcagccgcggtaatacgtagggggcgagcgttatccggaattattgggcgtaaagagtgcgtaggtggttacctaagcgcagggtttaaggcaatggctcaaccattgttcgccttgcgaactgggctacttgagtgcaggagaggaaagcggaattcctagtgtagcggtgaaatgcgtagatattaggaggaacaccagtggcgaaggcggctttctggactgtaactgacactgaggcacgaaagcgtggggagcaaacaggattagataccctggtagtccacgccgtaaacgatgagcactaggtgtcggggtcgcaagacttcggtgccgcagttaacgcattaagtgctccgcctggggagtacgcacgcaagtgtgaaactcaaaggaattgacggggacccgcacaagcagcggagcatgtggtttaattcgaagcaacgcgaagaaccttaccagaacttgacatccttctgacaacaccttaatcggtgtcttccttcgggacagaagagacaggtggtgcatggttgtcgtcagctcgtgtcgtgagatgttgggttaagtcccgcaacgagcgcaacccttgtcattagttgccatcattaagttgggcactctagtgagactgccggggacaactcggaggaaggtggggatgacgtcaaatcatcatgccccttatgttctgggctacacacgtgctacaatggccggtacagaaagcagcgaaaccgcgaggtggagccaatctcaaaaaccggtcccagttcggactgcaggctgaaactcgcctgcacgaagttggagttgctagtaatcgcagatcagaatgctgcggtgaatgcgttcccgggtcttgtacacaccgcccgtcacaccacggaagttgggggtgcccgaagttggtcgagaaatagattacctaaggcaaaatcaatgactggggtgaagtcgtaacaaggtaaccg

SEQ ID NO: 1022 - DNA, 1333 bp, Artificial Sequence
  Synthetic polymer
gatgaacgctggcggcgtgcctaacacatgcaagtcgagcgatgaaaccgccctcgggcggacatgaagcggcgaacgggtgagtaacacgtgaccgacctgccccccgcccagggacagccccccgaaagggggattaatacctggtactccggaagcggcgcatgccgcgtccgggaaagccttggcggcgggggatggggtcgcggcccatcaggtagacggcggggcagaggcccaccgtgccgacgacgggtagccgggttgagagaccgaccggccacattgggactgagatacggcccagactcctacgggaggcagcagtggggaattttgcgcaatgggggcaaccctgacgcagcaacgccgcgtgcgggacgaaggcgtccgcgtcgtaaaccgctttcagcggggaacacttcaacgagggtacccgcagaagaagccccggctaaatacgtgccagcagccgcggtaatacgtatggggcgagcgttatccggattcattgggcgtaaagcgcgcgtaggcggagcgctaagcgggacctctaacccgagggctcaacccccggccgggtcccgaactggcgctctcgagtgcggtaggggagagcggaattcccggtgtagcggtggaatgcgcagatatcgggaggaacaccgacggcgaaggcagctctctgggccgaaactgacgctgaggcgcgaaagctgggggagcgaacaggattagataccctggtagtcccagccgtaaacgatgggcgctaggtgtgggggagaccatcctccgcgccgcagccaacgcgttaagcgccccgcctggggagtacggccgcaaggctaaaactcaaaggaattgacgggggcccgcacaagcagcggagcatgtggcttaattcgaagcaacgcgaagaaccttaccagggcttgacatcaccgtgaagcggcggagacgccgtggccggaaggagcggtgacaggtggtgcatggctgtcgtcagctcgtgccgtgaggtgttgggttaagtcccgcaacgagcgcaacccctgccccgtgttgccagcattcagttggggactcgcgggggaccgccggcgtcaagccggaggaaggcggggacgacgtcaagtcatcatgccccttatgccctgggccgcacacgtgctacaatggccggtacagagggttgccaccccgcgagggggagcggatcccgcaaaagccggccccagttcggatcggaggctgcaaacccgcctccgtgaaagccggagttgctagtaatcgcggatcagcacgccgcggtaaatacgttcccgggcct

SEQ ID NO: 1023 - DNA, 1365 bp, Artificial Sequence
  Synthetic polymer
ataccgaatgtgacagtttttctcgcatgagattactgtgaaaagatggcctctatttataagctatcgctaaaggatgggctgcgtctgattagctagttggtggggtaacggcctaccaaggcgatgatcagtagccggtctgagaggatgaacggccacattgggactgagacacggcccagactcctacgggaggcagcagtggggaatcttccgcaatgggcgaaagcctgacggagcaatgccgcgtgagtgatgaaggaattcgttccgtaaagctcttttgtttatgacgaatgtgcagactgtgaataatggtttgtaatgacggtagtaaacgaataagccacggctaactacgtgccagcagccgcggtaatacgtaggtggcgagcgttgtccggaattattgggcgtaaagagcatgtaggcggttttttaagtccggagtgaaaatgcggggctcaaccccgtatggctctggatactggaagacttgagtgcaggagaggaaaggggaattcccagtgtagcggtgaaatgcgtagatattgggaggaacaccagtggcgaaggcgcctttctggactgtgtctgacgctgagatgcgaaagccagggtagcgaacgggattagataccccggtagtcctggccgtaaacgatgggtactaggtgtaggaggtatcgaccccttctgtgccggagttaacgcaataagtaccccgcctggggagtacgtccgcaaggatgaaactcaaaggaattgacgggggcccgcacaagcggtggagtatgtggtttaattcgacgcaacgcgaagaaccttaccaaggcttgacattgagtgaccgctctagagatagagctttcccttcggggacacgaaaacaggtggtgcatggctgtcgtcagctcgtgtcgtgagatgttgggttaagtcccgcaacgagcgcaacccctatcctatgttaccagcacgtaatggtggggactcataggagactgccaaggacaacttggaggaaggcggggatgacgtcaagtcatcatgccccttatgtcttgggctacacacgtactacaatggtcgacaacagagggaagcgaagccgcgaggcagagcaaaccccagaaactcgatctcagttcggatcgcaggctgcaacccgcctgcgtgaagtcggaatcgctagtaatcgcaggtcagcatactgcggtgaatacgttcccgggccttgtacacaccgcccgtcacaccacgaaagttggtaacacccgaagccggtggggtaacctattaggagccagccgtctaaggtggggccgatgattggggtgaagtcgtaacaaggtaaccgta

SEQ ID NO: 1024 - DNA, 1426 bp, Artificial Sequence
  Synthetic polymer
tagcggcggacgggtgagtaacacgtgggcaacctgcctcatagaggggaatagcctcccgaaagggagattaataccgcataagattgtagcttcgcatgaagtagcaattaatggagcaatccgctatgagatgggcccgcggcgcattagctagttggtgaggtaacggctcaccaaggcgacgatgcgtagccgacctgagagggtgatcggccacattgggactgagacacggcccagactcctacgggaggcagcagtggggaatattgcacaattgggggaaaccctgatgcagcaacgccgcgtgagtgatgacggccttcgggttgtaaagctctgtcttcagggacgataatgacggtacctgaggaggaagccacggctaactacgtgccagcagccgcggtaatacgtaggtggcgagcgttgtccggatttactgggcgtaaagggagcgtaggcggactttttagtgagatgtgaaatacccgggctcaacttgggtgctgcatttcaaactggaagtctagagtgcaggagaggagaatggaattcctagtgtagcggtgaaatgcgtagagattaggaagaacaccagtggcgaaggcgattctctggactgtaactgacgctgaggctcgaaagcgtggggagcaaacaggattagataccctggtagtccacgccgtaaacgatgaatactaggtgtaggggttgtcatgacctctgtgccgccgctaacgcattaagtattccgcctggggagtacggtcgcaagattaaaactcaaaggaattgacgggggcccgcacaagcagcggagcatgtggtttaattcgaagcaacgcgaggaaccttacctagacttgacatctcctgaattacccataactggggaagtcgcttcggcgacaggaagacaggtggtgcatggttgtcgtcagctcgtgtcgtgagatgttgggttaagtcccgcaacgagcgcaacccctattgttagttgctaccattaagttgagcactctagcgagactgcccgggttaaccgggaggaaggtggggatgacgtcaaatcatcatgcccgttatgtctagggctacacacgtgctacaatggcaagtacaaagagaagcaagaccgcgaggtggagcaaaactcaaaaacttgtctcagttcggattgtaggctgaaactcgcctacatgaagctggagttgctagtaatcgcgaatcagcatgtcgcggtgaatacgttcccgggccttgtacacaccgcccgtcacaccatgagagttggcaatacccaaagtgcgtgatctgactcgcaagagaggaagcgccctaaggtagggtaagcgattggggtgaagtcgtaacaaggtagccgtaggagaacctgcggctggatcacctcctttct

SEQ ID NO: 1025 - DNA, 1400 bp, Artificial Sequence
  Synthetic polymer
agtcgaacggagcttcttggatagagacttcggtcaattgaattgaagcttagtggcggactggtgagtaacgcgtgaggaacctgcctttcagagggggacaacagttggaaacggctgctaataccgcatgatgtatcggagctgcatggttttgataccaaagattttatcgctgaaagatggcctcgcgtctgattagctagttggtgaggtaacggcccaccaaggcgacgatcagtagccggactgagaggttgaccggccacattgggactgagatacggcccagactcctacgggaggcagcagtggggaatattgggcaatggacgcaagtctgacccagcaacgccgcgtgaaggaagaaggctttcgggttgtaaacttcttttaagggggaagagtagaagacggtaccccttgaataagccacggctaactacgtgccagcagccgcggtaatacgtaggtggcaagcgttgtccggatttactgggtgtaaagggcgtgcagccgggtctgcaagtcagatgtgaaatctaggggctcaactcctaaactgcatttgaaactgtagatcttgagtgccggagaggtaatcggaattccttgtgtagcggtgaaatgcgtagatataaggaagaacaccagtggcgaaggcggattactggacggtaactgacggtgaggcgcgaaagcgtggggagcaaacaggattagataccctggtagtccacgctgtaaacgatcaatactaggtgtgcggggactgaccccctgcgtgccgcagttaacacaataagtattgcacctggggagtacgatcgcaaggttgaaactcaaaggaattgacgggggcccgcacaagcggtggattatgtggtttaattcgaagcaacgcgaagaaccttaccagggcttgacatcctactaacgaagtagagatacattaggtgcccttcggggaaagtagagacaggtggtgcatggttgtcgtcagctcgtgtcgtgagatgttgggttaagtcccgcaacgagcgcaacccctattgttagttgctacgcaagagcactctagcgagactgccgttgacaaaacggaggaaggtggggacgacgtcaaatcatcatgccccttatgtcctgggctacacacgtaatacaatggcggttaacagagggatgcaaatccgcgaggaggagcgaacccccaaaagccgtctcagttcggatcgcaggctgcaacccgcctgcgtgaagtcggaatcgctagtaatcgcggatcagcatgccgcggtgaatacgttcccgggccttgtacacaccgcccgtcacaccatgagagtcgggaacacccgaagtccgtagtctaaccgcaagggggacgcggccgaagg

SEQ ID NO: 1026 - DNA, 1840 bp, Artificial Sequence
  Synthetic polymer
acacatgcaagtcgagcggtaacaggagaaagcttgctttcttgctgcgagcggcggacgggtgagtaatgtatggggatctgcccgatagagggggataactactggaaacggtggctaataccgcataatgtctacggaccaaagcaggggctcttcggaccttgcactatcggatgaacccatatgggattagctagtaggtggggtaaaggctcacctaggcgacgatctctagctggtctgagaggatgatcagccacactgggactgagacacggcccagactcctacgggaggcagcagtggggaatattgcacaatgggcgcaagcctgatgcagccatgccgcgtgtatgaagaaggccttagggttgtaaagtactttcagcggggaggaaggtgataaggttaatacccttatcaattgacttacccgcagaagaagcaccggctaactccgtgccagcagccgcggtaatacggagggtgcaagcgttaatcggaattactgggcgtaaagcgcacgcaggcggtcaattaagtcagatgtgaaagccccgagcttaacttgggaattgcatctgaaactggttggctagagtcttgtagaggggggtagaattccatgtgtagcggtgaaatgcgtagagatgtggaggaataccggtggcgaaggcggccccctggacaaagactgacgctcaggtgcgaaagcgtggggagcaaacaggattagataccctggtagtccacgctgtaaacgatgtcgatttagaggttgtggtcttgaaccgtggcttctggagctaacgcgttaaatcgaccgcctggggagtacggccgcaaggttaaaactcaaatgaattgacgggggcccgcacaagcggtggagcatgtggtttaattcgatgcaacgcgaagaaccttacctactcttgacatccagcgaatcctttagagatagaggagtgccttcgggaacgctgagacaggtgctgcatggctgtcgtcagctcgtgttgtgaaatgttgggttaagtcccgcaacgagcgcaacccttatcctttgttgccagcacgtgatggtgggaactcaaaggagactgccggtgataaaccggaggaaggtggggatgacgtcaagtcatcatggcccttacgagtagggctacacacgtgctacaatggcagatacaaagagaagcgacctcgcgagagcaagcggaactcataaagtctgtcgtagtccggattggagtctgcaactcgactccatgaagtcggaatcgctagtaatcgtagatcagaatgctacggtgaataaatgcaagtcgtacggccccttcagagttcttggcctcctggtgagtaatgcctgggagcttgcttttatgttcgaacttgccccttgaaaggggagaacttctcgaaagagtggctaataccgaatacgccctaggggggaaagggggggatcgcaagacctctcactattgaagcggccctctcaaagcgatattggaggggtaaaggctcagatgagcaaccacactgggactgatagcggcccaaactcctacgggaggcctgagtggggaaccttgctccatggggaaaagcctgaggggaatttgccgcgtgaatgatgaaggtcttaggattgtaaaattctttcaccggggacgataatgactgtacccggataagaagccccggccgttcccgggccttgtacacaccgcccgtccacaccatgggagtgggttgcaaaagaagggggtagcttaaccttcgggagggcgcttaccacttttgtgattcatgactggggtgaagt

SEQ ID NO: 1027 - DNA, 1459 bp, Artificial Sequence
  Synthetic polymer
tggctcaggatgaacgctagcggcaggcttaacacatgcaagtcgaggggcagcataatggatagcaatatctatggtggcgaccggcgcacgggtgcgtaacgcgtatgcaacctacctttaacagggggataacactgagaaattggtactaataccccataatatcatagaaggcatcttttatggttgaaaattccgatggttagagatgggcatgcgttgtattagctagttggtggggtaacggctcaccaaggcgacgatacatagggggactgagaggttaaccccccacactggtactgagacacggaccagactcctacgggaggcagcagtgaggaatattggtcaatggacgcaagtctgaaccagccatgccgcgtgcaggatgacggctctatgagttgtaaactgcttttgtacgagggtaaacgcagatacgtgtatctgtctgaaagtatcgtacgaataaggatcggctaactccgtgccagcagccgcggtaatacggaggattcaagcgttatccggatttattgggtttaaagggtgcgtaggcggtttgataagttagaggtgaaatttcggggctcaaccctgaacgtgcctctaatactgttgagctagagagtagttgcggtaggcggaatgtatggtgtagcggtgaaatgcttagagatcatacagaacaccgattgcgaaggcagcttaccaaactatatctgacgttgaggcacgaaagcgtggggagcaaacaggattagataccctggtagtccacgcagtaaacgatgataactcgttgtcggcgatacacagtcggtgactaagcgaaagcgataagttatccacctggggagtacgttcgcaagaatgaaactcaaaggaattgacgggggcccgcacaagcggaggaacatgtggtttaattcgatgatacgcgaggaaccttacccgggcttgaaagttagcgacgattcttgaaagaggatttcccttcggggcgcgaaactaggtgctgcatggttgtcgtcagctcgtgccgtgaggtgtcgggttaagtcccataacgagcgcaacccctaccgttagttgccatcaggtcaagctgggcactctggcgggactgccggtgtaagccgagaggaaggtggggatgacgtcaaatcagcacggcccttacgtccggggctacacacgtgttacaatggtaggtacagagggcagctacccagcgatgggatgcgaatctcgaaagcctatctcagttcggattggaggctgaaacccgcctccatgaagttggattcgctagtaatcgcgcatcagcatgctgcggtgaatacgttcccgggccttgtacacaccgcccgtcacaccatgagagccggggggacccgaagtcggtagtctaaccgcaaggaggacgccgccgaaggtaaaactggtgatt

SEQ ID NO: 1028 - DNA, 1426 bp, Artificial Sequence
  Synthetic polymer
gcttaacacatgcaagtcgaacggacggattggagcttgctccatgaagttagtggcggacgggtgagtaacgcgtgggtaacctgccctatgcagggggataacgtttggaaacgaacgctaataccgcataacctagttggttcgcatgaaccgactagcaaagattttatcggcataggatggacccgcgttggattagctagttggtgagataacagcccaccaaggcaacgatccatagccggcctgagagggtgaacggccacactgggactgagacacggcccagactcctacgggaggcagcagtggggaatattgcacaatgggcgcaagcctgatgcagcgacgccgcgtgaaggatgaaggtcttcggatcgtaaacttctatcagcagggaagaaaccatgacggtacctgactaagaagccccggctaactacgtgccagcagccgcggtaatacgtagggggcaagcgttatccggaattactgggtgtaaagggtgcgtaggcggacttttaagtgagatgtgaaatacccaggctcaacttgggtgctgcatttcaaactggaagtctagagtgcaggagaggagaatggaattcctagtgtagcggtgaaatgcgtagagattaggaagaacaccagtggcgaaggcgactttctggactgtaactgacgctgaggctcgaaagcgtggggagcaaacaggattagataccctggtagtccacgccgtaaacgatgaatactaggtgtaggggttgtcatgacctctgtgccgccgctaacgcattaagtattccgcctggggagtacggtcgcaagattaaaactcaaaggaattgacgggggcccgcacaagtagcggagcatgtggtttaattcgaagcaacgcgaagaaccttacctagacttgacatctcctgaattaccatgtaatgtgggaagtcccttcggggacaggaagacaggtggtgcatggttgtcgtcagctcgtgtcgtgagatgttgggttaagtcccgcaacgagcgcaacccttattgttagttgctaccatttagttgagcactctagcgagactgcccgggttaaccgggaggaaggtggggatgacgtcaaatcatcatgccccttatgtctagggctacacacgtgctacaatggccggtacaacgagatgcaataccgtgaggtggagcaaaactataaaaccggtctcagttcggattgtaggctgaaactcgcctacatgaagctggagttactagtaatcgcgaatcagaatgtcgcggtgaatacgttcccgggccttgtacacaccgcccgtcacaccatgagagttagcaatacccaaagttggtgatctaacccgtaagggaggaagccacctaaggtagggtcagcgattggggtgaa

SEQ ID NO: 1029 - DNA, 1436 bp, Artificial Sequence
  Synthetic polymer
  misc_feature (768)..(768): n is a, c, g, or t
tggcggcgcgcctaacacacgcaagtcgaacgaagcttgattacggattcttcggatgaagtatgatatgactgagtggcggacgggtgagtaacgcgtgagtaacctgcccttcagagggggatagcgtttggaaacgaacggtaataccgcataatgtattttgaccgcatgatcgaaataccaaagatttatcgctgaaggatggactcgcgtctgattaggtagttggtggggtaacggcctaccaagccgacgatcagtagccggactgagaggttgatcggccacattgggactgagacacggcccagactcctacgggaggcagccgtggggaatattgcacaatgggcgcaagcctgatgcagcaacgccgcgtgaaggaagacggttttcggattgtaaacttctgttcttagtgaagaataatgacggtagctaaggagcaagccacggctaactacgtgccagcagccgcggtaatacgtaggtggcaagcgttgtccggatttactgggtgtaaagggcgcgtaggcggactgtcaagtcagtcgtgaaataccggggcttaaccccggggctgcgattgaaactgacagccttgagtatcggagaggaaagcggaattcctagtgtagcggtgaaatgcgtagatattaggaggaacaccagtggcgaaggcggctttctggacgacaactgacgctgaggcgcggaagtgtggggagcaaacaggattagataccctggtagtccacaccgtanacgatggatactaggtgtaggaggtatcgaccccttctgtgccgcagttaacacaataagtatcccacctggggagtacgaccgcaaggttgaaactcaaagggaattgacgggggcccgcacaagcagtggagtatgtggtataatttgaagcaacgcgaagaaccttacctgggcttgtcatccctggaatagagttgagatacttgagtgccttcgggaatcaggagacaggtggtgcatggttgtcgtccgctcgtgtcgtgagatgttgggttaagtctcgcaacgagagcaacccctattgtcagttgccatcattaagtagggcactctggcgagactgccggtgacaaatcggaggaaggtggggacgacgtcaaatcatcatgccccttatgcccagggctacacacgtcctacaatggacgataacaaagtgcagagaaaccgtgaggtggagcgaatcacaaaactcggtctcagttcagattgcaggctgcaactcgcctgcatgaagttggaattgctagtaatcgcggatcagaatgccgcggtgaatacgttcccgggccttgtacacaccgcccgtcacaccatgagagtcgataacacccgaagcctgtgagctaaccgaaaagaggcagcagtcgaaggtggggttgatg

SEQ ID NO: 1030 - DNA, 1441 bp, Artificial Sequence
  Synthetic polymer
acgaacgctggcggcgtgcctaacacatgcaagtcgaacggggttgtaagagcttgcttttgcaacctagtggcggacgggtgagtaacgcgtgagtaacctgccttacagagggggataacgtctggaaacggacgctaataccgcatgacatataattaccgcatggtaaagatatcaaaggagcaatccgctgtaagatggactcgcgtccgattagctagttggaggggtaacggcccaccaaggcgacgatcggtagccggactgagaggtcgaacggccacattgggactgagacacggcccagactcctacgggaggcagcagtgggggatattgcacaatgggggaaaccctgatgcagcaacgccgcgtgagggaagacggttttcggattgtaaacctctgtcatcggtgacgataatgacggtagccgatgaggaagctccggctaactacgtgccagcagccgcggtaatacgtagggagcgagcgttgtccggaattactgggtgtaaagggtgcgtaggcgggcagtcaagtcaggcgtgaaacctatgggcttaacccatagcctgcgtttgaaactgattgtcttgagtgaagtagaggtaagcggaattcccggtgtagcggtgaaatgcgtagagatcgggaggaacaccagtggcgaaggcggcttactgggcttttactgacgctgaggcacgaaagcatgggtagcaaacaggattagataccctggtagtccatgccgtaaacgatgattactaggtgtggggggactgaccccttccgtgccggagttaacacaataagtaatccacctggggagtacggccgcaaggttgaaactcaaaggaattgacgggggcccgcacaagcagtggagtatgtggtttaattcgaagcaacgcgaagaaccttaccagctcttgacatccgactaacgaagcagagatgcattaggtgcccttcggggaaagtcgagacaggtggtgcatggttgtcgtcagctcgtgtcgtgaaatgttgggttaagtcccgcaacgagcgcaacccttgtgattagttgctacgcgagagcactctagtcagactgccgttgacaaaacggaggaaggtggggacgacgtcaaatcatcatgccccttatgagctgggctacacacgtactacaatggccgccaacagagggaagcaaagccgcgaggcagagcaaaaccctaaaagcggtctcagttcagattgcaggctgcaacccgcctgcatgaagtcggaattgctagtaatcgcggatcagcatgccgcggtgaatacgttcccgggccttgtacacaccgcccgtcacaccatgggagccggtaatacccgaagtcagttgcctaaccgcaaggggggcgctgccgaaggtaggattggcgactggggtgaagtc

SEQ ID NO: 1031 - DNA, 1381 bp, Artificial Sequence
  Synthetic polymer
gacgagcggcggacgggtgagtaatgtctgggaaactgcctgatggagggggataactactggaaacggtagctaataccgcataacgtcgcaagaccaaagtgggggaccttcgggcctcatgccatcagatgtgcccagatgggattagctagtaggtggggtaatgtcgcacctatgcggcgatccctagctggtctgagaggatgaccagccacactggaactgagacacggtccagactcctacgggaggcgacagtggggaatattgcagatggtgcgccagcttgatgcagccgtgccgcgtggatgatgaatgccttccttttgtaaagtactttcagcgaggaggaaggcgttaaggttaataaccttagtgattgacgtactcgcagaagaagcaccggctaactccgtgccagcagccgcggtaatacggagggtgcaagcgttaatcggaattactgggcgtaaagcgcacgcaggcggtctgttaagtcagatgtgaaatccccgggctcaacctgggaactgcatttgaaactggcaggcttgagtcttgtagaggggggtagaattccaggtgtagcggtgaaatgcgtagagatctggaggaataccggtggcgaaggcggccccctggacaaagactgacgctcaggtgcgaaagcgtggggagcaaacaggattagataccctggtagtccacgctgtaaacgatgtcgacttggaggttgttcccttgaggagtggcttccggagctaacgcgttaagtcgaccgcctggggagtacggccgcaaggttaaaactcaaatgaattgacgggggcccgcacaagcggtggagcatgtggtttaattcgatgcaacgcgaagaaccttacctactcttgacatccagagaacttagcagagatgctttggtgccttcgggaactctgagacaggtgctgcatggctgtcgtcagctcgtgttgtgaaatgttgggttaagtcccgcaacgagcgcaacccttatcctttgttgcagaggttgcgcccgggaactcaaaggagactgccagtgataaactggaggaaggtggggatgacgtcaagtcatcatggcccttacgagtagggctacacacgtgctacaatggcatatacaaagagaagcgacctcgcgagagcaagcggacctcataaagtatgtcgtagtccggattggagtctgcaactcgactccatgaagtcggaatcgctagtaatcgtagatcagaatgctacggtgaatacgttcccgggccttgtacacaccgcccgtcacaccatgggagtgggttgcaaaagaagtaggtagcttaaccttcgggagggcgcttaccactttgtgatt

SEQ ID NO: 1032 - DNA, 1427 bp, Artificial Sequence
  Synthetic polymer
ctgtcggcgcgcctaacacatgcaagtcgaacgagccgaggggagcttgctccccagagctagtggcggacgggtgagtaacacgtgagcaacctgcctttcagagggggataacgtttggaaacgaacgctaataccgcataacataccgggaccgcatgattctggtatcaaaggagcaatccgctgaaagatgggctcgcgtccgattagctagttggcggggtaacggcccaccaaggcgacgatcggtagccggactgagaggttgatcggccacattgggactgagacacggcccagactcctacgggaggcagcagtgggggatattgcacaatggaggaaactctgatgcagcgacgccgcgtgagggaagacggtcttcggattgtaaacctctgtctttggggacgataatgacggtacccaaggaggaagctccggctaactacgtgccagcagccgcggtaatacgtagggagcgagcgttgtccggaattactgggtgtaaagggagcgtaggcggggtctcaagtcgaatgttaaatctactggctcaactggtagctgcgttcgaaactggggctcttgagtgaagtagaggcaggcggaattcctagtgtagcggtgaaatgcgtagatattaggaggaacaccagtggcgaaggcggcctgctgggcttttactgacgttgaggctcgaaagcgtggggagcaaacaggattagataccctggtagtccacgcggtaaacgatgaatgctaggtgttggggagcaaagctcttcggtgccgtcgcagacgcaataagcattccacctggggagtacgttcgcaagaatgaaactcaaaggaattgacggggacccgcacaagcggtggagcatgtggtttaattcgaagcaacgcgaagaaccttaccaagtcttgacatccttctggccggtacgtaacggtaccttctcttcggagcaggagtgacaggtggtgcatggttgtcgtcagctcgtgtcgtgagatgttgggttaagtcccgcaacgagcgcaacccttatccttagtagccagcagtaagatgggcactctagggagactgccagggataacctggaggaaggtggggatgacgtcaaatcatcatgccccttatgatttgggctacacacgtgctacaatggcgtaaacaaagggaagcgaagccgcgaggtgaagcaaatcccaaaaataacgtcccagttcggattgtaggctgcaactcgcctgcatgaagctggaatcgctagtaatcgcgaatcagaatgtcgcggtgaatacgttcccgggtcttgtacacaccgcccgtcacaccatgggagtcgataacgcccgaagtcagtgacccaaccgcaaggagggagctgccgaaggcgggattgataactggg

SEQ ID NO: 1033 - DNA, 1532 bp, Artificial Sequence
  Synthetic polymer
tacaatggagagtttgatcctggctcaggataaacgctagcggcaggcctaacacatgcaagtcgaggggcagcgggtggagtatttcggtactcctgccggcgaccggcgcacgggtgcgtaacgcgtatgcaacctacctttaacagggggataatccgaagaaatttggtctaataccccataatatcatttaaggcatcttagatggttgaaaattccgatggttagagatgggcatgcgttgtattagctagttggtgaggtaacggctcaccaaggctacgatacatagggggactgagaggttttccccccacactggtactgagacacggaccagactcctacgggaggcagcagtgaggaatattggtcaatggacgcaagtctgaaccagccatgccgcgtgcaggatgaaggtgctatgcattgtaaactgcttttgtacgagggtaaatgcaggtacgtgtacctgtttgaaagtatcgtacgaataagggtcggctaactccgtgccagcagccgcggtaatacggaggacccgagcgttatccggatttattgggtttaaagggtgcgtaggcggattagtaagttagaggtgaaagctcgatgctcaacatcgaaattgcctctgatactgttagtctagagtatagttgcggaaggcggaatgtgtggtgtagcggtgaaatgcttagatatcacacagaacaccgattgcgaaggcagctttccaagctattactgacgctgatgcacgaaagcgtggggagcgaacaggattagataccctggtagtccacgccgtaaacgatgataactcgttgcaggcgatacacagtctgtgacttagcgaaagcgttaagttatccacctggggagtacgttcgcaagaatgaaactcaaaggaattgacgggggcccgcacaagcggaggaacatgtggtttaattcgatgatacgcgaggaaccttacccgggcttgaaagttagcgacggatcctgaaaggggtcttctcttcggagcgcgaaactaggtgctgcatggttgtcgtcagctcgtgccgtgaggtgtcgggttaagtcccataacgagcgcaacccctactgttagttaccagcacgtcaaggtgggcactctagcaggactgccggtgtaagccgagaggaaggtggggatgacgtcaaatcagcacggcccttacgtccggggcgacacacgtgttacaatggtcggtacagagggtcgctaccccgtgaggggatgccaatctcgaaagccgatctcagttcggattggaggctgaaactcgcctccatgaagttggattcgctagtaatcgcgcatcagccatggcgcggtgaatacgttcccgggccttgtacacaccgcccgtcaagccatgggagttgggggtgcctgaagtacgtgaccgcaaggagcgtcctagggcaaaaccgatgactggggctaagtcgtaacaaggtagccgtaccggaaggtgcggctggaacacctcctttct

SEQ ID NO: 1034 - DNA, 1454 bp, Artificial Sequence
  Synthetic polymer
gaacgctggcggcgtgcttaacacatgcaagtcgaacgaaacaccttatttgattttcttcggaactgaagatttggtgattgagtggcggacgggtgagtaacgcgtaggcaacctgccttatgcagagggatagccattggaaacgatgattaaaacctcataaagccattttatcacatggtgagatggtcaaagatttatcggcataagatgggcctgcgtctgattagctagttggtggggtaacggcctaccaaggcgacgatcagtagccgacctgagagggtgatcggccacattggaactgagacacggtccaaactcctacgggaggcagcagtggggaatattgcacaatgggcgaaagcctgatgcagcaacgccgcgtgaaggaagaaggtcttcggatcgtaaacttctgtccttggggaagataatgacggtacccttggaggaagccccggctaactacgtgccagcagccgcggtaatacgtagggggcaagcgttatccggaattattgggcgtaaagagtgcgtaggtggttacctaagcagggggtgaaaggcactggcttaaccaatgtcagccccctgaactgggtaccttgagtgcaggagaggaaagcggaattcctagtgtagcggtgaaatgcgtagatattaggaggaacaccagtggcgaaggcggcttactggactgtaactgacgttgaggctggaaagcgtggggagcaaacaggattagataccctggtagtccacgcggtaaacgatgattgctaggtgtaggtgggtatggacccatcggtgccgcagctaacgcaataagcaatccacctggggaggtacgttcgcaagaatgaaactcaaaggaattgacggggacccgcacaagcggtggagcatgtggtttaattcgaagcaacgcgaagaaccttaccaagtcttgacatcccaatgacgcacctgtaaagaggtgttcccttcggggcattggagacaggtggtgcatggttgtcgtcagctcgtgtcgtgagatgttgggttaagtcccgcaacgagcgcaacccttattcttagtagccagcaggtaaagctgggcactctaaggagactgccggggataacccggaggaaggcggggatgacgtcaaatcatcatgccccttatgatttgggctacacacgtgctacaatggcgtaaacaaagggaagcgagacagtgatgtggagcaaatcccagaaataacgtctcagttcggattgtagtctgcaactcgactacatgaagctggaatcgctagtaatcgcgaatcagcatgtcgcggtgaatacgttcccgggtcttgtacacaccgcccgtcacaccatgggagttggaaatgcccgaagtctgtgacctaaccgaaagggaggagcagccgaaggcaggtctgataactggggtg

SEQ ID NO: 1035 - DNA, 1488 bp, Artificial Sequence
  Synthetic polymer
agagtttgatcctggctcagattgaacgctggcggcaggcctaacacatgcaagtcgaacggtagcacagagagcttgctctcgggtgacgagtggcggacgggtgagtaatgtctgggaaactgcctgatggagggggataactactggaaacggtagctaataccgcataacgtcgcaagaccaaagagggggaccttcgggcctcttgccatcagatgtgcccagatgggattagctagtaggtggggtaacggctcacctaggcgacgatccctagctggtctgagaggatgaccagccacactggaactgagacacggtccagactcctacgggaggcagcagtggggagtattgcacaatgggcgcaagcctgatgcagccatgccgcgtgtatgaagaaggccttcgggttgtaaagtactttcagcggggaggaaggtgttgtggttaataaccacagcaattgacgttacccgcagaagaagcaccggctaactccgtgccagcagccgcggtaatacggagggtgcaagcgttaatcggaattactgggcgtaaagcgcacgcaggcggtctgtcaagtcggatgtgaaatccccgggctcaacctgggaactgcattcgaaactggcaggctagagtcttgtagaggggggtagaattccaggtgtagcggtgaaatgcgtagagatctggaggaataccggtggcgaaggcggccccctggacaaagactgacgctcaggtgcgaaagcgtggggagcaaacaggattagataccctggtagtccacgccgtaaacgatgtcgacttggaggttgtgcccttgaggcgtggcttccggagctaacgcgttaagtcgaccgcctggggagtacggccgcaaggttaaaactcaaatgaattgacgggggcccgcacaagcggtggagcatgtggtttaattcgatgcaacgcgaagaaccttacctactcttgacatccagagaactttccagagatggattggtgccttcgggaactctgagacaggtgctgcatggctgtcgtcagctcgtgttgtgaaatgttgggttaagtcccgcaacgagcgcaacccttttcctttgtcgccagccgtccggccggcaactcaaaggacactgccagtgataaaccggaggaaggtggggatggagtcaagtcatcatggcccttacgagtagggctacacacgttctacaatggcgcatacaaagagaagcgaactcgcgagagcaagcggacctcataaagtgcgtcgtagtccggattggcgtgagcaactcgactccatgaagtcggtatcgctagtaattgtagatcagaatgctgcggtcaatacgtttccgggcccatcacacaccgcccctcacaccatgggagtgggttgcaaaagacgtaggtagcctaactttcgggagggcgcttcccccttcatgattcaggcctggggcgaagtcg

SEQ ID NO: 1036 - DNA, 1446 bp, Artificial Sequence
  Synthetic polymer
gctggcggcgtgcttaacacatgcaagtcgaacgaagcatttacgacagatttcttcggattgaagttgtttgtgactgagcggcggacgggtgagtaacgcgtgggtaacctgcctcatacagggggataacagtcagaaatgactgctaataccgcataagaccacggtaccgcatggtacagtggtaaaaactccggtggtatgagatggacccgcgtctgattaggtagttggtggggtaacggcctaccaagccgacgatcagtagccgacctgagagggtgaccggccacattgggactgagacacggcccagactcctacgggaggcagcagtggggaatattgcacaatggaggaaactctgatgcagcgacgccgcgtgaaggatgaagtatttcggtatgtaaacttctatcagcagggaagaaaatgacggtacctgactaagaagccccggctaactacgtgccagcagccgcggtaatacgtagggggcgagcggtatccggatttactgggtgtaaagggagcgtagacggcacggcaagccagatgtgaaagcccggggctcaaccccgggactgcatttggaactgctgagctagagtgtcggagaggcaagtggaattcctagtgtagcggtgaaatgcgtagatattaggaggaacaccagtggcgaaggcggcttgctggacgatgactgacgttgaggctcgaaagcgtggggagcaaacaggattagataccctggtagtccacgccgtaaacgatgactgctaggtgtcgggtggcaaagccattcggtgccgcagctaacgcaataagcagtccacctggggagtacgttcgcaagaatgaaactcaaaggaattgacggggacccgcacaagcggtggagcatgtggtttaattcgaagcaacgcgaagaaccttaccaagtcttgacatccttctgaccggtacttaaccgtaccttctcttcggagcaggagtgacaggtggtgcatggttgtcgtcagctcgtgtcgtgagatgttgggttaagtcccgcaacgagcgcaacccttatctttagtagccagcggttcggccgggcactctagagagactgccagtgataacctggaggaaggcggggatgacgtcaaatcatcatgccccttatgacttgggctacacacgtgctacaatggcgtaaacaaagggaagcaaagctgtgaagccgagcaaatctcaaaaataacgtctcagttcggactgtagtctgcaacccgactacacgaagctggaatcgctagtaatcgcagatcagaatgctgcggtgaatacgttcccgggtcttgtacacaccgcccgtcacaccatgggagttgggaatgcccgaagccagtgacctaaccgaaaggaaggagctgtcgaaggcaggctcgataactgggg

SEQ ID NO: 1037 - DNA, 1417 bp, Artificial Sequence
  Synthetic polymer
cgctggcggcgcgcctaacacatgcaagtcgaacgagcgagaggaggtttactttctcaagcgagtggcgaacgggtgagtaacgcgtgaggaacctgcctcaaagagggggacaacagttggaaacgactgctaataccgcataagcccacgacccggcatcgggtagagggaaaaggagcaatccgctttgagatggcctcgcgtccgattagctagttggtgaggtaacggcccaccaaggcgacgatcggtagccggactgagaggttgaacggccacattgggactgagacacggcccagactcctacgggaggcagcagtggggaatattgcacaatgggggaaaccctgatgcagcgacgccgcgtggagaaagaaggtcttcggattgtaaactcctgttgttgaggaagataatgacggtactcaacaaggaagtgacggctaactacgtgccagcagccgcggtaaaacgtaggtcacaagcgttgtccggaattactgggtgtaaagggagcgcaggcgggaagacaagttggaagtgaaatccatgggctcaacccatgaactgctttcaaaactgtttttcttgagtagtgcagaggtaggcggaattcccggtgtagcggtggaatgcgtagatatcgggaggaacaccagtggcgaaggcggcctactgggcaccaactgacgctgaggctccaaagtgtgggtagcaaacaggattagataccctggtagtccacactgtaaacgatgattactaggtgttgggagattgaccccttcagtgccccagttaacccaataagtaatccacctggggagtacgaccgcaaggttgaaactcaaaggaattgacgggggcccgctcaagctgtggagtatgtggtttaattcgacgcaacgcgaagagccttaccaagtcttgacttcttgcgacgctcatagaaatatgtgtttctttcgggacgcagagacaggtggtgcatggttgtcttcagctcgtgtcgtgagatgttgggttaagtcccgcaacgagcgcaacccttatggtcagttactacgcaagaggactctggccagactgccgttgacaaaacggaggaaggtggggatgacgtcaaatcatcatgccctttatgacttgggctactcacgtactacaatggcgttaaacaaagagaagcaagaccgcgaggtggagcaaaactcagaaacaacgtcccagttcggactgctggctgcaactcgcttgcacgaagtcggaattgctagtaatcgcagatcagctatgctgcggtgaatacgttcccgggctttgtactctcctcccgtctctcctatgagagccggggggacccgaagtcggtagtctaacctcaaggaggactcctctgaaggtaaaactg

SEQ ID NO: 1038 - DNA, 1494 bp, Artificial Sequence
  Synthetic polymer
agagtttgatcctggctcaggatgaacgctagcggcaggcctaacacatgcaagtcgaggggcagcacgttaaagagtttactctttatggtggcgaccggcggacgggtgcgtaacgcgtatgcaacctgcctgacacagggggataatccgaagaaatttggtctaataccccataataccgatataggcatctatgttggttgaaagctttggtggtgtcagatgggcatgcgttgtattagctagttggtgaggtaacggctcaccaaggcgacgatacatagggggactgagaggttaaccccccacactggtactgagacacggaccagactcctacgggaggcagcagtgaggaatattggtcaatgggcggaagcctgaaccagccatgccgcgtgcaggaagacggctctatgagttgtaaactgcttttgtactagggtaatttgcggtacgtgtaccgtattgaaagtatagtacgaataaggatcggctaactccgtgccagcagccgcggtaatacggaggatccaagcgttatccgggatttattgggtttaaagggtgcgtaggcggcagattaagttagaggtgaaattccgaggctcaaccttggcactgcctctgatactggtttgctagcgagtagatgctgtaggcggaatgtgtggtgtagcggtgaaatgcatagagatcacacagaacaccgattgcgaaggcagcttacaaatctatatcggacgctgaggcacgaaagcgtggggagcaaacaggattagataccctggtagtccacgcagtaaacgatgataactcgttgtcggcgatatacagtcggtgaccaagcgaaagcgataagttatccacctggggagtacgttcgcaagaatgaaactcaaaggaattgacgggggcccgcacaagcggaggaacatgtggtttaattcgatgatacgcgaggaaccttacccgggcttgaaagttagtgacggatgccgaaaggtgtcttcccttcggggcacgaaactaggtgctgcatggttgtcgtcagctcgtgccgtgaggtgtcgggttaagtcccataacgagcgcaacccctatcgttagttaccagcacgtgaaggtggggactctaacgagactgccggtgtaagccgagaggagggtggggatgacgtcaaatcagcacggcccttacgtccggggcgacacacgtgttacaatggtcagtacagagggcagctacctggtgacaggatgcgaatctcgaaagccggtctcagttcggattggaggctgaaactcgcctccatgaagttggattcgctagtaatcgcgcatcagccatggcgcggtgaatacgttcccgggccttgtacacaccgcccgtcaagccatgggagtcgggggtgcctgaagtacgttaccgcgaggagcgtcctagggcaaaactgatgactggggctaagtcgtaacaaggtagccgta

SEQ ID NO: 1039 - DNA, 1451 bp, Artificial Sequence
  Synthetic polymer
cgctagcgacaggcctaacacatgcaagtcgaggggcagcatttttgaagcttgcttcaaaagatggcgaccggcgcacgggtgagtaacgcgtatggaaccaacccgcaacagggggataacccggagaaatccggactaataccgcatagcactttctgtacataagtatagaaatttaaagatgcaaatcggttgcggacggtcatgcgttccattagctagttggcggggtaacggcccaccaaggcgacgatggataggggttctgagaggaaggtcccccacactggtactgagacacggaccagactcctacgggaggcagcagtgaggaatattggtcaatgggcgagagcctgaaccagccaagtcgcgtgagggaagactgccctatgggttgtaaacctcttttagatgagagtaaaagatcttacgagtaggattttgcaagtatcatcagaataagcatcggctaattccgtgccagcagccgcggtaatacggaagatgcgagcgttatccggatttattgggtttaaagggtgcgtaggcggataattaagtcagcggtgaaatacgtcagcttaactggcgaactgccattgaaactggttatcttgagtgtagcggaagtatgcggaatgtgtggtgtagcggtgaaatgcatagatatcacgcagaactccgattgcgaaggcagcataccatactacaactgacgctgaagcacgaaagcgtgggtatcgaacaggattagataccctggtagtccacgcagtaaacgatgaatactaaccgtttgcgatataatgtaagcggtacagcgaaagcgttaagtattccacctggggagtacgccggcaacggtgaaactcaaaggaattgacgggggcccgcacaagcggaggaacatgtggtttaattcgatgatacgcgaggaaccttacccgggcccaaacgacaggggaatatgtgggaaaccatatagccagcaatggtcgctgtcgaggtgctgcatggttgtcgtcagctcgtgccgtgaggtgtcggcttaagtgccataacgagcgcaacccttatcgatagttactaacaggtcaagctgaggactctatcgagactgccggcgtaagccgcgaggaaggtggggatgacgtcaaatcagcacggcccttacgtccggggcgacacacgtgttacaatggcagggacagagagcagccaggcggcgacgccgcgcgaatctcgaaaccctgtctcagttcggattggagtctgcaactcgactccatgaagctggattcgctagtaatcgcgcatcagccatggcgcggtgaatacgttcccgggccttgtacacaccgcccgtcaagccatggaagccgggagcacctgaagtatgcaaccgcgaggagcgtcctagggtaaaatcggtaactggggctaag

SEQ ID NO: 1040 - DNA, 1463 bp, Artificial Sequence
  Synthetic polymer
gatgaacgctggcggcatgctttacacatgcaagtcgaacggcagcatagagagcttgctctctgatggcgagtggcgaacgggtgagtaatacatcggaacgtgtccgtttgtgggggacaaccacccgaaagggtggctaataccgcataagacctgagggtgaaagccggggaccgcaaggcctggcgcgaacggagcggccgatgactgattagctggttggcggggtaaaggcccaccaaggcgacgatcagtagctggtctgagaggacgaccagccacactggaactgagacacggtccagactcctacgggaggcagcagtggggaattttggacaatgggggcaaccctgatccagccatgccgcgtgcgggaagaaggccttcgggttgtaaaccgcttttgtcagggacgaaaaggtgcgggttaagagctagcactgatgacggtacctgaagaataagcaccggctaactacgtgccagcagccgcggtaatacgtagggtgcgagcgttaatcggaattactgggcgtaaagcgtgcgcaggcggttgggtaagacagatgtgaaatccccgggcttaacctgggaactgcatttgtgactgtccgactggagtatgtcagaggggggtggaattccaagtgtagcagtgaaatgcgtagatatttggaagaacaccgatggcgaaggcagccccctggggcaaaactgacgctcatgcacgaaagcgtggggagcaaacaggattagataccctggtagtccacgccctaaacgatgtctactggttgttggagggtaaaaccttcagtaacgaagctaacgcgtgaagtagaccgcctggggagtacggtcgcaagattaaaactcaaaggaattgacggggacccgcacaagcggtggatgatgtggattaattcgatgcaacgcgaaaaaccttacctagccttgacatgtcaggaacgctccggagatggggcggtgcccgcaagggaacctgagcacaggtgctgcatggctgtcgtcagctcgtgtcgtgagatgttgggttaagtcccgcaacgagcgcaacccttgtcactagttgctacgtaacagagcactctagtgagactgccggtgacaaaccggaggaaggtggggatgatgtcaagtcctcatggcccttatggctagggcctcacacgtcatacaatggtcggaacagagggcagagaaaccgcgaggtggagcaaatcccagaaaaccgatcgtagtccggattgcagtttgcaactcgactgcatgaagtcggaatcggtagtaatcgcgggtcagcataccgcggtgaatacgttcccgggccttgtacacaccgcccgtcacactatgagagtcagaaacacccgaagccggtgaggtaaccgcaaggagccagccgtcgaaggcggagctgatgattggagtgaagt

SEQ ID NO: 1041 - DNA, 1449 bp, Artificial Sequence
  Synthetic polymer
atcctggctcaggatgaacgctggcggcgcgcctaacacatgcaagtcgaacggcacccacctccgggtggaagcgagtggcgaacggctgagtaacacgtgaccaacctgccccccgcacggggacagccgcgggaaaccgcgggtgatacccggtggccccgggcggacgcatgtccgcccgggcatagctccggcggcgggggatggggtcgcggcccatcaggtagacggcggggtgaaggcccaccgtgccgacaacgggtagccgggttgagagaccgaccggccagattgggactgagacacggcccagactcctacgggaggcagcagtggggaatcttgcgcaatggggggaaccctgacgcagcgacgccgcgtgcgggatggaggccttcgggtcgtgaaccgctttcagcagggacgagactgacggtacctgcagaagaagccccggctaactacgtgccagcagccgcggtaatacgtagggggctagcgttatccggattcattgggcgtaaagcgcgcgtaggcggccgcgcaggcggggggtcaaatgccggggctcaaccccggcccgccccccgaaccgcgcggcttgggtccggcaggggagggtggaacgcccggtgtagcggtggaatgcgcagatatcgggcggaacaccggtggcgaaggcggccctctgggccggcaccgacgctgaggcgcgagagccgggggagcgaacaggattagataccctggtagtcccggccgtaaacgatggacgctaggtgtggggggacgatccccccgtgccgcagccaacgcattaagcgtcccgcctggggagtacggccgcaaggctaaaactcaaaggaattgacgggggcccgcacaagcagcggagcatgtggcttaattcgaagcaacgcgaagaaccttacccgcgcttgacatatgggtgagcccggggagacccgggggccgagaggagcccatacaggtggtgcatggctgtcgtcagctcgtgtcgtgagatgttgggttaagtcccgcaacgagcgcaacccccgccgcgtgttgccatcattcagttgggaacccacgcgggaccgccggcgccaagccggaggagggcggggacgacgtcaagtcatcatgccccttatgcgcggggctgcacacgtgctacaatggccggtacagagggttgccaccccgcgagggggagcggatcccgaaagccggccccagttcggaccgggggctgcaacccgcccccgtgaagtcggagttgctagtaatcgcggatcagcatgccgcggtgaatgcgtacccgggccttgtacacaccgcccgtcgcaccacccgagtcgtctgcacccgaagccgccggcccaaccgttaggggggaggcgtcgaaggtgtggagggcgaggggggtgaagtcgtaacaag

SEQ ID NO: 1042 - DNA, 1432 bp, Artificial Sequence
  Synthetic polymer
gctttacacatgcaagtcgaacggtaacgtggggaggagcttgctccaccccgacgacgagtggcgaacgggtgagtaatacatcggaacgtgtccgcttgtgggggacaaccagccgaaaggttggctaataccgcatgagttctacggaagaaagagggggacccgcaagggcctctcgcgagcggagcggccgatgactgattagccggttggtgaggtaacggctcaccaaagcaacgatcagtagctggtctgagaggacgaccagccacactgggactgagacacggcccagactcctacgggaggcagcagtggggaattttggacaatgggcgcaagcctgatccagctattccgcgtgtgggatgaaggccctcgggttgtaaaccacttttgtagagaacgaaaagacatcttcgaataaaggatgttgctgacggtactctaagaataagcaccggctaactacgtgccagcagccgcggtaatacgtagggtgcgagcgttaatcggaattactgggcgtaaagggtgcgcaggcggttgagtaagacagatgtgaaatccccgagcttaactcgggaatggcatatgtgactgctcgactagagtgtgtcagagggaggtggaattccacgtgtagcaatgaaatgcgtagatatgtggaagaacaccgatggcgaaggcagcctcctgggacataactgacgctcaagcaccaaagcgtggggagcaaacaggattagatacccctggagtccacgccctaaacgatgttaactagttgttgggatgtaacaatctcagtaacgcagcccagcgcgagaagttaatcccatgggaagtacggtcgcaagacttaaagatcaaaggaattgacgggggcccgcacaaccggtggatgatcttgattaattcgatgcagcgcgaaaaaccttatcttcccgtggcatgtcaggaagctcttgtaatgagagcgtgcccgcaagggagcctgaacacaggtgctgcatggctgtcgtcagctcgtgtcgtgagatgttgggttaagtcccgcaacgagcgcaccccttgtcattagttgctacgaaagggcactttagtgagactgccggtgacaaaccggaggaaggtggggaagacgtcaagtcctcatggcccttatgggtagggcttcacacgtcatacaatggtcggaacagagggcagagaagccgtgaggcggagccaatcccagaaaaccgatcgtagtccggattgcagtatgcaactcgactgcatgaagtcggaatcgttagtaatcgcggatcagcatgccgcggtgaatacgttcccgggtcttgtacacaccgcccgtcaaacaatgggagtggtgtttaccagaagtcgttagcctaaccgcaaggagggcggcgaccacggtgag

SEQ ID NO: 1043 - DNA, 1420 bp, Artificial Sequence
  Synthetic polymer
acgctggcggcgtgcctgacacatgcaagtcgagcgagtggagttcttcggaacatagctagcggcggacgggtgagtaacacgtgggcaacctgcctcatagaggggaatagcctcccgaaagggagattaataccgcataagattgtagcttcgcatgaagtagcaattaaaggagtaatccgctatgagatgggcccgcggcgcattagctagttggtgaggtaacggctcaccaaggcgacgatgcgtagccgacctgagagggtgatcggccacattgggactgagacacggcccagacttctacgggaggcagcagtggggaatattgcacaatgggggaaaccctgatgcagcaacgccgcgtgagtgatgacggccttcgggttgtaaagctctgtcttcagggacgataatgacggtacctgaggaggaagccacggctaactacgtgccagcagccgcggtaatacgtaggtggcgagcgttgtccggatttactgggcgtaaagggagcgtaggcggacttttaagtgagatgtgaaatacccaggctcaacttgggtgctgcatttcaaactggaagtctagagtgcaggagaggagaatggaattcctagtgcagcggtgaaatgcgtagagattaggaagaacaccagtggcggaggcgattctctggactgtaactgacgctgaggctcgaaagcgtggggagcaaacaggattagataccctggtagtccacgccgtaaacgatgaatactaggtgtaggggttgtcatgacctctgtgccgccgctaacgcattaagtattccgcctggggagtacggtcgcaagattaaaactcaaaggaattgacgggggcccgcacaagcagcggagcatgtggtttaattcgaagcaacgcgaagaaccttacctagacttgacatctcctgcattacccttaatcggggaagttccttcggggacaggaagacaggtggtgcatggttgtcgtcagctcgtgtcgtgagatgttgggttaagtcccgcaacgagcgcaacccttgtcgttagttactaccattaagttgaggactctagcgagactgcctgggttaaccaggaggaaggtggggatgacgtcaaatcatcatgccccttatgtgtagggctacacacgtgctacaatggctggtacagagagatgcaataccgcgaggtggagccaaacttaaaaaccagtctcagttcggatcgtaggctgaaactcgcctacatgaagctggagttactagtaatcgcgaatcagaatgtcgcggtgaatacgttcccgggtcttgtacacaccgcccgtcacaccatgagagttggcaatacccgaagtccgtgagctaaccgcaaggaggcagcggccgaaggtagggtcagcg

SEQ ID NO: 1044 - DNA, 1425 bp, Artificial Sequence
  Synthetic polymer
agtcgaacggagaattccttcgggaattcttagtggcgaacgggtgagtaacgcgtaggcaacctgccctttggatggggacaacattccgaaaggagtgctaataccgaatgtgacgattttaccgcatggtttaatcgtgaaagatggcctctacatgtaagctatcgccaaaggatgggcctgcgtctgattagctagttggtggggtaacggctcaccaaggcgacgatcagtagccggtctgagaggatgaacggccacattgggactgagacacggcccagactcctacgggaggcagcagtggggaatcttccgcaatggacgaaagtctgacggagcaatgccgcgtgagtgatgaaggttttcggaccgtaaagctcttttgtttatgacgaatgtgcatgatgtgaacaatgttgtgtaatgacggtagtaaacgaataagccacggctaactacgtgccagcagccgcggtaatacgtaggtggcaagcgttgtccggaattattgggcgtaaagagcatgtaggcggtcctttaagtctggagtgaaaatgcggggctcaaccccgtatggctttggatactgggggacttgagtgcaggagaggaaaggggaattcccagtgtagcggtgaaatgcgtagatattgggaggaacaccagtggcgaaggcgcctttctggactgtgtctgacgctgagatgcgaaagccagggtagcgaacgggattagataccccggtagtcctggccgtaaacgatgggtactaggtgtaggaggtatcgacccctcctgtgccggagttaacgcaataagtaccccgcctggggagtacgtcggcaacgatgaaactcaaaggaattgacgggggcccgcacaagcggtggagtatgtggtttaattcgacgcaacgcgaagaaccttaccaaggcttgacattgattgaccgctctagagatagagctttcccttcggggacatgaaaacaggtggtgcatggctgtcgtcagctcgtgtcgtgagatgttgggttaagtcccgcaacgagcgcaacccctatcctatgttaccagcacgttatggtggggactcatgggagactgccaaggacaacttggaggaaggcggggatgacgtcaagtcatcatgccccttatgtcttgggctacacacgtactacaatggtcggcaacagagggaagcgaagccgcgaggcagagcaaaccccagaaacccgatctcagttcggattgcaggctgcaactcgcctgcatgaagtcggaatcgctagtaatcgcaggtcagcatactgcggtgaatacgttcccgggccttgtacacaccgcccgtcacaccacgaaagttgataacacccgaagccggtggggtaacctattaggagccagccgtctaagg

SEQ ID NO: 1045 - DNA, 1375 bp, Artificial Sequence
  Synthetic polymer
acggtaacaggaagcacttgctgctttgctgacgagtggcggacgggtgagtaatgtctgggaaactgcctgatggagggggataactactggaaacggtagctaataccgcataacgtcgcaagaccaaagagggggaccttcgggcctcttgccatcggatgtgcccagatgggattagctagtaggtggggtaaaggctcacctaggcgacgatccctagctggtctgagaggatgaccagccacactggaactgagacacggtccagactcctacgggaggcagcagtggggaatattgcacaatgggcgcaagcctgatgcagccatgccgcgtgtatgaagaaggccttcgggttgtaaagtactttcagcggggaggaagggagtaaagttaatacctttgctcattgacgttacccgcagaagaagcaccggctaactccgtgccagcagccgcggtaatacggagggtgcaagcgttaatcggaattactgggcgtaaagcgcacgcaggcggttcgttaagtcagatgtgaaatccccgggctcaacctgggaactgcatctgatactggcaagcttgagtctcgtagaggggggtagaattccaggtgtagcggtgaaatgcgtagagatctggaggaataccggtggcgaaggcggccccctggacgaagactgacgctcaggtgcgaaagcgtggggagcaaacaggattagataccctggtagtccacgctgtaaacgctgtcgatttggggattgggcttagtgcttggtgctcgaagttaacgtgataaatcgaccgcctggggagtacggccgcaaggttaaaactcaaatgaattgacgggggcccgcacaagcggtggagcatgtggtttaattcgatgcaacgcgaagaaccttacctactcttgacatcctaagaaggacttagagataagtctgtgccttcgggaacttagagacaggtgctgcatggctgtcgtcagctcgtgttgtgaaatgttgggttaagtcccgcaacgagcgcaacccttatcctttgttgccagcgatttggtcgggaactcaaaggagactgccagtgataaactggaggaaggtggggatgacgtcaagtcatcatggcccttacgagtagggctacacacgtgctacaatggtgcatacagagggaggcgagagggcgaccttaagcgaaactcagaaagtgcatctaagtccggattggagtctgcaactcgactccatgaagtcggaatcgctagtaatcgcaaatcagaatgttgcggtgaatacattcccgggccttgtacacaccgcccgtcacaccatgggagtgggttgtaccagaagtagatagc

SEQ ID NO: 1046 - DNA, 1452 bp, Artificial Sequence
  Synthetic polymer
tggctcaggatgaacgctagcgacaggcctaacacatgcaagtcgaggggcaacatggtatcagcttgctgataccgatggcgaccggcgcacgggtgagtaacgcgtatgtaatctacctgtaacagagggataacccggagaaatccggactaatacctcatagcacatattattcgcatgaattttatgttaaagagactcggttacagatgaacatgcgttccattagctagttggcggggtaacggcccaccaaagcgacgatggataggggttctgagaggaaggtcccccacattggaactgagacacggtccaaactcctacgggaggcagcagtgaggaatattggtcaatggtcggcagactgaaccagccaagtcgcgtgagggaagacggccctacgggttgtaaacctcttttgtcggagagtaaagtacgctacgtgtagtgtattgcaagtatccgaagaaaaagcatcggctaactccgtgccagcagccgcggtaatacggaggatgcaagcgttatccggatttattgggtttaaagggtgcgtaggcggcacgccaagtcagcggtgaaatttccgggctcaacccggagtgtgccgttgaaactggcgagctagagtacacaagaggcaggcggaatgcgtggtgtagcggtgaaatgcatagatatcacgcagaaccccgattgcgaaggcagcctgctagggtgaaacagacgctgaggcacgaaagcgtgggtatcgaacaggattagataccctggtagtccacgcagtaaacgatgaatactaactgtttgcgatacaatgtaagcggtacagcgaaagcgttaagtattccacctggggagtacgccggcaacggtggaactcaaaggaattgacgggggcccgcacaagcggaggaacatgtggtttaattcgatgatacgcgaggaaccttacccgggctcaaacgcagggggaatatatatgaaagtatatagctagcaatagtcacctgcgaggtgctgcatggttgtcgtcagctcgtgccgtgaggtgtcggcttaagtgccataacgagcgcaacccctatcgacagttactaacgggtcaagccgaggactctgtcgagactgccggcgcaagccgcgaggaaggtggggatgacgtcaaatcagcacggcccttacgtccggggcgacacacgtgttacaatggcaggtacagaaggcagccagtcagcaatgacgcgcgaatcccgaaaacctgtctcagttcggattggagtctgcaacccgactccatgaagctggattcgctagtaatcgcgcatcagccatggcgcggtgaatacgttcccgggccttgtacacaccgcccgtcaagccatggaagccgggagtacctgaagcatgcaaccgcaaggagcgtacgaaggtaataccggtaac

SEQ ID NO: 1047 - DNA, 1442 bp, Artificial Sequence
  Synthetic polymer
gcggcgtgcttaacacatgcaagtcgagcgaagcacctaagatagattcttcggatgaattcttttgtgactgagcggcggacgggtgagtaacgcgtgggtaacctgcctcatacagggggataacagttagaaatgactgctaataccgcataagaccacggtaccgcatggtacagaggtaaaaactccggtggtatgagatggacccgcgtctgattagctagttggtggggtaaaggcctaccaaggcgacgatcggtagccggactgagaggttgaacggccacattgggactgagacacggcccagactcctacgggaggcagcagtgggggatattgcacaatgggggaaaccctgatgcagcaacgccgcgtgtgggaagaaggttttcggattgtaaaccactgttcttggtgaagataatgacggtaaccaaggagaaagctccggctaactacgtgccagcagccgcggtaatacgtagggagcaagcgttgtccggatttactgggtgtaaagggtgcgtaggcggctaggcaagtcagacgtgaaaaccatgggctcaacctgtggactgcgtttgaaactgtttagcttgagtgaagtagaggtaggcggaattcccggtgtagcggtgaaatgcgtagagatcgggaggaacaccagtggcgaaggcggcctactgggctttaactgacgctgaggcacgaaggcatgggtagcaaacaggattagataccctggtagtccatgccgtaaacgatgattactaggtgtggggggtctgaccccctccgtgccggagttaacacaataagtaatccacctggggagtacggccgcaaggttgaaactcaaaggaattgacgggggcccgcacaagcagtggagtatgtggtttaattcgaagcaacgcgaagaaccttaccaggtcttgacatccgactaacgaagtagagatacattaggtgcctttcggggaaagtcgagacaggtggtgcatggttgtcgtcagctcgtgtcgtgagatgttgggttaagtcccgcaacgagcgcaacccttgtcattagttgctacggtaagagcactctaatgagactgccgttgacaaaacggaggaaggtggggacgacgtcaaatcatcatgccccttatgacctgggctacacacgtactacaatggccgttaacagagggaggcaataccgcgaggtggagcaaaaccctaaaaacggtcccagttcggattgtaggctgaaactcgcctacatgaagttggaattgctagtaatcgcggatcagcatgccgcggtgaatacgttcccgggccttgtacacaccgcccgtcacaccatgggagccggtaatacccgaagccagtagtctaaccgcaaggaggacgctgtcgaaggtaggattggcgactggggtgaa

SEQ ID NO: 1048 - DNA, 1426 bp, Artificial Sequence
  Synthetic polymer
ctcatgacgaacgctggcggcgcgcctaacacatgcaagtcgaacggagctgagagaagcttgcttttcttagcttagtggcgaacgggtgagtaacgcgtgagtaacctgccctggagtgggggacaacagttggaaacgactgctaataccgcataagcccacgatccggcatcggattgagggaaaaggagcaatccgctttgagatggcctcgcgtccgattagctagttggtgaggtaatggcccaccaaggcgacgatcggtagccggactgagaggttgaacggccacattgggactgagacacggcccagactcctacgggaggcagcagtggggaatattgcacaatgggggaaaccctgatgcagcgacgccgcgtggaggaagaaggtcttcggattgtaaactcctgttgttgaggaagataatgacggtactcaacaaggaagtgacggctaactacgtgccagcagccgcggtaaaacgtaggtcacaagcgttgtccggaattactgggtgtaaagggagcgcaggcgggaagacaagttggaagtgaaatctatgggctcaacccataaactgctttccaaactgtttttcttgagtagtgcagaggtaggcggaattcccggtgtagcggtggaatgcgtagatatcgggaggaacaccagtggcgaaagcggcctactgggcaccaactgacgctgaggctcgaaagtgtgggtagcaaacagggatagataccctggtagtccacaccgtaaacgatgattactaggtgttggaggattgaccccttcagtgccgcagttaacacaataagtaatccacctggggagtacgaccgcaaggttgaaactcaaaggaattgacgggggcccgcacaagcagtggagtatgtggtttaattcgacgcaacgcgaagaaccttaccaagtcttgacatcccttgacgaacatagaaatatgttttctcttcggagcaaggagacaggtggtgcatggttgtcgtcagctcgtgtcgtgagatgttgggttaagtcccgcaacgagcgcaacccttactgtcagttactacgcaagaggactctggcaggactgccgttgacaaaacggaggaaggtggggatgacgtcaaatcatcatgccctttatgacttgggctacacacgtactacaatggcgttaaacaaagagaagcaagaccgcgaggtggagcaaaactcagaaacaacgtcccagttcggactgcaggctgcaactcgcctgcacgaagtcggaattgctagtaatcgtggatcagcatgccacggtgaatacgttcccgggccttgtacacaccgcccgtcacaccatgagagccggggggacccgaagtcggtagtctaaccgcaaggaggacgccgccgaaggtaaaac

SEQ ID NO: 1049 - DNA, 1335 bp, Artificial Sequence
  Synthetic polymer
gatgatcgctggcggcgcgcctaacacatgcaagtcgaacggccggacccacctcggtgggcgaggcagtggcgaacggctgagtaacacgtgggcaacctgcccccctccccgggacagcctcgggaaaccgtgggtaataccggatgtgccgccccctccgcatgggaggggcgggaaagctccggcggggggggatgggcccgcggcctgttagcttgttggcggggcaacggcccaccaaggcgactatgggtagctgggttgagagaccgaccagccagattgggactgagacacggcccagactcctacgggaggcagcagtggggaatcttgcgcaatgggcggaagcctgacgcagcgacgccgcgtgcgggaggaaggccctcgggtcgtaaaccgctttcagcagggacgaggccgcaaggtgacggtacctgcagaagaagccccggctaactacgtgccagcagccgcggtaatacgtagggggcgagcgttatccggattcattgggcgtaaagcgctcgtaggcggcctgctaggtcgggagtcaaatgcgggggcccaacccccggccgctcccgataccggcgggcttgagtttggcaggggaaggcggaattcccggtgtagcggtggaatgcgcagatatcgggaagaacaccggtggcgaaggcggccttctgggccacaactgacgctgaggagcgaaagctgggggagcgaacaggattagataccctggtagtcccagccgtaaacgatggacactaggtgtgggggggacgcccctccgtgccgcagccaacgcattaagtgtcccgcctggggagtacggccgcaaggctaaaactcaaaggaattgacgggggcccgcacaagcagcggagcatgtggcttaattcgaagcaacgcgaagaaccttaccagggcttgacatcttggtgaagcggcggagacgccgtggccgagaggagccaagacaggtggtgcatggctgtcgtcagctcgtgtcgtgagatgttgggttaagtcccgcaacgagcgcaacccccgtcgcatgttgccagcggtccggccgggcacccatgcgagaccgccggcgtcaagccggaggagggcggggacgacgtcaagtcatcatgccccttatgccctgggctgcacacgtgctacaatggccggcacagcgggctgccaggcggcgacgccgagcgaatccccaaagccggccccagttcggaccgggggctgcaacccgcccccgcgaagtcggagttgctagtaatcgcggatcagcacgccgcggtgaaatgcgttcccgggcct

SEQ ID NO: 1050 - DNA, 1354 bp, Artificial Sequence
  Synthetic polymer
gatgaacgctggcggcgtgcttaacacatgcaagtcgaacggagagctaatgattgaggattcgtccaaatgatttagtttcttagtggcggacgggtgagtaacgcgtgaggaacctgccttggagtggggaataacacagtgaaaattgtgctaataccgcatgatgcagttgggtcgcatggctctgactgccaaagatttatcgctctgagatggcctcgcgtctgattagatagttggcggggtaacggcccaccaagtcgacgatcagtagccggactgagaggttgaccggccacattgggactgagacacggcccagactcctacgggaggcagcagtggggaatattgggcaatgggcgcaagcctgacccagcaacgccgcgtgaaggaagaaggctttcgggttgtaaacttcttttgtcagggacgaaacaatgacggtacttgacgaataagccacggctaactacgtgccagcagccgcggtaatacgtaggtggcaagcgttatccggatttactgggtgtaaagggcgtgtaggcgggactacaagtcagatgtgaaaaccagaggctcaacctctggcctgcatttgaaactgcagttcttgagtgctggagaggcaatcggaattccgtgtgtagcggtgaaatgcgtagatatacggaggaacaccagtggcgaaggcggattgctggacagtaactgacgctgaggcgcgaaagcgtggggagcaaacaggattagataccctggtagtccacgctgtaaacgatggatactaggtgtggggggtctgaccccctcccgtgcccgcagttaacacaataagtatcccacctggggagtacgatcgcaaggttgaaactcaaaggaattgacgggggcccgcacaagcggtggagtatgtggtttaattcgaagcaacgcgaagaaccttaccagggcttgacatcccgatgaccggtgtagagatacacttttctcttcggagacatcggtgacaggtggtgcatggttgtcgtcagctcgtgtcgtgagatgttgggttaagtcccgcaacgagcgcaacccctattgttagttgctacgcaagagcactctagcgagactgccgttgacaaaacggaggaaggcggggacgacgtcaaatcatcatgccccttatgtcctgggctacacacgtactacaatggtggtcaacagagggaggcaaagccgcgaggcggagcaaacccctaaaagccatcccagttcggatcgcaggctgcaacccgcctgcgtgaagttggaatcgctagtaatcgcggatcagcatgccgcggtgaaatacgttcccgggcct

SEQ ID NO: 1051 - DNA, 1496 bp, Artificial Sequence
  Synthetic polymer
gctcagattgaacgctggcggcaggcctaacacatgcaagtcgggcggtagcacaggggagcttgcttcctggtgaacgagcggcggacgggtgagtaaagtctgggaaactgcctgatggagggggataactactggaaacggtagctaataccgcataatgtcttcggaccaaagtgggggaccttagggcctcacgccatcggatgtgcccagatgggattagctggtaggtggggtaaaggctcacctaggcgacgatccctagctggtctgagaggatgaccagccacactggaactgagacacggtccagactcctacgggaggcagcagtggggaatattgcacaatgggggaaaccctgatgcagccatgccgcgtgtgtgaagaaggccttcgggttgtaaagcactttcagcgaggaggaaggcggtaaggttaataaccttatcgattgacgttactcgcagaagaagcaccggctaactccgtgccagcagccgcggtaatacggagggtgcaagcgttaatcggaatgactgggcgtaaagcgcacgcaggcggtctgttaagttggatgtgaaatccccgggcttaacctgggaactgcattcaaaactgacaggctagagtcttgtagaggggggtagaattccaggtgtagcggtgaaatgcgtagagatctggaggaataccggtggcgaaggcggccccctggacaaagactgacgctcaggtgcgaaagcgtggggagcaaacaggattagataccctggtagtccacgctgtaaacgatgtcgacttgaaggttgtggccttgagccgtggctttcggagcaaacgcgttaagtcgaccgcctggggagtacggccgcaaggttaaaactcaaatgaattgacgggggcccgcacaagcggtggagcatgtggtttaattcgatgcaacgcgaagaaccttacctactcttgacatcctcagaagagactggagatagttttgtgccttcgggaactgagagacaggtgctgcatggctgtcgtcagctcgtgttgtgaaatgttgggttaagtcccgcaacgagcgcaacccttatcctttgttgccagcacgtaatggtgggaactcaaaggagactgccggtgataaaccggaggaaggtggggatgacgtcaagtcatcatggcccttacgagtagggctacacacgtgctacaatggcgcatacaaagagaagcgagcctgcgagggtgagcggacctcataaagtgcgtcgtagtccggattggagtctgcaactcgactccatgaagtcggaatcgctagtaatcgtggatcagaatgccacggtgaatacgttcccgggccttgtacacaccgcccgtcacaccatgggagtgggttgcaaaagaagtaggtagcttaacctcagggggggcgcttaccactttgtgattcatgactggggtgaagtcgtaacaaggtaaccgtaggg

SEQ ID NO: 1052 - DNA, 1391 bp, Artificial Sequence
  Synthetic polymer
ttcgcccttagagtttgatcctggctcaggatgaacgctggcggcgtgcctaacacatgcaagtcgagcgagaagctcatcacagatgcttcggttgaagtgatgagtggaaagcggcggacgggtgagtaacgcgtaggcaacctgccctttgcagagggatagcctcgggaaaccgggattaaaacctcatgacacctcttaaagacatctttgagaggtcaaagatttatcggcagaggatgggcctgcgtctgattagctagttggtggggtaacggcctaccaaggcgacgatcagtagccgacctgagagggtgatcggccacattggaactgagacacggtccaaactcctacgggaggcagcagtggggaatattgcacaatgggggaaaccctgatgcagcaacgccgcgtgaaggaagaaggcctttgggtcgtaaacttctgttctaagggaggataatgacggtaccttaggagcaagtcccggctaactacgtgccagcagccgcggtaatacgtagggggcaagcgttatccggaattattgggcgtaaagggtacgtaggtggttacccaagcacgaggtataaggcaatggcttaaccattgttcgccttgtgaactgggctacttgagtgcaggagaggaaagcggaattcctagtgtagcggtgaaatgcgtagatattaggaggaacaccagtggcgaaggcggctttctggactgtaactgacactgaggtacgaaagcgtggggagcaaacaggattagataccctggtagtccacgccctaaacgatgaacactagttgttgccttgcacgtcaaggcagtaatgcacctaacggattaagtgttccgcctggggagtacggtcgcaagattaaaactcaaaggaatagacggggacccgcacaagcggtggagcatgtggtttaattcgatgatacgcgaaaaaccttaccaggtcttgacatcctaggaacctttgagagatcagagggtgccttcgggaacctagagacaggtggtgcatggttgtcgtcagctcgtgtcgtgagatgttgggttaagtcccgcaacgagcgcaacccctcccattagttgctacgcaagagcactctaatgggactgccgttgacaaaacggaggaaggtggggaggacgtcaaatcatcatgccccctatgacctgggctacacacgtactacaatggcaattaacaacggggagcaatacagtgatgtggagcaaatcccaaaaaattgtctcagttcggattgtaggctgcaactcgcctacatgaagtcggaattgctagtaatcgcgaatcagcatgtcgcggtgaataaaatcccgggccttgcacacaccgcccgtca

SEQ ID NO: 1053 - DNA, 1453 bp, Artificial Sequence
  Synthetic polymer
gcggcgtgcttaacacatgcaagtcgaacggagagctaatgacagaggattcgtccaatggatttagtttcttagtggcggacgggtgagtaacgcgtgaggaacctgcctcggagtggggaataacacaacgaaagctgtgctaataccgcatgatgcagctgggtcgcatgactctggctgccaaagatttatcgctctgagatggcctcgcgtctgattagctggttggcggggtaacggcccaccaaggcgacgatcagtagccggactgagaggttggccggccacattgggactgagacacggcccagactcctacgggaggcagcagtggggaatattgggcaatgggcgcaagcctgacccagcaacgccgcgtgaaggaagaaggccctcgggttgtaaacttcttttgtcagggacgaagcaagtgacggtacctgacgaataagccacggctaactacgtgccagcagccgcggtaatacgtaggtggcaagcgttatccggatttactgggtgtaaagggcgtgtaggcgggattgcaagtcagatgtgaaaaccacgggctcaacctgtggcctgcatttgaaactgcagttcttgagtactggagaggcagacggaattcctagtgtagcggtgaaatgcgtagatattaggaggaacaccagtggcgaaggcggtctgctggacagcaactgacgctgaggcgcgaaagcgtggggagcaaacaggattagataccctggtagtccacgctgtaaacgatggatactaggtgtggggggtctgaccccctccgtgccgcagttaacacaataagtatcccacctggggagtacgatcgcaaggttgaaactcaaaggaattgacgggggcccgcacaagcggtggagtatgtggtttaattcgaagcaacgcgaagaaccttaccagggcttgacatcccgatgaccggactagagatagtcttttctcttcggagacatcggtgacaggtggtgcatggttgtcgtcagctcgtgtcgtgagatgttgggttaagtcccgcaacgagcgcaacccctattgttagttgctacgcaagagcactctagcgagactgccgttgacaaaacggaggaaggtggggacgacgtcaaatcatcatgccccttatgtcctgggccacacacgtactacaatggtggttaacagagggaggcaatactgcgaagtggagcaaacccctaaaagccatcccagttcggattgcaggctgcaacccgcctgcatgaagttggaatcgctagtaatcgcggatcagcatgccgcggtgaatacgttcccgggccttgtacacaccgcccgtcacaccatgagagtcgggaacacccgaagtccgtagcctaaccgcgaggggggcgcggccgaaggtgggttcgataattggggtgaagtcataaca

SEQ ID NO: 1054 - DNA, 1447 bp, Artificial Sequence
  Synthetic polymer
gcggcatgctttacatatgcaagtcgaacggcagcatggagagcttgctctctgatggcgagtggcgaacgggtgagtaatacatcggaacgtgtcctgttgtgggggataactactcgaaagagtagctaataccgcataagacctaagggtgaaagcgggggaccttcgggcctcgcgcagttggagcggccgatgactgattagctagttggtggggtaaaggcctgccaaggcgacgatcagtagctggtctgagaggacgaccagccacattgggactgagacacggcccaaactcctacgggaggcagcagtggggaattttggacaatgggggcaaccctgatccagccatgccgcgtgcgggaagaaggccttcgggttgtaaaccgcttttgttaggaacgaaaaggtatctgtgaacaacaggtattgctgacggtacctaaagaataagcaccggctaactacgtgccagcagccgcggtaatacgtagggtgcgagcgttaatcggaattactgggcgtaaagcgtgcgcaggcggttgggtaagacaggtgtgaaatccccgagcttaacttgggaactgcacttgtgactgctcaactagagtatgtcagagggaggtggaattccaagtgtagcagtgaaatgcgtagatatttggaagaacaccgatggcgaaggcagcctcctgggataatactgacgctcatgcacgaaagcgtggggagcaaacaggattagataccctggtagtccacgccctaaacgatgtcaactagttgttgggccgcatggcttagtaacacagctaacgcgagaagttgaccgcctggggagtacggtcgcaagattaaaactcaaaggaattgacggggacccgcacaagcggtggatgatgtggattaattcgatgcaacgcgaaaaaccttacctagccttgacatgccaggaatcctgatgaaagttgggagtgcccgcaagggaatctggacacaggtgctgcatggctgtcgtcagctcgtgtcgtgagatgttgggttaagtcccgcaacgagcgcaacccttgtcactagttgctacgcaagagcactctagtgaaactgccggtgacaaaccggaggaaggtggggatgacgtcaagtcctcatggcccttatggctagggcctcacacgtcatacaatggtcggaacagagggcagcgaagctgtgaagtggagccaatcccagaaaaccgatcgtagtccggattgcagtctgcaactcgactgcatgaagtcggaatcgctagtaatcgcggatcagcatgccgcggtgaatacgttcccgggtcttgtacacaccgcccgtcacaccacgaaagtcattcacacccgaagccggtgaggcaaccgcaaggaaccagccgtcgaaggtgggggcgatgattggggtgaag

SEQ ID NO: 1055 - DNA, 1419 bp, Artificial Sequence
  Synthetic polymer
ttaacacatgcaagtcgagcgatgaagtttccttcgggaaacggattagcggcggacgggtgagtaacacgtgggtaacctgcctcatagaggggaatagccttccgaaaggaagattaataccgcataacgttgaaagatggcatcatcatttaaccaaaggagcaatccgctatgagatggacccgcggcgcattagctagttggtggggtaacggcctaccaaggcgacgatgcgtagccgacctgagagggtgatcggccacattgggactgagacacggcccagactcctacgggaggcagcagtggggaatattgcacaatgggggaaaccctgatgcagcaacgccgcgtgagtgatgaaggttttcggatcgtaaagctctgtctttggggaagataatgacggtacccaaggaggaagccacggctaactacgtgccagcagccgcggtaatacgtaggtggcgagcgttatccggatttactgggcgtaaagggagcgtaggcggatgattaagtgggatgtgaaatacccgggctcaacttgggtgctgcattccaaactggttatctagagtgcaggagaggagggtggaattcctagtgtagcggtgaaatgcgtagagattaggaagaacaccagtggcgaaggcgactctctggactgtaactgacgctgaggctcgaaagcgtggggagcaaacaggattagataccctggtagtccacgccgtaagcgatgaataataggtgtgggggtttcaacatctccgtgccgccgctaacgcattaagtattccgtgtggggagtacggtcgcaagattaaatctcaaaggaattgacggggacccgcacaagtagcggagcatgtggtttaattagaagcaacgagaagcaccttacatacacttgacattcctcgcattactttttatcgaggaaatcctttcggggacaaggtgacaggtggcgcatggttgttgtcagctcgtgtcgtgagatgttgggttaagtcccgcaacgagcgcaacccttgtcgttagttactcccattaagttgaggtctatagcgagactgcgtgggttacccaggaggaaggtggggatgatgtcaaatcatcatgccctttatgtgtagggctacacacgtgctacaatggatggtacagagagatgcaatcccgtgagggggagccaaactttaaaaccagtctcagttgggattgtagggtgaatctcgcatacatgaagctggagtttatagtaatcgagaatcagaatgtcgcggagaatacgttcccgggttttgtacaccccgcccgtcaccccatgagagttcgcaataccagaagtccgtgagctaacctcaaggaggcagcggccgaaggtagggtcagcgattggggtgaagt

SEQ ID NO: 1056 - DNA, 1520 bp, Artificial Sequence
  Synthetic polymer
ttgagagtttgatcctggctcaggacgaacgctggcggcatgcctaacacatgcaagtcgaacggagactatttcggtagtcttagtggcgaacgggtgagtaacgcgtgggcaacctgccctctagatggggacaacatcccgaaaggggtgctaataccgaatgtgacgatttatccgcatggatttatcgtgaaagatggcctctacatgtaagctatcgctagaggatgggcctgcgtctgattagctagttggtggggtaacggcctaccaaggcgacgatcagtagccggtctgagaggatgaacggccacattgggactgagacacggcccagactcctacgggaggcagcagtggggaatcttccgcaatgggcgaaagcctgacggagcaatgccgcgtgagtgatgaaggaattcgttccgtaaaactcttttgtttatgacgaatgtgcagattgtgaataattatttgtaatgacggtagtaaacgaataagccacggctaactacgtgccagcagccgcggtaatacgtaggtggcgagcgttgtccggaattattgggcgtaaagagcatgtaggcggtttcttaagtctggagtgaaaatgcggggctcaaccccgtatggctctggatactgggagacttgagtgcaggagaggaaaggggaattcccagtgtagcggtgaaatgcgtagatattgggaggaacaccagtggcgaaggcgcctttctggactgtgtctgacgctgagatgcgaaagccagggtagcgaacgggattagataccccggtagtcctggccgtaaacgatgggtactaggtgtaggaggtatcgacccctcctgtgccggagttaacgcaataagtaccccgcctggggagtacgtccgcaaggatgaaactcaaaggaattgacgggggcccgcacaagcggtggagtatgtggtttaattcgacgcaacgcgaggaaccttaccagcgtttgacatcccaagaagttaacagagatgttttcgtgcctcttcggaggaacttggtgacaggtggtgcatggctgtcgtcagctcgtgtcgtgagatgttgggttaagtcccgcaacgagcgcaacccctttcgtatgttaccatcattaagttgggggctcatgcgagactgcctgcgatgagcaggaggaaggtggggatgacgtcaagtcatcatgccccttatacgctgggctacacacgtgctacaatggcgtaaacaaagggaagcaggagtgcgagcttgagcaaatcccaaaaataacgtcccagttcggactgcagtctgcaactcgactgcacgaagctggaatcgctagtaatcgcagatcagaatgctgcggtgaatacgttcccgggtcttgtacacaccgcccgtcacaccatgggagtcagtaacgcccgaagtcagtgacctaaccgcaagggaggagctgccgaaggcgggaccgataactggggtgaagtcgtaacaaggtagccgta

SEQ ID NO: 1057 - DNA, 1445 bp, Artificial Sequence
  Synthetic polymer
acgctggcggcgtgcttaacacatgcaagtcgaacgaagcgcttgaatggaattcttcggaaggaagctcaagtgactgagtggcggacgggtgagtaacgcgtgggtaacctgcctcatacagggggataacagttagaaatgactgctaataccgcataagcacacgtgatcgcatgattgagtgtgaaaaactccggtggtatgagatggacccgcgtctgattagctagttggtggggtaatggcccaccaaggcgacgatcagtagccggcctgagagggcgaacggccacattgggactgagacacggcccagactcctacgggaggcagcagtgggggatattgcacaatgggggaaaccctgatgcagcaacgccgcgtgtgggaagaaggttttcggattgtaaaccactgttcttggtgaagataatgacggtaaccagggagaaagctccggctaactacgtgccagcagccgcggtaatacgtagggagcaagcgttgtccggatttactgggtgtaaagggtgcgtaggcggctaggcaagtcagacgtgaaaaccatgggctcaacctgtggactgcgtttgaaactgtctagcttgagtgaagtagaggtaggcggaattcccggtgtagcggtgaaatgcgtagagatcgggaggaacaccagtggcgaaggcggcctactgggctttaactgacgctgaggcacgaaagcatgggtagcaaacaggattagataccctggtagtccatgccgtaaacgatgattactaggtgtggggggtctgaccccctccgtgccggagttaacacaataagtaatccacctggggagtacggccgcaaggttgaaactcaaaggaattgacgggggcccgcacaagcagtggagtatgtggtttaattcgaagcaacgcgaagaaccttaccaggtcttgacatccgactaacgaagtagagatacattaggtgccctttttgggaaggtcgagacaggtggtgcatggttgtcgtcagctcgtgtcgtgagatgttgggttaagtcccgcaacgagcgcaacccttgtcattagttgctacgtaagagcactctaatgagactgccgttgacaaaacggaggaaggtggggacgacgtcaaatcatcatgccccttatgacctgggctacacacgtactacaatggccgttaacagagggaagcaataccgtgaggtggagccaaaccctaaaaacggtcccagttcggattgtaggctgaaactcgcctacatgaagttggaattgctagtgatcgcggatcagcatgccgcggtgaatacgttcccgggccttgtacacaccgcccgtcacaccatgggagccggtaatacccgaagccagtagtctaaccgtaaggaggacgctgtcgaaggtaggattggcgactggggt

SEQ ID NO: 1058 - DNA, 1442 bp, Artificial Sequence
  Synthetic polymer
gcgacaggcctaacacatgcaagtcgaggggcagcggagaggtagcaatacctttgccggcgaccggcgcacgggtgagtaacacgtatgcaatccacctgtaacagggggataacccggagaaatccggactaataccccataatatgggcgctccgcatggagagtccattaaagagagcaatcttggttacagacgagcatgcgctccattagccagttggcggggtaacggcccaccaaggcgacgatggataggggttctgagaggaaggtcccccacattggaactgagacacggtccaaactcctacgggaggcagcagtgaggaatattggtcaatggtcggcagactgaaccagccaagtcgcgtgagggaagacggccctacgggttgtaaacctcttttgtcggagagtaaagtacgctacgcgtagcgtattgcaagtatccgaagaaaaagcatcggctaactccgtgccagcagccgcggtaatacggaggatgcgagcgttatccggatttattgggtttaaagggtgcgtaggcggcacgccaagtcagcggtgaaatttccgggcccaacccggagtgtgccgttgaaactggcgagctagagtacacaagaggcaggcggaatgcgtggtgtagcggtgaaatgcatagatatcacgcagaaccccgattgcgaaggcagcctgctagggtgaaacagacgctgaggcacgaaagcgtgggtatcgaacaggattagataccctggtagtccacgcagtaaacgatgaatactaactgtttgcgatacaatgtaagcggtacagcgaaagcgttaagtattccacctggggagtacgccggcaacggtgaaactcaaaggaattgacgggggcccgcacaagcggaggaacatgtggtttaattcgatgatacgcgaggaaccttacccgggctcaaacgcagggggaatatatatgaaagtatatagctagcaatagtcacctgcgaggtgctgcatggttgtcgtcagctcgtgccgtgaggtgtcggcttaagtgccataacgagcgcaacccctatggacagttactaacgggtgaagccgaggactctgtcgagactgccggcgcaagccgcgaggaaggtggggatgacgtcaaatcagcacggcccttacgtccggggcgacacacgtgttacaatggcaggtacagaaggcagccagtcagcaatgacgcgcgaatcccgaaaacctgtctcagttcggattggagtctgcaacccgactccatgaagctggattcgctagtaatcgcgcatcagccatggcgcggtgaatacgttcccgggccttgtacacaccgcccgtcaagccatgggagccgggggtacctgaagtgcgtaaccgcgaggagcgccctagggtaaaactggtgactggggc

SEQ ID NO: 1059 - DNA, 1506 bp, Artificial Sequence
  Synthetic polymer
agagtttgatcatggctcagattgaacgctggcggcaggcctaacacatgcaagtcgaacggtaacaggaaacagcttgctgtttcgctgacgagtggcggacgggtgagtaatgtctgggaaactgcctgatggagggggataactactggaaacggtagctaataccgcataacgtcgcaagaccaaagagggggaccttcgggcctcttgccatcggatgtgcccagatgggattagctagtaggtggggtaacggctcacctaggcgacgatccctagctggtctgagaggatgaccagccacactggaactgagacacggtccaggctcctacgggaggcagcagtggggaatattgcacaatgggcgcaagcctgatgcagccatgccgcgtgtatgaagaaggccttcgggttgtaaagtactttcagcggggaggaagggagtaaagttaatacctttgctcattgacgttacccgcagaagaagcaccggctaactccgtgccagcagccgcggtaatacggagggtgcaagcgttaatcggaattactgggcgtaaagcgcacgcaggcggtttgttaagtcagatgtgaaatccccgggctcaacctgggaactgcatctgatactagcaagcttgagtctcgtagaggggggtagaattccaggtgtagcggtgaaatgcgtagagatctggaggaataccggtggcgaaggcggccccctggacgaagactgacgctcaggtgcgaaagcgtggggagcaaacaggattagagaccctggtagtccacgccgtcaacgatgagaactagctgttggggagtttactttctagtagcgaagctaacgcgttaagttctccgcctggggagtacggccgcaaggttaaaactcaaagaaattgacgggggcccgcacaagcggtggagcatgtggtttaattcgatgcaacacgaaaaaccttacctacccttgacatcctcggaatttgtcagaaatgacttggtgccttcgggaaccgagtgacaggtgctgcatggctgtcgtcagctcgtgtcgtgagatgttgggttaagtcccgtaacgagcgcaacccttgtccttagttgccagcggggtctgccgggaactttaaggagactgccggtaataaaccggaggaaggcggggatgacgtcaagtcatcatggcccttacgggtagggctacacacgtgctacaatgggcagtacaaagggttgccaagccgcgaggtggagctaatcccaaaaagctgctctcagtccggattggagtctgcaactcgactccatgaagctggaatcgctagtaatcgcgaatcagaatgtcgcggtgaatacgttctcgggccttgtacacaccgcccgtcacaccatgggagtgaattgtaccagaagcgggtaggctaaccttcgggaggccgctcaccacggtgtgattcatgactggggtgaagtcgtaacaaggtaaccgta

SEQ ID NO: 1060 - DNA, 1482 bp, Artificial Sequence
  Synthetic polymer
aagagtttgatcctggctcaggatgaacgctggcggcgtgcctaatacatgcaagtcgaacgcgggcagtaatgtccgagtggcgaacgggtgagtaagacataagtaacctgccctttacagggggataactattggaaacgatagctaagaccgcataggtaaagataccgcatggtaggtttattaaaagtgccaaggcactggtagaggatggacttatggcgcattagctggttggtgaggtaacggctcaccaaggcgacgatgcgtagccgacctgagagggtgaccggccacactgggactgagacacggcccagactcctacgggaggcagcagtagggaattttcggcaatggggggaaccctgaccgagcaacgccgcgtgaaggaggaaggtcttcggactgtaaacttctgttataaaggaagaaaggcggatacagggaatggtatccgagtgacggtactttatgaggaagccacggctaactacgtgccagcagccgcggtaatacgtaggtggcaagcgttatccggaattattgggcgtaaagagggagcaggcggcagcaagggtctgtggtgaaagactgaagcttaacttcagtaagccatagaaaccgggcagctagagtgcaggagaggatcgtggaattccatgtgtagcggtgaaatgcgtagatatatggaggaacaccagtggcgaaggcgacgatctggcctgcaactgacgctcagtcccgaaagcgtggggagcaaataggattagataccctagtagtccacgccgtaaacgatgagtactaagtgttgggagtcaaatctcagtgctgcagttaacgcagtaagtactccgcctgagtagtacgttcgcaagaatgaaactcaaaggaattgacgggggcccgcacaagcggtggagcatgtggtttaattcgaagcaacgcgaagaaccttaccaggtcttgacatactcataaaggctccagagatggagagataggtatatgggatacaggtggtgcatggttgtcgtcagctcgtgtcgtgagatgttgggttaagtcccgcaacgagcgcaacccttatcgttagttaccatcattaagttggggactctagcgagactgccagtgacaagctggaggaaggcggggatgacgtcaaatcatcatgccccttatgacctgggctacacacgtgctacaatggatggagcagagggaagcgaagccgcgaggtggagcgaaacccagaaaaccattctcagttcggattgtagtctgcaactcgactacatgaagttggaatcgctagtaatcgcgaatcagcatgtcgcggtgaatacgttctcgggccttgtacacaccgcccgtcacaccatgagagttgataacacccgaagccggtggcctaaccgcaaggagggagctgtctaaggtgggattgatgattggggtgaagtcgtaacaagg

SEQ ID NO: 1061 - DNA, 1421 bp, Artificial Sequence
  Synthetic polymer
cggcgcgcctaacacatgcaagtcgaacgagcgagagagagcttgctttctcgagcgagtggcgaacgggtgagtaacgcgtgaggaacctgcctttaagagggggataacagtcggaaacggctgctaataccgcataaagcatcaaattcgcatgtttttgatgccaaaggagcaatccgcttttagatgagctcgcgtctgattagctggttggcggggtaacggcccaccaaggcgacgatcagtagccggactgagaggttgaacggccacattgggactgagacacggcccagactcctacgggaggcagcagtggggaatattgcacaatgggggaaaccctgatgcagcgacgccgcgtggaggaagaaggtcttcggattgtaaactcctgttgttgaggaagataatgacggtactcaacaaggaagtgacggctaactacgtgccagcagccgcggtaaaacgtaggtcacaagcgttgtccggaattactgggtgtaaagggagcgcaggcgggagaacaagttggaagtgaaatccatgggctcaacccatgaactgctttcaaaactgtttttcttgagtagtgcagaggtaggcggaattcccggtgtagcggtggaatgcgtagatatcgggaggaacaccagtggcgaaggcggcctactgggcaccaactgacgctgaggctcgaaagtgtgggtagcaaacaggattagataccctggtagtccacaccgtaaacgatgattactaggtgttggaggattgaccccttcagtgccgcagttaacacaataagtaatccacctggggagtacgaccgcaaggttgaaactcaaaggaattgacgggggcccgcacaagcagtggagtatgtggtttaattcgacgcaacgcgaagaaccttaccaagtcttgacatcccttgacgaacatagaaatatgttttctcttcggagcaaggagataggtggtgcatggttgtcgtcagctcgtgtcgtgagatgttgggttaagtcccgcaacgagcgcaacccttatggtcagttactacgcaagaggactctggccagactgccgttgacaaaacggaggaaggtggggatgacgtcaaatcatcatgccctttatgacttgggctacacacgtactacaatggcgttaaacaaagagaagcaagaccgcgaggtggagcaaaactcagaaacaacgtcccagttcggactgcaggctgcaactcgcctgcacgaagtcggaattgctagtaatcgtggatcagcatgccacggtgaatacgttcccgggccttgtacacaccgcccgtcacaccatgagagccggggggacccgaagtcggtagtctaaccgcaaggaggacgccgccgaaggtaaaactggtgattggggtg

SEQ ID NO: 1062 - DNA, 1423 bp, Artificial Sequence
  Synthetic polymer
gacgaacgctggcggcacgcctaacacatgcaagtcgaacggacgaggaggagcttgcttctccgagttagtggcggacgggtgagtaacacgtgagcaacctgcccttgagagggggatagcttctggaaacggatggtaataccccataacatatattttaggcatctaagatatatcaaagaaattcgctcaaggatgggctcgcgtctgattagatagttggtgaggtaacggcccaccaagtcgacgatcagtagccggactgagaggttgaacggccacattgggactgagacacggcccagactcctacgggaggcagcagtggggaatattgcacaatggggggaaccctgatgcagcgatgccgcgtggaggaagaaggttttcggattgtaaactccttttaacagggacgataatgacggtacctgaagaaaaagctccggctaactacgtgccagcagccgcggtaatacgtagggagcgagcgttgtccggaattactgggtgtaaagggagcgtaagcgggacggtaagtcaggtgtgaaatatacgtgctcaacatgtagactgcacttgaaactgctgttcttgagtgaagtagaggtaagcggaattcctagtgtagcggtgaaatgcgtagatattaggaggaacatcggtggcgaaggcggcttactgggcttttactgacgctgaggctcgaaagcgtggggagcaaacaggattagataccctggtagtccacgctgtaaacgatgattactaggtgtggggggactgaccccttccgtgccgcagttaacacaataagtaatccacctggggagtacgaccgcaaggttgaaactcaaaggaattgacgggggcccgcacaagcagtggagtatgtggtttaattcgaagcaacgcgaagaaccttaccaggtcttgacatcgtatgcatagtctagagatagatgaaatcccttcggggacatatagacaggtggtgcatggttgtcgtcagctcgtgtcgtgagatgttgggttaagtcccgcaacgagcgcaacccttacctttagttgctacgcaagagcactctagagggactgccgttgacaaaacggaggaaggtggggatgacgtcaaatcatcatgccccttatgacctgggctacacacgtactacaatggcaattaacagagggaagcaaaacagcgatgtggagcaaatcccgaaaaattgtctcagttcagattgcaggctgcaactcgcctgcatgaagtcggaattgctagtaatcgcagatcagaatgctgcggtgaatacgttcccgggccttgtacacaccgcccgtcacaccatgggagtcggtaacacccgaagcctgtagtctaaccttttaggaggacgcagtcgaaggtgggattgat

SEQ ID NO: 1063 - DNA, 1499 bp, Artificial Sequence
  Synthetic polymer
ttgagagtttgatcctggctcaggatgaacgctggcggcgtgcttaacacatgcaagtcgaacgaagcattttagaatgagacttcggtggatttttaaaatgactgagtggcggacgggtgagtaacgcgtgggcaacctgccttacacagggggacaacagttagaaatagctgctaataccgcataagcgcacagtaccgcatggtaccgtgtgaaaaactccggtggtgtaagatgggcccgcgttggattagctagttggaggggtaacggcccaccaaggcgacgatccatagccgacctgagagggtgaccggccacattgggactgagacacggcccagactcctacgggaggcagcagtggggaatattgcacaatgggcgaaagcctgatgcagcgacgccgcgtgagcgaagaagtatttcggtatgtaaagctctatcagcagggaagaaaatgacggtacctgactaagaagctccggctaaatacgtgccagcagccgcggtaatacgtatggagcaagcgttatccgggatttactgggtgtaaagggagcgtaggcggatgattaagtgggatgtgaaatacccgggctcaacttgggtgctgcattccaaactggttatctagagtgcaggagaggagagtggaattcctagtgtagcggtgaaatgcgtagagattaggaagaacaccagtggcgaaggcgactctctggactgtaactgacgctgaggctcgaaagcgtgggggagcaaacaggattagataccctggtagtccacgccgtaaacgatgaatactaggtgtggggggttcaacacctccgtgccgccgctaacgcattaagtattccgcctggggagtacggtcgcaagattaaaactcaaaggaattgacggggacccgcacaagtagcggagcatgtgggtttaattcgaagcaacgcgaagaaccttacctacacttgacatcccttgcattactcttaatcgaggaaatcccttcggggacaaggtgacaggtggtgcatggttgtcgtcagctcgtgtcgtgagatgttgggttaagtcccgcaacgagcgcaacccttgtctttagttgccatcatttagttgggcactctagagagactgccagggataacctggaggaaggtggggatgacgtcaaatcatcatgccccttatgcctagggctacacacgtgctacaatgggtggtacagagggcagccaaaccgtgaggtggagcaaatcccttaaagccattctcagttcggattgtaggctgaaactcgcctacatgaagctggagttactagtaatcgcagatcagaatgctgcggtgaatgcgttcccgggtcttgtacacaccgcccgtcacaccatgggagttggagacacccgaagccgattgtctaaccttttgggagaagtcgtcgaaggtggaatcaataactggggtgaagtcgtaacaaggtagccgta

SEQ ID NO: 1064 - DNA, 1439 bp, Artificial Sequence
  Synthetic polymer
ctcaggacgaacgctggcggcgtgcctaatacatgcaagtcgaacgcttctttttccaccggagcttgctccaccggaaaaagaggagtggcgaacgggtgagtaacacgtgggtaacctgcccatcagaaggggataacacttggaaacaggtgctaataccgtataacaatcaaaaccgcatggttttgatttgaaaggcgctttcgggtgtcgctgatggatggacccgcggtacattagctagttggtgaggtaacggctcaccaaggccacgatgcatagccgacctgagagggtgatcggccacattgggactgagacacggcccaaactcctacgggaggcagcagtagggaatcttcggcaatggacgaaagtctgaccgagcaacgccgcgtgagtgaagaaggttttcggatcgtaaaactctgttgttagagaagaacaaggatgagagtaactgttcatcccttgacggtatctaaccagaaagccacggctaactacgtgccagcagccgcggtaatacgtaggtggcaagcgttgtccggatttattgggcgtaaagcgagcgcaggcggtttcttaagtctgatgtgaaagcccccggctcaaccggggagggtcattggaaactgggagacttgagtgcagaagaggagagtggaattccatatgtagcggtggaatgcgtagatatatggaggaacaccagtggcgaaggcggctctctggtctgtaactgacgctgaggctcgaaagcgtggggagcaacaggattagataccctggtagtccacgccgtaaacgatgagtgctaagtgttggagggtttccgcccttcaggtgctgcagctaacgcattaagcactccgcctggggagtgcgaccgcaaggttgaaactcaaaggaattgacgggggcccgcacaagcggtggagcatgtggtttaattcgaagcaacgcgaagaaccttaccaggtcttgacatcctttgaccactctagagatagagcttccccttcgggggcaaagtgacaggtggtgcatggttgtcgtcagctcgtgtcgtgagatgttgggttaagtcccgcaacgagcgcaatcgttattgttagttgccatcattcaggtgggcactctagcaagactgccggtgacaaaccggaggaaggtggggatgacgtcaaatcatcatgcccattttgacttgggatacacacgtggtacaatgggaagttcaacgagttgcgaagtcgcgagggtaagataatctcttaaagcttctatcagttcggattgcaggctgcaagtcgcctgcatgaagccggaatcggtagtaattgcggatcagcatgccgcggtgaataggttcccgggcctggtacactccgcccgtcacccctcgagagtttgtaacacccgaagtcggtgag

SEQ ID NO: 1065 - DNA, 1384 bp, Artificial Sequence
  Synthetic polymer
cctaacacatgcaagtcgaacgagcgagagagagcttgctttcttgagcgagtggagaacgggggagtaacgcgtgaggaacctgcctcaaagagggggacaacagttggaaacgactgctaataccgcataagcccacgacccggcatcgggtagagggaaaaggagcaatccgctttgagatggcctcgcgtccgattagctagttggtgaggtaatggcccaccaaggcgacgatcggtagccggactgagaggttgaacggccacattgggactgagacacggcccacactcctacgggaggcagcagtggggaatattgcacaatgggggaaaccctgatgcagcgacgccgcgtggaggaagaaggtcttcggattgtaaactcctgttgttgaggaagataatgacggtactcaacaaggaagtgacggctaactacgtgccagcagccgcggtaaaacgtacgtcacaagcgttgtccggaattactgggtgtaaagggagcgcaggcgggaagacaagttggaagtgaaatccatgggctcaacccatgaactgctttcaaaactgtttttcttgactactgcagaggtaggcggaattcccggtgtagcggtggaatgcgtagatatcgggaggaacaccagtggcgaaggcggcctactgggcaccaactgacgctgaggctcgaaagtgtgggtagcaaacaggattagataccctggtagtccacactgtaaacgatgattaactaggtgttggaggattgaccccttcagtgccgcagttaacacaataagtaattcacctggggagtacgaccgcaaggttgaaactcaaaggaattgacgggggcccgcacaagcagtggagtatgtggtttaattcgacgcaacgcgaagaaccttaccaagtcttgacatcctgcgacgcacatagaaatatgtgtttccttcgggacgcagagacaggtggtacatggttgtagtcagctcgtgtcgtgagatgttgggttaagtcccgcaacgagcgcaacccttatggtcagttcctactgcaagaggactctggccagactgccgtagacaaaacggaggaaggtggggatgatgtcgaatcatcatgccctttatgacttggggtacacatgtcctacaaaggcgttaaacaaagagaagcaagaccgcgaggtggagcaaaactcagaaacagcgtcccagttcggtacttcaggctgcaactcgcgtgcacgaagtcggaactgctagtaatcgcagatcagcatgctgcggtgaatacgttcccgggccttgtacacacctcccgtcaccccatgagagccggggggaccggaagtctgtagtctaaccgcaaggagg

SEQ ID NO: 1066 - DNA, 1449 bp, Artificial Sequence
  Synthetic polymer
catgctttacacatgcaagtcgaacggcagcacagggagcttgctcccgggtggcgagtggcgcacgggtgagtaatacatcggaacgtgtcctgttgtgggggataactgctcgaaagggtggctaataccgcatgagacctgagggtgaaagcgggggatcgcaagacctcgcgcaattggagcggccgatgcccgattagctagttggtgaggtaaaggctcaccaaggcgacgatcggtagctggtctgagaggacgaccagccacactgggactgagacacggcccagactcctacgggaggcagcagtggggaattttggacaatgggggcaaccctgatccagccatgccgcgtgcaggatgaaggccttcgggttgtaaactgcttttgtcagggacgaaaaggaccgtgttaataccatggtctgctgacggtacctgaagaataagcaccggctaactacgtgccagcagccgcggtaatacgtagggtgcaagcgttaatcggaattactgggcgtaaagcgtgcgcaggcggttctgtaagacagatgtgaaatccccgggcttaacctgggaattgcatttgtgactgcaggactagagttcatcagaggggggtggaattccaagtgtagcagtgaaatgcgtagatatttggaagaacaccaatggcgaaggcagccccctgggatgcgactgacgctcatgcacgaaagcgtggggagcaaacaggattagataccctggtagtccacgccctaaacgatgtctactggttgttggggttttttaaccttggtaacgaagctaacgcgtgaagtagaccgcctggggagtacggtcgcaagattaaaactcaaaggaattgacggggacccgcacaagcggtggatgatgtggattaattcgatgcaacgcgaaaaaccttacctagccttgacatgccaggaatcctgaagagattcgggagtgcccgcaagggaatctggacacaggtgctgcatggctgtcgtcagctcgtgtcgtgagatgttgggttaagtcccgcaacgagcgcaacccttgtcactagttgctacgtaagagcactctagtgagactgccggtgacaaaccggaggaaggtggggatgacgtcaagtcctcatggcccttatggctagggcctcacacgtcatacaatggtcggaacagagggcagcgaagccgcgaggtggagcaaatcccagaaaaccgatcgtagtccggattgcagtctgcaactcgactgcatgaagtcggaatcgctagtaatcgcggatcagcatgccgcggtgaatacgttcccgggtcttgtacacaccgcccgtcacaccatgggagtctgcaatgcccaaagccggtggcctaaccttcgggaaggagccgtctaaggcagggcagatgactggggtgaagtcgt

SEQ ID NO: 1067 - DNA, 1490 bp, Artificial Sequence
  Synthetic polymer
tggcggcgtgcctaatacatgcaagtcgaacgcttctttcctcccgagtgcttgcactcaattggaaagaggagtggcggacgggtgagtaacacgggggtaacctacccatcagagggggataacacttggaaacaggtgctaataccgcataacagtttatgccgcatggcataacagtgaaaggcgctttcggatgtcgctgatggatgaacccgcggtgcattacctagttggtgaggtaacggctcaccacggccacgatgcatagccgacctgagagggatgatcggccacactgggactgagacacggcccagactcctacgggaggcagcagtagggaatcttcggcaatggacgaaagtctgaccgagcaacgccgcgtgagtgaagaaggttttcggatcgtaaaactctgttgttagagaagaacaaggacgttagtaactgaacatcccctgacggtatctaaccagaaagccacggctaactacgtgccagcggccgcggtaatacgtatgtggcaagcgttgtccggatttattgggcgtaaagcaagcgcaggcggtttcttaagtctgatgtgaaagcccccggctcacccggggagggtcattggaaactgggagacttgagtgcacaagaggagagtggaattccatgtgtagcgatgaaatgcgtagatatatggaggaacaccagtggcgaatgcggctctctggtctgtaactgacgctgaggctcgaaagcgtggggagcaaacaggattagataccctggtagtccacgccgtaaacgatgagtgttaagtgttggagggtttctgcctttcagtgttgcagcaaacgcattaagcactccgcctggggagtacgaccgcaaggttgaaactcaaaggaattgacggggggccgcacaagcggtggagcatgtggtttaatttgaagcaacgcgaagaaccttttcaggtcttgacatcctttgaccactatagagatagagctttcccttcggggacaaagtgacaggtggtgcatggttgtcgtcagctcgtgtcgtgagatgttgggttaagtcccgcaacgagcgcaacccttattgttagttgccatcatttagttgggcactctagcgagactgccggtgacaaaccggaggaaggtggggatgacgtcaaatcatcatgccccttatgacgtgggctacacacgtgcatacaatgggaagtacaacgagtcgctcagaccgcgaggtcatgcaaatctcttaaagcttctttcagttcggattgcaggttgcaacttgcctgcatgaaaccggaatcgctagtaatcgcggatcagcacgccgcggtgaatacgttcccgggctttgtacacaccgcccgtcacaccccgagagtttgtaacacccgaagtcggtgaggtaaccttttggagccagccgcctaaggctggggtagatgattggggtgaagtcataacaag

SEQ ID NO: 1068 - DNA, 1449 bp, Artificial Sequence
  Synthetic polymer
cgctagcgacaggcctaacacatgcaagtcgaggggcagcggataggtagcaatacctttgccggcgaccggcgcacgggtgagtaacacatatgcaatccacctgtaacagggggataacccggagaaatccggactaataccccataatatgggctctccgcatggagggtccattagagagagcaattttggttacagacgagcatgcgctccattagccagttggcggggtaacggcccaccaaagcgacgatggataggggttctgagaggaaggtcccccacattggaactgaaacacggtccaaactcctacgggaggcggcagtgaggaatattggtcaatggtcggcagactgaaccagccaagtcgcgtgagggaagccggccctacgggttgtaaacctcttttgtcggagagtaaagtacgctacgtgtagcgtattgcaagtatccgaagaaaaagcatcggctaactccgtgccagcagccgcggtaatacggaggatgcgagcgttatccggatttattgggtttaaagggtgcgtaggcggcacgccaagtcagcggtggaattttcgggctcaacccggactgtgccgttgaaactggcgagctagagtgcacaagaggcaggcggaatgcgtggtgtagcggtgaaatgcatagatatcacgcagaaccccgattgcgaaggcagcctgctagggtgcgacagacgctgaggcacgaaagcgtgggtatcgaacaggattagataccctggtagtccacgcagtaaacgatgaatactaactgtttgcgatacaatgtaagcggtacagtgaaagcgttaagtattgcacatggtgagtacactgacaacgatgaaaatcaaaggaattgacggcgacccgcacaacaggaggaacatgtggtttaattcgatgatacgcgaggaacccttacccgtgctcaaacgcagggggaatatatatgaaagtttatagactagcaatagtcacttgcgcaggtgctgtcatgatggtcgtcagctgagtaccgtgaggagttggcttatgtgaccataacgagtgcaacccctatcgacagttactaacgggtcaagccgaggactctgtcgagagcgccggggcagaccgcgaggaaggtggggatgtcgtcaaatcagcacggccattacgtccggggcgacacacgtgttacaatggcaggtacagaaggcagccagtcagcaatgactcgagaatcccgaaaacctgtctcagttggtattggagtctgcaaccagactccatgaagctggattatctagtaatcgcgcatcagccatggcgcggtgaatacgtttccgggccttgtacactccgcccgtcaagccatggaagccgggagtacgtgaagcatgcaaacgcaaggagcgtacgaaggtaataccggtaactg

SEQ ID NO: 1069 - DNA, 1341 bp, Artificial Sequence
  Synthetic polymer
gggacagccccccgaaagggggattaatacctggtactccgggagcggcgcatgccgcccccgggaaagctctggcggcgggggatggggtcgcggcccatcaggtagacggcggggcagaggcccaccgtgccgacgacgggtagccgggttgagagaccgaccggccacattgggactgagatacggcccagactcctacgggaggcagcagtggggaattttgcgcaatgggggcaaccctgacgcagcaacgccgcgtgcgggacgaaggcgtccgcgtcgtaaaccgctttcagcggggaacacctaacgagggtacccgcagaagaagccccggctaaatacgtgccagcagccgcggtaatacgtatggggcgagcgttatccggattcattgggcgtaaagcgcgcgtaggcggagcgctaagcgggacctctaacccgagggctcaacccccggccgggtcccgaactggcgctctcgagtgcggtaggggagagcggaattcccggtgtagcggtggaatgcgcagatatcgggaagaacaccgacggcgaaggcagctctctgggccgaaactgacgctgaggcgcgaaagctgggggagcgaacaggattagataccctggtagtcccagccgtaaacgatgggcgctaggtgtgggggatcagatcccccgtgccgcagccaacgcattaagcgccccgcctggggagtacggccgcaaggctaaaactcaaaggaattgacgggggcccgcacaagcagcggagcatgtggcttaattcgaagcaacgcgaagaaccttaccagggcttgacatgcaggtgaagcggcggagacgccgtggccgagaggagcctgcacaggtggtgcatggctgtcgtcagctcgtgtcgtgagatgttgggttaagtcccgcaacgagcgcaacccctgccccgtgttgccagcattcagttggggactcgcgggggactgccggcgtcaagccggaggaaggtggggacgacgtcaagtcatcatgccccttatgccctgggccgcacacgtgctacaatggccggtacagagggttgcgaccccgcgagggggagcggatcccgcaaagccggccccagttcggatcggaggctgcaacccgcctccgtgaagccggagttgctagtaatcgcggatcagcacgccgcggtgaatacgttcccgggccttgtacacaccgcccgtcacaccacccgagtcgtctgcacccgaagccgccggccgaaccctttcaggggcggaggcgtcgaaggtgtggagggtgaggggggtgaagtcgtaacaaggagccgta

SEQ ID NO: 1070 - DNA, 1378 bp, Artificial Sequence
  Synthetic polymer
ttagagtttgatcctggctcaggacgaacgtttgcggcgtgcctaacacatgcaagtcgagcgaatgatttttcttcgggaacggatttagcggcggacgggtgagtaacacgtgggcaacctgcctcatagaggggaatagccttccgaaagggagattaataccgcataagattgtagtaccgcatggtacagcaattaaaggagcaatccgctatgagatggacccgcgtcgcattagctagttggtgaggtaacggctcaccaaggcgacgatgcgtagccgacctgagagggtgatcggccacattgggactgagacacggcccagactcctacgggaggcagcagtggggaatattgcacaatgggggaaaccctgatgcagcaacgccgcgtgagtgatgacggtcttcggattgtaaagctctgtctttagggacgataatgacggtacctaaggaggaagccacggctaactacgtgccagcagccgcggtaatacgtaggtggcaagcgttgtccggatttactgggcgtaaagggagcgtaggtggatatttaagtgggatgtgaaatacccgggcttaacctgggtgctgcattccaaactggatatctagagtgcaggagaggaaaggagaattcctagtgtagcggtgaaatgcgtagagattaggaagaataccagtggcgaaggcgcctttctggactgtaactgacactgaggctcgaaagcgtggggagcaaacaggattagataccctggtagtccacgccgtaaacgatgaaatactaggtgtagggggttgtcatgacctctgtgccgccgctaacgcattaagtattccgcctggggagtacggtcgcaagattaaaactcaaaggaattgacgggggcccgcacaagcagcggagcatgtggtttaattcgaagcaacgcgaagaaccttacctagacttgacatctcctgaattactctgtaatggaggaagccgcttcggcggcaggaagacaggtggtgcatggttgtcgtcagctcgtgtcgtgagatgttgggttaagtcccgcaacgagcgcaacccttattgttagttgctaccatttagttgagcactctagcgagactgcccgggttaaccgggaggaaggtggggatgacgtcaaatcatcatgccccttatgtctagggctacacacgtgctacaatggtcggtacaatgagatgcaacctcgcgagagtgagcaaaactataaaaccgatttcagttcggattgtaggctgaaactcgcctacatgaagctggagttgctagtaatcgcgaatcagaatgtcgcggtgaatacgttcccgggccttgtacacaccgcccgtca

SEQ ID NO: 1071 - DNA, 1487 bp, Artificial Sequence
  Synthetic polymer
ttgagagtttgatcctggctcaggacgaacgctggcggcgtgcctaacacatgcaagtcgaacggggttaagagagcttgctttcttgacttagtggcgaacgggtgagtaacgcgtgaggaatctgcctttcagtgggggacaacagttggaaacgactgctaataccgcataatgtcattcggaggcatctctgagtgaccaaagatttattgctgaaagatgacctcgcgtctgattagctagttggtgaggtaatggctcaccaaggcgacgatcagtagccggactgagaggttgaacggccacattgggactgagatacggcccagactcctacgggaggcagcagtggggaatattgggcaatgggggaaaccctgacccagcaacgccgcgtgaaggaagaaggccttcgggttgtaaacttcttttagtagggacgaagaacgtgacggtacctacagaaaaagcaacggctaactacgtgccagcagccgcggtaatacgtaggttgcaagcgttgtccggaattactgggtgtaaagggcgtgtaggcggagctgcaagtcagatgtgaaatcccggggctcaaccctggaactgcatttgaaactgtagcccttgagtatcggagaggcaagcggaattcctagtgtagcggtgaaatgcgtagatattaggaggaacaccagtggcgaaggcggcttgctggacgacaactgacgctgaggcgcgaaagcgtggggagcaaacaggattagataccctggtagtccacgctgtaaacgatgaatactaggtgtgggaggactgaacccttccgtgccgcagttaacacaataagtattccacctggggagtacgaccgcaaggttgaaactcaaagggattgacgggggcccgcacaagcagtggattatgtggtttaattcgacgcaacgcgaagaaccttaccaggacttgacatcccgatgaccgctctagagatagagcttctcttcggagcatcggtgacaggtggtgcatggttgtcgtcagctcgtgtcgtgagatgttgggttaagtcccgcaacgagcgcaacccctatcttcagtagccatcattgagttgggcactctgggagagactgccgtggataacacggaggaaggtggggatgacgtcaaatcatcatgccccttatgtcttgggctacacacgtgctacaatggctggtaacaaagtgaagcgagacggcgacgttcagcaaatcacaaaaacccagtcccagttcagattgtagtctgcaactcgactacatgaagtcggaattgctagtaatcgcggatcagcatgccgcggtgaatacgttcccgggccttgtacacaccgcccgtcacaccatgggagttggaagcacccgaagtcggtgacctaaccgtaaggaaggagccgccgaaggtgaagccagtgactggggtgaagtcgtaacaaggtagccgta

SEQ ID NO: 1072 - DNA, 1327 bp, Artificial Sequence
  Synthetic polymer
gatgaacgctggcggcgtgcttaacacatgcaagtcgaacgattaacccgccctcgggcggttatagagtggcgaacgggtgagtaacacgtgaccaacctgcccccttcaccgggataacccagggaaacctgcgctaataccggatactccgcatgggccgcatggcccttgcgggaaagctccggcggaaggggatggggtcgcggcccattaggtagttggcggggtaacggcccaccaagcccgcgatgggtagccgggttgagagaccgatcggccacattgggactgagatacggcccagactcctacgggaggcagcagtggggaattttgcgcaatgggggaaaccctgacgcagcaacgccgcgtgcgggacgaaggccttcgggttgtaaaccgctttcagcagggaatatcgtgaaggtacctgcagaagaagctccggctaactacgtgccagcagccgcggtaatacgtagggagcgagcgttatccggattcattgggcgtaaagcgcgcgtaggcggcccgtcaagcggggtttcaaatccaggggctcaacctctggccggaccccgaactggcgggctcgagtgcggtagaggaaggtggaattcccagtgtagcggtggaatgcgcagatattgggaagaacaccgatggcgaaggcagccttctgggccgccactgacgctgaggcgcgaaagctaggggagcgaacaggattagataccctggtagtcctagccgtaaacgatgggcactaggtgtgggggagcatctcctccgtgccgcagccaacgcattaagtgccccgcctggggagtacggccgcaaggctaaaactcaaaggaattgacgggggcccgcacaagcagcggagcatgtggcttaattcgaagcaacgcgaagaaccttaccagggcttgaaatcatggtgaagccggggaaacccggtggccgagaggagccatgacaggtggtgcatggctgtcgtcagctcgtgtcgtgagatgttgggttaagtcccgcaacgagcgcaacccctgtcgcgtgttgccagcgttcagttggggactcgcgcgagactgccggcgtcaagccggaggaaggtggggacgacgtcaagtcatcatgccccttatgccctgggctgcacacgtgctacaatggccggtacaacgggctgcgacgccgcgaggcggagcgaatccctcaaagccggccccagttcggatcgcaggctgcaattcgcctgcgtgaagccggagttgctagtaatcgcggatcagcatgccgcggtgaatacgttcccgggcct

SEQ ID NO: 1073 - DNA, 1415 bp, Artificial Sequence
  Synthetic polymer
cgctggcggcgtgcctaacacatgcaagtcgaacggagataaagatttcggtttttatcttagtggcgcacgggtgagtaacacgtgaataacctgacccaaagagggggataacacctggaaacaggtgctaataccgcataagaccacaatgtcgcatgacgaaggggtcaaagaaaatcgctttgggaggggttcgcgtcccattaggtagtaggcggggtaacggcccacctagccaacgatgggtagccgagctgagaggctgatcggccacactggaactgagacacggtccagactcctacgggaggcagcagtggggaatattgggcaatgggcgcaagcctgacccagcaacgccgcgtgagggaagaaggttttcggattgtaaacctctgtcgcagaagacgaaggaagtgacggtattctgtgaggaagccccggctaactacgtgccagcagccgcggtaatacgtagggggcgagcgttgtccggaattactgggcgtaaagggagcgtaggcggtctgataagttggatgtgaaatacccgggcttaacttggggggtgcatccaatactgttggactagagtacaggagaggaaagcggaattcctagtgtagcggtgaaatgcgtagatattaggaggaacaccagtggcgaaggcggctttctggactgttactgacactgaggcacgaaagtgtggggagcaaacaggattagataccctggtagtccacaccgtaaacgatgagcactaggtgtcggggtcgcaagacttcggtgccgcagttaacgcattaagtgctccgcctggggagtacgtacgcaagtatgaaactcaaaggaattgacggggacccgcacaagcagcggagcatgtggtttaattcgaagcaacgcgaagaaccttaccaggacttgacatccctctgaaacccctgataacgaaggggcctctacggacagaggagacaggtggtgcatggttgtcgtcagctcgtgtcgtgagatgttgggttaagtcccgcaacgagcgcaacccttgctgttagttgccatcattgagttgggcactctaacgggactgccggggataactcggaggaaggtggggatgacgtcaaatcatcatgccccttatgttctgggctacacacgtgctacaatggtcggtacaaagagcagcaagaccgcgaggtggagcaaatctcaaaaaccgatcccagttcggattgcaggctgcaactcgcctgcatgaagttggagttgctagtaatcgcgaatcagaatgtcgcggtgaatgcgttcccgggtcttgtacacaccgcccgtcacaccacggaagttgggggtgcccaaagttggtcaaaaaatagattacctaaggcaaaaccaatgactgg

SEQ ID NO: 1074 - DNA, 1429 bp, Artificial Sequence
  Synthetic polymer
acgctggcggcgcgcctaacacatgcaagtcgaacgagcgagagagagcttgctttcttgagcgagtggcgaacgggtgagtaacgcgtgaggaacctgcctcaaagagggggacaacagttggaaacgactgctaataccgcataagcccacggctcggcatcgagcagagggaaaaggagcaatccgctttgagatggcctcgcgtccgattagctagttggtgaggtaatggcccaccaaggcgacgatcgatagccggactgagaggttgaacggccacattgggactgagacacggcccagactcctacgggaggcagcagtggggaatattgcacaatgggggaaaccctgatgcagcgacgccgcgtggaggaagaaggtcttcggattgtaaactcctgttgttgaggaagataatgacggtactcaacaaggaagtgacggctaactacgtgccagcagccgcggtaaaacgtaggtcacaagcgttgtccggaattactgggtgtaaagggggcgcaggcgggaagacaagttggaagtgaaatccatgggctcaacccatgaactgctttcaaaactgtttttcttgagtagtgcagaggtaggcggaattcccggtgtagcggtggaatgcgtagatatcgggaggaacaccagtggcgaaggcggcctactgggcaccaactgacgctgaggctcgaaagtgtgggtagcaaacaggattagataccctggtagtccacactgtaaacgatgattactaggtgttggaggattgacccccttcatgccgcagttaacccataagtaatccacgtggggagtacgaccgcaaagttgaaactcaaaagaattgacgggggcccgcacaagcagtggagtatgtggtttaattagacgcaacgcgaagaaccttaccaagtcttgacatcctgcgacggtttatgatacagaactttcgttcgggacgcagaaacaggtggagcatggttgtcgtcagctcgtgtcgtgagatgttggaataagtcccgcaacgagcgcaacccttatggtcagttattactcaagaggactctggccagactgccgcttgacaaaacggaggaaggtggggagagacgtcaaatcatcatgtcctttatgacttgggctacacacgtactacaatggcgttaaacaaagagaagcaagaccgcgaggtggagcaaaactcagaaacaacgttccagttcggactgcaggctgcaactcgcctgcacgaagtcggaattgctagtaatcgcagatcagcatgctgcggtgaatacgttcccgggccttgtacacaccgcccgtcacaccatgagagccggggggacccgaagtcggtagtctaaccgcaaggaggacgccgccgaaggtaaaactaatgattggggtg

SEQ ID NO: 1075 - DNA, 1472 bp, Artificial Sequence
  Synthetic polymer
gagtttgctcctggctcaggatgaacgctggcggcgtgcttaacacatgcaagtcgaacgattaacccatcttcggatggttatagagtggcgaacgggtgagtaacacgtgaccaacctaccttatactttgggataactcagagaaatctgtgctaataccgaatactccgataccttcgcatgttggtttcgggaaagttccggcggtataagatggggtcgcggcctattggatagttggtggggtaacggcctaccaagtcagcgataggtagccgggttgagagactgatcggccacattgggactgagatacggcccagactcctacgggaggcagcagtggggaattttgcgcaatgggcgaaagcctgacgcagcaacgccgcgtgcgggatgacggccttcgggttgtaaaccgctttcagcagggaagaattttgacggtacctgcagaagaagctccggctaactacgtgccagcagccgcggtaatacgtagggagcaagcgttatccggatttattgggcgtaaagcgcgcgtaggcggcttattaagcggaatctctaatctgagggctcaacccccagccggattccgaactggtaagctcgagtttggtagaggaagatggaattcccagtgtagcggtgaaatgcgcagatattgggaagaacaccgatggcgaaggcagtcttctgggccaacactgacgctgaggtgcgaaagcgtggggagcaaacaggattagataccctggtagtccacgccgtaaacgatgggcactaggtgtggggaggaatacctttccgtgccgcagctaacgcattaagtgccccgcctggggagtacggccgcaaggctaaaactcaaaggaattgacgggggcccgcacaagcagcggagcatgtggcttaattcgaagcaacgcgaagaaccttaccagggcttgacatataggtgaagcggcggaaacgtcgtggccgaaaggagcctatacaggtggtgcatggctgtcgtcagctcgtgtcgtgagatgttgggttaagtcccgcaacgagcgcaacccctgtcgtatgttgccagcatttagttggggactcatacgagactgccggcgttaagccggaggaaggtggggatgacgtcaagtcatcatgccccttatgtcctgggctgcacacgtgctacaatggccgatacaacgggctgcgagccagcgatggtaagcgaatcccttaaaatcggtctcagttcggattggaggctgcaattcgcctccatgaagtcggagttgctagtaatcgcggatcagcatgccgcggtgaatacgttcccgggccttgtacacaccgcccgtcacaccacccgagttgtctgcacccgaagtcgccggcctaaccttttggagggaggcgccgaaggtgtggggagtaaggggggtgaagtcgtaatcaaggtaaccgta

SEQ ID NO: 1076 - DNA, 1445 bp, Artificial Sequence
  Synthetic polymer
tgcttaacacatgcaagtcgaacgaagcactttacctgatttccttcggggatgattgttctgtgactgagtggcggacgggtgagtaacgcgtgggtaacctgcctcatacagggggatagcagctggaaacggctgataaaaccgcataagcgcacagcatcgcatgatgcagtgtgaaaaactccggtggtatgagatggacccgcgtctgattagctagttggtgaggtaacggcccaccaaggcgacgatcagtagccggcctgagagggtgaccggccacattgggactgagacacggcccaaactcctacgggaggcagcagtggggaatattgcacaatgggggaaaccctgatgcagcgacgccgcgtgaaggaagaagtatctcggtatgtaaacttctatcagcagggaagataatgacggtacctgactaagaagccccggctaactacgtgccagcagccgcggtaatacgtagggggcaagcgttatccggatttactgggtgtaaagggagcgtaggcggcggagcaagtcagaagtgaaagcccggggctcaaccccgggacggcttttgaaactgccctgcttgatttcaggagaggtaagcggaattcctagtgtagcggtgaaatgcgtagatattaggaggaacaccagtggcgaaggcggcttactggactgacaatgacgctgaggctcgaaagcgtggggagcaaacaggattagataccctggtagtccacgccgtaaacgatgaatactaggtgtcggggctcataagagcttcggtgccgcagcaaacgcaataagtattccacctggggagtacgttcgcaagaatgaaactcaaaggaattgacggggacccgcacaagcggtggagcatgtggtttaattcgaagcaacgcgaagaaccttaccaggccttgacatcccggtggccgtcccgtaatggggacctctcttcggagcaccggtgacaggtggtgcatggttgtcgtcagctcgtgtcgtgagatgttgggttaagtcccgcaacgagcgcaacccctatgttcagtagccagcaggtaaggctgggcactctggacagactgccggggataacccggaggaaggcggggatgacgtcaaatcatcatgccccttacggcctgggctacacacgtgctacaatggcgtaaacaaagggaagcgagagggtgacctggagcgaatcccaaaaataacgtcccagttcggactgtagtctgcaacccgactacacgaagctggaatcgctagtaatcgcgaatcagcatgtcgcggtgaatacgttcccgggtcttgtacacaccgcccgtcacaccatgggagttggaaatgcccgaagtcagtgacctaaccgcaagggaggagctgccgaaggtggagccgatgactggggtgaagtc

SEQ ID NO: 1077 - DNA, 1465 bp, Artificial Sequence
  Synthetic polymer
attgaacgctggcggcaggcctaacacatgcaagtcgaacggtagcatagaggagcttgctccttgggtgacgagtggcggacgggtgagtaatgtctgggtatctgcctgatagagggggataaccactagaaatggtggctaataccgcataatgtcgcaagaccaaagagggggaaccttttggcctctcactatcagatgaacccagatgggattagctagtaggtggggtaatggctcacctaggcgacgatctctagctggtctgagaggatgaccagccacactggaactgagacacggtccagactcctacgggaggcagcagtggggaatattgcacaatgggcgcaagcctgatgcagccatgccgcgtgtatgaagaaggccttcgggttgtaaagtactttcagcggggaagaagaccatacggctaataaccgtgtcgtttgacgttactcgcagaagaagcaccggctaactccgtgccagcagccgcggtaatacggagggtgcaagcgttaatcggaattactgggcgtaaagcgcacgcaggcggtttgttaagtcagatgtgaaatccccgggcttaacctgggaactgcatttgaaactggcaagcttgagtctcgtagaggggggtagaattccgggtgtagcggtgaaatgcgtagagatctggaggaatatcggtggcgaaggcggccccctggacgaagactgacgctcaggtgcgaaagcgtggggagcaaacaggattagataccctggtagtccacgccgtaaacgatgtcgacttggaagttgtgcctttgaggcgtggcttccggagctaacgcgttaagtcgaccgcctggggagtacggccgcaaggttaaaactcaaatgaattgacgggggcccgcacaagcggtggagcatgtggtttaattcgatgcaacacgaagaaccttacctactcttgacatccacagaatgagacagagatgtcttagtgccttcgggagctgtgagacaggtgctgcatggctgtcgtcagctcgtgttgtgaaatgttgggttaagtcccgcaacgagcgcaacccttgtcctttgttgccagcgattcggtcgggaacttaaaggagactgccggtgataaaccggaggaaggtggggatgacgtcaagtcatcatggcccttacgagtagggctacacacgtgctacaatggcgcatacaaagagaagctacctcgcgagagcaagcggacctcataaagtgcgtcgtagttcggatcggagtctgcaactcgactacgtgaagtcggaatcgctagtaatcgtggatcagaatgccacggtgaatacgttcccgggccttgtacacaccgcccgtcacaccatgggagtgggttgcaaaagaagtaggtagcttaaccttcgggagggcgtttaccactttgtgattcatgactggggtg

SEQ ID NO: 1078 - DNA, 1454 bp, Artificial Sequence
  Synthetic polymer
aacgctggcggcgtgcctaacacatgcaagtcgaacggggatcatgaagcggaagttttcggatggaaggttcatgattctagtggcgcacgggtgagtaacgcgtgaacaacctgcctttcagtgggggataacacctggaaacaagtgctaataccgcatgagaccacgacctggcatcgggatggggtcaaagatttatcgctgaaagaggggttcgcgtcccattaggtagttggtgagataacagcccaccaagccgacgatgggtagccgagctgagaggctgatcggccacactggaactgagacacggtccagactcctacgggaggcagcagtggggaatattgggcaatgggcgcaagcctgacccagcaacgccgcgtgagggaagaaggtcttcggattgtaaacctctgtcgcaagggacgaaggcgtgacggtaccttgtgaggaagccccggctaactacgtgccagcagccgcggtaatacgtagggggcgagcgttgtccggaattactgggcgtaaagggtgcgtaggcggttgcttaagttggatgtgaaatacccgggcttaacttggggggtgcattcaaaactgggcgactagagttcaggagagggaagcggaattcctagtgtagcggtgaaatgcgtagatattaggaggaataccagtggcgaaggcggctttctggactgacactgacgctgaggcacgaaagcgtggggagcaaacaggattagataccctggtagtccacgctgtaaacgatgaatactaggtgtagggggtatgaactccctctgtgccgtagcaaacgcaataagtattccgcctggggagtacggccgcaaggttgaaactcaaaggaattgacgggggcccgcacaagcagcggagcatgtggtttaattcgaagcaacgcgaagaaccttaccaaggcttgacatcctgctaaagtcatggaaacatgatgtcccttcgggggagcagagacaggtggtgcatggttgtcgtcagctcgtgtcgtgagatgttgggttaagtcccgcaacgagcgcaacccctgttgccagttaccagcgcgtagaggcggggactctggtgagactgccggggacaactcggaggaaggtggggacgacgtcaaatcatcatgccccttatgtcttgggctacacacgtgctacaatggctgtaacaaagggaagcgagtgcgtaagcatgagcggatctcagaaaagcagtctcagttcggattgtgggctgcaacccgcccacatgaagttggagttgctagtaatcgcggatcagcatgccgcggtgaatacgttcccgggccttgtacacaccgcccgtcacaccatgggagttgggagcgcccgaagccggtatcctaaccgaaaggagggagccgtcgaaggtgagaccaatgactggggtga

SEQ ID NO: 1079 - DNA, 1503 bp, Artificial Sequence
  Synthetic polymer
agagtttgatcctggctcaggacgaacgctggcggcatgcctaacacatgcaagtcgaacggaactaaggggcttgccctttagtttagtggcggacgggtgagtaacgcgtgagcaacctgcctttcagtggggaataatatcctgaaaagggtactaataccgcataacgtaacgagatcgcatggttttgttaccaaagatttatcgctgagagatgggctcgcgtccgattagccagttggtggggtaacggcctaccaaagctacgatcggtagccggactgagaggttgaacggccacattgggactgagacacggcccagactcctacgggaggcagcagtaggggatattgcgcaatgggggaaaccctgacgcagcaatgccgcgtgaaggatgaaggtcttcggattgtaaacttcttttgtcagggacgaaaattgacggtacctgacgaataagctccggctaactacgtgccagcagccgcggtaatacgtagggagcaagcgttgtccggatttactgggtgtaaagggtgcgcaggcggctttgcaagtcagctgtgaaatctatgggctcaacccataaattgcagttgaaactgtagagcttgagtgaagtagaggtaggcggaattcccggtgtagcggtgaaatgcgtagagatcgggaggaacaccagtggcgaaggcggcctactgggctttaactgacgctcaggcacgaaagcatgggtagcaaacaggattagataccctggtagtccatgccgtaaacgatgattactaggtgtggggggactgaccccctccgtgccgcagttaacacaataagtaatccacctggggagtacggccgcaaggttgaaactcaaaggaattgacgggggcccgcacaagcagtggagtatgtggtttaattcgaagcaacgcgaagaaccttaccggggcttgacatcctgagaacttgccagagatggcttggtgcccttcggggaactcagagacaggtggtgcatggttgtcgtcagctcgtgtcgtgagatgttgggttaagtcccgtaacgagcgcaacccttgcttttagttgctacgcaagagcactctaaaaggactgccgttgacaaaacggaggaaggtggggacgacgtcaaatcatcatgccccttatgtcccgggctacacacgtactacaatggccgttaacagagggaagcaaagccgcgaggtggagcaaacccctaaaaacggtcccagttcagattgtaggctgcaactcgcctatatgaagttggaattgctagtaatcgcggatcagcatgccgcggtgaatacgttcccgggccttgtacacaccgcccgtcacaccatgggagccggtaatacccgaagtcagtagtctgaccgcaaggaggacgctgccgaaggtaggattggcgactggggtgaagtcgtaacaaggtagccgtatcggaaggtgcggctggatcacctcctt

SEQ ID NO: 1080 - DNA, 1532 bp, Artificial Sequence
  Synthetic polymer
agagtttgatcctggctcagattgaacgctggcggcaggcctaacacatgcaagtcgagcggcagcggaaggaagcttgcttccttgccggcgagcggcggacgggtgggtaaggtatggggatctggccgaaggcgggggataaccactggaaacggtggctaataccgcataatctctaaggagcaaagtgggggaccattatggcctcacaccttcggatgaacccatatgagattagctagtaggtggggtaaaggctcacctaggcgacgatctctagctggtctgagaggatgatcagccacactgggactgagacacggcccagactcctacgggaggcagcagtggggaatattgcacaatgggcgcaagcctgatgcagccatgccgcgtgtgtgaagaaggccttcgggttgtaaagcactttcagcgaggaggaaggtgatgagcttaatacgctcatcaattggcgttactcgcagaagaagcaccggctaactccgtgccagcagccgcggtaatacggagggtgcaagcgttaatcggaattactgggcgtaaagcgcacgcaggcggtttgttaagtcagatgtgaaatccccgggctcaacctgggaactgcatttgaaactggcaagctagagtctcgtagaggggggtagaattccaggtgtagcggtgaaatgcgtagagatctggaggaataccggtggcgaaggcggccccctggacgaagactgacgctcaggtgcgaaagcgtggggagcaaacaggattagataccctggtagtccacgctgtaaacgatgtcgatttggaggttgtgcccttgaggcgtggcttccggagctaacgcgttaaatcgaccgcctggggagtacggccgcaaggttaaaactcaaatgaattgacgggggcccgcacaagcggtggagcatgtggcttaattcgatgcaacgcgaagaaccttacctactcttgacatccagagaacttagcagagatgctttggtgccttcgggaactctgagacaggtgctgcatggctgtcgtcagctcgtgttgtgaaatgttgggttaagtcccgcaacgagcgcaacccttatcctttgttgccagcggttcggccgggaactcaaaggagactgccagtgataaactggaggaaggtggggatgacgtcaagtcatcatggcccttacgagtagggctacacacgtgctacaatggcgtatacaaagagaagcgacctcgcgagagcaagcggacctcataaagtacgtcgtagtccggatcggagtctgcaactcgactccatgaagtcggaatcgctagtaatcgtagatcagaatgctacggtgaatacgttcccgggccttgtacacaccgcccgtcacaccatgggagtgggttgcaaaagaagtaggtagcttaaccttcgggagggcgcttaccactttgtgattcatgactggggtgaagtcgtaacaagcgtaaccgtaggggaacctgcggctggatcacct

SEQ ID NO: 1081 - DNA, 1429 bp, Artificial Sequence
  Synthetic polymer
tgcctaacacatgcaagtcgaacggactgatttgagagcttgctcttaatgaaagttagtggcggacgggtgagtaacgcgtgagtaacctgcctttcagagggggataacattctgaaaaggatgctaataccgcataacatcttagtatcgcatggtactgagatcaaaggagcaatccgctgagagatggactcgcgtccgattagctagttggcggggtaaaggcccaccaaggcgacgatcggtagccggactgagaggttgaacggccacattgggactgagacacggcccagactcctacgggaggcagcagtgggggatattgcacaatgggggaaaccctgatgcagcaacgccgcgtgaaggatgaaggttttcggattgtaaacttctgttcttagtgacgataatgacggtagctaagaagaaagctccggctaactacgtgccagcagccgcggtaatacgtagggagcgagcgttgtccggatttactgggtgtaaagggtgcgtaggcggcagagcaagtcaggcgtgaaagccatgggcttaacccatgaactgcgcttgaaactgttctgcttgagtgaagtagaggcaggcggaattcccggtgtagcggtgaaatgcgtagagatcgggaggaacaccagtggcgaaggcggcctactgggctttaactgacgctgaggcacgaaagcatgggtagcaaacaggattagataccctggtagtccatgccgtaaacgatgattactaggtgtggggggtctgaccccctccgtgccggagttaacacaataagtaatccacctggggagtacggccgcaaggttgaaactcaaaggaattgacgggggcccgcacaagtagtggagtatgtggtttaattcgaagcaacgcgaagaaccttaccaggtcttgacatccgactaacgaagtggagatacattaggtgcccttcggggaaagtcgagacaggtggtgcatggttgtcgtcagctcgtgtcgtgagatgttgggttaagtcccgcaacgagcgcaacccttgtccttagttgctacgcaagagcactctaaggagaccgccgttgacaaaacggaggaaggtggggacgacgtcaaatcatcatgccccttatgacctgggctacacacgtactacaatggccgtcaacagagggaagcaaaaccgtgaggcagagcaaacccctaaaaacggtcccagttcagattgtaggctgcaactcgcctacatgaagtcggaattgctagtaatcgcggatcagaatgccgcggtgaatacgttcccgggccatgtacacaccgcccgtcacaccatgggagccggtaatacccgaagtcagtagtctaaccgcaaggggggcgctgccgaaggtaggattggcgactggggtgaagt

SEQ ID NO: 1082 - DNA, 1380 bp, Artificial Sequence
  Synthetic polymer
agtcgaacggtgacgagagagtttgctctctctgatcagtggcggacgggtgagtaacacgtgagcaacctggctctaagagggggacaacagttggaaacgactgctaataccgcataacatatactttaggcatctttagtatatcaaagattttatcgcttagagatgggctcgcgtctgattagatagttggcggggtaacggcccaccaagtcgacgatcagtagccggactgagaggttgaacggccacattgggactgagacacggcccagactcctacgggaggcagcagtgggggatattggacaatgggggcaaccctgatccagcgacgccgcgtgagggaagaaggttttcggattgtaaacctctgttgacggagaaaaaaatgatggtatccgtttagaaagccacggctaactacgtgccagcagccgcggtaatacgtaggtggcaagcgttgtccggaattactgggtgtaaagggagtgtaggcgggattttaagtcagaagtgaaaattacgggctcaactcgtaacctgcttttgaaactgaaattcttgagtgaagtagaggcaagcggaattcctagtgtagcggtgaaatgcgtagatattaggaggaacaccagtggcgaaggcggcttgctgggcttttactgacgctgaggctcgaaagcgtggggagcaaacaggattagataccctggtagtccacgccgtaaacgatgattactaggtgtggggggattgaccccttccgtgccggagtaaacacaataagtaatccacctggggagtacgaccgcaaggttgaaactcaaaggaattgacgggggcccgcacaagcagtggagtatgtggtttaattcgaagcaacgcgaagaaccttaccaggtcttgacatcaagtgaccgcctaagagattaggccttctcttcggagacacgaagacaggtggtgcatggttgtcgtcagctcgtgtcgtgagatgttgggttaagtcccgcaacgagcgcaacccttatcattagttgctacgcaagagcactctaatgagactgccgttgacaaaacggaggaaggtggggatgacgtcaaatcatcatgccctttatgacctgggctacacacgtactacaatggcgtttaacaaagagaagcgaaacagcgatgtggagcaaatctccaaaaaacgtctcagttcggattgtaggctgcaactcgcctacatgaagtcggaattgctagtaatcgtaggtcagcatactacggtgaatacgttcccgggccttgtacacaccgcccgtcaaaccatgagagttggcaacacccgaagtcgatagtctaaccgcaaggaggacgtcgccgaag

SEQ ID NO: 1083 - DNA, 1489 bp, Artificial Sequence
  Synthetic polymer
attgaacgctggcggcatgctttacacatgcaagtcgaacggcagcacagggagcttgctcccgggtggcgagtggcgcacgggtgagtaagacatcggaacgtgtcctcttgtgggggataactacccgaaagggtggctaataccgcataagtcctgagggagaaagcgggggatcttcggacctcgcgcgagaggagcggccgatggccgattagctagttggtgaggtaaaggctcaccaaggcgacgatcggtagctggtctgagaggacgaccagccacactgggactgagacacggcccagactcctacgggaggcagcagtggggaattttggacaatgggcgaaagcctgatccagccatgccgcgtgtgggatgaaggccttcgggttgtaaaccacttttgtcagggacgaaaaggttcaggcyaataccttgaactgctgacggtacctgaagaataagcaccggctaactacgtgccagcagccgcggtaatacgtagggtgcaagcgttaatcggaattactgggcgtaaagcgtgcgcaggcggttctgtaagatagatgtgaaatccccgggcttaaccttggaattgcatttatgactgcaggactcgagtttgtcagaggggggtggaattccaagtgtagcagtgaaatgcgtagatatttggaagaacaccgatggcgaaggcagccccctgggacatgactgacgctcatgcacgaaagcgtggggagcaaacaggattagataccctggtagtccacgccctaaacgatgtctactggttgttggggacgatttggtccttggtaacgaagctaacgcgtgaagtagaccgcctggggagtacggtcgcaagattaaaactcaaaggaattgacggggacccgcacaagcggtggatgatgtggattaattcgatgcaacgcgaaaaaccttacctagccttgacatgtcggaaagctctgagagatcggagygtgcccgcaagggaatccgaacacaggtgctgcatggctgtcgtcagctcgtgtcgtgagatgttgggttaagtcccgcaacgagcgcaacccttgtcactagttgctacgaaagggcactctagtgagactgccggtgacaaaccggaggaaggtggggatgacgtcaagtcctcatggcccttatggctagggcctcacacgtcatacaatggtcggaacagagggcagcgaagccgcgaggtggagcaaatcccagaaaaccgatcgtagtccggattgcagtctgcaactcgactgcatgaagtcggaatcgctagtaatcgcggatcagcatgccgcggtgaatacgttcccgggtcttgtacacaccgcccgtcacaccatgggagtggggttcaccagaagacgtttgtctaaccgcaaggaggacggcgtccacggtgggtttcatgactggggtgaagtcgtaacaaggtagccgtaccggaagg

SEQ ID NO: 1084 - DNA, 1443 bp, Artificial Sequence
  Synthetic polymer
cggcgtgcttagcacatgcaagtcgaacgaaacaccttatttgattttcttcggaactgaagatttggtgattgagtggcggacgggtgagtaacgcgtgggtaacctaccctgtacagggggataacagtcagaaatgactgctaataccgcataagaccacagcaccgcatggtgcaggggtaaaaactccggtggtacaggatggacccgcgtctgattagctggttggtgaggtaacggcttaccaaggcgacgatcagtagccggcttgagagagtgaacggccacattgggactgagacacggcccaaactcctacgggaggcagcagtggggaatattgcacaatgggggaaaccctgatgcagcgacgccgcgtgagtgaagaagtatctcggtatgtaaagctctatcagcagggaagaaaatgacggtacctgactaagaagccccggctaactacgtgccagcagccgcggtaatacgtagggggcaagcgttatccggaattactgggtgtaaagggtgcgtaggtggtatggcaagtcagaagtgaaaacccagggcttaactctgggactgcttttgaaactgtcagactggagtgcaggagaggtaagcggaattcctagtgtagcggtgaaatgcgtagatattaggaggaacatcagtggcgaaggcggcttactggactgcaactgacactgatgctcgaaagtgtgggtatcaaacaggattagatacccctggtagtccacacagtaaacgatgaatactcgctgtttgcgatatacagtaagcggccaagcgaaagcattaagtattccacctggggagtacgccggcaacggtgaaactcaaaggaattgacggggacccgcacaagcggtggagcatgtggtttaattcgaagcaacgcgaagaaccttacctgctcttgacatccctctgaccggcaagtaatgttgcctttccttcgggacagaggagacaggtggtgcatggctgtcgtcagctcgtgtcgtgagatgttgggttaagtcccgcaacgagcgcaacccctatcttcagtagccagcggcaaggccgggcactctggagagactgccagggataacctggaggaaggtggggatgacgtcaaatcatcatgccccttatgagcagggctacacacgtgctacaatggcgtaaacaaagggaagcagagtcgtgaggccgagcaaatcccaaaaataacgtctcagttcggattgtagtctgcaactcgactacatgaagctggaatcgctagtaatcgcgaatcagaatgtcgcggtgaatacgttcccgggtcttgtacacaccgcccgtcacaccatgggagtcagtaacgcccgaagtcagtgacccaaccgtaaggagggagctgccgaaggtgggaccgataactggggtgaa

SEQ ID NO: 1085 - DNA, 1441 bp, Artificial Sequence
  Synthetic polymer
ctaacacatgcaagtcgaacgaagctctgcgatacaagacttcggtcaagttgaacggatgacttagtggcggacgggtgagtaacgcgtgaggaacctgcctttcagtgggggacaacagttggaaacgactgctaataccgcataatgtattctgaccgcatgatcggaataccaaagatttattgctgaaagatggcctcgcgtctgattagatagttggtgaggtaacggctcaccaagtcgacgatcagtagccggactgagaggttgaacggccacattgggactgagatacggcccagactcctacgggaggcagcagtggggaatattgggcaatgggggaaaccctgacccagcaacgccgcgtgaaggaagaaggctttcgggttgtaaacttcttttaccagggacgaaggacgtgacggtacctggagaaaaagccacggctaactacgtgccagcagccgcggtaatacgtaggtggcaagcgttgtccggatttactgggtgtaaagggcgtgtaggcggagaagcaagtcagaagtgaaatccatgggcttaacccatgaactgcttttgaaactgtttcccttgagtatcggagaggcaggcggaattcctagtgtagcggcgaaatgcgtagatattaggaggaacaccagtggcgaaggcggcttactggacgattactgacgctgaggctcgaaagcgtggggagcaaacaggattagataccctggtagtccacgccgtaaacgatgaatactaggtgtcggccaccacaggtggtcggtgccgcagcaaacgcaataagtattccacctggggagtacgttcgcaagaatgaaactcaaaggaattgacggggacccgcacaagcggtggagcatgtggtttaattcgaagcaacgcgaagaaccttaccaagtcttgacatccttctgacaaagtatgtaatgtactcttccttcgggacagaagtgacaggtggtgcatggttgtcgtcagctcgtgtcgtgagatgttgggttaagtcccgcaacgagcgcaacccttgtccttagtagccagcatttaaggtgggcactctagggagactgccagggtgaacctggaggaaggtggggatgacgtcaaatcatcatgccccttatgacttgggctacacacgtgctacaatggcgtaaacaaagggaagcgaaatcgcgaggtggagcaaatctcaaaaataacgtctcagttcggattgtagtctgcaactcgactacatgaagctggaatcgctagtaatcgcgaatcagaatgtcgcggtgaatacgttcccgggtcttgtacacaccgcccgtcacaccatgggagttgggaatgcccgaagtcagtgacctaaccgtaaggaaggagctgccgaaggcaggctcgataactggggtgaagt

SEQ ID NO: 1086 - DNA, 1463 bp, Artificial Sequence
  Synthetic polymer
gatgaacgctggcggcgtgcttaacacatgcaagtcgaacgaagcatttaagacggattctttcgggatgaagacttttatgactgagtggcggacgggtgagtaacgcgtgggtaacctgcctcacacagggggatagcagttggaaacggctgataataccgcataagcgcacagtaccgcatggtacagtgtgaaaaactccggtggtgtgagatggacccgcgtctgattagcttgttggcagggtaacggcctaccaaggcaacgatcagtagccgacctgagagggtgaccggccacattgggactgagacacggcccagactcctacgggaggcagcagtggggaatattgcacaatggaggaaactctgatgcagcgacgccgcgtgagtgaagaagtaattcgttatgtaaagctctatcagcagggaagatagtgacggtacctgactaagaagctccggctaaatacgtgccagcagccgcggtaatacgtatggagcaagcgttatccggatttactgggtgtaaagggagtgtaggtggcatcacaagtcagaagtgaaagcccggggctcaaccccgggactgcttttgaaactgtggagctggagtgcaggagaggcaagtggaattcctagtgtagcggtgaaatgcatagatattaggaggaacaccagtggcgaaggcggcttactggacagtaactgacgttgaggctcgaaagcgtggggagcaaacaggattagataccctggtagtccacgccgtaaacgatgaatactaggtgttggtgagcaaagctcatcggtgccgtcgcaaacgcaataagtattccacctggggagtacgttcgcaagaatgaaactcaaaggaattgacggggacccgcacaagcggtggagcatgtggtttaattcgaagcaacgcgaagaaccttaccaagtcttgacatccctctgactgggaagtaatgttccctttccttcgggacagaggagacaggtggtgcatggttgtcgtcagctcgtgtcgtgagatgttgggttaagtcccgcaacgagcgcaacccttatcctaagtagccagcaggtaaagctgggcactcttgggagactgccagggataacctggaggaaggtggggatgacgtcaaatcatcatgccccttatgacttgggctacacacgtgctacaatggcgtaaacaaagggaagcgaaagtgtgagctggagcaaatctcagaaataacgtctcagttcggattgtagtctgcaactcgactacatgaagctggaatcgctagtaatcgcggatcagaatgccgcggtgaatacgttcccgggtcttgtacacaccgcccgtcacaccatgggagtcgataacgcccgaagccagtgacctaaccgaaagggaggagctgtcgaaggcgggattgataactggggtgaagtcgt

SEQ ID NO: 1087 - DNA, 1416 bp, Artificial Sequence
  Synthetic polymer
catgcaagtcgaacggtaacaggaagcagcttgctgcttcgctgacgagtggcgggcgggtgggtggtgtctggggggctgcctggtggggggggataactactggaaacggtagctaataccgcataacgtcgcaagaccaaagagggggaccttcgggcctcttgccatcggatgtgcccagatgggattagctagtaggtggggtaacggctcacctaggcgacgatccctagctggtctgagaggatgaccagccacactggaactgagacacggtccagactcctacgggaggcagcagtggggaatattgcaccaatgggcgcaagcctgatgcagccatgccgcgtgtatgaagaaggccttcgggttgtaaagtactttcagcggggaggaagggattaaatttaataccttttctcatttactttacccgcagaagaagcaccggctaactccgtgccagcagccgcggtaatacggagggtgcaagcgttaatcggaattactgggcgtaaagcgcacgcaggcggtttgttaagtcagatgtgaaatccccgggctcaacctgggaactgcatctgatactggcaagcttgagtctcgtagaggggggtagaattccaggtgtagcggtgaaatgcgtagagatctggaggaataccggtggcgaaggcggccccctggacgaagactgacgctcaggtgcgaaagcgtggggagcaaacaggattagataccctggtagtccacgccgtaaacgatgtcgacttggaggttgtgcccttgaggcgtggcttccggagctaacgcgttaagtcgaccgcctggggagtacggccgcaaggttaaaactcaaatgaattgacgggggcccgcacaagcggtggagcatgtggtttaattcgatgcaacgcgaagaaccttacctggtcttgacatccacggaagttttcagagatgagaatgtgccttcgggaaccgtgagacaggtgctgcatggctgtcgtcagctcgtgttgtgaaatgttggggttaagtcccgcaacgagtcgcaacccttatccattgttgccagcggtccggccgggaactcaaaggagactgccagtgataaactggaggaaggtggggatgacgtcaagtcatcatggcccttacgaccagggctacacacgtgctacaatggcgcatacaaagagaagcgacctcgcgagagcaagcggacctcataaagtgcgttgtagtttggattggagtttgtaatttgattttatgaagttggaattgttagtaattgtggattagaatgtcacggtgaatacgttcccgggccttgtacacaccgcccgtcacaccatgggagtgggttgcaaaagaagtaggtagcttaaccttcgggagggcgctacc

SEQ ID NO: 1088 - DNA, 1452 bp, Artificial Sequence
  Synthetic polymer
atgaacgctggcggcgtgcttaacacatgcaagtcgaacgaagcactttatttgatttcttcggaatgaagattttgtgactgagtggcggacgggtgagtaacgcgtgggtaacctgccttatacagggggataacagttggaaacgactgctaataccgcataagcgcacagggtcgcatgacctggtgtgaaaaactccggtggtatgagatggacccgcgtctgattagccagttggtggggtaacggcctaccaaagcgacgatcagtagccgacctgagagggtgaccggccacattgggactgagacacggcccaaactcctacgggaggcagcagtggggaatattgcacaatgggggaaaccctgatgcagcgacgccgcgtgagcgaagaagtatttcggtatgtaaagctctatcagcagggaagataatgacggtacctgactaagaagcaccggctaaatacgtgccagcagccgcggtaatacgtatggtgcaagcgttatccggatttactgggtgtaaagggtgcgtaggtggcaaggcaagtctgaagtgaaaatccggggctcaaccccggaactgctttggaaactgtttagctggagtacaggagaggtaagtggaattcctagtgtagcggtgaaatgcgtagatattaggaggaacaccagtggcgaaggcgacttactggactgctactgacactgaggcacgaaagcgtggggagcaaacaggattagataccctggtagtccacgccgtaaacgatgaatactaggtgttgggttccaaagggactcggtgccgtcgcaaacgcattaagtattccacctggggagtacgttcgcaagaatgaaactcaaaggaattgacggggacccgcacaagcggtggagcatgtggtttaattcgaagcaacgcgaagaaccttacctgcccttgacatcccgctgaccggacggtaatgcgtccttcccttcggggcagcggagacaggtggtgcatggttgtcgtcagctcgtgtcgtgagatgttgggttaagtcccgcaacgagcgcaacccttatctttagtagccagcatttaaggtggggactctagagagactgccagggataacctggaggaaggtggggatgacgtcaaatcatcatgccccttatgggcagggctacacacgtgctacaatggcgtaaacaaagggaagcgatactgcgaagttgagcaaatcccaaaaataacgtctcagttcggattgtagtctgcaactcgactacatgaagctggaatcgctagtaatcgcgaatcagaatgtcgcggtgaatacgttcccgggtcttgtacacaccgcccgtcacaccatgggagtcagtaacgcccgaagtcagtgacccaaccgcaaggagggagctgccgaaggtgggaccgataactggggtg

SEQ ID NO: 1089 - DNA, 1434 bp, Artificial Sequence
  Synthetic polymer
tcaggatgaacgctggcggcgcgcctaacacatgcaagtcgaacggacgatgaagagcttgcttttcaaagttagtggcggacgggtgagtaacgcgtgggtaacctgcctcatacaggggaatagcagctggaaacggctgataaaaccgcataagcgcacagtgccgcatggcacagtgtgaaaaactccggtggtatgagatggacccgcgtctgattagcttgttggtgaggtaacggcccaccaaggcgacgatcagtagccggactgagaggttgaccggccacattgggactgagatacggcccagactcctacgggaggcagcagtggggaatattgggcaatgggcgcaagcctgacccagcaacgccgcgtgaaggaagaaggctttcgggttgtaaacttcttttaagtgggaagagtagaagacggcaccacttgaataagccacggctaactacgtgccagcagccgcggtaatacgtaggtggcaagcgttgtccggatttactgggtgtaaagggcgtgcagccgggcatgcaagtcagatgtgaaatctcagggcttaaccctgaaactgcatttgaaactgtatgtcttgagtgccggagaggtaatcggaattccttgtgtagcggtgaaatgcgtagatataaggaagaacaccagtggcgaaggcggattactggacggtaactgacggtgaggcgcgaaagcgtggggagcgaacaggattagataccctggtagtccacgctgtaaacgatggatactaggtgtgcggggactgaccccctgcgtgccgcagttaacacaataagtatcccacctggggagtacgatcgcaaggttgaaactcaaaggaattgacgggggcccgcacaagcggtggattatgtggtttaattcgaagcaacgcgaagaaccttaccaggtcttgacatcctgctaacgaagtagaaatacattaggtgcccttcggggaaagcagagacaggtggtgcatggttgtcgtcagctcgtgtcgtgagatgttgggttaagtcccgcaacgagcgcaacccctattgttagttgctacgcaagagcactctagcgagactgccgttgacaaaacggaggaaggtggggacgacgtcaaatcatcatgccccttatgacctgggctacacacgtaatacaatggcggtcaacaaagggatgcaaagccgcgaggcagagcgaaccccaaaaagccgtcccagttcggatcgcaggctgcaacccgcctgcgtgaagtcggaatcgctagtaatcgtgggtcagcataccacggtgaatacgttcccgggccttgtacacaccgcccgtcacaccatgagagtcgggaacacccgaagtccgtagcctaaccgcaaggagggcgcggccgaaggtgggttcgataat

SEQ ID NO: 1090 - DNA, 1444 bp, Artificial Sequence
  Synthetic polymer
acgaacgctggcggcgtgcttaacacatgcaagtcgaacggacgaggaggagcttgcttctccaagtcagtggcggacgggtgagtaacgcgtgagtaacctgcccttcagagggggataacgtctggaaacggacgctaataccgcatgacatatttccatcgcatggtggagatatcaaaggagcaatccgctgaaggatggactcgcgtccgattagatagttggcggggtaacggcccaccaagtcgacgatcggtagccggactgagaggttgaacggccacattgggactgagacacggcccagactcctacgggaggcagcagtgggggatattgcacaatgggcgaaagcctgatgcagcaacgccgcgtgagggaagacggttttcggattgtaaacctctgttctaagtgacgaacaaatgacggtagcttaggagaaagccccggctaactacgtgccagcagccgcggtaatacgtagggggcaagcgttgtccggaattactgggtgtaaagggagcgcaggcggagaagcaagtcagtggtgaaaacgatgggcttaactcatcgactgccattgaaactgtttcccttgagtgaagtagaggcaggcggaattccgagtgtagcggtgaaatgcgtagatattaggaggaacaccagtggcgaaggcggcttactggacgataactgacgctgaggctcgaaagcgtggggagcaaacaggattagataccctggtagtccacgccgtaaacgatgaatactaggtgttgggaagcattgcttctcggtgccgtcgcaaacgcagtaagtattccacctggggagtacgttcgcaagaatgaaactcaaaggaattgacggggacccgcacaagcggtggagcatgtggtttaattcgaagcaacgcgaagaaccttaccaagtcttgacatccttctgaccggtacttaatcgtaccttctcttcggagcaggagtgacaggtggtgcatggttgtcgtcagctcgtgtcgtgagatgttgggttaagtcccgcaacgagcgcaacccttatctttagtagccagcggttcggccgggcactctagagagactgccgttgacaaaacggaggaaggtggggatgacgtcaaatcatcatgccctttatgacctgggctacacacgtactacaatggcgtttaacaaagagaagcaagaccgcgaggtggagcaaaactcaaaaacaacgtctcagttcagattgcaggctgcaactcgcctgcatgaagtcggaattgctagtaatcgcggatcagcatgccgcggtgaatacgttcccgggccttgtacacaccgcccgtcacaccatgagagccggggggacccgaagtcggtagtctaaccgcaaggaggacgccgccgaaggtaaaactggtgattggggtgaa

SEQ ID NO: 1091 - DNA, 1445 bp, Artificial Sequence
  Synthetic polymer
gcggcgtgcttaacacatgcaagtcgaacgaagcgcttaaatttgattcttcggatgaagatttttgtgactgagtggcggacgggtgagtaacgcgtgggtaacctgcctcatacagggggataacagttagaaatgactgctaataccgcataagcgcacaggaccgcatggtctggtgtgaaaaactccggtggtatgagatggacccgcgtctgattagctagttggtgaggtaacggcccaccaaggcgacgatcagtagccgacctgagagggtgaccggccacattgggactgagacacggcccagactcctacgggaggcagcagtggggaatattgcacaatgggggaaaccctgatgcagcgacgccgcgtgaaggaagaagtatttcggtatgtaaacttctatcagcagggaagaaaatgacggtacctgactaagaagccccggctaactacgtgccagcagccgcggtaatacgtagggggcaagcgttatccggatttactgggtgtaaagggagcgtaggcggtctgacaagtcagaagtgaaagcccggggctcaactccgggactgcttttgaaactgccggactagattgcaggagaggtaagtggaattcctagtgtagcggtgaaatgcgtagatattaggaggaacaccagtggcgaaggcggcttactggactgtaaatgacgctgaggctcgaaagcgtggggagcaaacaggattagataccctggtagtccacgccgtaaacgatgaatactaggtgttggggagcacagctcttcggtgccgcagcaaacgcaataagtattccacctggggagtacgttcgcaagaatgaaactcaaaggaattgacggggacccgcacaagcggtggagcatgtggtttaattcgaagcaacgcgaagaaccttaccaagtcttgacatcccgatgaccggacagtaatgtgtccttctcttcggagcatcggagacaggtggtgcatggttgtcgtcagctcgtgtcgtgagatgttgggttaagtcccgcaacgagcgcaacccttatctttagtagccagcggttcggccgggcactctagagagactgcctgggataacctggaggaaggtggggatgacgtcaaatcatcatgccccttatgacttgggctacacacgtgctacaatggcgtaaacaaagggaagcaaagctgtgaagccgagcaaatctcaaaaataacgtctcagttcggattgtagtctgcaactcgactacatgaagctggaatcgctagtaatcgcgaatcagcatgtcgcggtgaatacgttcccgggtcttgtacacaccgcccgtcacaccatgggagttggaaacgcccgaagtcagtgacccaaccgtaaggagggagctgccgaaggcgggtctgataactggggtgaag

SEQ ID NO: 1092 - DNA, 1442 bp, Artificial Sequence
  Synthetic polymer
gctttacacatgcaagtcgaacggtaacgtggggaggagcttgctccaccccgacgacgagtggcgaacgggtgagtaatacatcggaacgtgtccgctcgtgggggacaaccatccgaaaggttggctaataccgcatgagttctactgaagaaagagggggacccgcaagggcctctcgcgagcggagcgaccgatgactgattagcctgttggtgaggtaacggctcaccaaagcaacgatcagtagctggtctgagaggacgaccagccacactgggactgacacacggcccacactcctacgggaggcagcagtggggaattttggacagtgggcgcaagcctgatccagctattccgcgtgtgggatgagcgccctcgggttgtaaaccacttttgtagagaacgaaaagacatcttcgaataataggatgttgctgacggtactctaagaataagcaccggctaactacgtgccagcagccgcggtaatacgtagggtgcgagcgttaatcgtaattactgggcgtaaagggtgcgcaggcggttgagtaatgacagatgtgaaatcctcaagcttaactctggaatggaatatgtgactgctcgactagagtgagtcagagggaggtggaattccacgtgtagcagtgaaatgcgtagatatgtggaagaacaccgatggcgaaggcagcctcctgggacataactgacgctcaggcacgaaagcgtggggagcaaacaggattagataccctggtagtccacgccctaaacgatgttaactagttgttgggatgtaacaatctcagtaacgcagccaacgcgagaagttaaccgcctgggaagtacggtcgcaagactaaaactcaaaggaattgacggggacccgcacaagcggtggatgatgtggattaattcgatgcaacgcgaaaaaccttacctacccttgacatgtcaggaagctcttgtaatgagagcgtgcccgcaagggagcctgaacacaggtgctgcatggctgtcgtcagctcgtgtcgtgagatgttgggttaagtcccgcaacgagcgcaacccttgtcactagttgctacgaaagggcactctagtgagactgccggtgacaaaccggaggaaggtggggatgacgtcaagtcctcatggcccttatgggtagggcttcacacgtcatacaatggtcggaacagagggcagcgaagccgtgaggcggagccaatcccagaaaaccgatcgtagtccggattgcagtctgcaactcgactgcatgaagtcggaatcgctagtaatcgcggatcagcatgccgcggtgaatacgttcccgggtcttgtacacaccgcccgtcagacaatgggagtggtgtttaccagaagtcgttagcctaaccgcaaggagggcggcgaccacggtgagcaccgtgact

SEQ ID NO: 1093 - DNA, 1368 bp, Artificial Sequence
  Synthetic polymer
tgaacgctggcggcatgctttacacatgcaagtcgaacggtaacagggtgcttgcaccgctgacgagtggcgaacgggtgagtaatgcgtcggaacgtgccgagtagtgggggataacgcagcgaaagttgtgctaataccgcataacgtcgcaagaccaaagagggggaccttcgggcctcttgccatcagatgtgcccagatgggattagctagtaggcggggtaacggcccacccaggcgacgatccctagctggtctgagaggatgaccagccacactggaactgagacacggtccagactcctacgggaggcagcagtggggaatattgcacaatgggcgcaagcctgatgcagccatgccgcgtgtgtgaagaaggccttcgggttgtaaagcactttcagcggggaggaaggcagtacggttaataagcgtgctgattgacgttacccgcagaagaagcaccggctaactccgtgccagcagccgcggtaatacggagggtgcaagcgttaatcggaattactgggcgtaaagcgcacgcaggcggtctgtcaagtcggatgtgaaatccccgggctcaacctgggaactgcattcgaaactggcaggctggagtctcgtagagggaggtagaattccaggtgtagcggtgaaatgcgtagagatctggaggaataccagtggcgaaggcggcctcctggacgaagactgacgctcaggtgcgaaagcgtggggagcaaacaggattagataccctggtagtccacgctgtaaacgatgtcgatttggaggttgtgcccttgaggcgtggcttccggagctaacgcgttaaatcgaccgcctggggagtacggccgcaaggttaaaactcaaatgaattgacgggggcccgcacaagcggtggagcatgtggtttaattcgatgcaacgcgaagaaccttacctggtcttgacatccacagaagtttccagagatgggaatgtgccttcgggaactgtgagacaggtgctgcatggctgtcgtcagctcgtgttgtgaaatgttgggttaagtcccgcaacgagcgcaacccttatcctttgttgccagcggtccggccgggaactcaaaggagactgccagtgataaactggaggaaggtggggatgacgtcaagtcatcatggcccttacgaccagggctacacacgtgctacaatggcgcatacaaagagaagcgacctcgcgagagcaagcggacctcataaagtgcgtcgtagtccggattggagtctgcaactcgactccatgaagtcggaatcgctagtaatcgtgaatcagaatgtcacggtgaatacgttcccgggccttgtacacaccgcc

SEQ ID NO: 1094 - DNA, 1413 bp, Artificial Sequence
  Synthetic polymer
acgctggcggcgtgcctaacacatgcaagtcgagcgattctcttcggagaagagcggcggacgggtgagtaacgcgtgggtaacctgccctgtacacacggataacataccgaaaggtatgctaatacgggataacataagaaattcgcatgtttttcttatcaaagctccggcggtacaggatggacccgcgtctgattagctagttggtgaggtaacggctcaccaaggcgacgatcagtagccgacctgagagggtgatcggccacattggaactgagacacggtccaaactcctacgggaggcagcagtggggaatattgcacaatgggcgaaagcctgatgcagcaacgccgcgtgagcgatgaaggccttcgggtcgtaaagctctgtcctcaaggaagataatgacggtacttgaggaggaagccccggctaactacgtgccagcagccgcggtaatacgtagggggctagcgttatccggatttactgggcgtaaagggtgcgtaggcggtcttttaagtcaggagtgaaaggctacggctcaaccgtagtaagctcttgaaactggaggacttgagtgcaggagaggagagtggaattcctagtgtagcggtgaaatgcgtagatattaggaggaacaccagtagcgaaggcggctctctggactgtaactgacgctgaggcacgaaagcgtggggagcaaacaggattagataccctggtagtccacgccgtaaacgatgagtactaggtgtcgggggttacccccctcggtgccgcagctaacgcattaagtactccgcctggggagtacgctcgcaagagtgaaactcaaaggaattgacggggaacccgcacaagtagcggagcatgtggtttaattcgaaagaaagggaagaacctttacttaagcttgacattcttttggacgaaggcttattggattttttcctttgggggccgaaaggaccaggggggcaaggttgttgttaagttgggttgggagaaggtggggtaaattccgcaacgaaggccaaccttgcccttaatttccctccattaattgggccattttgaagggattcccgggataaactgggagaaagggggggaggagttaaattccttattccccttttggttaaggggctacacacgtgctacaatggggtaaacaaagggaagcgaacttgtgaggggcaacatatttcaaaaaaaacatttcaatttgggatgtagtgtgcaaattgacttccagaaagcgggagctattgttattgcgagatcagcatgtcgcggtgaatgcgttcccgggtcttgtacacaccgcccgtcacaccatgggagtcagggacgcccgaagtcaggtagccaaccgtaaggaaggagttgtcgaaggtggaacc

SEQ ID NO: 1095 - DNA, 1449 bp, Artificial Sequence
  Synthetic polymer
aacgctggcggcgtgcttaacacatgcaagtcgaacgagaatctaatgatggagttttcggacaactgatttagaggacagtggcggactggtgagtaacgcgtgaggaacctgcctttcagagggggacaacagttggaaacgactgctaataccgcatgacgcattttgatcgcatggtcggaatgccaaagatttatcgctgaaagatggcctcgcgtctgattagatagttggcggggtaacggcccaccaagtcgacgatcagtagccggactgagaggttgaccggccacattgggactgagatacggcccagactcctacgggaggcagcagtggggaatattgggcaatgggcgcaagcctgacccagcaacgccgcgtgaaggaagaaggctttcgggttgtaaacttcttttaagtgggaagagcagaagacggtaccacttgaataagccacggctaactacgtgccagcagccgcggtaatacgtaggtggcaagcgttgtccggatttactgggtgtaaagggcgtgcagccgggcatgcaagtcagatgtgaaatctcagggcttaaccctgaaactgcatttgaaactgtatgtcttgagtgccggagaggtaatcggaattccttgtgtagcggtgaaatgcgtagatataaggaagaacaccagtggcgaagggcggattactggacggtaactgacggtgaggcgcgaaagcgtggggagcgaacaggattagataccctggtagtccacgctgtaaaacgatggatactaggtgtgcggggactgaccccctgcgtgccgcagttaacacaataagtatcccacctggggagtacgatcgcaaggttgaaactcaaaggagttgacgggggcccgcacaagcggtggattatgtggtttaattcgaagcaacgcgaagaaccttaccaggtcttgacatcctgctaacgaagtagagatacatcaggtgcccttcggggaaagcagagacaggtggtgcatggttgtcgtcagctcgtgtcgtgagatgttgggttaagtcccgcaacgagcgcaacccctattgttagttgctacgcaagagcactctagcgagactgccgttgacaaaacggaggaaggtggggacgacgtcaaatcatcatgccccttatgacctgggctacacacgtaatacaatggcggtcaacaaagggatgcaaagccgcgaggcagagcgaaccccaaaaagccgtcccagttcggatcgcaggctgcaacccgcctgcgtgaagtcggaatcgctagtaatcgcggatcagcatgccgcggtgaatacgttcccgggccttgtacacaccgcccgtcacaccatgagagtcgggaacacccgaagtccgtagcctaaccgcaaggagggcgcggccgaaggtgggttcgataattggggtg

SEQ ID NO: 1096 - DNA, 1415 bp, Artificial Sequence
  Synthetic polymer
gatgaacgctggcggcgtgcttaacacatgcaagtcgagcgagtggagttcttcggaacaaagctagcggcggacgggtgagtaacacgtgggcaacctgcctcgtagaggggaatagcctcccgaaagggagattaataccgcataagattgtagcttcgcatgaagtagcaattaaaggagcaatccgctatgagatgggcccgcggcgcattagctagttggtgaggtaacggctcaccaaggcgacgatgcgtagccgacctgagagggtgatcggccacattgggactgagacacggcccagactcctacgggaggcagcagtggggaatattgcacaatgggggaaaccctgatgcagcaacgccgcgtgagtgatgacggccttcgggttgtaaagctctgtcttcagggacgataatgacggtacctgaggaggaagccacggctaactacgtgccagcagccgcggtaatacgtaggtggcgagcgttgtccggatttactgggcgtaaagggagcgtaggcggacttttaagtgagatgtgaaatacccgggctcaacctgggtgctgcattccaaactggaaatctagagtgcaggaggggaaagtggaattcctagtgtagcggtgaaatgcgtagagattaggaagaacaccagtggcgaaggcgactttctggactgtaactgacgctgaggctcgaaagcgtggggagcaaacaggattagataccctggtagtccacgccgtaaacgatgactactaggtgtaggggttgtcatgacctctgtgccgccgctaacgcattaagtattccgcctggggagtacggtcgcaagattaaaactcaaaggaattgacgggggcccgcacaagtagcggagcatgtggtttaattcgaagcaacgcgaagaaccttacctagacttgacatctcctgaattaccatgtaatgtgggaagtcccttcggggacaggaagacaggtggtgcatggttgtcgtcagctcgtgtcgtgagatgttgggttaagtcccgcaacgagcgcaacccttattgttagttgctaccatttagttgagcactctagcgagactgcccgggttaaccgggaggaaggtggggatgacgtcaaatcatcatgccccttatgtctagggctacacacgtgctacaatggccggtacaacgagatgcaataccgtgaggtggagcaaaactataaaaccggtctcagttcggattgtaggctgaaactcgcctacatgaagctggagttactagtaatcgcgaatcagaatatcgcggtgaatacgttcccgggccttgtacactccgcccgtcacaccatgagagttggcaatacccaaagttggaaatgtaacccgtaagggaggaagccacctaa

SEQ ID NO: 1097 - DNA, 1431 bp, Artificial Sequence
  Synthetic polymer
caggacgaacgctggcggcgtgcttaacacatgcaagtcgaacggggatattcgcttcggcggatattctagtggcggacgggtgagtaacgcgtgaacaagctgtcctatacagggggataacactgagaaatcagtgctaataccgcataagaccacaacctcgcatggggaaggggtcaaaggaggaatccggtagaggaggcgttcgcgtcccattagatagttggcggggtaacggcccaccaagtcagcgatgggtagccgagctgagaggctgatcggccacactgggactgagacacggcccagactcctacgggaggcagcagtggggtatattgggcgatgggggaaacccttacccagcaacgccgcgtgagagaagaaggttttcggattgtaaatctctgtccttgagggcgaaggaagtgacggtactcgaggaggaagccccggctaactacgtgccagcagccgcggtaatacgtagggggcgagcgttgtccggaattattgggcgtaaagggcgtgtagacggttttataagttacgggtgaaagcccatttttcaaggatggaactgcctgtaagactgtaggacttgagtgcaggagagggaagcggaattccaagtgtagcggtgaaatgcgtagatatttggaggaacaccagtggcgaaggcggctttctggactgcaactgacgttgaggcgcgaaagcgtggggagcgaacaggattagataccctggtagtccccgctgtaaacgatgggatgctaggtgtgggaggtatcgaccccttccgtgccggagttaacgcaataagcatcccgcctggggagtacggccgcaaggttgaaactcaaaggaattgacgggggcccgcacaagcagcggagcatgtggtttaattcgacgcaacgcgaagaaccttaccaggacttgacatctatctaaggctattgaaaggtagcgtcccttcgggggagataagacaggtggtgcatggttgtcgtcagctcgtgtcgtgagatgttgggttaagtcccgcaacgagcgcaacccttatgatcagttactaacgcgtagaggcgaggactctgatgagactgccggggacaactcgggggaaggtggggacgatgtcaaatcatcatgccccttatgttctgggctacacacgtgctacaatggcagtcaacaaagaggagcgagtccgcaaggaggagcaaatctcaaaaaagctgtcccagttcggattgtgggctgcaacccgcccacatgaagtcggagttgctagtaatcgcggatcagcatgccgcggtgaatacgttcccgggccttgtacacaccgcccgtcacaccatgggagtttggagcacccgaagtcagtgaggtaacccggaagggagccagctgccgaaggtg

SEQ ID NO: 1098 - DNA, 1360 bp, Artificial Sequence
  Synthetic polymer
agagtttgatcctggctcaggatgaacgctggcggcgcgcctaacacatgcaagtcgaacggttaaggcgcccttcggggcgcgaatagagtggcgaacggctgagtaacacgtgggcaacctgccccccgcaccgggacagcctcgggaaaccgtgggtaataccgggtactccgccacccccgcatgggggaggcgggagagcgtatgcggcgggggatgggcccgcggcctgttagctagttggcggggcaacggcccaccaaggcgattatgggtagctgggttgagagaccgaccagccagattgggactgagacacggcccagactcctacgggaggcagcagtggggaatcttgcgcaatgggggcaaccctgacgcagcgacgccgcgtgcgggacgaaggccttcgggtcgtaaaccgctttcagcagggacgaggccggaaggtgacggtacctgcagaagaagccccggctaactacgtgccagcagccgcggtaatacgtagggggcgagcgttatccggattcattgggcgtaaagcgctcgtaggctgcccgctaggtccggggtcaaatccgggggctcaacccccgcacgccccggataccggcgggcttgagtcgggtaggggaaggcggaattccaggtgtagcggtggaatgcgcagatatctggaagaacaccggtggcgaaggcggccttctgggcctcgactgacgctgaggagcgaaagctgggggagcgaacaggattagataccctggtagtcccagccgtaaacgatggacgctaggtgtgggggggagatgccctccgtgccgcagccaacgcattaagcgtcccgcctggggagtacggccgcaaggctaaaactcaaaggaattgacgggggcccgcacaagcagcggagcatgtggcttaattcgaagcaacgcgaagaaccttaccagcgcttgacattatggtgaagccggggagacccggtggccgagaggagccataacaggtggtgcatggctgtcgtcagctcgtgtcgtgagatgttgggttaagtcccgcaacgagcgcaacccccgtcgcgtgttgccagcggttcggccgggcacccgcgcgagaccgccggcgtcaagccggaggagggtggggacgacgtcaagtcatcatgccccttatgcgctgggccgcacacgtgctacaatggccggcacaacgggctgccacgccgcaaggcggagcgaatccccaaagccggccccagttcggaccgggggctgcaacccgcccccgcgaagtcggagttgctagtaatcgcggatcagcacgccgcggtgaatgcgttcccgggccttgt

SEQ ID NO: 1099 - DNA, 1408 bp, Artificial Sequence
  Synthetic polymer
acgaacgctggcggcacgcctaacacatgcaagtcgcacggacgaggaggagcttgcttctccgagttagtggcggacgggtgagtaacacgtgagcaacctgcccttgagagggggatagcttctggaaacggatggcaataccccataacatatattttaggcatctaagatatatcaaagaaattcgctcaaggatgggctcgcgtctgattagatagttggtgaggtaacggcccaccaagtcgacgatcagtagccggactgagaggttgaacggccacattgggactgagacacggcccagactcctacgggaggcagcagtggggaatattgcacaatggggggaaccctgatgcagcgatgccgcgtggaggaagaaggttttcggattgtaaactccttttaacagggacgataatgacggtacctgaagaaaaagctccggctaactacgtgccagcagccgcggtaatacgtagggagcgagcgttgtccggaattactgggtgtaaagggagcgtaggcgggacggtaagtcaggtgtgaaatatacgtgctcaacatgtagactgcacttgaaactgctgttcttgagtgaagtagaggtaagcggaattcctagtgtaccggtgaaatgcgtagatattatgaggaacatcggtggagaaggcggcttactgggcttttactgacggctgaggctcgaaagcgtggggagcaaacaggattagataccctggtagtgccacgctataaacgatgattaataggtgtgggggggactgacccctttccgtgttgcagttaacgcaataagctaatccacctggggagtgcgacccccagggttgaaactcaaaggaattgacgggggcccgcacaagcagtggagtatgtggtataattggaagcaacgcgaaagaaccttgtcaggtcttgacatggtatgcatagtctagagatagatgaaatcccttcggggacatatagacaggtggtgcatggttgtagtcagctagtgatcgtgagatgttggcgttaagtcccgcaacgagcgcaacccttacctttaggtgctaggcaagagcactctagagggattgccgtagacaaaacggaggaaggtggggatgacgtcaaatcatcatgtcccttttgtcttgggctacacacctattacaatggcaattagcagagggaagcaaaacagtgatgtggagcaaatcccgaaaaattgtctcagttcagatttcaggctgcagctcgccggcatgaagtcggaattgctagtaatcgcagatcagaatgctgcggtgaatgcgttcccgggccttgtacacaccgcccgtcacaccatgggagtcggtaacacccgaagcatgtagtctaaccttttaggagg

SEQ ID NO: 1100 - DNA, 1418 bp, Artificial Sequence
  Synthetic polymer
gctcaggatgaacgctagcgacaggcttaacacatgcaagtcgaggggtaacagggtgtagcaatacaccgctgacgaccggcgcacgggtgagtaacgcgtatgcaacctgcctttgacagagggatagcccatggaaacgtggattaatacctcatagtctctttttccttcctggggaatagagtaaaacgagagtggtcaaagatgggcatgcgtcctattaggcagttggcggggtaacggcccaccaaaccgatgataggtaggggttctgagaggaaggtcccccacactggtactgagacacggaccagactcctacgggaggcagcagtgaggaatattggtcaatggtcgagagactgaaccagccaagtcgcgtgagggatgactgccctatgggttgtaaacctcttttctactgggagaataagccctatgtatagggtgatgacagtacagtaggaataagcatcggctaactccgtgccagcagccgcggtaatacggaggatgcgagcgttatccggatttattgggtttaaagggtgcgtaggcggctttataagttagtggtaaaatttcggagcttcactccggtccgccattaaaactgtagagctagagaatggacgaggtaggcggaataagttaagtagcggtgaaatgcatagatataacttagaactccgatagcgaaggcagcttaccagaccataactgacgctgatgcacgagagcgtgggtagcgaacaggattagataccctggtagtccaccgctgtaaacgatgctcaccggcccttagcgataagacagttaggggctaattgaaagaattaagtgagccacctggggagtacgtcggcaacgatgaaactcaaaggaattgacgggggcccgcacaagcggaggaacatgtggtttaattcgatgatacgcgaggaaccttacctgggtttaaatgtatgttgcataatctggaaacagtttttttctttggagttatatacaaggtggtgcatggttgtcgtcagctcgtgccgtgaggtgtcgggttaagtcccataatgagcgcaaccgttaccgttagttgctaacatgtaatgatgagcactctagcgggactgcctccgtaaggtgagaggaagggggggacgatgtcaaatcagcgcggcccttctatagcagggcgacacacgtgttacaatggccataacagcgggtaactaccgggtgaccggatgcaaatctagaaaattggtctaagtttggattggagtatgcaaccctattccatgaagttggattagttagtaatagtgcatcagccatggcgcggtgaatacgttcctgggccttgtacacaccgcccgtcaagccttggaagctgggagtacctaaagtccgtagcc

SEQ ID NO: 1101 - DNA, 1432 bp, Artificial Sequence
  Synthetic polymer
gggcctaacacatgcaagtcgaggggcatcgggatccttgcttgcttcaattgccggcgaccggcgcacgggtgcgtaacgcgtatgcaacctacctataacacgggcataacactgagaaattggtactaattccccataatattcggagaggcatctctccaggttgaaaactccggcggttatagatggacatgcgttgcattagctagttggtgaggtaacggctcaccaaggcaacgatacatagggggactgagaggataaccccccccacactggcactgagacacggaccacactcctacgggaggcagcagagaagaatattggtcaatggacgcaagtctgaaccacccatgccgcgtgcaagaacaccgctctatgagttgtaaactgcttttgtacgaaggaaaactcacctacgtgtaggtgactgaaagtatcatacgaataaagatcggctaactccgtgccagcacccgcggtaatacagaagattcaagcgttatccgagatttattgggtttaaagggtgcgtaggcggtttgataagttagaggtgaaatcccggggcttaactccggaactgcctctaatactgttagactagagagtagttgcggtaggcggaatgtatggtgtagcggtgaaatgcttagaaatcatacagaacaccgattgcgaaggcagcttaccaaactatatctgacgttgaggcacgaaagcgtggggagcaaacaggattagataccccggtagtccacgcagtaaacgatgataactcgttgtcggcgatacacagtcggtgactaagcgaaagcgataagttatccacctggggagtacgttcgcaagaatgaaactcaaaggaattgacgggggcccgcacaagcggaggaacatgtggtttaattcgatgatacgcgaggaaccttacccgggcttgaaagttactgacgattctggaaacaggatttcccttcggggcaggaaactaggtgctgcatggttgtcgtcagctcgtgccgtgaggtgtcgggttaagtcccataacgagcgcaacccctaccgttagttgccatcaggtcaagctgggcactctggcgggactgccggtgtaagccgagaggaaggtggggatgacgtcaaatcagcacggcccttacgtccggggctacacacgtgttacaatggtaggtacagagggtcgctaccccgcgaggggatgccaatctcgaaagcctatctcagttcggattggaggctgaaacccgcctccatgaagttggattcgctagtaatcgcgcatcagccatggcgcggtgaatacgttcccgggccttgtacacaccgcccgtcaagccatggaagctgggggtgcctgaagttcgtgaccgcaaggagcgacctagggcaaaaccggtaactg

SEQ ID NO: 1102 - DNA, 1474 bp, Artificial Sequence
  Synthetic polymer
aggacgaacgctggcggcatgcctaacacatgcaagtcgaacggggattgcttcggtaatcctagtggcgaacgggtgagtaacgcgtaggcaacctgccctttagatggggacaacatcccgaaaggggtgctaataccgaatacgaccggacttccgcatgggagcccggtgaaagatggcctctacaagtaagctatcgctaaaggatgggcctgcgtctgattagctagttggtggggtaatggcccaccaaggcgacgatcagtagccggtctgagaggatgaacggccacattgggactgagacacggcccagactcctacgggaggcagcagtggggaatcttccgcaatgggcgaaagcctgacggagcaatgccgcgtgagtgaagaaggaattcgttccgtaaagctctgttgtctatgacgaatgtgcatactgtgaacaatggtgtgtaatgacggtagtagacgaggaagccacggctaactacgtgccagcagccgcggtaatacgtaggtggcgagcgttgtccggaattattgggcgtaaagagcatgtaggcggtctgttaagtctggagtgaaaatgaggggctcaaccccgtatggctctggatactggtagacttgagtgcaggagaggaaaggggaattcccagtgtagcggtgaaatgcgtagatattgggaggaacaccagtggcgaaggcgcctttctggactgtgtctgacgctgagatgcgaaagccagggtagcgaacgggattagataccccggtagtcctggccgtaaacgatgggtactaggtgtaggaggtatcgaccccttctgtgccggagttaacgcaataagtaccccgcctggggagtacgtccgcaaggatgaaactcaaaggaattgacgggggcccgcacaagcggtggagtatgtggtttaattcgacgcaacgagaagaaccttaccaaggcttgacattgaatgaccatcttagagataagattttcccttcggggacatgaaaacaggtggtgcatggctgtcgtcagctcgtgtcgtgagatgttgggttaagtcccgcaacgagcgcaacccctatcctatgttaccagcgagtgaagtcggggactcataggagactgccagggacaacctggaggaaggcggggatgacgtcaagtcatcatgccccttatgtcttgggctacacacgtactacaatggtcgacaacagagggaagcgaagccgcgaggcagagcgaaccccagaaactcgatctcagttcggatcgcaggctgcaacccgcctgcgtgaagttggaatcgctagtaatcgcaggtcagcatactgcggtgaatacgttcccgggccttgtacacaccgcccgtcacaccacgaaagttggtaacacccgaagccggtggggtaaccgtaaggagccagccgtctaaggtggggccgatgattgggg

SEQ ID NO: 1103 - DNA, 1441 bp, Artificial Sequence
  Synthetic polymer
tgaacgctagcgacaggcctaacacatgcaagtcgaggggcaacatggtatcagcttgctgatactgatggcgaccggcgcacgggtgagtaacgcgtatgtaatctacctgtaacagagggataacccggagaaatccggactaatacctcatagcacatattattcgcatgaattttatgttaaagagactcggttacagatgaacatgcgttccattagctagttggcggggttacggcccaccaaggcaacgatggataggggttctgagaggaaggtcccccacactggtactgagacacggaccagactcctacgggaggcagcagtgaggaatattggtcaatgggcgaaagcctgaaccagccaagtcgcgtggaggaagacggccctacgggttgtaaactccttttacctgggaataacgggcgctacgtgtagcgctgtgcaagtaccgggagaataagcatcggctaattccgtgccagcagccgcggtaatacggaagatgcgagcgttatccggatttattgggtttaaagggtgcgtaggcggaagaataagtcagcggtgaaatgcttcagctcaactggggaattgccgatgaaactgtttttctagagtataaaagaggtatgcggaatgcgtggtgtagcggtgaaatgcatagatatcacgcagagccccgattgcgaaggcagcatactgggctataactgacgctgaagcacgaaagcgtgggtatcgaacaggattagataccctggtagtccacgccgtaaacgatgaatactaactgtttgcgatataatgtaagcggtacagcgaaagcgttaagtattccacctggggagtacgccggcaacggtgaaactcaaaggaattgacgggggcccgcacaagcggaggaacatgtggtttaattcgatgatacgcgaggaaccttacccgggctcaaacgacaggggaataatcccgaaaaggattagccagcaatcgccgctgtggaggtgctgcatggttgtcgtcagctcgtgccgtgaggtgtcggcttaagtgccataacgagcgcaacccttaccaatagttgccatcaggtaacgctggggactctatcgggactgccgtcgtaagatgtgaggaaggtggggatgacgtcaaatcagcacggcccttacgtccggggctacacacgtgttacaatggggggtacagcaggccgctaccgggcgaccggatgccaatccctaaaacccctctcagttcggactggagtctgcaacccgactccacgaagctggattcgctagtaatcgcgcatcagccacggcgcggtgaatacgttcccgggccttgtacacaccgcccgtcaagccatgaaagccgggggtacctgaagtatgcaaccgcaaggagcgccctagggtaaaactggtga

SEQ ID NO: 1104 - DNA, 1374 bp, Artificial Sequence
  Synthetic polymer
  misc_feature (774)..(775): n is a, c, g, or t
ttcgcccttagagtttgatcctggctcaggacgaacgctggcggcgtgcctaacacatgcaagtcgagcgagtggagttcttcggaacaaagctagcggcggacgggtgagtaacacgtgggcaacctgcctcatagaggggaatagcctcccgaaagggagattaataccgcataagattgtagcttcgcatgaagtagcaattaaaggagcaatccgctatgagatgggcccgcggcgcattagctagttggtgaggtaacggctcaccaaggcgacgatgcgtagccgacctgagagggtgatcggccacattgggactgagacacggcccagactcctacgggaggcagcagtggggaatattgcacaatgggggaaaccctgatgcagcaacgccgcgtgagtgatgacggccttcgggttgtaaagctctgtcttcagggacgataatgacggtacctgaggaggaagccacggctaactacgtgccagcagccgcggtaatacgtaggtggcgagcgttgtccggatttactgggcgtaaagggagcgtaggcggacttttaagtgagatgtgaaatacccgggctcaacttgggtgctgcatttcaaactggaagtctagagtgcaggagaggagaatggaattcctagtgtagcggtgaaatgcgtagagattaggaagaacaccagtggcgaaggcgattctctggactgtaactgacgctgaggctcgaaagcgtggggagcttaaatgagttagctaccctnntagtccacaccgtaaacgcccgggtagggtgaggggtgtcatgacctctgtgccgccgctaacgcattaagtattccgcctggggagtacggtcgcaagattaaaactcaaaggaattgacgggggcccgcacaagcagcggagcatgtggtttaattcgaagcaacgcgaagaaccttacctagacttgacatctcctgcattactcttaatcggggaagttccttcggggacaggaagacaggtggtgcatggttgtcgtcagctcgtgtcgtgagatgttgggttaagtcccgcaacgagcgcaacccttattgttagttgctaccatttagttgagcactctagcgggactgcccgggttaaccgggaggaaggtggggatgacgtcaaatcatcatgccccttatgtctagggctacacacgtgctacaatggcaagtacaaagagaagcaagaccgcgaggtggagcaaaactcaaaaacttgtctcagttcggattgtaggctgaaactcgcctacatgaagctggagttgctagtaatcgcgaatcagcatgtcgcggtgaataagaacccgggccttgtactcaccgccc

SEQ ID NO: 1105 - DNA, 1455 bp, Artificial Sequence
  Synthetic polymer
gaacgctggcggaacgctttacacatgcaagtcgaacggtaacgcggagagaagcttgcttctctccggcgacgagtggcgaacgggtgagtaatacatcggaacgtgtccgctcgtgggggacaaccagccgaaaggttggctaataccgcatgagttctacggaagaaagagggggacccgcaagggcctctcgcgagcggagcgaccgatgactgattagccggttggtgaggtaacggctcaccaaagcaacgatcagtagctggtctgagaggacgaccagccacactgggactgagacacggcccagactcctacgggaggcagcagtggggaattttggacaatgggcgcaagcctgatccagctattccgcgtgtgggatgaaggccctcgggttgtaaaccacttttgtagagaacgaaaagacaccttcgaataaagggtgttgctgacggtactctaagaataagcaccggctaactacgtgccagcagccgcggtaatacgtagggtgcgagcgttaatcggaattactgggcgtaaagggtgcgcaggcggttgagtaagacagatgtgaaatccccgagcttaactcgggaatggcatatgtgactgctcgactagagtgtgtcagagggaggtggaattccacgtgtagcagtgaaatgcgtagatatgtggaagaacaccgatggcgaaggcagcctcctgggacataactgacgctcaggcacgaaagcgtggggagcaaacaggattagataccctggtagtccacgccttaaacgatgttaattagttgttgggaagtaaaattgtctgtaacgcagccaacgcgagaagttaaccgcctgggaagtacggtcgcaagactaaaactcaaaggaattgacggggacccgcacaagcggtggatgatgtggattaattagatgcaacgcgaaaaaccttacctacccttgacatgtcaggaagcttttgtaatgagagtgtgcccgcaagggagcctgaacacaggtgctgcatggctgtagtcagctcgtgtcgtgagatgttgggttaagtcccgcaacgagcgcaacctttgtcattagttggtatgaaagggcactgtagtgagactgccggtgacaaaccggaggaaggtggggatgacgtcaagtcctcatggcccttatgggtagggcttcacacgtcatacaatggtcggaacagagggcagcgaagtcgtgagacggagccaatcccagaaaaccgatcgtagtccggattgcagtctgcaactcgactgcatgaagtcggaatcggtagtaatcgcggatcagcatgccgcggtgaatacgttcccgggtcttgtacacaccgcccgtcaaacaatgggagtggtgtttaccagaagtcgttagcctaaccgcaaggagggcggcgacctcggtgagcaccgtgact

SEQ ID NO: 1106 - DNA, 1424 bp, Artificial Sequence
  Synthetic polymer
aacgctggcggcgtgcctaacacatgcaagtcgagcgagaagctgatgattgattcttcggatgaaagattcagtggaaagcggcggacgggtgagtaacgcgtaggcaacctgccttatgcagagggatagccattggaaacgatgattaaaacctcataacgcagaagattcacatggttcttctgccaaagatttatcggcataagatgggcctgcgtctgattagctggttggtgaggtaacggctcaccaaggcgacgatcagtagccgacctgagagggtgatcggccacattggaactgagacacggtccaaactcctacgggaggcagcagtggggaatattgcacaatgggcgaaagcctgatgcagcaacgccgcgtgaaggaagaaggccttcgggtcgtaaacttctgtccttggggaagaagaactgacggtacccaaggaggaagccccggccaactacgtgccagcagccgcggtaatacgtagggggcaagcgttatccggaattattgggcgtaaagagtacgtaggtggcaacttaagcgcagggtttaaggcaatggctcaaccattgttcgccctgcgaactgggatgcttgagtgcaggagaggaaagcggaattcctagtgtagcggtgaaatgcgtagatattaggaggaacaccagtggggaaggcggctttctggactgtaactgacactgaggtacgaaagcgtggggagcaaacaggattagataccctggtagtccacgccgtaaacgatgagcactaggtgtcggggtcgcaagacttcggtgccggagttaacgcattaagtgctccgcctggggagtacgcacgcaagtgtgaaactcaaaggaattgacggggacccgcacaagcagcggagcatgtggtttaattcgaagcaacgcgaagaaccttaccaggacttgacatccctctgacgtatccttaatcggatatttcttcggacagaggagacaggtggtgcatggttgtcgtcagctcgtgtcgtgagatgttgggttaagtcccgcaacgagcgcaacccttgccattagttgccagtagtaagatgggcactctaatgggactgccggggacaactcggaggaaggtggggatgacgtcaaatcatcatgccccttatgttctgggctacacacgtgctacaatggccggtacagaaagcagcgaagtcgtgaggcggagcaaatctcgaaaaccggtcccagttcggactgcaggctgcaactcgcctgcacgaagccggagttgctagtaatcgcggatcagaatgccgcggtgaatgcgttcccgggtcttgtacacaccgcccgtcacaccatggaagttgggggtgccagaagccggcagggtaatatgctgtctaaggcaaaaccaat

SEQ ID NO: 1107 - DNA, 1351 bp, Artificial Sequence
  Synthetic polymer
gatgaacgctggcggcgtgcttaacacatgcaagtcgaacgaacggaggagagcttgctctccaaagttagtggcggacgggtgagtaacgcgtgggtaacctgccctatgcagggggataacgtttggaaacgaacgctaataccgcataaactatcggtagtcgcatgactgctatagtaaagatgcagactttggtctgttttcggcataggatgggcccgcggcgcattagctagttggtgaggtaacggctcaccaaggcgacgatgcgtagccgacctgagagggtgatcggccacattgggactgagacacggcccaaactcctacgggaggcagcagtggggaatattgcacaatgggggaaaccctgatgcagcaacgccgcgtgagtgatgaaggtcttcggatcgtaaagctctgtcttcagggacgataatgacggtacctgaggaggaagccacggctaactacgtgccagcagccgcggtaatacgtaggtggcgagcgttgtccggatttactgggcgtaaagggagcgtaggcggatttttaagtgagatgtgaaatacccaggctcaacctgggggctgcatttcaaactggaagtctagagtgcaggagaggagagtggaattcctagtgtagcggtgaaatgcgtagagattaggaagaacaccagtggcgaaggcgactctctggactgtaactgacgctgaggctcgaaagcgtggggagcaaacaggattagataccctggtagtccacgccgtaaacgatgaatactaggtgtaggggttgtcatgacctctgtgccgccgcaaacgcattaagtattccgcctggggagtacggtcgcaagattaaaactcaaaggaattgacgggggcccgcacaagcagcggagcatgtggtttaattcgaagcaacgcgaagaaccttacctagacttgacatctcctgcattactcttaatcgaggaagtcctttcggggacaggatgacaggtggtgcatggttgtcgtcagctcgtgtcgtgagatgttgggttaagtcccgcaacgagcgcaacccttattgttagttgctaccatttagttgagcactctagcgagactgcccgggttaaccgggaggaaggtggggatgacgtcaaatcatcatgccccttatgtctagggctacacacgtgctacaatggcaagtacaacgagatgcaataccgcaaggtggagccaaactataaaacttgtctcagttcggattgtaggctgaaactcgcctacatgaagctggagttgctagtaatcgcgaatcagaatgtcgcggtgaatacgttcccgggcct

SEQ ID NO: 1108 - DNA, 1473 bp, Artificial Sequence
  Synthetic polymer
gacgaacgctggcggcgtgcctaatacatgcaagtagaacgctgacctttcggtgcttgcaccgaaagtgatgagttgcgaacgggtgagtaacacgtgggtaacctgcccagaagagggggataacacttggaaacaggtgctaataccgcataacaatttgaatcgcatgattcgaatttgaaaggcgcttttgcgtcacttctggatggacccgcggtgcattagctagttggtgaggtaacggctcaccaaggccatgatgcatagccgacctgagagggtgatcggccacactgggactgagacacggcccagactcctacgggaggcagcagtagggaatcttcggcaatggacgaaagtctgaccgagcaacgccgcgtgagtgaagaaggttttcggatcgtaaaactctgttgttagagaagaacaagggtgagagtaaaaagttcaccccttgacggtatctaaccagaaagccacggctaactacgtgccagcagccgcggtaatacgtaggtggcaagcgttgtccggatttattgggcgtaaagcgagcgcaggcggtttcttaagtctgatgtgaaagcccccggcttaaccggggagggtcattggaaactgggagacttgagtgcagaagaggagagtggaattccatgtgtagcggtgaaatgcgtagatatatggaggaacaccagtggcgaaggcggctctctggtctgtaactgacgctgaggctcgaaagcgtggggagcaaacaggattagataccctggtagtccacgccgtaaacgatgagtgctaagtgttggagggtttccgcccttcagtgctgcagctaacgcattaagcactccgcctggggagtacgaccgcaaggttgaaactcaaaggaattgacgggggcccgcacaagcggtggagcatgtggtttaattcgaagcaacgcgaagaaccttaccaggtcttgacatcctttgaccatcctagagataggactttcccttcggggacaaagtgacaggtggtgcatggttgtcgtcagctcgtgtcgtgagatgttgggttaagtcccgcaacgagcgcaacccttattgttagttgccatcatttagttgggcactctagcgagactgccggtgataaaccggaggaaggtggggatggcgtcaaatcatcatgccccttatgacctgggctacacacgtgctacaatgggaagtacaacgagtcgcaaagtcgcgaggctaagctaatctcttaaagcttctctcagttcggattgtaggctgcaactcgcctacatgaagccggaatcgctagtaatcgcggatcagcacgccgcggtgaatacgttcccgggccttgtacacaccgcccgtcacaccacgagagtttgtaacacccgaagtcggtgaggtaaccttttggagccagccgcctaaggtgggatagatgattggggtg

SEQ ID NO: 1109 - DNA, 1407 bp, Artificial Sequence
  Synthetic polymer
taacacatgcaagtcgaggggcagcatgaggtagctataccttgatggcgaccggcgcgcgggtgagtaacgcgtatgcaacctgcccgataccggggtatagcccatggaaacgtggattaacaccccatagtacttttatcctgcatgggatgtgagttaaatgttcaaggtatcggatgggcatgcgtcctattagttagttggcggggtaacagcccaccaagacgatgataggtaggggttctgagaggaacgacccccacattggaactgacacacggtccaaactcctacgggaggaatcagtgaggaatattggtcaatggacgtaagtctgaaccagccaagtcgcgtgagggaagactgccctatgggttgtaaacctcttttataagggaagaataagttctacgtgtagaatgatgcctgtaccttatgaataagcatcggctaactccgtgccagcagccgcggtaatacggaggatgcgagcgttatccggatttattgggtttaaagggtgcgtatgcggtttattaagttagtggttaaatatttgagctaaactcaattgtgccattaatactggtaaactggagtacagacgaggtaagcggaataagttaagtagcggtgaaatgcatagatataacttagaactccgatagcgatggcagcttaccagactgtaactgacgctgatgcacgagagcgtgggtagcgaacaggattagataccctggtagtccacgccgtatacgatgctcactggttctgtgcgatatattgtacgggattaagcgaaagtattaagtgagccgcgtggggagtccgtcggcaacgttgaaactcaaaggaattgacgggggcccgcacaagcggaggaacatgtggtgtaattcgatgatgcgcgaggaaccttccctgggtttaaatgggaaatgctgtatttggaaacagattttctgttcggagcgtttttcaaggtggtgcatggtcgtcgtcagttcgtgccgtgaggtgtcgggttaagtcccataacgagcgcaacccttaccgttagtcgttagcatgtaatgttgagcgttctaacgggactgccaccgtaaggtgagaggaaggcggggatatcgtcaaatcagcacggcctttgcacccagggctactcccgtgttacaatggccggtacagagggccgctaccaggtgactggatgccaatctcataacccggtggtagttcggattggagtctgtaacccgactccatgaagttggattctctagtattcgcgcatcagccatggcgcggtgaatacgttcccgggccttgtacaccccgcccgtcaagccatggaagccgggggtgcctgaagtccctataaagggggatcggcctagggca

SEQ ID NO: 1110 - DNA, 1357 bp, Artificial Sequence
  Synthetic polymer
gatgaacgctggcggcgtgcctaacacatgcaagtcgagcgagaaacctttcaacgaaagctttcggtagattttgagaggtggaaagcggcggaacgggtgagtaacgcgtaggcaacctgccccttgcagagggatagcctcgggaaaccgggattaaaacctcataatgcctttgaagcacatgctataaaggtcaaagatttatcggcaagggatgggcctgcgtctgattagctagtaggtggggtaacggcctacctaggcgacgatcagtagccgacctgagagggtgatcggccacattggaaccgagacacggtccaaactcctacgggaggcagcagtggggaatattgcacaatgggcgaaagcctgatgcagcaacgccgcgtgaaggaagaaggcctttgggtcgtaaacttctgtccttggggaagaataatgacggtacccttggaggaagccccggctaactacgtgccagcagccgcggtaatacgtagggggcaagcgttatccggaattattgggcgtaaagagtacgtaggtggttttcctaagcacagggtttaaggctaaggctcaaccatagttcgccctgtgaactgggagacttgagtgcaggagaggaaagcggaattcctagtgtagcggtgaaatgcgtagatattaggagaaacaccagtggcgaaggcggctttctggactgtaactgacactgaggtacgaaagcgtggggagcaaacaggattagataccctggtagtccacgccgtaaacgatgagcactaggtgtcggggccgcaaggtttcggtgccgcagttaacgcattaagtgctccgcctggggagtacgcacgcaagtgtgaaactcaaaggaattgacggggacccgcacaagcagcggagcatgtggtttaattcgaagcaacgcgaagaaccttaccagggcctgacatccctctgaccggactttaacaggtctttctcttcggagcagaggtgacaggtggtgcatggttgtcgtcagctcgtgtcgtgagatgttgggttaagtcccgcaacgagcgcaacccttgtcattagttgccatcattaagttgggcactctagtgagactgccggggacaactcggaggaaggtggggatgacgtcaaatcatcatgccccttatgttctgggctacacacgtgctacaatggccggtacagaaagcagcgaagtcgtgaggcggagcaaatctccgaaaaccggtcccggttcggattgcaggctgcaactcgcctgcatgaagttggagttgctagtaatcgcagaatcagaaatgctgcggtgaaatgcgttcccgggtct

SEQ ID NO: 1111 - DNA, 1447 bp, Artificial Sequence
  Synthetic polymer
ctcatgacgaacgctggcggcgtgcctaacacatgcaagtcgaacggagataagcgctgatgatttagcttgctattgattcttgtttatcttagtggcggacgggtgagtaacgcgtgagcaacctgcctttcagagggggataacgtcttgaaaaggacgctaataccgcatgagatcgtagtcccacatgggacagcgaccaaaggagcaatccgctgaaagatggactcgcgtccgattagatagttggcggggtaacggcccaccaagtcgacgatcggtagccggactgagaggttgaacggccacattgggactgagacacggcccagactcctacgggaggcagcagtgagggatattggtcaatgggggaaaccctgaaccagcaacgccgcgtgagggatgacggccttcgggttgtaaacctctgtcctctgtgaagataatgacggtagcagaggaggaagctccggctaactacgtgccagcagccgcggtaatacgtagggagcaagcgttgtccggatttactgggtgtaaagggtgcgtaggcggttcggcaagtcagaagtgaaatccatgggcttaacccatgaactgcttttgaaactgtcgaacttgagtgaagtagaggtaggcggaattcccggtgtagcggtgaaatgcgtagagatcgggaggaacaccagtggcgaaggcggcctactgggctttaactgacgctgaggcacgaaagcatgggtagcaaacaggattagataccctggtagtccatgccgtaaacgatgattactaggtgtggggggtctgaccccctccgtgccggagttaacacaataagtaatccacctggggagtacggccgcaaggctgaaactcaaaggaattgacgggggcccgcacaagcagtggagtatgtggattaattcgaagcaacgcgaagaaccttaccaggtcttgacatccagctaacgaagtagagatacattaggtgcccttcggggaaagctgagacaggtggtgcatggttgtcgtcagctcgtgtcgtgagatgttgggttaagtcccgcaacgagcgcaacccttactgttagttgctacgcaagagcactctagcaggaccgccgttgacaaaacggaggaaggtggggatgatgtcaaatcatcatgccccttatgacctgggcctcacacgtactacaatggccgtaaacagagggaagcaataccgcgaggtggagcaaaaccctaaaaacggtcccagttcggattgtaggctgcaacccgcctgcatgaagttggaattgctagtaatcgcggatcagcatgccgcggtgaatacgttcccgggccttgtacacaccgcccgtcacaccatgggagccggtaatacccgaagtcagtagtctaaccgcaaggagggcgctgccgaaggtaggat

SEQ ID NO: 1112 - DNA, 1441 bp, Artificial Sequence
  Synthetic polymer
aacgctagcggcaggcttaacacatgcgagtcgaggggcagcataatggatagcaatatctatggtggcgaccggcgcacgggtgcgtaacgcgtatgcaacctacctttaacagggggataacactgagaaattggtactaataccccataacatcatgaaaggcatcttttatggttgaaaattccgatggttagagatgggcagtgcgttgtattacctagttggtgaggtaacggctcaccaaggcgacgatacatagggggactgagaggttaaccccccacactggtactgagacacggaccagactcctacgggaggcagcagtgaggaatattggtcaatggacgcgagtctgaaccagccatgccgcgtgcaggatgacggctctatgagttgtaaactgcttttgtactagggtaaactcacctacgtgtaggtgactgaaagtatagtacgaataaagatcgggtaactccgtggcaggcagccgcggtaatacggaggattcaagcgttatccggaattattgggtttaaagggtgccgaggcggtttgataagttagaggtgaaatgttagggctcaaccctgaaactgcctctaatactgttggactagagagtagttgcggtaggcggaatgtatggtgtagcggtgaaatgcttagagatcatacagaacaccgattgcgaaggcagcttaccaaactatatctgacgttgaggcacgaaagcgtggggagcaaacaggattagataccctggtagtccacgcagtaaacgatgataactcgttgtcggcgatacacagtcggtgactaagcgaaagcgataagttatccacctggggagtacgttcgcaagaatgaaactcaaaggaattgacgggggcccgcacaagcggaggaacatgtggtttaattcgatgatacgcgaggaaccttacccgggcttgaaagttagcgacgattcttgaaagaggatttcccttcggggcgcgaaactaggtgctgcatggttgtcgtcagctcgtgccgtgaggtgtcgggttaagtcccataacgagcgcaacccctaccgttagttgccatcaggtcaagctgggcactctggcgggactgccggtgtaagccgagaggaaggtggggatgacgtcaaatcagcacggcccttacgtccggggctacacacgtgttacaatggtaggtacagagggtagctacccagcgatgggatgcgaatctcgaaagcctatctcagttcggattggaggctgaaacccgcctccatgaagttggattcgctagtaatcgcgcatcagccatggcgcggtgaatacgttcccgggccttgtacacaccgcccgtcaagccatgggagccgggggtgcctgaagttcgtgaccgcaaggagcgacctagggcaaaactggtaact

SEQ ID NO: 1113 - DNA, 1436 bp, Artificial Sequence
  Synthetic polymer
tggcggcgtgcttaacacatgcaagtcgaacgaagcatttgcgacagatttcttcggattgaagttgcttatgactgagtggcggacgggtgagtaacgcgtgggtaacctgcctcacacagggggatagcagttggaaacggctgataataccgcataagcgcacagtaccgcatggtacagtgtgaaaaactccggtggtgtgagatggacccgcgtctgattagcttgttggcagggtaacggcctaccaaggcaacgatcagtagccgacctgagggggtgaccggccacattgggactgagacacggcccagactcctacgggaggcagcagtggggaatattgcacaatggaggaaactctgatgcagcgacgccgcgtgagtgaagaagtaattcgttatgtaaagctctatcagcagggaagatagtgacggtacctgactaagaagctccggctaaatacgtgccagcagccgcggtaatacgtatggagcaagcgttatccggatttactgggtgtaaagggagtgtaggtggcatcacaagtcagaagtgaaagcccggggctcaaccccgggactgcttttgaaactgtggagctggagtgcaggagaggcaagtggaattcctagtgtagcggtgaaatgcgtagatattaggaggaacaccagtggcgaaggcggcttgctggactgtaactgacactgaggctcgaaagcgtggggagcaaacaggattagataccctggtagtccacgccgtaaacgatgaatactaggtgtcggggctcataagagcttcggtgccgcagcaaacgcaataagtattccacctggggagtacgttcgcaagaatgaaactcaaaggaattgacggggacccgcacaagcggtggagcatgtggtttaattcgaagcaacgcgaagaaccttaccaagtcttgacatcccgatgacagggtatgtaatgtactttctcttcggagcatcggtgacaggtggtgcatggttgtcgtcagctcgtgtcgtgagatgttgggttaagtcccgcaacgagcgcaacccctgttcttagtagccagcggttcggccgggcactctagggagactgccagggataacctggaggaaggcggggatgacgtcaaatcatcatgccccttatgacttgggctacacacgtgctacaatggcgtaaacaaagggaagcggagccgtgaggccgagcaaatctcaaaaataacgtctcagttcggactgtagtctgcaacccgactacacgaagctggaatcgctagtaatcgcagatcagaatgctgcggtgaatacgttcccgggtcttgtacacaccgcccgtcacaccatgggagttggaaatgcccgaagtcagtgacccaaccgcaaggagggagctgccgaaggcaggttcga

SEQ ID NO: 1114 - DNA, 1449 bp, Artificial Sequence
  Synthetic polymer
  misc_feature (724)..(724): n is a, c, g, or t
gcgtgcttaacacatgcaagtcgaacgaagcatttaagatggattctttcgggatgaagacttttatgactgagtggcggacgggtgagtaacgcgtgggtaacctgcctcacacagggggatagcagttggaaacggctgataataccgcataagcgcacagtaccgcatggtacagtgtgaaaaactccggtggtgtgagatggacccgcgtctgattagcttgttggcagggtaacggcctaccaaggcaacgatcagtagccgacctgagagggtgaccggccacattgggactgagacacggcccagactcctacgggaggcagcagtggggaatattgcacaatggaggaaactctgatgcagcgacgccgcgtgagtgaagaagtaattcgttatgtaaagctctatcagcagggaagatagtgacggtacctgactaagaagctccggctaaatacgtgccagcagccgcggtaatacgtatggagcaagcgttatccggatttactgggtgtaaagggagtgtaggtggcatcacaagtcagaagtgaaagcccggggctcaaccccgggactgcttttgaaactgtggagctggagtgcaggagaggcaagtggaattcctagtgtagcggtgaaatgcgtagatattaggaggaacaccagtggcgaaggcggcttgctggactgtaactgacactgaggctcgaaagcgtgnggagcaaacaggattagataccctggtagtccacgccgtaaacgatgaatactaggtgtcggggctcataagagcttcggtgccgcagcaaacgcaataagtattccacctggggagtacgttcgcaagaatgaaactcaaaggaattgacggggacccgcacaagcggtggagcatgtggtataattcgaagcaacgcgaagaaccttaccaagtcttgacatcctcttgaccggtcagtaatgtggccttttcttcggaacaagagtgacaggtggtgcatggttgtcgtcagctcgtgtcgtgagatgttgggttaagtcccgcaacgagcgcaacccctattcttagtagccagcatataaggtgggcactctagggagactgccagggataacctggaggaaggtggggatgacgtcaaatcatcatgccccttatgaccagggctacacacgtgctacaatggcgtaaacaaagggaagcaaagctgtgaggccgagcaaatcccaaaaataacgtctcagttcggattgtagtctgcaactcgactacatgaagctggaatcgctagtaatcgcgaatcagaatgtcgcggtgaatacgttcccgggtcttgtacacaccgcccgtcacaccatgggagtcagtaacgcccgaagtcagtgacccaaccgtaaggagggagctgccgaaggtgggaccgataactggggtgaagtcgt

SEQ ID NO: 1115 - DNA, 1439 bp, Artificial Sequence
  Synthetic polymer
cggcgtgcctaacacatgcaagtcgaacggagttaagagagcttgctcttttaacttagtggcggacgggtgagtaacgcgtgagtaacctgcctttcagaggggaataacattctgaaaagaatgctaataccgcatgagatcgtagtatcgcatggtacagcgaccaaaggagcaatccgctgaaagatggactcgcgtccgattagctagttggtgagataaaggcccaccaaggcgacgatcggtagccggactgagaggttgaacggccacattgggactgagacacggcccagactcctacgggaggcagcagtgggggatattgcacaatgggggaaaccctgatgcagcaacgccgcgtgaaggaagaaggtcttcggattgtaaacttctgtcctcagggaagataatgacggtacctgaggaggaagctccggctaactacgtgccagcagccgcggtaatacgtagggagcaagcgttgtccggatttactgggtgtaaagggtgcgtaggcggatctgcaagtcagtagtgaaatcccagggcttaaccctggaactgctattgaaactgtgggtcttgagtgaggtagaggcaggcggaattcccggtgtagcggtgaaatgcgtagagatcgggaggaacaccagtggcgaaggcggcctgctgggccttaactgacgctgaggcacgaaagcatgggtagcaaacaggattagatacagtggtagtccatgccgtaaacgatgattactaggtgtggggtggtctgacccccatcccgtgcaggagttaacacaatgagtaatccacgtggggagtacggcggcaaggttgaaactcaaaggaattgacgggggcccgcacaagcagtggagtatgtggtttaattcgaagcaacgcgaagaaccttagcaggtcttgacatcctgctaacgaggtagagatacgttaggtgcccttcggggaaagcagggacaggtggtgcatggtggtcgtcagctggtgtcgtgagatgttgggttaagtcccgcaacgagcgcaacccctgttattagttgttacgcaagagcactctaataggtctgccgttgacaaaacggaggaaggtggggaagacgtcaaatcatcatgctcattatgacctgggctacacaggtaatacaatggccgtcaacagagagaagcaaagccgcgaggtggagcaaaactctaaaaacggtcccagtttggatggtaggatgcaactcgcctacgtgaagtcggaattgctagtaatcgcggatcatcatgtcgcggtgaatacgttgccgggctttgtacacaccgcccgtcacaccatgggagccggtaataccggaagtcagtagtgtaaccgcaagggggacgctgccgaaggtaggattggcgactggggtgaagtcataaca

SEQ ID NO: 1116 - DNA, 1445 bp, Artificial Sequence
  Synthetic polymer
ggcggcgtgcttaacacatgcaagtcgaacgaagctgcttaactgatcttcttcggaattgacgttttgtagactgagtggcggacgggtgagtaacgcgtgggtaacctaccctgtacagggggataacagtcagaaatgactgctaataccgcataagaccacagcaccgcatggtgcaggggtaaaaactccggtggtacaggatggacccgcgtctgattagctggttggtgaggtaacggctcaccaaggcgacgatcagtagccggcttgagagagtgaacggccacattgggactgagacacggcccaaactcctacgggaggcagcagtggggaatattgcacaatgggggaaaccctgatgcagcgacgccgcgtgagtgaagaagtatctcggtatgtaaagctctatcagcagggaagaaaatgacggtacctgactaagaagccccggctaactacgtgccagcagccgcggtaatacgtagggggcaagcgttatccggaattactgggtgtaaagggtgcgtaggtggtatggcaagtcagaagtgaaaacccagggcttaactctgggactgctttcgaaactgtcagactggagtgcaggagaggtaagcggaattcctggtgtagcggtgaaatgcgtagatattaggaggaacatcagtggcgaaggcggcttactggacgataactgacgctgaggctcgaaagcgtggggagcaaacaggattagataccctggtagtccacgccgtaaacgatgaatactaggtgtcggggagcattgctcttcggtgccgcagcaaacgcaataagtattccacctggggagtacgttcgcaagaatgaaactcaaaggaattgacggggacccgcacaagcggtggagcatgtggtttaattcgaagcaacgcgaagaaccttaccaagtcttgacatcccgatgacagagtatgtaatgtactttctcttcggagcatcggtgacaggtggtgcatggttgtcgtcagctcgtgtcgtgagatgttgggttaagtcccgcaacgagcgcaacccctgttcttagtagccagcggttcggccgggcactctagggagactgccagggataacctggaggaaggcggggatgacgtcaaatcatcatgccccttatgacttgggctacacacgtgctacaatggcgtaaacaaagggaagcggagccgtgaggccgagcaaatctcaaaaataacgtctcagttcggactgtagtctgcaacccgactacacgaagctggaatcgctagtaatcgcagatcagaatgctgcggtgaatacgttcccgggtcttgtacacaccgcccgtcacaccatgggagttggaaatgcccgaagtcagtgacccaaccgcaaggagggagctgccgaaggcaggttcgataactggggtg

SEQ ID NO: 1117 - DNA, 1395 bp, Artificial Sequence
  Synthetic polymer
agtcgaacgaagcacttcgatttcttcggaatgaaaaagtgactgagtggcggacgggtgagtaacgcgtgggtaacctgcctcatacagggggataacagttagaaatggctgctaataccgcataagcgcacagtaccgcatggtaccgtgtgaaaaactccggtggtatgagatggacccgcgtctgattagctagttggtaaggtaacggcttaccaaggcgacgatcagtagccggcctgagagggtgatcggccacattgggactgagacacggcccaaactcctacgggaggcagcagtggggaatattgcacaatgggggaaaccctgatgcagcaacgccgcgtgaaggatgacgtatttcggtatgtaaacttctatcagcaaggaagatgatgacggtacttgactaagaagccccggctaactacgtgccagcagccgcggtaatacgtagggggcaagcgttatccggatttactgggtgtaaagggagcgtaggcggccatgcaagtcagaagtgaaagcccggggctcaaccccgggactgcttttgaaactgtaaggctagattgccggagaggtaagcggaattcctagtgtagcggtgaaatgcgtagatattaggaggaacaccagtggcgaaggcggcttactggacggtgaatgacgctgaggctcgaaagcgtggggagcaaacaggattagataccctggtagtccacgctgtaaacgatgaatactaggtgtcggggcccagaagggcttcggtgccgcagctaacgcaataagtattccacctggggagtacgttcgcaagaatgaaactcaaaggaattgacggggacccgcacaagcggtggagcatgtggtttaattcgaagcaacgcgaagaaccttaccaggtcttgacatcccgatgaccgacaagtaatgttgtctttcctacgggacatcggtgacaggtggtgcatggttgtcgtcagctcgtgtcgtgagatgttgggttaagtcccgcaacgagcgcaacccctacttttagtagccagcagttcggctgggcactctagagagactgccagggataacctggaggaaggtggggatgacgtcaaatcatcatgccccttatgatctgggctacacacgtgctacaatggtggtaacaaagtgaagcgagcctgcgagggggagcaaatcacagaaaagccatctcagttcggattgtagtctgcaactcgactacatgaagctggaatcgctagtaatcgcgaatcagcatgtcgcggtgaatacgttcccgggtcttgtacacaccgcccgtcacaccatgggagttggatatgcccgaggtcagtgacccaaccgtaaggagggagctgccgaagg

SEQ ID NO: 1118 - DNA, 1382 bp, Artificial Sequence
  Synthetic polymer
ttcgcccttagagtttgatcctggctcaggacgaacgctggcggcgtgcctaacacatgcaagtcgagcgaatgaagttcctccgggaacggatttagcggcggacgggtgagtaacacgtgggcaacctgcctcatagaggggaatagccttccgaaagggagattaataccgcataagattgtagtaccgcatggtacatcaattaaaggagcaatccgctatgagatgggcccgcggcgcattagctagttggtgaggtaacggctcaccaaggcgacgatgcgtagccgacctgagagggtgatcggccacattgggactgagacacggcccagactcctacgggaggcagcagtggggaatattgcacaatgggggaaaccctgatgcagcaacgccgcgtgagtgatgacggccttcgggttgtaaagctctgtcttcagggacgataatgacggtacctgaggaggaagccacggctaactacgtgccagcagccgcggtaatacgtaggtggcgagcgttgtccggatttactgggcgtaaagggagcgtaggcggatttttaagtgagatgtgaaatactcgggcttaacctgagtgctgcatttcaaactggaagtctagagtgcaggagaggagaagggaattcctagtgtagcggtgaaatgcgtagagattaggaagaacaccagtggcgaaggcgcttctctggactgtaactgacgctgaggctcgaaagcgtggggagcaaacaggattagataccctggtagtccacgccgtaaacgatgaaaaataggggttgggggttttcatgacctctgtgccccctcaaacgcattagtaatttcccccggggaggacgttggcaagaataaaatcacaagaattgacagggggccgcccaagcagcggagcatgtggtttatttgttgcaacgcgaagaaccctaccttgacgtgacatctcctgcactacttctttatcaaggaagtcccttcggggacaggatgacagatggtgcatggttgtcgtcagctcgtgtcttgagatgttgggttaagtcccgcaacgagcgcacccctcattgttagttgccatcattaagttgggcactctagcgagactgcccgggttaaccgggaggaaggtggggatgacgtcaaatcatcatgccccttatgtctagggctacacacgtgctacaatggtcggtacaataagacgcaagcccgcgagggggagcaaaactggaaaaccgatctcagttcggattgtaggctgaaactcgcctacatgaagctggagttgctagtaatcgcgaatcagcatgtcgcggtgaataagttcccgggccttgtacacaccgcccgtca

SEQ ID NO: 1119 - DNA, 1421 bp, Artificial Sequence
  Synthetic polymer
gcggcgcgcctaacgcatgcaagtcgaacgagcgagagagagcttgctttctcaagcgagtggcgaacgggtgagtaacgcgtgaggaacctgcctcaaagagggggacaacagttggaaacgactgctaataccgcataagcccacagctcggcatcgagcatagggaaaaggagcaatccgctttgagatggcctcgcgtccgattagctaattggtgaggtaatggcccaccaaggcaacgatcggtagccggactgagaggttgaacggccacattgggactgagacacggtccacactcctaccggaggcatcagtggggaatattgttcaatgggggaaaccctgatgcaccgacgccgcgtggaggagcaatgtcttcggattgtaaacccctgttgctgaggaagataatgacagtactctgcaaggaactgactcgcaaactacgagccagcagccgcggtaaaacgtaggtcacaagcggtgttccggaattactgggtgtaaagggagcgcaggcggaaagacaagttggaagtgaaatctatgggctcaacccataaactgctttcaaaactgtttttcttgagtagtgcagaggtaggcggaattcccggtgtagcggtggaatgcgtagatatcgggaggaacaccagtggcgaaggcggcctactgggcaccaactgacgctgaggctcgaaagtgtgggtagcaaacaggattagataccctggtagtccacaccgtaaacgatgattactaggtgttggaggattgaccccttcagtgccgcagttaacacaataagtaatccacctggggagtacgaccgcaaggttgaaactcaaaggaattgacgggggcccgcacaagcagtggagtatgtggtttaattcgacgcgacgcgaagaaccttaccaagtcttgacatcctgcgacgaagatagaaacagtattttccttcgggacgcagagacaggtggtgcatggttgtcgtcagctcgtgtcgtgagatgttgggttaagtcccgcaacgagcgcaacccttactgtcagttactacgcaagaggactctggcaggactgccgttgacaaaacggaggaaggtggggatgacgtcaaatcatcatgccctttatgacttgggctacacatgtactacaatggcgttaaacaaagagaagcaagaccgcgaggtggagcaaaactcagaaacaacgtcccagttcggactgcaggttgcaactcgcctgcacgaagtcggaattgctagtaatcgtggatcagcatgccacggtgaatacgttcccgggccttgtacacaccgcccgtcacaccatgagagccggggggacccgaagtcggtagtctaaccgcaaggaggacgccgccgaaggtaaaactggtgattggg

SEQ ID NO: 1120 - DNA, 1452 bp, Artificial Sequence
  Synthetic polymer
tgaacgctagcgacaggcctaacacatgcaagtcgaggggcagcggagaggtagcaatacctttgccggcgaccggcgcacgggtgagtaacacgtatgcaatccacctgtaacagggggataacccggagaaatccggactaataccccataatatgggctctccgcatggagggtccattaaagagagcaattttggttacagacgagcatgcgctccattagccagttggcggggtaacggcccaccaaagcgacgatggataggggttctgagaggaaggtcccccacattggaactgagacacggtccaaactcctacgggaggcagcagtgaggaatattggtcaatggtcgacagactgaaccagccaagtcgcgtgagggaagacggccctacgggttgtaaacctcttttgtcggagagtaaagtacgctacgtgtagcgtattgcaagtatccgaagaaaaagcatcggctaactccgtgccagcagccgcggtaatacggaggatgcgagcgttatccggatttattgggtttaaagggtgcgtaggcggcacgccaagtcagcggtgaaattttcgggctcaacccggactgtgccgttgaaactggcgagctagagtgcacaagaggcaggcggaatgcgtggtgtagcggtgaaatgcatagatatcacgcagaaccccgattgcgaaggcagcctgctagggtgcgacagacgctgaggcacgaaagcgtgggtatcgaacaggattagataccctggtagtccacgcagtaaacgatgaacactaggtgtgcgggtcgaatgagatctgcgtgccacagcgaaagcgttaagtgttccacctggggagtacgccggcaacggtgaaactcaaaggaattgacgggggcccgcacaagcggaggaacatgtggtttaattcgatgatacgcgaggaaccttacccgggctcaaacggcagaggaaagtttttgaaaggaggctgctcttaggagtctctgccgaggtgctgcatggttgtcgtcagctcgtgccgtgaggtgtcggcttaagtgccataacgagcgcaacccctaccgccagttgccatcaggtaaagctggggactctggcgggactgccggcgcaagctgtgaggaaggcggggatgacgtcaaatcagcacggcccttacgtccggggcgacacacgtgttacaatggcaggtacagcgggaagccaccgagcgatcgggagcagaacccgaaaacctgtctcagttcggattggagtctgcaactcgactccatgaagctggattcgctagtaatcgcgcatcagccatggcgcggtgaatacgttcccgggccttgtacacaccgcccgtcaagccatggaagccgggggtgcctgaagtgcgcgaccgcaaggagcgccctaaggtaaaaccggtgactgg

SEQ ID NO: 1121 - DNA, 1442 bp, Artificial Sequence
  Synthetic polymer
ctggcggcgtgcttaacacatgcaagtcgagcgaagcacttaagtttgattcttcggatgaagacttttgtgactgagcggcggacgggtgagtaacgcgtgggtaacctgcctcatacagggggataacagttagaaatgactgctaataccgcataagaccacggtaccgcatggtacagtggtaaaaactccggtggtatgagatggacccgcgtctgattaggtagttggtggggtaacggcctaccaagccgacgatcagtagccgacctgagagggtgaccggccacattgggactgagacacggcccagactcctacgggaggcagcagtggggaatattgcacaatggaggaaactctgatgcagcgacgccgcgtgaaggatgaagtatttcggtatgtaaacttctatcagcagggaagaaaatgacggtacctgactaagaagccccggctaactacgtgccagcagccgcggtaatacgtagggggcaagcgttatccggatttactgggtgtaaagggagcgtagacggcacggcaagccagatgtgaaagcccggggctcaaccccgggactgcatttggaactgctgagctagagtgtcggagaggcaagtggaattcctagtgtagcggtgaaatgcgtagatattaggaggaacaccagtggcgaaggcggcttgctggacgatgactgacgttgaggctcgaaagcgtggggagcaaacaggattagataccctggtagtccacgccgtaaacgatgaatactaggtgtcgggtggcagagccattcggtgccgtcgcaaacgcagtaagtattccacctggggagtacgttcgcaagaatgaaactcaaaggaattgacggggacccgcacaagcggtggagcatgtggtttaattcgaagcaacgcgaagaaccttaccaagtcttgacatccgcctgactgatccttaaccggatctttccttcgggacaggcgagacaggtggtgcatggttgtcgtcagctcgtgtcgtgagatgttgggttaagtcccgcaacgagcgcaacccctatcctcagtagccagcatttaaggtgggcactctggggagactgccagggataacctggaggaaggcggggatgacgtcaaatcatcatgccccttatgatttgggctacacacgtgctacaatggcgtaaacaaagggaagcgagattgtgagatggagcaaatcccaaaaataacgtcccagttcggactgtagtctgcaacccgactacacgaagctggaatcgctagtaatcgcggatcagaatgccgcggtgaatacgttcccgggtcttgtacacaccgcccgtcacaccatgggagtcagtaacgcccgaagtcagtgacctaaccgaaagggaggagctgccgaaggcgggaccgatgactggg

SEQ ID NO: 1122 - DNA, 1449 bp, Artificial Sequence
  Synthetic polymer
ggctcaggatgaacgctggcggcgtgcttaacacatgcaagtcgaacggggattatttcattgaagcttcggcagatttggcttaatcctagtggcggacgggtgagtaacgcgtgggtaacctgccttgtacagggggataacagtcagaaatgactgctaataccgcataagcgcacaggaccgcatggtccggtgtgaaaaactccggtggtataagatggacccgcgttggattagctagttggcagggtaacggcctaccaaggcgacgatccatagccggcctgagagggtgaacggccacattgggacggagacacggcccagactcctacgggaggcagcagtgggggatattgcacaatgggggaaaccctgatgcagcaacgccgcgtgtgggaagaaggttttcggattgtaaaccactgttcttggtgaagataatgacggtaaccaaggagaaagctccggctaactacgtgccagcagccgcggtaatacgtagggagcaagcgttgtccggatttactgggtgtaaagggtgcgtaggcggctaggcaagtcagacgtgaaaaccatgggctcaacctgtggactgcgtttgaaactgtttagcttgagtgaagtagaggtaggcggaattcccggtgtagcggtgaaatgcgtagagatcgggaggaacaccagtggcgaaggcggcctactgggctttaactgacgctgaggcacgaaagcatgggtagcaaacaggattagataccctggtagtccatgccgtaaacggtgattactaggtgtggggggtctgaccccctccgtgccggagttaacacaataagtaatccacctggggagtacggccgcaaggttgaaactcaaaggaattgacgggggcccgcacaagcagtggagtatgtggtttaattcgaagcaacgcgaagaaccttaccaggtcttgacatccgactaacgaagtagagatacattaggtgccctttttgggaaagtcgagacaggtggtgcatggttgtcgtcagctcgtgtcgtgagatgttgggttaagtcccgcaacgagcgcaacccttgtcattagttgctacgtaagagcactctaatgagactgccgttgacaaaacggaggaaggtggggacgacgtcaaatcatcatgccccttatgacctgggctacacacgtactacaatggccgttaacagagggaagcaataccgtgaggtggagccaaaccctaaaaacggtcccagttcggattgtaggctgaaactcgcctacatgaagttggaattgctagtaatcgcggatcagcatgccgcggtgaatacgttcccgggccttgtacacaccgcccgtcacaccatgggagccggtaatacccgaagccagtagtctaaccgtaaggaggacgctgtcgaaggtaggattggcga

SEQ ID NO: 1123 - DNA, 1360 bp, Artificial Sequence
  Synthetic polymer
ggcgaccggcgcacgggtgagtaacgcgtatgcaacctgcccgataccggggtataccccatggaaacatgtattaacaccccatagtacttttatcctgcatgggatgtgagttaaatgttcaaggtatcggatgggcatgcgtcctattagttagttggcggggtaacagcccaccaagacgatgataggtaggggttctgacaggaaggtcccccacattggaactgatacacggtccacactcctactgcaggcaccactgaggaatattggtcaatggacgtaagtctgaagcagcctagtcgcgtgagggaatactgtcctatgggttgtaaacctcttttataacgaaacaatatgatctacgtgtagaatgatgcctgtaccatatgaataagaatcagctaactccgtgccttgacccgcggaaatacggacgatgcgagcgttatccggatttattgagtttaaagggtgcgtagggcggtttattaagttagtggttaaatatttgagctaaactcaattgtgccattaatactggtaaactggagtacagacgaggtaggcggaataagttaagtagcggtgaaatgcatagatataacttagaactccgatagcgaaggcagcttaccagactgtaactgacgctgatgcacgagagcgtgggtagcgaacaggattagataccctggtagtccacgccgtaaacgatgctcactggttctgtgcgatatattgtacgggattaagcgaaagtattaagtgagccacctggggagtacgtcggcaacgatgaaactcaaaggaattgacgggggcccgcacaagcggaggaacatgtggtttaattcgatgatacgcgaggaaccttacctgggtttaaatgggaaatgccgtatttggaaacagatattctcttcggagcgtttttcaaggtgctgcatggttgccgtcagctcgtgccgtgaggtgtcgggttaagtcccataacgagcgcaacccttaccgttagttgctagcatgtaatgatgagcactctaacgggactgccaccgtaaggtgagaggaaggcggggatgacgtcaaatcagcacggcccttacacccagggctacacacgtgttacaatggccggtacagagggccgctaccaggtgactggatgccaatctcaaaagccggtcgtagttcggattggagtctgtaacccgactccatgaagttggattcgctagtaatcgcgcatcagccatggcgcggtgaatacgttcccgggccttgtacacaccgcccgtcaagccatggaagccgggggtgcctgaagtccgtaaccgcgaggatcggcctaggg

SEQ ID NO: 1124 - DNA, 1447 bp, Artificial Sequence
  Synthetic polymer
gctggcggcatgctttacacatgcaagtcgaacggcagcgcggggagcttgctccctggcggcgagtggcgcacgggtgagtaatacatcggaacgtgtcttctagtgggggataactgcccgaaagggcagctaataccgcatgagacctgagggtgaaagcgggggatcgcaagacctcgcgctggaagagcggccgatgtccgattagctagttggtgaggtaaaggctcaccaaggcgacgatcggtagctggtctgagaggacgaccagccacactgggactgagacacggcccagactcctacgggaggcagcagtggggaattttggacaatgggggcaaccctgatccagccatgccgcgtgcaggatgaaggtcttcggattgtaaactgcttttgtcagggacgaaaagggatgcgataacaccgtattccgctgacggtacctgaagaataagcaccggctaactacgtgccagcagccgcggtaatacgtagggtgcaagcgttaatcggaactactgggcgtaaagcgtgcgcaggcggttctgtaagatagatgtgaaatccccgggctcaacctggaattgcatatatgactgcaggacttgagtttgtcagaggagggtggaattccacgtgtagcagtgaaatgcgtagatatgtggaagaacaccgatggcgaaggcagccctctgggacatgactgacgctcatgcacgaaagcgtggggagcaaacaggattagataccctggtagtccacgccctaaacgatgtctactagttgttggggacgatagtccttggtaacgcagctaacgcgtgaagtagaccgcctggggagtacggtcgcaagattaaaactcaaaggaattgacggggacccgcacaagcggtggatgatgtggattaattcgatgcaacgcgaaaaaccttacctagccttgacatgccaggaaggcctgagagatcaggccgtgcccgcaagggaatctggacacaggtgctgcatggctgtcgtcagctcgtgtcgtgagatgttgggttaagtcccgcaacgagcgcaacccttgtcattagttgctacgaaagggcactctaatgagactgccggtgacaaaccggaggaaggtggggatgacgtcaagtcctcatggcccttatggctagggcctcacacgtcatacaatggtcggaacagagggaagcgaagccgcgaggtgaagccaatcccagaaaaccgatcgtagtccggattgcagtctgcaactcgactgcatgaagtcggaatcgctagtaatcgcggatcagcatgccgcggtgaatacgttcccgggtcttgtacacaccgcccgtcacaccatgggagtcgataacgcccgaagtcagtgacccaaccgcaaggagggagctgccgaaggcgggattgataactgggg

SEQ ID NO: 1125 - DNA, 1434 bp, Artificial Sequence
  Synthetic polymer
cgctggcggaacgctttacacatgcaagtcgaacctttacggggggaggagcttgctccagcccaacaacgagtggcgaacgggtgaggaatacatcggagcgtgaccgctcgtgggggacaaccagccgaaaggttggctaataccgcatgagttctacggaagaaagagggggacccgcaagggcctctcgcgagcggagcggccgatgactgattagcctgttggtgaggtaacggctcaccaaagcaacgatcagtagctggtctgagaggacgaccagccacactgggactgagacacggaccagactcctacgggaggcagcagtggggaattttggacaatgggcgcaagcctgatccagctattccgcgtgtgggatgaaggccctcgggttgtaaaccacttttgtagagaacgaaaagacatcttcgaataaaggatgttgctgacggtactctaagaataagcaccggctaactacgtgccagcagccgcggtaatacgtagggtgcgagcgttaatcggaattactgggcgtaaagggtgcgcaggcggttgagtaagacagatgtgaaatccccgagcttaactcgggaatggcatatgtgactgctcgactagagtgtgtcagagggaggtggaattccacgtgtagcagtgaaatgcgtagatatgtggaagaacaccgatggcgaaggcagcctcctgggacataactgacgctctggcacgaaagcgtggggagcaaacaggattagatactctggtagtccacgccctaaacgatgttaactagttgttgggatgtaataatctcagtaacgcagccaacgcgagaagttaaccgcctgggaagtacggtcgcaagactaaaactcaaaggaattgacggggacccgcacaagcggtggatgatgtggattaattcgatgcaacgcgaaaaaccttacctacccttgacatgtcaggaagctcttgtaatgagagcgtgtccgcaagggagcctgaacacaggtggtgcatggctgtcgtcagctcgtgtcgtgagatgttgggttaagtcccgcaacgagcgcaatccttgtcactagttgcttcgaaagggcactctagtgagactgccggtgacaaaccggaggaaggtggggatgacgtcaagtcctcatggcccttatgggtagggcttcccacgtcatacaatggtcggaacagagggcagggaagccgtgaggcggagccaatcccagaaaaccgatcgtagtccggattgcagtttgcaacttgactgcatgaagttggaatcgctagtaatcgcggatcagcatgccgcggtgaatacgttcccgggtcttgtacaccccgcccgtcaaccaatgggagtggtgtttcccagaagtcgttagcctaaccgcaaggagggcggcgacc

SEQ ID NO: 1126 - DNA, 1451 bp, Artificial Sequence
  Synthetic polymer
caggcctaacacatgcaagtcgaggggcagcggggaggtatcattacctctggtcggagggcggcgggcgggtgagtaacaagtatgcaatccacctgtagcaaggggataacccggataaatacggactaataccccataatatgggcgctccgcctggagagttcattaaagagagcaattttggttacagacgagcgtgcgctccattagccagttggggggggaacggcccaccaaagcgacgatggatgggggttctgagaggaaggtcccccacattggaactgagacacggtccaaactcctacgggaggcagcagtgaggaatattggtcaatggtcggcagactgaaccagccaagtcgcgtgagggaagacggccctacgggttgtaaacctcttttgtcggagagtaaagtacgctacgtgtagcgtattgcatgtatcctaagaaaaagcatcggctaactccgtgccagcagccgcggtaatacggaggatgcgagcgttatccggatttattgggtttaaagggagcgtaggcggcacgccaagtcagcggtgaaatttccgggctcaacccggagtgtgccgttgaaactggcgagctagagtacacaagaggcaggcggaatgcgtggtgtagcggtgaaatgcatagatatcacgcagaaccccgattgcgaaggcagccctgctagggtgaaacagacgctgaggcacgaaagcgtgggtatcgaacaggattagataccctggtagtccacgcagtaaacgatgaatactaactgtttgcgatacaatgtaagcggtacagcgaaagcgttaagtattccacctggggagtacgccggcaacggtgaaactcaaaggaattgacgggggcccgcacaagcggaggaacatgtggtttaattcgatgatacgcgaggaaccttacccgggctcaaacgcagggggaatgtcggtgaaagccggcagctagtaatagtcacctgcgaggtgctgcatggttgtcgtcagctcgtgccgtgaggtgtcggcttaagtgccataacgagcgcaacccctatcgacagttactaacgggtgaagccgaggactctgtcgagactgccggcgcaagccgcgaggaaggtggggatgacgtcaaatcagcacggcccttacgtccggggcgacacacgtgttacaatggcaggtacagaaggcagccagtcagcaatgacgcgcgaatcccgaaaacctgtctcagttcggattggagtctgcaacccgactccatgaagctggattcgctagtaatcgcgcatcagccatggcgcggtgaatacgttcccgggccttgtacacaccgcccgtcaagccatggaagccgggagtacctgaagcatgcaaccgcaaggagcgtacgaaggtaataccggtaactggggctaagtcataac

SEQ ID NO: 1127 - DNA, 1424 bp, Artificial Sequence
  Synthetic polymer
taacacatgcaagtcgaggggcagcacaaagtaccagtactttggtggcgaccggcgcacgggtgcgtaacgcctatgcaacctacctttaacaggggcataacactgagaaattggtactaattccccataacattccagaaggcatcttcttgggttaaaaactccggtggataaaaatgggcatgcgttgtattagctggttggtgaggtaacgcctcaccaaggcaacaatacttagggggactgagaggttaaccccccacattggtactgagacacggaccaaactcctacgggaggcagcagtgaggaatattggtcaatggacgcaagtctgaaccagccatgccgcgtgcaggaagacggctctatgagttgtaaactgcttttgtactagggtaaacgcttctacgtgtaggagcctgaaagtataatacgaataaggatcggctaactccgtgccaccagccgcggtaatacggaggatccaagcgttatccggatttattgggtttaaagggtgcgtaggcggtttgataagttagaggtgaaataccggggctcaactccggaactgcctctaatactgttgaactagagagtagttgcggtaggcggaatgtatggtgtagcggtgaaatgcttagagatcatacagaacaccgattgcgaaggcagcttaccaaactatatctgacgttgaggcacgaaagcgtggggagcaaacaggattagatactctggtagtccacgcagtaaacgatgctaacttgttgtcggcgatacacagtcgctgactaagcgaaagcgataagttattcacgtggggagtacgttcgcaagaatgaaactcaaaggaattgacgggggcccgcacaagcggaggaacatgtggtttaattcgatgatacgcgaggaaccttacccgggcttgaaagttagtgacgattttggaaacaggatttcccttcggagcacgaaactaggtgctgcatggttgtcgtcagctcgtgccgtgaggtgtcgggttaagtcccataacgagcgcaacccctaccgttagttgccatcaggtcaagctgggcactctggcgggactgccggtgtaagccgagaggaaggtggggatgacgtcaaatcagcacggcccttacgtccggggctacacacgtgttacaatggtaggtacagagggccgctaccccgtgaggggatgccaatctcgaaagcctatctcagttcggatcggaggctgaaacccgcctccgtgaaattggattcgctagtaatcgcgcatcagccatggcgcggtgaatacgttcccgggccttgtacacaccgcccgtcaagccatggaagctgggggtgcttgaagttcgtgaacgcaaggagcgacttagggcaaaaccggtgactggggc

SEQ ID NO: 1128 - DNA, 1451 bp, Artificial Sequence
  Synthetic polymer
acgctggcggcgtgcctaacacatgcaagtcgagcgaagcgatttagtggaagttttcggatggaagttaaattgactgagcggcggacgggtgagtaacgcgtatgcaacctgcctttgacagagggatagcccatggaaacgtggattaatacctcatagtctctttttccttcctggggaatagagtaaaacgagagtggtcaaagatgggcatgcgtcctattaggcagttggcggggtaacggcccaccaaaccgatgataggtaggggttctgagaggaaggtcccccacactggtactgagacacggaccagactcctacgggaggcagcagtgaggaatattggtcaatggtcgagagactgaaccagccaagtcgcgtgagggatgactgccctatgggttgtaaacctcttttctactgggagaataagccctatgtatagggtgatgacagtacagtaggaataagcatcggctaactccgtgccagcagccgcggtaatacggaggatgcgagcgttatccggatttattgggtttaaagggtgcgtaggcggctttataagttagtggtaaaatttcggagcttcactccggtccgccattaaaactgtagagctagagaatggacgaggtaggcggaataagttaagtagcggtgaaatgcatagatataacttagaactccgatagcgaaaagcagcttaccagaccataactgacgctgatgcacgagagcgtggggtagcgaacaggattaaataccctggttattccacgccgtaaacggtgcttcaccggcctttagcggataagacagttgggggttaattgaaagaattaaagtgagccacctggggagtacgtcggcaacgagaaaactcaaaggaattgacgggggcccgcacaagcggaggaacatgtggtttaattcgatgatacgcgaggaaccttacctgggtttaaatgtatgttgcataatctggaaacagtttttctcttcggagctatatacaaggtgctgcatggttgtcgtcagctcgtgccgtgaggtgtcgggttaagtcccataacgagcgcaacccttaccgttagttgctagcatgtaatgatgagcactctagcgggactgccaccgtaaggtgagaggaagggggggatgacgtcaaatcagcacggcccttacatccagggcgacacacgtgttacaatggccataacagcgggtagctaccgggcgaccggatgcaaatctcgaaaattggtctaagttcggattggagtctgcaacccgactccatgaagttggattcgctagtaatcgcgcatcagccatggcgcggtgaatacgttcccgggccttgtacacaccgcccgtcaagccatggaagctgggagtacctgaagtccgtaaccgcgaggatcggcctagggtaataccgg

SEQ ID NO: 1129 - DNA, 1347 bp, Artificial Sequence
  Synthetic polymer
gatgaacgctggcggcgtgcctaacacatgcaagtcgagcgggaaatacttgattgaaacttcggtcgattgatagtatggaaagcggcggacgggtgagtaacgcgtaggcaacctgccttatgcagagggatagccattggaaacgatgattaaaacctcataatgccaagagttcacatgtacttttggccaaagatttatcggcataagatgggcctgcgtctgattagctagttggtgaggtaacggctcaccaaggcgacgatcagtagccgacctgagagggtgatcggccacattggaactgagacacggtccaaactcctacgggaggcagcagtggggaatattgcacaatgggcgaaagcctgatgcagcaacgccgcgtgagcgatgaaggtcttcggatcgtaaagctctgtccttggggaagataatgacggtacccttggaggaagccccggctaactacgtgccagcagccgcggtaatacgtagggggcaagcgttatccggaattattgggcgtaaagagtgcgtaggtggttacctaagcagggggtgaaaggctatggcttaaccatagttagccccctgaactgggctacttgagtgcaggagaggaaagcggaattcctagtgtagcggtgaaatgcgtagatattaggaggaacaccagtggcgaaggcggctttctggactgttactgacactgaggcacgaaagtgtggggagcaaacaggattagataccctggtagtccacaccgtaaacgatgagcactaggtgtcggggtcgcaagacttcggtgccgcagttaacgcattaagtgctccgcctggggagtacgtacgcaagtatgaaactcaaaggaattgacggggacccgcacaagcagcggagcatgtggtttaattcgaagcaacgcgaagaaccttaccaggacttgacatccctctgaaagccgtgataacgatcggccctcttcggacagaggtgacaggtggtgcatggttgtcgtcagctcgtgtcgtgagatgttgggttaagtcccgcaacgagcgcaacccttgctgttagttgccatcattcagttgggcactctaacgggactgccggggataactcggaggaaggtggggatgacgtcaaatcatcatgccccttatgttctgggctacacacgtgctacaatggtcggtacaaagagcagcaagaccgtgaggtggagcaaatctcaaaaaccgatcccagttcggactgtaggctgcaactcgcctacacgaagttggagttgctagtaatcgtggatcagaatgtcacggtgaatgcgttcccgggtct

SEQ ID NO: 1130 - DNA, 1423 bp, Artificial Sequence
  Synthetic polymer
acgaacgctggcggcgcgcctaacacatgcaagtcgaacgattttagagagagcttgctttttctaacttagtggcgaacgggtgagtaacgcgtgaggaacctgcctcaaagagggggacaacagttggaaacgactgctaataccgcataagcccacagctccgcatggagcagggggaaaaggagcaatccgctttgagatggcctcgcgtccgattagctagttggtgaggtaacggcccaccaaggcgacgatcggtagccggactgagaggttgatcggccacattgggactgagacacggcccagactcctacgggaggcagcagtggggaatattgcacaatgggggaaaccctgatgcagcgacgccgcgtggaggaagaaggtcttcggattgtaaactcctgttgttggggaagataatgacggtacccaacaaggaagtgacggctaactacgtgccagcagccgcggtaaaacgtaggtcacaagcgttgtccggaattactgggtgtaaagggagcgcaggcgggaagacaagttggaagtgaaatctatgggctcaacccataaactgctttcaaaactgtttttcttgagtagtgcagaggtaggcggaattcccggtgtagcggtggaatgcgtagatatcgggaggaacaccagtggcgaaagcggcctactgggcaccaactgacgctgaagctcgaaagtgggggtagcaaacaggattagataccctggtagtccaccctggtaaacgatgattctaggtggtgggggggtttggcccccctcagtgccgcagttaccacaataagtaatcccacgtgggggagtacgacggcaaggttgaaactcaaagggaattgacgggggcccgcccaagcagtggagtatgtggtttaattggacgcaacgggaagacccttaccaagtctggacatcctgggacgtgcatagaaatatgtatttctttcgggacgcagagacagggggtgcatggttgtcgtcagctggtgtcgtgagatgttgggttaagtcccgcaacgagcgcaacccctatggtcagttactacgcaagaggactctggccagactgccgttgacaaaacggaggaaggtggggatgacgtcaaatcatcatgccctttatgacttgggctacacacgtactacaatggcgtttaacaaagagaagcgaagtcgcgaggcagagcaaaactcagaaacaacgtcccagttcggactgcaggctgcaactcgcctgcacgaagtcggaattgctagtaatcgcagatcagcatgctgcggtgaatacgttcccgggccttgtacacaccgcccgtcacaccatgagagccggggggacccgaagtcgaatagtctaaccgcaaggaggacgccgccgaaggta

SEQ ID NO: 1131 - DNA, 1409 bp, Artificial Sequence
  Synthetic polymer
ctggcggcgcgcctaacacatgcaagtcgaacggcacccctctccggagggaagcgagtggcgaacggctgagtaacacgtggagaacctgccccctcccccgggatagccgcccgaaaggacgggtaataccggataccccggggtgccgcatggcaccccggctaaagccccgacgggaggggatggctccgcggcccatcaggtagacggcggggtgacggcccaccgtgccgacaacgggtagccgggttgagagaccgaccggccagattgggactgagacacggcccagactcctacgggaggcagcagtggggaatcttgcgcaatggggggaaccctgacgcagcgacgccgcgtgcgggacggaggccttcgggtcgtaaaccgctttcagcagggaagagtcaagactgtacctgcagaagaagccccggctaactacgtgccagcagccgcggtaatacgtagggggcgagcgttatccggattcattgggcgtaaagcgcgcgtaggcggcccggcaggccgggggtcgaagcggggggctcaaccccccgaagcccccggaacctccgcggcttgggtccggtaggggagggtggaacacccggtgtagcggtggaatgcgcagatatcgggtggaacaccggtggcgaaggcggccctctgggccgagaccgacgctgaggcgcgaaagctgggggagcgaacaggattagataccctggtagtcccagccgtaaacgatggacgctaggtgtgggggggacgatccccccgtgccgcagccaacgcattaagcgtcccgcctggggagtacggccgcaaggctaaaactcaagggaattgacgggggcccgcacaagcaacggagcatgtggcttaattccaaccaacgcgaagaacctttaccagggcttgacatatgggggaagcgggggagaccccgtggccgagaggagcccatacaggtggtgcatggctgtcgtcagctcgtgtcgtgagatgttgggttaagtcccgcaacgagcgcaacccccgccgcgtgtggccatcgggtgatgccgggaaccctcgggggaccgccgccgtcaaggcggaggaggggcgggggggacgtcaagtcatcatgccccttatgccctggggtgcacacgtgctacaatggccggtacagagggatgccaccccgcgagggggagcggatcccggaaagccggccccagttcggattgggggctgcaacccgcccccatgaagtcggagttgctagtaatcgcggatcagcaaccgcggggagaagcgttcccgggccttgtacacaccgcccgtcacaccacccgagtcgtctgcacccgaagtcgccggcccaaccgtcaaggggggaggcgccgaaggtgtgg

SEQ ID NO: 1132 - DNA, 1372 bp, Artificial Sequence
  Synthetic polymer
agagtttgatcctggctcaggacgaacgctggcggcgtgcctaacacatgcaagtcgagcgaggggagtttcttcggaaacaaacctagcggcggacgggtgagtaacacgtgggcaacctgccttatagaggggaatagccttccgaaaggaagattaataccgcataacattgcagcttcgcatgaagcagtaattaaaggagcaatccgctataagatgggcccgcggcgcattagctagttggtgaggtaacggctcaccaaggcgacgatgcgtagccgacctgagagggtgatcggccacattgggactgagacacggcccagactcctacgggaggcagcagtggggaatattgcacaatgggggaaaccctgatgcagcaacgccgcgtgagtgatgaaggttttcggatcgtaaaactctgtcttcggggacgataatgacggtacccgaggaggaagccacggctaactacgtgccagcagccgcggtaatacgtaggtggcaagcgttgtccggatttactgggcgtaaagggagcgtaggcggacttttaagtgagatgtgaaatacccgggctcaacttgggtgctgcatttcaaactggaagtctagagtgcaggagaggagagtggaattcctagtgtagcggtgaaatgcgtagagattaggaagaacaccagtggcgaaggcgactctctggactgtaactgacgctgaggctcgaaagcgtggggagcaaacaggattagataccctggtagtccacgccgtaaacgatgaatactaggtgtaggggttgtcatgacctctgtgccgccgctaacgcattaagtattccgcctggggagtacggtcgcaagattaaaactcaaaggaattgacgggggcccgcacaagcagcggagcatgtggtttaattcgaagcaacgcgaagaaccttacctagacttgacatctcctgcattactcttaatcgaggaagtcctttcggggacaggatgacaggtggtgcatggttgtcgtcagcccgtgtcgtgagatgttgggttaagtcccgcaacgagcgcaacccttattgttagttgctaccatttagttgagcactctagcgagactgcccgggttaaccgggaggaaggtggggatgacgtcaaatcatcatgccccttatgtctagggctacacacgtgctacaatggcaagtacaaagagatgcaagaccgcaaggtggagctaaactataaaacttgtctcagttcggattgtaggctgaaactcgcctacatgaagctggagttgctagtaatcgcgaatcagcatgtcgcggtgaatacgttcccgggccttgtacacaccgcccgtc

SEQ ID NO: 1133 - DNA, 1388 bp, Artificial Sequence
  Synthetic polymer
gatgaacgctagcggcaggcctaacacatgcaagtccaggggcatcgggattgaggcttgcttcaattgccggcgaccggcgcacgggtgcgtaacgcgtatgtaacctacctataacaggggcataacactgagaaattggtactaattccccataatattcggagaggcatctctccgggttgaaaactccggtggttatatatggacatgcgttgtattacctagttggtgaggtaacggctcaccaaggcaacgatacatagggggactgagaggttaaccccccacactggtactgagacacccaccacactcctacgggaggcagcactgaggaatattggtcaatggacgcaagtctgaaccagccatgccgcgtgcacgaagacggctctatgagttgtaaactgcttttgtacgagggtaaactcacctacgtgtacgtgactgaaagtatcgtacgaataaggatcggctaactccgtgccagcagccgcggtaatacggaggattcaagcgttatccggatttattgggtttaaagggtgcgtaggcggtttgataagttagaggtgaaatcccggggcttaactcccgaactgcctctaatactgttagactagagagtagttgcggtaggcggaatgtatggtgtagcggtgaaatgcttagagatcatacagaacaccgattgcgaaggcagcttaccaatctatatctgacgttgaggcacgaaagcgtggggagcaaacaggattagatacattggtagtccacgcagtaaacgatgataactcgttgtcggcgatccacagtcggtgattaagcgaaagcgataagttatccacctggggagtacgtttgcaagaatgaaactcaaaggaattgaagggggtccgcacaagcggaggaacatgtggtctaattagatgatacgcgaggaactttacccgggcttgaaagttactgacgattctggaaacaggatttcctttaggggcaggaaactaggtgcagcatggttgtcgtcagctcgtgccgagaggagtcgggctaagtcccataacgagcgcaacccctaccgttagttgccatcaggtcaagctgggcactctggcgggaccgccggtgtaagccgagaggaaggtggggatgtcgtcaaatcagcacggccctcccgtctggggctacacacgtgtttcaatggtaggtacagagggtcgctaccccgcgaggggatgccaatctcgaaagcctatctcagttaggactggaggatgtaatccgcctccatgaagttggattcgctagtaatcgcgcatcagccatggcgcggtgaatacgttcccgggcgttgtacacaccgcccgtcaccccacgaaagt

SEQ ID NO: 1134 - DNA, 1400 bp, Artificial Sequence
  Synthetic polymer
agcggcgggacgggttgagtaatgtatggggatctgcccgatagagggggataactactggaaacggtggctaataccgcataatgtctacggaccaaagcaggggctcttcggaccttgcactatcggatgaacccatatgggattagctagtaggtgggcgttatagaggctcttcacctctatggcgaccgatctctcaagctggtctcgagagagatgatcagccacactgggactgagaacacggcccagactcctaacgggaggcaggcaagtggggaatattgcacaatgggcgcaagcctgaatgcagccaatgccgcgtgtatgagagaaggccttaagggctgtaaagtacttttcaggccggggaggaaagttgattaaggttaataccctttatcaattgacgttacccgcagaagaagcaccgggctaactccgtgccagcagccgcggtaatacggagggtgcaagcgttaatcggaattactgggcgtaaagcgcacgcaggcggtcaatttaagtcagatgtgaaagccccgagcttaacttgggaattgcatctgaaactggttggctagagtcttgtagaggggggtagaattccatgtgtagcggtgaaatgcgtagagatgtggaggaataccggtggcgaaggcggccccctggacaaagactgacgctcaggtgcgaaagcgtggggagcaaacaggattagataccctggtagtccacgctgtaaacgatgtcgatttagaggttgtggtcttgaaccgtggcttctggagctaacgcgttaaatcgaccgcctgggggagtacggccgccaaggttaaaactcaaatgaaattgacggggggcccgcaccaagcggtggaagcatgtggtttaattcgatgcaacgcgaagaaccttacctactcttgacatccagcgaatcctttagagatagaggagtgccttcgggaacgctgagacaggtgctgcatggctgtcgtcagctcgtgttgtgaaatgttgggttaagtcccgcaacgagcgcaacccttatcctttgttgccagcacgtaatggtgggaactcaaaggagactgccggtgataaaccggaggaaggtggggatgacgtcaagtcatcatggcccttacgagtagggctacacacgtgctacaatggcagatacaaagagaagcgacctcgcgagagcaagcggaactcataaagtctgtcgtagtccggattggagtctgcaactcgactccatgaagtcggaatcgctagtaatcgtagatcagaatgtttcggtgaatacgttcccgggccttgtacacaccccccgacagaccatgggagtgggttgcaaaagaagtaggtagcttaaccttcgggagggc

SEQ ID NO: 1135 - DNA, 1479 bp, Artificial Sequence
  Synthetic polymer
ctggctcagattgaacgctggcggcaggcctaacacatgcaagtcgagcggtaacaggagaaaaagcttgctttcttgctgacgagggggggcgggggagtaatgtatggggatctgcccgatagagggggataactactggaaacggtggctaataccgcataatgtctacggaccaaagcaggggctcttcggaccttgcactatcggatgaacccatatgggattagctagtaggtggggtaaaggctcacctaggcgacgatctctagctggtctgagaggatgatcagccacactgggactgagacacggcccagactcctacgggaggcagcagtggggaatattgcacaatgggcgcaagcctgatgcagccatgccgcgtggatgaaaaaaggcctaggggttgtaaagtactttcagcggggaggaaggtgataaggttaatacccttatcaattgacgttacccgcagaagaagcaccggctaactccgtgccagcagccgcggtaatacggagggtgcaagcgttaatcggaattactgggcgtaaagcgcacgcaggcggtcaattaagtcagatgtgaaagccccgagcttaacttgggaattgcatctgaaactggttggctagagtcttgtagaggggggtagaattccatgtgtagcggtgaaatgcgtagagatgtggaggaataccggtggcgaaggcggcgccctggacaaagactgacgctcaagtgcgaaagcgtggggagcaaacaggattagataccctggtagtccacgctgtaaacgatgtcgatttagaggttgttggtcttgaaccgtggccttctgggagctaacgcgttaagtcgaccgcgtggtgagtaccgcggcaatgtctaacactcaaatgagttgactgggggccgcacgaaagcggtggagcatgtggtttaattcgatgcaacgcgaagaaccttacctactcttgacatccagcgaatcctttagagatagaggagtgccttcgggaacgctgagacaggtgctgcatggctgtcgtcagctcgtgttgtgaaatgttgggttaagtcccgcaacgagcgcaacccttatcctttgttgccagcacgtaatggtgggaactcaaaggagactgccggtgataaaccggaggaaggtggggatgacgtcaagtcatcatggcccttacgagtagggctacacacgtgctacaatggcagatacaaagagaagcgacctcgcgagagcaagcggaactcataaagtctgtcgtagtccggattggagtctgcaactcgactccatgaagtcggaatcgctagtaatcgtagatcagaatgctacggtgaatacgttcccgggccttgtacacaccgcccgtcacaccatgggagtgggttgcaaaagaagtaggtagcttaaccttcgggagggcgcttaccactttgtgattcatgactggg

SEQ ID NO: 1136 - DNA, 1467 bp, Artificial Sequence
  Synthetic polymer
attgaacgcttgcggcaggcctaacacacgcaagtcgagcggtaacaggagattgcttgctttcttgctgacgagcggcggacgggtgagtaatgtatggggatctgcccgatagagggggataactactggaaacggtggctaataccgcataatgtctacggaccaaagcaggggctcttcggaccttgcactatcggatgaacccatatgggattagctagtaggtggggtaaaggctcacctaggcgacgatctctagctggtctgagaggatgatcagccacactgggactgagacacggcccagactcctacgggaggcagcagtggggaatattgcacaatgggcgcaagcctgatgcagccatgccgcgtgtatgaagaaggccttagggttgtaaagtactttcagcggggaggaaggtgataaggttaatacccttatcaattgacgttacccgcagaagaagcaccggctaactccgtgccagcagccgcggtaatacggagggtgcaagcgttaatcggaattactgggcgtaaagcgcacgcaggcggtcaattaagtcagatgtgaaagccccgagcttaacttgggaattgcatctgaaactggttggctagagtcttgtagaggggggtagaattccatgtgtagcggtgaaatgcgtaaagatgtggaggaataccggtggcgaaggcggccccctggacaaagactgacgctcaggtgcgaaagcgtggggagcaaacaggattagaaaccctggtagtccacgctgtaaacgatgtcgatttagaggttgtggtcttgagccgtgggttgtggagctaagcgtattaaatcgaccgcatgggaagtacggcccccagggtttagagctcaagtgaattggcgggggcccgcgcaagcggtggagcatgtggtttaattcaatgcaacgcgaagaaccttacctactcttgacatccagcgaatcctttagagatagaggaggtgcattcgggaacgctgagacaggtgctgcatggctgtcgtcaactcgtgttgtgaaatgttgggttaagtcccgcaacgagcgcaacccttatcctttgttgccagcacgtgatggtgggaactcaaaggagactgccggtgataaaccggaggaaggtggggatgacgtcaagtcatcatggcccttacgagtagggctacacacgtgctacaatggcagatacaaagagaagcgacctcgcgagagcaagcggaactcataaagtctgtcgtagtccggattggagtctgcaactcgactccatgaagtcggaatcgctagtaatcgtagatcagaatgctacggtgaatacgttcccgggccttgtacacaccgcccgtcacaccatgggagtgggttgcaaaagaagtaggtagcttaacctaagggagggcgcttaccactttgtgattcatgactgggg

SEQ ID NO: 1137 - DNA, 1840 bp, Artificial Sequence; identical to SEQ ID NO: 1026
  Synthetic polymer

SEQ ID NO: 1138 - DNA, 1424 bp, Artificial Sequence
  Synthetic polymer
  misc_feature (58)..(58): n is a, c, g, or t
  misc_feature (131)..(131): n is a, c, g, or t
  misc_feature (138)..(138): n is a, c, g, or t
  misc_feature (373)..(373): n is a, c, g, or t
  misc_feature (385)..(385): n is a, c, g, or t
  misc_feature (909)..(909): n is a, c, g, or t
  misc_feature (1358)..(1358): n is a, c, g, or t
  misc_feature (1362)..(1362): n is a, c, g, or t
tcgagcggtacagggagaaaagcttgcttttcttgctgacgagcggcggacggtgttnagataatgctatggggatctgcccgatagagggggataactactgcgaaacggtggctaataccgcataatgnctacggnccaaagcaggggctcttcggaccttgcactatcggatgaacccatatgggattagctagtaggtggggtaaaggctcacctaggcgacgatctctagctggtctgagaggatgatcagccacactgggactgagacacggcccagactcctacgggaggcagcagtggggaatattgcacaatgggcgcaagcctgatgcagccatgccgcgtgtatgaagaaaggccttaaggnttgtaaagtacntttcagcggggaggaaggtgataaggttaatacccttgtcaattgacgttacccgcagaagaagcaccggctaaactccgtgccagcagccgcggtaatacggaggggtgcaagcgttaatcggaaattactgggcgtaaagcgcacgcaggcggtcaattaagtcagatgtgaaagccccgagcttaacttgggaattgcatctgaaactggttggctagagtcttgtagaggggggtagaattccatgtgtagcggtgaaatgcgtagagatgtggaggaataccggtggcgaatggcggccccctggacaaagactgacgctcaggtgcgaaagcgtggggagcaaacaggattagataccctggtagtccacgctgtaaacgatgtcgatttagaggttgtggtcttgaaccgtggctttctggagctaacgcgttaaatcgaccgcctggggagtacggccgcaaggttaaaactcaaatgaattgacgggggcccgcacaagcggtggagcatgtggntttaattcgatgcaacgcgaagaaccttacctactcttgacattccagcgaatcctttagagatagaggagtgccttcgggaacgctgagacaggtgctgcatggctgtcgtcagctcgtgttgtgaaatgttgggttaagtcccgcaacgagcgcaacccttatcctttgttgccagcacgtaatggtgggaactcaaaggagactgccggtgataaaccggaggaaggtggggatgacgtcaagtcatcatggcccttacgagtagggctacacacgtgctacaatggcagatacaaagagaagcgacctcgcgagagcaagcggaactcataaagtctgtcgtagtccggattggagtctgcaactcgactccatgaagtcggaatcgctagtaatcgtagatcagaatgctacggtgaatacgttcccgggccttgtacacaccncccnacacaccatgggagtgggttgcaaaagaagtaggtagcttaacccttcgggagggcgctacc

SEQ ID NO: 1139 - DNA, 1381 bp, Artificial Sequence
  Synthetic polymer
ttgaagagtttgatcatggctcagattgaacgctggcggcaggcctaacgcatgcaagtcgaccggaaacagaggaaagcttgctttcttgctgacgagcggcggacgggtgagtaatgtatggggatctgcccgatagaggggggtaactattggaaaaagggggggtaaataccgcttgacgtctacggccaaaagccggggcgcttcggacctttcgctattggatgaacccatatgggattagctagtaggtgaggtaaaggctcacctaggcgacgatctctagctggtctgagaggatgatcagccacactgggactgagacacggcccagactcctacgggaggcagcagtggggaatattgcacaatgggcgcaagcctgatgcagccatgccgcgtgtatgaagaaggccttagggttgtaaagtactttcagcggggaggaaggtgataaagttaatacctttatcaattgacgttacccgcagaagaagcaccggctaactccgtgccagcagccgcggtaatacggagggtgcaagcgttaatcggaattactgggcgtaaagcgcacgcaggcggtcaattaagtcagatgtgaaagccccgagcttaacttgggaattgcatctgaaactggttggctagagtcttgtagagggggggtagaattccatgtgtagcggtgaaatgcgtagagatgtggaggaataccggtggcgaaggcggccccctggacaaagactgacgctcaggtgcgaaagcgtggggagcaaacaggattagataccctggtagtccacgctgtaaacgatgtcgatttagaggttgtggtcttgaaccgtggcttctggagctaacgcgttaaatcgaccgcctggggagtacggccgcaaggttaaaactcaaatgaattgacgggggcccgcacaagcggtggagcatgtggtttaattcgatgcaacgcgaagaaccttacctactcttgacatccagcgaatcctttagagatagaggagtgccttcgggaacgctgagacaggtgctgcatggctgtcgtcagctcgtgttgtgaaatgttgggttaagtcccgcaacgagcgcaacccttatcctttgttgccagcgcgtgatggcgggaactcaaaggagactgccggtgataaaccggaggaaggtggggatgacgtcaagtcatcatggcccttacgagtagggctacacacgtgctacaatggcagatacaaagagaagcgacctcgcgagagcaagcggaactcataaagtctgtcgtagtccggattggagtctgcaactcgactccatgaagtcggaatcgctagtaatcgtagatcagaatgctacggtgaatacg

SEQ ID NO: 1140 - DNA, 1331 bp, Artificial Sequence
  Synthetic polymer
gacgagcggcggacgggtgagtaatgtatggggatctgcccgatggagggggataactactggaaacggtggctaataccgcatgacgtctacggaccaaagcaggggctcttcggaccttgcgctatcggatgaacccatatgggattagctagtaggtgaggtaatggctcacctaggcgacgatctctagctggtctgagaggatgatcagccacactgggactgagacacggcccagactcctacgggaggcagcagtggggaatattgcacaatgggcgcaagcctgatgcagccatgccgcgtgtatgaagaaggccttagggttgtaaagtactttcagcggggaggaaggtgttaaggttaatactcttagcaattgacgttacccgcagaagaagcaccggctaactccgtgccagcagccgcggtaatacggagggtgcaagcgttaatcggaattactgggcgtaaagcgcacgcaggcggtcaattgagtcagatgtgaaagccccgagcttaacttgggaattgcatctgaaactggttggctagagtcttgtagaggggggtagaattccacgtgtagcggtgaaatgcgtagagatgtggaggaataccggtggcgagggcggccccctggacaaagactgacgctcaggtgcgacagcgtggggagcaaacaggattagataccctggtagtcacgctgtaaacgatgtcgatttagaggttgtgctcgtgaggcgtggcttctggagctaacgcgttaaatcgaccgcctggggagtacggccgcaaggttaaaactcaaatgaattgacgggggcccgcacaagcggtggagcatgtggtttaattcgatgcaacgcgaagaaccttacctactcttgacatccagagaatccattagagatagaggagtgccttcgggaactctgagacaggtgctgcatggctgtcgtcagctcgtgttgtgaaatgttgggttaagtcccgcaacgagcgcaacccttatcctttgttgccagcgcgtaatggcgggaactcaaaggagactgccggtgataaaccggaggaaggtggggatgacgtcaagtcatcatggcccttacgagtagggctacacacgtgctacaatggcagatacaaagagaagcgacctcgcgagagcaagcggaactcataaagtccgtcgtagtccggattggagtctgcaactcgactccatgaagtcggaatcgctagtaatcgtagatcagaatgctacggtgaatacgttcccgggccttgtacacaccgcccgtcacaccatgggagtgggttgc

SEQ ID NO: 1141 - DNA, 1492 bp, Artificial Sequence
  Synthetic polymer
  misc_feature (72)..(72): n is a, c, g, or t
  misc_feature (106)..(106): n is a, c, g, or t
  misc_feature (109)..(109): n is a, c, g, or t
  misc_feature (1182)..(1182): n is a, c, g, or t
  misc_feature (1216)..(1216): n is a, c, g, or t
  misc_feature (1246)..(1246): n is a, c, g, or t
  misc_feature (1340)..(1340): n is a, c, g, or t
  misc_feature (1411)..(1411): n is a, c, g, or t
  misc_feature (1440)..(1440): n is a, c, g, or t
ggcggcaggcttacccatgcaatttgagcggtaacagaaaaaccttcttttttttacgaccgggggacgggngagtaattttggggatctgcccgatagaggggantanctactggaaacggtggctaataccgcataatgtctacggaccaragcaggggctcttcggaccttgcactatcgggatgaacccatatgggattagctagtaggtggggtaaaggctcacctaggcgacgatctctagctggtctgagaggatgatcagccacactgggactgagacacggaccagactcctacgggaggcagcagtggggaatattgcacaatgggcgcaagcctgatgcagccatgccgcgtgtatgaagaaggccttagggttgtaaagtactttcagcggggaggaaggtgataaggttaatacccttatcaattgacgttacccgcagaagaagcaccggctaactccgtgccagcagccgcggtaatacggagggtgcaagcgttaatcggaattactgggcgtaaagcgcacgcaggcggtcaattaagtcagatgtgaaagccccgagcttaacttgggaattgcatctgaaactggttggctagagtcttgtagaggggggtagaattccatgtgtagcggtgaaatgcgtagagatgtggaggaataccggtggcgaaggcggccccctggacaaagactgacgctcaggtgcgaaagcgtggggagcaaacaggattagataccctggtagtccacgctgtaaacgatgtcgatttagaggttgtggtcttgaacgsgtcggctactctaaggaccgctgggaacggccgttaaatcaggatacgggcctggggagtacggccgcaaggttaaaactcaaatgaattgacgggggcccgcacaagcgggtggagcatgtggtttaattcgatgcaacgcgaagaaccttactactcttgacatccagcgaatcctttagagatagaggagtgcctccggaacgctgaaacaggtgctgcatggctgtcgtcactcgtgttgtgaaatgttgggttaagtcccgcaacsagcgcaacccttatcctttgttgccagcacgtaatggtgggaactcaaaggagactgccggtgataaaccggaggaaggtggggatgacgcctcaaggtcatcntggcccttacgagtagggctacacacgtgctacnatggcagatacaaagagaagcgacctcgcnagagcaagcggaactcataaagtctgtcgtagtccggattggagtctgcaactcgactccatgaaggtcggaatcgctagtaatcgtatatcanaatgctacggtgaatacgttcccgggccttgtacacaccgcccgtcacaccatgggagtgggttgcaaaanaagtaagtagcttatccttcgggagggcncttaccactttgtgattcatgactgaggtgaagtcgtacaaggtacccgtag

SEQ ID NO: 1142 - DNA, 1492 bp, Artificial Sequence; identical to SEQ ID NO: 489
  Synthetic polymer

SEQ ID NO: 1143 - DNA, 1459 bp, Artificial Sequence; identical to SEQ ID NO: 1027
  Synthetic polymer

SEQ ID NO: 1144 - DNA, 1519 bp, Artificial Sequence; identical to SEQ ID NO: 876
  Synthetic polymer

SEQ ID NO: 1145 - DNA, 1532 bp, Artificial Sequence; identical to SEQ ID NO: 1033
  Synthetic polymer

SEQ ID NO: 1146 - DNA, 1490 bp, Artificial Sequence; identical to SEQ ID NO: 488
  Synthetic polymer

SEQ ID NO: 1147 - DNA, 1400 bp, Artificial Sequence
  Synthetic polymer
ttagagtttgatcctggctcaggatgaacgctagcggcaggcttaacacatgcaagtcgaggggcagcgagatcagtgcttgcactgattgtcggcgaccggcgcacgggtgcgtaacgcgtatgcaacctacccattacagggggataacactgagaaatcggtactaataccccataacatccagggaggcatcttcttgggttgaaaactccggtggtaatggatgggcatgcgttgtattagttagttggtggggtaacggctcaccaagacaacgatacatagggggactgagaggttaaccccccacattggtactgagacacggaccaaactcctacgggaggcagcagtgaggaatattggtcaatggacgcaagtctgaaccagccatgccgcgtgcaggaagacggctctatgagttgtaaactgcttttgtacgagggtaaacgcagatacgcgtatctgtctgaaagtatcgtacgaataaggatcggctaactccgtgccagcagccgcggtaatacggaggattcaagcgttatccggatttattgggtttaaagggtgcgtagacggtcggataagttagaggtgaaatcccggggctcaacttcggaattgcctctgatactgttcggctagagagtagttgcggtaggcggaatgtatggtgtagcggtgaaatgcttagagatcatacagaacaccgattgcgaaggcagcttaccaagctacttctgacgttgaggcacgaaagcgtggggagcaaacaggattagataccctggtagtccacgcagtaaacgatgataactcgttgtcggcgatacagtgttggtgactaagcggaagcgataagttatccacctgggggagtacgttcgcaagaatgaaactcaaaggaattgacggggggcccgcccaagcggaggaacatgtggtttaaattcgatgatacgcgaggaaccttacccgggcttgaaagttagtgacggatcttgaaagaggtcttcccttcggggcacgaaactaggtgctgcatggttgtcgtcagctcgtgccgtgaggtgtcgggttaagtcccataacgagcgcaacccctaccgttagttgccagcaggtcaagctgggcactctgacgggactgccggtgtaagccgagaggaaggtggggatgacgtcaaatcagcacggcccttacgtccggggctacacacgtgttacaatggcaggtacagagggcagctacccagcgatgggatgcgaatctcgaaagcctgtctcagttcggactgtaggctgcaactcgcctacacgaagtcggaatcgctagtaatcgcggatcagcatgccgcggtgaatacgttcccgggccttgcagtcaccgcccgtca

SEQ ID NO: 1148 - DNA, 1487 bp, Artificial Sequence; identical to SEQ ID NO: 974
  Synthetic polymer

SEQ ID NO: 1149 - DNA, 1394 bp, Artificial Sequence; identical to SEQ ID NO: 119
  Synthetic polymer

SEQ ID NO: 1150 - DNA, 1424 bp, Artificial Sequence; identical to SEQ ID NO: 1127
  Synthetic polymer

SEQ ID NO: 1151 - DNA, 1404 bp, Artificial Sequence
  Synthetic polymer
ttcgcccttagagtttgatcctggctcaagatgaacgctagcggcaggcttaacacatgcaagtcgaggggcagcataatggatagcaatatctatggtggcgaccggcgcacgggtgcgtaacgcgtatgcaacctgcctttaacagggggataacactgagaaattggtactaataccccataatatcatagaaggcatcttttatggttgaaaattccgatggttagagatgggcatgcgttgtattagctagttggtggggtaacggctcaccaaggcgacgatacatagggggactgagaggttaaccccccacactggtactgagacacggaccagactccaacgggaggcagcagtgaggaatattggtcaatgggcgcaagtctgaaccagccatgccgcgtgcaggatgacggctctatgagttgtaaactgcttttgtacgagggtaaacgcagatacgtgtatctatctgaaagtatcgtacgaataaggatcggctaactccgtgccagcagccgcggtaatacggaggattcaagcgttatccggatttattgggtttaaagggtgcgtaggcggtttgataagttagaggtgaaatttcggggctcaaccctgaacgtgcctctaatactgttgagctagagagtagttgcggtaggcggaatgtatggtgtagcggtgaaatgcttagagatcatacagaacaccgattgcgaaggcagcttaccaaactatatctgacgttgaggcacgaaagcgtggggagcaaacaggattagataccctggtagtccacgcagtaaacgatgataactcgttgtcggcgatacacagtcggtgactaagcgaaagcgataagttatccacctggggagtacgttcgcaagaatgaaactcaaaggaattgacgggggcccgcacaagcggaggaacatgtggtttaattcgatgatacgcgaggaaccttacccgggcttgaaagttagcgacgattcttgaaagaggatttcccttcggggcgcgaaactaggtgctgcatggttgtcgtcagctcgtgccgtgaggtgtcgggttaagttccataacgagcgcaacccctaccgttagttgccatcaggtcaagctgggcactctggcgggactgccggtgtaagccgagaggaaggtggggatgacgtcaaatcagcacggcccttacgtccggggctacacacgtgttacaatggtaggtacagagggcagctacccagcgatgggatgcgagtctcgaaagcctatctcagttcggattggaggctgaaacccgcctccatgaagttggattcgctagtaatcgcgcatcagccatggcgcggtgaatacgttcccgggccttgtacacaccgcccgtca

SEQ ID NO: 1152 - DNA, 1471 bp, Artificial Sequence; identical to SEQ ID NO: 83
  Synthetic polymer

SEQ ID NO: 1153 - DNA, 1395 bp, Artificial Sequence; identical to SEQ ID NO: 461
  Synthetic polymer

SEQ ID NO: 1154 - DNA, 1364 bp, Artificial Sequence; identical to SEQ ID NO: 743
  Synthetic polymer

SEQ ID NO: 1155 - DNA, 1394 bp, Artificial Sequence; identical to SEQ ID NO: 595
  Synthetic polymer

SEQ ID NO: 1156 - DNA, 1394 bp, Artificial Sequence; identical to SEQ ID NO: 246
  Synthetic polymer

SEQ ID NO: 1157 - DNA, 1492 bp, Artificial Sequence; identical to SEQ ID NO: 495
  Synthetic polymer

SEQ ID NO: 1158 - DNA, 1449 bp, Artificial Sequence
  Synthetic polymer
gataaacgctagcggcaggcctaacacatgcaagtcgaggggcagcataagaacagtttactgtttttgatggcgaccggcgcacgggtgcgtaacgcgtatgcaacctacctttaacagggggataatccgaagaaatttggtctaataccccataatactatttaaggcatcttagatagttaaaaaatccgttggttagagatgggcatgcgttgtattagctagttggtggagtaacggttcaccaaggctacgatacatagggggactgagaggttttccccccacactggtactgagacacggaccagactcctacgggaggcagcagtgaggaatattggtcaatggacgcaagtctgaaccagccatgccgcgtgcaggatgacggctctatgagttgtaaactgcttttatacgagggtaatgatgtctacgtgtaggcatttgaaagtatcgtatgaataaggatcggctaactccgtgccagcagccgcggtaatacggaggatccaagcgttatccggatttattgggtttaaagggtgcgtaggcggtttgataagttagaggtgaaagctcgatgctcaacatcgaaaatgcctctgatactgttgaactagagtatagttgcggaaggcggaatgtgtggtgtagcggtgaaatgcttagatatcacacagaacaccgattgcgaaggcagctttccaagctattactgacgctgaggcacgaaagcgtgggtagcgaacaggattagataccctggtagtccacgccgtaaacgatgataactcgttgctggcgatataatgtcagtgacttagcgaaagcgttaagttatccacctggggagtacgttcgcaagaatgaaactcaaaggaattgacgggggcccgcacaagcggaggaacatgtggtttaattcgatgatacgcgaggaaccttacccgggcttgaaagttagcgacgaatcctgaaagggattttctcttcggagcgcgaaactaggtgctgcatggttgtcgtcagctcgtgccgtgaggtgtcgggttaagtcccataacgagcgcaacccctactgttagttgccagcgagtaatgtcggggactctagcaggactgccggtgtaagccgagaggaaggtggggatgacgtcaaatcagcacggcccttacgtccggggcgacacacgtgttacaatggtcggtacagagggcagctacccagtgatgggatgcgaatctcgaaagccgatctcagttcggattggaggctgaaacccgcctccatgaagttggattcgctagtaatcgcgcatcagccatggcgcggtgaatacgttcccgggccttgtacacaccgcccgtcaagccatgggagttgggggtgcctgaagtacgtgaccgcaaggagcgtcctagggcaaaaccgatgactagggc

SEQ ID NO: 1159 - DNA, 1480 bp, Artificial Sequence; identical to SEQ ID NO: 513
  Synthetic polymer

SEQ ID NO: 1160 - DNA, 1438 bp, Artificial Sequence; identical to SEQ ID NO: 957
  Synthetic polymer

SEQ ID NO: 1161 - DNA, 1356 bp, Artificial Sequence; identical to SEQ ID NO: 636
  Synthetic polymer

SEQ ID NO: 1162 - DNA, 1464 bp, Artificial Sequence; identical to SEQ ID NO: 30
  Synthetic polymer

SEQ ID NO: 1163 - DNA, 1358 bp, Artificial Sequence; identical to SEQ ID NO: 904
  Synthetic polymer

SEQ ID NO: 1164 - DNA, 1450 bp, Artificial Sequence; identical to SEQ ID NO: 669
  Synthetic polymer

SEQ ID NO: 1165 - DNA, 1491 bp, Artificial Sequence; identical to SEQ ID NO: 494
  Synthetic polymer

SEQ ID NO: 1166 - DNA, 1390 bp, Artificial Sequence; identical to SEQ ID NO: 848
  Synthetic polymer

SEQ ID NO: 1167 - DNA, 1398 bp, Artificial Sequence; identical to SEQ ID NO: 343
  Synthetic polymer

SEQ ID NO: 1168 - DNA, 1388 bp, Artificial Sequence; identical to SEQ ID NO: 1133
  Synthetic polymer

SEQ ID NO: 1169 - DNA, 1376 bp, Artificial Sequence
  Synthetic polymer
gatgaacgctagcggcaggcctaacacatgcaagtcgaggggcagcacggtgtagcaatacactggtggcgaccggcgcacgggtgcgtaacgcgtatgcaacctacccataacagggggataacactgagaaattggtactaataccccataacatcaggaccggcatcggttttggttgaaaactccggtggttatggatgggcatgcgttgtattagctggttggtgaggtaacggctcaccaaggcaacgatacatagggggactgagaggttaaccccccacattggtactgagacacggaccaaactcctacgggaggcagcagtgaggaatattggtcaatggacgcaagtctgaaccagccatgccgcgtgcaggaagacggctctatgagttgtaaactgcttttgtacgagggtaaacgctcttacgtgtaagagcctgaaagtatcgtacgaataaggatcggctaactccgtgccagcagccgcggtaatacggaggatccaagcgttatccggatttattgggtttaaagggtgcgtaggcggtttagtaagtcagcggtgaaattttggtgcttaacaccaaacgtgccgttgatactgctgggctagagagtagttgcggtaggcggaatgtatggtgtagcggtgaaatgcttagagatcatacagaacaccgattgcgaaggcagcttaccaaactatatctgacgttgaggcacgaaagcgtggggagcaaacaggattagataccctggtagtccacgcagtaaacgatgatagctcgttgtcggcgatacacagtcggtgactaagagaaatcgataagctatccacctggggagtacgttcgcaagaatgaaactcaaaggaattgacgggggcccgcacaagcggaggaacatgtggtttaattcgatgatacgcgaggaaccttacccgggcttgaaagttactgacgattctggaaacaggatttcccttcggggcaggaaactaggtgctgcatggttgtcgtcagctcgtgccgtgaggtgtcgggttaagtcccataacgagcgcaacccctactgatagttgccatcagagcgtttgagcgatcaaacaagctgggcactctatcgggactgccggtgtaagccgagaggaaggtggggatgacgtcaaatcggcacggcccttacgtccggggctacacacgtgttacaatggtaggtacagagggcagctacccagtgatgggatgcgaatctcgaaagcctatctcagttcggatcggaggctgaaacccgcctccgtgaagttggattcgctagtaatcgcgcatcagccatggcgcggtgaataaaatcccgggccttgcaca

SEQ ID NO: 1170 - DNA, 1473 bp, Artificial Sequence; identical to SEQ ID NO: 519
  Synthetic polymer

SEQ ID NO: 1171 - DNA, 1442 bp, Artificial Sequence; identical to SEQ ID NO: 1001
  Synthetic polymer

SEQ ID NO: 1172 - DNA, 1399 bp, Artificial Sequence; identical to SEQ ID NO: 418
  Synthetic polymer

SEQ ID NO: 1173 - DNA, 1494 bp, Artificial Sequence; identical to SEQ ID NO: 1038
  Synthetic polymer

SEQ ID NO: 1174 - DNA, 1359 bp, Artificial Sequence
  Synthetic polymer
ggctcaggatgaacgctagcggcaggcctaacacatgcaagtcgaggggcagcacaagaagtagcttgctacttttggtggcgaccggcgcacgggtgcgtaacgcgtatgcaacctacccataacagggggataacactgagaaattggtactaataccccataacatcagatgcggcatcgcatttggttgaaaactccggtggttatggatgggcatgcgttgtattagctagttggagaggtaacggctcaccaaggcgacgatacatagggggactgagaggttaaccccccacattggtactgagacacggaccaaactcctacgggaggcagcagtgaggaatattggtcaatggacgcaagtctgaaccagccatgccgcgtgcaggatgacggctctatgagttgtaaactgcttttgtataagggtaaacccagatacgtgtatctggctgaaagtactatacgaataaggatcggctaactccgtgccagcagccgcggtaatacggaggatccaagcgttatccggatttattgggtttaaagggtgcgtaggcggtttgataagttagaggtgaaataccggggctcaactccggaactgcctctaatactgttgaactagagagtagttgctgtggggcggaatgtatggtgtagcggtgaaatgcttagagatcatacagaacaccgattgcgaaggcagctcacaaaactatatctgacgttgaggcacgaaagcgtggggagcaaacaggattagataccctggtagtccacgcagtaaacgatgataactcgctgtcggcgatacacagtcggtggccaagcgaaagcgataagttatccacctggggagtacgttcgcaagaatgaaactcaaaggaattgacgggggcccgcacaagcggaggaacatgtggtttaattcgatgatacgcgaggaaccttacccgggcttgaaagttagcgacggatctggaaacaggtcttcccttcggggcgcgaaactaggtgctgcatggttgtcgtcagctcgtgccgtgaggtgtcgggttaagtcccataacgagcgcaacccctaccgttagttgccatcaggtaaagctgggcactctggcgggactgccggtgtaagccgagaggaaggtggggatgacgtcaaatcagcacggcccttacgtccggggctacacacgtgttacaatggtaggtacagagggtcgctaccccgtgaggggatgccaatctcgaaagcctatctcagttcggattggaggctgaaacccgcctccatgaagttggattcgctagtaatcgcgcatcagccatggcgcggtgaatacgttc

SEQ ID NO: 1175 - DNA, 1406 bp, Artificial Sequence; identical to SEQ ID NO: 534
  Synthetic polymer

SEQ ID NO: 1176 - DNA, 1525 bp, Artificial Sequence; identical to SEQ ID NO: 809
  Synthetic polymer

SEQ ID NO: 1177 - DNA, 1447 bp, Artificial Sequence; identical to SEQ ID NO: 945
  Synthetic polymer

SEQ ID NO: 1178 - DNA, 1497 bp, Artificial Sequence
  Synthetic polymer
agagtttgatcctggctcaggatgaacgctggcggcgtgcttaacacatgcaagtcgaacgaagtatagtgaatcgagttcttcggaacaattgaagctgtactgagtggcggacgggtgagtaacgcgtggataacctgccttacactgggggacaacagttggaaacgactgctaataccgcataagcgcacagtaccgcatggtacggtgtgaaaaactccggtggtgtaagatggatccgcgtctgattagctagttggtagggtaatggcctaccaaggcaacgatcagtagccggcctgagagggtgtacggccacattgggactgagacacggcccagactcctacgggaggcagcagtggggaatattgcacaatgggcgaaagcctgatgcagcgacgccgcgtgagcgaagaagtatttcggtatgtaaagctctatcagcaaggaagataatgacggtacttgactaagaagccccggctaactacgtgccagcagccgcggtaatacgtagggggcaagcgttatccggatttactgggtgtaaagggagtgtaggtggcatggcaagtcagaagtgaaagcccggggctcaaccccgggactgcttttgaaactgccaagctagagtgcaggagaggtaagtggaattcctagtgtagcggtgaaatgcgtagatattaggaggaacaccagtggcgaaggcgacttactggactgtaactgacactgaggctcgaaagcgtggggagcaaacaggattagataccctggtagtccacgctgtaaacgatgaatactagatgttgggaggcataagcttctcagtgtcgtagctaacgcgataagtattccacctgggaagtacgttcgcaagaatgaaactcaaaggaattgacggggacccgcacaagcggtggagcatgtggtttaattcgaagcaacgcgaagaaccttaccaagtcttgacatccctctgaccggcacgtaatggtgcctttccttcgggacagaggagacaggtggtgcatggttgtcgtcagctcgtgtcgtgagatgttgggttaagtcccgcaacgagcgcaacccttatctttagtagccagcatttcggatgggcactctagagagactgccagggataacctggaggaaggtggggatgacgtcaaatcatcatgccccttatgacttgggctacacacgtgctacaatggcgtaaacaaagggacgcaagctggtgacagtaagcaaatcccaaaaataacgtctcagttcggattgtagtctgcaactcgactacatgaagctggaatcgctagtaatcgcgaatcagaatgtcgcggtgaatacgttcccgggtcttgtacacaccgcccgtcacaccatgggagtcggtaatgcccgaagtcagtgacccaaccgtaaggagggagctgccgaaggcaggatcgataactggggtgaagtcgtaacaaggtagccgta

SEQ ID NO: 1179 - DNA, 1445 bp, Artificial Sequence
  Synthetic polymer
ggcggcaggcctaacacatgcaagtcgacctttaacaggaagcagcttgctgctttgctgacgagtggcggacgggtgagtaatgtctgggaaactgcccgatggatcgggataactactggaaacggtagctaataccgcataacgtcgcaagaccaaagagggggaccttagggcctcttgccatcggatgtgcccagatgggattagctagtaggtggggtaacggctcacctaggcgacgatccctagctggtctgagaggatgaccagccacactggaactgagacacggtccagactcctacgggaggcagcagtggggaatattgcacaatgggcgcaagcctgatgcagccatgccgcgtgtatgagggggggggtcgggttgtaaagtactttcagcggggaggaagggagtaaagttaatacctttgctcattgacgttacccgcagaagaagcaccggctaactccgtgccagcagccgcggtaatacggagggtgcaagcgttaatcggaattactgggcgtaaagcgcacgcacgcggtttgttaagtcagatgtgaaatccccgggctccacctgggaactgcatctgatactggcaagcttgagtttcgtagaggggggtagaattccaggtgtagcggtgaaatgcgtagagatctggaggaataccggtggcgaaggcggccccctggacgaagactgacgctcaggtgcgaaagcgtggggagcaaacaggattagataccctggtagtccacgccgtaaacgatgtcgacttggaggttgtgcccttgaggcgtggcttccggagctaacgcgttaagtcgaccgcctggggagtacggccgcaaggttaaaactcaaatgaattgacgggggcccgcacaagcggcggagcatgtggtttaattcgatgcaacgcgaagaaccttacctggtcttgacatccacggaagttttcagagatgagaatgtgccttcgggaaccgtgagacaggtgctgcatggctgtcgtcagctcgtgttgtgaaatgttgggttaagtcccgcaacgagcgcaacccttatcctttgctgccagcggtccggccgggaactcaaaggagactgccagtgataaactggaggaaggtggggatgacgtcaagtcatcatggcccttacgaccagggctacacacgtgctacaatggcgcatacaaagagaagcgacctcgcgagagcaagcggacctcataaagtgcgtcgtagtccggattggagtctgcaactcgactccatgaagtcggaatcgctagtaatcgtggatcagaatgccacggtgaatacgttcccgggccttgtacacaccgcccgtcacaccatgggagtgggttgcaaaagaagtaggtagcttaaccttcgggagggcgcttaccactttgtgattcatg

SEQ ID NO: 1180 - DNA, 1452 bp, Artificial Sequence
  Synthetic polymer
gcggcaggcctaacacatgcaagtcgagccttaacgcggaggagcttgctccttgggtgacgagcggcggacgggtgagtaatgcctggggatctgcccgatagagggggataactccgggaaactgtagctaataccgcatacggtctacggaccaaagcgggggctcttcggacctcatgctatcggatgtacccaggtgggattagctagttggtgaggtaatggctcaccaaggcgacgatctctaactggtttgagagaatgatcagtcacactggaactgagacacggtccagactcctacgggaggcagcagtggggaatattgcacaatgggcgcaagcctgatgcagccatgccgcgtgtgtgaagaaggccttcgggttgtaaagcactttcagcggggaggaagggtcactagttaatatctagtggcattgacgttactcgcagaagaagcaccggctaactccgtgccagcagccgcggtaatacggagggtgcaagcgttaatcggaattactgggcgtaaagcgcacgcaggcggtttgttaagtcagatgtgaaatccccgagctcaacttgggaattgcatttgaaactgtcaagctagagtcttgtagaggggggtagaattccaggtgtagcggtgaaatgcgtagagatctggagaaataccggtggcgaaggcggccccctggacaaagactgacgctcaggtgcgaaagcgtggggagcccacaagggtagatcccttggtattccacgcggtaaacgacccgttaggaggttgttcccttgaggcgtggcttcggaagctaacgcgttaaatggcccgcttggggagtagggcggcaaggttaaaattcaaatgaattgaggggggccggcacaagcggtggagcatgtggtttaattggatgcaacgggaggacctttacttactcttgacattcagagatctttccagagatggataggtcctttcgggatctgtgagacaggtgctgcatggcggtgttcagttggtgttgtgaaatgttgggttaattccggcaaggagcgcaacccttatcttttgttgccagagattaggtcgggaactcaaaggagactgccggtgataaaccggaggaaggtggggatgacgtcaagtcatcatggcccttacgagtagggctacacacgtgctacaatggcatatacaaagggcggcaagctagcgatagtgagcgaatcccataaagtatgtcgtagtccggattggagtctgcaactcgactccatgaagtcggaatcgctagtaatcgcggatcagaatgccgcggtgaatacgttcccgggcattgtacacaccgcccgtcacaccatgggagtgggttgcaaaagaagtaggtagcttaaccttcgggagggaggttaccactttgtgattcatgactggggtga

SEQ ID NO: 1181 - DNA, 1492 bp, Artificial Sequence; identical to SEQ ID NO: 552
  Synthetic polymer

SEQ ID NO: 1182 - DNA, 1352 bp, Artificial Sequence
  Synthetic polymer
tgaacgctggcggcaggcctaacacatgcaagtcgaacggtaaaacagcttgctgtttacgagtggcggacgggtgagtaatgtctgggaaactgcctgatggagggggataactactggaaacggtagctaataccgcataacgtcgcaagaccaaagtggttcgtcatgccatcagatgtgcccagatgggattagctagtaggtggggtaatggctcacctaggcgacgatccctagctggtctgagaggatgaccagccacactggaactgagacacggtccagactcctacgggaggcagcagtggggaatattgcacaatgggcgcaagcctgatgcagccatgccgcgtgtgtgaagaaggccttcgggttgtaaagcactttcagcggggaggaaggcggtgagtaatctcatcgattgacgttacccgcagaagaagcaccggctaactccgtgccagcagccgcggtaatacggagggtgcaagcgttaatcggaattactgggcgtaaagcgcacgcaggcggtctgtcaagtcggatgtgaaatccccgggctcaacctgggaactgcattcgaaactggcaggctagagtcttgtagaggggggtagaattccaggtatagcggtgaaatgcgtagagatctggaggaataccggtggcgaaggcggcccctggacaagactgacgctcaggtgcgaaagcgtggggagcaaacaggattagataccctggtagtccacgccgtaaacgatgtcgatttggaggttgtgcccttgaggcgtggcttccggagctaacgcgttaaatcgaccgcctggggagtacggccgcaaggttaaaactcaaatgaattgacgggggcccgcacaagcggtggagcatgtggtttaattcgaagcaacgcgaagaaccttaccaggtcttgacatccagtgcaaacctaagagattaggtgttcccttcggggacgctgagacaggtgctgcatggctgtcgtcagctcgtgttgtgaaatgttgggttaagtcccgcaacgagcgcaacccttatcctttgttgccagcggtccagccgggaactcaaaggagactgccagtgataaactggaggaaggtggggatgacgtcaagtcatcatggcccttacgaccagggctacacacgtgctacaatggtgcatacaaagagaagcgacctcgcgagagcaagcggacctcataaagtgcgtcgtagtccggattggagtctgcaactcgactccatgaagtcggaatcgctagtaatcgtggatcagaatgccacggtgaatacgttcccgggccttgcacacaccgcccgtca

SEQ ID NO: 1183 - DNA, 1507 bp, Artificial Sequence
  Synthetic polymer
agagtttgatcatggctcagattgaacgctggcggcaggcctaacacatgcaagtcgaacggtaacaggaagcagcttgctgctttgctgacgagtggcggacgggtgagtaatgtctgggaaactgcccggtggagggggataactactggaaacggtagctaataccgcataacgtcgcaagaccaaagagggggaccttcgggcctcttgccaccggatgtgcccagatgggattagcttgttggtgaggtaacggctcaccaaggcgacgatccctagctggtctgagaggatgaccagccacactggaactgagacacggtccagactcctacgggaggcagcagtggggaatattgcacaatgggcgcaagcctgatgcagccatgccgcgtgtatgaagaaggccttcgggttgtaaagtactttcagcggggaggaagggattgtggttaataaccgcagtcattgacgttacccgcagaagaagcaccggctaactccgtgccagcagccgcggtaatacggagggtgcaagcgttaatcggaattactgggcgtaaagcgcacgcaggcggtctgtcaagtcggatgtgaaatccccgggctcaacctgggaactgcattcgaaactggcaggcttgagtctcgcagaggggggtggaattccaggtgtaccggtgaaatgcgtaagatctggaggaataccggtggcgaaggcggccccctggacgaagactgacgctcaggtgcgaaagcgtggggagcaacaggatttagatcccctggtagtccacgccgtaaacgatgtctacttggaggttgtgcccctgaggcgtggcttccggagctaacgcgttaagtagacctcctggggagtacgtccgcaaggttaaaactcaaatgaattgacgggggctcgcacaagcggtggagcatgtggtttaattcgatgcaacgcgaagaaccttacctggtcttgacatccacggaagacggcagagatgcggttgtgccttcgggaaccgtgagacaggtgctgcatggctgtcgtcagctcgtgttgcgaaatgttgggttaagtcccgcaacgagcgcaacccttatcctttgttgccagcggtccggccgggaactcaaaggagactgccagtgataacctggaggaaggtggggatgacgtcaagtcatcatggcccttacgaccagggctacacacgtgctacaatggcatatacaaagagaagcgacctcgcgagagcaagcggacctcataaagtatgtcgtagtccggattggagtctgcaactcgactccatgaagtcggaatcgctagtaatcgtggatcagaatgccacggtgaatacgttcccgggccttgtacacaccgcccgtcacatccatgggagtgggttgcaaaagaagtaggtagcttaacctccgggagggcgcttaccactttgtgattcatgaactggggtgaagtcgtaacaaggtaaccgta

SEQ ID NO: 1184 - DNA, 1506 bp, Artificial Sequence
  Synthetic polymer
catggctcagattgaacgctggtggcaggcctaacacatgcaagtcgagtggtaacaggagaagcttgcttctcgctgacgagcggcggacgggtgagtaatgtatggggatctgcctgatagagggggataaccactggaaacggtggctaataccgcataatctctaaggagcaaagcaggggaacttcggtccttgcgctatcggatgaacccatatgggattagctagtaggtgaggtaatggctcacctaggcgacgatccctagctggtctgagaggttgatcagccaccctgggacttagacacgggccagactcctacggaggcagcagtggggaatattgcacaatgggcgcaagcctgatgcacccattccccgtgtatgaagaaggccttagggttgtaaagtactttcagtcgggaggaaggcgttgatgctaatatcatcaacgattgacgttaccaacagaagaagcaccggctaactccgtgccagcagccgcggtaatacggagggtgcaagcgttaatcggaattactgggcgtaaagcgcacgcaggcggttgattaagttagatgtgaaatccccgggcttaacctgggaatggcatctaagactggtcagctagagtcttgtagaggggggtagaattccatgtgtagcggtgaaatgcgtagagatgtggaggaataccggtggcgaaggcggccccctggaccaagactgacgctcaggtgcgaaagcgtggggagcaaacaggattagataccctggtagtccacgccgtaaacgatgtcgatttggaggttgttcccatgaggagtggtttccggagttaacgcgttaaatcgaccacctggggagtacggccgaaaggttaaaactcaattgaattgacgggggcccgcacaagcggtggagcatgtggtttaattcgatgaaacgcgacgaaccttacctactcttgacatccagagaactgagcagagatgcttaggtgccttcgggaactctgagacaggtgctgcatggctgccgtcagctcgtgttgtgaaatgttgggttacgtcccgaaacgagcgcaacccttatcctttggtgccagcagttcggccgggaactcaaaggagactgccagtgataaactggaggaaggtggggatgacgtcaagtcatcatggcccttacgagtagggctacacacgtgctacaatgccgtatacaacgagaagcgacctcgcgagagcaagcggacctcataaagtacgtcgtagtccggattggagtctgcaactcgactccatgaagtcggaatcgctagtaatcgtagatcacaatgctacggtgaatacgttcccgggccttgtacacaccgtccgtcacaacatgggagtgggttgcaaaagaagtaggtagcttaaccttcgggagggcgcttaccactttgtgattcatgactggggtgaagtcgtaacaaggtaaccgtaggggaacctgcgg

SEQ ID NO: 1185 - DNA, 1452 bp, Artificial Sequence
  Synthetic polymer
cggcaggcctaacacatgcaagtcgaacggtaacaggaagcagcttgctgctttgctgacgagtggcggacgggtgagtaatgtctgggaaactgcccgatggagggggataactactggaaacggtagctaataccgcataacgtcgcaagaccaaagagggggaccttagggcctcttgccatcggatgtgcccagatgggattagctagtaggtggggtaatggctcacctaggcgacgatccctagctggtctgagaggatgaccagccacactggaactgagacacggtccagactcctacgggaggcagcagtggggaatattgcacaatgggcgcaagcctgatgcagccatgccgcgtgaatgaagaaggccttcgggttgtaaagtactttcagcggggaggaaggtagtaaagttaatacctttgctcattgacgttacccgcacaacaagcaccggctaactccgggccagcacccgcggtaatacggagggtgcaagcgttaatcggaattactgggcgtaaagcacacgcaggcggtttgctaagtcagatgtgaaatccccgggttcaacctgggaactgcatgtgatactggcaagcttgagtctcgtagagtagggtagaatcctaggtgtagcggtgaaatgcgtagagatctggaggaatacaggtggcgaaggcggccccctggacgaagactgacgctcaggtgcgaaagcgtggggagcaaacaggattagataccctggtagtccacgccgtaaacgatgtcgacttggaggttgtgcccttgaggcgtggcttccggagctaacgcgttaagtcgacagcctggggagtacgtccgcaaggttaaaactcaaatgaattgacgggggcccgcacaagcggtggagcatgtggtttaattggatgcaacgcgaagaaccttacatggtcttgacatcctcggaagttttcagagatgagaatgttccttcgggaaccgtgagacaggtgctacatggctgtcgtcagctcgtgttgtgaaatgttgggttaagtcccgcaacgagcgcaacccttatcctttgttgccagcggtccggccgggaactcaaaggagactgccagtgataaactggaggaaggtggggatgacgtcaagtcatcatggcccttacgaccagggctacacacgtgctacaatggcgcatacaaagagaagcgacctcgcgagagcaagcggtcctcataaagtgcgttgtagtccggattggagtctgcaactcgactccatgaagtcggaatcgctagtaatcgtggatcagaatgccacggtgaatacgttcccggtccttgtacacaccgcccgtcacaccatgggagtgggttgcaaaagaagtaggtagcttaaccttcgggagggcgcttaccactttgtgattcatgactggggtg

SEQ ID NO: 1186 - DNA, 1532 bp, Artificial Sequence; identical to SEQ ID NO: 1080
  Synthetic polymer

SEQ ID NO: 1187 - DNA, 1455 bp, Artificial Sequence; identical to SEQ ID NO: 961
  Synthetic polymer

SEQ ID NO: 1188 - DNA, 1464 bp, Artificial Sequence
  Synthetic polymer
attgaacgctggcggcaggcctaacacatgcaagtcgagcggtagcacagagagcttgctctcgggtgacgagcggcggacgggtgagtaatgtctgggaaactgcctgatggagggggataactactggaaacggtagctaataccgcataacgtcgcaagaccaaagagggggaccttcgggcctcttgccatcagatgtgcccagatgggattagctagtaggtggggtaatggctcacctaggcgacgatccctagctggtctgagaggatgaccagccacactggaactgagacacggtccagactcctacgggaggcagcagtggggaatattgcacaatgggcgcaagcctgatgcagccatgccgcgtgtatgaagaaggccttcgggttgtaaagtactttcagcggggaggaaggtgctgaggttaataacctcagcaattgacgttacccgcagaagaagcaccggctaactccgtgccagcagcgcggtatacggagggtgcaagcgttaatcggaataactgggcgtaaagcgcacgcaggcggtctgtcaagtcgaatgtgaaatccccgggctcaacctgggaactgcattcgaaactggcaggctagagtcttgtagaggggggtagaattccaggtgtagcggtgaaatgcgtagagatctggaggaataccggtggcgaaggcggccccctggacaaagactgacgctcaggtgcgaaagcgtggggagcaaacaggattagataccctggtagtccacgccgtaaacgatgtcgatttggaggttgttcccttgaggagtggcttccggagctaacgcgttaaatcgaccgcctggggagtacggccgcaaggttaaaactcaaatgaattgacgggggcccgcacaagcggtggagcatgtggtttaattcgatgcaacgcgaagaaccttacctactcttgacatccaagagaacttaacagagatgccttcggtgccttcggaactctgagacaggtgctgcatggctgtcgtcagctcgtgttgtgaaatgttgggttaagtcccgcaacgagcgcaaccttatcctttgttgccagcggtccggccgggaactcaaaggagactgccagtgataaactggaggaaggtggggatgacgtcaagtcatcatggcccttacgagtagggctacacacgtgctacaatggcgcatacaaagagaagcgacctcgcgagagcaagcggacctcataaagtgcgtcgtagtccggattggagtctgcaactcgactccatgaagtcggaatcgctagtaatcgtagatcagaatgctacggtgaatacgttcccgggccttgtacacaccgcccgtcacaccatgggagtgggttgcaaaagaagtaggtagcttaaccttcgggagggcgcttaccactttgtgattcatgactggggtgaagt

SEQ ID NO: 1189 - DNA, 1348 bp, Artificial Sequence; identical to SEQ ID NO: 845
  Synthetic polymer

SEQ ID NO: 1190 - DNA, 1447 bp, Artificial Sequence
  Synthetic polymer
gcctaacacatgcaagtcgaacggtagcacagaggagcttgctccttgggtggcgagtggcggacgggtgaggaatgcctgggaatctgcctgtttgtgggggataacgtagggaaacggtcgctaataccgcatacgaccgcaaggccaaagcgggggaccttcgggcttctcgcagatagatgagcccacgtcggattagctagttggcggggtaaaggcccacctaggcgacgatccctagctggtctgagaggatgaccagccacactggaactgagacacggtccagactcctacgggaggcagcagtggggaatattgcacaatgggcgcaagcctgatgcagccatgccgcgtgtatgaagaaggccttcgggttgtaaagtactttcagcgaggaggaaggcggtgaggttaataacctcatcgattgacgttactcgcagaagaagcaccggctaactccgtgccagcagccgcggtaatacggagggtgcaagcgttaatcggaattactgggcgtaaagcgcacgcaggcggtctgtcaagtcggatgtgaaatccccgggctcaacctgggaactgcattcgaaactggcaggctagagtcttgtagaggggggtagaattccaggtgtagcggtgaaatgcgtagagatctggaggaataccggtggcgaaggcggccccctggacaaagactgacgctcaggtgcgaaagcgtggggagcaaacaggattagataccctggtagtccacgccgtaaacgatgtcgacttggaggttgttcccttgaggagtggcttccggagctaacgcgttaagtcgaccgcctggggagtacggccgcaaggttaaaactcaaatgaattgacgggggcccgcacaagcggtggagcatgtggtttaattcgatgcaacgcgaagaaccttacctactcttgacatccagagaacttagcagagatgctttggtgccttcgggaactctgagacaggtgctgcacggctgtcgtcagctcgtgttgtgaaatgttgggttaagtcccgcaacgagcgcaacccttatcctttgttgccagcggtccggccgggaactcaaaggagactgccagtgataaactggaggaaggtggggatgacgtcaagtcatcatggcccttacgagtagggctacacacgtgctacaatggcgcatacaaagagaagcgacctcgcgagagcaagcggacctcataaagtgcgtcgtagtccggattggagtctgcaactcgactccatgaagtcggaatcgctagtaatcgtagatcagcaatgctacggtgaatacgttcccgggccttgtacacaccgcccgtcacaccatgggagtgggctgcaaaagaagtaggtagcttaaccttcgggagggcgcttaccactttgtgattcatgactggggtg

SEQ ID NO: 1191 - DNA, 1364 bp, Artificial Sequence
  Synthetic polymer
attgaacgcttgcggcaggcctaacacatgcaagtcggacggtagcacaggagagcttgctctccgggtgacgagtggcggacgggtgagtaatgtctgggaaactgcccggtggagggggataactactggaaacggtagctaataccgcataacgtcttcggaccaaagtgggggatcttcggacctcacgccaccggatgtgcccagatgggattagctagtaggtggggtaatggctcacctaggcgacgatccctagctggtctgagaggatgaccagccacactggaactgagacacggtccagactcctacgggaggcagcagtggggaatattgcacaatgggcgcaagcctgatgcagccatgccgcgtgtatgaagaaggccttcgggttgtaaagtactttcagcggggaggaaggcggtgaggttaataaccttgccgattgacgttacccgcagaagaagcaccggctaactccgtgccagcagccgcggtaatacggagggtgcaagcgttaatcggaattactgggcgtaaagcgcacgcaggcggtctgttaagtcagatgtgaaatccccgggcttaacctgggaactgcatttgaaactggcaggcttgagtctcgtagaggggggtagaattccaggtgtagcggtgaaatgcgtagagatctggaggaataccggtggcgaaggcggccccctggacgaagactgacgctcaggtgcgaaagcgtggggagcaaacaggattagataccctggtagtccacgccgtaaacgatgtcgacttggaggctgtttccttgagaagtggcttccggagctaacgcgttaagtcgaccgcctggggagtacggccgcaaggttaaaactcaaatgaattgacgggggcccgcacaagcggtggagcatgtggtttaattcgatgcaacgcgaagaaccttacctggccttgacatccagagaacttagcagagatgctttggtgccttcgggaactctgagacaggtgctgcatggctgtcgtcagctcgtgttgtgaaatgttgggttaagtcccgcaacgagcgcaacccttatcctttgttgccagcgggtagtgccgggaactcaaaggagaccgccggtgataaaccggaggaaggtggggatgacgtcaagtcatcatggcccttacggccagggctacacacgtgctgcaatggcgcatacaaagagaagcgacctcgcgagagcaagcggacctcataaagtgcgtcgtagtccggatcggagtctgcaactcgactccgtgaagtcggaatcgctggtaatcgtagatcagaatgctacggtgaatacgttcccgggcct

SEQ ID NO: 1192 - DNA, 1363 bp, Artificial Sequence
  Synthetic polymer
  misc_feature (2)..(2): n is a, c, g, or t
angagcttgctcctttgcgctgacgagtggcggacgggtgagtaatgtctgggaaactgcccgatggagggggataactactggaaacggtagctaataccgcataacgtcttcggaccaaagtgggggaccttcgggcctcacaccatcggatgtgcccagatgggattagctagtaggtggggtaatggctcacctaggcgacgatccctagctggtctgagaggatgaccagccacactggaactgagacacggtccagactcctacgggaggcagcagtggggaatattgcacaatgggcgcaagcctgatgcagccatgccgcgtgtatgaagaaggccttcgggttgtaaagtactttcagcggggaggaaggcgatgcggttaataaccgcgtcgattgacgttacccgcagaagaagcaccggctaactccgtgccagcagccgcggtaatacggagggtgcaagcgttaatcggaattactgggcgtaaagcgcacgcaggcggtctgtaagtcagatgtgaaatccccgggctcaacccgggaactgcatttgaaactggcaggcttgagtctcgtagaggggggtagaatttccaggtgtagcggtgaaatgcgtagagatctggaggaataccggtggcgaaggcggccccctggacgaagactgacgctcaggtgcgaaagcgtggggagcaaacaggattagataccctggtagtccacgccgtaaacgatgtcgacttggaggttgtgcccttgaggcgtggcttccggagctaacgcgttaagtcgaccgcctggggagtacggccgcaaggttaaaactcaaatgaattgacgggggcccgcacaagcggtggagcatgtggtttaattcgatgcaacgcgaagaaccttacctggccttgacatccacagaactttccagagatggattggtgccttcgggaactgtgagacaggtgctgcatggctgtcgtcagctcgtgttgtgaaatgttgggttaagtcccgcaacgagcgcaacccttatcctctgttgccagcgattcggtcgggaactcaggggagactgccggtgataaaccggaggaaggtggggatgacgtcaagtcatcatggcccttacggccagggctacacacgtgctacaatggcgcatacaaagagaagcgaccctgcgagggcaagcggatctcataaagtgcgtcgtagtccggatcggagtctgcaactcgactccgtgaagtcggaatcgctagtaatcgtggatcagaatgccacggtgaatacgttcccgggccttgtacacaccgcccgtcacaccatgggagtgggttgcaaaagaagtag

SEQ ID NO: 1193 - DNA, 1462 bp, Artificial Sequence; identical to SEQ ID NO: 39
  Synthetic polymer

SEQ ID NO: 1194 - DNA, 1504 bp, Artificial Sequence
  Synthetic polymer
agagtttgatcatggctcagattgaacgctggcggcaggcctaacacatgcaagtcgaacggtaacaggaagaagcttgcttctttgctgacgagtggcggacgggtgagtaatgtatggggatctgcctgatggagggggataactactggaaacggtagctaataccgcataatgtcgcaagaccaaagagggggctcgtatgacctcttgccatcggatgaacccatatgggattagctagtaggtggggtaatggctcacctaggcgacgatctctagctggtctgagaggatgaccagccacactggaactgagacacggtccagactcctacgggaggcagcagtggggaatattgcacaatgggggaaaccctgatgcagccatgccgcgtgtgtgaagaaggccttagggttgtaaagcactttcagtcgggaggaaggtggagtagttaatacctgctccaattgacgttaccgacagaagaagcaccggctaactccgtgccagcagccgcggtaatacggagggtgcaagcgttaatcggaattactgggcgtaaagcgcacgcaggcggttgattaggttagatgtgaaatccccgggcttaacctgggaactgcatttaaaactggtcagctagagtctcgtagaggggggtagaattccacgtgtagcggtgaaatgcgtagagatgtggaggaataccggtggcgaaggcggccccctggacgaagactgacgctcaggtgcgaaagcgtggggagcaaacaggattagataccctggtagtccacgctgtaaacgatgtcaacttggagtttgcggtcttgaactgtgggctccgaagctaacgcgttaagttgaccgcctggggagtacggtcgcaagattaaaactcaaatgaattgacgggggcccgcacaagcggtggagcatgtggtttaattcgatgcaacgcgaagaaccttacctactcttgacatccacggaagactttagagataaagttgtgccttcgggaaccgtgagacaggtgctgcatggctgtcgtcagctcgtgttgtgaaatgttgggttaagtcccgcaacgagcgcaacccttatcctttgttgccagcacgttatggtgggaactcaaaggagactgccggtgataaaccggaggaaggtggggatgacgtcaagtcatcatggcccttacgagtagggctacacacgtgctacaatggcgcatacaaagagaagcgacctcgcgagagcaagcggacctcataaagtgcgtcgtagtccggattggagtctgcaactcgactccatgaagtcggaatcgctagtaatcgtagatcagaatgctacggtgaatacgttcccgggccttgtacacaccgcccgtcacaccatgggagtgggttgcaaaagaagtaggtagcttaaccttcgggggggcgcttaccactttgtgattcatgactggggtgaagtcgtaacaaggtaacc

SEQ ID NO: 1195 - DNA, 1360 bp, Artificial Sequence
  Synthetic polymer
cgagcggcagcggaaagtagctttcttctttgccggcgagcggcggacgggtgagtaatgtctgggaaactgcctgatggagggggataactactggaaacggtagctaataccgcataacgtcgcaagaccaaagagggggaccttcgggcctcttgccatcagatgtgcccagatgggattagctagtaggtggggtaacggctcacctaggcgacgatccctagctggtctgagaggatgaccagccacactggaactgagacacggtccagactcctacgggaggcagcagtggggaatattgcacaatgggcgcaagcctgatgcagccatgccgcgtgtatgaagaaggccttcgggttgtaaagtactttcagcggggaggaaggtgttgtggttaataacctcagcaattgacgttacccgcagaagaagcaccggctaactccgtgccagcagccgcggtaatacggagggtgcaagcgttaatcggaattactgggcgtaaagcgcacgcaggcggtctgtcaagtcggatgtgaaatccccgggctcaacctgggaactgcattcgaaactggcaggctagagtcttgtagaggggggtagaattccaggtgtagcggtgaaatgcgtagagatctggaggaataccggtggcgaaggcggccccctggacaaagactgacgctcaggtgcgaaagcgtggggagcaaacaggattagataccctggtagtccacgccgtaaacgatgtcgacttggaggttgtgcccttgaggcgtggcttccggagctaacgcgttaagtcgaccgcctggggagtacggccgcaaggttaaaactcaaatgaattgacgggggcccgcacaagcggtggagcatgtggtttaattcgatgcaacgcgaagaaccttacctactcttgacatccagagaactttccagagatggattggtgccttcgggaactctgagacaggtgctgcatggctgtcgtcagctcgtgttgtgaaatgttgggttaagtcccgcaacgagcgcaacccttatcctttgttgccagcggttcggccgggaactcaaaggagactgccagtgataaactggaggaaggtggggatgacgtcaagtcatcatggcccttacgagtagggctacacacgtgctacaatggcgcatacaaagagaagcgactttccgagatcaagcggacctcataaagcgcgtcgtagtccggataggaggctgccactcgattccatgaagtcggaatcgctagtaactgtgaatcagaatgctacggggaatacgttcccgggccttgtacccgccacccgtcacaccatgggagtgg

SEQ ID NO: 1196 - DNA, 1508 bp, Artificial Sequence
  Synthetic polymer
cggcaggcctaacacatgcaagtcgaacggtagcacagaggagcttgctccttgggtgacgagtggcggacgggtgagtaatgtctgggaaactgcccgatggagggggataactactggaaacggtagctaataccgcataacgtcgcaagaccaaagagggggaccttcgggcctcttgccatcggatgtgcccagatgggattagctagtaggtggggtaacggctcacctaggcgacgatccctagctggtctgagaggatgaccagccacactggaactgaacacggtccaactcctacgggaggcagcagtggggaatattgcacaatgggcgcaagcctgatgcagccatgccgcgtgtatgaggaaggccttcgggttgtaaagtactttcagcgaggaggaaggcgttgtggttaataaccgcagcgattgacgttactcgcagaagaagcaccggctaactccgtgccagcagccgcggtaatacggaaggtgcagcgttatcggattactgggcgtaacgcgcacgcaggcggtctgtcaagtcggatgtgaaatccccgggctcaacctgggaactgcatccgaaactggcaggctagagtcttgtagaggggggtagaattccaggtgtagcggtgaaatgcgtagagatctggaggaataccggtggcgaaggcggccccctggacaaagactgacgctcaggtgcgaaagcgtggggagcaaacaggattagataccctggtagtccacgccgtaaacgatgtcgacttggaggttgtgcccttgaggcgtggcttccggagctaacgcgttaagtcgaccgcctggggagtacggccgcaaggttaaaactcaaatgaattgacgggggcccgcacaagcggtggagcatgtggtttaattcgatgcaacgcgaagaaccttacctactcttgacatccagagaacttagcagagatgctttggtgccttcgggaactctgagacaggtgctgcatggctgtcgtcagctcgtgttgtgaaatgttgggttaagtcccgcaacgagcgcaacctttatcctttgtttgccagcggttcggcccgggaactcaaaggagactgccagtgataaaacttgggagagaaggtggcggatgacgtccagtcatcatggcccctttacgagtaggggctagacacatgctagaatgtcatatagattgataaccaccctcgcgagagcaagcggacctcataaagtatgtcgtagtccggattggagtctgcaactcgactccatgaagtcggaatcgctagtaatcgtggatcagaatgccacggtgaatacgttcccgggccttgtacacaccgcccgtcacaccatgggagtgggttgcaaaagaagtaggtagcttaaccttcgggagggcgcttaccactttgtgattcatgactggggtgaagtcgtaacaaggtaaccgtaggggaacctgcggctggatcacctcctta

SEQ ID NO: 1197 - DNA, 1462 bp, Artificial Sequence
  Synthetic polymer
  misc_feature (59)..(59): n is a, c, g, or t
  misc_feature (1084)..(1084): n is a, c, g, or t
catgcaagtcgaacggtaacaggaagcagcttgctgctttgctgacgagtggcgttttnggtgagtaatgtctgggaaactgcccgatggagggggataactactggaaacggtagctaataccgcataatgtcgcaagaccaaagagggggaccttcgggcctcttgccatcggatgtgcccagatgggattagctagttggtgaggtaacggctcaccaaggcgacgatccctagctggtctgagaggatgaccagccacactggaactgagacacggtccagactcctacgggaggcagcagtggggaatattgcacaatgggcgcaagcctgatgcagccatgccgcgtgtatgaagaaggccttcgggttgtaaagtactttcagcggggaggaaggggttaaggttaataaccttagccattgacgttacccgcagaagaagcaccggctaactccgtgccagcagccgcggtaatacggagggtgcaagcgttaatcggaattactgggcgtaaagcgcacgcaggcggtctgtcaagtcggatggtgaaatccccgggctcaacctgggaactgcattcgaaactggcaggcttgagtctcgtagaggggggtagaattccaggtgtagcggtgaaatgcgtagagatctggaggaataccggtggcgaaggcggccccctggacgaagactgacgctcaggtgcgaaagcgtggggagcaaacaggattagataccctggtagtccacgctgtaaacgatgtcgatttagaggttgtggtcttgaaccgtggcttctggagctaacgcgttaaatcgatcgcctggggagtacggccgcaaggttaaaactcaaatgaattgacgggggcccgcacaagcggtggagcatgtggtttaattcgatgcaacgcgaaaaaccttacctactcttgacatccagcgaatcctttaaagataaagaagtgccttcgggaacgctgagacaggtgctgcatggctgtcgtcagctcgtgttgtgaaatgttgggttaagtcccgcaacgagcgcaacccttatcctttgttgccagcacntgtatggtgggaactcaaaggagactgccggtggtaaaccggaggaaggtggggatgacgtcaagtcatcatggcccttacgagtagggctacacacgtgctacaatggcagatacaaagagaagcgacctcgcgagagcaagctggaactcataaagtctgtcgtagtccggattggagtctgcaactcgactccatgaagtcggaatcgctagtaatcgtagatcagaatgctacggtgaatacgttcccgggccttgtacacaccgcccgtcacaccatgggagtgggttgcaaaagaagtaggtagcttaaccttcgggagggcgcttaccactttgtgattcatgactggggtgaagtcgtaacaaggtaacc

SEQ ID NO: 1198 - DNA, 1482 bp, Artificial Sequence
  Synthetic polymer
agagtttgatcctggctcagattgaacgctggcggcaggcctaacacatgaagtcgaacggtagcacagagagcttgctctcgggtgacgagtggcggacgggtgagtaatgtctgggaaactgcctgatggagggggataactactggaaacggtagctaataccgcataacgtcgcaagaccaaagagggggaccttcgggcctcttgccatcagatgtgcccagatgggattagctagtaggtggggtaacggctcacctaggcgacgatccctagctggtctgagaggatgaccagccacactggaactgagacacggtccagactcctacgggaggcagcagtggggaatattgcacaatgggcgcaagcctgatgcagccatgccgcgtgtatgaagaaggccttcgggttgtaaagtactttcagcggggaggaaggtgttgtggttaataaccacagcaattgacgttacccgcagaagaagcaccggctaactccgtgccagcagccgcggtaatacggagggtgcaagcgttaatcggaattactgggcgtaaagcgcacgcaggcggtctgtcaagtcggatgtgaaatccccgggctcaacctgggaactgcattcgaaactggcaggctagagtcttgtagaggggggtagaattccaggtgtagcggtgaaatgcgtaaagatctggaaggaatacccggtggcgaaggcggcccctggacaaagactgacgctcaggtgcgaaagcgtggggagcaaacaggattagataccctggtagtccacgccgtaaacgatgtcgacttggaggttgtgcccttgaggcgtggcttccggagctaacgcgttaagtcgaccgcctgggagtacggccgcaaggttaaaactcaaatgaattgacgggggcccgcacaagcggtggagcatgtggtttaattcgatgcaacgcgaagaaccttacctactcttgacatccagagaactttccagagatggattggtgccttcgggaactctgagacaggtgctgcatggctgtcgtcagctcgtgttgtgaaatgttgggttaagtcccgcaacgagcgcaacccttgtccttagttaccagcacgtaatggtgggcactctaaggagactgccggtgacaaaccggaggaaggtggggatgacgtcaagtcatcatggcccttacggcctgggctacacacgtgctacaatggtcggtacaaagggttgccaagccgcgaggtggagctaatcccataaaaccgatcgtagtccggatcgcagtctgcaactcgactgcgtgaagtcggaatcgctagtaatcgcgaatcagaatgtcgcggtgaatacgttcccgggccttgtacacaccgcccgtcacaccatgggagtgggttgcaccagaagtagctagtctaaccttcgggaggacggttaccacggtgtgattcatgactggggtg

SEQ ID NO: 1199 - DNA, 1405 bp, Artificial Sequence
  Synthetic polymer
agtcgagcggtacaggggaagcttgcttgccgctgacgagcggcggacgggtgagtaatgtatggggatctgcccgatagagggggatacctactggaaacggtagctaataccgcataatctctcaggagcaaagcaggggaacttcggtccttgcgctatcggatgaacccatatggaattagctagtaggtgaggtaatggctcacctaggcgaccatccctagctggtctgaaaggatgatcacccacactgggactgagacacggcacacactcctacgggaggcagcagtggggaatattgcagaatgggcgcaagcctgatgcatccatgccgcgtgtatgaagaaggccctagggttgtaaagtactttcagtcgggaggaaggcgttgatgctaatatcatcaacgattgacgttaccgacaaaagaagcaccggctaactccgtgccaccacccgcggtaatacggagggtgcaagcgttaatcggaattactgggcgtaaagcgcacgcaggcggttgattaagttatatgtgaaatccccgggcttaacctgggaatggcatctaagactggtcagctagagtcttgtacaggggggtagaattccatgtgtagcggtgaaatgcgtagagatgtggaggaataccggtggcgaaggcggccccctggacaaagactgacgctcaggtgcgaaagcgtggggagcaaacaggattagataccctggtagtccacgctgtaaacgatgtcgatttgaaggttgttccctagaggactggctttcggagctaacgcgttaaatcgaccgcctggggagtacggccgcaaggttaaaactcaaatgaattgacgggggcccgcacaagcggtggagcatgtggtttaattcgatgcaacgcgaagaaccttacctactcttgacatgcagagaatttaccagagatgctttggtgccttcgggaactctgaaacaggtgctgcatggctgtcgtcagctcgtgttgtgaaatgttgggttaagtcccgcaacgagcgcaacccttatcctttgttgccagcgattcggtcgggaactctaaggagactgccggtgataaaccggaggaaggtggggatgacgtcaagtcatcatggcccttacgagtagggctacacacgtgctacaatggcgtatacaaagagaagcgacctcgcgagagcaagcggaactcataaagtacgtcgtagtccggattggagtctgcaactcgactccatgaagtcggaatcgctagtaatcgtagatcagaatgctacggtgaatacgttcccgggccttgtccacaccgcccgtcacaccatgggagtgggttgcaaaagaagtaggtagcttaaccttcgggagggcggttacc

SEQ ID NO: 1200 - DNA, 1368 bp, Artificial Sequence; identical to SEQ ID NO: 1093
  Synthetic polymer

SEQ ID NO: 1201 - DNA, 1525 bp, Artificial Sequence
  Synthetic polymer
agagtttgatcctggctcagattgaacgctggcggcaggcctaacacatgcaagtcgaacggtaacaggaagaagcttgcttctttgctgacgagtggcggacgggtgagtaatgtctgggaaactgcctgatggagggggataactactggaaacggtagctaataccgcataacgtcgcaagaccaaagagggggaccttcgggcctcttgccatcggatgtgcccagatgggattagctagtaggtggggtaacggctcacctaggcgacgatccctagctggtctgagaggatgaccagccacactggaactgagacacggtccagactcctacgggaggcagcagtggggaatattgcaaaattggtgcgccaaggcctgattgcagccatgccgcgtgtatgaagaaggccttcgagtggtaaagtaccttcaagcgggaaggaaagggagtaaagttaatacctttgctcattgacgttacccgcagaagaagcaccggctaactccgtgccagcagccgcggtaataccggaagggtgcaagcgttaatcggaattactgggcgtaaagcgcacgcaggcggtttgttaagtcagatgtgaaatccccgggctcaacctgggaactgcatctgatactggcaagcttgagtctcgtagaggggggtagaattccaggtgtagcggtgaaatgcgtagagatctggaggaataccggtgacgaaggcggccccctggacgaagactgacgctcaggtgcgaaagcgtggggagcaaacaggattagataccctgatagtccacgccgtaaacgatgtcgacttggaggttgtgcccttgaggcgtggcttccggagctaacgcgttaagtcgaccgcctggggagtacggccgcaaggttaaaactcaaatgaattgacgggggcccgcacaagcggtggagcatgtgtgtttaattcgatgcaacgcgaagaacccttacctggtcttgaacatcccacagaacttcccagagatggattggtggccttcaggaactggtgaaacaggtgctgcatggctgtcgtcagctcatgatgtgaaatgttgggttaagtcccgcaacgagcccaacccttaatctttagttgccagcggtccggccgggaactcaaaggagactgcaagtgataaacctggaggaacgggtggggatagacgtactaagtcatcatggcccttacgaccagggctacacacgtgctacaatggcgcatacaaagagaagcgacctcgcgagagcaagcggacctcataaagtgcgtcgtagtccggattggagtctgcaactcgactccatgaagtcggaatcgctagtaatcgtggatcagaatgccacggtgaatacgttcccgggccttgtacacaccgcccgtcacaccatgggagtgggtcgcaaaagaagtaggtagcttaaccttcgggagggcgcttaccactttgtgattcatgactggggtgaagtcgtaacaaggtagcc

SEQ ID NO: 1202 - DNA, 1534 bp, Artificial Sequence; identical to SEQ ID NO: 47
  Synthetic polymer

SEQ ID NO: 1203 - DNA, 1465 bp, Artificial Sequence
  Synthetic polymer
attgaacgctggcggcaggcctaacacatgcaagtcgaacggtagcacagaggagcttgctccttgggtgacgagtggcggacgggtgagtaatgtctgggaaactgcccgatggagggggataactactggaaacggtagctaataccgcataacgtcgcaagaccaaagagggggaccttcgggcctcttgccatcggatgtgcccagatgggattagctagtaggtggggtaacggctcacctaggcgacgatccctagctggtctgagaggatgaccagccacactggaactgagacacggtccagactcctacgggaggcagcagtggggaatattgcacaatgggcgcaagcctgatgcagccatgccgcgtgtatgaagaaggccttcgggttgtaaagtactttcagcgaggaggaaggcgttgtggttaataaccgcaacgattgacgttactcgcagaagaagcaccggctaactccgtgccagcagccgcggtaatacggagggtgcaagcgttaatcggaattactgggcgtaaagcgcacgcaggcggtctgtcaagtcggatgtgaaatccccgggctcaacctgggaactgcatccgaaactggcaggctagagtcttgtagaggggggtagaattccaggtgtagcggtgaaatgcgtagagatctggaggaataccggtggcgaaggcggccccctggacaaagactgacgctcaggtgcgaaagcgtggggagcaaacaggattagataccctggtagtccacgccgtaaacgatgtcgacttggaggttgtgcccttgaggcgtggcttccggagctaacgcgttaagtcgaccgcctggggagtacggccgcaaggttaaaactcaaatgaattgacgggggcccgcacaagcggtggagcatgtggtttaattcgatgcaacgcgaagaaccttacctactcttgacatccacggaacttgccagagatggcttggtgccttcgggaaccgtgagacaggtgctgcatggctgtcgtcagctcgtgttgtgaaatgttgggttaagtcccgcaacgagcgcaacccttatcctctgttgccagcgattcggtcgggaactcaaaggagactgccagtgataaactggaggaaggtggggatgacgtcaagtcatcatggcccttacgagtagggctacacacgtgctacaatggcatatacaaagagaagcgacctcgcgagagcaagcggacctcataaagtatgtcgtagtccggattggagtctgcaactcgactccatgaagtcggaatcgctagtaatcgcggatcagcatgtcgcggtgaatacgttcccgggtcttgtacacaccgcccgtcacaccatgggagtgggttttaccagaagtagttagcctaaccgcaaggggggcgattaccacggtaggattcatgactggggtga

SEQ ID NO: 1204 - DNA, 1381 bp, Artificial Sequence
  Synthetic polymer
cggtaacaggggaagcttgcttcccgctgacgagcggcggacgggtgtagtaatgtatggggatctgcccgatagagggggataaccactggaaacggtggctaataccgcataatctcttaggagcaaagcaggggaacttcggtccttgcgctatcggatgaacccatatgggattagctagtaggtggggtaatggctcacctaggcgacgatccctagctggtctgagaggatgatcagccacactgggactgagacacggcccagactcctacgggaggcagcagtggggaatattgcacaatgggcgcaagcctgatgcagccatgccgcgtgtatgaagaaggccttagggttgtaaagtactttcagtcgggaggaaggcgttgatgctaatatcatcaacgattgacgttaccgacagaagaagcaccggctaactccgtgccagcagccgcggtaatacggagggtgcaagcgttaatcggaattactgggcgtaaagcgcacgcaggcggttgattaagttagatgtgaaatccccgggcttaacctgggaatggcatctaagactggtcagctagagtcttgtagaggggggtagaattccatgtgtagcggtgaaatgcgtagagatgtggaggaataccggtggcgaaggcggccccctggacaaagactgacgctcaggtgcgaaagcgtggggagcaaacaggattagataccctggtacaggattagataccctggtagtccacgctgtaaacgatgtcgatttgaaggttgttcccttgaggagtggctttcggagctaacgcgttaaatcgaccgcctggggagtacggccgcaaggttaaaactcaaatgaattgacgggggcccgcacaagcggtggagcatgtggtttaattcgatgcaacgcgaagaaccttacctactcttgacatccagagaacttagcagagatgctttggtgccttcgggaactctgagacaggtgctgcatggctgtcgtcagctcgtgttgtgaaatgttgggttaagtcccgcaacgagcgcaacccttatcctttgttgccagcgattcggtcgggaactcaaaggagactgccggtgataaaccggaggaaggtggggatgacgtcaagtcatcatggcccttacgagtagggctacacacgtgctacaatggcgtatacaaagagaagcgacctcgcgagagcaagcggaactcataaagtacgtcgtagtccggattggagtctgcaactcgactccatgaagtcggaatcgctagtaatcgtagatcagaatgctacggtgaatacgttcctcgggccttgtacacaccgcccgtcacaccatgggagtgggttgc

SEQ ID NO: 1205 - DNA, 1463 bp, Artificial Sequence; identical to SEQ ID NO: 868
  Synthetic polymer

SEQ ID NO: 1206 - DNA, 1416 bp, Artificial Sequence; identical to SEQ ID NO: 1087
  Synthetic polymer

SEQ ID NO: 1207 - DNA, 1450 bp, Artificial Sequence
  Synthetic polymer
attgaacgctggcggcaggcctaacacatgcaagtcgagcggtaacacagaggagcttgctccttgggtgacgagcggcggacgggtgagtaatgcctggggatctgcccgatagagggggataactacgagaaactgtagctaataccgcataacgtctacggaccaaagtgggggctcttcggacctcatgctatcggatgaacccaggtgggattagctagttggtgaggtaatggctcaccaaggcgacgatctctaactggtttgagagaatgaccagtcacactggaactgagacacggtccagactcctacgggaggcagcagtggggaatattgcacaatgggcgcaagcctgatgcagccatgccgcgtgtggagaaggccttcgggttgtaaagcactttcagcggggaggaagggtcactagttaatacctagtgacattgacgttactcgcagaagaagcaccggctaactccgtgccagcagccgcggtaatacggagggtgcaagcgttaatcggaattactgggcgtaaagcgcacgcaggcggtttgttaagtcagatgtgaaatccccgagctcaacttgggaactgcatttgaaactggcaagctagagtcttgtagaggggggtagaattccaggtgtagcggtgaaatgcgtagagatctaagaggaataccggtggcgaaggcggccccctggacaaagactgacgctcaggtgcgaaagcgtggggagcaaaaaggattagataccctggtagtccacgctgtaaacgatctcaatttggaggttgtgccctgagggggtggcttcgggagttaagggtttaaatcgaccgcctggggagtacggcggcaaggataaaactcaaatgatttgacgggggcccgcacaagcgttggagcatgtggtttaattcgatgcaacgcgaagacccttacttactcttgacatccagagaactttccagagatggattggtgctttcgggaattctgagacaggtgctgcatggctgtcgtcagctcgtgttgtgaaatgttgggttaagtcccgcaacgagcgcaacccttatcctttgttgccagcgattcggtcgggaactcaaaggagactgccggtgataaaccggaggaaggtggggatgacgtcaagtcatcatggcccttacgagtagggctacacacgtgctacaatggcatatacaaagggcggcaagctagcgatagtgagcgaatcccataaagtatgtcgtagtccggattggagtctgcaactcgactccatgaagtcggaatcgctagtaatcgcggatcagaatgccgcggtgaatacgttcccgggccttgtacacaccgcccgtcacaccatgggagtgggttgcaaaagaagtaggtagcttaaccttcgggagggcgcttaccactttgtgatt

SEQ ID NO: 1208 - DNA, 1511 bp, Artificial Sequence
  Synthetic polymer
ttagagtttgatcatggctcagattgaacgctggcggcaggcctaacacatgcaagtcgagcggcagcgggaaagtagcttgctacttttgccggcgagcggcggacgggtgagtaatgcctggggatctgcccagtcgagggggataactactggaaacggtagctaataccgcatacgccctacgggggaaagcaggggaccttcgggccttgcgcgattggatgaacccaggtgggattagctagttggtgaggtaatggctcaccaaggcgacgatccctagctggtctgagaggatgatcagccacactggaactgagacacggtccagactcctacgggaggcagcagtggggaatattgcacaatgggcgcaagcctgatgcagccatgccgcgtgtatgaagaaggccttcgggttgtaaagtactttcagcggggaggaggctactttagttaatacctagagatagtggacgttactcgcagaataagcaccggctaactctgtgccagcagccgcggtaatacagagggtgcgagcgttaatcggatttactgggcgtaaagcgcacgcaggcggtctgtcaagtcggatgtgaaatccccgggctcaacctgggaactgcattcgaaactggcaggctagagtcttgtagaggggggtagaattccaggtgtagcggtgaaatgcgtagagatctggaggaataccggtggcgaaagcggccccctggacaaagactgacgctcagtacgaaagcatggggagcaaacaggattagataccctggtagtgcacgccgtaaacgatgtcgacttggaggttgtgcccttgaggcgtggcttccggagctaacgcgttaagtcgaccgcctggggagtacggccccaaggttaaaactcaaatgaattgacgggggcccgcacaagcggtggagcatgtggtttaattcgatgcaacgcgaagaaccttacctactcttgacatccagagaacttagcagagatgctttggtgccttcgggaactctgagacaggtgctgcatggctgtcgtcagctcgtgttgtgaaatgttgggttaagtcccgcaacgagcgcaacccttatcctttgttgccagcggttaggccgggaactcaaaggagactgccagtgataaactggaggaaggtggggatgacgtcaagtcatcatggcccttacgagtagggctacacacgtgctacaatggcgcatacaaagagaagcgacctcgcgagagcaagcggacctcataaagtgcgtcgtagtccggattggagtctgcaactcgactccatgaagtcggaatcgctagtaatcgtagatcagaatgctacggtgaatacgttcccgggccttgtacacaccgcccgtcacaccatgggagtgggttgcaccagaagtagatagcttaaccttcgggagggcgtttaccacggtgtgattcatgactggggtgaagtcgtaacaaggtaaccgtag

SEQ ID NO: 1209 - DNA, 1400 bp, Artificial Sequence; identical to SEQ ID NO: 1134
  Synthetic polymer

SEQ ID NO: 1210 - DNA, 1526 bp, Artificial Sequence; identical to SEQ ID NO: 915
  Synthetic polymer

SEQ ID NO: 1211 - DNA, 1494 bp, Artificial Sequence
  Synthetic polymer
gctggcggcaggcctacacatgcaagtcgaccggtagcacaggagaagcttgctctcgggtgacgagcggcggacgggtgagtaatgtctgggaaactgcctgatggagggggataactactggaaacggtagctaataccgcataatgtcgcaagaccaaagtgggggaccttcgggcctcatgccatcagatgtgcccagatgggattagctagtaggtggggtaacggctcacctaggcgacgatccctagctggtctgagaggatgaccagccacactggaactgagacacggtccagactcctacgggaggcagcagtggggaatattgcacaatgggggcaagcctgatgcagccatgccgcgtgtgtgaagaaggccttcgggttgtaaagcactttcagcggggaggaaggcgataaggttaataaccttggcgattgacgttacccgcataagaagcaccggctaactccgtgcccgctgccgcgtgtaatacggaggttacaagcgttaatcggaattactgggcgtaaagcgcacgcaggcggtctgtcaagtcggatgtgaaatccccgggctcaacctgggaactgcattcgaaactggcaggctagagtcttgtagaggggggtagaattccaggtgtagcggtgaaatgcgtagagatctggaggaataccggtggcgaaggcggccccctggacaaagactgacgctcaggtgcgaaagcgtggggagcaaacaggattagataccctggtagtccacgccgtaaacgatgtcgatttggaggttgtgtgtccccttgaggcgtgggtttccggagctaaccgcggtaaaatcgaccgcctgggggagtacgccccgcaaggttaaacttccaatgaatttgacgggggccccgcccaaagcggtggagcatgtggtttaattcgatgcaaacgcgaagaacccttacctgggtcctgacatcccacagaactttcccagagatgggattggtgccttcggggaactgtgagacaggtgctgcatggctgtcgtccagctccgtgttgtgaaaatgttggggtaagtccccgcaacgagcgcaacccttatcctttgttgccagcggttgggccgggaactcaaaggagactgccagtgataaactggaggaaggtggggatgacgtcaagtcatcatggcccttacgaccagggctacacacgtgctacaatggcatatacaaagagaagcgacctcgcgagagcaagcggacctcataaagtatgtcgtagtccggattggagtctgcaactcgactccatgaagtcggaatcgctagtaatcgtagatcagaatgctacggtgaatacgttcccgggccttgtacacaccgcccgtcacaccatgggagtgggttgcaaaagaagtaggtagcttaaccttcgggagggcgcttaccactttgtgattcatgactggggtgaagtcgtaacaagg

SEQ ID NO: 1212 - DNA, 1498 bp, Artificial Sequence; identical to SEQ ID NO: 8
  Synthetic polymer

SEQ ID NO: 1213 - DNA, 1395 bp, Artificial Sequence
  Synthetic polymer
  misc_feature (12)..(12): n is a, c, g, or t
  misc_feature (611)..(612): n is a, c, g, or t
  misc_feature (799)..(800): n is a, c, g, or t
  misc_feature (967)..(967): n is a, c, g, or t
  misc_feature (1017)..(1017): n is a, c, g, or t
agagtttgatcntggctcagattgaacgctggcggcaggcctaacacatgcaagtcgaacggtagcacagagagcttgctctcgggcgacgagtggcggacgggtgagtaatgtctgggaaactgcctgatggagggggataactactggaaacggtagctaataccgcataacgtcgcaagaccaaagagggggaccttcgggcctcttgccatcagatgtgcccagatgggattagctagtaggtggggtaatggctcacctaggcgacgatccctagctggtctgagaggatgaccagccacactggaactgagacacggtccagactcctacgggaggcagcagtggggaatattgcacaatgggcgcaagcctgatgcagccatgccgcgtgtatgaagaaggccttcgggttgtaaagtactttcagcggggaggaaggtgttgtggttaataaccacagcaattgacgttacccgcagaagaagcaccggctaactccgtgccagcagccgcggtaatacggagggtgcaagcgttaatcggaattactgggcgtaaagcgcacgcaggcggtctgtcaagtcggatatgaaatccccgggctnnacctgggaactgcattcgaaactggcaggctagagtcttgtagaggggggtagaattccaggtgtagcggtgaaatgcgtagagatctggaggaataccggtggcgaagcggcccctggacaaagactgacgctcaggtgcgaaagcgtggggagcaaacaggattagataccctggtagtccacgnntaaacgatgtcgacttggaggttgttcccttgaggagtggcttccgggagctaacgcgttaagtcgaccgcctggggagtacggccgcaaggttaaaactcaaatgaattgacgggggcccgcacaagcggtggagcatgtggtttaattcgatgcaacgcgaaganccttacctactcttaacatccagaggacttagcagagatgctttggtgcnttcgggaactctgagacaggtgctgcatggctgtcgtcagctcgtgttgtgaaatgttgggttaagtcccgcaacgagcgcaacccttatcctttgttgccagcggttaggccgggaactcaaaggagactgccagtgataaactggaggaaggtggggatgacgtcaagtcatcatggcccttacgagtagggctacacacgtgctacaatggcgcatacaaagagaagcgacctcgcgagagcaagcggacctcataaagtgcgtcgtagtccggattggagtctgcaactcgactccatgaagtcggaatcgctagtaatcgtagatcagaatgctacggtgaatacgttcccgggccttgtacacaccgcccgt

SEQ ID NO: 1214 - DNA, 1482 bp, Artificial Sequence
  Synthetic polymer
tgaacgctggcggcaggcctaacacatgcaagtcgaacggtagcacagaggagcttgctcctcgggtgacgagtggcggacgggtgagtaatgtctggggatctgcccggtagagggggataaccactggaaacggtggctaataccgcataatctcgcaagagcaaagtgggggaccttcgggcctcacactaccggatgaacccagatgggattagccagctggtgaggtaacggctcaccagggcgacgatccctagctggtctgagaggatgaccagccacactggaactgagacacggtccagactcctacgggaggcagcagtggggaatattgcacaatgggcgcaagcctgatgcagccatgccgcgtgtatgaagaaggccttcgggttgtaaagtactttcagcggggaggaagggtgaagagcgaataacttttcacattgacgttacccgcagaagaagcaccggctaactccgtgccagcagccgcggtaatacggagggtgcaagcgttaatcggaattactgggcgtaaagcgcacgcaggcggtctgttaagtcagatgtgaaatccccgggctcaacccgggaactgcatttgaaactggcaggcttgagtctcgtagaggggggtggaattccaggtgtagcggtgaaatgcgtagagatctggaggaataccggtggcgaaggcggccccctggacgaagactgacgctcaggtgcgaaagcgtgggggagcaaacaggattagataccctggtagtccacgccgtaaacgatgtcgatttggaggctgtgagcttgactcgtggcttccgtagctaacgcgttaaatcgaccgcctggggagtacggccgcaaggttaaaactcaaatgaattgacgggggcccgcacaagcggtggagcatgtggtttaattcgatgcaacgcgaagaaccttacctggtcttgacatccacggaatcgggcagagatgcctgagtgccttcgggagccgtgagacaggtgctgcatggctgtcgtcagctcgtgttgtgaaatgttgggttaagtcccgcaacgagcgcaacccttatcctttgttgccagcgattcggtcgggaactcaaaggagactgccggtgataaaccggaggaaggtggggatgacgtcaagtcatcatggcccttacgaccagggctacacacgtgctacaatggcgcatacaaagagaagcgacctcgcgagagcaagcggacctcataaagtgcgtcgtagtccggatcggagtctgcaacccgactccgtgaagtcggaatcgctagtaatcgtggatcagaatgccacggtgaatacgttcccgggccttgtacacaccgcccgtcacaccatgggagtgggttgcaaaagaagtaggtagcttaacttcgggagggcgcttaccactttgtgattcatgactggggtgaagtcgtaacaaggaagccg

SEQ ID NO: 1215 - DNA, 1454 bp, Artificial Sequence
  Synthetic polymer
ctggctcagattgaacgctggcggcaggcctaacacatgcaagtcgaacggtaacaggaagcagcttgctgctttgctgacgagtggcggacgggtgagtaatgtctgggaaactgcctgatggagggggataactactggaaacggtagctaataccgcataacgtcgcaagaccaaagtgggggaccttcgggcctcatgccatcagatgtgcccagatgggattagctagtaggtggggtaacggctcacctaggcgacgatccctagctggtctgagaggatgaccagccacactggaactgagacacggtccagactcctacgggaggcagcagtggggaatattgcacaatgggcgcaagcctgatgcagccatgccgcgtgtatgaagaaggccttcgggttgtaaagtactttcagcgaggaggaaggggttaaggttaataaccttggccattgacgttactcgcagaagaagcaccggctaactccgtgccagcagccgcggtaatacggagggtgcaagcgttaatcggaattactgggcgtaaagcgcacgcaggcggtctgtcaagtcggatgtgaaatccccgggctcaacctgggaactgcatccgaaactggcaggcttgagtctcgtagaggggggtagaattccaggtgtagcggtgaaatgcgtagagatctggaggaatcaccggtggcgaaggcggccccctggacgaagactgacgctcaggtgcgaaagcgtggggagcacaacaggattagataccctggtagtccacgccgtaaacgatgtcgacttggaggttgtgcccttgaggcgtggcttccggagctaacgcgttaagtcgaccgcctggggagtacggccgcaaggttaaaactcaaatgaattgacgggggcccgcacaagcggtggagcatgtggtttaattcgatgcaacgcgaagaaccttacctggtcttgacatccagagaatcctgcagagatgcgggagtgccttcgggaactctgagacaggtgctgcatggctgtcgtcagctcgtgttgtgaaatgttgggttaagtcccccaacgagcgcaacccttatcctttgttgccagcacatcatggtgggaactcaaaggagactgccggtgataaaccggaggaaggtggggatgacgtcaagtcatcatggcccttacgaccagggctacacacgtgctacaatggcgcatacaaagagaagcgacctcgcgagagcaagcggacctcataaagtgcgtcgtagtccggattggagtctgcaactcgactccatgaagtcggaatcgctagtaatcgtggatcagaatgccacggtgaatccgttcccggtccttgtcccccccccccgtccccccctgggagtgggttgcaaaagaagtaggtagcttaaccttcgggagggcgcttaccac

SEQ ID NO: 1216 - DNA, 1363 bp, Artificial Sequence
  Synthetic polymer
tcccaagaccaaagagggggaccttcgggcctcttgccatcagatgtgcccagatgggattagctagtaggtggggtaacggctcacctaggcgacgatccctagctggtctgagaggatgaccagccacactggaactgagacacggtccagactcctacgggaggcagcagtggggaatattgcacaatgggcgcaagcctgatgcagccatgccgcgtgtatgaagaaggccttcgggttgtaaagtactttcagcggggaggaaggtgttgtggttaataaccgcagcaattgacgttacccgcagaagaagcaccggctaactccgtgccagcagccgcggtaatacggagggtgcaagcgttaatcggaattactgggcgtaaaacgcacgcaggcggtctgtcaagtcggatgtgaaatccccgggctcaacctgggaactgcattcgaaactggcaggctagagtcttgtagaaggggggtagaattccaggtgtagcggtgaaatgcgtagagatctggaggaataccggtggcgaaggcggccccctggacaaggactgacgctcaggtgcgaaagcgtggggagcaaacaggattagataccctggtagtccacgccgtaaacgatgtcgacttggaggttgtgcccttgaggcttgctttccggagctaacgcgttaaagtcgaccgcctggggagtacggccgcaaggtttaaaacttcaaatgaattgacgggggcccggcacaagcggtggagcatgtggtttaattcgatgcaacgcgaagaaccttacctactcttgacatccagagaagtttgcagagatgcgaatgtgccttcgggaactctgagacaggtgctgcatggctgtcgtcagctcgtgttgtgaaatgttgggttaagtcccgcaacgagcgcaacccttatcctttgttgccagcggttaggccgggaactcaaaggagactgccagtgataaactggaggaaggtggggatgacgtcaagtcatcatggcccttacgagtagggctacacacgtgctacaatggcgcatacaaagagaagcgacctcgcgagagcaagcggacctcataaagtgcgtcgtagtccggattggagtctgcaactcgactccatgaagtcggaatcgctagtaatcgtagatcagaatgctacggtgaatacgttcccgggccttgtacacaccgcccgtcacaccatgggaagtgggttgcaaaagaagtaggtagcttaaccttcgggagggcgcttaccactttgtgattcatgactggggtgaagtcgtaacaaggtaaccgtaggggaacctgcggttggatcacctcctt

SEQ ID NO: 1217 - DNA, 1363 bp, Artificial Sequence
  Synthetic polymer
attgaacgctggcggcaggcctaacacatgcaagtcgaacggcagcacagaagagcttgctctttgggtggcgagtggcggacgggagagtaatgtctgggaaactgcccgatggagggggataactactggaaacggtagctaataccgcataacgtcgcaagaccaaagtgggggaccttcgggcctcacaccaccggatgtgcccagatgggattagctagtaggtggggtaacggctcacctaggcgacgatccctagctggtctgagaggatgaccagccacactggaactgagacacggtccatactcctacgggaggcagcagaggggaatattgcacaatgggcgcaagcctgatgcagccatgccgcgtgtatgaagaacgccttcgggttgtaaagtactttcagcggggaggaaggcaatgcggttaataaccgcgtccattgacgttacccgcagaagaagcaccggctaactccgtgccagcagccgcggtaatacggagggtgcaagcgttaatcggaattactgggcgtaaagcgcacgcaggcggtctgtcaagtcggatgtgaaatccccgggcttaacctgggaactgcattcgaaactggcaggctagagtcttgtagaggggggtagaattccaggtgtagcggtgaaatgcgtagagatctggaggaataccggtggcgaaggcggccccctggacaaagactgacgctcaggtgcgaaagcgtggggagcaaacaggattagataccctggtagtccacgccgtaaacgatgtcgacttggaggctgtttccttgagaagtggcttccggagctaacgcgttaagtcgaccgcctggggagtacggccgcaaggttaaaactcaaatgaattgacgggggcccgcacaagcggtggagcatgtggtttaattcgatgcaacgcgaagaaccttacctactcttgacatccagagaacttggcagagatgccttggtgccttcgggaactctgagacaggtgctgcatggctgtcgtcagctcgtgttgtgaaatgttgggttaagtcccgcaacgagcgcaacccttatcctttgttgccagcgattcggtcgggaactcaaaggagactgccggtgataaaccggaggaaggtggggatgacgtcaagtcatcatggcccttacgagtagggctacacacgtgctacaatggcgcatacaaagagaagcgacctcgcgagagcaagcggacctcataaagtgcgtcgtagtccggatcggagtctgcaactcgactccgtgaagtcggaatcgctagtaatcgtggatcagaatgccacggtgaatacgttcccgggcct

SEQ ID NO: 1218 - DNA, 1365 bp, Artificial Sequence; identical to SEQ ID NO: 827
  Synthetic polymer

SEQ ID NO: 1219 - DNA, 1446 bp, Artificial Sequence
  Synthetic polymer
  misc_feature (708)..(708): n is a, c, g, or t
  misc_feature (719)..(719): n is a, c, g, or t
  misc_feature (727)..(727): n is a, c, g, or t
  misc_feature (733)..(737): n is a, c, g, or t
ctaacacatgcaagtcgaacggtaacaggaaacagcttgctgtttcgctgacgagtggcggacgggtgagtaatgtctgggaaactgcctgatggagggggataactactggaaacggtagctattaccgcataacgtcgcaagaccaaagagggggaccttcgggcctcttgccatcagatgtgcccagatgggattagctagtaggtggggtaacggctcacctaggcgacgatccctagctggtctgagaggatgaccagccacactggaactgagacacggtccagactcctacgggaggcagcagtggggaatattgcacaatgggcgcaagcctgatgcagccatgccgcgtgtatgaagaaggccttcgggttgtaaatacctttcagcggggaggaagggagtaaagttaatacctttgctcattgacgttacccgcagaagaagcaccggctaactccgtgccagcagccgcggtaatacggagggtgcaagcgttaatcggaattactgggcgtaaagcgcacgcaggcggtttgttaagtcagatgtgaaatcccgggctcaacctgggaactgcatctgatactggcaagcttgagtctcgtagaggggggtagaattccaggtgtagcggtgaaatgcgtagagatctggaggaataccggtggcgaaggcggccccctggacgaagactgacgntcagtgcgaangcgtgggnagcaannnnntagatacctggtagtcacgcgtaaacgatgtcgactggaggttgtgcccttgaggcgtggcttccggagctaacgcgttaagtcgaccgcctggggagtacggccgcaaggttaaaactcaaatgaattgacgggggcccgcacaagcggtggagcatgtggtttaattcgatgcaacgcgaagaaccttacctggtcttgacatccacgggaagttttcagagatgagaatgtgccttcgggaaccgtgagacaggtgctgcatggctgtcgtcagctcgtgttgtgaaatgttgggttaagtcccgcaacgagcgcaacccttatcctttgttgccagcggtccggccgggaactcaaaggagactgccagtgataaactggaggaaggtggggatgacgtcaagtcatcatggcccttacgaccagggctacacacgtgctacaatggcgcatacaaagagaagcgacctcgcgagagcaagcggacctcataaagtgcgtcgtagtccggattggagtctgcaactcgactccatgaagtcggaatcgctagtaatcgtggatcagaatgccacggtgaatacgttcccgggccttgtacacaccgcccgtcacaccatgggagtgggttgcaaaagaagtaggtagcttaaccttcgggagacgcttacctctttgtgattcatgactggagttagtcgtaaca

SEQ ID NO: 1220 - DNA, 1495 bp, Artificial Sequence
  Synthetic polymer
  misc_feature (1460)..(1460): n is a, c, g, or t
  misc_feature (1487)..(1487): n is a, c, g, or t
tgaacgctggcggcaggcctaacacatgcaagtcgagcggcagcgggaggaagcttgcttcctcgccggcgagcggcggacgggtgagtaatgtctgggaaactgcccgatggagggggataactactggaaacggtagctaataccgcataacgtctacggaccaaagtgggggaccttagggcctcacaccatcggatgtgcccagatgggattagctagtaggtggggtaatggctcacctaggcgacgatccctagctggtctgagaggatgaccagccacactggaactgagacacggtccagactcctacgggaggcagcagtggggaatattgcacaatgggcgcaagcctgatgcagccatgccgcgtgtgtgaagaaggccttcgggttgtaaagcactttcagcgaggaggaaggcgttgtagttaataactgcagcgattgacgttactcgcagaagaagcaccggctaactccgtgccagcagccgcggtaatacggagggtgcaagcgttaatcggaattactgggcgtaaagcgcacgcaggcggtctgttaagtcagatgtgaaatccccgggcttaacctgggaactgcatttgaaactggcaggctagagtctcgtagaggggggtagaattccaggtgtagcggtgaaatgcgtagagatctggaggaataccggtggcgaaggcggccccctggacgaagactgacgctcaggtgcgaaagcgtggggagcaaacaggattagataccctggtagtccacgctgtaaacgatgtcgatttggaggttgtggccttgagccgtggcttccggagctaacgcgttaaatcgaccgcctggggagtacggccgcaaggttaaaactcaaatgaattgacgggggcccgcacaagcggtggagcatgtggtttaattcgatgcaacgcgaagaaccttacctactcttgacatccagagaactttccagagatgcattggtgccttcgggaactctgagacaggtgctgcatggctgtcgtcagctcgtgttgtgaaatgttgggttaagtcccgcaacgagcgcaacccttatcctttgttgccagcggttcggccgggaactcaaaggagactgccagtgataaactggaggaaggtggcgatgacgtcaagtcatcatggcccttacgagtagggctacacacgtgctacaatggcatatacaaagagaagcgatctcgcgagagcaagcggacctcataaagtatgtcgtagtccggattggagtctgcaactcgactccatgaagtcggaatcgctagtaatcgtagatcagaatgctacggtgaatacgttcccgggccttgtacacaccgcccgtcacaccatgggagtgggttgcaaaagaagtaggtagcttaaccttcgggagggcgcttaccactttgtgattcatgattgggntgaagtcgtaacaaggtaaccgtaggngaacctgc

SEQ ID NO: 1221 - DNA, 1414 bp, Artificial Sequence
  Synthetic polymer
tgaacgctggcggcaggcctaacacatgcaagtcgggcggtaacagggagaagcttgcttctctgctgacgagcggcggacgggtgagtaatgtatggggatctgcctgatggagggggataactactggaaacggtagctaataccgcatgatgtcttcggaccaaagcgggggaccttcgggcctcgcgccatcagatgaacccatatgggattagctagtaggtgaggtaatggctcacctaggcgacgatctctagctggtctgagaggatgatcagccacactgggactgagacacggcccagactcctacgggaggcagcagtggggaatattgcacaatgggcgcaagctggatgcagccatgccgcgtgtatgaagaaggccttagggttgtaaagtactttcagtcgggaggaaggtgttgagtttaatatgctcagcaattgacgttaccgacagaagaagcaccggctaactccgtgccagcagccgcggtaatacggagggtgcaagcgttaatcggaattactgggcgtaaagcgcacgcaggcggttgattaagtcagatgtgaaatccccgggctcaacccgggaattgcatctgagactggtcggctagagtcttgtagaggggggtagaattccatgtgtagcggtgaaatgcgtagagatgtggaggaataccggtggcgaaggcggccccctggacaaagactgacgctcaggtgcgaaagcgtggggagcaaacaggattagataccctggtagtccacgctgtaaacgatgtcgacttggaggttgtgcccttgaggcgtggcttccggagctaacgcgttaagtcgaccgcctggggagtacggccgcaaggttaaaactcaaatgaattgacgggggcccgcacaagcggtggagcatgtggtttaattcgatgcaacgcgaagaaccttacctactcttgacatccagagaacttagcagagatgctttggtgccttcgggaactctgagacaggtgctgcatggctgtcgtcagctcgtgttgtgaaatgttgggttaagtcccgcaacgagcgcaacccttatcctttgttgccagcacgtwatggcgggaactcaaaggagactgccggtgataaactggaggaaggtggggatgacgtcaagtcatcatggcccttacgagtagggctacacacgtgctacaatggcgcgatacaaagagaagcgacctcgcgagagcaagcggaactcataaagtctgtcgtagtccggattggagtctgcaactcgactccatgaagtcggaatcgctagtaatcgtagatcagaatgctacggtgaatacgttcccgggccttgtacacaccgcccgtcacaccatgggagtgggttgcaaaagaagtaggta

SEQ ID NO: 1222 - DNA, 1473 bp, Artificial Sequence
  Synthetic polymer
ctggctcagattgaacgctggcggcaggcctaacacatgcaagtcgagcggtagcacaggagagcttgctctctgggtgacgagcggcggacgggtgagtaatgtctgggaaactgcctgatggagggggataactactggaaacggtagctaataccgcataacctcgcaagagcaaagagggggaccttcgggcctctcgccatcagatgtgcccagatgggattagctagtaggtgaggtaatggctcacctaggcgacgatccctagctggtctgagaggatgaccagccacactggaactgagacacggtccagactcctacgggaggcagcagtggggaatattgcacaatgggcgcaagcctgatgcagccatgccgcgtgtgtgaagaaggccttcgggttgtaaagcactttcagcgaggaggaaggcagtcgtgttaatagcacggttgattgacgttactcgcagaagaagcaccggctaactccgtgccagcagccgcggtaatacggagggtgcaagcgttaatcggaatgactgggcgtaaagcgcacgcaggcggtctgttaagttggatgtgaaatccccgggcttaacctgggaactgcattcaaaactgacaggctagagtcttgtagaggggggtagaattccaggtgtagcggtgaaatgcgtagagatctggaggaataccggtggcgaaggcggccccctggacaaagactgacgctcaggtgcgaaagcgtggggagcaaacaggattagataccctggtagtccacgctgtaaacgatgtcgatttggaggttgtgcccttgaggcgtggcttccggagctaacgcgttaaatcgaccgcctggggagtacggccgcaaggttaaaactcaaatgaattgacgggggcccgcacaagcggtggagcatgtggtttaattcgatgcaacgcgaagaaccttacctactcttgacatccagagaattagctagagatagctgagtgccttcgggaactctgagacaggtgctgcatggctgtcgtcagctcgtgttgtgaaatgttgggttaagtcccgcaacgagcgcaacccttatcctttgttgccagcgattcggtcgggaactcaaaggagactgccggtgataaaccggaggaaggtggggatgacgtcaagtcatcatggcccttacgagtagggctacacacgtgctacaatggcgtatacaaagagaagcgacctcgcgagagcaagcggacctcataaagtacgtcgtagtccggattggagtctgcaactcgactccatgaagtcggaatcgctagtaatcgtagatcagaatgctacggtgaatacgttccgggggcttgtacacaacggcccgtcacaccatgggagtcggggtgcaaagaagtcagtagtttatcttcgggagggcgctttaccactttgtgatttcatgactgggg

SEQ ID NO: 1223 - DNA, 1540 bp, Artificial Sequence
  Synthetic polymer
gagagtttgatcctggctcagaacgaacgctggcggcgtgcttaacacatgcaagtcgaacgcgaacgggacttcggttcctagtagagtggcgcacgggtgagtaacgcgtagataacctgtcttcatatccggaataacacgccgaaaggggtactaataccggatattcttgcatttcacaggtaaggcaaggaaaggtggcctctgattcaagctactgtatgaagaggggtctgcgtaccattagctagtaggtggggtaacggctcacctaggcgacgatccctagctggtctgagaggatgaccagccacactggaactgagacacggtccagactcctacgggaggcagcagtggggaatattgcacaatgggcgcaagcctgatgcagccatgccgcgtgtatgaagaaggccttcgggttgtaaagtactttcagcggggaggaaggtgttgaggttaataacctcagcaattgacgttacccgcagaagaagcaccggctaactccgtgccagcagccgcggtaatacggagggtgcaagcgttaatcggaattactgggcgtaaagcgcacgcaggcggtctgtcaagtcggatgtgaaatccccgggctcaacctgggaactgcattcgaaactggcaggctagagtcttgtagaggggggtagaattccaggtgtagcggtgaaatgcgtagggatctggaggaataccggtggcgaaggcggccccctggacaaagactgacgctcaggtgcgaaagcgtggggagcaaacaggattagataccctggtagtccacgccgtaaacgatgtcgacttggaggttgttcccttgaggagtggcttccggagctaacgcgttaagtcgaccgcctggggagtacggccgcaaggttaaaactcaaatgaattgacgggggcccgcacaagcggtggagcatgtggtttaattcgatgcaacgcgaagaaccttacctactcttgacatccagagaactttccagagatggattggtgccttcgggaactctgagacaggtgctgcatggctgtcgtcagctcgtgttgtgaaatgttgggttaagtcccacaacgagcgcaacccttatcctttgttgccagcggtccggccgggaactcaaaggagactgccagtgataaactggaggaaggtggggatgacgtcaagtcatcatggcccttacgagtagggctacacacgtgctacaatggcgcatacaaagagaagcgacctcgcgagagcaagcggacctcataaagtgcgtcgtagtccggattggagtctgcaactcgactccatgaagtcggaatcgctagtaatcgtagatcagaatgctacggtgaatacgttcccgggccttgtacacaccgcccgtcacaccatgggagtgggttgcaaaggaagtaggtagcttaaccttcgggagggcgcttaccactttgtgattcatgactggggtgaagtcgtaacaaggtaaccgtaggggaacctgcggctggatcacct

SEQ ID NO: 1224 - DNA, 1415 bp, Artificial Sequence
  Synthetic polymer
acacatgcaagtcggacggtagcacagagagcttgctcttgggtgacacgtgggggacgggggagtaatgtctggggatctgccccatatagggggagatcccctgggaacggtgggtaataccccatatcgtctcacgagcaaaaagggggaccttctggcctctctctatctgatgaacccccatggggttagctattatgcggggtaatgggccccctatgcgacaatacctatctggtctgagaggatgaccagccacactggaactgagacacggtccacactcctacaggaggcggcactggggaatattgcgcaatgggcgcaagcctgatgcacccatgccccgtgtgtgaaaaaagccttctggttgtaaagtactttctccggggaggaaagcggtgcggttaataaccccgccgattgacatttcccccagaaaagcaccggctaactccgtgccagcagccgcggtaatacggagggtgcaagcgttaatcggaaattactgggcgtaaagcgcacgcaggcggtctgttaagtcagatgtgaaatccccgggcttaacctgggaactgcatttgaaactggcaggcttgagtcttgtagaggggggtagaattccaggtgtagcggtgaaatgcgtagagatctggaggaataccggtggcgaaggcggccccctggacaaagactgacgctcaggtgcgaaagcgtggggagcaaacaggattagataccctggtagtccacgccgtaaacgatgtcgacttggaggttgtgcccttgaggagtggcttccggagctaacgcgttaagtcgaccgcctggggagtacggccgcaaggttaaaactcaaatgaattgacgggggcccgcacaagcggtggagcatgtggtttaattcgatgcaacgcgaagaaccttacctactcttgacatccacggaatttggcagagatgccttagtgccttcgggaaccgtgagacaggtgctgcatggctgtcgtcagctcgtgttgtgaaatgttgggttaagtcccgcaacgagcgcaacccttatcctttgttgccagcgattcggtcgggaactcaaaggagactgccggtgataaaccggaggaaggtggggatgacgtcaagtcatcatggcccttacgagtagggctacacacgtgctacaatggcgcatacaaagagaagcgacctcgcgagagcaagcggacctcacaaagtgcgtcgtagtccggatcggagtctgcaactcgactccgtgaagtcggaatcgctagtaatcgtggatcagaatgccacggtgaatacgttcccgggccttgtacacaccgcccgtcacaccatgggagtgggttgcaaaagaagtaggtagcttaaccttcgggagggcgctacct

SEQ ID NO: 1225 - DNA, 1413 bp, Artificial Sequence
  Synthetic polymer
gaacgctggcggcaggcctaacacatgcaagtcgggcggtaacagggagaagcttgcttctctgccgacgagcggcggacgggtgagtaatgtatggggatctgcctgatggcgggggataactactggaaacggtagctaataccgcataatgtcttcggaccaaagcgggggacctcagggcctcgcgccatcagatgaacccatatgggattagctagtaggtaaggtaacggcttacctaggcgacgatccctagctggtctgagaggatgatcagccacactgggactgagacacggcccagactcctacgggaggcagcagtggggaatattgcacaatgggcgcaagcctgatgcagccatgccgcgtgtatgaagaaggccttcgggttgtaaagtactttcagtcgggaggaaggtgtcaaggttaataaccttggcaattgacgttaccgacagaagaagcaccggctaactccgtgccagcagccgcggtaatacggagggtgcaagcgttaatcggaattactgggcgtaaagcgcacgcaggcggttgattgagtcagatgtgaaatccccgggcttaacccgggaattgcatctgatactggtcagctagagtcttgtagaggggggtagaattccatgtgtagcggtgaaatgcgtagagatgtggaggaataccggtggcgaaggcggccccctggacaaagactgacgctcaggtgcgaaagcgtgggggagcaaacaggattagataccctggtagtccacgctgtaaacgatgtcgacttggaggttgtgcccttgaggcgtggcttccggagctaacgcgttaagtcgaccgcctggggagtacggccgcaaggttaaaagtcaaatgaattgacgggggcccgcacaagcggtggagcatgtggtttaattagatgcaacgcgaagaaccttacctactcttgacatccagagaacttagcagagatgctttggtgccttcgggaactctgagacaggtgctgcatggctgtcgtcaggtcgtgttgtgaaatgtagggttaagtcccgcaacgagcgcaacccttatcctttgtggccagcgcgtgatggcgggaactcaaaggagactgccggtgataaaccggaggaaggtggggatgacctcaagtcatcatggcccgtacgagtagggctacacacgtgctacaatggcgtatacaaagggaagcgtccccgcgagggcaagcggaactcataaagtacgtcgtagtccggattggagtttgcaactcgactccatgaagtcggaatcgctagtaattgttgatcagaatgttacggcgaatacgttcccgggccttgtacacaccgcccgtcactccatgggagtgggttgcaaaagaagtagtta

SEQ ID NO: 1226 - DNA, 1436 bp, Artificial Sequence; identical to SEQ ID NO: 54
  Synthetic polymer
  misc_feature (193)..(193): n is a, c, g, or t
  misc_feature (443)..(443): n is a, c, g, or t
  misc_feature (1337)..(1337): n is a, c, g, or t

SEQ ID NO: 1227 - DNA, 1413 bp, Artificial Sequence
  Synthetic polymer
  misc_feature (6)..(6): n is a, c, g, or t
  misc_feature (19)..(19): n is a, c, g, or t
  misc_feature (308)..(308): n is a, c, g, or t
  misc_feature (324)..(324): n is a, c, g, or t
catgcnagtcgaacggtancacagagagcttgctctcgggtgacgagtggcggacgggtgagtaatgtctgggaaactgcccgatggagggggataactactggaaacggtagctaataccgcataacgtcttcggaccaaagtgggggaccttcgggcctcacaccattggatgtgcccagatgggattagctagtaggtggggtaatggctcacctaggcgacgatccctagctggtctgagaggatgaccagccacactggaactgagacacggtccagactcctacgggaggcagcagtggggnatattgcacaatgggngcaagcctgatgcagccatgccgcgtgtatgaagaaggccttcgggttgtaaagtactttcagcggggaggaaggcggtggagttaatagcttcatcgattgacgttacccgcagaagaagcaccggctaactccgtgccagcagccgcggtaatacggagggtgcaagcgttaatcggaattactgggcgtaaagcgcacgcaggcggtctgtcaagtcggatgtgaaatccccgggcttaacctgggaactgcattcgaaactggcaggctagagtcttgtagaggggggtagaattccaggtgtagcggtgaaatgcgtagagatctggaggaataccggtggcgaaggcggccccctggacaaagactgacgctcaggtgcgaaagcgtgggagcaaacaggattagataccctggtagtccacgccgtaaacgatgtcgacttggaggttgtgcccttgaggcgtggcttccggagctaacgcgttaagtcgaccgcctggggagtacggccgcaaggttaaaactcaaatgaattgacgggggcccgcacaagcggtggagcatgtggtttaattggatgcaacgcgaagaaccttacctactcttgacatccagcgaattcggtagagataccttagtgccttcgggaacgctgagacaggtgctgcatggctgtcgtcagctcgtgttgtgaaatgttgggttaagtcccgcaacgagcgcaacccttatcctttgttgccagcggtccggccgggaactcaaaggagactgccagtgataaactggaggaaggtggggatgacgtcaagtcatcatggcccttacgagtagggctacacacgtgctacaatggcgcatacaaagagaagcgacctcgcgagagcaagcggacctcataaagtgcgtcgtagtccggattggagtctgcaactcgactccatgaagtcggaatcgctagtaatcgtagatcagaatgctacggtgaatacgttcccgggccttgtacacaccgcccgtcacaccatgggagtgggttgcaaaagaagtaggtagcttaaccttcgggagggcgcttaccac

SEQ ID NO: 1228 - DNA, 1485 bp, Artificial Sequence
  Synthetic polymer
acgctggcggcaggcctaacacatgcaagtcgagcggcagcggaaagtagcttgctactttgccggcgagcggcggacgggtgagtaatgtctgggaaactgcctgatggagggggataactactggaaacggtggctaataccgcgtaacgtcgcaagaccaaagagggggaccttcgggcctctcgccatcagatgtgcccagatgggattagctagtaggtggggtaatggctcacctaggcgacgatccctagctggtctgagaggatgaccagccacactgggactgagacacggcccagactcctacgggaggcagcagtggggaatattgcacaatgggggaaaccctgatgcagccatgccgcgtgtgtgaagaaggccttagggttgtaaagcactttcagcggggaggaagggtaggtacttaatacgtgcttacattgacgttacccgcagaagaagcaccggctaactccgtgccagcagccgcggtaatacggagggtgcaagcgttaatcggaattactgggcgtaaagcgcacgcaggcggtttgttaagttagatgtgaaatccccgggcttaacctgggaactgcatttaaaactggcaagctagagtcttgtagaggggggtagaattccatgtgtagcggtgaaatgcgtagagatgtggaagaataccggtggcgaaggcggccccctggacaaagactgacgctcaggtgcgaaagcgtggggagcaaacaggattagataccctggtagtccacgctgtaaacgatgtcgacttggaggttgttcccttgaggagtggcttccggagctaacgcgttaagtcgaccgcctggggagtacggccgcaaggttaaaactcaaatgaattgacgggggcccgcacaagcggtggagcatgtggtttaattcgatgcaacgcgaagaaccttacctactcttgacatccagagaacttagcagagatgctttggtgccttcgggaactctgagacaggtgctgcatggctgtcgtcagctcgtgttgtgaaatgttgggttaagtcccgcaacgagcgcaacccttatcctttgttgccagcaagtcatgttgggaactcaaaggagactgccggtgataaaccggaggaaggtggggatgacgtcaagtcatcatggcccttacgagtagggctacacacgtgctacaatggcgtatacaaagagaagctaactcgcgagagcatgcggacctcataaagtacgtcgtagtccggatcggagtctgcaactcgactccgtgaagtcggaatcgctagtaatcgtggatcagaatgccacggtgaatacgttcccgggccttgtacacaccgcccgtcacaccatgggagtgggttgcaaaagaagtaggtagcttaaccttcgggagggcgcttaccactttgtgattcatgactggggtgaagtcgtaacaaggtaaccgtaggg

SEQ ID NO: 1229 - DNA, 1552 bp, Artificial Sequence
  Synthetic polymer
tagagtttgatcmtggctcagattgaacgctggcggcaggcctaacacatgcaagtcgaacggtaacaggaagmagcttgctkcttygctgacgagtggcggacgggtgagtaatgtctgggaaactgcctgatggagggggataactactggaaacggtagctaataccgcataacgtcgcaagaccaaagagggggaccttcgggcctcttgccatcggatgtgcccagatgggattagctagtaggtggggtaacggctcacctaggcgacgatccctagctggtctgagaggatgaccagccacactggaactgagacacggtccagactcctacgggaggcagcagtggggaatattgcacaatgggcgcaagcctgatgcagccatgccgcgtgtatgaagaaggccttcgggttgtaaagtactttcagcggggaggaagggagtaaagttaatacctttgctcattgaccgttacccgcagaagaagcacctggctaactccgttgccagcagccgcggtaatacggagggtgcaagcgttaatcggaattactgggcgtaaagcgcacgcaggcggtttgttaagtcagatgtgaaatccccgggctcaacctgggaactgcatctgatactggcaagcttgagtctcgtagaggggggtagaattccaggtgtagcggtgaaatgcgtagagatctggaggaataccggtggcgaaggcggccccctggacgaagactgacgctcaggtgcgaaagcgtggggagcaaacaggattagataccctggtagtccacgccgtaaacgatgtcgacttggaggttgtgcccttgaggcgtggcttccggagctaacgcgttaagtcgaccgcctggggagtacggccgcaaggttaaaactcaaawggaatttgrcggggggcccscmccaaggcggkgggagcaatktggtttaattcgatggcaacscggaagaaccttacctggkccttgacatccacaagaactttccagagatggattggtgsctttcgggaaactgtgagacaggtgctgcatggctgtcgtcagctcgtgttgtgaaatgttgggttaagtcccgcaacgagcgcaacccttatcctttgttgccagcggtccggccgggaactcaaaggagactgccagtgataaactggaggaaggtggggatgacgtcaagtcatcatggcccttacgaccagggctacacacgtgctacaatggcgcatacaaagagaagcgacctcgcgagagcaagcggacctcataaagtgcgtcgtagtccggattggagtctgcaactcgactccatgaagtcggaatcgctagtaatcgtggatcagaatgccacggtgaatacgttcccgggccttgtacacaccgcccgtcacaccatgggagtgggttgcaaaagaagtaggtagcttaaccttcgggagggcgcttaccactttgtgattcatgactggggtgaagtcgtaacaaggtaaccgtarrtcgaattccygcggttggatcacstcc

SEQ ID NO: 1230 - DNA, 1408 bp, Artificial Sequence; identical to SEQ ID NO: 56
  Synthetic polymer

SEQ ID NO: 1231 - DNA, 1479 bp, Artificial Sequence; identical to SEQ ID NO: 1135
  Synthetic polymer

SEQ ID NO: 1232 - DNA, 1402 bp, Artificial Sequence
  Synthetic polymer
tagagtttgatcctggctcagattgaacgctggcggcaggcctaacacatgcaagtcgggcggtaacagggagaagcttgcttctctgctgacgagcggcggacgggtgagtaatgtatggggatctgcgtgatggaggggggataactctggaaacggtagctaataccgcataatgtcttcggaccaaagcgggggacctccgggcctcgcgccatcagatgaacccatatgggattagcttgtaggtgaggtaacggctcacctaggcgacgatccctagctggtctgagaggatgatcagccacactgggactgagacacggcccagactcctacgggaggcagcagtggggaatattgcacaatgggcgcaagcctgatgcagccatgccgcgtgtatgaagaaggccttcgggttgtaaagtactttcagtcgggaggaaggtgttaaggttaataaccttagcaattgacgttaccgacagaagaagcaccggctaactccgtgccagcagccgcggtaatacggagggtgcaagcgttaatcggaattactgggcgtaaagcgcacgcaggcggttgattgagtcagatgtgaaatccccgggcttaacccgggaattgcatctgatactggtcagctagagtcttgtagaggggggtagaattccatgtgtagcggtgaaatgcgtagagatctggaggaataccggtggcgaaggcggccccctggacaaagactgacgctcaggtgcgaaagcgtggggagcaaacaggattagataccctggtagtccacgccgtaaacgatgtcgacttggaggttgtgcccttgaggcgtggcttccggagctaacgcgttaagtcgaccgcctggggagtacggccgcaaggttaaaactcaaatgaattgacgggggcccgcacaagcggtggagcatgtggtttaattcgatgcaacgcgaagaaccttacctactcttgacatccagagaacttagcagagatgctttggtgccttcgggaactctgagacaggtgctgcatggctgtcgtcagctcgtgttgtgaaatgttgggttaagtcccgcaacgagcgcaacccttatcctttgttgccagcggttcggccgggaactcaaaggagactgccagtgataaactggaggaaggtggggatgacgtcaagtcatcatggcccttacgagtagggctacacacgtgctacaatggcatatacaaagagaagcgacctcgcgagagcaagcggacctcataaagtatgtcgtagtccggattggagtctgcaactcgactccatgaagtcggaatcgctagtaatcgtggatcagaatgccacggtgaatacgttcccgggccttgcactcaccgcccgtca

SEQ ID NO: 1233 - DNA, 1353 bp, Artificial Sequence
  Synthetic polymer
tgaacgctggcggcaggcctaacacatgcaagtcgaacggtagaggagcttgctccttacgagtggcggacgggtgagtaatgtctgggaaactgcccgatggagggggataactactggaaacggtagctaataccgcataacgtcgcaagaccaaagaggttcgtcttgccatcggatgtgcccagatgggattagctagtaggtggggtaacggctcacctaggcgacgatccctagctggtctgagaggatgaccagccacactggaactgagacacggtccagactcctacgggaggcagcagtggggaatattgcacaatgggcgcaagcctgatgcagccatgccgcgtgtatgaagaaggccttcgggttgtaaagtactttcagcgaggaggaaggcgttaagtaatcttagcgattgacgttactcgcagaagaagcaccggctaactccgtgccagcagccgcggtaatacggagggtgcaagcgttaatcggaattactgggcgtaaagcgcacgcaggcggtttgttaagtcagatgtgaagtccccgggctcaacctgggaactgcatttgaaactggcaagcttgagtctcgtagaggggggtagaattccaggtgtagcggtgaaatgcgtagagatctggaggaataccggtggcgaaggcggccccctggacgagactgacgctcaggtgcgaaagcgtggggagcaaacaggattagataccctggtagtccacgccgtaaacgatgtctatttggaggttgttcccttgaggagtggcttccggagctaacgcgttaaatagaccgcctggggagtacggccgcaaggttaaaactcaaatgaattgacgggggcccgcacaagcggtggagcatgtggtttaattcgatgcaacgcgaagaaccttacctactcttgacatccagagaacttagcagagatgctttggtgccttcgggaactctgagacaggtgctgcatggctgtcgtcagctcgtgttgtgaaatgttgggttaagtcccgcaacgagcgcaacccttatcctttgttgccagcggttcggccgggaactcaaaggagactgccagtgataaactggaggaaggtggggatgacgtcaagtcatcatggcccttacgagtagggctacacacgtgctacaatggcatatacaaagagaagcgacctcgcgagagcaagcggacctcataaagtatgtcgtagtccggattggagtctgcaactcgactccatgaagtcggaatcgctagtaatcgtagatcagaatgctacggtgaatacgttcccgggccttgcacacaccgcccgtca

SEQ ID NO: 1234 - DNA, 1400 bp, Artificial Sequence
  Synthetic polymer
agtcgagcggtagcacagggagcttgctcctgggtgacgagcggcggacgggtgagtaatgtgtgggaaactgcctgagggggggggataactcctggaaacggtggctattaccgcataacgtcttctgacaaaagagggggaccttcgggcctcttgccatcacatgtgcccacatgggattatctattatgtgaggtaatggctcacctatgcgacaatccctatctggtttgagaggatgaccacccacactggaactgagacacggtccacactcctacgggaggcagcagtggggaatattgcacaatgggcgcacgcctgatgcacccatgccgcgtgtatgaaaaaagccttcgggttgtaaagtactttcagcgaggaggaaggcgttaaggttaataaccttggcgattgacgtttctcgcacaaaaaacaccggctatctccgtgcccccacccgcggtaatacggagggtgcaagcgttaatcggaattactgggcgtaaagcgcacgcaggcggtttgtcaagtcggatgtgaaatccccgggctcaacctgggaactgcattcgaaactggcaagctagagtcttgtagaggggggtagaattccaggtgtagcggtgaaatgcgtagagatctggaggaataccggtggcgaaggcggccccctggacaaagactgacgctcaggtgcgaaagcgtggggagcaaacaggattagataccctggtagtccacgccgtaaacgatgtcgacttggaggttgttcccttgaggagtggcttccggagctaacgcgttaagtcgaccgcctggggagtacgcccgcaaggttaaaactcaaatgaattgacgggggcccgcacaagcggtggagcatgtggtttaattcgatgcaacgcgaagaaccttacctactcttgacatccacagaattcggtagagataccttagtgccttcgggaactgtgagacaggtgctgcatggctgtcgtcagctcgtgttgtgaaatgttgggttaagtcccgcaacgagcgcaacccttatcctttgttgccagcggttcggccgggaactcaaaggagactgccagtgataaactggaggaaggtggggatgacgtcaagtcatcatggcccttacgagtagggctacacacgtgctacaatggcgcatacaaagagaagcgacctcgcgagagcaagcggacctcataaagtgcgtcgtagtccggatcggagtctgcaactcgactccgtgaagtcggaatcgctagtaatcgtagatcagaatgctacggtgaatacgttcccgggccttgtacacaccgcccgtcacaccatgggagtgggttgcaaaagaagtaggtagcttaaccttcgggagggcg

SEQ ID NO: 1235 - DNA, 1467 bp, Artificial Sequence; identical to SEQ ID NO: 1136
  Synthetic polymer

SEQ ID NO: 1236 - DNA, 1495 bp, Artificial Sequence
  Synthetic polymer
agagtttgatcatggctcaggacgaacgctggcggcgtgcctaatacatgcaagtcgagcggacagatgggagcttgctccctgatgttagcggcggacgggataactactggaaacggtagctaataccgcataatgtcgcaagaccaaagtgggggaccttcgggcctcatgccatcagatgtgcccagatgggattagctagtaggtggggtaacggctcacctaggcgacgatccctagctggtctgagaggatgaccagccacactggaactgagacacggtccagactcctacgggaggcagcagtggggaatattgcacaatgggcgcaagcctgatgcagccatgccgcgtgtgtgaagaaggccttcgggttgtaaagcactttcagcggggaggaaggcgataaggttaataaccttgttgattgacgttacccgcagaagaagcaccggctaactccgtgccagcagccgcggtaatacggagggtgcaagcgttaatcggaattactgggcgtaaagcgcacgcaggcggtctgtcaagtcggatgtgaaatccccgggctcaacctgggaactgcattcgaaactggcaggctagagtcttgtagaggggggtagaattccaggtgtagcggtgaaatgcgtagagatctggaggaataccggtggcgaaggcggccccctggacaaagactgacgctcaggtgcgaaagcgtggggagcaaacaggattagataccctggtagtccacgccgtaaacgatgtcgatttggaggttgtgcccttgaggcgtggcttccggagctaacgcgttaaatcgaccgcctggggagtacggccgcaaggttaaaactcaaatgaattgacgggggcccgcacaagcggtggagcatgtggtttaattcgatgcaacgcgaagaaccttacctggtcttgacatccacagaacttagcagagatgctttggtgccttcgggaactgtgagacaggtgctgcatggctgtcgtcagctcgtgttgtgaaatgttgggttaagtcccgcaacgagcgcaacccttatcctttgttgccagcggtccggccgggaactcaaaggagactgccagtgataaactggaggaaggtggggatgacgtcaagtcatcgtggcccttacgaccagggctacacacgtgctacaatggcatatacaaagagaagcgacctcgcgagagcaagcggacctcataaagtatgtcgtagtccggattggagtctgcaactcgactccatgaagtcggaatcgctagtaatcgtagatcagaatgctacggtgaatacgttcccgggccttgtacacaccgcccgtcacaccatgggagtgggttgcaaaagaagtaggtagcttaaccttcgggagggcgcttaccactttgtgattcatgactggggtgaagtcgtaacaaggtaaccgtaggggaacctgcggctggatcacctcctt

SEQ ID NO: 1237 - DNA, 1416 bp, Artificial Sequence
  Synthetic polymer
catgcaagtcgaacggcagcacagaagagcctgctctttgggtggcgagtggcggacgggtgagtaatgtctgggaaactgcccgatggagggggataactactggaaacggtagctaataccgcataacgtcttcggaccaaagtgggggaccttcgggcctcacaccatcggatgtgcccagatgggattagctagtaggtggggtaacggctcacctaggcgacgatctctagctggtctgagaggatgatcagccacactggaactgagacacggtccagactcctgcgggaggcagcagtggggaatattgcacaatgggcgcaagcctgatgcagccatgccgcgtgtatgaagaaggccttcgggttgtaaagtactttcagcggggaggaagggatgaggcttaatacgcttcgtcattgacgttacctgcagaagaagcaccggctaactccgtgccagcagccgcggtaatacggagggtgcaagcgttaatcggaattactgggcgtaaagcgcacgcaggcggtctgtcaagtcggatgtgaaatccccgggcttaacctgggaacggcattcgaaactggcaggctagagtctcgtagaggggggtagaattccaggtgtagcggtgaaatgcgtagagatctggaggaataccggtggcgaaggcggccccctggacgaagactgacgctcaggtgcgaaagcgtggggagcaaacaggattagataccctggtagtccacgccgtaaacgatgtcgacctggaggttgtttccttgagaagtggcttccgcagctaacgcgttaagtcgaccgcctggggagtacggccgcaaggttaaaactcaaatgaattgacgggggcccgcacaagcggtggagcatgtggtttaattcgatgcaacgcgaagaaccttacctggccttgacatccagagaactttccagagatggattggtgccttcgggaactgtgagacaggtgctgcatggctgtcgtcagctcgtgttgtgaaatgttgggttaagtcccgcaacgagcgcaacccttatcctttgttgccagcgattcggtcgggaactcaaaggagactgccggtgataaaccggaggaaggtggggatgacgtcaagtcatcatggcccttacggccagggccacacacgtgctacaatggcgcatacaaagagaagcgacctcgcgagagtaagcggacctcataaagtgcgtcgtagtccggatcggagtctgcaactcgactccgtgaagtcggaatcgctagtaatcgtggatcagaacgccacggtgaatacgttcccgggccttgtacacaccgcccgtcacaccatgggagtgggttgcaaaagaagtaggtagcttaacctccgggagggcgcttaccac

SEQ ID NO: 1238 - DNA, 1504 bp, Artificial Sequence
  Synthetic polymer
tggctcagattgaacgctggcggcaggcctaacacatgcaagtcgaacggtagcacaggggagcttgctccctgggtgacgagtggcggacgggtgagtaatgtctgggaaactgcccgatggagggggataactactggaaacggtagctaataccgcataacgtcttcggaccaaagtgggggaccttcgggcctcacaccatcggatgtgcccagatgggattagctggttggtgaggtaacggctcaccaaggcgacgatccctagctggtctgagaggatgaccagccacactggaactgagacacggtccagactcctacgggaggcagcagtggggaatattgcacaatgggcgcaagcctgatgcagccatgccgcgtgtatgaagaaggccttcgggttgtaaagtactttcagcggggaggaaggtggtggggttaataaccttatcaattgacgttacccgcagaagaagcaccggctaactccgtgccagcagccgcggtaatacggagggtgcaagcgttaatcggaattactgggcgtaaagcgcacgcaggcggtctgttaagtcagatgtgaaatccccgggcttaacctgggaactgcatttgaaactggcaggcttgagtcttgtagaggggggtagaattccaggtgtagcggtgaaatgcgtagagatctggaggaataccggtggcgaaggcggccccctggacaaagactgacgctcaggtgcgaaagcgtggggagcaaacaggattagataccctggtagtccacgccgtaaacgatgtcgatttggaggttgtgcccttgaggcgtggcttccgtagctaacgcgttaaatcgaccgcctggggagtacggccgcaaggttaaaactcaaatgaattgacgggggcccgcacaagcggtggagcatgtggtttaattcgatgcaacgcgaagaaccttacctggccttgacatccacggaagacctcagagatggggttgtgccttcgggaaccgtgagacaggtgctgcatggctgtcgtcagctcgtgttgtgaaatgttgggttaagtcccgcaacgagcgcaacccttatcctttgttgccatcgattcggtcgggaactcaaaggagactgccggtgataaaccggaggaaggtggggatgacgtcaagtcatcatggcccttacggccagggctacacacgtgctacaatggcgcatacaaagagaagcgacctcgcgagagcaagcggatctcataaagtgcgtcgtagtccggatcggagtctgcaactcgactccgtgaagtcggaatcgctagtaatcgtggatcagaatgccacggtgaatacgttcccgggccttgtacacaccgcccgtcacaccatgggagtgggttgcaaaagaagtaggtagcttaaccttcgggagggcgcttaccactttgtgattcatgactggggtgaagtcgtaacaaggtaaccgtaggggaacctg

SEQ ID NO: 1239 - DNA, 1455 bp, Artificial Sequence
  Synthetic polymer
catgcaagtcgaacggtagcacagagagcttgctctcgggtgacgagtggcggacgggtgagtaatgtctgggaaactgcctgatggagggggataactactggaaacggtagctaataccgcataacgtcgcaagaccaaagagggggaccttcgggcctcttgccatcagatgtgcccagatgggattagcttgtaggtgaggtaacggctcacctaggcgacgatccctagctggtctgagaggatgaccagccacactggaactgagacacggtccagactcctacgggaggcagcagtggggaatattgcacaatgggcgcaagcctgatgcagccatgccgcgtgtatgaagaaggccttcgggttgtaaagtactttcagcggggaggaaggtgttgtggttaataaccgcagcaattgacgttacccgcagaagaagcaccggctaactccgtgccagcagccgcggtaatacggagggtgcaagcgttaatcggaattactgggcgtaaagcgcacgcaggcggcctgtcaagtcggatgtgaaatccccgggctcaacctgggaactgcattcgaaactggcaggctggagtcttgtagaggggggtagaattccaggtgtagcggtgaaatgcgtagagatctggaggaataccggtggcgaaggcggccccctggacaaagactgacgctcaggtgcgaaagcgtggggagcaaacaggattagataccctggtagtccacgctgtaaacgatgtcgacttggaggttgttcccttgaggagtggtttccggagctaacgcgttaagtcgaccgcctggggagtacggccgcaaggttaaaactcaaatgaattgacggaggcccgcacaagcggtggagcatgtggtttaattcgatgcaacgcgaagaaccttacctggtcttgacatccacagaagttttcagagatgagaacgtgccttcgggaactgtgagacaggtgctgcatggctgtcgtcagctcgtgttgtgaaatgttgggttaagtcccgcaacgagcgcaacccttatcctttgttgccagcggtccggccgggaactcaaaggagactgccagtgataaactggaggaaggtggggatgacgtcaagtcatcatggcccttacgaccagggctacacacgtgctacaatggcatatacaaagagaagcgacctcgcgagagcaagcggacctcataaagtatgtcgtagtccggattggagtctgcaactcgactccatgaagtcggaatcgctagtaatcgtggatcagaatgccacggtgaatacgttcccgggccttgtacacaccgcccgtcacaccatgggagtgggttgcaaaagaagtaggtagcttaaccttcgggagggcgcttaccactttgtgattcatgactggggtgaagtcgtaacaaggtaacc

SEQ ID NO: 1240 - DNA, 1382 bp, Artificial Sequence
  Synthetic polymer
attgaacgctggcggcaggcctaacacatgcaagtcgaacggtaacaggaagcagcttgctgctttgctgacgagtggcggacgggtgagtaatgtctgggaaactgcctgatggagggggataactactggaaacggtagctaataccgcataacgtcgcaagaccaaagagggggaccttcgggcctcttgccatcggatgtgcccagatgggattagctagtaggtggggtaacggctcacctaggcgacgatccctagctggtctgagaggatgaccagccacactggaactgagacacggtccagactcctacgggaggcagcagtggggaatattgcacaatgggcgcaggcctgatgcagccatgccgcgtgtatgaagaaggccttcgggttgtaaagtactttcagcggggaggaagggagtaaagttaatacctttgctcattgacgttacccgcagaagaagcaccggctaactccgtgccagcagccgcggtaatacggagggtgcaagcgttaatcggaattactgggcgtaaagcacacgcaggcggtttgttaagtcagatgtgaaatccccgggctcaacctgggaactgcatctgatactggcaagcttgagtctcgtagaggggggtagaattccaggtgtagcggtgaaatgcgtagagatctggaggaataccggtggcgaaggcggccccctggacgaagactgacgctcaggtgcgaaagcgtggggagcaaacaggattagataccctggtagtccacgccgtaaacgattaaaaagaggaggttgtgccttcgaggcgtggcttccgggagctaacgcgttaagtcgaccgcccggggagtacggccgcaagcttaaaactcaaatgaaaagacgggggcccgcacaagcggtggagcatgtggtttaattcgatgcaacgcgaagaaccttacctggtcttgacatccacagaactttccagagatggattggtgccttcgggaactgtgagacaggagctgcatggctgtcgtcagctcgtgttgtgaaatgttgggttaagtcccgcaacgagcgcaacccttatcctttgttgccagcggtccggccgggaactcaaaggagactgccagtgataaactggaggaaggtggggatgacgtcaagtcatcatggcccttacgaccagggctacacacgtgctacaatggcgcatacaaagagaagcgacctcgcgagagcaagcggacctcataaagagcgtcgtagtccggattggagtctgcaactcgactccacgaagtcggaatcgctagtaatcgtggatcagaatgccacggtgaaaaaaatcccgggccttgcacactccgcccgtca

SEQ ID NO: 1241 - DNA, 1496 bp, Artificial Sequence; identical to SEQ ID NO: 1051
  Synthetic polymer

SEQ ID NO: 1242 - DNA, 1492 bp, Artificial Sequence
  Synthetic polymer
aaaaaaagagtttgatcatggctcagattgaacgctggcggcaggcctaacacatgcaagtcgaacggtaacaggaagcagcttgctgctttgctgacgagtggcggacgggtgagtaatgtctgggaaactgcctgatggagggggataactactggaaacggtggctaataccgcataacgtcgcaagaccaaagagggggaccttcgggccccttgccatcagatgtgcccagatgggattagcttgttggtgaggtaacggctcaccaaggcgacgatccctagctggtctgagaggatgaccagccacactggaactgagacacggtccagactcctacggggggcagcagtggggaatattgcacaatgggcgcaagcctgatgcagccatgccgcgtgtatgaagaaggccttcgggttgtaaagtactttcagcgggggggaaggtgttgtggttaataaccgcagcaattgacgttacccgcagaagaagcaccggctaactccgtgccagcagccgcggtaatacggggggtgcaagcgttaatcggaattactgggcgtaaagcgcacgcaggcggtctgtcaagtcggatgtgaaatccccgggctcaacctgggaactgcattcgaaactggcaggcttgagtcttgtagaggggggtagaattccaggtgtagcggtgaaatgcgtagagatctgggggaataccggtggcgaaggcggccccctggacaaagactgacgctcaggtgcgaaagcgtggggggcaaacaggattagataccctggtagtccacgccgtaaacgatgtctacttgggggttgtgcccttgaggcgtggcttccggggctaacgcgttaagtagaccgcctggggggtacggccgcaaggttaaaactcaaatgaattgacgggggcccgcacaagcggtggggcatgtggtttaattcgatgcaacgcgaagaaccttacctggtcttgacatccacggaagttttcagagatgagaatgtgccttcgggaaccgtgagacaggtgctgcatggctgtcgtcagctcgtgttgtgaaatgttgggttaagtcccgcaacgagcgcaacccttatcctttgttgccagcggtccggccgggaactcaaaggggactgccagtgataaactgggggaaggtggggatgacgtcaagtcatcatggcccttacgaccagggctacacacgtgctacaatggcgcatacaaagagaagcgaccccgcgagagcaagcggaccccataaagtgcgtcgtagtccggattggggtctgcaactcgactccatgaagtcggaatcgctagtaatcgtggatcagaatgccacggtgaatacgttcccgggccttgtacacaccgcccgtcacaccatgggggtgggttgcaaaagaagtaggtagcttaaccttcgggggggcgcttaccactttgtgattcatgactggggtgaa

SEQ ID NO: 1243 - DNA, 1464 bp, Artificial Sequence; identical to SEQ ID NO: 931
  Synthetic polymer

SEQ ID NO: 1244 - DNA, 1388 bp, Artificial Sequence
  Synthetic polymer
ctcagattgagcgcgggcggcaggcctaacacatgcaggtcgaacggtaacaggaagcagcttgctgcttcgctgacgagtggcggacgggtgagtaatgtctgggaaactgcctgatggagggggataactactggaaacggtagctaataccgcataacgtcgcaagaccaaagagggggaccttcgggcctcttgccatcggatgtgcccagatgggattagcttgttggtggggtaacggctcaccaaggcgacgatccctagctggtctgagaggacgaccagccacactggaactgagacacggtccacactcctacgggaggcagcagtgggggaattattgcacaatgggcgcaagcctgatgcagccatgccgcgtgtatgaagaaggccttcgggttgtaaagtactttcagcggggaggaagggagtaaagttaatacctttactcattgacgttacccgcagaagaagcaccggctaactccgtgccagcagccgcggtaatacgtaggtggcaagcgttgtccggatttattgggcgtaaagcgagcgcaggcggtttcttaagtctgatgtgaaagcccccggctcaaccggggagggtcattggaaactgggagacttgagtgcagaagaggagagtggaattccatgtgtagcggtgaaatgcgtagagatctagaggaataccggtggcgaaggcggccccctggacgaagactgacgctcaggtgcgaaagcgtggggagcaaacaggattagataccctggtagtccacgccgtaaacgatgtcgacttggaggttgtgcccttgaggcgtggcttccggagctaacgcgttaagtcgaccgcctggggagtacggccgcaaggttaaaactcaaatgaattgacgggggcccgcacaagcggtggagcatgtggtttaattcgatgcaacgcgaagaaccttacctggtcttgacatccacagaactttccagagatggattggtgccttcgggaactgtgagacaggtgctgcatggctgtcgtcagctcgtgttgtgaaatgttgggttaagtcccgcaacgagcgcaacccttatcctttgttgccagcggtccggccgggaactcaaaggagactgccagtgataaactggaggaaggtggggatgacgtcaagtcatcatggcccttacgaccagggctacacacgtgctacaatggcgcatacaaagagaagcgacctcgcgagagcaagcggacctcataaagtgcgtcgtagtccggattggagtctgcaactcgactccatgaagtcggaatcgctagtaatcgtggatcagaatgccacggtgaatacgttcccgggccttgcacacaccgcccgtca

SEQ ID NO: 1245 - DNA, 1457 bp, Artificial Sequence
  Synthetic polymer
gcggcaggcctaacacatgcaagtcgaacggtagcacagaggagcttgctccttgggtgacgagtggcggacgggtgagtaatgtctgggaaactgcccgatggagggggataactactggaaacggtagctaataccgcataacgtcgcaagaccaaagagggggaccttcgggcctcttgccatcggatgtgcccagatgggattagctagtaggtggggtaacggctcacctaggcgacgatccctagctggtctgagaggatgaccagccacactggaactgaggcacggtccagactcctacgggaggcagcagtggggaatattgcacaatgggcgcaagcctgatgcagccatgccgcgtgtatgaagaaggccttcgggttgtaaagtactttcagcgaggaggaaggtgttgtggttaataaccgcagcaattgacgttactcgcagaagaagcaccggctaactccgtgccagcagccgcggtaatacggagggtgcaagcgttaatcggaattactgggcgtaaagcgcacgcaggcggtctgtcaagtcggatgtgaaatccccgggctcaacctgggaactgcatccgaaactggcaggctagagtcttgtagaggggggtagaattccaggtgtagcggtgaaatgcgtagagatctggaggaataccggtggcgaaggcggccccctggacaaagactgacgctcaggtgcgaaagcgtggggagcaaacaggattagataccctggtagtccacgccgtaaacgatgtccacttggaggttgtgcccttgaggcctggcttcccgaacctaacccttaagtccgccgccctggggagtaccggccgcaaggttaaaacttcaaatgaattggccgggggcccgcacaagcggtggagcatgtggtttaattggatgcaacgggaaggaaccttacctattcttgacatccacggagcttggcagagatgccttggtgccttcgggaaccgtgagacaggtgctgcatggctgtcgtcagctcgtattgtgaaatgttgggttaagtcccgcaacgagcgcaacccttatcttttgttgccagcggttaggccgggaactcaaaggagactgccagtgataaactggaggaaggtggggatgacgtcaagtcatcatggcccttacgagtagggctacacacgtgctacaatggcatatacaaagagaagcgacctcgcgagagcaagcggacctcataaagtatgtcgtagtccggattggagtctgcaactcgactccatgaagtcggaatcgctagtaatcgtggatcagaatgccacggtgaatacgttcccgggccttgtacacaccgcccgtcacaccatgggagtgggttgcaaaagaagtaggtagcttaaccttcgggaaagcgcttaccactttgtgattcatgactggggt

SEQ ID NO: 1246 - DNA, 1424 bp, Artificial Sequence
  Synthetic polymer
gcctaacacatgcaagtcgaacggtagcacagagagcttgctctttgggtgacgagtggcggacgggtgagtaatgtctggggatctgcccgatggagggggataactactggaaacggtagctaataccgcataatctcgcaagagcaaagtgggggaccttatggcctcacaccattggatgaacccagatgggattagctagtaggtggggtaatggctcacctaggcgacgatccctagctggtctgagaggatgaccagccacactggaactgagacacggtccagactcctacgggaggcagcagtggggaatattgcacaatgggcgcaagcctgatgcagccatgccgcgtgtatgaagaaggccttcgggttgtaaagtactttcagcggggaggaaggtgattaagcgaataccttagtcaattgacgttacccgtagaagaaacaccggctaactccgtgccagcagccgcggtaatacggagggtgcaagcgttaatcggaattactgggcgtaaagcgcacgcaggcggtctgtcaagtcaaatgtgaaatccccgggcttaacctgggaactgcatttgaaactggcaagctggagtcttgtagaggggggtagaattccaggtgtagcggtgaaatgcgtagagatctggaagaataccggtggcgaaggcggccccctggacaaagactgacgctcaggtgcgaaagcgtggggagcaaacaggattagatacccctggtagtccaccctgtaaacgatgtcgacttggaggttgtgcccttgaggcgtggcttccggagctaacgcgttaaatccaccgcctggggagtacggccgcaaggttaaaactcaaatgaattgacgggggcccgcacaagcggtggagcatgtggtttaattcgatgcaacgcgaagaaccttacctggccttgacatccacagaagaattcagagatggatttgtgccttcgggaactgtgagacaggtgctgcatggctgtcgtcagctcgtgttgtgaaatgttgggttaagtcccgcaacgagcgcaacccttatcctttgttgccagcgattcggtcgggaactcaaaggagactgccggtgataaaccggaggaaggtggggatgacgtcaagtcatcatggcccttacggccagggctacacacgtgctacaatggcgcatacaaagagaagcgacctcgcgagagcaagcggacctcataaagtgcgtcgtagtccggatcggagtctgcaactcgactccgtgaagtcggaatcgctagtaatcgtagatcagaatgctacggtgaatacgttcccgggccttgtacacaccgcccgtcacaccatgggagtgggttgcaaaagaagtaggtagcttaaccttcgggagggcgcttaccac

SEQ ID NO: 1247 - DNA, 1373 bp, Artificial Sequence; identical to SEQ ID NO: 497
  Synthetic polymer
  misc_feature (7)..(7): n is a, c, g, or t
  misc_feature (154)..(154): n is a, c, g, or t
  misc_feature (360)..(360): n is a, c, g, or t
  misc_feature (366)..(366): n is a, c, g, or t
  misc_feature (913)..(914): n is a, c, g, or t
  misc_feature (943)..(943): n is a, c, g, or t
  misc_feature (1040)..(1040): n is a, c, g, or t

SEQ ID NO: 1248 - DNA, 1453 bp, Artificial Sequence
  Synthetic polymer
caggcctaacacatgcaagtcgaacggtaacagaaagcagcttgctgctttgctgacgagtggcggacgggtgagtaatgtctgggaaactgcccgatggagggggatgactactggaaacggtagctaataccgcataacgtcgcaagaccaaagagggggaccttcgggcctcttgccatcggatgtgcccagatgggattagctagtaggtggggtaaaggctcacctaggcgacgatccctagctggtctgagaggatgaccagccacactggaactgagacacggtccagactcctacgggaggcagcagtggggaatattgcacaatgggcgcaagcctgatgcagccatgccgcgtgtatgaagaaggccttcgggttgtaaagtactttcagcggggaggaagggagtaaagttaatacctttgctcattgacgttacccgcagaagaagcaccggctaactccgtgccagcagccgcggtaatacggagggtgcaagcgttaatcggaattactgggcgtaaagcgcacgcaggcggtttgttaagtcagatgtgaaatccccgggctcaacctgggaactgcatctgatactggcaagcttgagtctcgtagaggggggtagaattccaggtgtagcggtgaaatgcgtagagatctggaggaataccggtggcgaaggcggcccccctggacgaagactgacgctcaagtgcgaaagcgcggggagcaaacaggattagataccctggtagtccacgccgtaaacgatgtcgacttggaagttgtgccctgagggcgtggcttccggagctaacgcgttaagtcgaccgcttggggagtacggccgcaagggttaaaactcaaatgaattgacggggcgccccccccaaccggtggagcatgtggtttaattcgatgcaacgcgaagacctttacctggtcttgacatccacggaagttttcagagatgagaatgtgccttcgggaaccgtgagacaggtgctgcatggcggtcgtcagctggtgttgtgaaatgttgggttaagtccggcaacgagcgcaacccttatcttttgttgccagcggtcgggccgggaactcaaaggagactgccagtgataaactggaggaaggtggggatgacgtcaagtcatcatggcccttacgaccagggctacacacgtgctacaatggcgcatacaaagagaagcgacctcgcgagagcaagcggacctcataaagtgcgtcgtagtccggattggagtctgcaactcgactccatgaagtcggaatcgctagtaatcgtggatcagaatgccacggtgaatacgttcccgggccttgtacacaccgcccgtcacaccatgggagtgggttgcaaaagaagtaggtagcttaaccttcggaagggcgcttaccactttgtgattcatgactggggtg

SEQ ID NO: 1249 - DNA, 1502 bp, Artificial Sequence
  Synthetic polymer
tagagtttgatcctggctcagattgaacgctggcggcaggcctaacacatgcaagtcgaacggtagcacagagagcttgctctcgggtgacgagtggcggacgggtgagtaatgtctgggaaactgcctgatggagggggataactactggaaacggtagctaataccgcataacgtcgcaagaccaaagagggggaccttcgggcctcttgccatcagatgtgcccagatgggattagctagtaggtggggtaacggctcacctaggcgacgatccctagctggtctgagaggatgaccagccacactggaactgagacacggtccagactcctacgggaggcagcagtggggaatattgcacaatgggcgcaagcctgatgcagccatgccgcgtgtatgaagaaggccttcgggttgtaaagtactttcagcggggaggaaggtgttgtggttaataaccacagcaattgacgttacccgcagaagaagcaccggctaactccgtgccagcagccgcggtaatacggagggtgcaagcgttaatcggaattactgggcgtaaagcgcacgcaggcggtctgtcaagtcggatgtgaaatccccgggctcaacctgggaactgcattcgaaactggcaggctagagtcttgtagaggggggtagaattccaggtgtagcggtgaaatgcgtagagatctggaggaataccggtggcgaaagcggccccctggacaaagactgacgctcaggtgcgaaagcgtggggagcaaacaggattagataccctggtagtccacgccgtaaacgatgtcgacttggaggttgtgcccctgaggcgtggcttccggagctaacgcgttaagtcgaccgcctggggagtacggccgcaaggttaaaactcaaatgaattgacggggccccgcacaagcggtggagcatgtggtttaattcgatgcaacgcgaagaaccttacctactcttgacatccagagaactttccagagatggattggtgccttcgggaactctgagacaggtgctgcatggctgtcgtcagctcgtgttgtgaaatgttgggttaagtcccgcaacgagcgcaacccttatcctttgttgccagcggtccggccgggaactcaaaggagagtgccagtcataaactggaggaaggtggggatgtcgtcaagtcatcatggcccttgagtgtagggctactctcgtgttccaatggcgcattcaaagagaagcgacctcgcgagatcaagcggtcctcgtaaagtgcgtcctagtccggattggagtcttcaactcgcctccatgaagtcggaatcgctagtaatcgttgatcagaatgctacggtgaatacgttcccgggccttgtacacaccgcctgtccctccatgggagtgggttgcaaaagaagtaggtagcttaaccctcgggagggcgcttaccactttgtgattcatgactggggtgaagtcgtaacaaggtaacc

SEQ ID NO: 1250 - DNA, 1421 bp, Artificial Sequence
  Synthetic polymer
ctaacacatgcaagtcgagcggcagcggaggtaccttgctcctttgccggagagcggcagacgggagagtaatgtctggaaaagtgcctgatggagggggataactagtggaaacggtatctaataccgcatagtgtcacaagaccaaagagggggaccttcggccctcttgccatcatatgtgcccatatggttttatctagtgggtggggtaacggctcacctaggagactatccctatgtggtctgagaggatgaccacccactctggaactgacacacggcccacactcctacggggggcagcagtggggaatattgcacagtgggcgcacgcctgatgcacccgtgccgcgtgtatgaaaaaggccttcgggttgtaaagtactttccgcggagaagaaggtgttgaggttaataccctcaacttttgactttccccgcaaaaaaagccccggataactccgtgccagcagccgcggtaatacggagggtgcaagcgttaatcggaattactgggcgtaaagcgcacgcaggcggtctgtcaagtcggatgtgaaatccccgggctcaacctgggaactgcattcgaaactggcaggctagagtcttgtagaggggggtagaattccaggtgtagcggtgaaatgcgtagagatctggaggaataccggtggcgaaggcggccccctggacaaagactgacgctcaggtgcgaaagcgtggggagcaaacaggattagataccctggtagtccacgccgtaaacgatgtcgacttggaggttgtgcccttgaggcgtggcttccggagctaacgcgttaagtcgaccgcctggggagtacggccgcaaggttaaaactcaaatgaattgacgggggcccgcacaagcggtggagcatgtggtttaattcgatgcaacgcgaagaaccttacctactcttgacatccagagaacttagcagagatgctttggtgccttcgggaactctgagacaggtgctgcatggctgtcgtcagctcgtgttgtgaaatgttgggttaagtcccgcaacgagcgcaacccttatcctttgttgccagcggtccggccgggaactcaaaggagactgccagtgataaactggaggaaggtggggatgacgtcaagtcatcatggcccttacgagtagggctacacacgtgctacaatggcgcatacaaagagaagcgacctcgcgagagcaagcggacctcataaagtgcgtcgtagtccggattggagtctgcaactcgactccatgaagtcggaatcgctagtaatcgtagatcagaatgctacggtgaatacgttcccgggccttgtacacaccgcccgtcacaccatgggagtgggttgcaaaagaagtaggtagcttaaccttcgggagggcgcttaccac

SEQ ID NO: 1251 - DNA, 1467 bp, Artificial Sequence
  Synthetic polymer
attgaacgctggcggcaggcctaacacatgcaagtcgaacggtaacaggaagcagcttgctgcttcgctgacgagtggcggacgggtgagtaatgtctgggaaactgcccgatggagggggataactactggaaacggtagctaataccgcataatgtcgcaagaccaaagagggggaccttcgggcctcttgccatcggatgtgcccagatgggattagcttgttggtgaggtaacggctcaccaaggcgacgatccctagctggtctgagaggatgaccagccacactggaactgagacacggtccagactcctacgggaggcagcagtggggaatattgcacaatgggcgcaagcctgatgcagccatgccgcgtgtatgaagaaggccttcgggttgtaaagtactttcagcggggaggaaggggatgtggttaataaccgcattcattggcgttacccgcagaagaagcaccggctaactccgtgccagcagccgcggtaatacggagggtgcaagcgttaatcggaattactgggcgtaaagcgcacgcaggcggtctgtcaagtcggatgtgaaatccccgggctcaacctgggaactgcattcgaaactggcaggcttgagtctcgtagaggggggtagaattccaggtgtagcggtgaaatgcgtagagatctggaggaataccggtggcgaaggcggccccctggacgaagactgacgctcaggtgcgaaagcgtggggagcaaacaggattagataccctggtagtccacgccgtaaacgatgtctatttggaggttgtgcccttgaggcgtggcttccggagctaacgcgttaaatagaccgcctggggagtacggccgcaaggttaaaactcaaatgaattgacgggggcccgcacaagcggtggagcatgtggtttaattcgatgcaacgcgaagaaccttacctggtcttgacatccacagaacttggcagagatgccctggtgccttcgggaactgtgagacaggtgctgcatggctgtcgtcagctcgtgttgtgaaatgttgggttaagtcccgcaacgagcgcaacccttatcctttgttgccagcgattcggtcgggaactcaaaggagactgccagtgataaactggaggaaggtggggatgacgtcaagtcatcatggcccttacgaccagggctacacacgtgctacaatggcatatacaaagagaagcgacctcgcgagagcaagcggacctcataaagtatgtcgtagcccggattggagtctgcaactcgactccatgaagtcggaatcgctagtaatcgtggatcagaatgccacggtgaatacgttcccgggtcttgtacacaccgcccgtcacaccacgagagttcgtaacacccgaagccggtggggcaacctttataggagctagccgtcgaaggtgggatggatgattggggtga

SEQ ID NO: 1252 - DNA, 1528 bp, Artificial Sequence
  Synthetic polymer
gtttgatcctggctcagattgaacgctggcggcaggcctaacacatgcaagtcgagcggtaacacagagagcttgctctcgggtgacgagcggcggacgggtgagtaatgtctgggaaactgcctgatggagggggataactactggaaacggtagctaataccgcataatgtcgcaagaccaaagagggggaccttagggcytcttgccatcggatgtgcccagatgggattagctagtaggtgaggtaaaggctcacctaggcgacgatccctagctggtctgagaggatgaccagccacactggaactgagacacggtccagactcctacgggaggcagcagtggggaatattgcacaatgggcgcaagcctgatgcagccatgccgcgtgtgtgaagaaggccttcgggttgtaaagcactttcagcggggaggaaggcgtgagagcgaatacctttcatgattgacgttacccgcagaagaagcaccggctaactccgtgccagcagccgcggtaatacggagggtgcaagcgttaatcggaatgactgggcgtaaagcgcacgcaggcggtttgttaagttggatgtgaaatccccgggcttaacctgggaactgcattcaaaactgacaggctagagtcttgtagaggggggtagaattccaggtgtagcggtgaaatgcgtagagatctggaggaataccggtggcgaaggcggccccctggacaaagactgacgctcaggtgcgaaagcgtggggagcaaacaggattagataccctggtagtccacgctgtaaacgatgtcgacttggaggttgtgccctagaggcgtggcttccggagctaacgcgttaagtcgaccgcctggggagtacggccgcaaggttaaaactcaaatgaattgacgggggcccgcacaagcggtggagcatgtggtttaattcgatgcaacgcgaagaaccttacctactcttgacatccacagaatgckgtagagatacatcwgtgtcttcggaaactgtgagacaggtgctgcatggctgtcgtcagctcgtgttgtgaaatgttgggttaagtcccgcaacgagcgcaacccttatcctttgttgccagcgattaggtcgggaactcaaaggagactgccggtgataaaccggaggaaggtggggatgacgtcaagtcatcatggcccttacgagtagggctacacacgtgctacaatggcgtatacaaagagaagcgagcctgcgagggtgagcggacctcataaagtacgtcgtagtccggattggagtctgcaactcgactccatgaagtcggaatcgctagtaatcgtagatcagaatgctacggtgaatacgttcccgggccttgtacacaccgcccgtcacaccatgggagtgggttgcaaaagaagtaggtagcttaaccttcgggggggcgcttaccactttgtgattcatgactggggtgaagtcgtaacaaggtaaccgtaggggaacctgcggctggatcacctcct

SEQ ID NO: 1253 - DNA, 1369 bp, Artificial Sequence
  Synthetic polymer
  misc_feature (310)..(310): n is a, c, g, or t
gataactaccggaaacggtagctaataccgcataacgtcttcggaccaaagtgggggaccttcgggcctcacgccatcagatgtgcccagatgggattagctagtaggtggggtaatggctcacctaggcgacgatccctagctggtctgagaggatgaccagccacactggaactgagacacggtccagactcctacgggaggcagcagtggggaatattacacaatgggcgcaagcctgatgcagccatgccgcgtgtgtgaagaaggccttcgggttgtaaagcgctttcagcgaggaggaagggtnctgtgttaatagcacgctgcattgacgttactcgcagaagaagcaccggctaactccgtgccaggagccgcggtaatacggagggtgcaagcgttaatcagaattactgggcgtaaagcgcacgcaggcggtttgttaagtcagatgtgaaatccccgcccttaacgtgggaactgcatttgaaactggcaagctagagtcttgtagaggggggtagaattccaggtgtagcggtgaaatgcgtagagatctggaggaattaccggtggcgaaggcggccccctggacaaagactgacgctcaggtgcgaaagcgtggggagcaaacaggattagataccctggatagtccacgctgtatgcgatgtcgacttaggaggttgtgcccttgaggcgtggcttccggagctaacgcgttaagtcgttccgcctggggagtacggccgcaaggttaaaaattcaaatgaattgacgggggcccgcacaagcggtggagcatgtggtttaattcgatgcaacgcgaagaaccttacctactcgtgacatccagagaattcgctagagatagcttagtgccttcgggaactctgagacaggtgctgcatggctgtcgtcagctcgtgttgtgaaatgttgggttaagtcccgcaacgagcgcaacccttatcctttgttgccagcacgtaatggttgggaactcaaaggagactgccggtgataaaccggaggaaggtggggatgacgtcaagtcatcatggcccttacgagttcgggctacacacgtgatacgatggcgtattacaaagagaagcgaactcgcgagagatcaagcggacctcataaagtacgtcgtagtccggatcggagtctgcaactcgactccgtgaagtcggaatcgctagtaatcgtagatcagaatgctacggtgaacgtcgttcccgggccttgtacacaccgcccgtcacaccatgggagtcgggttgcaaaagaagtaggtagcttaaccttacgggagggcgcttaccactttgtgattcatgactggggtgaagtcgtaaca

SEQ ID NO: 1254 - DNA, 1524 bp, Artificial Sequence
  Synthetic polymer
gattgaacgctggcggcaggcctaacacatgcaagtcgagcggtagcacagagagcttgctctcgggtgacgagcggcggacgggtgagtaatgtctgggaaactgcctgatggagggggataactactggaaacggtagctaataccgcataatgtcgcaagaccaaagagggggaccttcgggcctcttgccatcagatgtgcccagatgggattagctagtaggtggggtaacggctccctaggcgacgatccctagctggtctgcctaggcgacgatccctagctggtctgagaggatgaccagccacactggaactgagacacggtccagactcctacgggaggcagcggtggggaatattgcacaatgggcgcaagcctgatgcagccatgccgcgtgtatgaagaaggccttcgggttgtaaagtactttcagcggggaggaaggtgttgaggttaataacctcagcaattgacgttacccgcagaagaagcaccggctaactccgtgccagcagccgcggtaatacggagggtgcaagcgttaatcggaattactgggcgtaaagcgcacgcaggcggtctgtcaagtcggatgtgaaatccccgggctcaacctgggaactgcattcgaaactggcaggctagagtcttgtagaggggggtagaattccaggtgtagcggtgaaatgcgtagagatctggaggaataccggtggccgaagcggccccctggacaaagactgacgctcaagtgcgaaagcgtgggggagcaaacagggatttaagattccccttggtaagtcccacgccggtaaccgatgttcgacttggaaggttggtccccatgaggcgtggcttccggaagctaacgcgtaaagtcgaccgcttggggagtacggccgcaaggttaaaactcaactgaattgacggggacccgcacaagcggtggagcatgtgttaacttggatgcaacgcgaagaccattacctactcttgacatccagagaactcagcagagatgttttggtgccttcgggaactctgagacaggtgctgcatggctgtcgtcagctcgtgttgtgaaatgttggttaagtcccgcaacgagcgcaacccttatcctttgttgccagcggttcggccgggaactcaaaggagactgccagtgataaactggaggaaggtggggatgacgtcaagtcatcatggcccttacgagtagggctacacacgtgctacaatggcgcatacaaagagaagcgacctcgcgagagcaagcggacctcataaagtgcgtcgtagtccggattggagtctgcaactcgactccatgaagtcggaatcgctagtaatcgtagatcagaatgctacggtgaatacgttcccgggccttgtacacaccgcccgtcacaccatgggagtgggttgcaaaagaagtaggtagcttaaccttcgggagggcgcttaccactttgtgattcatgactggggtgaagtcgtaacaaggtaaccgtagg

SEQ ID NO: 1255 - DNA, 1403 bp, Artificial Sequence; identical to SEQ ID NO: 612
  Synthetic polymer

SEQ ID NO: 1256 - DNA, 1447 bp, Artificial Sequence
  Synthetic polymer
ctcagattgaacgctggcggcaggcctaacacatgcaagccgagcggtagcacaagagagcttgctctctgggtgacgagcggcggacgggtgagtaatgtctgggaaactgcctgatggagggggataactactggaaacggtagctaatgccgcataacgtctacggaccaaagtgggggaccttcgggcctcacgccatcagatgtgcccagatgggattagctagtaggtggggtaatggctcacctaggcgacgatccctagctggtctgagaggatgaccagccacactggaactgagacacggtccagactcctacgggaggcagcagtggggaatattgcacaatgggcgcaagcctgatgcagccatgccgcgtgtgtgaagaaggccttagggttgtaaagcactttcagcgaggaggaagggttcagtgttaatagcactgtacattgacgttactcgcagaagaagcaccggctaactccgtgccagcagccgcggtaatacggagggtgcaagcgttaatcggaattactgggcgtaaagcgcacgcaggcggtttgttaagtcagatgtgaaatccccgcgcttaacgtgggaactgcatttgaaactggcaagctagagtcttgtagaggggggtagaattccaggtgtagcggtgaaatgcgtagagatctggaggaataccggtggcgaaggcggccccctggacaaagactgacgctcaggtgcgaaagcgtggggagcaaacaggattagataccctggtagtccacgctgtaaacgatgtcgatttggaggttgtgcccttgaggcgtggcttccggagctaacgcgttaaatcgcaatcctggggagtacggccgcaaggttaaaactcaaatgaattgacgggggcccgcacaagcggtggagcatgtggtttaattcgatgcaacgcgaagaaccttacctactcttgacatccagagaactttccagagatggattggtgccttcgggaactctgagacaggtgctgcatggctgtcgtcagctcgattgctgaaatgttgggttaagtcccgcaacgagcgcaacccttatcctttgttgccagcgattcggtcgggaactcaaaggagactgccggtgattttccggaggaaggtggggatgacgtcaagtcatcttaacacggacgagtagggctacacacgtgctacaatggcgtatacaaagagaagcgaactcgcgagagcaagcggacctcataaagtacgtcgtagtccggattggagtctgcaactcgactccatgaagtcggaatcgctagtaatcgtagatcagaatgctacggtgaatacgttcccgggccctgtacacaccgcccgtcacaccatgggagtgggttgcaaaagaagtaggtagcttaaccttcgggagggcgcttaccac

SEQ ID NO: 1257 - DNA, 1400 bp, Artificial Sequence; identical to SEQ ID NO: 561
  Synthetic polymer

SEQ ID NO: 1258 - DNA, 1387 bp, Artificial Sequence
  Synthetic polymer
aagtagcttgctactttgccggcgagcggcggacgggtgagtaatgtctgggaaactgcctgatggagggggataactactggaaacggtagctaataccgcatgacctcgcaagagcaaagtgggggaccttagggcctcacgccatcggatgtgcccagatgggattagctagtaggtgaggtaatggctcacctaggcgacgatccctagctggtctgagaggatgaccagccacactggaactgagacacggtccagactcctacgggaggcagcagtggggaatattgcacaatgggcgcaagcctgatgcagccatgccgcgtgtgtgaagaaggccttcgggttgtaaagcactttcagcgaggaggaaggcagcaaagcgaatacctttgctgattgacgttactcgcagaagaagcaccggctaactccgtgccagcagccgcggtaatacggagggtgcaagcgttaatcggaattactgggcgtaaagcgcacgcaggcggtttgttaagtcagatgtgaaatccccgcgcttaacgtgggaactgcatttgaaactggcaagctagagtcttgtagaggggggtagaattccaggtgtagcggtgaaatgcgtagagatctggaggaataccggtggcgaaggcggccccctggacaaagactgacgctcaggtgcgaaagcgtggggagcaaacaggattagataccctggtagtccacgctgtaaacgatgtcgatttggaggttgtgggcttgacccgtggcttccggagctaacgcgttaaatcgaccgcctggggagtacggccgcaaggttaaaactcaaatgaattgacgggggcccgcacaagcggtggagcatgtggtttaattcgatgcaacgcgaagaaccttacctactcttgacatccagagaattcgctagagatagcttagtgccttcgggagctctgagacaggtgctgcatggctgtcgtcagctcgtgttgtgaaatgttgggttaagtcccgcaacgagcgcaacccttatcctttgttgccagcacgtcatggtgggaactcaaaggagactgccggtgataaaccggaggaaggtggggatgacgtcaagtcatcatggcccttacgagtagggctacacacgtgctacaatggcatatacaaagagaagcgaactcgcgagagccagcggacctcataaagtatgtcgtagtccggattggagtctgcaactcgactccatgaagtcggaatcgctagtaatcgtagatcagaatgctacggtgaatacgttcccgggccttgtacacaccgcccgtcacaccatgggagtgggttgcaaaagaagtaggtagcttaaccttcgggagggcgc

SEQ ID NO: 1259 - DNA, 1456 bp, Artificial Sequence
  Synthetic polymer
tgaacgctggcggcaggcctaacacatgcaagtcgagcggcagcgggaagtagtttactactttgccggcgagcggcggacgggtgagtaatgtctgggaaactgcctgatggagggggataactactggaaacggtagctaataccgcatgacctcgtaagagcaaagtgggggaccttcgggcctcacgccatcggatgtgcccagatgggattagctagtaggtggggtaatggctcacctaggcgacgatccctagctggtctgagaggatgaccagccacactggaactgagacacggtccagactcctacgggaggcagcagtggggaatattgcacaatgggcgcaagcctgatgcagccatgccgcgtgtgtgaagaaggccttcgggttgtaaagcactttcagcgaggaggaaggcagtcgtgttaatagcacggttgattgacgttactcgcagaagaagcaccggctaactccgtgccagcagccgcggtaatacggagggtgcaagcgttaatcggaattactgggcgtaaagcgcacgcaggcggtttgttaagtcagatgtgaaatccccgggcttaacctgggaactgcatttgaaactggcaggctagagtcttgtagaggggggtagaattccaggtgtagcggtgaaatgcgtagagatctggaggaataccggtggcgaaggcggccccctggacaaagactgacgctcaggtgcgaaagcgtggggagcaaacaggattagataccctggtagtccacgccgtaaacgatgtcgacttggaggttgtgcccttgaggcgtggcttccggagctaacgcgttaagtcgaccgcctggggagtacggccgcaaggttaaaactcaaatgaattgacgggggcccgcacaagcggtggagcatgtggtttaattcgatgcaacgcgaagaaccttacctggccttgacatccacggaattcggcagagatgccttagtgccttcgggaaccgtgagacaggtgctgcatggctgtcgtcagctcgtgttgtgaaatgttgggttaagtcccgcaacgagcgcaacccttatcctttgttgccagcgagtaatgtcgggaactcaaaggagactgccggtgacaaaccggaggaaggtggggatgacgtcaagtcatcatggcccttacggccagggctacacacgtgctacaatggcgcatacaaagagaagcgaactcgcgagagcaagcggacctcacaaagtgcgtcgtagtccggatcggagtctgcaactcgactccgtgaagtcggaatcgctagtaatcgtagatcagaatgctacggtgaatacgtccccgggccttgtacacaccgcccgtcacaccatgggagtgggttgcaaaagaagtaggtagcttaaccttcgggagggcgcttaccactttgtgattcatgac

SEQ ID NO: 1260 - DNA, 1472 bp, Artificial Sequence
  Synthetic polymer
catgcaagtcagagcggtagcacaggagagcttgctctctgggtgacgagcggcggacgggtgagtaatgtctgggaaactgcctgatggagggggataactactggaaacggtagctaataccgcatgatgtcgcaagaccaaagtgggggaccttcgggcctcacgccatcggatgtgcccagatgggattagctagtaggtgaggtagatgtgctcacctagtggcgacgatgccctagctggtctgacgtctaggatgaccagccacactggaactgagacacggtccagactcctacgggaggcagcagtggggaatattggacaatgggcgcaagcctgatgcagccatgccgcgtgtgtgaagaaggccttcgggttgtaaagcactttcagcgaggaggaagggtttagtgttaatagcactaagcattgacgttactcgcagaagaagcaccggctaactccgtgccagcagccgcggtaatacggagggtgcaagcgttaatcggaattactgggcgtaaagcgcacgcaggcggtttgttaagtcagatgtgaaatccccgagcttaacttgggaactgcatttgaaactggcaagctagagtcttgtagaggggtggtagaattccaggtgtagcggtgaaatgcgtagagatctggaggaataccggtggcgaaggcggccccctggacaaagactgacgctcaggtgcgaaagcgtggggagcaaacaggattagataccctggtagtccacgctgtaaacgatgtcgattaggaggtggtgggcttgacccgtggcttccgcagctaacgcgttaaatcgaccgcctggggagtacggccgcaaggttaaaactcaaatgaattgacgggggcccgcacaagcggtggagcatgtggtttaattcgatgcaacgcgaagaaccttacctactcttgacatccagtagaattcgctagagatagcttagtgccttcgggagctctgagacaggtgctgcatggctgtcgtcagctcgtgcttgtgaaatgttgggttaagtcccgcaacgagcgcaacccttatcctttgttgccagcacgtaatggtgggaactcaaaggagactgccggtgataaaccgagagcggatgaggtcggggactgcttacgtcaagtcatcgactggctcctgctacgagtagggcatcactacatcgatgtctacaatggcatatacaaagagaagccaactcgcgagagcaagcggacctcacaaagtatgtcgtagtccggattggagtctgcaactcgactccatgaagtcggaatcgctagtaatcgtagatcagaatgctacggtgaatacgttcccgggccttgtacacaccgcccgtcacaccatgggagtgggttgcaaaagaagtaggtagcttaaccttcgggagggcgcttacctactttgtgattcatgtctgggg

SEQ ID NO: 1261 - DNA, 1493 bp, Artificial Sequence
  Synthetic polymer
agtttgatcctggctcagattgaacgctggcggcaggcctaacacatgcaagtcgaacggtagcacagagagcttgctctcgggtgacgagtggcggacgggtgagtaaagtctgggaaactgcctgatgagggggataactactggaaacggtagctaataccgcataacgtcttcggaccaaagagggggaccttcgggcctcttgccatcagatgtgcccagatgggattagcttgttggtggggtaaaggctcaccaaggcgacgatccctagctggtctgagaggatgaccagccacactggaactgaggcacggtccaggctcctacgggaggcagcagtgggaatattgcacaatgggcgcaagcctgatgcagccatgccgcgtgtatgaagaaggccttcgggttgtaaagtactttcagcggggaggaaggcggtgaggttaataaccttatcgattgacgttacccgcagaagaagcaccggctaactccgtgccagcagccgcggtaatacggagggtgcaagcgttaatcggaattactgggcgtaaagcgcacgcaggcggtctgtcaagtcggatgtgaaatccccgggctcaacccgggaactgcattcgaaactggcaggctggagtcttgtagagggggggtagaattccaggtgtagcggtgaaatgcgtagagatctggaggaataccggtggcgaaggcggccccctggacaaagactgacgctcaggtgcgaaagcgtggggagcaaacaggattagataccctggtagtccacgctgtaaacgatgtcgacttggaggttgttcccctgaggagtggcttccggagctaacgcgttaagtcgaccgcctggggagtacggccgcaaggttaaaactcaaatgaattgacgggggcccgcacaagcggtggagcatgtggtttaattcggtgcaacgcgaagaaccttacctgatcttgacgtccacggaagaattcagagatggattcgtgccttcgggaaccgtgagacaggtgctgcatggctgtcgtcagctcgtgttgtgaaatgttgggttaagtcccgcaacgagcgcaacccttatcctttgttgccagcggtccggccgggaactcaaaggagaccgccagtgataaactggaggaaggtggggatgacgtcaagtcatcatggcccttacgaccagggctacacacgtgctacaatggcatatacaaagagaagcgacctcgcgagagcaagcggacctcataaagtatgtcgtagtccggatcggagtctgcaactcgactccgtgaagtcggaatcgctagtaatcgtggatcagaatgccacggtgaatacgttcccgggccttgtacacaccgcccgtcacaccatgggagtgggttgcaaaagaagtaggtagcttaaccttagggagggcgcttaccactttgtgattcatgactggggtgaagtcgtaacaagg

SEQ ID NO: 1262 - DNA, 1840 bp, Artificial Sequence; identical to SEQ ID NO: 1026
  Synthetic polymer

SEQ ID NO: 1263 - DNA, 1461 bp, Artificial Sequence; identical to SEQ ID NO: 864
  Synthetic polymer

SEQ ID NO: 1264 - DNA, 1403 bp, Artificial Sequence
  Synthetic polymer
agagtcttatcctggctcagattgaacgctggcggcaggcctaacacatgcaagtcgagcggtaacaggggaagcttgcttcccgttgacgagcggcggacgggtgagtaatgtatggggatctgcccgatagagggggataactactggaaacggtggctaataccgcataatctctaaggagcaaagcaggggaacttcggtccttgcgctatcggatgaacccatatgggattagctagtaggtggggtaatggctcacctaggcgacgatccctagctggtctgagaggatgatcagccacactgggactgagacacggcccagactcctacgggaggcagcagtggggaatattgcacaatgggcgcaagcctgatgcagccatgccgcgtgtatgaagaaggccctagggttgtaaagtactttcagtcgggaggaaggcgttggtgctaatatcatcaacgattgacgttaccgacagaagaagcaccggctaactccgtgccagcagccgcggtaatacggagggtgcaagcgttaatcggaattactgggcgtaaagcgcacgcaggcggttgattaagttagatgtgaaatccctgggcttaacctgggaatggcatctaagactggtcagctagagtcttgtagaggggggtagaattccatgtgtagcggtgaaatgcgtagagatgtggaggaataccggtggcgaaggcggccccctggacaaagactgacgctcaggtgcgaaagcgtggggagcaaacaggattagataccctggtagtccacgctgtaaacgatgtcgatttggaaggttgtcccctgaaggcggggcttccggagccaacgcgtaaaatcgaccgcctggggagtacggcccgcaaggttaaaactcaaatgaattgacgggggcccgcacaagcgggtgggagcatgtggtttaattcgatgcaacgcgaagaaccttacctactcttgacatccagagaacttagcagagatgctttggtgccttcgggaactctgagacaggtgctgcatggctgtcgtcagctcgtgttgtgaaatgttgggttaagtcccgcaacgagcgcaacccttatcctttgttgccagcgattcggtcgggaactcaaaggagactgccggtgataaaccggaggaaggtggggatgacgtcaagtcatcatggccctcacgagtagggctacacacgtgctacaatggcgtatacaaagagaagcgacctcgcgagagcaagcggaactcataaagtacgtcgtagtccggattggagtctgcaactcgactccatgaagtcggaatcgctagtaatcgtagatcagaatgctacggtgaatacaaaaccgggccttgcacacaccgcccgtca

SEQ ID NO: 1265 - DNA, 1452 bp, Artificial Sequence
  Synthetic polymer
agtcggacggtagcacagaggagcttgctcctcgggtgacgagtggcggacgggtgagtaatgtctgggaaactgcccgatggagggggataactactggaaacggtagctaataccgcataacgtcgcaagaccaaagtgggggacctccgggcctcacaccatcggatgtgcccagatgggattagcttgtaggcggggtaacggcccacctaggcgacgatccctagctggtctgagaggatgaccagccacactggaactgagacacggtccagactcctacgggaggcagcagtggggaatattgcacaatgggcgcaagcctgatgcagccatgccgcgtgtatgaagaaggccttcgggttgtaaagtactttcagcggggaggaaggtgctgaggttaataacctcagcaattgacgttacccgcagaagaagcaccggctaactccgtgccagcagccgcggtaatacggagggtgcaagcgttaatcggaattactgggcgtaaagcgcacgcaggcggtctgttaagtcagatgtgaaatccccgggcttaacctgggaactgcatttgaaactggcaggcttgagtctcgtagaggggggtagaattccaggtgtagcggtgaaatgcgtagagatctggaggaatacccggtggcgaaggcggccccctggacgaagactgacgctcaggtgcgaaagcgtggggagcaaacaggattagataccctggtagtccacgccgtaaaacgatgtcggacttggagggttgttcccttgaggagtggctttccgggagctaaccgcgttaaagtcgacccgcctgggggagtacgggccgcaaaggttaaaaactcaaattgaattgacgggggcccggcacaagccggtggagcatgtggtttaattcgatgcaacgccgaagaaaccttaccctactcttgacatccagccgaacttttccaagagatggaattggtgccttccgggaacgctggagaccaggtggctgccatggctgtcggtcagctccgtgtttgtgaaaatgttggggttaagtccccgcaaacgaggcgcaaacccttatccctttgttgccagcggattcgggtcgggaacctcaaaaggagactgcccggtgataaacccggaggaaggtgggggatgacgtcaagtccatcatggcccttacgagtagggctacacacgtgctacaatggcgcatacaaagagaagcgacctcgcgagagcaagcggacctcataaagtgcgtcgtagtccggatcggagtctgcaactcgactccgtgaagtcggaatcgctagtaatcgtggatcagaatgccacggtgaatacgttcccgggccttgtacacaccgcccgtcacaccatgggagtgggttgcaaaagaagtaggtagctaacctctcggagggcgctacc

SEQ ID NO: 1266 - DNA, 1360 bp, Artificial Sequence; identical to SEQ ID NO: 562
  Synthetic polymer

SEQ ID NO: 1267 - DNA, 1404 bp, Artificial Sequence
  Synthetic polymer
agtcgaacggtagcacagagagcttgctctcgggtgacgagtggcggacgggtgagtaatgtctgggaaactgcccgatggagggggataactactggaaacggtagctaataccgcataacgtcgcaagaccaaagagggggaccttcgggcctcttgccatcggatgtgcccagatgggattagcttgtaggtgaggtaacggctcacctaggcgacgatccctagctggtctgagaggatgaccagccacactggaactgagacacggtccagactcctacgggaggcagcagtggggaatattgcacaatgggcgcaagcctgatgcagccatgccgcgtgtatgaagaaggccttcgggttgtaaagtactttcagcggggaggaagggagtgaggttaataaccttattcattgacgttacccgcagaagaagcaccggctaactccgtgccagcagccgcggtaatacggagggtgcaagcgttaatcggaattactgggcgtaaagcgcacgcaggcggtctgtcaagtcggatgtgaaatccccgggctcaacctggaacagcattcgaaactgacaagcctggagtctgtagaggggggtagaattccaggtgtagcggtgaaatgcgtagagatctggaggataccggtggcgaaggcggccccctggacaaagactgacgctcaggtgcgaaagcgtggggagcaaacagggattagataccctggtagtccacgctgtaaacgatgtcgacttggaggttgttcccttgaggagtggcttccggagctaacgcgttaagtcgaccgcctggggagtacggccgcaaggttaaaactcaaatgaattgacgggggcccgcacaagcggtggagcatgtggtttaattcgatgcaacgcgaagaaccttacctactcttgacatccagagaacttagcagagatgctttggtgccttcgggaactctgagacaggtgctgcatggctgtcgtcagctcgtgttgtgaaatgttgggttaagtcccgcaacgagcgcaacccttatcctttgttgccagcgattcggtcgggaactcaaaggagactgccagtgataaactggaggaaggtggggatgacgtcaagtcatcatggcccttacgagtagggctacacacgtgctacaatggcatatacaaagagaagcgacctcgcgagagcaagcggacctcataaagtatgtcgtagtccggattggagtctgcaactcgactccatgaagtcggaatcgctagtaatcgtggatcagaatgccacggtgaatacgttcccgggccttgtacacaccgcccgtcacaccatgggagtgggttgcaaaagaagtaggtagcttaaccttcgggaggacgctacc

SEQ ID NO: 1268 - DNA, 1369 bp, Artificial Sequence
  Synthetic polymer
attgaacgctggcggcaggcctaacacatgcaagtcgagcggcagcggaaagtagcttgctactttgccggcgagcggcggacgggtgagtaatgtctgggaaactgcctgatggagggggataactactggaaacggtagctaataccgcataacgtcgcaagaccaaagagggggaccttcgggcctcttgccatcagatgtgcccagatgggattagctagtaggtggggtaacggctcacctaggcgacgatccctagctggtctgagaggatgaccagccacactggaactgagacacggtccagactcctacgggaggcagcagtggggaatattgcacaatgggcgcaagcctgatgcagccatgccgcgtgtatgaagaaggccttcgggttgtaaagtactttcagcggggaggaaggcgttgaggttaataacctcagcgattgacgttacccgcagaagaagcaccggctaactccgtgccagcagccgcggtaatacggagggtgcaagcgttaatcggaattactgggcgtaaagcgcacgcaggcggtctgtcaagtcggatgtgaaatccccgggctcaacctgggaactgcattcgaaactggcaggctagagtcttgtagaggggggtagaattccaggtgtagcggtgaaatgcgtagagatctggaggaataccggtggcgaagggggccccctggacaaagactgacgctcaggtgcgaaagcgtggggagcaaacaggattagataccctggtagtccacgctgtaaacgatgtcgactgggaggttgtgcccttgagggcgtggcttccggagctaacgcgttaagtcgaccgcctggggagtacggccgcaaggttaaaactcaaatgaattgacgggggcccgcacaagcggtggagcatgtggtttaattcgatgcaacgcgaagaaccttacctactcttgacatccagagaacttagcagagatgctttggtgccttcgggaactctgagacaggtgctgcatggctgtcgtcagctcgtgttgtgaaatgttgggttaagtcccgcaacgagcgcaacccttatcctttgttgccagcggtccggccgggaactcaaaggagactgccagtgataaactggaggaaggtggggatgacgtcaagtcatcatggcccttacgagtagggctacacacgtgctacaatggcgcatacaaaagagaaagcgacctcgcgagagcaagcggacctcataaagtgcgtcgtagtccggattggagtctgcaactcgactccatgaaagtcggaatcgctagtaatcgtagatcagaaatgctacggtgaaatacgtttcccgggcc

SEQ ID NO: 1269 - DNA, 1416 bp, Artificial Sequence
  Synthetic polymer
catgcaagtcgaacggtagcacagaggagcttgctccttgggtgacgagtggcgaacgggtgagtaatgtctggggatctgcccgatagagggggataactactggaaacggtggctaataccgcgtaacgtcgcaagaccaaagagggggaccttctcaggcctctcactatcggatgaacccagatgggattagctagtaggcggggtaatggctcacctaggcgacgatccctagctggtctgagaggatgaccagccacactggaactgagacacggtccagactcctacgggaggcagcagtggggaatattgcacaatgggcgaaagcctgatgcagccatgccgcgtgtatgaagaaggccttcgggttgtaaagtactttcagcggggaggaaggcaatgtggttaataaccgcgttgattgacgttacccgcagaagaagcaccggctaactccgtgccagcagccgcggtaatacggagggtgcaagcgttaatcggaattactgggcgtaaagcgcacgtaggcggtctgttaagtcagatgtgaaatccccgggcttaacctgggaactgcatttgaaactggcaggcttgagtctcgtagaggggggtagaattccaggtgtagcggtgaaatgcgtagagatctggaggaataccagtggcgaaggcggccctctggacgaagactgacgctcaggtgcgaaagcgtggggagcaaagaggattagataccctggtagtccacgccgtaaacgatgtcgacttggaggttgttcccttgaggagtagcttccggagctaacgcgttaagtcgaccgcctggggagtacggccgcaaggttgaaactcaaatgaattgacgggggcccgcacaagcggtggagcatgtggtttaattcgatgcaacgcgaagaaccttacctactcttgacatccacagaatttggcagaaatgcctagtgccttcgggaactgtgagacaggtgctgcatggctgtcgtcagctcgtgttgtgaaatgttgggttaagtcccgcaacgagcgcaacccttatcctttgttgccagcgactcggtcgggaactcaaaggagactgccggtgataaactggaggaaggtggggatgacgtcaagtcatcatggcccttacgagtagggctacacacgtgctacaatggcgtatacaaagagaagcgacctcgcaagagtaagcggacctcataaagtgcgtcttagtccggatcggagtctgcaactcgactccgtgaagtcggaatcgctagtaatcgtggatcagaatgccacggtgaatacgttcccgggccttgtacacaccgcccgtcacaccatgggagtggattgcaaaagaagtaggtagcttaaccttcgggagggcgcttacca

SEQ ID NO: 1270 - DNA, 1505 bp, Artificial Sequence
  Synthetic polymer
tagggtttgatcctggctcagattgaacgctggcggcaggcctaacacatgcaagtcgaacggtagcacagaggagcttgctccttgggtgacgagtggcggacgggtgagtaatgtctgggaaactgcccgatggagggggataactactggaaacggtagctaataccgcataacgtcgcaagaccaaagagggggaccttcgggcctcttgccatcggatgtgcccagatgggattagctagtaggtggggtaacggctcacctaggcgacgatccctagctggtctgagaggatgaccagccacactggaactgagacacggtccagactcctacgggaggcagcagtggggaatattgcacaatgggcgcaagcctgatgcagccatgccgcgtgtatgaagaaggccttcgggttgtaaagtactttcagcgaggaggaaggtgttgtggttaataaccgcagcaattgacgttactcgcagaagaagcaccggctaactccgtgccagcagccgcggtaatacggagggtgcaagcgttaatcggaattactgggcgtaaagcgcacgcaggcggtctgtcaagtcggatgtgaaatccccgggctcaacctgggaactgcatccgaaactggcaggctagagtcttgtagaggggggtagaattccaggtgtagcggtgaaatgcgtagagatctggaggaataccggtggcgaaggcggccccctggacaaagactgacgctcaggtgcgaaagcgtggggagcaaacaggattagataccctggtagtccacgccgtaaacgatgtcgacttggaggttgtgcccttgaggcgtggcttccggagctaacgcgttaagtcgaccgcctggggagtacggccgcaaggttaaaactcaaatgaattgacgggggcccgcacaagcggtggagcatgtggtttaattcgatgcaacgcgaagaaccttacctactcttgacatccagagaagtttgcagagatgcgaacgtgccttcgggaactctgagacaggtgctgcatggctgtcgtcagctcgtgttgtgaaatgttgggttaagtcccgcaacgagcgcaacccttatcctttgttgccagcggttcggccgggaactcaaaggagactgccagtgataaactggaggaaggtggggatgacgtcaagtcatcatggcccttacgagtagggctacacacgtgctacaatggtggggacagagggctgcaatcccgcgagggtgagccaatcccagaaaccccatctcagtccggattggagtctgcaactcgactccatgaagtcggaatcgctagtaatcgcagatcagcattgctgcggtgaatacgttcccgggccttgtacacaccgcccgtcacaccatgggagtttgttgcaccagaagcaggtagcttaaccgcaaggagggcgcttgccacggtgtggccgatgactggggtgaagtcgtaacaaggtaacc

SEQ ID NO: 1271 - DNA, 1381 bp, Artificial Sequence
  Synthetic polymer
  misc_feature (2)..(2): n is a, c, g, or t
angcagcttgctgctttgctgacgagtggcggacgggtgagtaatgtctgggaaactgcctgatggagggggataactactggaaacggtggctaataccgcataacgtcgcaagaccaaagagggggaccttcgggcctcttgccatcagatgtgcccagatgggattagcttgttggtgaggtaacggctcaccaaggcgacgatccctagctggtctgagaggatgaccagccacactggaactgagacacggtccagactcctacgggaggcagcagtggggaatattgcacaatgggcgcaagcctgatgcagccatgccgcgtgtatgaagaaggccttcgggttgtaaagtactttcagcggggaggaaggtgttgtggttaataaccgcagcaattgacgttacccgcagaagaagcaccggctaactccgtgccagcagccgcggtaatacggagggtgcaagcgttaatcggaattactgggcgtaaagcgcacgcaggcggtctgtcaagtcggatgtgaaatccccgggctcaacctgggaactgcattcgaaactggcaggcttgagtcttgtagaggggggtagaattccaggtgtagcggtgaaatgcgtagagatctggaggaataccggtggcgaaaggcggccccctggacaaagactgacgctcagtgcgaaagcgtggggagcaaacaggattagataccctggtagtccacgccgtaaacgatgtctacttggaggttgtgcccttgagcgtggcttccggagctaacgcgttaagtagaccgcctgggggagttccggccgcaaaggttaaaaactcaaaatgaatttgacgggggggccccccccaaggcggtgggagcatgtgggtttaatttcgatgcaaacgcgaagaaaccttacctggttcttgacatcccacagaagaatcccagagatggatttgtgccttccgggaactgtgagacaggtgctgcatggctgtcgtcagctcgtgttgtgaaatgttgggttaagtcccgcaacgagcgcaacccttatcctttgttgccagcggttaggccgggaactcaaaggagactgccagtgataaactggaggaaggtggggatgacgtcaagtcatcatggcccttacgaccagggctacacacgtgctacaatggcgcatacaaagagaagcgacctcgcgagagcaagcggacctcataaagtgcgtcgtagtccggattggagtctgcaactcgactccatgaagtcggaatcgctagtaatcgtggatcagaatgccacggtgaatacgttcccgggccttgtacacaccgcccgtcacaccatgggagtgggttgcaaaagaagtagg

SEQ ID NO: 1272 - DNA, 1466 bp, Artificial Sequence
  Synthetic polymer
cggcaggcctaacacatgcaagtcgtaacaaggtacacagagagcttgctgcttgggtgacgagtggcggacgggtgagtaatgtctgggaaactgcctgatggagggggataactactggaaacggtagctaataccgcataacgtcgcaagaccaaagagggggaccttcgggcctcttgccatcagatgtgcccagatgggattagctagtaggtggggtaacggctcacctaggcgacgatccctagctggtctgagaggatgaccagccacactggaactgagacacggtccagactcctacgggaggcagcagtggggaatattgcacaatgggcgcaagctgatgcagccatgccgcgtgtatgaagaaggccttcgggttgtaaagtactttcagcggggaggaaggcgatgcggttaataaccgcgtcgattgacgttacccgcagaagaagcaccggctaactccgtgccagcagccgcggtaatacggagggtgcaagcgttaatcggaattactgggcgtaaagcgcacgcaggcggtctgtcaagtcggatgtgaaatccccgggctcaacctgggaactgcatccgaaactggcaggcttgagtctcgtagaggggggatgaattccaggtgtagcggtgaaatgcgtagagatctggaggaataccggtggcgaaggcggccccctggacgaagactgacgctcaggtgcgaaagcgtggggagcaaacaggattagataccctggtagtccacgccgtaaacgatgtcgacttggaggttgtgcccttgaggcgtggcttccggagctaacgcgttaagtcgaccgcctggggagtacggccgcaaggttaaaactcaaatgaattgacgggggcccgcacaagcggtggagcatgtggtttaattcgatgcaacgcgaagaaccttacctggtcttgacatccacagaacttcgcagagatgcattggtgccttcgggaactgtgagacaggtgctgcatggctgtcgtcagctcgtgttgtgaaatgttgggttaagtcccgcaacgagcgcaacccttatcctttgttgccagcggtcaggccgggaactcaaaggagactgccagtgataaactggaggaaggtggggatgacgtcaagtcatcatggcccttacgaccagggctacacacgtgctacaatggcgcatacaaagagaagcaaactcgcgagagcaagcggacctcataaagtgcgtcgtagtccggattggagtctgcaactcgactccatgaagtcggaatcgctagtaatcgtgaatcagaatgtcacggtgaatacgttcccgggccttgtacacaccgcccgtcacaccatgggagtgggttgcaaaagaagtaggtagcttaaccttcgggagggcgcttaccactttgtgattcatgactggggtgaagtcgtaacaagg

SEQ ID NO: 1273 - DNA, 1488 bp, Artificial Sequence; identical to SEQ ID NO: 1035
  Synthetic polymer

SEQ ID NO: 1274 - DNA, 1498 bp, Artificial Sequence
  Synthetic polymer
gtttgatcatggctcagattgaacgctggcggcaggcctaacacatgcaagtcgaacggtagcaggaagaagcttgcttctttgctgacgagtggcggacgggtgagtaatgtctggggatctgccttgtagagggggataaccactggaaacggtggctaataccgcataacgtcttcggaccaaagtgggggaccttcgggcctcacgctaccggatgaacccagatgggattagcttgctggtgaggtaacggctcaccagggctgcgatccctagctggtctgagaggatgaccagccacactggaactgagacacggtccagactcctacgggaggcagcagtggggaatattgcacaatgggcgcaagcctgatgcagccatgccgcgtgtatgaagaaggccttcgggttgtaaagtactttcagcggggaggaagggggagaggttaataacctttttcattgacgttacccggagaagaagcaccggctaactccgtgccagcagccgcggtaatacggagggtgcgagcgttaatcggaattactgggcgtaaagggcacgcaggcggtgtgttaagtcagatgtgaaatccccgggctcaacccgggaactgcatttgaaactggcatgcttgagtctcgtagaggggggtagaattccaggtgtagcggtgaaatgcgtagagatctggaggaataccggtggcgaaggcggccccctggacgaagactgacgctgaggtgcgaaagcgtggggagcaaacaggattagataccctggtagtccacgctgtaaacgatgtcgatttggaggttgtggtcatgaactgtgtcttccgaagctaacgcgataaatcgaccgccctggggagtacggccgcaaggttaaaactcaaatgaattgacgggggcccgcacaagcggtggagcatgtggtttaattcgatgcaacgcgaagaaccttacctggtcttgacatccacagaaatccccggagacggggagttgccttcgggagctgtgagacaggtgctgcatggctgtcgtcagctcgtgttgtgaaatgttgggttaagtcccgcaacgagcgcaacccttatcctttgttgccatcggttcggccgggaactcaaaggagactgccggtgataaaccggaggaaggtggggatgacgtcaagtcatcatggcccttacgaccagggctacacacgtgctacaatggcgcatacaaagagaagcgagcctgcgaggggaagcggaactcataaagtgcgtcgtagtccggatcggagtctgcaacccgactccgtgaagtcggaatcgctagtaatcgtggatcagaatgccacggtgaatacgttcccgggccttgtacacaccgcccgtcacaccatgggagtgggttgcaaaagaagtaggtagcttaaccttcgggagggcgcttaccactttgtgattcatgactggggtgaagtcgtaacaaggta

SEQ ID NO: 1275 - DNA, 1442 bp, Artificial Sequence
  Synthetic polymer
  misc_feature (220)..(220): n is a, c, g, or t
  misc_feature (223)..(224): n is a, c, g, or t
  misc_feature (226)..(232): n is a, c, g, or t
  misc_feature (236)..(236): n is a, c, g, or t
  misc_feature (240)..(240): n is a, c, g, or t
  misc_feature (244)..(244): n is a, c, g, or t
  misc_feature (1200)..(1200): n is a, c, g, or t
  misc_feature (1232)..(1232): n is a, c, g, or t
  misc_feature (1237)..(1239): n is a, c, g, or t
  misc_feature (1241)..(1241): n is a, c, g, or t
  misc_feature (1256)..(1256): n is a, c, g, or t
catgcaagtcgagcggcagcggaagtagcttgctactttgccggcgagcggcggacgggtgagtaatgtctgggaaactgcctgatggagggggataactactggaaacggtagctaataccgcatgacctcgaaagagcaaagtgggggatcttcggacctcacgccatcggatgtgcccagatgggattagctagtaggtgaggtaatggctcaccgnttnnannnnnnnggcngacngatncccttagctggtctgagaggatgaccagccacactggaactgagacacggtccagactcctacgggaggcagcagtggggaatattgcacaatgggcgcaagcctgatgcagccatgccgcgtgtgtgaagaaggccttagggttgtaaagcactttcagcgaggaggaagggcatcatacttaatacgtgtggtgattgacgttactcgcagaagaagcaccgggctaactccgtgccagcagccgcggtaatacggagggtgcaagcgttaatcggaattactgggcgtaaagcgcacgcaggcggtttgttaagtcagatgtgaaatccccgcgcttaacgtgggaactgcatttgaaactggcaagctagagtcttgtagaggggggtagaattccaggtgtagcggtgaaatgcgtagagatctggaggaataccggtggcgaaggcggccccctggacaaagactgacgctcaggtgcgaaagcgtggggagcaaacaggattagataccctggtagtccacgctgtaaacgatgtcgacttggaggttgtgcccttgaggcgtggcttccggagctaacgcgttaagtcgaccgcctggggagtacggccgcaaggttaaaactcaaatgaattgacgggggcccgcacaagcggtggagcatgtggtttaattcgatgcaacgcgaagaaccttacctactcttgacatccacggaattcgccagagatggcttagtgccttcgggaaccgtgagacaggtgctgcatggctgtcgtcagctcgtgttgtgaaatgttggggttaagtcccgcaacgagcgcaacccttatcctttgttgccagcgagtcatgtcgggaactcaaaggagactgccggtgataaaccggaggaaggtggggatgacgtcaagtcatcatggcccttacgagtagggctacacacgtgnctacaatggcatatacaaagagaagctgaacntcgcnnngnagaccaagcggaccncctcataaagtatgtcgtagtccggattggagtctgcaactcgactccatgaagtcggaatcgctagtaatcgtagatcagaatgctacggtgaatacgttcccgggccttgtacacaccgcccgtcacaccatgggagtgggttgcaaaagaagtaggtagcttaaccttcgggagggcgctacc

SEQ ID NO: 1276 - DNA, 1417 bp, Artificial Sequence
  Synthetic polymer
tagagtttgatcatggctcagattgaacgctggcggcaggcctaacacatgcaagtcgagcggtagcacagagagcttgctctcgggtgacgagcggcggacgggtgagtaatgtctgggaaactgcctgatggagggggataactactggaaacggtagctaataccgcataacgtcgcaagaccaaagtgggggaccttcgggcctcatgccatcagatgtgcccagatgggattagctggtaggtggggtaacggctcacctaggcgacgatccctagctggtctgagaggatgaccagccacactggaactgagacacggtccagactcctacgggaggcagcagtggggaatattgcacaatgggcgcaagcctgatgcagccatgccgcgtgtatgaagaaggccttcgggttgtaaagtactttcagcggggagaaagggtgggtgaggttaataaccttgccgattgacgttacccgcagaagaagcaccggctaactccgtgccagcagccgcggtaatacggagggtgcaagcgttaatcggaattactgggcgtatcagcgcacgcaggcggtctgttaagtcagatcgtgaaatccccgggcttaacctgggaactgcatttgaaactggcaggcttgagtctcgtagaggggggtagaattccaggtgtagcggtgaaatgcgtagagatctggaggaataccggtggcgaaggcggccccctggacgaagactgacgctcaggtgcgaaagcgtggggagcaaacaggattagataccctggtagtccacgccgtaaacgatgtcgacttggaggttgttcccttgaggagtggcttccggagctaacgcgttaagtcgaccgcctggggagtacggccgcaaggttaaaactcaaatgaattgacgggggcccgcacaagcggtggagcatgtggtttaattcgatgcaacgcgaagaaccttacctactcttgacatccagagaacttagcagagatgctttggtgccttcgggaactctgagacaggtgctgcatggctgtcgtcagctcgtgttgtgaaatgttgggttaagtcccgcaacgagcgcaacccttatcctttgttgccagcgattcggtcgggaactcaaaggagactgccggtgataaaccggaggaaggtggggatgacgtcaagtcatcatggcccttacgagtagggctacacacgtgctacaatggcgcatacaaagagaagcgacctcgcgagagcaagcggacctcacaaagtgcgtcgtagtccggatcggagtctgcaactcgactcgtgagtcggaatcgctagtaatcgtggatcaaatgcccggtgaatacgttcccgggcttgtacacaccgccgtcaaacatgggagtggggtgca

SEQ ID NO: 1277 - DNA, 1541 bp, Artificial Sequence; identical to SEQ ID NO: 1
  Synthetic polymer

SEQ ID NO: 1278 - DNA, 1360 bp, Artificial Sequence
  Synthetic polymer
attgaacgctggcggcaggcctaacacatgcaagtcgagcggtagcacacagagcttgctctcgggtgacgagcggcggacgggtgagtaatgtctgggaaactgcctgatggagggggataactactggaaacggtagctaataccgcataacgtcccaagaccaaggtgggggaccttcgggcctcatgccatcagatgtgcccagatgggattagctagtaggtggggtaatggctcacctaggcgacgatccctagctggtctgagaggatgaccagccacactggaactgaaacacggtccagactcctacgggaggcagcagtggggaatattgcacaatgggcgcaagcctgatgcacccatgccgcgtgtgtgaagaacgccttccggttgtaaagcactttcagcggggaggaaggcggtgaggttaataacctcatcgattgacgttacccgcagaagaagcaccggctaactccgtgccagcagccgcggtaatactgagggtgcaagcgtgtatcggaattactgggcgtagagcgcacgcaggcggtctgtcagtcggatgtgaaatccccgggctcaacctgggaactgcattcgaaactggcaggctagagtcttgtagaggggggtagaattccaggtgtagcggtgaaatgcgtagagatctggaggaataccggtggcgaaggcggccccctggacaaagactgacgctcaggtgcgaaagcgtggggagcaaacaggattagataccctggtagtccacgccgtaaacgatgtcgatttggaggttgtgcccttgaggcgtggcttccggagctaacgcgttaaatcgaccgcctggggagtacggccgcaaggttaaaactcaaatgaattgacgggggcccgcacaagcggtggagcatgtggtttaattcgatgcaacgcgaagaaccttacctggtcttgacatccacagaactttccagagatggattggtgccttcgggaactgtgagacaggtgctgcatggctgtcgtcagctcgtgttgtgaaatgttgggttaagtcccgcaacgagcgcaacccttatcctttgttgccagcggtccggccgggaactcaaaggagactgccagtgataaactggaggaaggtggggatgacgtcaagtcatcatggcccttacgaccagggctacacacgtgctacaatggcatatacaaagagaagcgacctcgcgagagcaagcggacctcataaagtatgtcgtagtccggattggagtctgcaactcgactccatggagtcggaatcgctagtaatcgtagatcagaatgctacggtgaatacgttcccgggcct

SEQ ID NO: 1279 - DNA, 1504 bp, Artificial Sequence
  Synthetic polymer
agagtttgatcctggctcagattgaacgctggcggcaggcctaacacatgcaagtcgaacggtaacaggaagaagcttgcttctttgctgacgagtggcggacgggtgagtaatgtctgggaaactgcctgatggagggggataactactggaaacggtagctaataccgcataacgtcgcaagaccaaagagggggaccttcgggcctcttgccatcggatgtgcccagatgggattagctagtaggtggggtaacggctcacctaggcgacgatccctagctggtctgagaggatgaccagccacactggaactgagacacggtccagactcctacgggaggcagcagtggggaatattgcacaatgggcgcaagcctgatgcagccatgccgcgtgtatgaagaaggccttcgggttgtaaagtactttcagcggggaggaagggagtaaagttaatacctttgctcattgacgttacccgcagaagaagcaccggctaactccgtgccagcagccgcggtaatacggagggtgcaagcgttaatcggaattactgggcgtaaagcgcacgcaggcggtttgttaagtcagatgtgaaatccccgggctcaacctgggaactgcattcaaaactgactgactagagtatggtagagggtggtggaatttcctgtgtagcggtgaaatgcgtagatataggaaggaacaccagtggcgaaggcgaccacctggactaatactgacactgaggtgcgaaagcgtggggagcaaacaggattagataccctggtagtccacgccgtaaacgatgtcaactagccgttgggagccttgagctcttagtggcgcagctaacgcattaagctgaccgcctggggagtacggccgcaaggttaaaactcaaatgaattgacgggggcccgcacaagcggtggagcatgtggtttaattcgaagcaacgcgaagaaccttaccaggccttgacatccaatgaactttctagagatagattggtgccttcgggaacattgagacaggtgctgcatggctgtcgtcagctcgtgtcgtgagatgttgggttaagtcccgtaacgagcgcaacccttgtccttagttaccagcacgtaatggtgggcactctaaggagactgccggtgacaaaccggaggaaggtggggatgacgtcaagtcatcatggcccttacggcctgggctacacacgtgctacaatggtcggtacagagggttgccaaaccgcgaggtggagctaatcccataaaaccgatcgtagtccggatcgcagtctgcaactcgactgcgtgaagtcggaatcgctagtaatcgcgaatcagaatgtcgcggtgaatacgttcccgggccttgtacacaccgcccgtcacaccatgggagtgggttgcaccagaagtagctagtctaaccttcgggaggacggttaccacggtgtgattcatgactggggtgaagtcgtaacaaggtaacc

SEQ ID NO: 1280 - DNA, 1441 bp, Artificial Sequence; identical to SEQ ID NO: 929
  Synthetic polymer

SEQ ID NO: 1281 - DNA, 1508 bp, Artificial Sequence
  Synthetic polymer
agagtttgatcatggctcagattgaacgctggcggcaggcctaacacatgcaagtcgagcggcagcggaaagtagcttgctactttgccggcgagcggcggacgggtgagtaatgtctgggaaactgcctgatggagggggataactactggaaacggtagctaataccgcatgacctcgaaagagcaaagtgggggatcttcggacctcacgccatcggatgtgcccagatgggattagctagtaggtgaggtaatggctcacctaggcgacgatccctagctggtctgagaggatgaccagccacactggaactgagacacggtccagactcctacgggaggcagcagtggggaatattgcacaatgggcgcaagcctgatgcagccatgccgcgtgtgtgaagaaggccttagggttgtaaagcactttcagcgaggaggaaggctccatacttaatacgtgtggtgattgacattactcgcagaagaagcaccggctaactccgtgccagcagccgcggtaatacggagagtgcaagcgttaatcggaattactgggcgtaaagcgcacgcaggcggtttgttaagtcagatgtgaaatccccgcgcttaacgtgggaactgcatttgaaaactggcaagctagagtcttgtagaggggggtagaattccaggtgtacggtgaaatgcgtagagatctggaggaataccggtggcgaaggcggccccctggacaaagactgacgctcaagtgcgaaagcgtggggagcaaacaggattagatacccaggtagtccacgctgtaaacgatgtcgacttggaggttgtgcccttgaggcgtggcttccggagctaacgcgttaagtcgaccgcctggggagtacggccgcaaggttaaaactcaaatgaattgacgggggcccgcacaagcggtggagcatgtggtttaattcgatgcaacgcgaagaaccttacctactcttgacatccacggaattcgccagagatggcttagtgccttcgggaaccgtgagacaggtgctgcatggctgtcgtcagctcgtgttgtgaaatgttgggttaagtcccgcaacgagcgcaacccttatcctttgttgccagcacgtaatggtgggaactcaaaggagactgccggtgataaaccggaggaaggtggggatgacgtcaagtcatcatggcccttacgagtagggctacacacgtgctacaatggcatatacaaagagaagcgaactcgcgagagcaagcggacctcatgaagtatgtcgtagtccggattggagtctgcaactcgactccatgaagtcggaatcgctagtaatcgcggatcagaacgccgcggtgaatacgttcccgggtcttgtacacaccgcccgtcacaccacgagagtttgtaacacccgaagccggtgaggtaaccttttaggagccagccgtctaaggtgggatagataattggggtgaagtcgtaacaaggtaaccgta

SEQ ID NO: 1282 - DNA, 1444 bp, Artificial Sequence
  Synthetic polymer
cctgtctcagattgaacgctggcggcaggcttaacacatgcaagtcgagcggtagcgggaggaagcttgcttcctcgccgacgagcggcggacgggtgagtaatgtctggggatctgcctgatggagggggataactactggaaacggtagctaataccgcataacgtcgcaagaccaaagtgggggaccttcgggcctcatgccatcagatgaacccagatgggattagctagtaggtgaggtaatggctcacctaggcgacgatccctagctggtctgagaggatgaccagccacactggaactgagacacggtccagactcctacgggaggcagcagtggggaatattgcacaatgggcgcaagcctgatgcagccatgccgcgtgtatgaagaaggccttcgggttgtaaagtactttcagtagggaggaaggtgtacgtgttaatagcacgtgcaattgacgttacctacagaagaagcaccggctaactccgtgccagcagccgcggtaatacggagggtgcaagcgttaatcggaattactgggcgtaaagcgcacgcaggcggtttgttaagttggatgtgaaatccccgggcttaacctgggaactgcatccaagactggcaagctagagtctcgtagagggaggtagaattccaggtgtagcggtgaaatgcgtagagatctggaggaataccggtggcgaaggcggcctcctggacgaagactgacgctcaggtgcgaaagcgtggggagcaaacaggattagataccctggtagtccacgctgtaaacgatgtcgatttggaggttgtgcccttgaggcgtggcttccgaagctaacgcgttaaatcgaccgcctggggagtacggccgcaaggttaaaactcaaatgaattgacgggggcccgcacaagcggtggagcatgtggtttaattcgatgcaacgcgaagaaccttacctactcttgacatccagcgaatcctgtagagatacgggagtgccttcgggaacgctgagacaggtgctgcatggctgtcgtcagctcgtgttgtgaaatgttgggttaagtcccgcaacgagcgcaacccttatcctttgttgccagcggttcggccgggaactcaaaggagactgccagtgataaactggaggaaggtggggatgacgtcaagtcatcatggcccttacgagtagggctacacacgtgctacaatggcgtatacaaagagaagcgacctcgcgagagcaagcggacctcataaagtacgtcgtagtccggattggagtctgcaactcgactccatgaagtcggaatcgctagtaatcgtggatcagaatgccacggtgaatacgttcccgggccttgtacacaccgcccgtcacaccatgggagtgggttgcaaaagaagtaggtagcttaaccttcgggagggcg

SEQ ID NO: 1283 - DNA, 1467 bp, Artificial Sequence
  Synthetic polymer
attgaacgctggcggcaggcctaacacatgcaagtcgaacggcagcacggggggagcttgctcctcgggtggcgagtggcggacgggtgagtaatgtctggggatctgcccgatggagggggataaccactggaaacggtggctaataccgcataacgtcgcaagaccaaagtggggggaaccttcggacctcataccatcggatgaacccagatgggattagttagtaggtggggtaacggctcacctaggcgacgatccctagctggtctgagaggatgaccagccacactggaactgagacacggtccagactcctacgggaggcagcagtggggaatattgcacaatgggcgcaagcctgatgcagctatgccgcgtgtatgaagaaggccttcgggttgtaaagtactttcagcggggaggaagggatgatgtttaatacgcgtcatcattgacgttacccgcagaagaagcaccggctaactccgtgccagcagccgcggtaatacggagggtgcaagcgttaatcggaattactgggcgtaaagcgcacgcaggcggtctgttaagtcagatgtgaaatccccgggcttaacctaggaactgcatttgaaactggcaggcttgagtctcgtagaggggggtagaattctaggtgtagcggtgaaatgcgtagagatctggaggaataccagtggcgaaggcggcctcctggacgaagactgacgctcaggtgcgaaagcgtggggagcaaacaggattagataccctggtagtccatgccgtaaacgatgtcgacttggaagttgtttccttgagaagtggcttccggagctaacgcgttaagtcgaccgcctggggagtacgaccgcaaggttaaaactcaaatgaattgacgggggcccgcacaagcggtggagcatgtggtttaattcgatgcaacgcgaaaaaccttacctggtcttgacatccacagaactttccagagatggattggtgccttcgggaactgtgagacaggtgctgcatggctgtcgtcagctcgtgttgtgaaatgttgggttaagtcccgcaacgagcgcaacccttatcctttgttgccagcggttcggccgggaactcaaaggagactgccggtgataaaccgggggaaggtggggatgacgtcaagtcatcatggcccttacgaccagggctacacacgtgctacaatggcgcatacaaagagaagcgacctcgcgagggcaagcggacctcacaaagtgtgtcgtagtccggattggagtctgcaactcggctccatgaagtcggaatcgctagtaatcgtggatcagaatgccacggtgaatacgttcccgggccttgtacacaccgcccgtcacaccatgggagtgggttgcaaaagaagtaggtagcttaaccttcgggagggtgcttaccactttgtgattcatgactggggtg

SEQ ID NO: 1284 - DNA, 1498 bp, Artificial Sequence
  Synthetic polymer
atcctggctcagattgaacgctggcggcaggcctaacacatgcaagtcgaacggtaacaggaagcagcttgctgctttgctgacgagtggcggacgggtgagtaatgtctgggaaactgcctgatggagggggataactactggaaacggtagctaataccgcataacgtcgcaagaccaaagagggggaccttcgggcctcttgccatcagatgtgcccagatgggattagctagtaggtggggtaacggctcacctaggcgacgatccctagctggtctgagaggatgaccagccacactggaactgagacacggtccagactcctacgggaggcagcagaggggaatattgcacaatgggcgcaagcctggtgcagccatgccgcgtgtatgaagagggccttcgggttgtaaagtactttcagcggggaggaaggtgttgaggttaataacctcagcaattgacgttacccgcagaagaagcaccggctaactccgtgccagcagccgcggtaatacggagggtgcaagcgttaatcggaattactgggcgtaaagcgcatgcaggcggtctgtcaagtcggatgtgaaatccccgggctcaacctgggaactgcattcgaaactggcaggctggagtcttgtagaggggggtagaattccgggtgtagcggtgaaatgcgtagagatctggaggaataccggtggcgaaggcggccccctggacaaagactgacgctcaggtgcgaaagcgtggggagcaaacaggattagataccctggtagtccacgctgtaaacgatgtcgatttggaggttgtgcccttgaggcgtggcttccggagctaacgcgttaaatcgaccgcctggggagtacggccgcaaggttaaaactcaaatgaattgacgggggcccgcacaagcggtggagcatgtggtttaattcgatgcaacgcgaagaaccttacctactcttgacatccacagaattcggtagagataccttagtgccttcgggaactgtgagacaggtgctgcatggctgtcgtcagctcgtgttgtgaaatgttgggttaagtcccgcaacgagcgcaacccttatcctttgttgccagcgattcggtcgggaactcaaaggagactgccggtgataaaccggaggaaggtggggatgacgtcaagtcatcatggcccttacgagtagggctacacacgtgctacaatggcgtatacaaagagaagcgacctcgcgagagcaagcggacctcataaagtacgtcgtagtccggattggagtctgcaactcgactccatgaagtcggaatcgctagtaatcgtagatcagaatgctacggtgaatacgttcccgggccttgtacacaccgcccgtcacaccatgggagtgggttgcaaaagaagtaggtagcttaaccttcgggagggcgcttaccactttgtgattcatgactggggtggagtcgtaacaaggtagccgta

SEQ ID NO: 1285 - DNA, 1507 bp, Artificial Sequence; identical to SEQ ID NO: 507
  Synthetic polymer

SEQ ID NO: 1286 - DNA, 1399 bp, Artificial Sequence
  Synthetic polymer
agagtttgatcctggctcagattgattgctggcggcaggcctaacacatgcaagtcgaacggtagcacagagagcttgctctcgggtgacgagtggcggacgggtgagtaatgtctgggaaactgcctgatggagggggataactactggaaacggtagctaataccgcataacgtcgcaagaccaaagagggggaccttcgggcctcttgccatcagatgtgcccagatgggattagctagtaggcggggtaatggcccacctaggcgacgatccctagctggcctgagaggatgaccagccacactggaactgagacacggtccagactcctacgggaggcagcagtggggaatattgcacaatgggcgcaagcctgatgcagccatgccgcgtgtgtgaagaaggccttcgggttgtaaagcactttcagcggggaggaaggcagtacggttaataaccgtgctgattgacgttacccgcagaagaagcaccggctaactccgtgccagcagccgcggtaatacggagggtgcaagcgttaatcggaattactgggcgtaaagcgcacgcaggcggtttgttaagtcagatgtgaaatccccgggctcaacctgggaactgcatttgaaactggcaagctggagtctcgtagaggggggtagaattccaggtgtagcggtgaaatgcgtagagatctggaggaacaccggtggcgaaggcgcccccctggacgaagactgacgctcaggtgcgaaagcgtggggagcaaacaggattagataccctggtagtccacgccgtaaacgatgtcgatttggaggttgtgcccttgaggcgtggcttccggagctaacgcgttaaatcgaccgcctggggagtacggccgcaaggttaaaactcaaatgaatagacgggggcccgcacaagcggtggagcatgtggtttaattcgacgcaacgcgaagaaccttacctggtcttgacatccacagaacctggcagagatgccggggtgccttcgggaactgtgagacaggtgctgcatggctgtcgtcagctcgtgttgtgaaatgttgggttaagtcccgcaacgagcgcaacccttatcctttgttgccagcggcccggccgggaactcaaaggagactgccagtgataaactggaggaaggtggggatgacgtcaagtcatcatggcccttacgaccagggctacacacgtgctacaatggcgcatacaaagagaagcgacctcgcgagagcaagcggacctcataaagtgcgtcgtagtccggattggagtctgcaactcgactccatgaagtcggaatcgctagtaatcgtgaatcagaatgtcacggtgagtacgttcccgggccttgcacacaccgcccgtca

SEQ ID NO: 1287 - DNA, 1413 bp, Artificial Sequence
  Synthetic polymer
cccgatagagggggataaccactggaaacggtggctaataccgcataacgtcgcaagaccaaagagggggaccttcgggcctctcgctatcggatgaacccagatgggattagctagtaggcggggtaacggctcacctaggcgacgatccctagctggtctgagaggatgaccagccacactggaactgagacacggtccagactcctacgggaggcagcagtggggaatattgcacaatgggcgcaagcctgatgcagccatgccgcgtgtatgaagaaggccttcgggttgtaaagtactttcagcggggaggaaggcgatgtggttaataaccttgtcgattgacgttacccgcagaagaagcaccggctaactccgtgccagcagccgcggtaatacggagggtgcaagcgttaatcggaattactgggcgtaaagcgcacgcaggcggtctgttaagtcagatgtgaaatccccgggcttaacctgggaactgcatttgaaactggcaggcttgagtctcgtagaggggggtagaattccaggtgtagcggtgaaatgcgtagagatctggaggaataccggtggcgaaggcggccccctggacgaagactgacgctcaggtgcgaaagcgtggggagcaaacaggattagataccctggtagtccacgctgtaaacgatgtcgacttggaggttgtgcccttgaggcgtggcttccggagctaacgcggtttaaatagacccgcctggggagtacggccgcaaaggttaaaactcaaatgaattgacggggggcccgcacaagcggtggagcatgtggtttaattcgatgcaacgcgaagaaccttacctactcttgacatccacggaacttttcagagatgaattggtgccttcgggaaccgtgagacaggtgctgcatggctgtcgtcagctcgtgttgtgaaatgttgggttaagtcccgcaacgagcgcaacccttatcctttgttgccagcggttcggccgggaactcaaaggagactgccagtgataaactggaggaaggtggggatgacgtcaagtcatcatggcccttacgagtagggctacacacgtgctacaatggcatatacaaagagaagcgacctcgcgagagcaagcggacctcataaagtatgtcgtagtccggattggagtctgcaactcgactccatgaagtcggaatcgctagtaatcgtggatcagaatgccacggtgaatacgttcccgggccttgtacacaccgcccgtcacaccatgggagtgggttgcaaaagaagtaggtagcttaaccttcgggagggcgcttaccactttgtgaattcatgactggggtgaagtcgtaacaaggtaaccgtaggggaacctgcggttggatcacctcctt

SEQ ID NO: 1288 - DNA, 1441 bp, Artificial Sequence
  Synthetic polymer
gcctaacacatgcaagtcgaacggtaacaggaagaagcttgcttctttgctgacgagtggcggacgggtgagtaatgtctgggaaactgcctgatggagggggataactactggaaacggtagctaataccgcataacgtcgcaagaccaaagagggggaccttcgggcctcttgccatcggatgtgcccagatgggattagctagtaggtggggtaacggctcacctaggcgacgatccctagctggtctgagaggatgaccagccacactggaactgagacacggtccagactcctacgggaggcagcagtggggaatattgcacaatgggcgcaagcctgatgcagccatgccgcgtgtatgaagaaggccctagggttgtaaagtactttcagtcgggaggaaggcgttgatgctaatatcatcaacgattgacgttaccgacagaagaagcaccggctaactccgtgccagcagccgcggtaatacggagggtgcaagcgttaatcggaattactgggcgtaaagcgcacgcaggcggttgattaagttagatgtgaaatccccgggcttaacctgggaatggcatctaagactggtcagctagagtcttgtagagggggggtagaattccatgtgtagcggtgaaatgcgtagagatgtggaggaataccggtggcgaaggcggccccctggacaaagactgacgctcaggtgcgaaagcgtggggagcaaacaggattagataccctggtagtccacgctgtaaacgatgtcgatttgggggttgagctttgagcttggcgcccgtagctaacgtgataaatcgaccgcctggggagtacggccgcaaggttaaaactcaaatgaattgacgggggcccgcacaagcggtggagcatgtggtttaattcgatgcaacgcgaagaaccttacctactcttgacatccagagaactttccagagatggattggtgccttcgggaactctgagacaggtgctgcatggctgtcgtcagctcgtgttgtgaaatgttgggttaagtcccgcaacgagcgcaacccttatcctttgttgccagcgatttggtcgggaactcaaaggagactgccggtgataaaccggaggaaggtggggatgacgtcaagtcatcatggcccttacgagtagggctacacacgtgctacaatggcgtatacagagggaagcgagagtgcgagctggagcgaatctcacaaagtacgtctaagtccggattggagtctgcaactcgactccatgaagtcggaatcgctagtaatcgcaaatcagaatgttgcggtgaatacgttcccgggccttgtacacaccgcccgtcacaccatgggagtgggttgtaccagaagtagatagcttaaccttcgggagggcgtttaccacggtatgattcatgactgg

SEQ ID NO: 1289 - DNA, 1503 bp, Artificial Sequence; identical to SEQ ID NO: 832
  Synthetic polymer

SEQ ID NO: 1290 - DNA, 1451 bp, Artificial Sequence
  Synthetic polymer
ggcggcaggcctaacacatgcaagtcgaacggtaacaggaaacagcttgctgtttcgctgacgagtggcggacgggtgagtaatgtctgggaaactgcctgatggagggggataactactggaaacggtagctaataccgcataacgtctcaagaccaaagagggggaccttcgggcctcttgccatcggatgtgcccagatgggattagctagtaggtggggtaacggctcacctaggcgacgatccctagctggtctgacaggatgaccagccacactggaactgagacacggtccacactcctaccggaggcagcagtggggaatattgcacaatgggcgcacgcctgatgcacccatgccgcgtgtatgagcaatgccttcgggttgtaaagtactttcagcgggcacgaacggagtaaagttaatacctttgctccttgacattacccgcagaacaagcacctcctaactccgtgccaccggccgcggtaatacggagggtgcaagcgttaatcggaattactgggcgtaaagcgcacgcagcgggttgttaagtcagatgtgaaatccccgggctcaacctgggaactgcatctgatactggcaagcttgagtctcgtagagggggggtagaattccaggtgtagcggtgaaatgcgtagagatctggaggaataccggtggcggaggcggccccctggacgaagactgacgctcaggtgcgaaagcgtggggagcaaacaggattagataccctggtagtccacgccgtaaacgatgtcgacttggaggttgtgcccttgaggcgtggcttccggagctaacgcgttaagtcgaccgcctggggagtacggccgcaaggttaaaactcaaatgaattgacgggggcccgcacaagcggtggagcatgtggtttaattcgatgcaacgcgaagaaccttacctggtcttgacatccacagaactttccagagatggattggtgccttcgggaactgtgagacaggtgctgcatggctgtcgtcagctcgtgttgtgaaatgttgggttaagtcccgcaacgagcgcaacccttatcctttgttgccagcggtccggccgggaactcaaaggagactgccagtgataaactggaggaaggtggggatgacgtcaagtcatcatggcccttacgaccagggctacacacgtgctacaatggcgcatacaaagagaagcgacctcgcgagagcaagcggacctcataaagtgcgtcgtagtccggattggagtctgcaactcgactccatgaagtcggaatcgctagtaatcgtggatcagaatgccacggtgaatacgttcccgggccttgtacacaccgcccgtcacaccatgggagtgggttgcaaaagaagtaggtagcttaaccttcgggagggcgcataccactttgtgattcatgactggg

SEQ ID NO: 1291 - DNA, 1443 bp, Artificial Sequence
  Synthetic polymer
acacatgcaagtcgaacggtaacaggaagcattttgcttctttgctgacgagtggcggacgggtgagtaatgtctgggaaactgcctgatggagggggataactactggaaacggtagctaataccgcatgatgtcttcggaccaaagtgggggaccttcgggcctcacgccatcagatgtgcccagatgggattagctagtaggtggggtaatggctcacctaggcgacgatctctagctggtctgagaggatgaccagccacactggaactgagacacggtccagactcctacgggaggcagcagtggggaatattgcacaatgggcgcaagcctgatgcagccatgccgcgtgtatgaagaaggccttcgggttgtaaagtactttcagcgaggaggaaggcattaaggttaataaccttagtgattgacgttactcgcagaagaagcaccggctaactccgtgccagcagccgcggtaatacggagggtgcaagcgttaatcggaattactgggcgtaaagcgcacgcaggcggttgattaagtcagatgtgaaatccccgagcttaacttgggaactgcatttgaaactggtcagctagagtctcgtagaggggggtagaattccaggtgtagcggtgaaatgcgtagagatctggaggaataccggtggcgaaggcggccccctggacgaagactgacgctcaggtgcgaaagcgtggggagcaaacaggattagataccctggtagtccacgccgtaaacgatgtcgacttggaggttgtgcccttgaggcgtggcttccggagctaacgcgttaagtcgaccgcctggggagtacggccgcaaggttaaaactcaaatgaattgacgggggcccgcacaagcggtggagcatgtggtttaattcgatgcaacgcgaagaaccttacctggtcttgacatccacggaagttttcagagatgagaatgtgccttcgggaaccgtgagacaggtgctgcatggctgtcgtcagttcgtgttgtgaaatgttgggttaagtcccgcaacgagcgcaacccttatcctttgttgccagcggtccggccgggaactcaaaggagactgccagtgataaactggaggaaggtggggatgacgtcaagtcatcatggcccttacgaccagggctacacacgtgctacaatggcgcatacaaagagaagcgacctcgcgagagcaagcggacctcataaagtgcgtcgtagtccggattggagtctgcaactcgactccatgaagtcggaatcgctagtaatcgtggatcagaatgccacggtgaatacgttcccgggccttgtacacaccgcccgtcacaccatgggagtgggttgcaaaagaagtaggtagcttaaccttcgggagggcgcttaccactttgtgattcatgactggggtgaa

SEQ ID NO: 1292 - DNA, 1402 bp, Artificial Sequence
  Synthetic polymer
  misc_feature (603)..(603): n is a, c, g, or t
  misc_feature (620)..(620): n is a, c, g, or t
agtcgagcggtagcacagagagcttgctctcgggtgacgagcggcggacgggtgagtaatgtctgggaaactgcctgatggagggggataactactggaaacggtagctaataccgcataacgtcgcaagaccaaagagggggaccttcgggcctcttgccatcacatgtgcccagatgggattagctagtaggtggggtaatgggtcacctaggcgacaatccctagctggtctgagaggatgaccagccacactggaactgagacacggtccagactcctacgggaggcagcagtggggaatattgcgcaatgggcgcaagcctgatgcacccatgccgcgtgtatgaaaaaagccttctggttgtaaagtactttctccgaggaggaaagcattgtggttaataaccacagtgattgacgttactcgcacaaaaaacaccggctaactccgtgccagcagccgcggtaatacggagggtgcaagcgttaatcggaattactgggcgtaaagcgcacgcacgcggtctgtcaagtcggatgtgaaatccccgggctcaacctgggaactgcgttctaaactgggaggctagagtcttgtanaggggggtagaattccnggtgtatcggtgaaatgcgtatagatctggaggaataccggtggcgaaggcggccccctggacaaagactgacgctcaggtgcgaaagcgtggggagcaaacaggattagataccctggtagtccacgccgtaaacgatgtcgacttggaggttgttcccttgaggagtggcttccggagctaacgcgttaagtcgaccgcctggggagtacggccgcaaggttaaaactcaaatgaattgacgggggcccgcacaagcggtggagcatgtggtttaattcgatgcaacgcgaagaaccttacctactcttgacatccagagaacttagcagagatgctttggtgccttcgggaactctgagacaggtgctgcatggctgtcgtcagctcgtgttgtgaaatgttgggttaagtcccgcaacgagcgcaacccttatcctttgttgccagcggttcggccgggaactcaaaggagactgccagtgataaactggaggaaggtggggatgacgtcaagtcatcatggcccttacgagtagggctacacacgtgctacaatggcatatacaaagagaagcgacctcgcgagagcaagcggacctcacaaagtatgtcgtagtccggatcggagtctgcaactcgactccgtgaagtcggaatcgctagtaatcgtagatcagaatgctacggtgaatacgttcccgggccttgtacacaccgcccgtcacaccatgggagtgggttgcaaaagaagtaggtagcttaaccttcgggagggcgct

SEQ ID NO: 1293 - DNA, 1404 bp, Artificial Sequence
  Synthetic polymer
agagtttgatcctggctcagattgaacgctggcggcaggcctaacacatgcaagtcgaacggtaacaggaagaagcttgcttctttgctgacgagtggcggacgggtgagtaatgtctgggaaactgcctgatggagggggataactactggaaacggtagctaataccgcataacgtcgcaagaccaaagagggggaccttcgggcctcttgccatcggatgtgcccagatgggattagcttgttggtggggtaacggctcaccaaggcgacgatccctagctggtctgagaggatgaccagtcacactggaactgagacacggtccagactcctacgggaggcagcagtggggaatattgcacaatgggcgcaagcctgatgcagccatgccgcgtgtatgaagaaggccttcgggttgtaaagtactttcagcggggaggaagggagtaaagttaatacctttgctcattgacgttacccgcagaagaagcaccggctaactccgtgccagcagccgcggtaatacggagggtgcaagcgttaatcggaattactgggcgtaaagcgcacgcaggcggtttgttaagtcagatgtgaaatccccgggctcaacctgggaactgcatctgatactggcaagcttgagtctcgtagaggggggtagaattccaggtgtagcggtgaaatgcgtagagatctggaggaataccggtggcgaaggcggccccctggacgaagactgacgctcaggtgcgaaagcgtggggagcaaacaggattagataccctggtagtccacgccgtaaacgatgtcgacttggaaggtgtgcccctgaaggcggggctcccggactaaatgccgttaagtcaaccgcctgggggagtcgggccccaggtttaaaactcaaatgaattgacgggggcccgcacaagcggtggagcatgtggtttaattcgatgcaacgcgaagaaccttacctggtcttgacatccacagaactttccagagatggattggtgccttcgggaactgtgagacaggtgctgcatggctgtcgtcagctcgtgttgtgaaatgttgggttaagtcccgcaacgagcgcaacccttatcctttgttgccagcggtccggccgggaactcaaaggagactgccagtgataaactggaggaaggtggggatgacgtcaagtcatcatggcccttacgaccagggctacacacgtgctacaatggcgcatacaaagagaagcgacctcgcgagagcaagcggacctcataaagtgcgtcgtagtccggattggagtctgcaactcgactccatgaagtcggaatcgctagtaatcgtggatcagaatgccacggtgaataaaaggccgggccttgcacacaccgcccgtca

SEQ ID NO: 1294 - DNA, 1398 bp, Artificial Sequence
  Synthetic polymer
agtcggacggtagcacagaggagctggctcctcgggtgacgagtggcggacgggtgagtagtgtctggggatctgcccgatagagggggataaccagtggaaacggtggctaataccgcataacgtcgcaagaccaaagagggggaccttcgggcctctcactatcggatgaacccagatgggattatctagtaggcggggtaatgacaaccataggcgaagatccctaggtggtctgagaggatgaccagccacactggaactgaaacacggtccagactcctacgggaggcagcagtggggaatattgcacagtgggcgcaagcctgatgcaccagtgccgcgtgtatgaagaaggccttcgggttgtaaagtaccttcagcggagaggaaggcgatgtggttaataactctgtcgattgacgttacccgcagaagaagcaccggctaactccgtgccagcagccgcggtaatacggagggtgcaagcgttaatcggaattactgggcgtaaagcgcacgcaggcggtctgttaagtcagatgtgaaatccccgggcttaacctgggaactgcatgtgaaactggcaggcttgagtctcgtagaggggggtagaattccaggtgtagcggtgaaatgcgtagagatctggaggaataccgggggcgaaggcggccccctggacgaagactgacgctcaggtgcgaaagcgtggggagcaaacaggattagataccctgatagtccacgccgtaaagatgtcgacttggaggttgttcccttgaggagtggcttccggagctaacgcgttaactcgaccgcctggggagtacggccgcaaggttaaaactcaaatgaattacgggggcccgcacaagcggtggagcatgtggtttaattcgatgcaacgcgaagaaccttacctactcttgacatccacagaactcagcagagatgctttagtgccttcgggaactctgaaacaggtgctgcatggctgtcgtcagcctgtgttgtgaaatgttgggttaagtcccgcaacgagcccaacccttatcctttgttgccagcgattcggtcgggaactcaaaggagactgccggtgataaaccggaggaaggtggggatgacgtcaagtcatcatggcccttacgagtagggctacacacgtgctacaatggcgcatacaaagagaagcgacctcgcgagagcaagcggacctcataaagtgcgtcgtagtccggatcggagtctgcaactcgactccgtgaagtcggaatcgctagtaatcgtggatcagaatgccacggtgaatacgttcccgggccttgtacacaccgcccgtcacaccatgggagtgggttgcaaaaaaagtaaggagcttaaccttcgggaggc

SEQ ID NO: 1295 - DNA, 1438 bp, Artificial Sequence
  Synthetic polymer
cagattgaacgctggcggcaggcctaacacatgcaagtcgaacggtaacagagagcagcttgctgctctgctgacgagtggcggacgggtgagtaatgtctgggaaactgcctgatggagggggataactactggaaacggtagctaataccgcataacgtcttcagaccaaagtgggggaccttcgggcctcatgccatcagatgtgcccagatgggattagctagtaggtggggtaaaggctcacctaggcgacgatccctagctggtctgagaggatgaccagccacactggaactgagacacggtccagactcctacgggaggcagcagtggggaatattgcacaatgggcgcaagcctgatgcagccatgccgcgtgtatgaagaaggccttcgggttgtaaagtactttcagcgaggaggaagggattgtggttaataaccgcagtcattgacgttactcgcagaagaagcaccggctaactccgtgccagcagccgcggtaatacggagggtgcaagcgttaatcggaattactgggcgtaaagcgcacgcaggcggtytgttmagtcagatgtgaaatccccgggctcaacctgggaactgcatttgaaactggcaagcttgagtctygtagaggggggtagaattccaggtgtagcggtgaaatgcgtagagatctggaggaataccggtggcgaaggcggccccctggacgaagrctgacgctcaggtgcgaaagcgtgrgsagcaaaccggattagattccctggtagttccccccgtaaacgatgtcgacttggaggttgtgtccctgaggcgtggcttccggagctaacgcgttaagttggccgcctggggagtacggccgcaaggttaaaactcaaatgaattgacgggggcccgccccagcggtggagcatgtggtttaatttgatgcaacgcgaagaaccttacctggtcttgacatcccgagaatcttgcagagatgcgggagtgcctttgggaactctgagaccggtggtgcatggctgttgtcagcttgtgttgtgaaaagttgggttaagttccgcaacgagcgcaacccttttcctttgttgccagcaggtcatgttgggaactcaaaggagactgccggtgataaaccggaggaaggtggggatgacgtcaagtcatcatggcccttacgaccagggctacacacgtgctacaatggcgcatacaaagagaagcgaactcgcgagagcaagcggacctcataaagtgcgtcgtagtccggattggagtctgcaactcgactccatgaagtcggaatcgctagtaatcgtggatcagaatgccacggtgaatacgttcccgggccttgtacacaccgcccgtcacaccatgggagtgggttgcaaaagaagtaggtagcttaaccttcgggagggcg

SEQ ID NO: 1296 - DNA, 1471 bp, Artificial Sequence
  Synthetic polymer
ttagagtttgatcatggctcatattgaacgctggcggcaggcctaacacatgcaagtcgaacggtaacaggaagcagcttgctgctttgctgacgagtggcggacgggtgagtaatgtctgggaaactgcctgatggagggggataactactggaaacggtagctaataccgcataacgtcgcaagaccaaagagggggaccttcgggcctcttgccatcggatgtgcccagatgggattagctagtaggtggggtaacggctcacctaggcgacgatccctagctggtctgagaggatgaccagccacactggaactgagacacggtccagactcctacgggaggcagcagtggggaatattgcacaatgggcgcaagcctgatgcagccatgccgcgtgtatgaagaaggccttcgggttgtaaagtactttcagcggggaggaagggagtaaagttaatacctttactcattgacgttacccgcagaagaagcaccggctaactccgtgccagcagccgcggtaatacggagggtgcaagcgttaatcggaattactgggcgtaaagcgcacgcaggcggtttgttaagtcagatgtgaaatccccgggctcaacctgggaactgcatctgatactggcaagcttgagtctcgtagaggggggtagaattccaggtgtagcggtgaaatgcgtagagatctggaggaataccggtggcgaaggcggcccccctggacgaagacctggcgctcaggtgcgaaaagcgtggggagcaaacaggattagataccctggtagtccacgccgtaaacaatgttgacttgggaggttgtaccctttgagagagtggcttcaagaagataacgcgataagtcgaacgcctggggagttggtccgcaaggttataattcaaatgaattgacgggggcacgcacaagcggtggagcatttggtttaattggatgcaacgcgaagatcctttcttggtcttgacatccacagaactttccagagatggattgatgccttcgggaactgtgagacaggtgccgcatggctgtcgtcagctcgtgttgtgaaatgttgggttaagtcccgcaacgagcgcaacccttatcctttgttgccagcggtccggccgggaactcaaaggagactgccagtgataatctggaggaaggtggggatgacgtcaagtcatcatggcccttacgaccagggctacacacgtgctacaatggcgcatacaaagagaagcgacctcgcgagagcaagcggacctcataaagtgggtcgtagtccggattggagtctgcaactcgactccatgaagtcggaatcgctagtaatcgtggatcagaatgccacggtgaatacgttcccgggccttgtacacaccgcccgtcacaccatgggagtgggttgcaaaagaagtaaaaagcttaaccttcgggagggcgcttaccac

SEQ ID NO: 1297 - DNA, 1346 bp, Artificial Sequence
  Synthetic polymer
gcggcggacgggtgagtaatgtctgggaatctgcctgatggagggggataacttctggaaacggtagctaataccgcataacttcgcaaggccaaagagggggatcttcgggcctcttgccatcagatgtgcccagatgggattagctagtaggtggggtaatggctcacctaggcgacgatccctagctggtctgagaggatgatcagccacactggaactgagacacggtccagactcctacgggaggcagcagtggggaatattgcacaatgggcgcaagcctgatgcagccatgccgcgtgtatgaagaaggccttcgggttgtaaagtactttcagcggggaggaaggtgttgtggttaataacctcagcgattgacgttacccgcagaagaagcaccggctaactccgtgccagcagccgcggtaatacggagggtgcaagcgttaatcggaattactgggcgtaaagcgcacgcaggcggtctgtcaagtcggatgtgaaatccccgggctcaacctgggaactgcattcgaaactggcaggctagagtcttgtagaggggggtagaattccaggtgtagcggtgaaatgcgtagagatctggaggaataccggtggcgaaggcggccccctggacaaagactgacgctcaggtgcgaaagcgtggggagcaaacaggattagataccctggtagtccacgccgtaaacgatgtcgacttggaggttgtgcccttgaggtgtggcttccggagctaacgcgttaagtcgaccgcctggggagtacggccgcaaggttaaaactcaaatgaattgacgggggcccgcacaagcggtggagcatgtggtttaattcgatgcaacgcgaagaaccttacctactcttgacatccagagaactttccagagatggattggtgccttcgggaactctgagacaggtgctgcatggcgttgttcagctggggttgggaaaggtggggtaaattccggcaagggggccaacctttttctttggttcccaccggttcggccgggcactcaaaggagactgccagtgacaaaccggaggaaggtggggatgacgtcaagtcatcatggcccttacgagtagggctacacacgtgctacaatggcgcatacaaagggaagccaactcgcgagagcaagcggacctcataaagccggtcgtagtccggattgcagtctgcaactcgactccatgaagtcggaatcgctagtaatcgaggatcagaatgttacggtgaatacgttcccgggccttgtacacaccgcccgtcacaccatgggagtgggtgcaccagaagtagtagtctaacc

SEQ ID NO: 1298 - DNA, 1356 bp, Artificial Sequence; identical to SEQ ID NO: 68
  Synthetic polymer

SEQ ID NO: 1299 - DNA, 1460 bp, Artificial Sequence
  Synthetic polymer
gctcagattgaacgctggcggcaggcctaacacatgcaagtcgagcggtagcacaggggagcttgctccctgggtgacgagcggcggacgggtgagtaatgtctgggaaactgcctgatggagggggataactactggaaacggtagctaataccgcataacgtcttcggaccaaagagggggaccttcgggcctcttgccatcggatgtgcccagatgggattagctagtaggtgaggtaatggctcacctaggcgacgatccctagctggtctgagaggatgaccagccacactggaactgagacacggtccagactcctacgggaggcagcagtggggaatattgcacaatgggcgcaagcctgatgcagccatgccgcgtgtgtgaagaaggccttcgggttgtaaagcactttcagcggggaggaaggcggtgagattaatactctcatcgattgacgttacccgcagaagaagcaccggctaactccgtgccagcagccgcggtaatacggagggtgcaagcgttaatcggaatgactgggcgtaaagcgcacgcaggcggtctgttaagttggatgtgaaatccccgggcttaacctgggaactgcattcaaaactgacaggctagagtcttgtagaggggggtagaattccaggtgtagcggtgaaatgcgtagagatctggaggaataccggtggcgaaggcggccccctggacaaagactgacgctcaggtgcgaaagcgtggggagcaaacaggattagataccctggtagtccacgctgtaaacgatgtcgatttggaggttgtgcccttgaggcgtggcttccggagctaacgcgttaaatcgaccgcctggggagtacggccgcaaggttaaaactcaaatgaattgacgggggcccgcacaagcggtggagcatgtggtttaattcgatgcaacgcgaagaaccttacctactcttgacatccagagaatttgctagagatagcttagtgccttcgggaactctgagacaggtgctgcatggctgtcgtcagctcgtgttgtgaaatgttgggttaagtcccgcaacgagcgcaacccttatcctttgttgccagcacgtaatggtgggaactcaaaggagactgccggtgataaaccggaggaaggtggggatgacgtcaagtcatcatggcccttacgagtagggctacacacgtgctacaatggcgtatacaaagagaagcgacctcgcgagagcaagcggacctcataaagtacgtcgtagtccggattggagtctgcaactcgacttccatgaagtcggaatcgctagtaatcgtagaatcagaatgctacgtgaatacgttcccgggccttgtacacaccgcccgtcacaacatggggagtgggtgcaaaagaagtaagtagcctaaccctccggagggcgccttaccactttgtgatt

SEQ ID NO: 1300 - DNA, 1391 bp, Artificial Sequence
  Synthetic polymer
  misc_feature (29)..(34): n is a, c, g, or t
  misc_feature (1343)..(1343): n is a, c, g, or t
  misc_feature (1360)..(1360): n is a, c, g, or t
  misc_feature (1384)..(1386): n is a, c, g, or t
aacacatgcaagtcgaacggtagcacagnnnnnnttgctcttgggtgacgagtggcggacgggtgagtaatgtctgggaaactgcccgagagagggggataactactggaaacggtagctaataccgcataacgtcttgcgaccaaagtgggggaccttcgggcctcacactatcggatgagcccagatgggattagctagtaggtggggtaacggctcacctaggcgacgatccctagctggtctgagaggatgaccagccacactggaactgagacacggtccagactcctacgggaggcagcagtggggaatattgcacaatgggcgcaagctgatgcagccatgccgcgtgtatgaagaaggccttcgggttgtaaagtactttcagtggggaggaaggcgaagaggttaataacctcttcgattgacgttacccgcagaagaagcaccggctaactccgtgccagcagccgcggtaatacggagggtgcaagcgttaatcggaattactgggcgtaaagcgcacgcaggcggtctgtcaagtcggatgtgaaatccccgggctcaacctgggaactgcattcgaaactggcaggctagagtcttgtagaggggggtagaattccaggtgtagcggtgaaatgcgtagagatctggaggaataccggtggcgaaggcggccccctggacaaagactgacgctcaggtgcgaaacgtggggagcaaacaggattagataccctggtagtccacgccgtaaacgatgtcgacttggaggttgttccttgagagtggcttccggagctaacgcgttaagtcgaccgcctggggagtacggccgcaaggttaaaactcaaatgaattgacgggggcccgcacaagcggtggagcatgtggtttaattcgatgcaacgcgaagaaccttacctggccttgacatccacggaatttggcagagatgccttagtgcttcgggaaccgtgagacaggtgctgcatggctctcgtcagctcgtgttgtgaaatgttgggttaagtcccgcaacgagcgcaacccttatcctttgttgccagcgcgtaatggtgggaactcaaaggagactgccggtgataaaccggaggaaggtggggatgacgtcaagtcatcatggcccttacggccagggctacacacgtgctacaatggcgcatacaaagagaagcgacctcgcgagagcaagcggacctcataaagtgcgtcgtagtccggatcggagtctgcaactcgactccgtgaagtcggaatcgctagtaatcgtagatcagaatgctacggtgaatacgttcccgggccttgtacanaccgcccgtcacaccangggagtgggttgcaaaagaagtannnagctt

SEQ ID NO: 1301 - DNA, 1364 bp, Artificial Sequence
  Synthetic polymer
attgaacgctggcggcaggcctaacacatgcaagtcgaacggtaacaggaagcagcttgctgcttcgctgacgagtggcggacgggtgagtaatgtctggggatctgcccgatggagggggataaccactggaagcggtggctaataccgcataacgtcgcaagaccaaagtgggggaccttcgggcctcacaccatcggatgaacccagatgggattagctagtaggtggggtaacggctcacctaggcgacgatccctagctggtctgagaggatgaccagccacactggaactgagacacggcccagactcctaccggaggcagcagtggggaatattgcacaatgggcgcaagcctgatgcaaccatgccgcgtgtatgaagaaagccttcgggttgtaaaggactttcaccggggaggaagggatggtgcttaatacgcgccgtccttgacgttacccgaagaataagcatcggctaactccgtgccagcagccgcggtaatacggaggatgcaagcgttaatcggatttactgggtgtaaagcgcacgcaggcggtctgttaagtcagatgtgaaatccccgggcttaacctgggaactgcatttgaaactggcaggcttgagtctcgtagaggggggtagaattccaggtgtagcggtgaaatgcgtagagatctggaggaataccggtggcgaaggcggccccctggacgaagactgacgctcaggtgcgaaagcgtggggagcaaacaggattagataccctggtagtccacgccgtaaacgatgtcgacttggaggctgtttccttgagaagtggcttccggagctaacgcgttaagtcgaccgcctggggagtacggccgcaaggttaaaactcaaatgaattgacgggggcccgcacaagcggtggagcatgtggtttaattcgatgcaacgcgaagaaccttacctggtcctgacatccacggaattcggcagagatgccctagtgccttcgggaaccgtgagacaggtgctgcatggctgtcgtcagctcgtgttgtgaaatgttgggttaagtcccgcaacgagcgcaacccttatcctttgttgccagcgcgtgatggcgggaactcaaaggagactgccggtgataaaccggaggaaggtggggatgacgtcaagtcatcatggcccttacgaccagggctacacacgtgttacaatggcgcatacaaagagaagcgacctcgcgagagcaagcggacctcataaagtgcgtcgtagtccggattggagtctgcaactcgactccatgaagtcggaatcgctagtaatcgtggatcagaatgccacggtgaatacgttcccgggcct

SEQ ID NO: 1302 - DNA, 1396 bp, Artificial Sequence
  Synthetic polymer
agtcgagcggtaacagaaatcagcttgctgatttgctgacgagcggcggacgggtgagtaatgtctgggaaactgcctgatggagggggataactactggaaacggtagctaataccgcataacgtcttcggaccaaagtgggggacgcttcgggcctcatgccattcagatgtgcccagatgggattagctagtaggtggggtaaaggctcacctaggcgacgatccctagctggtctgagaggatgaccagccacactggaactgagacacggtccagactcctacgggaggcagcagtggggaatattgcacaatgggcgcaagcctgatgcacccatgccgcgtgtatgaagaaggccttcgggttgtaaagtactttcagcgaggaggaaggtgttgtggttaataaccacagcaattgacgttactcgcagaagaagcaccggctaactccgtgccagcagccgcggtaatacggagggtgcaagcgttaatcggaattactgggcgtaaagcgcacgcaggcggtttgttaagtcagatgtgaaatccccgggctcaacctgggaactgcatttgaaactggcaagcttgagtctcgtagaggggggtagaattccaggtgtagcggtgaaatgcgtagagatctggaggaataccggtggcgaaggcggccccctggacgaagactgacgctcaggtgcgaaagcgtggggagcaaacaggattagataccctggtagtccacgccgtaaacgatgtcgacttggaggttgtgcccttgaggcgtggcttccggagctaacgcgttaagtcgaccgcctggggagtacggccgcaaggttaaaactcaaatgaattgacgggggcccgcacaagcggtggagcatgtggtttaattcgatgcaacgcgaagaacctttacctggtcttgacatccagagaatcctgcagagatgcgggagtgccttcgggaactctgagacaggtgctgcatggctgtcgtcagctcgtgttgtggaaatgttgggttaagtcccgcaacgagcgcaacccttatccttttgttgccagccacgtgatggtgggaactcaaaaggagactgccggtgataaaccggaggaaggtggggatgacgtcaagtcatcatggccccttacgaccagggctaccacacgtgctacaatggcgcatatcaaagagaagcgacctcgcgagagcaagcggcacctcataaagtgcgtcgtagtccggattggagtctgcaactcgactccatgaagtcggaatcgctagtaatcgtggatcagaatgccacggtgaatacgttcccgggccttgtacacaccgcccgtcacaccatgggagtgggttgcaaaagaagtaggtagc

SEQ ID NO: 1303 - DNA, 1464 bp, Artificial Sequence
  Synthetic polymer
attgaacgctggcggcaggcctaacacatgcaagtcggacggtaacatagaggagcttgctccttggatgacgagtggcggacgggtgagtaatgtctgggtatctacctgatagagggggataaccattagaaatggtggctaataccgcataacgtcgcaagaccaaagagggggaccttcgggcctcttgctatcagatgaacccagatgggattagctagtaggtggggtaatggcctacctaggcaacgatccctagctggtctgagaggatgaccagccacactggaactgagacacggtccagactcctacgggaggcagcagtggggaatattgcacaatgggcgcaagcctgatgcagccatgccgcgtgtatgaagaaggccttcgggttgtaaagtactttcagcggggaagaaggtgatatggataatacccatgttgcttgacgttacccgcagaagaagcaccggctaactccgtgccagcagccgcggtaatacggagggtgcaagcgttaatcggaattactgggcgtaaagcgcacgcaggcggcctgttaagtcagatgtgaaatccccgggcttaacctgggaactgcatttgaaactggcaggcttgagtctcgtagaggggggtagaattccgggtgtagcggtgaaatgcgtagagatctggaggaataccggtggcgaaggcggccccctggacgaagactgacgctcaggtgcgaaagcgtggggagcaaacaggattagataccctggtagtccacgctgtaaacgatgtcgacttggaagttgtgcccttgaggcgtggcttccgtagctaacgcgttaagtcgaccgcctggggagtacggccgcaaggttaaaactcaaatgaattgacgggggcccgcacaagcggtggagcatgtggtttaattcgatgcaacacgaagaaccttacctactcttgacatccacggaatgtggcagagatgccacggtgccttcgggaaccgtgagacaggtgctgcatggctgtcgtcagctcgtgttgtgaaatgttgggttaagtcccgcaacgagcgcaacccttatcctttattgccagcgattcggtcgggaacttaaaggagactgccggtgataaaccggaggaaggtggggatgacgtcaagtcatcatggcccttacgagtagggctacacacgtgctacaatggcgcatacaaagagaagctacctcgcgagagcaagcggacctcataaagtgcgtcgtagtccggatcggagtctgcaactcgactgcgtgaagtcggaatcgctagtaatcgtggatcagaatgccacggtgaatacgttcccgggccttgtacacaccgcccgtcacaccatgggagtgggttgcaaaagaagtaggtagcttaaccttcgggagggcgtttaccactttgtgattcatgactggggtg

SEQ ID NO: 1304 - DNA, 1432 bp, Artificial Sequence
  Synthetic polymer
gctggcggcaggcttaacacatgcaagtcgaacggtaacataaagaagcttgcttctttgatgacgagtggcggacgggtgagtaatgcttgggaatctagcttatggagggggataactacgggaaacggtagctaataccgcataacgtcgcaagaccaaagagggggaccttcgggcctcttgccatcggatgtgcccagatgggattagctagtaggtggggtaacggctcacctaggcgacgatccctagctggtctgagaggatgaccagccacactggaactgagacacggtccagactcctacgggaggcagcagtggggaatattgcacaatgggcgcaagcctgatgcagccatgccgcgtgtatgaagaaggccttcgggttgtaaagtactttcagcggggaggaagggagtaaagttaatacctttgctcattgacgttacccgcagaagaagcaccggctaactccgtgccagcagccgcggtaatacggagggtgcaagcgttaatcggaattactgggcgtaaagcgcacgcaggcggtttgttaagtcagatgtgaaatccccgggctcaacctgggaactgcatctgatactggcaagcttgagtctcgtagaggggggtagaattccaggtgtagcggtgaaatgcgtagagatctggaggaataccggtggcgaaggcggccccctggacgaagactgacgctcaggtgcgaaagcgtggggagcaaacaggattaaataccctggtagtccactccgtaaatgatgtcgatttggaggttgtgcccttgaggcgtggcttccggagctaatgcgttaagtcgaccgcatggggagtacggccgcaaggttaaaactcaaatgaattgacgggggcccgcacaagcggtggagcatgtggtttaatttgatgcaacgcgaagaatcttacctggtcttgacatccacggaagttttcagagatgagaatgtgccttcgggaaccgtgagacaggtgctgcatggctgtcgtcagctcgtgttgtgaaatgttgggttaagtcccgcaacgagcgcaacccttatcctttgtttccagcggtccggccgggaactcaaaggagactgccagtgataaattggaggaaggtggggatgacgtcaagtcatcatggcccttacgtccagggctacacacgtgttacaatggcgcatacaaagagaagcgacctcgcgagagcaagcggacttcataaagtgcgtcgtagtccggattggagtgtgcaactggactccatgaagtcggaatcgttagtaatcgtggatcagaatgcctcggtgaatacgttcccgggctttgtacacaccgcccgtcacaccatgggagtgggttgcaaaagaagtaggtagcttaaccttcgggagggcgcttac

SEQ ID NO: 1305 - DNA, 1457 bp, Artificial Sequence
  Synthetic polymer
gagtttgatccctggctcagattgaacgctggcggcaggcctaacacatgcaagtcgagcggcagcgggggaaagcttgctttcccgccggcgagcggcggacgggtgagtaatgtctgggaaactgcctgatggagggggataactactggaaacggtagctaataccgcataacgtctacggaccaaagtgggggaccttcgggcctcatgccatcagatgtgcccagatgggattagctagtaggtggggtaacggctcacctaggcgacgatccctagctggtctgagaggatgaccagccacactggaactgagacacggtccagactcctacgggaggcagcagtggggaatattgcacaatgggcgcaagcctgatgcagccatgccgcgtgtatgaagaaggccttcgggttgtaaagtactttcagcggggaggaaggtgttgtggttaataaccgcagcaattgacgttacccgcagaagaagcaccggctaactccgtgccagcagccgcggtaatacggagggtgcaagcgttaatcgggaattactgggcgtaaagccgcacgcaggcggtctgtcaagtcggatgtgaaatccccgggctcaacctgggaactgcatccgaaactggcaggcttgagtcttgtagaggggggtagaattccaggtgtagcggtgaaatgcgtagagatctggaggaataccggtggcgaaggcggccccctggacaaagactgacgctcaggtgcgaaagcgtggggagcaaacaggattagataccctggtagtccacgccgtaaacgatgtcgacttggaggttgtgcccttgaggcgtggcttccggagctaacgcgttaagtcgaccgcctggggagtacggccgcaaggttaaaactcaaatgaattgacgggggcccgcacaagcggtggagcatgtggtttaattcgatgcaacgcgaagaaccttacctggtcttgacatccacagaaccctgtagagatacgggggtgccttcgggaactgtgagacaggtgctgcatggctgtcgtcagctcgtgttgtgaaatgttgggttaagtcccgcaacgagcgcaacccttatcctttgttgccagcggtccggccgggaactcaaaggagactgccagtgataaactggtaggaaggtgggggatgacgtcaagtcatcatggcccttacgaccagggctacacacgtgctaccaatggcatataccaaagagaagcgacctcgcgagagcaaagagaagcgacctcgcgaagagcaagcggacctcataaagtatgtcgtagtccggattggagtctgcaactcgactccatgaagtcggaatcgctagtaatcgtggtatcagcaatgccacggtgaataacgttcccgggaccttgtacaacaccgcccgtcacaccatgggagtgggttgca

SEQ ID NO: 1306 - DNA, 1506 bp, Artificial Sequence; identical to SEQ ID NO: 841
  Synthetic polymer

SEQ ID NO: 1307 - DNA, 1424 bp, Artificial Sequence; identical to SEQ ID NO: 1138
  Synthetic polymer
  misc_feature (58)..(58): n is a, c, g, or t
  misc_feature (131)..(131): n is a, c, g, or t
  misc_feature (138)..(138): n is a, c, g, or t
  misc_feature (373)..(373): n is a, c, g, or t
  misc_feature (385)..(385): n is a, c, g, or t
  misc_feature (909)..(909): n is a, c, g, or t
  misc_feature (1358)..(1358): n is a, c, g, or t
  misc_feature (1362)..(1362): n is a, c, g, or t

SEQ ID NO: 1308 - DNA, 1437 bp, Artificial Sequence
  Synthetic polymer
agtcgagcggcagcggaggtgccttgctactttgccggcgagcggcggacgggtgagtaatgtctgggaaactgcctgatggagggggataactactggaaacggtatctaataccgcataatgtcgcgagaccaaagggggggaccttggggcctcgtgccctcagatgtgcccagatgggattatctagtggggggggtaacggctcccctaggcgactatccctaggtggtctgagaggatgaccacccacactggaactgacacacggtccagactcctacgggaggcagcagtggggaatattgcacagtgggcgcaagcctgatgcccccgtgccgcgtgtatgaagaacgccttcgggttgtaaagtactttccgcggggaagaaggtgttgaggttaataacctccgcttttgactttacccgcaaaaaaagccccggctatctccgtgccagcagccgcggtaatacggagggtgcaagcgttaatcgaaattactgggcgtaaagcgcacgcaggcggtctgtcaagtcggatgtgaaatccccgggctcaacctgggaactgcattcgaaactggcaggctagagtcttgtagaggggggtagaattccaggtgtagcggtgaaatgcgtagagatctggaggaataccggtggcgaaggcggccccctggacaaagactgacgctcaggtgcgaaagcgtggggagcaaacaggattagataccctggtagtccacgccgtaaacgatgtcgacttggaggttgtgcccttgaggcgtggcttccggagctaacgcgttaagtcgaccgcctggggagtacggccgcaaggttaaaactcaaatgaattgacgggggcccgcacaagcggtggagcatgtggtttaattcgatgcaacgcgaagaaccttacctactcttgacatccagagaacttagcagagatgctttggtgccttcgggatctctgagacaggtgctgcatggctgtcgtcagctcgtgttgtgaaatgttgggttaagtcccgcaacgagcgcaacccttatcctttgttgccagcggtccggccgggaactcaaaggagactgccagtgataaactggaggaaggtggggatgacgtcaagtcatcatggcccttacgagtagggctacacacgtgctacaatggcgcatacaaagagaagcgacctcgcgagagcaagcggacctcataaagtgcgtcgtagtccggattggagtctgcaactcgactccatgaagtcggaatcgctagtaatcgtagatcagaatgctacggtgaatacgttcccgggccttgtacacaccgcccgtcacaccatgggagtgggttgcaaaagaagtaggtagcttaaccttcgggagggcgcttaccactttgtgattcatgactgggggaagtcgt

SEQ ID NO: 1309 - DNA, 1365 bp, Artificial Sequence
  Synthetic polymer
tcagattgaacgctggcggcaggcctaacacatgcaagtcgaacggtagcacagagagcttgctctcgggtgacgagtggcggacgggtgagtaatgtctgggaaactgcctgatggagggggataactactggaaacggtagctaataccgcataacgtcgcaagaccaaagagggggaccttcgggcctcttgccatcagatgtgcccagatgggattagctagtaggtggggtaacggctcacctaggcgacgatccctagctggtctgagaggatgaccagccacagtggagctgagacacggtccagactcctaggggaggcagcagtggggaatattgcacaatgggcgcaagcctgatgcagccatgccgcgtgtatgaagaaggccttcgggttgtaaagtactttcagcggggaggaaggcgttgtggttaataaccgcagcgattgacgttacccgcagaagaagcaccggctaactccgtgccagcagccgcggtaatacggagggtgcaagcgttaatcggaattactgggcgtaaagcgcacgcaggcggttgattaagtcagatgtgaaatccccgggctcaacctgggaactgcatttgaaactggtcagcttgagtctcgtagaggggggtagaattccaggtgtagcggtgaaatgcgtagagatctggaggaataccggtggcgaaaggcggccccctggacgaagactgacgctcaggtgcgaaagcgtggggagcaaacaggatttagatacccctggtagtccacgccgtaaacgatgtcgacttggaggttgtgcccttgaggcgtggcttccggagctaacgcgttaagtcgaccgcctggggagtacggccgcaaggttaaaactcaaatgaattgacgggggcccgcacaagcggtggagcatgtggtttaattcgatgcaacgcgaagaaccttacctggtcttgacatccagagaatcctgcagagatgcgggagtgccttcgggaactctgagacaggtgctgcatggctgtcgtcagctcgtgttgtgaaatgttgggttaagtcccgcaccgagcgcaacccttatcctttgttgccagcggttcggccgggaactcaaaggagactgccggtgataaaccggaggaaggtggggatgacgtcaagtcatcatggcccttacgaccagggctacacacgtgctacaatggcgcatacaaagagaagcgacctcgcgagagcaagcggacctcataaagtgcgtcgtagtccggattggagtctgcaactcgactccatgaagtcggaatcgctagtaatcgtggatcagaatgccacggtgaatacgttcccggg

SEQ ID NO: 1310 - DNA, 1449 bp, Artificial Sequence; identical to SEQ ID NO: 781
  Synthetic polymer

SEQ ID NO: 1311 - DNA, 1344 bp, Artificial Sequence
  Synthetic polymer
ctttgctctctcttgacgagtggcggacgggtgagtaatgtttgggcaaactgcctgatggagggggataacttctggaaacggtagctaataccgcataacgtcgcaagaccaaagagggggaccttcgggcctcttgccatcagatgtgcccagatgggattagctagtaggtggggtaacggctcacataggcgacgatccctagctggactgagaggatgaccagccacactggaactgagacacggtccagactcctacgggaggcagcagtggggaatattgcacaatgggcgcaagcctgatgcagccatgccgcgtgtatgaagaaggccttcgggttgtaaagtactttcagcggggaggaaggtgttgtggttaatatctgcagcaattgacgttactcgcagaagaagcaccggctaactccgtgccagcagccgcggtaatacggagggtgcaagcgttaatcggaattactgggcgtaaagcgcacgcaggcggtctgtcaagtcggatgtgaaatccccgggctcaacctgggaactgcattcgaaactggcaggctagagtcttgtagaggggggtagaattccaggtgtagcggtgaaatgcgtagagatctggaggaataccggtggcgaaggcggccccctggacaaagactgacgctcaggtgcgaaagcgtggggagcaaacaggattagataccctggtagtccacgccgtaaacgatgtcgacttggaggttgtgcccttgaggcgtggcttccggagctaacgcgttaagtcgaccgcctggggagtacggccgcaaggttaaaactcaaatgaattgacgggggcccgcacaagcggtggagcatgtggtttaattcgatgcaacgcgaagaaccttacctactcttgacatccagagaactttccagagatggattggtgccttcgggaactctgagacaggtgctgcatggctgtcgtcagctcgtgttgtgaaatgttgggttaagtcccgcaacgagcgcaacccttatcctttgttgccagcggtccggccgggaactcaaaggagactgccagtgacaaactggaggaaggtggggatgacgtcaagtcatcatggcccttacgagcagggctacacacgtgctacaatggcgcatacaaagggaagcgacctcgcgagagcaagcggacctcataaagtgcgtcgtagtccggattggagtctgcaactcgactccatgaagtcggaatcgctagtaatcgtagatcagaatgctacggggaatacgttcccggcccttgtcccccccccccgtccccccatgggagtgggtt

SEQ ID NO: 1312 - DNA, 1405 bp, Artificial Sequence
  Synthetic polymer
ttatcctgaagttgatccatgctccagatgaacgctggcggcagctacacaatgcagtcgacgtagccacagagagctgctctcgggtgacgagtggcgaacgggtgagtatgttctgggaactgcctgatgagggggataactactggaaacggtagctaataccgcataacgtcgcaagaccaaagaggggaccttcgggcctcttgccatcagatgtgcccagatgggattagctggtagcggggtaaccgccccacctaggcgacgatccctagctggtctgagaggatgaccagccacactggaactgagacacggtccagactcctacgggaggcagcagtggggaatattgcacaatgggcgcaagcctgatgcagccatgccgcgtgtgtgaagaaggccttcgggttgtaaagcactttcagcggggaggaaggcggtacggttaataaccgtgccgattgacgttacccgcagaagaagcaccggctaactccgtgccagcagccgcggtaatacggagggtgcaagcgttaatcggaattactgggcgtaaagcgcacgcaggcggtctgtcaagtcggatgtgaaatccccgggctcaacctgggaactgcattcgaaactggcaggctggagtctcgtagagggaggtagaattccaggtgtagcggtgaaatgcgtagagatctggaggaataccggtggcgaaggcggcctcctggacgaagactgacgctcaggtgcgaaagcgtggggagcaaacaggattagataccctggtagtccacgccgtaaacgatgtcgatttggaggttgtgcccttgaggcgtggcttccggagctaacgcgttaaatcgaccgcctggggagtacggccgcaaggttaaaactcaaatgaattgacgggggcccgcacaagcggtggagccatgtggtttaattcggatgcaacgcgaagaaccttacctggtctgacatccacagaaacctggcagagatgcgggggtgccttcgggaactgtgagacaggtgctgcatggctgtcgttcagctcgtgttgggaaatgttgggttaagtcccgcaacgagcgcaacccttatcctttgttgccagcggtcaggccgggaactcaaaggagactgccagtgataaactggaggaaggtggggatgacgtcaagtcatcatggcccttacgaccagggctacacacgtgctacaatggcgcatacaaagagaagcgacctcgcgagagcaagcggacctcagaaagtgcgtcgtagtccggattggagtctgcaactcgactccatgaagtgggaatggctagtaatcgtgaatcagaatgtcacggtgaatacgttcccgggccttgtacacaccgcccgtcacacca

SEQ ID NO: 1313 - DNA, 1397 bp, Artificial Sequence
  Synthetic polymer
gagtttgatcgtggttcagattgaacgctggcggcaggcatatcacatgcaagtcgatcggtagcacagagagcttgctctcgggtgacgagtggcggacgggtgagtaatgtctgggaaactgcctgatggagggggataactactggaaacggtggctaataccgcataacgtcgcaagaccaaagagggggaccttcgggcctcttgccatcagatgtgcccagatgggattagctagttggtgaggtaacggctcaccaaggcgacgatccctagctggtctgagaggatgaccagccacactggaactgagacacggtccagactcctacgggaggcagcagtggggaatattgcacaatgggcgcaagcctgatgcagccatgccgcgtgtatgaagaaggccttcgggttgtaaagtactttcagcggggaggaaggtgttgtggttaataaccacagcaattgacgttacccgcagaagaagcaccggctaactccgtgccagcagccgcggtaatacggagggtgcaagcgttaatcggaattactgggcgtaaagcgcacgcaggcggtctgtcaagtcggatgtgaaatccccgggctcaacctgggaactgcattcgaaactggcaggcttgagtctcgtagaggggggtagaattccacgtgtagcggtgaaatgcgtagagatctggaggaataccggtggcgaaggcggccccctggacgaagactgacgctcaggtgcgaaagcgtggggagcaaacaggattagataccctggtagtccacgccgtaaacgatgtctatttggaggttgttcccttgaggagtggcttccggagctaacgcgttaaatagaccgcctggggagtacggccgcaaggttaaaactcaaatgaattgacgggggcccgcacaagcggtggagcatgtggtttaattcgatgcaacgcgaagaaccttacctggtcttgacatccacagaattctgcagagatgcggaagtgccttcgggaactgtgagacaggtgctgcatggctgtcgtcagctcgtgttgtgaaatgttgggttaagtcccgcaacgagcgcaacccttatcctttgttgccagcggttaagccgggaactcaaaggagactgccagtgataaactggaggaaggtggggatgacgtcaagtcatcatggcccttacgaccatggctacacacgtgctacaatggcatatacaaagagaagcgacctcgcgagagcaagcggacctcataaagtatgtcgtagtccggattggagtctgcaactcgactccatgaagtcggaatcgctagtaatcgtggatcagaatgccacggtgaatacgttcccgggccttgtacacaccgtccgtc

SEQ ID NO: 1314 - DNA, 1375 bp, Artificial Sequence; identical to SEQ ID NO: 1045
  Synthetic polymer

SEQ ID NO: 1315 - DNA, 1382 bp, Artificial Sequence; identical to SEQ ID NO: 919
  Synthetic polymer

SEQ ID NO: 1316 - DNA, 1362 bp, Artificial Sequence
  Synthetic polymer
gatcctggctcagattgaacgctggcggcaggcctaacacatgcaagtcgaacggtagaggagcttgctccttacgagcggcggacgggtgagtaatgtctgggaaactgcctgatggagggggataactactggaaacggtagctaataccgcataatgtcgcaagaccaaagtggttcgtcatgccatcagatgtgcccagatgggattagctagtaggtggggtaacggctcacctaggcgacgatccctagctggtctgagaggatgaccagccacactggaactgagacacggtccagacccctacgggaggcagcagtggggaatattgcacaatgggcgcaagcctgatgcagccatgccgcgtgtgtgaagaaggccttcgggttgtaaagcactttcagcggggaggaaggcggtgagtaatctcatcgattgacgttacccgcagaagaagcaccggctaactccgtgccagcagccgcggtaatacggagggtgcaagcgttaatcggaattactgggcgtaaagcgcacgcaggcggtctgtcaagtcggatgtgaaatccccgggctcaacctgggaactgcattcgaaactggcaggctagagtcttgtagaggggggtagaattccaggtgtagcggtgaaatgcgtagagatctggaggaataccggtggcgaaggcggcccctggacaagactgacgctcaggtgcgaaagcgtggggagcaaacaggattagataccctggtagtccacgccgtaaacgatgtcgacttggaggttgtgcccttgaggcgtggcttccggagctaacgcgttaagtcgaccgcctggggagtacggccgcaaggttaaaactcaaatgaattgacgggggcccgcacaagcggtggagcatgtggtttaattcgatgcaacgcgaagaaccttacctactcttgacatccagagaacttagcagagatgctttggtgccttcgggaactctgagacaggtgctgcatggctgtcgtcagctcgtgttgtgaaatgttgggttaagtcccgcaacgagcgcaacccttatcctttgttgccagcgattcggtcgggaactcaaaggagactgccagtgataaactggaggaaggtggggatgacgtcaagtcatcatggcccttacgagtagggctacacacgtgctacaatggcatatacaaagagaagcgacctcgcgagagcaagcggacctcataaagtatgtcgtagtccggattggagtctgcaactcgactccatgaagtcggaatcgctagtaatcgtggatcagaatgccacggtgaatacgttcccgggccttgtacacactgcc

SEQ ID NO: 1317 - DNA, 1452 bp, Artificial Sequence; identical to SEQ ID NO: 77
  Synthetic polymer
  misc_feature (771)..(771): n is a, c, g, or t
  misc_feature (773)..(773): n is a, c, g, or t
  misc_feature (783)..(783): n is a, c, g, or t
  misc_feature (788)..(788): n is a, c, g, or t
  misc_feature (795)..(795): n is a, c, g, or t
  misc_feature (797)..(797): n is a, c, g, or t

SEQ ID NO: 1318 - DNA, 1503 bp, Artificial Sequence
  Synthetic polymer
agggtttgatcctggctcagattgaacgctggcggcaggcctaacacatgcaagtcgagcggcagcggaaagaagcttgcttctttgccggcgagcggcggacgggtgagtaatgtctggggatctgcccgatggagggggataaccactggaaacggtggctaataccgcataacgtcgcaagaccaaagtgggggaccttcgggcctcacgccataggatgaacccagatgggattagctagtaggtggggtaaaggctcacctaggcgacgatctctagctggtctgagaggatgaccagccacactggaactgagacacggtccagactcctacgggaggcagcagtggggaatattgcacaatgggggaaaccctgatgcagccatgccgcgtgtatgaagaaggccttcgggttgtaaagtactttcagcggggaggaaggctggtggcttaatacgccatcagattgacgttacccgcagaagaagcaccggctaactccgtgccagcagccgcggtaatacggagggtgcaagcgttaatcggaattactgggcgtaaagcgcacgcaggcggtctgttaagtcagatgtgaaatccccgggctcaacccgggaactgcatttgaaactggcaggcttgagtctcgtagaggggggtagaattccaggtgtagcggtgaaatgcgtagagatctggaggaataccggtggcgaaggcggccccctggacgaagactgacgctcaggtgcgaaagcgtggggagcaaacaggattagataccctggtagtccacgccgtaaacgatgtctacttggaggctgtggtcatgaaccgtggcttccggagctaacgcgttaagtagaccgcctggggagtacggccgcaaggttaaaactcaaatgaattgacgggggcccgcacaagcggtggagcatgtggtttaattcgatgcaacgcgaagaaccttacctggtcttgacatccacagaattctccggagacggagaagtgccttcgggaactgtgagacaggtgctgcatggctgtcgtcagctcgtgttgtgaaatgttgggttaagtcccgcaacgagcgcaacccttatcctttgttgccagcgattcggtcgggaactcaaaggagactgccggtgataaaccggaggaaggtggggatgacgtcaagtcatcatggcccttacgaccagggctacacacgtgctacaatggcgcatacaaagagaagcgacctcgcgagagcaagcggacctcataaagtgcgtcgtagtccggatcggagtctgcaactcgactccgtgaagtcggaatcgctagtaatcgtggatcagaatgccacggtgaatacgttcccgggccttgtacacaccgcccgtcacaccatgggagtgggttgcaaaagaagtaggtagcttaaccttcgggagggcgcttaccactttgtgattcatgactggggtgaagtcgtaacaaggtaacc

SEQ ID NO: 1319 - DNA, 1392 bp, Artificial Sequence
  Synthetic polymer
agtggcggacgggtgaataatgtctgggaaactgcccgatggagggggataactactggaaacggtagctaataccgcataacgtcgccagaccaaagagggggaccttcgggcctcttgccatcggatgtgcccagatgggattagctagtaggtggggtaacggctcacctaggcgacgatccctagctggtctgagaggatgaccagccacactggaactgagacacggtccagactcctacgggaggcagcagtggggaatattgcacaatgggcgcaagcctgatgcagccatgccgcgtagtatgaagaaggccttcgggttgtaaagtactttcagcgaggagggaaggcattgtggttaataaccgcagtgattgacgttactcgcagaagaagcaccggctaactccgtgccagcagccgcggtaatacggagggtgcaagcgttaatcggaattactggggcgtaaagcgcacgcaggcggtctgtcaagtcggatgtgaaatccccgggctcaacctgggaactgcatccgaaactggcaggctagagtcttgtagagggggtagaattccaggtgtagcggtgaaatgcgtagagatctggaggaataccggtggcgaaggcggccccctggacaaagactgacgctcaggtgcgaaagcgtggggagcaaacaggattagataccctggtagtccacgccgtaaacgatgtcgacttggaggttgtgcccttgaggcgtggcttccggagctacgcgtaagtcgaccgcctggggagtacggccgcaaggttaaaactcaaatggaattgacggggcccgcactagcggtggagcatgtggtttaattcgatgcaacgcgaagaacccttactctactcttgacatctcagagaatcttagcagagaaatgctttggtgcccttcggaaactctgagacaggtgctgcattggctttcgtcagctcgtgttgtgaaatgttgggttaagtcccgcaacgagcgcaacccttatcctttgttgccagcgattcggtcgggaaactcaaggagaactgccagtgataaactggaggaaaggtggggatgacctcaagtcatcatggcccttacgagtagggctacacacgtgctacaaggcatatacaaagagaagcgacctcgcgagagcaagcggacctcataaagtagtcgtagtccggattggagtctgcaactcgactccatgaaactcggaatcgctagtaatcgtggatcaaaatgaaacggtgaatacttcccgggccttgtacacaccgcccgtcacaccatgggagtgggttgcaaagaagtaggtagcttaaccttcgggagggcgcttaccactttgtgattcatgact

SEQ ID NO: 1320 - DNA, 1532 bp, Artificial Sequence
  Synthetic polymer
agagtttgatcatggctcagattgaacgctggcggcaggcctaacacatgcaagtcgaacggtaacaggaagcagcttgctcttttgctgacgagtggcggacgggtgagtaatgtctgggaaactgcccgatggagggggataactactggaaacggtagctaataccgcataacgtcgcaagaccaaagagggggaccttcgggcctcttgccatcggatgtgcccagatgggattagctagtaggtggggtaacggctcacctaggcgacgatccctagctggtctgagaggatgaccagccacactggaactgagacacggtcaagactcctacgggaggcagcagtggggaatattgcacaatgggcgcaagctgtatgcagccatgccgcgtgtatgaagaaggccttcgggttgtaaagtactttcagcggggaggaaggcgatgtggttaataaccgcattgattgacgttacccgcagaagaagcaccggctaactccgtgccagcagccgcggtaatacggagggtgcaagcgttaatcggaattactgggcgtaaagcgcacgcaggcggtctgttaagtcagatgtgaaatccccgggcttaacctgggaactgcatttgaaactggcaggcttgagtctcgtagaggggggtagaattccaggtgttgcggtgaaatgcgtagagatctggaggaataccggtggcgaaggcggccccctggacgaagactgacgctcaggtgcgaaagcgtggggagcaaacaggattagataccttggtagttccacgccgttaacgatgttcggacttggaggttgttcccttgaggagtggcttccggagctaacgcgttaagtcgaccgcctggggagtacggccgcaaggttaaaactcaaatgaattgacgggggcccgcacaagcggtggagcatgtggtttaattcgatgcaacgcgaagaaccttacttactcttgacatccagagaacttagcagagatgctttggtgcttcgggaactctgagacaggtgctgcatggctgtcgtcagctcgtgttgtgaaatgttgggttaagtcccgcaacgagcgcaacccttatcctttgtgccagcgggtcggccgggaactcaaaggagactgccagtgacaaactggaggaaggtggggatgacgtcaagtcatcatggcccttacgagtagggctacacacgtgctacaatggcgcatacaaagagaagcgacctcgcgagagcaacggacctcataaagtgcgtcgtaggccggatcggagtctgcaactcgactccgtgaagtcggaatcgctagtaatcgtggatcagaatgccacggtgaatacgttcccgggccttgtacacaccgcccgtcacaccatgggagtgggttgcaaaagaagtaggtagcttaacttcgggagggcgcttaccactttgtgattcatgactggggtgaagtcgtaacaaggtaaccgtagggaactgcggttggaacacctcctta

SEQ ID NO: 1321 - DNA, 1458 bp, Artificial Sequence
  Synthetic polymer
  misc_feature (204)..(205): n is a, c, g, or t
catgcaagtcgagcggcagcgggaagaagcttgcttctttgccggcgagcggcggacgggtgagtaatgtctgggaaactgcctgatggagggggataactactggaaacggtggctaataccgcataacgtcgcaagaccaaagagggggaccttagggcctcttgccatcagatgtgcccagatgggattagctagctggtnnggtaatggcctaccagggcgacgatccctagctggtctgagaggatgaccagccacactggaactgagacacggtccagactcctacgggaggcagcagtggggaatattgcacaatgggcgcaagcctgatgcagccatgccgcgtgtatgaagaaggccttcgggttgtaaagtactttcagcggggaggaaggtgagtggcttaatacgccattcaattgacgttacccgcagaagaagcaccggctaactccgtgccagcagccgcggtaatacggagggtgcaagcgttaatcggaattactgggcgtaaagcgcacgcaggcggtctgttaagtcagatgtgaaatccccgggctcaacccgggaactgcatttgaaactggcaggcttgagtctcgtagaggggggtagaattccaggtgtagcggtgaaatgcgtagagatctggaggaataccggtggcgaaggcggccccctggacgaagactgacgctcaggtgcgaaagcgtggggagcaaacaggattagataccctggtagtccacgccgtaaacgatgtcgatttggaggttgttcccttgaggagtggcttccggagctaacgcgttaaatcgaccgcctggggagtacggccgcaaggttaaaactcaaatgaattgacgggggcccgcacaagcggtggagcatgtggtttaattcgatgcaacgcgaagaaccttacctggtcttgacatccacagaagtttccagagatgggaatgtgccttcgggaactgtgagacaggtgctgcatggctgtcgtcagctcgtgttgtgaaatgttgggttaagtcccgcaacgagcgcaacccttatcctttgttgccagcgattcggtcgggaactcaaaggagactgccggtgataaaccggaggaaggtggggatgacgtcaagctcatcatggcccttacgaccagggctacacacgtgctacaatggcgcatacaaagagaagcgacctcgcgagagcaagcggacctcataaagtgcgtcgtagtccggattggagtctgcaactcgactccatgaagtcggaatcgctagtaatcgtgaatcagaatgtcacggtgaatacgttcccgggccttgtacacaccgcccgtcacaccatgggagtgggttgcaaaagaagtaggtagcttaaccttcgggagggcgcttaccactttgtgattcatgactggggtgaagtcgtaacaaggtaacc

SEQ ID NO: 1322 - DNA, 1453 bp, Artificial Sequence; identical to SEQ ID NO: 1006
  Synthetic polymer

SEQ ID NO: 1323 - DNA, 1421 bp, Artificial Sequence
  Synthetic polymer
tgcaagtcgaacggtaacacagagtagcttgcttctttgctgacgagtggcggacgggtgagtaatgtctggggaactgccgatggagggggataactactggaaacggtagctaataccgcataacgtcgcaagaccaaagcgggggactttgggcctcgcaccatcagatgaacccagatgggattagctagtaggtaaggtaatggcttacctagccgacgatccctagctggtctgagaggatgaccagccacactggaactgagacacggtccagactcctacgggaggcagcagtggggaatattgcacaatgggcgcaagcctgatgcagccatgccgcgtgtatgaagaaggcttcgggttgtaaagtactttcagtcaggaggaagggtgtgaaattaatacttcatcattgacgttactgacagaagaagcaccggctaactccgtgccagcagccgcggtaatacggagggtgcaagcgttaatcggaattactgggcgtaaagcgcacgcaggcggtttgttaagtcggatgtgaaatccccgggctcaacctgggaactgcattggaaactggcaagcttgagtcttgtagaggggggtagaattccaggtgtagcggtgaaatgcgtagagatctggaggaataccggtggcgaaggcggccccctggacaaagactgacgctcaggtgcgaaagcgtggggagcaaacaggattagataccctggtagtccacgccctaaacgatgtcgacttggaggttgtgcccttgaggcgtggcttccggagctaacgcgttaagtcgaccgcctggggagtacggccgcaaggttaaaactcaaatgaattgacgggggcgcacaagcggtggagcatgtggtttaattcgatgcaacgcgaagaaccttacctggcttgacatccacggaatttggcagagatggtgccttcgggaaccgtgagacaggtgctgcatggctgtcgtcagctcgtgttgtgaaatgttgggttaagtcccgcaacgagcgcaacccttatcctttgttgcagcacgtaatggtgggaactcaaaggagactaccggtgataaaccggaggaaggtggggatgacgtcaagtcatcatgcccttacggccagggctacacacgtgctacaatggcgcatacaaagagaagcgacctcgcgagagcaagctgacctcataaagtgcgtcgtagtccggattggagtctgcaactcgactccatgaagtcggaatcgctagtaatcgtaaatcagaatgttacggtgaatacgggcccgggccttgtacacaccgcccgtcacaccatgggagtgggttgcaaaagaagtaggtagcttaaccttcgggagggcgcttacctctttgtgattcatgactggggt

SEQ ID NO: 1324 - DNA, 1368 bp, Artificial Sequence; identical to SEQ ID NO: 517
  Synthetic polymer

SEQ ID NO: 1325 - DNA, 1442 bp, Artificial Sequence
  Synthetic polymer
acatgcaagtcgaacggtaacaggaacccctttgcgtctttgctgacgagtggcggacgggtgagtaatgtctgggaaactgcctgatggagggggataactactggaaacggcagctaataccgcataacgtcgccagaccaaagagggggaccttcgggcctcttgccatcggatgtgcccagatgggattagctagtacgtggggtaaaggctcacctacgcgaccatccctagctggcctgagaggatgaccagccacactggaactgagacacggtccagactcctacgggaggcagtagcggggaatattgcacaacggccgcaagcctgatgcagccatgttctgtgtatgaagaaggccttcgggttgcacagtactttccgcggggagcaacggagtaaagttaatacctttgctcattgacgtcaccccgcagaagaagccaccggctaattccgtgccagcagccgcggtattacgggggtgcaagcgttaatcggaattacccggccgtaaagcgcacgcaggcggtttgtaagtcagatgtgaaatccccgggctcaactggggaactgcatctgatactggcaagcttgagtctcgtagaggggggtagaattccaggtgtagcggtgaaatgcgtagagatctggaggaataccggtggcgaaggcggccccctggacgaagactgacgctcaggtgcgaaagcgtggggagcaaacaggattagataccctggtagtccacgccgtaaacgatgtcgacttggaggttgtgcccttgaggcgtggcttccggagctaacgcgttaagtcgaccgcctggggagtacggccgcaaggttaaaactcaaatgaattgacgggggcccgcacaagcggtggagcatgtggtttaattcgatgcaacgcgaagaaccttacctggtcttgacatccacagaactttccagagatggattggtgccttcgggaactgtgagacaggtgctgcatggctgtcgtcagctcgtgttgtgaaatgttgggttaagtcccgcaacgagcgcaacccttatcctttgttgccagcggaccggccgggaactcaaaggagactgccagtgataaactggaggaaggtggggatgacgtcaagtcatcatggcccttacgaccagggctacacacgtgctacaatggcgcatacaaagagaagcgacctcgcgagagcaagcggacctcataaagtgcgtcgtagtccggattggagtctgcaactcgactccatgaagtcggaatcgctagtaatcgtggatcagaatgccacggtgaatacgttcccgggccttgtacacaccgcccgtcacaccatgggagtgggttgcaaaagaagtaggtagcttaaccttcgggagggcgcttaccactttgtgattcatgactggggtgaa

SEQ ID NO: 1326 - DNA, 1439 bp, Artificial Sequence
  Synthetic polymer
tcttcgggtgacgagtgccggacgggtgagtaatgtctggggatctgcctgacagagggggataactactggaaacggtagctaataccgcataacctcgcaagagcaaagagggggaccttcgggcctctcgctgtcagatgaacccagatgggattagctagcaggtagggtaatggcctacctgggcgacgatccctagctggtctgagaggatgaccagccacactggaactgagacacggtccagactcctacgggaggcagcagtggggaatattgcacaatgggcgcaagcctgatgcagccatgccgcgtgtatgaagaaggccttcgggttgtaaagtactttcagcggggaggaagggttgctggttaataaccagcgacattgacgttacccgcagaagaagcaccggctaactccgtgccagcagccgcggtaatacggagggtgcaagcgttaatcggaattactgggcgtaaagcgcacgcaggcggtctgtcaagtcagatgtgaaatccccgggcttaacctgggaactgcatttgaaactggcagactagagtcttgtagaggggggtagaattccaggtgtagcggtgaaatgcgtagagatctggaggaataccggtggcgaaggcggccccctggacaaagactgacgctcaggtgcgaaagcgtggggagcaaacaggattagataccctggtagtccacgccgtaaacgatgtcgacttggaggttgtgcccttgaggcgtggcttccggagctaacgcgttaagtcgaccgcctggggagtacggccgcaaggttaaaactcaaatgaattgacgggggcccgcacaagcggtggagcatgtggtttaattcgatgcaacgcgaagaaccttacctggccttgacatccacagaactttccagagatggattggtgccttcgggaactgtgagacaggtgctgcatggctgtcgtcagctcgtgttgtgaaatgttgggttaagtcccgcaacgagcgcaacccttatcctttgttgccagcgattcggtcgggaactcaaaggagactgccggtgataaaccggaggaaggtggggatgacgtcaagtcatcatggcccttacggccagggctacacacgtgctacaatggcgcatacaaagagaagcgacctcgcgagagcaagcggacctcacaaagtgcgtcgtagtccggatcggagtctgcaactcgactccgtgaagtcggaatcgctagtaatcgtggatcagaatgccacggtgaatacgttcccgggccttgtacacaccgcccgtcacaccatgggagtgggttgcaaaagaagtaggtagcttaaccttcgggagggcgcttaccactttgtgattcatgactggggtgaagtcgtaacaaggtaaccgtaggggaacctgcgg

SEQ ID NO: 1327 - DNA, 1403 bp, Artificial Sequence
  Synthetic polymer
  misc_feature (1230)..(1230): n is a, c, g, or t
  misc_feature (1327)..(1327): n is a, c, g, or t
  misc_feature (1389)..(1389): n is a, c, g, or t
agtcgagcggtagcgggaagtagcttgctctttgccggcgagcggcggacgggtgagtaatgtctgggaaactgcctgatggagggggataactactggaaacggtagctaataccgcataacgtcttcggaccaaagagggggaccttcgggcctcttgccatcagatgtgcccagatgggattagcttgtaggtgaggtaatggctcacctaggcgacgatccctagctggtctgagaggatgaccagccacactggaactgagacacggtccagactcctacgggaggcagcagtggggaatattgcacaatgggcgcaagcctgatgcagccatgccgcgtgtatgaagaaggccttcgggttgtaaagtactttcagcgaggaggaaggcattgtggttaataacctcggtgattgacgttactcgcagaagaagcaccggctaactccgtgccagcagccgcggtaatacggagggtgcaagcgttaatcggaattactgggcgtaaagcgcacgcaggcggtttgttaagtcagatgtgaaatccccgggctcaacctgggaactgcatttgaaactggcaagcttgagtcttgtagaggggggtagaattccaggtgtagcggtgaaatgcgtagagatctggaggaataccggtggcgaaggcggccccctggacaaagactgacgctcaggtgcgaaagcgtggggagcaaacaggattagataccctggtagtccacgccgtaaacgatgtcgacttggaggttgttcccttgaggagtggcttccggagctaacgcgttaagtcgaccgcctggggagtacggccgcaaggttaaaactcaaatgaattgacgggggcccgcacaagcggtggagcatgtggtttaattcgatgcaacgcgaagaaccttacctactcttgacatccacagaattcggcagagatgccttagtgccttcgggaactgtgagacaggtgctgcatggctgtcgtcagctcgtgttgtgaaatgttgggttaagtcccgcaacgagcgcaacccttatcctttgttgccagcggtccggccgggaactcaaaggagactgccagtgataaactggaggaaggtggggatgacgtcaagtcatcatggcccttacgagtagggctacacacgtgctacaatggcgcatacaaagagaagcgacctcgcgagagcaagcggacctcataaantgcgtcgtagtccggatcggagtctgcaactcgactccgtgaagtcggaatcgctagtaatcgtagatcagaatgctacggtgaatacgttcccggnccttgtacacaccgcccgtcacaccatgggagtgggttgcaaaagaagtagttagcttaacnttcgggagggcgct

SEQ ID NO: 1328 - DNA, 1431 bp, Artificial Sequence
  Synthetic polymer
gggcctaacacatgcaagtctgacggtagcacagaggagcttgctccttgggtgacgagtggcggacgggtgagtaatgtctggggatctgcccgatagagggggataaccactggaaacggtggctaataccgcataacgtcgcaagaccaaagagggggaccttcgggcctctcactatcggatgaacccagatgggattagctagtaggcggggtaatggcccacctaggcgacgatccctagctggtctgagaggatgaccagccacactggaactgagacacggtccagactccctacgggagcaggcagtggggaatattgcacaatgggcgcaagcctgatgcagccatgccgcgtgtatgaagaaggccttcgggttgtaaagtacttcagcggagggaggaaaggcgatgatggttaataaccttgtcgattgacgttacccgcagaagaagcaccggctaactccgtgccagcagccgcggtaatacggagggtgcaagcgttaatcggaattactgggcgtaaagcgcacgcaggcggtctgttaagtcagatgtgaaatccccgggcttaacctgggaactgcatttgaaactggcaggcttgagtcttgtagaggggggtagaattccaggtgtagcggtgaaatgcgtagagatctggaggaataccggtggcgaaggcggccccctggacaaagactgacgctcaggtgcgaaagcgtggggagcaaacaggattagataccctggtagtccacgccgtaaacgatgtcgacttggaggttgttcccttgaggagtggcttccggagctaacgcgttaagtcgaccgcctggggagtacggccgcaaggttaaaactcaaatgaattgacgggggcccgcacaagcggtggagcatgtggtttaattcgatgcaacgcgaagaaccttacctactcttgacatccacggaatttggcagagatgcattagtgccttcgggaactgtgagacaggtgctgcatggctgtcgtcagctcgtgttgtgaaatgttgggttaagtcccgcaacgagcgcaacccttatcctttgttgccagcgagtcatgtcgggaactcaaaggagactgccggtgataaaccggaggaaggtggggatgacgtcaagtcatcatggcccttacgagtagggctacacacgtgctacaatggcgcatacaaagagaagcgacctcgcgagagcaagcggacctcacaaagtgcgtcgtagtccggatcggagtctgcaactcgactccgtgaagtcggaatcgctagtaatcgtggatcagaatgccacggtgaatacgttcccgggccttgtacacaccgcccgtcacaccatgggagtgggttgcaaaagaagtaggtagcttaaccttcgggagggcgcttaccac

SEQ ID NO: 1329 - DNA, 1421 bp, Artificial Sequence; identical to SEQ ID NO: 867
  Synthetic polymer
  misc_feature (3)..(3): n is a, c, g, or t

SEQ ID NO: 1330 - DNA, 1453 bp, Artificial Sequence
  Synthetic polymer
gtcgaacggtagcacagagagcttgctctcgggtgacgagtggcggacgggtgagtaatgtctgggaaactgcccgatggagggggataactactggaaacggtagctaataccgcataatgtcgcaagaccaaagagggggaccttcgggcctcttgccatcggatgtgcccagatgggattagctagtaggtggggtaacggctcacctaggcgacgatccctagctggtctgagaggatgaccagccacactggaactgagacacggtccagactcctacgggaggcagcagtggggaatattgcacaatgggcgcaagcctgatgcagccatgccgcgtgtatgaagaaggccttcgggttgtaaagtactttcagcgaggaggaaggcgttgtggttaataaccacagcgattgacgttactcgcagaagaagcaccggctaactccgtgccagcagccgcggtaatacggagggtgcaagcgttaatcggaattactgggcgtaaagcgcacgcaggcggtctgtcaagtcggatgtgaaatccccgggctcaacctgggaactgcatccgaaactggcaggctagagtcttgtagaggggggtagaattccaggtgtagcggtgaaatgcgtagagatctggaggaataccggtggcgaaggcggccccctggacaaagactgacgctcaggtgcgaaagcgtggggagcaaacaggattagataccctggtagtccacgccgtaaacgatgtcgacttggaggttgtgcccttgaggcgtggcttccggagctaacgcgttaaatcgaccgcctggggagtacggccgcaaggttaaaactcaaatgaattgacgggggcccgcacaagcggtggagcatgtggtttaattcgatgcaacgcgaagaaccttacctactcttgacatccagagaacttagcagagatgctttggtgccttcgggaactctgagacaggtgctgcatggctgtcgtcagctcgtgttgagaaatgttgggttaagtcccgcaacgagcgcaacccttatcctttgttgccagctgtccggccggtttctcaaaggagactgccagtgataaactggaggaaggtggggatgacgtcaagtcatcatggccattactagtcgggctacacacgtgctacactggcatatacaaagagagcgacctcgcgagagcaagcggtcctcataaagtatgtcgtagtccagattggagtctgcatctcgactccatgaagtcggaatcgatagtcttcatggatcagactgccacggtgaatacgttctcggtcctagtccacacgcgccccgtcacaccatgggagtgggttgcaaaagagtaggtagcttaccttcgggagggcgcttaccactttgtgattcatgactggggtgaagtacgtaacaaggtagccgtagc

SEQ ID NO: 1331 - DNA, 1362 bp, Artificial Sequence
  Synthetic polymer
caggcctaacacatgcaagtcgaacggtaacaggaagaagcttgcttctttgctgacgagtggcggacgggtgagtaatgtctgggaaactgcctgatggagggggataactactggaaacggtagctaataccgcataacgtcgcaagaccaaaaagggggaccttcgggcctcttgccatcggatgtgcccagatgggattagctagtaggtggggtaacggctcacctaggcgacgatccctagctggtctgagaggatgaccagccacactggaactgagacacggtccagactcctacgggaggcagcagtggggaatattgcacaatgggcgcaagcctgatgcagccatgccgcgtgtatgaagaaggccctcgggttgtaaagtactttcagcggggaggaagggagtaaagttaatacctttgctcattgacgttacccgcagaagaagcaccggctaactccgtgccagcagccgcggtaatacggagggtgcaagcgttaatcggaattactgggcgtaaagcgcacgcaggcggtttgttaagtcagatgtgaaatccccgggctcaacctgggaactgcatctgatactggcaagcttgagtctcgtagaggggggtagaattccaggtgtagcggtgaaatgcgtagagatctggaggaataccggtggcgaaggcggcccccctggacgaagactgacgctcaggtgcgaaagcgtggggagcaaacaggattagataccctggtagtccacgccgtaaacgatgtcgacttggaggttgtgcccttgaggcgtggcttccggagctaacgcgttaagtcgaccgcctggggagtacggccgcaaggttaaaactcaaatgaattgacgggggcccgcacaagcggtggagcatgtggtttaattcgatgcaacgcgaagaaccttacctggtcttgacatccacggaagttttcagagatgagaatgtgccttcgggaaccgtgagacaggtgctgcatggctgtcgtcagctcgtgttgtgaaatgttgggttaagtcccgcaacgagcgcaacccttatcctttgttgccagcggtccggccgggaactcaaaggagactgccagtgataaactggaggaaggtggggatgacgtcaagtcatcatggcccttacgaccagggctacacacgtgctacaatggtcggtacaaagggttgccaagccgcgaggtggagctaatcccataaaaccgatcgtagtccggatcgcagtctgcaactcgactgcgtgaagtcggaatcgctagtaatcgtgaatcagaatgtcacggtgaatacgttcccgggccttgtacactccgcc

SEQ ID NO: 1332 - DNA, 1363 bp, Artificial Sequence
  Synthetic polymer
gagcggcggacgggtgagtaatgtctgggaatctgcccgatggagggggataactactggaaacggtggctaataccgcataactcttaggagcaaagagggggaccttcgggcctttgccatcggatgaacccatatgggattagctagtaggtaaggtaatggcttacctaggcgacgatccctagctggtctgagaggatgatcagccacactgggactgagacacggcccagactcctacgggaggcagcagtggggaatattgcacaatgggcgcaagcctgatgcagccatgccgcgtgtatgaagaaggccctagggttgtaaagtactttcagcgggaggaaggcgttgatgttaatacctcagcgattgacgttacccgcagaagaagcaccggctaactccgtgccagcagccgcggtaatacggagggtgcaagcgttaatcggaattactgggcgtaaagcgcacgcaggcggtctgtcaagtcggatgtgaaatccccgggctcaacctgggaactgcattcgaaactggcaggctagagtcttgtagaggggggtagaattccaggtgtagcggtgaaatgcgtagagatctggaggaataccggtggcgaaggcggccccctggacaaagactgacgctcaggtgcgaaagcgtggggagcaaacaggattagataccctggtagtccacgccgtaaacgatgtcgacttggaggttgtgcccttgaggcgtggcttccggagtaacgcgttaagtcgaccgcctggggagtacggccgcaaggttaaaactcaaatgaattgacggggcccgcacaagcggtggagcatgtggtttaattcgatgcaacgcgaagaaccttacctactcttgacatccagagaactttccagagatggattggtgccttcgggaactctgagacaggtgctgcatggctgtcgtcagctcgtgttgtgaaatgttgggttaagtcccgcaacgagcgcaacccttatcctttgttgccagcggtccggccgggaactcaaaggagactgccagtgataaactggaggaaggtggggatgacgtcaagtcatcatggcccttacgagtagggctacacacgtgctacaatggcgcatacaaagagaagcgacctcgcgagagcaagcggacctcataaagtgcgtcgtagtccggattggagtctgcaactcgactccatgaagtcggaatcgctagtaatcgtagatcagaatgctacggtgaatacgttcccgggccttgtacacaccgcccgtcacaccatgggagtgggttgcaaaagaagtaggcagcttaacttcgggagggcgcttaccac

SEQ ID NO: 1333 - DNA, 1505 bp, Artificial Sequence
  Synthetic polymer
tagagtttgatcctggctcagattgaacgctggcggcaggcctaacacatgcaagtcgagcggcagcggaaagtagcttgctactttgccggcgagcggcggacgggtgagtaatgtctgggaagctgcctgatggagggggataactactggaaacggtagctaataccgcatgacctcgaaagagcaaagtgggggatcttcggacctcacgccatcggatgtgcccagatgggattagctagtaggtgaggtaatggctcacctaggcgacgatccctagctggtctgagaggatgaccagccacactggaactgagacacggtccagactcctacgggaggcagcagtggggaatattgcacaatgggcgcaagcctgatgcagccatgccgcgtgtgtgaagaaggccttagggttgtaaagcactttcagcgaggaggaaggcaacacacttaatacgtgtggtgattgacgttactcgcagaagaagcaccggctaactccgtgccagcagccgcggtaatacggagggtgcaagcgttaatcggaattactgggcgtaaagcgcacgcaggcggtttgttaagtcagatgtgaaatccccgcgcttaacgtgggaactgcatttgaaactggcaagctagagtcttgtagaggggggtagaattccaggtgtagcggtgaaatgcgtagagatctggaggaataccggtggcgaaggcggccccctggacaaagactgacgctcaggtgcgaaagcgtggggagcaaacaggattagataccctggtagtccacgctgtaaacgatgtcgacttggaggttgtgcccttgaggcgtggcttccggagctaacgcgttaagtcgaccgcctggggagtacggccgcaaggttaaaactcaaatgaattgacgggggcccgcacaagcggtggagcatgtggtttaattcgatgcaacgcgaagaaccttacctactcttgacatccacggaattcgccagagatggcttagtgccttcgggaaccgtgagacaggtgctgcatggctgtcgtcagctcgtgttgtgaaatgttgggttaagtcccgcaacgagcgcaacccttatcctttgttgccagcacgtaatggtgggaactcaaaggagactgccggtgataaaccggaggaaggtggggatgacgtcaagtcatcatggcccttacgagtagggctacacacgtgctacaatggcatatacaaagagaagcgaactcgcgagagcaagcggacctcataaagtatgtcgtagtccggattggagtctgcaactcgactccatgaagttggaatcgctagtaatcgcggatcagcatgtcgcggtgaatacgttcccgggtcttgtacacaccgcccgtcacaccatgggagcgggttttaccagaagtgggtagcctaaccgcaaggagggcgctcaccacggtaggattcgtgactggggtgaagtcgtaacaaggtaacc

SEQ ID NO: 1334 - DNA, 1365 bp, Artificial Sequence; identical to SEQ ID NO: 956
  Synthetic polymer

SEQ ID NO: 1335 - DNA, 1377 bp, Artificial Sequence
  Synthetic polymer
aagtcgaacggcagccaaagcttgctctttgggtggcgagtggcgtacgggtgagtaatgggtgggaaactgcccgatggagggggataactactggaaacggtagctataccgctaacgtccggaccgtgggggaccttcgggcctcacacctcggatgtgcccatgggattactaggagtggggtaatggtcctagcacatcctctggtctgagaggatgaccagcccctggaactgagaccggccagactcctaggggaggcctaggggaatattgcacaatgggcgcaagcctgatgcagccatgccgcgtgtatgaagaaggccttcgggttgtaaagtactttcagcggggaggaaggcggtgaggttaataccttgccgattgacgttacccgcagaagaagcaccggctaactccgtgccagcagccgcggtaatacggagggtgcaagcgttaatcggaattactgggcgtaaagcgcacgcaggcggtctgttaagtcagatgtgaaatccccgggcttaacctgggaactgcatttgaaactggcaggcttgagtctcgtagaggggggtagaattccaggtgtagcggtgaaatgcgtagagatctggaggaataccggtggcgaaggcggccccctggacgaagactgacgctcaggtgcgaaagcgtggggagcaaacaggattagataccctggtagtccacgccgtaaacgatgtcgacttggaggttgtgcccttgaggcgtggcttccggagctaacgcgttaagtcgaccgcctggggagtacggccgcaaggttaaaactcaaatgaattgacgggggcccgcacaagcggtggagcatgtggtttaattcgatgcaacgcgaagaaccttacctggccttgacatccagagaacttagcagagatgctttggtgccttcgggaactctgagacaggtgctgcatggctgtcgtcagctcgtgttgtgaaatgttgggttaagtcccgcaacgagcgcaacccttatcctttgttgccagcggttcggccgggaactcaaaggagactgccggtgataaaccggaggaaggtggggatgacgtcaagtcttcatggcccttacggccaggtctacacacgtgctacaatggcgcatacaaagagaagcgacctcgcgagagcaagcggacctcataaagtgcgtcgtagtccggattggagtctgcaactcgactccatgaagtcggaatcgctcgtaatcgtagatcagaatgctacggtgaatacgttcccgggccttgtacacaccgcccgtcacaccatgggagtgggttgcaaaacaagtaggtagattaacccctggagggcgctgaccac

SEQ ID NO: 1336 - DNA, 1414 bp, Artificial Sequence
  Synthetic polymer
  misc_feature (51)..(51): n is a, c, g, or t
  misc_feature (57)..(57): n is a, c, g, or t
  misc_feature (59)..(59): n is a, c, g, or t
  misc_feature (95)..(95): n is a, c, g, or t
  misc_feature (98)..(98): n is a, c, g, or t
  misc_feature (398)..(398): n is a, c, g, or t
  misc_feature (948)..(948): n is a, c, g, or t
  misc_feature (952)..(952): n is a, c, g, or t
  misc_feature (965)..(966): n is a, c, g, or t
  misc_feature (984)..(984): n is a, c, g, or t
  misc_feature (1358)..(1358): n is a, c, g, or t
gcaagtcgaacggtaacaggaagcagcttgctgcttcgctgacgagtggcncctttnangagtaatgtctgggaaactgcctgatggaggggganttntactggaaacggtagctaataccgcataacgtcgcaagaccaaagagggggaccttcgggcctcttgccatcggatgtgcccagatgggattagctagtaggtggggtaacggctcacctaggcgacgatccctagctggtctgagaggatgaccagccacactggaactgagacacggtccagactcctacgggaggcagcagtggggaatattgcacaatgggcgcaagcctgatgcagccatgccgcgtgtatgaagaaggccttcgggttgtaaagtactttcagcggggaggaanggagtaaagttaatacctttgctcattgacgttacccgcagaagaagcaccggctaactccgtgccagcagccgcggtaatacggagggtgcaagcgttaatcggaattactgggcgtaaagcgcacgcaggcggtttgttaagtcagatgtgaaacccccgggctcaacctgggaactgcatctgatactggcaagcttgagtctcgtagaggggggtagaattccaggtgtagcggtgaaatgcgtagagatctggaggaataccggtggcgaaggcggccccctggacgaagactgacgctcaggtgcgaaagcgtggggagcaaacaggattagataccctggtagtccacgccgtaaacgatgtcgacttggaggttgtgcccttgaggcgtggcttccggagctaacgcgttaagtcgaccgcctggggagtacgggccgcaaggttaaaactcaaatgaattgacgggggcccgcacaagcggtggagcatgtggtttaattcgatgcaacgcgaagaaccttacctggtcttgacatccacngaanttttcagagatgnnaatgtgccttcgggaacngtgagacaggtgctgcatggctgtcgtcagctcgtgttgtgaaatgttgggttaagtcccgcaacgagcgcaacccttatcctttgttgccagcggtccggccgggaactcaaaggagactgccagtgataaactggaggaaggtggggatgacgtcaagtcatcatggcccttacgaccagggctacacacgtgctacaatggcgcatacaaagagaagcgacctcgcgagagcaagcggacctcataaagtgcgtcgtagtccggattggagtctgcaactcgactccatgaagtcggaatcgctagtaatcgtggatcagaatgccacggtgaatacgttcccgggccttgtacacaccgcccgtcacagncatgggagtgggttgcaaaagaagtaggtagcttaaccttcgggagggcgctaccc

SEQ ID NO: 1337 - DNA, 1400 bp, Artificial Sequence; identical to SEQ ID NO: 567
  Synthetic polymer

SEQ ID NO: 1338 - DNA, 1465 bp, Artificial Sequence
  Synthetic polymer
gatgaacgctggcggcaggcctaacacatgcaagtcgagcggcagcgggaagtagcttgctactttgccggcgagcggcggacgggtgagtaatgtctggggatctgcctgatggtgggggataactactggaaacggtagctaataccgcataacgtcgcaagaccaaagtgggggaccttcgggcctcacgccatcggatgaacccagatgggattagctagtaggtgaggtaatggctcacctaggcgacgatccctagctggtctgagaggatgaccagccacactggaactgagacacggtccagactcctacgggaggcagcagtggggaatattgcacaatgggcgcaagcctgatgcagccatgccgcgtgtgtgaagaaggccttcgggttgtaaagcactttcagcgaggaggaaggggtgagtgttaatagcgcttaccattgacgttactcgcagaagaagcaccggctaactccgtgccagcagccgcggtaatacggagggtgcgagcgttaatcggaattactgggcgtaaagcgtacgcaggcggtttgttaagtcagatgtgaaatccccgagcttaactcgggaactgcatttgaaactggcaagctagagtctcgtagaggggggtagaattccaggtgtagcggtgaaatgcgtagagatccggaggaataccggtggcgaaggcggccccctggacgaagactgacgctcaggtacgaaagcgtggggagcaaacaggattagataccctggtagtccacgctgtaaacgatgtcgatttgaaggttgtggccttgagccgtggctttcggagctaacgcgttaaatcgaccgcctggggagtacggccgcaaggttaaaactcaaatgaattgacgggggcccgcacaagcggtggagcatgtggtttaattcgatgcaacgcgaagaaccttacctactcttgacatccagagaagtttgcagagatgcgaatgtgccttcgggagccctgagacaggtgctgcatggctgtcgtcagctcgtgttgtgaaatgttgggttaagtcccgcaacgagcgcaacccttatcctttgttgccagcacgtaatggtgggaactcaaaggagactgccggtgacaaaccggaggaaggtggggatgacgtcaagtcatcatggcccttacgagtagggctacacacgtgctacaatggcgcatacaaagagaagcgaactcgcgagagccagcggacctcacaaagtgcgtcgtagtccggattggagtctgcaactcgactccatgaagtcggaatcgctagtaatcgtggatcagaatgccacggtgaatacgttcccgggccttgtacacaccgcccgtcacaccatgggagtgggttgcaaaagaagtaggtagcttaaccttcgggagggcgcttaccactttgtgattcatgactggggtg

SEQ ID NO: 1339 - DNA, 1443 bp, Artificial Sequence
  Synthetic polymer
gcctaacacatgcaagtcgagcggtagcacgggagagcttgctctctgggtgacgagcggcggacgggtgagtaatgtctgggaaactgcctgatggagggggataactactggaaacggtagctaataccgcatgacctcgcaagagcaaagtgggggaccttcgggcctcacgccatcggatgtgcccagatgggattagctagtaggtggggtaatggctcacctaggcgacgatccctagctggtctgagaggatgaccagccacactggaactgagacacggtccagactcctacgggaggcagcagtggggaatattgcacaatgggcgcaagcctgatgcagccatgccgcgtgtgtgaagaaggccttagggttgtaaagcactttcagcgaggaggaaggcgttgtagttaatagctgcagcgattgacgttactcgcagaagaagcaccggctaactccgtgccagcagccgcggtaatacggagggtgcaagcgttaatcggaattactgggcgtaaagcgcacgcaggcggtttgttaagtcagatgtgagatccccgagcttaacttgggaactgcatttgaaactggcaagctagagtcttgtagaggggggtagaattccaggtgtagcggtgaaatgcgtagagatctggaggaataccggtggcgaaggcggccccctggacaaagactgacgctcaggtgcgaaagcgtggggagcaaacaggattagataccctggtagtccacgctgtaaacgatgtcgacttggaggttgtgcccttgaggcgtggcttccggagctaacgcgttaagtcgaccgcctggggagtacggccgcaaggttaaaactcaaatgaattgacgggggcccgcacaagcggtggagcatgtggtttaattcgatgcaacgcgaagaaccttacctacccttgacatccacggaattcgctagagatagcttagtgccttcgggaaccgtgagacaggtgctgcatggctgtcgtcagctcgtgttgtgaaatgttgggttaagtcccgcaacgagcgcaacccttatcctttgttgccagcgagcaatgtcgggaactcaaaggagactgccggtgataaaccggaggaaggtggggatgacgtcaagtcatcatggcccttacgagtagggctacacacgtgctacaatggcatatacaaagagaagcaaactcgcgagagcaagcggacctcataaagtatgtcgtagtccggattggagtctgcaactcgactccatgaagtcggaatcgctagtaatcgtagatcagaatgctacggtgaatacgttcccgggccttgtacacaccgcccgtcacatcacgaaagtgggccgtactagaagtcggtaagccaaccgcaagggggcagccgcccaaggtacagctcatgattgg

SEQ ID NO: 1340 - DNA, 1474 bp, Artificial Sequence
  Synthetic polymer
agagtttgatcttggctcagattgaacgctggcggcaggcctaacacatgcaagtcgaacggtaacaggaaacagcttgctgtttcgctgacgagtggcggacgggtgagtaatgtctgggaaactgcctgatggagggggataactactggaaacggtagctaataccgcataacgtcgcaagaccaaagagggggaccttcgggcctcttgccatcggatgtgcccagatgggattagctagtaggtggggtaacggctcacctaggcgacgatccctagctggtctgagaggatgaccagccacactggaactgagacacggtccagactcctacgggaggcagcagtggggaatattgcacaatgggcgcaagcctgatgcagccatgccgcgtgtatgaagaaggccttcgggttgtaaagtactttcagcggggaggaagggagtaaagttaatacctttgctcattgacgttacccgcagaagaagcaccggctaactccgtgccagcagccgcggtaatacggagggtgcaagcgttaatcggaattactgggcgtaaagcgcacgcaggcggtttgttaagtcagatgtgaaatccccgggctcaacctgggaactgcatctgatactggcaagcttgagtctcgtagaggggggtagaattccaggtgtagcggtgaaatgcgtagagatctggaggaataccggtggcgaaggcggccccctggacgaagactgacgctcaggtgcgaaagcgtggggagcaaacaggattagataccctggtagtccacgccgtaaacgatgttgatttggggtttgtcccttgggggggggtttcgggagtaaacgcgtaaattggaccgcctggggagtagggcggcaaagtttaaaattcaaatgaatgaaggggggcccgcacagcgggtggagcatgggtttaatttggatgcaacgcgaagaaccttacctggtcttgacatccacggaagttttcagagatgagaatgtgccttcggggaccgtgagacaggtgctgcatggctgtcgtcagctcgtgttgtgaaatgttgggttaagtcccgcaacgagcgcaacccttatcctttgttgccagcggtccggccgggaactcaaaggagactgccagtgataaactggaggaaggtggggatgacgtcaagtcatcatggcccttacgaccagggctacacacgtgctacaatggcgcatacaaagagaagcgacctcgcgagagcaagcggacctcataaagtgcgtcgtagtccggattggagtctgcaactcgactccatgaagtcggaatcgctagtaatcgtggatcagaatgccacggtgaatacgttcccgggccttgtacacaccgcccgtcacaccatgggagtgggttgcaaaagaagtaggtagcttaaccttcgggagggcgcttaccactttgtgattcat

SEQ ID NO: 1341 - DNA, 1411 bp, Artificial Sequence
  Synthetic polymer
catgcaagtcggacggtagcacagagaagcttgttccttgtgtgacgagtgggagaggggtgtgagtgtggggagatctgccatatagggggggataccctctgaaaaggggggctaataccatataacctcacaagaccaaagagggggaccttcgggcctctcactatcggatgaacccagatgggattagctagtaggcggggtaatggcccacctaggcgacgatccctagctggtctgagaggatgaccagccacactggaactgagacacggtccagactcctacgggaggcagcagtggggaatattgcacaatgggcgcaagcctgatgcagccatgccgcgtgtatgaagaaggccttcgggttgtaaagtactttcagcggggaggaaggcgatggggttaataaccgctgtcgatgacgtacccgcagaagagcccgactaactccgtgccagcagccgcggtaatacggagggtgcaagcgttaatcggaattactgggcgtaagcgcacgcaggcggtctgttaagtcagatgtgaaatccccgggcttaacctgggaactgcatttgaaactggcaggcttgagtcttgtagaggggggtagaattccaggtgtagcggtgaaatgcgtagagatctggaggaataccggtggcgaaggcggccccctggacaaagactgacgctcaggtgcgaaagcgtggggagcaaacaggattagataccctggtagtccacgccgtaaacgatgtcgacttggaggttgttcccttgaggagtggcttccggagctaacgcgttaagtcgaccgcctggggagtacggccgcaaggttaaaactcaaatgaattgacgggggcccgcacaagcggtggagcatgtggtttaattcgatgcaacgcgaagaaccttacctactcttgacatccagcgaacttagcagagatgctttggtgccttcgggaacgctgagacaggtgctgcatggctgtcgtcagctcgtgttgtgaaatgttgggttaagtcccgcaacgagcgcaacccttatcctttgttgccagcgattcggtcgggaactcaaaggagactgccggtgataaaccggaggaaggtggggatgacgtcaagtcatcatggcccttacgagtagggctacacacgtgctacaatggcgcatacaaagagaagcgacctcgcgagagcaagcggacctcacaaagtgcgtcgtagtccggatcggagtctgcaacttgactccgcgaagtcggaatcgctagtaatcgtggatcagaatgccacggtgaatacgttcccgggccttgtacacaccgcccgtcacaccatgggagtgggttgcaaaagaagtaggtagcttaaccttcgggagggcgcttaccac

SEQ ID NO: 1342 - DNA, 1478 bp, Artificial Sequence
  Synthetic polymer
attgaacgctggcggcaggcctaacacatgcaagtcgaacggtagcacagaggagcttgctccttgggtgacgagtggcggacgggtgagtaatgtctgggaaactgcccgatggagggggataactactggaaacggtagctaataccgcataacgtcgcaagaccgaagagggggaccttcgggcctcttgccatcggatgtgcccagatgggattagctagtaggtggggtaacggctcacctaggcgacgatccctagctggtctgagaggatgaccagccacactggaactgagacacggtccagactcctacgggaggcagcagtggggaatattgcacaatgggcgcaagcctgatgcagccatgccgcgtgtatgaagaaggccttcgggttgtaaagtactttcagcgaggaggaaggtgttgtggttaataaccgcagcaattgacgttactcgcagaagaagcaccggctaactccgtgccagcagccgcggtaatacggagggtgcaagcgttaatcggaattactgggcgtaaagcgcacgcaggcggtctgtcaagtcggatgtgaaatccccgggctcaacctgggaactgcatccgaaactggcaggctagagtcttgtagaggggggtagaattccaggtgtagcggtgaaatgcgtagagatctggaggaataccggtggcgaaggcggccccctggacaaagactgacgctcaggtgcgaaagcgtggggagcaaacaggattagataccatggtagtccacgccgtaaacgatgtcaacgtggaggttgtgcccttgggggcgtgtttcgggaagttaacggttaagttcgcccgcctgggggagtacggccccaaggttaaaattcaaataaatgacggggggccggcacaagcggtggagcatgtggtttaattggatgcaaggcgaagacccttccttactcttgacatccagagaacttaggcagaagatgttttggtgccttcgggaattctgagacaggtgctgcatggctgtcgtcagctcgtgttgtgaaatgttgggttaagtcccgcaacgagcgcaacccttatcttttgttgccagcggttcggccgggaactcaaaggagactgccagtgataaactggaggaaggtggggaggacgtcaagtcatcatggcccttacgagtagggctacacacgtgctacaatggcatatacaaagagaagcgacctcgcgagagcaagcggacctcataaagtatgtcgtagtccggattggagtctgcaactcgactccatgaagtcggaatcgctagtaatcgtggatcagaatgccacggtgaatacgttcccgggccttgtacacaccgcccgtcacaccatgggagtgggttgcaaaagaagtaggtagcttaaccttcgggagggcgcttaccactttgtgattcatgactggggtgaagtcgtaac

SEQ ID NO: 1343 - DNA, 1506 bp, Artificial Sequence; identical to SEQ ID NO: 1059
  Synthetic polymer

SEQ ID NO: 1344 - DNA, 1494 bp, Artificial Sequence
  Synthetic polymer
gagtttgatcctggctcagattgaacgctggcggcaggcctaatacatgcaagtcgaacggtaacagcagagagcttgctctttggctgacgagtggcggacgggtgagtaagacctgggaatctgcctggtagtgggggacaacagttggaaacgactgctaataccgcatactccctaagggggaaagacgcaagtcgctatcagatgagcccaggagggattagctagtaggtgaggtaaaggctcacctaggcgacgatctctagctggtctgagaggatgatcagccacattgggactgagacacggtccagactcctacgggaggcagcagtggggaatattgcacaatgggcgcaagcctgatgcagccatgccgcgtgtatgaagaaggccttcgggttgtaaagtactttcagcggggaggaagggagtaaagttaatacctttgctcattgacgttacccgcagaagaagcaccggctaactccgtgccagcagccgcggtaatacggagggtgcaagcgttaatcggaattactgggcgtaaagcgcacgcaggcggtttgttaagtcagatgtgaaatccccgggctcaacctgggaactgcatctgatactggcaagcttgagtctcgtagaggggggtagaattccaggtgtagcggtgaaatgcgtagagatctggaggaataccggtggcgaaggcggccccctggacgaagactgacgctcaggtgcgaaagcgtggggagcaaacaggattagataccctggtagtccacgccgtaaacgatgtcgacttggaggttgtgcccttgaggcgtggcttccggagctaacgcgttaagtcgaccgcctggggagtacggccgcaaggttaaaactcaaatgaattgacgggggcccgcacaagcggtggagcatgtggtttaattcgatgcaacgcgaagaaccttacctggtcttgacatccacggaagttttcagagatgagaatgtgccttcgggaaccgtgagacaggtgctgcatggctgtcgtcagctcgtgttgtgaaatgttgggttaagtcccgcaacgagcgcaacccttatcctttgttgccagcggtccggccgggaactcaaaggagactgccagtgataaactggaggaaggtggggatgacgtcaagtcatcatggcccttacgaccagggctacacacgtgctacaatggcgcatacaaagagaagcgacctcgcgagagcaagcggacctcataaagtgcgtcgtagtccggattggagtctgcaactcgactccatgaagtcggaatcgctagtaatcgtggatcagaatgccacggtgaatacgttcccgggccttgtacacaccgcccgtcacaccatgggagtgggttgcaaaagaagtaggtagcttaaccttcgggagggcgcttaccactttgtgattcatgactggggtgaagtcgtaacaaggtagccgtag

SEQ ID NO: 1345 - DNA, 1507 bp, Artificial Sequence; identical to SEQ ID NO: 877
  Synthetic polymer

SEQ ID NO: 1346 - DNA, 1381 bp, Artificial Sequence; identical to SEQ ID NO: 1139
  Synthetic polymer

SEQ ID NO: 1347 - DNA, 1368 bp, Artificial Sequence
  Synthetic polymer
ctgcctgatggagggggataactactggaaacggtagctaataccgcataacgtcgcaagagcaaagagggggaccttcgggcctcttgccatcagatgtgcccagatgggattagctagtaggtggggtaatggctcacctaggcgacgatccctagctggtctgagaggatgaccagccacactggaactgagacacggtccagactcctacgggaggcagcagtggggaatattgcacaatgggcgcaagcctgatgcagccatgccgcgtgtatgaagaaggccttcgggttgtaaagtactttcagcggggaggaaggtgttgtggttaataaccacagcaattgactttactcgcagaagaagcaccggctaactccgtgccagcagccgcggtaatacggagggtgcaagcgttaatcgcaattactgggcgtaaagcgcacgcaggcggtttgttaagtcagatgtgaaatccccgcgctcaacctgggaactgcattcgaaactggcaggctagagtcttgtagaggggggtagaattccaggtgtagcggtgaaatgcgtagagatctggaggaataccggtggcgaaggcggccccctggacaaagactgacgctcaggtgcgaaagcgtggggagcaaacaggattagataccctggtagtccacgccgtaaacgatgtcgacttggaggttgttcccttgaggagtggcttccggagctaacgcgttaagtcgaccgcctggggagtacggccgcaaggttaaaactcaaatgaattgacgggggcccgcacaagcggtggagcatgtggtttaattcgatgcaacgcgaagaaccttacctactcttgacatccacataacttaccagagatgctttggtgccaccgggaactctgagaccggtgctgcatggctgtcgtcagctcgtgttgtgaaatgttgggttaattcccgcaacgagcgcaacccttatcctttgttgccagcacgtaatggtgggaactcaagggagactgccagtgataaactggaggaaggtggggatgacgtcaagtcatcatggcccttacgagtagggctacacacgtgctacaatggcgcatacaaagagaagcgacctcgcgagagcaagcggacctcataaagtgcgtcgtagtccggattggagtctgcaactcgactccatgaagtcggaatcgctagtaatcgtagatcagaatgctacggtgaatacgttcccgggccttgtacacaccgcccgtcacaccatgggagtgggttgcaaaagaagtaggtagcttaaccttcgggagggcgcttaccactttgtgattcatgactggggtgaagtcgt

SEQ ID NO: 1348 - DNA, 1503 bp, Artificial Sequence; identical to SEQ ID NO: 25
  Synthetic polymer

SEQ ID NO: 1349 - DNA, 1356 bp, Artificial Sequence
  Synthetic polymer
gcttgctccccgggtgacgagtggcggacgggtgagtaatgcctgggaaactgcccgatggagggggataactactggaaacggtagctaataccgcataatgtcttcggaccaaagtgggggaccttcgggcctcacaccatcggatgtgcccaggtgggattagcttgtaggtgaggtaatggctcacctaggcgacgatccctagctggtctgagaggatgaccagccacactgggactgagacacggcccacactcctacgggaggcagcagtggggaatattgcacaatgggggaaaccctgatgcagccatgccgcgtgtgtgaagaaggccttagggttgtaaagcactttcagtggggaggaaggatgtggagttaatagcttcatgtattgacgttacccacagaagaagcaccggctaactccgtgccagcagccgcggtaatacggagggtgcaagcgttaatcggaattactgggcgtaaagcgcacgcaggcggtctgccaagtcggatgtgaaatccccgggcttaacctgggaactgcatccgaaactggcaggctagagtcttgtagaggggggtagaattccatgtgtagcggtgaaatgcgtagagatgtggaggaataccggtggcgaaggcggccccctggacaaagactgacgctcaggtgcgaaagcgtggggagcaaacaggattagataccctggtagtccacgctgtaaacgatgtcgacttggaggttgttcccttgaggagtggcttccggagctaacgcgttaagtcgaccgcctggggagtacggccgcaaggttaaaactcaaatgaattgacgggggcccgcacaagcggtggagcatgtggtttaattcgatgcaacgcgaagaaccttacctactcttgacatccagagaacttagcagagatgctttggtgccttcgggagctctgagacaggtgctgcatggctgtcgtcagctcgtgttgtgaaatgttgggttaagtcccgcaacgagcgcaacccctatcctttgttgccagcacgtcatggtgggaactcaaaggagactgccggtgataaaccggaggaaggtggggatgacgtcaagtcatcatggcccttacgagtagggctacacacgtgctacaatggcgtatacaaagagaagctacctcgcgagagcatgcggacctcataaagtacgtcgtagtccggattggagtctgcaactcgactccatgaagtcggaatcgctagtaatcgtagatcagaatgctacggtgaatacgttcccgggccttgtacacaccgcccgtcacaccatgggagtgggttgcaaaagaagt

SEQ ID NO: 1350 - DNA, 1486 bp, Artificial Sequence
  Synthetic polymer
tcatggctcagattgaacgctggcggcaggcttaacacatgcaagtcgagcggtaacaggggagagcttgctctcctgctgacgagcggcggacgggtgagtaatgtctgggaaactgcctgatggagggggataactactggaaacggtggctaataccgcatgatgtcgcaagaccaaagagggggaccttcgggcctcttgccatcggatgtgcccagatgggattagctagtaggtgaggtaatggctcacctaggcgacgatctctagctggtctgagaggatgaccagccacactggaactgagacacggtccagactcctacgggaggcagcagtggggaatattgcacaatgggcgcaagcctgatgcagccatgccgcgtgtgtgaagaaggccttagggttgtaaagcactttcagcgaggaggaagggtrataacttaatacgttattacattgacgttactcgcagaagaagcaccggctaactccgtgccagcagccgcggtaatacggagggtgcaagcgttaatcggaattactgggcgtaaagcgcacgcaggcggtttgttaagtcagatgtgaaatccccgggctcaacctgggaactgcatttgaaactggcaagctagagtcttgtagaggggggtagaattccacgtgtagcggtgaaatgcgtagagatgtggaggaataccggtggcgaaggcggccccctggacaaagactgacgctcaggtgcgaaagcgtggggagcaaacaggattagataccctggtagtccacgctgtaaacgatgtcgatttggaggttgttcccttgaggagtggcttccggagctaacgcgttaaatcgaccgcctggggagtacggccgcaaggttaaaactcaaatgaattgacgggggcccgcacaagcggtggagcatgtggtttaattcgatgcaacgcgaagaaccttacctactcttgacatccagagaacttrgcagagatgctttggtgccttcgggaactctgagacaggtgctgcatggctgtcgtcagctcgtgttgtgaaatgttgggttaagtcccgcaacgagcgcaacccttatcctttgttgccagcgagtaatgtcgggaactcaaaggagactgccggtgataaaccggaggaaggtggggatgacgtcaagtcatcatggcccttacgagtagggctacacacgtgctacaatggcgcatacaaagagaagcgacctcgcgagagcaagcggacctcacaaagtgcgtcgtagtccggattggagtctgcaactcgactccatgaagtcggaatcgctagtaatcgtgaatcagaatgtcacggtgaatacgttcccgggccttgtacacaccgcccgtcacaccatgggagtgggttgcaaaagaagtaggtagcttaaccttcgggagggcgcttaccactttgtgattcatgactggggtgaagtcgtaac

SEQ ID NO: 1351 - DNA, 1479 bp, Artificial Sequence
  Synthetic polymer
  misc_feature (303)..(303): n is a, c, g, or t
attgaacgctggcggcaggcctaacacatgcaagtcgaacggcagcacagagagcttgctctcgggtggcgagtggcggacgggtgagtaatgtctgggaaactgcctggtggagggggataactactggaaacggtagctaataccgcataatgtcgcaagaccaaagtgggggaccttcgggcctcacaccatcggatgtgcccagatgggattagctagcaggcagggtaacggcctacctgggcgacgatccctagctggtctgagaggatgaccagccacactggaactgagacacgntccagtccagactcctgcgggaggcagcagtggggaatattgcacaatgggcgcaagcctgatgcagccatgccgcgtgtatgaagaaggccttagggttgtaaagtactttcagcggggaggaagggtctgtggttaataaccgcagtcattgacgttacccgcagaagaagcaccggctaactccgtgccagcagccgcggtaatacggagggtgcaagcgttaatcggaattactgggcgtaaagcgcacgcaggcggtctgtcaagtcggatgtgaaatccccgggcttaacccgggaacggcattcgaaactgtcaggctggagtctcgtagaggggggtagaattccaggtgtagcggtgaaatgcgtagagatctggaggaataccggtggcgaaggcggccccctggacgaagactgacgctcaggtgcgaaagcgtggggagcaaacaggattagataccctggtagtccacgccgtaaacgatgtcgacctggaggttgtgcccttgaggtgtggcttccggagctaacgcgttaagtcgaccgcctggggagtacggccgcaaggttaaaactcaaatgaattgacgggggcccgcacaagcggtggagcatgtggtttaattcgatgcaacgcgaagaaccttacctggccttgacatccagagaacgtggcagagatgctgtggtgccttcgggaactctgagacaggtgctgcatggctgtcgtcagctcgtgttgtgaaatgttgggttaagtcccgcaacgagcgcaacccctatcctttgttgccagcgattcggtcgggaactcaaaggagactgccggtgataaaccggaggaaggtggggatgacgtcaagtcatcatggcccttacgagtagggctacacacgtgctacaatggcgcatacaaagagaagcgacctcgcgagagcaagcggacctcataaagtgcgtcgtagtccggatcggagtctgcaactcgactccgtgaagtcggaatcgctagtaatcgtagatcagaatgctacggtgaatacgttcccgggccttgtacacaccgcccgtcacaccatgggagtgggttgcaaaagaagtagatagcttaaccttcgggagggcgtttaccactttgtgattcatgactggggtgaagtcgtaacaa

SEQ ID NO: 1352 - DNA, 1400 bp, Artificial Sequence; identical to SEQ ID NO: 723
  Synthetic polymer

SEQ ID NO: 1353 - DNA, 1504 bp, Artificial Sequence; identical to SEQ ID NO: 37
  Synthetic polymer

SEQ ID NO: 1354 - DNA, 1373 bp, Artificial Sequence
  Synthetic polymer
gggtgagtaatgtctggggaaactgccccgacttgtgagggggataactactggaaacggtagctaataccgcataacgtcgcaagacccaaagagggggaccttcgggcctcttgccatcggatgtgcccagatgggattagcttgtaggtgaggtaacggctcaccttaggcgacgatccctagctggtctgagaggatgaccagccacactggaaattgagacacggtccagactcctacgggaggcagcagtggggaatattgcacaattgggcgcaagcctgatgcagccatgccgcgtgtatgaagaaggccttcgggttgtaaagtacttttcagcggggaggaagggagtgaggttaataacctcatttcattgacgttacccgcagaagaagcaccggctaacttccgtgccagcagccgcggtaatacggagggtgcaagcgttaatcggaattactgggcgtaaagcgcacgcaggcggtctgtcaagtcggatgtgaaatccccgggctcaacctgggaactgcattcgaaactggcaggctggagtcttgtagaggggggtagaattccaggtgtagcggtgaaatgcgtagagatctagaggaataccggtggcgaaggcggccccctggacaaaagaccgacgctcaggtgcgaaagcgtggggagcaaaacaggattagataccctggtagtccacgctgtaaacgatgtcgacttggaggttgttcccttgaggagtggcttccggagctaacgcgttaagtcgaccgcctggggagtacggccgcaaggttaaaactcaaatgaattgacgggggcccgcacaagcggtggagcatgtggtttaattcgatgcaacgcgaagaaccttacctactcttgacatccagagaacttagcagagatgctttggtgccttcgggaactctgagacaggtgctgcatggctgtcgtcagctcgtgttgtgaaatgttgggttaagtcccgcaacgagcgcaacccttatcctttgttgccagcgattcggtcgggaactcaaaggagactgccagtgataaactggaggaaggtggggatgacgtcaagtcatcatggcccttacgagtagggctacacacgtgctacaatggcatatacaaagagaagcgacctcgcgagagcaagcggacctcataaagtatgtcgtagtccggattggagtctgcaactcgactccatgaagtcggaatcgctagtaatcgtggatcagaatgccacggtgaatacgttcccgggccttgtacacaccgcccgtcacaccatgggagtgggttgcaaaagaagtaggtagcttaaccttcgggagggcgcttaccac

SEQ ID NO: 1355 - DNA, 1403 bp, Artificial Sequence; identical to SEQ ID NO: 599
  Synthetic polymer

SEQ ID NO: 1356 - DNA, 1492 bp, Artificial Sequence
  Synthetic polymer
ggagagttagatcttggctcagattgaacgctggcggcaggcctaacacatgcaagtcgaacggtagcaggaagaagcttgcttctttgctgacgagtggcggacgggtgagtaatgtctgggaaactgcccgatggagggggataactactggaaacggtagctaataccgcataacgtcttcggaccaaagagggggaccttcgggcctcttgccatcggatgtgcccagatgggattagctagtaggtggggtaacggctcacctaggcgacgatccctagctggtctgagaggatgaccagccacactggaactgagacacggtccagactcctacgggaggcagcagtggggaatattgcacaatgggcgcaagcctgatgcagccatgccgcgtgtatgaagaaggccttcgggttgtaaagtactttcagcggggaggaagggagtgaggttaataacctcattcattgacgttacccgcagaagaagcaccggctaactccgtgccagcagccgcggtaatacggagggtgcaagcgttaatcggaattactgggcgtaaagcgcacgcaggcggtctgtcaagtcggatgtgaaatccccgggctcaacctgggaactgcattcgaaactggcaggcttgagtctcgtagaggggggtagaattccaggtgtagcggtgaaatgcgtagagatctggaggaataccggtggcgaaggcggccccctggacgaagactgacgctcaggtgcgaaagcgtggggagcaaacaggattagataccctggtagtccacgccgtaaacgatgtctacttggaggctgtggtcttgaaccgtggcttccggagctaacgcgttaagtagaccgcttggggagtacggccgcaaggttaaaactcaaatgaattgacgggggcccgcacaagcggtggagcatgtggtttaattcgatgcaacgcgaagaaccttacctactcttgacatccagagaacttagcagagatgctttggtgccttctggaactctgagacaggtgctgcatggctgtcgtcagctcgtgctttgaaatgttgggttaagtcccgcaacgaggccaacccttatccttcgttactaccgattcggtcgggaactcaaagtagagtgccagtgacaaattggaggaaggtggggatgatgtcaagtcatcatggccttttcgagtaggggtacacacgtgccacaatggagcatacaaagagaagcgacctcgcgagagcaaagggacctcattaactgtgtcgtagtccggattggagtctgcaattcgactccatgaagtgggaatctctagtaatcgtggatcagaatcccaccgtgaatacgttctcgggccttgtacacaccgcccgtcacaccatgggagtgggctgcaaaagaagtaggtagcttaaccttcgggagggcgcttaccactttgtgattcatgactggggtgaagtcg

SEQ ID NO: 1357 - DNA, 1535 bp, Artificial Sequence; identical to SEQ ID NO: 623
  Synthetic polymer

SEQ ID NO: 1358 - DNA, 1508 bp, Artificial Sequence
  Synthetic polymer
ttagagtttgatcatggctcagactgaacgctggcggcaggcctaacacatgcaagtcgaacggtagcacagagagcttgctctcgggtgacgagtggcggacgggtgagtaatgtctgggaaactgcctgatggagggggataactactggaaacggtagctaataccgcataacgtcgcaagaccaaagagggggaccttcgggcctcttgccatcagatgtgcccagatgggattagctagtaggtggggtaacggctcacctaggcgacgatccctagctggtctgagaggatgaccagccacactggaactgagacacggtccagactcctacgggaggcagcagtggggaatattgcacaatgggcgcaagcctgatgcagccatgccgcgtgtgtgaagaaggccttcggattgtaaagcactttcagcggggaggaaggcggtgaggttaataacctcatcgattgacgttacccgcagaagaagcaccggctaactccgtgccagcagccgcggcaatacggagggtgcaagcgttaatcggaattactgggcgtaaagcgcacgcaggcggtctgtcaagtcggatgtgaagtccccgggctcaacctgggaactgcattcgaaactggcaggctagagtcttgtagaggggggtagaattccaggtgtagcggtgaaatgcgtagagatctggaggaataccggtggcgaaggcggccccctggacaaagactgacgctcaggtgcgaaagcgtggggagcaaacaggattagataccctggtagtccacgctgtaaacgatgtcgatttggaggttgtgcccttgaggcgtggcttccggagctaacgcgttaaatcgaccgcctggggagtacggccgcaaggttaaaactcaaatgaattgacgggggcccgcacaagcggtggagcatgtggtttaattcgatgcaacgcgaagaaccttacctggtcttgacatagtaagaactttccagagatggattggtgccttcgggaacttacatacaggtgctgcatggctgtcgtcagctcgtgtcgtgagatgttgggttaagtcccgcaacgagcgcaacccttttccttatttgccagcgggttaagccgggaactttaaggatactgccagtgacaaactggaggaaggcggggacgacgtcaagtcatcatggcccttacgaccagggctacacacgtgctacaatggtcggtacaaagggttgctacctagcgataggatgctaatctcaaaaagccgatcgtagtccggattggagtctgcaactcgactccatgaagtcggaatcgctagtaatcgcggatcagaatgccgcggtgaatacgttcccgggccttgtacacaccgcccgtcacaccatgggagtttgttgcaccagaagtaggtagtctaaccgtaaggaggacgcttaccacggtgtggccgatgactggggtgaagtcgtaacaaggtaaccgtag

SEQ ID NO: 1359 - DNA, 1492 bp, Artificial Sequence
  Synthetic polymer
  misc_feature (122)..(122): n is a, c, g, or t
  misc_feature (172)..(172): n is a, c, g, or t
  misc_feature (177)..(177): n is a, c, g, or t
  misc_feature (186)..(188): n is a, c, g, or t
  misc_feature (209)..(209): n is a, c, g, or t
  misc_feature (239)..(239): n is a, c, g, or t
  misc_feature (259)..(259): n is a, c, g, or t
  misc_feature (282)..(282): n is a, c, g, or t
attgaacgctggcggcaggcctaacacatgcaagtcgagcggtagcacagggagcttgctcctgggtgacgagcggcggacgggtgagtaatgtctgggaaactgcccgatggaggggatanctactggaaacggtagctataccgcataacgtcttcggaccaagtggggnacttncgggcctcnnncatcggatgtgcccagatggnattagctagtaggtgaggtaatggctcacntaggcgacgatccctagctngtctgagaggatgaccagccacnactgggaactgagacacggtccagactctaccgggaggcagcagtggggaatattgcacaatgggcgcaagcctgatgcagccatgccgcgtgtgtgaagaaggccttcgggttgtaaagcactttcagcgaggaggaagggttcagtgttaatagcactgttcattgacgttactcgcagaagaagcaccggctaactccgtgccagcagccgcggtaatacggagggtgcaagcgttaatcggaattactgggcgtaaagcgcacgcaggcggtttgttaagtcagatgtgaaatccccgagcttaacttgggaactgcatttgaaactggcaagctagagtcttgtagaggggggtagaattccaggtgtagcggtgaaatgcgtagagatctggaggaataccggtggcgaaggcggccccctggacaaagactgacgctcaggtgcgaaagcgtggggagcaaacaggattagataccctggtagtccacgctgtaaacgatgtcgacttggaggttgtgcccttgaggcgtggcttccggagctaacgcgttaagtcgaccgcctggggagtacggccgcaaggttaaaactcaaatgaattgacgggggcccgcacaagcggtggagcatgtggtttaattcgatgcaacgcgaagaaccttacctactcttgacatccacagaactttccagagatggattggtgccttcgggaactgtgagacaggtgctgcatggctgtcgtcagctcgtgttgtgaaatgttgggttaagtcccgcaacgagcgcaacccttatccctttgttgccagcgcgtcatggcgggaactcaaaggagactgccggtgataaaccggaggaaggtggggatgacgtcaagtcatcatggcccttacgagtagggctacacacgtgctacaatggcatatacaaagagaagcgaactcgcgagagcaagcggacctcataaagtatgtcgtagtccggatcggagtctgcaactcgactccgtgaagtcggaatcgctagtaatcgtagatcagaatgctacggtgaatacgttcccgggccttgtacacaccgcccgtcacaccatgggagtgcgttgcaaaagaagtaggtagcttaaccttcgggagggcgcttaccactttgtgattcatgactggggtgaagtcgtaacaaggtaaccgtaggggaacc

SEQ ID NO: 1360 - DNA, 1455 bp, Artificial Sequence
  Synthetic polymer
gcggcaggcctaacacatgcaagtcgagcggtagcacagagagcttgctctcgggtgacgagcggcggacgggtgagtaatgtctgggaaactgcctgatggagggggataactactggaaacggtagctaataccgcataatgtcgcaagaccaaagtgggggaccttcgggccccatgccatcagatgtgcccagatgggattagctagtaggtggggtaacggctcacctaggcgacgatccctagctggtctgagaggatgaccagccacactggaactgagacacggtccagactcctacgggaggcagcagtggggaatattgcacaatgggcgcaagcctgatgcagccatgccgcgtgtgtgaagaaggccttcgggttgtaaagcactttcagcggggaggaaggcgataaggttaataaccttgtcgattgacgttacccgcagaagaagcaccggctaactccgtgccagcagccgcggtaatacggagggtgcaagcgttaatcggaattactgggcgtaaagcgcacgcaggcggtctgtcaagtcggatgtgaaatccccgggcttaacctgggaactgcattcgaaactggcaggctagagtcttgtagaggggggtagaattccaggtgtagcggtgaaatgcgtagagatctggaggaatatcggtggcgaaggcggccccctggaccaagactgacgctcacgtgcgaaagcgtgacgagcaaacaggattacataccctgggaggccacgccgaaaacgatgtcgatttggaggttgtgccctcgaggcgtggctttcggagctgacgcgttaaatcgaccgcgtggggagtacggccgcaaggttaaaactcaaatgaattgacgggggcccgcacaagaggtggagcatgtggtttaattagatgcaacgcgaagaaccttacctggtcttgacatccacagaactttccagagatggactggtgccttcgggaactgtgagacaggtgctgcatggctgtcgtcagctcgtgttgtgaaatgttgggttaagtcccgcaacgagcgcaacccttatcctttgttgccagcggttcgcccgggaactcaaaggagactgccagtgataaactggaggaaggtggggatgacgtcaagtcatcatggcccttacgaccagggctacacacgtgctacaatggcatatacaaagagaagcgacctcgcgagagcaagcggacctcataaagtatgtcgtagtccggattggagtctgcaactcgactccatgaagtcggaatcgctagtaatcgtagatcagaatgctacggcgaatacgttcccgggccttgtacacaccgcccgtcacaccatgggagtgggttgcaaaagaagtaggtagcttaaccttcgggagggcgcttatccactttgtgattcatgactggggtgaag

SEQ ID NO: 1361 - DNA, 1441 bp, Artificial Sequence
  Synthetic polymer
acgctggcggaaggcctaacacatgcaagtccaacggtaacagaaagcagcttgctgctttgctgaccagtggcggacgggtgagtaatgtctgggaaactgcctgatggagggggatacctactggaaacggtaactaataccgcataacgtctacaagaccaaagagggggaccttcgggcctcttgccatcggatgtgcccagatgggattacctagtaggtggggtaacggctcacctatgcgacgatccctagctggtctgagaggatgaccagccacactggaactgatacactgtccacactcctactgtaggccgcagtggggaatattgcacaatgggcgcaaacctgatgcacccatgccgcgtgtatgaagaaggccttcgggttgtaaagtactttctgcggggaggaagggagtaaagatcatacctttgctcattgaggttactcgcataagaagcgccggcttactcctcgtcagcccccgcggtaatacggaggggtgcaagcggtaattgggaattactgggcgtaaagggcacgcaggcggtttgttaagtcagatgtgaaatccccgggctcaacctggggaactgcatttgatactggcaagcttgagtctcgtagaggggggtagaattccaggtgtagcggtgaaatgcgtagagatctggaggaataccggtggcgaaggcggccccctggacgaagactgacgctcaggtgcgaaagcgtggggagcaaacaggattagataccctggtagtccacgccgtaaacgatgtcgacttggaggttgtgcccttgaggcgtggcttccggagctaacgcgttaagtcgaccgcctggggagtacggccgcaaggttaaaactcaaatgaattgacgggggcccgcacaagcggtggagcatgtggtttaattcgatgcaacgcgaagaaccttacctggtcttgacatccacagaactttccagagatggattggtgccttcgggaactgtgagacaggtgctgcatggctgtcgtcagctcgtgttgtgaaatgttgggttaagtcccgcaacgagcgcaacccttatcctttgttgccagcggtccggccgggaactcaaaggagactgccagtgataaactggaggaaggtggggatgacgtcaagtcatcatggcccttacgaccagggctacacacgtgctacaatggcgcatacaaagagaagcgacctcgcgagagcaagcggacctcataaagtgcgtcgtagtccggattggagtctgcaactcgactccatgaagtcggaatcgctagtaatcgtggatcagaatgccacggtgaatacgttcccgggccttgtacacaccgcccgtcacaccatgggagtgggttgcaaaagaagtaaagagcttaaccttcgggagggcgcttaccac

SEQ ID NO: 1362 - DNA, 1380 bp, Artificial Sequence
  Synthetic polymer
cggtagacagagagcttgctctcgggtgacgagtggcggacgggtgagtaatgtctgggaaactgcctgatggagggggataactactggaaacggtagctaataccgcataacgtcgcaagaccaaagagggggaccttcgggcctcttgccatcagatgtgcccagatgggattagctagtaggtggggtaacggctcacctaggcgacgatccctagctggtctgagaggatgaccagccacactggaactgagacacggtccaaactcctacgggaggcagcagtggggaatattgcacaatgggcgcaagcctgatgcagccatgccgcgtgtatgaagaaggccttcgggttgtaaagtactttcagcggggaggaaggcgatgaggttaataaccttgtcgattgacgttacccgcagaagaagcaccggctaactccgtgccagcagccgcggtaatacggagggtgcaagcgttaatcggaattactgggcgtaaagcgcacgcaggcggtctgtcaagtcggatgtgaaatccccgggctcaacctgggaactgcattccaaaccggcaggctagagtcttgtagaggggggtagaattccaggtgtagcggtgaaatgcctacagatctggaggaataccggtggcgaaggcggccccctggacaaagactgacgctcaggtgcgaaagcgtggggaacaaacaggattagataccctggtagtcccacgccgtaaacgatgtcaacttggaggatgtgccctaaaggcgtggctttccaaagctaaatgcgtaaaaccgaccgcctggggagtacggccgcaaggttaaaactcaaatgaattgacgggggcccgcacaagcggtggagcatgtggtttaattcgatgcaacgcgaagaaccttacctactcttgacatccagagaacttagcagagatgctttggtgccttcgggaactctgagacaggtgctgcatggctgtcgtcagctcgtgttgtgaaatgttgggttaagtcccgcaacgagcgcaacccttatcctttgttgccagcggttaggccgggaactcaaaggagactgccagtgataaactggaggaaggtggggatgacgtcaagtcatcatggcccttacgagtagggctacacacgtgctacaatggcgcatacaaagagaagcgacctcgcgagagcaagcggacctcataaagtgcgtcgtagtccggattggagtctgcaactcgactccatgaagtcggaatcgctagtaatcgtggatcagaatgccacggtgaatacgttcccgggccttgtacacaccgcccgtcacagcatgggagtgggttgcaaaagaagtaggtagctta

SEQ ID NO: 1363 - DNA, 1501 bp, Artificial Sequence
  Synthetic polymer
tttgatcatggctcagattgaacgctggcggcaggcctaacacatgcaagtcgaacggtagcacagagagcttgctcttgggtgacgagtggcggacgggtgagtaaagtctgggaaactgcctgatggagggggataaccactggaaacggtggctaataccgcataatctcgcgagagcaaagtgggggaccttaatggcctcacgccatcggatgtgcccagatgggattagcttgttggtggggtaaaggctcaccaaggcgacgatccctagctggtctgagaggatgaccagccacactggaactgagacacggtccagactcctacgggaggcagcagtggggaatattgcacaatgggcgcaagcctgatgcagccatgccgcgtgtgtgaagaaggccttcgggttgtaaagcactttcagcggggaggaaggtggtgtggttaacagccacatcaattgacgttacccgcagaagaagcaccggctaactccgtgccagcagccgcggtaatacggagggtgcaagcgttaatcggaattactgggcgtaaagcgcacgcagacggtctgacaagtcagacgtgaaatccccgggcttaacctgggaactgcatttgaaactgtcaggctggagtcttgtagaggggggtagaattccaggtgtagcggtgaaatgcgtagagatctggaggaataccggtggcgaaggcggccccctggacaaagactgacgctcaggtgcgaaagcgtggggagcaaacaggattagataccctggtagtccacgctgtaaacgatgtcgacttggaggttgttcccttgaggagtggcttccggagctaacgcgttaagtcgaccgcctggggagtacggccgcaaggttaaaactcaaatgaattgacgggggcccgcacaagcggtggagcatgtggtttaattcgatgcaacgcgaagaaccttacctggccttgacatccacagaagaatccggagatggatttgtgccttcgggagctgtgagacaggtgctgcatggctgtcgtcagctcgtgttgtgaaatgttgggttaagtcccgcaacgagcgcaacccttatcctttgttgccatcgattaggtcgggaactcaaaggagactgctggtgacaaaccgggggaaggtggggatgacgtcaagtcatcatggcccttacggcctgggctacacacgtgctacaatggtcggtacaaagggttgccaagccgcgaggtggagctaatcccataaaaccgatcgtagtccggatcgcagtctgcaactcgactgcgtgaagtcggaatcgctagtaatcgcgaatcagaatgtcgcggtgaatacgttcccgggccttgtacacaccgcccgtcacaccatgggagtgggttgcaccagaagtagctagtctaaccttcgggaggacggttaccacggtgtgattcatgactggggtgaagtcgtaacaaggtagccgta

SEQ ID NO: 1364 - DNA, 1363 bp, Artificial Sequence
  Synthetic polymer
caggcctaacacatgcaagtcgagcggtaacacagagaagcttgcttcttgggtgacgagcggcggacgggtgagtaatgcctggtgatctgcccgatagagggggataactacgggaaactgtagctaataccgcataacgtctacggaccaaagtgggggctcttcggacctcatgctatcggatgaacccaggtgggattagctagttggtgaggtaatggctcaccaaggcgacgatctctaactggtttgataggatgaccagtcacactggaactgagacacggtccagactcctacgggaggcagcagtggggaatattgcacaatgggggataccctgatgcagccatgccgcgtgtgtgaagaaggccttcgggttgtaaagcactttcagcgaggaggatagggtgcagcttaatacgctgtgtctatgacgttactcgcagaagaggcaccggctagctccgtgccagctgccgcggtattacggaaggtgctagctttaatcggaattactgggcgtaaagcgcacgcaggcggtcaattaagtcagatgtgaaagccccgagcttaacttgggaattgcatctgaaactggttggctagagtcttgtagaggggggtagaattccaggtgtagcggtgaaatgcgtagagatctggaggaataccggtggcgaaggcggccccctggacaaagactgacgctcaggtgcgaaagcgtggggagcaaacaggatcagataccctggtagtccacgctgtaaacgatgtcgatttggaggttgtgcccttgaggcgtggcttccgggactaacgcgttaaatcgaccgcctggggagtacggccgcaaggttaaaactcaaatgaattgacgggggcccgcacaagcggtggagcatgtggtctaattcgatgcaacgcgaagaaccttacctactcttgacatccacagaatcctgtagagatagaggagtgccttcgggaactgtgagacaggtgctgcatggctgtcgtcagctcgtgttgtgaaatgttgggttaagtcccgcaacgagcgcaacccttatcctctgttgccagcacgtaatggtgggaactcaaaggagactgccggtgataaaccggaggaaggtggggatgacgtcaagtcatcatggcccttacgagtagggctacacacgtgctacaatggcatatacaaagggcggcaagctagcgatagtgagcgaatcccataaagtatgtcgtagtccggattggagtctgcaactcgactccatgaagtcggaatcgctagtaatcgtagatcagaatgctacggtgaatacgttcccgggccttgtacactccgccc

SEQ ID NO: 1365 - DNA, 1457 bp, Artificial Sequence
  Synthetic polymer
  misc_feature (59)..(59): n is a, c, g, or t
  misc_feature (61)..(61): n is a, c, g, or t
  misc_feature (63)..(63): n is a, c, g, or t
  misc_feature (901)..(901): n is a, c, g, or t
  misc_feature (906)..(906): n is a, c, g, or t
  misc_feature (935)..(935): n is a, c, g, or t
  misc_feature (953)..(954): n is a, c, g, or t
  misc_feature (971)..(971): n is a, c, g, or t
  misc_feature (1014)..(1014): n is a, c, g, or t
  misc_feature (1019)..(1019): n is a, c, g, or t
  misc_feature (1024)..(1024): n is a, c, g, or t
  misc_feature (1071)..(1071): n is a, c, g, or t
  misc_feature (1073)..(1073): n is a, c, g, or t
catgcaagtcgaacggtagcacagtagagcttgctctcgggtgacgagtggcggctttntngngtaatgtctgggaaactgcccgatggagggggattactactggaaacggtagctaataccgcataatgtcgcaagaccaaagagggggaccttcgggcctcttgccatcggatgtgcccagatgggattagcttgtaggtgaggtaacggctcacctaggcgacgatccctagctggtctgagaggatgaccagccacactggaactgagacacggtccagactcctacgggaggcagcagtggggaatattgcacaatgggcgcaagcctgatgcagccatgccgcgtgtatgaagaaggccttcgggttgtaaagtactttcagcggggaggaagggagtgaggttaataacctcattcattgacgttacccgcagaagaagcaccggctaactccgtgccagcagccgcggtaatacggagggtgcaagcgttaatcggaattactgggcgtaaagcgcacgcaggcggtctgtcaagtcggatgtgaaatccccgggctcaacctgggaactgcattcgaaactggcaggctggagtcttgtagaggggggtagaattccaggggaagcggtgaaacgcgtagagatctggaggaataccggtggcgaaggcggccccctggacaaagactgacgctcaggtgcgaaagcgtggggagcaaacaggattagataccctggtagcccacgctgtaaacgatgtcgacttggaggttgttcccttgaggagtggcttccggagctaacgcgttaagtcgaccgcctggggagtacggccgcaaggttaaactcaaatgaattgacgggggcccgcacaagcggtggagcaagtggnttaantcgatgcaacgcgaagaaccttacctggncttgacatccacagaacnnggcagagatgccttggngccttcgggaactgtgagacaggcgctgcatggctgacgtcancgcgngtagngaaatgttgggttaagtcccgcaacgagcgcaacccttatcctttgntnccagcggtccggcggcgggaaccaaggagactgccagggtacaaactggaggaggtggggatgacgccaagacatcatgggcccttacgagtagggctacacacgtgctacaatggtttatacaaagagaagcgacctcgcgagagcaagcggacctcataaagtatgtcgtagtccggattggagtctgcaactcgactccatgaagtcggaatcgctagtaatcgtggatcagaatgccacggtgaatacgttcccgggccttgtacacaccgcccgtcacaccatgggagtgggttgcaaaagaagtaggtagcttaaccttcgggagggcgcttaccactttgtgattcatgactggggtgaagtcgtaacaaggtaacc

SEQ ID NO: 1366 - DNA, 1459 bp, Artificial Sequence
  Synthetic polymer
  misc_feature (976)..(976): n is a, c, g, or t
gcctaacaatgcaagtcgggcggtaacagggagaagcttgcttctctgctgacgagcggcggacgggtgagtaatgtatggggatctgcctgatggcgggggataactactggaaacggtagctaataccgcataatgtcttcggaccaaagcgggggaccttcgggcctcgcgccatcagatgaacccatatgggattagcttgtaggtgaggtaacggcttacctaggcgacgatccctagctggtctgagaggatgatcagccacactgggactgagacacggcccagactcctacgggaggcagcagtggggaatattgcacaatgggcgcaagcctgatgcagccatgccgcgtgtatgaagaaggccttcgggttgtaaagtactttcagtcgggaggaggtggtaaggttaataaccttatcatttgacgtttaccgacagaagaagcaccggctaactccgtgccagcagccgcggtaatacggagggtgcaagcgttaatcggaattactgggcgtaaagcgcacgcaggcggtctgtcaagtcggatgtgaaatccccgggctcaacctgggaactgcattcgaaactggcaggctagagtcttgtagaggggggtagaattccaggtgtagcggtgaaatgcgtagagatctggaggaataccggtggcgaaggcggccccctggacaaagactgacgctcaggtgcgaaagcgtctggggagcaaacaggattagataccctggtagtccacgccgtaaacgatgtcgatttggaggttgtgcccttgaggcgtggcttccggagctaacgcgttaaatcgaccgcctggggagtacggccgcaaggttaaaactcaaatgaattgacgggggcccgcacaagcggtggagcatgtggtttaattcgatgcaacgcgaagaaccttacctggtcttgacatccacagaacttaccagagatggnttggtgccttcgggaactctgagacaggtgctgcatggctgtcgtcagctcgtgttgtgaaatgttgggttaagtcccgcaacgagcgcaacccttatcctttgttgccagcgcgtgatgtcgggaactcaaaggagactgccggtgataaaccggaggaaggtggggatgacgtcaagtcatcatggcccttacgagtagggctacacacgtgctacaatggcgtatacaaagggaagcgaccccgcgagggcaagcggaactcataaagtacgtcgtagtccggattggagtctgcaactcgactccatgaagtcggaatcgctagtaatcgtagatcagaatgctacggtgaatacgttcccgggccttgtacacaccgcccgtcacaccatgggagtgggttgcaaaagaagtaggtagcttaaccttcgggagggcgcttaccactttgtgattcatgactggggtgaagtcgtaaca

SEQ ID NO: 1367 - DNA, 1502 bp, Artificial Sequence; identical to SEQ ID NO: 26
  Synthetic polymer

SEQ ID NO: 1368 - DNA, 1446 bp, Artificial Sequence
  Synthetic polymer
acgctggcggcaggcctaacacatgcaagtcgaacggtagcacagaggagcttgctccttgggtgacgagtggcggacgggtgagtaatgtctgggaaactgcccgatggagggggataactactggaaacggtagctaataccgcataacgtcgcaagaccaaagagggggaccttcgggcctcttgccattggatgtgcccagatgggattagctagtaggtggggtaacggctcacctaggcgacgatccctagctggtctgagaggatgaccagccacactggaactgagacacggtccagactcctacgggaggcagcagtggggaatattgcacaatgggcgcaagcctgatgcagccatgccgcgtgtatgaagaaggccttcgggttgtaaagtactttcagcgaggaggaaggtgttgtggttaataaccacagcaattgacgttactcgcagaagaagcaccggctaactccgtgccagcagccgcggtaatacggagggtgcaagcgttaatcggaattactgggcgtaaagcgcacgcaggcggttgattaagttagatgtgaaatccccgggcttaacctgggaatggcatctaagactggtcagctagagtcttgtagaggggggtagaattccatgtgtagcggtgaaatgcgtagagatgtggaggaataccggtggcgaaggcggccccctggacaaagactgacgctcaggtgcgaaagcgtggggagcaaacaggattagataccctggtagtccacgctgtaaacgatgtcgatttgaaggttgttcccttgaggagtggctttcggagctaacgcgttaaatcgaccgcctggggagtacggccgcaaggttaaaactcaaatgaattgacgggggcccgcacaagcggtggagcatgtggtttaattcgatgcaacgcgaagaaccttacctactcttgacatccacggaagttttcagagatgagaatgtgccttcgggaaccgtgagacaggtgctgcatggctgtcgtcagctcgtgttgtgaaatgttgggttaagtcccgcaacgagcgcaacccttatcctttgttgccagcggtccggccgggaactcaaaggagactgccagtgataaactggaggaaggtggggatgacgtcaagtcatcatggcccttacgaccagggctacacacgtgctacaatggcgcatacaaagagaagcgacctcgcgagagcaagcggacctcataaagtgcgtcgtagtccggattggagtctgcaactcgactccatgaagtcggaatcgctagtaatcgtggatcagaatgccacggtgaatacgttcccgggccttgtacacaccgcccgtcacaccatgggagtgggttgtaccagaagtagatagcttaaccttcgggagggcgtttaccacggtatgatt

SEQ ID NO: 1369 - DNA, 1399 bp, Artificial Sequence; identical to SEQ ID NO: 577
  Synthetic polymer

SEQ ID NO: 1370 - DNA, 1381 bp, Artificial Sequence; identical to SEQ ID NO: 1031
  Synthetic polymer

SEQ ID NO: 1371 - DNA, 1457 bp, Artificial Sequence
  Synthetic polymer
  misc_feature (313)..(313): n is a, c, g, or t
  misc_feature (596)..(597): n is a, c, g, or t
  misc_feature (607)..(607): n is a, c, g, or t
  misc_feature (1039)..(1039): n is a, c, g, or t
  misc_feature (1333)..(1333): n is a, c, g, or t
  misc_feature (1442)..(1442): n is a, c, g, or t
cggcaggcctaacacatgcaagtcgagcggtaacaggggaagcttgcttcctgttgacgagcggcggacgggtgagtaatgtatggggatctgcccgatagagggggataactactggaaacggtagctaataccgcataatctctcaggagcaaagcaggggaactttggtccttgcgctatctgatgaacccatatgggattagctagtatgtgaggtaatggctcacctatgcgacaatccctatctggtctgagaggatgatcacccacactgggactgagacacggcccacactcctacgggagggcncagtggggaatattgcacaatgggcgcaagcctgatgcacacatgccgcgtgtatgaagaaagccctatggttgtaaagtactctcagatcggaggaaagcgttgatgctaatatcatcaacgattgacgttacccccagaagaagcaccggctaactccgtgccagcagccgcggtaatacggagggtgcaagcgttaatcggaattactgggcgtaaagcgcacgcaggcggttggttaagttagatgtgaaatccccgggctcaacctgggaacggcatnnaaaactggcnagctagagtcttgtagaggggggtagaattccatgtgtagcggtgaaatgcgtagagatgtggaggaataccggtggcgaaggcggccccctggacaaagactgacgctcaggtgcgaaagcgtggggagcaaacaggattagataccctggtagtccacgctgtaaacgatgtcgacttggaggttgtgcccttgaggagtggctttcggagctaacgcgttaaatcgaccgcctggggagtacggccgcaaggttaaaactcaaatgaattgacgggggcccgcacaagcggtggagcatgtggtttaattcgatgcaacgcgaagaaccttacctactcttgacatccagagaacttagcagagatgctttagtgccttcgggaactctgagacaggtgctgcatggctgtcgtcagctcgtgttgtgnaatgttgggttaagtcccgcatcgagcgcacccttatcctttgttgccagcggttcggcgggaactcaaaggagactgccggtgataaacccggaggaaggtggggatgacgtcaagtcatcatggcccttacgagtagggctgcacacgtgctgcaatggcgtatacaaagagaagcgacctcgcgagagcaagcggacctcataaagtgcgtcgtagtccggattggcgtctgcgcactcaactccatgaagtcggaatcgctagtaatcgtagatcagaatgctacggtgnatacgttcccgggccttgtacacaccgcccgtcacaccatgggagtgggttgcaaaagaagtaggtagcttaaccttcgggagggcgcttccccctttgtgattcatgnctggggttaagtcgt

SEQ ID NO: 1372 - DNA, 1442 bp, Artificial Sequence
  Synthetic polymer
gggcctaacacatgcaagtcgagcggtagcacagacatcttgctctcgggtgacgagcggcggacgggtgagtaatgtctgggaaactgcctgatggagggggataactactggaaacggtagctaataccgcataacgtcgcaagaccaaagtgggggaccttcgggcctcatgccatcagatgtgcccagatgggattagctagtagatggggtaacggctcacctaggcgacgatccctagctggtctgagaggatgaccagccacactggaactgagacacggtccagactcctacgggaggcagcagtggggaatattgcacaatgggcgcaagcctgatgcagccatgccgcgtgtgtgaagaaggccttcgggttgtaaagcactttcagcggggaggaaggcgttaaggttaataaccttggcgattgacgttacccgcagaagaagcaccggctaactccgtgccagcagccgcggtaatacggagggtgcaagcgttaatcggaattactgggcgtaaagcgcacgcaggcggtctgtcaagtcggatgtgaaatccccgggctcaacctgggaactgcattcgaaactggcaggctagagtcttgtagaggggggtagaattccaggtgtagcggtgaaatgcgtaaagatctggaggaataccggtggcgaaggcggccccctggaacaagactgacgctcaggtgcgaaagcgtggggagcaaacaggattagataccctggtagtccacgccgtaaacgatgccgatttggaggttgtgcccttgaggcgtggcttccggagctaacgcgttaaatcgaccgcctggggagtacggccgcaaggttaaaactcaaatgaattgacgggggcccgcacaagcggtggagcatgtggtttaattcgatgcaacgcgaagaaccttacctactcttgacatccagagaatttgctagagatagcttagtgccttcgggaactctgagacaggtgctgcatggctgtcgtcagctcgtgttgtgaaatgttgggttaagtcccgcaacgagcgcaacccttatcctttgttgccagcgagtaatgtcgggaactcaaaggagactgccggtgataaaccggaggaaggtggggatgacgtcaagtcatcatggcccttacgagtagggctacacacgtgctacaatggcatatacaaagagaagcgaactcgcgagagcaagcggacctcataaagtatgtcgtagtccggattggagtctgcaactcgactccatgaagtcggaatcgctagtaatcgtagatcagaatgctacggtgaatacgttcccgggccttgtacacaccgcccgtcacaccatgggagtgggttgcaaaagaagtaggtagcttaaccttcgggagggcgcttaccactttgtgattcatgactg

SEQ ID NO: 1373 - DNA, 1404 bp, Artificial Sequence
  Synthetic polymer
gtcgagcggtcgcggagagtgggttgctactttgccggcgaccggcggacgggtgagtaatgtctgggaaactgcctgatggagggggataactactggaaacggtagctaataccgcataatgtcgcaagaccaaagagggggaccttcgggcctcttgccatcagatgtgcccagatgggattagctagtaggtggggtaacggctcacctaggcgacgatccctagctggtctgagaggatgaccagccacactggaactgagacacggtccagactcctacgggaggcagcagtggggaatattgcacaatgggcgcaagcctgatgcagccatgccgcgtgtatgaagaaggccttcgggttgtaaagtactttcagcggggaggaaggcgttgaggttaataacctcgcgattgacgttaacccgcaggaagaagccccggctaactccgtgccagctgccgcggtaatacggagggtgcaagcgttaatcggaattactgggcgtaagcgcacgcaggcggtctgtcaagtcggatgtgaaatcccccggctcaacctgggaactgcattcgaaactggcaggctagagtcttgtagaggggggtagaattccaggtgtagcggtgaaatgcgtagagatctggaggaataccggtggcgaaggcggccccctggacaaagactgacgctcaggtgcgaaagcgtggggagcaaacaggattagataccctggtagtccacgccgtaaacgatgtcgacttggaggttgtgcccttgaggcgtggcttccggagctaacgcgttaagtcgaccgcctggggagtacggccgcaaggttaaaactcaaatgaattgacgggggcccgacaagcggtggagcatgtggtttaattcgatgcttcgcgaagaaccttacctactcttgacatccagagaacttagcagagatgctttggtgccttcgggaactctgagacaggtgctgcatggctgtcgtcagctcgtgttgtgaaatgttgggttaagtcccgcaacgagcgcaacccttatcctttgttgccagcggttaggccgggaactcaaaggagactgccagtgataaactggaggaaggtggggatgacgtcaagtcatcatggcccttacgagtagggctacacacgtgctagaatggcgcatacaaagagaagcgacctcgccagagcaagcggacctcataaagtgcgtcgtagtccggattggagtctgcaactcgactccatgaagtcggaatcgctagtaatcgtagatcagcctgctacggtgaatacgttcccgggccttgtacacaccgcccgtcacaccatgggagtgggttgcaaaagaagtaggtagcttaaccttcgggagggcgctta

SEQ ID NO: 1374 - DNA, 1499 bp, Artificial Sequence
  Synthetic polymer
tttgatcctggtcagaacgaacggaggcggctggccttacacatcgaactcgagcggtagcacagagagcttgctctcgggtgtcgagcggcggacgggtgtgtaatgtctgggaaactgcctgtaggagggggataactactcgaaacggtagctaataccgcataatgtcgcaagaccaaagtgggggaccttcgggcctattgccatcagatgtgcccagatgggattagctagtaggtggggtaagttctcacctaggcgacgatccctagctggtctgagaggatgaccagccacactggaactgagacacggtccagactcctacgggaggcagcagtggggaatgttgcacaatgggcgcaagcctgatgcagccatgccgcgtgtgtgaagaaggccttcgggttgtaaagcactttctgcggggaggaaggcggtgaggttaataacctcatcgattgacgttacccgcagaagaagcaccggctacatccgtgccagcagccggggtaatacggagggtgcaagcgtttgtcggaattactgggcgtaaagcgcacgcaggcggtctgtgaagtcggatgtgaaatccccgggctcaacctgggaactgcattcgaaactggcaggctagagtcttgtagaggggggtagaattccaggtgtagcggagaaatgcgtagagatctggaggaataccggtgacgaaggcggccccctggacaaagactaacgctcaggtgcgaaagcgtggggagcaaacaggattagataccctggtagtccacgccgagaacgatgtcgatttggaggttgtgcccttgaggcgtggcttccggagctaacgcgttaaatcgaccgcctggggagtacggccgcaaggttaaaactcaaatgaattgacgggggcccgcacaagcggtggagcatgtggtttaattcgatgcaagacgaagaaccttacctggtcttgacatccacagaacttagcagagatgctttggtgccttcgggaactgtgagacaggtgctgcatggctggtgtcagctcgtgttgtgaaatgttgggttaagtcccgcaacgagcgcaacccttatcctttgttggcagcggttaggccgggaactcaaaggagactgccagtgataaactggaggaaggtggggatgacgtcaagtcatcatggcccttatgaccagggctacacacgtgctagtttggcatatacaaagagaagcgacctcgcgagagcaagcggacctcataaagtatgtcgtagtccggattggagtctgcaactcgacaaaatgaagtcggaatcgctagtaatcgtagatcagaatgctacggtgaatacgttcccgggccttgtacacagcgcccgtcacaccatgggagtgggttgcaaaagaagtaggtagcttaaccttcgggagggcgcttaccactttgtgattcatgactggggaagtcgtaacaaggtagccgtagg

SEQ ID NO: 1375 - DNA, 1449 bp, Artificial Sequence
  Synthetic polymer
gcggcaggcctaacacatgcaagtccccctgtaacaggaaacagcttgctgtttcgctgacgagtggcggacgggtgagtaatgtctgggaaactgcctgatggatttggataactactggaaacggtagctaataccgcataacgtcgcaagaccaaagagggggaccttcgggcctcttgccatcggatgtgcccagatgggattagctagtaggtggggtaacggctcacctaggcgacgatccctagctggtctgagaggatgaccagccacactggaactgagacacggtccagactcctacgggaggcagcagtggggaatattgcacaatgggcgcaagcctgatgcagccatgccgcgtgtatgaagaaggccttcgggttgtaaagtactttttttttggaccaagggagtaaagttaatacctttacccattgacgttacccgcagaagaagcaccggctaactccgtgccagcagccgcggtaatacggagggtgcaagcgtttaatcggaattactgggcgtaaagcccacccaggcgggtttgttaagtcagatgtgaaatccccgggctccaacctgggaaatgcatctgatactggcaagcttgagtcctcgtagaggggggtagaattccaggtgtagcggtgaaatgcgtagagatctggaggaataccggtggcgaaggcggccccctggacgaagactgacgctcaggtgcgaaagcgtggggagcaaacaggattagataccctggtagtccacgccgtaaacgatgtcgacttggaggttgtgcccttgaggcgtggcttccggagctaacgcgttaagtcgaccgcctggggagtacggccgcaaggttaaaactcaaatgaattgacgggggcccgcacaagcggtggagcatgtggtttaattcgatgcaacgcgaagaaccttacctggtcttgacatccacggaagttttcagagatgagaatgtgccttcgggaaccgtgagacaggtgctgcatggctgtcgtcagctcgtgttgtgaaatgttgggttaagtcccgcaacgagcgcaacccttatcctttgttgccagcggtccggccgggaactcaaaggagactgccagtgataaactggaggaaggtggggatgacgtcaagtcatcatggcccttacgaccagggctacacacgtgctacaatggcgcatacaaagagaagcgacctcgcgagagcaagcggacctcataaagtgcgtcgtagtccggattggagtctgcaactcgactccatgaagtcggaatcgctagtaatcgtggatcagaatgccacggtgaatacgttcccgggccttgtacacaccgcccgtcacaccatgggagtgggttgcaaaagaagtaggtagcttaaccttcgggagggcgcttaccactttgtgattcataa

SEQ ID NO: 1376 - DNA, 1400 bp, Artificial Sequence
  Synthetic polymer
tagagtttgatcctggctcagattgaacgctggcggcaggcctaacacatgcaagtcgaacggtagcacagaggagcttgctccttgggtgacgagtggcggacgggtgagtaatgtctgggaaactgcccgatggagggggataactactggaaacggtagctaataccgcataacgtcgcaagaccaaagagggggaccttcgggcctcttgccatcggatgtgcccagatgggattagctagtaggtggggtaacggctcacctaggcgacgatccctagctggtctgagaggatgaccagccacactggaactgagacacggtccagactcctacgggaggcagcagtggggaatattgcacaatgggcgcaagcctgatgcagccatgccgcgtgtatgaagaaggccttcgggttgtaaagtactttcagcgaggaggaaggtgttgaggttaataacctcagcaattgacgttactcgcagaagaagcaccggctaactccgtgccagcagccgcggtaatacggagggtgcaagcgttaatcggaattactgggcgtaaagcgcacgcaggcggtctgtcaagtcggatgtgaaatccccgggctcaacctgggaactgcatccgaaactggcaggctagagtcttgtagaggggggtagaattccaggtgtagcggtgaaatgcgtagagatctggaggaataccggtggcgaaggcggccccctggacaaagactgacgctcaggtgcgaaagcgtggggagcaaacaggattagataccctggtagtccacgccgtaaacgatgtctacttggaggttgtgcacttgacgcctggcttccggagctaacgcgttaagttgtccgcctggggagtacggccgcaaggttaaaactcaaaggaattgacgggggcccgcacaagcggtggagcatgtggtttaattcgatgcaacgcgaagaaccttacctactcttgacatcaagagaactcagctgagatgctttagtgccctcgggaacggtgagacaggtgctgcatggctgtcgtcagctcgtgttgtgaaatgttgggttaagtcccgcaacgagcgcaacccttatcatttgttgccatcggtcctgccgggaactcaaatgagactgccagtgataaactggaggaaggtggggatgacgtcaagtcatcatggcccttacgagtagggctacacacgtgctacaatggcatatacaaagggatgcgagctcgcgagaggaagcggacctcaaaaagtctgtcgtagtccggattggagtctgcaactcgactccatgaagtcggaatcgctagtaatcgcggatcagaatgccgcggtgaatacgttcccgggccttgtacacaccgcccgt

SEQ ID NO: 1377 - DNA, 1365 bp, Artificial Sequence
  Synthetic polymer
attgaacgctggcggcaggcctaacacatgcaagtcgaacggtagcacagaggagcttgctcctcgggtgacgagtggcggacgggtgagtaatgtctgggaaactgcctgatggagggggataactactggaaacggtagctaataccgcataacgtcgcaagaccaaagagggggaccttcgggcctcttgccatcatatgtgcccagatgggattagctagtaggtggggtaatggctcacctaggcgacgatccctagctggtctgagaggatgaccacccacactggaactgacacacggtccacactcctacgggaggcagcagtggggaatattgcacaatgggcgcaagcctgatgcacccatgccgcgtgtatgaaaaaggccttcgggttgtaaagtactttccgcggggaggaaggcgttgcggttaataaccgcagcgattgacgttacccgcagaacaagcacacggctaactccgtgccagcactcgcggtaatacggacggtgcgagcgttaatcggaattactgggcgtaaagcgcccgcaggcggtctgtcaagtcggatgtgaaatcccccgggctcaacctgggaactgcattcgaaactggcaggcttgagtcttgtagaggggggtagaattccaggtgtagcggtgaaatgcgtagagatctggaggaataccggtggcgaaggcggccccctggacaaagactgacgctcaggtgcgaaagcgtggggagcaaacaggattagataccctggtagtccacgctgtaaacgatgtcgacttggaggttgtgcccttgaggcgtggcttccggagctaacgcgttaagtcgaccgcctggggagtacggccgcaaggttaagactcaaatgaattgacgggggcccgcacaagcggtggagcatgtggtttaattcgatgcaacgcgaagaaccttacctactcttgacatccacggaacttgccagagatggcttggtgccttcgggaaccgtgagacaggtgctgcatggctgtcgtcagctcgtgttgtgaaatgttgggttaagtcccgcaacgagcgcaacccttatcctttgttgccagcggttaggccgggaactcaaaggagactgccagtgataaactggaggaaggtggggatgacgtcaagtcatcatggcccttacgagtagggctacacacgtgctacaatggcgcatacaaagagaagcgaactcgcgagagcaagcggccctcataaagtgcgtcgtagtccggatcggagtctgcaactcgactccgtgaagtcggaatcgctagtaatcgtggatcagaatgccacggtgaatacgttcccgggcct

SEQ ID NO: 1378 - DNA, 1482 bp, Artificial Sequence
  Synthetic polymer
ggcggcaggcctaacacatgcaagtcgaacggcagcgggaagtagcttgctactttgccggcgagtggcggacgggtgagtaatgtctgggaaactgcccgatggagggggataactactggaaacggtagctaataccgcatgacgtcttcggaccaaagagggggaccttagggcctcttgccatcggatgtgcccagatgggattagctagtaggcggggtaatggcccacctaggcgacgatccctagctggtctgagaggatgaccagccacactgggactgagacacggcccagactcctacgggaggcagcagtggggaatattgcacaatgggggaaaccctgatgcagccatgccgcgtgtgtgaagaaggccttcgggttgtaaagcactttcagcgaggaggaaggggttgtatttaatacatgcaatcattgacgttactcgcagaagaagcaccggctaactccgtgccagcagccgcggtaatacggagggtgcaagcgttaatcggaattactgggcgtaaagcgcacgcaggcggttgattaagttagatgtgaaatccccgggcttaacctgggaactgcatttaaaactggtcagctagagtcttgtagaggggggtagaattccacgtgtagcggtgaaatgcgtagagatgtggaggaataccggtggcgaaggcggccccctggacaaagactgacgctcaggtgcgaaagcgtggggagcaaacaggattagataccctggtagtccacgctgtaaacgatgtcgatttggaggttgtgcccttgaggcgtggcttccggagctaacgcgttaaatcgaccgcctggggagtacggccgcaaggttaaaactcaaatgaattgacgggggcccgcacaagcggtggagcatgtggtttaattcgatgcaacgcgaagaaccttacctactcttgacatccagagaacttagcagagatgctttggtgccttcgggaactctgagacaggtgctgcatggctgtcgtcagctcgtgttgtgaaatgttgggttaagtcccgcaacgagcgcaacccttatcctttgttgccagcggttcggccgggaactcaaaggagactgccagtgataaactggaggaaggtggggatgacgtcaagtcatcatggcccttacgagtagggctacacacgtgctacaatggcgtatacaaagagaagcgacctcgcgagagcaagcggacctcataaagtacgtcgtagtccggattggagtctgcaactcgactccatgaagtcggaatcgctagtaatcgcggatcagaatgccgcggtgaatacgttcccgggccttgtacacaccgcccgtcacaccatgggagtgggttgcaaaagaagtaggtagcttaaccttcgggggggcgcttaccactttgtgatccatgactggggtgaagtcgtaacaaggtaaccgtaggggaa

SEQ ID NO: 1379 - DNA, 1361 bp, Artificial Sequence
  Synthetic polymer
tgaacgctggcggcaggcctaacacatgcaagtcgaacggtaacaggaagcagcttgctgcttcgctgacgagtggcggacgggtgagtaatgtctgggaaactgcctgatggagggggataactactggaaacggtagctaataccgcataacgtcgcaagaccaaagagggggaccttcgggcctcttgccatcggatgtgcccagatgggattagctagtaggtggggtaacggctcacctaggcgacgatccctagctggtctgagaggatgaccagccacactggaactgagacacggtccagactcctacgggaggcagcagtggggaatattgcacaatgggcgcaagcctgatgcagccatgccgcgtgtatgaagaaggccttcgggttgtaaagtactttcagcggggaggaaggtgttgaggttaataacctcagcaattgacgttacccgcagaagaagcaccggctaactccgtgccagcagccgcggtaatacggagggtgcaagcgttaatcggaattactgggcgtaaagcgcacgcaggcggtctgtcaagtcggatgtgaaatccccgggctcaacctgggaactgcattcgaaactggcaggctagagtcttgtagaggggggtagaattccgggtgtagcggtgaaatgcgtagagatctggaggaataccggtggcgaaggcggccccctggacaaagactgacgctcaggtgtgagagcgtgtggagcacacacgattagataccctggtagtgcacgcctaaacgatgtcgacttggaggttgtgcccctgaggcgtggcttctggagataacgcgttaagtcgaccgcctggggagtacggccgcaaggttaaaactcaaatgaattgacgggggcccgcacaagcggtggagcatgtggtttatttcgatgcaacgcgaagaaccttacctactcttgacatccagagaactttccagagatggattggtgccttcgggaactctgagacaggtgctgcatggctgtcgtcagctcgtgttgtgaaatgttgggttaagtcccgcaacgagcgcaacccttatcttttgttgccagcggttaggccgggaactcaaaggagactgccagtgataaaatggaggaaggtggggatgacgtcaagtcatcatggcccttacgagtagggctacacacgtgctacaatggcgcatacaaagagaagcgacctcgcgagagcaagcggacctcataaagtgcgtcgtagtccggattggagtctgcaactagactccatgaagtcggaatcgctagtaatcgggatcagaatgccacggtgaatacgttcccgggccttg

SEQ ID NO: 1380 - DNA, 1372 bp, Artificial Sequence; identical to SEQ ID NO: 889
  Synthetic polymer

SEQ ID NO: 1381 - DNA, 1532 bp, Artificial Sequence
  Synthetic polymer
tagagtttgatcctggctcagattgaacgctggcggcaggcctaacacatgcaagtcggacggtagcacagagagcttgctctcgggtgacgagtggcggacgggtgagtaatgtctggggatctgcccggtagagggggataaccactggaaacggtggctaataccgcataacgtcgcaagaccaaagagggggaccttcgggcctctcactatcggatgaacccagatgggattagctagtaggcggggtaatggcccacctaggcgacgatccctagctggtctgagaggatgaccagccacactggaactgagacacggtccagactcctacgggaggcagcagtggggaatattgcacaatgggcgcaagcctgatgcagccatgccgcgtgtatgaagaaggccttcgggttgtaaagtactttcagcggggaggaaggcgatggggttaataactctgtcgattgacgttacccgcagaagaagcaccggctaactccgtgccagcagccgcggtaatacggagggtgcaagcgttaatcggaattactgggcgtaaagcgcacgcaggcggtctgttaagtcagatgtgaaatccccgggcttaacctgggaactgcatttgaaactggcaggcttgagtcttgtagaggggggtagaattccaggtgtagcggtgaaatgcgtagagatctggaggaataccggtggcgaaggcggccccctggacaaagactgacgctcagtgcgaaagcgtggggagcaaacaggattagataccctggtagtccacgccgtaaacgatgtcgatttggaggttgttcccttgaggagtggcttccggagctaacgcgttaagtcgaccgcctggggagtacggccgcaaggttaaaactcaaatgaattgacgggggcccgcacaagcggtggagcatgtggtttaattcgatgcaacgcgaagaaccttacctactcttgacatccacggaatttggcagagatgccttagtgccttcgggaaccgtgagacaggtgctgcatggctgtcgtcagctcgtgttgtgaaatgttgggttaagtcccgcaacgagcgcaacccttatcctttgttgccagcgattcggtcgggaactcaaaggagactgccggtgataaaccggaggaaggtggggatgacgtcaagtcatcatggcccttacgagtagggctacacacgtgctacaatggcgcatacaaagagaagcgacctcgcgagagcaagcggacctcacaaagtgcgtcgtagtccggatcggagtctgcaactcgagtgcgtgaagctggaatcgctagtaatcgcggatcagcatgccgcggtgaatacgttcccgggtcttgtacacaccgcccgtcacaccatgggagtgggttttaccagaagtggctagtctaaccgcaaggaggacggtcaccacggtaggattcatgactggggtgaagtcgtaacaaggtagccgtatcggaaggtgtggctggatcacctcctt

SEQ ID NO: 1382 - DNA, 1508 bp, Artificial Sequence
  Synthetic polymer
tagagtttgatcatggctcagattgaacgctggcggcaggcctaacacatgcaagtcgaacggtagcacagaagagcttgctctttgggtgacgagtggcggacgggtgagtaatgtctggggatctgcccggcagagggggataactactggaaacggtagctaataccgcataacctcgcaagagcaaagagggggaccttcgggcctctcgctgtcggatgaacccagatgggattagctagtaggtgaggtaacggctcacccaggcgacgatccctagctggtctgagaggatgaccagccacactggaactgagacacggtccagactcctacgggaggcagcagtggggaatattgcacaatgggcgcaagcctgatgcagccatgccgcgtgtatgaagaaggccttcgggttgtaaagtactttcagcggggaggaaggattgcgggttaacagcctgcgagcttgacgttacccgcagaagaagcaccggctaactccgtgccagcagccgcggtaatacggagggtgcaagcgttaatcggaattactgggcgtaaagcgcacgcaggcggtctgtcaagtcagatgtgaaatccccgggcttaacctgggaactgcatttgaaactggcagactggagtcttgtagaggggggtagaattccaggtgtagcggtgaaatgcgtagagatctggaggaataccggtggcgaaggcggccccctggacaaagactgacgctcaggtgcgaaagcgtggggagcaaacaggattagataccctggtagtccacgctgtaaacgatgtcgacttggaggttgtgcccttgaggcgtggcttccggagctaacgcgttaagtcgaccgcctggggagtacggccgcaaggttaaaactcaaatgaattgacgggggcccgcacaagcggtggagcatgtggtttaattcgatgcaacgcgaagaaccttacctggccttgacatccacgggatctggcagagatgccggagtgccttcgggaaccgtgagacaggtgctgcatggctgtcgtcagctcgtgttgtgaaatgttgggttaagtcccgcaacgagcgcaacccttatcctttgttgccatcgggtgaagccgggaactcaaaggagactgccggtgacaaaccggaggaaggtggggatgacgtcaagtcatcatggcccttacggtcagggctacacacgtgctacaatggcgcatacaaagagaagcgacctcgcgagagcaagcggacctcataaagtgcgtcgtagtccggatcggagtctgcaacccgactccgtgaagtcggaatcgctagtaatcgtggatcagaatgccacggtgaatacgttcccgggccttgtacacaccgcccgtcacaccatgggagtgggttgcaaaagaagtaggtagcttaaccttcgggagggcgcttaccactttgtgattcatgactggggtgaagtcgtaacaaggtaaccgta

SEQ ID NO: 1383 - DNA, 1358 bp, Artificial Sequence; identical to SEQ ID NO: 815
  Synthetic polymer

SEQ ID NO: 1384 - DNA, 1463 bp, Artificial Sequence
  Synthetic polymer
tgaacgctggcggcaagcctaacacatgcaagtcgagcggcagcgaaagagagcttgctctcttgtcggcaagcggcaaacgggtgagtaatatctggggatctacccaaaagagggggataactactagaaatggtagctaataccgcataatgttgaaaaaccaaagtgggggaccttcgggcctcacaccatcggatgtgcccagatgggattagctagtaggtggggtaacggctcacctaggcgacgatccctagctggtctgagaggatgaccagccacactggaactgagacacggtccagactcctacgggaggcagcagtggggaatattgcacaatgggcgcaagcctgatgcagccatgccgcgtgtacgaagaaggccttcgggttgtaaagtactttcagtggggaggaaggcgatgaagttaataacttcgtcgattgacgttacccgcagaagaagcaccggctaactccgtgccagcagccgcggtaatacggagggtgcaagcgttaatcggaattactgggcgtaaagcgcacgcaggcggtctgtcaagtcggatgtgaaatccccgggctcaacctgggaactgcattcgaaactggcaggctagagtcttgtagaggggggtagaattccaggtgtagcggtgaaatgcgtagagatctggaggaataccggtggcgaaggcggccccctggacaaagactgacgctcaggtgcgaaagcgtggggagcaaacaggattagataccctggtagtccacgccgtaaacgatgtcgacttggaggttgtgcccttgaggcgtggcttccggagctaacgcgttaagtcgaccgcctggggagtacggccgcaaggttaaaactcaaatgaattgacgggggcccgcacaagcggtggagcatgtggtttaattcgatgcaacgcgaagaaccttacctggccttgacatccacggaattcggcagagatgccttagtgccttcgggaaccgtgagacaggtgctgcatggctgtcgtcagcttgtgtcgtgagatgttgggttaagtcccgcaacgagcgcaacccttgtccttagttaccagcgggttaagccgggaactctaaggatactgccagtgacaaactggaggaaggcggggacgacgtcaagtcatcatggcccttacgaccagggctacacacgtgctacaatggtaggtacagagggcagctacacagcgatgtgatgcgaatctcaaaaagcctatcgtagtccagattggagtctgcaactcgactccatgaagtaggaatcgctagtaatcgcggatcagaatgccgcgatgaatacgttcccgggccttgtacacaccgcccgtcacaccatgggagttgattgcaccagaagtggttagcctaaccgtaaggaaggcgatcaccacggtgtggttgatgactggggtg

SEQ ID NO: 1385 - DNA, 1389 bp, Artificial Sequence
  Synthetic polymer
agagtttgatcctggctcaggacgaacgctggcggcgtgcctaacacatgcaagtcgaacggagatgctccttcgggagtatcttagtggcgaacgggtgagtaacgcgtgagcaacctgaccttcacagggggataaccgctggaaacagcagctaataccgcataacgtcgcaagaccaaagagggggaccttcgggcctcttgccatcggatgtgcccagatgggattagcttgttggtggggtaacggctcaccaaggcgacgatccctagctggtctgagaggatgaccagccacactggaactgagacacggtccagactcctacgggaggcagcagtggggaatattgcacaatgggcgcaagcctgatgcagccatgccgcgtgtatgaagaaggccttcgggttgtaaagtactttcagcggggaggaagggagtaaagttaatacctttgctcattgacgttacccgcagaagaagcaccggctaactccgtgccagcagccgcggtaatacggagggtgcaagcgttaatcggaattactgggcgtaaagcgcacgcaggcggtttgttaagtcagatgtgaaatccccgggctcaacctgggaactgcatctgatactggcaagcttgagtctcgtagaggggggtagaattccaggtgtagcggtgaaatgcgtagagatctggaggaataccggtggcgaaggcggccccctggacgaagactgacgctcaggtgcgaaagcgtggggagcaaacaggattagataccctggtagtccacgccgtaaacgatgtcgacttggaggttgtgcccttgaggcgtggcttccggagctaacgcgttaagtcgaccgcctggggagtacggccgcaaggttaaaactcaaatgaattgacgggggcccgcacaagcggtggagcatgtggtttaattcgatgcaacgcgaagaaccttacctggtcttgacatccacagaactttccagagatggattggtgccttcgggaactgtgagacaggtgctgcatggctgtcgtcagctcgtgttgtgaaatgttgggttaagtcccgcaacgagcgcaacccttgtcctttgttgccagcggtccggccgggaactcaaaggagactgccagtgataaactggaggaaggtggggatgacgtcaagtcatcatggcccttacgaccagggctacacacgtgctacaatggcgcatacaaagagaagcgacctcgcgagagcaagcggacctcataaagtgcgtcgtagtccggattggagtctgcaactcgactccatgaagtcggaatcgctagtaatcgtggatcagaatgccacggtgaatacgttcccgggccttgcacacaccgcc

SEQ ID NO: 1386 - DNA, 1331 bp, Artificial Sequence; identical to SEQ ID NO: 1140
  Synthetic polymer

SEQ ID NO: 1387 - DNA, 1418 bp, Artificial Sequence
  Synthetic polymer
  misc_feature (947)..(947): n is a, c, g, or t
ggtaacaggaaagaagcttgctttctttgctgacgagtggcggacgggtgagtaatgtctgggaaactgcctgatggagggggataactactggaaacggtagctaataccgcataacgtcgcaagaccaaagagggggaccttcgggcctcttgccatcggatgtgcccagatgggattagctagtaggtggggtaacggctcacctaggcgacgatccctagctggtctgagaggatgaccagccacactggaactgagacacggtccagactcctacgggaggcagcagtggggaatattgcacaatgggcgcaagcctgatgcagccatgccgcgtgtatgaagaaggccttcgggttgtaaagtactttcagcggggaggaagggagtaaagttaatacctttgctcattgacgttacccgcagaagaagcaccggctaactccgtgccagcagccgcgggtaatacggagggtgcaagcgttaatcggaattactgggcgtaaagcgcacgcaggcggttttgttaagtcagatgtgaaatccccgggctcaaacctgggaactgcatctgatactggcaagctttgagtctcgtagaggggggtagaattccaggtgtagcggtgaaatgcgtagagatctggaggaataccggtggcgaaggcggccccctggacgaagactgacgctcaggtgcgaaagcgtggggagcaaacaggattagataccctggtagtccacgccgtaaacgatgtcgacttggaggttgtgcccttgaggcgtggcttccggagctaacgcgttaagtcgaccgcctggggagtacggcccgcaaggttaaaactcaaatgaattgacggggggccccgcacaagcggtggagcatgtggtttaattcgatgcaacgcgaagaaccttacctgggtcttgacatccacagnaactttccagaaaatggattgggtgccttcgggaactgtgagacaggtgctgcatggctgtcgttcacctcgtgttgtgaaatgttgggttaagtcccgcaacgagcgcaacccttatcctttgttgccagcggtccggccgggaactcaaaggaaactgccagtgataaactggaggaaggtggggatgacgtcaagtcatcatggcccttacgaccagggctacacacgtgctacaatggcgcatacaaagagaagcgacctcgcgagagcaagcggacctcataaagtgcgtcgtagtccggattggagtctgcaactcgactccatgaagtcggaatcgctagtaatcgtggatcagaatgccacggtgaatacgttcccgggccttgtacacaccgcccgtcacaccatgggagtgggttgcaaaagaagtaggtaggcttaacccttcgggaggggcgctaccac

SEQ ID NO: 1388 - DNA, 1371 bp, Artificial Sequence
  Synthetic polymer
aggagcttgctccttgggtgacgagtggcggacgggtgagtaatgtctgggaaactgccccatagagggggataactactggaaacggtaactaataccgcataacgtctcaagaccaaagagggggaccttcgggcctcttgccatcggatgtgcccacatcggattagctcgtacgtggggtaacggctcacctaggcgacgatccctagctggtctgagaggatgaccagccacactggaactgagacacggtccagactcctacgggaggcagcagtggggaatattgcacaatgggcgcaagcctgatgcagccatgccgcgtgtatgaagaaggccttcgggttgtaaagtactttcagcgaggaggaaggtgttgtggttaataaccgcagcaattgacgttactcgcagaagaagcaccggctaactccgtgccagcagccgcggtaatacggagggtgcaagcgttaatcggaattactgtgcgtaaagcgcacgcaggcggtctgtcaagtcggatgtgaaatccccgggctcaacctgggaactgcatccgaaactggcaggctagagtcttgtagaggggggtagaattccaggtggagcggtgaaatgcgtagagatctggaggaataccggtggcgaatgcggccccctggacaaagactgacgctcaggtgcgaaagcgtggggagcaaacaggattagataccctggtagtccacgccgtaaacgatgtcgacttggaggttgtgcccttgaggcgtggcttccggagctaacgcgttaagtcgaccgcctggggagtacggccgcaaggttaaaactcaaatgaattgacgggggcccgcacaagcggtggagcatgtggtttaattcgatgcaacgcgaaaaaccttacctactcttgacatccaaagaacttagcagagatcctttggtgccttcgggaactctcagacaggttctgcatggctgtcgtcagctcgtgttgtgaagttttggtttaattcccgcaacaacgcaacccttatcctttgttgccagcggtttggtcgggaactcaaaggaaactgccagtgatatactggaggaaggtggggatgacgtctagtcatcatggcccttaggagtagggctacacacatgctacaatggcatatacaaagagaagcgacctcgcgagaggaagcggacctcataaagtatgtcgtagtccggattggagtctgcaactcgactccatgaagtcggaatcgctagtaatcgtggatcagaatgccacggtgaatacgttcccgggccttgtacacaccgcccgtcacaccatgggagtgggttgcaaaagaagtgaggtagcttaac

SEQ ID NO: 1389 - DNA, 1481 bp, Artificial Sequence
  Synthetic polymer
gagtttgatcctggctcagattgaacgctggcggcaggcctaacacatgcaagtcgagcggtaacacagaggagcttgctccttgggtgacgagcggcggacgggtgagtaatgcctggggatctgcccgatagagggggataactacgggaaactgtagctaataccgcataatgtctacggaccaaagtgggggctcttcggacctcatgctatcggatgaacccaggtgggattagctagttggtgaggtaatggctcaccaaggcgacgatctctaactggtttgagagaatgaccagtcacactggaactgagacacggtccagactcctacgggaggcagcagtggggaatattgcacaatgggcgcaagcctgatgcagccatgccgcgtgtgtgaagaaggccttcgggttgtaaagcactttcagcggggaggaagggtcactagttaatacctagtggcattgacgttactcgcagaagaagcaccggctaactccgtgccagcagccgcggtaatacggagggtgcaagcgttaatcggaattactgggcgtaaagcgcacgcaggcggtttgttaagtcagatgtgaaatccccgagctcaacttgggaactgcatttgaaactggcaagctagagtcttgtagaggggggtagaattccaggtgtagcggtgaaatgcgtagagatctggaggaataccggtggcgaaggcggccccctggacaaagactgacgctcaggtgcgaaagcgtggggagcaaacaggattagataccctggtagtccacgctgtaaacgatgtcgatttggagggtgggcccctggaagcgtggcttcccggagctaacgcgtttaaatcgaccggcctggggaagtacggccgcaagggttaaaactcaatgaattgacgggggcccgcacaagcgtggagcatgtgtttatttcgatgcacgagaagaccttaccttactctgaacatccagagactttcccagagatggattgggctttcggaatctctgagacaggtgctgcatggttgtcgtcagctcgtgttgtgaatggttggttaaagtcccgcaacgagcgcaaccttatctttgtcgccagcgatccgttcggaaactcaaggagactgccggtgataaccgggaggaaggtggggagacgtcaagtcatcatggccctaacgagtagggctacacacgtgctacaatggcatatacaaagggcggcaagctagcgatagtgagcgaatcccataaagtatgtcgtagtccggattggagtctgcaactcgactccatgaagtcggaatcgctagtaatcgcggatcagaatgccgcggtgaatacgttcccgggccttgtacacaccgcccgtcacaccatgggagtgggttgcaaaagaagtaggtagcttaaccttcgggagggcgcttaccactttgtgattcatgactggggtga

SEQ ID NO: 1390 - DNA, 1433 bp, Artificial Sequence
  Synthetic polymer
  misc_feature (744)..(744): n is a, c, g, or t
  misc_feature (751)..(751): n is a, c, g, or t
  misc_feature (785)..(785): n is a, c, g, or t
  misc_feature (796)..(796): n is a, c, g, or t
gcggcaggcttaacacatgcaagtcgagcggtagcacaggggagcttgctcccagggtgacgacctgcggatggatgagtaatgtctgggaaactgcctgatggagggggataactactggaaacggtagctaataccgcataacgttgcaagaccaaagagggggaccttcgggcctctttccatcagatgtgcccagatgggattagctagtaggtggggtaatggctcacctaggcgacgatccctagctggtctgagaggatgaccagccacactggaagtgagacacggtccagactcctacgggaggcagcagtggggaatattgcacaatgggcgcaagcgtgatgcagccatgcagcgtgtgtgaagaaggccttcgggttgtaaagcactttcagcgaggaggaaggtggtgagcttaatacgctcatcaattgacgttactcgcagaagaagcaccggctaactccgtgccagcagccgcggtaataaggagggtgcaagcgttaatcggaattactgggcgtaaagcgcacgcaggcggtttgttaagtcagatgtgaaatccccgggctcaacctgggaactgcatttgaaactggcaagctagagtctcgtagaggggggtagaattccaggtgtagcggtgaaatgcgtagagatctggaggaataccggtggcgaaggcggccccctggacgaagactgacgctcaggtgcgaaagcgtggggagcaancaggatnagataccctggtagtccacgctgtaaacgatgtngatttggaggntgtgcccttgaggcgtggcttccggagctaacgcgttaaatcgaccgcctggggagtacggccgcaaggttaaaactcaaatgaattgacgggggcccgcacaagcggtggagcatgtggtttaattcgatgcaacgtgaagaaccttacctactcttgacatccagagaacttcgcagagatgttttggtgccttcgggaactctgagacaggtgctgcatggctgtcgtcagctcgtgttgtgaaatgttgggttaagtcccgcaacgagcgcaacccttatcttttgttgcaagcggttcggccgggaactcaaaggagactgccagtgatacaactggaggaaggtggggatgacgtcaagtcatcatggcccttacgagtagggctacacacgtgctacaatggcgtatacaaagagaagcgacctcgcgagagcaagcggacctcataaagtacgtcgtagtccggattggagtctgcaactcgactccatgaagtcggaatcgctagtaatcgtagatcagaatgctacggtgaatacgttcccgggccttgtacacaccgcccgtcacaccatgggagtgggttgcaaaagaagtacggtagcttaaccttcgggagggcgcttaccac

SEQ ID NO: 1391 - DNA, 1508 bp, Artificial Sequence
  Synthetic polymer
tagagtttgatcatggctcagattgaacgctggcgacagacttaacacatgcaagtcgagcggtagcacaggggagcttgctccctgggtgacgagcggcggacgggtgagtaatgtctgggaaactgcctgatggagggggataactactggaaacggtagctaataccacataacgtcgcaagaccaaagagggggaccttcgggcctcttgccatcagatgtgcccagatgggattagctagtaggtggggtaatggctcacctaggcgacgatccctagctggtctgagaggatgaccagccacactggaactgagacacggtccagactcctacgggaggcagcagtggggaatattgcacaatgggcgcaagcctgatgcagccatgccgcgtgtgtgaagaaggccttcgggttgtaaagcactttcagcgaggaggaaggtggtgagcttaatacgctcatcaattgacgttactcgcagaagaagcaccggctaactccgtgccagcagccgcggtaatacggagggtgcaagcgttaatcggaattactgggcgtgaagcgcacgcaggcggtttgttaagtcagatgtgaaatccccgggctcaacctgggaactgcatttgaaactggcaagctagagtctcgtagaggggggtagaattccaggtgtagcggtgaaatgcgtagagatctggaggaataccggtggcgaaggcggccccctggacgaagactgacgctcaggtgcgaaagcgtggggagcaaacaggattagataccctggtagtccacgctgtaaacgatgtcgatttggaggttgtgcccttgaggcgtggcttccggagctaacgcgtttaaatcgaccgcctggggagtacggccgcaaggttaaaactcaaatgaactgacgggggcccgcacaagcggtggagcatgtggtttaattcgatgcaacgcgaagaaccttacctggccttgacatccacagaaagatccagagatggatttgtgccttcgggagctgtgagacaggtgctgcatggctgtcgtcagctcgtgttgtgaaatgttgggttaagtcccgcaacgagcgcaacccatatcctttgttgccatcgattaggtcgggaactcaaaggagactgccggtgataaaccggaggaaggtggggatgacgtcaagtcatcatggcccttacggccagggctacacacgtgctacaatggcgcatacaaagagaagcgagcctgcgaggggaagcggacctcataaagtgcgtcgtagtccggatcggagtctgcaactcgactccgtgaagtcggaatcgctagtaatcgtggatcagaatgccacggtgaatacgttcccgggccttgtacacaccgcccgtcacaccatgggagtgggttgcaaaagaagtaggtagcttaaccttcgggagggcgcttaccactttgtgattcatgactggggtgaagtcgtaacaaggtaaccgta

SEQ ID NO: 1392 - DNA, 1529 bp, Artificial Sequence
  Synthetic polymer
agagtttgatcctggctcagattgaacgctggcggcaggcctaacacatgcaagtcgagcggtagcacaagggagcttgctctctgggtgacgagcggcggacgggtgagtaatgtctgggaaactgcctgatggagggggataacttatggaaacggtagctaataccgcataacgtcgcaagaccaaagtgggggactttcgggcctcacgccaccagatgtacccagatgggattagctagtaggtggggtaatggctcacctaggcgacgatccctagctggtctgagaggatgaccagccacactggaactgagacacggtccagactcctacgggaggcagcagtggggaatattgcacaatgggcgcaagcctgatgcagccatgccgcgtgtgtgaagaaggccttcgggttgtaaagcactttcagcgaggaggaaggcaacaaggttaataaccttgctgattgacattactcgcagaagaagcaccggctaactccgtgccagcagccgcggtaatacggagggtgcaagcgttaatcggaatgactgggcgtaaagcgcacgcaggcggtttgttaagttggatgtgaaatccccgggcttaacctgggaactgcattcaaactggcaagctagagtctcgtagaggggggtagaattccaggtgtagcggtgaaatgcgtagatatctggaggaataccggtggcgaaggcggcccccaggacgaagactgacgctcaggtgcgaaagcgtggggagcaaacaggattagataccctggtagtccacgctgtaaacgatgtcgatttggaggttatgcccttgaggcgtggcttccggagctaacgcgttaaatcgaccgcctggggagtacggccgcaaggttaaaactcaaatgaattgacgggggcccgcacaagcggtggagcatgtggtttaattcgatgcaacgcgaagaaccttacctactcttgacatccagagaacttcgtagagatacgaaggtgccttcgggaactctgagacaggtgctgcatggctgtcgtcagctcgtgttgtgaaatgttgggttaagtcccgcaacgagcgcaacccttatcctttgttgccagcgattcggtcgggaactcaaaggagactgccagtgataaactggaggaaggtggggatgacgtcaagtcatcatggcccttacgagtagggctacacacgtgctacaatggcgtatacaaagagaagcgacctcgcgagagcaagcggacctcataaagtacgtcgtagtccggattggagtctgcaactcgactccatgaagtcggaatcgctagtcgtcgtagatcagaatgagacggtgaatacttttccgggccttgtacacaccgcccgtcacaccatgggagtgggttgcaaaagaagtaggtagcttaaccttcgggagggcgcttaccactttgtgattcatgactcgggcgaagtcgtaacaatctacccattatagagagagcggctggatcacct

SEQ ID NO: 1393 - DNA, 1504 bp, Artificial Sequence; identical to SEQ ID NO: 724
  Synthetic polymer

SEQ ID NO: 1394 - DNA, 1492 bp, Artificial Sequence; identical to SEQ ID NO: 1141
  Synthetic polymer
  misc_feature (72)..(72): n is a, c, g, or t
  misc_feature (106)..(106): n is a, c, g, or t
  misc_feature (109)..(109): n is a, c, g, or t
  misc_feature (1182)..(1182): n is a, c, g, or t
  misc_feature (1216)..(1216): n is a, c, g, or t
  misc_feature (1246)..(1246): n is a, c, g, or t
  misc_feature (1340)..(1340): n is a, c, g, or t
  misc_feature (1411)..(1411): n is a, c, g, or t
  misc_feature (1440)..(1440): n is a, c, g, or t

SEQ ID NO: 1395 - DNA, 1356 bp, Artificial Sequence
  Synthetic polymer
gcctaacacatgcaagtcgagcggtaacaggggaagcttgcttctcgctgacgagcggcggacgggtgagtaatgtatggggatctgcccgatagagggggataactactggaaacggtagctaataccgcataatctcttaggagcaaagcaggggaacttcggtccttgcgctatcggatgaacccatatgggattagctagttggtgaggtaatggctcaccaaggcgacgatccctagctggtctgagaggatgatcagccacactgggactgagacacggcccagactcctacgggaggcagcagtggggaatattacacaatgggcgcaagcctgatgcagccatgccgcgtgtatgaagaaggccttcgggttgtaaagtactttcagcgaggaggaaggcgttgtggttaataaccacagcgattgacgttactcgcagaagaagcaccggctaactccgtgccagcagccgcggtaatacggagggtgcaagcgttaatcggaattactgggcgtaaagcgcacgcaggcggtctgtcaagtcggatgtgaaatccccgggctcaacctgggaactgcatccgaaactggcaggctagagtcttgtagaggggggtagaattccaggtgtagcggtgaaatgcgtagagatctggaggaataccggtggcgaaggcggccccctggacaaagactgacgctcaggtgcgaaagcgtggggagcaaacaggattagataccctggtagcccacgccgtaaacgatgtcgactagccgttgggatccttgagatcttagtggcgcagctaacgcgataagtcgaccgcctggggagtacggccgcaaggttaaaactcaaatgaattgacgggggcccgcacaagcggtggagcatgtggtttaattcgaagcaaagcgaagaaccttacctggccttgacatgctgagaactttccagagatggattggtgccttcgggaactcagacacaggtgctgcatggctgtcgtcagctcgtgtcgtgagatgttgggttaagtcccgtaacgagcgcaacccttgtccttagttaccagcacctcgggtgggcactctaaggagactgccggtgacaaaccggaggaaggtggggatgacgtcaagtcatcatggcccttacggccagggctacacacgtgctacaatggtcggtacaaagggttgccaagccgcgaggtggagctaatcccataaaaccgatcgtagtccggatcgcagtctgcaactcgactgcgtgaagtcggaatcgctagtaatcgtgaatcagaatgtcacggtgaatacgttcccgggccttgtacactccgcc

SEQ ID NO: 1396 - DNA, 1462 bp, Artificial Sequence; identical to SEQ ID NO: 890
  Synthetic polymer

SEQ ID NO: 1397 - DNA, 1402 bp, Artificial Sequence
  Synthetic polymer
agtcgagcggggcacacaggacttggttccttgggtgaagagtgggagaggggagagtagtgtgtggaaatgtgccctatggagggggatatcttgtgaaaacggtctctaatcccgcataacctcacaagaccaaagaggggcaccttcggccctcttgccctcatatgtgcccatatggtattatctaatatggggggtagcgtctcccctacgacaatatccctatctggtctgagaagaagaccacccactgtgaatctgacacacgccccacactcctacgggaggccgctgtggaaaattttgcactgtgggcgcaagcctgatgcacccatgccgcgtgtatgaaaaacgccttcggtttgaaaagtattttccgcgaagaaaaaggctttggggttaataaccgcagcgattgacttttctcacaaaaaaaaccccggctatctccgtgccagcacccgcggtatacggagggtgcaagcgttaatcggaattactgggcgtaaagcgcacgcaggcggtctgtcaagtcggatgtgaaatccccgggctcaacctgggaactgcatccgaaactggcaggctagagtcttgtagaggggggtagaattccaggtgtagcggtgaaatgcgtagagatctggaggaataccggtggcgaaggcggccccctggacaaagactgacgctcaggtgcgaaagcgtggggagcaaacaggattagataccctggtagtccacgccgtaaacgatgtcgacttggaggttgtgcccttgaggcgtggcttccggagctaacgcgttaagtcgaccgcctggggagtacggccgcaaggttaaaactcaaatgaattgacgggggcccgcacaagcggtggagcatgtggtttaattcgatgcaacgcgaagaaccttacctactcttgacatccagagaacttagcagagatgctttggtgccttcgggaactctgagacaggtgctgcatggctgtcgtcagctcgtgttgtgaaatgttgggttaagtcccgcaacgagcgcaacccttatcctttgttgccagcggttcggccgggaactcaaaggagactgccagtgataaactggaggaaggtggggatgacgtcaagtcatcatggcccttacgagtagggctacacacgtgctacaatggcatatacaaagagaagcgacctcgcgagagcaagcggacctcataaagtatgtcgtagtccggattggagtctgcaactcgactccatgaagtcggaatcgctagtaatcgtggatcagaatgccacggtgaatacgttcccgggccttgtacacaccgcccgtcacaccatgggagtgggttgcaaaagaagtaggtagcttaaccttcgggagggcgct

SEQ ID NO: 1398 - DNA, 1442 bp, Artificial Sequence
  Synthetic polymer
  misc_feature (326)..(326): n is a, c, g, or t
tcgaacggtaacaggtcttcggatgctgacgagtggcgaacgggctgagtaatacatcggaacgtgcctagtagtgggggataactactcgaaagagtagctaataccgcatgagatctacggatgaaagcaggggaccttcgggccttgtgctactagagcggctgatggcagattagctagttggtgaggtaatggctcaccaaggcgacgatccctagctggtctgagaggatgatcagccacactgggactgagacacggcccagactcctacgggaggcagcagtggggaatattgcacaatgggcgcaagcctgatgcanccatgccgcgtgtatgaagaaggccttagggttgtaaagtactttcagttgggaggaaggcgttgatgctaatatcatcaacgattgacgttaccaacagaagaagcaccggctaactccgtgccagcagccgcggtaatacggagggtgcaagcgttaatcggaattactgggcgtaaagcgcacgcaggcggttgattaagttagatgtgaaatccccgggcttaacctgggaatggcatctaaggctggtcagctagagtcttgtagaggggggtagaattccatgtgtagcggtgaaatgcgtagagatgtggaggaataccggtggcgaaggcggccccctggacaaagactgacgctcaggtgcgaaagcgtggggagcaaacaggattagataccctggtagtccacgctgtaaacgatgtcgatttggaggttgttcccttgaggagtggcttccggagctaacgcgttaaatcgaccgcctggggagtacggccgcaaggttaaaactcaaatgaattgacgggggcccgcacaagcggtggagcatgtggtttaattcgatgcaacgcgaagaaccttacctggtcttgacatccacagaagttcccagagatggggacgtgccttcgggaactgtgagacaggtgctgcatggctgtcgtcagctcgtgttgtgaaatgttgggttaagtcccgcaacgagcgcaacccttatcctttgttgccagcggttaggccgggaactcaaaggagactgccagtgataaactggaggaaggtggggatgacgtcaagtcatcatggcccttacgaccagggctacacacgtgctacaatggcatatacaaagagaagcgacctcgcgagagcaagcggacctcataaagtatgtcgtagtccggattggagtctgcaactcgactccatgaagtcggaatcgctagtaatcgtggatcagaatgccacggtgaatacgttcccgggccttgtacacaccgcccgtcacaccatgggagtgggttgcaaaagaagtaggtagcttaaccttcgggagggcgcttaccactttgtgattcatgactggggtgaagtcgtaacaaggtaacc

SEQ ID NO: 1399 - DNA, 1394 bp, Artificial Sequence
  Synthetic polymer
gagtggcggacgggtgagtaatgtctgggaaactgcctgatggagggggataactactgtcaaacggtagctaataccgcataacgtcgcaagaccaaagagggggaccctcgggcctcttgtcatcggatgtgcctagatgggattagttagtaggtggggtaaaggctcacctaggcgacgatccctagctggtctgagaggatgaccagccacactggaactgagacacggtccagactcctacgggaggcagcagtggggaatattgcataatgggcgcaagcctgatgcacccatgttttgtgtatgaagaacgccttcgggttgtaaagtactttcagcggggaggaaggaagtaaagttaatacctttgctcattgatgttaaccgcaagaagaagcaccggcttaacttcgtgccagcagccgccggtaatacgaagggtgcaagcgttatcggaattactgggcgtaaagcgcacgcaggcggttgttaagtcagatgtgaaatccccgggctcaactggggaactgcatctgatactggcaagcttgagtctcgtagaggggggtagaattccaggtgtagcggtgaaatgcgtagagatctggaggaataccggtggcgaaggcggccccctggacgaagactgacgctcaggtgcgaaagcgtggggagcaaacaggattagataccctggtagtccacgccgtaaacgatgtcgacttggaggttgtgcccttgaggcgtgacttccggagctaacgcgttaagtcgaccgcctggggagtacggccgcaaggttaaaactcaaatgaattgacgggggcccgcacaagcggtggagcatgtggtttaattcgatgcaacgcgaagaaccttacctggtcttgacatccacagaaccttgtagagatacgagggtgccttcgggaactgtgagacaggtgctgcatggctgtcgtcagctcgtgttgtgaaatgttgggttaagtcccgcaacgagcgcaacccttatcctttgttgccagcggtccggccgggaactcaaaggagactgccagtgataaactggaggaaggtggggatgacgtcaagtcatcatggcccttacgaccagggctacacacgtgctacaatggcgcatacaaagagaagcgacctcgcgagagcaagcggacctcataaagtgcgtcgtagtccggattggagtctgcaactcgactccatgaagtcggaatcgctagtaatcgtggatcagaatgccacggtgaatacgttcccgggccttgtacacaccgcccgtcacaccatgggagtgggttgcaaaagaagtaggtagcttaaccttcgggagggcgcttaccactttgtgattcatgactggggtg

SEQ ID NO: 1400 - DNA, 1491 bp, Artificial Sequence
  Synthetic polymer
cagattgaacgctggcggcaggcctaacacatgcaagtcgagcggcagcgggaagtagcttgctactttgccggcgagcggcggacgggtgagtaatgtctggggatctgcctgatggagggggataaccactggaaacggtggctaataccgcatgacgtcgcaagaccaaagtgggggaccttcgggcctcacgccatcggatgaacccagatgggattagctagtaggcggggtaatggcccacctaggcgacgatccctagctggtctgagaggatgaccagccacactggaactgagacacggtccagactcctacgggaggcagcagtggggaatattgcacaatgggggaaaccctgatgcagccatgccgcgtgtgtgaagaaggccttcgggttgtaaagcactttcagcggggaggaaggggaaaggtttaagagactttttcattgacgttacccgcagaagaagcaccggctaactccgtgccagcagccgcggtaatacggagggtgcaagcgttaatcggaatgactgggcgtaaagcgcacgcaggcggtctgttaagttggatgtgaaatccccgggcttaacccgggaactgcattcaaaactgacaggctggagtctcgtagaggggggtagaattccaggtgtagcggtgaaatgcgtagagatctggaggaataccggtggcgaaggcggccccctggacgaagactgacgctcaggtgcgaaagcgtggggagcaaacaggattagataccctggtattccacgccgtaaacgatgtcgacttggaggctgtggtccagaaccgtggcttccggagctaacgcgttaagtcgaccgcctggggagtacggccgcaaggttaaaactcaaatgaattgacgggggcccgcacaagcggtggagcatgtggtttaattcgatgcaacgcgaagaaccttacctactcttgacatccagagaagacttcagagatgaggttgtgccttagggagctctgagacaggtgctgcatggctgtcgtcagctcgtgttgtgaaatgttgggttaagtcccgcaacgagcgcaacccttatcctttgttgccagcgattcggtcgggaactcaaaggagactgccggtgataaaccggaggaaggtggggatgacgtcaagtcatcatggcccttacgagtagggctacacacgtgctacaatggcgcatacaaagagaagcgagcctgcgagggtgagcggacctcataaagtgcgtcgtagtccggattggagtctgcaactcgactccatgaagtcggaatcgctagtaatcgtagatcagaatgctacggtgaatacgttcccgggccttgtacacaccgcccgtcacaccatgggagtgggttgcaaaagaagtaggtagcttaaccttcgggggggcgcttaccactttgtgattcatgactggggtgaagtcgtaacaaggtaaccgtagg

SEQ ID NO: 1401 - DNA, 1419 bp, Artificial Sequence
  Synthetic polymer
acacatgcaagtcgagcggtaacaggagaaagcttgctttctcgctgacgagcggcggacgggtgagtaatgtatgggtatctgcctgatggagggggataactactggaaacggtagctaataccgcataatgtctacggaccaaagcgggggaccttcgggcctcgcaccatcagatgaacccatatgggattagctagtaggtgaggtaacggctcacctaggcgacgatctctagctggtctgagaggatgatcagccacactggaactgagacacggtccagactcctacgggaggcagcagtggggaatattgcacaatgggcgcaagcctgatgcagccatgccgcgtgtatgaagaaggccttagggttgtaaagtactttcagtagggaggaagggttaagtgttaatagcactgaacattgacgttacctacagaagaagcaccggctaactccgtgccagcagccgcggtaatacggagggtgcaagcgttaatcggaattactgggcgtaaagcgcacgcaggcggttgattaagttagatgtgaaatccccgggcttaacctgggaattgcatctaaaactggtcagctagagtcttgtagaggggggtagaattccatgtgtagcggtgaaatgcgtagagatgtggaggaataccggtggcgaaggcggccccctggacaaagactgacgctcaggtgcgaaagcgtggggagcaaacaggattagataccctggtagtccacgctgtaaacgatgtcgacttggaggttgtgcccttgaggcgtggcttccggagctaacgcgttaagtcgaccgcctggggagtacggccgcaaggttaaaactcaaatgaattgacgggggcccgcacaagcggtggagcatgtggtttaattcgatgcaacgcgaagaaccttacctactcttgacatccagagaatttagcagagatgctttagtgccttcgggaactctgagacaggtgctgcatggctgtcgtcagctcgtgttgtgaaatgttgggttaagtcccgcaacgagcgcaacccttatcctttgttgccagcacgtgatggtgggaactcaaaggagactgccggtgataaaccggaggaaggtggggatgacgtcaagtcatcatggcccttacgagtagggctacacacgtgctacaatggcgtatacaaagagaagcgacctcgcgagagcaagcggaactcataaagtacgtcgtagtccggattggagtctgcaactcgactccatgaagtcggaatcgctagtaatcgtagatcagaatgctacggtgaatacgttcccgggccttgtacacaccgcccgtcacaccatgggagtgggttgcaaaagaagtaggtagcttaaccttcgggagggcgcttacca

SEQ ID NO: 1402 - DNA, 1371 bp, Artificial Sequence; identical to SEQ ID NO: 879
  Synthetic polymer

SEQ ID NO: 1403 - DNA, 1503 bp, Artificial Sequence
  Synthetic polymer
agagtttgatcctggctcagattgaacgctggcggcaggcctaacacatgcaagtcgaacggtagcacagaggagcttgctcctggattcagcggcggacgggtgagtaatgcctaggaatctgcctggttgtgggggataacgtccggaaacgggcgctaataccgcatacgtcctgagggagaaagtgggggatcttcggacctcacgctatcagatgagcctaggtcggattagctagttggtggggtaaaggcctaccaaggcgacgatccgtaactggtctgagaggatgatcagtcacactggaactgagacacggtccagactcctacgggaggcagcagtggggaatattggacaatgggcgaaagcctgatccagccatgccgcgtgtgtgaagaaggtcttcggattgtaaagcactttaagttgggaggaagggcagtaagttaataccttgctgttttgacgttaccaacagaataagcaccggctaacttcgtgccagcagccgcggtaatacgaagggtgcaagcgttaatcggaattactgggcgtaaagcgcacgcaggcggtttgttaagtcagatgtgaaatccccgggctcaacctgggaactgcatctgatactggcaagcttgagtctcgtagaggggggtagaattccaggtgtagcggtgaaatgcgtagagatctggaggaataccggtggcgaaggcggccccctggacgaagactgacgctcaggtgcgaaagcgtggggagcaaacaggattagataccctggtagtccacgccgtaaacgatgtcgacttggaggttgtgcccttgaggcgtggcttccggagctaacgcgttaagtcgaccgcctggggagtacggccgcaaggttaaaactcaaatgaattgacgggggcccgcacaagcggtggagcatgtggtttaattcgatgcaacgcgaagaaccttacctggtcttgacatccacggaagttttcagagatgagaatgtgccttcgggaaccgtgagacaggtgctgcatggctgtcgtcagctcgtgttgtgaaatgttgggttaagtcccgcaacgagcgcaacccttatcctttgttgccagcggtccggccgggaactcaaaggagactgccagtgataaactggaggaaggtggggatgacgtcaagtcatcatggcccttacgaccagggctacacacgtgctacaacggcgcatacaaagagaagcgacctcgcgagagcaagcggacctcataaagtgcgtcgtagtccggattggagtctgcaactcgactccatgaagtcggaatcgctagtaatcgtggatcagaatgccacggtgaatacgttcccgggccttgtacacaccgcccgtcacaccatgggagtgggttgcaaaagaagtaggtagcttaaccttcgggagggcgcttaccactttgtgattcatgactggggtgaagtcgtaacaaggtagccgta

SEQ ID NO: 1404 - DNA, 1457 bp, Artificial Sequence
  Synthetic polymer
gaacgctggcggcaggcctaacacatgcaagtcgggcggtaacagggagaagcttgcctctccgctgacgagcggcggacgggtgagtaatgtatggggatctgcctgatggcgggggataactactggaaacggtagctaataccgcataatgtctacggaccaaagcgggggacctccgggcctcgcgccatcagatgaacccatatgggattagcttgtaggtgaggtaacggctcacctaggcgacgatccctagctggtctgagaggatgatcagccacactgggactgaaacacggcccagactcctacgggaggcagcagtggggaatattgcacaatgggcgcaagcctgatgcagccatgccgcgtgtatgaagaaggccttcgggttgtaaagtactttcagtcgggaggaaggtggtaaggttaataaccttatcaattgacgttaccgacagaagaagcaccggctaactccgtgccagcagccgcggtaatacggagggtgcaagcgttaatcggaattactgggcgtaaagcgcacgcaggcggttgattgagtcagatgtgaaatccccgggcttaacccgggaattgcatctgatactggtcagctagagtcttgtagaggggggtagaattccatgtgtagcggtgaaatgcgtagagatgtggaggaataccggtggcgaaggcggccccctggacaaagactgacgctcaggtgcgaaagcgtggggagcaaacaggattagataccctggtagtccacgctgtaaacgatgtcgacttggaggttgtgcccttgaggcgtggcttccggagctaacgcgttaagtcgaccgcctggggagtacggccgcaaggttaaaactcaaatgaattgacgggggcccgcacaagcggtggagcatgtggtttaattcgatgcaacgcgaagaaccttacctactcttgacatccagagaacattccggagatggattggtgccttcgggaactctgagacaggtgctgcatggctgtcgtcagctcgtgttgtgaaatgttgggttaagtcccgcaacgagcgcaacccttatcctttgttgccagcgattcggtcgggaactcaaaggagactgccggtgataaaccggaggaaggtggggatgacgtcaagtcatcatggcccttacgagtagggctacacacgtgctacaatggcgtatacagagggaagcgagagtgcgagctggagcgaatctcacaaagtacgtctaagtccggattggagtctgcaactcgactccatgaagtcggaatcgctagtaatcgcaaatcagaatgttgcggtgaatacgttcccgggccttgtacacaccgcccgtcacaccatgggagtgggttgtaccagaagtagatagcttaaccttcgggggggcgtttaccactttgtgattcatgactgg

SEQ ID NO: 1405 - DNA, 1507 bp, Artificial Sequence
  Synthetic polymer
agagtttgatcatggctcagattgaacgctggcggcaggcctaacacacgcaagtcgagcggcagcggaaagtagcttgctactttgccggcgagcggcggacgggtgagtaatgtctgggaaactgcctgatggagggggataactactggaaacggtagctaataccgcatgacctcgaaagagcaaagtgggggatcttcggacctcacgccatcggatgtgcccagatgggattagctagtaggtgaggtaatggctcacctaggcgacgatccctagctggtctgagaggatgaccagccacactggaactgagacacggtccagactcctacgggaggcagcagtggggaatattgcacaatgggcgcaagcctaatgcagccatgccgcgtgtgtgaagaaggccttagggttgtaaagcactttcagcgaggaggaaggcatcatacttaatacgtgtggtgattgacgttactcgcagaagaagcaccggctaactccgtgccagcagccgcggtaatacggagggtgcaagcgttaatcggaattactgggcgtaaagcgcacgcaggcggtttgttaagtcagatgtgaaatccccgcgcttaacgtgggaactgcatttgaaactggcaagctagagtcttgtagaggggggtagaattccaggggtagcggtgaaatgcgtagagatctggaggaataccggtggcgaaggcggccccctggacaaagaatgacgatctggtgtgaaagcgtggggagcaaacaggattatataccttggtagtccacgctgtaaacgatgtcgacttggaggttgtgcccttgaggcgtggcttccggagataacgcgataagtcgaccgcttggggagtacggccgcaaatttaaaacccatctgcatgactgggggcccccacaagcggtgcagcatgtggtttaattcgatgcaacgcgaagaaccttacctactcttgacatccacggaattcgccagagatggcttagtgccttcgggaaccgtgagacaggtgctgcatggctgtcgtcagctcgtgttgtgaaatgttgggttaagtcccgcaacgagcgcaacccttatcctttgttgccagcacgtaatggtgggaactcaaaggagactgccggtgataaaccggaggaaggtggggatgacgtcaagtcatcatggcccttacgagtagggctacacacgtgctacaatggcatatacaaagagaagcgaactcgcgagagcaagcggacctcataaagtatgtcgtagtccggattggagtctgcaactcgactccatgaagtcggaatcgctagtaatcgtagatcagaatgctacggtgaatacgttcccgggccttgtacacaccgcccgtcacaccatgggagtgggttgcaaaagaagtaggtagcttaaccttcgggagggcgcttaccactttgtgattcatgactggggtgaagtcgtaacaaggtaaccgta

SEQ ID NO: 1406 - DNA, 1409 bp, Artificial Sequence
  Synthetic polymer
acacatgcagtcgagcggtagcacaggggaagtttgctcctcccgccgacgagcggcggacgggtgagtaatgtctggggatctgcctgatggagggggataactactggaaacggtagctaataccgcataacgtcgcaaggccaatatgggggacctctgcggccttccccgcatcggatgaccggttgatagctatagtgggtaccggctcacctagggacgattccgtagtggtcgagaggatgaccaggcccacactgactgagacaccgttccagactcctacggagcagcagtggggaatattgcacaatgggggaagcctgatgcagccatgccgcggtgtgtgaagaaggccttcggtgtaaagcactttcaggcgggggaggaaggcggcaaggttattaacctgtcgattgacgttacccccagaagaagcaccggctaactccgtgccagcagccgcggtaatacggagggtgcaagcgttaatcggaatgactgggcgtaaagcgcacgcaggcggtctgttaagttggatgtgaaatccccgggcttaactgggaactgcattcaaaactgacaggctagagtctcgtagaggggggtagaattccaggtgtagcggtgaaatgcgtagagatctggaggaataccggtggcgaaggcggccccctggacgaagactgacgctcaggtgcgaaagcgtggggagcaaacaggattagataccctggtagtccacgctgtaaacgatgtcgatttggaggttgtgcccttgaggcgtggcttccggagctaacgcgttaaatcgaccgcctggggagtacggccgcaaggttaaaactcaaatgaattgacgggggcccgcacaagcggtggagcatgtggtttaattcgatgcaacgcgaagaaccttacctactcttgacatccagcgaagactgcagagatgcggtcgtgccttcgggaacgctgagacaggtgctgcatggctgtcgtcagctcgtgttgtgaaatgttgggttaagtcccgcaacgagcgcaacccttatcctctgttgccagcactacgggtgggaactcaggggagactgccggtgataaaccggaggaaggtggggatgacgtcaagtcatcatggcccttacgagtagggctacacacgtgctacaatggcgtatacaaagagaagcgacctcgcgagagcaagcggacctcataaagtacgtcgtagtccggattggagtctgcaactcgactccatgaagtcggaatcgctagtaatcgtagatcagaatgctacggtgaatacgttcccgggccttgtacacaccgcccgtcacaccatgggagtgggttgcaaaagaagtaggtagcttaaccttcgggagggcgcttaccac

SEQ ID NO: 1407 - DNA, 1372 bp, Artificial Sequence
  Synthetic polymer
agtcgagcggtacacggggagactggttctctgggtgacgagcggcacacgggagagatgtgtctggaactctgcctgatggagggagatatctactggaaacggtatctaataccgcataacgtcacgagaccaaagagggagaccttcggctctcttgccatcatatgtgcccatatggtattatctaatatgtggggtaatgtctcacctacgacactatccctatctggtctgagaagatgaccacccactctggatctgacacacggtccacactcctacgggaggcagcagtggaaaatattgcacagtgggcgcaagcctgatgcacccgtgccgcgtgtatgaaaaaggtcttcggtttgtaaagcactttccgcgaagaagaaggctttgaggttaatacccacagagattgacgttactcgcaaaaaaagcaccgtctatctccgtgccagcacccgcggtaatacagagggtgcaagcgttattcggattactgggcgtaaagcgcacgcaggcggtctgtcaagtcggatgtgaaatccccgggctcaacctgggaactgcattcgaaactggcaggctagagtcttgtagaggggggtagaattccaggtgtagcggtgaaatgcgtagagatctggaggaataccggtggcgaaggcggccccctggacaaagactgacgctcaggtgcgaaagcgtggggagcaaacaggattagataccctggtagtccacgccgtaaacgatgtcgacttggaggttgttcccttgaggagtggcttccggagctaacgcgttaagtcgaccgcctggggagtacggccgcaaggttaaaactcaaatgaattgacgggggcccgcacaagcggtggagcatgtggtttaattcgatgcaacgcgaagaaccttacctactcttgacatccagagaacttagcagagatgctttggtgccttcgggaactctgagacaggtgctgcatggctctgcatggctgtcgtcagctcgtgttgtgaaatgttgggttaagtcccgcaacgagcgcaacccttatcctttgttgccagcggtccggccgggaactcaaaggagactgccagtgataaactggaggaaggtggggatgacgtcaagtcatcatggcccttacgagtagggctacacacgtgctacaatggcgcatacaaagagaagcgacctcgcgagagcaagcggacctcataaagtgcgtcgtagtccggattggagtctgcaactcgactccatgaagtcggaatcgctagtaatcgtagatcagaatgctacggtgaatacgttcccgggccttgtcacaccgcccgtcacaccatgggagtgggt

SEQ ID NO: 1408 - DNA, 1498 bp, Artificial Sequence
  Synthetic polymer
ttagagtttgatcctggctcagaacgaacgctggcggcaggcctaacacatgcaagtcgagcggtaacacagggagcttgctcctgggtgacgagcggcggacgggtgagtaatgtctgggaaactgcctgatggagggggataactactggaaacggtagctaataccgcataacgtcgcaagaccaaagagggggaccttcgggcctcttgccatcagatgtgcccagatgggattagctagtaggtggggtaatggctcacctaggcgacgatccctagctggtctgagaggatgaccagccacactggaactgagacacggtccagactcctacgggaggcagcagtggggaatattgcacaatgggcgcaagcctgatgcagccatgccgcgtgtatgaagaaggccttcgggttgtaaagtactttcagcgaggaggaaggcattaaggttaataaccttggtgattgacgttactcgcagaagaagcaccggctaactccgtgccagcagccgcggtaatacggagggtgcaagcgttaatcggaattactgggcgtaaagcgcacgcaggcggtctgtcaagtcggatgtgaaatccccgggctcaacctgggaactgcattcgaaactggcaggctagagtcttgtagaggggggtagaattccaggtgtagcggtgaaatgcgtagagatctggaggaataccggtggcgaaggcggccccctggacaaagactgacgctcaggtgcgaaagcgtggggagcaaacaggattagataccctggtagtccacgccgtaaacgatgtcgacttggaggctgttcccttgaggagtggcttccggagctaacgcgttaagtcgaccgcctggggagtacggccgcaaggttaaaactcaaatgaattgacgggggcccgcacaagcggtggagcatgtggtttaattcgatgcaacgcgaagaaccttacctactcttgacatccacggaacttagcagagatgctttggtgccttcgggaaccgtgagacaggtgctgcatggctgtcgtcagctcgtgttgtgaaatgttgggttaagtcccgcaacgagcgcaacccttatcctttgttgccagcggtccggccgggaactcaaaggagactgccagtgataaactggaggaaggtggggatgacgtcaagtcatcatggcccttacgagtagggctacacacgtgctacaatggcgcatacaaagagaagcgacctcgcgagagcaagcggacctcataaagtgcgtcgtagtccggattggagtctgcaactcgactccatgaagtcggaatcgctagtaatcggatatcagccatgatccggtgaatacgttcccgggccttgtacacaccgcccgtcaagccatggaagctgggggtacctgaagtcggtcgccgcaaggagctgcctagggtaaaactggtgactggggtgaagtcgtaacaaggtagccgta

SEQ ID NO: 1409 - DNA, 1413 bp, Artificial Sequence
  Synthetic polymer
catgcaagtcgaacggcagcgggggagagcttgctctcctgccggcgagtggcggacgggtgagtaatgtctggggatctgcccgatggagggggataaccactggaaacggtggctaataccgcatgaagtcgcaagaccaaagtgggggaccttcgggcctcacgccataggatgaacccagatgggattagctggtaggtggggtaaaggctcacctaggcgacgatccctagctggtctgagaggatgaccagccacactggaactgagacacggtccagactcctacgggaggcagcagtggggaatattgcacaatgggggaaaccctgatgcagccatgccgcgtgtatgaagaaggccttagggttgtaaagtactttcagtcaggaggaagggtgagcagtgaatagctgtttgcattgacgctactgacagaagaagcaccggctaactccgtgccagcagccgcggtaatacggagggtgcaagcgttaatcggaattactgggcgtaaagcgcacgcaggcggtctgttaagtcagatgtgaaatccccgggcttaacccgggaactgcatttgaaactggcaggctggagtctcgtagaggggggtagaattccaggtgtagcggtgaaatgcgtagagatctggaggaataccggtggcgaaggcggccccctggacgaagactgacgctcaggtgcgaaagcgtggggagcaaacaggattagataccctggtagtccacgctgtaaacgatgtcgacttggaggttgtgcccttgaggcgtggcttccggagctaacgcgttaagtcgaccgcctggggagtacggccgcaaggttaaaactcaaatgaattgacgggggcccgcacaagcggtggagcatgtggtttaattcgatgcaacgcgaagaaccttacctggtcttgacatccacggaaggtcccagagatggggctgtgccttcgggagccgtgagacaggtgctgcatggctgtcgtcagctcgtgttgtgaaatgttgggttaagtcccgcaacgagcgcaacccttatcctttgttgccagcgatacggtcgggaactcaaaggagactgccggtgataaaccggaggaaggtggggatgacgtcaagtcatcatggcccttacgaccagggctacacacgtgctacaatggcgcatacaaagagaagcgacctcgcgagagcaagcggacctcataaagtgcgtcgtagtccggattggagtctgcaacccgactccatgaagtcggaatcgctagtaatcgtggatcagaatgccacggtgaatacgttcccgggccttgtacacaccgcccgtcacaccatgggagtgggttgcaaaagaagtaggtagcttaaccttcgggagggcgctacc

SEQ ID NO: 1410 - DNA, 1465 bp, Artificial Sequence; identical to SEQ ID NO: 1077
  Synthetic polymer

SEQ ID NO: 1411 - DNA, 1360 bp, Artificial Sequence
  Synthetic polymer
gagcttgctccctgggtgacgagcggcggacgggtatcgcatgtctgggaaactgcctgatggatggggataactactggaaacggtagctaataccgcataacgtcgcaagaccaaaggctgctaccttcgggcctcttgccatcagatgtgcccagatgggattagctagtaggtggggtaatggctcacctaggcgacgatccctagctggtctgagaggatgaccagccacactggaactgagacacggtccagactcctacgggaggcagcagtggggaatattgcacaatgggcgcaagcctgatgcagccatgccgcgtgtgtgaagaaggccttcgggttgtaaagcactttcagcgaggaggaaggtggtgagcttaatacgctcatcaattgacgttactcgcagaagaagcaccggctaactccgtgccagcagccgcggtaatacggaggttacgagcgttaatcggaattactgggcgtaaagcgcacgcaggcggtctgtcaagtcggatgtgaaatccccgggctcaacctgggaactgcattcgaaactggcaggctagagtcttgtagaggggggtagaattccaggtgtagcgatgaaatgcgtagagatctggaggaataccggtggcgaaggcggccccctggacaaagactgacgctcaggtgcgaaagcgtggggagcaaacaggattagataccctggtagtccacgccgtaaacgatgtcgacttggaggttgtgcccttgaggcgtggcttccggagctaacgcgttaatcgtgccgcctggggagtacggccgcaaggttaaaactcaaatgaattgacgggggcccgcacaagcggtggagcatgtggtttaattcgatgcaacgcgaagaaccttacctactcttgacatccagagaacttagcagagatgctttggtgccttcgggaactctgagacaggtgctgcatggctgtcgtcagctcgtgttgtgaaatgttgggttaagtcccgcaacgagcgcaacccttatcctttgttgccagcggttaggccgggaacccaaaggagactgccagtgatacatgtggaggaaggtggggatgacgtcaagcatcatggcccttacgagtagggctacacacgtgctacaatggcgtatacaaagagaagcgacctcgcgagagcaagcggacctcataaagtacgtcgtagtccggattgagctgctgctactcgactccatgaagtcggatcgctagtaatcgtagatcagaatgctacggtgaatacgttcccgggccttgtacacaccgcccgtcacaccatgggagtgggttgcaaaagaagtagg

SEQ ID NO: 1412 - DNA, 1498 bp, Artificial Sequence
  Synthetic polymer
catggctcagattgaacgctggcggcaggcctaacacatgcaagtcgagcggtagcacaagggagcttgctccccgggtgacgagcggcggacgggtgagtagtgtctgggaaactgcctgatggagggggataactactggaaacggtagctaataccgcataacgtcgcaagaccaaagtgggggaccttcgggcctcacgccatcagatgtgcccagatgggattagctagtaggtggggtaacggctcacctaggcgacgatccctagctggtctgagaggatgaccagccacactggaactgagacacggtccagactcctacgggaggcagcagtggggaatattgcacaatgggcgcaagcctgatgcagccatgccgcgtgtgtgaagaaggccttcgggttgtaaagcactttcagcgaggaggaaggcagtaaggttaataaccttgctgattgacgttactcgcagaagaagcaccggctaactccgtgccagcagccgcggtaatacggagggtgcaagcgttaatcggaatgactgggcgtaaagcgcacgcaggcggtttgttaagttggatgtgaaatccccgggcttaacctgggaaactgcattcaaaactggcaagctagagtctcgtagaggggggtagaattccaggtgtagcggtgaaatgcgtagagatctggaggaataccggtggcgaaggcggccccctggacgaagactgacgctcaggtgcgaaagcgtggggagcaaacaggattagataccctggtagtccactctgtaaacgatgtcgatttggaggttgtgcccttgaggcgtggcttccggacgtaacgcgttaaatcgaccgcctgggggagtacggccgcaaggttaaaagtgaaatgaattgacggggccgctacaagcggtggagcatgtggtttaattcgatgcaacgcgaagaccttacctactcttgacatccagagaatttagcagagatgctttagtgcttcgggaactctgagacaggtgctgcatggctgtcgtcagctcgtgttgtgaaatgttgggttaagtcccgcaacgagcgcaacccttatgctttgttgccagcgattcggtcgggaactcaaaggagactgccagtgataaactggaggaaggtggggatgacgtcaagtcatcatggcccttacgagtagggctacacacgtgctacaatggcgtatacaaagagaagcgaccgcgcgagagcaagcggacctcataaagtacgtcgtagtccgattggagtgtgcaactcgactccatgaagtcggaatcgctagtaatcgtagatcagaatgctacggtgaatacgttcccgggccttgtacacaccgcccgtcacaccatgggagtgggttgcaaaagaagtaggtagcttaaccttcgggagggcgcttaccactttgtgattcatgactggggtgaagtcgtaacaaggtaaccgtagggg

SEQ ID NO: 1413 - DNA, 1545 bp, Artificial Sequence
  Synthetic polymer
agagtttgatcatggctcagattgaacgctggcggcaggcctaacacatgcaagtcgaacggtaacaggaagcagcttgctgcttcgctgacgagtggcggacgggtgagtaatgtctgggaaactgcctgatggagggggataactactggaaacggtagctaataccgcataacgtcgcaagaccaaagagggggaccttcgggcctcttgccatcggatgtgcccagatgggattagctagtaggtggggtaacggctcacctaggcgacgatccctagctggtctgagaggatgaccagccacactggaactgagacacggtccagactcctacgggaggcagcagtggggaatattgcacaatgggcgcaagcctgatgcagccatgccgcgtgtatgaagaaggccttcgggttgtaaagtactttcagcggggaggaaggtgttgaggttaataacctcagcaattgacgttacccgcagaagaagcaccggctaactccgtgccagcagccgcggtaatacggagggtgcaagcgttaatcggaattactgggcgtaaagcgcacgcaggcggtctgtcaagtcggatgtgaaatccccgggctcaacctgggaactgcattcgaaactggcaggctagagtcttgtagaggggggtagaattccaggtgtagcggtgaaatgcgtagagatctggaggaataccggtggcgaaggcggccccctggacaaagactgacgctccaggtgcgaaagcgtggggagcaaacagggattagataccctggtagtcccacgccgtaaacgatgtcgacttggaggttgtgcccttgaggcgtggcttccggagctaacgcgttaagtcgaccgcctgggggagtacggccgcaaggttaaaactccaaatgaattgacgggggcccgcacaagcggtggagcatgtggtttaattccgatgcaacgcgaagaaccttacctactcttgacatcccagagaacttagcagagatgctttggtgccttcgggaactctggagacaggtgctgcatggctgtcgtccagctcgtgttgtgaaatgttgggttaagtccagcaacgtttagcctgctaagcccttatccattggtagccagcggtccggccgggaactcaaagcagactgccagtgataaactgtgaggtcacaggtggggatgacgccaagtcatcatggcccttacgatgtagggctacacacgtgctacaatggcttgcatacaaagtactaaccgaccgcgcgcagagcaaacggacctcataaagtgcgtcatagaccagattggagtcttgcaactcgacttccatgaagtcagaatcgctagataatcgtggatcaacaacgccacgctgaatacgttcaccgggccttgttacgacaccgcccgtcacaccatggggagtggggttgcaaaagaagtaggtagcttaaaccttcgggagggcgctttaccactttgtgattgcatgactggggtgaaatcctaaccaaggtaaccgt

SEQ ID NO: 1414 - DNA, 1404 bp, Artificial Sequence
  Synthetic polymer
agagtttgatcctggctcagattgaacgctggcggcaggcctaacacatgcaagtcgagcggtagcacagagagcttgccctcgggtgacgagcggcggacgggtgagtaatgtctgggaaactgcctgatggagggggataactactggaaacggtagctaataccgcataacgtcgcaagaccaaagagggggaccttcgggcctcttgccatcagatgtgcccagatgggattagctagtaggtggggtaatggctcacctaggcgacgatccctagctggtctgagaggatgaccagccacactggaactgagacacggtccagactcctacgggaggcagcagtggggaatattgcacaatgggcgcaagcctgatgcagccatgccgcgtgtatgaagaaggccttcgggttgtaaagtactttcagcgaggaggaaggcattgtggttaataaccacagtgattgacgttactcgcagaagaagcaccggctaactccgtgccagcagccgcggtaatacggagggtgcaagcgttaatcggaattactgggcgtaaagcgcacgcaggcggtctgtcaagtcggatgtgaaatccccgggctcaacctgggaactgcattcgaaactggcaggctagagtcttgtagaggggggtagaattccaggtgtagcggtgaaatgcgtagagatctggaggaataccggtggcgaaggcggccccctggacaaagactgacgctcaggtgcgaaagcgtggggagcaaacaggattagataccctggtagtccacgccgtaaacgatgtcgaatatggaggttgttccccctgaaggagtggtttcccggagctaacgcgtaaagtcgccccccttggggagtacggccgcaaggttaaaactcagatgaattgacgggggcccgcacaagcggtggagcatgtggtttaattcgatgcaacgcgaagaaccttacctactcttgacatccagagaacttagcagagatgctttggtgccttcgggaactctgagacaggtgctgcatggctgtcgtcagctcgtgttgtgaaatgttgggttaagtcccgcaacgagcgcaacccttatcctttgttgccagcggttcggccgggaactcaaaggagactgccagtgataaactggaggaaggtggggatgacgtcaagtcatcatggcccttacgagtagggctacacacgtgctacaatggcatatacaaagagaagcgacctcgcgagagcaagcggacctcacaaagtatgtcgcagtccggatcggagtctgcaactcgactccgtgaagtcggaatcgctagtaatcgtagatcagaatgctacggtgaatacgttcccgggccttgcacaaaccgcccgtca

SEQ ID NO: 1415 - DNA, 1545 bp, Artificial Sequence
  Synthetic polymer
ttaaattgaagagtttgatcatggctcagattgaacgctggcggcaggcctaacacatgcaagtcgagcggcagcggggggaagcttgcttccccgccggcgagcggcggacgggtgagtaatgtctgggaaactgcctgatggagggggataactactggaaacggtagctaataccgcataacgtcttcggaccaaagtgggggctcttcggacctcatgccatcggatgtgcccagatgggattagctagtaggcggggtaaaggcccacctaggcgacgatccctagctggtctgagaggatgaccagccacactggaactgagacacggtccagactcctacgggaggcagcagtggggaatattgcacaatgggggaaaccctgatgcagccatgccgcgtgtgtgaagaaggccttcgggttgtaaagcactttcagcggggaggaaggggacaggcttaatacgtctgttcattgacgttacccgcagaagaagcaccggctaactccgtgccagcagccgcggtaatacggagggtgcaagcgttaatcggaatgactgggcgtaaagcgcacgcaggcggtctgttaagttggatgtgaaatccccgggcttaacctgggaactgcattcaaaactgacaggctagagtctcgtagaggggggtagaattccaggtgtagcggtgaaatgcgtagagatctggaggaataccggtggcgaaggcggccccctggacgaagactgacgctcaggtgcgaaagcgtggggagcaaacaggattagataccctggtagtccacgctgtaaacgatgtcgatttggaggttgtggtcttgaaccgtggcttccggagctaacgcgttaaatcgaccgcctggggagtacggccgcaaggttaaaactcaaatgaattgacgggggcccgcacaagcggtggagcatgtggtttaattcgatgcaacgcgaagaaccttacctactcttgacatccagagaagactgcagagatgcggttgtgccttcgggagctctgagacaggtgctgcatggctgtcgtcagctcgtgttgtgaaatgttgggttaagtcccgcaacgagcgcaacccttatcctttgttgccagcacgtgatggtgggaactcaagggagactgccggtgataaaccggaggaaggtggggatgacgtcaagtcatcatggcccttacgagtagggctacacacgtgctacaatggcgcatacaaagagaagcgacctcgcgagagcaagcggatctcataaagtgcgtcgtagtccggattggagtctgcaactcgactccatgaagtcggaatcgctagtaatcgcggatcagaatgccgcggtgaatacgttcccgggccttgtacacaccgcccgtcacaccatgggagtgggttgcaaaagaagtaggtagcttaaccttcgggagggcgcttaccactttgtgattcatgactggggtgaagtcgtaacaaggtaaccgtaggggaacctgcggttggatcacctcctta

SEQ ID NO: 1416 - DNA, 1458 bp, Artificial Sequence
  Synthetic polymer
catgcaagtcgaacggaaacgatggagagcttgctcttcaggcgtcgagtggcggacgggtgagtaatgactggggaactgcccgatggagggggataactactggaaacggtagctaataccgcataacgtcttcggaccaaagtgggggaccttcgggcctcacaccatcggatgtacccagttgggattagctagtaggtgaggtaatggctcacctaggcgacgatccctagctggtctgagaggatgaccagccacactgggactgagacacggcccagactcctacgggaggcagcagtggggaatattgcacaatgggcgcaagcctgatgcagccatgccgcgtgtatgaagaaggccttcgggttgtaaagtactttcagcgaggaggaaggcggtaaggttaatagccttatcgattgacgttactcgcagaagaagcaccggctaactccgtgccagcagccgcggtaatacggagggtgcaagcgttaatcggaattactgggcgtaaagcgcacgcaggcggtttgttaagtcagatgtgaaatccccgagctcaacttgggaactgcatttgaaactggcaagctagagtcttgtagaggggggtagaatttcaggtgtagcggtgaaatgcgtagagatctgaaggaataccggtggcgaaggcggccccctggacaaagactgacgctcaggtgcgaaagcgtggggagcaaacaggattagataccctggtagtccacgctgtaaacgatgtcgacttggaggttgtgcccttgaggcgtggcttccggagctaacgcgttaagtcgaccgcctggggagtacggccgcaaggttaaaactcaaatgaattgacgggggcccgcacaagcggtggagcatgtggtttaattcgatgcaacgcgaagaaccttacctactcttgacatccagagaacttagcagagatgctttggtgccttcgggaactctgagacaggtgctgcatggctgtcgtcagctcgtgttgtgaaatgttgggttaagtcccgcaacgagcgcaacccttatcctttgttgccagcacgtaatggtgggaactcaaaggagactgccggtgataaaccggaggaaggtggggatgacgtcaagtcgtcatggcccttacgagtagggctacacacgtgctacaatggcgtatacaaagagaagcgacctcgcgagagcaagcggacctcataaagtgcgtcgtagtccggattggagtctgcaactcgactccatgaagtcggaatcgctagtaatcgtggatcagaatgctacggtgaatacgttcccgggccttgtacacaccgcccgtcacaccatgggagtgggttgcaaaagaagtaggtagcttaaccttcgggagggcgcttaccactttgtgattcatgactggggtgaagtcgtaacaaggtaacc

SEQ ID NO: 1417 - DNA, 1415 bp, Artificial Sequence
  Synthetic polymer
  misc_feature (6)..(6): n is a, c, g, or t
  misc_feature (19)..(19): n is a, c, g, or t
  misc_feature (501)..(501): n is a, c, g, or t
  misc_feature (504)..(504): n is a, c, g, or t
  misc_feature (531)..(531): n is a, c, g, or t
catgcnagtcgaacgggtnacaggaagcagcttgctgcttcgctgacgagtggcggacgggtgagtaatgtctggggatctgcccgatggagggggataaccactggaaacggtggctaataccgcataacgtcgcaagaccaaagtgggggaccttcgggcctcacaccatcggatgaacccagatgggattagctagtaggtggggtaacggctcacctaggcgacgatccctagctggtctgagaggatgaccagccacactggaactgagacacggtccagactcctacgggaggcagcagtggggaatattgcacaatgggcgcaagcctgatgcagccatgccgcgtgtatgaagaaggccttcgggttgtaaagtactttcagcggggaggaagggatggtgcttaatacgcaccgtcattgacgttacccgcagaagaagcaccggctaactccgtgccagcagccgcggtaatacggagggtgcaagcgttnatnggaattactgggcgtaaagcgcacgcnggcggtctgtcaagtcggatgtgaaatccccgggctcaacccgggaactgcatttcgaaactggcaggctagagtctcgtagaggggggtagaattccaggtgtagcggtgaaatgcgtagagatctggaggaataccggtggcgaaggcggccccctggacgaagactgacgctcaggtgcgaaagcgtggggagcaaacaggattagataccctggtagtccacgccgtaaacgatgtcgacttggaggctgtgagcttgactcgtggcttccggagctaacgcgttaagtcgaccgcctggggagtacggccgcaaggttaaaactcaaatgaattgacgggggcccgcacaagcggtggagcatgtggtttaattcgatgcaacgcgaagaaccttacctggtcttgacatccacggaattctgcagagatgcggaagtgccttcgggaaccgtgagacaggtgctgcatggctgtcgtcagctcgtgttgtgaaatgttgggttaagtcccgcaacgagcgcaacccttatcctttgttgccagcggctcggccgggaactcaaaggagactgccggtgataaaccggaggaaggtggggatgacgtcaagtcatcatggcccttacgaccagggctacacacgtgctacaatggcgcatacaaagagaagcgacctcgcgagagcaagcggacctcataaagtgcgtcgtagtccggattggagtctgcaactcgactccatgaagtcggaatcgctagtaatcgtggatcagaatgccacggtgaatacgttcccgggccttgtacacaccgcccgtcacaccatgggagtgggttgcaaaagaagtagttagcttaaccttcgggagggcgctacc

SEQ ID NO: 1418 - DNA, 1420 bp, Artificial Sequence
  Synthetic polymer
gcctaacacatgcaagtcgagcggcagcgggaagtagtttactactttgccggcgagcggcggacgggtgagtaatgtctgggaaactgcctgatggagggggataactactggaaacggtagctaataccgcataacgtcttcgaaccaaagtgggggaccttagggcctcacgccatcggatgtgcccagatggcattagctagtaggtggggtaatggctcacctaggcgacgatccctagctggtctgagaggatgaccagccacactggaactgagacacggtccagactcctacgggaggcagcagtggggaatattgcacaatgggcgcaagcctgatgcagccatgccgcgtgtgtgaagaaggccttcgggttgtaaagcactttcagcgaggaggaaggccaataacttaatacgttgttggattgacgttactcgcagaagaagcaccggctaactccgtgccagcagccgcggtaatacggagggtgcaagcgttaatcggaattactgggcgtaaagcgcacgcaggcggtttgttaagtcagatgtgaaatccccgcgcttaacgtgggaactgcatttgaaactggcaagctagagtcttgtagattggggtagaattccaggtgtagcggtgaaatgcgtagagatctggaggaataccggtggcgaaggcggccccctggacaaagactgacgctcaggtgcgaaagcgtggccgagcaaacaggattagataccctggtagtccacgctgtaaacgatgtcgacttggaggttgtgcccttgaggcgtggcttccggagctaacgcgttaagtcgaccgcctggggagtacggccgcaaggttaaaactcaaatgaattgacgaggcccgcacaagcggtggagcatgtggtttaattcgatgcaacgcgaagaaccttacctactcttgacatccacggaatttagcagagatgctttagtgccttcgggaaccgtgagacaggtgctgcatggctgtcgtcagctcgtgttgtgaaatgttgggttaagtcccgcaacgagcgcaacccttatcctttgttgccagcacgtaatggtgggaactcaaaggagactgccggtgataaaccggaggaaggtttggatgacgtcaagtcatcatggcccttacgagtagggctacacacgtgctacaatggcagatacaaagtgaagcgaactcgcgagagcaagcggaccacataaagtctgtcgtagtccggattggagtctgcaactcgactccatgaagtcggaatcgctagtaatcgtagatcagaatgctacggtgaatacgttcccgggccttgtacacaccgcccgtcacaccatgcgagtgggttgcaaaagaagtaggtagcttaaccttcgggagcgcgctt

SEQ ID NO: 1419 - DNA, 1410 bp, Artificial Sequence
  Synthetic polymer
agtcgaacggtagcgggaagaagcttgcttctttgccgacgagtggcggacgggtgagtaatgtctgggaaactgcccgatggagggggataactactggaaacggtagctaataccgcataacgtctacggaccaaagtgggggaccttcgggcctcacaccatcggatgtgcccagatgggattagctagtaggtggggtaacggctcacctaggcgacgatccctagctggtctgagaggatgaccagccacactggaactgagacacggtccagactcctacgggaggcagcagtggggaatattgcacaatgggcgcaagcctgatgcagccatgccgcgtgtatgaagaaggccttcgggttgtaaagtactttcagcggggaggaagggwgagmggttaataayckcttkcattgacgttacccgcagaagaagcaccggctaactccgtgccagcagccgcggtaatacggagggtgcaagcgttaatcggaattactgggcgtaaagcgcacgcaggcggtctgtcaagtcggatgtgaaatccccgggctcaacccgggaactgcattcgaaactggcagactggagtcttgtagaggggggtagaattccaggtgtagcggtgaaatgcgtagagatctggaggaataccggtggcgaaggcggccccctggacaaagactgacgctcaggtgcgaaagcgtggggagcaaacaggattagataccctggtagtccacgccgtaaacgatgtcgacttggaggctgttcccttgaggagtggcttccggagctaacgcgttaagtcgaccgcctggggagtacggccgcaaggttaaaactcaaatgaattgacgggggcccgcacaagcggtggagcatgtggtttaattcgatgcaacgcgaagaaccttacctggccttgacatccacggaattctgcagagatgcggaagtgccttcgggacccgtgagacaggtgctgcatggctgtcgtcagctcgtgttgtgaaatgttgggttaagtcccgcaacgagcgcaacccttatcctttgttgccagcgattcggtcgggaactcaaaggagactgccggtgataaaccggaggaaggtggggatgacgtcaagtcatcatggcccttacggccagggctacacacgtgctacaatggcgcatacaaagagaagcgacctcgcgagagcaagcggacctcataaagtgcgtcgtagtccggatcggagtctgcaactcgactccgtgaagtcggaatcgctagtaatcgtagatcagaatgctacggtgaatacgttcccgggccttgtacacaccgcccgtcacaccatgggagtgggttgcaaaagaagtaggtagcttaaccttcgggagggcgcttaccac

SEQ ID NO: 1420 - DNA, 1449 bp, Artificial Sequence
  Synthetic polymer
gctggcggcaggcctaacacatgcaagtcgagcggtatcacagagagcttgctctcgggtgacgagcggcggacgggtgagtaatgtctgggaaactgcctgatggagggggataactactggaaacggtagctaataccgcataatgtcgcaagaccaaagtgggggaccttcgggcctcatgccatcagatgtgcccagatgggattagctagtaggtggggtaacggctcacctaggcgacgatccctagctggtctgagaggatgaccagccacactggaactgagacacggtccagactcctacgggaggcagcagtggggaatattgcacaatgggcgcaagcctgatgcagccatgccgcgtgtatgaagaaggccttcgggttgtaaagtactttcagcgaggaggaaggcattaaggttaataaccttagtgattgacgttactcgcagaagaagcaccggctaactccgtgccagcagccgcggtaatacggagggtgcaaacgttaatcggaattactgggcgtaaagcgcacgcaggcggttgattaagtcagatgtgaaatccccgagcttaacttgggaactgcatttgaaactggtcagctagagtcttgtagaggggggtagaattccaggtgtagcggtgaaatgcgtagagatctggaggaataccggtggggaaggcggccccctggacaaagaccgacgctcaggtgcgaaagcgtgggggagcaaacaggattagataccctggttagtccacgctgtaaacgatgtcgacatggaggttgtgcccttgaggcgtggcttccggagctaacgcgttaagtcgcccgcctggggagtacggccgcaaggttaaaactcaaatgaattgacgggggcccgcacaagcggtggagcatgtggtttaattcgatgcaacgcgaagaaccttacgtggtcttgacatccacagaactttccagagatggattggtgccttcgggaactgtgagacaggtgctgcatggctgtcgtcagcttgtgttgtgaaatgttgggttaagtcccgcaacgagcgcaacccttatcctttgtttccagcgagtaatgtcgggaactcaaaggagtctgccggtgataaaccggaggaaggtggggatgacgtcaagtcatcatggtccttacgaccagggctacacacgtgctacaatggcatatacaaagagaagcgacctcgcgagagcaagcggacctcataaagtatgtagtagtccggattggagtttgcaactcgactccatgaagtcggaatcggtagtaattgtagatcagaattctacggtgaatacgttcccgggctttgtacacaccgcccgtcacaccatgggagtgggttgcaaaagaagtaggtagcttaaccttcgggagggcgcttaccactttgtgattcatg

SEQ ID NO: 1421 - DNA, 1460 bp, Artificial Sequence
  Synthetic polymer
attgaacgctggcggcaggcttaacacatgcaagtcgagcgggggatattgcttcggtaattgacctagcggcggacgggtgagtaatacttaggaatctgcctattaatgggggacaacatctcgaaagggatgctaataccgcatacgccctacgggggaaagcaggggatcacttgtgaccttgcgttaatagatgagcctaagtcggattagctagttggtggggtaaaggcctaccaaggcgacgatctgtagcgggtctgagaggatgatccgccacactggaactgagacacggtccagactcctacgggaggcagcagtggggaatattgcacaatgggcgcaagcctgatgcagccatgccgcgtgtatgaagaaggccttcgggttgtaaagtactttcagcggggaggaaggtgttgaggttaataacctcagcaattgacgttacccgcagaagaagcaccggctaactccgtgccagcagccgcggtaatacggagggtgcaagcgttaatcggaattactgggcgtaaagcgcacgcaggcggtctgtcaagtcggatgtgaaatccccgggctcaacctgggaactgcattcaaaactggcaggctagagtcttgtagaggggggtagaattccaggtgtagcggtgcaatgcgtacagatctggaggaataccggtggcgaaggcggcccctggacaaagactgacgctcaggtgcgaaagcgtggggagcaaacaggattagataccctggtagtccacgccgtaaacgatgtcgacttggaggttgtgccccttgaggcgtggcttccggagctaacgcgttaagtcgaccgcctggggagtacggccgcaaggttaaaactcaaatgaattgacgggggcccgcacaagcggtggagcatgtggtttaattcgatgcaacgcgaagaaccttacctactcttgacatccagagaacttagcagagatgctttggtgccttcgggaactctgagacaggtgctgcatggctgtcgtcagctcgtgttgtgaaatgttgggttaagtcccgcaacgagcgcaacccttatcctttgttgccagcggtccggccgggaactcaaaggagactgccagtgataaactggaggaaggtggggatgacgtcaagtcatcatggcccttacgagtagggctacacacgtgctacaatggcgcatacagagagaagcgaactcgcgagagcaagcggaccccataaagtgcgtcgtagtccggattggagtctgcaactcgactccatgaagtcggaatcgctagtaatcgtagatcagaatgctacggtgaatacgttcccgggccttgtacacaccgcccgtcacaccatgggagtgggttgcaaaagaagtaggtagcttaaccttcgggagggcgcttaccactttgtgattcatgactggggtg

SEQ ID NO: 1422 - DNA, 1425 bp, Artificial Sequence
  Synthetic polymer
acgctggcggctggcctaaacatgcaagtcgagcggtaacagaaagcagcttgctgctttgctgacgagtggcggacgggtgagtaatgtctgggaaactgcctgatggagggggataactactggaaacggtasctaataccgcataacgtctcaagaccaaggagggggaccttagggcctcttgccatcggatgtgcccagatgggattagctmgtwrgtggggtaacggctcacctaggcgacgatccctagctggtctgacaggatgaccagccacactggaactgagacacggtccagactcctacgggaggcagcagtggggaatattgcacaatgggcgcaagcctgatgcagccatgccgcgtgtatgaagaaggccttcaggttgtaaagtactttcagcggggaggaagggagtaaagttaatacctttgctcattgacgttacccgcataacaagcaccggctaactccgtgcctgcatccgcggtaatacggagggtgcaagcgttaatcggaattactgggcgtaaagcgcacgcaggcggtttgttaagtcagatgtgaaatccccgggctcaacctgtgaactgcatctgatactggcaagcttgagtctcgtagaggggggtagaattccaggtgtagcggtgaaatgcgtagagatctggaggaataccggtggcgaaggcggcaccctgaactaagactgacgctcaggtgcgaaagcgtggggagcaaacaggattagataccctggtagtccacgccgtaaacgatgtcgacttggaggttgtgcccctgaggccgtggcttccggagctaacgcgttaagtcgaccgcctggggagtacggccgcaaggttaaaactcaaatgaattgacgggggcccgcacaagcggtggagcatgtggtttaattcgatgcaacgcgaagaaccttacctggtcttgacatccacggaagttttcagagatgagaatgtgccttcgggaaccgtgagacaggtgctgcatggctgttgtcagctcgtgttgtgaaatgttgggttaagtyccgcaacgagcgcaacccttatcytttgttgccagcggtccggccgggaactcaaaggagactgccagtgataaactggaggaaggtggggatgacgtcaagtcatcatggcccttacgaccagggctacacacgtgctacaatggcgcatacaaagagaagcgacctcgcgagagcaagcggacctcataaagtgsgtcgtagtccggattggagtctgcaactcgactccatgaagtcggaatcgctagtaatcgtggatcagaatgccacggtgaatacgttcccgggccttgtacacaccgcccgtcacaccatgggagtgggttgcaaaagaagtaggtagcttaaccttcgggag

SEQ ID NO: 1423 - DNA, 1502 bp, Artificial Sequence
  Synthetic polymer
tagagtttgatcctggctcagattgaacgctggcggcaggcctaacacatgcaagtcgagcggcagcgggaagtagcttgctactttgccggcgagcggcggacgggtgagtaatgtctgggaaactgcctgatggcgggggataactactggaaacggtagctaataccgcataatgtcttcggaccaaagagggggaccttcgggcctcttgccatcggatgtgcccagatgggattagctggtaggtgaggtaacggctcacctaggcgacgatccctagctggtctgagaggatgaccagccacactggaactgagacacggtccagactcctacgggaggcagcagtggggaatattgcacaatgggcgcaagcctgatgcagccatgccgcgtgtgtgaagaaggccttcgggttgtaaagcactttcagcggggaggaaggggataaggcgaatacccttattcattgacgttaccccgcagaagaagcaccggctaactccgtgccagcagccgcggtaatacggagggtgcaagcgttaatcggaatgactgggcgtaaagcgcacgcaggcggtctgttaagtcagatgtgaaatccccgggcttaacctgggaactgcatttgaaactggcaggctagagtcttgtagaggggggtagaattccaggtgtagcggtgaaatgcgtagagatctggaggaataccggtggcgaaggcggccccctggacaaagactgacgctcaggtgcgaaagcgtggggagcaaacaggattagataccctggtagtccacgctgtaaacgatgtcgatttggaggctgtggtcttgaaccgtggcttccggagctaacgcgttaaatcgaccgcctggggagtacggccgcaaggttaaaactcaaatgaattgacgggggcccgcacaagcggtggagcatgtggtttaattcgatgcaacgcgaagaaccttacctactcttgacatcctcagaagagactggagacagtcttgtgccttcgggaactgagagacaagtgctgcatggctgtcgtcagctcgtgttgtgaaatgttgggttaagtcccgcaacgagcgcaacccttatcctttgttgccagcgatacggtcgggaactcaaaggagactgccggtgataaaccggaggaaggtggggatgacgtcaagtcatcatggcccttacgagtagggctacacacgtgctacaatggcgtatacaaagagaagcgacctcgcgagagcaagcggacctcataaagtacgtcgtagtccggattggagtctgcaactcgactccatgaagtcggaatcgctagtaatcgtagatcagaatgctacggtgaatacgttcccgggccttgtacacaccgcccgtcacaccatgggagtgggttgcaaaagaagtaggtagcttaaccttcgggggggcgcttaccactttgtgattcatgactggggtgaagtcgtaacaaggta

SEQ ID NO: 1424 - DNA, 1418 bp, Artificial Sequence
  Synthetic polymer
  misc_feature (20)..(20): n is a, c, g, or t
  misc_feature (1333)..(1333): n is a, c, g, or t
gtcgagcggcagcggaaagnagcttgctactttgccggcgagcggcggacgggtgagtaatgtctggggatctgcctgatggcgggggataactactggaaacggtagctaataccgcataacgtcgcaagaccaaagtgggggaccttcgggcctcacgccatcagatgaacccagatgggattagctagtaggtggggtaatggctcacctaggcgacgatccctagctggtctgagaggatgaccagccacactggaactgagacacggtccagactcctacgggaggcagcagtggggaatattgcacaatgggggaaaccctgatgcagccatgccgcgtgtgtgaagaaggccttcgggttgtaaagcactttcagcgaggaggaaggcgatagcgttaatagcgctgtcgattgacgttactcgcagaagaagcaccggctaactccgtgccagcagccgcggtaatacggagggtgcaagcgttaatcggaattactgggcgtaaagcgtacgcaggcggtctgttaagtcagatgtgaaatccccgggcttaacctgggaactgcatttgaaactggcaggctagagtcttgtagaggggggtagaattccaggtgtagcggtgaaatgcgtagagatctggaggaataccggtggcgaaggcggccccctggacaaagactgacgctcaggtacgaaagcgtggggagcaaacaggattagataccctggtagtccacgctgtaaacgatgtcgatatgaaggttgtggccttgagccgtggctttcggagctaacgcgtcaaatcgaccgcctggggagtacggccgcaatgtgaaaactcaaatgaattgacgggggcccgcacaagcggtggagcatgtggtttaattcgatgcaacgcgaagaaccttacctactcttgacatccagagaatcgggcagagatgcctgagtgccttcgggaactctgagacaggtgctgcatggctgtcgtcagctcgtgttgtgaaatgttgggttaagtcccgcaacgagcgcaacccttatcctttgttgccagcacgtaatggtgggaactcaaaggagactgccggtgataaaccggaggaaggtggggatgacgtcaagtcatcatggcccttacgagtatggctacacacgtgctacaatggcgcatacaaagagaagcgatctcgcgagagtcagcggacctcataaagtgcgtcgtagtccggataggagtctgcaactcgactccatgaagtctgaatcgctagtaatcgtggatcagaatgccacggtgaatacgttcacgggcctgnacacaccgcccgtcacaccatgggagtgggttgcaaaagaagtaggtagcttaaccttcgggagggcgcttaccactttgtgatt

SEQ ID NO: 1425 - DNA, 1502 bp, Artificial Sequence
  Synthetic polymer
tagagtttgatcatggctcagattgaacgctggcggcaggcctaacacatgcaagtcgaacggtagcacagaggagcttgctccttgggtgacgagtggcggacgggtgagtaatgtctgggaaactgcccgatggagggggataactactggaaacggtagctaataccgcataacgtcgcaagaccaaagagggggaccttcgggcctcttgccatcggatgtgcccagatgggattagctagtaggtggggtaacggctcacctaggcgacgatccctagctggtctgagaggatgaccagccacactggaactgagacacggtccagactcctacgggaggcagcagtggggaatattgcacaatgggcgcaagcctgatgcagccacgccgcgtgtatgaagaaggccttcgggttgtaaagtactttcagcgaggaggaaggcattaaggttaataactttagtgattgacgttactcgcagaagaagcaccggctaactccgtgccagcagccgcggtaatacggagggtgcaagcgttaatcggaattactgggcgtaaagcgcacgcaggcggtctgtcaagtcggatgtgaaatccccgggctcaacctgggaactgcatccgaaactggcaggctagagtctcgtagaggggggtagaattccaggtgtagcggtgaaatgcgtagagatctggaggaataccggtggcgaaagcggccccctggacaaagactgacgctcaggtgcgaaagcgtggggagcaaacaggattagataccctggtagtccacgccgtaaacgatgtcgactagccgttgggatccttgagatcgtagtggcgcagctaacgcattaagtcgaccgcctgggggagtacggccgcaaggttaaaactcaaatgaattaacgggggcccgcacaagcggtggagcatgtggtttaattcgaagcaacgcgaagaaccttacctggccttgacatgctgagaactttccagagatggattggtgccttcgggaactcagacacaggtgctgcatggctgtcgtcagcttgtgtcgtgagatgttgggttaagtcccgtaacgagcgcaacccttgtcctcagttaccagcacttcgggtgggcactttgaggagactgccggtgacaaaccggaggaaggtggggatgacgtcaagtcatcatggcccttacggccagggctacacacgtgctacaatggtcggtacaaagggttgccaagccgcgaggtggagctaatcccataaaaccgatcgtagtccggatcgcagtctgcaactcgactgcgtgaagtcggaatcgctagtaatcgtgaatcagaatgtcacggtgaatacgttcccgggccttgtacacaccgcccgtcacaccatgggagtgggttgcaccagaagtagctagtctaaccttcgggaggacggttaccacggtgtgattcatgactggggtgaagtcgtaacaaggta

SEQ ID NO: 1426 - DNA, 1370 bp, Artificial Sequence
  Synthetic polymer
tgatcctggctcagattgaacgctggcggcaggcctaacacatgcaagtcgaacggtagcacagaagagcttgctccttgggtgacgagtggcggacgggtgagtaatgtctgggaaactgcctgatggagggggataactactggaaacggtagctaataccgcataacgtcgcaagaccaaagtgggggaccttcgggcctcacaccatcggatgtgcccagatgggattagctagtaggtggggtaacggctcacctaggcgacgatccctagctggtctgagaggatgaccagccacactggaactgagacacggtccagactcctacgggaggcagcagtggggaatattgcacaatgggcgcaagcctgatgcagccatgccgcgtgtatgaagaaggccttcgggttgtaaagtactttcagtcaggaggaagggtgtagtcttaatacggctatgcattgacgttactgacagaagaagcaccggctaactccgtgccagcagccgcggtaatacggagggtgcaagcgttaatcggaattactgggcgtaaagcgcacgcaggcggtctgtcaagtcggatgtgaaatccccgggctcaacccgggaactgcattcgaaactggcaggctagagtcttgtagagggggggtagaattccaggtgtagcggtgaaatgcgtagagatctggaggaataccggtggcgaggcggccccctggacaaagactgacgctcaggtgcgaaagcgtggggagcaacaggattagatactctggtagtccacgccgtaaacgatgtcgactggaggttgtgcccctgaggcgtggcttctcggagctaacgcgttaagtcgaccgcctggggagtacggccgcaaggttaaaactcaaatgaattgacgggggcccgcacaagcggtggagcatgtggtttaattcgatgcaacgcgaagaaccttacctactcttgacatccagagaacttagcagagatgctttggtgccttcgggaactctgagacaggtgctgcatggctgtcgtcagctcgtgttgtgaaatgttgggttaagtcccgcaacgagcgcaacccctatcctttgttgccagcgattcggtcgggaactcaaaggagactgccggtgataaaccggaggaaggtggggatgacgtcaagtcatcatggcccttacgagtagggctacacacgtgctacaatggcgcatacaaagagaagcgacctcgcgagagcaagcggacctcataaagtgcgtcgtagtccggattggagtctgcaactcgactccatgaagtcggaatcgctagtaatcgtagatcagaatgctacggtgaatacgttccc

SEQ ID NO: 1427 - DNA, 1446 bp, Artificial Sequence
  Synthetic polymer
gcaggcctaacacatgcaagtcgaacggtaacaggaaacagcttgctgtttcgctgacgagtggcggacgggtgagtaatgtctgggaaactgcctgatggagggggataactactggaaacggtagctaataccgcataacgtcgcaagaccaaagagggggaccttcgggcctcttgccatcggatgtgcccagatgggattagctagtaggtggggtaacggctcacctaggcgacgatccctagctggtctgagaggatgaccagccacactggaactgagacacggtccagactcctacgggaggcagcagtggggaatattgcacaatgggcgcaagcctgatgcagccatgccgcgtgtatgaagaaggccttcgggttgtaaagtactttcagcggggaggaagggagtaaagttaatacctttgctcattgacgttacccgcagaagaagcaccggctaactccgtgccagcagccgcggtaatacggagggtgcaagcgttaatcggaattactgggcgtaaagcgcacgcaggcggtttgttaagtcagatgtgaaatccccgggctcaacctgggaactgcatctgatactggcaagcttgagtctcgtagaggggggtagaattccaggtgtagcggtgaaatgcgtagagatctggaggaataccggtggcgaaggcggccccctggacgaagactgacgctcaggtgcgaaagcgtggggagcaaacaggattagataccctggtagtccacgcggtaaacgatgtcgtcttggaggttgtgcccttgaggcgtggcttccggagctaacgcgttaagtcgaccgcgtggggagtacggcagcaaggttaaaactcaaatgaattgacgggggcccgcgcaagcggtggagcatgtggtttaattagatgcaacgcgaagatcctttcttggtcttgacatccacagaagtgtccagagatggattggtgcgttcgggaactgtgagacaggtgctgcatggctgtcgtcagctcgtgttgtgaaatgttgggttaagtcccgcaacgagcgcaatctttatcctttgttgccagcggtccggccgggaactcaaaggagactgccagtgataaagtggaggaaggtggggatgtcgtctagtcatcatggcccttacgaccagggctacacacgtgctacaatggagcatacaaagagaagcgacctcgagagagcaagcggacctcataaagtgcgtcgtagtcgggattggagtgtgcatctcgactccatgaagtcggaatcgatagtaatcgtggatcagaatgccacggtgaatacgttcccgggctttgtacacaccgcccgtcacaccatgggagtgggttgcaaaagaagtaggtagcttaaccttcgggagggcgcttaccactttgtgattcatgactgg

SEQ ID NO: 1428 - DNA, 1500 bp, Artificial Sequence
  Synthetic polymer
agagtttgatcctggctcagattgaacgctggcggcaggcctaacacatgcaagtcgagcggcagcggaaggaagcttgcttccttgccggcgagcggcggacgggtgagtaatgtctggggatctgcctgatggagggggataaccactggaaacggtggctaataccgcataacctcgaaagagcaaagtgggggaccttcgggcctcatgccatcagatgaacccagatgggattagccagttggtgaggtaacggctcaccaaagcgacgatccctagctggtctgagaggatgaccagccacactggaactgagacacggtccagactcctacgggaggcagcagtggggaatattgcacaatgggcgcaagcctgatgcagccatgccgcgtgtatgaagaaggccttcgggttgtaaagtactttcagcgaggaggaaggcggtaaggttaataaccttgccgattaacgttactcgcagaagaagcaccggctaactccgtgccagcagccgcggtaatacggagggtgcaagcgttaatcggaattactgggcgtaaagcgcacgcaggcggttggttaagtcagatgtgaaatccccgggctcaacccgggaactgcatttgaaactggccagcttgagtctcgtagagggagatagaattccaggtgtagcggtgaaatgcgtagagatctggaggaataccggtggcgaaggcggcctcctggacgaagactgacgctcaggtgcgaaagcgtggggagcaaacaggattagataccctggtagtccacgccgtaaacgatgtctatttggaggctgtgcccttgaggcatggcttccggagctaacgcgttaaatagaccgcctggggagtacggccgcaaggttaaaactcaaatgaattgacgggggcccgcacaagcggtggagcatgtggtttaattcgatgcaacgcgaagaaccttacctggtcttgacatccacggaaggtctcagagatgagactgtgccttcgggaaccgtgagacaggtgctgcatggctgtcgtcagctcgtgttgtgaaatgttgggttaagtcccgcaacgagcgcaacccttatcctttgttgccagcggctcggccgggaactcaaaggagactgccggtgataaaccggaggaaggtggggatgacgtcaagtcatcatggcccttacgaccagggctacacacgtgctacaatggcgcatacaaagagaagcgacctcgcgagagcaagcggacctcataaagtgcgtcgtagtccggattggagtctgcaactcgactccatgaagtcggaatcgctagtaatcgtgaatcagaatgtcacggtgaatacgttcccgggccttgtacacaccgcccgtcacaccatgggagtgggttgcaaaagaagtaggtagcttaaccttcgggagggcgcttaccactttgtgattcatgactggggtgaagtcgtaacaaggta

SEQ ID NO: 1429 - DNA, 1462 bp, Artificial Sequence
  Synthetic polymer
gcctaacacatgcaagtcgtaacaaggtacacaggaagcagcttgctctcggctgacgagtggcggacgggtgagtaatgtctgggcaactgcctgatggagggggataactactggaaacggtagctaataccgcataacgtcttcggaccaaagagggggaccttcgggcctcttgccatcggatgtgcccagatgggattagctagttggtggggtaacggctcaccaaggcgacgatccctagctggtctgacaggatgaccagccacactggaactgagacacggtccagactcctacgggaggcagcagtggggaatattgcacaatgggcgcaagctgatgcagccatgccgcgtgtatgaagaaggccttcgggttgtaaagtactttcagcggggaggaaggggttgtggttaataaccgcagccattgacgttacccgcagaagaagcaccggctaactccgtgccagcagccgcggtaatacggagggtgcaagcgttaatcggaattactgggcgtaaagcgcacgcaggcggcgtgtcaagtcggatgtgaaatccccgggctcaacccgggaactgcattcgaaactggcatgctagagtcttgtagaggggggtagaattccaggtgtagcggtgaaatgcgtagagatctggaggaataccggtggcgaaggcggccccctggacaaagactgacgctcaggtgcgaaagcgtggggagcaaacaggattagataccctggtagtccacgccgtaaacgatgtcgacttggaggttgtgcccttgaggcgtggcttccggagctaacgcgttaagtcgaccgcctggggagtacggccgcaaggttaaaactcaaatgaattgacgggggcccgcacaagcggtggagcatgtggtttaattcgatgcaacgcgaagaaccttacctggtcttgacatccacggaacttggcagagatgccttagtgccttcgggaaccgtgagacaggtgctgcatggctgtcgtcagctcgtgttgtgaaatgttgggttaagtcccgcaacgagcgcaacccttatcctttgttgccagcggtccggccgggaactcaaaggagactgccagtgataaactggaggaaggtggggatgacgtcaagtcatcatggcccttacgaccagggctacacacgtgctacaatggcatatacaaagagaagcgacctcgcgagagcaagcggacctcataaagtatgtcgtagtccggatcggagtctgcaactcgactccgtgaagtcggaatcgctagtaatcgtggatcagaatgccacggtgaatacgttcccgggccttgtacacaccgcccgtcacaccatgggagtgggttgcaaaagaagtaggtagcttaaccttcgggagggcgcttaccactttgtgattcatgactggggtgaagtcgtaacaagg

SEQ ID NO: 1430 - DNA, 1367 bp, Artificial Sequence
  Synthetic polymer
tagagtttgatcttggctcagattgaacgctggcggcaggcctaacacatgcaagtcgaacggtaacagaaagcagcttgctgctttgctgacgagtggcggacgggtgagtaatgtctgggaaactgcctgatggagggggataactactggaaacggtagctaataccgcataacgtcgcaagaccaaagagggggaccttcgggcctcttgccatcggatgtgcccagatgggattagctagtaggtggggtaacggctcacctaggcgacgatccctagctggtctgagaggatgaccagccacactggaactgagacacggtccagactcctacgggaggcagcagtggggaatattgcacaatgggcgcaagcctgatgcagccatgccgcgtgtatgaagaaggccttcgggttgtaaagtactttcagcggggaggaagggagtaaagttaatacctttgctcattgacgttacccgcagaagaagcaccggctaactccgtgccagcagccgcggtaatacggagggtgcaagcgttaatcggaattactgggcgtaaagcgcacgcaggcggtttgttaagtcagatgtgaaatccccgggctcaacctgggaactgcatctgatactggcaagcttgagtctcgtagaggggggtggaattccaggtgtagcggtgaaatgcgtagagatctggaggaataccggtggcgaaggcggccccctggacgaagactgacgctcaggtgcgaaagcgtggggagcaaacagaattagataccctggtagtccacgccgtaaacgcctagaagggaggtttgcccctcaggcgtggcttccggagctaacgcgtttaagttgaccgcctggggagtgcggccgcaaggttaaaactcaaatgaattgacgggggcccgcccaagcggcggagcatgtggtttaattcgatgcaacgcgaagaaccttccctggtcttgacatccacagaactttccagagatggattggtgccttcgggaactgtgagacaggtgctgcatggctgtcgtcagctcgtgttgtgaaatgttgggttaagtcccgcaacgagcgcaacccccatcctttgttgccagcggtccggccgggaactcaaaggagactgccagcgataaactggaggaaggtggggaggacgtcaagtcatcatggcccctacgaccagggctacacacgtgctacaatggcgcatacaaagagaagagacctcgcgagagcaagcggacctcataaagtgcgtcgtagtccggattggagtctgcaactcgactccatgaagtcggaatcgctagtaatcgtggatcagaatgccacggtgaa

SEQ ID NO: 1431 - DNA, 1458 bp, Artificial Sequence
  Synthetic polymer
attgaacgctggcggcaggcctaacacatgcaagtcgagcggatgagaggagcttgctccttgattcagcggcggacgggtgagtaatgcctaggaatctgcctggtagtgggggataacgttccgaaaggaacgctaataccgcatacgtcctacgggagaaagcaggggaccttcgggccttgcgctatcagatgagcctaggtcggattagctagttggtggggtaacggctcacctaggcgacgatccctagctggtctgagaggatgaccagccacactggaactgagacacggtccagactcctacgggaggcagcagtggggaatattgcacaatgggcgcaagcctgatgcagccatgccgcgtgtgtgaagaaggccttcgggttgtaaagcactttcagcggggaggaaggcgataaggttaataaccttgtcgattgacgttacccgcagaagaagcaccggctaactccgtgccagcagccgcggtaatacggagggtgcaagcgttaatcggaattactgggcgtaaagcgcacgcaggcggtctgtcaagtcggatgtgaaatccccgggctcaacctgggaactgcattcgaaactggcaggctagagtcttgtagaggggggtagaattccaggtgtagcggtgaaatgcgtagagatctggaggaataccggtggcgaaggcggccccctggacaaagactgacgctcaggtgcgaaagcgtggggagcaaacaggattagataccctggtagtccacgctgtaaacgatgtcgatttggaggttgtgcccttgaggcgtggcttccggagctaacgcgttaaatcgaccgcctggggagtacggccgcaaggttaaaactcaaatgaattgacgggggcccgcacaagcggtggagcatgtggtttaattcgatgcaacgcgaagaaccttacctggtcttgacatccacagaacttagcagagatgctttggtgccttcgggaactgtgagacaggtgctgcatggctgtcgtcagctcgtgttgtgaaatgttgggttaagtcccgcaacgagcgcaacccttatcctttgttgccagcggttaggccgggaactcaaaggagactgccagtgataaactggaggaaggtggggatgacgtcaagtcatcatggcccttacgaccagggctacacacgtgctacaatggcatatacaaagagaagcgacctcgcgagagcaagcggacctcataaagtatgtcgtagtccggattggagtctgcaactcgactccatgaagtcgggatcgctagtaatcgtagatcagaatgctacggtgaatacgttcccgggccttgtacacaccgcccgtcacaccatgggagtgggttgcaaaagaagtaggtagcttaaccttcgggagggcgcttaccactttgtgattcatgactggggtg

SEQ ID NO: 1432 - DNA, 1393 bp, Artificial Sequence
  Synthetic polymer
gtcgagcggtagcacagaagagcttgctcttcgggtgacgagcggcggacgggtgagtaatgtctgggaaactgcctgatggagggggataactactggaaacggtagctaataccgcataacgtcttcggaccaaagagggggaccttcgggcctcttgccatcagatgtgcccagatgggattagctagtaggtgaggtaatggctcacctaggcgacgatccctagctggtctgagaggatgaccagccacactggaactgagatcacggtccagactcctacgggaggcagcagtggggtaatattggcacaatgggcgcaagcctgatgcaagccatgccgcgtgtgtgaagaaggccttcgggttgtaaagcactttcagcggggaggaatggcggtgagattaatactctcaccgattgacgttacccagcagaagaagcaccggctaactccgtgccagcagccgcggtaatacggagggtgcaagcgttaatcggaatgactgggcgtaaagcgcacgcaggcggtttgttaagtcagatgtgaaatccccgagcttaacttgggaactgcatttgaaactggcaagctagagtcttgtagaggggggtagaattccaggtgtagcggtgaaatgcgtagagatctggaggaataccggtggcgaaggcggccccctggacaaagactgacgctcaggtgcgaaagcgtggggagcaaacaggattagataccctggtagtccacgctgtaaacgatgtcgatttggaggttgtgcccttgaggcgtggcttccggagctaacgcgttaaatcgaccgcctggggagtacggccgcaaggttaaaactcaaatgaattgacgggggcccgcacaagcggtggagcatgtggtttaattcgatgcaacgcgaagaaccttacctactcttgacatccacagaattcggtagagatacctttagtgcctttcgggaactgtgagacaggtgcttgcattggctgtcgtcagctcgtgttgtgaaatgttgggattaagttcccgcaacgaagcgcaacccttatcctttgttgccagccggttcggccgggaactccaaagagagactgccagtgaataaactggaggaaggtggggatgacgtcaagtcatcatggcccttacgagtagggctacacacgtgctacaatggcgtatacaaagagaagcgacctcgcgagagcaagcggacctcataaagtacgtcgtagtccggattggagtctgcaactcgactccatgaagtcggaatcgctagtaatcgtagatcagaatgctacggtgaatacgttcccgggccttgtacacaccgcccgtcacaccatgggagtgggttgcaaaagaagt

SEQ ID NO: 1433 - DNA, 1498 bp, Artificial Sequence
  Synthetic polymer
tgatcctggctcagattgaacgctggcggcaggcctaacacatgcaagtcgagcggcagcgggaggaagcttgcttcctcgccggcgagcggcggacgggtgagtaatgtctgggaaactgcccgacggagggggataactactggaaacggtagctaataccgcacaacgtctacggaccaaagtgggggaccttcgggcctcacaccatcggatgtgcccagatgggattagctggtaggtggggtaatggctcacctaggcgacgatccctagctggtctgagaggatgaccagccacactggaactgagacacggtccagactcctacgggaggcagcagtggggaatattgcacaatgggcgcaagcctgatgcagccatgccgcgtgtgtgaagaaggccttcgggttgtaaagcactttcagcgaggaggaaggcgttgtagttaatagctgcagcgattgacgttacccgcagaagaagcaccggctaactccgtgccagcagccgcggtaatacggagggtgcaagcgttaatcggaattactgggcgtaaagcgcacgcaggcggtctgttaagtcagatgtgaaatccccgggcttaacctgggaactgcatttgaaactggcaggctagagtctcgtagaggggggtagaattccaggtgtagcggtgaaatgcgtagagatctggaggaataccggtggcgaaaggcggccccctggacaaagactgacgctcaggtgcgaaagcgtggggagcaaacaggattagataccctggtagtccacgctgtaaacgatgtcgacttggaggttgttcccctgaggagtggcttccggagctaacgcgttaagtcgaccgcctggggagtacggccgcaaggttaaaactcaaatgaattgacgggggcccgcacaagcggtggagcatgtggtttaatccgatgcaacgcgaagaaccttacctactcttgacatccacggaacttagcagagatgctttggtgccttcgggaaccgtgagacaggtgctgcatggctgtcgtcagctcgtgttgtgaaatgttgggttaagtcccgcaacgagcgcaacccttgtcctttgttgccagcgattcggtcgggaactcaaaggagactgccagtgataaactggaggaaggtggggatgacgtcaagtcatcatggcccttacgagtagggctacacacgtgctacaatggcatatacaaagagaagcgacctcgcgagagcaagcggacctcataaagtatgtcgtagtccggattggagtctgcaactcgactccatgaagtcggaatcgctagtaatcgtggatcagaatgccacggtgaatacgttcccgggccttgtacacaccgcccgtcacaccatgggagtgggttgcaaaagaagtaggtagcttaaccttcgggagggcgcttaccactttgtgattcatgactggggtgaagtcgtaacaaggtagcc

SEQ ID NO: 1434 - DNA, 1432 bp, Artificial Sequence; identical to SEQ ID NO: 86
  Synthetic polymer

SEQ ID NO: 1435 - DNA, 1465 bp, Artificial Sequence
  Synthetic polymer
ttgatccggaattagattggacggtggggccgggcttacacatgcaattggagcggttgctcacaggagcttctccttgggtgacgtgcggtggacgggtgagtaagttttggaaactgcccgacggagggggaacactcctggaaacgggtggctaatactgcataacgtcgcaaaaccaaaggagggggaccttcgggcctcttgccatgtgatgtgcccagatgtgatttgctagtaggtggggtaacggctcacctaggcgacgatccatagcttgtccgagaggatgaccagccacactcgaaatgagacactgtccagactcctacgggaggcagcagtggggaatattgcacaatgggcgcaagcctgatgcagccattccgggtgtacgaagaaggccttcgggttgtaaagtactttcatcgaggaggaaggtgttttggttaataaccgcagcaattgacgttcctcgcagaagaagcaccggctaactccgtgccagcagccgcggtaatacggagggtgcaagcgtttatcggaattactgggcgtaaagcgcacgcaggcggtctgtcaagtcggatgtgaaatccccgggctcaacctgggaactgcatccgaaactggcaggctagagtcttgtagaggggggtagaattcaggtgtagcggtgaaatgcgtagagatctggaggaataccggtggcgaaggcggccccctggacaaagactgacgctcaggtgcgaaagcgtggggagcaaacaggattagataccctggtagtccacgccgtaaacgatgtcgacttggaggttgtgcccttgaggcgtggcttccggagctaacgcgttaagttgaccgcctggggagtacggccgcaaggttaaaactcaaatgaattgacgggggcccgcacaagcggtggagcatgtggtttaattcgatgcaacgcgaagaaccttacttactcttgacattccacggaacttggcagagatgccttggtgccttcgggaaccgtgagacaggtgctgcatggctgtcgtcagttcgtgttgtgaaatgttgggttaagtcccgcaacgagcgcaacccttatcctttgttgccagcggttaggccgggaactcaaaggagactgccagtgataaactggaggaaggtagggatgacgtcaagccatcatggccctttcgagtagggctacacacgtggtacaatggcatatacaaagagaagcgacctcgcgagagcaagcggacctcataaagtatgttgtagtccggattggagtctgcaacttgactccatgaagtcggaatcgctagtaattgtggatcagaatgccacggtgaatacgttcccgggccttgtacacaccgcccgtcacaccatgggagtgggttgcaaaagaagtaggtagcttaaccttcgggagggcgcttaccactttgtgatt

SEQ ID NO: 1436 - DNA, 1466 bp, Artificial Sequence
  Synthetic polymer
agtgaacgctggcggtaggcctaacacatgcaagtcgaacggcagcacaggagagcttgctctctgggtggcgagtggcggacgggtgaggaatacatcggaatctactctatcgtgggggataacgtagggaaacttacgctaataccgcatacgacctacgggtgaaagcaggggaccttcgggccttgcgcgattgaatgagccgatgtcggattagctagttggcggggtaaaggcccaccaaggcgacgatccgtagctggtctgagaggatgatcagccacactggaactgagacacggtccagactcctacgggaggcagcagtggggaatattggacaatgggcgcaagcctgatccagccataccgcgtgggtgaagaaggccttcgggttgtaaagcccttttgttgggaaagaaatccagccggctaatacctggttgggatgacggtacccaaagaataagcaccggctaacttcgtgccagcagccgcggtaatacgaagggtgcaagcgttaatcggaattactgggcgtaaagcgcacgcaggcggtctgtcaagtcggatgtgaaatccccgggctcaacctgggaactgcattcgaaactggcaggctagagtcttgtagaggggggtagaattccaggtgtagcggtgaaatgcgtagagatctggaggaataccggtggcgaaggcggccccctggacaaagactgacgctcaggcgcgaaagcgtggggagcaaacaggattagataccctggtagtccacgccgtaaacgatgtcgacttggaggttgtgcccttgaggcgtggcttccggagctaacgcgttaagtcgaccgcctggggagtacggccgcaaggttaaaactcaaatgaattgacgggggcccgcacaagcggtggagtatgtggtttaattcgatgcaacgcgaagaaccttacctggccttgacatgtcgagaactttccagagatggatgggtgccttcgggaactcgaacacaggtgctgcatggctgtcgtcagctcgtgtcgtgagatgttgggttaagtcccgcaacgagcgcaacccttgtccttagttgccagcacgtaatggtgggaactctaaggagaccgccggtgacaaaccggaggaaggtggggatgacgtcaagtcatcatggcccttacggccagggctacacacgtactacaatggtagggacagagggctgcaagccggcgacggtaagccaatcccagaaaccctatctcagtccggattggagtctgcaactcgactccatgaagtcggaatcgctagtaatcgcagatcagcattgctgcggtgaatacgttcccgggccttgtacacaccgcccgtcacaccatgggagtttgttgcaccagaagcaggtagcttaaccttcgggagggcgcttgccacggtgtggccgatgactggggtg

SEQ ID NO: 1437 - DNA, 1467 bp, Artificial Sequence
  Synthetic polymer
agattgaaccctttcggcaggcctaacacatgcaagtcgaacggtaacagaaagctttcttgctgctttgctgacgagtggcggacgggtgagtaatgtctgggaaactgcctgatggagggggataactactgtaaacggtagctaataccgcataacgtcgcaagaccaaagagggggaccttcgggcctcttgccatcggatgtgcccagatgggattaccttgttggtggggtaacggctcaccacggcgacaatccctagctggtctgagaggatgaccagccacactggaactgagacacggtccagactcctaccggaggcaacagtggggaatattgcacaatgggcgcaagcctgatgcaaccctgccgcgtgtatgaaaaaagccttcggcttgtaaagtactttcaccgttaaggaaggaagtaaagttaatacctttgctcattgactttacccgcagaagaagcaccggctaactccgtgccagcagccgcggtaatacggaggatgcaagcgttaatcggaattactgggcgtaaagcgcacgcaggcggattgttaagtcagatgtgaaatccccgggctcaacctgagaactgcatctgatactggcaagcttgagtctcgtagaggggggtagaattccaggtgtagcggtgaaatgcgtagagatctggaggaataccggtggcgaaggcggccccctggacgaagactgacgctcaggtgcgaaagcgtggggagcaaacaggattagataccctggtagtgcacgccgtaaacgatgtcgacttggaggttgtgcccttgaggcgtggcttccggaactaacgcgttaagtcgaccgcctggggagtacggccgcaaggttaaaactcaaatgaattgacgggggcccgcacaagcggtggagcatgtggtttaattcgatgcaacgcgaagaaccttacctggtcttgacatccacggaagttttcagagatgagaatgtgccttcgggaaccgtgagacaggtgctgcatggctgtcgtcagctcgtgttgtgaaatgttgggttaagtcccgcaacgagcgcaacccttatcctttgttgccagcggtccggccgggaactcaaaggagtctgccagtgataaactggaggaaggtggggatgacgtcaagtcatcatggtccttacgaccagggctacacacgtgctacaatggcgcatacaaagagaagcgacctcgcgagagcaagcggacctcataaagtgcgtcgtagtccggattggagtctgcaactcgactccatgaagtcggaatcgctagtaatcgtggatcagaatgtcacggtgaatacgttgccgggccttgtacacaccgcccgtcacaccacgagagttggttgcacctgaagtagcaggcctaaccgtaaggagggatgctccgagggtgtgattagcgattggggtg

SEQ ID NO: 1438 - DNA, 1486 bp, Artificial Sequence; identical to SEQ ID NO: 71
  Synthetic polymer

SEQ ID NO: 1439 - DNA, 1416 bp, Artificial Sequence
  Synthetic polymer
catgcaagtcgaacggcagcacagaagagcttgctctttgggtggcgagtggcggacgggtgagtaatgtctgggaaactgcccgatggagggggataactactggaaacggtagctaataccgcataacgtcgcaagaccaaagtgggggaccttcgggcctcacaccatcggatgtgcccagatgggattagctagtaggtggggtaacggctcacctaggcgacgatccctagctggtctgagaggatgaccagccacactggaactgagacacggtccagactcctacgggaggcagcagtggggaatattgcacaatgggcgcaagcctgatgcagccatgccgcgtgtatgaaaaaggccttcgggttgtaaagtaccttcagcggggaggaaggcgatgcggttaataaccgggtcgattgacgttacccgcagaagaagcaccggctaactccgtgccagcagccgcggtaatacggagggtgcaagcgttaatcggaattactgggcgtaaagcgcacgcaggcggtctgtcaagtcggatgtgaaatccccgggcttaacctgggaactgcattcaaaactggcaggctagagtcttgtagaggggggtagaattcccaggtgtagcggtgaaatgcgtagagatctggaggaataccggtggcgaaggcggctccctggacaaagactgacgctcaggtgcgaaagcgtggggagcaaacaggattagataccctggtagtccacgccgtaaacgatgtcgacttggaggctgttcccttgaggagtggcttccggagctaacgcgttaagtcgaccgcctggggagtacggccgcaaggttaaaactcaaatgaattgacgggggcccgcacaagcggtggagcatgtggtttaattcgatgcaacgcgaagaaccttacctactcttgacatccacggaattcggcagagatgccttagtgccttcgggaaccgtgagacaggtgctgcatggctgtcgtcagctcgtgttgtgaaatgttgggttaagtcccgcaacgagcgcaacccttatcctttgttgccagcgattcggtcgggaactcaaaggagactgccggtgataaaccggaggaaggcggggatgacgtcaagtcatcatggcccttacgagtagggctacacacgtgctacaatggcgcatacaaagagaagcgacctcgcaagagcaagcggaccccataaagtgcgtcgtagtccggatcggagtctgcaactcgactccgtggagtcggaatcgctagtaatcgtggatcagaatgccacggtgaatacgttcccgggccttgtacacaccgcccgtcacaccatgggagtgggttgcaaaagaagtaggtagcttaaccttcgggagggcgcttacca

SEQ ID NO: 1440 - DNA, 1392 bp, Artificial Sequence
  Synthetic polymer
catgcaagtcgagcggcagcacgggggaagcttgcttccccgccggcgagcggcggacgggtgagtaatgtctggggatctgcctgatggagggggataactactggaaacggtagctaataccgcataacgtcgcaagaccacagtgggaacctttcggctcacgcaatcgagaatccagtggatagctatggtggggtaaacgctcacttagcgacgattctaagctggtcgagaggatgacagcacactgactgagacacggtcagatcctacggaggcagcagtggggattatgcacatggggaaacctgatgcaggccatgccgcgtgttggaagaaggcttcgggttgtaaagcactttcagcggggaggaaggcggtaaggttaataacttatcgattgacgttacccgcagaagaagcaccgggctaactccgtgccagcagccgcggtaatacggagggtgcaagcgttaatcggaatgactgggcgtaaagcgcacgcaggcggtctgttaagttggatgtgaaatccccgggcttaacctgggaactgcattcaaaactgacaggctagagtctcgtagaggggggtagaattccaggtgtagcggtgaaatgcgtagagatctggaggaataccggtggcgaaggcggccccctggacgaagactgacgctcaggtgcgaaagcgtggggagcaaacaggattagataccctggtagtccacgctgtaaacgatgtcgatttggaggttgtgcccttgaggcgtggcttccggagctaacgcgttaaatcgaccgcctggggagtacggccgcaaggttaaaactcaaatgaattgacgggggcccgcacaagcggtggagcatgtggtttaattcgatgcaacgcgaagaaccttacctactcttgacatccagcgaagactgcagagatgcggtcgtgccttcgggaacgctgagacaggtgctgcatggctgtcgtcagctcgtgttgtgaaatgttgggttaagtcccgcaacgagcgcaacccttatcctctgttgccagcactacgggtgggaactcaggggagactgccggtgataaaccggaggaaggtggggatgacgtcaagtcatcatggcccttacgagtagggctacacacgtgctacaatggcgtatacaaagagaagcgacctcgcgagagcaagcggacctcataaagtacgtcgtagtccggattggagtctgcaactcgactccatgaagtcggaatcgctagtaatcgtagatcagaatgctacggtgaatacgttcccgggccttgtacacaccgcccgtcacaccatgggagtgggttgcaaaagaagtaggtagcttaaccttcgggagggcgctacc

SEQ ID NO: 1441 - DNA, 1456 bp, Artificial Sequence
  Synthetic polymer
cggcaggcctaacacatgcaagtcgagcggtaacacttaggagcttgctccttgtgtgacgagaggcggacaggtgagtaatgcctggggatctgccccatagagggggatatctccggtaaactgtacctcataccccataacctccccagaccggaatgggggctctcctcacctcttgctctcttatgaacccccgtgggattttctctgtggggaggtgatggctcaccccggcgacaatctctctctgggttgagagaatgacctctcacactgtaactgagacacgctccccactcctacgggaggcgccactggggaatattgcacaatgggcgcaagcctgatgcagccatgccgcgtgtgtgaagaaggccttcgggttgtaaagcactttcagcggggaggaagggtcagtagttaatatctagtggcattgacgttactcgcagaagaagcaccggctaactccgtgccagcagccgcggtaatacggagggtgcaagcgttaatcggaattactgggcgtaaagcgcacgcaggcggtttgttaagtcagatgtgaaatccccgagctcaacttgggaactgcatttgaaactgtcaagctagagtcttgtagaggggggtagaattccaggtgtagcggtgaaatgcgtagagatctggaggaataccggtggcgaaggcggccccctggacaaagactgacgctcaggtgcgaaagcgtggggagcaaacaggattagataccctggtagtccacgccgtaatcgatgtcgaagggaggttgtgcccttgaggcgtggcttcgggagttaacgcgttaattcgcccgcttggggagtaggccggcaaggttaaaattcaaatgaattgacgggggccggcacaagcggtggagcatgtggtttaattggatgcaacgggaagacctttacttactcttgacattcagagatctttccagagatggattggtcctttggggatctgtgagacaggtgtggcatggctgtgttcagttggttttgtgaaatgttgggttaattcccgcaaggagcgcaacccttttcttttgttgccagagattcggtcgggaactcaaaggagactgccggtgataaaccggaggaaggtggggatgacgtcaagtcatcatggcccttacgagtagggctacacacgtgctacaatggcatatacaaagggcggcaagctagcgatagtgagcgaatcccataaagtatgtcgtagtccggattggagtctgcaactcgactccatgaagtcggaatcgctagtaatcgcggatcagaatgccgcggtgaatacgttcccgggccttgtacacaccgcccgtcacaccatgggagtgggttgcaaaagaagtaggtagcttaaccttcgggagggcgcttaccactttgtgattcatgactggggtgaagtc

SEQ ID NO: 1442 - DNA, 1498 bp, Artificial Sequence
  Synthetic polymer
tagagtttgatcatggctcagattgaacgctggcggcaggcctaacacatgcaagtcgagcggcagcgggaggaagcttgcttcctcgccggcgagcggcggacgggtgagtaatgtctgggaaactgcccgatggagggggataactactggaaacggtagctaataccgcataacgtctacggaccaaagtgggggaccttcgggcctcacaccatcggatgtgcccagatgggattagctggtaggtggggtaatggctcacctaggcgacgatccctagctggtctgagaggatgaccagccacactggaactgagacacggtccagactcctacgggaggcagcagtggggaatattgcacaatgggcgcaagcctgatgcagccatgccgcgtgtatgaagaaggccttcgggttgtaaagtactttcagcggggaggaaggtgttgtggttaataaccacagcaattgacgttacccgcagaagaagcaccggctaactccgtgccagcagccgcggtaatacggagggtgcaagcgttaatcggaattactgggcgtaaagcgcacgcaggcggtctgttaagtcagatgtgaaatccccgggctcaacctgggaactgcatctgatactggcaggcttgagtctcgtagaggggggtagaattccaggtgtagcggtgaaatgcgtagagatctggaggaataccggtggcgaaagcggccccctggacgaagactgacgctcaggtgcgaaagcgtggggagcaaacaggattagataccctggtagtccacgccgtaaacgatgtcgacttggaggttgtgcccttgaggcgtggcttccggagctaacgcgttaagtcgaccgcctggggagtacggccgcaaggttaaaactcaaatgaattgacgggggcccgcacaagcggtggagcatgtggtttaattcgatgcaacgcgaagaaccttacctggtcttgacatccacggaaggtctcagagatgagactgtgccttcgggagccgtgagacaggtgctgcatggctgtcgtcagctcgtgttgtgaaatgttgggttaagtcccgcaacgagcgcaacccttatcctttgttgccagcggttaggccgggaactcaaaggagactgccagtgataaactggaggaaggtggggatgacgtcaagtcatcatggcccttacgaccagggctacacacgtgctacaatggcatatacaaagagaagcgacctcgcgagagcaagcggacctcataaagtatgtcgtagtccggattggagtctgcaactcgactccatgaagtcggaatcgctagtaatcgtggatcagaatgccacggtgaatacgttcccgggccttgtacacaccgcccgtcacaccatgggagtgggttgcaaaagaagtaggtagcttaaccttcgggagggcgcttaccactttgtgattcatgactggggtgaagtcgtaacaag

SEQ ID NO: 1443 - DNA, 1465 bp, Artificial Sequence
  Synthetic polymer
gatgaacgctggcggcaggcctaacacatgcaagtcgagcggtagcacaagagagcttgctctctgggtgacgagcggcggacgggtgagtaatgtctgggaaactgcctgatggagggggataactactggaaacggtagctaataccgcataacgtctacggaccaaagtgggggaccttcgggcttcacgccatcggatgtgcccagatgggattagctagtaggtggggtaatggctcacctaggcgacgatccctagctggtctgagaggatgaccagccacactggaactgagacacggtccagactcctacgggaggcagcagtggggaatattgcacaatgggcgcaagcctgatgcagccatgccgcgtgtgtgaagaaggccttcgggttgtaaagcactttcagcgaggaggaaggcagtcgtgttaatagcacgattgattgacgttactcgcagaagaagcaccggctaactccgtgccagcagccgcggtaatacggagggtgcaagcgttaatcggaattactgggcgtaaagcgcacgcaggcggtttgttaagtcagatgtgaaatccccgcgcttaacgtgggaactgcatttgaaactggcaagctagagtcttgtagaggggggtagaattccaggtgtagcggtgaaatgcgtagagatctggaggaataccggtggcgaaggcggccccctggacaaagactgacgctcaggtgcgaaagcgtggggagcaaacaggattagataccctggtagtccacgctgtaaacgatgtcgacttggaggttgtgcccttgaggcgtggcttccggagctaacgcgttaagtcgaccgcctggggagtacggccgcaaggttaaaactcaaatgaattgacgggggcccgcataagcggtggagcatgtggtttaattcgatgcaacgcgaagaaccttacctactcttgacatccacggaatttagcagagatgctttagtgccttcgggaaccgtgagacaggtgctgcatggctgtcgtcagctcgtgttgtgaaatgttgggttaagtcccgcaacgagcgcaacccttatcctttgttgccagcacgtaatggtgggaactcaagggagactgccggtgacaaaccggaggaaggtggggatgacgtcaagtcatcatggcccttacgagtagggctacacacgtgctacaatggcagatacaaagtgaagcgaactcgcgagagcgagcggaccacataaagtctgtcgtagtccggattggagtctgcaactcgactccatgaagtcggaatcgctagtaatcgtagatcagaatgctacggtgaatacgttcccgggccttgtacacaccgcccgtcacaccatgggagtgggttgcaaaagaagtaggtagcttaaccttcgggagggcgcttaccactttgtgattcatgactggggtg

SEQ ID NO: 1444 - DNA, 1482 bp, Artificial Sequence
  Synthetic polymer
ggcggcaggcctaacacatgcaagtcgagcggcagcggggggaagcttgcttccccgccggcgagcggcggacgggtgagtaatgtctggggatctgcctgatggagggggataactactggaaacggtagctaataccgcataacgtcgcaagaccaaagtgggggaccttcgggcctcacgccatcggatgaacccagatgggattagctggtaggtgaggtaatggctcacctaggcgacgatccctagctggtctgagaggatgaccagccacactggaactgagacacggtccagactcctacgggaggcagcagtggggaatattgcacaatgggggaaaccctgatgcagccatgccgcgtgtatgaagaaggccttcgggttgtaaagtactttcagcggggaggaaggggagcactttaatagagtgtttcattgacgttacccgcagaagaagcaccggctaactccgtgccagcagccgcggtaatacggagggtgcaagcgttaatcggaatgactgggcgtaaagcgcacgcaggcggtctgttaagttggatgtgaaatccccgggcttaacctgggaactgcattcaaaactgacagactagagtctcgtagaggggggtagaattccaggtgtagcggtgaaatgcgtagagatctggaggaataccggtggcgaaggcggccccctggacgaagactgacgctcaggtgcgaaagcgtggggagcaaacaggattagataccctggtagtccacgctgtaaacgatgtcgacttgaaggttgtggccttgagccgtggctttcggagctaacgcgttaagtcgaccgcctggggagtacggccgcaaggttaaaactcaaatgaattgacgggggcccgcacaagcggtggagcatgtggtttaattcgatgcaacgcgaagaaccttacctactcttgacatcctcagaagactgcagagatgcggttgtgccttcgggaactgagagacaggtgctgcatggctgtcgtcagctcgtgttgtgaaatgttgggttaagtcccgcaacgagcgcaacccttatcctttgttgccagcgcgtaatggcgggaactcaagggagactgccggtgataaaccggaggaaggtggggatgacgtcaagtcatcatggcccttacgagtagggctacacacgtgctacaatggcgcatacaaagagaagcgaactcgcgagagcaagcggacctcataaagtgcgtcgtagtccggattggagtctgcaactcgactccatgaagtcggaatcgctagtaatcgtagatcagaatgctacggtgaatacgttcccgggccttgtacacaccgcccgtcacaccatgggagtgggttgcaaaagaagtaggtagcttaaccttcgggagggcgcttaccactttgtgattcatgactggggtgaagtcgtaacaaggtaaccgcagggga

SEQ ID NO: 1445 - DNA, 1448 bp, Artificial Sequence
  Synthetic polymer
cgctggcggcaggcctaacacatgcaagtcgagcggtagcacagagagcttgctctcgggtgacgagcggcggacgggtgagtaatgtctgggaaactgcctgatggaggggggtaactactggaaacggtagctaataccgcataatgtcgcaagaccaaagtgggggaccttcgggcctcatgccatcagatgtgcccagatgggattagctagtaggtggggtaacggctcacctaggcgacgatccctagctggtctgagaggatgaccagccacactggaactgagacacggtccagactcctacgggaggcagcagtggggaatattgcacaatgggcgcaagcctgatgcagccatgccgcgtgtgtgaagaaggccttcgggttgtaaagcactttcagcggggaggaaggcgataaggttaataaccttgtcgattgacgttacccgcagaagaagcaccggctaactccgtgccagcagccgcggtaatacggagggtgcaagcgttaatcggaattactgggcgtaaagcgcacgcaggcggtctgtcaagtcggatgtgaaatccccgagctcaacctgggaactgcattcgaaactggcaggctagagtcttgtagaggggggtagaattccaggtgtagcggtgaaatgcgtagagatctggaggaataccggtggcgaaggcggccccctggacaaagactgacgctcaggtgcgaaagcgtggggagcaaacaggattagataccctggtagtccacgccgtaaacgatgtcgatttggaggttcatgcccttgaggcgtggcttccgggagctaacgcttcaaatcgaccgcttggggggttcggccgcaaggtttaaactcaaatgaattggcggggggccccgacaagcggtggagcattgtgggtttaatttgattcaatgggaagaacgttagctggttttgtcatccacagatctttgcagagatggattggtgccttcgggaactgtgagacaggtgctgcatggctgtcgtcagctcgcgttgtgaaatgttgggttaagtcccgcaacgagcgcaatccttatcctttgttgccagcggtccggccgggaactcaaaggagattgccagtgataaattggaggaaggtggggatgacgtcaagtcatcatggcccttatgaccagggctacacacgtgctacaatggcatatacaaagagaagcgacctcgcgagagcaagcggacctcataaagtatgtcgtagtccggattggagtctgcaactcgactccatgaagtcggaatcgctagtaatcgtagatcagaatgctacggtgaatacgttctcgggccttgtacacaccgcccgtcacaccatgggagtgggttgcaaaagaagtaggtagtttaaccttcgggagggcgcttaccactttgtgact

SEQ ID NO: 1446 - DNA, 1399 bp, Artificial Sequence
  Synthetic polymer
agagtttgatcctggctcagattgaacgctggcggcaggcctaacacatgcaagtcgaacggtaacaggaagaagcttgcttctttgctgacgagtggcggacgggtgagtaatgtctgggaaactgcctgatggagggggataactactggaaacggtagctaataccgcataacgtcgcaagaccaaagagggggaccttcgggcctcttgccatcggatgtgcccagatgggattagcttgttggtggggtaacggctcaccaaggcgacgatccctagctggtctgagaggatgaccagccacactggaactgagacacggtccagactcctacgggaggcagcagtggggaatattgcacaatgggcgcaagcctgatgcagctatgccgcgtgtatgaagaaggccttcgggttgtaaagtactttcagcggggaggaagggagtaaagttaatacctttgctcattgacgttacccgcagaagaagcaccggctaactccgtgccagcagccgcggtaatacggagggtgcaagcgttaatcggaattactgggcgtaaagcgcacgcaggcggtttgttaagtcagatgtgaaatccccgggctcaacctgggaactgcatctgatactggcaagcttgagtctcgtagaggggggtagaattccaggtgtagcggtgaaatgcgtagagatctggaggaataccggtggcgaaggcggccccctggacgaagactgacgctcaggtgcgaaagcgtggggagcaaacaggattagataccctggtagtccacgccgtaaacgatgtcgaattggaggttgtgcccttgaggcgtggcttccggagctaacgggttaattggcccgccgggggagtacggccgcaaggttaaaactcaaagaaatgaggggggcccgcccaagcggggggagcatggggtttatttcgatgcaacgcgaggaacctacctggtcttgcatcccacggaagtttcagagatgagaaggtgcttcggggaaccgtgagacaggtgctgcatggctgtcgtcagctcgtgttgtgaaatgttgggttaagtcccgcaacgagcgcaacccttatcctttgttgccagcggtccggccgggaactcaaaggagactgccagtgataaactggaggaaggtggggatgacgtcaagtcatcatggcccttacgaccagggctacacacgtgctacaatggcgcatacaaagagaagcgacctcgcgagagcaagcggacctcataaagtgcgtcgtagtccggattggagtctgcaactcgactccatgaagtcggaatcgctagtaatcgtggatcagaatgccacggtgaatacgtacccgggccttgcacacaccgcccgtca

SEQ ID NO: 1447 - DNA, 1393 bp, Artificial Sequence; identical to SEQ ID NO: 866
  Synthetic polymer

SEQ ID NO: 1448 - DNA, 1363 bp, Artificial Sequence
  Synthetic polymer
attgaacgctggcggcaggcctaacacatgcaagtcgaacggtagcacagaagagcgtgctctttgggtgacgagtggcggacgggtgagtaatgtctgggaaactgcctgatggcgggggataaccactggaaacggtggctaataccgcataatctcgcaagagcaaagagggggaccttatggcctcttgccatcggatgtgcccagatgggattagctggcaggtagggtaacggcctacctgggcgacgatccctagctggtctgagaggatgaccagccacactggaactgagacacggtccagactcctacgggaggcagcagtggggaatattgcacaatgggcgcaagcctgatgcagccatgccgcgtgtatgaagaaggccttcgggttgtaaagtactttcagcggggaggaagggacgctggttaataaccagcggcattgacgttacccgcagaagaagcaccggctaactccgtgccagcagccgcggtaatacggagggtgcaagcgttaatcggaattactgggcgtaaagcgcacgcaggcggtctgttaagtcagatgtgaaatccccgggcttaacctgggaactgcatttgaaactggcaggctggagtcttgtagaggggggtggaattccaggtgtagcggtgaaatgcgtagagatctggaggaataccggtggcgaaggcggccccctggacaaagactgacgctcatgtgcgaaagcgtggggagcaaacaggattagataccctggtagtccacgctgtaaacgatgtcgatttggaggttgtgcccttgaggtgtggcttccgtagctaacgcgttaaatcgaccgcctggggagtacggccgcaaggttaaaactcaaatgaattgacgggggcccgcacaagcggtggagcatgtggtttaattcgatgcaacgcgaagaaccttacctggccttgacatccacagaacttagcagagatgctttggtgccttcgggagctgtgagacaggtgctgcatggctgtcgtcagctcgtgttgtgaaatgttgggttaagtcccgcaacgagcgcaacccttatcctttgttgccagcgatttggtcgggaactcaaaggagactgccggtgataaaccggaggaaggtggggatgacgtcaagtcatcatggcccttacggccagggctacacacgtgctacaatggcgcatacaaagagaagcgacctcgcgagagcatgcggacctcataaagtgcgtcgtagtccggatcggagtctgcaactcgactccgtgaagtcggaatcgctagtaatcgtggatcagaatgccacggtgaatacgttcccgggcct

SEQ ID NO: 1449 - DNA, 1507 bp, Artificial Sequence
  Synthetic polymer
tagagtttgatcatggctcagattgaacgctggcggcaggcctaacacatgcaagtcgaacggtagcacagagagcttgctcttgggtgacgagtggcggacgggtgagtaaagtctgggaaactgcctgatggagggggataaccactggaaacggtggctaataccgcataatctcgcgagagcaaagtgggggaccttaatggcctcacgccatcggatgtgcccagatgggattagcttgttggtggggtaaaggctcaccaaggcgacgatccctagctggtctgagaggatgaccagccacactggagctgagacacggtccagactcctacgggaggcagcagtggggaatattgcacaatgggcgcaagcctgatgcagccatgccgcgtgtgtgaagaaggccttcgggttgtaaagcactttcagcggggaggaaggtggtatggttaagagccatatcaattgacgttacccgcagaagaagcaccggctaactccgtgccagcagccgcggtaatacggagggtgcaagcgttaatcggaattactgggcgtaaagcgcacgcaggcggtctgacaagtcagatgtgaaatccccgggcttaacctgggaactgcatttgaaactgtcaggctggagtcttgtagaggggggtagaattccaggtgtagcggtgaaatgcgtagagatctggaggaataccggtggcgaaggcggccccctggacaaagactgacgctcaggtgcgaaagcgtggggagcaaacaggattagataccctggtagtccacgctgtaaacgatgtcgacttggaggttgtgcccttgaggcgtggcttccggagctaacgcgttaagtcgaccgcctggggagtacggccgcaaggttaaaactcaaatgaattgacgggggcccgcacaagcggtggagcatgtggtttaattcgatgcaacgcgaagaaccttacctggccttgacatccacgggatctggcagagatgccggagtgccttcgggaaccgtgagacaggtgctgcatggctgtcgtcagctcgtgttgtgaaatgttgggttaagtcccgcaacgagcgcaacccttatcctttgttgccatcgggtgaagccgggaactcaaaggagactgccggtgacaaaccggaggaaggtggggatgacgtcaagtcatcatggcccttacggccagggctacacacgtgctacaatggcgcatacaaagagaagcgacctcgcgagagcaagcggacctcataaagtgcgtcgtagtctggatcggagtctgcaacccgactccgtgaagtcggaatcgctagtaatcgtggatcagaatgccacggtgaatacgttcccgggccttgtacacaccgcccgtcacaccatgggagtgggttgcaaaagaagtaggtagcttaaccttcgggagggcgcttaccactttgtgattcatgactggggtgaagtcgtaacaaggtaaccgta

SEQ ID NO: 1450 - DNA, 1463 bp, Artificial Sequence
  Synthetic polymer
  misc_feature (55)..(55): n is a, c, g, or t
  misc_feature (57)..(57): n is a, c, g, or t
  misc_feature (1148)..(1148): n is a, c, g, or t
catgcaagtcgagcggtaacacagggagcttgctcccgggtgacgagcggcggantngtgagtaatgtctgggaaactgcccgatggagggggataactactggaaacggtagctaataccgcataacgtcttcggaccaaagtggggggccttcgggcctcacaccatcggatgtgcccagatgggattagctagtaggtggggtaatggctcacctaggcgacgatccctagctggtctgagaggatgaccagccacactggaactgaggcacggtccagactcctacgggaggcagcagtggggaatattgcacaatgggcgcaagcctgatgcagccatgccgcgtgtgtgaagaaggccttcgggttgtaaagcactttcagcgaggaggaagggttcagtgttaatagcactgtgcattgacgttactcgcagaagaagcaccggctaactccgtgccagcagccgcggtaatacggagggtgcaagcgttaatcggaattactgggcgtaaagcgcacgcaggcggtttgttaagtcagatgtgaaatccccgagcttaacttgggaactgcatttgaaactggcaagctagagtcttgtagaggggggtagaattccaggtgtagcggtgaaatgcgtagagatctggaggaataccggtggcgaaggcggccccctggacaaagactgacgctcaggtgcgaaagcgtggggagcaaacaggattagataccctggtagtccacgctgtaaacgatgtcgacttggaggttgttcccttgaggagtggcttccggagctaacgcgttaagtcgaccgcctggggagtacggccgcaaggttaaaactcaaatgaattgacgggggccccgcaccaaccggtggagcatgtggtttaattcgatgcaacgcgaagaaccttacctactcttgacatccagagaacttagcagagatgctttggtgccttcgggaactctgagacaggtgctgcatggctgtcgtcagctcgtgttgtgaaatgttgggttaagtcccgcaacgagcgcaacccttatcctttgttgccagcgattcggtcgggaactcaaaggagactgccagtgataaactggaggaaggtggggatgacgtcaagtcnatcatggcccttacgaagtagggctacacacgtgctacaatggcatatacaaagagaagcgacctcctcgagagcaaatcggacctcataaaatatgtcgtagtccgggattggaattctgcaactcgactccatgaagtcggaatcgctagtaatcgtggatcagaatgccacggtgaatacgttcccgggccttgtacacaccgcccgtcacaccatgggagtgggttgcaaaagaagtaggtagcttaaccttcgggagggcgcttaccactttgtgattcatgactggggtgaagtcgtaacaaggtaacc

SEQ ID NO: 1451 - DNA, 1391 bp, Artificial Sequence
  Synthetic polymer
  misc_feature (20)..(21): n is a, c, g, or t
  misc_feature (836)..(837): n is a, c, g, or t
tagagtttgatcctggctcnnattgaacgctggcggcaggcctaacacatgcaagtcgagcggcagcacaagtaagtttacttatgaggtggcgagcggcggacgggtgagtaatgcctagggatctgcccagtcgagggggataacagttggaaacgactgctaataccgcatacgccctacgggggaaagagggggaccttcgggcctctcgcgattggatgaacctaggtgggattagctagttggtgaggtaatggctcaccaaggcgacgatccctagctgttctgagaggatgatcagccacactgggactgagacacggcccagactcctacgggaggcagcagtggggaatattgcacaatgggggaaaccctgatgcagccatgccgcgtgtgtgaagaaggccttcgggttgtaaagcactttcagtagggaggaaagggtgagtcttaatacggctcatctgtgacgttacctacagaagaaggaccggctaactccgtgccagcagccgcggtaatacggagggtgcaagcgttaatcggaattactgggcgtaaagcgcacgcaggcggtctgtcaagtcggatgtgaaatccccgggctcaacctgggaactgcattcgaaactggcaggctagagtcttgtagaggggggtagaattccaggtgtagcggtgaaatgcgtagagatctggaggaataccggtggcgaaggcggccccctggacaaagactgacgctcaggtgcgaaagcgtggggagcaaacaggattagataccctggtagtccacgccgtaaacgatgtcgacttggaggttgtgcccnngaggcgtggcttccggagctaacgcgttaagtcgaccgcctggggagtacggccgcaaggttaaaactcaaatgaattgacgggggcccgcacaagcggtggagcatgtggtttaattcgatgcaacgcgaagaaccttacctactcttgacatccagagaacttagcagagatgctttggtgccttcgggaactctgagacaggtgctgcatggctgtcgtcagctcgtgttgtgaaatgttgggttaagtcccgcaacgagcgcaacccttatcctttgttgccagcggtccggccgggaactcaaaggagactgccagtgataaactggaggaaggtggggatgacgtcaagtcatcatggcccttacgagtagggctacacacgtgctacaatggcgcatacaaagagaagcgacctcgcgagagcaagcggacctcataaagtgcgtcgtagtccggattggagtctgcaactcgactccatgaagtcggaatcgctagtaatcgtggatcagaatgccacggtgaatacgttcccgggccttgtacac

SEQ ID NO: 1452 - DNA, 1466 bp, Artificial Sequence
  Synthetic polymer
tttgaatggaggtttgatcatggctcagattgagcgctggcgtcagcctatcacatgcaagtcgaacggtagcacatagagcttgctctcgggtgacgagtggcggacgggtgagtaatgtctgggaaactgcctgatggagggggataactactggaaacggtagctaataccgcataacgtcgcaagaccaaagagggggaccttcgggcctcttgccatcagatgtgcccagatgggattagctagtaggcggggtaacggcccacctaggcgacgatccctagctggtctgagaggatgaccagccactctggaactgagacacggtccagactcctacgggaggcagcagtggggaatattgcacagtgggcgcaagcctgatgcagccatgccgcgtgtgtgaagaaggccttcgggttgtaaagctttttcagcggggaggaaggcggtccggttaataaccgtgctgattgacgttccccgcagaagaagcaccggctaactccgtgccagcagccgcggtaatacggagggtgcaagcgttaatcggaattactgggcgtaaagcgcacgcaggcggtctgtcaagtcggatgtgaaatccccgggctcaacctgggaactgcattcgaaactggcaggctggagtctcgtagagggaggtagaatttccaggtgtagcggtgaaatgcgtagagatctggaggaataccggtggcgaaggcggcctcctggacgaagactgacgctcaggtgcgaaagcgtggggagcaaacaggattagataccctggtagtccacgccgtaaacgatgtcgatttggaggttgtgcccttgaggcgtggcttccggagctaacgcgttaaatcgaccgcctggggagtacggccgcaaggttaaaactcaaatgaattgacgggggcccgcacaagcggtagcagcatgtggtttaattcgatgcaacgcgaagaaccttacctggtcttgacatccacagaacccggcagagatgccggggtgccttttggaactgtgagacaggtgctgcatggctgtcgtcagctcgtgttgtgaaaaattgggttaaatcccgcaacgagcgcaacccttatcctttgttgccagcggtccggccgggaactcaaaggagactgccactgataaaatggaggaaggtggggatgacgtcaagtcatcatggcccttacgaccaggggtacacacgtgctacaatggcgcatacaaagagaagcgaccttgcgagagcaagcggacctcataaagtgcgtcgtagtccggattggagtctgcaactcgactccatgaagtaggaatcgttagtaatcgtgaatcagaatgtcacggtgaatacgttcccgggccttgtacacaccgcccgtcactccatgggagtgggttgcaaaagaaataggtagattaaccttcgagagggcgctacc

SEQ ID NO: 1453 - DNA, 1481 bp, Artificial Sequence
  Synthetic polymer
agtctgatcctggctcagattgaacgctggcggcaggcctaacacatgcaagtcgaacggtaacaggaagcagcttgctgctttgctgacgagtggcggacgggtgagtaatgtctgggaaactgcctgatggagggggataactactggaaacggtagctaataccgcataacgtcgcaagaccaaagagggggaccttcgggcctcttgccatcggatgtgcccagatgggattagctagtaggtggggtaacggctcacctaggcgacgatccctagctggtctgagaggatgaccaaggccaccactggaacctgaggacaccggtccaagactcctacgggaggcagcagtggggaatattgcacaatgggcgcaagcctgatgcagccatgccgcgtgtatgaagaaggccttcgggttgtaaagtacttttcagcggggaggaaggcgataaggttaataaccttgtcgattgacgttacccgcagaagaagcaccggctaactccgtgccagcagccgcggtaatacggagggtgcaagcgttaatcggaattactgggcgtaaagcgcacgcaggcggtctgtcaagtcggatgtgaaatccccgggctcaacctgggaactgcattcgaaactggcaggctagagtcttgtagaggggggtagaattccaggtgtagcggtgaaatgcgtagagatctggaggaataccggtggcgaaggcggccccctggacaaagactgacgctcaggtgcgaaaggcgtgcccgggagcaaacaggattagataccctggtagtccacgccgtaaacgatgtcgacttggaggttgtgcccttgaggcgtggcttccggagctaacgcgttaagtcgaccgcctggggagtacggccgcaaggttaaaactcaaatgaaattgaccgggggccccgcacaaagccgggggaggcatggggttttaattcgatgcaacgcgaagaacctttacctacttcttgacatcccagagaaacttagcagagatgctttggggccttcggggaactctgagacaggtgctgcatggctgtcgtcagctcgtgttgtgaaatgttgggttaagtcccgcaacgagcgcaacccttatcctttgttgccagcggtccggccgggaactcaaaggagactgccagtgataaactggaggaaggtggggatgacgtcaagtcatcatggcccttacgagtagggctacacacgtgctacaatggcgcatacaaagagaagcgacctcgcgagagcaagcggacctcataaagtgcgtcgtagtccggattggagtctgcaactcgactccatgaagtcggaatcgctagtaatcgtggatcagaatgccacggtgaatacgttcccgggccttgtacacaccgcccgtcacaccatgggagtgggttgcaaaagaagtaggtagcttaaccttcgggagggcgctacc

SEQ ID NO: 1454 - DNA, 1398 bp, Artificial Sequence
  Synthetic polymer
agagtttgatcctggctcagattgaacgctggcggcaggcctaacacatgcaagtcgagcggtagcacagagagcttgctctcgggtgacgagcggcggacgggtgagtaatgtctgggaaactgcctgatggagggggataactactggaaacggtagctaataccgcataatgtcgcaagaccaaagtgggggaccttcgggcctcatgccatcagatgtgcccagatgggattagctagtaggtggggtaacggctcacctaggcgacgatccctagctggtctgagaggatgaccagccacactggaactgagacacggtccagactcctacgggaggcagcagtggggaatattgcacaatgggcgcaagcctgatgcagccatgccgcgtgtgtgaagaaggccttcgggttgtaaagcactttcagcggggaggaaggcgataaggttaataaccttgtcgattgacgttacccgcagaagaagcaccggctaactccgtgccagcagccgcggtaatacggagggtgcaagcgttaatcggaattactgggcgtaaagcgcacgcaggcggtctgtcaagtcggatgtgaaatccccgggctcaacctgggaactgcattcgaaactggcaggctagagtcttgtagaggggggtagaattccaggtgtagcggtgaaatgcgtagagatctggaggaataccggtggcgaaggcggccccctggacaaagactgacgctcaggtgcgaaagcgtggggagcaaacaggattagataccctggtagtccacgccgtaaacgatgtcgatttggaggttgtgcccttgaggcgtggcttccggagctaacgcgttaaatcgaccgcctggggagtacggccgcaaggttaaaactcaaatgaattgacgggggcccgcacaagcggtggagcatgtggtttaattcgatgcaacgcgaagaaccttacctggtcttgacatccacagaactttccagagatggattggtgccttcgggaactgtgagacaggtgctgcatggctgtcgtcagctcgtgttgtgaaatgttgggttaagtcccgcaacgagcgcaacccttatcctttgttgccagcggttaggccgggaactcaaaggagactgccagtgataaactggaggaaggtggggatgacgtcaagtcatcatggcccttacgaccagggctacacacgtgctacaatggcgtaaacaaagggaagcaagagtgcgagcttgagcaaatcccaaaaataacgtcccagttcggactgcagtctgcaactcgactgcacgaagctgaatcgctagtaatcgcagatcagaatgctgcggtgaatacgttcccgggtcttgcacacaccgcccgtca

SEQ ID NO: 1455 - DNA, 1421 bp, Artificial Sequence
  Synthetic polymer
taatgtctgggaaaactgccctgatggagggggataactactggaaacggtagctaataccgcataacgtcgcaagaccaaagagggggaccttcgggcctcttgccatcagatgtgcccagatgggattagctagtaggtggggtaacggctcacctaggcgacgatccctagctggtctgagaggatgaccagccacactggaactgagacacggtccagactcctacgggaggcagcagtggggaatattgcacaatgggcgcaagcctgatgcagccatgccgcgtgtatgaagaaggccttcgggttgtaaagtactttcagcgaggaggaaggcattgtggttaataaccacagtgattgacgttactcgcagaagaagcaccggctaactccgtgccagcagccgcggtaatacggagggtgcaagcgttaatcggaattactgggcgtaaagcgcacgcaggcggtctgtcaagtcggatgtgaaatccccgggctcaacctgggaactgcattcgaaactggcaggctagagtcttgtagaggggggtagaattccaggtgtagcggtgaaatgcgtagagatctggaggaataccggtggcgaaggcggccccctggacaaagactgacgctcaggtgcgaaagcgtggggagcaaacaggattagataccctggtagtccacgccgtaaacgatgtcgacttggaggttgttcccttgaggagtggcttccggagctaacgcgttaagtcgaccgcctggggagtacggccgcaaggttaaaactcaaatgaattgacgggggcccgcacaagcggtggagcatgtagtttaattcgatgcaacgcgaagaaccttacctactcttgacatccagagaacttagcagagatgctttggtgccttcgggaactctgagacaggtgctgcatggctgtcgtcagctcgtgttgtgaaatgttgggttaagtcccgcaacgagcgcaacccttatcctttgttgccagcggtccggccgggaactcaaaggagactgccagtgataaactggaggaaggtggggatgacgtcaagtcatcatggcccttacgagtagggctacacacgtgctacaatggcgtatacaaagagaagcgacctcgcgagagcaagcggacctcataaagtacgtcgtagtccggattggagtctgcaactcgactccatgaagtcggaatcgctagtaatcgtagatcagaatgctacggtgaatacgttcccgggccttgtacacaccgcccgtcacaccatgggagtggttgcaaaagagtagtagcttaccttcgggaggcgcttaccactttgtgattcatgactggggtgaagtcgtaacaaggtaaccgtaggggaacctgcggttggatcacctcctt

SEQ ID NO: 1456 - DNA, 1402 bp, Artificial Sequence
  Synthetic polymer
cggcaccaggagagcttgctctctggagtggcgagtggcggacgggtgaggaatacatcggaatctactttttcgtgggggataacgtagggaaacttacgctaataccgcatacgacctacgggtgaaagcaggggatcttcggaccttgacgcgattgaatgagccgatgtcggattagctagttggcggggtaaaggcccaccaaggcgacgatccgtagctggtctgagaggatgatcagccacactggaactgagacacggtccagactcctacgggaggcagcagtggggaatattggacaatgggcgcgagcctgatccagccataccgcgtgggtgaagaaggccttcgggttgtaaagtactttcagcggggaggaaggtgttgtggttaataaccgcagcaattgacgttacccgcagaagaagcaccggctaactccgtgccagcagccgcggtaatacggagggtgcaagcgttaatcggaattactgggcgtaaagcgcacgcaggcggtctgtcaagtcggatgtgaaatccccgggctcaacctgggaactgcattcgaaactggcaggctagagtcttgtagaggggggtagaattccaggtgtagcggtgaaatgcgtagagatctggaggaataccggtggcgaaggcggccccctggacaaagactgacgctcaggtgcgaaagcgtggggagcaaacaggattaaataccctggtagtccacgccgtaaacgatgtcgacttggaggttgtgcccttgaggcgtggcttccggagctaacgcgttaagttcgccgcctggagagtacggtcgcaagactgaaactcaaaggaattgacgggggcccgcacaagcggtggagtatgtggtttaatttgatgcaacgcgaagaaccttacctggccttgacatgtcgagaactttccagagatggattggtgccttcgggaactcgaacacaggtgctgcatggctgtcgtcagctcgtgtcgtgagatgttgggttaagtcccgcaacgagcgcaacccttgtccttagttgccagcacgtaatggtgggaactctaaggagaccgccggtgacaaaccggaggagggtggggatgacgtcaagtcatcatggcccttacggccagggctacacacgtactacaatggtagggacagagggccgcaagccggcgacggtaagccaatcccagaaaccctatctcagtccggattggagtctgcaactcgactccatgaagtcggaatcgctagtaatcgcagatcagcattgctgcggtgaatacgttctcgggccttgtacacaccgcccgtcacaccatgggagtttgttgcaccagaagcaggtagcttaaccttcgggagggcgctgcc

SEQ ID NO: 1457 - DNA, 1496 bp, Artificial Sequence
  Synthetic polymer
tggctcagattgaacgctggcggcaggcctaacacatgcaagtcgagcggcagcgggaagaagcttgcttctttgccggcgagcggcggacgggtgagtaaagtctgggaaactgcctgatggagggggataactactggaaacggtagctaataccgcataatctcgcaagagcaaagtgggggaccttagggcctcacgccatcggatgtgcccagatgggattagctggtaggtggggtaaaggctcacctaggcgacgatccctagctggtctgagaggatgaccagccacactggaactgagacacggtccagactcctacgggaggcagcagtggggaatattgcacaatgggggaaaccctgatgcagccatgccgcgtgtgtgaagaaggccttagggttgtaaagcactttcagcggggaggaaggggtagtggttaatagccactgtcattgacgttacccgcagaagaagcaccggctaactccgtgccagcagccgcggtaatacggagggtgcaagcgttaatcggaatgactgggcgtaaagcgcacgcaggcggtctgttaagttggatgtgaaatccccgggcttaaacctgggaacggcattcaaaactgacaggctagagtctcgtagaggggggtagaattccaggtgtagcggtgaaatgcgtagagatctggaggaataccggtggcgaaaggcggccccctggacgaagactgacgctcacgtgcgaaagcgtggggagcaaacaggattagataccctggtagtccacgccgtaaacgatgtcgacttggaggctgtggtcttgaaccgtggcttccggagctaacgcgttaagtcgaccgcctggggagtacggccgcaaggttaaaactcaaatgaattgacgggggcccgcacaagcggtggagcatgtggtttaattcgatgcaacgcgaagaaccttacctactcttgacatcctcagaagagactggagacagtcttgtgccttcgggaactgagagacaggtgctgcatggctgtcgtcagctcgtgttgtgaaatgttgggttaagtcccgcaacgagcgcaacccttatcctttgttgccagcgatacggtcgggaactcaaaggagactgccggtgataaaccggaggaaggtggggatgacgtcaagtcatcatggcccttacgagtagggctacacacgtgctacaatggcgcatacaaagagaagcgaacttgcgagagtaagcggacctcataaagtgcgtcgtagtccggattggagtctgcaactcgactccatgaagtcggaatcgctagtaatcgtagatcagaatgctacggtggatacgttcccgggccttgtacacaccgcccgtcacaccatgggagtgggttgcaaaagaagtaggtagcttaaccttagggggggcgcttaccactttgtgattcatgactggggtgaagtcgtaacaaggtaaccgta

SEQ ID NO: 1458 - DNA, 1510 bp, Artificial Sequence
  Synthetic polymer
catggctcagattgaacgctggcggcaggcctaacacatgcaagtcgagcggtagcacagaaggagacttgctctctgggtgacgagcggcggacgggtgagtaatgtctgggaaactgcctgatggagggggataactactggaaacggtagctaataccgcataacgtcgcaagaccaaagagggggaccttcgggcctcttgccatcagatgtgcccagatgggattagctagtaggtggggtaatggctcacctaggcgacgatccctagctggtctgagaggatgaccagtcacattggaactgagacaaggtccagacccctacgggaggcaccagtggggaatattccccaatggccccaagcctgatgcaccatcccccttttttgaagaaggccttcgggttgtaaagtactttcaccgaggaggaggtggttgaaacttataccgtcatccattgccgttactcgcagaagaaccaccggctaactccgtgccagcacccgcggtaatacggagggtgcaagcgttaatcggaattactgggcgtaaagcgcacgcaggcggtttgttaagtcagatgtgaaatccccgggctcaacctgggaactgcatttgaaactggcaagctagagtctcgtagaggggggtagaattccaggtgtagcggtgaaatgcgtagagatctggaggaataccggtggcgaaggcggccccctggccgaagactgacgctcaggtgcgaaagcgtggggagcaaacaggattagataccctggtagtccacgctgtaaacgatgtcgatttggaggttgtgcccttgaggcgtggcttccggagctaacgcgttaaatcgaccgcctggggagtacggccgcaaggttaaaactcaaatgaattgacgggggcccgcacaagcggtggagcatgtggtttaattcgatgcaacgcgaagaaccttacctactcttgacatccagagaacttaccagagatgggttggtgccttcgggaactctgagacaggtgctgcatggctgtcgtcagctcgtgttgtgaaatgttgggttaactcccccaacgagcgcaacccttatccttgggtggcagcggtccggccgggaactcaaaggggactgccagtgataaactggaggaaggtggggatgacgtcaagtcatcatggcccttacgagtagggctacacacgtgctacaatggcatatacaaagagaagcgacctcgcgagagcaagcggacctcataaagtatgtcgtagtccggattggagtctgcaactcgactccatgaagtcggaatcgctagtaatcgtagatcagaatgctacggtgaatacgttcccgggccttgtacacaccgcccgtcacaccatgggagtgggttgcaaaagaagtaggtagcttaaccttcgggagggcgcttaccactttgtgattcatgactggggtgaagtcgtaacaaggtaaccgtaggggaacctgcgg

SEQ ID NO: 1459 - DNA, 1416 bp, Artificial Sequence; identical to SEQ ID NO: 521
  Synthetic polymer

SEQ ID NO: 1460 - DNA, 1537 bp, Artificial Sequence
  Synthetic polymer
agagtttgatcctggctcagattgaacgctggcggcaggcctaacacatgcaagtcgaacggtaacaggaaacagattgctgtttcgctgacgagtggcggacgggtgagtaatgtctgggaaactgcctgatggagggggataactactggaaacggtagctaataccgcataacgtcgcaagaccaaagagggggaccctcgggcctcttgccatcggatgtgcccagatgggattagcttgttggtggggtaacggctcaacacacaggggatccgatccctaagcttgttctgagaggactgaccagccacacgtggaactgagacacggttcagacttctacgggaggcagcagtggggaatattgcacaatgggcgcaaggctgatgcaggcatgccgcgtgtatgaagaaggccttcgggttgtaaagtactttcagcagggaggaagggagtaaagttaatacctttgctcattgacgttacccgccagaagaagcaccggctaactccgtgccagcagccgcggtaatacggagggtgcaagcgttaatcggaattactgggcgtaaagcgcacgcaggcggtttgttaagtcagatgtgaaatccccgggctcaacctgggaactgcatctgatactggcaagcttgagtctcgtagaggggggtagaattccaggtgtagcggtgaaatgcgtagagatctggaggaataccggtggcgaaggcggccccctggacgaagactgacgctcaggtgcgaaagcgtggggagcaaacaggattagataccctggtagtccacgccgtaaacgatgtcgacttggaggttgtgcccttgaggcgtggcttccggagctaacgcgttaagtcgaccgcctggaggagtacggccgcaaggttaaaacttctaatgaattgaccgggggcccgcacaagcggtggagcatgtgcgtttaattcgatgcaacgcgaagaatgcttacctggtcttgacattccacggacgttttcggagatgtgaatgtgccttcgggaaccgtgaagacaggtagcgtgcatggctgtcgtcactgctcgtgttgtgaaatgttgggttcagtcccgcaacgagctgctatacctcagtgctatacgctcttgttgccagcggtccggccgggaactcaaaggagactgccagtgataaactggaggaaggtggggatgacgtcaagtcatcatggcccttacgaccagggctacacacgtgctacaatggcgcatacaaagagaagcgacctcgcgagagcaagcggacctcataaagtgcgtcgtagtccggattggagtctgcaactcgactccatgaagtcggaatcgctagtaatcgtggatcagaatgccacggtgaatacgttcccgggccttgtacacaccgcccgtcacaccatgggagtgggttgcaaaagaagtaggtagcttaaccttcgggagggcgcttaccactttgtgattcatgactggggtgaagtcgtaacaaggtagccgt

SEQ ID NO: 1461 - DNA, 1544 bp, Artificial Sequence
  Synthetic polymer
ttaaattgaagagtttgatcatggctcagattgaacgctggcggcaggcctaacacatgcaagtcgaacggtaacaggaagcagcttgctgcttcgctgacgagtggcggacgggtgagtaatgtctgggaaactgcctgatggagggggataactactggaaacggtagctaataccgcataatgtcgcaggaccaaagagggggaccttcgggcctcttgccatcagatgtgcccagatgggattagctagttggtgaggtaacggctcaccaaggcgacgatccctagctggtctgagaggatgaccagccacactggaactgagacacggtccagactcctacgggaggcagcagtggggaatattgcacaatgggcgcaagcctgatgcagccatgccgcgtgtatgaagaaggccttcgggttgtaaagtactttcagcggggaggaaggggataaggctaataaccttgttcattgacgttacccgcagaagaagcaccggctaactccgtgccagcagccgcggtaatacggagggtgcaagcgttaatcggaattactgggcgtaaagcgcacgcaggcggtctgtcaagtcggatgtgaaatccccgggctcaacctgggaactgcattcgaaactggcaggcttgagtcttgtagaggggggtagaattccaggtgtagcggtgaaatgcgtagagatctggaggaataccggtggcgaaggcggccccctggacaaagactgacgctcaggtgcgaaagcgtggggagcaaacaggattagataccctggtagtccacgccgtaaacgatgtctacttggaggttgtgcccttgaggcgtggcttccggagctaacgcgttaagtagaccgcctggggagtacggccgcaaggttaaaactcaaatgaattgacgggggcccgcacaagcggtggagcatgtggtttaattcgatgcaacgcgaagaaccttacctggtcttgacatccacagaactttccagagatggattggtgccttcgggaactgtgagacaggtgctgcatggctgtcgtcagctcgtgttgtgaaatgttgggttaagtcccgcaacgagcgcaacccttatcctttgttgccagcggtccggccgggaactcaaaggagactgccagtgataaactggaggaaggtggggatgacgtcaagtcatcatggcccttacgaccagggctacacacgtgctacaatggcgcatacaaagagaagcgacctcgcgagagcaagcggacctcataaagtgcgtcgtagtccggactggagtctgcaactcgactccatgaagtcggaatcgctagtaatcgtggatcagaatgccacggtgaatacgttcccgggccttgtacacaccgcccgtcacaccatgggagtgggttgcaaaagaagtaggtagcttaaccttcgggagggcgcttaccactttgtgattcatgactggggtgaagtcgtaacaaggtaaccgtaggggaacctgcggttggatcacctcctta

SEQ ID NO: 1462 - DNA, 1377 bp, Artificial Sequence; identical to SEQ ID NO: 80
  Synthetic polymer

SEQ ID NO: 1463 - DNA, 1373 bp, Artificial Sequence
  Synthetic polymer
ggacgggtgagtaatgtctgggaaactgcccgatggagggggataactactggaaacggtagctaataccgcataacgtcgcaagaccaaagagggggtccttcgggcctcttgccatcggatgtgcccagatgggattagctagtaggtggggtaacggctcacctaggcgacgatccctagctggtctgagaggatgaccagccacactggaactgagacacggtccagactcctacgggaggcagcagtggggaatattgcacaatgggcgcaagcctgatgcagccatgccgcgtgtatgaagaaggccttcgggttgtaaagtactttcagcgaggaggaaggcgttgtggttaataaccgcaacgattgacgttactcgcaggagaagcaccggctaactccgtgccagcagccgcggtaatacggagggtgcaagcgttaatcggaattactgggcgtaaagcgcacgcaggcggtctgtcaagtcggatgtgaaatccccgggctcaacctgggaactgcatccgaaactggcaggctagagtcttgtagaggggggtagaattccaggtgtagcggtgaaatgcgtagagatctgaaggaataccggtggcgaaggcggccccctggacaaagactgacgctcaggtgcgaaagcgtggggagcaaacaaagattagataccctggtagtccacgccgtaaacgacctccaaagggaggttgtgcccttgaggcgtggcttccggagctaacgcgttaagtcgaccgcctggggagtacggccgcaaggttaaaactcaaatgaattgacgggggcccgcacaagcggtggagcatgtggtttaattcgatgcaacgcgaagaaccttacctactcttgacatccagagaacttagcagagatgctttggtgccttcgggaactctgagacaggtgctgcatggctgtcgtcagctcgtgttgtgaaatgttgggttaagtcccgcaacgagcgcaacccttatcctttgttgccagcggttcggccgggaactcaaaggagactgccagtgataaactggaggaaggtggggatgacgtcaagtcatcatggcccttacgagtagggctacacacgtgctacaatggcatatacaaagagaagcgacctcgcgagagcaagcggacctcataaagtatgtcgtagtccggattggagtctgcaactcgactccatgaagtcggaatcgctagtaatcgtggatcagaatgccacggagaatacgttcccgggccttgtacacaccgcccgtcacaccatgggagtgggttgcaaaagaagtaggtagctaagccttcgggagggcgcttaccactttgtgatt

SEQ ID NO: 1464 - DNA, 1361 bp, Artificial Sequence
  Synthetic polymer
attgaacgctggcggcaggcctaacacatgcaagtcgaacggtagcacagagagcttgctctcgggtgacgagtggcggacgggtgagtaatgtctgggaaactgcccgatggagggggataactactggaaacggtagctaataccgcataatgtcgcaagaccaaagagggggaccttcgggcctcttgccatcggatgtgcccagatgggattagcttgtaggtgaggtaacggctcacctaggcgacgatccctagctggtctgagaggatgaccagccacactggaactgagacacggtccagactcctacgggaggcagcagtggggaatattgcacaatgggcgcaagcctgatgcagccatgccgcgtgtatgaagaaggccttcgggttgtaaagtactttcagcggggaggaagggagtgaggttaataaccttattcattgaccttacccgcaaaagaagcaccggctaactccgtgccagcagccgcggtaatacggagggcgcaagcgttcatcggaattactgggtgtaaagcgcacgcaggcggtctgtctagtcggatgtgaaatccccgggctcaacttgggaactgcattcgaaactggcaggctggagtcttgtagaggggggtagaattccaggtgtagcggtgaaatgcgtagagatctggaggaataccggtggcgaaggcggccccctggacaaagactgacgctcaggtgcgaaagcgtggggagcaaacaggattagataccctggtagtccacgctgtaaacgatgtcgacttggaggttgttcccttgaggagtggcttccggagctaacgcgttaagtcgaccgcctggggagtacggccgcaaggttaaaactcaaatgaattgacgggggcccgcacaagcggtggagcatgtggtttaattcgatgcaacgcgaagaaccttacctactcttgacgtccagagaacttagcagagatgctttggtgccttcgggaactctgagacaggtgctgcatggctgtcgtcagctcgtgttgtgaaatgttgggttaagtcccgcaacgagcgcaacccttatcctttgttgccagcggtccggccgggaactcaaaggagactgccagtgataaactggaggaaggtggggatgacgtcaagtcatcatggcccttacgagtagggctacacacgtgctacaatggcatatacaaagagaagcgacctcgcgagagcaagcggacctcataaagtatgtcgtagtccggattggagtctgcaactcgactccatgaagtcggaatcgctagtaatcgtggatcagaatgccacggtgaatacgttcccgggcct

SEQ ID NO: 1465 - DNA, 1504 bp, Artificial Sequence; identical to SEQ ID NO: 686
  Synthetic polymer

SEQ ID NO: 1466 - DNA, 1364 bp, Artificial Sequence
  Synthetic polymer
attgaacgctggcggcaggcctaacacatgcaagtcgagcggtagcacaggagagcttgctctctgggtgacgagcggcggacgggtgagtaatgtctgggaaactgcctgatggagggggataactactggaaacggtagctaataccgcatgacctcgcaagagcaaagtgggggaccttcgggcctcacgccatcggatgtgcccagatgggattagctagtaggtggggtaatggctcacctaggcgacgatccctagctggtctgagaggatgaccagccacactggaactgagacacggtccagactcctacgggaggcagcagtggggaatattgcacaatgggcgcaagcctgatgcagccatgccgcgtgtgtgaagaaggccttagggttgtaaagcactttcagcgaggaggaaggcgctgtagttaatagctgcagcgattgacgttactcgcagaagaagcaccggctaactccgtgccagcagccgcggtaatacggagggtgcaagcgttaatcggaattactgggcgtaaagcgcacgcaggcggtttgttaagtcagatgtgaaatccccgagcttaacttgggaactgcatttgaaactggcaagctagagtcttgtagaggggggtagaattccaggtgtagcggtgaaatgcgtagagatctggaggaataccggtggcgaaggcggccccctggacaaagactgacgctcaggtgcgaaagcgtggggagcaaacaggattagataccctggtagtccacgctgtaaacgatgtcgacttggaggttgtgcccttgaggcgtggcttccggagctaacgcgttaagtcgaccgcctggggagtacggccgcaaggttaaaactcaaatgaattgacgggggcccgcacaagcggtggagcatgtggtttaattcgatgcaacgcgaagaaccttacctactcttgacatccacggaattcgctagagatagcttagtgccttcgggaaccgtgagacaggtgctgcatggctgtcgtcagctcgtgttgtgaaatgttgggttaagtcccgcaacgagcgcaacccttatcctttgttgccagcgagtgatgtcgggaactcaaaggagactgccggtgataaaccggaggaaggtggggatgacgtcaagtcatcatggcccttacgagtagggctacacacgtgctacaatggcatatacaaagagaagcaaactcgcgagagcaagcggacctcataaagtatgtcgtagtccggattggagtctgcaactcgactccatgaagtcggaatcgctagtaatcgtagatcagaatgctacggtgaatacgttcccgggcct

SEQ ID NO: 1467 - DNA, 1402 bp, Artificial Sequence
  Synthetic polymer
agtcgagcggtagcacagggagcttgctcctgggtgacgagcggcggacgggtgagtaatgtctgggaaactgcctgatggagggggataactactggaaacggtagctaataccgcataacgtcgcaagaccaaagagggggaccttcgggcctcttgccatctcatgtgcccagatgggattagctattaggtggggtaacggctcacctakgcgacaatccctagctggtctgagaggatgaccasccacactggaactgagacacggtccacactcctacgggaggcagcagtggggaatattgcacaatgggcgcaagcctgatgcacccatgccgcgtgtatgaaaaaagccttcgggttgtaaagtactttcagcggggaggaaggcgttgtggttaataaccacagcgattgacgttacccgcagaagaagcaccggctaactccgtgccagcagccgcggtaatacggagggtgcaagcgttaatcggaattactgggcgtaaagcgcacgcaggcggtctgtcaagtcggatgtgaaatccccgggctcaacctgggaactgcattcgaaactggcaggctagagtcttgtagaggggggtagaattccaggtgtagcggtgaaatgcgtagagatctggaggaataccggtggcgaargcggccccctggacaaagactgacgctcaggtgcgaaagcgtggggagcaaacaggattakataccctggtagtccacgccgtaaacgatgtcgacttggaggttgtgcccttgaggcgtgkcttccggagctaacgcgttaagtcgaccgcctgkggagtacggccgcaaggttaaaactcamatgarttgacgggggcccgcacaagcggtggagcatgtggtttaattcgatgcaacgcgaagaaccttacctactcttgacatccagagaactttccagagatggattggtgccttcgggaactctgagacagrtgctgcatggctgtcgtcagctcgtgttgtgaaatgttgggttaagtcccgcaacgagcgcaacccttatcctttgttgccagcggttaggccgggaactcaaaggagactgccagtgataaactggaggaaggtggggatgacgtcaagtcatcatggcccttacgagtagggctacacacgtgctacaatggcgcatacaaagagaagcgacctcgcgagagcaagcggacctcataaagtgcgtcgtagtccggattggagtctgcaactcgactccatgaagtcggaatcgctagtaatcgtagatcagaatgctacggtgaatacgttcccgggccttgtacacaccgcccgtcacaccatgggagtgggttgcaaaagaagtaggtagcttaaccttcgggagggcgct

SEQ ID NO: 1468 - DNA, 1466 bp, Artificial Sequence; identical to SEQ ID NO: 831
  Synthetic polymer

SEQ ID NO: 1469 - DNA, 1379 bp, Artificial Sequence
  Synthetic polymer
gagcttgctctcgggtgacgagtggcggacgggtgagatatgtctgggaaactgcccgatggagggggataactactggaaacggttgctaataccgcataacttcttcggaccacagtgggggaccttcgggcctcacaccctccgatgtgcccagatgggattagctagtatgtggggtaatggctcaccttcgcgacaatccctagctggtctgagaggatgaccagccacactggaactgagacacggtccagactcctacgggaggcagcagtggggaatattgcacaatgggcgcaagcctgatgcaaccgtgccgcgtgtatgaagaaggccttcgggttgtaaagtactttcagcggggaggaaggtgttgaggttaataaccgcatcgattgacgttacccgcagaagaagcaccggctaactccgtgccagcagccgcggtaatacggagggtgcaagcgttaatcggaattactgggcgtaaagcgcacgcaggcggtctgtcaagtcggatgtgaaatccccgggctcaacctgggaactgcattcgaaactggcaggctagagtcttgtagaggggggtagaattccaggtgtagcggtgaaatgcgtagagatctggaggaataccggtggcgaaggcggccccctggacaaagactgacgctcaggtgcgaaagcgtggggagcaaacaggattagataccctggtagtccacgccgtaaacgatgtcgacttggaggttgtgcccttgaggcgtggcttccggagctaacgcgttaagtcgaccgcctggggagtacggcgcaaggttaaaactcaaatgaattgacgggggcccgcacaagcggtggagcatgtggggtttatttggatgcaacgcgaagaaccttacctactcttgacatccagagaacttagcagagatgctttgttgtcttcgggaactatgagacaggtgatgcatggcagtcgtcagctcgtgttgtgaaatgttgggttaagtcccgcaacgagcgcaacccttatcctttgttgccagcggtccggccgggaactcaaaggagactgccagtgataaactggaggaaggtggggatgacgtcaagtcatcatggcccttacgagtagggctacacacgtgctacaatggcgcatacaaagagaagcgacctcgcgagagcaagcggacctcataaagtgcgtcgtagtccggattggagtctgcaactagactccatgaagtcggaatcgctagtaatcgtagatcagaatgttacggtgaatacgttcccgggccttgtacacaccgcccgtcacaccatgggagtgggttgcaaaagaagtaggtagcttaaccttcgggagg

SEQ ID NO: 1470 - DNA, 1389 bp, Artificial Sequence; identical to SEQ ID NO: 340
  Synthetic polymer

SEQ ID NO: 1471 - DNA, 1355 bp, Artificial Sequence; identical to SEQ ID NO: 839
  Synthetic polymer

SEQ ID NO: 1472 - DNA, 1360 bp, Artificial Sequence; identical to SEQ ID NO: 786
  Synthetic polymer

SEQ ID NO: 1473 - DNA, 1390 bp, Artificial Sequence; identical to SEQ ID NO: 329
  Synthetic polymer

SEQ ID NO: 1474 - DNA, 1393 bp, Artificial Sequence; identical to SEQ ID NO: 587
  Synthetic polymer

SEQ ID NO: 1475 - DNA, 1331 bp, Artificial Sequence
  Synthetic polymer
tagtggcggacgggtgagtaacgcgtgggtaacctaccttatacagggggataacagttggaaacgactgctaataccgcataaaactgtcacttcgcatgaagagacagtaaaagatttatcggtataagatggacccgcgtctgattagctagttggtgaggtaatggctcaccaaggcgacgatcagtagccgacttgagagagtgatcggccacattgggactgagacacggcccaaactcctacgggaggcagcagtggggaatattgcacaatgggggaaaccctgatgcagcgacgccgcgtgagtgaagaagtatttcggtacgtaaagctctatcagcaaggaagataatgacggtacttgactaagaagccccggctaactacgtgccagcagccgcggtaatacgtagggggcaagcgttatccggatttactgggtgtaaagggagcgtaggtggcatggtaagtcagatgtgaaagcccggggctcaaccccgggattgcatttgaaactatcaagctagagtgcaggagaggtaagtggaattcctagtgtagcggtgaaatgcgtagatattaggaggaacaccagtggcgaaggcggcttactggactgtaactgacactgaggctcgaaagcgtggggagcaaacaggattagataccctggtagtccacgccgtaaacgatgaatactaggtgtcggggcccatccgggcttcggtgccgcagcaaacgcattaagtattccacctggggagtacgttcgcaagaatgaaactcaaaggaattgacggggacccgcacaagcggtggagcatgtggtttaattcgaagcaacgcgaagaaccttaccaggtcttgacatccctctgaccggtccttaaccggaccttctcttcggagcagaggagacaggtggtgcatggttgtcgtcagctcgtgtcgtgagatgttgggttaagtcccgcaacgagcgcaacccttatctttagtagccagcatttcggatgggcactctagagagactgccagggataacctggaggaaggtggggatgacgtcaaatcatcatgccccttatgatctgggctacacacgtgctacaatggtgacaacaaagagaagcaacgtcgcgaggctaagcaaatctcaaaaaagtcatctcagttcggattgtagtctgcaactcgactacatgaagctggaatcgctagtaatcgcgaatcagaatgtcgcggtgaatacgttcccgggtcttgtacacaccgcccgtcacaccatgggagtcggatatgcccgaagtcagtgacccaaccgt

SEQ ID NO: 1476 - DNA, 1389 bp, Artificial Sequence
  Synthetic polymer
agagtttgatcctggctcaggatgaacgctggcggcgtgcttaacacatgcaagtcgaacgaagcaccttgatttgattcttcggatgaagatcttggtgactgagtggcggacgggtgagtaacgcgtgggtaacctgcctcatacagggggataacagttagaaatgactgctaataccgcataagaccacagcaccgcatggtgcaggggtaaaaactccggtggtatgagatggacccgcgtctgattaggtagttggcggggtaacggcccaccaaaccaacgatccatagccggcctgagagggtgaacggccacattgggactgagacacggcccaaactcctacgggaggcagcagtggggaatattgcacaatgggggaaaccctgatgcagcgacgccgcgtgagtgatgaagtatttcggtatgtaaagctctatcagcagggaagataatgacggtacctgactaagaagcaccggctaaatacgtgccagcagccgcggtaatacgtatggtgcaagcgttatccggatttactgggtgtaaagggtgcgtaggtggtgagacaagtctgaagtgaaaatccggggcttaaccccggaactgctttggaaactgcctgactagagtacaggagaggtaagtggaattcctagtgtagcggtgaaatgcgtagatattaggaggaacaccagtggcgaaggcgacttactggactgctactgacactgaggcacgaaagcgtggggagcaaacaggattagataccctggtagtccacgccgtaaacgatgaatactaggtgtcggggcccaaagggcttcggtgccgcagccaacgcaataagtattccacctggggagtacgttcgcaagaatgaaactcaaaggaattgacggggacccgcacaagcggtggagcatgtggtttaattcgaagcaacgcgaagaaccttaccaagtcttgacatcctgctgaccgttccttaatcggaactttccttcgggacagcagagacaggtggtgcatggttgtcgtcagctcgtgtcgtgagatgttgggttaagtcccgcaacgagcgcaacccctatttccagtagccagcagtcagatgggcactctggagagactgccggggataacccggaggaaggtggggatgacgtcaaatcatcatgccccttatgatttgggctacacacgtgctacaatggcagttacaaagagaagcgaaactgtgaagtggagcaaacctcaaaaaggctgtctcagttcggattgtagtctgcaactcgactacatgaagctggaatcgctagtaatcgcagatcagaatgctgcggtgaatacgttcccgggtcttgcacacaccgcccgtca

SEQ ID NO: 1477 - DNA, 1388 bp, Artificial Sequence; identical to SEQ ID NO: 357
  Synthetic polymer

SEQ ID NO: 1478 - DNA, 1387 bp, Artificial Sequence; identical to SEQ ID NO: 161
  Synthetic polymer

SEQ ID NO: 1479 - DNA, 1392 bp, Artificial Sequence; identical to SEQ ID NO: 409
  Synthetic polymer

SEQ ID NO: 1480 - DNA, 1392 bp, Artificial Sequence
  Synthetic polymer
agagtttgatcctggctcaggatgaacgctggcggcgtgcctaacacatgcaagtcgaacgaagcacttgcagcggaatcttcggaggaagctgcacttgactgagtggcggacgggtgagtaacgcgtgggtaacctgccttacacagggggataacagttagaaatgactgctaataccgcataagcgcacgggaccgcatggtccagtgtgaaaagaaattcggtgtaagatggacccgcgtctgattagctagttggcggggtaacggcccaccaaggcgacgatcagtagccggcctgagagggtggacggccacattgggactgagacacggcccaaactcctacgggaggcagcagtggggaatattgcacaatgggggaaaccctgatgcagcgacgccgcgtgagtgaagaagtatttcggtatgtaaagctctatcagcagggaagaaaatgacggtacctgactaagaagctccggctaaatacgtgccagcagccgcggtaatacgtatggagcaagcgttatccggatttactgggtgtaaagggtgcgtaggcggcagggcaagtcagatgtgaaagcccggggctcaaccccggtagtgcatttgaaactgctttgctggagtacgggagaggtaagcggaattcctagtgtagcggtgaaatgcgtagatattaggaggaacaccagtggcgaaggcggcttactggaccgtaactgacgctgaggcacgaaagcgtggggagcaaacaggattagataccctggtagtccacgccgtaaacgatgaatactaggtgtcggggccgtagaggcttcggtgccgcagcaaacgcaataagtattccacctggggagtacgttcgcaagaatgaaactcaaaggaattgacggggacccgcacaagcggtggagcatgtggtttaattcgaagcaacgcgaagaaccttaccaagtcttgacatcgatctgaccggacagtaatgagtcctttcccttcggggacagagaagacaggtggtgcatggttgtcgtcagctcgtgtcgtgagatgttgggttaagtcccgcaacgagcgcaacccttatccttagtagccagcacataaaggtgggcactctgaggagactgccagggataacctggaggaaggtggggatgacgtcaaatcatcatgccccttatgatttgggctacacacgtgctacaatggcgtaaacaaagggaagcgaacccgcgaggggaagcgaatctcaaaaataacgtcccagttcggattgtagtctgcaactcgactacatgaagctggaatcgctagtaatcgcaggtcagcatactgcggtgaatacgttcccgggtcttgtacacaccgcccgtca

SEQ ID NO: 1481 - DNA, 1430 bp, Artificial Sequence; identical to SEQ ID NO: 693
  Synthetic polymer

SEQ ID NO: 1482 - DNA, 1389 bp, Artificial Sequence; identical to SEQ ID NO: 122
  Synthetic polymer

SEQ ID NO: 1483 - DNA, 1394 bp, Artificial Sequence
  Synthetic polymer
agtcgaacggagttattattaagaaatcttcggatggattgataataacttagtggcggacgggtgagtaacgcgtgggtaacctgccctatacaggaggataacagccggaaacggttgctaaaaccgcataagcgcacattgtcgcatgacaaagtgtgaaaatatttataggtataggatgggcccgcgtctgattagctagttggtgaggtaacggctcaccaaggcgacgatcagtagccggcttgagagagtgaccggccacattgggactgagacacggcccaaactcctacgggaggcagcagtggggaatattgcacaatgggggaaactctgatgcagcgacgccgcgtgagtgaagaagtatttcggtatgtaaagctctatcagcagggaagaaaatgacggtacctgactaagaagccccggctaactacgtgccagcagccgcggtaatacgtagggggcaagcgttatccggatttactgggtgtaaagggagcgtaggtggtgtggtaagtcagatgtgaaagcccggggctcaactccgggattgcatttgaaactatcatgctagagtgcaggagaggtaagtggaattcctagtgtagcggtgaaatgcgtagatattaggaggaacaccagtggcgaaggcggcttactggactgtaactgacactgaggctcgaaagcgtggggagcgaacaggattagataccctggtagtccacgccgtaaacgatgaatactaggtgttggggagcaaaagctcttcggtgccgacgcaaacgcattaagtattccacctggggagtacgttcgcaagaatgaaactcaaaggaattgacggggacccgcacaagcggtggagcatgtggtttaattcgaagcaacgcgaagaaccttaccaggtcttgacatccctctgaccggtccgtaacgggatcttcccttcggggcagaggagacaggtggtgcatggttgtcgtcagctcgtgtcgtgagatgttgggttaagtcccgcaacgagcgcaacccctatccttagtagccagcaggtagagctgggcactctagggagactgccaaggacaacttggaggaaggcggggatgacgtcaaatcatcatgccccttatgatctgggctacacacgtgctacaatggtgactacaaagggaagcgaccctgtgaaggtaagccaatctcaaaaaagtcatcccagttcggattgtagtctgcaactcgactacatgaagctggaatcgctagtaatcgcgaatcagcatgtcgcggtgaatacgttcccgggccttgtacacaccgcccgtcacaccacaaaggttggcgatacctgaagttactgtaccaacccttcggggaggaag

SEQ ID NO: 1484 - DNA, 1380 bp, Artificial Sequence; identical to SEQ ID NO: 700
  Synthetic polymer

SEQ ID NO: 1485 - DNA, 1394 bp, Artificial Sequence; identical to SEQ ID NO: 109
  Synthetic polymer

SEQ ID NO: 1486 - DNA, 1435 bp, Artificial Sequence
  Synthetic polymer
cacatgcaagtcgagcgaagcacttttgcggatttcttcggattgaagcaattgtgactgagcggcggacgggtgagtaacgcgtgggtaacctgcctcatacagggggataacagttggaaacggctgctaataccgcataagcgcacagtaccgcatggtaccgtgtgaaaaactccggtggtatgagatggacccgcgtctgattagctagttggtggggcaacggcctaccaaggcgacgatcagtagccgacctgagagggtgaccggccacattgggactgaaacacggcccaaactcctacgggaggcagcagtggggaatattgcacaatgggggaaaccctgatgcagcgacgccgcgtgagcgatgaagtatttcggtatgtaaagctctatcagcagggaagaaaaagacggtacctgactaagaagccccggctaactacgtgccagcagccgcggtaatacgtagggggcaagcgtcatccggaattactgggtgtaaagggtgcgtaggtggcatggtaagtcagaagtgaaagcccggggcttaaccccgggactgcttttgaaactgtcatgctggagtgcaggagaggtaagcggaattcctagtgtagcggtgaaatgcgtagatattaggaggaacaccagtggcgaaggcggcttactggactgtcactgacactgatgcacgaaagcgtggggagcaaacaggattagataccctggtagtccacgccgtaaacgatgaatactaggtgtcggggccgtagaggcttcggtgccgcagcaaacgcagtaagtattccacctggggagtacgttcgcaagaatgaaactcaaaggaattgacggggacccgcacaagcggtggagcatgtggtttaattcgaagcaacgcgaagaaccttacctggtcttgacatctaactgaccggttcgtaatgggacctttccttcgggacagttaagacaggtggtgcatggttgtcgtcagctcgtgtcgtgagatgttgggttaagtcccgcaacgagcgcaacccctatctttagtagccagcatataaggtgggcactctagagagactgccagggataacctggaggaaggtggggacgacgtcaaatcatcatgccccttatggccagggctacacacgtgctacaatggcgtaaacaaagggaagcgaagtcgtgaggcgaagcaaatcccagaaataacgtctcagttcggattgtagtctgcaactcgactacatgaagctggaatcgctagtaatcgtgaatcagaatgtcacggtgaatacgttcccgggtcttgtacacaccgcccgtcacaccatgggagtcagtaacgcccgaagtcagtgacccaaccttataggagggagctgccgaaggtgggaccgataactggggtgaagtc

SEQ ID NO: 1487 - DNA, 1351 bp, Artificial Sequence; identical to SEQ ID NO: 667
  Synthetic polymer
  misc_feature (735)..(735): n is a, c, g, or t

SEQ ID NO: 1488 - DNA, 1375 bp, Artificial Sequence
  Synthetic polymer
  misc_feature (401)..(401): n is a, c, g, or t
tagtggcggacgggtgagtaacgcgtgggtaacctgccttatacagggggataacagccggaaacggttgctaataccgcataagcatacagtgccgcatggtacagtgtgaaaaagattaagttcaacttcgttgaactctggtataagatggacccgcgtctgattagctagttggtgaggtaatggctcaccaaggcgacgatcagtagccggcttgagagagtgaccggccacattgggactgagacacggcccaaactcctacgggaggcagcagtggggaatattgcacaatgggggaaaccctgatgcagcgacgccgcgtgagtgaagaagtattttcggtatgtaaagctctatcagcagggacgataatgaccgtaccctgactaagaagnccccggctaactacgtgccagcagccgcggtaatacgtagggggcaagcgttatccggatttactgggtgtaaagggagcgtagacggtctggtaagtcaggtgtgaaaagcccggggctcaaccccgggattgcacttgaaactacccgactagagtgcaggagaggtaagtggaattcctagtgtagcggtgaaatgcgtagatattaggaggaacaccagtggcgaaggcggcttactggactgtaactgacgttgaggctcgaaagcgtggggagcaaacaggattagataccctggtagtccacgccgtaaacgatgaatactaggtgttggggtccataaggacttcggtgccgtcgcaaacgcaataagtattccacctggggagtacgttcgcaagaatgaaactcaaaggaattgacggggacccgcacaagcggtggagcatgtggtttaattcgaagcaacgcgaagaaccttaccaggtcttgacatccctctgaccggtccgtaatgggacctttccctccggacagggaagacaggtgggtgcatggttgtcgtcagctcgtgtcgtgagatgttgggttaagtcccgcaacgagcccaacccctatctttagtagccagcagttcggctgggcactctagagagactgccagggataacctggaggaaggcggggatgacgtcaaatcatcatgccccttatgatctgggctacacacgtgctacaatggtgactacaaagagaagcaaagctgtgaagtggagccaatctcaaaaaggtcatctcagttcggattgtagtctgcaactcgactacatgaagctggaatcgctagtaatcgcagatcagaatgctgtggtgaatacgttcccgggtcttgtacacaccgcccgtcacatccatgggagttggatatgcccgaagtcagtgacccaaccgaaggaggagcgccgagggca

SEQ ID NO: 1489 - DNA, 1462 bp, Artificial Sequence
  Synthetic polymer
gctcaggatgaacgctggcggcgtgcttaacacatgcaagtcgaacgaagctgcttaacggaagccttcgggtggaagataagtagactgagtggcggacgggtgagtaacgcgtgggtaacctaccctgtacagggggataacagttagaaatgactgctaataccgcataagcgcacgatgtcgcatgacattgtgtgaaaagttttttcggtacaggatggacccgcgtctgattagctagttggtgaggtaatggctcaccaaggcgacgatcagtagccggctttaacgagtgaacggccacattgggactgagacacggcccaaactcctacgggaggcagcagtggggaatattgcacaatgggggaaaccctgatgcagcgacgccgcgtgagtgaagaagtatttcggtatgtaaagctctatcagcagggaagaaaatgacggtacctgactaagaagccccggctaactacgtgccagcagccgcggtaatacgtagggggcaagcgttatccggaattactgggtgtaaagggagcgtaggcggcagagcaagtcagaagtgaaaacccagggctcaactttgggattgcttttgaaactgttttgctagagtgtcggagaggtaagtggaattcctagtgtagcggtgaaatgcgtagatattaggaggaacaccagtggcgaaggcgacttactggacgatcactgacgctgaggctcgaaagcgtggggagcaaacaggattagataccctggtagtccacgccgtaaacgatgaatactaggtgttggggtccataaggacttcggtgccgcagctaacgcaataagtattccacctggggagtacgttcgcaagaatgaaactcaaaggaattgacggggacccgcacaagcggtggagcatgtggtttaattcgaagcaacgcgaagaaccttacctagtcttgacatccctctgaccggcgagtaacgtcgccttttccttcgggacagaggagacaggtggtgcatggttgtcgtcagctcgtgtcgtgagatgttgggttaagtcccgcaacgagcgcaacccctatctttagtagccagcatttaaggtgggcactctagagagactgccagggataacctggaggaaggtggggatgacgtcaaatcatcatgccccttatgactagggctacacacgtgctacaatggtgataacaaagtgaagcagcgccgtgaggctgagcaaatcacaaaaaagtcatctcagttcggattgtagtctgcaactcgactacatgaagctggaatcgctagtaatcgcgaatcagaatgtcgcggtgaatacgttcccgggtcttgtacacaccgcccgtcacaccatgggagttggaaatgcccgaagtcagtgacccaaccgtaaggagggagctgccgaaggtggtgccgatgactgggacga

SEQ ID NO: 1490 - DNA, 1493 bp, Artificial Sequence; identical to SEQ ID NO: 479
  Synthetic polymer

SEQ ID NO: 1491 - DNA, 1358 bp, Artificial Sequence
  Synthetic polymer
agagtttgatcctggctcaggatgaacgctggcggcgtgcttaacacatgcaagtcgaacgaagcacttaagacagattctttcgggatgaagacttttgtgactgagtggcggacgggtgagtaacgcgtgggtaacctgccttatacagggggatagcagttggaaacgactggtaataccgcataagcgcacagtaccgcatggtacagtgtgaaaaactccggtggtataagatggacccgcgtctgattagctggttggcagggtaacggcctaccaaggcgacgatcagtagccgacctgagagggtgaccggccacattgggactgagacacggcccagactcctacgggaggcagcagtggggaatattgcacaatggaggaaactctgatgcagcgacgccgcgtgagtgaagaagtatttcggtatgtaaagctctatcagcagggaagataatgacggtacctgactaagaagccccggctaactacgtgccagcagccgcggtaatacgtagggggcaagcgttatccggatttactgggtgtaaagggtgcgtaggtggtctggcaagtcagaagtgaaaacgcagggcttaaccctgcgactgcttttgaaactgtcagactagagtgcaggagaggcaagcggaattcctagtgtagcggtgaaatgcgtaggtattaggaggaacaccagtggcgaaggcggcttgctggactgttactgacactgaggcacgaaagcgtggggagcaaacaggattagataccctggtagtccacgccgtaaacgatgaatattaggtgtcggggcacaaaagtgcttcggtgccgcagccgacgcgataagtattccatctggggagggcgttcgcaagaatgaaactcaaaggaatcggcggggacccgcacaagcggcggagcatgtggtttaatttgaagcaacgtgaagagccttatcaggtcttgacatcgtcttgagcgatgcttaattgtatcttgtctttggagcaagagagacaggtggtgcatggttgtcgtcagctagtgtcgtgagatgttgggttaagtcccgcaagcgagcgccacccctatttttagtagccagcggttcggccgggcactctagagagatttccggggataactcggaggaaggtggggacgagcgtcaaatcatcatgccctctatgattaggcacaccagcgtgctccaatggcggatacaaagggaagcaaagccgggaggcagagcaaaccccaaaaaagccgtgtcagttcggatggtagtgtgcaactcgagtacatgaagcgggaatcgatagtaatcgagaatcagaacgtcgcgg

SEQ ID NO: 1492 - DNA, 1446 bp, Artificial Sequence; identical to SEQ ID NO: 1036
  Synthetic polymer

SEQ ID NO: 1493 - DNA, 1378 bp, Artificial Sequence; identical to SEQ ID NO: 745
  Synthetic polymer

SEQ ID NO: 1494 - DNA, 1391 bp, Artificial Sequence; identical to SEQ ID NO: 157
  Synthetic polymer

SEQ ID NO: 1495 - DNA, 1393 bp, Artificial Sequence; identical to SEQ ID NO: 185
  Synthetic polymer

SEQ ID NO: 1496 - DNA, 1396 bp, Artificial Sequence; identical to SEQ ID NO: 215
  Synthetic polymer

SEQ ID NO: 1497 - DNA, 1378 bp, Artificial Sequence; identical to SEQ ID NO: 810
  Synthetic polymer
  misc_feature (1356)..(1356): n is a, c, g, or t

SEQ ID NO: 1498 - DNA, 1495 bp, Artificial Sequence; identical to SEQ ID NO: 470
  Synthetic polymer

SEQ ID NO: 1499 - DNA, 1493 bp, Artificial Sequence
  Synthetic polymer
agagtttgatcctggctcaggatgaacgctggcggcgtgcttaacacatgcaagtcgagcgaagcacttggtttgaagttttcggatggaaaatcatttgactgagcggcggacgggtgagtaacgcgtggggaacctgcctcatacaggggaataacagctagaaatggctgctaatgccgcataagcgcacagtgccgcatggcacggtgtgaaaaactccggtggtatgagatggccccgcgtctgattaggcagttggcggggtaacggcccaccaaaccgacgatcagtagccgacctgagagggtgaccggccacattgggactgagacacggcccaaactcctacgggaggcagcagtgggggatattgcacaatgggggaaaccctgatgcagcgacgccgcgtgaaggaagaagtatttcggtatgtaaacttctatcagcagggaagaaaatgacggtacctgactaagaagccccggctaactacgtgccagcagccgcggtaatacgtagggggcaagcgttatccggatttactgggtgtaaagggagcgtaggcggcgatgcaagtcagaagtgaaagcccggggctcaactccgggactgcttttgaaactgtatggctagattgcaggagaggcaagtggaattcctagtgtagcggtgaaatgcgtagatattaggaggaacaccagtggcgaaggcggcttgctggactgtaaatgacgctgaggctcgaaagcgtggggagcaaacaggattagataccctggtagtccacgccgtaaacgatgaatactaggtgtcagggagcaaagctctttggtgccgcagcaaacgcaataagtattccacctggggagtacgttcgcaagaatgaaactcaaaggaattgacggggacccgcacaagcggtggagcatgtggtttaattcgaagcaacgcgaagaaccttaccaagtcttgacatccctgtgacaggagggtaacgcctctttctcttcggagcacaggagacaggtggtgcatggttgtcgtcagctcgtgtcgtgagatgttgggttaagtcccgcaacgagcgcaacccttatctttagtagccagcggaaaaagccgggcactctagagagactgccagggataacctggaggaaggtggggatgacgtcaaatcatcatgccccttatgatttgggctacacacgtgctacaatggcgtaaacaaagggaagcgaggcagtgatgtgaagcaaatcccaaaaataacgtctcagttcggattgtagtctgcaactcgactacatgaagctggaatcgctagtaatcgcgaatcagcatgtcgcggtgaatacgttcccgggtcttgtacacaccgcccgtcacaccatgggagttggtaacgcccgaagtcagtgacccaaccgcaaggagggagctgccgaaggtggagccggtaactggggtgaagtcgtaacaaggtaacc

SEQ ID NO: 1500 - DNA, 1395 bp, Artificial Sequence; identical to SEQ ID NO: 453
  Synthetic polymer

SEQ ID NO: 1501 - DNA, 1379 bp, Artificial Sequence; identical to SEQ ID NO: 408
  Synthetic polymer

SEQ ID NO: 1502 - DNA, 1380 bp, Artificial Sequence; identical to SEQ ID NO: 327
  Synthetic polymer

SEQ ID NO: 1503 - DNA, 1389 bp, Artificial Sequence; identical to SEQ ID NO: 282
  Synthetic polymer

SEQ ID NO: 1504 - DNA, 1355 bp, Artificial Sequence; identical to SEQ ID NO: 281
  Synthetic polymer

SEQ ID NO: 1505 - DNA, 1358 bp, Artificial Sequence; identical to SEQ ID NO: 785
  Synthetic polymer
  misc_feature (754)..(754): n is a, c, g, or t

SEQ ID NO: 1506 - DNA, 1391 bp, Artificial Sequence
  Synthetic polymer
agagtttgatcctggctcaggatgaacgctggcggcgtgcctaacacatgcaagtcgagcgaagcgggtttcatgaagttttcggatggattgagacttgactgagcggcggacgggtgagtaacgcgtgggtaacctgccttatacagggggataacagttagaaatgactgctaataccgcataagcgcacggctccgcatggaacagtgtgaaaaactgaggtggtataagatggacccgcgtctgattagctagttggtggggtaacggcctaccaaggcgacgatcagtagccgacctgagagggtgaccggccacattgggactgagacacggcccaaactcctacgggaggcagcagtggggaatattgcacaatgggggaaaccctgatgcagcgacgccgcgtgagtgaagaagtatttcggtatgtaaagctctatcagcagggaagaaaatgacggtacctgactaagaagccccggctaactacgtgccagcagccgcggtaatacgtagggggcaagcgttatccggatttactgggtgtaaagggagcgtagacggcgaggcaagtctgaagtgaaagcccggggcttaaccccgggactgctttggaaactgtcatgctagagtgcaggagaggtaagcggaattcctagtgtagcggtgaaatgcgtagatattaggaggaacaccagtggcgaaggcggcttactggactgaaactgacactgaggcacgaaagcgtggggagcaaacaggattagataccctggtagtccacgccgtaaacgatgaatactaggtgtcggggtcgaaaagacttcggtgccgcagcaaacgcaataagtattccacctggggagtacgttcgcaagaatgaaactcaaaggaattgacggggacccgcacaagcggtggagcatgtggtttaattcgaagcaacgcgaagaaccttaccaagtcttgacatccaactgaccagtagagtaatgtctacctttcttcggaacagttgagacaggtggtgcatggttgtcgtcagctcgtgtcgtgagatgttgggttaagtcccgcaacgggcgcaacccctatctttagtagccagcatataggatgggcactctagagagactgccagggataacttggaggaaggtggggatgacgtcaaatcatcatgccccttatgatttgggctacacacgtgctacaatggtgataacaaagtgaggcgaacctgcgagggggagcgaaccacagaaaaatcatctcagttcggattgtagtcagcaactcgactacatgaagctggaatcgctagtaatcgcgaatcagaatgtcgcggtgaatacgttcccgggtcttgcacacaccgcccgtca

SEQ ID NO: 1507 - DNA, 1443 bp, Artificial Sequence; identical to SEQ ID NO: 1084
  Synthetic polymer

SEQ ID NO: 1508 - DNA, 1393 bp, Artificial Sequence
  Synthetic polymer
agagtttgatcctggctcaggatgaacgctggcggcgtgcttaacacatgcaagtcgaacgaagcactgaaagcagattacttcggtttgaagctttctttgactgagtggcggacgggtgagtaacgcgtgggtaacctgcctcatacagggggataacagttagaaatgactgctaataccgcataagcgcacggtttcgcatggaacagtgtgagaaactccggtggtatgggatggacccgcgtctgattagctggttggcggggtaacggcccaccaaggcgacgatcagtagccggcctgagagggtgaacggccacattgggactgagacacggcccaaactcctacgggaggcagcagtggggaatattgcaccatgggggaaaccctgatgcagcgacgccgcgtgaaggaagaagtatttcggtatgtaaacttctatcagcagggaagaaaatgacggtacctgactaagaagccccggctaactacgtgccagcagccgcggtaatacgtagggggcaagcgttatccggatttactgggtgtaaagggagcgtaggcggcgatgcaagtcagaagtgaaagcccggggctcaactccgggactgcttttgaaactgtgttgctagattgcaggagaggtaagtggaattcctagtgtagcggtgaaatgcgtagatattaggaggaacaccagtggcgaaggcggcttactggactgtaaatgacgctgaggctcgagagcgtggggagcaaacaggattagataccctggtagtccacgccgtaaacgatgaatactaggtgtcagggagcaaggctctttggtgccgcagcaaacgcagtaagtattccacctggggagtacgttcgcaagaatgaaactcaaaggaattgacggggacccgcacaagcggtggagcatgtggtttaattcgaagcaacgcgaagaaccttaccaagtcttgacatccggatgaccggaaattaaccgttccttcccttcggggcatccgagacaggtggtgcatggttgtcgtcagctcgtgtcgtgagatgttgggttaagtcccgcaacgagcgcaacccttatctttagtagccagcggaagaagccgggcactctagagagactgccagggataacctggaggaaggtggggatgacgtcaaatcatcatgccccttatgatttgggctacacacgtgctacaatggcgtaaacaaagggaagcgagcatgcgaatgtaagcaaatctcaaaaataacgtctcagttcggattgtagtctgcaactcgactacatgaagctggaatcgctagtaatcgcgaatcagcatgtcgcggtgaatacgttcccgggtcttgcactcaccgcccgtca

SEQ ID NO: 1509 - DNA, 1392 bp, Artificial Sequence; identical to SEQ ID NO: 573
  Synthetic polymer

SEQ ID NO: 1510 - DNA, 1462 bp, Artificial Sequence; identical to SEQ ID NO: 74
  Synthetic polymer

SEQ ID NO: 1511 - DNA, 1397 bp, Artificial Sequence; identical to SEQ ID NO: 284
  Synthetic polymer

SEQ ID NO: 1512 - DNA, 1436 bp, Artificial Sequence
  Synthetic polymer
cggcgtgcttaacacatgcaagtcgaacgaagctgctttttggaagccttcgggtggaagataagtagactgagtggcggacgggtgagtaacgcgtgggtaacctaccctgtacagggggataacagttagaaatgactgctaataccgcataagcgcacgatgtcgcatgacattgtgtgaaaagttttttcggtacaggatggacccgcgtctgattagctagttggtgaggtaacggctcaccaaggcgacgatcagtagccggctttaacgagtgaacggccacattgggactgagacacggcccaaactcctacgggaggcagcagtggggaatattgcacaatgggggaaaccctgatgcagcgacgccgcgtgagtgaagaagtatttcggtatgtaaagctctatcagcagggaagaaaatgacggtacctgactaagaagccccggctaactacgtgccagcagccgcggtaatacgtagggggcgagcgttatccggaattactgggtgtaaagggagcgtaggcggcagagcaagtcagaagtgaaaacccagggctcaactttgggattgcttttgaaactgttttgctagagtgtcggagaggtaagtggaattcctagtgtagcggtgaaatgcgtagatattaggaggaacaccagtggcgaaggcgacttactggacgatcactgacgctgaggctcgaaagcgtggggagcaaacaggattagataccctggtagtccacgccgtaaacgatgaatactaggtgttggggtccataaggacttcggtgccgcagctaacgcaataagtattccacctggggagtacgttcgcaagaatgaaactcaaaggaattgacggggacccgcacaagcggtggagcatgtggtttaattcgaagcaacgcgaagaaccttacctagtcttgacatccctctgaccggtgagtaatgtcacctttccttcgggacagaggagacaggtggtgcatggttgtcgtcagctcgtgtcgtgagatgttgggttaagtcccgcaacgagcgcaacccctatctttagtagccatcattcagttgggcactctagagagactgccagggataacctggaggaaggtggggatgacgtcaaatcatcatgccccttatgtttagggctacacacgtgctacaatgggtgctacaaagggaagcaaatccgcgaggccgagcaaatctcaaaaaagcactcccagttcggattgtagtctgcaactcgactacatgaagttggaatcgctagtaatcgcgaatcagaatgtcgcggtgaatacgttcccgggtcttgtacacaccgcccgtcacaccatgggagttgggggggcccaacgccagtgacctaacccgtaagggaaggagctgtctaaggcaaaaccaatgac

SEQ ID NO: 1513 - DNA, 1380 bp, Artificial Sequence; identical to SEQ ID NO: 186
  Synthetic polymer

SEQ ID NO: 1514 - DNA, 1376 bp, Artificial Sequence; identical to SEQ ID NO: 128
  Synthetic polymer

SEQ ID NO: 1515 - DNA, 1386 bp, Artificial Sequence; identical to SEQ ID NO: 433
  Synthetic polymer

SEQ ID NO: 1516 - DNA, 1385 bp, Artificial Sequence
  Synthetic polymer
ttagagtttgatcctggctcacgatgaacgctggcggcgtgcttaacacatgcaagtcgaacgaagcacttggatttcttcggattgataagtgactgagtggcggacgggtgagtaacgcgtgggtaacctgcctcatacagggggataacagttagaaatgactgctaataccgcataagcgcacagtgctgcatggcacagtgtgaaaaactccggtggtatgagatggacccgcgtctgattagctagttggtgaggtaacggcccaccaaggcgacgatcagtagccggcctgagagggtgaccggccacattgggactgagacacggcccaaactcctacgggagacagcagtggggaatattgcacaatgggggaaaccctgatgcagcaacgccgcgtgaaggaagacgtatttcggtatgtaaacttctatcagcaaggaagatgatgacggtacttgactaagaagccccggctaactacgtgccagcagccgcggtaatacgtagggggcaagcgttatccggatttactgggtgtaaagggagcgtaggcggccatgcaagtcagaagtgaaagcccggggctcaaccccgggactgcttttgaaactgtaaggctagattgccggagaggtaagcggaattcctactgtagcggtgagatgcgtagatattaggaggaaccccagtggcgaaggcggcttactggacggtaaatgacgctgaggctcgaaagcgtggggagcagacaggattagatactctggtagtccacgccgtaaacgatgaatactaggtgtcggggcccaaaagggtttcggtgccgcagctaacgcaataagtattccacctggggagtacgttcgcaagaatgaaactcaaaggaattgacggggacccgcacaagcggtggagcatgtggtttaattcgaagcaacgcgaagaaccttaccaggtcttgacatctcgatgaccggagagtaacgtctcctttcctacgggacatcggtgacaggcggtgcatggttgtcgtcagctcgtgtcgtgagatgttgggttaagtcccgcaacgagcgcaacccctatttttagtagccagcggtttggccgggcactctagagagactgccagggataacctggaggaaggtggggatgacgtcaaatcatcatgccccttatgatctgggctacacacgtgctacaatggtggtaacaaagtgaggcaaacctgcgagggggagcaaatcacagaaaagccatctcagttcggattgtagtctgcaactcgactacatgaagctggaatcgctagtaatcgcgaatcagcatgtcgcggtgaatacgttcccgggtaattgtacacagcgcccgtc

SEQ ID NO: 1517 - DNA, 1476 bp, Artificial Sequence
  Synthetic polymer
gatgaacgctggcggcgtgcttaacacatgcaagtcgaacgaagcacttttaattcttcggaagagaaagcgactgagtggcggacgggtgagtaacgcgtgggtaacccgccttatacagggggataacagttggaaacgactgctaataccgcataagccggtagagccgcatggctccttcggaaaagatttatcggtataagatggacccgcgtctgattagctagttggtggggtaaaggcctaccaaggcgacgatcagtagccggcttgagagagtgaacggccacattgggactgagacacggcccaaactcctacgggaggcagcagtggggaatattgcacaatgggggaaaccctgatgcagcaacgccgcgtgaaggaagaagtatttcggtatgtaaacttctatcagcaggaaagaaaatgacggtacctgactaagaagccccggctaactacgtgccagcagccgcggtaatacgtagggggcaagcgttatccggatttactgggtgtaaagggagcgtaggtggcattgcaagtctggtgtgaaagcccggggctcaaccccgggactgcattggaaactgtgatgctagagtgcaggagaggtaagtggaattcctagtgtagcggtgaaatgcgtagatattaggaggaacaccagtggcgaaggcggcttactggactgtaactgacactgaggctcgaaagcgtggggagcaaacaggattagataccctggtagtccacgccgtaaacgatgaatactaggtgccgggaagctaaagcttttcggtgccgcagctaacgcaataagtattccacctggggagtacgttcgcaagaatgaaactcaaaggaattgacggggacccgcacaagcggtggagcatgtggtttaattcgaagcaacgcgaagaaccttaccaaatcttgacatccctctgacagcatatgtaatgtatgtttccttcgggacagaggagacaggtggtgcatggttgtcgtcagctcgtgtcgtgagatgttgggttaagtcccgcaacgagcgcaacccttatctttagtagccagcatttaaggtgggcactctagagagactgccggggataacccggaggaaggcggggatgacgtcaaatcatcatgccccttatgatttgggctacacacgtgctacaatggcgtaaacaaagggaagcgaaatggtgacatggagcaaatcccaaaaataacgtctcagttcgggttgtagtctgcaactcgactacatgaagctggaatcgctagtaatcgcgaatcagaatgtcgcggtgaatacgttcccgggtcttgtacacaccgcccgtcacaccatgggagttggaaatgcccgaagtcagtgacccaaccgtaaggagggagctgccgaaggtggagccgataactggggtgaagtcgtaacaaggtagccgtatcggaagg

SEQ ID NO: 1518 - DNA, 1362 bp, Artificial Sequence; identical to SEQ ID NO: 837
  Synthetic polymer

SEQ ID NO: 1519 - DNA, 1495 bp, Artificial Sequence
  Synthetic polymer
agagtttgatcctggctcaggatgaacgctggcggcgtgcttaacacatgcaagtcgaacggagtttataagcggaagtcttcggatggaagcttgtgaacttagtggcggacgggtgagtaacgcgtgggtaacctgccttacacagggggataacagccggaaacggctgctaataccgcataagcgcacagtgctgcatggtaccgtgtgaaaagattttatcggtgtaagatggacccgcgtctgattagctagttggtggggtaacggcctaccaaggcaacgatcagtagccggcttgagagagtgaacggccacattgggactgagacacggcccaaactcctacgggaggcagcagtggggaatattgcacaatgggggaaaccctgatgcagcgacgccgcgtgagtgaagaagtatttcggtatgtaaagctctatcagcagggacgaaaaaatgacggtacctgactaagaagccccggctaactacgtgccagcagccgcggtaatacgtagggggcaagcgttatccggatttactgggtgtaaagggagcgtagacggtgatgtaagtcagatgtgaaagcccggggctcaaccccgggactgcatttgaaactatgttgctagagtgcaggagaggtaagtggaattcctagtgtagcggtgaaatgcgtagatattaggaggaacaccagtggcgaaggcggcttactggactgtaactgacgttgaggctcgaaagcgtggggagcaaacaggattagataccctggtagtccacgccgtaaacgatgaatactaggtgttgggggtcaaaagaccttcggtgccgtcgcaaacgcattaagtattccacctggggagtacgttcgcaagaatgaaactcaaaggaattgacggggacccgcacaagcggtggagcatgtggtttaattcgaagcaacgcgaagaaccttaccaggtcttgacatccctctgaccggatcttaaccggtcctttccttcgggacagaggagacaggtggtgcatggttgtcgtcagctcgtgtcgtgagatgttgggttaagtcccgcaacgagcacaacccttatccttagtagccagcagttcggctgggcactctagggagactgccagggataacctggaggagggcggggatgacgtcaaatcatcatgccccttatgatctgggctacacacgtgctacaatggtgactacagagggaagcagcctcgtgagagtgagcaaatcccaaaaaggtcatctcagttcggattgtagtctgcaactcgactacatgaagctggaatcgctagtaatcgcgaatcagaatgtcgcggtgaatacgttcccgggtcttgtacacaccgcccgtcacaccatgggagttggaaatacctgaagtctgtgacccaaccgtaaggagggagcagccgaaggcaggttcaataactggggtgaagtcgtaacaaggtaacc

SEQ ID NO: 1520 - DNA, 1437 bp, Artificial Sequence; identical to SEQ ID NO: 22
  Synthetic polymer

SEQ ID NO: 1521 - DNA, 1390 bp, Artificial Sequence; identical to SEQ ID NO: 579
  Synthetic polymer

SEQ ID NO: 1522 - DNA, 1373 bp, Artificial Sequence; identical to SEQ ID NO: 773
  Synthetic polymer

SEQ ID NO: 1523 - DNA, 1391 bp, Artificial Sequence; identical to SEQ ID NO: 444
  Synthetic polymer

SEQ ID NO: 1524 - DNA, 1391 bp, Artificial Sequence; identical to SEQ ID NO: 265
  Synthetic polymer

SEQ ID NO: 1525 - DNA, 1415 bp, Artificial Sequence
  Synthetic polymer
cttacacatgcaagtcgaacgaagcaatgaagaagaagttttcggatggatttttcattgacttagtggcggacgggtgagtaacgcgtgggtaacctgcctcatacagggggataacagttggaaacgactgctaataccgcataagcctacagtatcgcatggtacagtaggaaaatatttataggtatgagatggacccgcgtctgattagctagttggtaaggtaacggcttaccaaggcgacgatcagtagccgacttgagagagtgatcggccacattgggactgagacacggcccaaactcctacgggaggcagcagtggggaatattgcacaatgggggaaaccctgatgcagcgacgccgcgtgagtgaagaagtatttcggtatgtaaagctctatcagcaaggaagataatgacggtacttgactaagaagccccggctaactacgtgccagcagccgcggtaatacgtagggggcaagcgttatccggatttactgggtgtaaagggagcgtaggtggcatggtaagtcagatgtgaaagcccggggctcaaccccgggattgcatttgaaactatcaagctagagtgcaggagaggtaagtggaattcctagtgtagcggtgaaatgcgtagatattaggaggaacaccagtggcgaaggcggcttactggactgtaactgacactgatgctcgaaagcgtggggagcaaacaggattagataccctggtagtccacgccgtaaacgatgaatactaggtgttgggggtcaaaagaccttcggtgccgcagcaaacgcattaagtattccacctggggagtacgttcgcaagaatgaaactcaaaggaattgacggggacccgcacaagcggtggagcatgtggtttaattcgaagcaacgcgaagaaccttaccaagtcttgacatccctctgacaagctcttaatcgagttctcccttcggggcagaggagacaggtggtgcatggttgtcgtcagctcgtgtcgtgagatgttgggttaagtcccgcaacgagcgcaacccctatctttagtagccagcacattaggtgggcactctagagagactgccagggataacctggaggaaggtggggatgacgtcaaatcatcatgccccttatgacttgggctacacacgtgctacaatggtgataacaaagggaagcgacctcgcgagagtaagccaatctcataaatatcatctcagttcggattgtagtctgcaactcgactacatgaagctggaatcgccagtaatcgcgaatcagaatgtcgcggtgaatacgttcccgggtcttgtacacaccgcccgacacaccacgggagttggatatgcccgaagtcagtgacctaaccgtaagggaggagctgcccgaagg

SEQ ID NO: 1526 - DNA, 1492 bp, Artificial Sequence
  Synthetic polymer
agagtttgatcctggctcaggatgaacgctggcggcgtgcttaacacatgcaagtcgaacggagttaataagtagaagtcttcggatggaagcttataaacttagtggcggacgggtgagtaacgcgtgggtaacctgccttatacagggggataacagccggaaacggttgctaataccgcataagcatacagtgccgcatggtaccgtgtgaaaagatttatcggtataagatggacccgcgtctgattagctagttggtgaggtaatggcccaccaaggcgacgatcagtagccggcttgagagagtgaccggccacattgggactgagacacggcccaaactcctacgggaggcagcagtggggaatattgcacaatgggggaaaccccgatgcagcgacgccgcgtgagtgaagaagtatttcggtatgtaaagctctatcagcagggacgataatgacggtacctgactaagaagccccggctaactacgtgccagcagccgcggtaatacgtagggggcaagcgttatccggatttactgggtgtaaagggagcgtagacggtgtggtaagtcaggtgtgaaagcccggggctcaaccccgggattgcacttgaaactatcaaactagagtgcaggagaggtaagtggaattcctagtgtagcggtgaaatgcgtagatattaggaggaacaccagtggcgaaggcggcttactggactgtaactgacgttgaggctcgaaagcgtggggagcaaacaggattagataccctggtagtccacgccgtaaacgatgaatactaggtgttggggtccataaggacttcggtgccgtcgcaaacgcaataagtattccacctggggagtacgttcgcaagaatgaaactcaaaggaattgacggggacccgcacaagcggtggagcatgtggtttaattcgaagcaacgcgaagaaccttaccaggtcttgacatccctctgaccggtccgtaacgggacctttccttcgggacaggggagacaggtggtgcatggttgtcgtcagctcgtgtcgtgagatgttgggttaagtcccgcaacgagcgcaacccctatctttagtagccagcaggtaaggctgggcactctagagagactgccagggataacctggaggaaggcggggatgacgtcaaatcatcatgccccttatgatctgggctacacacgtgctacaatggtgactacaaagagaagcaaagctgtgaagtggagcaaatctcaaaaaggtcatctcagttcggattgtagtctgcaactcgactacatgaagctggaatcgctagtaatcgcagatcagaatgctgtggtgaatacgttcccgggtcttgtacacaccgcccgtcacacatgggagttggatatgcccgaagtcagtgacccaaccgtaaggagggagctgccgaaggtggagccaatgactggggtgaagtcgtaacaaggtaacc

SEQ ID NO: 1527 - DNA, 1445 bp, Artificial Sequence; identical to SEQ ID NO: 66
  Synthetic polymer

SEQ ID NO: 1528 - DNA, 1387 bp, Artificial Sequence
  Synthetic polymer
agagtttgatcctggctcaggatgaacgctggcggcgtgcttaacacatgcaagtcgagcgaagcacttaagtttgattcttcggatgaagacttttgtgactgagcggcggacgggtgagtaacgcgtgggtaacctgcctcatacagggggataacagttagaaatgactgctaataccgcataagaccacagggtcgcatgacccggtggtaaaaactccggtggtatgagatggacccgcgtctgattagctagttggtggggtaacggctcaccaaggcgacgatcagtagccgacctgagagggtgaccggccacattgggactgagacacggcccaaactcctacgggaggcagcagtggggaatattgcacaatgggggaaaccctgatgcagcgacgccgcgtgaaggatgaagtatttcggtatgtaaacttctatcagcagggaagaaaatgacggtacctgactaagaagccccggctaactacgtgccagcagccgcggtaatacgtagggggcaagcgttatccggatttactgggtgtaaagggagcgtagacggcatggcaagtctgaagtgaaagcccggggctcaaccccgggactgctttggaaactgtcaggctagagtgctggagaggtaagtggaattcctagtgtagcggtgaaatgcgtagatattaggaggaacaccagtggcgaaggcggcttactggacagtgactgacgttgaggctcgaaagcgtggggagcaaacaggattagataccctggtagtccacgccgtaaacgatgagtactaagtgttgggtgtcaaagctcagtgctgcagttaacgcaataagtactccgcctgagtagtacgttcgcaagaatgaaactcaaaggaattgacggggacccgcacaagcggtggagcatgtggtttaattcgaagcaacgcgaagaaccttaccaaatcttgacatccctctgaccggtctttaatcggaccttctcttcggagcagaggtgacaggtggtgcatggttgtcgtcagctcgtgtcgtgagatgttgggttaagtcccgcaacgagcgcaacccctatcctcagtagccagcatttaaggtgggcactctggggagactgccagggataacctggaggaaggcggggatgacgtcaaatcatcatgccccttatgatttgggctacacacgtgctacaatggcgtaaacaaagggaagcgagattgtgagatggagcaaatcccaaaaataacgtcccagttcggactgtagtctgcaacccgactacacgaagctggaatcgctagtaatcgcggatcagaatgccgcggtgaatacgttcccgggtcttgcactcaccgcccgtca

SEQ ID NO: 1529 - DNA, 1391 bp, Artificial Sequence; identical to SEQ ID NO: 100
  Synthetic polymer

SEQ ID NO: 1530 - DNA, 1383 bp, Artificial Sequence
  Synthetic polymer
agagtttgatcctggcccaggatccccgctggcggcgtgcttaacacatgcaagtcgaacgaagcactccgagatcttcggaaggaagagtgactgagtggcggacgggtgagtaacgcgtgggtaacctgccttacagagggggataacagttggaaacggctgctaataccgcataagcgcacggaatcgcatgattcagtgtgaaaaactcaggtgctgtaagatggacccgcgttggattagctagttggtgaggtaacggcccaccaaggcgacgatccatagccggcctgagagggtgaccggccacattgggactgagacacggcccaaactcctacgggaggcagcagtggggaatattgcacaatgggcgaaagcctgatgcagcaatgccgcgtgaaggacgacgtatttcggtatgtaaacttctatcagcagggaagacaatgacggtacctgactaagaagccccggctaactacgtgccagcagccgcggtaatacgtagggggcaagcgttatccggatttactgggtgtaaagggagcgtaggcggtcttgcaagtcagaagtgaaagcccggggctcaactccgggactgcttttgaaactgtaggactagatttcaggagaggtaagcggaattcctagtgtagcggtgaaatgcgtagatattaggaggaacaccagtggcgaaggcggcttactggactgataatgacgctgaggctcgaaagcgtggggagcaaacaggattagataccctggtagtccacgccgtaaacgatgaatactaggtgtcgggggtcagaagactttcggtgccgcagcaaacgcaataagtattccacctggggagtacgttcgcaagaatgaaactcaaaggaattgacggggacccgcacaagcggtggagcatgtggtttaattcgaagcaacgcgaagaaccttaccaagtcttgacatcccactgaccggccagtaacgtggtcttctcttcggagcagtggagacaggtggtgcatggttgtcgtcagctcgtgtcgtgagatgttgggttaagtcccgcaacgagcgcaacccctatctttagtagccagcggccaggccgggcactctagagagactgccggggataacccggaggaaggcggggatgacgtcaaatcatcatgccccttatgatttgggctacacacgtgctacaatggtggtaacaaagtgaagcgatcacgtgagtgtgagcaaatcacaaaaaagccatctcagttcggattgtagtctgcaactcgactacatgaagctggaatcgctagtaatcgcgaatcagaatgtcgcggtgaatacgttcccgggtcttgcacacaccgcccgtca

SEQ ID NO: 1531 - DNA, 1378 bp, Artificial Sequence
  Synthetic polymer
agagtttgatcctggctcaggatgaacgctggcggcgtgcttaacacatgcaagtcgaacgggaaacattttattgaagcttcggcagatttagattgtttctagtggcggacgggtgagtaacgcgtgggtaacctgccttataccgggggataacagccagaaatgactgctaataccgcataagcgcacagaaccgcatggttccgtgtgaaaaactccggtggtataagatggacccgcgttggattagctagttggcagggcagcggcctaccaaggcgacgatccatagccggcctgagagggtgaacggccacattgggactgagacacggcccagactcctacgggaggcagcagtggggaatattgcacaatgggggaaaccctgatgcagcgacgccgcgtgaaggaagaagtatctcggtatgtaaacttctatcagcagggaagataatgacggtacctgactaagaagccccggctaactacgtgccagcagccgcggtaatacgtagggggcaagcgttatccggaattactgggtgtaaagggtgcgtaggtggtatggcaagtcagaagtgaaaacccagggcttaactctgggactgcttttgaaactgtcagactggagtgcaggagaggtaagcggaattcctagtgtagcggtgaaatgcgtagatattaggaggaacatcagtggcgaaggcggcttactggactgaaactgacactgaggcacgaaagcgtggggagcaaacaggattagataccctggtagtccacgccgtaaacgatgaatactaggtgtcggggccgtagaggcttcggtgccgcagccaacgcagtaagtattccacctggggagtacgttcgcaagaatgaaaactcaaaggaattgacggggacccgcacaagcggtggagcatgtggtttaattcgaagcaacgcgaagaaccttacctggtcttgacatcccgatgaccggcccgtaacggggccttctcttcggagcattggagacaggtggtgcatggttgtcgtcagctcgtgtcgtgagatgttgggttaagtcccgcaacgagcgcaacccttatcctcagtagccagcaggtcaagctgggcactctgtggagactgccagggataacctggaggaaggtggggatgacgtcaaatcatcatgccccttatgatctgggctacacacgtgctacaatggcgtaaacaaagggaggcaaagccgcgaggtggagcaaatcccaaaaataacgtctcagttcggactgcagtctgcaactcgactgcacgaagctggaatcgctagtaatcgcgaatcagaatgtcgcggtgaatacgttcccgggtcttgcac

SEQ ID NO: 1532 - DNA, 1387 bp, Artificial Sequence
  Synthetic polymer
agagtttgatcctggctcacgatgaacgctggcggcgtgcttaacacatgcaagtcgaacgaagcgctccggacgattctttcgggatgagactggagggactgagtggcggacgggtgagtaacgcgtgggtaacctgcctcatacagggggataacagtcagaaatggctgctaataccgcataagcgcacagtaccgcatggtacggtgtgaaaaactccggtggtatgagatggacccgcgtctgattagctggttggcagggtaacggcctaccaaggcgacgatcagtagccggcttgagagagtggacggccacattgggactgagacacggcccagactcctacgggaggcagcagtggggaatattgcacaatgggggaaaccctgatgcagcgacgccgcgtgagtgaagaagtatttcggtatgtaaagctctatcagcagggaagaaaatgacggtacctgactaagaagccccggctaactacgtgccagcagccgcggtaatacgtagggggcaagcgttatccggaattactgggtgtaaagggtgcgtaggtggtgcggcaagtcagaagtgaaagcccggggctcaactccgggactgcttttgaaactgtcggactggagtgcaggagaggtaagcggaattcctagtgtagcggtgaaatgcgtagatattaggaggaacaccagtggcgaaggcggcttactggactgtcactgacactgaggcacgaaagcgtggggagcaaacaggattagataccctggtagtccacgccgtaaacgatgaatactaggtgtcggggccgcagaggcttcggtgccgcagcaaacgcagtaagtattccacctggggagtacgttcgcaagaatgaaactcaaaggaattgacggggacccgcacaagcggtggagcatgtggtttaattcgaagcaacgcgaagaaccttacctggtcttgacatcctccggaccggcccgtaacggggcctttccttcgggactggagagacaggtggtgcatggttgtcgtcagctcgtgtcgtgagatgttgggttaagtcccgcaacgagcgcaacccttatctttagtagccagcattttggatgggcactctagagagactgccagggataacctggaggaaggtggggatgacgtcaaatcatcatgcccctcatggccagggctacacacgtgctacaatggtggtaacagagtgaggcaaacccgcgagggggagcacatcacaaaaatgccatcccaccccccatcgtagtctgcaactcgactacatgaagctggaatcgctagtaatcgcgaatcagaatgtcccggtgaatacgttcccggggtcttgtacacaccgccc

SEQ ID NO: 1533 - DNA, 1390 bp, Artificial Sequence
  Synthetic polymer
agagtttgatcctggctcaggatgaacgctggcggcgtgcctaacacatgcaagtcgaacgaagcaccttttaagattcttcggatgattgatcggtgactgagtggcggacgggtgagtaacgcgtgggtaacctgccctgtacagggggataacagttggaaacgactgctaataccgcataagcgcacgagaggacatcctctagtgtgaaaaactccggtggtacaggatgggcccgcgtctgattagctggttggcagggtaacggcctaccaaggcgacgatcagtagccggtctgagaggatgaacggccacattggaactgagacacggtccaaactcctacgggaggcagcagtggggaatattgcacaatggggggaaccctgatgcagcaacgccgcgtgagtgaagaagtatttcggtatgtaaagctctatcagcagggaagataatgacggtacctgactaagaagctccggctaaatacgtgccagcagccgcggtaatacgtatggagcaagcgttatccggatttactgggtgtaaagggtgcgtaggtggcagtgcaagtcagatgtgaaaggccggggctcaaccccggagctgcatttgaaactgctcggctagagtacaggagaggcaggcggaattcctagtgtagcggtgaaatgcgtagatattaggaagaacaccagtggcgaaggcggcttactggacggtaactgacgttgaggctcgaaagcgtggggagcaaacaggattagataccctggtagtccacgccgtaaacgatgaatgctaggtgttgggggagcaaagctcttcggtgccgccgcaaacgcattaagcattccacctggggagtacgttcgcaagaatgaaactcagaggaattgacggggacccgcacaagcggtggagcatgtggtttaattcgaagcaacgcgaagaaccttaccaggtcttgacatcccgatgaccggttcgtaatggaactttctcttcggagcattggagacaggtggtgcatggttgtcgtcagctcgtgtcgtgagatgttgggttaagtcccgcaacgagcgcaacccttatcctcagtagccagcaggtcaagctgggcactctgtggagactgccagggataacctggaggaaggtggggatgacgtcaaatcatcatgccccttatgatctgggctacacacgtgctacaatggcgtaaacaaagggaggcaaagccgcgaggtggagcaaatcccaaaaataacgtctcagttcggactgcagtctgcaactcgactgcacgaagctggaatcgctagtaatcgcgaatcagaatgtcgcggtgaatacgttcccgggtcttgtactcaccgcccgtca

SEQ ID NO: 1534 - DNA, 1391 bp, Artificial Sequence
  Synthetic polymer
agagtttgatcctggctcaggatgaacgctggcggcgtgcttaacacatgcaagtcgaacgaagcaatttgatcggatctcttcggagtgacgaacttattgactgagtggcggacgggtgagtaacgcgtgggtaacctgccttgcacagggggataacagttagaaatgactgctaataccgcataacccgctagtaccgcatggtacggacggaaaagatttatcggtgtaagatggacccgcgtctgattagctagttggtgaggtaacggctcaccaaggcaacgatcagtagccggcttgagagagtgatcggccacattgggactgagacacggcccaaactcctacgggaggcagcagtggggaatattgcacaatgggggaaaccctgatgcagcgacgccgcgtgagtgaagaagtatttcggtatgtaaagctctatcagcagggaagaaaatgacggtacctgactaagaagccccggctaactacgtgccagcagccgcggtaatacgtagggggcaagcgttatccggatttactgggtgtaaagggagcgtaggtggtctggcaagtcagatgtgaaaacccggggcttaactccgggattgcatttgaaactgttagactagagtgcaggagaggtaagtggaattcctagtgtagcggtgaaatgcgtagatattaggaggaacaccagtggcgaaggcggcttactggactgtaactgacactgaggctcgaaagcgtggggagcaaacaggattagataccctggtagtccacgccgtaaacgatgaatactaggtgtcggggcccacagggcttcggtgccgcagctaacgcattaagtattccacctggggagtacgttcgcaagaatgaaactcaaaggaattgaccgggacccgcacaagcggtggagcatgtggtttaattcgaagcaacgcgaagaaccttaccaagtcttgacatcctcctgaccgttccttaatcggaacttctcttcggagcaggagtgacaggtggtgcatggttgtcgtcagctcgtgtcgtgagatgttgggtcaagtcccgcaacgagcgcaacccttattttcagtagccagcagttcggctgggcactctggagagactgccggggataacccggaggaaggtggggatgacgtcaaatcatcatgccccttatgacttgggctacacacgtgctacaatggtgataacaaagggaagcagtcctgtgaaggtgagcaaatcccaaaaatgtcatctcagttcggattgtagtctgcaactcgactacatgaagctggaatcgctagtaatcgcgaatcagaatgtcgcggtgaatacgttcccgggtctgtacacaccgcccgtca

SEQ ID NO: 1535 - DNA, 1393 bp, Artificial Sequence; identical to SEQ ID NO: 431
  Synthetic polymer

SEQ ID NO: 1536 - DNA, 1451 bp, Artificial Sequence; identical to SEQ ID NO: 940
  Synthetic polymer

SEQ ID NO: 1537 - DNA, 1379 bp, Artificial Sequence; identical to SEQ ID NO: 460
  Synthetic polymer

SEQ ID NO: 1538 - DNA, 1393 bp, Artificial Sequence
  Synthetic polymer
agagtttgatcctggctcaggatgaacgctggcggcgtgcttaacacatgcaagtcgaacgaagcactgaaagcagattacttcggtttgaagctttctttgactgagtggcggacgggtgagtaacgcgtgggtaacctgcctcatacagggggataacagttagaaatgactgctaataccgcataagcgcacggtttcgcatggaacagtgtgaaaaactccggtggtatgggatggacccgcgtctgattagctggttggcggggtaacggcccaccaaggcgacgatcagtagccggcctgagagggtgaacggccacattgggactgagacacggcccaaactcctacgggaggcagcagtggggaatattgcacaatgggggaaaccctgatgcagcgacgccgcgtgaaggaagaagtatttcggtatgtaaacttctatcagcagggaagaaaatgacggtacctgactaagaagccccggctaactacgtgccagcagccgcggtaatacgtagggggcaagcgttatccggatttactgggtgtaaagggagcgtaggcggcgatgcaagtcagaagtgaaagcccggggctcaactccgggactgcttttgaaactgtgttgctagattgcaggagaggtaagtggaattcctagtgtagcggtgaaatgcgtagatattaggaggaacaccagtggcgaaggcggcctgctggacgatgactgacgttgaggctcgaaagcgtggggagcaaacaggattagataccctggtagtccacgccgtaaacgatgactgctaggtgtcggggggcaaggccgtccggtgccgcagcaaacgcattaagcagtccacctggggagtacgttcgcaagaatgaaactcaaaggaattgacggggacccgcacaagcggtggagcatgtggtttaattcgaagcaacgcgaagaaccttacctgggcttgacatcccgctgaccggacggtaacgcgtccttcccttcggggcagcggagacaggtggtgcatggttgtcgtcagctcgtgtcgtgagatgttgggttaagtcccgcaacgagcgcaacccctatcttcagtagccagcacatgatggtgggcactctggagagactgccagggacaacctggaggaaggcggggatgacgtcaaatcatcatgccccttatggccagggctacacacgtgctacaatggcgtgaacaaagggaggcgagcgcgtgagtgcgagcgaatctcaaaaataacgtctcagttcggattgtagtctgcaactcgactacatgaagctggaatcgctagtaatcgcggatcagaatgccgcggtgaatacgttcccgggtcttgtactcaccgcccgtca

SEQ ID NO: 1539 - DNA, 1391 bp, Artificial Sequence; identical to SEQ ID NO: 283
  Synthetic polymer

SEQ ID NO: 1540 - DNA, 1326 bp, Artificial Sequence; identical to SEQ ID NO: 279
  Synthetic polymer

SEQ ID NO: 1541 - DNA, 1390 bp, Artificial Sequence; identical to SEQ ID NO: 311
  Synthetic polymer

SEQ ID NO: 1542 - DNA, 1445 bp, Artificial Sequence; identical to SEQ ID NO: 1091
  Synthetic polymer

SEQ ID NO: 1543 - DNA, 1389 bp, Artificial Sequence; identical to SEQ ID NO: 203
  Synthetic polymer

SEQ ID NO: 1544 - DNA, 1496 bp, Artificial Sequence; identical to SEQ ID NO: 887
  Synthetic polymer

SEQ ID NO: 1545 - DNA, 1390 bp, Artificial Sequence
  Synthetic polymer
agagtttgatcctggctcaggatgatcgctggcggcgtgcttaatacatgcaagtcgagcgaagcactttaacggaattcttcggaaggaaggtaaagtgactgagcggcggacgggtgagtaacgcgtgggtaacctgccttatacagggggataacagttagaaatggctgctaataccgcataagcgcacaggaccgcatggtctggtgtgaaaaactccggtggtataagatggacccgcgtctgattagctagttggtggggtaacggcccaccaaggcgacgatcagtagccggcctgagagggtgaacggccacattgggactgagacacggcccagactcctacgggaggcagcagtagggaatattgcacaatgggggaaaccctgatgcagcgacgccgcgtgaaggaagaagtatctcggtatgtaaacttctatcagcagggaagacaatgacggtacctgactaagaagccccggctaactacgtgccagcagccgcggtaatacgtagggggcaagcgttatccggatttactgggtgtaaagggagcgtaggtggcgatgcaagccagaagtgaaaacccggggctcaaccccgaggactgcttttggaactgtgttgctggagtgcaggagaggtaagtggaactcctagtgtagcggtgaaatgcgtagatattaggaggaacaccagtggcgaaggcggcttactggacggtaactgacgttgaggctcgaaagcgtggggagcaaacaggattagataccctggtagtccacgccgtaaacgatgaatactaggtgtcgggttgcaaagcaattcggtgccgcagcaaacgcaataagtattccacctggggagtacgttcgcaagaatgaaactcaaaggaattgacggggacccgcacaagcggtggagcatgtggtttaattcgaagcaacgcgaagaaccttaccaagtcttgacatccggatgaccggaacttaaccgttccttcccttcggggcatccgagacaggtggtgcatggttgtcgtcagctcgtgtcgtgagatgttgggttaagtcccgcaacgagcgcaacccctgtccttagtagccagcagtcagatgggcactctagggagactgccggggataacccagaggaaggcggggacgacgtcaaatcatcatgccccttatgatttgggctacacacgtgctacaatggcgtaaacaaagggaagcaggagtgcgagcttgagcaaatcccaaaaataacgtcccagttcggactgcagtctgcaactcgactgcacgaagctggaatcgctagtaatcgcgaatcagaatgtcgcggtgaatacgttcccgggtcttgcacacaccgccggtca

SEQ ID NO: 1546 - DNA, 1376 bp, Artificial Sequence; identical to SEQ ID NO: 124
  Synthetic polymer

SEQ ID NO: 1547 - DNA, 1377 bp, Artificial Sequence
  Synthetic polymer
agagtttgatcctggctcaggatgaacgctggcggcgcgcctaacacatgcaagtcgaacggacgatgaagagcttgcttttcaaagttagtggcggacgggtgagtaacgcgtgggtaacctgcctcatacaggggaatagcagctggaaacggctgataaaaccgcataagcgcacagtgccgcatggcacagtgtgaaaaactccggtggtatgagatggacccgcgtctgattagctggttggtggggtaacggcccaccaaggcgacgatcagtagccggcctgagagggtgatcggccacattgggactgagacacggcccaaactcctacgggaggcagcagtggggaatattgcacaatgggggaaaccctgatgcagcgacgccgcgtgaaggaagaagtatctcggtatgtaaacttctatcagcagggaagataatgacggtacctgactaagaagccccggctaactacgtgccagcagccgcggtaatacgtagggggcaagcgttatccggatttactgggtgtaaagggagcgtaggcggcggagcaagtcagaagtgaaagcccggggctcaaccccgggacggcttttgaaactgccctgcttgatttcaggagaggtaagcggaattcctagtgtagcgggtgaaatgcgtagatattaggaggaacaccagtggcgaaggcggcttactggactgacaatgacgctgaggctcgaaagcgtggggagcaaacaggattagataccctggtagtccacgccgtaaacgatgaatactaggtgtcggggctcataagagcttcggtgccgcagcaaacgcaataagtattccacctggggagtacgttcgcaagaatgaaactcaaaggaattgacggggacccgcacaagcggtggagcatgtggtttaattcgaagcaacgcgaagaaccttaccaggccttgacatcctgctgaccggtgagtaatgtcacctttcctacgggacagcagagacaggtggtgcatggttgtcgtcagctcgtgtcgtgagatgttgggttaagtcccgcaacgagcgcaacccttatctttagtagccagcggtccggccgggcactctagagagactgccagggataacctggaggaaggcggggatgacgtcaaatcatcatgccccttatgacttgggctacacacgtgctacaatggcgtaaacaaagggaagcaaagctgtgaagccgagcaaatctcaaaaataacgtctcagttcggactgtagtctgcaacccgactacacgaagctggaatcgctagtaatcgcagatcagaatgctgcggtgaatacgttcccgggtcttgcacacaccgcccgtca

SEQ ID NO: 1548 - DNA, 1346 bp, Artificial Sequence; identical to SEQ ID NO: 668
  Synthetic polymer

SEQ ID NO: 1549 - DNA, 1394 bp, Artificial Sequence
  Synthetic polymer
  misc_feature (71)..(71): n is a, c, g, or t
  misc_feature (783)..(783): n is a, c, g, or t
ttagagttgatcctggctccggatgaactctggcggcgtgcttaacacatgcaagtcgaacgaagcacctngggacggattctttcgggatgacgtttcttgtgactgagtggcggaggggtgagtaacgcgtgggcaacctgccttatacagggggataacagttagaaatgactgctaataccgcataagaccacggtaccgcatggtacagtggtaaaaactgaggtggtataagatggacccgcgtctgattagctagttggtgaggtaacggctctaccaaggcaacgatcagtagccggcttgagagagtggacggccacattgggactgagacacggcccaaactcctacgggaggcagcagtggggaatattgcacaatgggggaaaccctgatgcagcgacgccgcgtgagtgaagaagtatctcggtatgtaaagctctatcagcagggaagaaaatgacggtacctgactaagaagccccggctaactacgtgccagcagccgcggtaatacgtagggggcaagcgttatccggaattactgggtgtaaagggtgcgtaggtggtatggcaagtcagaagtgaaaacccggggcttaactccgggactgcttttgaaactgtcagactggagtgcaggagaggtaagcggaattcctagtgtaccggtgaaatgcgtagatattaggaggaacatcagtggcgaaggcggcttactggactgaaactgacactgaggcacgaaagcgtggggagcaaacaggattagatacnctggtagtccacgccgtaaacgatgaatactaggtgtgggggccgtagaggcttcggtgccgcagctaacgcaataagtattccacctggggagtacgttcgcaagaatgaaactcaaaggaattgacggggacccgcacaagcggtggagcatgtggtttaattcgaagcaacgcgaagaaccttacctggtcttgacatcctcctgaccgtcccttaatcgggattttccttcgggacaggagtgacaggtggtgcatggttgtcgtcagctcgtgtcgtgagatgttgggttaagtcccgcaacgagcgcaacccctatctttagtagccagcagtgagatgggcactctagagagactgccagggataacctggaggaaggtggggacgacgtcaaatcatcatgccccttatgaccagggctacacacgtgctacaatggcgtaaacagagggaagcgagactgcgaggtggagcaaatcccaaaaatagcgtcacagttcggattgtagtctgcaactcgactacatgaagctggaatcgctagtaatcgcgaatcagaatgtcgcggtgaatacgttcccgggatctagtacacacggcccgtc

SEQ ID NO: 1550 - DNA, 1396 bp, Artificial Sequence; identical to SEQ ID NO: 164
  Synthetic polymer

SEQ ID NO: 1551 - DNA, 1389 bp, Artificial Sequence; identical to SEQ ID NO: 368
  Synthetic polymer

SEQ ID NO: 1552 - DNA, 1391 bp, Artificial Sequence; identical to SEQ ID NO: 401
  Synthetic polymer

SEQ ID NO: 1553 - DNA, 1390 bp, Artificial Sequence; identical to SEQ ID NO: 361
  Synthetic polymer

SEQ ID NO: 1554 - DNA, 1498 bp, Artificial Sequence; identical to SEQ ID NO: 46
  Synthetic polymer

SEQ ID NO: 1555 - DNA, 1384 bp, Artificial Sequence; identical to SEQ ID NO: 582
  Synthetic polymer

SEQ ID NO: 1556 - DNA, 1439 bp, Artificial Sequence; identical to SEQ ID NO: 984
  Synthetic polymer

SEQ ID NO: 1557 - DNA, 1392 bp, Artificial Sequence
  Synthetic polymer
agagtttgatcctggctcaggatgaacgctggcggcgtgcttaacacatgcaagtcgaacgaagcactttatttgatttccttcgggactgattattttgtgactgagcggcggacgggtgagtaacgcgtgggtaacctgcctcatacagggggataacagttagaaatgactgctaataccgcataagaccacggtaccgcatggtacagtggtaaaaactccggtggtatgagatggacccgcgtctgattaggtagttggtggggtaacggcctaccaagccgacgatcagtagccgacctgagagggtgaccggccacattgggactgagacacggcccagactcctacgggaggcagcagtggggaatactgcacaatggaggaaactctgatgcagcgacgccgcgtgaaggatgaagtatttcggtatgtaaacttctatcagcagggaagaaaatgacggtacctgactaagaagccccggctaactacgtgccagcagccgcggtaatacgtagggggcaagcgttatccggatttactgggtgtaaagggagcgtagacggcacggcaagccagatgtgaaagcccggggctcaaccccgggactgcatttggaactgctgagctagagtgtcgaagaggcaagtggaattcctagtgtagcggtgaaatgcgtagatattaggaggaacaccagtggcgaaggcggcttgctggacgatgactgacgttgaggctcgaaagcgtggggagcaaacaggattagataccctggtagtccacgccgtaaacgatgactgctaggtgtcgggtggcaaagccattcggtgccgcagctaacgcaataagcagtccacctggggagtacgttcgcaagaatgaaactcaaaggaattgacggggacccgcacaagcggtggagcatgtggtttaattcgaagcaacgcgaagaaccttacctgatcttgacatcccgatgaccgcttcgtaatggaagcttttcttcggaacatcggtgacaggtggtgcatggttgtcgtcagctcgtgtcgtgagatgttgggttaagtcccgcaacgagcgcaacccctatcttcagtagccagcatttaggatgggcactctggagagactgccagggataacctggaggaaggtggggatgacgtcaaatcatcatgccccttatgacttgggctacacacgtgctacaatggcctaaacaaagggaagcaaagctgtgaagccgagcaaatctcaaaaataacgtctcagttcggactgtagtctgcaacccgactacacgaagctggaatcgctagtaatcgcagatcagaatgctgcggtgaatacgtttccgggtcttgtactcaccgcccgtca

SEQ ID NO: 1558 - DNA, 1405 bp, Artificial Sequence; identical to SEQ ID NO: 330
  Synthetic polymer

SEQ ID NO: 1559 - DNA, 1389 bp, Artificial Sequence; identical to SEQ ID NO: 339
  Synthetic polymer

SEQ ID NO: 1560 - DNA, 1454 bp, Artificial Sequence
  Synthetic polymer
gatgaacgctggcggcgtgcctaacacatgcaagtcgaacgaagcacttatcttagattcttcggatgaagagatatttgactgagtggcggacgggtgagtaacgcgtgggtaacctgcctcatacagggggataacagttagaaatgactgctaataccgcataagcgcacggaatcgcatgattcagtgtgaaaagccgagacggtatgagatggacccgcgtctgattaggtagttggtgaggtaacggcccaccaagccgacgatcagtagccgacctgagagggtgaccggccacattgggactgagacacggtccaaactcctacgggaggcagcagtggggaatattgcacaatgggggaaaccctgatgcagcgacgccgcgtgaaggaagaagtatttcggtatgtaaacttctatcagcagggaagaaaatgacggtacctgactaagaagccccggctaactacgtgccagcagccgcggtaatacgtagggggcaagcgttatccggatttactgggcgtaaagggagcgtaggcggtctgacaagtcagaagtgaaagcccggggctcaacctcgggactgcttttgaaactgccggactagattgcaggagaggtaagtggaattcctagtgtagcggtgaaatgcgtagatattaggaggaacaccagtggcgaaggcggcttactggactgtaaatgacgctgaggctcgaaagcgtggggagcaaacaggattagataccctggtagtccacgccgtaaacgatgaatactaggtgtcgggtggcaaagccattcggtgccgcagcaaacgcaataagtattccacctggggagtacgttcgcaagaatgaaactcaaaggaattgacggggacccgcacaagcggtggagcatgtggtttaattcgaagcaacgcgaagaaccttaccaagtcttgacatccggctgaccggtgagtaacgtcccctttccttcgggacagccgagacaggtggtgcatggttgtcgtcagctcgtgtcgtgagatgttgggttaagtcccgcaacgagcgcaacccttaccttcagtagccagcggtttggccgggcactctggagggactgccagggataacctggaggaaggtggggatgacgtcaaatcatcatgccccttatgatttgggctacgcacgtgctacaatggcgtaaacaaagggaagcgagagtgtgagcttaagcaaatcccaaaaataacgtctcagttcggattgtagtctgcaactcgactacatgaagctggaatcgctagtaatcgcgaatcagcatgtcgcggtgaatacgttcccgggtcttgtacacaccgcccgtcacaccatgggagttggaaacgcccgaagtcagtgacccaaccgtaaggagggagctgccgaaggcgggtctgataactggggtga

SEQ ID NO: 1561 - DNA, 1380 bp, Artificial Sequence
  Synthetic polymer
agagtttgatcctggctcaggatgaacgctggcggcgtgcttaacacatgcaagtcgaacgaagacatctgagtgcttgcacttggatggactgagtggcggacgggtgagtaacgcgtgggtaacctgccttatacagggggataacagttggaaacgactgctaataccgcataagcgcacggtatcgcatgatacagtgtgaaaaactccggtggtataagatggacccgcgtctgattagcttgttggtgaggtaacggcccaccaaggcgacgatcagtagccggcctgagagggtgaacggccacattgggactgagacacggcccaaactcctacgggaggcagcagtggggaatattgcacaatgggggaaaccctgatgcagcgacgccgcgtgagtgatgaagtatttcggtatgtaaaactctatcagcagggaagataatgacggtacctgactaagaagcaccggctaaatacgtgccagcagccgcggtaatacgtatggtgcaagcgttatccggatttactgggtgtaaagggtgcgtaggtggtatggcaagtcagaagtgaaaggctggggctcaaccccgggactgcttttgaaactgtcaaactagagtacaggagaggaaagcggaattcctagtgtagcggtgaaacgcgtagatattaggaggaacaccagtggcgaaggcggctttctggactgaaactgacactgaggcacgaaagcgtggggagcaaacaggattagataccctggtagtccacgccgtaaacgatgaatactaggtgtcgggcagcatagctgttgggtgccgcagcaaaggcattaagtattccacctggggagtacgttcgcaagaatgaaactcaaaggaattgacggggacccgcacaagcggtggagcatgtggtttaattcgaagcaacgcgaagaaccttaccaggtcttgacatcccgatgaccgcttcttaatcgaagcttttcttcggaacatcggagacaggtggtgcatggttgtcgtcagctcgtgtcgtgagatgttgggttaagtcccgcaacgagcgcaacccctattttcagtagccagcattttggatgggcactctggagaaactgcccgggataaccgggaggaaggtggggatgacgtcaaatcatcatgccccttatgatctgggctacacgcgtgctacaatggctgttacagagagaagcgaatccgcgaggaagagcaaacctcagaaaggcagtctcagttcggattgtagtctgcaactcgactacatgaagctggaatcgctagtaatcgcgaatcagaatgtcgcggtgaatacgttcccgggtcttgcacacaccgcccgtca

SEQ ID NO: 1562 - DNA, 1376 bp, Artificial Sequence; identical to SEQ ID NO: 204
  Synthetic polymer

SEQ ID NO: 1563 - DNA, 1357 bp, Artificial Sequence
  Synthetic polymer
gcctaatacatgcaagtcgaacggagttgttaaatggaagtcttcggatggaagtttaataacttagtggcggacgggtgagtaacgcgtgggtaacctacctcatacagggggataacagttagaaatgactgctaacaccgcataataagttggagccgcatgactctaacttcaaatatttataggtatgagatgggcccgcgtctgattagctagttggtggggtaacagcctaccaaggcgacgatcagtagccggcttgagagagtgaccggccacattgggactgagacacggcccaaactcctacgggaggcagcagtggggaatattggacaatgggggcaaccctgatccagcgacgccgcgtgagtgaagaagtatttcggtatgtaaagctctatcagcagggaagaataaaatgacagtacctgactaagaagccccggctaactacgtgccagcagccgcggtaatacgtagggggcaagcgttatccggatttactgggtgtaaagggagcgtaggtggtttgataagtcagaagtgaaagcccagggctcaaccctgggactgcttttgaaactatcaaactagagtgcaggagaggtaagtggaattcctagtgtagcggtgaaatgcgtagatattaggaggaacaccagtggcgaaggcgacttactggactgtaactgacactgaggctcgaaagcgtggggagcaaacaggattagataccctggtagtccacgccgtaaacgatgaatactagctgttgggttccataaggagctcggtggcgcagctaacgcaataagtattccacctggggagtacgttcgcaagaatgaaactcaaaggaattgacggggacccgcacaagcggtggagcatgtggtttaattcgaagcaacgcgaagaaccttaccaagtcttgacatccctctgacagccgagtaacgtcggtcttcctacgggacagaggtgacaggtggtgcatggttgtcgtcagctcgtgtcgtgagatgttgggttaagtcccgcaacgagcgcaacccttatccttagtagccagcagttcggctgggcactctagagagactgccagggataacctggaggaaggcggggatgacgtcaaatcatcatgccccttatgatttgggctacacacgtgctacaatggtgactacaaagagaagcaaacctgtgagggggagcaaatctcaaaaaggtcatcccagttcggattgtactctgcaactcgagtacatgaagctggaatcgctagtaatcgcagatcagaatgctgcggtgaatacgttcccgggtcttgtacacaccgcccgtcaca

SEQ ID NO: 1564 - DNA, 1452 bp, Artificial Sequence; identical to SEQ ID NO: 1088
  Synthetic polymer

SEQ ID NO: 1565 - DNA, 1378 bp, Artificial Sequence; identical to SEQ ID NO: 849
  Synthetic polymer

SEQ ID NO: 1566 - DNA, 1391 bp, Artificial Sequence; identical to SEQ ID NO: 132
  Synthetic polymer

SEQ ID NO: 1567 - DNA, 1392 bp, Artificial Sequence; identical to SEQ ID NO: 158
  Synthetic polymer

SEQ ID NO: 1568 - DNA, 1391 bp, Artificial Sequence; identical to SEQ ID NO: 146
  Synthetic polymer

SEQ ID NO: 1569 - DNA, 1354 bp, Artificial Sequence; identical to SEQ ID NO: 52
  Synthetic polymer

SEQ ID NO: 1570 - DNA, 1389 bp, Artificial Sequence; identical to SEQ ID NO: 110
  Synthetic polymer

SEQ ID NO: 1571 - DNA, 1401 bp, Artificial Sequence
  Synthetic polymer
tagtggcggacgggtgagtaacgcgtgggtaacctgcctcatacagggggataacagctggaaacggctgctaaaaccgcataagcacacagcatcgcatgatgcagtgtgaaaatatttataggtatgagatgggcccgcgtctgattagctagttggtgaggtaaaggctcaccaaggcgacgatcagtagccggcttgagagagtgaccggccacattgggactgagacacggcccaaactcctacgggaggcagcagtggggaatattgcacaatgggggaaaccctgatgcagcgacgccgcgtgagtgaagaagtacttcggtatgtaaagctctatcagcagggaagaaaatgacggtacctgactaagaagccccggctaactacgtgccagcagccgcggtaatacgtagggggcaagcgttatccggatttactgggtgtaaagggagcgtaggtggtttggtaagtcaggtgtgaaagcccggggctcaactccgggattgcacttgaaactatcaaactagagtgcaggagaggtaagtggaattcctagtgtagcggtgaaatgcgtagatattaggaggaacaccagtggcgaaggcggcttactggactgtaactgacactgaggctcgaaagcgtggggagcaaacaggattagataccctggtagtccacgccgtaaacgatgaatactaggtgttggggagcaaaagctcttcggtgccgtcgcaaacgcattaagtattccacctggggagtacgttcgcaagaatgaaactcaaaggaattgacggggacccgcacaagcggtggagcatgtggtttaattcgaagcaacgcgaagaaccttaccaggtcttgacatccctctgacagccgagtaacgtcggtttcccttcggggcagaggtgacaggtggtgcatggttgtcgtcagctcgtgtcgtgagatgttgggttaagtcccgcaacgagcgcaacccctatccttagtagccagcagttcggctgggcactctagggagactgccagggataacctggaggaaggcggggatgacgtcaaatcatcatgccccttatgatctgggctacacacgtgctacaatggtggctacaaagggaagcgaccctgtgaaggtaagcaaatcccaaaaaggtcatcccagttcggattgtagtctgcaactcgactacatgaagctggaatcgctagtaatcgcgaatcagaatgtcgcggtgaatacgttcccgggtcttgtacacaccgcccgtcacaccacgggagtcggaaatgcccgaagtcagtgacccaaccgtaaggagggagctgccgaaggtggagccgatgactggggtgaagtcgtaacaaggtagccgtatcggaagg

SEQ ID NO: 1572 - DNA, 1447 bp, Artificial Sequence
  Synthetic polymer
cgctggcggcgtgcctaacacatgcaagtcgaacgaagcaattaaaatgaagttttcggatggatttttgattgactgagtggcggacgggtgagtaacgcgtggataacctgcctcacactgggggataacagttagaaatgactgctaataccgcataagcgcacagtaccgcatggtacggtgtgaaaaactccggtggtgtgagatggatccgcgtctgattagccagttggcggggtaacggcccaccaaagcgacgatcagtagccgacctgagagggtgaccggccacattgggactgagacacggcccaaactcctacgggaggcagcagtggggaatattgcacaatgggcgaaagcctgatgcagcgacgccgcgtgagtgaagaagtatttcggtatgtaaagctctatcagcagggaagaaaatgacggtacctgactaagaagccccggctaactacgtgccagcagccgcggtaatacgtagggggcaagcgttatccggaattactgggtgtaaagggtgcgtaggtggtatggcaagtcagaagtgaaaacccagggcttaactctgggactgcttttgaaactgtcagactggagtgcaggagaggtaagcggaattcctagtgtagcggtgaaatgcgtagatattaggaggaacatcagtggcgaaggcggcttactggactgaaactgacactgaggcacgaaagcgtggggagcaaacaggattagataccctggtagtccacgccgtaaacgatgaatactaggtgtcggggccgtagaggcttcggtgccgcagccaacgcagtaagtattccacctggggagtacgttcgcaagaatgaaactcaaaagaattgacggggacccgcacaagcggtggagcatgtggtttaattcgaagcaacgcgaagaaccttacctggtcttgacatccttctgaccggtccttaaccggaccttcccttcggggcagcggagacaggtggtgcatggttgtcgtcagctcgtgtcgtgagatgttgggttaagtcccgcaacgagcgcaacccctatctttagtagccagcggccaggccgggcactctagagagactgccggggatagcccggaggaaggtggggatgacgtcaaatcatcatgccccttatgagcagggctacacacgtgctacaatggcgtaaacaaagggaagcgagaccgcgaggtggagcaaatcccaaaaataacgtctcagttcggattgtagtctgcaactcgactacatgaagctggaatcgctagtaatcgcgaatcagaatgtcgcggtgaatacgttcccgggtcttgtacacaccgcccgtcacaccatgggagtcagtaacgcccgaagtcagtgacccaaccgtaaggagggagctgccgaaggcgggaccgataactggggtg

SEQ ID NO: 1573 - DNA, 1477 bp, Artificial Sequence
  Synthetic polymer
tggctcaggatgaacgctggcggcgtgcttaacacatgcaagtcgaacggagtttatagcccgaagtcttcggatggaagaatataaacttagtggcggacgggtgagtaacgcgtgggtaacctgccttatacagggggataacagctggaaacggctgctaataccgcataagcgcacagctttgcatgaagcagtgtgaaaagatttatcggtataagatggacccgcgtctgattagctagttggtggggtaacggcctaccaaggcgacgatcagtagccggcttgagagagtgaacggccacattgggactgagacacggcccaaactcctacgggaggcagcagtggggaatattgcacaatgggggaaaccctgatgcagcgacgccgcgtgagtgaagaagtatttcggtatgtaaagctctatcagcagggacgataatgacggtacctgactaagaagccccggctaactacgtgccagcagccgcggtaatacgtagggggcaagcgttatccggatttactgggtgtaaagggagcgtagacggtgtggtaagtcagatgtgaaagcccggggctcaaccccgggactgcatttgaaactatcatactagagtgcaggagaggtaagtggaattcctagtgtagcggtgaaatgcgtagatattaggaggaacaccagtggcgaaggcggcttactggactgtaactgacgttgaggctcgaaagcgtggggagcaaacaggattagataccctggtagtccacgccgtaaacgatgaatactaggtgtcgggggtcaaaagaccttcggtgccgtcgcaaacgcattaagtattccacctggggagtacgttcgcaagaatgaaactcaaaggaattgacggggacccgcacaagcggtggagcatgtggtttaattcgaagcaacgcgaagaaccttaccaggtcttgacatccctctgacagccgagtaacgtcggtcttccttcgggacagaggagacaggtggtgcatggttgtcgtcagctcgtgtcgtgagatgttgggttaagtcccgcaacgagcgcaacccctatctttagtagccagcggttcggccgggcactctagagagactgccagggataacctggaggaaggcggggatgacgtcaaatcatcatgccccttatgatctgggctacacacgtgctacaatggtgactacaaagggaagcaaagctgtgaagtggagcaaatcccaaaaaggtcatctcagttcggattgtagtctgcaactcgactacatgaagctggaatcgctagtaatcgcgaatcagaatgtcgtggtgaatacgttcccgggtcttgtacacaccgcccgtcacaccatgggagcctaatatgcccgaagtcagtgacccaaccgtaaggagggagctgccgaaggtggagtaggtgactggggtgaagtcgtaacaaggta

SEQ ID NO: 1574 - DNA, 1350 bp, Artificial Sequence
  Synthetic polymer
gatgaacgctggcggcgtgcctaacacatgcaagtcgaacgaagcgccttttgagattcttcggatgatcgatcggtgactgagtggcggacgggtgagtaacgcgtgggtaacctgccctgtacagggggataacagctggaaacggctgctaataccgcataagcgcacgaggagacatctccttgtgtgaaaaactccggtggtacaggatgggcccgcgtctgattagctggttggcagggtaacggcctaccaaggcaacgatcagtagccggtctgagaggatgaacggccacattggaactgagacacggtccaaactcctacgggaggcagcagtggggaatattgcacaatgggggaaaccctgatgcagcaacgccgcgtgagtgaagaagtatttcggtatgtaaagctctatcagcagggaagataatgacggtacctgactaagaagctccggctaaatacgtgccagcagccgcggtaatacgtatggagcaagcgttatccggatttactgggtgtaaagggtgcgtaggtggcagtgcaagtcagatgtgaaaggccggggctcaaccccggagctgcatttgaaactgctcggctagagtacaggagaggcaggcggaattcctagtgtagcggtgaaatgcgtagatattaggaggaacaccagtggcgaaggcggcctgctggactgttactgacactgaggcacgaaagcgtggggagcaaacaggattagataccctggtagtccacgccgtaaacgacgaatactaggtgtcggggccgtataggctccggtgccgcctctaacgcagtaagtattccacctggggagtacgttcgcaagaatgaaactcaaaggaattgacggggacccgcacaagcggtggagcatgtggtttaattcgaagcaacgcgaagaacctcacctgctcttgacatctccctgaccggcaagtaatgttgcctttccttcgggacagggatgacaggtggtgcatggttgtcgtcagctcgtgtcgtgagatgttgggttaagtcccgcaacgagcgcaacccctatctttagtagccagcggtcaggccgggcactctagagagactgccagggataacctggaggaaggtggggatgacgtcaaatcatcatgccccttatgagcagggctacacacgtgctacaatggcgtaaacaaagggaggcagaaccgcgaggtcgagcaaatcccaaaaataacgtctcagtttggattgtagtctgcaactcgactacatgaagctggaatcgctagtaatcgcgaatcagaatgtcgcggtgaatacgttcccgggtct

SEQ ID NO: 1575 - DNA, 1392 bp, Artificial Sequence; identical to SEQ ID NO: 423
  Synthetic polymer

SEQ ID NO: 1576 - DNA, 1337 bp, Artificial Sequence; identical to SEQ ID NO: 753
  Synthetic polymer

SEQ ID NO: 1577 - DNA, 1393 bp, Artificial Sequence; identical to SEQ ID NO: 451
  Synthetic polymer

SEQ ID NO: 1578 - DNA, 1384 bp, Artificial Sequence
  Synthetic polymer
agagtttgatcctggctcaggatgaacgctggcggcgtgcttaacacatgcaagtcgaacgggaattactttattgaaacttcggtcgatatgatttaattctagtggcggacgggtgagtaacgcgtgggtaacctgccttatacagggggataacagtcagaaatgactgctaataccgcataagcgcacagagctgcatggctcggtgtgaaaaactccggtggtacaggatgggcccgcgtctgattagctggttggcagggtaacggcctaccaaggcaacgatcagtagccggtctgagaggatgaacggccacattggaactgagacacggtccaaactcctacgggaggcagcagtggggaatattgcacaatgggggaaaccctgatgcagcaacgccgcgtgagtgaagaagtatttcggtatgtaaagctctatcagcagggaagataatgacggtacctgactaagaagctccggctaaatacgtgccagcagccgcggtaatacgtatggagcaagcgttatccggatttactgggtgtaaagggtgcgtaggtgggcagtgcaagtcagatgtgaaaggccggggctcaacccccggagctgcatttgaaactgctcggctagagtacaggagaggcaggcggaattcctagtgtagcggtgaaatgcgtagatattaggaggaacaccagtggcgaaggcggcctgctggactgttactgacactgaggcacgaaagcgtggggagcaaacaggattagataccctggtagtccacgccgtaaacgatgaatactaggtgtcggggccgtataggcttcggtgccgccgctaacgcagtaagtattccacctggggagtacgttcgcaagaatgaaactcaaaggaattgacggggacccgcacaagcggtggagcatgtggtttaattcgaagcaacgcgaagaaccttaccaggccttgacatccttctgaccggtgagtaatgtcacctttccttcgggacaggagagacaggtggtgcatggttgtcgtcagctcgtgtcgtgagatgttgggttaagtcccgcaacgagcgcaacccctatgttcagtagccagcaggtaaggctgggcactctggacagactgccggggataacccggaggaaggcggggatgacgtcaaatcatcatgccccttacggcctgggctacacacgtgctacaatggcgtaaacaaagggaagcgagagggtgacctggagcgaatcccaaaaataacgtcccagttcggactgtagtctgcaacccgactacacgaagctggaatcgctagtaatcgcgaatcagcatgtcgcggtgaatacgttcccgggtcttgcacacacc

SEQ ID NO: 1579 - DNA, 1391 bp, Artificial Sequence; identical to SEQ ID NO: 217
  Synthetic polymer

SEQ ID NO: 1580 - DNA, 1388 bp, Artificial Sequence; identical to SEQ ID NO: 295
  Synthetic polymer

SEQ ID NO: 1581 - DNA, 1454 bp, Artificial Sequence; identical to SEQ ID NO: 995
  Synthetic polymer

SEQ ID NO: 1582 - DNA, 1374 bp, Artificial Sequence; identical to SEQ ID NO: 603
  Synthetic polymer

SEQ ID NO: 1583 - DNA, 1393 bp, Artificial Sequence
  Synthetic polymer
agagtttgatcctggctcaggatgaacgctggcggcgtgcttaacacatgcaagtcgaacgaaacaccttatttgattttcttcggaacggaagatttggtgattgagtggcggacgggtgagtaacgcgtgggtaacctaccctgtacagggggataacagtcagaaatgactgctaataccgcataagaccacagcaccgcatggtgcaggggtaaaaactccggtggtacaggatggacccgcgtctgattagctggttggcggggtaacggcccaccaaggcgacgatcagtagccgacctgagagggtgaccggccacattgggactgagacacggcccaaactcctacgggaggcagcagtggggaatattgcacaatgggggaaaccctgatgcagcgacgccgcgtgaaggacgacgtatttcggtatgtaaacttctatcagcaaggaagatgatgacggtacttgactaagaagccccggctaactacgtgccagcagccgcggtaatacgtagggggcaagcgttatccggatttactgggtgtaaagggagcgtaggcggccatgcaagtcagaagtgaaagcccggggctcaaccgcgggactgcttttgaaactgtaaggctagattgccggagaggtaagcggaattcctagtgtagcggtgaaatgcgtagatattaggaggaacaccagtggcgaaggcggcttactggacggtgaatgacgctgaggctcgaaagcgtggggagcaaacaggattagataccctggtagtccacgccgtaaacgatgaatactaggtgttggggcccagaagggcttcggtgccgcagcaaacgcaataagtattccacctggggagtacgttcgcaagaatgaaactcaaaggaattgacggggacccgcacaagcggtggagcatgtggtttaattcgaagcaacgcgaagaaccttaccaggtcttgacatcccgacgaccgttccttaatcggagcttttcttcggaacgtcggtgacaggtggtgcatggttgtcgtcagctcgtgtcgtgagatgttgggttaagtcccgcaacgagcgcaacccctattttcagtagccagcattttggatgggcactctggagagactgcccgggataaccgggaggaaggtggggatgacgtcaaatcatcatgccccttatgatctgggctacacacgtgctacaatggctgttacagagagaagcgaatccgcgaggaagagcaaacctcaaaaaggcagtctcagttcggattgtagtctgcaactcgactacatgaagctggaatcgctagtaatcgcgaatcagaatgtcgcggtgaatacgttcccgggtcttgcactcaccgcccgtca

SEQ ID NO: 1584 - DNA, 1390 bp, Artificial Sequence; identical to SEQ ID NO: 170
  Synthetic polymer

SEQ ID NO: 1585 - DNA, 1389 bp, Artificial Sequence
  Synthetic polymer
agagtttgatcctggctcaggatgaacgctggcggcgtgcctaacacatgcaagtcgaacgaagcaccttacctgattcttcggatgatggtctggtgactgagtggcggacgggtgagtaacgcgtgggtaacctgccctgtacaggggggataacagttggaaacggctgctaataccgcataagcgcacgagaggacatcctcttgtgtgaaaaactccggtggtacaggatgggcccgcgtctgattagctggttggcagggtaacggcctaccaaggcgacgatcagtagccggtctgagaggatgaacggccacattggaactgagacacggtccaaactcctacgggaggcagcagtggggaatattgcacaatgggggaaaccctgatgcagcaacgccgcgtgagtgaagaagtatttcggtatgtaaagctctatcagcagggaagataatgacggtacctgactaagaagctccggctaaatacgtgccagcagccgcggtaatacgtatggagcaagcgttatccggatttactgggtgtaaagggtgcgtaggtggcagtgcaagtcagatgtgaaaggccggggctcaaccccggagctgcatttgaaactgcatagctagagtacaggagaggcaggcggaattcctagtgtagcggtgaaatgcgtagatattaggaggaacaccagtggcgaaggcggcctgctggactgttactgacactgaggcacgaaagcgtggggagcaaacaggattagataccctggtagtccacgccgtaaacgatgaatactgggtgtcgggcagcaaagctgttcggtgccgcagcaaacgcaataaatagtccacctggggagtacgttcgcaagaatgaaactcaaaggaattgacggggacccgcacaagcggtggagcatgtggtttaattcgaagcaacgcgaagaaccttacctgctcttgacatctccctgaccggcaagtaatgttgcctttccttcgggacagggaagacaggtggtgcatggttgtcgtcagctcgtgtcgtgagatgttgggttaagtcccgcaacgagcgcaacccctatctttagtagccagcggttcggccgggcactctagagagactgccagggataacctggaggaaggtggggatgacgtcaaatcatcatgccccttatgagcagggctacacacgtgctacaatggcgtaaacaaagggaggcagaaccgcgaggtcgagcaaatcccaaaaataacgtctcagttcggattgtagtctgcaactcgactacatgaagctggaatcgctagtaatcgcgaatcagaatgtcgcggtgaatacaatcccgggtcttgcactcaccgcccgtca

SEQ ID NO: 1586 - DNA, 1390 bp, Artificial Sequence
  Synthetic polymer
agagtttgatcctggctcaggatgaacgctggcggcgtgcttaacacatgcaagtcgaacgaagcacttaactttgattcttcggatgaagagttttgtgactgagtggcggacgggtgagtaacgcgtgggtaacctgcctcatacagggggataacagttagaaatgactgctaataccgcataagcgcacagtaccgcatggtacagtgtgaaaaactccggtggtatgagatggacccgcgtctgattagcttgttggtgaggtaacggcccaccaaggcgacgatcagtagccgacctgagagggtgatcggccacattgggactgagacacggcccaaactcctacgggaggcagcagtggggaatattgcacaatgggggaaaccctgatgcagcgacgccgcgtgaaggaagaagtatttcggtatgtaaacttctatcagcagggaagaaaatgacggtacctgactaagaagccccggctaactacgtgccagcagccgcggtaatacgtagggggcaagcgttatccggatttactgggtgtaaagggagcgtaggcggtctgacaagtcagaagtgaaagcccggggctcaactccgggactgcttttgaaactgccggactagattgcaggaggggtaagtggaattcctagtgtagcggtgaaatgcgtagatattaggaggaacaccagtggcgaaggcggcttactggactgtaaatgacgctgaggctcgaaagcgtggggagcaaacaggattagataccctggtagtccacgccgtaaacgatgaatactaggtgtcagggagcatagctctttggtgccgcagcaaacgcaataagtattccacctggggagtacgttcgcaagaatgaaactcaaaggaattgacggggacccgcacaagcggtggagcatgtggtttaattcgaagcaacgcgaagaaccttaccaagtcttgacatcccgatgaccgcagagtaatgtctgcttttcttcggaacatcggtgacaggtggtgcatggttgtcgtcagctcgtgtcgtgagatgttgggttaagtcccgcaacgagcgcaacccttatctttagtagccagcggtacggccgggcactctagagagactgccagggataacctggaggaaggtggggatgacgtcaaatcatcatgccccttatgatttgggctacacacgtgctacaatggcgtaaacaaagggaagcaaacacgcgagtgtaagcaaatctcaaaaataacgtctcagttcggattgtagtctgcaactcgactacatgaagctggaatcgctagtaatcgcgaatcagcatgtcgcggtgaatacgttcccgggtcttgcactcaccgcccgtca

SEQ ID NO: 1587 - DNA, 1394 bp, Artificial Sequence
  Synthetic polymer
agagtttgatcctggctcaggatgaacgctggcggcgtgcttaacacatgcaagtcgaacgaaacaccttatttgattttcttcggaactgaagatttggtgattgagtggcggacgggtgagtaacgcgtgggtaacctaccctgtacagggggataacagtcagaaatgactgctaataccgcataagaccacagcaccgcatggtgcaggggtaaaaactccggtggtacaggatggacccgcgtctgattaggtagttggtggggtaacggcctaccaagccaacgatcagtagccgacctgagagggtgaccggccacattgggactgagacacggcccagactcctacgggaggcagcagtggggaatattgcacaatggaggaaactctgatgcagcgacgccgcgtgaaggatgaagtatttcggtatgtaagcttctatcagcagggaagaaaatgacggtacctgactaagaagccccggctaactacgtgccagcagccgcggtaatacgtagggggcaagcgttatccggatttactgggtgtaaagggagcgtagacggcacggcaagccagatgtgaaagcccggggctcaaccccgggactgcatttggaactgctgagctagagtgtcggagaggcaagtggaattcctagtgtagcggtgaaatgcgtagatattaggaggaacaccagtggcgaaggcggcttgctggacgatgactgacgttgaggctcgaaagcgtggggagcaaacagaattagataccctggtagtccacgccgtaaacgatgaatactaggtgtcggggaagcatggctcttcggggccgtcgcagaacgcagtaagtattccacgtggggagtacgttcgcaagaaagaaactcaaaggaattgacggggacccgcacaagcggtggagcatgtggtttaattcgaagcaacgcgaagaaccttgccaagtcttgacatcctcctgaccggtccttaaccggacctttctttcgggacaggagagacaggtggtgcaaggtagtagtcagcttgtgtcgtgagatgttgggttaagtcccgcaacgagcgcaacccctatcctcagtagccagcacttaaggtgggcactctggggagactgccagggataacctggaggaaggcggggatgacgtcaaatcatcatgccccttatgatttgggctacacacgtgctacaatggcgtaaacaaagggaagcgagatcgtgagatggagcaaatcccaaaaataacgtcccagttcggactgtagtctgcaacccgactacacgaagctggaatcgctagtaatcgcggatcagaatgccgcggtgaatacgttcgtgggtcttgcacacaccgcccgtca

SEQ ID NO: 1588 - DNA, 1368 bp, Artificial Sequence; identical to SEQ ID NO: 701
  Synthetic polymer

SEQ ID NO: 1589 - DNA, 1386 bp, Artificial Sequence
  Synthetic polymer
agagtttgatcctggctcaggatgaacgctggcggcgtgcttaacacatgcaagtcgaacggggaaccttttattgaagcttcggcagatttagattgtttctagtggcggacgggtgagtaacgcgtgggtaacctgccttatacagggggataacagtcaggaatgactgctaataccgcataagcgcacagagctgcatggctcagtgtgaaaaactccggtggtataagatggacccgcgttggattagctagttggtgaggtaacggcccaccaaggcgacgatccatagccggcctgagagggtgaacggccacattgggactgagacacggcccagactcctacgggaggcagcagtggggaatattgcacaatgggggaaaccctgatgcagcgacgccgcgtgaaggaagaagtatctcggtatgtaaacttctatcagcagggaagataatgacggtacctgactaagaagcaccggctaaatacgtgccagcagccgcggtaatacgtatggtgcaagcgttatccggatttactgggtgtaaagggtgcgtaggtggtatggcaagtcagaagtgaaaggctggggctcaaccccgggactgcttttgaaactgtcaaactagagtacaggagaggaaagcggaattcctagtgtagcggtgaaatgcgtagatattaggaggaacaccagtggcgaaggcggctttctggactgaaactgacactgaggcacgaaagcgtggggagcaaacaggattagataccctggtagtccacgccgtaaacgatgaatactaggtgtcgggcagcatagctgttcggtgccgcagcaaacgcattaagtattccacctggggagtacgttcgcaagaatgaaactcaaaggaattgacggggacccgcacaagcggtggagcatgtggtttaattcgaagcaacgcgaagaaccttaccaggccttgacatcccttgcagaggtatagagatatatccgaggttatcaaggagacaggtggtgcatggttgtcgtcagctcgtgtcgtgagatgttgggttaagtcccgcaacgagcgcaacccttatcctcagtagccagcaggtaaagctgggcactctgtggagactgccagggataacctggaggaaggtggggatgacgtcaaatcatcatgccccttatgatctgggctacacacgtgctacaatggcgtaaacaaagggaggcaaagccgcgaggtggagcaaatcccaaaaataacgtctcagttcggactgcagtctgcaacccgacttcatgaggctggaatcgctagtaatcgcgaatcagcatgtcgcggtgaatacgttctcgggccttgcacacaccgcccgtca

SEQ ID NO: 1590 - DNA, 1400 bp, Artificial Sequence
  Synthetic polymer
agagtttgatcctggctcaggatgaacgctggcggcgtgcttaacacatgcaagtcgaacgaagctgcttaactgatcttcttcggaattgacgttttgtagactgagtggcggacgggtgagtaacgcgtgggtaacctaccctgtacagggggataacagtcagaaatgactgctaataccgcataagaccacagcaccgcatggtgcaggggtaaaaactccggtggtacaggatggacccgcgtctgattagctggttggtgaggtaacggctcaccaaggcgacgatcagtagccggcttgagagagtgaacggccacattgggactgagacacggcccaaactcctacgggaggcagcagtggggaatattgcacaatgggggaaaccctgatgcagcgacgccgcgtgagtgaagaagtatctcggtatgtaaagctctatcagcagggaagaaaatgacggtacctgactaagaagccccggctaactacgtgccagcagccgcggtaatacgtagggggcaagcgttatccggaattactgggtgtaaagggtgcgtaggtggtatggcaagtcagaagtgaaaacccagggcttaactctgggactgcttttgaaactgtcagactggagtgccggagaggtaagcggaattcctagtgtagcggtgaaatgcgtagatattaggaggaacaccagtggcgaaggcggcttactggacggtaactgacgttgaggctcgaaagcgtggggagcaaacaggattagataccctggtagtccacgccgtaaacgatgaatactaggtgtttggggaggcaaaagctctttcggtgccgccgcaaacgcaattaagtatttccacctggggagtacgtttcgcaagaatgaaaactcaaaggaattgacggggacccgcacaagcggtggagcatgtggtttaattcgaagcaacgcgaagaaccttaccaagtcttgacatccctctgaccgactcttaaccgagtctttccttcaggacagaggagacaggtggtgcatggttgtcgtcagctcgtgtcgtgagatgttgggttaagtcccgcaacgagcgcaacccctatccccagtagccagcggttcggccgggcactctgaggagactgccagggataacctggaggaaggcggggatgacgtcaaatcatcatgccccttatgatttgggctacacacgtgctacaatggcgtaaacaaaggggagcgagcctgcgaaggtaagcaaatcccaaaaataacgtcccagttcggactgcagtctgcaactcgactgcacgaagctggaatcgctagtaatcgcggatcagaatgccgcggtgaatacgttcccgggtcttgcacacaccgcccgtca

SEQ ID NO: 1591 - DNA, 1393 bp, Artificial Sequence
  Synthetic polymer
agagtttgatcctggctcaggatgaacgctggcggcgtgcttaacacatgcaagtcgaacgaagcactttggatagatctcttcggaatgatatccttagtgactgagtggcggacgggtgagtaacgcgtgggtaacctgcctcatacagggggataacagttagaaatggctgctaataccgcataagcgcacagtaccacatggtacggtgtgaaaaactccggtggtatgagatggacccgcgtctgattagctagttggcagggtaacggcctaccaaggcgacgatcagtagccgacctgagagggtgatcggccacattgggactgagacacggcccaaactcctacgggaggcagcagtggggaatattgcacaatgggggaaaccctgatgcagcgacgccgcgtgaaggaagacgtatttcggtatgtaaacttctatcagcaaggaagatgatgacggtacttgactaagaagccccggctaactacgtgccagcagccgcggtaatacgtagggggcaagcgttatccggatttactgggtgtaaagggagcgtaggcggccatgcaagtcagaagtgaaagcccggggctcaaccccgggactgcttttgaaactgtaaggctagattgccggagaggtaagcggaattcctagtgtagcggtgaaatgcgtagatattaggaggaacaccagtggcgaaggcggcttactggacggtgaatgacgctgaggctcgaaagcgtggggagcaaacaggattagataccctggtagtccacgctgtaaacgatgaatactaggtgttggggtccaaaaggacttcggtgccgcagcaaacgcaataagtattccacctggggagtacgttcgcaagaatgaaactcaaaggaattgacggggacccgcacaagcggtggagcatgtggtttaattcgaagcaacgcgaagaaccttaccaggtcttgacatccccctgacggcagagtaatgtctgcgttcctacgggacaggggagacaggtggtgcatggttgtcgtcagctcgtgtcgtgagatgttgggttaagtcccgcaacgagcgtaacccctatttttagtagccagcggttcggccgggcactctagagagactgccagggataacctggaggaaggcggggatgacgtcaaatcatcatgccccttatgatctgggctacacacgtgctacaatggtggtaacaaagtgaagcgagcctgcgagggggagccaatcacagaaaagccatctcagttcggattgtagtctgcaactcgactacatgaagctggaatcgctagtaatcgcgaatcagcatgtcgcggtgaatacgttcccgggtcttgcacacaccgcccgtca

SEQ ID NO: 1592 - DNA, 1408 bp, Artificial Sequence; identical to SEQ ID NO: 149
  Synthetic polymer

SEQ ID NO: 1593 - DNA, 1393 bp, Artificial Sequence; identical to SEQ ID NO: 388
  Synthetic polymer

SEQ ID NO: 1594 - DNA, 1380 bp, Artificial Sequence; identical to SEQ ID NO: 172
  Synthetic polymer

SEQ ID NO: 1595 - DNA, 1388 bp, Artificial Sequence
  Synthetic polymer
agagtttgatcctggctcaggatgaacgctggcggcgtgcctaacacatgcaagtcgaacgaagcaccttacttgattcttcggatgaaagtttggcgactgagtggcggacgggtgagtaacgcgtgggtaacctgccctgtacagggggataacagctggaaacggctgctaataccgcataagcgcacgaggagacatctcctagtgtgaaaaactccggtggtacaggatgggcccgcgtctgattagctggttggcagggtaacggcctaccaaggcaacgatcagtagccggtctgagaggatgaacggccacattggaactgagacacggtccaaactcctacgggaggcagcagtggggaatattgcacaatgggggaaaccctgatgcagcaacgccgcgtgagtgaagaagtatttcggtatgtaaagctctatcagcagggaagataatgacggtacctgactaagaagctccggctaaatacgtgccagcagccgcggtaatacgtatggagcaagcgttatccggatttactgggtgtaaagggtgcgtaggtggcagtgcaagtcagatgtgaaaggccggggctcaaccccggagctgcatttgaaactgctcggctagagtacaggagaggcaggcggaattcctagtgtagcggtgaaatgcgtagatattaggaggaacaccagtggcgaaggcggcctgctggactgttactgacactgaggcacgaaagcgtggggagcaaacaggattagataccctggtagtccacgccgtaaacgatgaatactaggtgtaggggttgtcatgacctctgtgccgccgctaacgcattaagtattccgcctggggagtacggtcgcaagattaaaactcaaaggaattgacgggggcccgcacaagcagcggagcatgtggtttaattcgaagcaacgcgaagaaccttacctagacttgacatctcctgcattacccttaatcggggaagttccttcggggacaggaagacaggtggtgcatggttgtcgtcagctcgtgtcgtgagatgttgggttaagtcccgcaacgagcgcaacccctgttcttagtagccagcagttcggctgggcactctagggagactgccagggataacctggaggaaggcggggatgacgtcaaatcatcatgccccttatgacttgggctacacacgtgctacaatggcgtaaacaaagggaagcaaaaaggtgacttctagcaaatcccaaaaataacgtcccagttcggactgtagtctgcaactcgactacacgaagctggaatcgctagtaatcgcgaatcagaatgtcgcggtgaatacgttcccgggtcttgcacacaccgcccgtca

SEQ ID NO: 1596 - DNA, 1392 bp, Artificial Sequence; identical to SEQ ID NO: 183
  Synthetic polymer

SEQ ID NO: 1597 - DNA, 1392 bp, Artificial Sequence; identical to SEQ ID NO: 219
  Synthetic polymer

SEQ ID NO: 1598 - DNA, 1367 bp, Artificial Sequence; identical to SEQ ID NO: 754
  Synthetic polymer

SEQ ID NO: 1599 - DNA, 1391 bp, Artificial Sequence; identical to SEQ ID NO: 168
  Synthetic polymer

SEQ ID NO: 1600 - DNA, 1394 bp, Artificial Sequence; identical to SEQ ID NO: 645
  Synthetic polymer

SEQ ID NO: 1601 - DNA, 1392 bp, Artificial Sequence; identical to SEQ ID NO: 377
  Synthetic polymer

SEQ ID NO: 1602 - DNA, 1390 bp, Artificial Sequence; identical to SEQ ID NO: 222
  Synthetic polymer

SEQ ID NO: 1603 - DNA, 1464 bp, Artificial Sequence
  Synthetic polymer
taacacatgcaagtcgaacgaggtatgaggacggaagttttcggacggaagaccttgtactgagtggcggacgggtgagtaacgcgtgggaaacctgccctgttccgggggataccagttggaaacgactgttaataccgcataagcgcacagcaccgcatggtgcagtgtgaaaaactccggtggaacaggatggtcccgcgtctgattgggcagttggcagggtaacggcctaccaaaccgacgatcagtagccggcctgagagggtgaacggccacattgggactgagacacggcccaaactcctacgggaggcagcagtggggaatattgcacaatgggggaaaccctgatgcagcgacgccgcgtgagtgaagaagtacttcggtatgtaaagctctatcagcagggaagaaaatgacggtacctgactaagaagccccggctaactacgtgccagcagccgcggtaatacgtagggggcaagcgttatccggatttactgggtgtaaagggagcgtaggtggtttggtaagtcaggtgtgaaagcccggggctcaaccccgggattgcacttgaaactatcaaactagagtgcaggagaggtaagtggaattcctagtgtagcggtgaaatgcgtagatattaggaggaacaccagtggcgaaggcggcttactggactgtaactgacactgaggctcgaaagcgtggggagcaaacaggattagataccctggtagtccacgccgtaaacgatgaatactaggtgttggggagcaaaagctcctcggtgccgtcgcaaacgcattaagtattccacctggggagtacgttcgcaagaatgaaactcaaaggaattgacggggacccgcacaagcggtggagcatgtggtttaattcgaagcaacgcgaagaaccttaccaggtcttgacatccctctgaccggtccgtaacgggaccttcccttcggggcaggggtgacaggtggtgcatggttgtcgtcagctcgtgtcgtgagatgttgggttaagtcccgcaacgagcgcaacccttatccttagtagccagcagttcggctgggcactctagggagactgccagggataacctggaggaaggcggggatgacgtcaaatcatcatgccccttatgatctgggctacacacgtgctacaatggtgactacaaagggaagcaaccctgtgaaggtgagcaaatcccaaaaaggtcatcccagttcggattgtagtctgcaactcgactacatgaagctggaatcgctagtaatcgcgaatcagaatgtcgcggtgaatacgttcccgggtcttgtacacaccgcccgtcacaccatgggagtcggaaatgcccgaagtcagtgacccaacccgaaagggagggagctgccgaaggtggagccgatgactggggtgaagtcgtaacaaggtagccgtatcggaagg

SEQ ID NO: 1604 - DNA, 1391 bp, Artificial Sequence
  Synthetic polymer
agagtttgatcctggctcaggatgaacgctggcggcgtgcctaacacatgcaagtcgaacggagtcgttttggaaatctcttcggagatggaattctcgacttagtggcggacgggtgagtaacgcgtgagcaatctgcctttaagagggggataacagtcggaaacggctgctaataccgcataaagcatcaaattcgcatgtttttgatgccaaaggagcaatccgcttttagatgagctcgcgtctgattagcttgttggtggggtaacggcccaccaaggcgacgatccatagccggcctgagagggtgaacggccacattgggactgagacacggcccagactcctacgggaggcagcagtggggaatattgcacaatgggggaaaccctgatgcagcgacgccgcgtgagtgaagaagtatctcggtatgtaaagctctatcagcagggaagaaaatgacggtacctgactaagaagccccggctaactacgtgccagcagccgcggtaatacgtagggggcaagcgttatccggaattactgggtgtaaagggtgcgtaggtggtatggcaagtcagaagtgtaaacccagggcttaactctgggactgcttttgaaactgtcagactggagtgcaggagaggtaagcggaattcctagtgtagcggtgaaatgcgtagatattaggaggaacatcagtgcgaaggcggcttactggactgaaactgacactgaggcacgaaagcgtggggagcaaacaggattagataccctggtagtccacgccgtaaacgatgaacactaggtgtcggggccgtataggcttcggtgccgccgctaacgcagtaagtattccacctggggagtacgttcgcaagaatgaaactcaaaggaattgacggggacccgcacaagcggtggagcatgtggtttaattcgaagcaacgcgaagaaccttaccaggtcttgacatccttctgaccgcaccttaatcggtgctttccttcgggacggaagagacaggtggtgcatggttgtcgtcagctcgtgtcgtgagatgttgggttaagtcccgcaacgagcgcaacccctatcttcagtagccagcaggtaaggctgggcactctggagagactgccagggataacctggaggaaggtggggacgacgtcaaatcatcatgccccttatgatctgggcgacacacgtgctacaatggcggtcacagagtgaggcgaacccgcgagggggagcaaaccacaaaaaggccgtcccagttcggactgtagtctgcaacccgactacacgaagctggaatcgctagtaatcgcgaatcagaatgtcgcggtgaatacgttcccgggtcttgtactcaccgcccgtca

SEQ ID NO: 1605 - DNA, 1395 bp, Artificial Sequence
  Synthetic polymer
agagtttgatcctggctcaggatgaacgctggcggcgtgcttaacacatgcaagtcgaacgaagcactttatttgatttccttcgggactgattattttgtgactgagtggcggacgggtgagtaacgcgtgggtaacctgccttgtacagggggataacagttggaaacggctgctaataccgcataagcgcacggcatcgcatgatgcagtgtgaaaaactccggtggtataagatggacccgcgttggattagctagttggtgaggtaacggcctaccaaagcgacgatcagtagccggcctgagagggtgaacggccacattgggactgagacacggcccaaactcctacgggaggcagcagtggggaacattgcacaatgggggaaaccctgatgcagcgacgccgcgtgagtgaagaagtatttcggtatgtaaagctctatcagcagggaagaagaaatgacggtacctgactaagaagccccggctaactacgtgccagcagccgcggtaatacgtagggggcaagcgttatccggatttactggttgtaaagggtgcgtaggtggtatggcaagtcagaagtgagaacccagggcttaactctgggactgcttttgaaactgtcagactggagtgcaggagaggtaagcggaattcctagtgtagcggtgaaatgcgtagatattaggaggaacatcagtggcgaaggcggcttactggactgaaactgacactgaggcacgaaagcgtggggagcaaacaggattagataccctggtagtccacgccgtaaacgatgaatactaggtgtcgggggacaaagtccttcggtgccgccgcaaacgcaataagtattccacctggggagtacgttcgcaagaatgaaactcaaaggaattgacggggacccgcacaagcggtggagcatgtggtttaattcgaagcaacgcgaagaaccttaccaaatcttgacatccctctgaaacactcttaatcgagtgcctacttcgggacagaggagacaggtggtgcatggttgtcgtcagctcgtgtcgtgagatgttgggttaagtcccgcaacgagcgcaacccttatctttagtagccagcggcttggccgggcactctagagagactgccagggacaacctggaggaaggtggggatgacgtcaaatcatcatgcctcttatgacttgggctacacacgtgctacaatggcgtaaacaaagggaagcgtacccgcgagggtgggcaaatcccaaaaataacgtctcagttcggattgtagtctgcaactcgactacatgaagctggaatcgctagtaatcgcgaatcagaatgtcgcggtgaatacgttcccgggtcgtgcacacaccgcccgtcac

SEQ ID NO: 1606 - DNA, 1380 bp, Artificial Sequence; identical to SEQ ID NO: 449
  Synthetic polymer

SEQ ID NO: 1607 - DNA, 1538 bp, Artificial Sequence; identical to SEQ ID NO: 524
  Synthetic polymer

SEQ ID NO: 1608 - DNA, 1377 bp, Artificial Sequence; identical to SEQ ID NO: 346
  Synthetic polymer

SEQ ID NO: 1609 - DNA, 1505 bp, Artificial Sequence; identical to SEQ ID NO: 27
  Synthetic polymer

SEQ ID NO: 1610 - DNA, 1381 bp, Artificial Sequence; identical to SEQ ID NO: 389
  Synthetic polymer

SEQ ID NO: 1611 - DNA, 1389 bp, Artificial Sequence; identical to SEQ ID NO: 141
  Synthetic polymer

SEQ ID NO: 1612 - DNA, 1388 bp, Artificial Sequence; identical to SEQ ID NO: 135
  Synthetic polymer

SEQ ID NO: 1613 - DNA, 1388 bp, Artificial Sequence; identical to SEQ ID NO: 209
  Synthetic polymer

SEQ ID NO: 1614 - DNA, 1388 bp, Artificial Sequence
  Synthetic polymer
tcctggctcaggatgaacgctggcggcgtgcttaacacatgcaagtcgagcgaagcacttaagcctgattcttcggatgaagacttttgtgactgagcgggcgggacgggtgagttaacgcgtgggtaacctgcctcatacagggggataacagttagaaaatgactgctaataccgcataagaccacggtaccgcatggtacagtggtaaaaactccggtggtatgagatggacccgcgtctgattaggtagttggtggggtaacggcctaccaagccgacgatcagtagccgacctgagagggtgaccggccacattgggactgagacacggcccagactcctacgggaggcagcagtggggaatattgcacaatggaggaaactctgatgcagcgacgccgcgtgaaggatgaagtatttcggtatgtaaacttctatcagcagggaagaaaatgacggtacctgactaagaagccccggctaactacgtgccagcagccgcggtaatacgtagggggcaagcggtatccggatttactgggtgtaaagggagcgtagacggcacggcaagccagatgtgaaagcccggggctcaaccccgggactgcatttggaactgctgagctagagtgtcggagaggcaagtggaattcctagtgtagcggtgaaatgcgtagatattaggaggaacaccagtggcgaaggcggcttgctggacgatgactgacgttgaggctcgaaagcgtggggagcaaacaggattagataccctggtagtccacgctgtaaacgataaatactaggggtcgggggagcagggctcttcggtgccgtcgcaaaacgcagtaagtattccacctggggagtacgttcgcaagaatgaaactcaaaggaattgacggggacccgcacaagcggtggagcatgtggtttaattcgaagcaacgcgaagaaccttaccaagtcttgacatccgcctgaccgatccataaccggatctttccttcgggacaggcgagacaggtggtgcatggttgtcgtcagctcgtgtcgtgagatgttgggttaagtcccgcaacgagcgcaacccctatcctcagtagccagcatttaaggtgggcactctggggagactgccagggataacctggaggaaggcggggatgacgtcaaatcatcatgccccttatgatttgggctacacacgtgctacaatggcgtaaacaaagggaagcgagattgtgagatggagcaaatcccaaaaataacgtcccagttcggacaagtagtctgcaacccgactgcacaaagctggaatcgctagtaatcgcggatcagaatgccgcggtgaatacaaagccgggtcttgtacacaccgcccgtca

SEQ ID NO: 1615 - DNA, 1389 bp, Artificial Sequence; identical to SEQ ID NO: 290
  Synthetic polymer

SEQ ID NO: 1616 - DNA, 1390 bp, Artificial Sequence; identical to SEQ ID NO: 242
  Synthetic polymer

SEQ ID NO: 1617 - DNA, 1446 bp, Artificial Sequence; identical to SEQ ID NO: 978
  Synthetic polymer

SEQ ID NO: 1618 - DNA, 1381 bp, Artificial Sequence; identical to SEQ ID NO: 140
  Synthetic polymer

SEQ ID NO: 1619 - DNA, 1394 bp, Artificial Sequence; identical to SEQ ID NO: 266
  Synthetic polymer

SEQ ID NO: 1620 - DNA, 1360 bp, Artificial Sequence; identical to SEQ ID NO: 592
  Synthetic polymer

SEQ ID NO: 1621 - DNA, 1386 bp, Artificial Sequence
  Synthetic polymer
agagtttgatcctggctcaggatgaacgctggcggcgtgcttaacacatgcaagtcgagcgaagcactttagtcgatccttcgggtgattctattgtgactgagcggcggacgggtgagtaacgcgtgggtaacctgcctcatacagggggataacagttagaaatgactgctaataccgcataagcgcacagtaccgcatggtacagtgtgaaaaactccggtggtatgagatggacccgcgttagattagctggttggtggggtaacggcctaccaaggcgacgatctatagccggactgagaggtcgaacggccacattgggactgagacacggcccaaactcctacgggaggcagcagtggggaatattgcacaatgggggaaaccctgatgcagcgacgccgcgtgagcgaagaagtatttcggtatgtaaagctctatcagcagggaagaaaatgacggtacctgactaagaagccccggctaactacgtgccagcagccgcggtaatacgtagggggcaagcgttatccggatttactgggtgtaaagggagcgtagacggtctggcaagtctgatgtgagagcccagggcttaaccttgggactgcattggaaactgtcagactagagtgcaggagaggtaagtggaattcctagtgtagcggtgaaatgcgtagatattaggaggaacaccagtggcgaaggcggcttactggactgtaactgacgttgaggctcgaaagcgtggggagcaaacaggattagataccctggtagtccacgccgtaaacgatgaatactaggtgttggccctaagagggtcggtgccgtcgcaaacgcattaagtattccacctggggagtacgttcgcaagaatgaaactcaaaggaattgacggggacccgcacaagcggtggagcatgtggtttaattcgaagcaacgcgaagaaccttacctaatcttgacatccctctgacaaactgtgtaatgcagtcttccttcgggacagaggtgacaggtggtgcatggttgtcgtcagctcgtgtcgtgagatgttgggttaagtcccgcaacgagcgcaacccctatctttagtagccagcattttggatgggcactctagagagactgccagggataacctggaggagggcggggaggacgtcaaatcatcatgccccttatgattagggctacacacgtgctacaatggtgactacaaagagaagcagagtcgtgaggccgagcaaatcccagaaaagtcatctcagttcggattgtagtctgcaactcgactacatgaagctggaatcgctagtaatcgcagatcagaatgctgcggtgaatacgttcccgggtcttgcactcaccgcccgtca

SEQ ID NO: 1622 - DNA, 1362 bp, Artificial Sequence; identical to SEQ ID NO: 367
  Synthetic polymer

SEQ ID NO: 1623 - DNA, 1391 bp, Artificial Sequence; identical to SEQ ID NO: 448
  Synthetic polymer

SEQ ID NO: 1624 - DNA, 1492 bp, Artificial Sequence
  Synthetic polymer
gtttgatcctggctcaggatgaacgctggcggcgtgcttaacacatgcaagtcgaacgaagcacatacgacggaatccttcgggaggaagatgtatgtgactgagtggcggacgggtgagtaacgcgtgggtaacctgccgtatacagggggataacagttagaaatgactgctaataccgcataagcgcacagtgttgcatgacacagtgtgaaaaactccggtggtatacgatggacccgcgtctgattaggtagttggtggggtaacggcctaccaagccgacgatcagtagccgacctgagagggtgaccggccacattgggactgagacacggcccaaactcctacgggaggcagcagtggggaatattgcacaatgggcgaaagcctgatgcagcgacgccgcgtgaaggaagaagtatttcggtatgtaaacttctatcagcagggaagaaaatgacggtacctgactaagaagctccggctaaatacgtgccagcagccgcggtaatacgtatggagcaagcgttatccggatttactgggtgtaaagggagcgcaggcggcatggcaagtcagatgtgaaaacccggggctcaaccccgggactgcatttgaaactgtcaggctggagtgcaggagaggcaggcggaattcctagtgtagcggtgaaatgcgtagatattaggaggaacaccagtggcgaaggcggcctgctggactgtaactgacgctgaggctcgaaagcgtggggagcaaacaggattagataccctggtagtccacgccgtaaacgatgaatactaggtgtcggggttcgacagaacttcggtgccgcagcaaacgcagtaagtattccacctggggagtacgttcgcaagaatgaaactcaaaggaattgacggggacccgcacaagcggtggagcatgtggtttaattcgaagcaacgcgaagaaccttaccaagtcttgacatccctctgaccgttccctaaccggaatttcccttcggggcagaggagacaggtggtgcatggttgtcgtcagctcgtgtcgtgagatgttgggttaagtcccgcaacgagcgcaacccctattttcagtagccagcggttcggccgggcactctggagagactgccagggataacctggaggaaggcggggatgacgtcaaatcatcatgccccttatgatttgggctacacacgtgctacaatgacgtaaacaaagggaagcagccctgtgaaggtgagcaaatcccaaaaataacgtctcagttcggattgtagtctgcaactcgactacatgaagctggaatcgctagtaatcgcgaatcagaatgtcgcggtgaatacgttcccgggtcttgtacacaccgcccgtcacaccatgggagttggaaatgcccgaagtcagtgacccaaccgcaaggagggagctgccgaaggcaggttcgataactggggtgaagtcgtaaaaaggtagcc

SEQ ID NO: 1625 - DNA, 1390 bp, Artificial Sequence; identical to SEQ ID NO: 247
  Synthetic polymer

SEQ ID NO: 1626 - DNA, 1393 bp, Artificial Sequence; identical to SEQ ID NO: 376
  Synthetic polymer

SEQ ID NO: 1627 - DNA, 1381 bp, Artificial Sequence
  Synthetic polymer
ctcaggatgaacgctggcggcgtgcttaacacatgcaagtcgaacgaaacaccttatttgattttctttcggaactgaagatttggtgattgagtggcggacgggtgagtaacgcgtgggtaacctgccctgtacagggggataacagtcagaaatgactgctaataccgcataagcgcacgagaggacatcctcttgtgtgaaaaactccggtggtacaggatgggcccgcgtctgattagctggttggcagggtaacggcctaccaaagcgacgatcagtagccgacctgagagggtgaccggccacattgggactgagacacggcccaaactcctacgggaggcagcagtggggaatattgcacaatgggggaaaccctgatgcagcgacgccgcgtgagcgaagaagtatttcggtatgtaaagctctatcagcagggaagaagaaatgacggtacctgactaagaagcaccggctaaatacgtgccagcagccgcggtaatacgtatggtgcaagcgttatccggatttactgggtgtaaagggtgcgtaggtggcagtgcaagtcagatgtgaaaggccggggctcaaccccggagctgcatttgaaactgcgcggctagagtacaggagaggcaggcggaattcctagtgtagcggtgaaatgcgtagatattaggaggaacaccagtggcgaaggcggcctgctggactgttactgacactgaggcacgaaagcgtggggagcaaacaggattagataccctggtagtccacgccgtaaacgatgaaatactaggtgtcggggccgtataggcttcggtgccgtcgcaaacgcagtaagtattccacctggggagtacgttcgcaagaatgaaactcaaaggaattgacggggacccgcacaagcggtggagcatgtggtttaattcgaagcaacgcgaagaaccttaccaagtcttgacatccccctgaccggacagtaacgtgtcccttccttcgggacaggggagacaggtggtgcatggttgtcgtcagctcgtgtcgtgagatgttgggttaagtcccgcaacgagcgcaacccttatccttagtagccagcacctcgggtgggcactctagggagactgccagggataacctggaggaaggtggggatgacgtcaaatcatcatgccccttatgatttgggctacacacgtgctataatggcgtaaacaaagggaagcggccctgcgaaggtgagcaaatcccaaaaataacgtcctagttcggactgtagtctgcaacccgactacacgaagctggaatcgctagtaatcgcggatcagaatgccgcggtgaatacgttcccgggtcttgtacacaccgcccgtca

SEQ ID NO: 1628 - DNA, 1389 bp, Artificial Sequence; identical to SEQ ID NO: 322
  Synthetic polymer

SEQ ID NO: 1629 - DNA, 1402 bp, Artificial Sequence; identical to SEQ ID NO: 271
  Synthetic polymer

SEQ ID NO: 1630 - DNA, 1495 bp, Artificial Sequence
  Synthetic polymer
ttagagtttgatcctggctcaggatgaacgctggcggcgtgcttaacacatgcaagtcgaacgaagcaatgggacggaagtcttcggatggaagacccatatacttaagtggcggacgggtgagtaacgcgtgggtaacctgcctcatacagggggataacagctggaaacagccgctaataccgcataagcctacagtcccgcatgggacaggaggaaaatatttataggtatgagatggacccgcgtctgattagctggttggtggggtaacggcccaccaaggcaatgatcagtagccgacttgagagagtgatcggccacattgggactgagacacggcccaaactcctacgggaggcagcagtggggaatattgcacaatgggggaaaccctgatgcagcgacgccgcgtgagtgaagaagtatttcggtatgtaaagctctatcagcaaggaagataatgacggtacttgactaagaagccccggctaactacgtgccagcagccgcggtaatacgtagggggcaagcgttatccggatttactgggtgtaaagggagcgtaggtggcatggtaagtcagatgtgaaagcccagggctcaaccctgggactgcatttgaaactatcaggctagagtgcaggagaggtaagtggaattcctagtgtagcggtgaaatgcgtagatattaggaagaacaccagtggcgaaggcggcttactggactgtaactgacactgaggctcgaaagcgtggggagcaaacaggattagataccctggtagtccacgccgtaaacgatgaatactaggtgttgggggtcataagaccttcggtgccgcagctaacgcaataagtattccacctggggagtacgttcgcaagaatgaaactcaaaggaattgacggggacccgcacaagcggtggagcatgtggtttaattcgaagcaacgcgaagaaccttaccaagtcttgacatccccctgaccggtccgtaaagggacccttccttcgggacaggggagacaggtggtgcatggttgtcgtcagctcgtgtcgtgagatgttggattaagtcccgcgacgagcgcaacccttatctttagtagccagcagtaagatgggcactctagagagactgccagggataacctggaggaaggtggggatgacgtcaaatcatcatgccccttatgatttgggctacacacgtgctacaatggtgaaaacaaagagaagcgaagtcgtgaggcgaagcaaatctcagaaaagtcatctcagttcggattgtagtctgcaactcgactacatgaagctggaatcgctagtaatcgcagatcagaatgctgcggtgaatacgttcccgggtcttgtacacaccgcccgtcacaccatgggagttggaaatgcccgaagtctgtgacccaaccgtaaggagggagcagccgaaggcaggttcgatgactggggtgaagtcgtaacaaggtaacc

SEQ ID NO: 1631 - DNA, 1391 bp, Artificial Sequence; identical to SEQ ID NO: 378
  Synthetic polymer

SEQ ID NO: 1632 - DNA, 1393 bp, Artificial Sequence; identical to SEQ ID NO: 372
  Synthetic polymer

SEQ ID NO: 1633 - DNA, 1442 bp, Artificial Sequence; identical to SEQ ID NO: 1121
  Synthetic polymer

SEQ ID NO: 1634 - DNA, 1389 bp, Artificial Sequence; identical to SEQ ID NO: 379
  Synthetic polymer

SEQ ID NO: 1635 - DNA, 1390 bp, Artificial Sequence; identical to SEQ ID NO: 262
  Synthetic polymer

SEQ ID NO: 1636 - DNA, 1390 bp, Artificial Sequence; identical to SEQ ID NO: 326
  Synthetic polymer

SEQ ID NO: 1637 - DNA, 1382 bp, Artificial Sequence
  Synthetic polymer
agagtttgatcctggctcaggatgaacgctggcggcgtgcctaacacatgcaagtcgaacgaagcaccttttaagattcttcggatgattgatcggtgactgagtggcggacgggtgagtaacgcgtgggtaacctgccctgtacagggggataacagttggaaacggctgctaataccgcataagcgcacgagaggacatcctcttgtgtgaaaaactccggtggtacaggatgggcccgcgtctgattagctggttggcagggtaatggcctaccaaggcgacgatcagtagccggtctgagaggatgaacggccacattggaactgagacacggtccaaactcctacgggaggcagcagtggggaatattgcacaatgggggaaaccctgatgcagcaacgccgcgtgagtgaagaagtatttcggtatgtaaagctctatcagtagggaagataatgacggtacctgactaagaagctccggctaaatacgtgccagcagccgcggtaataggtatggagcaagcgttatccggatttactgggtgtaaagggtgcgtaggtggcagtgcaagtcagatgtgaaaggccggggctcaaccccggagctgcatttgaaactgcatagctggagtacaggagaggcaggcggaattcctagtgtagcggtgaaatgcgtagatattaggaggaacaccagtggcgaaggcggcctgctggactgttactgacactgaggcacgaaagcgtggggagcaaacaggattagataccctggtagtccacgccgtaagcgatgaatactaggtgtcggggccgtataggcttcggtgccgtcgcaaacgcagtaagtattccacctggggagtacgttcgcaagaatgaaactcaaaggaattgatggggacccgcacaagcggtggagcatgtggtttaattcgaagcaacgcgaagaaccttaccaggtcttgacatccttctgaccgctccgtaatgggagctttccttcgggacagaagagacaggtggtgcatggttgtcgtcagctcgtgtcgtgagatgttgggttaagtcccgcaacgagcgcaacccctattgttagttgctacgcaagagcactctagcgagactgccgttgacaaaacggaggaaggtggggacgacgtcaaatcatcatgccccttatatcctgggctacacacgtaatacaatggcggtcaacagagggaagcaaagccgcgaggcagagcaaacccccaaaagccgtcccagttcggattgtaggctgcaactcgcctgcatgaagtcggaatcgctagtaatcgcggatcagcatgccgcggtgaatacgttcccgggccttgcacacaccgcccgtca

SEQ ID NO: 1638 - DNA, 1353 bp, Artificial Sequence; identical to SEQ ID NO: 139
  Synthetic polymer

SEQ ID NO: 1639 - DNA, 1412 bp, Artificial Sequence
  Synthetic polymer
catgcaagtcgaacggagtattttttacagattttcttcggagatgaagtagctaatacttagtggcggatgggtgagtaacgcgtgggtaacctgccttatacaggggaataacagccggaaacggttgctaaaaccgcataacatgcattcatcgcatgatgaaagcatcaaatatttataggtataagatgggcccgcgtctgattagctagttggtgaggtaactgctcaccaaggcgacgatcagtagccggcttgagagagtgaccggccacattgggactgagacacggcccaaactcctacgggaggcagcagtggggaatattgcacaatgggggaaaccctgatgcagcgacgccgcgtgagtgaagaagtatttcggtatgtaaagctctatcagcagggaagaaaatgacggtacctgactaagaagccccggctaactacgtgccagcagccgcggtaatacgtagggggcaagcgttatccggatttactgggtgtaaagggagcgtaggtggcatgtcaagtcagatgtgaaagcccggggctcaaccccgggattgcatttgaaactgatatgctagagtgcaggagaggtaagtggaattcctagtgtagcggtgaaatgcgtagatattaggaggaacaccagtggcgaaggcggcttactggactgtaactgacactgaggctcgaaagcgtggggagcaaacaggattagataccctggtagtccacgccgtaaacgatgaatactaggtgttggggagcaaaagctcttcggtgccggcgctaacgcattaagtattccacctggggagtacgttcgcaagaatgaaactcaaaggaattgacggggacccgcacaagcggtggagcatgtggtttaattcgaagcaacgcgaagaaccttaccaggtcttgacatccctctgaccggtccgtaatgggacctttccttcgggacagaggagacaggtggtgcatggttgtcgtcagctcgtgtcgtgagatgtttggttaagtccagcaacgagcgcaacccctatccttagtagccagcaagtaatgttgggcactctagggagactgccagggataacctggaggaaggcggggatgacgtcaaatcatcatgccccttatgacctgggctacacacgtgctacaatggtggctacaaagggaagcaaccctgcgaaggtaagcaaatcccaaaaaggtcacctcagttcggattgtagtctgcaactcgactacatgaagccggaatcgctagtaatcgtggatcagcatgccgcggtgaatacgttcccgggtcttgtacacaccgcccgtcacaccatgggagtcggaaatgcccgaagtcagtgacccaaccgtaaggagggagctgccgaagg

SEQ ID NO: 1640 - DNA, 1388 bp, Artificial Sequence; identical to SEQ ID NO: 402
  Synthetic polymer

SEQ ID NO: 1641 - DNA, 1387 bp, Artificial Sequence; identical to SEQ ID NO: 169
  Synthetic polymer

SEQ ID NO: 1642 - DNA, 1492 bp, Artificial Sequence
  Synthetic polymer
gtttgatcctggctcaggatgaacgctggcggcgtgcttaacacatgcaagtcgaacgaagcttgatttcagattttttcggaatgatgaatgatatgactgagtggcggacgggtgagtaacgcgtgggcaacctgcctcatacaggggggataacagttagaaatgactgctaataccgcataagaccacaggatcgcatgatccggtggtaaaaactccggtagtatgagatgggcccgcgtctgattagctagttggtgaggtaacggctgcaccaaggcgacgatcagtagccggcttgagagagtgaacggccacattgggactgagacacggcccaaactcctacgggaggcagcagtggggaatattgcacaatgggggaaaccctgatgcagcgacgccgcgtgagtgaagaagtatttcggtatgtaaagctctatcagcagggaagaaaatgacggtacctgactaagaagccccggctaactacgtgccagcagccgcggtaatacgtagggggcaagcgttatccggaattactgggtgtaaagggtgcgtaggtggccaggcaagtcagaagtgaaagcccggggcttaactccgggactgcttttgaaactgtcaggctagagtgcaggagaggtaagcggaattcctagtgtagcggtgaaatgcgtagatattaggaggaacatcagtggcgaaggcggcttactggactgaaactgacactgaggcacgaaagcgtggggagcaaacaggattagataccctggtagtccacgccgtaaacgatgaatactaggtgtcggggccgtagaggcttcggtgccgcagccaacgcaataagtattccacctggggagtacgttcgcaagaatgaaactcaaaggaattgacggggacccgcacaagcggtggagcatgtagtttaattcgaagcaacgcgaagaaccttacctggtcttgacatccttctgaccgactcttaatcgagtttttccttcgggacaggagtgacaggtggtgcatggttgtcgtcagctcgtgtcgtgagatgttgggttaagtcccgcaacgagcgcaacccctatctttagtagccagcaattcggatgggcactctagagagactgccagggataacctggaggaaggtggggacgacgtcaaatcatcatgccccttatgaccagggctacacacgtgctacaatggcgtaaacaaagggaagcagccttgtgagagtgagcaaatcccaaaaataacgtctcagttcggattgtagtctgcaactcgactacatgaagctggaatcgctagtaatcgcgaatcagaatgtcgcggtgaatacgttcccgggtcttgtacacaccgcccgtcacaccatgggagtcagtaacgcccgaagtcagtgacccaaccgcaaggagggagctgccgaaggtgggaccgataactggggtgaagtcgtaacaaggtatcc

SEQ ID NO: 1643 - DNA, 1392 bp, Artificial Sequence; identical to SEQ ID NO: 236
  Synthetic polymer

SEQ ID NO: 1644 - DNA, 1394 bp, Artificial Sequence; identical to SEQ ID NO: 252
  Synthetic polymer

SEQ ID NO: 1645 - DNA, 1379 bp, Artificial Sequence; identical to SEQ ID NO: 395
  Synthetic polymer

SEQ ID NO: 1646 - DNA, 1534 bp, Artificial Sequence
  Synthetic polymer
tttaatttgagagtttgatcctggctcaggatgaacgctggcggcgtgcttaacacatgcaagtcgaacggagtttttaaatggaagtcctcggatggaagtttagaaacttagtggcggacgggtgagtaacgcgtgggtaacctgcctcatacagggggataacagtcggaaacgattgctaaaaccgcataacatagcgaaaccgcatgattttgctatcaaatatttataggtatgagatggacccgcgtctgattagctagttggtggggtaatggcctaccaaggcgacgatcagtagccggcttgagagagtgaccggccacattgggactgagacacggcccaaactcctacgggaggcagcagtggggaatattggacaatgggggaaaccctgatccagcgacgccgcgtgagtgaagaagtatttcggtatgtaaagctctatcagcagggaagataatgacagtacctgactaagaagccccggctaactacgtgccagcagccgcggtaatacgtagggggcaagcgttatccggatttactgggtgtaaagggagcgtaggtggtaggtcaagtcagatgtgaaagcccagggctcaaccctgggactgcatttgaaactggcttactagagtgcaggagaggtaagtggaattcctagtgtagcggtgaaatgcgtagatattaggaggaacaccagtggcgaaggcggcttactggactgtaactgacactgaggctcgaaagcgtggggagcaaacaggattagataccctggtagtccacgccgtaaacgatgaatactagctgtcggggctatcatggcttcggtggcgcagctaacgcaataagtattccacctggggagtacgttcgcaagaatgaaactcaaaggaattgacggggacccgcacaagcggtggagcatgtggtttaattcgaagcaacgcgaagaaccttaccaagtcttgacatccctctgacaaccgagtaacgtcggtcttccttcgggacagaggtgacaggtggtgcatggttgtcgtcagctcgtgtcgtgagatgttgggttaagtcccgcaacgagcgcaacccctatctttagtagccagcagttcggctgggcactctagagagactgccagggataacctggaggaaggcggggatgacgtcaaatcatcatgccccttatgatttgggctacacacgtgctacaatggtgactacaaagagaagcaagcctgcgagggggagcaaatctcaaaaaggtcatcccagttcggattgtactctgcaactcgagtacatgaagctggaatcgctagtaatcgcgaatcagaatgtcgcggtgaatacgttcccgggtcttgtacacaccgcccgtcacaccatgggagtaggtaacgcccgaagtcagtgacccaaccgtaaggagggagctgccgaaggcgggatctataactggggtgaagtcgtaacaaggtagccgtatcggaaggtgcggctggatcacctcctttct

SEQ ID NO: 1647 - DNA, 1494 bp, Artificial Sequence
  Synthetic polymer
gatgaacgctggcggcgtgcttaacacatgcaagtcgaacgaagtactttgaaagcttgctttcaaagtgactgagtggcggacgggtgagtaacgcgtgggtaacctgccttatacagggggataacagttggaaacgactgctaataccgcataagcgcacagtgccgcatggcacagtgtgaaaaactccggtggtataagatggacccgcgtctgattagctagttggtgaggtaacggctcaccaaggcgacgatcagcagccggcttgagagagtgatcggccacattgggactgagacacggcccaaactcctacgggaggcagcagtggggaatattgcacaatgggggaaaccctgatgcagcaacgccgcgtgagtgaagaagtatttcggtatgtaaagctctatcagcagggaagataatgacggtacctgactaagaagccccggctaactacgtgccagcagccgcggtaatacgtagggggcaagcgttatccggatttactgggtgtaaagggagcgtaggcggcttggcaagtctgatgtgaaagcccagggctcaaccctgggactgcattggaaactgtcaggctagagtgcaggagaggtaagtggaattcctagtgtagcggtgaaatgcgtagatattaggaggaacaccagtggcgaaggcggcttactggactgtaactgacgctgaggctcgaaagcgtggggagcaaacaggattagataccctggtagtccacgctgtaaacgatgaatactgggtgtcgggtccgtcaaggattcggtgccgcagctaacgcaataagtattccacctggggagtacgttcgcaagaatgaaactcaaaggaattgacggggacccgcacaagcggtggagcatgtggtttaattcgaagcaacgcgaagaaccttacctagtcttgacatcccggtgaccggagcttaaccgctccttcccttcggggcagcggtgacaggtggtgcatggttgtcgtcagctcgtgtcgtgagatgttgggttaagtcccgcaacgagcgcaacccctatctttagtagccagcagttcggctgggcactctagagagactgccagggataacctggaggaaggtggggatgacgtcaaatcatcatgccccttatgactagggctacacacgtgctacaatggtaattacaaagggaagcagcctcgtgagagtgagcaaatcccaaaaaggttgcctcagttcggattgtagtctgcaactcgactacatgaagctggaatcgctagtaatcgcagatcagaatgctgcggtgaatacgttcccgggtcttgtacacaccgcccgtcacaccatgggagtcagtaacacccgaagtcagtggcccaaccgcaaggagggagctgccgaaggtgggaccgataactggggtgaagtcgtaacaaggtagccgtactggaaagtgcggctggatcacctccttt

SEQ ID NO: 1648 - DNA, 1390 bp, Artificial Sequence; identical to SEQ ID NO: 241
  Synthetic polymer

SEQ ID NO: 1649 - DNA, 1454 bp, Artificial Sequence; identical to SEQ ID NO: 816
  Synthetic polymer

SEQ ID NO: 1650 - DNA, 1392 bp, Artificial Sequence; identical to SEQ ID NO: 313
  Synthetic polymer

SEQ ID NO: 1651 - DNA, 1498 bp, Artificial Sequence
  Synthetic polymer
agagtttgatcctggctcaggatgaacgctggcggcgtgcttaacacatgcaagtcgaacgaagcttgatcttggatcccttcggggtgacgagtgatatgactgagtggcggacgggtgagtaacgcgtgggcaacctgcctcatacagggggataacagttagaaatgactgctaaaaccgcataagaccacagcaccgcatggtggagtggtaaaaactccggtggtatgagatgggcccgcgtctgattagctggttggtgaggtaacggctctaccaaggcaacgatcagtagccggcttgagagagtggacggccacattgggactgagacacggcccaaactcctacgggaggcagcagtggggaatattgcacaatggggggaaccctgatgcagcgacgccgcgtgagtgaagaagtacttcggtatgtaaagctctatcagcagggaagaaaatgacggtacctgactaagaagccccggctaactacgtgccagcagccgcggtaatacgtagggggcaagcgttatccggaattactgggtgtaaagggtgcgtaggtggcagggcaagtcagaagtgaaaacccggggcttaactccgggactgcttttgaaactgtccagctggagtgcaggaggggtaagcggaattcctagtgtagcggtgaaatgcgtagatattaggaggaacatcagtggcgaaggcggcttactggactgaaactgacactgaggcacgaaagcgtggggagcaaacaggattagataccctggtagtccacgccgtaaacgatgaatactaggtgtcggggccgtagaggcttcggtgccgcagcaaacgcattaagtattccacctggggagtacgttcgcaagaatgaaactcaaaggaattgacggggacccgcacaagcggtggagcatgtggtttaattcgaagcaacgcgaagaaccttaccaggtcttgacatcccggtgaccggcgcgtaacggcgcctttccttcgggacaccggagacaggtggtgcatggttgtcgtcagctcgtgtcgtgagatgttgggttaagtcccgcaacgagcgcaacccttattcttagtagccagcaggtgaagctgggcactctggggagactgccagggataacctggaggaaggtggggatgacgtcaaatcatcatgccccttatgatctgggctacacacgtgctacaatggcgtaaacaaagggaggcgaacccgcgagggggagcgaaccccaaaaataacgtctcagttcggactgcagtctgcaactcgactgcacgaagctggaatcgctagtaatcgcgaatcagcatgtcgcggtgaatacgttcccgggtcttgtacacaccgcccgtcacaccatgggagttggtaacgcccgaagtcagtgacccaaccgaaaggagggagctgccgaaggcgggactgataactggggtgaagtcgtaacaaggtagccgta

SEQ ID NO: 1652 - DNA, 1378 bp, Artificial Sequence
  Synthetic polymer
agagtttgatcctggctcaggatgaacgctggcggcgcgcctaacacatgcaagtcgaacggacgatgaagagcttgcttttcaaagttagtggcgggcgggtgagtaacgcgtgggtaacctgcctcatacaggggaatagcagctggaaacggctgataaaaccgcataagcgcacagtgccgcatggcacagtgtgaaaaactccggtggtatgagatggacccgcgtctgattagcttgttggcggggtaacggcccaccaaggcgacgatcagtagccggcctgagagggtgatcggccacattgggactgagacacggcccaaactcctacgggaggcagcagtggggaatattgcacaatgggggaaaccctgatgcagcgacgccgcgtgaaggaagaagtatctcggtatgtaaacttctatcagcagggaagataatgacggtacctgactaagaagccccggctaactacgtgccagcagccgcggtaatacgtagggggcaagcgttatccggatttactgggtgtaaagggagcgtaggcggcggagcaagtcagaagtgaaagcccggggctcaaccccgggacggcttttgaaactgccctgcttgatttcaggagaggtaagcggaattcccagtgtagcggtgaaatgcgtagatattaggaggaacaccagtggcgaaggcggcttactggactgacaatgacgctgaggctcgaaagcgtggggagcaaacaggattagataccctggtagtccacgccgtaaacgatgaatactaggtgtcggggctcataagggcttcggtgccgcagcaaaacgcaataagtattccaccctggggagtacgttcgcaagaatgaaactcaaaggaattgacggggacccgcacaagcggtggagcatgtggtttaattcgaagcaacgcgaagaaccctaccaggccttgacatcctgctgaccggtgagtaatgtcacctttccttcgggacagcagagacaggtggtgcatggttgtcgtcagctcgtgtcgtgagatgtcgggttaagtcccgcaacgagcgcaacccctatgttcagtagccagcatttaggatgggcactctggacagactgccggggataacccggaggaaggcggggatgacgtcaaatcatcatgccccttacggcctgggctacacacgtgctacaatggcgtaaacaaagggaagcaagagggtgacctggagcgaatcccagaaataacgtcccagttcggactgtagtctgcaacccgactacacgaagctggaatcgctagtaatcgcgaatcagcatgtcgcggtgaatacgttcccgggtcttgcacacaccgcccgtca

SEQ ID NO: 1653 - DNA, 1392 bp, Artificial Sequence; identical to SEQ ID NO: 216
  Synthetic polymer

SEQ ID NO: 1654 - DNA, 1387 bp, Artificial Sequence; identical to SEQ ID NO: 374
  Synthetic polymer

SEQ ID NO: 1655 - DNA, 1388 bp, Artificial Sequence
  Synthetic polymer
agagtttgatcctggctcaggatgaacgctggcggcgtgcctaacacatgcaagtcgaacgaagcgccttttgggattcttcggatgaacatttggtgactgagtggcggacgggtgagtaacgcgtgggtaacctgccctgtacagggggataacagccagaaatggctgctaataccgcataagcgcacatgaggacatcctcaagtgtgaaaaactccggtggtacaggatgggcccgcgtctgattagctggttggcggggtaacggcccaccaaggcgatgatcagtagccggtctgagaggatgaacggccacattggaactgagacacggtccaaactcctacgggaggcagcagtggggaatattgcacaatgggggaaaccctgatgcagcaacgccgcgtgagtgaagaagtatttcggtatgtaaagctctatcagcagggaagataatgacggtacctgactaagaagctccggctaaatacgtgccagcagccgcggtaatacgtatggagcaagcgttatccggatttactgggtgtaaagggtgcgtaggcggcacagcaagtcagatgtgaaagaccggggctcaaccccggggctgcatttgaaactgccgagcttgagtccgggagaggtaggcggaattcctagtgtagcggtgaaatgcgtagatattaggaggaacaccagtggcgaaggcggcctgctggaccggaactgacgctgaggcacgaaagcgtggggagcaaacaggattagataccctggtagtccacgccgtaaacgatgaatactaggtgtcggggccgtataggcttcggtgccgcagccaacgcagtaagtattccacctggggagtacgttcgcaagaatgaaactcaaaggaactgacggggacccgcacaagcggtggagcatgtggtttaattcgaagcaacgcgaagaaccttacctgatcttgacatcccgatgccaaagcgcgtaacgcgctctttcttcggaacatcggtgacaggtggtgcatggttgtcgtcagctcgtgtcgtgagatgttgggttaagtcccgcaacgagcgcaacccctatcttcagtagccagcattatggatgggcactctggagagactgccagggagaacctggaggaaggtggggatgacgtcaaatcatcatgccccttatgaccagggctacacacgtgctacaatggcgtaaacaaagggaggcgaacccgcgagggtgggcaaatcccaaaaataacgtctcagttcggattgtagtctgcaactcgactacatgaagctggaatcgctagtaatcgcgaatcagaatgtcgcggtgaatacgttcccgggtcttgcacacaccgcccgtca

SEQ ID NO: 1656 - DNA, 1389 bp, Artificial Sequence
  Synthetic polymer
agagtttgatcctggctcaggatgaacgctggcggcgtgcttaacacatgcaagtcgaacgggaaacattttattgaagcttcggcagatttagtttgtttctagtggcggacgggtgagtaacgcgtgggtaacctgcctcacactgggggataacagtcagaaatgactgctaataccgcataagcgcacgaaatcgcatggttttgtgtgaaaagctccggtggtgtgagatggacccgcgttggattagccagttggcagggtaacggcctaccaaagcgacgatccatagccggcctgagagggtgaacggccacattgggactgagacacggcccagactcctacgggaggcagcagtggggaatattgcacaatgggggaaaccctgatgcagcgacgccgcgtgaaggaagaagtatttcggtatgtaaacttctatcagcagggaagaaaatgacggtacctgactaagaagccccggctaactacgtgccagcagccgcggtaatacgtagggggcaagcgttatccggatttactgggtgtaaagggagcgtaggcggtctgacaagtcagaggtgaaagcccggggctcaactccgggactgcctttgaaactgccggactagattgcaggagaggcaagtggaattcctagtgtagcggtgaaatgcgtagatattaagaggaacaccagtggcgaaggcggcttgctggactgtaaatgacgctgaggctcgaaagcgtggggagcaaacaggattagataccctggtagtccacgccgtaaacgatgaatactaggtgtcagggagcaaagctctttggtgccgcagcaaacgcagtaagtattccacctggggagtacgttcgcaagaatgaaactcaaaggaattgacggggacccgcacaagcggtggagcatgtggtttaattcgaagcaacgcgaagaaccttaccaagtcttgacatccggctgaccggtgagtaatgtcacctttccttcgggacagccgagacaggtggtgcatggttgtcgtcagctcgtgtcgtgagatgttgggttaagtcccgcaacgagcgcaacccttaccttcagtagccagcattttggatgggcactctggagggactgccagggataacctggaggaaggtggggatgacgtcaaatcatcatgccccttatgatttgggctacacacgtgctacaatggcgtaaacaaagggaagcgagagtgtgagcttaagcaaatcccaaaaataacgtctcagttcggattgtagtctgcaactcgactacatgaagctggaatcgctagtaatcgcgaatcagcatgtcgcggtgaatacgttcccgggtcttgcactcaccgcccgtca

SEQ ID NO: 1657 - DNA, 1389 bp, Artificial Sequence; identical to SEQ ID NO: 123
  Synthetic polymer

SEQ ID NO: 1658 - DNA, 1380 bp, Artificial Sequence; identical to SEQ ID NO: 308
  Synthetic polymer

SEQ ID NO: 1659 - DNA, 1389 bp, Artificial Sequence; identical to SEQ ID NO: 438
  Synthetic polymer

SEQ ID NO: 1660 - DNA, 1396 bp, Artificial Sequence; identical to SEQ ID NO: 91
  Synthetic polymer

SEQ ID NO: 1661 - DNA, 1442 bp, Artificial Sequence
  Synthetic polymer
gatgaacgctggcggcgtgcttaacacatgcaagtcgaacgaagcaactatcttgcttgcaagagagttgacttagtggcggacgggtgagtaacgcgtgggtaacctgcctcatacagggggataacagttggaaacgactgctaagaccgcataacccgctagtgtcgcatgacacggacggaaaatatttataggtatgagatgggcccgcgtctgattagctagttggtaaggtaacggcttaccaaggcgacgatcagtagccgacttgagagagtgatcggccacattgggactgagacacggcccaaactcctacgggaggcagcagtggggaatattggacaatgggggaaaccctgatccagcgacgccgcgtgagtgaagaagtatttcggtatgtaaagctctatcagcagggaagataatgacagtacctgactaagaagccccggctaactacgtgccagcagccgcggtaatacgtagggggcaagcgttatccggatttactgggtgtaaagggagcgtaggtggcatggcaagtcagaagtgaaagcccagggctcaaccctgggactgcttttgaaactgtcaagctagagtgcaggagaggtaagtggaattcctagtgtagcggtgaaatgcgtagatattaggaggaacaccagtggcgaaggcggcttactggactgtaactgacactgaggctcgaaagcgtggggagcaaacaggattagataccctggtagtccacgccgtaaacgatgaatactaggtgtctgggattcgattctcaggtgccgacgctaacgcattaagtattccacctggggagtacgttcgcaagaatgaaactcaaaggaattgacggggacccgcacaagcggtggagcatgtggtttaattcgaagcaacgcgaagaaccttacctagtcttgacatcccgatgaccggactttaatcggtccttctcttcggagcatcggagacaggtggtgcatggttgtcgtcagctcgtgtcgtgagatgttgggttaagtcccgcaacgagcgcaacccctatctttagtagccagcatttaaggtgggcactctagagagactgccagggataacctggaggaaggtggggatgacgtcaaatcatcatgccccttatgactagggctacacacgtgctacaatggtgataacaaagtgaagcagcctcgtgagagtgagcaaatcacaaaaatgtcatctcagttcggattgtagtctgcaactcgactacatgaagctggaatcgctagtaatcgcgaatcagaatgtcgcggtgaatacgttcccgggtcttgtacacaccgcccgtcacaccatgggagttggtaatgcccgaagtcagtgacccaaccgtaaggagggagctgccgaaggcaggatcaataactggggtg

SEQ ID NO: 1662 - DNA, 1393 bp, Artificial Sequence; identical to SEQ ID NO: 130
  Synthetic polymer

SEQ ID NO: 1663 - DNA, 1387 bp, Artificial Sequence; identical to SEQ ID NO: 427
  Synthetic polymer

SEQ ID NO: 1664 - DNA, 1392 bp, Artificial Sequence
  Synthetic polymer
agagtttgatcctggctcaggatgaacgctggcggcgtgcttaacacatgcaagtcgaacgaaacaccttatttgattttcttcggaactgaagatttggtgattgagtggcggacgggtgagtaacgcgtgggtaacctgccctgtacagggggataacagtcggaaatgactgctaataccgcataagaccacagcaccgcatggtgcaggggtaaaaactccggtggtacaggatggacccgcgtctgattagctggttggtgaggtaacggctcacctaggcgacgatcagtagccggcttgagagagtgaacggccacattgggactgagacacggcccaaactcctacgggaggcagcagtggggaatattgcacaatgggggaaaccctgatgcagcgacgccgcgtgagtgaagaagtatctcggtatgtagagctctatcagcagggaagaaaatgacggtacctgactaagaagccccggctaactacgtgccagcagccgcggtaatacgtagggggcaagcgttatccggaattactgggtgtaaagggtgcgtaggtggtatggcaagtcagaagtgaaaacccagggcttaactctgggactgcttttgaaactgtcagactggagtgcaggagaggtaagcggaattcctagtgtagcggtgaaatgcgtagatattaggaggaacatcagtggcgaaggcggcttactggactgaaactgacactgaggcacgaaagcgtggggagcaaacaggattagataccctggtagtccacgccgtaaacgatgaatactaggtgtcggggccgtagaggcttcggtgccgcagccaacgcagtaagtattccacctggggagtacgttcgcaagaatgaaactcaaaggaattgacggggacccgcacaagcggtggagcatgtggtttaattcgaagcaacgcgaagaaccttacctggtcttgacatccttctgaccggtccttaaccggacctttccttcgggacaggagtgacaggtggtgcatggttgtcgtcagctcgtgtcgtgagatgttgggttaagtcccgcaacgagcgcaacccctattttcagtagccagcattttggatgggcactctggagagactgcccgggataaccgggaggaaggtggggatgacgtcaaatcatcatgccccttatgatctgggctacacacgtgctacaatggctgttacagagagaagcgaatccgcgaggaagagcaaacctcaaaaaggcagtctcagttcggattgtagtctgcaactcgactacatgaagctggaatcgctagtaatcgcgaatcagaatgtcgcggtgaatacgttcccgggtcttgcactcaccgcccgtca

SEQ ID NO: 1665 - DNA, 1380 bp, Artificial Sequence; identical to SEQ ID NO: 113
  Synthetic polymer

SEQ ID NO: 1666 - DNA, 1389 bp, Artificial Sequence; identical to SEQ ID NO: 385
  Synthetic polymer

SEQ ID NO: 1667 - DNA, 1377 bp, Artificial Sequence; identical to SEQ ID NO: 298
  Synthetic polymer

SEQ ID NO: 1668 - DNA, 1392 bp, Artificial Sequence; identical to SEQ ID NO: 263
  Synthetic polymer

SEQ ID NO: 1669 - DNA, 1398 bp, Artificial Sequence; identical to SEQ ID NO: 611
  Synthetic polymer

SEQ ID NO: 1670 - DNA, 1375 bp, Artificial Sequence; identical to SEQ ID NO: 424
  Synthetic polymer

SEQ ID NO: 1671 - DNA, 1393 bp, Artificial Sequence; identical to SEQ ID NO: 381
  Synthetic polymer

SEQ ID NO: 1672 - DNA, 1376 bp, Artificial Sequence
  Synthetic polymer
agagtttgatcctggctcaggacgaacgctggcggcgtgcctaacacatgcaagtcgaacggagttaagtgcttcggtatttaacttagtggcgaacgggtgagtaacgcgtgagaaacctgcctttcagtgggggacaacagttggaaacgactgctaataccgcataatgtcatttgggggcatccctgagtgaccaaagatttattgctgaaggatggcctcgcgtctgattagatagttggtggggtaacggcctaccaagtcgacgatcagtagccgggttgagagactgaccggccacattgggactgagatacggcccagactcctacgggaggcagcagtggggaatattgggcaatgggcgaaagcccgacccagcaacgccgcgtgaaggaagagggccttcgggttgtaaacttcttttaccagggacgaaggacgtgacggtacctggagaagaagccccggctaaatacgtgccagcagccgcggtaatacgtatggagcaagcgttatccggatttactgggtgtaaagggtgcgtaggcggcatggcaagtcagatgtgaaagcccggggctcaaccccggtagtgcatttgaaactgctgagctggagtacgggagaggtaagcggaattcctagtgtagcggtgaaatgcgtagatattaggaggaacaccagtggcgaaggcggcttactggaccgtaactgacgctgaggcacgaaagcgtggggagcaaacaggattagataccctggtagtccacgccgtaaacgatgaatactaggtgtcggggccgtagaggctccggtgccgccgcaaacgcagtaagtattccacctggggagtacgttcgcaagaatgaaactcaaaggaattgacggggacccgcacaagcggtggagcatgtggtttaattcgaagcaacgcgaagaaccttaccaagtcttgacatcccgatgaccgctctttaacaggagcttctcttcggagcatcggagacaggtggtgcatggttgtcgtcagctcgtgtcgtgagatgttgggttaagtcccgcaacgagcgcaacccttatcttcagtagccagcacatacggtgggcactctggagagactgccagggataacctggaggaaggtggggatgacgtcaaatcatcatgccccttatgatttgggctacacacgtgctacaatgacaggtacagagtgaagcgaacccgcgagggggagccaaccacaaaaaagctgtctcagttcggattgtagtctgcaactcgactacatgaagctggaatcgctagtaatcgcgaatcagaatgtcgcggtgaatacgttcccgggtcttgtactcaccgcccgtca

SEQ ID NO: 1673 - DNA, 1377 bp, Artificial Sequence; identical to SEQ ID NO: 894
  Synthetic polymer

SEQ ID NO: 1674 - DNA, 1509 bp, Artificial Sequence
  Synthetic polymer
agagtttgatcatggctcaggatgaacgctggcggcgtgcctaacacatgcaagtcgaacggagtggatattcttcggaagattcacttagtggcggacgggtgagtaacgcgtgggtaacctgcctcatacagggggatagcagctggaaacggctgataaaaccgcataagcgcacagcatcgcatgatgcagtgtgaaaaactccggtggtatgagatggacccgcgtctgattagctggttggtgaggtaacggcccaccaaggcgacgatcagtagccggcctgagagggtgaccggccacattgggactgagacacggcccaaactcctacgggaggcagcagtggggaatattgcacaatgggggaaaccctgatgcagcgacgccgcgtgaaggaagaagtatctcggtatgtaaacttctatcagcagggaagataatgacggtacctgactaagaagccccggctaactacgtgccagcagccgcggtaatacgtagggggcaagcgttatccggatttactgggtgtaaagggagcgtaggcggcggagcaagtcagaagtgaaagcccggggctcaaccccgggacggcttttgaaactgccctgcttgatttcaggagaggaaagcggaattcctagtgtagcggtgaaatgcgtagatattaggaggaacaccagtggcgaaggcggctttctggactgacaatgacgctgaggctcgaaagcgtggggagcaaacaggattagataccctggtagtccacgccgtaaacgatgaatactaggtgtcgggggacagaagtccttcggtgccgcagcaaacgcaataagtattccacctggggagtacgttcgcaagaatgaaactcaaaggaattgacggggacccgcacaagcggtggagcatgtggtttaattcgaagcaacgcgaagaaccttaccaggccttgacatcctgctgaccggtgagtaatgtcacccttccttcgggacagcagagacaggtggtgcatggttgtcgtcagctcgtgtcgtgagatgttgggttaagtcccgcaacgagcgcaacccctatgttcagtagccagcggcaaggccgggcactctggacagactgccggggataacccggaggaaggcggggatgacgtcaaatcatcatgccccttacggcctgggctacacacgtgctacaatggcgtcaacaaagggaggcaagagggtgaccttaagcgaatcccaaaaataacgtcccagttcggactgtagtctgcaacccgactacacgaagctggaatcgctagtaatcgcgaatcagcatgtcgcggtgaatacgttcccgggtcttgtacacaccgcccgtcacaccatgggagttggaaatgcccgaagtcagtgacctaaccgcaagggaggagctgccgaaggtggagccgatgactggggtgaagtcgtaacaaggtagccgtatcggaaggtgcggctggatcacctcctt

SEQ ID NO: 1675 - DNA, 1484 bp, Artificial Sequence
  Synthetic polymer
agagtttgatcctggctcaggatgaacgctggcggcgtgcttaacacatgcaagtcgaacggaggtcttaggagtgcttgcactcagaagactttagtggcggacgggtgagtaacgcgtggggaacctgccccgtaccgggggataacagccggaaacggctgctaaaaccgcataagcgcacagtatcgcatgatacggtgtgaaaaactccggtggtacgggatggacccgcgtctgattagccagttggcagggtaacggcctaccaaagcgacgatcagtagccggcctgagagggtggacggccacattgggactgagacacggcccaaactcctacgggaggcagcagtggggaatattgcacaatgggggaaaccctgatgcagcgacgccgcgtgagtgaagaagttattcgtaatgtaaagctctatcagcagggaagaaaaaagacggtacctgaccaagaagcaccggctaaatacgtgccagcagccgcggtaatacgtatggtgcaagcgttatccggatttactgggtgtaaagggtgcgtaggtggcatggcaagtcagaagtgaaaggccggggctcaaccccgggactgcttttgaaactgtcaggctggagtgcaggagaggaaagcggaattcctagtgtagcggtgaaatgcgtagatattaggaggaacaccagtggcgaaggcggctttctggactgaaactgacactgaggcacgaaagcgtggggagcaaacaggattagataccctggtagtccacgccgtaaacgatgaatactaggtgtcggggagcaaagctctccggtgccgcagcaaacgcattaagtattccacctggggagtacgttcgcaagaatgaaactcaaaggaattgacggggacccgcacaagcggtggagcatgtggtttaattcgaagcaacgcgaagaaccttaccaggtcttgacatccccctgacagggaagtaacgttccttttcctacgggacaggggagacaggtggtgcatggttgtcgtcagctcgtgtcgtgagatgttgggttaagtcccgcaacgagcgcaacccctgttttcagtagccagcatttaaggtgggcactctggagagactgcccgggataaccgggaggaaggcggggatgacgtcaaatcatcatgccccttatgacctgggctacacacgtgctacaatggcagtgacaaagggaagcggccccgcgagggtgagcaaaccccaaaaaagctgtcccagttcggattgtagtctgcaacccgactacatgaagccggaatcgctagtaatcgcaaatcagaatgttgcggtgaatacgttcccgggtcttgtacacaccgcccgtcacaccatgggagttggaaatgcccgaagtcagtgacccaaccgaaaggagggagctgccgaaggcaggtccgatgactggggtgaagtcgtaacaaggtaacc

SEQ ID NO: 1676 - DNA, 1445 bp, Artificial Sequence; identical to SEQ ID NO: 1076
  Synthetic polymer

SEQ ID NO: 1677 - DNA, 1343 bp, Artificial Sequence; identical to SEQ ID NO: 761
  Synthetic polymer

SEQ ID NO: 1678 - DNA, 1445 bp, Artificial Sequence; identical to SEQ ID NO: 1116
  Synthetic polymer

SEQ ID NO: 1679 - DNA, 1362 bp, Artificial Sequence; identical to SEQ ID NO: 750
  Synthetic polymer

SEQ ID NO: 1680 - DNA, 1376 bp, Artificial Sequence; identical to SEQ ID NO: 736
  Synthetic polymer

SEQ ID NO: 1681 - DNA, 1389 bp, Artificial Sequence; identical to SEQ ID NO: 162
  Synthetic polymer

SEQ ID NO: 1682 - DNA, 1389 bp, Artificial Sequence; identical to SEQ ID NO: 244
  Synthetic polymer

SEQ ID NO: 1683 - DNA, 1393 bp, Artificial Sequence; identical to SEQ ID NO: 259
  Synthetic polymer

SEQ ID NO: 1684 - DNA, 1360 bp, Artificial Sequence; identical to SEQ ID NO: 278
  Synthetic polymer

SEQ ID NO: 1685 - DNA, 1496 bp, Artificial Sequence; identical to SEQ ID NO: 512
  Synthetic polymer

SEQ ID NO: 1686 - DNA, 1390 bp, Artificial Sequence
  Synthetic polymer
agagtttgatcctggctcaggatgaacgctggcggcgtgcttaacacatgcaagtcgagcgaagcacttaagtttgattcttcggatgaagacttttgtgactgagcggcggacgggtgagtaacgcgtgggtaacctgcctcatacagggggataacagttagaaatgactgctaataccgcataagaccacggtaccgcatggtacagtggtaaaaactccggtggtatgagatggacccgcgtctgattaggtagttggtggggtaacggcctaccaagccgacgatcagtagccgacctgagagggtgatcggccacattgggactgagacacggcccagactcctacgggaggcagcagtggggaatattgcacaatggaggaaactctgatgcagcgacgccgcgtgaaggatgaagtatttcggtatgtaaacttctatcagcagggaagaaaatgacggtacctgactaagaagccccggctaactacgtgccagcagccgcggtaatacgtagggggcaagcgttatccggatttactgggtgtaaagggagcgtagacggcaaggcaagtctgatgtgaaaacccagggcttaaccctgggactgcattggaaactgtctggctcgagtgccggagaggtaagcggaattcctagtgtagcggtgaaatgcgtagatattaggaagaacaccagtggcgaaggcggcttactggacggtaactgacgttgaggctcgaaagcgtggggagcaaacaggattagataccctggtagtccacgccgtaaacgatgaatactaggtgtcggggagcatggctcttcggtgccgtcgcaaacgcagtaagtattccacctggggagtacgttcgcaagaatgaaactcaaaggaattgacggggacccgcacaagcggtggagcatgtggtttaattcgaagcaacgcgaagaaccttaccaagtcttgacatccgcctgaccgatccttaaccggatctttccttcgggacaggcgagacaggtggtgcatggttgtcgtcagctcgtgtcgtgagatgttgggttaagtcccgcaacgagcgcaacccctatcctcagtagccagcatttaaggtgggcactctggggagactgccagggataacctggaggaaggcggggatgacgtcaaatcatcatgccccttatgatttgggctacacacgtgctacaatggcgtaaacaaagggaagcgagattgtgagatggagcaaatcccaaaaataacgtcccagttcggactgtagtctgcaacccgactacacgaagctggaatcgctagtaatcgcggatcagaatgccgcggtgaatacgttcccgggtcttgtactcaccgcccgtca

SEQ ID NO: 1687 - DNA, 1392 bp, Artificial Sequence; identical to SEQ ID NO: 154
  Synthetic polymer

SEQ ID NO: 1688 - DNA, 1390 bp, Artificial Sequence; identical to SEQ ID NO: 301
  Synthetic polymer

SEQ ID NO: 1689 - DNA, 1347 bp, Artificial Sequence; identical to SEQ ID NO: 1017
  Synthetic polymer

SEQ ID NO: 1690 - DNA, 1393 bp, Artificial Sequence; identical to SEQ ID NO: 532
  Synthetic polymer

SEQ ID NO: 1691 - DNA, 1389 bp, Artificial Sequence; identical to SEQ ID NO: 214
  Synthetic polymer

SEQ ID NO: 1692 - DNA, 1455 bp, Artificial Sequence; identical to SEQ ID NO: 858
  Synthetic polymer

SEQ ID NO: 1693 - DNA, 1426 bp, Artificial Sequence; identical to SEQ ID NO: 1009
  Synthetic polymer

SEQ ID NO: 1694 - DNA, 1389 bp, Artificial Sequence; identical to SEQ ID NO: 454
  Synthetic polymer

SEQ ID NO: 1695 - DNA, 1383 bp, Artificial Sequence
  Synthetic polymer
agagtttgatcctggctcaggatgcatgctggcggcgtgcctaacacatgcaagtcgaacgaagcgcttaagacggacccttcgggggaagatttaagtgactgagtggcggacgggtgagtaacgcgtgggcaacctgccctgtacagggggataacagttggaaacggctgctaataccgcataagcgcacagtgggacatcccacagtgtgaaaaactccggtggtacaggatgggcccgcgtctgattagctagttggcagggtaacggcctaccaaggcaacgatcagtagccggtctgagaggatgaacggccacattggaactgagacacggtccaaactcctacgggaggcagcagtggggaatattgcacaatgggggaaaccctgatgcagcaacgccgcgtgagtgaagaagtatttcggtatgtaaagctctatcagcagggaagataatgacggtacctgactaagaagctccggctaaatacgtgccagcagccgcggtaatacgtatggagcaagcgttatccggatttactgggtgtaaagggtgcgtaggcggcaaggcaagtcagatgtgaaagaccggggctcaactccggggctgcatttgaaactgttttgctggagtccaggagaggcaggcggaattcctagtgtagcggtgaaatgcgtagatattaggaggaacaccagtggcgaaggcggcctgctggactggaactgacgctgaggcacgaaagcgtggggagcaaacaggaagagataccctggtagtccacgccgtaaacgatgaataactaggtgtcggggccgtataggcttcggtgccgcagcaaacgcagtaagtattccacctggggagtacgttcgcaagaatgaaactcaaaggaattgacggggacccgcacaagcggtggagcatgtggtttaattcgaagcaacgcgaagaaccttaccaggtcttgacatccttctgactgctccttaatcggagctttccttcgggacaggagagacaggtgaaacatagttgtcgtcagctcgtgtcgtgagatgttgggttaagtcccgcaacgagcgcaacccttatccttagtagccagcaagtgaagttgggcactctagggagactgccagggataacctggaggaaggtggggatgacgtcaaatcatcatgccccttatgatttgggctacacacgtgctacaatggcgtaaacaaagggaggcgaagccgcgaggtgaagcaaatcccaaaaataacgtctcagttcggattgtagtctgcaactcgactacatgaagctggaatcgctagtaatcgcgaatcagaatgtcgcggtgaatacgttcccgggtcttgcactcac

SEQ ID NO: 1696 - DNA, 1387 bp, Artificial Sequence
  Synthetic polymer
agagtttgatcctggctcaggatgaacgctggcggcgtgcctaacacatgcaagtcgaacgaagcaccttttgagattcttcggatgatcgattggtgactgagtggcggacgggtgagtaacgcgtgggtaacctgccctgtacagggggataacagctggaaacggctgctaataccgcataagcgcacgaggggacatctccttgtgtgaaaaactccggtggtacaggatgggcccgcgtctgattagctggttggcagggtaacggcctaccaaggcaacgatcagtagccggtttgagaggatgaacggccacattggaactgagacacggtccaaactcctacgggaggcagcagtggggaatattgcacaatgggggaaaccctgatgcagcaacgccgcgtgagtgaagaagtatttcggtatgtaaagctctatcagcagggaagataatgacggtacctgactaagaagctccggctaaatacgtgccagcagccgcggtaatacgtatggagcaagcgttatccggatttactgggtgtaaagggtgcgtaggtggcagtgtaagtcagatgtgaaaggccggggctcaaccccggagctgcatttgaaactgctcggctagagtacaggagaggcaggcggaattcctagtgtagcggtgaaatgcgtagatattaggaggaacaccagtggcgaaggcggcctgctggactgttactgacactgaggcacgaaagcgtggggagcaaacaggattagataccctggtagtccacgccgtaaacgatgaatactaggtgtcggggccgtataggcttcggtgccgccgctaacgcagtaagtattccacctggggagtacgttcgcaagaatgaaactcgaaggaattgacggggacccgcacaagcggtggagcatgtggtttaattcgaagcaacgcgaagaaccttacctggtcttgacatccctatgaataacgggcaatgccgttagtacttcggtacataggagacaggtggtgcatggttgtcgtcagctcgtgtcgtgagatgttgggttaagtcccgcaacgagcgcaacccttatctttagtagccagcagtaagatgggcactctagagagactgccggggataacccggaggaaggtggggatgacgtcaaatcatcatgccccttatgaccagggctacacacgtgctacaatggcgtaaacaaagagaagcggagtcgtgaggcagagcgaatctcaaaaataacgtctcagttcggattgtagtctgcaactcgactacatgaagctggaatcgctagtaatcgcagatcagaatgctgcggtgaatacgttcccgggtcttgtacacaccgcccgtca

SEQ ID NO: 1697 - DNA, 1390 bp, Artificial Sequence
  Synthetic polymer
agagtttgatcctggctcaggatgaacgctggcggcgtgcctaacacatgcaagtcgaacgaagcaccttacctgattcttcggatgaaggtctggtgactgagtggcggacgggtgagtaacgcgtgggtaacctgccctgtacagggggataacagttggaaacggctgctaataccgcataagcacacgagaggacatcctcttgtgtgaaaaactccggtggtacaggatgggcccgcgtctgattagctggttggcagggtaacggcctaccaaggcgacgatcagtagccggtctgagaggatgaacggccacattggaactgagacacggtccaaactcctacgggaggcagcagtggggaatattgcacaatgggggaaaccctgatgcagcaacgccgcgtgagtgaagaagtatttcggtatgtaaagctctatcagcagggaagataatgacggtacctgactaagaagctccggctaaatacgtgccagcagccgcggtaatacgtatggagcaagcgttatccggatttactgggtgtaaagggtgcgtaggtggcagtgcaagtcagatgtgaaaggccggggctcaaccccggagctgcatttgaaactgctcggctagagtacaggagaggcaggcggaattcctagtgtagcggtgaaatgcgtagatattaggaggaacaccagtggcgaaggcggcctgctggactgttactgacactgaggcacgaaagcgtggggagcaaacaggattagataccctggtagtccacgccgtaaacgatgaatactaggtgtcggggccgtataggcttcggtgccgtcgcaaacgcagtaagtattccacctggggagtacgttcgcaagaatgaaactcaaaggaattgacggggacccgcacaagcggtggagcatgtggtttaattcgaagcaacgcgaagaaccttaccaggtcttgacatccttctgaccactccgtaatgggagtcttccttcgggacagaagagacaggtggtgcatggttgtcgtcagctcgtgtcgtgagatgttgggttaagtcccgcaacgagcgcaacccctatcttcagtagccagcaggtaaggctgggcactctggagagactgccgtggataacacggaggaaggtggggatgacgtcaaatcatcatgccccttatgtcttgggctacacacgtgctacaatggctggtaacaaagtgacgcaagacggtgacgttaagcaaatcacaaaaacccagtcccagttcggattgtagtctgcaactcgactacatgaagctggaatcgctagtaatcgcgaatcagcatgtcgcggtgaatacgttcccgggccttgtacacaccgcccgtca

SEQ ID NO: 1698 - DNA, 1461 bp, Artificial Sequence
  Synthetic polymer
ctcaggatgaacgctggcggcgtgcttaacacatgcaagtcgaacgaagcaatgagacggaagttttcggatggaagattcattgacttaagtggcggacgggtgagtaacgcgtgggtaacctgcctcatacagggggataacagttggaaacagctgctaataccccataagcctccagtttcgcatgaaacggaaggaaaatatttataggtatgagatggacccgcgtctgattagctagttggtgaggtaacggctcaccaaggcaatgatcagtagccgacttgagagagtgatcggccacattgggactgagacacggcccaaactcctacgggaggcagcagtggggaatattgcacaatgggggaaaccctgatgcagcgacgccgcgtgagtgaagaagtatttcggtatgtaaagctctatcagcaaggaagataatgacggtacttgactaagaagccccggctaactacgtgccagcagccgcggtaatacgtagggggcaagcgttatccggatttactgggtgtaaagggagcgtaggtggcatggtaagtcagatgtgaaagcccagggctcaaccctgggattgcatttgaaactattaggctagagtgcaggagaggtaagtggaattcctagtgtagcggtgaaatgcgtagatattaggaagaacaccagtggcgaaggcggcttactggactgtcactgacactgaggctcgaaagcgtggggagcaaacaggattagataccctggtagtccacgccgtaaacgatgaatactaggtgtcggggagcaaaagttcttcggtgccgcagcaagcgcattaagtattccacctggggagtacgttcgcaagaatgaaactcaaaggaattgacggggacccgcacaagcggtggagcatgtggtttaattcgaagcaacgcgaagaaccttaccaagtcttgacatccctctgaccggtccgtaaagggacctttccttcgggacagaggagacaggtggtgcatggttgtcgtcagctcgtgtcgtgagatgttgggttaagtcccgcaacgagcgcaacccctatctttagtagccagcatataaggtgggcactctagagagactgccagggataacctggaggaaggtggggatgacgtcaaatcatcatgccccttatgacttgggctacacacgtgctacaatggtgaaaacaaagagaagcgaagtcgcgaggcgaagcaaatctcagaaaagtcacctcagttcggattgtagtctgcaactcgactacatgaagctggaatcgctagtaatcgcagatcagaatgctgcggtgaatacgttcccgggccttgtacacaccgcccgtcacaccacgagagtttgtaacacccgaagtcggtgaggtaaccttttggagccagccgcctaaggtgggatggatgattggggtga

SEQ ID NO: 1699 - DNA, 1388 bp, Artificial Sequence; identical to SEQ ID NO: 210
  Synthetic polymer

SEQ ID NO: 1700 - DNA, 1371 bp, Artificial Sequence; identical to SEQ ID NO: 685
  Synthetic polymer

SEQ ID NO: 1701 - DNA, 1380 bp, Artificial Sequence
  Synthetic polymer
ctcaggatgaacgctggcggcgtgcttaacacatgcaagtcgaacgaagcactttatttgatttccttcgggactgattattttgtgactgagtggcggacgggtgagtaacgcgtgggtaacctgccttgtacagggggataacagttggaaacggctgctaataccgcataagcgcacggcatcgcatgatgcagtgtgaaaaactccggtggtataagatggacccgcgttggattagctagttggtggggtaacggcccaccaaggcgacgatccatagccggcctgagagggtgaacggccacattgggactgagacacggcccagactcctacgggaggcagcagtggggaatattgcacaatgggggagaccctgatgcagcgacgccgcgtgaaggaagaagtatctcggtatgtaaacttctatcagcagggaagatagtgacggtacctgactaagaagccccggctaactacgtgccagcagccgcggtaatacgtagggggcaagcgttatccggatttactgggtgtaaagggagcgtagacggcacggcaagccagatgtgaaagcccggggctcaaccccgggactgcatttggaactgctgagctagagtgtcggagaggcaagtggaattcctagtgtagcggtgaaatgcgtagatattaggaggaacaccagtggcgaaggcggcttgctggacgatgactgacgttgaggctcgaaagcgtggggagcaaacaggattagataccctggtagtccacgccgtaaacgatgactgctaggtgtcgaggagcaaggctgttcggtgccgtcgcaaaccgcagtaagtaattccacctggggagtacgtttgcaagaatgaatctcaaaggaatagacggggacccgcacaagcggtggagcatgtggtttaatttgaagcaacgcgaagagccttaccaagtcttgacatcccgatgacagaacaagaatggtgttttctcttcggagcatcgatgacaggtggtgcatggtcgtcgtcagctcgtgtcgtgagaagttgggttaagtcccgcaacgagcgcaacccctattcttagtagccagcggttcggccgggcactctagggagactgccagggataacctggaggaaggtggggatgacgtcaaatcatcatgccccttatgacctgggctacacacgtgctacaatggcgtaaacaaagggaagcgagcctgcgagggggagcaaatctcaaaaataacgtctcagttcggattgtagtctgcaactcgaatacatgaagctggaatcgctagtaatcgcgaatcagaatgacgcggagaatacgttcccagggtcttgcgcacaccgcccgtca

SEQ ID NO: 1702 - DNA, 1375 bp, Artificial Sequence; identical to SEQ ID NO: 538
  Synthetic polymer

SEQ ID NO: 1703 - DNA, 1393 bp, Artificial Sequence; identical to SEQ ID NO: 403
  Synthetic polymer

SEQ ID NO: 1704 - DNA, 1358 bp, Artificial Sequence; identical to SEQ ID NO: 787
  Synthetic polymer

SEQ ID NO: 1705 - DNA, 1496 bp, Artificial Sequence
  Synthetic polymer
agagtttgatcctggctcaggatgaacgctggcggcgtgcttaacacatgcaagtcgaacgaagcacttggaacagattacttcggtatgaagttccatttgactgagtggcggacgggtgagtaacgcgtgggtaacctacctctatcagggggataacagttagaaatgactgctaataccgcataagcgcacagtgccgcatggcacggtgtgaaaagcccagacggatagagatggacccgcgtctgattagctggttggtgaggtaacggcccaccaaggcgacgatcagtagccggcctgagagggtgaacggccacattgggactgagacacggcccaaactcctacgggaggcagcagtggggaatattgcacaatgggggaaaccctgatgcagcgacgccgcgtgaaggaagaagtatttcggtatgtaaacttctatcagcagggaagaaaatgacggtacctgactaagaagccccggctaactacgtgccagcagccgcggtaatacgtagggggcaagcgttatccggatttactgggtgtaaagggagcgtaggcggcgatgcaagtcagaagtgaaagcccggggctcaactccgggactgcttttgaaactgtgttgctagattgcaggagaggtaagtggaattcctagtgtagcggtgaaatgcgtagatattaggaggaacaccagtggcgaaggcggcttactggactgtaaatgacgctgaggctcgaaagcgtggggagcaaacaggattagataccctggtagtccacgccgtaaacgatgaatactaggtgtgagggagcaaagctctttggtgccgcagcaaacgcaataagtattccacctggggagtacgttcgcaagaatgaaactcaaaggaattgacggggacccgcacaagcggtggagcatgtggtttaattcgaagcaacgcgaagaaccttaccaagtcttgacatcccggtgaccggagcttaatcgttccttctcttcggagcactggagacaggtggtgcatggttgtcgtcagctcgtgtcgtgagatgttgggttaagtcccgcaacgagcgcaacccttatctttagtagccagcgagtaaagtcgggcactctagagagactgccagggacaacctggaggaaggtggggatgacgtcaaatcatcatgccccttatgatttgggctacacacgtgctacaatggcgtaaacaaagggaagcgagcgagtgattgtaagcaaatctcaaaaataacgtctcagttcggattgtagtctgcaactcgactacatgaagctggaatcgctagtaatcgcgaatcagcatgtcgcggtgaatacgttcccgggtcttgtacacaccgcccgtcacaccatgggagttggtaacgcccgaagccagtgacccaaccgataaggagggagctgtcgaaggtgggaccgataactggggtgaagtcgtaacaaggtaacc

SEQ ID NO: 1706 - DNA, 1391 bp, Artificial Sequence; identical to SEQ ID NO: 114
  Synthetic polymer

SEQ ID NO: 1707 - DNA, 1380 bp, Artificial Sequence; identical to SEQ ID NO: 359
  Synthetic polymer

SEQ ID NO: 1708 - DNA, 1394 bp, Artificial Sequence; identical to SEQ ID NO: 614
  Synthetic polymer

SEQ ID NO: 1709 - DNA, 1394 bp, Artificial Sequence; identical to SEQ ID NO: 137
  Synthetic polymer

SEQ ID NO: 1710 - DNA, 1381 bp, Artificial Sequence; identical to SEQ ID NO: 341
  Synthetic polymer

SEQ ID NO: 1711 - DNA, 1392 bp, Artificial Sequence; identical to SEQ ID NO: 619
  Synthetic polymer

SEQ ID NO: 1712 - DNA, 1391 bp, Artificial Sequence; identical to SEQ ID NO: 302
  Synthetic polymer

SEQ ID NO: 1713 - DNA, 1392 bp, Artificial Sequence; identical to SEQ ID NO: 293
  Synthetic polymer

SEQ ID NO: 1714 - DNA, 1499 bp, Artificial Sequence; identical to SEQ ID NO: 859
  Synthetic polymer

SEQ ID NO: 1715 - DNA, 1388 bp, Artificial Sequence; identical to SEQ ID NO: 248
  Synthetic polymer

SEQ ID NO: 1716 - DNA, 1387 bp, Artificial Sequence; identical to SEQ ID NO: 173
  Synthetic polymer

SEQ ID NO: 1717 - DNA, 1392 bp, Artificial Sequence
  Synthetic polymer
agagtttgatcctggctcaggatgaacgctggcggcgtgcttaacacatgcaagtcgaacgggaatgcttcgctgatgcgatttcggtcaaatcttgaagcattttagtggcggacgggtgagtaacgcgtgggtaacctgccctgtacagggggacaacagttggaaacgactgctaataccgcataagcgcacagcttcgcatgaagcagtgtgaaaaactccggtggtacaggatggacccgcgtctgattagatagttggtgaggtaacggcccatcaagtcaacgatcagtagccggcctgagagggcgaacggccacattgggactgagacacggcccaaactcctacgggaggcagcagtggggaatattgcacaatgggggaaaccctgatgcagcgacgccgcgtgagcgaagaagtatttcggtatgtaaagctctatcagcagggaagataatgacggtacctgactaagaagccccggctaactacgtgccagcagccgcggtaatacgtagggggcaagcgttatccggaattactgggtgtaaagggtgcgtaggtggtatggcaagtcagaagtgaaaacccagggcttaactctgggactgcttttgaaactgtcagactggagtgcaggagaggtaagcggaattcctagtgtagcggtgaaatgcgtagatattaggaggaacatcagtggcgaaggcggcttactggactgaaactgacactgaggcacgaaagcgtggggagcaaacaggattagataccctggtagtccacgccgtaaacgatgaatactaggtgtcggggccgtagaggcttcggtgccgcagccaacgcagtaagtattccacctggggagtacgttcgcaagaatgaaactcaaaggaattgacggggacccgcacaagcggtggagcatgtggtttaattcgaagcaacgcgaagaaccttacctggtcttgacatccttctgaccggtccttaaccggacctttccttcgggacaggagtgacaggtggtgcatggttgtcgtcagctcgcgtcgtgagatgttgggttaagtcccgcaacgagcgcaacccctatctttagtagccagcatttaaggtgggcactctagagagactgccagggataacctggaggaaggtggggacgacgtcaaatcatcatgccccttatgaccagggctacacacgtgctacaatggcgtaaacaaagggaagcaaacctgtgaaggcaagcaaatcccaaaaataacgtctcagttcggattgtagtctgcaactcgactacatgaagctggaatcgctagtaatcgcagatcagaatgctgcggtgaatacgttcccgggtcttgtacacaccgcccgtca

SEQ ID NO: 1718 - DNA, 1384 bp, Artificial Sequence; identical to SEQ ID NO: 775
  Synthetic polymer

SEQ ID NO: 1719 - DNA, 1413 bp, Artificial Sequence; identical to SEQ ID NO: 629
  Synthetic polymer

SEQ ID NO: 1720 - DNA, 1411 bp, Artificial Sequence; identical to SEQ ID NO: 726
  Synthetic polymer

SEQ ID NO: 1721 - DNA, 1405 bp, Artificial Sequence; identical to SEQ ID NO: 580
  Synthetic polymer

SEQ ID NO: 1722 - DNA, 1405 bp, Artificial Sequence; identical to SEQ ID NO: 863
  Synthetic polymer

SEQ ID NO: 1723 - DNA, 1520 bp, Artificial Sequence; identical to SEQ ID NO: 1056
  Synthetic polymer

SEQ ID NO: 1724 - DNA, 1411 bp, Artificial Sequence; identical to SEQ ID NO: 565
  Synthetic polymer

SEQ ID NO: 1725 - DNA, 1397 bp, Artificial Sequence; identical to SEQ ID NO: 840
  Synthetic polymer

SEQ ID NO: 1726 - DNA, 1493 bp, Artificial Sequence; identical to SEQ ID NO: 42
  Synthetic polymer

SEQ ID NO: 1727 - DNA, 1465 bp, Artificial Sequence; identical to SEQ ID NO: 903
  Synthetic polymer

SEQ ID NO: 1728 - DNA, 1448 bp, Artificial Sequence; identical to SEQ ID NO: 545
  Synthetic polymer

SEQ ID NO: 1729 - DNA, 1399 bp, Artificial Sequence
  Synthetic polymer
gagtttgatcctggctcaggacgaacgctggcggcgtgcctaacacatgcaagtcgaacggagaattttatttcggtaggattcttagtggcgaacgggtgagtaacgcgtaggcaacctgccctttagacgggacaacattccgaaaggagtgctaataccggatgagatcattttcccgcataggagagtgaagaaagatggcctctacatgtaagctatcgctaaaggatgggcctgcgtctgattagctagttggtagtgtaacggactaccaaggcgatgatcagtagccggtctgagaggatgaacggccacattgggactgagacacggcccaaactcctacgggaggcagcagtggggaatcttccgcaatggacgaaagtctgacggagcaacgccgcgtgagtgatgaaggatttcggtctgtaaaactctgttgtttatgacgaacgtgcagtgtgtgaacaatgcattgcaatgacggtagtaaacgaggaagccacggctaactacgtgccagcagccgcggtaatacgtaggtggcgagcgtcgtccggaattattgggcgtaaagagcatgtaggcggcctattaagtcgagcgtgaaaatgcggggctcaaccccgtatggcgctggaaactggtaggcttgagtgcaggagaggaaaggggaattcccagtgtagcggtgaaatgcgtagatattgggaggaacaccagtggcgaaggcgcctttctggactgtgtctgacgctgagatgcgaaagccagggtagcgaacgggattagataccccggtagtcctggccgtaaacgatgggtactaggtgtaggaggtatcgaccccttctgtgccggagttaacgcaataagtaccccgcctggggagtacggccgcaaggttgaaactcaaaggaattgacgggggcccgcacaagcggtggagtatgtggtttaattcgacgcaacgcgaagaaccttaccaaggcttgacattgattgatcgctctagagatagagctttcccttcggggacaagaaaacaggtggtgcatggctgtcgtcagctcgtgtcgtgagatgttgggttaagtcccgcaacgagcgcaacccctatcctatgttaccagcaagtgaagttggggactcatgggagactgccagggacaacctggaggaaggcggggatgacgtcaagtcatcatgccccttatgtcttgggctacacacgtactacaatggtcggaaacagagggaagcaaagccgcgaggcagagcaaaccccagaaacccgatctcagttcggatcgcaggctgcaactcgcctgcgtgaagtcggaatcgctagtaatcgcaggtcagcatactgcggtgaatacgttcccgggccttg

SEQ ID NO: 1730 - DNA, 1487 bp, Artificial Sequence; identical to SEQ ID NO: 977
  Synthetic polymer

SEQ ID NO: 1731 - DNA, 1407 bp, Artificial Sequence; identical to SEQ ID NO: 568
  Synthetic polymer

SEQ ID NO: 1732 - DNA, 1491 bp, Artificial Sequence; identical to SEQ ID NO: 854
  Synthetic polymer

SEQ ID NO: 1733 - DNA, 1483 bp, Artificial Sequence
  Synthetic polymer
acgaacgctggcggcgtgcctaacacatgcaagtcgaacggagaattttatttcggtataattcttagtggcgaacgggtgagtaacgcgtacgcaacctgccctttatacggggacaacattccgaaaggagtgctagtaccggatgtgatcatcgtgcctcatggcacgatgaaaaaagatggcctctactagtaagctatcgctaaaggatgggcctgcgtctgattagctagttggtagtgtaatggactaccaaggcgatgatcagtagccggtctgagaggatgaacggccacattgggactgagacacggcccaaactcctacgggaggcaacagtggggaatcttccgcaatggacgaaagtctgacggagcaacgccgcgtgagtgatgaaggatttcggtctgtaaagctctgttgtttatgacgaacgtgcagtgtgtgaacaatgcattgcaatgacggtagtaaacgaggaagccacggctaactacgtgccagcagccgcggtaatacgtaggtggcgagcgttgtccggaattattgggcgtaaagagcatgtacgcggcttaataagtcgagcgtgaagatgcggggctcaaccccgtatggcgctggaaactgttaggcttgagtgcaggagaggaaaggggaattcccagtgtagcggtgaaatgcgtagatattgggaggaacaccagtggcgaaggcgcctttctggactgtgtctgacgctgagatgcgaaagccatggtagcgaacgggattagataccccggtagtcctggctgtaaacgatgggtactaggtgtaggaggtatcgacccgttctgtgccggagttaacgcaataagtacaccgcgtggggagtacggcggcaaggttgaaactcaaaggaattgacgggggcccgcacaagcggtggagtatgtggtttaattggacgcaacgcgaagaaccttaccaaggcttgacattgattgaatgctctagagatagagatttcccttcggggacaagaaaacaggtggtgcatggctgtagtcagctcgtgtcgtgagatgttgggttaagtcccgcaatgagcgcaacccctatcctatgttaccagcaagtaaagttggggactcatgggagactgccagggacaacatggaggaaggcggggatgacgtcaagtcatcatgccccttatgtcttgggctacacacgtactacaatggtcggaaacagagggaagcgaagccgcgaggcagagcaaaccccagaaacccgatttcagtttggatcgcaggctgcaacctgcctgcgtgaagttggaatcgctagtaattgcaggtcagcatactgcggtgaatacgttcccgggccttgtacacaccgcccgtcacaccacgaaagttggtaacacccgaagccggtgaggtaacctattaggagccagccgtctaaggtggggccgatgattggggtgaag

SEQ ID NO: 1734 - DNA, 1410 bp, Artificial Sequence; identical to SEQ ID NO: 572
  Synthetic polymer

SEQ ID NO: 1735 - DNA, 1451 bp, Artificial Sequence; identical to SEQ ID NO: 990
  Synthetic polymer

SEQ ID NO: 1736 - DNA, 1407 bp, Artificial Sequence; identical to SEQ ID NO: 657
  Synthetic polymer

SEQ ID NO: 1737 - DNA, 1474 bp, Artificial Sequence; identical to SEQ ID NO: 1102
  Synthetic polymer

SEQ ID NO: 1738 - DNA, 1511 bp, Artificial Sequence; identical to SEQ ID NO: 870
  Synthetic polymer

SEQ ID NO: 1739 - DNA, 1463 bp, Artificial Sequence; identical to SEQ ID NO: 963
  Synthetic polymer

SEQ ID NO: 1740 - DNA, 1409 bp, Artificial Sequence; identical to SEQ ID NO: 127
  Synthetic polymer

SEQ ID NO: 1741 - DNA, 1405 bp, Artificial Sequence; identical to SEQ ID NO: 126
  Synthetic polymer

SEQ ID NO: 1742 - DNA, 1425 bp, Artificial Sequence; identical to SEQ ID NO: 1044
  Synthetic polymer

SEQ ID NO: 1743 - DNA, 1365 bp, Artificial Sequence; identical to SEQ ID NO: 1023
  Synthetic polymer

SEQ ID NO: 1744 - DNA, 1396 bp, Artificial Sequence
  Synthetic polymer
ggacgaacgctggcggcatgcctaacacatgcaagtcgaacggagattgatggagcttgctttattgatcttagtggcgaacgggtgagtaacgcgtaggcaacctgccctttagatggggacaacattccgaaaggggtgctaataccgaatgtgatcgtccttccgcatggaaggatgatgaaagatggcctctacgagtaagctatcgctaaaggatgggcctgcgtctgattagctagttggtgtggtaacggcgcaccaaggcgacgatcagtagccggtctgagaggatgaacggccacattgggactgagacacggcccagactcctacgggaggcagcagtggggaatcttccgcaatgggcgaaagcctgacggagcaatgccgcgtgagtgaagaagggattcgttccgtaaagctctgttgttaaggacgaatgtgcagattgcgaatagtgatctgtaatgacggtacttaacgaggaagccacggctaactacgtgccagcagccgcggtaatacgtaggtggcgagcgttgtccggaattattgggcgtaaagagcatgtaggcggttttttaagtccggagtgaaaatgcggggctcaaccccgtatggctctggatactggaagacttgagtgcaggagaggaaaggggaattcccagtgtagcggtgaaatgcgtagatattgggaggaacaccagtggcgaaggcgcctttctggactgtgtctgacgctgagatgcgaaagccagggtagcgaacgggattagataccccggtagtcctggccgtaaacgatgggtactaggtgtaggaggtatcgaccccttctgtgccggagttaacgcaataagtaccccgcctggggagtacgtccgcaaggatgaaactcaaaggaattgacgggggcccgcacaagcggtggagtatgtggtttaattcgacgcaacgcgaagaaccttaccaaggcttgacattgagtgacagctctagagatagagcgttcccttaggggacacgaaaacaggtggtgcatggctgtcgtcagctcgtgtcgtgagatgttgggttaagtcccgcaacgagcgcaacccctatcctatgttaccagcacgtaaaggtggggactcatgggagactgccaaggacaacttggaggaaggcggggatgacgtcaagtcatcatgccccttatgtcttgggctacacacgtactacaatggtcggcaacagagggaagcaaagccgcgaggcagagcaaaccccagaaacccgatctcagttcggattgcaggctgaaactcgcctgcatgaagtcggaatcgctagtaatcgcaggtcagcatactgcggtgaatacgttcccgggccttgtacacaccgc

SEQ ID NO: 1745 - DNA, 1506 bp, Artificial Sequence; identical to SEQ ID NO: 871
  Synthetic polymer

SEQ ID NO: 1746 - DNA, 1456 bp, Artificial Sequence; identical to SEQ ID NO: 922
  Synthetic polymer

SEQ ID NO: 1747 - DNA, 1495 bp, Artificial Sequence; identical to SEQ ID NO: 1220
  Synthetic polymer
  misc_feature (1460)..(1460): n is a, c, g, or t
  misc_feature (1487)..(1487): n is a, c, g, or t

SEQ ID NO: 1748 - DNA, 1353 bp, Artificial Sequence; identical to SEQ ID NO: 1233
  Synthetic polymer

SEQ ID NO: 1749 - DNA, 1464 bp, Artificial Sequence; identical to SEQ ID NO: 931
  Synthetic polymer

SEQ ID NO: 1750 - DNA, 1369 bp, Artificial Sequence; identical to SEQ ID NO: 1253
  Synthetic polymer
  misc_feature (310)..(310): n is a, c, g, or t

SEQ ID NO: 1751 - DNA, 1447 bp, Artificial Sequence; identical to SEQ ID NO: 1256
  Synthetic polymer

SEQ ID NO: 1752 - DNA, 1443 bp, Artificial Sequence; identical to SEQ ID NO: 1291
  Synthetic polymer

SEQ ID NO: 1753 - DNA, 1381 bp, Artificial Sequence; identical to SEQ ID NO: 1031
  Synthetic polymer

SEQ ID NO: 1754 - DNA, 1433 bp, Artificial Sequence; identical to SEQ ID NO: 1390
  Synthetic polymer
  misc_feature (744)..(744): n is a, c, g, or t
  misc_feature (751)..(751): n is a, c, g, or t
  misc_feature (785)..(785): n is a, c, g, or t
  misc_feature (796)..(796): n is a, c, g, or t

SEQ ID NO: 1755 - DNA, 1360 bp, Artificial Sequence; identical to SEQ ID NO: 1411
  Synthetic polymer

SEQ ID NO: 1756 - DNA, 1449 bp, Artificial Sequence; identical to SEQ ID NO: 1420
  Synthetic polymer

SEQ ID NO: 1757 - DNA, 1510 bp, Artificial Sequence; identical to SEQ ID NO: 1458
  Synthetic polymer

SEQ ID NO: 1758 - DNA, 1487 bp, Artificial Sequence; identical to SEQ ID NO: 478
  Synthetic polymer

SEQ ID NO: 1759 - DNA, 1451 bp, Artificial Sequence; identical to SEQ ID NO: 1128
  Synthetic polymer

SEQ ID NO: 1760 - DNA, 1399 bp, Artificial Sequence
  Synthetic polymer
ttagagtttgatcctggctcaggatgaacgctagcgacaggcttaacacatgcaagccgaggggcagcatgaagttacttcggtaactttgatggcgaccggcgcacgggtgcgtaacgcgtatgcaacctacccataactcttggatagcccatggaaacgtggattaatacaggatggtctgaatgaatcgcatgattttttcagtaaagaatttcggttatggatgggcatgcgttccattaggtagtaggtgaggtaacggctcacctagcccatgatggataggggttctgagaggaaggtcccccacattggaactgagacacggtccaaactcctacgggaggcagcagtgaggaatattggtcaatggtcgagagactgaaccagccaagtcgcgtgagggatgactgccctatgggttgtaaacctcttttgtttgggaagaataagctttacgagtagagcgatgccggtaccaaacgaataagcatcggctaactccgtgccagcagccacggtaatacgggggatgcgagcgttatccggatttattgggtttaaagggtgcgtaggcggtagattaagttagtggttaaatcgagaggctcaacctctttcagccattaatactggtcaactagagtgtggacgaggtaggcggaataagtcaagtagcggtgaaatgcttagatatgacttagaactccgatagcgaaggcagcttaccaggccataactgacgctgaagcacgagagcgtgggtagcgaacaggattagataccctggtagtccacgccgtaaacgatgctcactagctctgtgcgatatgacagtacggggttaagcgaaggggataagtgagccacctggggagtacgccggcaacggtgaaactcaaaggaattgacgggggcccgcacaagcggaggaacatgtggtttaattcgatgatacgcgaggaaccttacccgggttcaaatgttggatgcatatcggtgaaagtcggtttcccttcggggctgccaacaaggtgctgcatggttgtcgtcagctcgtgccgtgaggtgtcgggttaagtcccataacgagcgcaacccttatcgttagttgccatcaggtaaagctgggcactctggcgagactgccaccgtaaggtgagaggaaggtggggatgacgtcaaatcagcacggcccttacacccggggctacacacgtgttacaatggcaaggacaaagggcagctacctggtgacaggatgcgaatctctaaaccttgtcgtagttcggattggagtctgcaacccgactccatgaagttggattcgctagtaatcgcgcatcagccatggcgcggtgaatacgttcccgggccttgtacacaccgcccgtca

SEQ ID NO: 1761 - DNA, 1407 bp, Artificial Sequence; identical to SEQ ID NO: 1109
  Synthetic polymer

SEQ ID NO: 1762 - DNA, 1431 bp, Artificial Sequence
  Synthetic polymer
cgacaggcttaacacatgcaagtcgaggggtaacagggtgtagcaatacaccgctgacgaccggcgcacgggtgagtaacgcgtatgcaacctgcctttgacagagggatagcccatggaaacgtggattaatacctcatagtctctttttccttcctggggaatagagtaaaacgagagtggtcaaagatgggcatgcgtcctattaggcagttggcggggtaacggcccaccaaaccgatgataggtaggggttctgagaggaaggtcccccacactggtactgagacacggaccagactcctacgggaggcagcagtgaggaatattggtcaatggtcgagagactgaaccagccaagtcgcgtgagggatgactgccctatgggttgtaaacctcttttctactgggagaataagccctatgtatagggtgatgacagtacagtaggaataagcatcggctaactccgtgccagcagccgcggtaatacggaggatgcgagcgttatccggatttattgggtttaaagggtgcgtaggcggctttataagttagtggtaaaatttcggagcttcactccggtccgccattaaaactgtagagctagagaatggacgaggtaggcggaataagttaagtagcggtgaaatgcatagatataacttagaactccgatagcgaaggcagcttaccagaccataactgacgctgatgcacgagagcgtgggtagcgaacaggattagataccctggtagtccacgccgtaaacgatgctcaccggcccttagcgataagacagttaggggttaattgaaagaattaagtgagccacctggggagtacgtcggcaacgatgaaactcaaaggaattgacgggggcccgcacaagcggaggaacatgtggtttaattcgatgatacgcgaggaaccttacctgggtttaaatgtatgttgcataatctggaaacagtttttctcttcggagctatatacaaggtgccgcatggttgtcgtcagctcgtgccgtgaggtgtcgggttaagtcccataacgagcgcaacccttaccgttagttgctagcatgtaatgatgagcactctagcggggctgccaccgtaaggtgagaggaagggggggatgacgtcaaatcagcacggcccttacatccagggcgacacacgtgttacaatggtaggtacagagggcagctaccctgcgaagggatgcgaatctcgaaagcctatctcagttcggattggaggctgaaacccgcctccatgaagttggattcgctagtaatcgcgcatcagccatggcgcggtgaatacgttcccgggccttgtacacaccgcccgtcaagccatggaagctgggggtgcctgaagttcgtgaccgcaaggagcgacctagggcaaaaccggtgactg

SEQ ID NO: 1763 - DNA, 1439 bp, Artificial Sequence; identical to SEQ ID NO: 958
  Synthetic polymer

SEQ ID NO: 1764 - DNA, 1418 bp, Artificial Sequence; identical to SEQ ID NO: 1100
  Synthetic polymer

SEQ ID NO: 1765 - DNA, 1401 bp, Artificial Sequence; identical to SEQ ID NO: 390
  Synthetic polymer

SEQ ID NO: 1766 - DNA, 1416 bp, Artificial Sequence
  Synthetic polymer
tgaacgctagcgacaggcttaacacatgcaagtcgaggggtaacagggtgtagcaatacaccgctgacgaccggcgcacgggtgagtaacgcgtatgcaacctgcctttgacagagggatagcccatggaaacgtggattaatacctcatagtctctttttccttcctggggaatagagtaaaacgagagtggtcaaagatgggcatgcgtcctattaggcagttggcggggtaacggcccaccaaaccgatgataggtaggggttctgagaggaaggtcccccacactggtactgagacacggaccagactcctacgggaggcagcagtgaggaatattggtcaatggtcgagagactgaaccagccaagccgcgtgagggatgactgccctatgggttgtaaacctcttttctactgggagaataagccctatgtatagggtgatgacagtacagtaggaataagcatcggctaactccgtgccagcagccgcggtaatacggaggatgcgagcgttatccggatttattgggtttaaagggtgcgtaggcggctttataagttagtggtaaaatttcggagcttcactccggtccgccattaaaactgtagagctagagaatggacgaggtaggcggaataagttaagtagcggtgaaatgcatagatataacttagaactccgatagcgaaggcagcttaccagaccataactgacgctgatgcacgagagcgtgggtagcgaacaggattagataccctggtagtccacgccgtatacgatgctcaccggcccttagcgataagacagttaggggttaattgaaagaattaagtgagccacctggggagtacgtcggcaacgatgaacctcaaaggaatggacgggggtccgctcaagcggaggaacatgtggtttaattagatgatacgcgaggatccttacgtgggtgtaaacgtagagtgcataatctggaaacagtttttctcttcggagctatatacaaggtgctgcatggttgtcgtcagctcgtgccgtgaggtgtcgggttacagtcctataacgagcgcaacccttgccgttagttgttagcaagtaatgatgagcactctagcgggactgccaccgtaaggtgagaggaagggggggatgacgtcaaatcagcacggtctttacatccagggcgacacacgtgttgcaatggccataacagcgggtagctgccgggcgaccggacgcaaatctcgaaaattggtttaagttcggattggagtctgcaacccgactccatgaagttggatttgttagtaatcgagcatcatccatggcgcggtgaatacgttcccgggccttgttcacaccgcccgtcaagccatggaagctgggagtaccagaagtccgtaaccgcgagga

SEQ ID NO: 1767 - DNA, 1398 bp, Artificial Sequence; identical to SEQ ID NO: 415
  Synthetic polymer

SEQ ID NO: 1768 - DNA, 1441 bp, Artificial Sequence
  Synthetic polymer
cgctagctacaggcttaacacatgcaagtcgaggggcagcatttcagtttgcttgcaaactggagatggcgaccggcgcacgggtgagtaacacgtatccaacctgccgataactcggggatagcctttcgaaagaaagattaatacccgatagtataatgaaaccgcatggtcttattattaaagaatttcggttatcaatggggatgcgttccattaggcagttggtgaggtaacggctcaccaaaccttcgatgggtaggggttctgagaggaaggtcccccacactggtactgagacacggaccagactcctacgggaggcagcagtgaggaatattggtcaatggtcgagagactgaaccagccaagtcgcgtgagggatgactgccctatgggttgtaaacctcttttctactgggagaataagccttatgtataaggtgatgacagtacagtaggaataagcatcggctaactccgtgccagcagccgcggtaatacggaggatgcgagcgttatccggatttattgggtttaaagggtgcgtaggcggctttataagttagtggtaaaatttcggagcttcactccggtccgccattaaaactgtagagctagagaatggacgaggtaggcggaataagttaagtagcggtgaaatgcatagatataacttagaactccgatagcgaaggcagcttaccagaccataactgacgctgatgcacgagagcgtgggtagcgaacaggattagataccctggtagtccacgccgtaaacgatgctcaccggcccttagcgataagacagttaggggttaattgaaagaattaagtgagccacctggggagtacgtcggcaacgatgaaactcaaaggaattgacgggggcccgcacaagcggaggaacatgtggtttaattcgatgatacgcgaggaaccttacctgggtttaaatgtatattgcataatctggaaacagtttttctcttcggagctatatacaaggtgctgcatggttgtcgtcagctcgtgccgtgaggcgtcgggttaagtcccataacgagcgcaacccttaccgttagttgctaacatgtaatgatgagcactctagcgggactgccaccgtaaggtgagaggaagggggggatgacgtcaaatcagcacggcccttacatccagggcgacacacgtgttacaatggccataacagcgggtagctaccgggtgaccggatgcaaatctcgaaaattggtctaagttcggattggagtctgcaacccgactccatgaagttggattcgctagtaatcgcgcatcagccatggcgcggtgaatacgttcccgggccttgtacacaccgcccgtcaagccatggaagctgggagtacctgaagtccgtaaccgcgaggatcggcctagggtaataccggtaact

SEQ ID NO: 1769 - DNA, 1434 bp, Artificial Sequence
  Synthetic polymer
aacacatgcaagtcgaggggtaacagggtgtagcaatacaccgctgacgaccggcgcacgggtgagtaacgcgtatgcaacctgcctttgacagagggatagcccatggaaacgtggattaatacctcatagtctctttttccttcctggggaatagagtaaaacgagagtggtcaaagatgggcatgcgtcctattaggcagttggcggggtaacggcccaccaaaccgatgataggtaggggttctgagaggaaggtcccccacactggtactgagacacggaccagactcctacgggaggcagcagtgaggaatattggtcaatggtcgagagactgaaccagccaagtcgcgtgagggatgactgccctatgggttgtaaacctcttttctactgggagaataagccctatgtatagggtgatgacagtacagtaggaataagcatcggctaactccgtgccagcagccgcggtaatacggaggatgcgagcgttatccggatttattgggtttaaagggtgcgtaggcggctttataagttagtggtaaaatttcggagcttcactccggtccgccattaaaactgtagagctagagaatggacgaggtaggcggaataagttaagtagcggtgaaatgcatagatataacttagaactccgatagcgaaggcagcttaccagaccataactgacgctgatgcacgagagcgtgggtagcgaacaggattagataccctggtagtccacgccgtaaacgatgctcaccggcccttagcgataagacagttaggggttaattgaaaaaattaagtgagccacctggggagtacgtcggcaacgatgaaactcaaaggaattgacgggggcccgcacaagcggaagaacatgtggtttaattcgatgatacgcgaggaaccttaactgggttttaatgtatgtggcataatctgggaacagttttttctctccgagctatatacaaggtgctgcatggttgtcgtcagctcgtgccgtgaggtgtcgggttaagtcccataacgagcgcaacccttgtcgtcagttactagcaggttatgatgagcactctagcgggactgccatcgtaagatgagaggaagggggggatgacgtcaaatcagcacggcccttacatccagggcgacacacgtgttacaatgggcataacagagggtagctaccgggcgaccggatgccaatctccaaaacctgtctaagttcggattggagtctgcaacccgactccatgaagttggattcgctagtaatcgcgcatcagccatggcgcggtgaatacgttcccgggccttgtacacaccgcccgtcaagccatggaagccgggagtacctgaagtccgtaaccgcgaggatcgccctagggtaataccggtaactggggctaagtcgta

SEQ ID NO: 1770 - DNA, 1360 bp, Artificial Sequence; identical to SEQ ID NO: 1123
  Synthetic polymer

SEQ ID NO: 1771 - DNA, 1358 bp, Artificial Sequence; identical to SEQ ID NO: 23
  Synthetic polymer
  misc_feature (21)..(21): n is a, c, g, or t
  misc_feature (36)..(36): n is a, c, g, or t

SEQ ID NO: 1772 - DNA, 1376 bp, Artificial Sequence
  Synthetic polymer
agagtttgatcctggctcaggacgaacgctggcggcgtgcctaacacatgcaagtcgagcgaatgaaattccttcgggaacggatttagcggaggagggttgattaagacgtggggaacctgcctcatagaggggaatacccttccgaaggggacattaataccacataacagtgtattaccgcgtggtacagccattaaaggagcaatacctctatgagatgggcccccgacgcattacctagttggtgaggaaacggctcgccaaggcgacgatgcctaacccaactaacagggtgatcgcccacattgggactgagacactggccacactcctacgggaggcactcctggggaatattgcacaatgggggaaaccctgatgcaccaacgcctcatgagtgatgaccgccttcgggttgtaaatctctgtcttcaggggcgataatgacggtacctgaggaggaagccacggctaactacgtgccagcagccgcggtaatacgtaggtggcgagcgttgtccggatttactgggtgtaaagggagcgtaggcggatttttaagtcagatgtgaaatactcgggcttaacctgagtgctgcatttcaaactggaagtctagagtgcaggagaggtgatgggaattcctagtgtagcggtgaaatgcgtagagattaggaagaacaccagtggcgaaggcggttctctggactgtaactgacgctgaggctcgaaagcgtggggagcaaacaggattagataccctggtagtccacgccgtaaacgatggatactaggtgtggggggtgtcacgacctctgtgccgccgctaacgcattaagtatcccgcctggggagtacggtcgcaagattaaaactcaaaggaattgacgggggcccgcacaagcaggggagctatgtggttttaattcgaagcaacgcgaagaaccttacccagacttgacatctcctgcattactcttaatagaggaagtccctccgtggacaggaggacagacagtgcatggttgttgtcagttagcgtcgttagatgttgggttaagtcccgcaacgagcgcaaccctccttgttagttgccatcattaagttggccattctagcgagactgcccgggttaaccgggaggaaggtggggaggacgtcaattcttcatcccccttatgtctagggctccacacgtgttccaatggtcggtacaataagacgcaagcccgcgagggggagcaaatccggaaaaccgatctcagttcggattgtaggctgaaactcgcctacatgaagttggagttgctagtaatcgcgaatcagcatgtcgcggtgaatacgttcccgggccttgcactcaccgcccgtca

SEQ ID NO: 1773 - DNA, 1360 bp, Artificial Sequence
  Synthetic polymer
agagtttgatcctggctcaggatgaacgctggcggcgtgcctaacacatgcaagtcgagcgatctcttcggagagagcggcggacgggtgagtaacgcgtgggtaacctgccttgtagagggggatagccttccgaaaggaagattaataccgcataagattgtagtttcgcatgaaacagcaattaaaggagcaatccgctacaagatggacccgcggcgcattagctagttggtgaggtaacggctcaccaaggcgacgatgcgtagccgacctgagagggtgatcggccacattgggactgagacacggcccagactcctacgggaggcagcagtggggaatattgcacaatgggggaaaccctgatgcagcaacgccgcgtgagtgatgacggtcttcggattgtaaagctctgtctttggggacgataatgacggtacccaaggaggaagccacggctaactacgtgccagcagccgcggtaatacgtaggtggcgagcgttgtccggatttactgggcgtaaagggagcgtaggcggatgattaagtgggatgtgaaatacccgggctcaacttgggtgctgcattccaaactggttatctagagtgcaggagaggagagtggaattcctagtgtagcggtgaaatgcgtagagattaggaagaacaccagtggcgaaggcgactctctggactgtaactgacgctgaggctcgaaagcgtggggagcaaacaggattagataccctggtagtccacgccgtaaacgatgaatactaggtgtgggggtttcaacacctccgtgccgccgctaacgcattaagtattccgcctggggagtacggtcgcaagattaaaactcaaaggaattgacggggacccgcacaagtagcggagcatgtggtttaattcgaagcaacgcgaagaaccttacctacacttgacatcccttgcattactcttaatcgaggaaatcccttcggggacaaggtgacaggtggtgcatggttgtcgtcagctcgtgtcgtgagatgttgggttaagtcccgcaacgagcgcatcccttgtcgttagttactaccattaagttgaggactctagcgagactgcctgggttaaccaggaggaaggtggggatgacgtcaaatcatcatgccccttatgtgtagggctacacacgtgctacaatggctggtacagagagatgcaataccgcgaggtggagccaaactttaaaaccagtctcagttcggattgtaggctgaaactcgcctacatgaagctggagttactagtaatcgcgaatcagaatgtcgcggtgaatacgttcccgggtcttgcacacaccgcccgtca

SEQ ID NO: 1774 - DNA, 1375 bp, Artificial Sequence; identical to SEQ ID NO: 131
  Synthetic polymer

SEQ ID NO: 1775 - DNA, 1425 bp, Artificial Sequence
  Synthetic polymer
gcctaacacatgcaagtcgagcgatgaagttccttcgggaacggattagcggcggacgggtgagtaacacgtgggcaacctgccttatagaggggaatagccttccgaaaggaagattaataccgcataacattgtagcttcgcatgaagcagcaattaaaggagcaatccactataagatgggcccgcggcgcattagctagttggtgaggtaacggctcaccaaggcgacgatgcgtagccgacctgagagggtgatcggccacattgggactgagacacggcccagactcctacgggaggcagcagtggggaatattgcacaatgggggaaaccctgatgcagcaacgccgcgtgagtgatgacggccttcgggttgtaaagctctgtctttggggacgataatgacggtacccaaggaggaagccacggctaactacgtgccagcagccgcggtaatacgtagggggcaagcgttatccggaattactgggtgtaaagggtgcgtaggcggcgatttaagtcagatgtgaaaactcagggctcaaccttgagactgcatctgaaactgagttgctagagtgcaggagaggaaagcggaattccgagtgtagcggtgaaatgcgtagagattcggaggaacaccagtagcgaaggcggctttctggactgtaactgacgctgaggcacgaaagcgtggggagcgaacaggattagataccctggtagtccacgccgtaaacgatgaatactaggtgtcggggcttacgggtctcggtgccgcagctaacgcattaagtattccacctgggaagtacgaccgcaaggttgaaactcaaaggaattgacggggacccgcacaagcggtggagcatgtggtttaattcgaagcaacgcgaagaaccttacctaaacttgacatccttttgaccggagggtaatgcctccctcactagcttgctagtgcaaaagtgacaggtggtgcatggttgtcgtcagctcgtgtcgtgagatgttgggttaagtcccgcaacgagcgcaacccctatctttagtagccatcattcagttgggcactctagagagactgccagggataacctggaggaaggtggggatgacgtcaaatcatcatgccccttatgtttagggctacacacgtgctacaatggccggtacaacgagatgcaataccgtgaggtggagcaaaactataaaaccggtctcagttcggattgtaggctgaaactcgcctacatgaagctggagttactagtaatcgcgaatcagaatgtcgcggtgaatacgttcccgggccttgtacacaccgcccgtcacaccatgagagttggcaatacccaaagttggtgatctaacccgtaagggaggaagccacctaaggtagggtcagcgattggggtgaa

SEQ ID NO: 1776 - DNA, 1371 bp, Artificial Sequence
  Synthetic polymer
agagtttgatcctggctcaggacgaacgctggcggcgtgcttaacacatgcaagtcgagcgatgaagcttcttcggaagtggattagcggcggacaggtgagtaacacgtgggtaacctgccttgtagagaggaatagccattcgaaaggatgattaatacctcataatattgtagcttcgcatggagcaacaatcaaaggagcaatccgctacaagatggacccgcggcgcattagctagttggtgaggtaacggctcaccaaggcgacgatgcgtagccgacctgagagggtgatcggccacattgggactgagacacggcccagactcctacgggaggcagcagtggggaatattgcacaatgggggaaaccctgatgcagcaacgccgcgtgagtgatgacggtcttcggattgtaaagctctgtcttcagggacgataatgacggtacctgaggaggaagccacggctaactacgtgccagcagccgcggtaatacgtaggtggcaagcgttgtccggatttactgggcgtaaagggagcgtaggcggacttttaagtgggatgtgaaatacccgggcttaacctgggtgctgcattccaaactgggagtctagagtgcaggaggggaaagtggaattcctagtgtagcggtgaaatgcgtagagattaggaagaacaccagtggcgaaggcggcttgctggacgacaactgacgctgaggcgcgaaagcgtggggagcaaacaggattagataccctggtagtccacactgtaaacgatgaatgctaggtgtagggggtatcgatcccttctgtgccgcagttaacacaataagtattccacctggggagtacggccgcaaggttgaaactcaaaggaattgacgggggcccgcacaagcagtggattatgtggtttaattcgaagcaacgcgaagaaccttaccagggcttgacatctaactaacgaagcagagatgcataaggtgcccttcggggaaagttaagacaggtggtgcatggttgtcgtcagctcgtgtcgtgagatgttcggttaagtccggcaacgagcgcaacccctattgttagttgctacgcaagagcactctagcgagactgccgttgacaaaacggaggaaggtggggacgacgtcaaatcatcatgccccttatgtcctgggctacacacgtaatacaatggcgtccaacaaagggaagcaaagccgcgaggcagagcaaatccccaaaagacgtctcagttcggattgcaggctgcaactcgcctgtatgaagtcggaattgctagtaatcgcggatcagcatgccgcggtgaatacgttcccgggccttgcactcaccgcccgtca

SEQ ID NO: 1777 - DNA, 1329 bp, Artificial Sequence
  Synthetic polymer
agagtttgatcctggctcaggatgaacgctggcggcgtgcctaacacatgcaagtcgagcgattctcttcggagaagagcggcggacgggtgagtaacgcgtgggtaacctgccctgtacacacggataacataccgaaaggtatgctaatacgggataacatataagagtcgcatgacttttatatcaaagattttttggtacaggatggacccgcgtctgattagcttgttggcggggtaacggcccaccaaggcgacgatcagtagccgacctgagagggtgatcggccacattggaactgagacacggtccaaactcctacgggaggcagcagtggggaatattgcacaatgggcgcaagcctgatgcagcaacgccgcgtgagcgatgaaggccttcgggtcgtaaagctctgtcctcaaggaagataatgacggtacttgaggaggaagccccggctaactacgtgccagcagccgcggtaatacgtagggggctagcgttatccggatttactgggagtaaagggtgcgtaggcggtctttcaagtcaggagttaaaggctacggctcaaccgtagtaagctcctgatactgtctgacttgagtgcaggagaggaaaacggaattcccagtgtagcggtgaaatgcgtagatattgggaggaacaccagtagcgaaggcggctttctggactgtaactgacgctgaggcacgaaagcgtggggagcaaacaggattagataccctggtagtccacgctgtaaacgatgagtactaggtgtcggaggttacccccttcggtgccgcagctaacgcattaagtactccgcctggggagtacgcacgcaagtgtgaaactcaaaggaattgacggggacccgcacaagtagcggagcatgtggtttaattcgaagcaacgcgaagaaccttacctaggcttgacatccttctgaccgaggactaatctcctctttccctccggggacagaagtgacaggtggtgcatggttgtcgtcagctcgtgtcgtgagatgttgggttaagtcccgcaacgagcgcaacccttgtctttagttgccatcatttagttgggcactctagagagactgccagggataacctggaggaaggtggggatgacgtcaaatcatcatgccccttatgatttgggctacacacgtgctacaatggcgtaaacaaagggaagcgagagggtgacctggagcaaatcccaaaaataacgtcccagttcggactgtagtctgcaacccgactacacgaagctggaatcaatagtaatcgcggatcagaatgccgcggtgaa

SEQ ID NO: 1778 - DNA, 1376 bp, Artificial Sequence
  Synthetic polymer
ttcgcccttagagtttgattctggctcaggacgaacgctggcggcgtgcttaacacatgcaagtcgagcgatgaaacttcttcggaagtggattagcggcggacgggtgagtaacacgtgggtaacctgcctcatagaggggaatagcctttcgaaaggaagattaataccgcataagattgtaatatcgcatgatatagcaattaaaggagcaatccgctatgagatggacccgcgtcgcattagctagttggtgaggtaacggctcaccaaggcgacgatgcgtagccgacctgagagggtgatcggccacattgggactgagacacggcccagactcctacgggaggcagcagtggggaatattgcacaatgggggaaaccctgatgcagcaacgccgcgtgagtgatgacggtcttcggattgtaaagctctgtctttagggacgataatgacggtacctaaggaggaagccacggctaactacgtgccagcagccgcggtaatacgtaggtggcaagcgttgtccggatttactgggcgtaaagggagcgtaggtggatatttaagtgggatgtgaaatacccgggcttaacctgggtgctgcattccaaactggatatctagagtgcaggagaggaaaggagaattcctagtgtagcggtgaaatgcgtagagattaggaagaataccagtggcgaaggcgcctttctggactgtaactgacactgaggctcgaaagcgtggggagcaaacaggattagataccctggtagttcacgccgtaaacgaagaatactaggtgtgggggttgtcatgacctccgtgccgccgctaacgcattaagtattccgcctggggagtacggtcgcaagattaaaactcaaaggaattgacgggggcccgcacaagcagcggagcatgtggtttaattcgaagcaacgcgaagaaccttacctagacttgacatctcctgaattactctgtaatggaggaagtcgcttcggcgacaggaagacaggtggtgcatggttgtcgtcagctcgtgtcgtgagatgttgggttaagtcccgcaacgagcgcaacccttattgttagttgctaacattgagttgagcactctaatgggactgcccgtgacaagcgggaggaaggtggggatgacgtcaaatcatcatgccctttatgatctgggcttcacacgtactacaatggtagcaacagagggcagccacaccgcgaggtggagcgaatcccaaaatgttatctcagttcggattgcaggctgaaactcgcctgcatgaagcaggaattgctagtaatggcaggtcagcatactgccgtgaataaaatcccgggccttgtacacaccgcc

SEQ ID NO: 1779 - DNA, 1360 bp, Artificial Sequence; identical to SEQ ID NO: 256
  Synthetic polymer

SEQ ID NO: 1780 - DNA, 1431 bp, Artificial Sequence; identical to SEQ ID NO: 342
  Synthetic polymer

SEQ ID NO: 1781 - DNA, 1433 bp, Artificial Sequence
  Synthetic polymer
gacgaacgctggcggcgtgcctaacacatgcaagtcggacgaacgagttgagagacgagttagtggcgaacgggtgagtaacacgtagataatatgacctataaagggggatagcccgacgaaagttggattaataccgcatatagcttaggtattgcatgatatttaagtgaaaagagagatctgatataggagtagtctgcggcacattagctagtaggtgaggtaagggcttacctaggcgacgatgtgtagccggtctgagaggatgaacggccacaatggaactgagatacggtccatactcctacgggaggcagcagtgggggatattgcacaatggggggaaccctgatgcagcaacgccgcgtgagtgaagaaggttttcggattgtaaagctctgttagcagggaagaggaaggacggtacctgaagaggaagccacggctaactacgtgccagcagccgcggtaatacgtaggtggcaagcgttgttcggaataactgggcgtaaaggatgcgtaggcggttagataagttatgtgtcaaatatataggcttaacctgtagaaggcatataaaactgtgtaactagagtgcaggagaggtaagtggaattcctagtgtagcggtgaaatgcgtagagattaggaagaacaccagtggcgaaggcgacttactggactgtaactgacgctgaggcatgagagcatggggagcaaacaggattagataccctggtagtccatgctgtaaacgatgggtactaggtgtgggctgtgaagaacagttcgtgccgtcgcaaacgcaataagtaccccgcctgaggagtacgatcgcaagattaaaactcaaaggaattgacggggacccgcacaagcagcggagcatgtggtttaattcgaagcaacgcgaagaaccttacctaaacttgacataccttgaattaccctgtaaagagggaagctcgcaagagcaaggatacaggtggtgcatggttgtcgtcagctcgtgtcgtgagatgttgggttaagtcccgcaacgagcgcaacccttgttgttaattgctagcaggtaaagctgagcactttagcaagacagcctaggttaactaggaggaaggtggggatgacgtcaaatcatcatgccccttacgtttagggctacacacgtgctacaatggtgagaacaaagagaagcaagctagcgatagtgagcaaaacttagaaaactcatctcagttcggattgcaggctgaaactcgcctgtatgaagatggagttgctagtaatcgcgaatcagaatgtcgcggtgaatacgttcccgggtcttgtacacaccgcccgtcacaccatgagagttggcaacacccgaagcttgtgggctaaccgaaaggaggcagcaatctaaggtggggtcagtgattggggtg

SEQ ID NO: 1782 - DNA, 1377 bp, Artificial Sequence; identical to SEQ ID NO: 465
  Synthetic polymer

SEQ ID NO: 1783 - DNA, 1395 bp, Artificial Sequence; identical to SEQ ID NO: 463
  Synthetic polymer

SEQ ID NO: 1784 - DNA, 1420 bp, Artificial Sequence
  Synthetic polymer
cctaacacatgcaagtcgagcgagtggagttcttcggaacaaagctagcggcggacgggtgagtaacacgtgggcaacctgcctcatagaggggaatagcctcccgaaagggagattaataccgcataagattgtagcttcgcatgaagtagcaattaaaggagcaatccgctataagatgggcccgcggcgcattagctagttggtgaggtaacggctcaccaaggcgacgatgcgtagccgacctgagagggtgatcggccacattgggactgagacacggcccagactcctacgggaggcagcagtggggaatattgcacaatgggggaaaccctgatgcagcaacgccgcgtgagtgatgacggccttcgggttgtaaagctctgtctttggggacgataatgacggtacccaaggaggaagccacggctaactacgtgccagcagccgcggtaatacgtaggtggcaagcgttgtccggatttactgggcgtaaagggagcgtaggcggatttttaagtgggatgtgaaatacccgggctcaacctgggtgctgcattccaaactggaaatctagagtgcaggaggggaaagtggaattcctagtgtagcggtgaaatgcgtagagattaggaagaacaccagtggcgaaggcgactttctggactgtaactgacgctgaggctcgaaagcgtggggagcaaacaggattagataccctggtagtccacgccgtaaacgatgaatactaggtgtaggggttgtcatgacctctgtgccgccgctaacgcattaagtattccgcctggggagtacggtcgcaagattaaaactcaaaggaattgacgggggcccgcacaagtagcggagcatgtggtttaattcgaagcaacgcgaagaaccttacctagacttgacatctcctgaattaccatgtaatgtgggaagtcccttcggggacaggaagacaggtggtgcatggttgtcgtcagctcgtgtcgtgagatgttgggttaagtcccgcaacgagcgcaacccttattgttagttgctaccatttagttgagcactctagcgagactgcccgggttaaccgggaggaaggtggggatgacgtcaaatcatcatgccccttatgtctagggctacacacgtgctacaatggccggtacaacgagatgcaataccgtgaggtggagcaaaactataaaaccggtctcagttcggattgtaggctgaaactcgcctacatgaagctggagttactagtaatcgcgaatcagaatgtcgcggtgaatacgttcccgggccttgtacacaccgcccgtcacaccatgagagttggcaatacccaaagttggtgatctaacccgtaagggaggaagccacctaaggtagggtcagcgattggggtgaa

SEQ ID NO: 1785 - DNA, 1364 bp, Artificial Sequence; identical to SEQ ID NO: 523
  Synthetic polymer

SEQ ID NO: 1786 - DNA, 1396 bp, Artificial Sequence; identical to SEQ ID NO: 165
  Synthetic polymer

SEQ ID NO: 1787 - DNA, 1481 bp, Artificial Sequence
  Synthetic polymer
tagagtttgatcctggctcaggacgaacgctggcggcgtgcctaacacatgcaagtcgagcgaggagattcccttcggggatgaacctagcggcggacgggtgagtaacacgtgggcaacctgccttgtagaggggaatagccttccgaaaggaagattaataccgcataacattgtttcttcgcatgaagagacaatcaaaggagcaatccgctacaagatgggcccgcggcgcattagctagttggtgaggtaacggctcaccaaggcgacgatgcgcagccgacctgagagggtgatcggccacattgggactgagacacggcccaaactcctacgggaggcagcagtggggaatattgcacgatgggggaaaccctgatgcagcaacgccgcgtgagcgatgaaggtcttcggatcgtaaagctctgtcttcagggacgataatgacggtacctgaggaggaagccacggctaactacgtgccagcagccgcggtaatacgtaggtggcaagcgttgtccggatttactgggcgtaaagggagcgtaggcggacttttaagtgagatgtgaaatacccaggctcaacctgggggctgcatttcaaactggaagtctagagtgcaggagaggagagtggaattcctagtgtagcggtgaaatgcgtagagattaggaagaacaccagtggcgaaggcgactctctggactgtaactgacgctgaggctcgaaagcgtggggagcaaacaggattagataccctggtagtccacgccgtaaacgatgaatactaggtgtaggggttgtcatgacctctgtgccgccgctaacgcattaagtattccgcctggggagtacggtcgcaagattaaaactcaaaggaattgacgggggcctgcacaagcagcggagcatgtggtttaattcgaagcaacgcgaagaaccttacctagacttgacatctcctgaattactcttaatcgaggaagccacttcggtggcaggaagacaggtggtgcatggttgtcgtcagctcgtgtcgtgagatgttgggttaagtcccgcaacgagcgcaacccctattgttagttgctaccattaagttgagcactctagcgagactgcctgggttaaccaggaggaaggtggggatgacgtcaaatcatcatgccccttatgtctagggctacacacgtgctacaatggcaagtacaaagagatgcaataccgcgaggtggagccaaactataaaacttgtctcagttcggatcgtaggctgaaactcgcctacatgaagctggagttgctagtaatcgcgaatcagaatgtcgcggtgaatacgttcccgggccttgtacacaccgcccgtcacaccatgagagttggcaatacccaaagttcgtgagctaacccgtaagggaggcagcgacctaaggtagggtcagcgattggggtgaagtcgtaacaaggtaaccgta

SEQ ID NO: 1788 - DNA, 1370 bp, Artificial Sequence
  Synthetic polymer
agtttgatcctggctcaggacgaacgctggcggcgtgcctaacacatgcaagtcgagcgagttgattctcttcggagatgaagctagcggcggacgggtgagtaacacgtgggcaacctgcctcatagaggggaatagcctcccgaaagggagattaataccgcataagattgtagcttcgcatgaagtagcaattaaaggagcaatccgctatgagatgggcccgcggcgcattagctagttggtgaggtaacggctcaccaaggcgacgatgcgtagccgacctgagagggtgatcggccacattgggactgagacacggcccagactcctacgggaggcagcagtggggaatattgcacaatgggggaagccctgatgcagcaacgccgcgtgagtgatgacggccttcgggttgtaaagctctgtcttcagggacgataatgacggtacctgaggaggaagccacggctaactacgtgccagcagccgcggtaatacgtaggtggcgagcgttgtccggatttactgggtgtaaagggagcgtagacggagtggcaagtctgatgtgaaaacccggggctcaaccccgggactgcattggaaactgtcaatctagagtaccggagaggtaagcggaattcctagtgtagcggtgaaacgcgtagatattaggaggaacaccagtggcgaaggcggcttactggacggtaactgacgttgaggctcgaaagcgtggggagcaaacaggattagataccctggtagtccacgccgtaaacgatgactactaggtgtcgggcagcaaagctgttcggtgccgcagcaaacgcaataagtattccacctggggagtacgatcgcaaggttgaaactcaaaggaattgacgggggcccgcacaagcggtggattatgtggtttaattcgaagcaacgcgaagaaccttaccagggtttgacatcctgctaacgaagtagagatacattaggtgcccttcggggaaagcagagacaggtggtgcatggttgtcgtcagctcgtgtcgtgagatgttgggttaagtcccgcaacgagcgcaacccttgctgttagttgctacgcaagagcactctaacaggactgccgttgacaaaacggaggaaggtggggacgacgtcaaatcatcatgccccttatgacctgggctacacacgtactacaatggccgcaaacaaagggaagcaaggctgcgaagtggagcgaaacccgaaaagcggtcccagttcggattgcaggctgcaacccgcctgcatgaagtcggaattgctagtaatcgcggatcagcatgccgcggtgaatacgttcccgggccttgtactcaccgcccgtca

SEQ ID NO: 1789 - DNA, 1497 bp, Artificial Sequence
  Synthetic polymer
ttgatcctggctcaggatgaacgctggcggcgtgcttaacacatgcaagtcgagcgagagagttccttcgggaacaatctagcggcggacgggtgagtaacacgtgggcaacctgcctcatagaggggaatagcctcccgaaagggagattaataccgcataatatcattgagtggcatcatttaatgattaaaggagtaatccgctatgagatgggcccgcggcgcattagctagttggtgaggtaacggctcaccaaggcgacgatgcgtagccgacctgagagggtgatcggccacattgggactgagacacggcccagactcctacgggaggcagcagtggggaatattgcacaatgggggaaaccctgatgcagcaacgccgcgtgagtgatgaaggtcttcggattgtaaagctctgtcttcagggacgataatgacggtacctgaggaggaagccacggctaactacgtgccagcagccgcggtaatacgtaggtggcaagcgttatccggatttactgggcgtaaagggagcgtaggcggataattaagtgggatgtgaaatacccgggctcaacttgggtgctgcattccaaactggttatctagagtgcaggagaggagagtggaattcctagtgtagcggtgaaatgcgtagagattaggaagaacaccagtggcgaaggcgactctctggactgtaactgacgctgaggctcgaaagcgtggggagcaaacaggattagataccctggtagtccacgccgtaaacgatgaatactaggtgtaggggccccaagcctctgtgccgccgctaacgcattaagtattccgcctggggagtacggtcgcaagattaaaactcaaaggaattgacggggacccgcacaagcagcggagcatgtggtttaattcgaagcaacgcgaagaaccttacctagacttgacatctcctgaattactcttaatcgaggaagtcccttcggggacaggaagacaggtggtgcatggttgtcgtcagctcgtgtcgtgagatgttgggttaagtcccgcaacgagcgcaacccttattgttagttgctaccattaagttgagcactctagcaagactgcccgggttaaccgggaggaaggtggggatgacgtcaaatcatcatgccccttatgtctagggctacacacgtgctacaatggcaagtacaaagagaagcaagaccgcaaggtggagcaaaactcaaaaacttgtctcagttcggattgtaggctgaaactcgcctacatgaagctggagttgctagtaatcgcgaatcagcatgtcgcggtgaatacgttcccgggtcttgtacacaccgcccgtcacaccatgagagttggcaatacccgaagtccgtgagctaaccgcaaggaggcagcggccgaaggtagggtcagcgattggggtgaagtcgtaacaaggtagccgtaggagaacctgcggctggatcacctcctt

SEQ ID NO: 1790 - DNA, 1474 bp, Artificial Sequence
  Synthetic polymer
agagtttgatcctggctcaggacgaacgctggcggcgtgcttaacacatgcaagtcgagcgatgaagcttcttcggaagtggattagcggcggacgggtgagtaacacgtgggtaacctgcctcatagaggggaatagccttccgaaaggaagattaataccgcataagattgtaatgccgcatggcatagcaattaaaggagcaatccgctatgagatggacccgcgtcgcattagctagttggtgaggtaacggctcaccaaggcgacgatgcgtagccgacctgagagggtgatcggccacattgggactgagacacggcccagactcctacgggaggcagcagtggggaatattgcacaatgggggaaaccctgatgcagcaacgccgcgtgagtgatgacggtcttcggattgtaaagctctgtctttagggacgataatgacggtacctaaggaggaagccacggctaactacgtgccagcagccgcggtaatacgtaggtggcaagcgttgtccggatttactgggcgtaaagggagcgtaggtggatatttaagtgggatgtgagatacccgggcttaacctgggtgctgcattccaaactggatatctagagtgcaggagaggaaaggagaattcctagtgtagcggtgaaatgcgtagagattaggaagaataccagtggcgaaggcgcctttctggactgtaactgacactgaggctcgaaagcgtggggagcaaacaggattagataccctggtagtccacgccgtaaacgatgaatactaggtgtaggggttgtcatgacctctgtgccgccgctaacgcattaagtattccgcctggggagtacggtcgcaagattaaaactcaaaggaattgacgggggcccgcacaagcagcggagcatgtggtttaattcgaagcaacgcgaagaaccttacctaagcttgacatccttttgaccgatgcctaatcgcatctttcccttcggggacagaagtgacaggtggtgcatggttgtcgtcagctcgtgtcgtgagatgttgggttaagtcccgcaacgagcgcaacccttattgttagttgccatcattaagttgggcactctagcgagactgcccgggttaaccgggaggaaggtggggatgacgtcaaatcatcatgccccttatgtctagggctacacacgtgctacaatggtcggtacaataagacgcaagcccgcgagggggagcaaaactggaaaaccgatctcagttcggattgtaggctgaaactcgcctacatgaagctggagttgctagtaatcgcgaatcagcatgtcgcggtgaatacgttcccgggccttgtacacaccgcccgtcacaccatgagagttggcaatacccaaagtacgtgatctaacccgtaagggaggaagcgtcctaaggtagggtcagcgattggggtgaagtcgtaacaaggta

SEQ ID NO: 1791 - DNA, 1444 bp, Artificial Sequence
  Synthetic polymer
gacgaacgctggcggcgtgcctaacacatgcaagtcgagcgaggagattcccttcggggatgaacctagcggcggacgggtgagtaacacgtgggcaacctgccttatagaggggaatagccttccgaaaggaagattaataccgcataacattacattttcgcatgaagaagtaattaaaggagtaatccgctataagatgggcccgcggcgcattagctagttggtgaggtaacggctcaccaaggcgacgatgcgtagccgacctgagagggtgatcggccacattgggactgagacacggcccagactcctacgggaggcagcagtgggaaatattgcacaatgggggaaaccctgatgcagcaacgccgcgtgagtgatgaaggtcttcggatcgtaaagctctgtcttcagggacgataatgacggtacctgaggaggaagccacggctaactacgcgccagcagccgcggtaatacgtaggtggcgagcgttgtccggatttactgggcgtaaagggagcgtaggcggatttttaagtgagatgtgaaatacccgggctcaacttgggtgctgcatttcaaactggaagtctagagtgcaggagaggagagtggaattcctagtgtagcggtgaaatgcgtagagattaggaagaacaccagtggcgaaggcgactctctggactgtaactgacgctgaggctcgaaagcgtggggagcaaacaggattagataccctggtagtccacgccgtaaacgatgaatactaggtgtaggggtttgtctggccccctgtgccccccccaaacgccattaagtattccgcctggggagtacggtggcaagattaaaactcaaaggaattgacgggggcccgcacaagcagcggagcatgtggtttaattggaagcaacgcgaagaaccttacctagacttgacatctcctgaattactcttaatcgaggaagtcccttcggggacaggaagacaggtggtgcatggttgtcgtcagctcgtgtcgtgagatgttgggttaagtcccgcaacgagcgcaacccttattgttagttgctaccattaagttgagcactctagcaagactgcccgggttaaccgggaggaaggtggggatgacgtcaaatcatcatgccccttatgtctagggctacacacgtgctacaatggcaagtacaaaaagatgcaataccgcaaggtggagctaaacttaaaaacttgtctcagttcggattgtaggctgaaactcgcctacatgaagctggagttgctagtaatcgcgaatcagaatgtcgcggtgaatacgttcccgggccttgtacacaccgcccgtcacaccatgagagttggcaatacccaaagttcgtgagctaacccgtaagggaggcagcgacctaaggtagggtcagcgattggggtgaag

SEQ ID NO: 1792 - DNA, 1397 bp, Artificial Sequence; identical to SEQ ID NO: 719
  Synthetic polymer

SEQ ID NO: 1793 - DNA, 1361 bp, Artificial Sequence
  Synthetic polymer
agagtttgatcctggctcaggatgaacgctggcggcgtgcctaacacatgcaagtcgagcgatcttcttcggaagagagcggcggacgggtgagtaacgcgtgggtaacctgcctcatacacatggataacataccgaaaggtatgctaatacaagatgatataagagattcgcatggatttcttatcaaagctccggcggtatgagatggacccgcgtctgattagctagttggtaaggtaatggcttaccaaggcgacgatcagtagccgacctgagagggtgatcggccacattggaactgagacacggtccaaactcctacgggaggcagcagtggggaatattgcacaatgggcgaaagcctgatgcagcaacgccgcgtgagcgatgaaggccttcgggtcgtaaagctctgtcctcaaggaagataatgacggtacttgaggaggaagccccggctaactacgtgccagcagccgcggtaatacgtagggggctagcgttatccggatttactgggcgtaaagggtgcgtaggtggtttcttaagtcaggagtgaaaggctacggctcaaccgtagtaagctcttgaaactgggaaacttgagtgcaggagaggaaagtggaattcctagtgtagcggtgaaatgcgtagatattaggaggaacaccagtagcgaaggcggctttctggactgtaactgacactgaggcacgaaagcgtggggagcaaacaggattagataccctggtagtccacaccgtaaacgatgattactaggtgttggaggattgaccccttcagtgccgcagttaacacaataagtaatccacctggggagtacgaccgcaaggttgaaactcaaaggaattgacgggggcccgcacaagcagtggagtatgtggtttaattcgacgcaacgcgaagaaccttaccaagtcttgacatcccttgacagacatagaaatatgtaatctcttcggagcaaggagacaggtggtgcatggttgtcgtcagctcgtgtcgtgagatgttgggttaagtcccgcaacgagcgcaacccctatcttcagtagccagcaggttaagctgggcactctggagagactgccagggataacctggaggaaggtggggatgacgtcaaatcatcatgccccttatgaccagggctacacacgtgctacaatggcgtaaacaaagagaagcgaactcgcgagggtaagcaaatctcaaaaataacgtctcagttcggattgtagtctgcaactcgactacatgaagctggaatcgctagtaatcgcagatcagaatgctgcggtgaatacgttcccgggtcttgcacacaccgcccgtca

SEQ ID NO: 1794 - DNA, 1457 bp, Artificial Sequence
  Synthetic polymer
  misc_feature (161)..(161): n is a, c, g, or t
acacatgcaagtcgagcgatgaagcttcttcggaagtggaatagcggcggacgggtgagtaacacgtgggcaacctgccttgtagaggggaatagccttccgaaaggaagattaataccgcataagattgtaacttcgcatgaagaagcaattaaaggagnaatccgctacaagatgggcccgcggcgcattagctagttggtgaggtaacggctcaccaaggcgacgatgcgtagccgacctgagagggtgatcggccacattgggactgagacacggcccagactcctacgggaggcagcagtggggaatattgcacaatgggcgaaagcctgatgcagcaacgccgcgtgagtgatgacggccttcgggttgtaaagctctgtcttcagggacgataatgacggtacctgaggaggaagccacggctaactacgtgccagcagccgcggtaatacgtaggtggcaagcgttgtccggatttactgggcgtaaagggagcgtaggcggacttttaagtgggatgtgaaatacccgggcttaacctgggtgctgcattccaaactggaagtctagagtgcaggaggggaaagtggaattcctagtgtagcggtgaaatgcgtagagattaggaagaacaccagtggcgaaggcgactttctggactgtaactgacgctgaggctcgaaagcgtggggagcaaacaggattagataccctggtagtccacgccgtaaacgatgaatactaggtgtaggggttgtcatgacctctgtgccgccgctaacgcattaagtattccgcctggggagtacggtcgcaagattaaaactcaaaggaattgacgggggcccgcacaagcagcggagcatgtggtttaattcgaagcaacgcgaagaaccttacctagacttgacatctcctgaattacccgtaattggggaagttccttcgggaacaggaagacaggtggtgcatggttgtcgtcagctcgtgtcgtgagatgttgggttaagtcccgcaacgagcgcaacccttattgttagttgctaccatttagttgagcactctagcgagactgcccgggttaaccgggaggaaggtggggatgacgtcaaatcatcatgccccttatgtctagggctacacacgtgctacaatggccggtacaaaaagatgcaataccgtaaggtggagctaaactcaaaaaccggtctcagttcggattgtaggctgaaactcgcctacatgaagctggagttgctagtaatcgcgaatcagaatgtcgcggtgaatacgttcccgggccttgtacacaccgcccgtcacaccatgagagttggcaatacccaaagttggtgatctaacccgtaagggaggaagccacctaaggtagggtcagcgattggggtgaagtcgtaacaaggtagccgtaggagaacctgcggctggatcac

SEQ ID NO: 1795 - DNA, 1387 bp, Artificial Sequence; identical to SEQ ID NO: 610
  Synthetic polymer

SEQ ID NO: 1796 - DNA, 1374 bp, Artificial Sequence; identical to SEQ ID NO: 436
  Synthetic polymer

SEQ ID NO: 1797 - DNA, 1375 bp, Artificial Sequence; identical to SEQ ID NO: 714
  Synthetic polymer

SEQ ID NO: 1798 - DNA, 1467 bp, Artificial Sequence
  Synthetic polymer
gagtttgatcctggctcaggatgaacgctggcagcgtgcctaacatatgcaagtcgagcgattcacttttgtgaagagcggcggacgggtgagtaacgcgtgggtaacctgccctgtacacacggataacataccgaaaggtatgctaatacgagataaaatatagaagtcacatggcttttatatcaaagatttttcggtacaggatggacccgcgtctgattagctagttggtaaggtaacggcttaccaaggcgacgatcagtagccgacctgagagggtgatcggccacattggaactgagacacggtccaaactcctacgggaggcagcagtggggaatattgcacaatgggcgaaagcctgatgcagcaacgccgcgtgagcgatgaaggccttcgggtcgtaaagctctgtcctcaaggaagataatgacggtacttgaggaggaagccccggctaactacgtgccagcagccgcggtaatacgtagggggctagcgttatccggatttactgggcgtaaagggtgcgtaggcggtctttcaagtcaggagttaaaggctacggctcaaccgtagtaagctcctgatactgtctgacttgagtgcaggagaggaaagcggaattcccagtgtagcggtgaaatgcgtagatattgggaggaacaccagtagcgaaggcggctttctggactgtaactgacgctgaagcacgaaagcgtggggagcaaacaggattagataccctggtagtccacgctgtaaacgatgaatactaggtgtcggaggttacccccttcggtgccgcagctaacgcattaagtattccgcctggggagtacgcacgcaagtgtgaaactcaaaggaattgacggggacccgcacaagtagcggagcatgtggtttaattcgaagcaacgcgaagaaccttacctaggcttgacgtccttctgatcgggaattaatcttccctttccctccggggacagaagtgacaggtggtgcatggttgtcgtcagctcgtgtcgtgagatgttgggttaagtcccgcaacgagcgcaacccttgtctttagttgccatcattaagttgggcactctagagagactgccagggataacctggaggaaggtggggatgacgtcaaatcatcatgccccttatgcctagggctacacacgtgccacaatgggtggtacagagggcagctaagccgtgaggtggagcaaatcccttaaagccattctcagttcggattgtaggctgaaactcgcctacatgaagctggagttactagtaatcgcagatcagaatgctgcggtgaatgcgttcccgggtcttgtacacaccgcccgtcacaccatgggagttggagacacccgaagccgattgtctaaccttttggaagaaatcgtcgaaggtggaatcaataactggggtgaagtcgtaacaaggtagccgtag

SEQ ID NO: 1799 - DNA, 1450 bp, Artificial Sequence; identical to SEQ ID NO: 999
  Synthetic polymer

SEQ ID NO: 1800 - DNA, 1351 bp, Artificial Sequence
  Synthetic polymer
ttcgcccttagagtttgatcctggctcaggacgaacgctggcggcgtgcctaacacatgcaagtcgagcgaatgaagttccttcgggaacggatttagcggcggacgggtgagtaacacgtgggcaacctgcctcatagaggggaatagccttccgaaagggagattaataccgcataagattgtagtaccgcatggtacagcaattaaaggagcaatccgctatgagatgggcccgcggcgcattagctagttggtgaggtaacggctcaccaaggcgacgatgcgtagccgacctgagagggtgatcggccacattgggactgagacacggcccagactcctacgggaggcagcagtggggaatattgcacaatgggggaaaccctgatgcagcaacgccgcgtgagtgatgacggccttcgggttgtaaagctctgtcttcagggacgataatgacggtacctgaggaggaagccacggctaactacgtgccagcagccgcggtaatacgtaggtggcgagcgttgtccggatttactgggcgtaaagggagcgtaggcggatttttaagtgagatgcgaaatactcgggcttaacctgagtgctgcatttcaaactggaagtctagagtgcaggagaggagaagggaattcctagtgtagcggtgaaatgcgtagagattaggaagaacaccagtggcgaaggcgcttctctggactgtaactgacgctgaggctcgaaagcgtggggagcaaacaagattagataccctggtagtccacgccgtaaacgatgaatactaggtgtagggggtgtcatgacctctgtgccgccgctaacgcattaagtattccgcctggggagtacggtcgcaagattaaaactcaaaggaattgacgggggcccgcccaagcagcggagcatgtggtttaattcgaagcaacgcgaagaaccttacctagacttgacattgcctgcattactcttaatcgaggaagtcccttcggggacaggatgacaggtggtgcatggttgtcgtcagctcgtgtcgtgagatgttgggttaagtcccgcaacgagcgcaacccttattgttagttgccatcattaagttgggcactctagcgagactgcccgggttaaccgggaggaaggtggggatgacgtcaaatcatcatgccccctatgtctagggctacacacgtgctacaatggccgatacaacgggcagctaaggagcaatccggagcaaatcctacaaaatcggtcccagttcggattgtggggtgaaattcgcccacacgaagtcggagttgctagtaatcgcgaatcagcatgtcgcggtgaat

SEQ ID NO: 1801 - DNA, 1444 bp, Artificial Sequence
  Synthetic polymer
gacgaacgctggcggcgtgcttaacacatgcaagtcgagcgaggaattcccttcggggaattcctagcggcggacgggtgagtaacacgtgggtaacctgcctcatagagggggatagccctccgaaaggaggattaataccgcataatgttattgaatcgcatgattcgataaccaaaggagcaatccgctatgagatggacccgcggcgcattagctagttggtgaggtaatggctcaccaaggcgacgatgcgtagccgacctgagagggtgatcggccacattgggactgagacacggcccagactcctacgggaggcagcagtggggaatattgcacaatgggggaaaccctgatgcagcaacgccgcgtgagtgatgaaggccttcgggttgtaaagctctgtcttcagggacgataatgacggtacctgaggaggaagccacggctaactacgtgccagcagccgcggtaatacgtaggtggcaagcgttgtccggatttactgggcgtaaagggagcgtaggcggatacttaagtgggatgtgaaatacccgggctcaacttgggtgctgcattccaaactgggtgtctagagtgcaggagaggaaagtggaattcctagtgtagcggtgaaatgcgtagagattaggaagaacaccagtggcgaaggcgactttctggactgtaactgacgctgaggctcgaaagcgtggggagcaaacaggattagataccctggtagtccacgccgtaaacgatgggtactaggtgtgggaggtatcgaccccttccgtgccgccgttaacacaataagtaccccgcctggggagtacggtcgcaagattaaaactcaaagggattgacgggggcccgcacaagcagcgtagcatgtggtttaattcgaagcaacgcgaagaaccttacctagacttgacatctcctgaattacccttaaccggggaagtcagtccctctgggactgacaggaagacaggtggtgcatggttgtcgtcagctcgtgtcgtgagatgttgggttaagtcccgcaacgagcgcaacccttattgttagttgctaccatttagttgagcactctagcaagactgcccgggttaaccgggaggaaggtggggatgacgtcaaatcatcatgccccttacgtctagggctacacacgtgctacaatggcgagtacaaagagacgcaagaccgtgaggtggagcaaatctcaaaaactcgtcccagttcggattgtaggctgaaactcgcctacatgaagccggagttgctagtaatcgcgaatcagcatgtcgcggtgaatacgttcccgggccttgtacacaccgcccgtcacaccatgagagttggcaatacccgaagtccgtgagctaacccgtaaggggggcagcggcctaaggtagggtcagcgattggggtg

SEQ ID NO: 1802 - DNA, 1364 bp, Artificial Sequence; identical to SEQ ID NO: 539
  Synthetic polymer

SEQ ID NO: 1803 - DNA, 1436 bp, Artificial Sequence
  Synthetic polymer
gcggcgtgcctaacacatgcaagtcgagcgggaaatttccgattgaaacttcggtcgaaagaggagatggagagcggcggacgggtgagtaacgcgtaggcaacctgccctttgcagagggatagccattggaaacgatgattaaaacctcataacacctattcatcacatggtggaaaggtcaaagatttatcggcaaaggatgggcctgcgtctgattagctagttggtggggtaacggcctaccaaggcgacgatcagtagccgacctgagagggtgatcggccacattggaactgagacacggtccaaactcctacgggaggcagcagtggggaatattgcacaatgggcgaaagcctgatgcagcaacgccgcgtgagcgaagaaggtcttcggatcgtaaagctctgtccttggggaagaagaaaatgacggtacccttggaggaagccccggctaactacgtgccagcagccgcggtaatacgtagggggcaagcgttatccggaattattgggcgtaaagagtgcgtaggtggttacctaagcagggggtgaaaggcaatggctcaaccattgttagccccctgaactgggctacttgagtgcaggagaggaaagcggaattcctagtgtagcggtgaaatacgtagatattaggaggaacaccagtggcgaaggcggctttctggactgttactgacactgaggcacgaaagcgtggggagcaaacaggattagataccctggtagtccacgccgtaaacgatgagcactaggtgtcggggtcgcaagacgtcggtgccgcagttaacgcattaagtgctccgcctggggagtacgcacgcaagtgtgaaactcaaaggaattgacggggacccgcacaagcagcggagcatgtggtttaattcgaagcaacgcgaagaaccttaccaggacttgacatcccgatgaccggcctttaatagggccttctcttcggagcatcggagacaggtggtgcatggttgtcgtcagctcgtgtcgtgagatgttgggttaagtcccgcaacgagcgcaacccttgtcattagttgccatcattcagttgggcactctagtgagactgccggggacaactcggaggaaggtggggatgacgtcaaatcatcatgccccttatgttctgggctacacacgtgctacaatggtcggtacaaagagcggcaatactgtgaagtggagcaaatctcaaaaaccgatcccagttcggattgtaggctgcaactcgcctacatgaagttggagttgctagtaatcgcagatcagaatgctgcggtgaatgcgttcccgggtcttgtacacaccgcccgtcacaccacggaagttgggggtgcccaaagttggcagacaaatatgttacctaaggcaaacccgatgactggggtgaagtcg

SEQ ID NO: 1804 - DNA, 1391 bp, Artificial Sequence
  Synthetic polymer
  misc_feature (1169)..(1169): n is a, c, g, or t
agagtttgatcctggctcaggatgaacgctggcggcgtgcttaacacatgcaagtcgagcgaagcagttaagaagattcttcggatgattcttaactgactgagcggcggacgggtgagtaacgcgtgggtgacctgccccataccgggggataacagctggaaacggctgctaataccgcataagcgcacagagctgcatggctcggtgtgaaaaactccggtggtatgggatgggcccgcgtctgattaggcagttggcggggtaacggcccaccaaaccgacgatcagtagccggcctgagagggcgaccggccacattgggactgagacacggcccaaactcctacgggaggcagcagtggggaatattgcacaatgggggaaaccctgatgcagcaacgccgcgtgagtgatgacggccttcgggttgtaaagctctgtcttcagggacgataatgacggtacctgaggaggaagccacggctaactacgtgccagcagccgcggtaatacgtaggtggcaagcgttgtccggatttactgggcgtaaagggagcgtaggcggacttttaagtgagatgtgaaatacccgggctcaacttgggtgctgcatttcaaactggaagtctagagtgcaggagaggagaatggaattcctagtgtagcggtgaaatgcgtagagattaggaagaacaccagtggcgaaggcgattctctggactgtaactgacgctgaggctcgaaagcgtggggagcaaacaggattagataccctggtagtccacgccgtaaacgatgaataataggtgtagggggtgtcctgacctctgtgccgccgctaacccagtaagtatttcccccggggagtccgttcgcaagaatgaaactcaaggaattgacggggcccccccccagcgggggaacatgtggtttaattcgaagcaacgcgaagaaccttacctggtcttgacatccttctgaccggtccttatccggacctttccttcgggacaggagtgaacaggcggtgcatggttgtcgtcagctcgtgtcgtgagatgtcgggtaacgtcccgcaacgagcgcaacccctatctttagtagccagcatttcaggtgggcactctagagagactgccagggatcatcctggaggaaggtggggncgacgtcaaatcatcatgcccctgacgacctacgggcgacacacgtgctacaatggcgtaaacagagggaagcagcctcgtgagagtgagcaaatcccaaaaataacgtctcagttcggattgtagtctgcaactcgactacatgaagctggaatcgctagtaatcgcgaatcagaatgtcgcggtgaatacgttcccgggtcttgcactcaccgcccgtca

SEQ ID NO: 1805 - DNA, 1378 bp, Artificial Sequence; identical to SEQ ID NO: 163
  Synthetic polymer

SEQ ID NO: 1806 - DNA, 1419 bp, Artificial Sequence; identical to SEQ ID NO: 1055
  Synthetic polymer

SEQ ID NO: 1807 - DNA, 1374 bp, Artificial Sequence
  Synthetic polymer
agagtttgatcctggctcaggacgaacgctggcggcgtgcctaacacatgcaagtcgagcgagttgattctcttcggagatgaagctagcggcggacgggtgagtaacacgtgggcaacctgcctcatagaggggaatagcctcccgaaagggagattaataccgcataagattgtagcttcgcatgaagtagcaattaaaggagtaatccgctatgagatgggcccgcggcgcattagctagttggtgaggtaacggctcaccaaggcgacgatgcgtagccgacctgagagggtgatcggccacattgggactgagacacggcccagactcctacgggaggcagcagtggggaatattgcacaatgggggaaaccctgatgcagcaacgccgcgtgagtgatgacggccttcgggttgtaaagctctgtcttcagggacgataatgacggtacctgaggaggaagccacggctaactacgtgccagcagccgcggtaatacgtaggtggcgagcgttgtccggatttactgggcgtaaagggagcgtaggcggacttttaagtgagatgtgaaatacccgggctcaacttgggtgctgcatttcaaactggaagtctagagtgcaggagaggagaatggaattcctagtgtagcggtgaaatgcgtagagattaggaagaacaccagtggcgaaggcgattctctggactgtaactgacgctgaggctcgaaagcgtggggagcaaacaggattagataccctggtagtccacgccgtaaacgatgaatactaggtgtaggggttgtcatgacctctgtgccgccgctaacgcattaagtattccgcctggggagtacggtcgcaagattaaaactcaaaggaattgacgggggcccgcacaagcagcggagcatgtggtttaattcgaagcaacgcgaagaaccttacctagacttgacatctcctgaattacccgtaactggggaagccacttcggtggcaggaagacaggtggtgcatggttgtcgtcagctcgtgtcgtgagatgttgggttaagtcccgcaacgagcgcaacccttattgttagttgctaccatttagttgagcactctagcgagactgccagggataacctggaggaaggtggggacgacgtcaaatcatcatgccccttatgatctgggcgacacacgtgctacaatggcggtcacaaagtgaggcgaacctgcgagggggagcaaaccacaaaaaggccgtcccagttcggactgtagtctgcaacccgactacacgaagctggaatcgctagtaatcgcgaatcagaatgtcgcggtgaatacgttcccgggtcttgcactcacagccggtca

SEQ ID NO: 1808 - DNA, 1315 bp, Artificial Sequence; identical to SEQ ID NO: 885
  Synthetic polymer

SEQ ID NO: 1809 - DNA, 1373 bp, Artificial Sequence
  Synthetic polymer
ttagagtttgatcctggctcaggacgaacgctggcggcgtgcttaacacatgcaagtcgagcgatgaatcttcttcggaagtggattagcggcggacgggtgagtaacacgtgggtaacctgcctcatagaggggaatagcctttcgaaaggaagattaataccgcataagattgtaatatcgcatgatatagcaattaaaggagtaatccgctatgagatggacccgcgtcgcattagctagttggtgaggtaacggctcaccaaggcgacgatgcgtagccgacctgagagggtgatcggccacattgggactgagacacggcccagactcctacgggaggcagcagtggggaatattgcacaatgggggaaaccctgatgcagcaacgccgcgtgagtgatgacggtcttcggattgtaaagctctgtctttagggacgataatgacggtacctaaggaggaagccacggctaactacgtgccagcagccgcggtaatacgtaggtggcaagcgttgtccggatttactgggcgtaaagggagcgtaggtggatatttaagtgggatgtgaaatacccgggcttaacctgggtgctgcattccaaactggatatctagagtgcaggagaggaaaggagaattcctagtgtagcggtgaaatgcgtagagattaggaagaataccagtggcgaaggcgcctttctggactgtaactgacactgaggctcgaaagcgtggggagcaaacaggattagataccctggtagtccacgccgtaaacgatgaatactaggtgtgggggtgttcatgccttccgtgccgccgctaacacaataagtatcccacctggggagtacggccgcaaggctgaaactcaaaggaattgacggggacccgcacaagcagtggagtatgtggtttaattcgaagcaacgcgaagaaccttaccagggcttgacatgcaggtgaatatgctagagatagtatagtccttcgggacacctgtgcaggtggtgcatggttgtcgtcagctcgtgtcgtgagatgttgggttaagtcccgcaacgagcgcaacccttgcctttagttgccatcattaagttgggcactctagagggactgccggtgacaaaccggaggaaggtggggatgacgtcaaatcatcatgccccttatgtcctgggctacacacgtgctacaatggtctgtacagagggaagcgaagcagcgatgtgaagcgaatcccagaaaacagatctcagttcggattgtaggctgcaactcgcctacatgaagctggaatcgctagtaatcgcaggtcagcatactgcggtggatacgttcccgggccttgtactcaccgcccgtca

SEQ ID NO: 1810 - DNA, 1371 bp, Artificial Sequence; identical to SEQ ID NO: 681
  Synthetic polymer

SEQ ID NO: 1811 - DNA, 1361 bp, Artificial Sequence
  Synthetic polymer
agagtttgatcctggctcaggatgaacgctggcggcgtgcctaacacatgcaagtcgagcgatcttcttcggaagagagcggcggacgggtgagtaacgcgtgggtaacctgcctcatacacatggataacataccgaaaggtatgctaatacaagatgatataagagattcgcatggatttcttatcaaagcttttgcggtatgagatggacccgcgtctgattagctagttggtaaggtaatggcttaccaaggcgacgatcagtagccgacctgagagggtgatcggccacattggaactgagacacggtccaaactcctacgggaggcagcagtggggaatattgcacaatgggcgaaagcctgatgcagcaacgccgcgtgagcgatgaaggccttcgggtcgtaaagctctgtcctcaaggaagataatgacggtacttgaggaggaagccccggctaactacgtgccagcagccgcggtaatacgtagggggctagcgttatccggatttactgggcgtaaagggtgcgtaggtggtttcttaagtcaggagtgaaaggctacggctcaaccgtagtaagcccttgaaactgggaaacttgagtgcaggagaggaaagtggaattcctagtgtagcggtgaaatgcgtagatattaggaggaacaccagtagcgaaggcggctttctggactgtaactgacactgaggcacgaaagcgtggggagcaaacaggattagataccctggtagtccacgctgtaaacgatgagtactaggtgtcgggggttacccccctcggtgccgcagctaacgcattaagtattccacctggggagtacgttcgcaagaatgaaactcaaaggaattgacggggacccgcacaagcggtggagcatgtggtttaattcgaagcaacgcgaagaaccttaccaagtcttgacatcccgatgacaagctatgtaatgtagcctctcttcggagcatcggtgacaggtggtgcatggttgtcgtcagctcgtgtcgtgaggtgttgggttaagtcccgcaacgagcgcaacccttatcctcagtagccagcggttcggccgggcactctagagagactgccagggataacctggaggaaggcggggatgacgtcaaatcatcatgccccttatgacttgggctacacacgtgctacaatggcgtaaacaaagggaagcaaagctgtgaagccgagcaaatctcaaaaataacgtctcagttcggactgtagtctgcaacccgactacacgaagctggaatcgctagtaatcgcagatcagaatgctgcggtgaatacgttcccgggtcttgcactcaccgcccgtca

SEQ ID NO: 1812 - DNA, 1362 bp, Artificial Sequence
  Synthetic polymer
agagtttgatcctggctcaggatgaacgctggcggcgtgcctaacacatgcaagtcgagcgattctcttcggagaagagcggcggacgggtgagtaacgcgtgggtaacctgccctgtacacacggataacataccgaaaggtatgctaatacgggataatatataagagtcgcatgacttttatatcaaagatttttcggtacaggatggacccgcgtctgattagcttgttggcggggtaacggcccaccaaggcgacgatcagtagccgacctgagagggtgatcggccacattggaactgagacacggtccaaactcccacgggaggcagcagtggggaatattgcacaatgggcgcaagcctgatgcagcaacgccgcgtgagcgatgaaggccttcgggtcgtaaagctctgtcctcaaggaagataatgacggtacttgaggaggaagccccggctaactacgtgccagcagccgcggtaatacgtagggggctagcgttatccggatttactgggcgtaaagggtgcgtaggcggtctttcaagtcaggagttaaaggctacggctcaaccgtagtaagctcctgatactgtctgacttgagtgcaggagaggaaagcggaattcccagtgtagcggtgaaatgcgtagatattaggaggaacaccagtggcgaaggcggcttactggacgattactgacgctgaggctcgaaagcgtggggagcaaacaggattagataccctggtagtccacgccgtaaacgatgaatactaggtgtcggggagcactgctcttcggtgccgtagcaaacgcaataagtattccacctggggagtacgttcgcaagaatgaaactcaaaggaattgacggggacccgcacaagcggtggagcatgtggtttaattcgaagcaacgcgaagaaccttaccaagtcttgacatcccgatgacagagcatgtaatgtgttttctcttcggagcatcggtgacaggtggtgcatggttgtcgtcagctcgtgtcgtgagatgttgggttaagtcccgcaacgagcgcaacccctattcttagtagccagcggttcggccgggcactctagggagactgccagggataacctggaggaaggtggggatgacgtcaaatcatcatgccccttatgacttgggctacacacgtgctacaatggcgtaaacaaagggaagcgagcctgcgagggggagcaaatctcaaaaataacgtctcagttcggactgtagtctgcaactcgactacacgaagctggaatcgctagtaatcgcgaatcagaatgtcgcggtgaatacgttcccgggtcttgcactcaccgcccgtca

SEQ ID NO: 1813 - DNA, 1373 bp, Artificial Sequence
  Synthetic polymer
agagtttgatcctggctcaggatgaacgctggcggcgtgcttaacacatgcaagtcgagcgatgaagtttccttcgggaaatggattagcggcggacgggtgagtaacacgtgggtaacctgcctcatagagtggaatagccttccgaaagggagattaataccgcataacgttgaaagatggcatcatcattcaaccaaaggagcaatccgctatgaggtggacccgcggcgcattagctagttggtggggtaacggcctaccaaggcgacgatgcgtagccgacctgagagggtgatcggccacattgggactgagacacggcccagactcctacgggaggcagcagtggggaatattgcacaatgggggaaaccctgatgcagcaacgccgcgtgagtgatgacggtcttcggattgtaaagctctgtctttggggacgataatgacggtacccaaggaggaagccacggctaactacgtgccagcagccgcggtaatacgtaggtggcgagcgttatccggaattattgggcgtaaagggagcgtaggcggataattaagtgggatgtgaaatactcaggctcaacctgggggctgcattccaaactgattatctagagtgcaggagaggagagtggaattcctagtgtagcggtgaaatgcgtagagattaggaagaacaccagtggcgaaggcgactctctggactgtaactgacgctgaggctcgaaagcgtggggagcaaacaggattagataccctggtagtccacgccgtaaacgatgaatactaggtgtgggggtttcaacacctccgtgccgccgctaacgcattaagtattccgcctggggagtacggtcgcaagattaaaactcaaaggaattgacggggacccgcacaagcagcggagcatgtggtttaattcgaagcaacgcgaagaaccttacctacacttgacatcccttgcattacccttaatcggggaaatctcttcggagacaaggtgacaggtggtgcatggttgtcgtcagctcgtgtcgtgagatgttgggttaagtcccgcaacgagcgcaacccctattgttagttgctaccattaagttgagcactctagcgagactgcctgggttaaccaggaggaaggtggggacgacgtcaaatcatcatgccccttatgtgtagggctacacacgtgctacaatggcaggtacagagagacgcaagaccgtgaggtggagcaaatcccacaaaacctgtcccagttcggattgaaggctgaaactcgccttcatgaagccggagttgctagtaatcgcgaatcagaatgtcgcggtgaatacgttcccgggtcttgcacacaccgcccgtca

SEQ ID NO: 1814 - DNA, 1420 bp, Artificial Sequence; identical to SEQ ID NO: 1043
  Synthetic polymer

SEQ ID NO: 1815 - DNA, 1388 bp, Artificial Sequence
  Synthetic polymer
  misc_feature (143)..(143): n is a, c, g, or t
  misc_feature (364)..(364): n is a, c, g, or t
  misc_feature (1322)..(1322): n is a, c, g, or t
  misc_feature (1381)..(1381): n is a, c, g, or t
agtcgagcgatgaagttcccttcggggaacggattagcggcggacgggtgactattacgatgggcaacctgcctcaaagaggggaatagcctcccgaaagggagattaataccgcataacgttgcggaatcgcatgattctgnaaccaaaggagcaatccgctttgagatgggcccgcggcgcattagctagttggtaaggtaatggcttaccaaggcgacgatgcgtagccgacctgagagggtgatcggccacattggaactgagatacggtccagactcctacgggaggcagcagtggggaatattgcgcaatgggggaaaccctgacgcagcaacgccgcgtgagtgatgaaggccttangggttgtaaagcttctgttatctgggacgataatgacggtaccagaggaggaagccacggctaactacgtgccagcagccgcggttaatacgtaggtggcgagcgttgtccgggatttactgggcgtaaagagtgcgtaggcggatgtttaagtgagatgtgaaatacccgagctcaacttgggtgctgcatttcaaactgggcatctagagtgcaggagaggaaagcggaattcctagtgtagcggtgaaatgcgtagagattaggaagaacaccagtggcgaaggcggctttctggactgtaactgacgctgaggcacgaaagcgtggggagcaaacaggattagataccctggtagtccacgccgtaaacgatgggtactaggtgtcgggggtccaacctcggtgccgcagtaaacacattaagtaccccgcctggggagtacggtcgcaagattaaaactcaaaggaattgacgggggcccgcacaagcagcggagcatgtggtttaattcgaagcaacgcgaagaaccttacctagacttgacatcccaagaatactgtggaaacacggtagtgcccttcggggaacttggtgacaggtggtgcatggttgtcgtcagctcgtgtcgtgagatgttgggttaagtcccgcaaccagcgcaacccctattgttagttgctaccattaagttgagcactctagcaagactgcctgggttaaccaggaggaaggtggggatgacgtcaaatcatcatgccccttatgtctagggctacacacgtgctacaatggtcggtacaacgagacgcaagaccgtgaggtggagcaaatctcaaaaaccgatctcagttcggattgtaggctgcaactcgcctacatgaagctggagttgctagtaatcgcgaatcagaatgtcgcggtgaatacgttcccgggccttgtacacccctaaanggcacaccatgagagctggtaacacccgaagtccgtgaggtaaccgtaagagccagcgnccgaagg

SEQ ID NO: 1816 - DNA, 1359 bp, Artificial Sequence
  Synthetic polymer
agagtttcatcctggctcaggatgaacgctggcggcgtgcctaacacatgcaagtcgagcgagaaatcttggattgaaacttcggtcgattgaagagatggaaagcggcggacgggtgagtaacgcgtaggcaacctgccccttgcagagggatagccattggaaacgatgattaaaacctcataatactgcgaagtcacatgtcattgcagtcaaagatttatcggcaagggatgggcctgcgtctgattagctggttggtggggtaacggcctaccaaggcgacgatcagtagccgacctgagagggtgatcggccacattggaactgagacacggtccaaactcctacgggaggcagcagtggggaatattgcacaatgggcgaaagcctgatgcagcaacgccgcgtgagcgaagaaggtcttcggattgtaaagctctgtccttggggaagataatgacggtacccttggaggaagccccggctaactacgtgccagcagccgcggtaatacgtagggggcaagcgttatccggaattattgggcgtaaagagtgcgtaggtggttacctaagcagggggtgaaaggcactggcttaaccaatgtcagccccctgaactgggctacttgagtgcaggagaggaaagcggaattcctagtgtagcggtgaaatgcgtagatattaggaggaacaccagtggcgaaggcggctttctggactgttactgacactgaggcacgaaagtgtggggagcaaacaggattagatacctggtagtccacaccgtaaacgatgagcactaggtgtcggggtcgcaagacttcggtgccgcagttaacgcattaagtgctccggctggggagtacgtacgcaagtatgaaactcaaaggaattgacggggacccgcacaagcagcggagcatgtggtttaattcgaagcaacgcgaagaaccttaccaggacttgacatccctctgaaactcctgataacgaaggagcctccttcgggacagaggagacaggtggtgcatggttgtcgtcagctcgtgtcgtgagatgttgggttaagtcccgcaacgagcgcaacccttgtcattagttgccatcattaagttgggcactctagtgagactgccggggacaactcggaggaaggtggggatgacgtcaaatcatcatgccccttatgttctgggctacacacgtgctacaatggttggtacaaagagcagcaaactcgtgagggggagcaaatctcaaaaaccaatcccagttcggattgcaggctgcaactcgcctgcatgaagttggagttgctagtaatcgcggatcagaatgccgcggtgaatgcgtt

SEQ ID NO: 1817 - DNA, 1382 bp, Artificial Sequence
  Synthetic polymer
ttcgcccttagagtttgatcctggctcaggatgaacgctggcggcgtgcttaacacatgcaagtcgagcgagaaaagttcttcggagcttttctagcggcggacgggtgagtaacacgtgggcaacctgcctcatagaggggaatagccttccgaaaggaagattaataccgcataacattgttgaaaggcatcttttaacaatcaaaggagcaatccgctatgagatgggcccgcggcgcattagctagttggtgaggtaacagctcaccaaggcgacgatgcgtagccgacctgagagggtgatcggccacattggaactgagacacggtccagactcctacgggaggcagcagtggggaatattgcacaatgggggaaaccctgatgcagcaacgccgcgtgagtgatgaaggtcttcggattgtaaagctctgtctttagggacgataatgacggtacctaaggaggaagccacggctaactacgtgccagcagccgcggtaatacgtaggtggcaagcgttatccggatttactgggcgtaaagggagcgtaggcggacttttaagtgagatgtgaaatacccgggctcaacttgggtgctgcatttcaaactggaagtctagagtgcaggagaggagaatggaattcctagtgtagcggtgaaatgcgtagagattaggaagaacaccagtggcgaaggcgattctctggactgtaactgacgctgaggctcgaaagcgtggggagcaaacaggattagataccctggtagtccacgccgtaaacgatgaatactaggtgtaggggttgtcatgacctctgtgcccgccgctaacgcattaagtattccgcctggggagtacggtcgcaagattaaaactcaaaggaattgacggggacccgcacaagcagcggagcatgtggtttaattcgaagcaacgcgaagaaccttacctagacttgacatgtcctgaattaccagtaatgtgggaagttccttcgggaacaggaacacaggtggtgcatggttgtcgtcagctcgtgtcgtgagatgttgggttaagtcccgcaacgagcgcaacccttattgttagttggtaccattaagttgaccactctagcgagactgcctgggttaaccaggaggaaggtggggacgacgtcaaatcatcatgccccttatgtgtagggctacacacgtgctacaatggcaggtacagagagacgcaagaccgtgaggtggagcaaatcccacaaaacctgtcccagttcggaaaaaggctgaaactcgccttcatgaagccggagttgctagtaatcgcgaatcagaatgtcgcggtgaatacgatcctcgggtcttgtactcaccgcccgtca

SEQ ID NO: 1818 - DNA, 1352 bp, Artificial Sequence; identical to SEQ ID NO: 530
  Synthetic polymer

SEQ ID NO: 1819 - DNA, 1371 bp, Artificial Sequence
  Synthetic polymer
ttagagtttgatcctggctcaggacgaactctggcggcgtgcttaacacatgcaagtcgagcgatgaagctccttcgggagtggattagcggcggacgggtgagtaacacgtgggtaacctgcctcatagaggggaatagcctttcgaaaggaagattaataccgcataagattgtagtaccgcatggtacagcaattaaaggagtaatccgctatgagatggacccgcgtcgcattagctagttggtgaggtaacggctcaccaaggcgacggtgcgtagccgacctgagagggtgatcggccacattgggactgagacacggcccggactcctacgggaggcagcagtggggaatattgcacaatgggggaaaccctgatgcagcaacgccgcgtgagtgatgacggtcttcggattgtaaagctctgtctttggggacgataatgacggtacccaaggaggaagccacggctaactacgtgccagcagccgcggtaatacgtaggtggcaagcgttgtccggatttactgggcgtaaagggaacgtaggcggatatttaagtgggatgtgaaatacccgagcttaacttgggagctgcattccaaactggatgtctagagtgcaggagaggagaatggaattcctagtgtagcggtgaaatgcgtagagattaggaagaacaccagtggcgaaggcgattctctggactgtaactgacgctgaggctcgaaagcgtggggagcaaacaggattagataccctggtagtccacgccgtaaacgatgaatactaggtgtaggggccccaagcctctgtgccgccgctaacgcattaagtattccgcctggggagtacggtcgcaagattaaaactcaaaggaattgacggggacccgcacaagcagcggagcatgtggtttaattcgaagcaacgcgaagaaccttacctagacttgacatgtcctgaattaccagtaatgtgggaagttccttcgggaacaggaacacaggtggtgcatggttgtcgtcagctcgtgtcgtgagatgttgggttaagtcccgcaacgagcgcaacccttattgttagttggtaccattaagttgaccactctagcgagactgctcgggttaaccgggaggaaggtggggatgacgtcaaatcatcatgccccttatgtctagggctacacacgtgctacaatggcaagtacaaagagaagcaatactgtgaagtggagcaaaactcaaaaacttgtctcagttcggattgtaggctgaaactcgcctacatgaagctggagttgctagtaatcgcgaatcagaatgtcgcggtgaatacgttcccgggtcttgcactcaccgcccgtca

SEQ ID NO: 1820 - DNA, 1372 bp, Artificial Sequence; identical to SEQ ID NO: 1132
  Synthetic polymer

SEQ ID NO: 1821 - DNA, 1437 bp, Artificial Sequence
  Synthetic polymer
gacgaacgctggcggcgtgcctaacacatgcaagtcgagcgaatgaagttccttcgggaacggatttagcggcggacgggtgagtaacacgtgggcaacctgcctcatagaggggaatagccttccgaaagggagattaataccgcataagattgtagtaccgcatggtacagcaattaaaggagtaatccgctatgagatgggcccgcggcgcattagctagttggtgaggtaacggctcaccaaggcgacgatgcgtagccgacctgagagggtgatcggccacattgggactgagacacggcccagactcctacgggaggcagcagtggggaatattgcacaatggggggaaccctgatgtagcaacgccgcgtgagtgatgacggccttcgggttgtaaagctctgtcttcagggacgataatgacggtacctgaggaggaagccacggctaactacgtgccagcagccgcggtaatacgtaggtggcgagcgttgtccggatttactgggcgtaaagggagcgtaggcggatttttaagtgagatgtgaaatactcgggcttaacctgagtgctgcatttcaaactggaagtctagagtgcaggagaggagaagggaattcctagtgtagcggtgaaatgcgtagagattaggaagaacaccagtggcgaaggcgcttctctggactgtaactgacgctgaggctcgaaagcgtggggagcaaacaggattagataccctggtagtccacgccgtaaacgatgaatactaggtgtaggggttgtcatgacctctgtgccgccgctaacgcattaagtattccgcctggggagtacggtcgcaagattaaaactcaaaggaattgacgggggcccgcacaagcagcggagcatgtggtttaattcgaagcaacgcgaagaaccttacctagacttgacatctcctgcattactcttaatcgaggaagtcccttcggggacaggatgacaggtggtgcatggttgtcgtcagctcgtgtcgtgagatgttgggttaagtcccgcaacgagcgcaacccttattgttagttgccatcattaagttgggcactctagcgagactgcccgggttaaccgggaggaaggtggggatgacgtcaaatcatcatgccccttatgtctagggctacacacgtgctacaatgggtggtacagagggcagccaagtcgtgaggccgagctaatcccttaaagccattctcagttcggattgtaggctgaaactcgcctacatgaagctggagttactagtaatcgcagatcagaatgctgcggtgaatgcgttcccgggtcttgtacacaccgcccgtcacaccatgggagttgggggcgcccgaagccggttagctaaccttttggaagcggccgtcgaaggtgaaaccaataactggggtg

SEQ ID NO: 1822 - DNA, 1374 bp, Artificial Sequence; identical to SEQ ID NO: 588
  Synthetic polymer

SEQ ID NO: 1823 - DNA, 1392 bp, Artificial Sequence
  Synthetic polymer
agagtttgatcctggctcaggatgaacgctggcggcgtgcttaacacatgcaagtcgaacgaagcactttggacagattcttcggatgaagtccttagtgactgagtggcggacgggtgagtaacgcgtgggtaacctgcctcatacagggggataacagttagaaatggctgctaataccgcataagcgcacagtaccgcatggtacggtgtgaaaaactccggtggtatgagatggacccgcgttggattagctagttggcagggtaacggcctaccaaggcgacgatccatagccggcctgagagggtggacggccacattggaactgagacacggtccaaactcctacgggaggcagcagtggggaatattgcacaatgggcgaaagcctgatgcagcaacgccgcgtgagcgatgaaggccttcgggtcgtaaagctctgtcctcaaggaagataatgacggtacttgaggaggaagccccggctaactacgtgccagcagccgcggtaatacgtagggggctagcgttatccggaattactgggcgtaaagggtgcgtaggtggtttcttaagtcagaggtgaaaggctacggctcaaccgtagtaagcctttgaaactgggaaacttgagtgcaggagaggagagtggaattcctagtgtagcggtgaaatgcgtagatattaggaggaacaccagttgcgaaggcggctctctggactgtaactgacactgaggcacgaaagcgtggggagcaaacaaaagtagattccctggtagtccccgctcgtaaacgatgggttgtagctgtcgggagggttacccccttcggtggagcagcttacgcatttaagtactccgcctgggaagtacgctcgcaagagtgaaactcaaaggaattgacggggacccgcacaagtagcggagcatgtggtttaattcgaagcaacgcgaagaaccttaccaagtcttgacatccctctgaccgactcttaaccgagtgtttccttaaggacagaggagacaggtggtgcatggttgtcgtcagctcgtgtcgtgagatgttgggttaagtcccgcaacgagcgcaacccctatctttagtagccagcggtcaggccgggcactctagagagactgccagggataacctggaggaaggtggggatgacgtcaaatcatcatgccccttatgagcagggctacacacgtgctacaatggcgtaaacaaagggaagcgagattgtgagatggagcaaatcccaaaaataacgtcccagttcggactgtagtctgcaacccgactacacgaagctggaatcgctagtaatcgcggatcagaatgccgcggtgaatacgttaacgggtcttgcacacaccgcccgtca

SEQ ID NO: 1824 - DNA, 1360 bp, Artificial Sequence; identical to SEQ ID NO: 720
  Synthetic polymer

SEQ ID NO: 1825 - DNA, 1367 bp, Artificial Sequence; identical to SEQ ID NO: 683
  Synthetic polymer

SEQ ID NO: 1826 - DNA, 1362 bp, Artificial Sequence
  Synthetic polymer
gagtttgatcctggctcaggatgagcccttgcggcgtgcctaacacatgcaagtcgagcgatcttcttcggaagagagcggcggacgggtgagtaacgcgtgggtaacctgccctgtacacacggataacataccgaaaggtatgctaatacgagataatatgcttttatcgcatggtagaagtatcaaagcttttgcggtacaggatggacccgcgtctgattagctagttggtaaggtaacggcttaccaaggcgacgatcagtagtcgacctgagagggtgatcggccacattggaactgagacacggtccaaactcctacgggaggcagcagcggggaatattgcacaatgggcgaaagcctgatgcagcaacgccgcgtgagcgatgaaggccttcgggtcgtaaagctctgtcctcaaggaagataatgacggtacttgaggaggaagccccggctaactacgtgccagcagccgcggtaatacgtagggggctagcgttatccggaattactgggcgtaaagggtgcgtaggtggtttcttaagtcagaggtgaaaggctacggctcaaccgtagtaagcctttgaaactgggaaacttgagtgcaggagaggagagtggaattcctagtgtagcggtgaaatgcgtagatattaggaggaacaccagttgcgaaggcggctctctggactgtaactgacactgaggcacgaaagcgtggggagcaaacaggattagataccctggtagtccacgccgtaaacgatgagtactagctgtcggaggttacccccttcggtggcgcagctaacgcattaagtactccgcctgggaagtacgctcgcaagagtgaaactcaaaggaattgacggggacccgcacaagtagcggagcatgtggtttaattcgaagcaacgcgaagaaccttacctaagcttgacatccttttgaccgatgcctaatcgcatctttcccttcggggacagaagtgacaggtggtgcatggttgtcgtcagctcgtgtcgtgagatgttgggttaagtcccgcaacgagcgcaacccttgcctttagttgccagcatataaggtggggactctagatagactgccggtgataaaccggaggaaggtggggacgacgtcaaatcatcatgccctttatgtcctgggctacacacgtgctacaatggccggtacagagggaagcgaagccgtgaggtgaagcgaatctcataaagccggccccagttcggattgtaggctgcaactcgcctacatgaagccggagttgctagtaatcgcaaatcagaatgttgcggtgaatgcgttcccgggtcttgtacacagcgcccgtca

SEQ ID NO: 1827 - DNA, 1442 bp, Artificial Sequence
  Synthetic polymer
gacgaacgctggcggcgtgcctaatacatgcaagtagaacgctgaagaaaggagcttgcttcttttggatgagttgcgaacgggtgagtaacgcgtaggtagcctgccttgtagcgggggataactattggaaacgatagctaataccgcataacagcttttgacacatgttagaagcttgaaagatgcaattgcatcactacgagatggacctgcgttgtattagctagttggtaaggtaacggcttaccaaggcgacgatcagtagccgacctgagagggtgatcggccacattggaactgagacacggtccaaactcctacgggaggcagcagtggggaatattgcacaatgggcgaaagcctgatgcagcgacgccgcgtgagcgatgaaggccttcgggtcgtaaagctctgtcctcaaggaagataatgacggtacttgaggaggaagccccggctaactacgtgccagcagccgcggtaatacgtaggtggcaagcgttgtccggatttactgggcgtaaagggagcgtaggcggacctttaagtgagatgtgaaatacccgagctcaacttgggtgctgcatttcaaactggaggtctagagtgtcggagaggtaagcggaattcctagtgtagcggtgaaatgcgtagagattagaagaaccccggtggcgaaagcggcttactggacgataactgacgctgaggctcgaaagcgtggggagcaaacaggactagataccctggtagtacacgctgtaaccgatgagtactaggtgtggtggttgtcatgacctccgtgccgtcgcaaacgcattaagtattccgcctggggagtacggtcgcaagattacaactcacaggaattgacgggggcccgcacaagcagcggagcatgtggtttaattcgaagcaacgcgaagaaccttacctagacttgacatctcctgaattactcttaatcgaggaagtcccttcggggacaggaagacaggtggtgcatggttgtcgtcagctcgtgtcgtgagatgttgggttaagtcccgcaacgagcgcaacccttattgttagttgctaccattaagttgagcactctagcaagactgccgtggttaacgcggaggaaggtggggatgacgtcaaatcatcatgccccttatgtctagggctacacacgtgctacaatggtgagtacaaagagacgcaataccgtgaggtggagcaaaactcaaaaactcatcccagttcggattgtaggctgcaactcgcctacatgaagttggagttgctagtaatcgcgaatcagaatgtcgcggtgaatacgttcccgggccttgtacacaccgcccgtcacaccatgagagctggtaacacccgaagtccgtgaggtaaccgcaaggagccagcggccgaaggtgggattagtgattggggtg

SEQ ID NO: 1828 - DNA, 1363 bp, Artificial Sequence
  Synthetic polymer
agagtttgatcctggctcaggatgaacgctggcggcgtgcctaacacatgcaagtcgagcgattctcttcggagaagagcggcggacgggtgagtaacgcgtgggtaacctgccctgtacacacggataacataccgaaaggtatgctaatacgagataatatgcttttatcgcatggtagaagtatcaaagtttttgcggtacaggatggacccgcgtctgattagctagttggtaaggtaacggcttaccaaggcgacgatcagtagccgacctgagagggtgatcggccacattggaactgagacacggtccaaactcctacgggaggcagcagtggggaatattgcacaatgggcgaaagcctgatgcagcaacgccgcgtgagcgatgaaggccttcgggtcgtaaagctctgtcctcaaggaagataatgacggtacttgaggaggaagccccggctaactacgtgccagcagccgcggtaatacgtagggggctagcgttatccggaattactgggcgtaaagggtgcgtaggtggtttcttaagtcagaggtgaaaggctacggctcaaccgtagtaagcctttgaaactgggaaacttgagtgcaggagaggagagtggaattcctagtgtagcggtgaaatgcgtagatattaggaggaacaccagttgcgaaggcggctctctggactgtaactgacactgaggcacgaaagcgtggggagcaaacaggattagataccctggtagtccacgccgtaaacgatgaatactaggtgtcggggagcaaagctcttcggtgccgtcgcaaactcagtaagtattccacctggggagtacgttcgcaagaatgaaactcaaaggaattgacggggacccgcacaagcggtggagcatgtggtttaattcgaagcaacgcgaagaaccttaccaagtcttgacatccgcctgaccgatccttaaccggatctttccttcgggacaggcgagacaggtggtgcatggttgtcgtcagctcgtgtcgtgagatgttgggttaagtcccgcaacgagcgcaacccctgttgccggttaccagcgagtaaagtcggggactccggtgagactgccgaggacaactcggaggaaggtggggacgacgtcaaatcatcatgccccttacgtcttgggctacacacgtgctacaatggctgtaacaaagggaagcgacagcgtaagctgaagcggatctcgaaaaggcagtcccagttcggattgtgggctgcaacccgcccacatgaagtcggagttgctagtaatcgcggatcagcatgccgcggtgaatacgttcccgggccttgcacacaccgcccgtca

SEQ ID NO: 1829 - DNA, 1343 bp, Artificial Sequence; identical to SEQ ID NO: 766
  Synthetic polymer

SEQ ID NO: 1830 - DNA, 1436 bp, Artificial Sequence
  Synthetic polymer
gacgaacgctggcggcgtgcctaacacatgcaagtcgagcgatgaaaccccttcgggggtggattagcggcggacgggtgagtaacacgtgggtaacctgcctcaaagtgggggatagccttccgaaaggaagattaataccgcataaagccaagtttcacatggaatttggatgaaaggagtaattcgctttgagatggacccgcggcgcattagttagttggtggggtaatggcctaccaagacagcgatgcgtagccgacctgagagggtgatcggccacattggaactgagatacggtccagactcctacgggaggcagcagtggggaatattgcacaatgggcgaaagcctgatgcagcaacgccgcgtgagtgatgaaggtcttcggattgtaaagctctgtcttttgggacgataatgacggtaccaaaggaggaagccacggctaactacgtgccagcagccgcggtaatacgtaggtggcgagcgttgtccggatttactgggcgtaaagggtgcgtaggcggatgtttaagtgagatgtgaaatacccgggcttaacttgggtgctgcatttcaaactggatatctagagtgcaggagaggagaatggaattcctagtgtagcggtgaaatgcgtagagattaggaagaacaccagtggcgaaggcgattctctggactgtaactgacgctgaggcacgaaagcgtgggtagcaaacaggattagataccctggtagtccacgccgtaaacgatgagtactaggtgtaggaggtatcgaccccttctgtgccgcagtaaacacattaagtattccacctggggagtacgttcgcaagaatgaaactcaaaggaattgacggggacccgcacaagcggtggagcatgtggtttaattcgaagcaacgcgaagaaccttacctagtcttgacatcccattgaccgcagagtaatgtctgcttcccttcggggcaatggagacaggtggtgcatggttgtcgtcagctcgtgtcgtgagatgttgggttaagtcccgcaacgagcgcaacccttatctttagtagccagcatttaaggtgggcactctagagagactgccagggataacctggaggaaggtggggatgacgtcaaatcatcatgccccttatgactagggctacacacgtgctacaatggtgacaacaaagagaagcaaccctgcgaaggtgagcaaatctcaaaaaagtcatctcagttcggattgtagtctgcaactcgactacatgaagctggaatcgctagtaatcgcgaatcagaatgtcgcggtgaatacgttcccgggtcttgtacacaccgcccgtcacaccatgggagttggaaatgcccgaagtcagtgacccaaccgtaaggagggagctgccgaaggtggagccaatgactggggtg

SEQ ID NO: 1831 - DNA, 1382 bp, Artificial Sequence
  Synthetic polymer
ttcgcccttagagtttgatcctggctcaggacgaacgctggcggcgtgcctaacacatgcaagtcgagcgaatgaaattccttcgggaacggatttagcggcggacgggtgagtaacacgtgggcaacctgcctcatagaggggaatagccttccgaaagggagattaataccgcataagattgtagtaccgcatggtacagcagttaaaggagcaatccgctatgagatggacccgcgtcgcattagctagttggtgaggtaacggctcaccaaggcgacgatgcgtagccgacctgagagggtgatcggccacattgggactgagacacggcccagactcctacgggaggcagcagtggggaatattgcacaatgggggaaaccctgatgcagcaacgccgcgtgagtgatgacggtcttcggattgtaaagctctgtctttagggacgataatgacggtacctaaggaggaagccacggctaactacgtgccagcagccgcggtaatacgtaggtggcaagcgttgtccggatttactgggcgtaaagggagcgtaggtggatatttaagtgggatgtgaaatacccgggcttaatctgggtgctgcattccaaactggatatctagagtgcaggagaggaaaggagaattcctagtgtagcggtgaaatgcgtagagattaggaagaataccagtggcgaaggcgcctttctggactgtaactgacactgaggctcgaaagcgtggggagcaaacaggattagataccctggtagtccacgccgtaaacgatgaatactaggtgtaggggttgtcatgacctctgtgccgccgctaacgcattaagtattccgcctggggagtacggtcgcaagattaaaactcaaaggaattgacgggggcccgcacaagcagcggagcatgtggtttaatttgaagcaacgcgaagaaccttacctagacttgacatctcctgcattactcttaatcgaggaagtcccttcggggacaggatgacaggtggtgcatggttgtcgtcagctcgtgtcgtgagatgttgggttaagtcccgcaacgagcgcaacccctattgttagttgccatcattaagttgggcactctagcgagactgcccgggttaaccgggaggaaggtggggaggacgtcaaatcatcatgccccctatgtctaggggtacacacgtgctacaatggtcggtacaataagacgcaagcccgcgagggggagcaaaactggaaaaccgatctcagttcggattgtaggctgaaactcgcctacatgaagtcggagttgctagtaatcgcagatcagaatgctgcggtgaatgcgttcccgggtcttgtacacaccgcccgtca

SEQ ID NO: 1832 - DNA, 1364 bp, Artificial Sequence
  Synthetic polymer
agagtttgatcctggctcaggatgaacgctggcggcgtgcctaacacatgcaagtcgagcgattctcttcagagaatagcggcggacgggtgagtaacgcgtgggtaacctcgccctgtacacacggataacgtaccgaaaggtatgctaatacgggataatatataagagtcgcatgacttttatatctaagatttttcggtacaggatggacccgcgtctgattagcttgttggcggggtaacggcccaccaaggcgacgatcagtagccgatctgagagggtgatcggccacattggaactgaaacgcggtccaaactcctacaggaggcagcagtggggaatattgcacaatgggcgcaagcctgatgcagtaacgccacgtgagagatgaaggccttcgggtcgtaaagctctgtcctcaaggaagataatgacggtacttgaggaggaagccccggctaactacgtgccagcagccgcggtaatacgtagggggctagcgttatctggatttactgggcgtaaagggtgcgtaggcggtctttcaagtcaggagttaaaggctacggctcaaccgtagtaagctcctgatactgtgatgacttgagtgcaggagaggaaagcggaattcccagtgtagcggtgaaatgcgtagatattgggaggaacaccagtcgcgaaggcggctttctggactgtaattgacgctgaggcacgaaagcgtggggagcaaacaggattagataccctggtagtccacgctgtaaacgatgagtactaggtgtcggaggttacccccttcggtgccgcagctcacgcattaagtactcctcttggggagtacgcacgcaagtgtgaaactcaaaggaattgacggggacccgcacaagtagcggagcatgtggtttaattcgaagcaacgcgaagaaccttacctaggcttgacatccttctgcccgaggactaatctcctctttccctccggggacagaagtgacaggtggtgcatggttgtcgtcagctcgtgtcgtgagatgttgggttaagtcccgcaacgagcgcaacccttgtctttagttgccatcattaagttgggcactctagagagactgccagggataacctggaggaaggtggggatgacgtcaaatcatcatgccccttatgcctagggctacacacgtgctacaatgggtggtacagagggcaaccaacccgtgaggtggagcaaatcccttaaagccattctcagttcggattgtagtctgaaactcgcctacatgaagctggagttactagtaatcgcagatcagaatgttgcggtgaatgcgttcccgggtcttgtacacaccgcccgtca

SEQ ID NO: 1833 - DNA, 1335 bp, Artificial Sequence
  Synthetic polymer
gacgaacgctggcggcgtgcctaacacatgcaagtcgagcgaggagattcccttcggggatgaacctagcggcggacgggtgagtaacacgtgggcaacctgccttgtagaggggaatagccttccgaaaggaagattaataccgcataacattgttttatcgcatgatagaacaatcaaaggagcaatccgctacaagatgggcccgcggcgcattagctagttggtgaggtaacggctcaccaaggcgacgatgcgtagccgacctgagagggtgatcggccacattgggactgagacacggcccagactcctacgggaggcagcagtggggaatattgcacaatgggggaaaccctgatgcagcaacgccgcgtgagtgatgacggtcttcggattgtaaaactctgtctttggggacgataatgacggtacccaaggaggaagccacggctaactacgtgccagcagccgcggtaatacgtaggtggcaagcgttgtccggatttactgggcgtaaagggagcgtaggtggatatttaagtggggtgtgaaatactcgggcttaacctgagtgctgcattccaaactggatatctagagtgcaggagaggaaaggagaattcctagtgtagcggtgaaatgcgtagagattaggaagaataccagtggcgaaggcgcctttctggactgtaactgacactgaggctcgaaagcgtggggagcaaacaggattagataccctggtagtccacgccgtaaacgatgaatactaggtgtgggggttgtcatgacctccgtgccgccgctaacgcattaagtattccgcctggggagtacggtcgcaagattaaaactcaaaggaattgacgggggcccgcacaagcagcggagcatgtggtttaattcgaagcaacgcgaagaaccttacctagacttgacatctcctgaattactcttaatcgaggaagtcacttcggtgacaggaagacaggtggtgcatggttgtcgtcagctcgtgtcgtgagatgttgggttaagtcccgcaacgagcgcaacccttattgttagttgctaccatttagttgagcactctagcgagactgcccgggttaaccgggaggaaggtggggatgacgtcaagtcatcatgccccttatgtctagggctacacacgtgctacaatggctggtacagagagatgctaaaccgcgaggtggagccaaactttaaaaccagtctcagttcggattgtaggctgaaactcgcctacatgaagctggagttgctagtaatcgcgaatcagaatgtcgcggtgaatacgttcccgggcct

SEQ ID NO: 1834 - DNA, 1328 bp, Artificial Sequence; identical to SEQ ID NO: 690
  Synthetic polymer

SEQ ID NO: 1835 - DNA, 1378 bp, Artificial Sequence; identical to SEQ ID NO: 102
  Synthetic polymer

SEQ ID NO: 1836 - DNA, 1370 bp, Artificial Sequence
  Synthetic polymer
agagtttgatcctggctcaggatgaacgctggcggcgtgcttaacacatgcaagtcgagcgagaaaagttcttcggagcttttctagcggcggacgggtgagtaacacgtgggcaacctgcctcatagaggggaatagccttccgaaaggaagattaataccgcataacattgttgaaaggcatcttttaacaatcaaaggagcaatccgctatgagatgggcccgcggcgcattagctagttggtgaggtaacggctcaccaaggcgacgatgcgtagccgacctgagagggtgatcggccacattggaactgagacacggtccagactcctacgggaggcagcagtggggaatattgcacaatgggggaaaccctgatgcagcaacgccgcgtgagtgatgaaggtcttcggattgtaaagctctgtctttagggacgataatgacggtacctaaggaggaagccacggctaactacgtgccagcagccgcggtaatacgtaggtggcaagcgttatccggatttactgggcgtaaagggagcgtaggcggatatttaagtgggatgtgaaatacccgagcttaacttgggagctgcattccaaactggatatctagagtgcaggagaggagaatggaattcctagtgtagcggtgaaatgcgtagagattaggaagaacaccagtggcgaaggcgattctctggactgtaactgacgctgaggctcgaaagcgtggggagcaaacaggattagataccctggtagtccacgccgtaaacgatgaatactaggtgtaggggccccaagcctctgtgccgccgctaacgcattaagtattccgcctggggagtacggtcgcaagattaaaactcaaaggaattgacggggacccgcacaagcagcggagcatgtggtttaattcgaagcaacgcgaagaaccttaccagaccttgacatccctctgaataagcttgtaatgagtttaggccttcgggacagaggagacaggtggtgcatggttgtcgtcagctcgtgtcgtgagatgttgggtcaagtcccgcaacgagcgcaacccttgtccacagtagccagcagtaagatgggaactctgtggagactgccggggataacccggaggaaggtggggatgacgtcaaatcatcatgccccttacggtctgggctacacacgtgctacaatggcgtaacaaagggaagcgaacctgcgaaggcaagcaaaccccaaaaataacgtcccagttcggactgcagtctgcaactcgactgcacgaagccggaatcgctagtaatcgcagatcagcatgctgcggtgaatacgttcccgggtcttgcacacaccgcccgtca

SEQ ID NO: 1837 - DNA, 1500 bp, Artificial Sequence; identical to SEQ ID NO: 9
  Synthetic polymer

SEQ ID NO: 1838 - DNA, 1374 bp, Artificial Sequence; identical to SEQ ID NO: 540
  Synthetic polymer

SEQ ID NO: 1839 - DNA, 1360 bp, Artificial Sequence
  Synthetic polymer
agagtttgatcctggctcaggatgaacgctggcggcatgcctaacacatgcaagtcgagcgatctcttcggagagagcggcggacgggtgagtaacgcgtgggtaacctgccctgtacacacggataacataccgaaaggtatgctaatacgggataatatataagagtcgcatgacttttatatcaaagatttttcggtacaggatggacccgcgtctgattagcttgttggcggggtaacggcccaccaaggcgacgatcagtagccgacctgagagggtgatcggccacattggaactgagacacggtccaaactcctacgggaggcagcagtggggaatattgcacaatgggcgcaagcctgatgcagcaacgccgcgtgagcgatgaaggccttcgggtcgtaaagctctgtcctcaaggaagataatgacggtacttgaggaggaagccccggctaactacgtgccagcagccgcggtaatacgtagggggctagcgttatccggatttactgggcgtaaagggtgcgtaggcggtctttcaagtcaggagttaaaggctacggctcaaccgtagtaagctcctgatactgtctgacttgagtgcaggagaggaaagcggaattcccagtgtagcggtgaaatgcgtagatattgggaggaacaccagtagcgaaggcggctttctggactgtaactgacgctgaggcacgaaagcgtggggagcaaacaggattagataccctggtagtccacgctgtaaacgatgagtactaggtgtcggaggttacccccttcggtgccgcagctaacgcattaagtactccgcctggggagtacgcacgcaagtgtgaaactcagaggaattgacgggggcccgcacaagcagtggattatgtggtttaattcgacgcaacgcgaagaaccttaccaggatttgacatcctactaacgaagcagagatgcattaggtgcccttcggggaaagtagagacaggtggtgcatggttgtcgtcagctcgtgtcgtgagatgttgggttaagtcccgcaacgagcgcaacccctattgttagttgctaccattaagttgagcactctagcgagactgcccgggttaaccgggaggaaggtggggatgacgtcaaatcatcatgccccttatgtctagggctacacacgtgctacaatgggtggtacagagggcagccaagccgtgaggtggagcaaatctcaaaaaccggtcccagttcggactgcaggctgcaacccgcctgcacgaagccggagttgctagtaatcgcggatcagaatgccgcggtgaatgcgttcccgggtcttgcacacaccgcccgtca

SEQ ID NO: 1840 - DNA, 1438 bp, Artificial Sequence
  Synthetic polymer
gacgaacgctggcggcgtgcttaacacatgcaagtcgagcgagagagttttcttcggaaaacaatctagcggcggacgggtgagtaacacgtgggtaacctgcctcatagagggggatagcctcccgaaagggagattaataccgcataacatcattttagcgcatgctgaaatgatcaaaggagtaatccgctatgagatggacccgcggcgcattagctagttggtgaggtaacggctcaccaaggccacgatgcgtagccgacctgagagggtgatcggccacattgggactgagacacggcccagactcctacgggaggcagcagtggggaatattgcacaatgggggaaaccctgatgcagcaacgccgcgtgagtgatgacggccttcgggttgtaaagctctgtctttagggacgataatgacggtacctaaggaggaagccacggctaactacgtgccagcagccgcggtaatacgtaggtggcaagcgttgtccggatttactgggcgtaaagggagcgtaggtggattcttaagtgagatgtgaaatacccgggcttaacttgggtgctgcatttcaaactgggaatctagagtgcaggagaggaaagtggaattcctagtgtagcggtgaaatgcgtagagattaggaagaacaccagtggcgaaggcgactttctggactgtaactgacactgaggctcgaaagcgtggggagcaaacaggattagataccctggtagtccacgccgtaaacgatggatactaggtgtgggaggtatcaactccttccgtgccgccgttaacacattaagtatcccgcctggggagtacggtcgcaagattaaaactcaaaggaattgacggggacccgcacaagcagcggagcatgtggtttaattcgaagcaacgcgaagaaccttacctagacttgacatctcctgaattactcttaatcgaggaagtcccttcggggacaggaagacaggtggtgcatggttgtcgtcagctcgtgtcgtgagatgttgggttaagtcccgcaacgagcgcaacccttattgttagttgctaccatttagttgagcactctagcgagactgcccgggttaaccgggaggaaggtggggatgacgtcaaatcatcatgccccttatgtctagggctacacacgtgctacaatggctggtacaaagagaagcaagaccgtgaggtggagcaaaactcaaaaaccagtcccagttcggattgtaggctgaaactcgcctacatgaagccggagttgctagtaatcgcgaatcagcatgtcgcggtgaatacgttcccgggtcttgtacacaccgcccgtcacaccatgagagttggcaatacccgaagtctgtgagctaacctgtaaagggggcagcggccgaaggtagggtcagcgattggggt

SEQ ID NO: 1841 - DNA, 1375 bp, Artificial Sequence
  Synthetic polymer
agagtttgatcctggctcaggacgaacgctggcggcgtgcctaacacatgcaagtcgagcgagttgattctcttcggagatgaagctagcggcggacgggtgagtaacacgtgggcaacctgcctcatagaggggaatagcctcccgaaagggagattaataccgcataagattgtagcttcgcatgaagtagcaattaaaggagtaatccgctatgagatgggcccgcggcgcattagctagttggtgaggtaacggctcaccaaggcgacgatgcgtagccgacctgagagggtgatcggccacattgggactgagacacggcccagactcctacgggaggcagcagtggggaatattgcacaatgggggaaaccctgatgcagcaacgccgcgtgagtgatgacggccttcgggttgtaaagctctgtcttcagggacgataatgacggtacctgaggaggaagccacggctaactacgtgccagcagccgcggtaatacgtaggtggcgagcgttgtccggatttactgggcgtaaagggagcgtaggcggacttttaagtgagatgtgaaatacccgggctcaacttgggtgctgcatttcaaactggaagtctagagtgcaggagaggagaatggaattcctagtgtagcggtgaaatgcgtagagattaggaagaacaccagtggcgaaggcgattctctggactgtaactgacgctgaggctcgaaagcgtggggagcaaacaggattagataccctggtagtccacgccgtaaacgatgagtactaggtgtcgggggttaccccctctcggtgccgcagctaacgcattaagtactccgcctggggagtacgctcgcaagagtgaaactcaaaggaattgacggggacccgcacaagtagcggagcatgtggtttaattcgaagcaacgcgaagaaccttacctaagcttgacatccttttgaccgatgcctaatcgcatttttcccttcggggacagaagtgacaggtggtgcatggttgtcgtcagctcgtgtcgtgagatgttgggttaagtcccgcaacgagcgcaacccttattgttagttgccatcattaagttgggcactctagcgagactgcccgggttaaccgggaggaaggtggggatgacgtcaaatcatcatgccccttatgtctagggctacacacgtgctacaatggtcggtacaataagacgcaagcccgcgagggggagcaaaactggaaaaccgatctcagttcggattgtaggctgaaactcgcctacatgaagctggagttgctagtaatcgcgaatcagcatgtcgcggtgaatacgttcccgggtcttgtactcaccgcccgtca

SEQ ID NO: 1842 - DNA, 1389 bp, Artificial Sequence; identical to SEQ ID NO: 391
  Synthetic polymer

SEQ ID NO: 1843 - DNA, 1368 bp, Artificial Sequence
  Synthetic polymer
ttagagtttgatcctggctcaggatgaacgctggcggcgtgcctaacacatgcaagtcgagcgatcttcttcggaagagagcggcggacgggtgagtaacgcgtgggtaacctgcctcatacacatggataacataccgaaaggtatgctaatacaagatgatataagagattcgcatggatttcttatcaaagctccggcggtatgagatggacccgcgtctgattagctagttggtaaggtaatggcttaccaaggcgacgatcagtagccgacctgagagggtgatcggccacattggaactgagacacggtccaaactcctacgggaggcagcagtggggaatattgcacaatgggcgaaagcctgatgcagcaacgccgcgtgagtgatgaaggccttcgggtcgtaaagctctgtcctcaaggaagataatgacggtacttgaggaggaagccccggctaactacgtgccagcagccgcggtaatacgtagggggctagcgtcatccggaattactgggcgtaaagggtgcgtaggtggtttcttaagtcagaggtgaaaggctacggctcaaccgtagtaagcctttgaaactgggaaacttgagtgcaggagaggagagtggaattcctagtgtagcggtgaaatgcgtagatattaggaggaacaccaggtgcgaaaggcggctctctgggactgtaactgaacactgaggcacgaaagcgtggggagcaaaacaggattagataccctggtagtccacgccgtaaacgatgagtactagctgtcggaggttacccccttcggtggcgcagctaacgcattaagtactccgcctgggaagtacgctcgcaagagtgaaactcaaaggaattgacggggacccgcacaagtagcggagcatgtggtttaattcgaagcaacgcgaagaaccttacctaagcttgacatccttttgaccgatgcctaatcgcatctttcccttcggggacagaagtgacaggtggtgcatggttgtcgtcagctcgtgtcgtgagatgttgggttaagtcccgcaacgagcgcaacccttgcctttagttgccagcattaagttgggcactctagagggactgccagggataacctggaggaaggtggggatgacgtcaaatcatcatgccccttatgacttgggctacacacgtgctacaatggcgtaaacaaagtgaagcgaagtcgtgaggccaagcaaatcacaaaaataacgtctcagttcggattgtagtctgcaactcgactacatgaagctggaatcgctagtaatcgcagatcagaatgctgcggtgaatacgttcccgggtcttgtacacaccgcccgtca

SEQ ID NO: 1844 - DNA, 1381 bp, Artificial Sequence; identical to SEQ ID NO: 589
  Synthetic polymer

SEQ ID NO: 1845 - DNA, 1392 bp, Artificial Sequence; identical to SEQ ID NO: 722
  Synthetic polymer

SEQ ID NO: 1846 - DNA, 1378 bp, Artificial Sequence
  Synthetic polymer
ttagagtttgatcctggctcaggacgaacgctggcggcgtgcctaacacatgcaagtcgagcgaatgaagttccttcgggagtggatttagcggcggacgggtgagtaacacgtgggcaacctgcctcatagaggggaatagccttccgaaagggagattaataccgcataagattgtagtaccgcatggtacagcaattaaaggagcaatccgctatgagatgggcccgcggcgcattagctagttggtgaggtaacggctcaccaaggcgacgatgcgtagccgacctgagagggtgatcggccacattgggactgagacacggcccagactcctacgggaggcagcagtggggaatattgcacaatgggggaaaccctgatgcagcaacgccgcgtgagtgatgacggccttcgggttgtaaagctctgtcttcagggacgataatgacggtacctgaggaggaagccacggctaactacgtgccagcagccgcggtaatacgtaggtggcgagcgttgtccggatttactgggcgtaaagggagcgtaggcggatttttaagtgagatgtgaaatactcgggcttaacctgagtgctgcatttcaaactggaagtctagagtgcaggagaggagaagggaattcctagtgtagcggtgaaatgcgtagagattaggaagaacaccagtggcgaaggcgcttctctggactgtaactgacgctgaggctcgaaagcgtggggagcaaacaggattagataccctggtagtccacgccgtaaacgatgaatactaggtgtaggggttgtcatgacctctgtgccgccgctaacgcattaagtattccgcctggggagtacggtcgcaagattaaaactcaaaggaattgacgggggcccgcacaagcagcggagcatgtggtttaattcgaagcaacgcgaagaaccttacctagacttgacatctcctgcattactcttaatcgaggaagtcccttcggggacaggatgacaggtggtgcatggttgtcgtcagctcgtgtcgtgagatgttgggttaagtcccgcaacgagcgcaacccttgctgatagttactaacgcgtagaggcgaggactctatcgggaccgccggggacaactcggaggaaggtggggacgacgtcaaatcatcatgccccttatgacctgggctacacacgtgctacaatggccgagacagagaggagcgaaggcgcgagccggagcggatctcaaaaaggcggccacagttcggattgtgggctgcagcccgcccacatgaagccggagttgctagtaatcgcgaatcagcatgtcgcggtgaatacgttcccgggccttgtacacaccgcccgtca

SEQ ID NO: 1847 - DNA, 1461 bp, Artificial Sequence
  Synthetic polymer
ctggctcaggacgaacgctggcggcgtgcctaacacatgcaagtcgagcgatgaaacccttcggggtggattagcggcggacgggtgagtaacacgtgggtaacctgcctcaaagagggggatagcctcccgaaagggagattaataccgcataacattagtttttcgcatggagaactaattaaaggagtaatccgctttgagatggacccgcggcgcattagctagttggtgaggtaaaggctcaccaaggcgacgatgcgtagccgacctgagagggtgatcggccacattggaactgagacacggtccagactcctacgggaggcagcagtggggaatattgcacaatgggcgaaagcctgatgcagcaacgccgcgtgagtgatgaaggccttcgggttgtaaagctctgtcttttgggacgataatgacggtaccaaaggaggaagccacggctaactacgtgccagcagccgcggtaatacgtaggtggcgagcgttgtccggatttactgggcgtaaaggatgcgtaggcggatttttaagtgagatgtgaaatacccgggcttaacttgggtgctgcatttcaaactggaagtctagagtgcgggagaggagagtggaattcctagtgtagcggtgaaatgcgtagagattaggaagaacaccagtggcgaaggcgactctctggaccgtaactgacgctgaggcatgaaagcgtgggtagcaaacaggattagataccctggtagtccacgccgtaaacaatgagtactaggtgtaggaggtatcgaccccttctgtgccgcagttaacacaataagtactccgcctgggaagtacgatcgcaagattaaaactcaaaggaattgacgggggcccgcacaagcagcggagcatgtggtttaattcgaagcaacgcgaagaaccttacctagacttgacatctttgtgaattactcgtaatggaggaagcccttcggggcaggaagacaggtggtgcatggttgtcgtcagctcgtgtcgtgagatgttaggttaagtcctgcaacgagcgcaacccttatcattgagttgctaccagtaagttgagcactctagtgagactgcccgggttaacccgggaggaaggtggggatgacgtcaaatcatcatgccccttatgtctagggctacacacgtgctacaatgggtaatacaaagagaagcaatacagtgatgtggagcaaaactataaaattaccctcagttcggaatgtaagctgaaactcgcctacatgaactggagttgctataatcgcgaatcagcctgtcgcgtgaatacgttcccgggccttgtacacaccgcccgtcacaccatgagagctggcaacacccgaagtccgtgaggtaaccgtaaggagccagcggccgaaggtggggtaagtgattgggggtgaagtcgcaacacggtagccg

SEQ ID NO: 1848 - DNA, 1385 bp, Artificial Sequence; identical to SEQ ID NO: 861
  Synthetic polymer

SEQ ID NO: 1849 - DNA, 1345 bp, Artificial Sequence
  Synthetic polymer
agagtttgatcctggctcaggacgaacgctggcggcgtgcctaacacatgcaagtcgagcgatgaagtttccttcggggaacggattagcggcggacgggtgagtaacacgtgggtaacctgccttgtagagggggatagccttccgaaaggaagattaataccgcataagattgtagtttcgcatgaaacagcaattaaaggagcaatccgctacaagatggacccgcggcgcattagctagttggtgaggtaacggctcaccaaggcgacgatgcgtagccgacctgagagggtgatcggccacattgggactgagacacggcccagactcctacgggaggcagcagtggggaatattgcacaatgggggaaaccctgatgcagcaacgccgcgtgagtgatgacggtcttcggattgtaaagctctgtctttggggacgataatgacggtacccaaggaggaagccacggctaactacgtgccagcagccgcggtaatacgtaggtggcgagcgttgtccggatttactgggcgtaaagggagcgtaggcggattcttaagtgggatgtgaaatacccgggctcaacctgggtgctgcattccaaactgggaatctagagtgcaggaggggagagtggaattcctagtgtagcggtgaaatgcgtagagattaggaagaacaccagtggcgaaggcgactctctggactgtaactgacgctgaggctcgaaagcgtggggagcaaacaggattagataccctggtagtccacgccgtaaacaatgaatactaggtgtagggggttcaacaccccctgtgccgcagctaacgcattcactacccccccctgggggtaccgcacgcaagtgtgaaactcaaaggaattgacggggacccgcacaagtagcggagcatgtggtttaattcgaagcaacgagaagaaccttacctaggcttgacatccttctgaccgaggactaatctcctctttccctccggggacagaagtgacaggtggtgcatggttgtcgtcagctcgtgtcgtgagatgttgggttaagtcccgcaacgagcgcaacccttgtctttagttgccatcatttagttgggcactctggagagactgccagggataacctggaggaaggtggggatgacgtcaaatcatcatgccccttatgcctagggctacacacgtgctacaatgggtggtacagagggcagctaagccgtgaggtggagcaaatcccttaaagccattctcagttcggattgtaggctgaaactcgcctacatgaagctggagttactagtaatcgcagatcagaatgctgcggtgaat

SEQ ID NO: 1850 - DNA, 1361 bp, Artificial Sequence
  Synthetic polymer
agagtttgatcctggctcaggatgaacgctggcggcgtgcctaacacatgcaagtcgagcgatcttcttcggaagagagcggcggacgggtgagtaacgcgtgggtaacctgcctcatacacatggataacataccgaaaggtatgctaatacaagatgatataagagattcgcatggatttcttatcaaagctccggcggtatgagatggacccgcgtctgattagctagttggtaaggtaacggcttaccaaggcgacgatcagtagccgacctgagagggtgatcggccacattggaactgagacacggtccaaactcctacgggaggcagcagtggggaatattgcacaatgggcgaaagcctgatgcagcaacgccgcgtgagcgatgaaggccttcgggtcgtaaagctctgtcctcaaggaagataatgacggtacttgaggaggaagccccggctaactacgtgccagcagccgcggtaatacgtagggggctagcgttatccggatttactgggcgtaaagggtgcgtaggtggtttcttaagtcaggagtgaaaggctacggctcaaccgtagtaagctcttgaaactgggaaacttgagtgcaggagaggaaagtggaattcctagtgtagcggtgaaatgcgtagatattaggaggaacaccagtagcgaaggcggctttctggactgtaactgacactgaggcacgagagcgtggggagcaaacaggattagataccctggtagtccacgccgtaaacgatgagtaataggtgtcgggggttacccccctcggtgccgtagctaacgcattaagtactccgcctggggagtacgctcgcaagagtgaaactcaaaggaattgacggggacccgcacaagtagcggagcatgtggtttaattcgaagcaacgcgaagaaccttacctaagcttgacatccttttgaccgatgcctaatcgcatctttcccttcggggacagaagtgacaggtggtgcatggttgtcgtcagctcgtgtcgtgagatgttgggttaagtcccgcaacgagcgcaacccctattgttagttgctaccatttagttgagcactctagcgagactgcccgggttaaccgggaggaaggtggggaggacgtcaaatcatcatgccccctatgtctagggctacacacgtgccacaatggctggtacagagagatgctaaaccgtgaggtggaggtaaactttaaagccagtctcagttcggattgtaggctgaaactcgcctacatgaagctggagttgctagtaatcgcgaatcagaatgtcgcggtgaataagatcccgggccttgcacacaccgcccgtca

SEQ ID NO: 1851 - DNA, 1430 bp, Artificial Sequence; identical to SEQ ID NO: 964
  Synthetic polymer

SEQ ID NO: 1852 - DNA, 1361 bp, Artificial Sequence
  Synthetic polymer
agagtttgatcctggctcaggatgaacgctggcggcgtgcctaacacatgcaagtcgagcgattctcttcggagaagagcggcggacgggtgagtaacgcgtgggtaacctgccctgtacacacggataacataccgaaaggtatgctaatacgagataatatgcttttatcgcatggtagaagtatcaaagcttttgcggtacaggatggacccgcgtctgattagctagttggtaaggtaacggcttaccaaggcgacgatcagtagccgacctgagagggtgatcggccacattggaactgagacacggtccaaactcctacgggaggcagcagtggggagtattgcacaatgggcgaaagcctgatgcagcaacgccgcgtgagcgatgaaggccttcgggtcgtaaagctctgtcctcaaggaagattatgacggtacttgaggaggaagccccggctaactacgtgccagcagccgcggtaatacgtagggggctagcgttatccggaattactgggcgtaaagggtgcgtaggtggtttcttaagtcagaggtgaaaggctacggctcaaccgtagtaagcctttgaaactgggaaacttgagtgcaggagaggagagtggaattcctagtgtagcggtgaaatgcgtagatattaggaggaacaccagttgcgaaggcggctctctggactgtaactgacactgaggcacgaaagcgtggggagcaaacaggattagataccctggtagtccacgccgtaaacgatgagtactagctgtcggaggttacccccttcggtggcgcagctaacgcattaagtactccgcctgggaagtacgctcgcaagagtgaaactcaaaggaattgacgggggcccgcacaagcggtggagcatgtggtttaattcgaagcaacgcgaagaaccttaccaagtcttgacatccttctgaccgttccttagccggaacttctcttcggagcagaagtgacaggtggtgcatggttgtcgtcagctcgtgtcgtgagatgttgggttaagtcccgcaacgagcgcaacccttatccttagtagccagcggttcggccgggcactctggggagactgccggagataatccggaggaaggtggggatgacgtcaaatcatcatgccccttatgacttgggctacacacgtgctacaatggcggtaacaaagggaagcagcctcgcgagagtgagcaaaccccaaaaatgccgtctcagttcggattgtagtctgcaactcgactacatgaagctggaatcgctagtaatcgcagatcagaatgctgcggtgaatacgttcccgggtcttgcacacaccgcccgtca

SEQ ID NO: 1853 - DNA, 1377 bp, Artificial Sequence
  Synthetic polymer
agagtttgatcctggctcaggacgaacgctggcggcgtgcctaacacatgcaagtcgagcggagacagtgagtagcttgctatgagctgttttagcggcggacgggtgagtaacgcgtgagcaacctttcccagacaggggaataacacaccgaaaggtgtactaataccgcataagaccacgggatcacatggttctggggtaaaagaattatcggtttggggtgggctcgcgtccgattaggtagttggtgaggtaacggcccaccaagccgacgatcggtagccgacctgagagggtgatcggccacattgggactgagacacggcccagactcctacgggaggcagcagtggggaatattgcacaatgggggaaaccctgatgcagcaatgccgcgtgagtgatgacggccttcgggctgtaaagctctgtcttcagggacgataatgacggtacctgaggaggaagccacggctaactacgtgccagcagccgcggtaatacgtaggtggcaagcgttgtccggatttactgggcgtaaagggagcgtaggcggatttttaagtgagatgtgaaatacccgggcttaacttgggtgctgcatttcaaactggaagtctagagtgcaggagaggaggagggaattcctagtgtagcggtgaaatgcgtagagattaggaagaacaccagtggcgaaggcgcttctctggactgtaactgacgctgaggctcgaaagcgtggggagcaaacaggattagataccctggtagtccacgccgtaaacgatgaatactaggtgtaggggttgtcatgacctctgtgccgccgctaacgcattaagtattccgcctggggagtacggtcgcaagattaaaactcaaaggaattgacgggggcccgcacaagcagcggagcatgtggtttaattcgaagcaacgcgaagaaccttacctagacttgacatctcctgcattacccttaatcggggaagtcgcttcggcgacaggaagacaggtggtgcatggttgtcgtcagctcgtgtcgtgagatgttgggttaagtcccgcaacgagcgcaacccttattgttagttgctaccatttagttgagcactctagcgagactgcccgggttaaccgggaggaaggtggggatgacgtcaaatcatcatgccccttatgtctagggctacacacgtgctacaatggcaagtacaaagagaagcaagaccgcgaggtggagcaagactcaaaaacttgtctcagttcggattgtaggctgaaactcgcctacatgaagctggagttgctagtaatcgcgaatcagcatgtcgcggtgaatacgttcccgggccttgcactcaccgcccgtca

SEQ ID NO: 1854 - DNA, 1379 bp, Artificial Sequence; identical to SEQ ID NO: 93
  Synthetic polymer

SEQ ID NO: 1855 - DNA, 1499 bp, Artificial Sequence; identical to SEQ ID NO: 1063
  Synthetic polymer

SEQ ID NO: 1856 - DNA, 1405 bp, Artificial Sequence; identical to SEQ ID NO: 84
  Synthetic polymer

SEQ ID NO: 1857 - DNA, 1356 bp, Artificial Sequence
  Synthetic polymer
agagtttgatcctggctcaggatgaacgctggcggcgtgcctaacacatgcaagtcgagcgaaccctttggggtgagcggtggacgggtgagtaacgcgtgggtaacctgccctatacatacggataacgtaccgaaaggtacactgataccagataacatatttttatcgcatggtataaatatcatagtctccggcggtatatgatggacccgcgtcagattatctagttggtaaggtaatggcttaccaaggcgacgatcagtagccgacctgagagggtgatcggccacattgaaactgagacacggtccaaactcctacgggaggcagcagtggggaatattgcacaatgggcgaaagcctgatgcagcaacgccgcgtgagcgatgaaggccttcgggtcgtaaagctctgtcctcaaggaagataatgacggtacttgaggaggaagccccggctaactacgtgccagcagccgcggtaatacgtagggggctagcgttatccggaattactgggcgtaaagggtgcgtaggtggtttcttaagtcagaggtgaaaggctacggttcaaccgtagtaagcctttgaaactgagaaacttgagtgcaggagaggagagtagaattcctagtgtagcggtgaaatgcgtagatattaggaggaataccagttgcgaaggcggctctctggactgtaactgacactgaggcacgaaagcgtggggagcaaacaggaatagactccctggtagtccacaccgtaaacgatgagtaccagccgggcggaggttaccccctgcggtggcgcacctaactcattaactaatccacctgggggagtacgaccgcgaggttgaaactcaaaggaatggacgggggcccgcacaagcactggagtatgtggtttaattagaagcaacgcgaagacccttgccaggtcttgacatgggatgcatagtgcagagttgcatgaagtccttcgggacatcccgacaggtggtgcatggttgtcgtcagctcgtgtggtgagatgttgggttaagtcccgcaaggagcgcaacccttatgcttagttagtacgcaagaggactttaagcagactgccctgacaaaacggaggaaggtggggatagacgtcaaatcctcctgccccttatgacctgggccacccccgtagttccatgggtattaacaaagagaagcgaagtcgcgaggcagagcaaacctcataaaaatagtctcagttcggatcgcaggctgcaacccgcctgcgtgaagccggaattgctagtaatcgcggatcagcatgccgcggtgaatacgttcccgggccttgcacacaccgcccgtca

SEQ ID NO: 1858 - DNA, 1440 bp, Artificial Sequence
  Synthetic polymer
ggcgtgcttaacacatgcaagtcgagcgaggaaattgcttcggtaatttcctagcggcggacgggtgagtaacacgtgggcaacctgcctgatagagggggatagcctcccgaaagggagattaataccgcataaagtcaaatgaaggcatcttcaaatgaccaaaggagtaatccgctatcagatgggcccgcggcgcattagctagttggtgaggtaacggctcaccaaggcgacgatgcgtagccgacctgagagggtgatcggccacattgggactgagacacggcccagactcctacgggaggcagcagtggggaatattgcacaatgggggaaaccctgatgcagcaacgccgcgtgagtgatgaaggccttcgggttgtaaagctctgtcttcagggacgataatgacggtacctgaggaggaagccacggctaactacgtgccagcagccgcggtaatacgtaggtggcaagcgttgtccggatttactgggcgtaaagggagcgtaggcggatacttaagtgggatgtgaaatacctgggcttaacttgggtgctgcattccaaactgggtgtctagagtgttggagaggaaagtggaattcctagtgtagcggtgaaatgcgtagagattaggaagaacaccagtggcgaaggcgactttctggacaataactgacgctgaggctcgaaagcgtggggagcaaacaggattagataccctggtagtccacgccgtaaacgatgggtactaggtgtagggggtatcgactccccctgtgccgcccttaaacccataagtaccccgcctgggggagtacggtcgcaagatttaaaactcaaaaggaaatgagcggggccccgcacaagccgcgggggcatgtggtttaattcgaaagcaacgcgaagacccttacctagactggacatctcttgaattattcttaatcgagggaagttctcccttcggggaggacaggaagacaggtggtgcatggttgtcgtcagctcgtgtcgtgagatgttgggttaagtcccgcaacgagcgcaacccttattgttagttgctaccatttagttgagcactctagcaagactgccgtggttaacgcggaggaaggtggggatgacgtcaaatcatcatgccccttatgtctagggctacacacgtgctacaatggcgagtacaaagagacgcaaagccgcgaggtggagcaaaacttataaaactcgtctcagttcggattgcaggctgaaactcgcctgcatgaagctggagttgctagtaatcgcgaatcagaatgtcgcggtgaatacgttcccgggccttgtacacaccgcccgtcacaccatgagagttggcaatacccgaagtccgtagcctaaccttttaggagagcgcggccgaaggtagggtcagcgattggggtgaag

SEQ ID NO: 1859 - DNA, 1434 bp, Artificial Sequence
  Synthetic polymer
tgcttaacacatgcaagtcgagcgatgaagctccttcgggagtggattagcggcggacgggtgagtaacacgtgggtaacctgcctcatagaggggaatagcctttcgaaaggaagattaataccgcatatggtagctttatcgcatggtactgctattaaaggagtaatccgctatgagatggacccgcgtcgcattagctagttggtgaggtaacggctcaccaaggcgacgatgcgtagccgacctgagagggtgatcggccacattgggactgagacacggcccagactcctacgggaggcagcagtggggaatattgcacaatgggggaaaccctgatgcagcaacgccgcgtgagtgatgacggccttcggattgtaaaactctgtctttggggacgataatgacggtacctaaggaggaagccacggctaactacgtgccagcagccgcggtaatacgtaggtggcaagcgttgtccggatttactgggcgtaaagggagcgtaggtggatatttaagtgggatgtgaaatactcgggcttaacctgggtgctgcattccaaactggatatctagagtgcaggagaggaaaggagaattcctagtgtagcggtgaaatgcgtagagattaggaagaataccagtggcgaaggcgcctttctggactgtaactgacactgaggctcgaaagcgtggggagcaaacaggattagataccctggtagtccacgccgtaaacgatgaatactaggtgtaggggttgtcatgacctctgtgccgccgctaacgcattaagtattccgcctggggagtacggtcgcaagattaaaactcaaaggaattgacgggggcccgcacaagcagcggagcatgtggtttaattcgaagcaacgcgaagaaccttacctagacttgacatctcctgaattactctgtaatggaggaagccacttcggtggcaggaagacaggtggtgcatggttgtcgtcagctcgtgtcgtgagatgttgggttaagtcccgcaacgagcgcaacccttattgttagttgctaccatttagttgagcactctagcgagactgcccgggttaaccgggaggaaggtggggatgacgtcaaatcatcatgccccttatgtctagggctacacacgtgctacaatggtcggtacaatgagatgcaacctcgcgagagtgagcaaaactataaaaccgatctcagttcggattgtaggctgaaactcgcctacatgaagctggagttgctagtaatcgcgaatcagaatgtcgcggtgaatacgttcccgggccttgtacacaccgcccgtcacaccatgagagttggcaatacccaaagttcgtgagctaaccgcaaggaggcagcgacctaaggtagggtcagcgattggggtgaagtcgtaacaaggta

SEQ ID NO: 1860 - DNA, 1372 bp, Artificial Sequence; identical to SEQ ID NO: 613
  Synthetic polymer

SEQ ID NO: 1861 - DNA, 1377 bp, Artificial Sequence
  Synthetic polymer
ttagagtttgatcctggctcaggacgaacgctggcggcgtgcctaacacatgcaagtcgaacggagttaatgatttcggttattaacttagtggcgaacgggtgagtaacgcgtgagcaacctgaccctttgaggggggataacagttggaaacaattgctaataccgcataagaccacgctctcgcatgggagagaggtcaaaggagcaatccgcagagggaggggctcgcgtcccattaggtagttggtgaggtaacggcccaccaagccaacgatgggtagccgagctgagagggtgatcggccacattgggactgagacacggcccagactcctacgggaggcagcagtggggaatattgcacaatgggggaaaccctgatgcagcaacgccgcgtgagtgatgacggtcttcggattgtaaagctctgtcttcagggacgataatgacggtacctgaggaggaagccacggctaactacgtgccagcagccgcggtaatacgtaggtggcaagcgttgtccggatttactgggcgtaaagggagcgtaggcggacttttaagtgggatgtgaaatacccgggcttaacctgggtgctgcattccaaactgggagtctagagtgcaggaggggaaagtggaattcctagtgtagcggtgaaatgcgtagagattaggaagaacaccggtggcgaaggcgactttctggactgtaactgacgctgaggctcgaaagcgtggggagcgaacaggattagataccctggtagtccacgccgtaaacgatgaatactaggtgtaggggttgtcatgacctctgtgccgccgctaacgcattaagtattccgcctggggagtacggtcgcaagattaaaactcaaaggaattgacgggggcccgcacaagcagcggagcatgtggtttaattcgaagcaacgcgaagaaccttacctagacttgacatctcctgaattactctgtaatggaggaagccgcttcggtggcaggaagacaggtggtgcatggttgtcgtcagctcgtgtcgtgagatgttgggttaagtcccgcaacgagcgcaacccttattgttagttgctaccatttagttgagcactctagcgagactgcccgggttaaccgggaggaaggtggggatgacgtcaaatcatcatgccccttatgtctagggctacacacgtgctacaatggccggtacaattagaagctaagccgcgaggtggagcaaaactgtaaaaccggtctcagttcggattgtaggctgaaactcgcctacatgaagctggagttgctagtaatcgcgaatcagcatgtcgcggtgaatacgttcccgggccttgcactcaccgcccgtca

SEQ ID NO: 1862 - DNA, 1373 bp, Artificial Sequence; identical to SEQ ID NO: 647
  Synthetic polymer

SEQ ID NO: 1863 - DNA, 1364 bp, Artificial Sequence; identical to SEQ ID NO: 353
  Synthetic polymer

SEQ ID NO: 1864 - DNA, 1362 bp, Artificial Sequence; identical to SEQ ID NO: 735
  Synthetic polymer

SEQ ID NO: 1865 - DNA, 1499 bp, Artificial Sequence
  Synthetic polymer
tgagagtttgatcctggctcaggatgaacgctggcggcgtgcttaatacatgcaagtcgagcgaagcgctttaacggaattcttcggaaggaagataaagtgactgagcggcggacgggtgagtaacgcgtgggtaacctgccttatacagggggataacagttagaaatagctgctaataccgcataagcgcacagtaccgcatggtacagtgtgaaaaactccggtggtatgagatggacccgcgtctgattagctagttggtgaggtaacggctcaccaaggcgacgatcagtagccgacctgagagggtgatcggccacattgggactgagacacggcccaaactcctacgggaggcagcagtggggaatattgcacaatgggggaaaccctgatgcagcaacgccgcgtgagtgaagaagtatttcggtatgtaaagctctatcagcagggaagaaaatgacggtacctgactaagaagccccggctaactacgtgccagcagccgcggtaatacgtaggtggcgagcgttgtccggatttactgggcgtaaagggagcgtaggcggattcttaagtgggatgtgaaatactcgggcttaacctgagtgctgcattccaaactgggaatctagagtgcaggaggggagagtggaattcctagtgtagcggtgaaatgcgtagagattaggaagaacaccagtggcgaaggcgactctctggactgtaactgacgctgaggctcgaaagcgtggggagcaaacaggattagataccctggtagtccacgccgtaaacgatgaatactaggtgtaggggtttcaacacctctgtgccgccgctaacgcattaagtattccgcctggggagtacggtcgcaagattaaaactcaaaggaattgacgggggcccgcacaagtagcggagcatgtggtttaattcgaagcaacgcgaagaaccttacctagacttgacatcttctgcattacccttaatcggggaagttccttcgggaacagaatgacaggtggtgcatggttgtcgtcagctcgtgtcgtgagatgttgggttaagtcccgcaacgagcgcaacccccgccgtatgttgccatcgggtaatgccgggcactcgtacgggaccgccggagccaatccggaggaaggcggggacgacgtcaagtcatcatgcccctcatgccctgggctgcacacgtgctacaatggccggtacaacgggccgccacgccgcgaggcggagcgaatccctcaaagccggccccagttcggatcgcaggctgcaacccgcctgcgtgaagccggagttgctagtaatcgcggatcagcatgccgcggtgaatacgttcccgggccttgtacacaccgcccgtcacaccacccgagtcgtctgcacccgaagccgccggccgaacccgaaaggggcggaggcgtcgaaggtgtggagggtgaggggggtgaagtcgtaacaaggtagccgta

SEQ ID NO: 1866 - DNA, 1373 bp, Artificial Sequence; identical to SEQ ID NO: 996
  Synthetic polymer

SEQ ID NO: 1867 - DNA, 1384 bp, Artificial Sequence
  Synthetic polymer
ctggcggcgtgcttaacacatgcaagtcgagcgatgaagttyccttcgggraacggattagcggcggacgggtgagtaacacgtgggtaacctgcctcatagagagggatagccttccgaaaggragattaatacctcataacatcattctttcgcatgttagaatgatcaaaggagcaatccgctatgagatggacccgcggcgcattagctagttggtggggtaacggcctaccaaggcgacgatgcgtagccgacctgagagggtgatcggccacattgggactgagacacggcccagactcctacgggaggcagcagtggggaatattgcacaatgggggaaaccctgatgcagcaacgccgcgtgagtgatgacggccttcgggttgtaaagctctgtttccagggacgataatgacggtacctggggaggaagccacggctaactacgtgccagcagccgcggtaatacgtaggtggcaagcgttgtccggatttactgggcgtaaagggagcgtaggcggatttttaagtgggatgtgaaatccccgggctcaacccgggggctgcattccaaactggaaatctagagtgtcggagaggaaagcagaattcctagtgtagcggtgaaatgcgtagagattaggaagaataccagtggcgaaggcggctttctggacgataactgacgctgaggctcgaaagcgtggggagcaaacaggattagataccctggtagtccacgccgtaaacgatggatactaggtgtaggagggtccaaccttctgtgccgccgcaaacgcattaagtatcccgcctggggagtacggtcgcaagattaaaactcaaaggaattgacgggggcccgcacaagtagcggagcatgtggtttaattcgaagcaacgcgaagaaccttacctagacttgacatattctgcattactcttaatcgaggaagtcccttcggggacagaaatacaggtggtgcatggttgtcgtcagctcgtgtcgtgagatgttgggttaagtcccgcaacgagcgcaacccctattgttagttgctaccattaagttgagcactctagcgagactgcctgggttaaccaggaggaaggtggggatgacgtcaaatcatcatgccccttatgtctagggctacacacgtgctacaatggcaagtacagaaagatgcgaactcgtgagggtgagctaaactcaaaaacttgtctcagttcggattgtaggctgaaactcgcctacatgaagctggagttactagtaatcgcgaatcagaatgtcgcggtgaatacgttcccgggccttgtacacaccgcccgtcacaccatgagagttggcaatacccgaagtccgtgagctaac

SEQ ID NO: 1868 - DNA, 1352 bp, Artificial Sequence
  Synthetic polymer
agagtttgatcctggctcaggatgaacgctggcggcgcgcctaacacatgcaagtcgaacggcacccaccctcgggtggaagcgagtggcgaacggctgagtaacacgtggagaacccgccccctcctccgggatagcctcgggaaaccgtgggtaataccggatgaccccgcagggccgcatggccccgcgggcaaagcccagacgggaggggatggctccgcggcccatcaggtagacggcggggtgacggcccaccgtgccgacgacgggtagccggactgagaggtcgatcggccacattgggactgagacacggcccagactcctacgggaggcagcagtggggaatattgcacaatgggcgcaagcctgatgcagcaacgccgcgtgagcgatgaaggccttcgggtcgtaaagctctgtcctcaaggaagataatgacggtacttgaggaggaagccccggctaactacgtgccagcagccgcggtaatacgtagggggctagcgttatccggatttactgggcgtaaagggtgcgtaggcggtctttcaagtcaggagttaaaggctacggctcaaccgtagtaagctcctgatactgtctgacttgagtgcaggagaggaaagcggaattcccagtgtagcggtgaaatgcgtagatattgggaggaacaccagtagcgaaggcggctttctggactgtaactgacgctgaggcacgaaagcgtggggagcaaacaggattagataccctggtagtccacgccgtaaacgatgaatactaggtgtcggggtgcaaagcagttcggtgccgcagcaaacgcaataagtattccacctggggagtacgttcgcaagaatgaaactcaaaggaattgacggggacccgcacaagtagcggagcatgtggtttaattcgaagcaacgcgaagaaccttacctaggcttgacatccttctgaccgaggactaatctcctctttccctccggggacagaagtgacaggtggtgcatggttgtcgtcagctcgtgtcgtgagatgttgggttaagtcccgcaacgagcgcaacccttgtctttagttgccatcattaagttgggcactctagagagactgccagggataacctggaggaaggtggggatgacgtcaaatcatcatgccccttatgcctagggctacacacgtgctacaatgggtggtacagagggcagccaaaccgtgaggtggagcaaatcccttaaagccattctcagttcggattgtaggctgaaactcgcctacatgaagctggagttactagtaatcgcaaatcagcaatgttgcggtgaatacgttctcgggtc

SEQ ID NO: 1869 - DNA, 1379 bp, Artificial Sequence
  Synthetic polymer
ttcgcccttagagtttgatcctggctcaggacgaacgctggcggcgtgcctaacacatgcaagtcgagcgagtggagttcttcggaacaaagctagcggcggacgggtgagtaacacgtgggcaacctgcctcatagaggggaatagcctcccgaaagggagattaataccgcataagattgtagcttcgcatgaagtagcaattaaaggagcaatccgctatgagatgggcccgcggcgcattagctagttggtgaggtaacggctcaccaaggcgacgatgcgtagccgacctgagagggtgatcggccacattgggactgagacacggcccagactcctacgggaggcagcagtggggaatattgcacaatgggggaaaccctgatgcagcaacgccgcgtgagtgatgacggccttcgggttgtaaagctctgtcttcagggacgataatgacggtacctgaggaggaagccacggctaactacgtgccagcagccgcggtaatacgtaggtcccgagcgttgtccggatttattgggcgtaaagcgagcgaaggcggtttaataagtctgaagttaaaggcagtggcttaaccattgttcgctttggaaactgttaaacttgagtgcagaaggggagagtggaattccatgtgtagcggtgaaatgcgtagagattaggaagaacaccagtggcgaaggcgattctctggactgtaactgacgctgaggctcgaaagcgtggggagcaaacaggattagataccctggtagtccacgccgtaaacgatgaatactaggtgtaggggttgtcatgacctctgtgccgccgctaacgcattaagtattccgcctggggagtacggtcgcaagattaaaactcaaaggaattgacgggggcccgcacaagcagcggagcatgtggtttaattcgaagcaacgcgaagaaccttacctagacttgacatctcctgaattacccttaatcggggaagttccttcgggaacaggaagacaggtggtgcatggttgtcgtcagctcgtgtcgtgagatgttgggttaagtcccgcaacgagcgcaacccttattgttagttgctaccatttagttgagcactctagcgagactgcccgggttaaccgggaggaaggtggggatgacgtcaaatcatcatgccccttatgtctagggctacacacgtgctacaatggcaagtacaaagagaagcaagaccgcgaggtggagcaaaactcaaaaacttgtctcagttcggattgtaggctgaaactcgcctacatgaagctggagttgctagtaatcgcgaatcagcatgtcgcggtgaatacgttcccgggccttgcacacaccgcccgtca

SEQ ID NO: 1870 - DNA, 1454 bp, Artificial Sequence; identical to SEQ ID NO: 1034
  Synthetic polymer

SEQ ID NO: 1871 - DNA, 1349 bp, Artificial Sequence; identical to SEQ ID NO: 721
  Synthetic polymer

SEQ ID NO: 1872 - DNA, 1419 bp, Artificial Sequence
  Synthetic polymer
ggcgtgcttaacacatgcaagtcgagcgatgaagtttttttcgggaaacggattagcggcggacgggtgagtaacacgtgggtaacctgcctcatagagtggaatagccttccgaaaggaagattaataccgtataatgttgaaagatggcatcatcattcaaccaaaggagcaatccgctatgagatggacccgcggcgcattagctagttggtggggtaacggcctaccaaggcgacgatgcgtagccgacctgagagggtgatcggccacattgggactgagacacggcccagactcctacgggaggcagcagtggggaatattgcacaatgggggaaaccctgatgcagcaacgccgcgtgagtgatgaaggttttcggatcgtaaagctctgtctttggggaagataatgacggtacccaaggaggaagccacggctaactacgcgccagcagccgcggtaatacgtaggtggcgagcgttatccggatttactgggcgtaaagggagcgtaggcggatgattaagtgggatgtgaaatacccgggctcaacttgggtgctgcattccaaactggttatctagagtgcaggagaggagagtggaattcctagtgtagcggtgaaatgcgtagatattaggaggaacaccagtggcgaaggcggcttactggacagtaactgacgttgaggctcgaaagcgtggggagcaaacaggattagataccctggtagtccacgccgtaaacgatgaatactaggtgttggtgggcaaagcccatcggtgccgccgcaaacgcaataagtattccacctggggagtacgttcgcaagaatgaaactcaaaggaattgacggggacccgcacaagcggtggagcatgtggtttaattcgaagcaacgcgaagaaccttaccaagtcttgacatcggaatgaccgggaagtaatgttcccttctctacggagcattccagacaggtggtgcatggttgtcgtcagctcgtgtcgtgagatgttgggttaagtcccgcaacgagcgcaacccttatccttagtagccagcagtaagatgggcactctagggagactgccagggataacctggaggaaggtggggatgacgtcaaatcatcatgccccttatgatttgggctacacacgtgctacaatggcgtaaacaaagagaggcgagcctgcgagggggagcgaatctcaaaaataacgtcccagttcggactgtagtctgcaacccgactacacgaagctggaatcgctagtaatcgcgaatcagaatgtcgcggtgaatacgttcccgggtcttgtacacaccgcccgtcacaccatgggagtcagcaacgcccgaagtcagtgactcaaccgaaaggagagagctgccgaaggcggggcaggtaactg

SEQ ID NO: 1873 - DNA, 1369 bp, Artificial Sequence
  Synthetic polymer
agaggttgatcctggctcaagatgaacgctggcggcgtgcctaacacatgccagtcaagcgattctcttccgagaacagcggcggacgggtgagtaacgcgtgggtaacctgccctgtactcacggataacatacccaaaggtaggctaatacgggataatatataaagggcgcatgacttttatatcaaagatttttcggtacaggatggacccgcgtctgattagcttgttggcggggtaacggcccaccaaggcgacgatcagtagccgacctgagagggtgatcggccacattgtgaactgagacacggtccaaactcctacgggaggcagcagtggggaatattgcccaatgggcgcaagcctgatgcagcaacgccgcgtgagcgatgaaggctttcgggtggtaaagttctgtcctcaaggaagataatgacggtacttgaggaggaagccccggctaactacgtgccagcagccgcggtaatacgtagggggctagcgtctatccggatttactgggcgtaaagggtgggtaggcggtctttcaattcaggagttaaaggctacggttcacccgtagtaagctcctgatactgtctgacttgagtgcaggagaggaaagcggaattcccagtgtagcggtgaaatgcgtagatattgggaggaacaccagtagcgaaggcggctttctggactgtaactgacgctgaggctcgaaagcgtggggagcaaacaggattagataccctggtagtccacgccgtaaacgatgaatactaggtgtcggggagcaaagcttttcgttgctgccgcaaaatcagtatgtagtcttcctggggagtatgttcgcgagagtgaaaatctaaggaattgacggggacccgcacaagaggtgcagcatgtggtttaattttagacaacgcgaagagcctttccatcgtctttacatccgtcttaagtgcacgtaacggtgccgttcttttgggacagcggagacacggggtgcatgggggtgttgagctcttgtgttgtgatattgggttaagtctcccactgagcgcgacccctatccccagtatcggtcattttagatggcccctttgaggagatcgcccgggattacctggaggaaggcgggggtgatgtccaatcatccagccccttatgtgtttgggctacacacgtggcacacattgcgtaaataatagggaagcgaacctgcgagggtgggcaaatccctaaaaataccgtcccagttcgggttgcagtctgcaactcgcctacacgaagctggaattgctagtaatcgcggatcagaatgccgcggtgaatacgctcccgggtcttgcacacaccgcccgtca

SEQ ID NO: 1874 - DNA, 1347 bp, Artificial Sequence
  Synthetic polymer
agagtttgatcctggctcaggatgaacgctggcggcgtgcctaacacatgcaagtcgagcgaacccttcggggtgagcggcggacgggtgagtaacgcgtgggtaacctgccctatacacacggataacgtaccgaaaggtacgctaatacgagataatatatttttatcgcatggtagaaatatcaaagctccggcggtataggatggacccgcgtctgattagctagttggtaaggtaatggcttaccaaggcgacgatcagtagccgacctgagagggtgatcggccacattggaactgagacacggtccaaactcctacgggaggcagcagtggggaatattgcacaatgggcgaaagcctgatgcagcaacgccgcgtgagcgatgaaggccttcgggtcgtaaagctctgtcctcaaggaagataatgacggtacttgaggaggaagccccggctaactacgtgccagcagccgcggtaatacgtagggggctagcgttatccggaattactgggcgtaaagggtgcgtaggtggtttcttaagtcagaggtgaaaggctacggctcaaccgtagtaagcctttgaaactgagaaacttgagtgcaggagaggagagtggaattcccagtgtagcggtgaaatgcgtagagattgggaggaacaccagtggcgaaggcggcctactgggctttaactgacgctgaggctcgaaagcgtgggtagcaaacaggattaggtaccctggtagtccatgctgtaaacgatgattactaggtgtgggccgaaaggtccgtgccgcagttaacacaataagtaatccacctggggagtacggccgcaaggctgaaactcaaaggaattgacgggggcccgcacaagcagtggagtatgtggtttaattcgaagcaacgcgaagaaccttaccaggtcttgacatcgagtgaataactaagagattagttagtccttcgggacacgaagacaggtggtgcatggttgtcgtcagctcgtgtcgtgagatgttgggttaagtcccgcaacgagcgcaacccttatcattagttgctacgcaagagcactctagtgagactgccgttgacaaaacggaggaaggtggggatgacgtcaaatcatcatgccccttatgacctgggctacacacgtactacaatggcaataaacagagggcggcaatacagcgatgtaaagcgaaaccctaaaaattgtctcagttcggattgcaggctgcaactcgcctgcatgaagtcggaattgctagtaatcgcagatcagcatgctgcggtgaatacgttcccgggccttgcacacaccgcccgtca

SEQ ID NO: 1875 - DNA, 1440 bp, Artificial Sequence
  Synthetic polymer
agagtttgatcatggctcaggacgaacgctggcggcgtgcttaacacatgcaagtcgagcgaacaaagctccttcgggagtggagttagcggcggacgggtgagtaacacgtgggtaacctgccttatagagggggatagccttccgaaaggaagattaataccgcataagaagtagaagtcgcatggctttagctttaaaggagcaatccgctataagatggacccgcggcgcattagctagttggtgaggtaacggctcaccaaggcgacgatgcgtagccgacctgagagggtgatcggccacattggaactgagacacggtccagactcctacgggaggcagcagtggggaatattgcacaatgggcgaaagcctgatgcagcaacgccgcgtgggtgatgaaggttttcggattcgtaaagtcctgtcttttgggacgataatgacggtaccaaaggaggaagccaggatgataagtgccagcaaccgcggtaatacgtaggtggcaagcgttgtccggatttactgggcgtaaagggagcgtaggcggacctttaagtgagatgtgaaatacccgagctcaacttgggtgctgcatttcaaactggaggtctagagtgtcggagaggtaagtggaattcctagtgtagcggtgaaatgcgtagagattaggaagaaccccggtggcgaaggcgacttactggacgataactgacgctgaggctcgaaagcgtggggagcaaacaggattagataccctggtagtccacgccgtaaacgatgaatactaggtgtgggggttgtcatgacctcacgtgccgtcgcaaacgcattaagtattccgcctggggagtacggtcgcaagattaaaactcaaaggaattgacgggggcccgcacaagcagcggagcatgtggtttaattcgaagcaacgcgaagaaccttacctagacttgacatctcctgaattactcttaatcgaggaagtcccttcggggacaggaagacaggtggtgcatggttgtcgtcagctcgtgtcgtgagatgttgggttaagtcccgcaacgagcgcaacccttattgttagttgctaccattaagttgagcactctagcaagactgccgtggttaacgcggaggaaggtggggatgacgtcaaatcatcatgccccttatgtctagggctacacacgtgctacaatggtgagtacaaagagacgcaaaaccgtgaggtggagcaaaactcaaaaactcatcccagttcggattgtaggctgcaactcgcctacatgaagttggagttgctagtaatcgcgaatcagaatgtcgcggtgaatacgttcccgggccttgtacacaccgcccgtcacaccatgagagctggtaacacccgaagtccgtgaggtaaccgtcaaggagccagcggccgaaggtgg

SEQ ID NO: 1876 - DNA, 1382 bp, Artificial Sequence
  Synthetic polymer
ttcgcccttagagtttgatcctggctcaggacgaacgctggcggcgtgcctaacacatgcaagtcgagcgagtggagttcttcggaacaaagctagcggcggacgggtgagtaacacgtgggcaacctgcctcatagaggggaatagcctcccgaaagggagattaataccgcataagattgtagcttcgcatgaagtagcaattaaaggagcaatccgctatgagatgggcccgcggcgcattagctagttggtgaggtaacggctcaccaaggcgacgatgcgtagccgacctgagagggtgatcggccacattgggactgagacacggcccagactcctacgggaggcagcagtggggaatattgcacaatgggggaaaccctgatgcagcaacgccgcgtgagtgatgacggccttcgggttgtaaagctctgtcttcagggacgataatgacggtacctgaggaggaagccacggctaactacgtgccagcagccgcggtaatacgtaggtggcgagcgttgtccggatttactgggcgtaaagggagcgtaggcggacttttaagtgagatgtgaaatacccgggctcaacttgggtgctgcatttcaaactggaagtctagagtgcaggagaggagaatggaattcctagtgtagcggtgaaatgcgtagagattaggaagaacaccagtggcgaaggcgattctctggactgtaactgacgctgaggctcgaaagcgtggggagcaaacaggattagatacccctgggaatccccgccgtaacgatgaatactaggtgtagggggtgttcatgacttctgtgccgcggctaagccattaagtattccgcttggggagtacggtggcaggattaaaattcaaaggaattgacgggggcccgcccaagcagcggggcatgtggtttatttggaagcaacgggaagacccttccttagacttgccttttctgccattccccttattcggggaggttctttcggggccaggaagacaggtggtgcatggttttgttcagttggtttggtgagatgttgggttaattcccgcaaggggggcaccccttttttttagttgttcccatttagttgaccattctagggagactcccggggttacccgggaggaagggggggaggaggtcaattcttcttcccctttatttttggggttccccacgtgttccaatggcaagtccaaggatgaagcaagaccgggaggcggagcaatattcaaaaacttgtctcagttcggattgtaggctgaaactcgcctacatgaagttggagttgctagtaatcgcgaatcagcatgtcgcggtgaatacgttcccgggccttgcacacaccgcccgtca

SEQ ID NO: 1877 - DNA, 1356 bp, Artificial Sequence
  Synthetic polymer
tttgatcctggctcaggatgaaccctggcggcgtgcctaacacatgcaagtcgagcgatcttcttcggaagagagcggcggacgggtgagtaacgcgtgggtaacctgcctcatacacatggataacataccgaaaggtatgctaatacaagatgatataagagattcgcatggatttcttatcaaagctccggcggtatgagatggacccgcgtctgattagctagttggtaaggtaacggcttaccaaggcgacgatcagtagccgacctgagagggtgatcggccacattggaactgagacacggtccaaactcctacgggaggcagcagtggggaatattgcacaatgggcgaaagcctgatgcagcaacgccgcgtgagcgatgaaggccttcgggtcgtaaagctctgtcctcaaggaagataatgacggtacttgaggaggaagccccggctaactacgtgccagcagccgcggtaatacgtagggggctagcgttatccggatttactgggcgtaaagggtgcgtaggtggtttcttaagtcaggagtgaaaggctacggctcaaccgtagtaagctcttgaaactgggaaacttgagtgcaggagaggaaagtggaattcctagtgtagcggtgaaatgcgtagatattaggaggaacaccagtagcgaaggcggctttctggactgtaactgacactgaggcacgaaagcgtggggagcaaacaggattagataccctggtagtccacgccgtaaacgatgagtactaggtgtcgggggttacccccctcggtgccgcagctaacgcattaagtactccgcctggggagtacggtcgcaagattaaaactcaaaggaattgacgggggcccgcacaagcagcggagcatgtggtttaattcgaagcaacgcgaagaaccttacctagacttgacatctcctgcattactcttaatcgaggaagtcccttcggggacaggatgacaggtggtgcatggttgtcgtcagctcgtgtcgtgagatgttgggttaagtcccgcaacgagcgcaacccttattgttagttgccatcattaagttgggcactctagcgagactgcccgggttaaccgggaggaaggtggggatgacgtcaaatcatcatgccccttatgtctagggctacacacgtgctacaatggtcggtacaacgggcagcaaaggagcaatccggagcaaatcctacaaaatcggtcccggttcggattgtgggctgaaattcgcccacatgaagtcggagttgctagtaatcgtgaatcagaatgtcgcggtgaatgcgttcccgggtcttgtactcaccgcccgtca

SEQ ID NO: 1878 - DNA, 1360 bp, Artificial Sequence
  Synthetic polymer
agagtttgatcctggctcaggatgaacgctggcggcgtgcctaacacatgcaagtcgagcgattctcttcggagaagagcggcggacgggtgagtaacgcgtgggtaacctgccctgtacacacggataacataccgaaaggtatgctaatacgggataatatataagagtcgcatgacttttatatcaaagatttttcggtacaggatggacccgcgtctgattagcttgttggcggggtaacggcccaccaaggcgacgatcagtagccgacctgagagggtgatcggccacattggaactgagacacggtccaaactcctacgggaggcagcagtggggaatattgcacaatgggcgcaagcctgatgcagcaacgccgcgtgagcgatgaaggccttcgggtcgtaaagctctgtcctcaaggaagataatgacggtacttgaggaggaagccccggctaactacgtgccagcagccgcggtaatacgtagggggctagcgttatccggatttactgggcgtaaagggtgcgtaggcggtctttcaagtcaggagttaaaggctacggctcaaccgtagtaagctcctgatactgtctgacttgagtgcaggagaggaaagcggaattcccagtgtagcggtgaaatgcgtagatattgggaggaacaccagtagcgaaggcggctttctggactgtaactgacgctgaggcacgaaagcgtggggagcaaacaggattagataccctggtagtccacgctgtaaacgatgagtactaggtgtcggaggttacccccttcggtgccgcagcaaacgcaataagtattccacctggggagtacgttcgcaagaatgaaactcaaaggaattgacggggacccgcacaagcggtggagcatgtggtttaattcgaagcaacgcgaagaaccttaccaagtcttgacatcctctcgaccaactatgtaatgtagtctctcttcggagcgggagtgacaggtggtgcatggttgtcgtcagctcgtgtcgtgagatgttgggttaagtcccgcaacgagcgcaacccttatccttagtagccagcagtaagatgggcactctagggagactgccagggataacctggaggaaggtggggatgacgtcaaatcatcatgccccttatgacttgggctacacacgtgctacaatggcgtaaacaaagggaagcgaaagtgtgagctggagcaaatcccaaaaataacgtctcagttcggattgtagtctgcaactcgactacatgaagctggaatcgctagtaatcgcgaatcagaatgtcgcggtgaatacgttcccgggtcttgtacacaccgcccgtca

SEQ ID NO: 1879 - DNA, 1374 bp, Artificial Sequence
  Synthetic polymer
agagtttgatcctggctcaggatgaacgctggcggcgtgcttaacacatgcaagtcgagcgatgaagtttccttcgggaaatggattagcggcggacgggtgagtaacacgtgggtaacctgcctcatagagtggaatagccttccgaaaggaagattaataccgcataatgttgaaagatggcatcatcattcaaccaaaggagtaatccgctatgagatggacccgcggcgcattagctagttggtggggtaacggctcaccaaggcgacgatgcgtagccgacctgagagggtgatcggccacattgggactgagacacggcccagactcctacgggaggcagcagtggggaatattgcacaatgggggaaaccctgatgcagcaacgccgcgtgagtgatgacggccttcgggttgtaaagctctgtcttcagggacgataatgacggtacctgaggaggaagccacggctaactacgtgccagcagccgcggtaatacgtaggtggcgagcgttgtccggatttactgggcgtaaagggagcgtaggcggacttttaagtgagatgtgaaatacccgggctcaacttgggtgctgcatttcaaactggaagtctagagtgcaggagaggagaatggaattcctagtgtagcggtgaaatgcgtagagattaggaagaacaccagtggcgaaggcgattctctggactgtaactgacgctgaggctcgaaagcgtggggagcaaacaggattagataccctggtagtccacgccgtaaacgatgaatactaggtgtaggggttgtcatgacctctgtgccgccgctaacgcattaagtattccgcctggggagtacggtcgcaagattaaaactcaaaggaattgacgggggcccgcacaagcagcggagcatgtggtttaattcgaagcaacgcgaagaaccttacctagactcgacatctcctgcattacccttaatcggggaagttccttcggagacaaggtgacaggtggtgcatggttgtcgtcagctcgtgtcgtgagatgttgggttaagtcccgcaacgagcgcaacccctattgttagttgctaccattaagttgagcactctagcgagactgcctgggttaaccaggaggaaggtggggatgacgtcaaatcatcatgccccttatgtgtagggctacacacgtgctacaatggcaagtacagagagacgcaaaaccgtgaggtcgagcaaatcccttaaaacttgtcccagttcggattgtaggctgaaactcgcctacatgaagccggagttgctagtaatcgcgaatcagaatgtcgcggtgaatacgttcccgggtcttgcacacacaacccgtca

SEQ ID NO: 1880 - DNA, 1359 bp, Artificial Sequence
  Synthetic polymer
ttcgcccttagagtttgatcctggctcaggatgaacgctggcggcgtgcttaacacatgcaagtcgagcgagaaaagttcttcggagcttttctagcggcggacgggtgagtaacacgtgggcaacctgcctcatagaggggaatagccttccgaaaggaagattaataccgcataatattgttgaaaggcatcttttaacaatcaaaggagcaatccgctatgagatgggcccgcggcgcattagctagttggtgaggtaacggctcaccaaggcgacgatgcgtagccgacctgagagggtgatcggccacattggaactgagacacggtccagactcctacgggaggcagcagtggggaatattgcacaatgggggaaaccctgatgcagcaacgccgcgtgagtgatgaaggtcttcggattgtaaagctctgtctttagggacgataatgacggtacctaaggaggaagccacggctaactacgtgccagcagccgcggtaatacgtaggtggcaagcgttatccggatttactgggcgtaaagggagcgtaggcggatatttaagtgggatgtgaaatacccgagcttaacttgggagctgcattccaaactggatatctagagtgcaggagaggagaatggaattcctagtgtagcggtgaaatgcgtagagattaggaagaacaccagtggcgaaggcggctttctggactgaaactgacgctgaggctcgaaagcgtggggagcgaacaggattagataccctggtagtccacgccgtaaacgatgagtgctaggtgtcggggagaaatcctcggtgccgcagttaacacaataagcactccacctggggagtacgaccgcaaggttgaaactcaaaggaattgacgggggcccgcacaagcggtggagcatgtggtttaattcgaagcaacgcgaagaaccttaccaaggtttgacatccctctgacgtatatagagatatatattttcttcggaacagaggagacaggtggtgcatggttgtcgtcagctcgtgtcgtgagatgttgggttaagtcccgcaacgagcgcaacccttatcattagtagccagcacgtagaggtgggcactctaatgagactgccgtggataacacggaggaaggtggggatgacgtcaaatcatcatgccccttatatcttgggctacacacgtgctacaatggccggtacaaagagaagcgagaccgcgaggtggagcaaaactcataaaaccggtcccagttcggattgtagtctgcaactcgactacatgaagctggaatcgctagtaatcgaagatcagaatgctgcggtgaatacgttcccggg

SEQ ID NO: 1881 - DNA, 1376 bp, Artificial Sequence; identical to SEQ ID NO: 225
  Synthetic polymer

SEQ ID NO: 1882 - DNA, 1328 bp, Artificial Sequence
  Synthetic polymer
agcggcggacgggtgagtaacgcgtgggtaacctgccctgtacacacggataacataccgaaaggtatgctaatacgggataacataagaaattcgcatgtttttcttatcaaagctccggcggtacaggatggacccgcgtctgattagctagttggtgaggtaacggctcaccaaggcgacgatcagtagccgacctgagagggtgatcggccacgttggaactgagacacggtccaaactcccacgggaggcagcagtggggaatattgcacaatgggcgaaagcctgatgcagcaacgccgcgtgagcgatgaaggccttcgggtcgtaaagctctgtcctcaaggaagataatgacggtacttgaggaggaagccccggctaactacgtgccagcagccgcggtaatacgtagggggctagcgttatccggatttactgggcgtaaagggtgcgtaggcggtcttttaagtcaggagtgaaaggctacggctcaaccgtagtaagctcttgaaactggaggacttgagtgcaggagaggagagtggaattcctagtgtagcggtgaaatgcgtagatattaggaggaacaccagtggcgaaggcggctcactggactgtaactgacactgaggctcgaaagcgtggggagcaaacaggattagataccctggtagtccacgccgtaaacgatgaatactaggtgtcggggcccataagggcttcggtgccgcagcaaacgcaataagtattccacctggggagtacgttcgcaagaatgaaactcaaaggaattgacgggggcccgcacaagcggtggagtatgtggtttaattcgacgcaacgcgaagaaccttaccaggtcttgacattgatggacaggtccagagatggactctcttcttcggaagccagaaaacaggtggtgcacggttgtcgtcagctcgtgtcgtgagatgttgggttaagtcccgcaacgagcgcaacccctatcttatgttaccagcacttcgggtggggactcatgagagactgccgcagacaatgcggaggaaggcggggatgacgtcaaatcatcatgccccttatgacctgggctacacacgtactacaatggacgataacagagggaagcgaagccgcgaggtgaagcgaaccccagaaactcgttctcagttcggattgcaggctgcaactcgcctgcgtgaagtcggaatcgctagtaatcgcaggtcagcatactgcggtgaatacgttcccgggccttgtacacaccgcccgtcacaccacgaaagtcggaagtgcccaaagccggtggggtaacc

SEQ ID NO: 1883 - DNA, 1465 bp, Artificial Sequence
  Synthetic polymer
cgaacgctggcggcgtgcctaacacatgcaagtcgagcgatgaagtttccttcgggaaayggattagcggcggacgggtgagtaacacgtgggtaacctgccttatagtgggggatagcctttcgaaaggaagattaataccgcataagattgtagtatcgcatgatatagcaattaaaggagcaatycgctataagatggacccgcgtcgcattagctagttggtgaggtaatggctcaccaaggcgacgatgcgtagccgacctgagagggtgatcggccacattgggactgagacacggcccagactcctacgggaggcagcagtggggaatattgcacaatgggcgaaagcctgatgcagcaacgccgcgtgagtgatgacggccttcgggttgtaaaactctgtcttcagggacgataatgacggtacctgaggaggaagccacggctaactacgtgccagcagccgcggtaatacgtaggtggcaagcgttgtccggatttactgggcgtaaagggagcgtaggcggatgtttaagtgggatgtgaaatactcgggctcaacttgagtgctgcattccaaactggatatctagagtgcaggagaggaaaggagaattcctagtgtagcggtgaaatgcgtagagattaggaagaataccagtggcgaaggcgcctttctggactgtaactgacgctgaggctcgaaagcgtggggagcaaacaggattagataccctggtagtccacgccgtaaacgatgaatactaggtgtaggggttgtcatgacctctgtgccgccgctaacgcattaagtattccgcctggggagtacggtcgcaagattaaaactcaaaggaattgacgggggcccgcacaagcagcggagcatgtggtttaattcgaagcaacgcgaagaaccttacctagacttgacatctcctgaattactctgtaatggaggaagctcttcggagcaggaagacaggtggtgcatggttgtcgtcagctcgtgtcgtgagatgttgggttaagtcccgcaacgagcgcaacccttattgttagttgctaccatttagttgagcactctagcgagactgcccgggttaaccgggaggaaggtggggatgacgtcaaatcatcatgccccttatgtctagggctacacacgtgctacaatggccggtacagtaagatgcaataccgtgaggtggagcaaaactcaaaaaccggtctcagttcggattgtaggctgaaactcgcctacatgaagctggagttgctagtaatcgcgaatcagaatgtcgcggtgaatacgttcccgggccttgtacacaccgcccgtcacaccatgagagttggcaatacccaaagttcgtgagctaacgcgtaagcgaggcagcgacctaaggtagggtcagcgattggggtgaagtcgtaacaaggtagccgtaggagaacc

SEQ ID NO: 1884 - DNA, 1483 bp, Artificial Sequence
  Synthetic polymer
catggctcaggatgaacgctggcggcgtgcttaacacatgcaagttgaacgaaactttcagaaacagattcttcggatgacgattctgaaacgtttagtggcggatgggcgagtaacacgtgaggaacctacctttcacaggggaataacactgggaaaccagtgctaataccgcataatgtattaaagtggcatcacattaataccaaagattttatcggtgaaagatggcctcgcgcctgattagctagtaggtgaggtaacggctcacctaggtgatgatcagtagccggactgagaggttgatcggccgcattgggactgagacacggcccagactcctacgggaggcagcagtggggaatattgggcaatgggcgcaagcctgacccagcaacgccgcgtgaaggaagacggtcttcggattgtaaacttctttagacagggacgaaacaaatgacggtacctgtagaataagccacggctaactacgtgccagcagccgcggtaatacgtaggtggcgagcgttatccggaattactgggtgtaaagggcgtgtaggcggcactgtaagtcagatgtgaaatctcccggctcaaccgggagcgtgcatctgatactgtaatgcttgagtgatagaggggaaagcggaattcctagtgtagcggtaaaatgcgtagatattaggaggaacaccagtggcgaaggcggctttctggctattaactgacgctgaggcgcgaaagcgtggggagcaaacaggattagataccctggtagtccacgccgtaaacgatgaatgctagatgtgggaggtatcgaccccttccgtgtcgcagctaacgcaataagcattccacctggggagtacggccgcaaggctgaaactcaaaggaattgacggggacccgcacaagcagtggagtatgtggtttaattcgaggctacgcgaagaaccttaccaaggcttgacatcttctgacagctctagagatagagttttcctacgggacagaatgacaggtggtgcatggctgtcgtcagctcgtgtcgtgagatgttcggttaagtccggcaacgagcgcaacccctacggtatattgccatcattcagttgggcacttttactggactgccgttaacaaaacggaggaaggtggggacgacgtcaagtcatcatgccccttatgtcttgggctacacacgtactacaatggtaatgacagagggcagcgacatagcgatatgaagcgaatcccaaaacgttatctcagttcggattggaggctgcaactcgcctccatgaagccggaattgctagtaatggcaggtcagcatactgccgtgaatacgttctcgggtcttgtacacaccgcccgtcacaccatgagagtttgtaacacccgaagctggtagtctaactacggaggacgctatcgaaggtgggacaaataattggggtgaagtcgtaacagggtaacc

SEQ ID NO: 1885 - DNA, 1374 bp, Artificial Sequence
  Synthetic polymer
agagtttgatcctggctcaggacgaacgctggcggcgtgcctaacacatgcaagtcgagcgagtgaatctccttcgggagtgaagctagcggcggacgggtgagtaacacgtgggcaacctgcctcatagaggggaatagccttccgaaaggaagattaataccgcataagattgtagcttcgcatgaagtagcaattaaaggagtaatccgctatgagatgggcccgcggcgcattagctagttggtgaggtaacggctcaccaaggcgacgatgcgtagccgacctgagagggtgatcggccacattgggactgagacacggcccagactcctacgggaggcagcagtggggaatattgcacaatgggggaaaccctgatgcagcaacgccgcgtgagtgatgacggccttcgggttgtaaagctctgtcttcagggacgataatgacggtacctgaggaggaagccacggctaactacgtgccagcagccgcggtaatacgtaggtggcgagcgttgtccggatttactgggcgtaaagggagcgtaggcggacttttaagtgagatgtgaaatacccgggctcaacttgggtgctgcatttcaaactggaggtctagagtgcaggagaggagaatggaattcctagtgtagcggtgaaatgcgtagagattaggaagaacaccagtggcgaaggcgattctctggactgtaactgtcgctgaggctcgaaagcgtggggagcaaacaggattagataccctggtagtccacgccgtaaacgatgaatactaggtgtaggggttgtcatgacctctgtgccgccgctaacgcattaagtattccgcctggggagtacggtcgcaagattaaaactcaaaggaattgacgggggcccgcacaagcagcggagcatgtggtttaattcgaagcaacgcgaagaaccttacctagacttgacatctcctgcattacccttaatcggggaagttccttcgggaacaggaagacaggtggtgcatggttgtcgtcagctcgtgtcgtgagatgttgggttaagtccggcaacgagcgcaacccctattattagttgccaatattaagttaggaactctaataagactgccgtggataacacggaggaaggtggggatgacgtcaaatcatcatgccccttacgtcttgggccacacacgtgctacaatgggcgctacagagagcagcgaaatcgcaaggtggagcaaatctcaaaaaagcgttctcagttcggattgtgggctgcaacccgcccacatgaagtcggagttgctagtaatcccgaatcagaatgtcggggtgaacgcgttcccgggtcttgcacacaccgcccgtca

SEQ ID NO: 1886 - DNA, 1370 bp, Artificial Sequence; identical to SEQ ID NO: 159
  Synthetic polymer

SEQ ID NO: 1887 - DNA, 1385 bp, Artificial Sequence; identical to SEQ ID NO: 738
  Synthetic polymer

SEQ ID NO: 1888 - DNA, 1371 bp, Artificial Sequence; identical to SEQ ID NO: 625
  Synthetic polymer

SEQ ID NO: 1889 - DNA, 1395 bp, Artificial Sequence
  Synthetic polymer
ggcggcgtgcctaacacatgcaagacgagcgatctcttcggagagagcggcggacgggtgagtaacgcgtgggtaacctgccctgtacacacggataacataccgaaaggtatactaatacgggataacatatgaaagtcgcatggcttttgtatcaaagctccggcggtacaggatggacccgcgtctgattagctagttggtaaggtaatggcttaccaaggcaacgatcagtagccgacctgagagggtgatcggccacactggaactgagacacggtccagactcctacgggaggcagcagtggggaatattgcacaatgggcgaaagcctgatgcagcaacgccgcgtgagcgatgaaggccttcgggtcgtaaagctctgtcctcaaggaagataatgacggtacttgaggaggaagccccggctaactacgtgccagcagccgcggtaatacgtagggggctagcgttatccggatttactgggcgtaaagggagcgtaggcggatgattaagtgggatgtgaaatacccgggctcaacttgggtgctgcattccaaactagttatctagagtgcaggagaggagagtggaattcctagtgtagcggtgaaatgcgtagagattaggaagaacaccagtggcgaaggcgactctctggactgtaactgacgctgaggctcgaaagcgtggggagcaaacaggattagataccctggtagtccacgccgtaaacgatgaatactaggtgtgggggtttcaacacctccgtgccgccgctaacgcattaagtattccgcctggggagtacggtcgcaagattaaaactcaaaggaattgacggggacccgcacaagtagcggagcatgtggtttaattcgaagcaacgcgaagaaccttacctaagcttgacatcccattgacctctccctaatcggagatttcccttcggggacagtggtgacaggtggtgcatggttgtcgtcagctcgtgtcgtgagatgttgggttaagtcccgcaacgagcgcaacccttgcctttagttgccagcattaagttgggcactctagagggactgccgaggataactcggaggaaggtggggatgacgtcaaatcatcatgccccttatgcttagggctacacacgtgctacaatgggtggtacagagggttgccaagccgtgaggtggagctaatcccttaaagccattctcagttcggattgtaggctgaaactcgcctacatgaagctggagttactagtaatcgcagatcagaatgctgcggtgaatgcgttcccgggtcttgtacacaccgcccgtcacaccatgggagttgggggcgcccgaagccggttagctaaccttttaggaagcggccgtcgaagg

SEQ ID NO: 1890 - DNA, 1372 bp, Artificial Sequence
  Synthetic polymer
agagtttgatcctggctcaggacgaacgctggcggcatgcctaacacatgcaagtcgagcgagctgatcccttcggggtgaagctagcggcggacgggtgagtaacacgtgggcaacctgcctcatagaggggaatagcctcccgaaagggagattaataccgcataagattgtagcttcgcatgaagtagcaattaaaggagcaatccgctatgagatgggcccgcggcgcattagctagttggtgaggtaacggctcaccaaggcgacgatgcgtagccgacctgagagggtgatcggccacattgggactgagacacggcccagactcctacgggaggcagcagtggggaatattgcacaatgggggaaaccctgatgcagcaatgccgcgtgagtgatgacggccttcgggttgtaaagctctgtcttcagggacgataatgacggtacctgaggaggaagccacggctaactacgtgccagcagccgcggtaatacgtaggtggcgagcgttgtccggatttactgggcgtaaagggagcgtaggcggacttttaagtgagatgtgaaatacccgggctcaacttgggtgctgcatttcaaactggaagtctagagtgcaggagaggagaatggaattccaggtgtagcggtgaaatgcgtagagatctggaggaataccggtggcgaaggcggccccctggacaaagactgacgctcaggtgcgaaagcgtggggagcaaacaggattagataccctggtagtccacgccgtaaacgatgaatactaggtgtagggggtgtcaactccccctgtgccgccgctaacgcattaagtattccgcctggggagtacggtcgcaagattaaaactcaaaggaattgacgggggcccgcacaagtagcggagcatgtggtttaattcgacgcaacgcgaagaaccttacctagacttgacatcttctgcattacccttaatcggggaagttccttcgggaacagaatgacaggtggtgcatggttgtcgtcagctcgtgtcgtgagatgttgggttaagtcccgcaacgagcgcaacccttattgttagttgctaccatttagttgagcactctagcgagactgcccgggttaaccgggaggaaggtggggatgacgtcaaatcatcatgccccttatgtctagggctacacacgtgctacaatggccggtacagaaagacgcgataccgcgaggtggagcaaaactttaaaaccggtctcagttcggattgtaggctgaaactcgcctacatgaagctggagttactagtaatcgcgaatcagcatgtcgcggtgaatacgttcccgggccttgcactcaccgcccgtca

SEQ ID NO: 1891 - DNA, 1396 bp, Artificial Sequence
  Synthetic polymer
ttcgcccttagagtttgatcctggctcaggatgaacgctggcggcgtgcttaacacatgcaagtcgagcgaagcactttgattgatccttcgggtgatttcactgtgactgagcggcggacgggtgagtaacgcgtgggtaacctgcctcatacagggggataacagctggaaacggctgctaataccgcttaagcgcacagtaccgcatggtacagtgtgaaaaactccggtggtatgagatggacccgcggcgcattagctagttggtgaggtaacggctcaccaaggcgacgatgcgtagccgacctgagagggtgatcggccacattgggactgagacacggcccagactcctacgggaggcagcagtggggaatattgcacaatgggggaaaccctgatgcagcaacgccacgtgagtgatgacggtcttcggattgtaaagctctgtctttggggacgataatgacggtacccaaggaggaagccacggctaactacgtgccagcagccgcggtaatacgttggtggcgagcgttgtccggatttactgggcgtaaagggagcgtaggcggattcttaagtgggatgtgaaatacccgggcttaacctgggtgctgcattccaaactgggaatctagagcgcaggaggggagagtggaattcctagtgtagcggtgaaatgcgtagagattaggaagaacaccagtggcgaaggcgactctctggactgtaactgacgctgaggctcgaaagcgtggggagcaaacaggattagataccctggtagtccacgccgtaaacgatggatactaggtgtgggaggtatcaactccttccgtgccgccgctaacgcattaagtatcccgcctggggagtacggtcgcaagattaaaactcaaaggaattgacgggggcccgcacaagtagcggagcatgtggtttaattcgaagcaacgcgaagaaccttacctagacttgacatcttctgcattacccttaatcggggaagttccttcgggaacagaatgacaggtggtgcatggttgtcgtcagctcgtgtcgtgagatgttgggttaagtcccgcaacgagcgcaacccctattgttagttgctaccattaagttgagcactctagcgagactgcccgggttaaccgggaggaaggtggggatgacgtcaaatcatcatgccccttatgtctagggctacacacgtgctacaatggcaagtacagagagatgcaataccgtgaggtggagctaaacttcaaaacttgtctcagctcggattgtaggctgaaactcgcctacatgaagctggagttactagtaatcgcgaatcagcatgtcgcggtgaatacgttcccgggccttgcactcaccgccggtca

SEQ ID NO: 1892 - DNA, 1375 bp, Artificial Sequence
  Synthetic polymer
agagtttgatcctggctcaggacgaacgctggcggcgtgcttaacacatgcaagtcgagcgatgaagtttccttcgggaaatggattagcggcggacgggtgagtaacacgtgggtaacctgcctcatagaggggaatagcctttcgaaaggaagattaataccgcataagattgtaatgtcgcatgacatagcaattaaaggagtaatccgctatgagatggacccgcgtcgcattagctagttggtgaggtaacggctcaccaaggcgacgacgcgtagccgacctgagagggtgatcggccacattgggactgagacacggcccagactcctacgggaggcagcagtggggaatattgcacaatgggggaaaccctgatgcagcaacgccgcgtgagtgatgacggtcttcggattgtaaagctctgtctttagggacgataatgacggtacctaaggaggaagccacggctaactacgtgccagcagccgcggtaatacgtaggtggcaagcgttgtccggatttactgggcgtaaagggagcgtaggtggatatttaagtgggatgtgaaatacccgggcttaacctgggtgctgcattccaaactggatatctagagtgcaggagaggaaaggagaattcctagtgtagcggtgaaatgcgtagagattaggaagaataccagtggcgaaggcgcctttctggactgtaactgacactgaggctcgaaagcgtggggagcaaacaggattagataccccggtagtcctagccgtaaacgatgataactaggtgtgggaggtatcgaccccttccgtgccgacgctaacgcattaagttatccgcctggggagtacggccgcaaggttaaaactcaaaggaattgacgggggcccgcacaagcggtggattatgtggtttaattcgacgctacgcgaagaaccttacctgggcttgaactgtaggtggtaacttttatgaaagtagaagtgacccgcaagggagcctatagaggtgctgcatggttgtcgtcagctcgtgtcgtgagatgttgggttaagtcccgcaacgagcgcaacccctattctgtgttgcttgctttgcaagttctctcagaagactgccacggacaacgtggaggaaggcggggatgacgtcaaatcatcatggcctttatgtccagggctacacacgtaatacaatggcgtatacagagggcagcaaaaccgcgaggtagagcaaatccctaaagtacgcctcagttcggattgtaggctgcaattcgcctacatgaagctggattcgctagtaatcgcatatcagccatgatgcggtgaatacgttcccgggccttgcactcaccgcccgtca

SEQ ID NO: 1893 - DNA, 1477 bp, Artificial Sequence; identical to SEQ ID NO: 28
  Synthetic polymer

SEQ ID NO: 1894 - DNA, 1389 bp, Artificial Sequence; identical to SEQ ID NO: 954
  Synthetic polymer

SEQ ID NO: 1895 - DNA, 1366 bp, Artificial Sequence
  Synthetic polymer
agagtttgatcctggctcaagatgaacgctggcggcgtgcctaacacatgcaagtcaagcgattctcttcggagaagagcggcggacgggtgagtaacgcgttgggtaacctgccctgtacacacggataacataccgaaaggtatgctaatacgggataatatataagagtcgcatgacttttatatcaaagatttttcgggtacaggatggacccgcgtctgattagcttgttggcggggtaacggcccaccaaggcgacgatcagtagccgacctgagagggtgatcggccacattggaactgagacacggtccaaactcctacgggaggcagcagtggggaatattgcacaatgggcgcaagcctgatgcagcaacgccgcgtgagcgatgaaggccttcgggtcgtaaagctctgtcctcaaggaagacaatgacggtacttgaggaggaagccccggctaactacgtgccagcacccgcggtaatacgtagggggctagcgttatccggatttactgggcgtaaagggtgcgtaggcggtctttcaagtcaggagttacaggctacggctcaaccgtagtaagctcctgatactgtctgacttgagtgcaggagaggaaagcggaattcccagtgtagcggtgaaatgcgtagatattgggaggaacaccagtagcgaaggcggctttctggactgtaactgacgctgaggcacgaaagcgtggggagcaaacagaattagataccctggtagtccacgctctaaacgatgagtactaggtgtaggaggttaccccctttggtgccgcagctaacgcattaagtactccgcatggggagtacgcacgcaagtgtgaaactcaaaggaattgacggggacccgcacaagtagcggagcatgtggtttaatttgaagcaacgtgaagatccttacctaggcttgacatccttgtgaccgaggcctaatttcctctttccctccggggacagaagtgacaggtggtgcatggttgttgtcagctcgtgtcgtgagatgttgggttaagtcccgcatcgagtgcaacccttgtctttagtttccatcattaagttgggctctttagagagacggccagggataacctggaggaaggtggggatgacgtcaaatcatcatgccccttatgcctagggctacacacgtgctacattgggtggtacagagggcagccaagccgtgaggtggagcaaatcccttaaagccattctcgagttcggattgtaggcttgaaactcgcctacatgaagctggagttaatagtaatcgcagatcagaatggtgcggtgaacgcgttaccggctcttgcactcaccgcccgtca

SEQ ID NO: 1896 - DNA, 1434 bp, Artificial Sequence
  Synthetic polymer
aacgctggcggcgtgcttaacacatgcaagtcgaacggacggattggagcttgctccatgaagttagtggcggacgggtgagcaacacgtgggcaacctgccttatagaggggaatagccttccgaaaggaagattaataccgcataagattgtagcttcgcatgaagcagcaattaaaggagcaatccgctataagatgggcccgcggcgcattagctagttggtgaggtaacggctcaccaaggcgacgatgcgtagccgacctgagagggtgatcggccacattgggactgagacacggcccagactcctacgggaggcagcagtggggaatattgcacaatgggggaaaccctgatgcagcaacgccgcgtgagtgatgacggccttcgggttgtaaggctctgtctttggggacgataatgacggtacccaaggaggaagccacggctaactacgtgccagcagccgcggtaatacgtaggtggcaagcgttgtccggatttactgggcgtaaagggagcgtaggcggatttttaagtgggatgtgaaatacccgggctcaacctgggtgctgcattccaaactggaaatctagagtgcaggagaggaaagcggaattccgagtgtagcggtgaaatgcgtagagattcggaggaacaccagtagcgaaggcggctttctggactgtaactgacgctgaggcacgaaagcgtggggagcgaacaggattagataccctggtagtccacgccgtaaacgatgaatactaggtgtcggggcttacgggtctcggtgccgcagctaacgcattaagtattccacctgggaagtacgaccgcaaggttgaaactcaaaggaattgacggggacccgcacaagcggtggagcatgtggtttaattcgaagcaacgcgaagaaccttacctaaacttgacatccctttgaccgatccttaatcggatctttactagcttgctagtacaaaggtgacaggtggtgcatggttgtcgtcagctcgtgtcgtgagatgttgggttaagtcccgcaacgagcgcaacccctatctttagtagccatcattgagttgggcactctagagagactgccagggataacctggaggaaggtggggatgacgtcaaatcatcatgccccttatgtctagggctacacacgtgctacaatggccggtacaacgagatgcaataccgtgaggtggagcaaaactataaaaccggtctcagttcggattgtaggctgaaactcgcctacatgaagctggagttactagtaatcgcgaatcagaatgtcgcggtgaatacgttcccgggccttgtacacaccgcccgtcacaccatgagagttggcaatacccaaagttggtgatctaacccgtaagggaggaagccacctaaggtagggtcagcaat

SEQ ID NO: 1897 - DNA, 1391 bp, Artificial Sequence; identical to SEQ ID NO: 1052
  Synthetic polymer

SEQ ID NO: 1898 - DNA, 1496 bp, Artificial Sequence; identical to SEQ ID NO: 910
  Synthetic polymer

SEQ ID NO: 1899 - DNA, 1479 bp, Artificial Sequence
  Synthetic polymer
agagtttgatcctggctcaggacgaacgctggcggcgtgcttaacacatgcaagtcgagcgatgaagttccttcgggaacggattagcggcggacgggtgagtaacacgtgggtaacctgcctcatagaggggaatagcctttcgaaaggaagattaataccgcataagattgtagtttcgcatgaaacagcaattaaaggagtaatccgctatgagatggacccgcgtcgcattagctagttggtgaggtaacggctcaccaaggcgacgatgcgtagccgacctgagagggtgatcggccacattgggactgagacacggcccagactcctacgggaggcagcagtggggaatattgcacaatgggggaaaccctgatgcagcaacgccgcgtgagtgatgacggtcttcggattgtaaaactctgtcttcagggacgataatgacggtacctgaggaggaagccacggctaactacgtgccagcagccgcggtaatacgtaggtggcaagcgttgtccggatttactgggcgtaaagggagcgtaggtggatatttaagtgggatgtgaaatactcgggcttaacctgagtgctgcattccaaactggatatctagagtgcaggagaggaaagtagaattcctagtgtagcggtgaaatgcgtagagattaggaagaataccagtggcgaaggcgactttctggactgtaactgacactgaggctcgaaagcgtggggagcaaacaggattagataccctggtagtccacgccgtaaacgatgagtgctaggtgtagagggtatcgaccccttctgtgccgcagttaacacaataagcactccgcctctggggagtacggccgcaaggttgaaactcaaaggaattgacgggggcccgcacaagcggtggagcatgtggtttaattcgacgcaacgcgaagaaccttaccagggcttgacatcccgaactctttggaaacagagaggtgcccttcggggagcgtagagacaggtggtgcatggttgtcgtcagctcgtgtcgtgagatgttgggttaagtcccgcaacgagcgcaacccctgtatttagttgctaacaagtaaggttgagcactctagatagactgccggtgataaaccggaggaaggtggggatgacgtcaaatcatcatgccccttatgtcctgggctacacacgtgctacaatggccagtacagacggaggcgaagccgcgaggtggagcaaacccgagaaagctggtctcagttcggattgcaggctgcaactcgcctgcatgaagtcggaatcgctagtaatcgcaggtcagcatactgcggtgaatacgttcccgggtcttgtacacaccgcccgtcacaccacgagagtttgtaacacccgaagtcggtgaggtaaccttagggagccagccgccgaaggtgggacagatgattggggtgaagtcgtaacaaggtaacc

SEQ ID NO: 1900 - DNA, 1389 bp, Artificial Sequence; identical to SEQ ID NO: 452
  Synthetic polymer

SEQ ID NO: 1901 - DNA, 1438 bp, Artificial Sequence
  Synthetic polymer
gacgaacgctggcggcgtgcctaacacatgcaagtcgagcgatgaagctccttcgggagtggattagcggcggacgggtgagtaacacgtgggtaacctgccttgtagtggggaatagcctttcgaaaggaagattaataccgcataagattgtagtttcgcatgaagcagcaattaaaggagcaattcgctacaagatggacccgcggcgcattagctagttggtgaggtaatggctcaccaaggcgacgatgcgtagccgacctgagagggtgatcggccacattgggactgagacacggcccagactcctacgggaggcagcagtggggaatattgcacaatgggggaaaccctgatgcagcaacgccgcgtgagtgatgaaggtcttcggattgtaaagctctgtctttggggacgataatgacggtacccaaggaggaagccacggctaactacgtgccagcagccgcggtaatacgtaggtggcaagcgttgtccggatttactgggcgtaaagggagcgtaggcggacttttaagtgggatgtgaaatactcgggcttaacctgagtgctgcattccaaactggaagtctagagtacaggaggggaaagtggaattcctagtgtagcggtgaaatgcgtagagattaggaagaacaccggtggcgaaggcgactttctggactgtaactgacgctgaggctcgaaagcgtggggagcaaacaggattagataccctggtagtccacgccgtaaacgatgaatactaggtgtaggggttgtcatgacctctgtgccgccgctaacgcattaagtattccgcctggggagtacggtcgcaagattaaaactcaaaggaattgacgggggcccgcacaagcagcggagcatgtggtttaattcgaagcaacgcgaagaaccttacctagacttgacatctcctgaattacccttaatcggggaagtcctttcggggacaggaagacaggtggtgcatggttgtcgtcagctcgtgtcgtgagatgttgggttaagtcccgcaacgagcgcaacccctattgttagttgctaccattaagttgagcactctagcgagactgcccgggttaaccgggaggaaggtggggatgacgtcaaatcatcatgccccttatgtctagggctacacacgtgctacaatggccggtacaaagagacgcaataccgtgaggtggagccaaactataaaaccggtctcagttcggattgcaggctgaaactcgcctgcatgaagctggagttgctagtaatcgcgaatcagaatgtcgcggtgaatacgttcccgggccttgtacacaccgcccgtcacaccataagagttggcaatacccaaagttggtgatctaacctcgcaagaggaggaagccacctaaggtagggtcagcgattggggtg

SEQ ID NO: 1902 - DNA, 1515 bp, Artificial Sequence
  Synthetic polymer
  misc_feature (51)..(51): n is a, c, g, or t
ggctcaggacgaacgctggcggcgtgcctaacacatgcaagtcgagcggancaatcatcagatcccttcggggtgacgaggaggaagcttagcggcggacgggtgagtaacgcgtgagtaacctgcccataagagggggataacacagagaaatttgtgctaataccgcatattgagcattgaccgcatggtcgatgcttgaaagatttatcgcttatggatggactcgcgtctgattagttagttggcggggtaacggcccaccaagacgacgatcagtagccgaactgagaggttgatcggccacattgggactgagacacggcccagactcctacgggaggcagcagtggggaatattgcgcaatgggggaaaccctgacgcagcaacgccgcgtgaaggaagaaggccttcgggttgtaaacttttgtcgcaagggaagaagacagtgacggtaccttgtgagaaagccacggctaactacgtgccagcagccgcggtaatacgtaggtggcgagcgttgtccggatttactgggtgtaaagggcgcgtaggcgggcctgcaagtcagatgtgaaatgccggggcttaaccccggagctgcatttgaaactgtaggtcttgagtgtcggagaggaaagcggaattcctagtgtagcggtgaaatgcgtagatattaggaggaacaccagtggcgaaggcggctttctggacgataactgacgctgaggcgcgaaagtgtggggagcaaacaggattagataccctggtagtccacactgtaaacgatggatactaggtgtaggaggtatcgaccccttctgtgccgcagttaacacaataagtatcccacctggggagtacgaccgcaaggttgaaactcaaaggaattgacgggggcccgcacaagcagtggagtatgtggtttaattcgaagcaacgcgaagaaccttacctgggcttgacatcccgacgaccgctctggagacagagcttttcttcggaacgtcggtgacaggtggtgcatggttgtcgtcagctcgtgtcgtgagatgttgggttaagtcccgcaacgagcgcaacccctgttgtcagtcgccatcatttagttgggcactctggcgagactgccggtgacaaatcggaggaaggtggggacgacgtcaaatcatcatgccccttatgtccagggctacacacgtactacaatggccggaaacaaagtgcagcaaagccgtgaggtggagcgaatcacaaaacccggtctcagttcagattgcaggctgcaactcgcctgcatgaaggtggaattgctagtaatcgcgaatcagaatgtcgcggtgaatacgttcccgggccttgtacacaccgcccgtcacaccatgagagtcgataacacccgaagcctgtgagctaaccgtaaggaggcagcagtcgaaggtggggttgatgattggggtgaagtcgtaacaaggtagccgtatcggaaggtgcggctggatcacctcctttct

SEQ ID NO: 1903 - DNA, 1375 bp, Artificial Sequence
  Synthetic polymer
agagtttgatcctggctcaggacgaacgctggcggcgtgcctaacacatgcaagtcgagcgaatgaagttccttcggggacggatttagcggcggacgggtgagtaacacgtgggcaacctgcctcatagaggggaatagccttccgaaagggagattaataccgcataagattgtagtaccgcatgatacagcaattaaaggagcaatccgctatgagatgggcccgcggcgcattagctagttggtgaggtaacggctcaccaaggcgacgatgcgtagccgacctgagagggtgatcggccacattgggactgagacacggcccagactcctacgggaggcagcagtgggggatattgcgcaatgggggcaaccctgacgcagcaacgccgcgtgaaggatgaaggttttcggattgtaaacttcttttattaaggacgaaaaatgacggtacttaatgaataagctccggctaactacgtgccagcagccgcggtaatacgtagggagcaagcgttgtccggatttactgggtgtaaagggtgcgtaggcggctttgcaagtcagatgtgaaatctatgggctcaacccataaactgcatttgaaactgtagagcttgagtgaagtagaggcaggcggaattcccccgtgtagcggtgaaatgcgtagagatggggaggaacaccagtggcgaaggcgcttctctggactgtaactgacgctgaggctcgaaagcgtggggagcaaacaggattagataccctggtagtccacgccgtaaacgatgaatactaggtgtgggggttgtcatgacctctgtgccgccgctaacgcattaagtattccgcctggggagtacggtcgcaagattaaaactcaaaggaattgacgggggcccgcacaagcagcggagcatgtggtttaattcgaagcaacgcgaagaaccttacctagacttgacatctcctgcattactcttaatcgaggaagtctcttcggggacaggatgacaggtggtgcatggttgtcgtcagctcgtgtcgtgagatgttgggttaagtcccgcaacgagcgcaacccttattgttagttgccatcattaagttgggcactctagcgagactgcccgggttaaccgggaggaaggtggggatgacgtcaaatcatcatgccccttatgtctagggctacacacgtgctacaatggtcggtacaataagacgcaagcccgcgagggggagcaaaactggaaaaccgatctcagttcggattgtaggctgaaactcgcctacatgaagctggagttgctagtaatcgcgaatcagcatgtcgcggtgaatacgttcccgggccttgcactaacggcccgtca

SEQ ID NO: 1904 - DNA, 1374 bp, Artificial Sequence
  Synthetic polymer
agagtttgatcctggctcaggatgaacgctggcggcgtgcttaacacatgcaagtcgaacggagattgatttgacagagacttcggttgaagtcgttttaatcttagtggcggacgggtgagtaacgcgtgggtaacctgccttatactgggggataacagtcagaaatgactgctaataccgcatatgcgcacagaaccgcatggtccggtgtggaaaactccggtggtataagatggacccgcgttggattagctagttggtgaggcagtggctcaccaaggcgacgatccatagccggcctgagagggtgaacggccacattgggactgagacacggtccaaactcctacgggaggcagcagtggggaatattgcacaatgggcgcaagcctgatgcagcaacgccgcgtgagcgatgaaggccttcgggtcgtaaagctctgtcctcaaggaagataatgacggtacttgaggaggaagccccggctaactacgtgccagcagccgcggtaatacgtagggggctagcgttatccggatttactgggcgtaaagggtgcgtaggcggtctttcaagtcaggagttaaaggctacggctcaaccgtagtaagctcctgatactgtctgacttgagtgcaggagaggaaagcggaattcccagtgtagcggtgaaatgcgtagatattgggaggaacaccagtagcgaaggcggctttctggacggtaactgacgttgaggctcgaaagcgtggggagcaaacaggattagataccctggtagtccacgccgtaaacgatgaatactaggtgtcgggaagcaaagcttttcggtgccgcagcaaacgcagtaagtattccacctggggagtacgttcgcaagaatgaaactcaaaggaattgacggggacccgcacaagcggtggagcatgtggtttaattcgaagcaacgcgaagaaccttaccaagtcttgacatctgcctgaccgttccttaaccggaaccttccttcgggacaggcaagacaggtggtgcatggttgtcgtcagctcgtgtcgtgagatgttgggttaagtcccgcaacgagcgcaacccctatcctcagtagccagcaggtagagctgggcactctgtggagactgcccgggataaccgggaggaaggcggggacgacgtcaaatcatcatgccccttatgatttgggctacacacgtgctacaatggcgtaaacaaagggaagcgaacctgcgagggcaagcaaatcccaaaaataacgtcccagttcggactgcagtctgcaactcgactgcacgaagctggaatcgctagtaatcgcgaatcagaatgtcgcggtgaatacgttcccgggtctt

SEQ ID NO: 1905 - DNA, 1415 bp, Artificial Sequence; identical to SEQ ID NO: 1096
  Synthetic polymer

SEQ ID NO: 1906 - DNA, 1363 bp, Artificial Sequence
  Synthetic polymer
agagtttgatcctggctcaggatgaacgctggcggcgtgccaaacacatgcaagtcgagcgattctcttcggagaagagcggcggacgggtgagtaacgcgtgggtaacctgccctgtacacacggataacataccgaaaggtatgctaatacgagataatatacttttatcgcatggtagaagtatcaaagctccggcggtacaggatggacccgcgtctgattagctagttggtaaggtaacggcttaccaaggcgacgatcagtagccgacctgagagggtgatcggccacattggaactgagacacggtccaaactcctacgggaggcagcagtggggaatcttgcgcaatggggggaaccctgacgcagcgacgccgcgtgcgggacggaggccttcgggtcgtaaaccgctttcagcagggaagagtcaagactgtacctgcagaggaagccccggctaactacgtgccagcagccgcggtaatacgtagggggctagcgttatccggatttactgggcgtaaagggtgcgtaggcggtctttcaagtcaggagttaaaggctacggctcaaccgtagtaagctcctgatactgtctgacttgagtgcaggagaggaaagcggaattcccagtgtagcggtgaaatgcgtagatattgggaggaacaccagtagcgaaggcggctttctggactgtaactgacgctgaggcacgaaagcgtggggagcaaacaggattagataccctggtagtccacgctgtaaacgatgagtactaggtgtcggaggttacccccttcggtgccgcagctaacgcattaagtactccgcctggggagtacgcacgcaagtgtgaaactcaaaggaattgacggggacccgcacaagtagcggagcatgtggtttaattcgaagcaacgcgaagaaccttacctaggcttgacatccttctgaccgaggattaatctcctctttcccttcggggacagaagtgacaggtggtgcatggttgtcgtcagctcgtgtcgtgagatgttgggttaagtcccgcaacgagcgcaacccttgcctttagttgccatcatttagttgggcactctagagagactgccagggataacctggaggaaggtggggatgacgtcaaatcatcatgccccttatgcctagggctacacacgtgctacaatgggtggtacagagggcagccaagccgtgaggtggagcaaatcccttaaagccattctcagttcggattgtaggctgaaactcgcctacatgaagctggagttactagtaatcgcagatctgaatgctgcggtgaatgcgttcccgggtcttgcacacaccgcccgtca

SEQ ID NO: 1907 - DNA, 1390 bp, Artificial Sequence; identical to SEQ ID NO: 637
  Synthetic polymer

SEQ ID NO: 1908 - DNA, 1324 bp, Artificial Sequence; identical to SEQ ID NO: 665
  Synthetic polymer

SEQ ID NO: 1909 - DNA, 1395 bp, Artificial Sequence; identical to SEQ ID NO: 270
  Synthetic polymer

SEQ ID NO: 1910 - DNA, 1369 bp, Artificial Sequence
  Synthetic polymer
tgatcctggctcaggatgaacgctattggcaggcttaacacatgcaagtcgaggggcagcatgtccagcaatggatgatggcgaccggcggaagggtgcgtaacgcgtgggtaacctgtctcatacacatggataacataccgaaaggtatgctaatacaagatgatataagagattcgcatggatttcttatcaaagctccggcggtatgagatggacccgcgtctgattagctagttggtaaggtaacggcttaccaaggcgacgatcagtagccgacctgagagggtgatcggccacattggaactgagacacggtccaaactcctacgggaggcagcagtggggaatattgcacaatgggcgaaagcctgatgcagcaacgccgcgtgagcgatgaaggccttcgggtcgtaaagctctgtcctcaaggaagataatgacggtacttgaggaggaagccccggctaactacgtgccagcagccgcggtaatacgtagggggctagcgttatccggatttactgggcgtaaagggtgcgtaggtggtttcttaagtcaggagtgaaaggctacggctcaaccgtagtaagctcttgaaactgggaaacttgagtgcaggagaggaaagtggaattcctagtgcagcggtgaaatgcgtagatattaggaggaacaccagtagcgaaggcggctttctggactgtaactgacgctgaggctcgaaagcgtggggagcaaacaggattagataccctggtagtccacgccataaacgatgattactgggtgtagggggtatcgactccctctgtgccgaagcaaacgcgataagtaatccacctggggagtacggccgcaaggctaaaactcaaaggaattgacgggggcccgcacaagcagtggagtatgtggtttaattcgaggcaacgcgaagaaccttaccagggtttgacatcccgcgctataggtagagatacttagttcccttcggggacgcggagacaggtggtgcatggttgtcgtcagctcgtgtcgtgagatgttgggttaagtcccgcaacgagcgcaacccctgctattagttgctaacattaaggatgagcactctaatgggaccgcctgtgacaagcaggaggaaggtggggatgacgtcaaatcatcatgccctttatgatctgggctacacacgtgctacaatggatggtacagagggcagcgaagccgcaaggtgaagcgaatctcaaaaagccattctcagttcggattgcagtctgcaactcgactgcatgaagtcggaatcgctagtaatcgcgaatcagcatgtcgcggtgaatgcgttcccgggccttgtacacaccgcccgtca

SEQ ID NO: 1911 - DNA, 1389 bp, Artificial Sequence
  Synthetic polymer
agaatttgatcctggctcaggacgaacgctggcggcgtgcctaacacatgcaagtcgagcgagaatcttatgaatgatccttcgggtgaatgattaagagaagagcggcggacgggtgagtaacgcgtgggtaacctgccctgtacgcacggataacataccgaaaggtatgctaatacgggataatgtattttgatcgcatggtcgaaatatcaaagctccggcggtacaggatggacccgcgtctgattagctagttggtgaggtaatggctcaccaaggcgacgatcagtagccgacctgagagggtgatcggccacattggaactgagacacggtccaaactcctgcgggaggcagcagtggggaatattgcacaatgggcgaaagcctgatgcagcaacgccgcgtgagcgatgaaggccttcgggtcgtaaagctctgtcctcaaggaagataatgacggtacttgaggaggaagccccggctaactacgtgccagcagccgcggtaatacgtagggggctagcgttatccggaattactgggcgtaaagggtgcgtaggtggtttcttaagtcagaggtgaaaggctacggctcaaccgtagtaagcctttgaaactgagaaacttgagtgcaggagaggagagtagaattcctagtgtagcggtgaaatgcgtagatattaggaggaataccagttgcgaaggcagctctctggactgtaactgacactgaggcacgaaagcgtggggagcaaacaggattagataccctggtagtccacgccgtaaacgatgagtactagctgtcggaggttacccccttcggtggcgcagctaacgcattaagtactccgcctgggaagtacgctcgcaagagtgaaactcaaaggaattgacggggacccgcacaagtagcggagcatgtggtttaattcgaagcaacgcgaagaacctcacctaagcttgacatccttttgacctctccttaatcggagatttcccttcggggacagaagtgacaggtggtgcatggttgtcgtcagctcgtgtcgtgagatgttgggttaagtcccgcagcgagcgcaacccctattcttagtagccagcattttggatgggcactctgagaagactgccagggataacctggaggaaggtggggatgacgtcaaatcatcatgccccttatgacttgggctacacacgtgctacaatggcgtaaacaaagagaggcgaactcgcgagggtgagcaaatctcaaaaataacgtctcagttcggattgtagtctgcaactcgactacatgaagctggaatcgctagtaatcgcggatcagaatgccgcggtgaatacgttcccgggtcttgtacacaccgcccgtca

SEQ ID NO: 1912 - DNA, 1341 bp, Artificial Sequence
  Synthetic polymer
gacgaacgctggcggcgcgcctaacacatgcaagtcgaacggagctgagaggagcttgcttttcttagcttagtggcgaacgggtgagtaacgcgtgagtaacctgccctggagtgggggacaacagttggaaacgactgctaataccgcataagcccacgatccggcatcggattgagggaaaaggatttattcgcttcaggatggactcgcgtccaattagctagttggtgaggtaacggcctaccaaggcgacgatgcgtagccgacctgagagggtgatcggccacattgggactgagacacggcccagactcctacgggaggcagcagtggggaatattgcacaatgggggaaaccctgatgcagcaacgccgcgtgagtgatgaaggttttcggatcgtaaagctctgtctttggggaagataatgacggtacccaaggaggaagccacggctaactacgtgccagcagccgcggtaatacgtaggtggcgagcgttatccggatttactgggcgtaaagggagcgtaggcggatgattaagtgggatgtgaaatacccgggctcaacttgggtgctgcattccaaactggttatctagagtgcaggagaggagagtggaattcctagtgtagcggtgaaatgcgtagagattaggaagaacaccagtggcgaaggcgactctctggactgtaactgacgctgaggctcgaaagcgtggggagcaaacaggattagataccctggtagtccacgccgtaaacgaatgaataataggtgtgggggtttcaacacctccgcgccgccgctaacgcattaagtattccgcctggggagtgcggtcgcaagattaaaactcaaaggaaatgacggggacccgcacaagtagcggagcatgtggtttaatttgaagcaacgcgaggaaccttacctacacttgacatcccttgcattactcttaatcgaggaaatcccttcggggacaaggtgacaggtggtgcatggttgtcgtcagctcgtgtcgtgagatgttgggttaagtcccgcaacgagcgcaacccttgttgttagttactgccattaagttgaggactctagcgagactgcctgggttaaccaggaggaaggtggggatgacgtcaaatcatcatgccccttatgtgtagggctacacacgtgctacaatggctggtacagagagatgcaataccgcgaggtggagccaaacttaaaaaccagtctcagttcggattgtaggctgaaactcgcctacatgaagctggggttgcttgttgtcgcgggtctgcatgtcgcggtgaataaaatcccgggtcttg

SEQ ID NO: 1913 - DNA, 1392 bp, Artificial Sequence; identical to SEQ ID NO: 105
  Synthetic polymer

SEQ ID NO: 1914 - DNA, 1297 bp, Artificial Sequence; identical to SEQ ID NO: 836
  Synthetic polymer

SEQ ID NO: 1915 - DNA, 1360 bp, Artificial Sequence
  Synthetic polymer
agagtttgatcctggctcaggatgaacgctggcggcgtgcctaacacatgcaagtcgagcgattctcttcggagaagagcggcggacgggtgagtaacgcgtgggtaacctgccctgtacacacggataacataccgaaaggtatgctaatacgagataatatgcttttatcgcatggtagaagtatcaaagctccggcggtacaggatggacccgcgtctgattagctagttggtgaggtaacggctcaccaaggcgacgatcagtagccgacctgagagggtgatcggccacattggaactgagacacggtccaaactcctacgggaggcagcagtggggaatattgcacaatgggcgaaagcctgatgcagcaacgccgcgtgagcgatgaaggccttagggtcgtaaagctctgtcctcaaggaagataatgacggtacttgaggaggaagccccggctaactacgtgccagcagccgcggtaatacgtagggggctagcgttatccggaattactgggcgtaaagggtgcgtaggtggtttcttaagtcagaggtgaaaggctacggctcaaccgtagtaagcctttgaaactgggaaacttgagtgcaggagaggagagtggaattcctagtgtagcggtgaaatgcgtagatattaggaggaacaccagttgcgaaggcggctctctggactgtaactgacactgaggcacgaaagcgtggggagcaaacaggattagataccctggtagtccacgccgtaaacgatgagtactagctgtcggaggttacccccttcggtggcgcagctaacgcattaagtactccgcctgggaagtacgttcgcaagaatgaaactcaaaggaattgacggggacccgcacaagcggtggagcatgtggtttaattcgaagcaacgcgaagaaccttaccaagtcttgacatcccgatgaccgttccttaaccggaacttctcttcggagcatcggtgacaggtggtgcatggttgtcgtcagctcgtgtcgtgagatgttgggttaagtcccgcaacgagcgcaacccctattttcagtagccagcagttcggctgggcactctggagagactgccagggataacctggaggaaggcggggatgacgtcaaatcatcatgccccttatgatttgggctacacacgtgctacaatggcaagtacaaagagaagcaagaccgcgaggtggagcaaaactcaaaaacttgtctcagttcggattgtaggctgaaactcgcctacatgaagctggagttgctagtaatcgcgaatcagcatgtcgcggtgaatacattcccgggccttgcacacaccgcccgtca

SEQ ID NO: 1916 - DNA, 1413 bp, Artificial Sequence; identical to SEQ ID NO: 1094
  Synthetic polymer

SEQ ID NO: 1917 - DNA, 1381 bp, Artificial Sequence; identical to SEQ ID NO: 650
  Synthetic polymer

SEQ ID NO: 1918 - DNA, 1377 bp, Artificial Sequence
  Synthetic polymer
ttcgcccttagagtttgatcctggctcaggacgaacgctggcggcgtgcctaacacatgcaagtcgagcgagtggagttcttcggaaccaagctagcggcggacgggtgagtagcgcatcgggccacctgcctcatacaggggaagaacctccccaaagggagattaataccgcataaggttgtagcttcgcatgaagcagcaattaaaggagcaatccgctatgagatgggcccgcggcgcattagctagttggtgaggtaacggctcaccaaggcgacgatgcgtagccgacctgagagggtgatcggccacattgggactgagacacggcccagactcctacgggaggcagcagtggagaatattgcacaatgggggaaaccctgatgcagcaacgccgcgtgagtgatgacggccttcgggttgtaaagctctgtcttcagggacgataatgacggtacctgaggaggaagccacggctaactacgtgccagcagccgcggtaatacgtaggtggcgagcgttgtccggatttactgggcgtaaagggagcgtaggcggacttttaagtgagatgtgaaatacccgggctcaacttgggtgctgcatttcaaactggaagtctagagtgcaggagaggagaatggaattcctagtgtagcggtgaaatgcgtagagattaggaagaacaccagtggcgaaggcgattctctggactgtaactgacgctgaggctcgaaagcgtggggagcaaacaggattagataccctggtagtccacgccgtaaacgatgaatactaggtgtaggggttgtcacgacctctgtgccgccgctaacgcatttagtattccgcagggggagtacggtcgcaagattaaaactcaaaggaattgacgggggcccgcacaagcaccggagcatgtggtttaattagaagcaacgccaagaacctttcctagacttgacatctccgtcattactattaatcggtgcagttccttccggaacaagaagacaggtggtgcatgttggtagtcagcttgtgtcgtgagatgttgggttaagtcccgcaacgagcgccacccttattgttagttgctaccatttagttgagcactctagcgagactgccccggttaaccggggggaagggggggaggacgtcaaatcatcacgccccttatgtgtaggcccacacacgtcatacaatggcaagtacaaagagaagcaagaccgcgaggtggagcaaaactcaaacacttgtctcagttcggattgtaggctgaaactcgcctacaagaagcaggagttggtagtaatcgagaatcagcatgtcgcggagaatatgttccctggccctccacacaccgccc

SEQ ID NO: 1919 - DNA, 1474 bp, Artificial Sequence
  Synthetic polymer
agagtttgatcctggctcaggacgaacgctggcggcgtgcctaacacatgcaagtcgagcgaatgaagttccttcgggaatggatttagcggcggacgggggagtaacacgtgggcaacctgcctcatagaggggaatagccttccgaaagggagattaataccgcataagattgtagtaccgcatggtacagcaattaaaggagcaatccgctatgagatgggcccgcggcgcattagctagttggtgaggtaacggctcaccaaggcgacgatgcgtagccgacctgagagggtgatcggccacattgggactgagacacggcccagactcctacgggaggcagcagtggggaatattgcacaatgggggaaaccctgatgcagcaacgccgcgtgagtgatgacggccttcgggttgtaaagctctgtcttcagggacgataatgacggtacctgaggaggaagccacggctaactacgtgccagcagccgcggtaatacgtaggtggcgagcgttgtccggatttactgggcgtaaagggagcgtaggcggatttttaagtgagatgtgaaatactcgggcttaacctgagtgctgcatttcaaactggaagtctagagtacaggagaggtgagtggaattcctagtgtagcggtgaaatgcgtagatattaggaggaacaccagtggcgaaggcgactcactggactgtaactgacgctgaggcacgaaagcgtggggagcgaacaggattagataccctggtagtccacgctgtaaacgatgaatgctaggtgtcggctcttaaagggtcggtgccgaagttaacacattaagcattccacctggggagtacgtacgcaagtatgaaactctcaaaggaattgacggggacccgcacaagcggtggagcatgtggtttaattcgaagcaacgcgaagaaccttaccaggtcttgacatcccattgaccggaacttaatcgttcctttccttcgggacaatggagacaggtggtgcatggttgtcgtcagctcgtgtcgtgagatgttgggttaagtcccgcaacgagcgcaacccttatctttagtagccagcacgtatggtgggcactctagggagactgccagggataacctggaggaaggcggggatgacgtcaaatcatcatgccccttatgatctgggctacacacgtgctacaatggtgactacaaagggacgcaacctcgtgacctggagcaaatctcacaaaagtcgtcccagttcggattgtagtctgcaactcgactacatgaagttggaatcgctagtaatcgcgaatcagaatgtcgcggtgaatacgttcccgggtcttgtacacaccgcccgtcacaccatgggagttggaagcgcccgaagccagtgactcaaccgtaaggagagagctgtcgaaggtgaagccaatgactggggtgaagtcgtaacaaggta

SEQ ID NO: 1920 - DNA, 1352 bp, Artificial Sequence; identical to SEQ ID NO: 156
  Synthetic polymer

SEQ ID NO: 1921 - DNA, 1366 bp, Artificial Sequence; identical to SEQ ID NO: 447
  Synthetic polymer

SEQ ID NO: 1922 - DNA, 1388 bp, Artificial Sequence
  Synthetic polymer
ttagagtttgatcctggctcaggacgacctctggcggcgtgcctaacacatgcaagtcgaacgatgaaggaaagatgaatctttcgggaggattctttccggattagtggcggacgggtgagtaacgcgtgagcaacctgcctcgaacagtgggatagccaagggaaactttgattaataccgcatgataccgaaagctcgcatgatttttcggtcaaagaacttcggttcgggatgggctcgcgtccgattagctagttggtgtgataaaagcgcaccaaggctgcgatcagtaaccggcttgagagagtgaacggtcacactggaactgagacacggcccacactcctacgggaggcagcagtggggaatattgcacaatgggggaaaccctgatgcagcaacgccgcgtgagtgatgacggccttcgggttgtaaagctctgtcttcagggacgataatgacggtacctgaggaggaagccacggctaactacgtgccagcagccgcggtaatacgtaggtggcgagcgttgtccggatttactgggcgtaaagggagcgtaggcggatttttaagtgagatgtgaaatactcgggcttaacctgagtgctgcatttcaaactggaagtctagagtgcaggagaggagaagggaattcctagtgtagcggtgaaatgcgtagagattaggaagaacaccagtggcgaaggcgcttctctggactgtaactgacgctgaggctcgaaagcgtggggagcaaacaggattagataccctggtagtccacgccgtaaacgatgaatactaggtgtaggggttgtcatgacctctgtgccgccgctaacgcattaagtattccgcctggggagtacggtcgcaagattaaaactcaaaggaattgacgggggcccgcacaagcagcggagcatgtggtttaattcgaagcaacgcgaagaaccttacctagacttgacatctcctgcattactcttaatcgaggaagtcccttcggggacaggatgacaggtggtgcatggttgtcgtcagctcgtgtcgtgagatgttgggttaagtcccgcaacgagcgcaacccttattgttagttgccatcattaagttgggcactctagcgagactgcccgggttaaccgggaggaaggtggggatgacgtcaaatcatcatgccccttatgtctagggctacacacgtgctacaatggtcggtacaataagacgcaagcccgcgagggggagcaaaactggaaaaccgatctcagttcggattgtaggctgaaactcgcctacatgaagctggagttgctagtaatcgcgaatcagcatgtcgcggtgaatacgttcccgggccttgtacacaccgcccgtca

SEQ ID NO: 1923 - DNA, 1375 bp, Artificial Sequence; identical to SEQ ID NO: 299
  Synthetic polymer

SEQ ID NO: 1924 - DNA, 1390 bp, Artificial Sequence
  Synthetic polymer
agagtttgatcctggctcaggacgaacgctggcggcgtgcctaacacatgcaagtcgaacgagaatctttggaatgattctttcgggatgaattccaaagaggaaagtggcggacgggcgagtaacgcgtgagtaacctgcccataagagggggataatccatggaaacgtggactaataccgcatattgtagttaagttgcatgacttgattatgaaagatttatcgcttatggatggactcgcgtcagattagctagttggtgaggtaacggctcaccaaggcgacgatcagtagccgacctgagagggtgatcggccacattggaactgagacacggtccaaactcctacgagaggcagcagtggggaatattgcacaatgggcgaaagcctgatgcagcaacgccgcgtgagcgatgaaggccttcgggtcgtaaagctctgtcctcaaggaagataatgacggtacttgaggaggaagccccggctaactacgtgccagcagccgcggtaatacgtagggggctagcgttatccggatttactgggcgtaaagggtgcgtaggcggtcttttaagtcaggagtgaaaggctacggctcaaccgtagtaagctcttgaaactggaggacttgagtgcaggagaggagagtggaattcctagtgtagcggtgaaatgcgtagatattaggaggaacaccagtagcgaaggcggctctctggactgtaactgacgctgaggcacgaaagcgtggggagcaaacaggattagataccctggtagtccacgccgtaaacgatgaatactaggtgttggcaggtaagacctgtcggtgccgcagcaaacgcaataagtattccacctggggagtacgttcgcaagaatgaaactcaaaggaattgacggggacccgcacaagcggtggagcatgtggtttaattcgaagcaacgcgaagaaccttaccaagtcttgacatcccggtgacagaacatgtaatgtgttttcccttcggggcaccggtgacaggtggtgcatggttgtcgtcagctcgtgtcgtgagatgttgggttaagtcccgcaacgagcgcaacccttatccccagtagccagcatttcggatgggcactctgtggagactgccagggacaacctggaggaaggtggggatgacgtcaaatcatcatgccccttatgacttgggctacacacgtgctacaatggcgtaaacaaagggaagcgagaccgcgaggtggagcaaatcccaaaaataacgtcccagttcggattgtagtctgcaactcgactacatgaagctggaatcgctagtaatcgcagatcagaatgctgcggtgaatacgttcccgggtcttgcacacaccgcccgtca

SEQ ID NO: 1925 - DNA, 1433 bp, Artificial Sequence
  Synthetic polymer
gacgaacgctggcggcgtgcctaacacatgcaagtcgagcgatgaaatcccttcggggatggattagcggcggacgggtgagtaacacgtgggcaacctgcctcaaagtgggggatagcctcccgaaagggagattaataccgcataacattagtttttcgcatgaagaactaattaaaggagtaatccgctttgagatgggcccgcggcgcattagctagttggtaaggtaatggcttaccaaggcgacgatgcgtagccgacctgagagggtgatcggccacattggaactgagacacggtccagactcctacgggaggcagcagtggggaatattgcacaatgggggaaaccctgatgcagcaacgccgcgtgggtgatgaaggtcttcggattgtaaaaccctgtcttttgggacgataatgacggtaccaaaggaggaagccacggctaactacgtgccagcagccgcggtaatacgtaggtggcaagcgttgtccggatttactgggcgtaaagggtgcgtaggcggatgtttaagtgggatgtgaaatacccgagctcaacttgggtgctgcattccaaactggatatctagagtgcgggagaggagagtggaattcctagtgtagcggtgaaatgcgtagagattaggaagaacaccagtggcgaaggcgactctctggaccgtaactgacgctgaggcacgaaagcgtggggagcaaacaggattagataccctggtagtccacgccgtaaacgatgaatgctaggtgtaggaggtatcgactccttctgtgccgcagttaacacaataagtattccgcctggggagtacggtcgcaagattaaaactcaaaggaattgacgggggcccgcacaagcagcggagcatgtggtttaattcgaagcaacgcgaagaaccctacctagacttgacataccctgaattaccagtaacttgggaagcccttcggggcagggatacaggtggtgcatggttgtcgtcagctcgtgtcgtgagatgttaggttaagtcctgcaacgagcgcaacccttatcattagttgctaccattaagttgagcactctagtgagactgcctgggttaaccaggaggaaggtggggatgacgtcaaatcatcatgccccttatgtctagggctacacacgtgctacaatgggcggtacaaaaagatgcaaactcgtgagggtgagccaaactttaaaaccgcccccagttcggattgtaggctgaaactcgcctacatgaagccggagttgctagtaatcgcgaatcagcatgtcgcggtgaatacgttcccgggccttgtacacaccgcccgtcacaccatgagagctggcaacacccgaagtccgtgaggtaaccgtaaggagccagcggccgaaggtggggttagtgattggggtg

SEQ ID NO: 1926 - DNA, 1359 bp, Artificial Sequence
  Synthetic polymer
agagtttgatcctggctcaggatgaacgctggcggcgtgcctaacacatgcaagtcgagcgatttacttcggtaaagagcggcggacgggtgagtaacgcgtgggtaacctgccctgtacacacggataacataccgaaaggtatgctaatacgagataatatgcttttatcgcatggtagaagtatcaaagcttttgcggtacaggatggacccgcgtctgattagccagttggtaaggtaacggcttaccaaggcgacgatcagtagccgacctgagagggtgatcggccacattggaactgagacacggtccaaactcctacgggaggcagcagtggggaatattgcacaatgggcgaaagcctgatgcagcaacgccgcgtgagcgatgaaggccttcgggtcgtaaagctctgtcctcaaggaagataatgacggtacttgaggaggaagccccggctaactacgtgccagcagccgcggtaatacgtagggggctagcgttatccggaattactgggcgtaaagggtgcgtaggtggtttcttaagtcagaggtgaaaggctacggctcaaccgtagtaagcctttgaaactgggaaacttgagtgcaggagaggagagtggaattcctagtgtagcggtgaaatgcgtagatattaggaggaacaccagttgcgaaggcggctctctggactgtaactgacactgaggcacgaaagcgtggggagcaaacaggattagataccctggtagtccacgccgtaaacgatgagtactagctgtcggaggttacccccttccgtgccgcagttaacacaataagtattccacctggggagtacgaccgcaaggttgaaactcaaaggaattgacgggggcccgcacaagcagcggagcatgtggtttaattcgaagcaacgcgaagaaccttacctagacttgacatctcctgcattacccttaatcggggaagttccttcgggaacaggaagacaggtggtgcatggttgtcgtcagctcgtgtcgtgagatgttgggttaagtcccgcaacgagcgcaacccttattgttagttgctaccatttagttgagcactctagcgagactgcccgggttaaccgggaggaaggtggggatgacgtcaaatcatcatgccccttatgtctagggctacacacgtgctacaatggctggtacagagagatgcgataccgtgaggtggagccaaacttcaaaaccagtctcagttcggattgtaggctgaaactcgcctacatgaagctggagttgctagtaatcgcgaatcagaatgtcgcggtgaatacgttcccgggccttgcacacaccgcccgtca

SEQ ID NO: 1927 - DNA, 1405 bp, Artificial Sequence; identical to SEQ ID NO: 96
  Synthetic polymer

SEQ ID NO: 1928 - DNA, 1389 bp, Artificial Sequence
  Synthetic polymer
agagtttgatcctggctcaggatgaacgctggcggcgtgcctaacacatgcaagtcgaacgaagcacttgaatggaattcttcggaaggaagtttaagtgactgagtggcggacgggtgagtaacgcgtgggtaacctgcctcatacagggggataacagttagaaatggctgctaataccgcataagcacacagcaacgcatgttgtagtgtgaaaaactccggtggtatgagatggacccgcgtctgattagctagttggtggggtaacggcctaccaaggcgacgatcagtagccgacctgagagggtgaccggccacattgggactgagacacggcccaaactcctacgggaggcagcagtggggaatattgcacaatgggcgcaagcctgatgcagcaacgccgcgtgagcgatgaaggccttcgggtcgtaaagctctgtcctcaaggaagataatgacggtacttgaggaggaagccccggctaactacgtgccagcagccgcggtaatacgtagggggctagcgttatccggatctactgggcgtaaagggtgcgtaggcggtctttcaagtcaggagttaaaggctacggctcaaccgtagtaagctcctgatactgtctgacttgagtgcaggagaggaaagcggaattcccagtgtagcggtgaaatgcgtagatattgggaggaacaccagtagcgaaggcggctttctggactgtaactgacgctgaggcacgaaagcgtggggagcaaacaggattagataccctggtagtccacgctgtaaacgatgaatactaggtgtcggggagcagagctcttcggtgccgcagcaaacgcaataagtattccacctggggagtacgttcgcaagaatgaaactcaaaggaattgacggggacccgcacaagcggtggagcatgtggtttaattcgaagcaacgcgaagaaccttaccaagtcttgacatccctctgaccgcaccttaaccggtgctttccttcgggacagaggagacaggtggtgcatggttgtcgtcagctcgtgtcgtgagatgttgggttaagtcccgcaacgagcgcaacccttatccttagtagccagcggtttggccgggcactctggggagactgccagggataacctggaggaaggtggggatgacgtcaaatcatcatgccccttatgatttgggctacacacgtgctacaatggcgtaaacaaagggaagcgatcacgtgagtgtaagcaaatctcaaaaataacgtcccagttcggactgtagtctgcaacccgactacacgaagctggaatcgctagtaatcgcaggtcagcatactgcggtgaatacgttcccgggtcttgtacacaccgcccgtca

SEQ ID NO: 1929 - DNA, 1374 bp, Artificial Sequence; identical to SEQ ID NO: 689
  Synthetic polymer

SEQ ID NO: 1930 - DNA, 1376 bp, Artificial Sequence; identical to SEQ ID NO: 628
  Synthetic polymer

SEQ ID NO: 1931 - DNA, 1434 bp, Artificial Sequence
  Synthetic polymer
aacgctggcggcgtgcttaacacatgcaagtcgagcgaggaatcaccttcgggtgtgaactagcggcggacgggtgagtaacacgtgggcaacctgccttacagagggggatagccttccgaaaggaagattaataccgcatattatgagttttctgcatggggaattcatgaaaggagaaatccgctgtaagatgggcccgcggcgcattagctagttggtgaggtaacggctcaccaaggcgacgatgcgtagccgacctgagagggtgatcggccacattgggactgagacacggcccagactcctacgggaggcagcagtgggggatattgcacaatgggggaaaccctgatgcagcaacgccgcgtgagtgatgacggccttcgggttgtaaagctctgtcttcagggacgataatgacggtacctgaggaggaagccacggctaactgcgtgccagcagccgcggtaatacgtaggtggcgagcgttatccggatttactgggcgtaaaggatgcgtaggtggaattttaagtgggatgtgaaatacccgggctcaacctgggaactgcattccaaactggaattctagagtgcaggagaggaaagcggaattcctagtgtagcggtgaaatgcgtagagattaggaagaacaccagtggcgaaggcggctttctggactgtaactgacactgaggcatgaaagcgtggggagcaaacaggattagataccctggtagtccacgccgtaaacgatgggtactaggtgtaggggtttcgatacctctgtgccgccgtaaacacagtaagtaccccgcctggggagtacggtcgcaagattaaaactcaaaggaattgacgggggcccgcacaagtagcggagcatgtggtttaattcgaagcaacgcgaagaaccttacctagacttgacatgtcctgaattacctgtaataagggaaactccttcgggagcaggaacacaggtggtgcatggttgtcgtcagctcgtgtcgtgagatgttgggttaagtcccgcaacgagcgcaacccctatagttagttgctaacagtaagatgagcactctagctagactgccgtggttaacgcggaggaaggtggggatgacgtcaaatcatcatgccccttatgtctagggctacacacgtgctacaatggcgagaacaaagagaagcaagaccgtgaggtggagcaaaactcataaaactcgtcccagttcggattgtaggctgaaactcgcctacatgaagccggagttactagtaatcgcgaatcagaatgtcgcggtgaatacgttcccgggccttgtacacaccgcccgtcacaccatgagagttggcaatacccaaagtccgtgaggtaaccgtaaggagccagcggcctaaggtagggtcagcgattggggtgaagt

SEQ ID NO: 1932 - DNA, 1364 bp, Artificial Sequence; identical to SEQ ID NO: 535
  Synthetic polymer

SEQ ID NO: 1933 - DNA, 1417 bp, Artificial Sequence
  Synthetic polymer
gcttaacacatgcaagtcgagcgatgaagtttccttcgggaaacggattagcggcggacgggtgagtaacacgtgggtaacctgcctcatagagtggaatagccttccgaaaggaagattaataccgcataatgttgaaagatggcatcatcattcaaccaaaggagtaatccgctatgagatggacccgcggcgcattagctagttggtggggtaacggcctaccaaggcgacgatgcgtagccgacctgagagggtgatcggccacattgggactgagacacggcccagactcctacgggaggcagcagtggggaatattgcacaatggggggaaccctgatgcagcaacgccgcgtgagtgatgaaggttttcggatcgtaaagctctgtctttggggaagataatgacggtacccaaggaggaagccacggctaactacgtgccagcagccgcggtaatacgtaggtggcgagcgttatccggatttactgggcgtaaagggagcgtaggcggatgattaagtgggatgtgaaatacccgggctcaacttgggtgttgcattccaaactggttatctagagtgcaggagaggagagtggaattcctagtgtagcggtgaaatgcgtagagattaggaagaacaccagtggcgaaggcgactctctggactgtaactgacgctgaggctcgaaagcgtggggagcaaacaggattagataccctggtagtccacgccgtaaacgatgaatactaggtgtgggggtttcaacacctccgtgccgccgctaacgcattaagtattccgcctggggagtacggtcgcaagattaaaactcaaaggaattgacggggacccgcacaagtagcggagcatgtggtttaattcgaagcaacgcgaagaaccttacctacacttgacatcccttgcattactcttaatcgaggaaatcccttcggggacaaggtgacaggtggtgcatggttgtcgtcagctcgtgtcgtgagatgttgggttaagtcccgcaacgagcgcaacccttgtcgttagttactaccattaagttgaggactctagcgagactgcctgggttaaccaggaggaaggtggggatgacgtcaaatcatcatgccccttatgtgtagggctacacacgtgctacaatggctggtacagagagatgcaataccgcgaggtggagccaaacttaaaaaccagtctcagttcggattgtaggctgaaactcgcctacatgaagctggagttactagtaatcgcgaatcagaatgccacggtgaatacgttcccgggccttgtacacaccgcccgtcacaccatgggagtgggttgcaaaagaagtaggtagcttaaccatcgggagggcgcttaccactttgtgattcatgactggggcg

SEQ ID NO: 1934 - DNA, 1390 bp, Artificial Sequence
  Synthetic polymer
agcggcggacgggtgagtaacacgtgggtaacctgccttgtagagggggatagccttccgaaaggaagattaataccgcataagattgtagtttcgcatgaaacagcaataaaaggagcaatccgctacaagatggacccgcggcgcattagctagttggtgaggtaacggctcaccaaggcgacgatgcgtagccgacctgagagggtgatcggccacattgggactgagacacggcccagactcctacgggaggcagcagtggggaatattgcacaatgggggaaaccctgatgcagcaacgccgcgtgagtgatgacggtcttcggattgtaaagctctgtctttggggacgataatgacggtacccaaggaggaagccacggctaactacgtgccagcagccgcggtaatacgtaggtggcgagcgttgtccggatttactgggcgtaaagggagcgtaggcggatttttaagtgggatgtgaaatacccgggctcaacctgggtgctgcattccaaactgggaatctagagtgcaggaggggagagtggaattcctagtgtagcggtgaaatgcgtagagattaggaagaacaccagtggcgaaggcgactctctggactgtaactgacgctgaggctcgaaagcgtggggagcaaacaggattagataccctggtagtccacgccgtaaacgatggatactaggtgtgggaggtatcaactccttccgtgccgccgctaacgcattaagtatcccgcctggggagtacggtcgcaagattaaaactcaaaggaattgacgggggcccgcacaagtagcggagcatgtggtttaattcgaagcaacgcgaagaaccttacctagacttgacatcttctgcattaccctgtaatgggggaagttccttcgggaacagaatgacaggtggtgcatggttgtcgtcagctcgtgtcgtgagatgttgggttaagtcccgcaacgagcgcaacccctattgttagttgctaccattaagttgagcactctagcgagactgcccgggttaaccgggaggaaggtggggatgacgtcaaatcatcatgccccttatgtctagggctacacacgtgctacaatggcaagtacagagagatgcgagaccgcgaggtggagctaaacttcaaaacttgtctcagttcggattgtaggctgaaactcgcctacatgaagctggagttactagtaatcgcgaatcagcatgtcgcggtgaatacgttcccgggccttgtacacaccgcccgtcacaccatgagagttggcaatacccaaagttcgtgagctaaccgtaaggaggcagcgacctaaggtagggtcagcgattggggtgaagtcgtaacaaggtagcc

SEQ ID NO: 1935 - DNA, 1386 bp, Artificial Sequence; identical to SEQ ID NO: 258
  Synthetic polymer

SEQ ID NO: 1936 - DNA, 1372 bp, Artificial Sequence
  Synthetic polymer
agagtttgatcctggctcaggattaacgctggcggcgtgcctaacacatgcaagtcgagcgatgaagcttccttcgggaaacggattagcggcggacgggtgagtaacacgtgggtaacctgccttatagtgggggatagcctttcgaaaggaagattaataccgcataagattgcagtatcgcatgatatagcaattaaaggagcaattcgctataagatggacccgcgtcgcattagctagttggtgaggtaacggctcaccaaggcgacgatgcgtagccgacctgagagggtgatcggccacattgggactgagacacggcccagactcctacgggaggcagcagtggggaatattgcacaatgggcgaaagcctgatgcagcaacgccgcgtgagtgatgacggccttcgggttgtaaaactctgtcttcagggacgataatgacggtacctgaggaggaagccacggctaactacgtgccagcagccgcggtaatacgtaggtggcaagcgttgtccggatttactgggcgtaaagggagcgtaggcggatgtttaagtgggatgtgaaatactcgggctcaacttgagtgctgcattccaaactggatatctagagtgcaggagaggaaaggagaattcctagtgtagcggtgaaatgcgtagagattaggaagaataccagtggcgaaggcgcctttctggactgtaactgacactgaggcacgaaagcgtggggagcaaacaggattagataccctggtagtccacgcagtaaacgatggataatagatgcagggggtattcactccttctgtgtcgcagctaacgcaataaagtatcccgcctggggagtgcggccgcaaggttgaaactcaaaggaattgacgggggcccgcacaagcagcggagcatgtggtttaattcgacgcaacgcgaaaaaccttaccaagacttgacatcgcgcgctatccctggaaacagggagttccttcgggacgcgcagacaggtggtgcatggttgtcgtcagctcgtgtcgtgagatgttcggttaagtccgataacgagcgcaaccctcattactagttgccaatattaagttaggaactctagtgagactgccgtggataacacggaggaaggtggggatgacgtcaaatcatcatgccccttacgtcttgggctacacacgtgctacaatggctactacaaagagctgcaaacccgtgagggcaagcgaatctcaaaaaggtagtctcagttcggattgtgggctgcaacccgcccacatgaagtcggagttgctagtaatcccgaatcagcatgtcggggtgaatgcgttcccgggccttgcacacaccgcccgt

SEQ ID NO: 1937 - DNA, 1344 bp, Artificial Sequence
  Synthetic polymer
ttcgcccttagagtttgatcctggctcaggacgaacgctggcggcgtgcttaacacatgcaagtcgagcgatgaagtttccttcgggaaacggattagcggcggacgggtgagtaacacgtgggtaacctgcctcatagaggggaatagcctttcgaaaggaagattaataccgcataagattgtaatgccgcatggcatagcaattaaaggagcaatccgctatgagatggacccgcgtcgcattagctagttggtgaggtaacggctcaccaaggcgacgatgcgtagccgacctgagagggtgatcggccacattgggactgagacacggcccagactcctacgagaggcagcagtggggaatattgcacaatgggggaaaccctgatgcagcaacgccgcgtgagtgatgacggtcttcggattgtaaagctctgtctttagggacgataatgacggtacctaaggaggaagccacggctaactacgtgccagcagccgcggtaatacgtaggtggcaagcgttgtccggatttactgggcgtaaagggagcgtaggtggatatttaagtgggatgtgaaatatccgggcttaacctgggtgctgcattccaaactggatatctagagtgcaggagaggaaaggagaattcctagtgtagcggtgaaatgcgtagagattaggaagaataccagtggcgaaggcgcctttctggactgtaactgacactgaggctcgaaagcgtggggagcaaacaggattagataccctggtagtccacgccgtaaacgaatgaataataggtgtgggggttgtcatgacctccgtgccgccgcctaacgcactaagtattctacctggggagtgcggtcgcaagattaaaactcaaaggaattgacgggggcccgcacaagcagcggagcatgtggtttaattcgaagcaacgcgaagaaccttacctagacttgacatctcctgcattactcttaatcgaggaagtcccttccgggacaggatgacaggtggtgcatggttgtcgtcagctcgtgtcgtgagatgttgggttaagtcccgcaacgagcgcaacccctattgttagttgccatcattaagttgggcactctagcgagactgcccgggttaaccgggaggaaggtggggatgacgtcaaatcatcatgccccttatgtctagggctacacacgtgctacaatggtcggtacaataagacgcaagcccgcgagggggagcaaaactggaaaaccgatctcagttcggattgtaggctgaaactcgcctacatgaagctggagttgctagtaatcgcgaatcagcatgtcg

SEQ ID NO: 1938 - DNA, 1382 bp, Artificial Sequence; identical to SEQ ID NO: 1118
  Synthetic polymer

SEQ ID NO: 1939 - DNA, 1324 bp, Artificial Sequence
  Synthetic polymer
ggatgaacgctggcggcgtgcctaacacatgcaagtcgagcgatttacttcggtaaagagcggcggacgggtgagtaacgcgtgggtaacctgccctgtacacacggataacataccgaaaggtatgctaatacgagataatatacttttatcgcatggtagaagtatcaaagctccggcggtacaggatggacccgcgtctgattagctagttggtaaggtaacggcttaccaaggcgacgatcagtagccgacctgagagggtgatcggccacattggaactgagacacggtccaaactcctacgggaggcagcagtggggaatattgcacaatgggcgaaagcctgatgcagcaacgccgcgtgagcgatgaaggccttcgggtcgtaaagctctgtcctcaaggaagataatgacggtacttgaggaggaagccccggctaactacgtgccagcagccgcggtaatacgtagggggctagcgttatccggaattactgggcgtaaagggtgcgtaggtggtttcttaagtcagaggtgaaaggctacggctcaaccgtagtaagcctttgaaactgggaaacttgagtgcaggagaggagagtggaattcctagtgtagcggtgaaatgcgtagatattaggaggaacaccagttgcgaaggcggctctctggactgtaactgacactgaggcacgaaagcgtggggagcaaacaggattagataccctggtagtccacgccgtaaacgatgagtactagctgtcggaggttacccccttcggtggcgcagctaacgcattaagtactccgcctgggaagtacgctcgcaagagtgaaactcaaaggaattgacggggacccgcacaagcagcggagcatgtggtttaattcgaagcaacgcgaagaaccttaccaggtcttgacatccatctaaagctgcggagacgcagtgtgagcaagctcgagatgagacaggtggtgcatggttgtcgtcagctcgtgtcgtgagatgttgggttaagtcccgcaacgagcgcaacccttgccggtagttactaacgggaagagccgaggactttaccgggaccgccggggacaactcggaggaaggtggggacgacgtcaaatcatcatgccccttatgacctgggctacacacgtgctacaatggccgagacagagggtagcgaaggcgcgagccggagcgaatctcaaaaaagcggtcacagttcggattgcgggctgcaacccgcccgcatgaagcaggagttgctagtaatcgcgaatcagcatgtcgcggtgaatacgttcccgggcct

SEQ ID NO: 1940 - DNA, 1494 bp, Artificial Sequence
  Synthetic polymer
agagtttgatcctggctcaggacgaacgctggcggcgtgcctaacacatgcaagtcgagcgaggaacttcggttcctagcggcggacgggcgagtaacacgtgggcaacctacctcatagagggggatagcctcccgaaagggagattaataccgcataacactgcggtttcgcatgaaactgcagttaaaggagcaatccgctatgagatgggcccgcggcgcattagctagttggtgaggtaacggctcaccaaggcgacgatgcgtagccgacctgagagggtgatcggccacattggaactgagacacggtccagactcctacgggaggcagcagtggggaatattgcacaatgggcgaaagcctgatgcagcaacgccgcgtggaggatgaaggccttcgggttgtaaactcttgtcttctgggacgataatgacggtaccagaggaggaagccacggctaactacgtgccagcagccgcggtaatacgtaggtggcgagcgttgtccggatttactgggcgtaaaggatgcgtaggcggatatttaagtgggatgtgaaatacccgggcttaacctgggtgctgcattccaaactggatatctagagtgcaggagaggaaagcggaattcctagtgtagcggtgaaatgcgtagagattaggaagaacaccagtggcgaaggcggctttctggactgtaactgacgctgaggcatgaaagcgtggggagcaaacaggattagataccctggtagtccacgccgtaaacgatgaatactaggtgtgggaggtaccaaaccttccgtgccgccgttaacacattaagtattccgcctggggagtacggtcgcaagattaaaactcaaaggaattgacgggggcccgcacaagcagcggagcatgtggtttaattcgaagcaacgcgaagaaccttacctagacttgacatctcctgaattaccggtaatgcgggaagcccttcggggcaggaagacaggtggtgcatggttgtcgtcagctcgtgtcgtgagatgttgggttaagtcccgcaacgagcgcaacccttattgttagttgctaccattcagttgagcactctagcgagactgccggggttaactcggaggaaggtggggatgacgtcaaatcatcatgccccttatgtctagggctacacacgtgctacaatggcgagtacaaagagatgcgataccgcgaggtggagccaaactcaaaaactcgtcccagttcggattgtaggctgaaactcgcctacatgaagccggagttgctagtaatcgcgaatcagaatgtcgcggtgaatacgttcccgggccttgtacacaccgcccgtcacaccatgagagttggcaatacccgaagtccgtagtctaaccgcaaggaggacgcggccgaaggtagggtcagcgattggggtgaagtcgtaacaaggtagccgtaggagaacctgcggctggatcacctcctt

SEQ ID NO: 1941 - DNA, 1436 bp, Artificial Sequence; identical to SEQ ID NO: 1029
  Synthetic polymer
  misc_feature (768)..(768): n is a, c, g, or t

SEQ ID NO: 1942 - DNA, 1359 bp, Artificial Sequence
  Synthetic polymer
agagtttgatcctggctcaggatgaaccctttcggcgtgcctaacacatgcaagtcgagcgatcttcttcggaagagagcggcggacgggtgagtaacgcgtgggtaacctgcctcatacacatggataacataccgaaaggtatgctaatacaagatgatataagagattcgcatggatttcttatcaaagctccggcggtatgagatggacccgcgtctgattagctagttggctaggtaacggcttaccaaggcgacgatcagtagccgacctgagagggtgatcggccacattggaactgagacacggtccaaactcctacgggaggcagcagtggggaatattgcacaatgggcgaaagcctgatgcagcaacgccgcgtgagcgatgaaggccttcgggtcgtaaagctctgtcctcaaggaagataatgacggtacttgaggaggaagccccggctaactacgtgccagcagccgcggtaatacgtagggggctagcgttatccggatttactgggcgtaaagggtgcgtaggtggtttcttaagtcaggagtgaaaggctacggctcaaccgtagtaagctcttgaaactgggaaacttgagtgcaggagaggaaagtggaattcctagtgtagcggtgaaatgcgtagagattaggaggaacatcggtggcgaaggcgactttctggctgacaactgacgctgaggcgcgaaagcgtggggagcgaacaggattagataccctggtagtccacgccgtaaacgctgattactaggtgtagggggtatcgactccctctgtgccgcagttaacgcaataagtaatccacctggggagtacggccgcaaggttaaaactcaaaggaattgacgggggcccgcacaagcagtggagtatgtggtttaattcgaagcaacgcgaagaaccttaccagggcttgacatcctctggacggtgtagagatacactttcccttcggggcagagagacaggtggtgcatggttgtcgtcagctcgtgtcgtgagatgttcggttaagtccggcaacgagcgcaacccctattgttagttgccatcattcagttgggcactctagcgagactgccgttgacaaaacggaggaaggtgggggcgacgtcaaatcatcatgccccttatgtcctgggctacacacgtactacaatggtaacaacagcgagaagccagaccgcgaggttgagcggatcttgaaatgttatctcagttcagattgcaggctgcaactcgcctgcatgaagtaggaattgctagtaatggcaggtcagcatactgccgtgaatacgttcccgggccttgcacacaccgcccgtca

SEQ ID NO: 1943 - DNA, 1348 bp, Artificial Sequence; identical to SEQ ID NO: 704
  Synthetic polymer

SEQ ID NO: 1944 - DNA, 1360 bp, Artificial Sequence; identical to SEQ ID NO: 966
  Synthetic polymer

SEQ ID NO: 1945 - DNA, 1333 bp, Artificial Sequence
  Synthetic polymer
agagtttgatcctggctcaggatgaacgctggcggcgtgcctaacacatgcaagtcgagcgattctcttcggagaagagcggcggacgggtgagtaacgcgtgggtaacctgccctgtacacacggataacataccgaaaggtatgctaatacgggataatatataagagtcgcatgacttttatatcaaagatttttcggtacaggatggacccgcgtctgattagcttgttggcggggtaacggcccgccaaggcgacgatcagtagccgacctgagagggtgatcggcacattggaactgagacacggtccaaactcctacgggaggcagcagtggggaatattgcacaatgggcgcaagcctgatgcagcaacgccgcgtgagcgatgaaggccttcgggtcgtaaagctctgtcctcaaggaagataatgacggtacttgaggaggaagccccggctaactacgtgccagcagccgcggtaatacatagggggctagcgttatccggatttactgggcgtaaagggtgcgtaggcggtctttcaagtcaggagttaaaggctacggctcaaccgtagtaagctcctgatactgtctgacttgagtgcaggagaggaaagcggaattcccagtgtagcggtgaaatgcgtagatattgggaggaacaccagtagcgaaggcggctttctggactgtaactgacgctgaggcacgaaagcgtggggagcaaacaggattagataccctggtagtccacgcggtaaacgatgaatgctaggtgtaggaggtatcgaccccttctgtgccgcagtaaacacaataagcattccgcctggggagtacggccgcaaggttgaaactcaaaggaattgacgggggcccgcacaagcagcggagcatgtggtttaattcgaagcaacgcgaagaaccttaccaggtcttgacatccgtgtaaaacccaagagattgggtgtgagcttgctcaatacgagacaggtggtgcatggttgtcgtcagctcgtgtcgtgagatgttgggttaagtcccgcaacgagcgcaacccctatcgtccgttactaacacgtcaaggtgaggactcagacgagaccgccggggacaactcggaggaaggtggggacgacgtcaaatcatcatgccccttacgacctgggctacacacgtgctacattgggtacaacaaagggaagcgaaaccgcaaggtggagcgaaacccataaaagtactctcagttcagattgtgggctgcaacccgcccacatgaagttggagttgctagtaatcgcggatcagcatgccgcggtgaatacg

SEQ ID NO: 1946 - DNA, 1345 bp, Artificial Sequence
  Synthetic polymer
ttcgcccttatagtttgatcctggctcaggacgaacgctggcggcctgcttaacacatgcaagtcgagcgatgaagcttcttcgggagtggattaacggcggacgggtgagtaacacgtgggtaacctgccttgtagagaggaatagccattcgaaaggatgattaatacctcataatattgtagtttcgcatggagcaacaatcaaaggagcaatccgctacaagatggacccgcggcgcattagctagttggtgaggtaacggctcaccaaggcgacgatgcgtagccgacctgagagggtgatcggccacattgggactgagacacggcccagactcctacgggaggcagcagtggggaatattgcacaatgggggaaaccctgatgcagcaacgccgcgtgagtgatgacggtcttcggattgtaaagctctgtcttcagggacgataatgacggtacctgaggaggaagccacggctaactacgtgccagcagccgcggtaatacgtaggtggcaagcgttgtccggatttactgggcgtaaagggagtgtaggcggacttttaagtgggatgtgaaatacccgggcttaacctgggtgctgcattccaaactgggagtctagagtgcaggaggggaaagtggaattcctagtgtagcggtgaaatgcgtagagattaggaagaacaccggtggcgaaggcgactttctggactgtaactgacgctgaggctcgaaagcgtggggagcgaacaagattagataccctggtagtccacgccgtaacccaccaaaaaggggtgtaggggtggtcatgacctctgtgccgcccgctaacgcaataagtattccgcctggggagtacggtcgcaagataaaaactcaaaggaattgacgggggcccgcacaagcagcggagcatgtggtttaatttgaagcaacgcgaagaaccttacctagacttgacatctcctgaattactctgtaatggaggaagccacttcggtggcaggaagacaggtggtgcatggttgtcgtcagctcgtgtcgtgagatgttgggttaagtcccgcaacgagcgcaacccttattgttagttgctaccatttagttgagcactctagcgagactgcccgggttaaccgggaggaaggtggggatgacgtcaaatcatcatgccccttatgtctagggctacacacgtgctacaatggccggtacaattagaagccaaaccgtgaggtggagcaaaactattaaaaccggtctcagttcggaaaataggctgaaactcgcctacatgaagctggagttgctagtaatcgcgaatcagcatgtcgcg

SEQ ID NO: 1947 - DNA, 1403 bp, Artificial Sequence; identical to SEQ ID NO: 296
  Synthetic polymer

SEQ ID NO: 1948 - DNA, 1353 bp, Artificial Sequence
  Synthetic polymer
agagtttgatcctggctcaggatgaacgctggcggcgtgcctaacacatgcaagtcgagcgatttacttcggtaaagagcggcggacgggtgagtaacgcgtgggtaacctgcctcatacacatggataacataccgaaaggtatgctaatacaggataatataagagattcgcatggatttcttatcaaagctccggcggtatgagatggacccgcgtctgattagctagttggtagggtaacggcttaccaaggcgacgatcagtagccgacctgagagggtgatcggccacattggaactgagacacggtccaaactcctacgggaggcagcagtggggaatattgcacaatgggcgaaagcctgatgcagcaacgccgcgtgagcgatgaaggccttcgggtcgtaaagctctgtcctcaaggaagataatgacggtacttgaggaggaagccccggctaactacgtgccagcagccgcggtaatacgtagggggctagcgttatccggatttactgggcgtaaagggtgcgtaggtggtttcttaagtcaggagtgaaaggctacggcttaaccgtagtaagctcttgaaactgggaaacttgagtgcaggagaggaaagtggaattcctagtgtagcggtgaaatgcgtagatattaggaggaacaccagtagcgaaggcggctttctggactgtaactgacactgaggcacggaagcgtggggagcaaacaggattagataccctggtagtccacgccgtaaacgatgattactaggtgtggggggactgaccccttccgtgccggagcaaacgcaataagtaatccacctggggagtacggccgcaaggctgaaactcaaaggaattgacgggggcccgcacaagcagtggagtatgtggtttaattcgaagcaacgcgaagaaccttaccaggtcttgacatcgagtgaagacttaagagattaagtcgccttcgggcacaaagacaggtggtgcatggttgtcgtcagctcgtgtcgtgagatgttgggttaagtcccgcaacgagcgcaacccttaccattagttgctacgcaagagcactctaatgggactgccgttgacaaaacggaggaaggtggggatgacgtcaaatcatcatgccccttatgacctgggctacacacgtactacaatggcaataaaacagagggaagcaatacagcgatgtaaagcaaaacccgaaaaattgtctcagttcggattgcaggctgcaactcgcctgcatgaagtcggaattgctagtaatcgcagatcagcatgctgcggtgaatacgttcccgggccttgcacacaccgcccgtca

SEQ ID NO: 1949 - DNA, 1375 bp, Artificial Sequence; identical to SEQ ID NO: 1013
  Synthetic polymer

SEQ ID NO: 1950 - DNA, 1380 bp, Artificial Sequence
  Synthetic polymer
agagtttgatcctggctcaggatgaacgctggcggcgcacttaagacatgcaagtcgaacggaaatttatttgaagtttactttagataaattttagtggcggacgggtgagtaatacgtaggcaacctgcctcaaagagaggaataactgggagaaatttcagctaatacctcataagaccacactgcggcatcgcagaggggtcaaaggagcaatccgctttgagatgggcctacggctgattagtttgttggtggggtaacggcctaccaaggcgacgatgcgtagccgacctgagagggtgatcggccacattgggactgagacacggcccagactcctacgggaggcagcagtggggaatattgcacaatgggggaaaccctgatgcagcaacgccgcgtgagtgatgaaggttttcggatcgtaaagctctgtctttggggaagataatgacggtacccaaggaggaagccacggctaactacgtgccagcagccgcggtaatacgtaggtggcgagcgttatccggatttactgggcgtaaagggagcgtaggcggatgattaagtgggatgtgaaatacccgggctcaacttgggtgctgcattccaaactggttatctagagtgcaggagaggagagtggaattcctagtgtagcggtgaaatgcgtagagattaggaagaacaccagtggcgaaggcgactctctggactgtaactgacgctgaggctcgaaagcgcggggagcaaacaggattagataccctggtagtccacgccgtaaacgatgaatactaggtgtgggggtttcaacacctccgtgccgccgctaacgcattaagtattccgcctggggagtacggtcgcaagattaaaactcaaaggaattgacggggacccgcacaagtagcggagcatgtggtttaattcgaagcaacgcgaagaaccttacctacacttgacatcccttgcattactcttaatcgaggaaatcccttcggggacaaggtgacaggtggtgcatggttgtcgtcagctcgtgtcgtgagatgttgggttaagtcccgcaacgagcgcaacccttgtcgttagttactaccactaagttgaggactctagcgagactgcctgggttaaccaggaggaaggtggggatgacgtcaaatcatcatgccccttatgtgtagggctacacacgtgctacaatggccggtacaaagagacgcaagaccgcgaggtggagcaaatctcaaaaaccggccccagttcggattgtaggctgcaactcgcctacatgaagccggagttgctagtaatcgcagatcagaatgctgcggtgaatgcgttcccgggtcttgcactcaccgcccgtca

SEQ ID NO: 1951 - DNA, 1391 bp, Artificial Sequence; identical to SEQ ID NO: 631
  Synthetic polymer

SEQ ID NO: 1952 - DNA, 1361 bp, Artificial Sequence
  Synthetic polymer
agagtttgatcctggctcaggatgaacgctggcggcgtgcctaacacatgcaagtcgagcgattctcttcggagaagagcggcggacgggtgagtaacgcgtgggtaacctgccctgtacacacggataacataccgaaaggtatgctaatacgggataatatataagagtcgcatgacttttatatcaaagatttttcggtacaggatggacccgcgtctgattagcttgttggcggggtaacggcccaccaaggcgacgatcagtagccgacctgagagggtgatcggccacattggaactgagacacggtccaaactcctacgggaggcagcagtggggaatattgcacaatgggcgcaagcctgatgcagcaacgccgcgtgagcgatgaaggccttcgggtcgtaaagctctgtcctcaaggaagataatgacggtacttgaggaggaagccccggctaactacgtgccagcagccgcggtaatacgtagggggctagcgttatccggatttactgggcgtaaagggtgcgtaggcggtctttcaagtcaggagttaaaggctacggctcaaccgtagtaagctcctgatactgtctgacttgagtgcaggagaggaaagcggaattcccagtgtagcggtgaaatgcgtagatattgggaggaacaccagtagcgaaggcggctttctggactgtaactgacgctgaggcacgaaagcgtggggagcaaacaggattagataccctggtagtccacgctgtaaacgatgagtactaggtgtcggaggttacccccttcggtgccgcagctaacgcattaagtactccgcctggggagtacgcacgcaagtgtgaaactcaaaggaattgacggggacccgcacaagtagcggagcatatggtttaattcgaagcaacgcgaagaaccttacctaggcttgacatccttctgaccgaggactaatctcctctttccctccggggacagaagtgacaggtggtgcatggttgtcgtcagctcgtgtcgtgagatgttgggttaagtcccgcaacgagcgcaacccttgtcattagttgccatcattaagttgggcactctagtgagactgccggggataactcggaggaaggtggggatgacgtcaaatcatcatgccccttatgttctgggctacacacgtgctacaatggccggtacaaagagaagcaagactgtgaggtggagcaaatctcaaaaaccggccccagttcggattgtaggctgcaactcgcctacatgaagtcggagttgctagtaatcgcagatcagaatgctgcggtgaatgcgttcccgggtcttgcactcaccgcccgtca

SEQ ID NO: 1953 - DNA, 1324 bp, Artificial Sequence
  Synthetic polymer
agagtttgatcctggctcaggatgaacgctggcggcgtgcctaacacatgcaagtcgagcgatctcttcggagagagcggcggacgggtgagtaacgcgtgggtaacctgccctgtacacacggataacataccgaaaggtatgctaatacgggataatatataagagtcgcatgacttttatatcaaagatttttcggtacaggatggacccgcgtctgattagcttgttggcggggtaacggcccaccaaggcgacgatcagtagccgacctgagagggtgatcggccacattggaactgagacacggtccaaactcctacgggaggcagcagtggggaatattgcacaatgggcgcaagcctgatgcagcaacgccgcgtgagcgatgaaggccttcgggtcgtaaagctctgtcctcaaggaagataatgacggtacttgaggaggaagccccggctaactacgtgccagcagccgcggtaatacgtagggggctagcgttatccggatttactgggcgtaaagggtgcgtaggcggtctttcaagtcaggagttaaaggctacggctcaaccgtagtaagctcctgatactgtctgacttgagtgcaggagaggaaagcggaattcccagtgtagcggtgaaatgcgtagatattgggaggaacaccagtagcgaaggcggctttctggactgtaactgacgctgaggcacgaaagcgtggggagcaaacaggattagataccctggtagtccacgctgtaaacgatgagtactaggggtcggaaggtaccccccttcggtgccgcagctacgctttaagtactccgcctggggagtacgcacgcaacagtgatactcataggaatgaccgggagacccgcacaagcggtggagcatgtggtttaatttgaaggcatcgcgaagatccttaccaagtcttgacatcccactgaccggacagtaatgtgtccttcccttcggggcagtggagacaggtggtgcatggttgtcgtcagctcgtgtcgtgagatgttgggttaagtcccgcaacgagcgcaaccctcattcttagtagccagcagttcggctgggcactctagggagactgccagggataacctggaggaaggtggggatgacgtcaaatcatcatgccccttatgacttgggctacacacgtgctacaatggcgtaaacaaagtgaagcaaagctgtgaagtcaagcgaatctcataaattacgtctcagttcggattgaagtctgcaacccgacttcatgaagctggaatcgctagtaatcgcgaatcagcatgtcgcgg

SEQ ID NO: 1954 - DNA, 1382 bp, Artificial Sequence; identical to SEQ ID NO: 607
  Synthetic polymer

SEQ ID NO: 1955 - DNA, 1362 bp, Artificial Sequence; identical to SEQ ID NO: 213
  Synthetic polymer

SEQ ID NO: 1956 - DNA, 1478 bp, Artificial Sequence; identical to SEQ ID NO: 702
  Synthetic polymer

SEQ ID NO: 1957 - DNA, 1362 bp, Artificial Sequence
  Synthetic polymer
agagtttgatcctggctcaggatgaacgctggcggcgtgcctaacacatgcaagtcgagcgattctcttcggagaagagcggcggacgggtgagtaacgcgtgggtaacctgccctgtacacacggattacataccgaaaggtatgctaatacgggataatatataagagtcgcatgacttttatatcaaagatttttcggtacaggatggacccgcgtctgattagcttgttggcggggtaacggcccaccaaggcgacgatcagtagccgacctgagagggtgatcggccacattggaactgagacacggtccaaactcctacgggaggcagcagtggggaatattgcacaatgggcgcaagcctgatgcagcaacgccgcgtgagcgatgaaggccttcgggtcgtaaagctctgtcctcaaggaagataatgacggtacttgaggaggaagccccggctaactacgtgccagcagccgcggtaatacgtagggggctagcgttatccggatttactgggcgtaaagggtgcgtaggcggtctttcaagtcaggagttaaaggctacggctcaaccgtagtaagctcctgatactgtctgacttgagtgcaggagaggaaagcggaattcccagtgtagcggtgaaatgcgtagatattaggaggaacaccagtggcgaaggcggcttactggacggtaactgacgttgaggctcgaaagcgtggggagcaaacaggattagataccctggtagtccacgccgtaaacgatgaatactaggcgtcggggagcagagctcttcggtgccgcagcaaacgcagtaagtattccacctggggagtacgttcgcaagaatgaaactcaaaggaattgacggggacccgcacaagcggtggagcatgtggtttaattcgaagcaacgcgaagaaccttaccaagtcttgacatccccctgaccgcaccttaaccggtgctttccttcgggacaggggagacaggtggtgcatggttgtcgtcagctcgtgtcgtgagatgttgggttaagtcccgcaacgagcgcaacccttatccttagtagccagcggtttggccgggcactctggggagactgccagggataacctggaggaaggtggggatgacgtcaaatcatcatgccccttatgatttgggctacacacgtgctacaatggcgtaaacaaagggaagcgatcacgtgagtgtgagcaaatctcaaaaataacgtcccagttcggactgtagtctgcaacccgactacacgaagctggaatcgctagtaatcgcaggtcagcatactgcggtgaatacgttcccgggtcttgcactcaccgcccgtca

SEQ ID NO: 1958 - DNA, 1341 bp, Artificial Sequence
  Synthetic polymer
ggcgtgcctaacacatgcaagtcgagcgagtggatttctttcgggattgaagctagcggcggacgggtgagtaacacgtaggcaacctgcctcatagaggggaatagccccccgaaagggagattaataccgcataagattgtagcttcgcatgaagtagcaattaaaggagcaatccgctatgagatgggcccgcggcgcattagccagttggtgaggtaacggctcaccaaggcgacgatgcgtagccgacctgagagggtgatcggccacattgggactgagacacggcccagactcctacgggtggcagcagtggggaatattgcacaatgggggaaaccctgatgcagcaacgccgcgtgagtgatgacggccttcaggttgtaaagctctgtcttcagggacgataatgacggtacctgaggaggaagccacggctaactacgtgccagcagccgcggtaatacgtaggtggcgagcgttgtccggatttactgggcgtaaagggagcgtaggcggacttttaagtgagatgtgaaatacccgggctcaacttgggtgctgcatttcaaactggaagtctagagtgcgggagaggagaatggaattcctagcgtagcggtgaaatgcgtagagattaggaagaacaccactggcgaaggcgattctctggactgtagctgacgctgaggctcgaaagcgtggggagcaaactggattagataccctggtagtccacgccgtaaacgaggaatactaaggtgtaggggttgtcatgacctctgtgccgccgctaacgcattaagtattccgcctggggagtacggtcgcaagattaaaactcaaaggaattgacgggggcccgcacaagcagcggagcatgtggtttaattcgaagcaacgcgaagaaccttacctagacttgacatctcctgaattacccgtaattggggaagtcgcttcggcgacaggaagtcaggtggtgcatggttgtcgtcagctcgtgtcgtgagatgttggattaagtcccgcaacgagcgcaacccctattgttagttgctaccattaagttgagcactctagcgagactgcccgggttaaccgggaggaaggtggggatgacgtcaaatcatcatgccccttatgtctagggctacacacgtgctacaatggcaagtacaaagagaagcaagaccgcgaggtggagcaaaactcaaaaacttgtctcagttcggattgtaggctgaaactcgcctacatgaagctggagttgctagtaatcgcgaatcagcatgtcgcggtgaatacgttcccgggccttgcactcaccgcccgtca

SEQ ID NO: 1959 - DNA, 1474 bp, Artificial Sequence
  Synthetic polymer
agagtttgatcctggctcaggacgaacgctggcggcgtgcctaacacatgcaagtcgagcgaatgaagttccttcgggaatggatttagcggcggacgggtgagtaacacgtgggcaacctgcctcatagaggggaatagccttccgaaagggagattaataccgcataagattgtagtaccgcatggtacagcaattaaaggagcaatccgctatgagatgggcccgcggcgcattagctggttggtgaggtaacggctcaccaaggcgacgatgcgtagccgacctgagagggtgatcggccacattgggactgagacacggcccagactcctacgggaggcagcagtggggaatattgcacaatgggggaaaccctgatgcagcaacgccgcgtgagtgatgacggccttcgggttgtaaagctctgtcttcagggacgataatgacggtacctgaggaggaagccacggctaactacgtgccagcagccgcggtaatacgtaggtggcgagcgttgtccggatttactgggcgtaaagggagcgtaggcggatttttaagtgagatgtgaaatactcgggcttaacctgagtgctgcatttcaaactggaagtctagagtgcaggagaggagaagggaattcctagtgtagcggtgaaatgcgtagagattaggaagaacaccagtggcgaaggcgcttctctggactgtaactgacgctgaggctcgaaagcgtggggagcaaacaggattagataccctggtagtccacgccgtaaacgatgaatactaggtgtaggggttgtcatgacctctgtgccgccgctaacgcattaagtattccgcctggggagtacggtcgcaagattaaaactcaaaggaattgacgggggcccgcacaagcagcggagcatgtggtttaattcgaagcaacgcgaagaaccttacctagacttgacatctcctgcattactcttaatcgaggaagtcccttcggggacaggatgacaggtggtgcatggttgtcgtcagctcgtgtcgtgagatgttgggttaagtcccgcaacgagcgtaacccctatctttagtagccagcagttcggctgggcactctagagagactgccagggataacctggaggaaggtggggatgacgtcaaatcatcatgccccttatgactagggctacacacgtgctacaatggcaattacaaagggaagcagcctcgtgagagtgagcaaatcccaaaaaggttgcctcagttcggattgtagtctgcaactcgactacatgaagctggaatcgctagtaatcgcagatcagaatgctgcggtgaatacgttcccgggtcttgtacacaccgcccgtcacaccatgggagtcagtaacacccgaagtcagtggcccaaccgcaaggagggagctgccgaaggtgggaccgataactggggtgaagtcgtaacaaggta

SEQ ID NO: 1960 - DNA, 1361 bp, Artificial Sequence
  Synthetic polymer
agagtttgatcctggctcaggacgaacgctggcggcgtgcctaacacatgcaagtcgagcgaatggagttccttcgggaacggatttagcggcggacgggtgagtaacacgtgggcaacctgcctcatagaggggaatagccttccgaaagggagattaataccgcataagattgtagtaccgcatggtacagcaattaaaggagcaatccgctatgagatgggcccgcggcgcattagctagttggtgaggtaacggctcaccaaggcgacgatgcgtagccgacctgagagggtgatcggccacattgggactgagacacggcccagactcctacgggaggcagcagtggggaatattgcacaatgggggaaaccctgatgcagcaacgccgcgtgagtgatgacggccttcgggttgtaaagctctgtcttcagggacgataatgacggtacctgaggaggaagccacggctaactacgtgccagcagccgcggtaatacgtaggtggcgagcgttgtccggatttactgggcgtaaagggagcgtaggcggatttttaagtgagatgtgaaatactcaggcttaacctgagtgctgcatttcaaactggaagtctagagtgcaggagaggagaagggagttcctagtgtagcggtgaaatgcgtagagattaggaagaacaccagtggcgaaggcgcttctctggactgtaactgacgctgaggctcgaaagcgtggggagcaaacaagattagataccctggtagtccacgccgtaaacgatgaatactaggtgtagggggtatcgaccccctctgcgccgcagtcaacacattaagtattccacctggggagtacggccgcaaggctgaaactcaaaggaattgacggggacccgcacaagcagtggagtatgtggtttaattcgacgcaacgcgaagaaccttaccagggcttgacatccctcgctatccctagagatagggagttcccttcggggacgaggagacaggtggtgcatggttgtcgtcagctcgtgtcgtgagatgttcggttaagtccggcaacgagcgcaacccctattgtctgttactaccattaagttgaggactcagacgagactgccgttaataaagcggaggaaggtggggacgacgtcaaatcatcatgccccttatgtcctgggctacacacgtactacaatggctaccacagagggcagcaacgccgcgaggccaagcgaatccccaaaggtagtcccagttcggattgcaggctgcaactcgcctgcatgaagttggaattgctagtaatggcaggtcagcatactgccgtgaatacaatcccgggtcttgcac

SEQ ID NO: 1961 - DNA, 1361 bp, Artificial Sequence
  Synthetic polymer
agagtttgatcctggctcaggatgaacgctggcggcgtgcctaacacatgcaagtcgagcgattctcttcggagaagagcggcggacgggtgagtaacgcgtgggtaacctgccctgtacacacggataacataccgaaaggtatgctaatacgggataatatataagagtcgcatgacttttatatcaaagatttttcggtacaggatggacccgcgtctgattagcttgttggcggggtaacggcccaccaaggcgacgatcagtagccgacctgagagggtgatcggccacattggaactgagacacggtccaaactcctacgggaggcagcagtggggaatattgcacaatgggcgcaagcctgatgctgcaacgccgcgtgagcgatgaaggccttcgggtcgtaaagctctgtcctcaaggaagataatgacggtacttgaggaggaagccacggctaactacgtgccagcagccgcggtaatacgtaggtggcgagcgttatccggatttactgggcgtaaagggagcgtaggcggtctttcaagtcaggagttaaaggctacggctcaaccgtagtaagctcctgatactgtctgacttgagtgcaggagaggaaagcggaattcccagtgtagcggtgaaatgcgtagatattgggaggaacaccagtagcgaaggcggctttctggactgtaactgacgctgaggcacgaaagcgtggggagcaaacaggattagataccctggtagtccacgctgtaaacgatgagtactaggtgtcggaggttacccccttcggtgccgcagctaacgcattaagtactccgcctggggagtacggccgcaaggctaaaactcaaaggaattgacgggggcccgcacaagcagcggagcatgtggcttaattcgaagcaacgcgaagaaccttaccaagtcttgacatccccctgaccggtccttaaccggacctttccttcgggacaggggagacaggtggtgcatggttgtcgtcagctcgtgtcgtgagatgttgggttaagtcccgcaacgagcgcaacccctatccccagtagccagcggtaaggccgggcactctggagagactgccagggataacctggaggaaggtggggatgacgtcaaatcatcatgccccttatgagcagggctacacacgtgctacaatggcgtaaacaaagggaagcagagtcgtgaggccgagcaaatcccaaaaataacgtctcagttcggattgtagtctgcaactcgactacatgaagctggaatcgctagtaatcgcgaatcagaatgtcgcggtgaatacgttcccgggtcttgcacacaccgcccgtca

SEQ ID NO: 1962 - DNA, 1374 bp, Artificial Sequence; identical to SEQ ID NO: 708
  Synthetic polymer

SEQ ID NO: 1963 - DNA, 1362 bp, Artificial Sequence; identical to SEQ ID NO: 175
  Synthetic polymer

SEQ ID NO: 1964 - DNA, 1362 bp, Artificial Sequence
  Synthetic polymer
agagtttgatcctggctcaggatgaacgctggcggcgtgcctaacacatgcaagtcgagcgattctcttcggagaagagcggcggacgggtgagtaacgcgtgggtaacctgccctgtacacacggataacataccgaaaggtatgctaatacgggataatatataagagtcgcatgacttttatatcaaagatttttcggtacaggatggacccgcgtctgattagcttgttggcggggtaacggcccaccaaggcgacgatcagtagccgacctgagagggtgatcggccacattggaactgagacacggtccaaactcctacgggaggcagcagtggggaatattgaacaatgggcgcaagcctgatgcagcaacgccgcgtgagcgatgaaggccttcgggtcgtaaagctctgtcctcaaggaagataatgacggtacttgaggaggaagccccggctaactacgtgccagcagccgcggtaatacgtagggggctagcgttatccggatttactgggcgtaaagggtgcgtaggcggtctttcaagtcaggagttaaaggctacggctcaaccgtagtaagctcctgatactgtctgacttgagtgcaggagaggaaagcggaattcccagtgtagcggtgaaatgcgtagatattgggaggaacaccagtagcgaaggcggctttctggactgtaactgacgctgaggcacgaaagcgtggggagcaaacaggattagataccctggtagtccacgctgtaaacgatgagtactaggtgtcgggtggcagagccattcggtgccgcagcaaacgcagtaagtattccacatggggagatcataagcaagaaagaaactcaaagaaatagaaggggacaagcacaaaaggtggagcatgaggttaaagtcgatgcaacacggagaacctcaccaagtcttgacatccccctgcgcggtccttaaccggacctttccttagggacaggggagacaggtggtgcaaggttgtcgtcagctcgtgtcgtgagatgttgggttaagtcccgcaacgagagcaacccctatccttagtagccagcatggaagatgggcactctgaggagactgccagggataacctggaggaaggcggggatgacgtcaaatcatcatgccccttatgatttgggctacacacgtgctacaatggcgtaaacaaagggaagcgagagtgtgagcttaagcaaatcccaaaaataacgtcccagttcggactgcagtctgcaactcgactgcacgaagctggaatcgctagtaatcgcggatcagaatgccgcggtgaatacgatcccgggtcttgcacacaccgcccgtca

SEQ ID NO: 1965 - DNA, 1367 bp, Artificial Sequence; identical to SEQ ID NO: 639
  Synthetic polymer

SEQ ID NO: 1966 - DNA, 1350 bp, Artificial Sequence; identical to SEQ ID NO: 688
  Synthetic polymer

SEQ ID NO: 1967 - DNA, 1374 bp, Artificial Sequence; identical to SEQ ID NO: 718
  Synthetic polymer

SEQ ID NO: 1968 - DNA, 1358 bp, Artificial Sequence; identical to SEQ ID NO: 869
  Synthetic polymer

SEQ ID NO: 1969 - DNA, 1355 bp, Artificial Sequence
  Synthetic polymer
atcatggctcaggacgaacgctggcggcgtgcctaacacatgcaagtcgagcgatgaagcccttcggggtggattagcggcggacgggtgagtaacacgtgggtaacctgccttatagagggggatagccttccgaaaggaagattaataccgcatgaaatgtttttatcgcatggtagaaacatcaaaggagtaatccgctataagatggacccgcggcgcattagctagttggtgaggtaacggcccaccaaggcgacgatgcgtagccgacctgagagggtgatcggccacattggaactgagacacggtccagactcctacgggaggcagcagtggggaatattgcgcaatgggggaaaccctgacgcagcaacgccgcgtgaatgaagaaggccttagggttgtaaagttctgttttctgggacgataatgacggtaccagaggaggaagccacggctaactacgtgccagcagccgcggtaatacgtaggtggcaagcgttgtccggatttactgggcgtaaaggatgcgtaggcggatgtttaagtgagatgtgaaatacccgagctcaacttgggtgctgcatttcaaactggatatctagagtgcaggagaggaaagcggaattcctagtgtagcggtgaaatgcgtagagattaggaagaacaccagtggcgaaggcggctttctggactgtaactgacgctgaggcatgaaagcgtggggagcaaacaggattagataccctggtagtccacgccgtaaacgatgaatactaggtgtaggaggtatcgactccttctgtgccgcagttaacacaataagtattccgcctggggagtacgatcgcaagattaaaactcaaaggaattgacgggggcccgcacaagcagcggagcatgtggtttaattcgaagcaacgcgaagaatcttacctagacttgacatctcctgaattacccttaaccggggaagcccttcggggcaggaagacaggtggtgcatggttgtcgtcagctcgtgtcgtgagatgttgggttaagtcccgcaacgagcgcaacccttatcattagttgctaccattaagttgagcactctagtgagactgccacggttaacgtggaggaaggtggggatgacgtcaaatcatcatgccccttatgtctagggctacacacgtgctacaatggctggtacaaagagacgcaagaccgcgaggtggagcaaatctcaaaaaccagtcccagttcggattgtaggctgcaactcgcctacatgaagttggagttgctagtaatcgcgaatcagaatgtcgcggtgaatgcgttcccgggtcttgtacacaccgcc

SEQ ID NO: 1970 - DNA, 1369 bp, Artificial Sequence
  Synthetic polymer
ttagagtttgatcctggctcaggacgacctctggcggcgtgcctaacacatgcaagtcgagcgaatgaagttccttcgggaacggatttagcggcggacgggtgagtaacacgtgggcaacctgcctcatagaggggaatagccttccgaaagggagattaataccgcataagattgtagtaccgcatggtacagcaattaaaggagcaatccgctatgagatgggcccgcggcgcattagctagttggtgaggtaacggctcaccaaggcgacgatgcgtagccgacctgagagggtgatcggccacattgggactgagacacggcccagactcctacgggaggcagcagtggggaatattgcacaatgggggaaaccctgatgcagcaacgccgcgtgagtgatgacggccttcgggttgtaaagctctgtcttcagggacgataatgacggtacctgaggaggaagccacggctaactacgtgccagcagccgcggtaatacgtaggtggcgagcgttgtccggatttactgggcgtaaagggagcgtaggcggatttttaagtgagatgtgaaatactcaggcttaacctgagtgctgcatttcaaactggaagtctagagtgcaggagaggagaagggaattcctagtgtagcggtgaaatgcgtagatattaggaggaacatcagtggcgaaggcggcttactgggcttttactgacgctgaggcccgaaagcgtggggagcaaacaggattagataccctggtagtccacgctgtaaacgatgattactaggtgtggggggactgaccccttccgtgccgcagttaacacaataagtaatccacctggggagtacgaccgcaaggttaaaactcaaaggaattgacgggggcccgcacaagcagtggagtatgtggtttaattcgaagcaacgcgaaaaaccttaccaggtcttgacatcgagtgaagtattaagagattaatacgtctttcgggacacgaagacaggtggtgcatggttgtcgtcagctcgtgtcgtgagatgttgggttaagtcccgcaacgagcgcaacccttatcattagttgctacgcaagagcactctaatgagactgccgttgacaaaacggaggaaggtggggatgacgtcaaatcatcatgccccttatgacctgggctacacacgtactacaatggcaattaacagagggaagcaaatcagcgatggtaagcaaatctcaaaaaattgtctcagttcggattgcaggctgcaactcgcctgcatgaagtcggaattgctagtaatcgcgaatcagcatgtcgcggtgaatacgttcccgggccttgtacacaccgcccgtca

SEQ ID NO: 1971 - DNA, 1440 bp, Artificial Sequence; identical to SEQ ID NO: 520
  Synthetic polymer

SEQ ID NO: 1972 - DNA, 1374 bp, Artificial Sequence; identical to SEQ ID NO: 1104
  Synthetic polymer
  misc_feature (774)..(775): n is a, c, g, or t

SEQ ID NO: 1973 - DNA, 1390 bp, Artificial Sequence
  Synthetic polymer
ttcgcccttagagtttgatccttgctcaggacgaacgctggcggcgtgcttaacacatgcaagtcgagcggggatcgtggaagttttcggacggaagcgattctagcggcggacgggtgagtaacgcgtgaacaatctgtcccagacagtggaataacaggtggaaacatctgctaataccgcataagaccccggagccacctggttctgaggtaaaaggagcaatccggtttggggtgagttcgcgtccgattagctagttggtggggtaaaggcctaccaaggcgacgatcggtagccgacctgagagggtgatcggccacattgggactgagacacggcccagactcctacgggaggcagcagtggggaatattgcacaatgggggaaaccctgatgcagcaacgccgcgtgagtgatgacggccttcgggttgtaaagctctgtcttcagggacgataatgacggtacctgaggaggaagccacggctaactacgtgccagcagccgcggtaatacgtaggtggcgagcgttgtccggatttactgggcgtaaagggagcgtaggcggatttttaagtgagatgtgaaatactcgggcttaacctgagcgctgcatttcaaactggaagtctagagtgcaggagaggagaagggaattcctagtgtagcggtgaaatgcgtagagattaggaagaacaccagtggcgaaggcgcttctctggactgtaactgacgctgaggctcgaaagcgtggggagcaaacaagattagataccctggtagtccacgccgtaaacgatgaataataggtgtaggggttgtcatgacctctgtgccgccgctaacgcattaagtattccgcctggggagtacggtcgcaagattaaaactcaaaggaattgacgggggcccgcacaagcagcggagcatgtggtttaatttgaagcaacgcgaagaaccttacctagacttgacatctcctgcattactcttaatcgaggaagtcccttcggggacaggatgacaggtggtgcatggttgtcgtcagctcgtgtcgtgagatgttgggttaagtcccgcaacgagcgcaacccctattgttagttgccatcattaagttgggcactctagcgagactgcccgggttaaccgggaggaaggtggggatgacgtcaaatcatcatgccccctatgtctagggctacacacgtgctacaatggtcggtacaataagacgcaagcccgcgagggggagcaaaactggaaaaccgatctcagttcggattgtaggctgaaactcgcctacatgaagctggagttgctagtaatcgcgaatcagcatgtcgcggtgaatacgttcccgggccttgtacacaccgcccgtca

SEQ ID NO: 1974 - DNA, 1363 bp, Artificial Sequence
  Synthetic polymer
agagtttgatcctggctcaggatgaacgctggcggcgtgcctaacacatgcaagtcgagcgatttacttcggtaaagagcggcggacgggtgagtaacgcgtgggtaacctgccctgtacacacggataacataccgaaaggtatgctaatacgagataaaatacttttatcgcatggtagaagtatcaaagcttttgcggtacaggatggacccgcgtctgattagctagttggtaaggtaacggcttaccaaggcgacgatcagtagccgacctgagagggtgatcggccacattggaactgagacacggtccaaactcctacgggaggcagcagtggggaatattgcacaatgggcgaaagcctgatgcagcaacgccgcgtgagcgatgaaggccttcgggtcgtaaagctctgtcctcaaggaagataatgacggtacttgaggaggaagccccggctaactacgtgccagcagccgcggtaatacgtagggggctagcgttatccggaattactgggcgtaaagggtgcgtaggtggtttcttaagtcagaggtgaaaggctacggctcaaccgtagtaagcctttgaaactggggaacttgagtgcaggagaggagagtggaattcctagtgtagcggtgaaatgcgtagatattaggaggaacaccagtggcgaaggcggcttgctggacgaaaactgacgttgaggctcgaaagcgtggggagcaaacaggattagataccctggtagtccacgccgtaaacgatgaatactaggtgttggggcccgaagggcgtcggtgccgtcgcaaacgcagtaagtattccacctggggagtacgttcgcaagaatgaaactcaaaggtattgacggggacccgcacaagcggtggagcatgtggtttaattcgaagcaacgcgaagaaccttaccaagccttgacatccctctgaagagctcgtaatggggcttgcctttctaggcagaggagacaggtggtgcatggttgtcgtcagctcgtgtcgtgagatgttgggttaagtcccgcaacgagcgcaacccttgttctcagtagccagcaggtagagttgggcactctggggagactgccggggagaacccggaggaaggcggggacgacgtcaaatcatcatgccccttatggcttgggctacacacgtgctacaatggcggtgacaaagggaagcgaacttgaaagagggagccaacctcaaaaacaccgtcccagttcggatcgtagtctgcaactcgactacatgaagccggaatcgctagtaatcgcagatcagcatgctgcggtgaatacgttcccgggtcttgcactcaccgcccgtca

SEQ ID NO: 1975 - DNA, 1473 bp, Artificial Sequence
  Synthetic polymer
gagagtttgatcctggctcaggatgaacgctggcggcgtgcctaacacatgcaagtcgagcgattctcttcggagaagagcggcggacgggtgagtaacgcgtgggtaacctgccctgtacacacggataacataccgaaaggtatgctaatacgagataatatacttttatcgcatggtagaagtatcaaagtttttgcggtacaggatggacccgcgtctgattagctagttggtaaggtaacggcttaccaaggcgacgatcagtagccgacctgagagggtgatcggccacattggaactgagacacggtccaaactcctacgggaggcagcagtggggaatattgcacaatgggcgaaagcctgatgcagcaacgccgcgtgagcgatgaaggccttcgggtcgtaaagctctgtcctcaaggaagataatgacggtacttgaggaggaagccccggctaactacgtgccagcagccgcggtaatacgtagggggctagcgttatccggaattactgggcgtaaagggtgcgtaggtggtttcttaagtcagaggtgaaaggctacggctcaaccgtagtaagcctttgaaactgggaaacttgagtgcaggagaggagagtggaattcctagtgtagcggtgaaatgcgtagatattaggaggaacaccagttgcgaaggcggctctctggactgtaactgacactgaggcacgaaagcgtggggagcaaacaggattagataccctggtagtccacgccgtaaacgatgagtactagctgtcggaggttacccccttcggtggcgcagctaacgcattaagtactccgcctgggaagtacgctcgcaagagtgaaactcaaaggaattgacggggacccgcacaagtagcggagcatgtggtttaattcgaagcaacgcgaagaaccttacctaagcttgacatccttttgactgatgcctaatcgcatctttcccttcggggacaaaagtgacaggtggtgcatggttgtcgtcagctcgtgtcgtgagatgttgggttaagtcccgcaacgagcgcaacccttatgattagttgccagcaggtagagctgggcactctaatgagactgccggggataactcggaggaaggtggggacgacgtcaaatcatcatgccccttatgtcctgggctacacacgtgctacaatggcctgaaacagagggaagcgaaggcgtaagccggagcggaccccagaaaccaggtcccagttcggattgtgggctgcaacccgcccacatgaagtcggagttgctagtaatcgcgaatcagcatgtcgcggtgaatgcgttcccgggccttgtacacaccgcccgtcacaccatgggagtcggaggcgcccgaagccggtgactgaacccgaaagggacagagccgtcgaaggtgaaatcgatgactggggtgaagtcgtaacaaggtagccgta

SEQ ID NO: 1976 - DNA, 1373 bp, Artificial Sequence; identical to SEQ ID NO: 457
  Synthetic polymer

SEQ ID NO: 1977 - DNA, 1369 bp, Artificial Sequence
  Synthetic polymer
agtttgatcctggctcaagacgaacgctggcggcgtgcctaacacatgcaagtcgagcgaatgaaattccttcgggaacggatttagcggcggacgggtgagtaacacgtgggcaacctgcctcatagaggggaatagccttccgaaagggagattaataccgcataagattgtagtaccgcatggtacagcaattaaaggagcaatccgctatgagatgggcccgcggcgcattagctagttggtgaggtaacggctcaccaaggcgacgatgcgtagccgacctgagagggtgatcggccacattgggactgagacacggcccagactcctacgggaggcagcagtggggaatattgcacaatgggggaaaccctgatgcagcaacgccgcgtgagtgatgacggccttcgggttgtaaagctctgtcttcagggacgataatgacggtacctgaggaggaagccacggctaactacgtgccagcagccgcggtatacgtaggtggcgagcgttgtccggatttactgggcgtaaagggagcgtaggcggatttttaagtgagatgtgaaatactcgggcttaacctgagtgctgcatttcaaactggaagtctagagtgcaggagaggagaagggaattcctagtgtagcggtgaaatgcgtagagattaggaagaacaccagtggcgaaggcgcttctctggactgtaactgacgctgaggctcgaaagcgtggggagcaaacaggattagataccctggtagtccacgcggtaaacgatgaatactaggtgtagggggtatcgactccctctgtgccgcagttaacgcaataagtaatccacctggggagtacggccgcaaggttaaaactcaaaggaattgacgggggcccgcacaagcagtggagtatgtggtttaattcgaagcaacgcgaagaaccttaccagggcttgacatcctctgaacggtgtagagatacactttcccttcggggcagagagacaggtggtgcatggttgtcgtcagctcgtgtcgtgagatgttcggttaagtccggcaacgagcgcaacccctattgttagttgccatcattcagttgggcactctagcgagactgccgttaacaaaacggaggaaggtggggacgacgtcaaatcatcatgccccttatgtcctgggctacacacgtactacaatggtaacaacagcgagaagccagaccgcgaggttgagcggatcttgaaatgttatctcagttcagattgcaggctgcaactcgcctgcatgaagtaggaattgctagtaatggcaggtcagcatactgccgtgaatacgttcccgggccttgcactcaccgcccgtca

SEQ ID NO: 1978 - DNA, 1458 bp, Artificial Sequence
  Synthetic polymer
gacgaacgctggcggcgtgcctaacacatgcaagtcgaacgagaattacgaagctgattacttcggtttgaagttttgtaaggaaagtggcggacgggcgagtaacgcgtgaataacctgcccataagagggggataacacatggaaacgtgtgctaataccgcatattgaatagtgaccgcatggtcgttatttgaaagattttatcgcttatggatggattcgcgtcagattagctagttggtgaggtaacggctcaccaaggcgacgatctgtagccgaactgagaggttgatcggccgcattgggactgagacacggcccagactcctacgggaggcagcagtgggggatattgcgcaatgggggcaaccctgacgcagcaacgccgcgtgcaggaagaaggtcttcggattgtaaaccgttgtcgcaagggaagaagacagtgacggtaccttgtgagaaagccacggctaactacgtgccagcagccgcggtaatacgtaggtggcaagcgttgtccggatttactgggtgtaaagggcgcgtaggcgggatagcaagtcagtcgtgaaatgccgaggcttaacctcggagctgcgattgaaactgttattcttgagtatcggagaggaaagcggaattcctagtgtagcggtgaaatgcgtagatattaggaggaacaccagtggcgaaggcggctttctggacgacaactgacgctgaggcgcgaaagtgtggggagcaaacaggattagataccctggtagcccacaccgtaaacgatggatactaggtgtaggaggtatcgaccccttctgtgccgcagttaacacaataagtatcccacctggggagtacgaccgcaaggttgaaactcaaaggaattgacgggggcccgcacaagcagtggagtatgtggtttaattcgaagcaacgcgaagaaccttacctgggcttgacatcccgatgaccgtcctagagatagggcttcccttcggggcatcggtgacaggtggtgcatggttgtcgtcagctcgtgtcgtgagatgttgggttaagtcccgcaacgagcgcaacccctattgtcagttgccatcattcagttgggaactctggcgagactgccggtgacaaatcggaggaaggtggggacgacgtcaaatcatcatgccccttatgcccagggctacacacgtactacaatggccgataacaaagtgcagcgaaatcgtgaggtggagcgaatcacaaaactcggtctcagttcagattgcaggctgcaactcgcctgcatgaagttggaattgctagtaatcgcgaatcagaatgtcgcggtgaatacgttcccgggccttgtacacaccgcccgtcacaccatgagagtcgataacacccgaagcctgtgagctaaccgcaaggaggcagcagtcgaaggtggggttgatgattggggtg

SEQ ID NO: 1979 - DNA, 1336 bp, Artificial Sequence
  Synthetic polymer
gtgcttaacttatgctagtcgagcgagaaaagttcttcggagcttttctagaggtggacgggtgagtaacaagtgggcaacctgcctcataaaggggaatacccctccgaaaggaatattaatagccgcataacattgttacaaaggcatcttttcacaatcaaaggagcaatccgctattgagatgggctcccgccgcattagctagttggtgaggtaacggctcaccaaggcgacgatgcgtagccgacctgagagggtgatcggccacattggaactgagacacggtccagactcctacgggaggcagcagtggggaatattgcacaatgggggaaaccctgatgcagcaacgccgcgtgagtgatgaaggtcttcggattgtaaagctctgtctttagggacgataatgacggtacctaaggaggaagccacggctaactacgtgccagcagccgcggtaatacgtaggtggcaagcgttatccggatttactgggcgtaaagggagcgtaggcggatatttaagtgggatgtgaaatacccgagcttaacttgggagctgcattccaaactggatatctagagtgcaggagaggagaatggaattcctagtgtagcggtgaaatgcgtagagattaggaagaacaccagtggcgaaggcgattctctggactgtaactgacgctgaggctcgaaagcgtggggagcaaacaggattagataccctggtagtccacgccgtaaacgatgaatactaggtgtaggggccccaagcctctgtgccgccgctaacgcattaggtattccgcttggggagtgcggtcgcaagattaaaactcaaaggaattgtcggggacccgcacaagcagcggagcatgtggtttaattcgaagcaacgcgaagaaccttacctagacttgacatatcctgaattaccagtaatgtgggaagttccctcgggaacaggaacacaggtggtgcatggttgtcgtcagctcgtgtcgtgagatgttgggttaagtcccgcaacgagcgcaacccttattgttagttggtaccattaagttgaccactctagcgagactgcccgggttaaccgggaggaaggtggggatgacgtcaaatcatcatgccccttatgtctagggctacacacgtgctacaatggcaagtacaaagagaagcaatactgtgaagtggagcaaaactcaaaaacttgtctcagttcggattgtaggctgaaactcgcctacatgaagctggagttgctagtaatcgcgaatcagaatgtcgcggtgaataaaaggccgggtcttgccctcaccgcccgtca

SEQ ID NO: 1980 - DNA, 1374 bp, Artificial Sequence
  Synthetic polymer
tttagtggcggactggtgagtaacgcgtaagaaatctacctatcagaggggaacaacaatgagaaatcattgctaataccgcatatgccataaacatcgcatgatgaaagtgggaaaggagcaatccgctgatagatgatcttgcgtctgattagttagttggtggggtaatggcctaccaagacgacgatcagtagccggactgagaggttgaacggccacattgggactgagacacggcccagactcctacgggaggcagcagtgggggatattgcacaatgggggaaaccctgatgcagcaacgccgcgtgaaggaagaaggtcttcgggttgtaaagctctgtcttcagggacgataatgacggtacctgaggaggaagccacggctaactacgtgccagcagccgcggtaatacgtaggtggcgagcgttgtccggatttactgggcgtaaagggagcgtaggcggatttttaagtgagatgtgaaatactcgggcttaacctgggtgctgcatttcaaactggaagtctagagtgcaggagaggagaagggaattcctagtgtagcggtgaaatgcgtagagattaggaagaacaccagtggcgaaggcgcttctctggactgtaactgacgctgaggctcgaaagcgtggggagcaaacaggattagataccctggtagtccacgccgtaaacgatgaatactaggtgtaggggttgtcatgacctctgtgccgccgctaacgcattaagtattccgcctggagagtacggtcgcaagattaaaactcaaaggaattgacgggggcccgcacaagcagcggagcatgtggtttaattcgaagcaacgcgaagaaccttacatagacttgacatctcctgcattactcttaatcgaggaagtctcttcggagacaggatgacaggtggtgcatggttgtcgtcagctcgtgtcgtgagatgttgggttaagtcccgcaacgagcgcaaccctttttgttagttgccatcattaagttgggcactctagcgagactgcccgggttaaccgggaggaaggtggggatgacgtcaaatcatcatgccccttatgtctagggctacacacgtgctacaatggtcggtacaataagacgcaagcccgcgagggggagcaaaactggaaaaccgatctcagttcggattgtaggctgaaactcgcctacatgaagctggagttgctagtaatcgcgaatcagcatgtcgcggtgaatacgttcccgggccttgtacacaccgcccgtcacaccatgagagttggcaatacccaaagtacgtgatctaacccgcaagggaggaagcgtcctaaggtagggtcagcgattggggtg

SEQ ID NO: 1981 - DNA, 1347 bp, Artificial Sequence; identical to SEQ ID NO: 1129
  Synthetic polymer

SEQ ID NO: 1982 - DNA, 1369 bp, Artificial Sequence
  Synthetic polymer
agagtttgatcctggctcaggacgaacgctggcggcgtgcctaacacatgcaagtcgagcgagtgaatctccttcgggagtgaagctagcggcggacgggtgagtaacacgtgggcaacctgcctcatagaggggaatagccttccgaaaggaagattaataccgcataagattgtagcttcgcatgaagtagcaattaaaggagcaatccgctatgagatgggcccgcggcgcattagctagttggtgaggtaacggctcaccaaggcgacgatgcgtagccgacctgagagggtgatcggccacattgggactgagacacggcccagactcctacgggaggcagcagtggggaatattgcacaatgggggaaaccctgatgcagcaacgccgcgtgagtgatgacggccttcgggttgtaaagctctgtcttcagggacgataatgacggtacctgaggaggaagccacggctaactacgtgccagcagccgcggtaatacgtaggtggcgagcgttgtccggatttactgggcgtaaagggagcgtaggcggacttttaagtgagatgtgaaatacccgggctcaacttgggtgctgcatttcaaactggaagtctagagtgcaggagaggagaatggaattcctagtgtagcggtgaaatgcgtagagattaggaagaacaccagtggcgaaggcgattctctggactgtaactgacgctgaggctcgaaagcgtggggagcaaacaggattagataccctggtagtccacgccgtaaacgatgaatactaggtgtaggggttgtcatgacctctgtgccgccgctaacgcattaagtattccgcctggggagtacggtcgcaagattaaaactcaaaggaattgacgggggcccgcacaagcagcggagcatgtggtttaattcgaagcaacgcgaagaaccttacctagacttgacatctcctgcattacccttaatcggggaagttccttcgggaacaggaagacaggtggtgcatggttgtcgtcagctcgtgtcgtgagatgttgggttaagtcccgcaacgagcgcaacccttattgttagttgctacgcaagagcactctagcgagactgccgttgacaaaacggaggaaggtggggacgacgtcaaatcatcatgccccttatatcctgggctacacacgtaatacaatggcggtcaacagagggaagcaaagccgcgaggcagagcaaacccccaaaagccgtcccagttcggattgtaggctgcaactcgcctgcatgaagtcggaatcgctagtaatcgcggatcagcatgccgcggtgaatacgttcccgggccttgcacacaccgcccgtca

SEQ ID NO: 1983 - DNA, 1377 bp, Artificial Sequence
  Synthetic polymer
ttcgcccttagagtttgatcctggctcaggacgaacgctggcggcgtgcctaacacatgcaagtcgagcgagttgattctcttcggagatgaagctagcggcggacgggtgagtaacacgtgggcaacctgcctcatagaggggaatagcctcccgaaagggagattaataccgcataagattgtagcttcgcatgaagtagcaattaaaggagtaatccgctatgagatgggcccgcggcgcattagctagttggtgaggtaacggctcaccaaggcgacgatgcgtagccgacctgagagggtgatcggccacattgggactgagacacggcccagactcctacgggaggcagcagtggggaatattgcacaatgggggaaaccctgatgcagcaacgccgcgtgagtgatgacggccttcgggttgtaaagctctgtcttcagggacgataatgacggtacctgaggaggaagccacggctaactacgtgccagcagccgcggtaatacgtaggtggcgagcgttgtccggatttactgggcgtaaagggagcgtaggcggacttttaagtgagatgtgaaatacccgggctcaacttgggggctgcatttcaaactggaagtctagagtgcaggagaggagaatggaattcctagtgtagcggtgaaatgcgtagatattaggaggaacaccagtggcgaaggcggcttgctggacgatgactgacgttgaggctcgaaagcgtggggagcaaacaggattagataccctggtagtccacgccgtaaacgatgactactaggtgtcgggtagcaaagctattcggtgccgcagcaaacgcaataagtagtccacctggggagtacgttcgcaagaatgaaactcaaaggaattgacggggacccgcacaagcagtggagtatgtggtttaattcgacgcaacgcgaagaaccttaccaagtcttgacatcctgcgacgatgctggaaacagtattttccttcgggacgcagagacaggtggtgcatggttgtcgtcagctcgtgtcgtgagatgttgggttaagtcccgcaacgagcgcaacccttatggtcagttactacgcaagaggactctggccagactgccgttgacaaaacggaggaaggtggggatgacgtcaaatcatcatgccctttatgacttgggctacacacgtactacaatggcgttaaacaaagagaagcaagaccgcgaggtggagcaaaactcataaaagacgcctcagttcagattgcaggctgcaacccgcctgcatgaagtcggaattgctagtaatcgcggatcagcatgccgcggtgaatacgttcccgggccttgtactcaccgcccgtca

SEQ ID NO: 1984 - DNA, 1460 bp, Artificial Sequence
  Synthetic polymer
gagtttgatcatggctcaggatgaacgctggcggcgtgcctaacacatgcaagtcgagcgattttcttcggaagagagcggcggacgggtgagtaacgcgtgggtaacctgccctgtacacacggataacataccgaaaggtatgctaatacgggataacatatttttatcgcatggtaaaaatatcaaagctccggcggtacaggatggacccgcgtctgattagctagttggtaaggtaacggcttaccaaggcgacgatcagtagccgacctgagagggtgatcggccacattggaactgagacacggtccaaactcctacgggaggcagcagtggggaatattgcacaatgggcgaaagcctgatgcagcaacgccgcgtgagcgatgaaggccttcgggtcgtaaagctctgtcctcaaggaagataatgacggtacttgaggaggaagccccggctaactacgtgccagcagccgcggtaatacgtagggggctagcgttatccggaattactgggcgtaaagggtgcgtaggtggtttcttaagtcagaagtgaaaggctacggctcaaccgtagtaagcttttgaaactaagagacttgagtgcaggagaggagagtagaattcctagtgtagcggtgaaatgcgtagatattaggaggaataccagttgcgaaggcggctctctggactgtaactgacactgaggcacgaaagcgtggggagcaaacaggattagataccctggtagtccacgccgtaaacgatgagtactagctgtcgggggttacccccctcggtggcgcagctaacgcattaagtactccgcctgggaagtacgctcgcaagagtgaaactcaaaggaattgacggggacccgcacaagtagcggagcatgtggtttaattcgaagcaacgcgaagaaccttacctaagcttgacatccttttgacctctccctaatcggagatttcccttcggggacagaagtgacaggtggtgcatggttgtcgtcagctcgtgtcgtgagatgttgggttaagtcccgcaacgagcgcaacccttgcctttagttgccagcattaagttgggcactctagagggactgccagggataacctggaggaaggtggggatgacgtcaaatcatcatgccccttatgtccagggctacacacgtgctacaatggtgagaacaaagagacgcaagaccgtaaggtggagcaaaactgataaaactcatcccagttcggattgtaggctgaaactcgcctacatgaagccggagttgctagtaatcgcgaatcagaatgtcgcggtgaatacgttcccgggccttgtacacaccgcccgtcacaccatgagagttggcaatacccgaagtccgtgagttaaccgtaaggagacagcggccgaaggtagggtcagcgattggggtgaagtcgtaacaaggta

SEQ ID NO: 1985 - DNA, 1361 bp, Artificial Sequence
  Synthetic polymer
agagtttgatcctggctcaggatgaacgctggcggcgtgcctaacacatgcaagtcgagcgattctcttcggagaagagcggcggacgggtgagtaacgcgtgggtaacctgccctgtacacacggataacataccgaaaggtatgctaatacgggataatatataagagtcgcatgacttttatatcaaagatttttcggtacaggatggacccgcgtctgattagcttgttggcggggtaacggcccaccaaggcgacgatcagtagccgacctgagagggtgatcggccacattggaactgagacacggtccaaactcctacgggaggcagcagtggggaatattgcacaatgggcgcaagcctgatgcagcaacgccgcgtgagcgatgaaggccttcgggtcgtaaagctctgtcctcaaggaagataatgacggtacttgaggaggaagccccggctaactacgtgccagcagccgcggtaatacgtagggggctagcgttatccggatttactgggcgtaaagggtgcgtaggcggtctttcaagtcaggagttaaaggctacggctcaaccgtagtaagctcctgatactgtctgacttgagtgccggagaggtaagcggaattcccagtgtagcggtgaaatgcgtagatattgggaggaacaccagtggcgaaggcggcttactggacggtaactgacgttgaggctcgaaagcgtggggagcaaacaggattagataccctggtagtccacgccgtaaacgatgactactaggtgtcgggtgtcagagacgttcggtgccgcagcaaacgcaataagtagtccacctggggagtacgttcgcaagaatgaaactcaaaggaattgacggggacccgcacaagcggtggagcatgtggtttaattcgaagcaacgcgaagaaccttacctggtcttgacatccctctgaccggacagtaatgtgtccttttcttcggaacagaggagacaggtgtgcatggttgtcgtcagctcgtgtcgtgagatgttgggttaagtcccgcaacgagcgcaacccctatcttcagtagccagcatataaggtgggcactctggagagactgccagggataacctggaggaaggtggggatgacgtcaaatcatcatgccccttatgaccagggctacacacgtgctacaatggcgtaaacaaagggaagcgagactgtgaggtggagcaaatcccaaaaataacgtctcagttcggattgtagtctgcaactcgactacatgaagctggaatcgctagtaatcgcgaatcagcatgtcgcggtgaatacgttcccgggtcttgcacacaccgcccgtca

SEQ ID NO: 1986 - DNA, 1379 bp, Artificial Sequence
  Synthetic polymer
catgcaagtcgagcgagaaaccttcgggtttctagcggcggacgggtgagtaacacgtgggtaacctgccttaatgagggggatagccttccgaaaggaagattaataccgcataacattggattttcgcatgaagattcaatcaaagatttatcgcattaagatggacccgcggcgcattagctagttggtgaggtaacggctcaccaaggccacgatgcgtagccgacctgagagggtgatcggccacattgggactgagacacggcccagactcctacgggaggcagcagtggggaatattgcacaatgggggaaaccctggtgcagcaacgccgcgtgagtgaagaaggtcttcggatcgtaaagctctgtctttggggacgataatgacggtacccaaggaggaagccacggctaactacgtgccagcagccgcggtaatacgtaggtggcaagcgttgtccggatttactgggcgtaaaggatgcgtaggcggatatttaagtgagatgtgaaatacccgggctcaacttgggtgctgcatttcaaactggatatctagagtgcaggagaggaaagtggaattcctagtgtagcggtgaaatgcgtagagattaggaagaacatcagtggcgaaggcgactttctggactgtaactgacgctgaggcatgaaagcgtggggagcaaacaggattagataccctggtagtccacgccgtaaacgatgaatactaggtgtgggagggttcaaccttccgtgccgcagttaacacaataagtattccgcctggggagtacggtcgcaagattaaaactcaaaggaattgacgggggcccgcacaagcagcggagcatgtggtttaattcgaagcaacgcgaagaaccttaccaggacttgacatccacggaatccttaagagattagggagtgccccttcgggggagccgtgagacaggtggtgcatggttgtcgtcagctcgtgtcgtgagatgttgggttaagtcccgcaacgagcgcaacccctgttgctagttgccatcattaagttgggcactctagcgagactgccgaggttaactcggaggaaggtggggatgacgtcaaatcatcatgccctttatgtcctgggccacacacgtgctacaatggctggtacagcgagatgcaataccgcgaggtggagcaaatcttcaaaaccagtcccagttcggattgtaggctgcaacccgcctacatgaagctggagttgctagtaatcgtggatcagaatgccacggtgaatgcgttcccgggccttgtacacaccgcccgtcacaccatgagagttggcaatacccaaagtccgtgaggtaaccgtaaggagccagcggcct

SEQ ID NO: 1987 - DNA, 1381 bp, Artificial Sequence
  Synthetic polymer
gtctcccttagagtttgatcctggctcaggcccgaacgctgtcggcgtgcctaacacatgcaagtcgagcgatgaagtttccttcgggaaatggattagcggcggacgggtgagtaacacgtgggcaacctgccttatagtgggggatagcctttcgaaaggaagattaataccgcataagattgtagtatcgcatgatatagcaattaaaggagcaattcgctataagatggacccgcgtcgcattagctagttggtgaggtaacggctcaccaaggcgacgatgcgtagccgacctgagagggtgatcggccacattgggactgagacacggcccagactcctacgggaggcagcagtggggaatattgcacaatgggcgaaagcctgatgcagcaacgccgcgtgagtgatgacggccttcgggttgtaaaactctgtcttcagggacgataatgacggtacctgaggaggaagccacggctaactacgtgccagcagccgcggtaatacgtaggtggcaagcgttgtccggatttactgggcgtaaagggagcgtaggcggatgtttaagtgggatgtgaaatactcgggctcaacttgagtgctgcattccaaactggatatctagagtgcaggagaggaaaggagaattcctagtgtagcggtgaaatgcgtagagattaggaagaataccagtggcgaaggcgcctttctggactgtaactgacgctgaggctcgaaagcgtggggagcaaacaggattagataccctggtagtccacgccgtaaacgatgaatactaggtgtaggggttgtcatgacctctgtgccgccgctaacgcattaagtattccgcctggggagtacggtcgcaagattaaaactcaaaggaattgacgggggcccgcacaagcagcggagcatgtggtttaattcgaagcaacgcgaagaaccttacctagacttgacatctcctgaattactctgtaatggaggaagcccttcgaggcaggaagacaggtggtgcatggttgtcgtcagctcgtgtcgtgagatgttgggttaagtcccgcaacgagcgcaacccttattgttagttgctaccatttagttgagcactctagcgagactgcccgggttaaccgggaggaaggtggggatgacgtcaaatcatcatgccccttatgtctagggctacacacgtgctacaatggccggtacagtaagatgcaataccgcgaggtggagcaaaactcaaaaaccggtctcagttcggattgtaggctgaaactcgcctacatgaagctggagttgctagtaatcgcgaatcagaatgtcgcggtgaatacgttcccgggccttgtacacaccgcccgtc

SEQ ID NO: 1988 - DNA, 1378 bp, Artificial Sequence; identical to SEQ ID NO: 1070
  Synthetic polymer

SEQ ID NO: 1989 - DNA, 1361 bp, Artificial Sequence
  Synthetic polymer
agagtttgatcctggctcaggatgaacgctggcggcgtgcctaacacatgcaagtcgagcgatctcttcggagagagcggcggacgggtgagtaacgcgtgggtaacctgccctgtacacacggataacataccgaaaggtatgctaatacgggataacatataagagtcgcatgacttttatatcaaagatttttcggtacaggatggacccgcgtctgattagcttgttggcggggtaacggcccaccaaggcgacgatcagtagccgacctgagagggtgatcggccacattggaactgagacacggtccaaactcctacgggaggcagcagtggggaatattgcacaatgggcgcaagcctgatgcagcaacgccgcgtgagcgatgaaggccttcgggtcgtaaagctctgtcctcaaggaagataatgacggtacttgaggaggaagccccggctaactacgtgccagcagccgcggtaatacgtagggggctagcgttatccggatttactgggcgtaaagggtgcgtaggcggtctttcaagtcaggagttaaaggctacggctcaaccgtagtaagctcctgatactgtctgacttgagtgcaggagaggaaagcggaattcccagtgtagcggtgaaatgcgtagatattaggaggaacaccagtggcgaaggcggcttgctggacgataactgacgctgaggcgcgaaagcgtggggagcaaacaggattagataccctggtagtccacgctgtaaacgatgaatactaggtgtgggaggactgaccccttccgtgccgcagttaacacaataagtattccacctggggagtacgaccgcaaggttgaaactcaaaggaattgacgggggcccgcacaagcagtggattatgtggtttaattcgacgcaacgcgaagaaccttacctaggcttgacatccttctgaccgaggactaatctcctctttccctccggggacagaagtgacaggtggtgcatggttgtcgtcagctcgtgtcgtgagatgttgggttaagtcccgcaacgagcgcaacccttgtctttagttgccatcatttagttgggcactctagagagactgccagggataacctggaggaaggtggggatgacgtcaaatcatcatgccccttatgcctagggctacacacgtgctacaatgggtggtacagagggcagccaagccgcgaggtggagcaaatctcaaaaaagtggtcccagttcggattgtgggctgcaacccgcccacatgaagtcggagttgctagtaatcgcggatcagcatgccgcggtgaatacgtacccgggccttgcactcaccgcccgtca

SEQ ID NO: 1990 - DNA, 1388 bp, Artificial Sequence; identical to SEQ ID NO: 212
  Synthetic polymer

SEQ ID NO: 1991 - DNA, 1404 bp, Artificial Sequence; identical to SEQ ID NO: 782
  Synthetic polymer

SEQ ID NO: 1992 - DNA, 1371 bp, Artificial Sequence
  Synthetic polymer
ttcgcccttagagtttgatcctggctcaggatgaacgctggcggcgtgcctaacacatgcaagttgagcgatttacttcggtaaagagcggcggacgggtgagtaacgcgtgggtaacctgccctgtacacacggataacataccgaaaggtatgctaatacgagataatatgcttttatcgcatggtagaagtatcaaagctctggcggtacaggatggacccgcgtctgattagctagttggtaaggtaacggcttaccaaggcgacgatcagtagccgacctgagagggtgatcggccacattggaactgagacacggtccaaactcctacgggaggcagcagtggggaatattgcacaatgggcgaaagcctgatgcagcaacgccgcgtgagcgatgaaggccttcgggtcgtaaagctctgtcctcaaggaagataatgacggtacttgaggaggaagccccggctaactacgtgccagcagccgcggtaatacgtagggggctagcgttacccggaattactgggcgtaaagggtgcgtaggtggtttcttaagtcagaggtgaaaggctacggctcaaccgtagtaagcctttgaaactgggaaacttgagtgcaggagaggagagtggaattcctagtgtagcggtgaaatgcgtagatattaggaggaacaccagttgcgaaggcggctctctggactgtaactgacactgaggcacgaaagcgtggggagcaaacaagattagataccctggtagtccacgccgtaaacgatgagtactaggtgttgggggtcaaacctcggtgccgaagtttaacacattaagcactccgcctggggagtacgtgcgcaagcatgaaactcaaaggaattgacggggacccgcacaagcagcggagcatgtggtttaattcgatgcaacgcgaagaaccttaccagggcttgacatgtagttgtaaggcttagagataagtccctctcttcggagacagctatacaggtggtgcatggttgtcgtcagctcgtgtcgtgagatgttgggttaagtcccgcaacgagcgcaacccctatctttagttactaacaggtaatgctgaggactctagagagactgccggtgacaaaccggaggaaggtggggacgacgtcaaatcatcatgccctttatgtcctgggctacacacgtgctacaatggtcggtacaacgggcagccaacgagcgatcgtgagcgaaacccaaaaagccgatcccagttcggattacaggctgcatctcgcctgcatgaagtcggagttgctagtaatcgcggatcagaatgccgcggtgaatgaattcccgggtcttgcacacaccgcccgtca

SEQ ID NO: 1993 - DNA, 1450 bp, Artificial Sequence
  Synthetic polymer
  misc_feature (789)..(789): n is a, c, g, or t
  misc_feature (793)..(793): n is a, c, g, or t
  misc_feature (838)..(838): n is a, c, g, or t
gagtttgatcctggctcaggacgaacgccggcggcgtgcctaacacatgcaagtcgagcgatgaaattttcttcggaaaatggattagcggcggacgggtgagtaacacgtgggtaacctgccctatagagagggatagccttccgaaagggagattaatacctcataatatcctagtatcgcatgatatatggattaaaggagcaatccactataggatggacccgcggcgcattagctagttggtgaggtaacggctcaccaaggcgacgatgcgtagccgacctgagagggtgatcggccacattgggactgagacacggcccagactcctacgggaggcagcagtggggaatattgcacaatgggggaaaccctgatgcagcaacgccgcgtgagtgatgacggtcttcggattgtaaagctctgtctttagggacgataatgacggtacctaaggaggaagccacggctaactacgtgccagcagccgcggtaatacgtaggtggcaagcgttatccggatttactgggcgtaaagggagcgtaggcggatatttaagtgggatgtgaaatacccgagcttaacttgggagctgcattccaaactggatatctagagtgcaggagaggagaatggaattcctagtgtagcggtgaaatgcgtagagattaggaagaacaccagtggcgaaggcgactttctggtctgtaactgacgctgatgtgcgaaagcgtggggatcaaacaggattagataccctggtagtccacgccgtaaacgatgantgcnaagtgttagggggtttccgccccttagtgctgcagctaacgcatnaagcactccgcctggggagtacgaccgcaaggttgaaactcaaaggaattgacggggacccgcacaagcggtggagcatgtggtttaattcgaagcaacgcgaagaaccttaccaaatcttgacatcctctgacccctctagagatagagttttccccttcgggggacagagtgacaggtggtgcatggttgtcgtcagctcgtgtcgtgagatgttgggttaagtcccgcaacgagcgcaacccttaagcttagttgccatcattaagttgggcactctaagttgactgccggtgacaaaccggaggaaggtggggatgacgtcaaatcatcatgccccttatgtctagggctacacacgtgctacaatggcaagtacaaagagaagcaatactgtgaagtggagcaaaactcaaaaacttgtctcagttcggattgtaggctgaaactcgcctacatgaagctggagttgctagtaatcgcgaatcagaatgtcgcggtgaatacgttcccgggtcttgtacacaccgcccgtcacaccatgagagttggcaatacccgaagtccgtaagctaaccgtaaggaggcagcggccgaaggtagggtcagcga

SEQ ID NO: 1994 - DNA, 1419 bp, Artificial Sequence; identical to SEQ ID NO: 608
  Synthetic polymer

SEQ ID NO: 1995 - DNA, 1360 bp, Artificial Sequence; identical to SEQ ID NO: 746
  Synthetic polymer

SEQ ID NO: 1996 - DNA, 1361 bp, Artificial Sequence
  Synthetic polymer
aacctgcctcatagaggggaatagcctttcgaaaggaagattaataccgcataagattgtagcttcgcatgaagtagcaattaaaggagcaatccgctatgagatggacccgcgtcgcattagctagttggtgaggtaacggcttaccaaggcgacgatgcgtagccgacctgagagggtgatcggccacattgggactgagacacggcccagactcctacgggaggcagcagtggggaatattgcacaatgggggaaaccctgatgcagcaacgccgcgtgagtgatgacggccttcgggttgtaaagctctgtctttggggacgataatgacggtacccaaggaggaagccacggctaactacgtgccagcagccgcggtaatacgtaggtggcaagcgttgtccggatttactgggcgtaaagggagcgtaggcggacttttaagtgggatgtgaaatactcgggctcaacctgagtgctgcattccaaactggaagtctagagtgcaggaggggaaagtggaattcctagtgtagcggtgaaatgcgtagatattaggaagaacaccggtggcgaaggcgactttctggactgtaactgacgctgaggctcgaaagcgtggggagcgaacaggattagataccctggtagtccacgccgtaaacgatgaatactaggtgtgggggttgtcatgacctccgtgccgccgctaacgcattaagtattccgcctggggagtacggtcgcaagattaaaactcaaaggaattgacgggggcccgcacaagcagcggagcatgtggtttaattcgaagcaacgcgaagaaccttacctagacttgacatctcctgaattactcttaatcgaggaagtcacttcggtgacaggaagacaggtggtgcatggttgtcgtcagctcgtgtcgtgagatgttgggttaagtcccgcaacgagcgcaacccttattgttagttgctaccatttagttgagcactctagcgagactgcccgggttaaccgggaggaaggtggggatgacgtcaaatcatcatgccccttatgtctagggctacacacgtgctacaatggccggtacaaagagatgcgataccgcaaggtggagccaaactataaaaccggtctcagttcggattgtaggctgaaactcgcctacatgaagctggagttgctagtaatcgcgaatcagaatgtcgcggtgaatacgttcccgggccttgtacacaccgcccgtcacaccacgagagttggcaatacccaaagttggtgatctaacccgcaagggaggaagccacctaaggtagggtcagcgattggggtgaagtcgtaacaaggtaacc

SEQ ID NO: 1997 - DNA, 1431 bp, Artificial Sequence
  Synthetic polymer
cgctggcggcgtgcttaacacatgcaagtcgaacgaagcactttatttgatttccttcgggactgattattttgtgactgagtggcggacgggtgagtaacgcgtaggcaacctgccctttgcagagggatagccattggaaacgatgattaaaacctcataacacctcattatcacatggtagagaggtcaaagatttatcggcaaaggatgggcctgcgtctgattagctagttggtggggtaacggctcaccaaggcgacgatcagtagccgacctgagagggtgatcggccacattggaactgagacacggtccaaactcctacgggaggcagcagtggggaatattgcacaatgggcgaaagcctgatgcagcaacgccgcgtgaaggaagaaggtcttcggatcgtaaacttctgtcctatgggaagataatgacggtaccataggaggaagccccggctaactacgtgccagcagccgcggtaatacgtagggggcgagcgttatccggaattattgggcgtaaagagtgcgtatgtggtaacttaagcgcggggtttaaggcaatggcttaaccattgttcgccctgcgaactgggatacttgagtgcaggagaggaaagcggaattcctagtgtagcggtgaaatgcgtagatattaggaggaacaccagtggcgaaggcggctttctggactgaaactgacactgaggcacgaaagtgtggggagcaaacaggattagataccctggtagtccacaccgtaaacgatgagcactaggtgtcgggtgagcaatcattcggtgccggagttaacgcattaagtgctccgcctggggagtacgtacgcaagtatgaaactcaaaggaattgacggggacccgcacaagcagcggagcatgtggtttaattcgaagcaacgcgaagaaccttaccagggcttgacatccctctgacagacccttaaccgggtccttcttcggacagaggagacaggtggtgcatggttgtcgtcagctcgtgtcgtgagatgttgggttaagtcccgcaacgagcgcaacccttgtcattagttgccatcattaagttgggcactctagtgagactgccggggataactcggaggaaggtggggatgacgtcaaatcatcatgccccttatgttctgggctacacacgtgctacaatggtcggtacagagagaagcgaagtcgtgagtcggagcaaaactcaaaagccgatcccagttcggattgtaggctgcaactcgcctacatgaagttggagttgctagtaatcgcagatcagaatgctgcggtgaatgcgttcccgggtcttgtacacaccgcccgtcacaccacggaagttgggggtgcccgaagttggtcgagaaatagattacctaaggcaaaaccgatgactgggg

SEQ ID NO: 1998 - DNA, 1364 bp, Artificial Sequence; identical to SEQ ID NO: 328
  Synthetic polymer

SEQ ID NO: 1999 - DNA, 1335 bp, Artificial Sequence
  Synthetic polymer
gacgaacgctggcggcgtgcctaacacatgctagtcgagcgagtgaatctccttctggagtgaagctatcggcggacgggttagtaacacgtgggcaacctgcctcataaaggggaatagccttcctaaaggaagattaataccgcataagattgtagcttcgcatgaagtatcaattaaaggagcaatccgctatgacatgggcccgcggcgcattatctagtctgtgaggtaacggctcaccaaggcgactatgcgtagccgacctgagagggtgaccggccacattgggactgatacacggcccacactcctacgggaggcagcactggggaatattgcacaatgggggaaaccctgatgcaacaacgccgtgtgagtgatgacggccttcgggttgtaaagctctgtcttcacggactataatgactgtacctgaggaggaagccacggctaactacctgccaccattcgcggtaatacctatgtggcgagcgttgtccggatttactgggcgtaaagggagcgtaggcggacttttaagtgagatgtgaaatacccgggctcaacttgggtgctgcatttcaaactggaagtctagagtgcaggagaggagaatggaattcctagtgtagcggtgaaatgcgtagagattaggaagaacaccagtggcgaaggcgattctctggactgtaactgacgctgaggctcgaaagcgtggggagcaaacaggattagataccctggtagtccacgccgtaaacgatgaatactaggtgtaggggttgtcatgacctctgtgccgccgccaacgcattaagtattccgcctggggagtacggtcgcaagattaaaactcaaaggaattgacgggggcccgcacaagcagcggagcatgtggtttaattcgaagcaacgcgaagaaccttacctagacttgacatctcgtgcattacccttaatcggggaagttccttcgggaacaggaagacaggtggtgcatggttgtcgtcagctcgtgtcgtgagatgttgggttaagtcccgcaacgagcgcaacccttattgttagttgctaccatttagttgagcactctagcgagactgcccgggttaaccgggaggaaggtggggatgacgtcaaatcatcatgccccttatgtctagggctacacacgtgctacaatggcaagtgcaaagagaagcaagaccgtgaggtggagcaaaactcaaaaacttgtctcagttcggattgtaggctgaaactcgcctacatgaagctggagttgctagtaatcgcgaatcagcatgtcgcggtgaatacgttcccgggcct

SEQ ID NO: 2000 - DNA, 1438 bp, Artificial Sequence
  Synthetic polymer
gacgaacgctggcggcgtgcctaacacatgcaagtcgagcgaatgaagttccttcgggagtggatttagcggcggacgggtgagtaacacgtgggcaacctgcctcatagaggggaatagccttccgaaagggagattaataccgcataagattgtagtaccgcatggtacagcaattaaaggagcaatccgctatgagatgggcccgcggcgcattagctagttggtgaggtaacggctcaccaaggcgacgatgcgtagccgacctgagagggtgatcggccacattgggactgagacacggcccagactcctacgggaggcagcagtggggaatattgcacaatgggggaaaccctgatgcagcaacgccgcgtgagtgatgacggccttcgggttgtaaagctctgtcttcagggacgataatgacggtacctgaggaggaagccacggctaactacgtgccagcagccgcggtaatacgtaggtggcgagcgttgtccggatttactgggcgtaaagggagcgtaggcggatttttaagtgagatgtgaaatactcgggcttaacctgagtgctgcatttcaaactggaagtctagagtgcaggagaggagaagggaattcctagtgtagcggtgaaatgcgtagatattaggaggaacaccagtagcgaaggcggctttctggactgtaactgacactgaggcacgaaagcgtggggagcaaacaggattagataccctggtagtccacgccgtaaacgatgagtactaggtgtcgggggttacccccctcggtgccgcagctaacgcattaagtactccgcctggggagtacgctcgcaagagtgaaactcaaaggaattgacggggacccgcacaagtagcggagcatgtggtttaattcgaagcaacgcgaagaaccttacctaagcttgacatccttttgaccgatgcctaatcgcatctttcccttcggggacagaagtgacaggtggtgcatggttgtcgtcagctcgtgtcgtgagatgttgggttaagtcccgcaacgagcgcaacccttgcctttagttgccagcattaagttgggcactctagagggactgccagggataacctggaggaaggtggggatgacgtcaaatcatcatgccccttatgcttagggctacacacgtgctacaatgggtggtacagagggcagccaagtcgtgaggccgagctaatcccttaaagccattctcagttcggattgtaggctgaaactcgcctacatgaagctggagttactagtaatcgcagatcagaatgctgcggtgaatgcgttcccgggtcttgtacacaccgcccgtcacaccatgggagttgggggcgcccgaagccggttagctaaccttttggaagcggccgtcgaaggtgaaaccaataactggggtg

SEQ ID NO: 2001 - DNA, 1351 bp, Artificial Sequence; identical to SEQ ID NO: 1107
  Synthetic polymer

SEQ ID NO: 2002 - DNA, 1436 bp, Artificial Sequence; identical to SEQ ID NO: 898
  Synthetic polymer

SEQ ID NO: 2003 - DNA, 1374 bp, Artificial Sequence
  Synthetic polymer
agagtttgatcctggctcaggatgaacgctggcggcgtgcttaacacatgcaagtcgaacgggaattactttattgaaacttcggtcgatttaatttaattctagtggcggacgggtgagtaacgcgtgggtaacctgccttatacagggggataacagtcagaaatggctgctaataccgcataagcgcacagagctgcatggctcagtgtgaaaaactccggtggtataagatggacccgcgttggattagcttgttggtggggtaacggcccaccaaggcgacgatccatagccggcctgagagggtgaacggccacattgggactgagacacggcccagactcctacgggaggcagcagtggggaatattgcacaatgggggaaaccctgatgcagcgacgccgcgtgaaggaagaagtatctcggtatgtaaacttctatcagcagggaagatagtgacggtacctgactaagaagccccggctaactacgtgccagcagccgcggtaatacgtaggtggcgagcgttgtccggatttactgggcgtaaagggagcgtaggcggatttttaagtgagatgtgaaatactcgggcttaacctgagtgctgcatttcaaactggaagtctagagtgcaggagaggagaagggaattcctagtgtagcggtgaaatgcgtagagattaggaagaacaccagtggcgaaggcgcttctctggactgtaactgacgctgaggctcgaaagcgtggggagcaaacaggattagataccctggtagtccacgccgtaaacgatgaatactaggtgtaggggttgtcatgacctctgtgccgccgctaacgcattaagtattccgcctggggagtacggtcgcaagattaaaactcaaaggaattgacgggggcccgcacaagcagcggagcatgtggtttaattcgaagcaacgcgaagaaccttacctgctcttgacatcccattcgatagagggtaatgcctctagcccttcgggggaatggagacaggtggtgcatggttgtcgtcagctcgtgtcgtgagatgttgggttaagtcccgcaacgagcgcaacccttattgtcagtagccagcaggtgaagctgggcactctgatgagactgccggggataacccggaggaaggtggggatgacgtcaaatcatcatgccccttatgagcagggctacacacgtgctacaatggcgtaaacagagggaagcgaaggagtgatctggagcaaatctcaaaaataacgtctcagttcggattgtagtctgcaactcgactacatgaagctggaatcgctagtaatcgcagatcagaatgctgcggtgaatacgttcccgggtcttg

SEQ ID NO: 2004 - DNA, 1403 bp, Artificial Sequence; identical to SEQ ID NO: 97
  Synthetic polymer

SEQ ID NO: 2005 - DNA, 1375 bp, Artificial Sequence; identical to SEQ ID NO: 654
  Synthetic polymer

SEQ ID NO: 2006 - DNA, 1405 bp, Artificial Sequence
  Synthetic polymer
gcggcgtgcctaacacatgcaagttgagcgattctcttctgtgaagagcggcggacgggtgagtaacgcgtgggtaacctgccctgtacacacggataacataccgaaaggtatgctaatacgggataatatataagagtcgcatgacttttatatcaaagatttttcggtacaggatggacccgcgtctgattagcttgttggcggggtgacggcccaccaaggcgacgatcagtagccgacctgagagggtgatcggccacattggaactgagacacggtccaaactcctacgggaggcagcagtggggaatattgcacaatgggcgcaagcctgatgcagcaacgccgcgtgagcgatgaaggccttcgggtcgtaaagctctgtcctcaaggaagataatgacggtacttgaggaggaagccccggctaactacgtgccagcagccgcggtaatacgtagggggctagcgttatccggatttactgggcgtaaagggtgcgtaggcggtctttcaagtcaggagttaaaggctacggctcaaccgtagtaagctcctgatactgtctgacttgagtgcaggagaggaaagcggaattcccagtgtagcggtgaaatgcgtagatattgggaggaacaccagtagcgaaggcggctttctggactgtaactgacgctgaggcaggaaagcgtggggagcaaacaggattagataccctggtagtccacgctgtaaacgatgagtactaggtgtcggaggttacccccttcggtgccgcagctaacgcattaagtactccgcctggggagtacgcacgcaagtgtgaaactcaaaggaattgtcggggacccgcacaagtagcggagcatgtggtttaattcgaagcaacgcgaagaaccttacgtaggcttgtcatcgttctgacagaggaataatctcctctttccctccggggacagaaagtgccaggtggtgcatggttgtcgtcagtttgtgtcgtgagatgtggggttaagtcccgcaacgagcgcaacccttgtctttagttgccatcatttagttgggcattctagagagtctgccagggataacctggaggaaggtggggatgacgtcaaatcatcatgccccttatgcctagggctacacacgtgctacaatgggtggtacagagggcagccaagccgtgaggtggagcaaatcccttaaagccattatcagttcggattgtaggctgaaactcgcctacatgaagctggagttattagtaatcgcagatcagaatgctgcggtgaatgcgttcccgggtcttgtacacaccgcccgtcacaccatgggagttggagacaccggaagcagactatctaacctaatgggagaagtcgtcgaaggtggaatcaat

SEQ ID NO: 2007 - DNA, 1365 bp, Artificial Sequence
  Synthetic polymer
gtttgatcctggctcaggataaactcttgcggtacgtctaatacatgcaagtcgaacgagaaccttcgggttctagtggcgaacgggtgagtaacacgtaggtaacctgcctttaagacgaggataacagttggaaacgattgctaatactggatataaagtaatgggggcatccccaaaacttaaaaggtcctaagggactacttaaagaggggcctgcggtgcattagttagttggtagggtaatggcctaccaagacgatgatgcatagccggactgagaggttgaacggccacattgggactgagacacggcccagactcctacgggaggcagcagtggggaatattgcacaatgggggaaaccctgatgcagcaacgccgcgtgagtgatgacggccttcgggttgtaaagctctgtcttcagggacgataatgacggtacctgaggaggaagccacggctaactacgtgccagcagccgcggtaatacgtaggtggcgagcgttgtccggatttactgggcgtaaagggagcgtaggcggatttttaagtgagatgtgaaatactcgggcttaacctgagtgctgcatttcaaactggaagtctagagtgcaggagaggagaagggaattcctagtgtagcggtgaaatgcgtagagattaggaagaacaccagtggcgaaggcgcttctctggactgtaactgacgctgaggctcgaaagcatggggagcaaacaggattagataccctggtagtccacgccgtaaacgatgaatactaggtgtaggggttgtcatgacctctgtgccgccgctaacgcatttagtattcgccctggggagtacggtcgcaggattaaaactcaaagggaatgacggggggcccgcacaagcagcggagcatgtggttaatttcgaagcaacgcgaagacccttacctagacttgacatctcctgcattactcttaatcgaggaagtcccttcggggacaggatgacaggtggtgcatggttgtcgtcagctcgtgtcgtgagatgttgggttaagtcccgcaacgagcgcaacccttattgttagttgccatcattaagttgggcactctagcgagactgcccgggttaaccgggaggaaggtggggatgacgtcaaatcatcatgccccttatgtctagggctacacacgtgctacaatggtcggtacaataagacgcaagcccgcgagggggagcaaaactggaaaaccgatctcagttcggattgtaggctgaaactcgcctacatgaagctggagttgctagtaatcgcgaatcagcatgtcgcggtgaatacgttcccgggccttgcactaacggcccgtca

SEQ ID NO: 2008 - DNA, 1365 bp, Artificial Sequence; identical to SEQ ID NO: 873
  Synthetic polymer

SEQ ID NO: 2009 - DNA, 1353 bp, Artificial Sequence; identical to SEQ ID NO: 923
  Synthetic polymer
  misc_feature (937)..(937): n is a, c, g, or t

SEQ ID NO: 2010 - DNA, 1454 bp, Artificial Sequence; identical to SEQ ID NO: 936
  Synthetic polymer

SEQ ID NO: 2011 - DNA, 1426 bp, Artificial Sequence
  Synthetic polymer
gatgaacgctggcggcgtgcctaacacatgcaagtcgagcgatcttcttcggaagagagcggcggacgggtgagtaacgcgtgggtaacctgcctcatacacatggataacataccgaaaggtatgctaatacaagatgatataagagattcgcatggatttcttatcaaagctccggcggtatgagatggacccgcgtctgattagctagttggtaaggtaacggcttaccaaggcgacgatcagtagccgacctgagagggtgatcggccacattggaactgagacacggtccaaactcctacgggaggcagcagtggggaatattgcacaatgggcgaaagcctgatgcagcaacgccgcgtgagcgatgaaggccttcgggtcgtaaagctctgtcctcaaggaagataatgacggtacttgaggaggaagccccggctaactacgtgccagcagccgcggtaatacgtagggggctagcgttatccggatttactgggcgtaaagggtgcgtaggtggtttcttaagtcaggagtgaaaggctacggcttaaccgtagtaagctcttgaaactgggaaacttgagtgcaggagaggaaagtggaattcctagtgtagcggtgaaatgcgtagatattaggaggaacaccagttgcgaaggcggctctctggactgtaactgacactgaggcacgaaagcgtggggagcaaacaggattagataccctggtagtccacgccgtaaacgatgagtactagctgtcggaggttacccccttcggtggcgcagctaacgcattaagtactccgcctgggaagtacgctcgcaagagtgaaactcaaaggaattgacggggacccgcacaagtagcggagcatgtggtttaattcgaagcaacgcgaagaaccttacctaagcttgacatccttttgaccgatgcctaatcgcatctttcccttcggggacagaagtgacaggtggtgcatggttgtcgtcagctcgtgtcgtgagatgttgggttaagtcccgcaacgagcgcaacccttattgttagttgccatcattaagttgggcactctagcgagactgcccgggttaaccgggaggaaggtggggatgacgtcaaatcatcatgccccttatgtctagggctacacacgtgctacaatggtcggtacaataagacgcaagcccgcgagggggagcaaaactggaaaaccgatctcagttcggattgtaggctgaaactcgcctacatgaagctggagttgctagtaatcgcgaatcagcatgtcgcggtgaatacgttcccgggccttgtacacaccgcccgtcacaccatgagagttggcaatacccaaagtacgtgatctaacccgtaagggaggaagcgtcctaaggtagggtcagcgattggggtg

SEQ ID NO: 2012 - DNA, 1358 bp, Artificial Sequence
  Synthetic polymer
ttcgcccttagagtttgatcctggctcaggacgaacgccggcggcgtgcctaacacatgcaagtcgagcgggagacttcggtctccagcggcggacgggtgagtaacacgtgggtaacctgcctcatagagggggatagcctcccgaaagggagattaataccgcataacactgcgatctcgcatgagaatgcagttaaaggagtaatccgctatgagatggacccgcggcgcattagctagttggtgaggtaacggctcaccaaggccacgatgcgtagccgacctgagagggtgatcggccacattggaactgagacacggtccagactcctacgggaggcagcagtggggaatattgcacaatgggcggaagcctgatgcagcaacgccgcgtggaggatgaaggcctttgggttgtaaactcttgtcttctgggacgataatgacggtaccagaggagggagccacggctaactacgtgccagcagccgcggtaatacgtaggtggcaagcgttgtccggatttactgggcgtaaaggatgcgtaggcggatatttaagtgggatgtgaaatacccgggctcaacctgggtgctgcattccaaactggatatctagagtgcgggagaggaaagtggaattcctagtgtagcggtgaaatgcgtagagattaggaagaacaccagtggcgaaggcgactttctggaccgtaactgacgctgaggcatgaaagcgtggggagcaaacaggattagataccctggtagtccacgccgtaaaacgatgaaatactaggtgtaggagggtccaaccttctgtgccgtcgttaacacactaagtattccgcctggggagtacggtcgcaagattaaaactcaaaggaatagacgggggcccgcacaagcagcggagcatgtggtttaattcgaagcaacgcgaagaaccttacctagacttgacatctcctgaattacccgtaactggggaagctcttcggagcaggaagacaggtgatgcatggttgtcgtcagctcgtgtcgtgagatgttgggttaagtcccgcaacgagcgcaacccttattgttagttgctaccattaagttgagcactctagcgagactgccggggttaactcggaggaaggtggggaggacgtcaaatcatcatgccccctatgtctaggggtacacacgtgctacaatggcgagtacaacaagacgctaagccgcgaggtggagcaaaactgtaaaactcgccccagttcggattgtaggctgaaactcgcctacatgaagccggagttgctagtaatcgcgaatcagcatgtcgcggtgaaaaagttcccgggccttgcac

SEQ ID NO: 2013 - DNA, 1375 bp, Artificial Sequence; identical to SEQ ID NO: 1011
  Synthetic polymer

SEQ ID NO: 2014 - DNA, 1428 bp, Artificial Sequence; identical to SEQ ID NO: 78
  Synthetic polymer

SEQ ID NO: 2015 - DNA, 1416 bp, Artificial Sequence
  Synthetic polymer
cggcgtgcctaacacatgcaagtcgagcgatgaagttccttcgggaacggattagcggcggacgggtgagtaacacgtgggcaacctgccttatagaggggaatagccttccgaaaggaagattaataccgcataacattgtagcttcgcatgaagcagcaattaaaggagtaatccactataagatgggcccgcggcgcattagctagttggtgaggtaacggctcaccaaggcgacgatgcgtagccgacctgagagggtgatcggccacattgggactgagacacggcccagactcctacgggaggcagcagtggggaatattgcacaatgggggaaaccctgatgcagcaacgccgcgtgagtgatgacggccttcgggttgtaaagctctgtctttggggacgataatgacggtacccaaggaggaagccacggctaactacgtgccagcagccgcggtaatacgtaggtggcaagcgttgtccggatttactgggcgtaaagggagcgtaggcggatttttaagtgggatgtgaaatacccgggctcaacctgggtgctgcattccaaactggaaatctagagtgcaggaggggaaagtggaattcctagtgtagcggtgaaatgcgtagagattcggaggaacaccagtagcgaaggcggctttctggactgtaactgacgctgaggcacgaaagcgtggggagcgaacaggattagataccctggtagtccacgccgtaaacgatgaatactaggtgtcggggcttacgggtctcggtgccgcagctaacgcattaagtattccgcctggggagtacggtcgcaagattaaaactcaaaggaattgacgggggcccgcacaagcagcggagcatgtggtttaattcgaagcaacgcgaagaaccttacctagacttgacatctcctgcattacccttaatcggggaagttccttcggggacaggaagacaggtggtgcatggttgtcgtcagctcgtgtcgtgagatgttgggttaagtcccgcaacgagcgcaacccttattgttagttgctaccatttagttgagcactctagcgagactgcccgggttaaccgggaggaaggtggggatgacgtcaaatcatcatgccccttatgtctagggctacacacgtgctacaatggcaagtacaaagagaagcaagaccgcgaggtggagcaaaactcaaaaacttgtctcagttcggattgtaggctgaaactcgcctacatgaagctggagttgctagtaatcgcgaatcagaatgtcgcggtgaatacgttcccgggccttgtacacaccgcccgtcacaccatgagagttggcaatacccaaagttggtgatctaacccgtaagggaggaagccacctaaggtagggtcagcgat

SEQ ID NO: 2016 - DNA, 1388 bp, Artificial Sequence; identical to SEQ ID NO: 134
  Synthetic polymer

SEQ ID NO: 2017 - DNA, 1499 bp, Artificial Sequence
  Synthetic polymer
  misc_feature (967)..(967): n is a, c, g, or t
  misc_feature (979)..(979): n is a, c, g, or t
  misc_feature (1487)..(1487): n is a, c, g, or t
tttgatcctggctcaggacgaacgctggcggcgtgcctaacacatgcaagtcgagcgatgaagtttccttcgggaaacggattagcggcggacgggtgagtaacacgtgggtaacctgcctcatagaggggaatagccttccgaaaggaagattaataccgcataacattgcagtttcgcatgaaacagcaattaaaggagcaatccgctatgagatggacccgcggcgcattagctagttggtaaggtaatggcttaccaaggcgacgatgcgtagccgacctgagagggtgatcggccacattgggactgagacacggcccagactcctacgggaggcagcagtggggaatattgcacaatgggggaaaccctgatgcagcaacgccgcgtgagtgatgacggtcttcggattgtaaagctctgtctttggggacgataatgacggtacccaaggaggaagccacggctaactacgtgccagcagccgcggtaatacgtaggtggcaagcgttgtccggatttactgggcgtaaagggagcgtaggcgatttttaagtgggatgtgaaatacccgggctcaacctgggtgctgcattccaaactgggaatctagagtgcaggaggggagagtggaattcctagtgtagcggtgaaatgcgtagagattaggaagaacaccagtggcgaaggcgactctctggactgtaactgacgctgaggcatgaaagcgtggggagcaaacaggattagataccctggtagtccacgccgtaaacgatgaatactaggtgtaggaggtatcgactccttctgtgccgcagttaacacaataagtattccgcctgggaagtacggtcgcaagattaaaactcaaaggaattgacggggacccgcacaagcagcggagcatgtggtttaattcgaagcaacgcgaagaaccttacctagacttgacatctcctgnattagtccgtantggatgaagtcccttcggggacaggagacaggtggtgcatggttgtcgtcagctcgtgtcgtgagatgttgggttaagtcccgcaacgagcgcaacccttatcattagttgctaacatttagttgagcactctagtgagactgcccgggttaaccgggaggaaggtggggatgacgtcaaatcatcatgccccttatgtctagggctacacacgtgctacaatggtaggacaaaaagatgctataccgcaaggtggagctaaactcaaaaccctatcccagttcggattgtaggctgaaactcgcctacatgaagccggagttgctagtaatcgcgaatcagaatgtcgcggtgaatacgttcccgggtcttgtacacaccgcccgtcacaccatgagagtcggcaacacccgaagcccgtgaggtaaccttttggaaccagcggtcgaaggtggggttgatgattggggtgaagtcgtaacaaggtaaccgtatcggaaggtgcggntggatcacctcc

SEQ ID NO: 2018 - DNA, 1409 bp, Artificial Sequence
  Synthetic polymer
ggcggcgtgcctaacacatgcaagtcgagcgatgaagtttccttcgggaaacggattagcggcggacgggtgagtaacacgtgggtaacctgccttgtagagggggatagccttccgaaaggaagattaataccgcataatattgtcgtatcgcatggtacaacaatcaaaagagcaatctgctacaagatggacccgcggcgcattagctagttggtaaggtaatggcttaccaaggcgacgatgcgtagccgacctgagagggtgatcggccacattgggactgagacacggcccagactcctacgggaggcagcagtggggaatattgcacaatgggggaaaccctgatgcagcaacgccgcgtgagtgatgacggtcttcggattgtaaaactctgtctttggggacgataatgacggtacccaaggaggaagccacggctaactacgtgccagcagccgcggtaatacgtaggtggcaagcgttgtccggatttactgggcgtaaagggagcgtaggcggatttttaagtgggatgtgaaatactcgggctcaacctgagtgctgcattccaaactggagatctagagtgcaggaggggagagtggaattcctagtgtagcggtgaaatgcgtagagattaggaagaacaccagtggcgaaggcgactctctggactgtaactgacgctgaggctcgaaagcgtggggagcaaacaggattagataccctggtagtccacgccgtaaacgatggatactaggtgtgggaggtgtcaactccttccgtgccgccgctaacgcattaagtatcccgcctggggagtacggtcgcaagattaaaactcaaaggaattgacgggggcccgcacaagtagcggagcatgtggtttaattcgaagcaacgcgaagaaccttacctagacttgacatcttctgcattacccttaaccggggaaatcccttcggggacagaatgacaggtggtgcatggttgtcgtcagctcgtgtcgtgagatgttgggttaagtcccgcaacgagcgcaacccctattgttagttgctaccattaagttgagcactctagcgagactgcccgggttaaccgggaggaaggtggggatgacgtcaaatcatcatgccccttatgtctagggctacacacgtgctacaatggccggtacagagagatgcaataccgcgaggtggagctaaacttcaaaaccggtctcagttcggattgtaggctgaaactcgcctacatgaagctggagttactagtaatcgcgaatcagcatgtcgcggtgaatacgttcccgggccttgtacacaccgcccgtcacaccatgagagttggcaatacccaaagttcgtgagctaacgcgtaagcgaggcagcgacctaagg

SEQ ID NO: 2019 - DNA, 1367 bp, Artificial Sequence
  Synthetic polymer
agagtttgatcctggctcaggatgatcgctggcggcgtgcctaacacatgcaagtcgagcgattctcttcggagaagagcggcggacgggtgagtaacgcgtgggtaacctgccctgtacacacggataacataccgaaaggtatgctaatacgggataatatataagagtcgcatgacttttatatcaaagatttttcggtacaggatggacccgcgtctgattagcttgttggcggggtaacggcccaccaaggcgacgatcagtagccgacctgagagggtgatcggccacattggaactgagacacggtccaaactcctacgggaggcagcagtggggaatattgcacaatgggcgcaagcctgatgcagcaacgccgcgtgagcgatgaaggccttcgggtcgtaaagctctgtcctcaaggaagataatgacggtacttgaggaggaagccccggctaactacgtgccagcagccgcggtaatacgtagggggctagcgttatccggatttactgggcgtaaagggtgcgtaggcggtctttcaagtcaggagttaaaggctacggctcaaccgtagtaagctcctgatactgtctgacttgagtgcaggagaggaaagcggaattcccagtgtagcggtgaaatgcgtagatattgggaggaacaccagtagcgaaggcggctttctggactgtaactgacgctgaggcacgaaagcgtggggagcaaacaggattagataccctggtagtccacgctgtaaacgatgagtactaggtgtcggaggttacccccttcggtgccgcagctaacgcattaagtactccgcctgggggagtacgcacgcaaagtgagaataacaaaggaatagagggggtcccacacaagtagccggagcaagaggatgaaattcgtagcaacgccgaagaacattacttagtcttgggatctttctgaccgaggattaatctcctctttccctccggggacagaagcgacaggtggtgcatggttgtcgtcagcttgtgtcgtgagatgatgggttaagtcccgcaacgagcgcaaccgttgtctttagctgccatcataaagttgggcactctagagagactgccagggataacctggaggaaggtggggatgacgtcaaatcatcatgccccttatgcctagggctacacacgtgctacaatgggtggtacagagggcagccaagccgtgaggtggagcaaatcccttaaagccattctcagttcggattgtaggctgaaactcgcctacatgaagctggagttactagtaatcgcagatcagaatgctgcggtgaatgcgttcccgggtcttgtactcaccgcccgtca

SEQ ID NO: 2020 - DNA, 1361 bp, Artificial Sequence
  Synthetic polymer
agagtttgatcctggctcaggatgaacgctggcggcgtgcctaacacatgcaagtcgagcgattctcttcggagaagagcggcggacgggtgagtaacgcgtgggtaacctgccctgtacacacggataacataccgaaaggtatgctaatacgagataatatgcttttatcgcatggtagaagtatcaaagcttttgcggtacaggatggacccgcgtctgattagctagttggtaaggtaacggcttaccaaggcgacgatcagtagccgacctgagagggtgatcggccacattggaactgagacacggtccaaactcctacgggaggcagcagtggggaatattgcacaatgggcgaaagcctgatgcagcaacgccgcgtgagcgatgaaggccttcgggtcgtaaagctctgtcctcaaggaagataatgacggtacttgaggaggaagccccggctaactacgtgccagcagccgcggtaatacgtagggggctagcgttatccggaattactgggcgtaaagggtgcgtaggtggtttcttaagtcagaggtgaaaggctacggctcaaccgtagtaagcctttgaaactgggaaacttgagtgcaggagaggagagtggaattcctagtgtagcggtgaaatgcgtagatattaggaggaacaccagtggcgaaggcggctttctggacgacaactgacgctgaggcgcgaaagtgtggggagcaaacaggattagataccctggtagtccacaccgtaaacgatggatactaggtgtaggaggtatcgaccccttctgtgccgcagttaacacaataagtatcccacccggggagtacgaccgcaaggttgaaactcaaaggaattgacgggggcccgcacaagcagtggagtatgtggtttaattcgaagcaacgcgaagaaccttacctgggcttgacatcccgatgaccgtcctagagatagggcttcccttcggggcatcggtgacaggtgtgcatggttgtcgtcagctcgtgtcgtgagatgttgggttaagtcccgcaacgagcgcaaccactattgtcagttgccatcattcagttgggaactctggcgagactgccggtgacaaatcggaggaaggtggggacgacgtcaaatcatcatgccccttatgcccagggctacacacgtactacaatggccgataacaaagtgcagcgaaatcgtgaggtggagcgaatcacaaaactcggtctcagttcagattgcaggctgcaactcgcctgcatgaagttggaattgctagtaatcgcgaatcagaatgtcgcggtgaatacgttcccgggccttgcactcaccgcccgtca

SEQ ID NO: 2021 - DNA, 1376 bp, Artificial Sequence
  Synthetic polymer
ttagagtttgatcctggctcaggacgaacgctggcggcgtgcttaacacatgcaagtcgagcgatgaagcttcttcgggagtggattagcggcggacgggtgagtaacacgtgggtaacctgccctatagtggggaatagcctttcgaaaggaagattaataccccataagattgtagttccgcatggaacaacaattaaaggagcaattcgctataggatggacccgcggcgcattagctagttggtgaggtaacggctcaccaaggcgacgatgcgtagccgacctgagagggtgatcggccacattgggactgagacacggcccagactcctacgggaggcagcagtggggaatattgcacaatgggggaaaccctgatgcaccaacgccgcgtgagtgatgacggtcttcggattgtaaagctctgtcttcagggacgataatgacggtacctgaggaggaagccacggctaactacgtgccagcagccgcggtaatacgtaggtggcaagcgttgtccggatttactgggcgtaaagggagcgtaggcggacttttaagtgggatgtgaaatacccgggctcaacctgggtgctgcattccaaactggaagtctagagtacaggaggggaaagcggaattcctagtgtagcggtgaaatgcgtagagattaggaagaacaccggtggcgaaggcggctttctggactgtaactgacgctgaggctcgaaagcgtgggtagcgaacaggattagataccctggtagtccacgccgtaaacgatgaatactaggtgtaggggttgtcatgacctctgtgccgccgctaacgcattaagtattccgcctggggagtacggtcgcaagattaaaactcaaaggaattgacgggggcccgcacaagcagcggagcatgtggtttaattcgaagcaacgcgaagaaccttacctagacttgacatctcctgcattacccttaatcggggaagttccttcggggacaggaagacaggtggtgcatggttgtcgtcagctcgtgtcgtgagatgttgggttaagtcccgcaacgagcgcaacccctatttccagttgccagcacgcaaaggtgggaactctggagaaactgccggtgacaaaccggaggaaggtggggatgacgtcaaatcatcatgccctttatgtcctgggctacacacgtgctacaatggtcggtacaaagggcagcgaagccgtgaggcggagcgaatcccataaagccggtctcagttcggattgcaggctgcaacccgcctgcatgaagtcggaatcgctagtaatcgcaagtcagcatattgcggtgaatacgttcccgggtcttgcacacaccgcccgtca

SEQ ID NO: 2022 - DNA, 1375 bp, Artificial Sequence
  Synthetic polymer
agagtttgatcctggctcaggacgaacgctggcggcgtgcctaacacatgcaagtcgagcgatgaagtttccttcgggaaacggattagcggcggacgggtgagtaacacgtgggtaacctgccttgtagagggggatagccttccgaaaggaagattaataccgcataagattgtagtttcgcatgaaacagcaattaaaggagcaatccgctacaagatggacccgcggcgcattagctagttggtgaggtaatggctcaccaaggcgacgatgcgtagccgacctgagagggtgatcggccacattggaactgagacacggtccaaactcctacgggaggcagcagtggggaatattgcacaatgggcgcaagcctgatgcagcaacgccgcgtgagcgatgaaggccttcgggtcgtaaagctctgtcctcaaggaagataatgacggtacttgaggaggaagccccggctaactacgtgccagcagccgcggtaatacgtagggggctagcgttatccggatttactgggcgtaaagggtgcgtaggcggtctttcaagtcaggagttaaaggctacggctcaaccgtagtaagctcctgatactgtctgacttgagtgcaggagaggaaagcggaattcccagtgtagcggtgaaatgcgtagatattgggaggaacaccagtagcgaaggcggctttctggactgtaactgacgctgaggcacgaaagcgtgggggagcaaacaggattagataccctggtagtccacgccgtaaacgatgaatactaggtgtgggggtttcaacacctccgtgccgccgctaacgcattaagtattccgcctggggagtacggtcgcaagattaaaactcaaaggaattgacggggacccgcacaagtagcggagcatgtggtttaattcgaagcaacgcgaagaaccttacctaggcttgacatccttctgaccgaggactaatctcctctttccctccggggacagaagtgacaggtggtgcatggttgtcgtcagctcgtgtcgtgagatgttgggttaagtcccgcaacgagcgcaacccttgtctttagttgccatcattaagttgggcactctagagagactgccagggataacctggaggaaggtggggatgacgtcaaatcatcatgccccttatgcctagggctacacacgtgctacaatgggtggtacagagggcagccaagccgtgaggtggagcaaatcccttaaagccattctcagttcggattgtaggctgaaactcgcctacatgaagctggagttactagtaatcgcagatcagaatgctgcggtgaatgcgttcccgggtcttgcacacaccgcccgtca

SEQ ID NO: 2023 - DNA, 1362 bp, Artificial Sequence; identical to SEQ ID NO: 600
  Synthetic polymer

SEQ ID NO: 2024 - DNA, 1362 bp, Artificial Sequence; identical to SEQ ID NO: 82
  Synthetic polymer

SEQ ID NO: 2025 - DNA, 1434 bp, Artificial Sequence
  Synthetic polymer
gacgaacgctggcggcgtgcctaacacatgcaagtcgagcgagttgatttcttcggaatgaagctagcggcggacgggtgagtaacacgtgggcaacctgcctcatagaggggaatagccttccgaaaggaagattaataccgcataagattgcagcttcgcatgaagcagcaattaaaggagcaatccgctatgagatgggcccgcggcgcattagctagttggtgaggtaacggctcaccaaggcgacgatgcgtagccgacctgagagggtgatcggccacattgggactgagacacggcccagactcctacgggaggcagcagtggggaatattgcacaatgggggaaaccctgatgcagcaacgccgcgtgagtgatgacggtcttcggattgtaaagctctgtcttcagggacgataatgacggtacctgaggaggaagccacggctaactacgtgccagcagccgcggtaatacgtaggtggcgagcgttgtccggatttactgggcgtaaagggagcgtaggcggacttttaagtgagatgtgaaatacccgggctcaacttgggtgctgcatttcaaactggaagtctagagtgtaggagaggagagtggaattcctagtgtagcggtgaaatgcgtagagattaggaagaacaccagtggcgaaggcgactctctggactgtaactgacgctgaggctcgaaagcgtggggagcaaacaggattagataccctggtagtccacgccgtaaacgatggatactaggtgtgggggttgtcatgacctccgtgccgccgctaacgcattaagtatcccgcctggggagtacggtcgcaagattaaaactcaaaggaattgacgggggcccgcacaagcagcggagcatgtggtttaattcgaagcaacgcgaagaaccttacctagacttgacatctcctgcattactcttaatcgaggaagtccttcgggacaggaagacaggtggtgcatggttgtcgtcagctcgtgtcgtgagatgttgggttaagtcccgcaacgagcgcaacccttattgttagttgctaccatttagttgagcactctagcgagactgcccgggttaaccgggaggaaggtggggatgacgtcaaatcatcatgccccttatgtctagggctacacacgtgctacaatggtcggtacaatgagacgcaaactcgcgagagtgagctaaactataaaaccgatctcagttcggattgtaggctgaaactcgcctacatgaagctggagttgctagtaatcgcgaatcagcatgtcgcggtgaatacgttcccgggccttgtacacaccgcccgtcacaccatgagagttggcaatacccaatgtgcgtgatctaactcgtaagagaggaagcgccctaaggtagggtcagcgattggggtg

SEQ ID NO: 2026 - DNA, 1372 bp, Artificial Sequence
  Synthetic polymer
agagtttgatcctggctcaggatgaacgctggcggcgtgcctaacacatgcaagtcgaacggttaaggcgccttcgggcgcgaatagagtggcgaacgggtgagtaacgcgtggccaacctgccccctcctccgggacaacctcgggaaaccgaggctaataccggatgctccgggccccccgcatggggggcccgggaaagcccaggcgggaggggatggggccgcgtcccatcaggtagtaggcggggtgacggcccacctagctgacgacgggtagccggactgagaggtcgatcggccacattgggactgagacacggtccaaactcctacgggaggcagcagtggggaatattgcacaatgggcgcaagcctgatgcagcaacgccgcgtgagcgatgaaggccttcgggtcgtaaagctctgtcctcaaggaagataatgacggtacttgaggaggaagccccggctaactacgtgccagcagccgcggtaatacgtagggggctagcgttatccggatttactgggcgtaaagggtgcgtaggcggtctttcaagtcaggagttaaaggctacggctcaaccgtagtaagctcctgatactgtctgacttgagtgcaggagaggaaagcggaattcccagtgtagcggtgaaatgcgtagatattgggaggaacaccagtagcgaaggcggctttctggactgtaactgacgctgaggcacgaaagcgtggggagcaaacaggattagataccctggtagtccacgctgtaaacgatgagtactaggtgtcggaggttacccccttcggtgccgcagctaacgcattaagtactccgcctggggagtacgcacgcaagtgtgaaactcaaaggaattgacggggacccgcacaagtagcggagcatgtggtttaattcgaagcaacgcgaagaaccttacctaggcttgacatccttctgaccgaggactaatctcctctttccctccggggacagaagtgacaggtggtgcatggttgtcgtcagctcgtgtcgtgagatgttgggttaagtcccgcaacgagcgcaacccttgtctttagttgccatcatttagttgggcactctagagagactgccagggataacctggaggaaggtggggatgacgtcaaatcatcatgccccttatgcctagggctacacacgtgctacaatgggtggtacagagggcagccaagccgtgaggtggagcaaatcccttaaagccattctcagttcggattgtaggctgcaactcgcctacatgaagccggaatcgctagtaatcgcggatcagcatgccgcggtgaatacgttcccgggccttgcactcaccgcccgtca

SEQ ID NO: 2027 - DNA, 1451 bp, Artificial Sequence
  Synthetic polymer
gacgaacgctggcggcgtgcctaacacatgcaagtcgagcgatgaaacccttcggggtgaattagcggcggacgggtgagtaacacgtgggtaacctgcctcaaagaggggaatagcctcccgaaagggagattaataccgcataatatgttttaatcgcatgattgaaacatcaaaggattttcttcggaacttccactttgagatggacccgcggcgcattagctagttggtgaggtaacggcccaccaaggcaacgatgcgtagccgacctgagagggtgatcggccacattggaactgagacacggtccagactcctacgggaggcagcagtggggaatattgcgcaatgggggaaaccctgacgcagcaacgccgcgtgaatgatgaaggccttcgggttgtaaagttctgtcttctgggacgataatgacggtaccagaggaggaagccacggctaactacgtgccagcagccgcggtaatacgtaggtggcaagcgttgtccggatttactgggcgtaaaggatgcgtaggcggacatttaagtcagatgtgaaatacccgagcttaacttgggtgctgcatttgaaactgggtgtctagagtgcaggagaggtaagtggaattcctagtgtagcggtgaaatgcgtagagattaggaagaacaccagtggcgaaggcgacttactggactgtaactgacgctgaggcatgaaagcgtggggagcaaacaggattagataccctggtagtccacgccgtaaacgatgaatactaggtgtcgggggtcgaacctcggtgccgcagttaacacaataagtattccgcctggggagtacgatcgcaagattaaaactcaaaggaattgacgggggcccgcacaagcagcggagcatgtggtttaattcgaagcaacgcgaagaaccttacctagacttgacatcccttgcatagcccagagatgggtgaagtccttcgggacaaggtgacaggtggtgcatggttgtcgtcagctcgtgtcgtgagatgttgggttaagtcccgcaacgagcgcaacccttatcattagttgctaccatttagttgagcactctagtgagactgcccgggttaaccgggaggaaggtggggatgacgtcaaatcatcatgccccttatgtctagggctacacacgtgctacaatggtgagtacaaagagatgcaagaccgcaaggtggagccaaactcaaaaactcatcccagttcggattgtaggctgcaactcgcctacatgaagccggagttgctagtaatcgcgaatcagcatgtcgcggtgaatacgttcccgggccttgtacacaccgcccgtcacaccatgagagttggtaacacccgaagtccgtgaggtaacctgacactttgtgtctatggagccagcggccgaaggtgggattgatgattggggtg

SEQ ID NO: 2028 - DNA, 1483 bp, Artificial Sequence
  Synthetic polymer
gagagtttgatcctggctcaggacgaacgctggcggcgtgcctaacacatgcaagtcgagcgaatgaagttccttcgggaacggatttagcggcggacgggtgagtaacacgtgggcaacctgcctcatagaggggaatagccttccgaaagggagattaataccgcgtaagattgtagtaccgcatggtacagcaattaaaggagcaatccgctatgagatgggcccgcggcgcattagctagttggtgaggtaacggctcaccaaggcgacgatgcgtagccgacctgagagggtgatcggccacattgggactgagacacggcccagactcctacgggaggcagcagtggggaatattgcacaatgggggaaaccctgatgcagcaacgccgcgtgagtgatgacggccttcgggttgtaaagctctgtcttcagggacgataatgacggtacctgaggaggaagccacggctaactacgtgccagcagccgcggtaatacgtaggtggcgagcgttgtccggatttactgggcgtaaagggagcgtaggcggatttttaagtgagatgtgaaatactcgggcttaacctgagtgctgcatttcaaactggaagtctagagtgcaggagaggagaagggaattcctagtgtagcggtgaaatgcgtagagattaggaagaacaccagtggcgaaggcgcttctctggactgtaactgacgctgaggctcgaaagcgtggggagcaaacaggattagataccctggtagtccacgccgtaaacgatgagtgctaggtgttgggggtcaaacctcggtgccggagctaacgcattaagcactccgcctggggagtacgtacgcaagtatgaaactcaaaggaattgacggggacccgcacaagcagcggagcatgtggtttaattcgaagcaacgcgaagaaccttaccaggacttgacatgccattgaccactttagagataaagttttagccttcgggctacaatggacacaggtggtgcatggttgtcgtcagctcgtgtcgtgagatgttgggttaagtcccgcaacgagcgcaacccttatttttagttgcaaacatttaagatgtgcactctagagagactgccgatgacaaatcggaggaaggtggggatgacgtcaaatcatcatgccctttatgtcctgggctacacacgtgctacaatggtcggtacaacgaggagcaagctagcgatagcaagcaaatctctaaaagccgatcccagttcggattgcaggctgcaactcgcctgcatgaagtcggagttgctagtaatcgcgaatcagaatgtcgcggtgaatgcgttcccgggtcttgtacacaccgcccgtcacaccatgggagttggaaatacccgaagccagtgagctaacctaaggggagcagctgtcgaaggtagggtcaatgactagggtgaagtcgtaacaaggtagccgtag

SEQ ID NO: 2029 - DNA, 1345 bp, Artificial Sequence
  Synthetic polymer
ttcgcccttagagtttgatcctggctcaggacgaacgctggcggcgtgcttaacacatgcaagtcgagcgatgaaatttccttcgggaaatggattagcggcggacgggtgagtaacacgtgggtaacctgcctcatagaggggaatagcctttcgaaaggaagattaataccgcataagattgtagtaccgcatggtacagcaattaaaggagcaatccgctatgagatggacccgcgtcgcattagctagttggtgaggtaacggctcaccaaggcgacgatgcgtagccgacctgagagggtgatcggccacattgggactgagacacggcccagactcctacgggaggcagcagtggggaatattgcacaatgggggaaaccctgatgcagcaacgccgcgtgagtgatgacggccttcgggttgtaaagctctgtcttcagggacgataatgacggtacctgaggaggaagccacggctaactacgtgccagcagccgcggtaatacgtaggtggcgagcgttgtccggatttactgggcgtaaagggagcgtaggcggatttttaagtgagatgtgaaatactcgggcttaacctgagtgctgcatttcaaactggaagtctagagtgcaggagaggagaagggaattcctagtgtagtggtgaaatgcgtagagattaggaagaacaccagtggcggaggcgcttctctggactgtaactgacgctgaggcttgaaagcgtggggagcaaacaggattagataccctggtagtccacgccgtaaacgatgaataatgggtgtagggggtgtcatgacctctgtgccgccgccaacgccttaagtattccgcctggggagtacggtcgcaagattaaaaactcaagggaattaacgggggcccgcacaagcagcgaagcatgtggtttaattcgaagcaacgcgaagaaccttacctagacttgacatctcctgaattactctgtaatggaggaagccgcttcggcggcaggaagacaggtggtgcatggttgtcgtcagctcgtgtcgtgagatgttgggttaagtcccgcaacgagcgcaacccttattgttagttgctaccatttagttgagcactccagcgagactgcccgggttaaccgggaggaaggtggggatgacgtcaaatcatcatgccccttatgtttagggctacacacgtgctacaatggctggtacagagagatgcgataccgcgaggtggagccaaacttcaaaaccagtctcagttcggattgtaggctgaaactcgcctacatgaagctggagttgctagtaatcgcgaatcagaatgtcgc

SEQ ID NO: 2030 - DNA, 1357 bp, Artificial Sequence
  Synthetic polymer
agagtttgatcctggctcaggatgaacgctggcggcgtgcctaacacatgcaagtcgagcgatctcttcggagagagcggcggacgggtgagtaacgcgtgggtaacctgccctgtacacacggataacataccgaaaggtatgctaatacgggataacatataagagtcgcatgacttttatatcaaagatttttcggtacaggatggacccgcgtctgattagcttgttggcggggtaacggcccaccaaggcgacgatcagtagccgacctgagagggtgatcggccacattggaactgagacacggtccaaactcctacgggaggcagcagtggggaatattgcacaatgggcgcaagcctgatgcagcaacgccgcgtgagcgatgaaggccttcgggtcgtaaagctctgtcctcaaggaagataatgacggtacttgaggaggaagccccggctaactacgtgccagcagccgcggtaatacgtagggggctagcgttatccggatttactgggcgtaaagggtgcgtaggcggtctttcaagtcaggagttaaaggctacggctcaaccgtagtaagctcctgatactgtctgacttgagtgcaggagaggaaagcggaattcccagtgtagcggtgaaatgcgtagatattgggaggaacaccagtagcgaaggcggctttctggactgtaactgacgctgaggcacgaaagcgtggggagcaaacaggattagataccctggtagtccacgctgtaaacgatgaatactaggtgtgggggtttcaacacctccgtgccgccgctaacgcattaagtattccgcctggggagtacggtcgcaagattaaaactcaaaggaattgacggggacccgcacaagtagcggagcatgtggtttaattcgaagcaacgcgaagaaccttacctacacttgacatcccttgcattactcttaatcgaggaaatcccttcggggacaaggtgacaggtggtgcatggttgtcgtcagctcgtgtcgtgagatgttgggttaagtcccgcaacgagcgcaacccttgtcgttagttactaccattaagttgaggactctagcgagactgcctgggttaaccaggaggaaggtggggatgacgtcaaatcatcatgccccttatgtgtagggctacacacgtgctacaatggctggtacagagagatgcaataccgcgaggtggagccaaacttaaaaaccagtctcagttcggattgtaggctgaaactcgcctacatgaagctggagttactagtaatcgcgaatcagaatgtcgcggtgaatacgttcccgggtcttgtacacaccgcccgtca

SEQ ID NO: 2031 - DNA, 1355 bp, Artificial Sequence
  Synthetic polymer
agagtttgatcctggctcaggatgaacgctggcggcgtgcctaacacatgcaagtcgagcgattctcttcggagaagagcggcggacgggtgagtaacgcgtgggtaacctgccctgtacacacggataacataccgaaaggtatgctaatacgggataacatataagagtcgcatgacttttatatcaaagatttttcggtacaggatggacccgcgtctgattagcttgttggcggggtaacggcccaccaaggcgacgatcagtagccgacctgagagggtgatcggccacattggaactgagacacggtccaaactcctacgggaggcagcagtggggaatattgcacaatgggcgcaagcctgatgcagcaacgccgcgtgagcgatgaaggccttcgggtcgtaaagctctgtcctcaaggaagataatgacggtacttgaggaggaagccccggctaactacgtgccagcagccgcggtaatacgtagggggctagcgttatccggatttactgggcgtaaagggtgcgtaggcggtctttcaagtcaggagttaaaggctacggctcaaccgtagtaagctcctgatactgtctgacttgagtgcaggagaggaaagcggaattcccagtgtagcggtgaaatgcgtagatattaggaggaacaccagtggcgaaggcggcttactggacagtaactgacgttgaggctcgaaagcgtggggagcaaacaggattagataccctggtagtccacgccgtaaacgatgaatactaggtgttggtgggcaaagcccatcggtgccgtcgcaaacgcaataagtatttcacctggggagtacattcgcaagaatgaaactcaaaggaattgacgggggcccgcacaagcagtggagtatgtggtttaattcgacgcaacgcgaagaaccttaccaagtcttgacatcctgcgacggtgctagaaatagtactttccttcgggacgcagagacaggtggtgcatggttgtcgtcagctcgtgtcgtgagatgttgggttaagtcccgcaacgagcgcaacccctatggtcagttactacgcaagaggactctggccagactgccgttgacaagacggaggaaggtggggatgacgtcaaatcatcatgccctttatgacttgggctacacacgtactacaatggcgtttaacaaagagaagcgaagtcgcgaggcagagcaaaactcagaaacaacgtcccagttcggactgcaggctgcaactcgcctgcacgaagtcggaattgctagtaatcgcagatcagcatgccgcggtgaatacgttcccgggccttgcacacaccgcccgtca

SEQ ID NO: 2032 - DNA, 1363 bp, Artificial Sequence
  Synthetic polymer
agagtttgatcctggctcaggatgaacgctggcggcgtgcctaacatatgcaagtcgagcgattctcttcggagaagagcggcggacgggtgagtaacgcgtgggtaacctgccctgtacacacggataacataccgaaaggtatgctaatacgggataacatataagagtcgcatgacttttatatcaaagatttttcggtacaggatggacccgcgtctgattagcttgttggcggggtaacggcccaccaaggcgacgatcagtagccgacctgagagggtgatcggccacattggaactgagacacggtccaaactcctacgggaggcagcagtggggaatattgcacaatgggcgcaagcctgatgcagcaacgccgcgtgagcgatgaaggccttcgggtcgtaaagctctgtcctcaaggaagataatgacggtacttgaggaggaagccccggctaactacgtgccagcagccgcggtaatacgtagggggctagcgttatccggatttactgggcgtaaagggtgcgtaggcggtctttcaagtcaggagttaaaggctacggctcaaccgtagtaagctcctgatactgtctgacttgagtgcaggagaggaaagcggaattcccagtgtagcggtgaaatgcgtagatattgggaggaacaccagtagcgaaggcggctttctggactgtaactgacgctgaggcacgaatgcgtggggagcaaacaggattagataccctggtagtccacgccgtaaacgatgcatactaggtgtcggggagcaaagctttccggtgccgccgcaaacgcagtaagtatgccacctggggagtacgttcgcaagaatgaaactcaaaggaattgacggggacccgcacaagcggtggagcatgtggtttaattcgaagcaacgcgaagaaccttaccaagtcttgacatccccctgacgagcgagtaacgtcgcttttccttcgggacaggggagacaggtggtgcatggttgtcgtcagctcgtgtcgtgagatgttgggttaagtcccgcaacgagcgcaacccttattgtcagtagccagcaggtaaagctgggcactctgatgagactgccagggataacctggaggaaggtggggatgacgtcaaatcatcatgccccttatgatttgggctacacacgtgctacaatggcgtaaacaaagggaagcgaccctgcgaaggcaagcaaatcccaaaaataacgtcccagttcggattgtagtctgcaactcgactacatgaagctggaatcgctagtaatcgcagatcagcatgctgcggtgaatacgttcccgggtcttgtacacaccgcccgtca

SEQ ID NO: 2033 - DNA, 1464 bp, Artificial Sequence
  Synthetic polymer
agagtttgatcctggctcaggatgaacgctggcggcgtgcctaacacatgcaagtcgagcgattctcttcggagaagagcggcggacgggtgagtaacgcgtgggtaacctgccctgtacacacggataacataccgaaaggtatgctaatacgagataatatgcttttatcgcatggtagaagtatcaaagctccggcggtacaggatggacccgcgtctgattagctagttggtaaggtaacggcttaccaaggcgacgatcagtagccgacctgagagggtgatcggccacattggaactgagacacggtccaaactcctacgggaggcagcagtggggaatattgcacaatgggcgaaagcctgatgcagcaacgccgcgtgagcgatgaaggccttcgggtcgtaaagctctgtcctcaaggaagataatgacggtacttgaggaggaagccccggctaactacgtgccagcagccgcggtaatacgtagggggctagcgttatccggaattactgggcgtaaagggtgcgtaggtggtttcttaagtcagaggtgaaaggctacggctcaaccgtagtaagcctttgaaactgggaaacttgagtgcaggagaggagagtggaattcctagtgtagcggtgaaatgcgtagatattaggaggaacaccagttgcgaaggcggctctctggactgtaactgacactgaggcacgaaagcgtggggagcaaacaggattagataccctggtagtccacgccgtaaacgatgagtactagctgtcggaggttacccccttcggtggcgcagctaacgcattaagtactccgcctgggaagtacgctcgcaagagtgaaactcaaaggaattgacggggacccgcacaagtagcggagcatgtggtttaattcgaagcaacgcgaagaaccttacctaagcttgacatccttttgaccgatgcctaatcgcatctttcccttcggggacagaagtgacaggtggtgcatggttgtcgtcagctcgtgtcgtgagatgttgggttaagtcccgcaacgagcgcaacccttgcctttagttgccagcattaagttgggcactctagagggactgccagggataacctggaggaaggtggggatgacgtcaaatcatcatgccccttatgtcctgggctacacacgtgctacaatggccggtacaacgggtagcgaccccgcaagggtgagcaaatcccaataagccggtcccagttcggattgtgggctgcaactcgcccacatgaagccggagttactagtaatcgcgaatcagaatgtcgcggtgaatgcgttcccgggccttgtacacaccgcccgtcacaccatgagagttggtaacacccgaagccagtgagctaaccgtaaggaggcagctgtcgaaggtgggatcaatgattggggtgaagtcgtaacaaggtaacc

SEQ ID NO: 2034 - DNA, 1374 bp, Artificial Sequence
  Synthetic polymer
agagtttgatcctggctcaggatgaacgctggcggcgtgcttaacacatgcaagtcgagcgagaaaagttcttcggagcttttctagcgccggacgggtgagtaacacgtgggcaacctgcctcatagaggggaatagccttccgaaaggaagattaataccgcataacattgttgaaaggcatcttttaacaatcaaaggagcaatccgctatgagatgggcccgcggcgcattagctagttggtgaggtaacggctcaccaaggcgacgatgcgtagccgacctgagagggtgatcggccacattggaactgagacacggtccagactcctacgggaggcagcagtggggaatattgcacaatgggggaaaccctgatgcagcaacgccgcgtgagtgatgaaggtcttcggattgtaaagctctgtctttagggacgataatgacggtacctaaggaggaagccacggctaactacgtgccagcagccgcggtaatacgtaggtggcaagcgttatccggatttactgtgtgtaaagggagcgtagacggaagagcaagtctgatgtgaaaggcaggggcccaacccctggactgcattggaaactgtccttcttgagtgccggaggggtaagcggaattcctagtgtagcggtgaaatgcgtagatattaggaggaacaccagtggcgaaggcggcttactggacggtaactgacgttgaggctcgaaagcgtggggagcaaacgggattagataccctggtagtccacgcggtaaacgatgaatactaggtgtcggggagcacagctcttcggtgccgccgcaaacgcattaagtattccacctggggagtacgttcgcaagaatgaaactcaaaggaattgacggggacccgcacaagcggtggagcatgtggtttaatccgaagcaacgcgaagaaccttaccaagtcttgacatccctgtgaccggcctttaatcgggccctcccttcggggcacaggagacaggtggtgcatggttgtcgtcagctcgtgtcgtgagatgttgggttaagtcccgcaacgagcgcaacccttatccttagtagccagcacgcagtggtgggcactctggggagactgccagggataacctggaggaaggtggggatgacgtcaaatcatcatgccccttatgatttgggctacacacgtgctacaatggcgtaaacaaagggaagcgagagggtgaccttgagcaaatcccaaaaataacgtcccagttcggactgtagtctgcaacccgactacacgaagctggaatcgctagtaatcgcggatcagaatgccgcggtgaatacgttcccgggtcttgtacacaccgcccgtca

SEQ ID NO: 2035 - DNA, 1368 bp, Artificial Sequence
  Synthetic polymer
tagagtttgatcctggctcaagacgaacgctggcggcgtgcctaacacatgcaagtcgagcgaatgaagttccttcgggaacggatttagcggcggacgggtgagtaacacgtgggcaacctgcctcatagaggggaatagccttccgaaagggagattaataccgcataagattgtactaccgcatggtacagcaattaaaggagcaatccgctatgagatgggcccgcggcgcattagctagttggtgaggtaacggctcaccaaggcgacgatgcgtagccgacctgagagggtgatcggccacattgggactgagacacggcccagactcctacgggaggcagcagtggggaatattgcacaatgggggaaaccctgatgcagcaacgccgcgtgagtgatgacggccttcgggttgtaaagctctgtcttcagggacgataatgacggtacctgaggaggaagccacggctaactacgtgccagcagccgcggtaatacgtaggtggcgagcgttgtccggatttactgggcgtaaagggagcgtaggcggatttttaagtgagatgtgaaatactcgggcttaacctgagtgctgcatttcaaactggaagtctagagtgcaggagaggagaagggaattcccagtgtagcggtgaaatgcgtagagattaggaagaacaccagtggcgaaggcgcttctctggactgtaactgacgctgaggctcgaaagcgtggggagcaaacaggattagataccctggtagtccacgccgtaaacgatgaatactaggtgttgggggaactcagtgccgcagctaacgcattaagtattccgcctggggagtacgctcgcaagagtgaaactcaaaggaattgacgggggcccgcacaagcagcggagcatgtggtttaattcgaagcaacgcgaagaaccttaccaggccttgacatcctttgacggctcaagagattgagcgttcccttcggggacaaagagacaggtggtgcatggttgtcgtcagctcgtgtcgtgagatgttgggttaagtcccgcaacgagcgcaacccctatgtttagttgccatcattaagttgggcactctggacagactgcccgtgaaaacgggaggaaggtggggatgacgtcaaatcatcatgccccttacggcctgggctacacacgtgctacaatggtttgtacagagggtagcgaagcagcaatgcggagccaatctcataaaacaaatcccagttcggattgcaggctgcaactcgcctgcatgaagtcggagttgctagtaatcgcagatcagccacggcgcggtgaatacgttcccgggccttgcacacagcgcccgtca

SEQ ID NO: 2036 - DNA, 1349 bp, Artificial Sequence; identical to SEQ ID NO: 618
  Synthetic polymer

SEQ ID NO: 2037 - DNA, 1361 bp, Artificial Sequence
  Synthetic polymer
agagtttgatcctggctcaggatgaactctggcggcgtgcctaacacatgcaagtcgagcgatttacttcggtaaagagcggcggacgggtgagtaacgcgtgggtaacctgccctgtacacacggataacataccgaaaggtatgctaatacgagataacatacttttatcgcatggtagaagtatcaaagcttttgcggtacaggatggacccgcgtctgattagctagttggtaaggtaacggcttaccaaggcgacgatcagtagccgacctgagagggtgatcggccacattggaactgagacacggtccaaactcctacgggaggcagcagtggggaatattgcacaatgggcgaaagcctgatgcagcaacgccgcgtgagcgatgaaggccttcgggtcgtaaagctctgtcctcaaggaagataatgacggtacttgaggaggaagccccggctaactacgtgccagcagccgcggtaatacgtagggggctagcgttatccggaattactgggcgtaaagggtgcgtaggtggtttcttaagtcagaggtgaaaggctacggctcaaccgtagtaagcctttgaaactgggaaacttgagtgcaggagaggagagtggaattcctagtgtagcggtgaaatgcgtagatattaggaggaacaccagtggcgaaggcggctttctggaccgtaactgacgttgaggcgcgaaagcgtgggtagcaaacaggattagataccctggtagtccacgccgtaaacgatgaatactaggtgtagggggtatcgactccttctgtgccgcagtaaacacaataagtattccacctggggagtacggccgcaaggttgaaactcaaaggaattgacgggggcccgcacaagcagtggagtatgtggtttaattcgaagcaacgcgaagaaccttacctgggcttgacatcccaagcatagtgtagagatacatgaaatcctacgggacttggagacaggtggtgcatggttgtcgtcagctcgtgtcgtgagatgttgggttaagtcccgcaacgagcgcaacccctattgtcagttgccatcattaagttgggcactctggcgagactgccggtgacaaatcggaggaaggtggggacgacgtcaaatcatcatgccccttatgtccagggctacacacgtactacaatggccgataacaaagtgaagcaatactgtgaagtggagcaaatcacaaaactcggtcccagttcagactgtaggctgcaactcgcctacacgaagtcggaattgctagtaatcgcgaatcagcatgtcgcggtgaatacgttcccgggtcttgcactcaaagcccgtca

SEQ ID NO: 2038 - DNA, 1375 bp, Artificial Sequence
  Synthetic polymer
agagtttgatcctggctcaggatgaacgctggcggcgtgcttaacacatgcaagtcgagcgaggaaagttcttcggagcttttctagcggcggacgggtgagtaacacgtgggtaacctgcctcatagaggggaatagccttccgaaaggaagattaataccgcataatattgttgaaaggcatcttttaacaatcaaaggagcaatccgctatgagatgggcccgcggcgcattagctagttggtgaggtaacggctcaccaaggcgacgatgcgtagccgacctgagagggtgatcggccacattggaactgagacacggtccagactcctacgggaggcagcagtggggaatattgcacaatgggggaaaccctgatgcagcaacgccgcgtgagtgatgaaggtcttcggattgtaaagctctgtctttagggacgataatgacggtacctaaggaggaagccacggctaactacgtgccagcagccgctgtaatacgtaggtggcaagcgttatccggaattactgggtgtaaagggagcgcaggcggaaggacaagttggaagtgaaacccacgggctcaacccgtgaactgctttcaaaactgtttttcttgagtggtgtagaggtaggcggaattcccggtgtagcggtggaatgcgtagatatcgggagggacaccagtggcgaaggcggcctactgggcactaactgacgctgaggcacgaaagcgtggggagcaaacaggattagataccctggtagtccacgctgtaaacgatgaatactaggtgtagggggtatcaactccctctgtgccgcagcaaacgcaataagtattccgcctggggagtacggccgcaaggttgaaactcaaaggaattgacggggacccgcacaagcggtggagcatgtggtttaattcgaagcaacgcgaagaaccttacctggtcttgacatccctttgaataatccgtaatggggttagtacttcggtacagaggagacaggtggtgcatggttgtcgtcagctcgtgtcgtgagatgttgggttaagtcccgcaacgagcgcaacccttatgattagtagccagcaggtaaagctgggcactctaatgagactgccggggataacccggaggaaggtggggatgacgtcaaatcatcatgccccttatgaccagggctacacacgtgctacaatggcgtaaacaaagggaagcgagcctgtgaaggtaagcaaatcccagaaataacgtctcagttcggattgtagtctgcaactcgactacatgaagctggaatcgctagtaatcgcgaatcagaatgtcgcggtgaatacgttcccgggtcttgcacacaccgcccgtca

SEQ ID NO: 2039 - DNA, 1376 bp, Artificial Sequence; identical to SEQ ID NO: 274
  Synthetic polymer

SEQ ID NO: 2040 - DNA, 1468 bp, Artificial Sequence
  Synthetic polymer
ttgagagtttgatcctggctcaggatgaacgctagcggcgtgcttaacacatgcaagtcgagcgatgaagtttccttcgggaaatggattagcggcggacgggtgagtaacacgtgggtaacctgcctcatagagtggaatagccttccgaaaggaagattaataccgcataacgttgaaagatggcatcatcatttaaccaaaggagtaatccgctatgagatggacccgcggcgcattagctagttggtggggtaacggcctaccaaggcgacgatgcgtagccgacctgagagggtgatcggccacattgggactgagacacggcccagactcctacgggaggcagcagtggggaatattgcacaatgggggaaaccctgatgcagcaacgccgcgtgagtgatgaaggttttcggatcgtaaaactctgtctttggggaagataatgacggtacccaaggaggaagccacggctaactacgtgccagcagccgcggtaatacgtaggtggcgagcgttatccggatttactgggcgtaaagggagcgtaggcggatgattaagtgggatgtgaaatacccgggctcaacttgggtgctgcattccaaactggttatctagagtgcaggagaggagagtggaattcctagtgtagcggtgaaatgcgtagagattaggaagaacaccagtggcgaaggcgactctctggactgtaactgacgctgaggctcgaaagcgtggggagcaaacaggattagataccctggtagtccacgccgtaaacgatgagcactaggtgtcggggtcgcaagacttcggtgccggagttaacgcattaagtgctccgcctggggagtacgcacgcaagtgtgaaactcaaaggaattgacggggacccgcacaagcagcggagcatgtggtttaattcgaagcaacgcgaagaaccttaccaggacttgacatccctctgaccggtccttaaccggacctttcttcggacagaggagacaggtggtgcatggttgtcgtcagctcgtgtcgtgagatgttgggttaagtcccgcaacgagcgcaacccttgctgttagttgccatcattcagttgggcactctaacgggactgccggggacaactcggaggaaggtggggatgacgtcaaatcatcatgccccttatgttctgggctacacacgtgctacaatggccggtacagaaagcagcgaagtcgcgaggcggagcaaatctcgaaaaccggtcccagttcggactgcaggctgcaactcgcctgcacgaagccggagttgctagtaatcgcggatcagaatgccgcggtgaatgcgttcccgggtcttgtacacaccgcccgtcacaccatggaagttgggggtgcccgaagccggcaggtagatatgctgtcgaaggcaaaaccaatgactggggtgaagtcgtaacaaggtagccgta

SEQ ID NO: 2041 - DNA, 1426 bp, Artificial Sequence; identical to SEQ ID NO: 1024
  Synthetic polymer

SEQ ID NO: 2042 - DNA, 1370 bp, Artificial Sequence
  Synthetic polymer
agagtttgatcctggctcaggatgaacgctggcggcgtgcttaacacatgcaagtcgagcgagaaaagttcttcggagcttttctagcggcggacgggtgagtaacacgtgggcaacctgcctcatagaggggaatagccttccgaaaggaagattaataccgcataatattgttgaaaggcatcttttaacaatcaaaggagcaatccgctatgagatgggcccgcggcgcattagctagttggtgaggtaacggctcaccaaggcgacgatgcgtagccgacctgagagggtgatcggccacattggaactgagacacggtccagactcctacgggaggcagcagtggggaatattgcacaatgggggaaaccctgatgcagcaacgccgcgtgagtgatgaaggtcttcggattgtaaagctctgtctttagggacgataatgacggtacctcatgaataagccacggctaactacgtgccagcagccgcggtaatacgtaggtggcaagcgttatccggatttactgggtgtaaagggcgcgtaggcggggatgcaagtcagatgtgaaatctatgggcttaacccataaactgcatttgaaactgtatctcttgagtgctggagaggtagacggaattccttgtgtagcggtgaaatgcgtagatataaggaagaacaccagtggcgaaggcggtctactggacagtaactgacgctgaggcgcgagagcgtggggagcaaacaggattagataccctggtagtccacgctgtaaacgatgaatactaggtgtggggggactgaccccttccgtgccgcagttaacacaataagtattccacctggggagtacggccgcaaggttgaaactcaaaggaattgacgggggcccgcacaagcagtggattatgtggtttaattcgaagcaacgcgaagaaccttaccagggcttgacatccaactaacgaagcagagatgcattaggtgcccttcggggaaagttgagacaggtggtgcatggttgtcgtcagctcgtgtcgtgagatgttgggttaagtcccgcaacgagcgcaacccctattgttagttgctacgcaagagcactctagcgagactgccgttgacaaaacggaggaaggtggggacgacgtcaaatcatcatgccccttatgtcctgggctacacacgtaatacaatggcggtcaacagagggatgcaaaaccgtgaggtggagcgaacccctaaaagccgtcccagttcagatcgtgggctgcaacccgcccacgtgaagtcggaatcgctagtaatcgcggatcagcatgccgcggtgaatacgatcccgggccttgcacacaccgcccgtca

SEQ ID NO: 2043 - DNA, 1363 bp, Artificial Sequence; identical to SEQ ID NO: 268
  Synthetic polymer

SEQ ID NO: 2044 - DNA, 1356 bp, Artificial Sequence
  Synthetic polymer
agagtttgatcctggctcaggatgaacgctggcggcgtgcctaacacatgcaagtcgagcgattctcttcggagaagagcggcggacgggtgagtaacgcgtgggtaacctgccctgtacacacggataacataccgaaaggtatgctaatacgagataatatacttttatcgcatggtagaagtatcaaagcttttgcggtacaggatggacccgcgtctgattagctagttggtaaggtaacggcttaccaaggcgacgatcagtagccgacctgagagggtgatcggccacattggaactgagacacggtccaaactcctacgggaggcagcagtggggaatattgcacaatgggcgaaagcctgatgcagcaacgccgcgtgagcgatgaaggccttcgggtcgtaaagctctgtcctcaaggaagataatggcggtacttgaggaggaagccccggctaactacgtgccagcagccgcggtaatacgtagggggctagcgttatccggaattactgggcgtaaagggtgcgtaggtggtttcttaagtcagaggtgaaaggctacggctcaaccgtagtaagcctttgaaactgggaaacttgagtgcaggagaggagagtggaattcctagtgtagcggtgaaatgcgtagatattaggaggaacaccagtggcgaaggcggcttactggacggtaactgacgttgaggctcgaaagcgtggggagcaaacaggattagataccctggtagtccacgccgtaaacgatgaatactaggtgtcagggagcacagctctttggtgccgccgcaaacgcattaagtattccacctggggagtacgttcgcaagaatgaaactcaaagggattgacggggacccgcacaagcggtggagcatgtggtttaattcgaagcaacgcgaagaaccttaccaaatcttgacatccctctgaccgggacttaaccgtccctttccttcgggacaggggagacaggtggtgcatggttgtcgtcagctcgtgtcgtgagatgttgggttaagtcccgcaacgagcgcaacccttgtcattagttgctacgcaagagcactctaatgagactgccgttgacaaaacggaggaaggtggggacgacgtcaaatcatcatgccccttatgacctgggctacacacgtactacaatggccgtaaacagagggaagcaagagagcgatctggagcaaacccccaaaaacggtcccagttcggattgcaggctgaaactcgcctgtatgaagtcggaattgctagtaatcgcggatcagcatgccgcggtgaatacgttcccgggccttgcactcaccgcccgtca

SEQ ID NO: 2045 - DNA, 1374 bp, Artificial Sequence; identical to SEQ ID NO: 375
  Synthetic polymer

SEQ ID NO: 2046 - DNA, 1380 bp, Artificial Sequence; identical to SEQ ID NO: 680
  Synthetic polymer

SEQ ID NO: 2047 - DNA, 1444 bp, Artificial Sequence
  Synthetic polymer
gctggcggcgtgcctaacacatgcaagtcgagcgagaaatcataaaatgaaacttcggtagatttttaagatggaaagcggcggacgggtgagtaacgcgtaggcaacctgccttatgcagagggatagccattggaaacgatgattaaaacctcataacgccggagagtcacatggttttccggccaaagatttatcggcataagatgggcctgcgtctgattagttagttggtggggtaacggcctaccaaggcgacgatcagtagccgacctgagagggtgatcggccacattggaactgagacacggtccaaactcctacgggaggcagcagtggggaatattgcacaatgggcgaaagcctgatgcagcaacgccgcgtgaaggaagaaggccttcgggtcgtaaacttctgtcctatgggaagaaaaaaatgacggtaccataggaggaagccccggctaactatgtgccagcagccgcggtaatacgtagggggcgagcgttatccggaattattgggcgtaaagagtgcgtaggtggtaacttaagcgcggggtttaaggcaatggcttaaccattgttcgccctgcgaactgggatacttgagtgcaggagaggaaagcggaattcctagtgtagcggtgaaatgcgtagatattaggaggaacaccagtggcgaaggcggctttctggactgaaactgacactgaggcacgaaagtgcggggagcaaacaggattagataccctggtagtccacaccgtaaacgatgagcactaggtgtcgggggcgcaagtcctcggtgccggagttaacgcattaagtgctccgcctggggagtatgtacgcaagtatgaaactcaaaggaattgacggggacccgcacaagcagcggagcatgtggtttaattcgaagcaacgcgaagaaccttaccagggcttgacatccctctgacaggactttaatcggttccttcttcggacagaggagacaggtggtgcatggttgtcgtcagctcgtgtcgtgagatgttgggttaagtcccgcaacgagcgcaacccttgtcattagttgccagcagtaagatgggcactctaatgagactgccggggataactcggaggaaggtggggatgacgtcaaatcatcatgccccttatgttctgggctacacacgtgctacaatggtcggtacaaagagcagcgaggccgtgaggcggagcaaatctcaaaagccgatcccagttcggattgtaggctgcaactcgcctacatgaagtcggagttgctagtaatcgcagatcagaatgctgcggtgaatgcgttcccgggtcttgtacacaccgcccgtcacaccacggaagttgggggtgcccaaagttggccaagaaatagattacctaaggcaaaaccgatgactggggtgaagtcataacaa

SEQ ID NO: 2048 - DNA, 1387 bp, Artificial Sequence
  Synthetic polymer
agagtttgatcctggctcaggatgaacgctggcggcgtgcttaacacatgcaagtcgagcgaagcgcttcaaaagattcttcggatgattttgaagtgactgagcggcggacgggtgagtaacgcgtggggaacctgcctcatacagggggataacagttagaaatgactgctaataccgcataagcgcacagtaccgcatggtaccgtgtgaaaaactccggtggtatgagatggacccgcgtctgattagctagttggcagggtaacggcctaccaaggcgacgatcagtagccgacctgagagggtgatcggccacattggaactgagacacggtccaaactcctacgggaggcagcagtggggaatattgcacaatgggcgcaagcctgatgcagcaacgccgcgtgagcgatgaaggccttcgggtcgtaaagctctgtcctcaaggaagataatgacggtacttgaggaggaagccccggctaactacgtgccagcagccgcggtaatacgtagggggctagcgttatccggatttactgggcgtaaagggtgcgtaggcggtctttcaagtcaggagttaaaggctacggctcaaccgtagtaagctcctgatactgtctgacttgagtgcaggagaggaaagcggaattcccagtgtagcggtgaaatgcgtagatattgggaggaacaccagtagcgaaggcggctttctggactgtaactgacgctgaggcacgaaagcgtggggagcaaacaggattagataccctggtagtccacgctgtaaacgatgagtactaggtgtcgggttgcatagcaattcggtgccgcagcaaacgcaataagtattccacctggggagtacgttcgcaagaatgaaactcaaaggaattgacggggacccgcacaagcggtggagcatgtggtttaattcgaagcaacgcgaagaaccttaccaagtcttgacatccccctgaccgttccttaaccggaactttccttcgggacaggcaagacaggtggtgcatggttgtcgtcagctcgtgtcgtgagatgttgggttaagtcctgcaacgagcgcaacccctatccttagtagccagcagtccggctgggcactctagggagactgccggggataacccggaggaaggcggggacgacgtcaaatcatcatgccccttatgatttgggctacacacgtgctacaatggcgtaaacaaagggaagcgaagcggtgacgcttagcaaatctcaaaaataacgtcccagttcggactgcagtctgcaactcgactgcacgaagctggaatcgctagtaatcgcgaatcagaatgtcgcggtgaatacgttcccgggtcttgcacacaccgcccgtca

SEQ ID NO: 2049 - DNA, 1362 bp, Artificial Sequence; identical to SEQ ID NO: 240
  Synthetic polymer

SEQ ID NO: 2050 - DNA, 1330 bp, Artificial Sequence
  Synthetic polymer
gacgaacgctggcggcgtgcctaacacatgcaagtcgagcgatgaaacccttcggggtggattagcggcggacgggtgagtaacacgtgggtaacctgccttgtagagggggatagccttccgaaaggaagattaataccgcataatatgcttttatcgcatgatgagagcatcaaaggagcaatccgctacaagatggacccgcggcgcattagctagttggtgaggtaacggctcaccaaggcgacgatgcgtagccgacctgagagggtgatcggccacattggaactgagacacggttcagactcctacgggaggcagcagtggggaatattgcgcaatgggggaaaccctgacgcagcaacgccgcgtgaatgaagaaggccttagggttgtaaagttctgtttacggggacgataatgacggtacccgtggaggaagccacggctaactacgtgccagcagccgcggtaatacgtaggtggcaagcgttgtccggatttactgggcgtaaaggatgcgtaggcggatgtttaagtgagatgtgaaatacccgggctcaacttgggtgctgcatttcaaactggatatctagagtgcgggagaggaaagcggaattcctagtgtagcggtgaaatgcgtagagattaggaagaacaccagtggcgaaggcggctttctggaccgtaactgacgctgaggcatgaaagcgtgggtagcaaacaggattagataccctggtagtccacgccgtaaacgatgaatactaggtgtaggaggtatcgactccttctgtgccgcagttaacacaataagtattccgcctggggagtacgatcgcaagattaaaactcaaaggaattgacgggggcccgcacaagcagcggagcatgtggtttaattcgaagcaacgcgaagaaccttacctagacttgacatctcctgaattactcttaatcgaggaagcccttcggggcaggaagacaggtggtgcatggttgtcgtcagctcgtgtcgtgagatgttgggttaagtcccgcaacgagcgcaacccttatcattagttgctaccattaagttgagcactctagtgagactgccacggttaacgtggaggaaggtggggatgacgtcaaatcatcatgccccttatgtctagggctacacacgtgctacaatggtgaatacaaatagatgcaataccgcgaggtggagccaaactataaaattcatcccagttcggattgcagtctgaaactcgactgcatgaagccggagttgctagtaatcgcgaatcagcatgtcgcggtgaatacgttcccgggcct

SEQ ID NO: 2051 - DNA, 1401 bp, Artificial Sequence
  Synthetic polymer
atgcaagtcgagcgatgaagcccttcggggtggatgagcggcggacgggtgagtaacacgtggggtgaacctgccttatgagagggggatgagccttccgaaaggaagatgtaataccgcatgaaatgtttttatgcgcatggtagaaacatgcaaaggagtaatccgctataagatggacccgcggcgcattagctagttggtgaggtaacggcccaccaaggcgacgatgcgtagccgacctgagagggtgatcggccacattggaactgagacacggtccagactcctacgggaggcagcagtggggaatattgcgcaatgggggaaaccctgacgcagcaacgccgcgtgaatgaagaaggccttagggttgtaaagttctgttttctgggacgataatgacggtaccagaggaggaagccacggctaactacgtgccagcagccgcggtaatacgtaggtggcaagcgttgtccggatttactgggcgtaaaggatgcgtaggcggatgtttaagtgagatgtgaaatacccgagctcaacttgggtgctgcatttcaaactggatatctagagtgcaggagaggaaagcggaattcctagtgtagcggtgaaatgcgtagagattaggaagaacaccagtggcgaaggcggctttctggactgtaactgacgctgaggcatgaaagcgtggggagcaaacaggattagataccctggtagtccacgccgtaaacgatgaatactaggtgtaggaggtatcgactccttctgtgccgcagttaacacaataagtattccgcctggggagtacgatcgcaagattaaaactcaaaggaattgacgggggcccgcacaagcagcggagcatgtggtttaattcgaagcaacgcgaagaaccttacctagacttgacatctcctgaattacccttaatcggggaagcccttcggggcaggaagacaggtggtgcatggttgtcgtcagctcgtgtcgtgagatgttgggttaagtcccgcaacgagcgcaacccttatcattagttgctaccattaagttgagcactctagtgagactgccacggttaacgtggaggaaggtggggatgacgtcaaatcatcatgccccttatgtctagggctacacacgtgctacaatggtgacatacaaatagatgcaataccgcgaggtggagccaaactcataaacattcatcccagttcggattgtagtctgaacactcgactcacatgaagccggagttgctagtaatcgcgacatcagccatgtcgcggtgacatcacgttcccgggccttgtcacacaccgcccgtcacacccatgagagctggtcacacccgaagtccgtgaggtaaccgtaaggagccagcggccgaag

SEQ ID NO: 2052 - DNA, 1388 bp, Artificial Sequence; identical to SEQ ID NO: 605
  Synthetic polymer

SEQ ID NO: 2053 - DNA, 1357 bp, Artificial Sequence
  Synthetic polymer
ttcgcctttagagtttgatcctggctcaggatgaacgctggcggcgtgcctaacacatgcaagtcgagcgattctcttcggagaagagcggcggacgggtgagtaacgcgtgggtaacctgccctgtacacacggataacataccgaaaggtatgctaatacgggataatatataagagtcgcatgacttttatatcaaagatttttttcggtacaggatggacccgcgtctgattagcttgttggcggggtaacggcccaccaaggcgacgatcagtagccgacctgagagggtgatcggccacattggaactgagacacggtccaaactcctacgggaggcagcagtggggaatattgcacaatgggcgcaagcctgatgcagcaacgccgcgtgagcgatgaaggccttcgggtcgtaaagctctgtcctcaaggaagataatgacggtacttgaggaggaagccccggctaactacgtgccagcagccgcggtaatacgtagggggctagcgttatccggatttactgggcgtaaagggtgcgtaggcggtctttcaagtcaggagttaaaggctacggctcaaccgtagtaagctcctgatactgtctgacttgagtgcaggagaggaaagcggaattcccagtgtagcggtgaaatgcgtagatattgggaggaacaccagtagcgaaggcggctttctggactgtaactgacgctgaggcacgaaagcgtggggagcaaacaggattagataccctggtagtccacgctgtaaacgatgagtactaggtgtcggaggttacccccttcggtgccgcagctaacgcattaagtactccgcctggggagtacgcacgcaagtgtgaaactcaaaggaattgacggggacccgcacaagtagcggagcatgtggtttaattcgacgcaacgcgaagaaccttaccaaggcttgacattgaatgaccatcttagagataagattttcccttcggggacatgaaaacaggtggtgcatggctgtcgtcagctcgtgtcgtgagatgttgggttaagtcccgcaacgagcgcaacccctatcctatgttaccagcgagtgaagtcggggactcataggagactgccagggacaacctggaggaaggcggggatgacgtcaagtcatcatgccccttatgtcttgggctacacacgtactacaatggtcgacaacagagggaagcgaagccgcgaggcagagcgaaccccagaaactcgatctcagttcggatcgcaggctgcaacccgcctgcgtgaagttggaatcgctagtaatcgcaggtcagcatactgcggtgaatacgttcccgggcctt

SEQ ID NO: 2054 - DNA, 1436 bp, Artificial Sequence
  Synthetic polymer
gacgaacgctggcggcgtgcttaacacatgcaagtcgagcgatgaagctccttcgggagcggattagcggcggacgggtgagtaacacgtgggtaacctgcctcatagaggggaatagccttccgaaaggaagattaataccgcataagattgtagtttcgcatgaaacagcaattaaaggagtaatccgctatgagatggacccgcgtcgcattagctagttggtgaggtaacggctcaccaaggcgacgatgcgtagccgacctgagagggtgatcggccacattgggactgagacacggcccagactcctacgggaggcagcagtggggaatattgcacaatgggggaaaccctgatgcagcaacgccgcgtgagtgatgacggtcttcggattgtaaaactctgtcttcagggacgataatgacggtacctgaggaggaagccacggctaactacgtgccaccagccgcggtaatacgtaggtgccaagcgttgtccggatttactgggcgtaaagggagcgtaggtggatatttaagtgggatgtgaaatactcgggcttaacctgagtgctgcattccaaactggatatctagagtgcaggagaggaaagtagaattcctagtgtagcggtgaaatgcgtagagattaggaagaataccagtggcgaaggcgactttctggactgtaactgacactgaggctcgaaagcgtggggagcaaacaggattagataccctggtagtccacgccgtaaacgatgaatactaggtgtgggggttgtcatgacctccgtgccgccgctaacgcattaagtattccgcctggggagtacggtcgcaagattaaaactcaaaggaattgacgggggcccgcacaagcagcggagcatgtggtttaattcgaagcaacgcgaagaaccttacctagacttgacatctcctgaattactcttaatcgaggaagtcacttcggtgacaggaagacaggtggtgcatggttgtcgtcagctcgtgtcgtgagatgttgggttaagtcccgcaacgagcgcaacccttattgttagttgctaccatttagttgagcactctagcgagactgcccgggttaaccgggaggaaggtggggatgacgtcaaatcatcatgccccttatgtctagggctacacacgtgctacaatggctggtacagagagatgcaataccgtgaggtggagccaaacttcaaaaccagtctcagttcggattgtaggctgaaactcgcctacatgaagctggagttgctagtaatcgcgaatcagaatgtcgcggtgaatacgttcccgggccttgtacacaccgcccgtcacaccacgaaagtcggcaacacccgaagccagtgagctaactagcaatagaggcagctgtcgaaggtggggttggtgattggggtg

SEQ ID NO: 2055 - DNA, 1361 bp, Artificial Sequence
  Synthetic polymer
agagtttgatcctggctcaggatgaactcttgcggcgtgcctaacacatgcaagtcgagcgattctcttcggagaagagcggcggacgggtgagtaacgcgtgggtaacctgccctgtacacacggatatcataccgaaaggtatgctaatacgagataacataagaaattcgcatgtttttcttatcaaagctccggcggtacaggatggacccgcgtctgattagctagttggtgaggtaatggctcaccaaggcgacgatcagtagccgacctgagagggtgatcggccacattggaactgggacacggtccaaactcctacgggaggcagcagtggggaatattgcacaatgggcgaaagcctgatgcagcaacgccgcgtgagcgatgaaggccttcgggtcgtaaagctctgtcctcaaggaagataatgacggtacttgaggaggaagccccggctaactacgtgccagcagccgcggtaatacgtagggggctagcgttatccggatttactgggcgtaaagggtgcgtaggcggtcttttaagtcaggagtgaaaggctacggctcaaccgtagtaagctcttgaaactggaggacttgagtgcaggagaggagagtggaattcctagtgtagcggtgaaatgcgtagatattaggaggaacaccagtagcgaaggcggctctctggactgtaactgacgctgaggcacgaaagcgtggggagcaaacaggattagataccctggtagtccacgccgtaaacgatgagtactagctgtcggaggttacccccttcggtggcgcagctaacgcattaagtactccgcctggggagtacgctcgcaagagtgaaactcaaaggaattgacggggacccgcacaagtagcggagcatgtggtttaattcgaagcaacgcgaagaaccttacctgatcttgacatcccgatgaccgcttcgtaatggaagcttttcttcggaacatcggtgacaggtggtgcatggttgtcgtcagctcgtgtcgtgagatgttgggttaagtcccgcaacgagcgcaacccttatcttcagtagccagcatttaggatgggcactctggagagactgccagggataacctggaggaaggtggggatgacgtcaaatcatcatgccccttatgaccagggctacacacgtgctacaatggcgtaaacaaagggaagcagagccgcgaggccgagcaaatctcaaaaataacgtctcagttcggattgtagtctgcaactcgactacatgaagctggaatcgctagtaatcgcagatcagaatgctgcggtgaatacgttcccgggtcttgcacacaccgcccgtca

SEQ ID NO: 2056 - DNA, 1462 bp, Artificial Sequence
  Synthetic polymer
gagtttgatcctggctcaggacgaacgctggcggcgtgcctaacacatgcaagtcgagcgagaaacttttgtttctagcggcggacgggtgagtaacacgtggataacctgcctcatagtgggggatagcctcccgaaagggagattaataccgcatattattaaatcttcgcatgaagatttaatgaaaggagyaatccgctatgagatgggtccgcggcgcattagctagttggtgaggtaacggctcaccaaggcaacgatgcgtagccggcctgagagggtgaacggccacattggaactgagacacggtccagactcctacgggaggcagcagtggggaatattgcacaatgggcgaaagcctgatgcagcaacgccgcgtgagtgaygaaggccttcgggttgtaaagctctgtcttctgggacgataatgacggtaccagaggaggaagccacggctaactacgtgccagcagccgcggtaatacgtaggtggcaagcgttgtccggatttactgggcgtaaaggatgcgtaggcggatatttaagtcagatgtgaaaatcccgggctyaacttgggaactgcatttgaaactgggtatctagagtgcaggagaggaaagcggaattcctagtgtagcggtgaaatgcgtagagattaggaagaacaccagtggcgaaggcggctttctggactgtaactgacgctgaggcatgaaagcgtggggagcaaacaggattagataccctggtagtccacgccgtaaacgatgaatactaggtgtggggattgtcatgatctccgtgccgcagttaacacaataagtattccgcctggggagtacggtcgcaagattaaaactcaaaggaattgacgggggcccgcacaagcagcggagcatgtggtttaattcgaagcaacgcgaagaaccttacctagacttgacatctcctgaattactcgtaacggaggaagcccttcggggcaggaagacaggtggtgcatggttgtcgtcagctcgtgtcgtgagatgttgggttaagtcccgcaacgagcgcaacccttgtcgttagttgctaccattaagttgagcactctagcgagactgccgcggttaacgcggaggaaggtggggatgacgtcaaatcatcatgccccttatgtctagggctacacacgtgctacaatggtgagtacaaagagaaccgaaaccgcgaggtggaggaaaactcaaaaactcatcccagttcggattgcaggctgcaactcgcctgcatgaagatggagttgctagtaatcgcaaatcagaatgttgcggtgaatacgttcccgggccttgtacacaccgcccgtcacaccatgagagttgccaacacccgaagtccgtgaggtaaccttttggagccagcggccgaaggtgggggtagcgattggggtgaagtcgtaacaaggtagcc

SEQ ID NO: 2057 - DNA, 1385 bp, Artificial Sequence
  Synthetic polymer
agagtttgatcctggctcaggacgaacgctggcggcgtgcctaacacatgcaagtcgagcgatgaaaaagaagtagatctcttcggagtgacacctctttggattagcggcggacgggtgagtaacacgtgagcaacctgccgtacacattgggatagcctcggagaaactgggattaataccaaacgaaacatattgatagcattatcaaaatgtcaaagatttatcggtgtacgatgggctcgcgtctgattagctagttggtgagataaaagctcaccaaggcaatgatcagtagccggcctgagagggtgatcggccacattgggactgagacacggcccaaactcctacgggaggcagcagtggggaatattacacaatggagggaactctgatgcagcgacgccgcgtgagcgaagaaggaattcgtttcgtaaagctctgtcctatgggaagataatgacggtaccatagaagaaagccccggctaactacgtgccagcagccgcggtaatacgtaggtggcgagcgttgtccggacttactgggcgtaaagggagcgtaggcggatttttaagtgagatgtgaaatactcgggcttaacctgagtgctgcatttcaaactggaagtctagagtgcaggagaggagaagggaattcctagtgtagcggtgaaatgcgtagagattaggaagaacaccagtggcgaaggcgcttctctggactgtaactgacgctgaggctcgaaagcgtggggagcaaacaggattagataccctggtagtccacgccgtaaacgatgaatactaggtgtaggggttgtcatgacctctgtgccgccgctaacgcattaagtattccgcctggggagtacggtcgcaagattaaaactcaaaggaattgacgggggcccgcacaagcagcggagcatgtggtttaattcgaagcaacgcgaagaaccttacctagacttgacatctcctgcattactcttaatcgaggaagtcccttcggggacaggatgacaggtggtgcatggttgtcgtcagctcgtgtcgtgagatgttgggttaagtcccgcaacgagcgcaacccccattgttagttgccatcattaagttgggcactctagcgagactgcccgggttaaccgggaggaaggtggggaggacgtcaaatcatcatgccccctatgtctagggctacacacgtgctacaatggtcggtacaataagacgcaagcccgcgagggggagcaaaactggaaaaccgatctcagttcggattgtaggctgaaactcgcctacatgaagctggagtcgctagtaatcgcgaatcagcatgtcgcggtgaatacgttcccgggccttgtacacaccgcc

SEQ ID NO: 2058 - DNA, 1374 bp, Artificial Sequence
  Synthetic polymer
agagtttgatcctggctcaggacgaacgctggcggcgtgcttaacacatgcaagtcgagcggagtaaaagattcgtcttttacttagcggcggacgggtgagtaacacgtgggcaacctgcctttaagagggggataacacagagaaatttgtgctaataccgcataacgatatgctgtcgcatggcagtatatccaaaggagtaatccgcttgaagatgggcccgcggcgcattagctagttggtgaggtaacggctcaccaaggcgacgatgcgtagccgacctgagagggtgatcggccacattgggactgagacacggcccagactcctacgggaggcagcagtggggaatattgcacaatgggggaaaccctgatgcagcaacgccgcgtgagcgatgaaggccttcgggttgtaaagctctgtcttcagggacgataatgacggtacctgaggaggaagccacggctaactacgtgccagcagccgcggtaatacgtaggtggcaagcgttgtccggatttactgggcgtaaagggagcgtaggcggacttttaagtgggatgtgaaatactcgggcttaacctgagtgctgcattccaaactggatatctagagtgcaggagaggaaagtagaattcctagtgtagcggtgaaatgcgtagagattaggaagaataccagtggcgaaggcgactttctggactgtaactgacactgaggctcgaaagcgtggggagcaaacaggattagataccctggtagtccacgccgtaaacgatgaatactaggtgtgggggttgtcatgacctccgtgccgccgctaacgcattaagtattccgcctggggagtacggtcgcaagattaaaactcaaaggaattgacgggggcccgcacaagcagcggagcatgtggtttaattcgaagcaacgcgaagaaccttacctagacttgacatctcctgaattactcttaatcgaggaagtcccttcggggacaggaagacaggtggtgcatggttgtcgtcagctcgtgtcgtgagatgttgggttaagtcccgcaacgagcgcaacccttgtccttagttgccctaccattaagttgagcactctagcgagactgcctgggttaaccgggaggaaggtggggatgacgtcaaatcatcatgccccttatgtctagggctacacacgtgctacaatggccggtacaaagggcagcaaagccgcggggtggagccaatcccagaaagccgttctcaggtcggattgcaggctgcaactcgcctgcatgaagtcggaatcgctagtaatcgcaggtcagcatactgcggtgaatacgttcccgggtcttgtacacaccgcccgtca

SEQ ID NO: 2059 - DNA, 1361 bp, Artificial Sequence
  Synthetic polymer
gtttgatcctggctcaggacgaacgctggcggcgtgcctaacacatgcaagtcgagcgaatgaagttccttcgggaacggatttagcggcggacgggtgagtaacacgtgggcaacctgcctcatagaggggaatagccttccgaaagggagattaataccgcataagattgtagtaccgcatggtacagcaattaaaggagcaatccgctatgagatgggcccgcggcgcattagctagttggtgaggtaacggctcaccaaggcgacgatgcgtagccgacctgagagggtgatcggccacattgggactgagacacggcccagactcctacgggaggcagcagtggggaatattgcacaatgggggaaaccctgatgcagcaacgccgcgtgagtgatgacggtcttcggattgtaaagctctgtctttagggacgataatgacggtacctaaggaggaagccacggctaactacgtgccagcagccgcggtaatacgtaggtggcaagcgttgtccggatttactgggcgtaaagggagcgtaggtggatatttaagtgggatgtgaaatacccgggcttaacctgggtgctgcattccaaactggatatctagagtgcaggagaggaaaggagaattcctagtgtagcggtgaaatgcgtagagattaggaagaataccagtggcgaaggtgcctttctggactgtaactgacactgaggctcgaaagcgtggggagcaaacagaagtagatcccctggtagtccccccccgtaaacgaagaatacttaggtggggggggtgttcatgccctccggtccgcccgctaacgcattaagtattccgcttggggagtacggtcgcagaattaaaattcaaagaaatgacgggggccccgcacaagcagcggagcatgtggtttaattgaagcaacgcgaagaacttaccttagacttgacatctcctgaattactctgtaatggaggaagccgcttcggcggcaggaagacaggtggtgcatggttgtcgtcagctcgtgtcgtgagatgttgggttaagtcccgcaacgagcgcaacccttattgttagctgctaccatttagttgagcactctagcgagactgcccgggttaaccgggaggaaggtggggatgacgtcaaatcatcatgccccttatgtctagggctacacacgtgctacaatggctggtacagagagatgcgataccgcgaggtggagccaaactttaaaaccagtctcagttcggattgtaggctgaaactcgcctacatgaagctggagttgctagtaatcgcgaatcagaatgtcgcggtgaatacgttcccgggccttgcac

SEQ ID NO: 2060 - DNA, 1335 bp, Artificial Sequence
  Synthetic polymer
gacgaacgctggcggcgtgcctaacacatgcaagtcgagcgaggatattcccttcggggatgaacctagcggcggacgggtgagtaacacgtgggcaacctgccttgtagaggggaatagccttccgaaaggaagattaataccgcataacattgttttatcgcatgatagaacaatcaaaggagcaatccgctacaagatgggcccgcggcgcattagctagttggtgaggtaacggctcaccaaggcgacgatgcgtagccgacctgagagggtgatcggccacattgggactgagacacggcccaaactcctacgggaggcagcagtggggaatattgcacaatgggggaaaccctgatgcagcaacgccgcgtgaatgatgaaggtcttcggaccgtaaagttctgtcttcagggacgataatgacggtacctgaggaggaagccacggctaactacgtgccagcagccgcggtaatacgtaggtggcaagcgttgtccggatttactgggcgtaaagggagcgtaggcggatttttaagtgagatgtgaaatacccaggctcaacctgggggctgcatttcaaactggaagtctagagtgcaggagaggagagtggaattcctagtgtagcggtgaaatgcgtagagattaggaagaacaccagtggcgaaggcgactttctggactgtaactgacactgaggctcgaaagcgtggggagcaaacaggattagataccctggtagtccacgccgtaaacgatgaatactaggtgtgggagttgtcatgacttccgtgccgccgctaacgcattaagtattccgcctggggagtacggtcgcaagattaaaactcaaaggaattgacgggggcccgcacaagcagcggagcatgtggtttaattcgaagcaacgcgaagaaccttacctagacctgacatctcctgaattacccgtaactggggaagtgacttcggtcacaggaagacaggtggtgcatggttgtcgtcagctcgtgtcgtgagatgttgggttaagtcccgcaacgagcgcaacccctattgttagttgccatcatttagttgggcactctagcgagactgcccgggttaaccgggaggaaggtggggatgacgtcaaatcatcatgccccttatgtctagggctacacacgtgctacaatggcaagtacaaagagaagcaagaccgcgaggtggagccaaactataaaacttgtctcagttcggattgcaggctgaaactcgcctgcatgaagctggagttgctagtaatcgcgaatcagaatgtcgcggtgaatacgttcccgggcct

SEQ ID NO: 2061 - DNA, 1339 bp, Artificial Sequence
  Synthetic polymer
ttcgcccttagagtttgatcctggctcaggacgaacgctggcggcgtgcctaacacatgcaagtcgagcgaatgaagttccttcgggaatggatttagcggcggacgggtgagtaacacgtgggcaacctgcctcatagaggggaatagccttccgaaagggagattaataccgcataagattgtagtaccgcatggtacagcaattaaaggagcaatccgctatgagatgggcccgcggcgcattagctagttggtgaggtaacggctcaccaaggcgacgatgcgtagccgacctgagagggtgatcggccacattgggactgagacacggcccagactcctacgggaggcagcagtggggaatattgcacaatgggggaaaccctgatgcagcaacgccgcgtgagtgatgacggccttcgggttgtaaagctctgtcttcagggacgataatgacggtacctgaggaggaagccacggctaactacgtgccagcagccgcggtaatacgtaggtggcgagcgttgtccggatttactgggcgtaaagggagcgtaggcggatttttaagtgagatgtgaaatactcgggcttaacctgggtgctgcatttcaaactggaagtctagagtgcaggagaggagaagggaattcctagtgtagcggtgaaatgcgtagagattaggaagaacaccagtggcgaaggcgcttctctggactgtaactgacgctgaggctcgaaagcgtggggagcaaacaggattagataccctggtagtccacgccgtaaacgatgaatactaggtgtaggggttgtcatgacctctgtgccgccgctaacgcactaagtattccgcctggggagtacggtcgcaagattaaaactcaaaggaatagacgggggcccgcacaagcagcggagcatgtggtttaattcgaagatacgcgaagaaccttaccaggacttgacatactagtgatcggtatagagatatactttttccttcgggaacactaatacaggtggtgcatggttgtcgtcagctcgtgtcgtgagatgttgggttaagtcccgtaacgagcgcaacccttatttttagttgctaccactaagttgagcactcttgagagactgccgttgataaaacggaggaaggtggggaggacgtcaaatcatcatgccccctatgtcctgggctacacacgtgctacaatggtcgatacaacgggcagctacatcgcaaggtgatgctaatcccttaaagtcgatctcagttcggattgtaggctgcaactcgcctacatgaagtcggagttgctagtaattgcaggtcagaa

SEQ ID NO: 2062 - DNA, 1362 bp, Artificial Sequence; identical to SEQ ID NO: 176
  Synthetic polymer

SEQ ID NO: 2063 - DNA, 1434 bp, Artificial Sequence
  Synthetic polymer
acgaacgctggcggcgtgcttaacacatgcaagtcgagcgatgaagctccttcgggagtggattagcggcggacgggtgagtaacacgtgggtaacctgcctcgtagaggggaatagccttccgaaaggaagattaataccgcataagattgtagtttcgcatgaaacagcaattaaaggagtaatccgctatgagatggacccgcgtcgcattagctagttggtgaggtaacggctcaccaaggcgacgatgcgtagccgacctgagagggcgatcggccacattgggactgagacacggcccagactcctacgggaggcagcagtggggaatattgcacaatgggggaaaccctgatgcagcaacgccgcgtgagtgatgacggtcttcggattgtaaaactctgtcctcagggacgataatgacggtacctgaggaggaagccacggctaactacgtgccagcagccgcggtaatacgtaggtggcaagcgttgtccggatttactgggcgtaaagggagcgtaggtggatatttaagtgggatgtgaaatactcgggctcaacctgagtgctgcattccaaactggatatctagagtgcaggagaggaaagtagaatccctagtgtagcggtgaaatgcgtagagattaggaagaataccagtggcgaaggcggctttctggactgtaactgacactgaggcacgaaagcgtggggagcaaacagaattagataccctggtagtccacgcggtaaacgatgaatactaggtgtagggggtatcaactccccctgtgccggagctaacgcaataagtattccgcctggggagtacggccgcaaggttgaaactcaaaggaattgacgggggcccgcacaagcagcggagcatgtggtgtttaattcgaagcaacgcgaagaaccttaccaaggcttgacatccacttaaacgcatggaaacatgcggtctcttcggaggaagtgagacaggtggtgcatggttgtcgtcagctcgtgtcgtgagattgggttaagtcccgcaacgagcgcaacccttattgccagttaccagcgagtaatgtcggggactctggtgagactgccggggacaactcggaggaaggtggggatgacgtcaaatcatcccccttatgtcttgggctacacacgtgctacaatggctgaaacaaagggaagcgacaacgcaagttgaagcggatctcataaaaacagtcccagttcggattgtgggctgcaacccgcccacatgaagtcggagttgctagtaatcgcggatcagcatgccgcggtgaatacgttcccgggccttgtacacaccgcccgtcacaccatgggagttgggagcgcccgaagccggtattctaaccgtaaggaggaagccgtctaaggcgagaccaatgactggggtga

SEQ ID NO: 2064 - DNA, 1358 bp, Artificial Sequence
  Synthetic polymer
agagtttgatcctggctcaggatgaacgctggcggcgtgcctaacacatgcaagtcgagcgatctcttcggagagagcggcggacgggtgagtaacgcgtgggtaacctgccctgtacacacggataacataccgaaaggtatgctaatacgggataatatataagagtcgcatgacttttatatcaaagatttttcggtacaggatggacccgcgtctgattagcttgttggcggggtaacagcccaccaaggcgacgatcagtagccgacctgagagggtgatcggccacattggaactgagacacggtccaaactcctacgggaggcagcagtggggaatattgcacaatgggcgcaagcctgatgcagcaacgccgcgtgagcgatgaaggccttcgggtcgtaaagctctgtcctcaaggaagataatgacggtacttgaggaggaagccccggctaactacgtgccagcagccgcggtaatacgtagggggctagcgttatccggatttactgggcgtaaagggtgcgtaggcggtctttcaagtcaggagttaaaggctacggctcaaccgtagtaagctcctgatactgtctgacttgagtgcaggagaggaaagcggaattcccagtgtagcggtgaaatgcgtagatattgggaggaacaccagtagcgaaggcggctttctggactgtaactgacgctgaggctcgaaagcgtggggagcaaacaggattagataccctggtagtccacgccgtaaacgatgaatactaggtgtaggggttgtcatgacctctgtgccgccgctaacgcattaagtattccgcctggggagtacggtcgcaagattaaaactcaaaggaattgacgggggcccgcacaagcagcggagcatgtggtttaattcgaagcaacgcgaagaaccttacctagacttgacatctcctgaattacccgtaactggggaagtcgcttcggcgacaggaagacaggtggtgcatggttgtcgtcagctcgtgtcgtgagatgttgggttaagtcccgcaacgagcgcaacccttattgttagttgctaccatttagttgagcactctagcgagactgcccgggttaaccgggaggaaggtggggatgacgtcaaatcatcatgccccttatgtctagggctacacacgtgctacaatggcaagtacaaagagaagcaagaccgcgaggtggagcaaaactcaaaaacttgtctcagttcggattgtaggctgaaactcgcttacatgaagctggagttgctagtaatcgcgaatcagcatgtcgcggtgaatacgttcccgggccttgtacacaccgcccgtca

SEQ ID NO: 2065 - DNA, 1333 bp, Artificial Sequence
  Synthetic polymer
gacgaacgctggcggcgtgcttaacacatgcaagtcgagcgatgaagctccttcgggagtggattagcggcggacgggtgagtaacacgtgggtaacctgcctcatagaggggaatagcctttcgaaaggaagattaataccgcataagattgtagtaccgcatggtacagcaattaaaggagtaatccgctatgagatggacccgcgtcgcattagctagttggtgaggtaacggctcaccaaggcgacgatgcgtagccgacctgagagggtgatcggccacattgggactgagacacggcccagactcctacgggaggcagcagtggggaatattgcacaatgggggaaaccctgatgcagcaacgccgcgtgagtgatgacggtcttcggattgtaaagctctgtctttggggacgataatgacggtacccaaggaggaagccacggctaactacgtgccagcagccgcggtaatacgtaggtggcaagcgttgtccggatttactgggcgtaaagggagcgtaggtggatatttaagtgggatgtgaaatattcgggcttaacctgggtgctgcattccaaactggatatctagagtgcaggagaggaaaggagaattcctagtgtagcggtgaaatgcgtagagattaggaagaataccagtggcgaaggcgattctctggactgtaactgacgctgaggctcgaaagcgtggggagcaaacaggattagataccctggtagtccacgccgtaaacgatgaatactaggtgtaggggttgtcatgacctctgtgccgccgctaacgcattaagtattccgcctggggagtacggtcgcaagattaaaactcaaaggaattgacgggggcccgcacaagcagcggagcatgtggtttaattcgaagcaacgcgaagaaccttacctagacttgacatctcctgcattacccttaatcggggaagttccttcgggaacaggaagacaggtggtgcatggttgtcgtcagctcgtgtcgtgagatgttgggttaagtcccgcaacgagcgcaacccttattgttagttgctaccatttagttgagcactctagcgagactgcccgggttaaccgggaggaaggtggggatgacgtcaaatcatcatgccccttatgtctagggctacacacgtgctacaatggcaagtacaaagagaagcaagaccgcgaggtggagcaaaactcaaaaacttgtctcagttcggattgtaggctgaaactcgcctacatgaagctggagttgctagtaatcgcgaatcagcatgtcgcggtgaatacgttcccgggcct

SEQ ID NO: 2066 - DNA, 1439 bp, Artificial Sequence
  Synthetic polymer
gatgaacgctggcggcgtgcctaacacatgcaagtcgagcggggttttgttgaatgaagcttcggtagattttaacgaatgagagcggcggacgggtgagtaacgcgtaggcaacctgccctttgcagagggatagccattggaaacgatgattaaaacctcataataccagattgagacatctctaactggtcaaagatttatcggcaaaggatgggcctgcgtctgattagctagttggtggggtaacggccttccaaggcgacgatcagtagccgacctgagagggtgatcggccacattggaactgagacacggtccaaactcctacgggaggcagcagtggggaatattgcacaatgggcgaaagcctgatgcagcaacgccgcgtgagcgaagaaggccttcgggttgtaaagctctgtccttagggaagataatgacggtacctttggaggaagccccggctaactacgtgccagcagccgcggtaatacgtagggggcaagcgttatccggaattattgggcgtaaagagtgcgtaggtggttacctaagcagggggtgaaaggcattggctcaaccaatgtcagccccctgaactgggctacttgagtgcaggagaggaaagcggaattcctagtgtagcggtgaaatgcgtagatattaggaggaacaccagtggcgaaggcggctttctggactgtaactgacactgaggcacgaaagtgtggggagcaaacaggattagataccctggtagtccacaccgtaaacgatgagcactaggtgtcggggtcgcaagacttcggtgccgcagttaacgcattaagtgctccgcctggggagtacgtacgcaagtatgaaactcaaaggaattgacggggacccgcacaagcagcggagcatgtggtttaattcgaagcaacgcgaagaaccttaccaggacttgacatcccgatgaaatctccttaatcggagcccctcttcggagcatcggtgacaggtggtgcatggttgtcgtcagctcgtgtcgtgagatgttgggttaagtcccgcaacgagcgcaacccttgtcattagttgccatcattaagttgggcactctagtgagactgccggggacaactcggaggaaggtggggatgacgtcaaatcatcatgccccttatgttctgggctacacacgtgctacaatggtcggtacaaagagcagcaaagtcgtgaggcggagcgaatctcaaaaaccgatcccagttcggattgtaggctgcaactcgcctacatgaagttggagttgctagtaatcgtggatcagaatgccacggtgaatgcgttcccgggtcttgtacacaccgcccgtcacaccacggaagttgggggtgcccaaagttggacaattaatagtttacctaaggcaaaaccaatgactggggtga

SEQ ID NO: 2067 - DNA, 1365 bp, Artificial Sequence; identical to SEQ ID NO: 529
  Synthetic polymer

SEQ ID NO: 2068 - DNA, 1376 bp, Artificial Sequence; identical to SEQ ID NO: 617
  Synthetic polymer

SEQ ID NO: 2069 - DNA, 1492 bp, Artificial Sequence
  Synthetic polymer
agagtttgatcctggctcaggacgaacgctggcggcgtgcctaacacatgcaagtcgagcgaagtgtttaggaatgatattttcgaattgacttcctaaacatcttagcggcaaacgggtgagtaacgcgtgaggaacctgcctttcacaaagggatagcctcgggaaactgggattaataccttatgatactgatatggcgcatgtcaaatcagttaaagcgcaaagcggtgaaagatggtctcgcgtcccattagctagttggtgagataaaggctcaccaaggctacgatgggtaaccggcctgagagggtgaacggtcacactggaactgagacacggtccagactcctacgggaggcagcagtggggaatattgcacaatggaggaaactctgatgcagcgacgccgcgtgagtgaagaaggctttcgagtcgtaaaactctgtccttggggacgataatgacggtacccaaggaggaagccccggctaactacgtgccagcagccgcggtaatacgtagggggcgagcgttgtccggatttactgggcgtaaagggagcgtaggcggatttttaagtgagatgtgaaatactcgggcttaacctgagtgctgcatttcaaactggaagtctagagtgcaggagaggagaagggaattcctagtgtagcggtgaaatgcgtagagattaggaagaacaccagtggcgaaggcgcttctctggactgtaactgacgctgaggctcgaaagcgtggggagcaaacaggattagataccctggtagtccacgccgtaaacgatgaatactaggtgtaggggttgtcatgacctctgtgccgccgctaacgcattaagtattccgcctggggagtacggtcgcaagattaaaactcaaaggaattgacgggggcccgcacaagcagcggagcatgtggtttaattcgaagcaacgcgaagaaccttacctagacttgacatctcctgcattactcttaatcgaggaagtcccttcggggacaggatgacaggtggtgcatggttgtcgtcagctcgtgtcgtgagatgttgggttaagtcccgcaacgagcgcaacccttattgttagttgccatcattaagttgggcactctagcgagactgcccgggttaaccgggaggaaggtggggatgacgtcaaatcatcatgccccttatgtctagggctacacacgtgctacaatggtcggtacaataagacgcaagcccgcgagggggagcaaaactggaaaaccgatctcagttcggattgtaggctgaaactcgcctacatgaagctggagttgctagtaatcgcgaatcagcatgtcgcggtgaatacgttcccgggccttgtacacaccgcccgtcacaccatgagagttggcaatacccaaagtacgtgatctaacccgcaagggaggaagcgtcctaaggtagggtcagcgattggggtgaagtcgtaacaaggta

SEQ ID NO: 2070 - DNA, 1333 bp, Artificial Sequence
  Synthetic polymer
acacatgcaagacgagcgaaagaaattccggcgggaacggagagagcggcggaggggagagaaacacgggggcaacccgccacagagaggggaacagcccaccgaaagggagaaaaacaccgcaaaagagagaagcaccgcagggaacagcaaaaaaaggagcaacccgcaaagagaggggcccgcggcgcaaaagcgagggggagaggaaacggcccaccagggagacgacgcgcagccgaccggagagggggagcggcaacagggggacagagacacggcccagaccccgacgggaggcagcagtggggaatattgcacaatgggggaaaccctgatgcagcaacgccgcgtgagtgatgacggccttcgggttgtaaagctctgtcttcagggacgataatgacggtacctgaggaggaagccacggctaactacgtgccagcagccgcggtaatacgtaggtggcgagcgttgtccggatttactgggcgtaaagggagcgtaggcggatttttaagtgagatgtgaaatactcgggcttaacctgagtgctgcatttcaaactggaagtctagagtgcaggagaggagaagggaattcctagtgtagcggtgaaatgcgtagagattaggaagaacaccagtggcgaaggcgcttctctggactgtaactgacgctgaggctcgaaagcgtggggagcaaacaggattagataccctggtagtccacgccgtaaacgatgaatactaggtgtaggggttgtcatgacctctgtgccgccgctaacgcattaagtattccgcctggggagtacggtcgcaagattaaaactcaaaggaattgacgggggcccgcacaagcagcggagcatgtggtttaattcgatgcaacgcgaagaaccttaccagaacttgacatctttgggaccggattggaaacaatcccttctcttcggagactcaaagacaggtggtgcatggttgtcgtcagctcgtgtcgtgagatgttgggttaagtcccgtaacgagcgcaacccctgcttttagttgcaaacagttaggctgtgcactctagaggaactgccgatgacaaatcggaggaaggtggggatgacgtcaaatcatcatgccctttatgttctgggctacacacgtgctacaatggtcggtacaatgggttgccacttagtgataaggagctaatctcataaagccgatcccagttcggactgcaggctgcaattcgcctgcatgaagccggagttgctagtaatcgtggatcagaatgccacggtgaatgcgttcccgggtcttgcacacaccgcccgtca

SEQ ID NO: 2071 - DNA, 1373 bp, Artificial Sequence; identical to SEQ ID NO: 576
  Synthetic polymer

SEQ ID NO: 2072 - DNA, 1391 bp, Artificial Sequence; identical to SEQ ID NO: 230
  Synthetic polymer

SEQ ID NO: 2073 - DNA, 1487 bp, Artificial Sequence; identical to SEQ ID NO: 1071
  Synthetic polymer

SEQ ID NO: 2074 - DNA, 1349 bp, Artificial Sequence; identical to SEQ ID NO: 292
  Synthetic polymer

SEQ ID NO: 2075 - DNA, 1325 bp, Artificial Sequence
  Synthetic polymer
agagtttgatcctggctcaggatgaacgctggcggcgtgcctaacacatgcaagtcgagcgatcttcttcggaagagagcggcggacgggtgagtaacgcgtgggtaacctgccctgtacacacggataacataccgaaaggtatgctaatacgagatgatatataaaagttgcatgacttttatatcaaagcttttgcggtacaggatggacccgcgtctgattagctagttggtaaggtaacggcttaccaaggcgacgatcagtagccgacctgagagggtgatcggccacactggaactgagacacggtccagactcctacgggaggcagcagtggggaatattgcacaatgggcgaaagcctgatgcagcaacgccgcgtgagcgatgaaggccttcgggtcgtaaagctctgtcctcaaggaagataatgacggtacttgaggaggaagccccggctaactacgtgccagcagccgcggtaatacgtagggggctagcgttatccggatttactgggcgtaaagggagcgtaggcggatgattaagtgggatgtgaaatacccgggctcaacttgggtgctgcattccaaactggttatctagagtgcaggagaggagagtggaattcctagtgtagcggtgaaatgcgtagagattaggaagaacaccagtggcgaaggcgactctctggactgtaactgacgctgaggctcgaaagcgtggggagcaaacaggattagataccctggtagtccacgccgtaaacgatgaatacaggttgggggtttcaacacctccgtgccgccgttaacgcattaattattccgccctggggagtacggtcgcaagataaaaactcaaaggaatggacggggacccgcacaagtagcggagcatgtggtttaattggaagcaacgcgaagacccttacctacccttgacttccctggcattactcttaatcgaggaaatcccttcggggacaaggtgacaggtggtgcatggtggtcgtcagctcgtgtcgtgagatgtcgggttaactcccgcaacgagcgcaacccttgtcgttagttcctaccattaagtcgaggactctagtgagactgcctgggttacccaggaggaaggtggcgatgccgtcaaatcatcatgccccttatgcgtagggctacacacgtgctacaatggctggtacagagagatgcaataccgcgaggtggagccacactcaaaaaccagtctcagttcggattctaggctgaaactcccctacatgaagctggagctactagtaatcgcgaatcagaatgtcgcggtga

SEQ ID NO: 2076 - DNA, 1354 bp, Artificial Sequence
  Synthetic polymer
ttcgcccttagagtttgatcctggctcaggatgaacgctggcgtcgtgcttaacacatgcaagtcgagcgagaaaagttcttcggagcttttctagcggcggacgggtgagtaacacgtgggcaacctgcctcatagaggggaatagccttccgaaaggaagattaataccgcataacattgttgaaaggcatcttttaacaatcaaaggagcaatccgctatgagatgggcccgcggcgcattagctagttggtgaggtaacggctcaccaaggcgacgatgcgtagccgacctgagagggtgatcggccacattggaactgagacacggtccagactcctacgggaggcagcagtggggaatattgcacaatgggggaaaccctgatgcagcaacgccgcgtgagtgatgaaggtcttcggattgtaaagctctgtctttagggacgataatgacggtacctaaggaggaagccacggctaactacgtgccagcagccgcggtaatacgtaggtggcaagcgttatccggatttactgggcgtaaagggagcgtaggcggatatttaagtgggatgtgaaatacccgagcttaacttgggagctgcattccaaactggatatctagagtgcaggagaggagaatggaattcctagtgtagcggtgaaatgcgtagatattaggaggaacaccagtggcgaaggcggcttactggacggtaactgacgttgaggctcgaaagcgtggggagcaaacaggattagataccctggtagtccacgccgtaaacgatgaatactaagtgtcgggtggcaaagccattcggtgccgtcgcaaacgcaataagtattccacctggggagtacgttcgcaagaatgaaactcaaaggaattgacggggacccgcacaagcggtggagcatgtggtttaattcgaagcaacgcgaagaaccttaccaaaacttgacatccttctgacagactatgtaacgtagttttccttcgggacagaagtgacaggtggtgcatggttgtcgtcagctcgtgtcgtgagatgttgggttaagtcccgcaacgagcgcaacccctattttcagtagccagcaggtaaagctgggcactctggagagactgccggggataacccggaggaaggcggggatgacgtcaaatcatcatgccccttatgatttgggctacacacgtgctacaatggtggtaacaaagtgaggcgaacctgcgagggcaagcaaatcacaaaaaagccatcccagttcggattgtagtctgcaactcgactacatgaagctggaatcgctagtaatcgcgaatcagaatgtcgcggtgaatacg

SEQ ID NO: 2077 - DNA, 1375 bp, Artificial Sequence
  Synthetic polymer
agagtttgattctggctcaggacgaacgctggcggcgtgcctaacacatgcaagtcgagcgatgaaattcccttcggggaatggattagcggcggacgggtgagtaacacgtgggtaacctacctcatagaggggaatagcctcccgaaagggagattaataccgcataatattacagtttcgcatgaaacagtaattaaaggagcaatccgctatgagatggacccgcggcgcattagctagttggtgaggtaacggctcaccaaggcgacgatgcgtagccgacctgagagggtgatcggccacattgggactgagacacggcccagactcctacgggaggcagcagtggggaatattgcacaatgggggaaaccctgatgcagcaacgccgcgtgagtgatgacggtcttcggattgtaaagctctgtctttggggacgataatgacggtacccaaggaggaagccacggctaactacgtgccagcagccgcggtaatacgtaggtggcgagcgttgtccggattcactgggcgtaaagggagcgtaggcggatttttaagtgggatgtgaaatacccgggcttaacctgggtgctgcattccaaactgggaatctagagtgcaggaggggagagtggaattcctagtgtagcggtgaaatgcgtagagattaggaagaacaccagtggcgaaggcgactctctggactgtaactgacgctgaggctcgaaagcgtggggagcaaacaggattagataccctggtagtccacgccgtaaacgatgaatactaggtgtaggggtttcaacacctctgtgccgccgctaacgcattaagtattccgcctggggagtacggtcgcaagattaaaactcaaaggaattgacgggggcccgcacaagtagcggagcatgtggtttaattcgaagcaacgcgaagaaccttacctagacttgacatcttctgcattacccttaatcggggaagttccttcgggaacagaatgacaggtggtgcatggttgtcgtcagctcgtgtcgtgagatgttgggttaagtcccgcaacgagcgcaacccttgtttccagttactaacgcgtcaaggcgaggactctggaaagactgccggggacaactcggaggaaggtggggacgacgtcaaatcatcatgccccttatgacctgggctacacacgtgctacaatggccgttacagagaggagcaagcctgtaagggtaagcagatctcaaaaaagcggtctcagttcggattgtgggctgcaacccgcccacatgaagtcggagttgctagtaatcgcggatcagcatgccgcggtgaatacgttcccgggccttgcacacaccgcccgtca

SEQ ID NO: 2078 - DNA, 1429 bp, Artificial Sequence; identical to SEQ ID NO: 81
  Synthetic polymer

SEQ ID NO: 2079 - DNA, 1370 bp, Artificial Sequence; identical to SEQ ID NO: 671
  Synthetic polymer

SEQ ID NO: 2080 - DNA, 1341 bp, Artificial Sequence; identical to SEQ ID NO: 677
  Synthetic polymer

SEQ ID NO: 2081 - DNA, 1367 bp, Artificial Sequence; identical to SEQ ID NO: 703
  Synthetic polymer

SEQ ID NO: 2082 - DNA, 1514 bp, Artificial Sequence
  Synthetic polymer
  misc_feature (126)..(126): n is a, c, g, or t
ttgatcatggctcaggacgaacgctggcggcgtgcttaacacatgcaagtcgagcgatgaagctccttcggagcggattagcggcggacgggtgagtaacacgtgggtaacctgcctcatagaggngaatagccttccgaaaggaagattaataccgcataagattgtagtatcgcatgatacagcaattaaaggagcaatccgctatgagatggacccgcgtcgcattagctagttggtgagaggtaacggctcaccaaggcgacgatgcgtagccgacctgagaaggtgatcggccacattgggactgagacacggcccagactcctacgggaggcagcagtggggaatattgcacaatgggggaaaccctgatgcagcaacgccgcgtgagtgatgacggtcttcggattgtaaaactctgtcttcagggacgataatgacggtacctgaggaggaagccacggctaactacgtgccagcagccgcggtaatacgtaggtggcaagcgttgtccggatttactgggcgtaaagggagcgtaggtggatatttaagtgggatgtgaaatactcgggcttaacctgagtgctgcattccaaactggatatctagagtgcaggagaggaaagtagaattcctagtgtagcggtgaaatgcgtagagattaggaagaataccagtggcgaaggcgactttctggactgtaactgacactgaggctcgaaagcgtggggagcaaacaggattagataccctggtagtccacgccgtaaacgatgaatactaggtgtgggggttgtcatgacctccgtgccgccgctaacgcattaagtattccgcctggggagtacggtcgcaagattaaaactcaaaggaattgacgggggcccgcacaagccagcgggagcatgtgggtttaatttcgaagcaacgcgaagaaccttacctagacttgacatctcctgaattactcttaatcgaggaagtcacttcggtgacgggaagacaggtggtgcatggttgtcgtcagctcgtgtcgtgagatgttgggtttaaattctcgcaccaacgagggcggccaacccttaattgttagttgctaccatttagttgagcactctagcgagactgcccgggttaaccggggggaaggtggggatgacgtcaaatcatcatgccccttatgtctagggctacacacgtgctacaatggctggtacagagagatgcgataccgcgaggtggagccaaacttcaaaaccagtctcagttcggattgtaggctgaaactcgcctacatgaagctggagttgctagtaatcgcgaatcagaatgtcgcggtgaatacgttcccgggccttgtacacaccgcccgtcacaccatgagagttggcaatacccaaagttcgtgagctaacgcgtaagcgaggcagcgacctaaggtagggtcagcgattggggtgaagtcgtaacaaggtagccgtaggagaacctgcggcttgatcacctcc

SEQ ID NO: 2083 - DNA, 1376 bp, Artificial Sequence
  Synthetic polymer
ttagagtttgatcctggctcaggacgaacgctggcggcgtgcctaacacatgcaagtcgagcgaatgaagttccttcgggaacggatttagcggcggacgggtgagtaacacgtgggcaacctgcctcatagaggggaatagccttccgaaagggagattaataccgcataagattgtagtaccgcatggtacagcaattaaaggagtaatccgctatgagatgggcccgcggcgcattagctagttggtgaggtaacggctcaccaaggcgacgatgcgtagccgacctgagagggtgatcggccacattgggactgagacacggcccagactcctacgggaggcagcagtggggaatattgcacaatgggggaaaccctgatgcagcaacgccgcgtgagtgatgacggccttcgggttgtaaagctctgtcttcagggacgataatgacggtacctgaggaggaagccacggctaactacgtgccagcagccgcggtaatacgtaggtggcgagcgttgtccggatttactgggcgtaaagggagcgtaggcggatttttaagtgggatgtgaaatacccgggcttaacctgggtgctgcattccaaactggatatctagagtgcaggagaggaaaggagaattcctagtgtagcggtgaaatgcgtagagattaggaagaataccagtggcgaaggcgcctttctggactgtaactgacactgaggctcgaaagcgtggggagcaaacaggattagataccctggtagtccacgccgtaaacgatgaatactaggtgtgggggttgtcatgacctccgtgccgccgctaacgcattaagtattccgcctggggagtacggtcgcaagattaaaactcaaaggaattgacgggggcccgcacaagcagcggagcatgtggtttaattcgaagcaacgcgaagaaccttacctagacttgacatctcctgaattactctgtaatggaggaagtcgcttcggcgacaggaagacaggtggtgcatggttgtcgtcagctcgtgtcgtgagatgttgggttaagtcccgcaacgagcgcaacccttattgttagttgctaccatttagttgagcactctagcgagactgcccgggttaaccgggaggaaggtggggatgacgtcaaatcatcatgccccttatgtctagggctacacacgtactacaatggccgttacagaaggaagcgaaaccgcgaggtggagcaaatccccaaaggcggccccagttcggattgcaggctgaaactcgcctgcatgaagtcggaattgctagtaattgcaggtcagcatactgcagtgaatacgttcccgggccttgcacacaccgcccgtca

SEQ ID NO: 2084 - DNA, 1343 bp, Artificial Sequence
  Synthetic polymer
agcggcggacgggtgagtaacacgtgggtaacctgccttgtagagggggatagccttccgaaaggaagattaataccgcataacattgtttcttcgcatgaagagataatcaaaggagcaatccgctacaagatggacccgcggcgcattagctagttggtgaggtagcggctcaccaaggcaacgatgcgtagccggcctgagagggtgaacggccacattggaactgagacacggtccagactcctacgggaggcagcagtggggaatattgcacaatgggcgaaagcctgatgcagcaacgccgcgtgagtgatgaaggccttcgggttgtaaagctctgtcttctgggacgataatgacggtaccagaggaggaagccacggctaactacgtgccagcagccgcggtaatacgtaggtggcaagcgttgtccggatttactgggcgtaaagaatgcgtaggcggatatttaagtgagatgtgaaattcccgggcttaacttgggagctgcatttcaaactggatatctagagtgcgggagaggaaagtggaattcctagtgtagcggtgaaatgcgtagagattaggaagaacaccagtggcgaaggcgactttctggaccgtaactgacgctgaggcatgaaagcgtggggagcaaacaggattagataccctggtagtccacgccgtaaacgatgaatactaggtgtgggggttatcatgacctccgtgccgcagttaacacaataagtattccgcctggggagtacggtcgcaagattaaaactcaaaggaattgacgggggcccgcacaagcagcggagcatgtggtttaattcgaagcaacgcgaagaaccttacctagacttgacatctcctgaattaccggtaatgcgggaagcccttcggggcaggaagacaggtggtgcatggttgtcgtcagctcgtgtcgtgagatgttgggttaagtcccgcaacgagcgcaacccttgtcgttagttgctaccattaagttgagcactctagcgagactgccgcggttaacgcggaggaaggtggggatgacgtcaaatcatcatgccccttatgtctagggctacacacgtgctacaatggtcggtacaatgagacgcaataccgcgaggtggagcaaaacttataaaaccgatcccagttcggattgcaggctgcaactcgcctgcatgaagccggagttgctagtaatcgcgaatcagaatgtcgcggtgaatacgttcccgggccttgtacacaccgcccgtcacaccatgagagttgccaacacccgaagtccgtgagctaacctttttggaggcagcggc

SEQ ID NO: 2085 - DNA, 1389 bp, Artificial Sequence; identical to SEQ ID NO: 227
  Synthetic polymer

SEQ ID NO: 2086 - DNA, 1426 bp, Artificial Sequence; identical to SEQ ID NO: 1028
  Synthetic polymer

SEQ ID NO: 2087 - DNA, 1373 bp, Artificial Sequence; identical to SEQ ID NO: 208
  Synthetic polymer

SEQ ID NO: 2088 - DNA, 1362 bp, Artificial Sequence; identical to SEQ ID NO: 546
  Synthetic polymer

SEQ ID NO: 2089 - DNA, 1516 bp, Artificial Sequence
  Synthetic polymer
ttattattgagagtttgatcctggctcaggacgaacgctggcggcgtgcttaacacatgcaagtcgagcgatgaagttccttcgggaacggattagcggcggacgggtgagtaacacgtgggtaacctgcctcatagaggggaatagccttccgaaaggaagattaataccgcataagattgtagtttcgcatgaaacagcaattaaaggagtaatccgctatgagatggacccgcgtcgcattagctagttggtgaggtaacggctcaccaaggcgacgatgcgtagccgacctgagagggtgatcggccacattgggactgagacacggcccagactcctacgggaggcagcagtggggaatattgcacaatgggggaaaccctgatgcagcaacgccgcgtgagtgatgacggtcttcggattgtaaagctctgtcttcagggacgataatgacggtacctgaggaggaagccacggctaactacgtgccagcagccgcggtaatacgtaggtggcaagcgttgtccggatttactgggcgtaaagggagcgtaggtggatatttaagtgggatgtgaaatactcgggcttaacctgggtgctgcattccaaactggatatctagagtgcaggagaggaaagtagaattcctagtgtagcggtgaaatgcgtagagattaggaagaataccagtggcgaaggcgactttctggactgtaactgacactgaggctcgaaagcgtggggagcaaacaggattagataccctggtagtccacgccgtaaacgatgaatactaggtgtaggggttgtcatgacctctgtgccgccgctaacgcattaagtattccgcctggggagtacggtcgcaagattaaaactcaaaggaattgacgggggcccgcacaagcagcggagcatgtggtttaattcgaagcaacgcgaagaaccttacctagacttgacatctcctgaattacccttaatcggggaagcccttcggggcaggaagacaggtggtgcatggttgtcgtcagctcgtgtcgtgagatgttgggttaagtcccgcaacgagcgcaacccttattgttagttgctaccatttagttgagcactctagcgagactgccgtggttaacgcggaggaaggtggggatgacgtcaaatcatcatgccccttatgtctagggctacacacgtgctacaatggtcggtacagagagatgctaaaccgcgaggtggagccaaactttaaaaccgatctcagttcggattgtaggctgaaactcgcctacatgaagctggagttgctagtaatcgcgaatcagaatgtcgcggtgaatacgttcccgggccttgtacacaccgcccgtcacaccatgagagttggcaatacccaaagttcgtgagctaacgcgtaagcggggcagcgacctaaggtagggtcagcgattggggtgaagtcgtaacaaggtagccgtaggagaacctgcggctggatcacctcctttct

SEQ ID NO: 2090 - DNA, 1321 bp, Artificial Sequence
  Synthetic polymer
tagaggggaatagccttcagaaaggaagattaataccgcataacattacatttccgcatgaagaagtaattaaaggagtaatccgatataagatgggcccgtggcgctattacctagttggtgaggtaacggctcaccaaggcgacgttgcgtacccgacatgagaggctgatcgcccactttgggagtgagacacggcccagactcttacgcgaggcagcagtgcgggaatacttgcccaatgggggaaaccatgatgcagcaacgccgcgtgagtgattaaggtcttcggatagtaaagctctgtcttctgggacgataatgacggtacttgaggaggaagccacggctaactacgtgccagcagccgcggtaatacgtaggtggcgagcgttgtccggatttactgggcgtaaagggagcgtaggcggatttttaagtgagatgtgaaatacccgggctcaacttgggtgctgcatttcaaactggaagtctagagtgcaggagaggagagtggaattcctagtgtagcggtgaaatgcgtagagattaggaagaacaccagtggcgaaggcgactctctggactgtaactgacgctgaggctcgaaagcgtggggagcaaacaggattagataccctggtagtccacgccgtaaacgatgaatactaggtgtaggggttgtcatgacctctgtgccgccgcaaacgcattaagtattccgcctggggagtacggtcgcaagattaaaactcaaaggaattgacgggggcccgcacaagcagcggagcatgtggtttaattcgaagcaacgcgaagaaccttacctagacttgacatctcctgaattactcttaatcgaggaagtcccttcggggacaggaagacaggtggtgcatggttgtcgtcagctcgtgtcgtgagatgttgggttaagtcccgcaacgagcgcaacccttattgttagttgctaccattaagttgagcactctggcaagactgcccgggttaaccgggaggaaggtggggatgacgtcaaatcatcatgccccttatgtctagggctacacacgtgcttcaatggcaagtacaaaaagatgcaataccgcaaggtggagctaaacttaaaaattcgtttcagttcggattgtaggttgcaacttgcctacatgaaggtggagttggtagtaatcgtgaatcagaatgttgcggtgaatacgttcccgggctttgtacacaccgctcgtcactccatgagtgttggcaatacccaacgttcgtgagttaacccgtaagggaggcagcgacttaaggtagggtc

SEQ ID NO: 2091 - DNA, 1510 bp, Artificial Sequence
  Synthetic polymer
  misc_feature (363)..(363): n is a, c, g, or t
gagagtttgatcctggctcaggatgaacgctggcggcgtgcttaacacatgcaagtcgagcgatgaagtttccttcgggaaacggattagcggcggacgggtgagtaacacgtgggtaacctgcctcatagagtggaatagccttccgaaaggaagattaataccgcataacgttgaaagatggcatcatcattcaaccaaaggagcaatccgctatgagatggacccgcggcgcattagctagttggtggggtaacggcctaccaaggcgacgatgcgtagccgacctgagagggtgatcggccacattgggactgagacacggcccagactcctacgggaggcagcagtggggaatattgnacaatgggggaaaccctgatgtagcaacgccgcgtgagtgatgaaggttttcggatcgtaaagctctgtctttggggaagataatgacggtacccaaggaggaagccacggctaactacgtgccagcagccgcggtaatacgtaggtggcgagcgttatccggatttactgggcgtaaagggagcgtaggcggatgattaagtgggatgtgaaatacccgggctcaacttgggtgctgcattccaaactggttatctagagtgcaggagaggagagtggaattcctagtgtagcggtgaaatgcgtagagattaggaagaacaccagtggcgaaggcgactctctggactgtaactgacgctgaggctcgaaagcgtggggagcaaacaggattagataccctggtagtccaacgccgtaaacgatgaatactaggktgttgggggtttcaamacactccgtgccgccgctaacgcattwaagtattcccgcctggggagtacggtcgcaagattaaaactcaaaggaattgacggggacccgcacaagtagcggagcatgtggtttaattcgaagcaacgcgaagaaccttacctacacttgacatcccttgcattactcttaatcgaggaaatcccttcggggacaaggtgacaggtggtgcatggttgtcgtcagctcgtgtcgtgagatgttgggttaagtcccgcaacgagcgcaacccttgtcgttagttactaccattaagttgaggactctagcgagactgcctgggttaaccaggaggaaggtggggatgacgtcaaatcatcaatgccccttatgtgtagggctacacacgtgctacaatggctggtacagagagatgcaataccgtgaggtggagccaaacttaaaaaccagtctcagttcggattgtaggctgaaactcgcctacatgaagctggagttactagtaatcgcgaatcagaatgtcgcggtgaatacgttcccgggtcttgtacacaccgcccgtcacaccatgagagttggcaatacccgaagtccgtgagctaaccgcaaggaagcagcggccgaaggtagggtcagcgattggggtgaagtcgtaacaaggtagccgtaggagaacctgcggctggatcacctc

SEQ ID NO: 2092 - DNA, 1491 bp, Artificial Sequence; identical to SEQ ID NO: 515
  Synthetic polymer

SEQ ID NO: 2093 - DNA, 1370 bp, Artificial Sequence
  Synthetic polymer
gagtttgatcctggctcaggacgaacgctggcggcgtgcttaacacatgcaagtcgagcgatgaagctttcttcggaaagtggattagcggcggacgggtgagtaacacgtgggtaacctgcctcatagaggggaatagcctttcgaaaggaagattaataccgcataagattgtaataccgcatggtatagcaattaaaggagtaatccgctatgagatggacccgcgtcgcattagctagttggtgaggtaacggctcaccaaggcgacgatgcgtagccgacctgagagggtgatcggccacattgggactgagacacggcccagactcctacgggaggcagcagtggggaatattgcacaatggggggaaccctgatgcagcaacgccgcgtgagtgatgacggtcttcggattgtaaagctctgtctttagggacgataatgacggtacctaaggaggaagccacggctaactacgtgccagcagccgcggtaatacgtaggtggcaagtgttgtccggatttactgggcgtaaagggagcgtaggtggatatttaagtgggatgtgaaatacccgggcttaacctgggagctgcattccaaactggatatctagagtgcaggagaggaaaggagaattcctagtgtagcggtgaaatgcgtagagattaggaagaataccagtggcgaaggcgcctttctggactgtaactgacactgaggctcgaaagcgtggggagcaacaggattagataccctggtagtccacgccgtaaacgatgaatactaggtgtgggggttgtcatgacctccgtgccgccgctaacgcattaagtattccgcctggggagtacggtcgcaagattaaaactcaaaggaattgacgggggcccgcacaagcagcggagcatgtggtttaattcgaagcaacgcgaagaaccttacctagacttgacatctcctgaattactctgtaatggaggaagccgcttcggcggcaggaagacaggtggtgcatggttgtcgtcagctcgtgtcgtgagatgttggcctaagtcccgcaacgagcgcaacccttattgttagttgctaccatttagttgagcactctagcgagactgcccgggttaaccgggaggaaggtggggatgacgtcaaatcatcatgccccttatgtctagggctacacacgtgctacaatggctggtacagagagatgcgataccgcgaggtggagccaaactttaacacccgtctcagttcggattgtaggctgaaactcgcctacatgaagctggagttgctagtaaccgcgaatcagaatgtcgcggtgaatacgttcccgggcctgtacacaccgcccgtc

SEQ ID NO: 2094 - DNA, 1360 bp, Artificial Sequence; identical to SEQ ID NO: 1773
  Synthetic polymer

SEQ ID NO: 2095 - DNA, 1375 bp, Artificial Sequence; identical to SEQ ID NO: 131
  Synthetic polymer

SEQ ID NO: 2096 - DNA, 1431 bp, Artificial Sequence; identical to SEQ ID NO: 342
  Synthetic polymer

SEQ ID NO: 2097 - DNA, 1377 bp, Artificial Sequence; identical to SEQ ID NO: 465
  Synthetic polymer

SEQ ID NO: 2098 - DNA, 1395 bp, Artificial Sequence; identical to SEQ ID NO: 463
  Synthetic polymer

SEQ ID NO: 2099 - DNA, 1497 bp, Artificial Sequence; identical to SEQ ID NO: 1789
  Synthetic polymer

SEQ ID NO: 2100 - DNA, 1474 bp, Artificial Sequence; identical to SEQ ID NO: 1790
  Synthetic polymer

SEQ ID NO: 2101 - DNA, 1457 bp, Artificial Sequence; identical to SEQ ID NO: 1794
  Synthetic polymer
  misc_feature (161)..(161): n is a, c, g, or t

SEQ ID NO: 2102 - DNA, 1374 bp, Artificial Sequence; identical to SEQ ID NO: 436
  Synthetic polymer

SEQ ID NO: 2103 - DNA, 1467 bp, Artificial Sequence; identical to SEQ ID NO: 1798
  Synthetic polymer

SEQ ID NO: 2104 - DNA, 1450 bp, Artificial Sequence; identical to SEQ ID NO: 999
  Synthetic polymer

SEQ ID NO: 2105 - DNA, 1444 bp, Artificial Sequence; identical to SEQ ID NO: 1801
  Synthetic polymer

SEQ ID NO: 2106 - DNA, 1378 bp, Artificial Sequence; identical to SEQ ID NO: 163
  Synthetic polymer

SEQ ID NO: 2107 - DNA, 1419 bp, Artificial Sequence; identical to SEQ ID NO: 1055
  Synthetic polymer

SEQ ID NO: 2108 - DNA, 1315 bp, Artificial Sequence; identical to SEQ ID NO: 885
  Synthetic polymer

SEQ ID NO: 2109 - DNA, 1371 bp, Artificial Sequence; identical to SEQ ID NO: 681
  Synthetic polymer

SEQ ID NO: 2110 - DNA, 1373 bp, Artificial Sequence; identical to SEQ ID NO: 1813
  Synthetic polymer

SEQ ID NO: 2111 - DNA, 1388 bp, Artificial Sequence; identical to SEQ ID NO: 1815
  Synthetic polymer
  misc_feature (143)..(143): n is a, c, g, or t
  misc_feature (364)..(364): n is a, c, g, or t
  misc_feature (1322)..(1322): n is a, c, g, or t
  misc_feature (1381)..(1381): n is a, c, g, or t

SEQ ID NO: 2112 - DNA, 1437 bp, Artificial Sequence; identical to SEQ ID NO: 1821
  Synthetic polymer

SEQ ID NO: 2113 - DNA, 1374 bp, Artificial Sequence; identical to SEQ ID NO: 588
  Synthetic polymer

SEQ ID NO: 2114 - DNA, 1343 bp, Artificial Sequence; identical to SEQ ID NO: 766
  Synthetic polymer

SEQ ID NO: 2115 - DNA, 1436 bp, Artificial Sequence; identical to SEQ ID NO: 1830
  Synthetic polymer

SEQ ID NO: 2116 - DNA, 1382 bp, Artificial Sequence; identical to SEQ ID NO: 1831
  Synthetic polymer

SEQ ID NO: 2117 - DNA, 1364 bp, Artificial Sequence; identical to SEQ ID NO: 1832
  Synthetic polymer

SEQ ID NO: 2118 - DNA, 1335 bp, Artificial Sequence; identical to SEQ ID NO: 1833
  Synthetic polymer

SEQ ID NO: 2119 - DNA, 1378 bp, Artificial Sequence; identical to SEQ ID NO: 102
  Synthetic polymer

SEQ ID NO: 2120 - DNA, 1370 bp, Artificial Sequence; identical to SEQ ID NO: 1836
  Synthetic polymer

SEQ ID NO: 2121 - DNA, 1500 bp, Artificial Sequence; identical to SEQ ID NO: 9
  Synthetic polymer

SEQ ID NO: 2122 - DNA, 1438 bp, Artificial Sequence; identical to SEQ ID NO: 1840
  Synthetic polymer

SEQ ID NO: 2123 - DNA, 1381 bp, Artificial Sequence; identical to SEQ ID NO: 589
  Synthetic polymer

SEQ ID NO: 2124 - DNA, 1461 bp, Artificial Sequence; identical to SEQ ID NO: 1847
  Synthetic polymer

SEQ ID NO: 2125 - DNA, 1385 bp, Artificial Sequence; identical to SEQ ID NO: 861
  Synthetic polymer

SEQ ID NO: 2126 - DNA, 1345 bp, Artificial Sequence; identical to SEQ ID NO: 1849
  Synthetic polymer

SEQ ID NO: 2127 - DNA, 1430 bp, Artificial Sequence; identical to SEQ ID NO: 964
  Synthetic polymer

SEQ ID NO: 2128 - DNA, 1440 bp, Artificial Sequence; identical to SEQ ID NO: 1858
  Synthetic polymer

SEQ ID NO: 2129 - DNA, 1434 bp, Artificial Sequence; identical to SEQ ID NO: 1859
  Synthetic polymer

SEQ ID NO: 2130 - DNA, 1372 bp, Artificial Sequence; identical to SEQ ID NO: 613
  Synthetic polymer

SEQ ID NO: 2131 - DNA, 1373 bp, Artificial Sequence; identical to SEQ ID NO: 647
  Synthetic polymer

SEQ ID NO: 2132 - DNA, 1384 bp, Artificial Sequence; identical to SEQ ID NO: 1867
  Synthetic polymer

SEQ ID NO: 2133 - DNA, 1352 bp, Artificial Sequence; identical to SEQ ID NO: 1868
  Synthetic polymer

SEQ ID NO: 2134 - DNA, 1419 bp, Artificial Sequence; identical to SEQ ID NO: 1872
  Synthetic polymer

SEQ ID NO: 2135 - DNA, 1374 bp, Artificial Sequence; identical to SEQ ID NO: 1879
  Synthetic polymer

SEQ ID NO: 2136 - DNA, 1465 bp, Artificial Sequence; identical to SEQ ID NO: 1883
  Synthetic polymer

SEQ ID NO: 2137 - DNA, 1483 bp, Artificial Sequence; identical to SEQ ID NO: 1884
  Synthetic polymer

SEQ ID NO: 2138 - DNA, 1370 bp, Artificial Sequence; identical to SEQ ID NO: 159
  Synthetic polymer

SEQ ID NO: 2139 - DNA, 1371 bp, Artificial Sequence; identical to SEQ ID NO: 625
  Synthetic polymer

SEQ ID NO: 2140 - DNA, 1477 bp, Artificial Sequence; identical to SEQ ID NO: 28
  Synthetic polymer

SEQ ID NO: 2141 - DNA, 1366 bp, Artificial Sequence; identical to SEQ ID NO: 1895
  Synthetic polymer

SEQ ID NO: 2142 - DNA, 1496 bp, Artificial Sequence; identical to SEQ ID NO: 910
  Synthetic polymer

SEQ ID NO: 2143 - DNA, 1438 bp, Artificial Sequence; identical to SEQ ID NO: 1901
  Synthetic polymer

SEQ ID NO: 2144 - DNA, 1515 bp, Artificial Sequence; identical to SEQ ID NO: 1902
  Synthetic polymer
  misc_feature (51)..(51): n is a, c, g, or t

SEQ ID NO: 2145 - DNA, 1363 bp, Artificial Sequence; identical to SEQ ID NO: 1906
  Synthetic polymer

SEQ ID NO: 2146 - DNA, 1395 bp, Artificial Sequence; identical to SEQ ID NO: 270
  Synthetic polymer

SEQ ID NO: 2147 - DNA, 1381 bp, Artificial Sequence; identical to SEQ ID NO: 650
  Synthetic polymer

SEQ ID NO: 2148 - DNA, 1474 bp, Artificial Sequence; identical to SEQ ID NO: 1919
  Synthetic polymer

SEQ ID NO: 2149 - DNA, 1366 bp, Artificial Sequence; identical to SEQ ID NO: 447
  Synthetic polymer

SEQ ID NO: 2150 - DNA, 1433 bp, Artificial Sequence; identical to SEQ ID NO: 1925
  Synthetic polymer

SEQ ID NO: 2151 - DNA, 1405 bp, Artificial Sequence; identical to SEQ ID NO: 96
  Synthetic polymer

SEQ ID NO: 2152 - DNA, 1374 bp, Artificial Sequence; identical to SEQ ID NO: 689
  Synthetic polymer

SEQ ID NO: 2153 - DNA, 1376 bp, Artificial Sequence; identical to SEQ ID NO: 628
  Synthetic polymer

SEQ ID NO: 2154 - DNA, 1434 bp, Artificial Sequence; identical to SEQ ID NO: 1931
  Synthetic polymer

SEQ ID NO: 2155 - DNA, 1417 bp, Artificial Sequence; identical to SEQ ID NO: 1933
  Synthetic polymer

SEQ ID NO: 2156 - DNA, 1344 bp, Artificial Sequence; identical to SEQ ID NO: 1937
  Synthetic polymer

SEQ ID NO: 2157 - DNA, 1494 bp, Artificial Sequence; identical to SEQ ID NO: 1940
  Synthetic polymer

SEQ ID NO: 2158 - DNA, 1436 bp, Artificial Sequence; identical to SEQ ID NO: 1029
  Synthetic polymer
  misc_feature (768)..(768): n is a, c, g, or t

SEQ ID NO: 2159 - DNA, 1345 bp, Artificial Sequence; identical to SEQ ID NO: 1946
  Synthetic polymer

SEQ ID NO: 2160 - DNA, 1403 bp, Artificial Sequence; identical to SEQ ID NO: 296
  Synthetic polymer

SEQ ID NO: 2161 - DNA, 1391 bp, Artificial Sequence; identical to SEQ ID NO: 631
  Synthetic polymer

SEQ ID NO: 2162 - DNA, 1367 bp, Artificial Sequence; identical to SEQ ID NO: 639
  Synthetic polymer

SEQ ID NO: 2163 - DNA, 1355 bp, Artificial Sequence; identical to SEQ ID NO: 1969
  Synthetic polymer

SEQ ID NO: 2164 - DNA, 1440 bp, Artificial Sequence; identical to SEQ ID NO: 520
  Synthetic polymer

SEQ ID NO: 2165 - DNA, 1373 bp, Artificial Sequence; identical to SEQ ID NO: 457
  Synthetic polymer

SEQ ID NO: 2166 - DNA, 1458 bp, Artificial Sequence; identical to SEQ ID NO: 1978
  Synthetic polymer

SEQ ID NO: 2167 - DNA, 1379 bp, Artificial Sequence; identical to SEQ ID NO: 1986
  Synthetic polymer

SEQ ID NO: 2168 - DNA, 1381 bp, Artificial Sequence; identical to SEQ ID NO: 1987
  Synthetic polymer

SEQ ID NO: 2169 - DNA, 1378 bp, Artificial Sequence; identical to SEQ ID NO: 1070
  Synthetic polymer

SEQ ID NO: 2170 - DNA, 1404 bp, Artificial Sequence; identical to SEQ ID NO: 782
  Synthetic polymer

SEQ ID NO: 2171 - DNA, 1419 bp, Artificial Sequence; identical to SEQ ID NO: 608
  Synthetic polymer

SEQ ID NO: 2172 - DNA, 1360 bp, Artificial Sequence; identical to SEQ ID NO: 746
  Synthetic polymer

SEQ ID NO: 2173 - DNA, 1361 bp, Artificial Sequence; identical to SEQ ID NO: 1996
  Synthetic polymer

SEQ ID NO: 2174 - DNA, 1438 bp, Artificial Sequence; identical to SEQ ID NO: 2000
  Synthetic polymer

SEQ ID NO: 2175 - DNA, 1403 bp, Artificial Sequence; identical to SEQ ID NO: 97
  Synthetic polymer

SEQ ID NO: 2176 - DNA, 1405 bp, Artificial Sequence; identical to SEQ ID NO: 2006
  Synthetic polymer

SEQ ID NO: 2177 - DNA, 1454 bp, Artificial Sequence; identical to SEQ ID NO: 936
  Synthetic polymer

SEQ ID NO: 2178 - DNA, 1358 bp, Artificial Sequence; identical to SEQ ID NO: 2012
  Synthetic polymer

SEQ ID NO: 2179 - DNA, 1499 bp, Artificial Sequence; identical to SEQ ID NO: 2017
  Synthetic polymer
  misc_feature (967)..(967): n is a, c, g, or t
  misc_feature (979)..(979): n is a, c, g, or t
  misc_feature (1487)..(1487): n is a, c, g, or t

SEQ ID NO: 2180 - DNA, 1367 bp, Artificial Sequence; identical to SEQ ID NO: 2019
  Synthetic polymer

SEQ ID NO: 2181 - DNA, 1375 bp, Artificial Sequence; identical to SEQ ID NO: 2022
  Synthetic polymer

SEQ ID NO: 2182 - DNA, 1372 bp, Artificial Sequence; identical to SEQ ID NO: 2026
  Synthetic polymer

SEQ ID NO: 2183 - DNA, 1451 bp, Artificial Sequence; identical to SEQ ID NO: 2027
  Synthetic polymer

SEQ ID NO: 2184 - DNA, 1374 bp, Artificial Sequence; identical to SEQ ID NO: 2034
  Synthetic polymer

SEQ ID NO: 2185 - DNA, 1375 bp, Artificial Sequence; identical to SEQ ID NO: 2038
  Synthetic polymer

SEQ ID NO: 2186 - DNA, 1376 bp, Artificial Sequence; identical to SEQ ID NO: 274
  Synthetic polymer

SEQ ID NO: 2187 - DNA, 1468 bp, Artificial Sequence; identical to SEQ ID NO: 2040
  Synthetic polymer

SEQ ID NO: 2188 - DNA, 1426 bp, Artificial Sequence; identical to SEQ ID NO: 1024
  Synthetic polymer

SEQ ID NO: 2189 - DNA, 1374 bp, Artificial Sequence; identical to SEQ ID NO: 375
  Synthetic polymer

SEQ ID NO: 2190 - DNA, 1380 bp, Artificial Sequence; identical to SEQ ID NO: 680
  Synthetic polymer

SEQ ID NO: 2191 - DNA, 1330 bp, Artificial Sequence; identical to SEQ ID NO: 2050
  Synthetic polymer

SEQ ID NO: 2192 - DNA, 1401 bp, Artificial Sequence; identical to SEQ ID NO: 2051
  Synthetic polymer

SEQ ID NO: 2193 - DNA, 1436 bp, Artificial Sequence; identical to SEQ ID NO: 2054
  Synthetic polymer

SEQ ID NO: 2194 - DNA, 1462 bp, Artificial Sequence; identical to SEQ ID NO: 2056
  Synthetic polymer

SEQ ID NO: 2195 - DNA, 1361 bp, Artificial Sequence; identical to SEQ ID NO: 2059
  Synthetic polymer

SEQ ID NO: 2196 - DNA, 1333 bp, Artificial Sequence; identical to SEQ ID NO: 2065
  Synthetic polymer

SEQ ID NO: 2197 - DNA, 1487 bp, Artificial Sequence; identical to SEQ ID NO: 1071
  Synthetic polymer

SEQ ID NO: 2198 - DNA, 1354 bp, Artificial Sequence; identical to SEQ ID NO: 2076
  Synthetic polymer

SEQ ID NO: 2199 - DNA, 1341 bp, Artificial Sequence; identical to SEQ ID NO: 677
  Synthetic polymer

SEQ ID NO: 2200 - DNA, 1514 bp, Artificial Sequence; identical to SEQ ID NO: 2082
  Synthetic polymer
  misc_feature (126)..(126): n is a, c, g, or t

SEQ ID NO: 2201 - DNA, 1343 bp, Artificial Sequence; identical to SEQ ID NO: 2084
  Synthetic polymer

SEQ ID NO: 2202 - DNA, 1373 bp, Artificial Sequence; identical to SEQ ID NO: 208
  Synthetic polymer

SEQ ID NO: 2203 - DNA, 1516 bp, Artificial Sequence; identical to SEQ ID NO: 2089
  Synthetic polymer

SEQ ID NO: 2204 - DNA, 1510 bp, Artificial Sequence; identical to SEQ ID NO: 2091
  Synthetic polymer
  misc_feature (363)..(363): n is a, c, g, or t

SEQ ID NO: 2205 - DNA, 1491 bp, Artificial Sequence; identical to SEQ ID NO: 515
  Synthetic polymer

SEQ ID NO: 2206 - DNA, 1370 bp, Artificial Sequence; identical to SEQ ID NO: 2093
  Synthetic polymer

SEQ ID NO: 2207 - DNA, 1357 bp, Artificial Sequence; identical to SEQ ID NO: 1110
  Synthetic polymer

SEQ ID NO: 2208 - DNA, 1478 bp, Artificial Sequence; identical to SEQ ID NO: 53
  Synthetic polymer

SEQ ID NO: 2209 - DNA, 1391 bp, Artificial Sequence
  Synthetic polymer
agagtttgatcctggctcaggattaacgctggcggcatgcctaatacatgcaagtcgaacgagagtagcaatactctagtggcgaacgggtgagtaacacgtaggaaacctgcctcaaagtcgaggataactactggaaacggtagctaaaactggataggatatattaaggcatcttgatatatttaaaagtccttctgggaatgctttgagatggtcctgcggcgcattagctagttggtgaggtagtagcttaccaaggcgacgatgcgtagctgagctgagaggccaaacagccacactgggactgagacacggcccagactcctacgggaggcagcagtagggaattttcggcaatgggggaaaccctgaccgagcaatgccgcgtgaatgatgaaattcttcggaatgtaaaattctgttgtgagggaagaaaggtagtatcaggaaatgggtattacttgacggtaccttactagaaagccccggctaactatgtgccagcagccgcggtaatacatagggggcgagcgttatccggaattattgggcgtaaagagtacgtaggtggtttcctaagcacagggtttaaggctaaggctcaaccatagttcgccctgtgaactgggagacttgagtgcaggagaggaaagcggaattcctagtgtagcggtgaaatgcgtagatattaggaggaacaccagtggcgaaggcggctttctggactgtaactgacactgaggtacgaaagcgtggggagcaaacaggattagataccctggtagtccacgccgtaaacgatgagcactaggtgtcgggggccgcaaggttttggtgccgcagttaacgcattaagtgctccgcctggggagtacgctcgcaagttgaaactcaaaggaattgacgggggacccgcacaagcagcggagcatgtggtttaattcgaagcaacgcgaagaaccttaccagggcttgacatccctctgaccggactttaacaggtctttctcttcggagcagaggtgacaggtagtgcatggttgtcgtcagctcgtgtcgtgagatgttgggttaagtcccgcaacgagcgcaacccttgtcattagttgccatcattaagttgggcactctagtgagactgccggggacaactcggaggaaggtggggatgacgtcaaatcatcatgccccttatgttctgggctacacacgtgctacaatggccggtacagaaagcagcgaagtcgtgaggcggagcaaatctccaaaaccggtcccagttcggattgcaggctacaactcacctgcatgaagttggagttgctagtaatcgcagatcagaatgctgcggtgaatgcgttcccgggtctcgcacaaaccgcccgtca

SEQ ID NO: 2210 - DNA, 1437 bp, Artificial Sequence
  Synthetic polymer
gatgaacgctggcggcgtgcctaacacatgcaagtcgagcgagaaacttatgacggatacttcggttgacagaataagcggaaagcggcggacgggtgagtaacgcgtaggcaacctgccctgtacagagagatagccattggaaacgatgattaatacctcataatgcctaatgtacacatgtacgaaaggccaaagatttatcggtatgggatgggcctgcgtctgattagctggttggtgaggtaacggctcaccaaggcaacgatcagtagccgacctgagagggtgatcggccacattggaactgagacacggtccaaactcctacgggaggcagcagtggggaatattgcacaatgggcgaaagcctgatgcagcaacgccgcgtgaaggatgaaggctttcgggtcgtaaacttcagttcttagggaagaaaaaaatgacggtacctaaggaggaagccccggctaactacgtgccagcagccgcggtaatacgtagggggcgagcgttatccggaattattgggcgtaaagagtgcgtaggtggttacctaagcgcagggtataaggcaatggcttaaccattgttggccttgcgaactgggctacttgagtgcaggagaggaaagcggaattcctagtgtagcggtgaaatgcgtagatattaggaggaacaccagtggcgaaggcggctttctggactgaaactgacactgaggcacgaaagcgtggggagcaaacaggattagataccctggtagtccacgccgtaaacgatgagcactaggtgtcggggtcgcaagacttcggtgccgcagttaacgcaataagtgctccgcctggggagtacgcacgcaagtgtaaaactcaaaggaattgacggggacccgcacaagcagcggagcatgtggtttaattcgaagcaacgcgaagaaccttaccaggacttgacatcctcctgacagatccttaatcggatccttctacggacaggagagacaggtggtgcatggttgtcgtcagctcgtgtcgtgagatgttgggttaagtcccgcaacgagcgcaacccttgccattagttaccatcattaagttggggactctaatgggactgccggggacaactcggaggaaggtggggatgacgtcaaatcatcatgccccttatgttctgggctacacacgtgctacaatggccggtacagaaggaagcgaacccgcgagggggagcgaaccccaaaagccggtcccagttcggactgcaggctgcaacccgcctgcacgaagttggagttgctagtaatcgcagatcagaatgctgcggtgaatgcgttcccgggtcttgtacacaccgcccgtcacaccatggaagttgggggtgcccaaagtcggttaaaaatagctgcctaaggcaaaaccaatgactggggtg

SEQ ID NO: 2211 - DNA, 1385 bp, Artificial Sequence
  Synthetic polymer
agagtttgatcctggctcaggatgaacgctggcggcgtgcctaacacatgcaagtcgagcgagaagcttctgatggaatcttcggatgaaagaggaagtggaaagcggcggacgggtgagtaacgcgtaggcaacctgccccttgcagagggatagccactggaaacggtgattaaaacctcataacactttatcatcacatggagataaagccaaagatttatcggcaagggatgggcctgcgtctgattagctagttggtggggtaacggctcaccaaggcgacgatcagtagccgacctgagagggtgaacggccacattggaactgagacacggtccaaactcctacgggaggcagcagtggggaatattgcacaatgggcgaaagcctgatgcagcaacgccgcgtgaaggaagaaggtcttcggatcgtaaacttctgtcctaggggaagaagaactgacggtacccttggaggaagccccggctaactacgtgccagcagccgcggtaatacgtagggggcaagcgttatccggaattattgggcgtaaagagtgcgtaggtggttctttaagcgcagggtttaaggcaatggctcaaccattgttcgccctgcgaactggaggacttgagtgcaggagaggaaagcggaattcctagtgtagcggtgaaatgcgtagatattaggaggaacaccagtggcgaaggcggctttctggactgtaactgacactgaggcacgaaagcgtggggagcaaacaggattagataccctggtagtccacgccgtaaacgatgagcactaggtgtcggggtcgcaagacttcggtgccgtagttaacgcattaagtgctccgcctggggagtacgcacgcaagtgtgaaactcaaaggaattgacggggacccgcacaagcagcggagcatgtggtttaattcgaagcaacgcgaagaaccttaccaggacttgacatccctctgacagaaccctaaccggttccttctacggacagaggagacaggtggtgcatggttgtcgtcagctcgtgtcgtgagatgttgggttaagtcccgcaacgagcgcaacccttgccaatagttgccatcattaagttgggcactctattgggactgccggggacaactcggaggaaggtggggatgacgtcaaatcatcatgccccttatgttctgggctacacacgtgctacaatggccggtacagaaagaagcgaagtcgtgaggcggagcaaatctcgaaaaccggtcccagttcggactgcaggctgcaactcgcctgcacgaagtcggagttgctagtaatcgtggatcagaatgccacggtgaatgcgttcccgggtcttgcacacaccgcccgtca

SEQ ID NO: 2212 - DNA, 1476 bp, Artificial Sequence
  Synthetic polymer
agttcgattctggctcaggatgaacgctggcggcgtgcctaacacatgcaagtcgagcgagaaacgggaagcggagatttcgattgaagtttcccgcggaaagcggcggacgggtgagtaacgcgtaggcaacctgccctttgcagagggatagcctcgggaaaccgggattaaaacctcatgatgccgagagcccgcatgggcatttggtcaaagattcatcggcaaaggatgggcctgcgtctgattagttagttggtggggtaacggcctaccaaggcgacgatcagtagccgacctgagagggtgatcggccacattggaactgagacacggtccaaactcctacgggaggcagcagtggggaatcttgcacaatgggcgaaagcctgatgcagcaacgccgcgtgagcgaagaaggcctttgggtcgtaaagctctgtcctaagggaagaaggaagtgacggtaccttaggaggaagccccggctaactacgtgccagcagccgcggtaatacgtagggggcaagcgttatccggaattattgggcgtaaagagtacgtaggcggttctttaagcgcagggtataaggcgaaggcttaaccatcgttcgccctgtgaactgggggacttgagtatcggagaggaaagcggaattcctagtgtagcggtgaaatgcgtagatattaggaggaacaccagtggcgaaggcggctttctggacgaaaactgacgctgaggtacgaaagcgtggggagcaaacaggattagataccctggtagtccacgccgtaaacgatgagcactaggtgtcggggccgcaaggcttcggtgccggagttaacgcaataagtgctccgcctggggagtacgcacgcaagtgtgaaactcaaaggaattgacggggacccgcacaagcagcggagcatgtggtttaattcgaagcaacgcgaagaaccttaccagggcttgacatccctctgatgcatccttaatcggatggttctacggacagaggagacaggtggtgcatggttgtcgtcagctcgtgtcgtgagatgttgggttaagtcccgcaacgagcgcaacccttgtcgttagttgctaacagtaagatgagaactctaatgagactgccgtggataacacggaggaaggtggggatgacgtcaaatcatcatgccccttatgtcctgggctacacacgtgctacaatggtcggaacaaagagaagcgagactgtgaagtggagcaaaactcaaaaaccgatcccagttcggattgcaggctgcaactcgcctgcatgaagtcggagttgctagtaatcgcagatcagaatgctgcggtgaatgcgttcccgggtcttgtacacaccgcccgtcacaccatggaagttgggggcgcccgaagtcggctaggaaataggctgcctaaggtgaaaccaatgactggggtgaagtcgtaacaaggtagcc

SEQ ID NO: 2213 - DNA, 1476 bp, Artificial Sequence; identical to SEQ ID NO: 3
  Synthetic polymer

SEQ ID NO: 2214 - DNA, 1380 bp, Artificial Sequence; identical to SEQ ID NO: 325
  Synthetic polymer

SEQ ID NO: 2215 - DNA, 1393 bp, Artificial Sequence
  Synthetic polymer
agagtttgatcctggctcaggatgaacgctggcggcgtgcttaacacatgcaagtcgagcgagaagctcatgattgattcttcggatgattgattgagtggaaagcggcggacgggtgagtaacgcgtaggcaacctgccccatgcagagggatagctactggaaacggtaattaatacctcataatacttttaagtcacatggctttgaggtcaaagatttatcggcatgggatgggcctgcgtctgattagcttgttggtgaggtaacggctcaccaaggcaacgatcagtagccgacctgagagggtaaacggccacattggaactgagacacggtccaaactcctacgggaggcagcagtggggaatattgcacaatgggggaaaccctgatgcagcaacgccgcgtgagcgaagaaggcctttgggtcgtaaagctctgtcctgagggaagaaacaaatgacggtacctcgggagaaagccccggctaactacgtgccagcagccgcggtaatacgtagggggcaaggcgttttccggaattattgggcgtaaagggtacgtaggcggtttaataagcgtggggtgaaaggcaatggcttaaccattgtaagccctgggaactgttagacttgagtgcaggagaggaaagcggaattcctagtgtagcggtgaaatgcgtagatattaggaggaacaccagtggcgaaggcggctttctggactgtaactgacgctgaggtacgaaagtgtggggagcaaacaggattagataccctggtagtccacaccgtaaacgatgagcactaggtgtcgggtaagcgattattcggtgccgcagttaacgcattaagtgctccgcctggggagtacgtacgcaagtatgaaactcaaaggaattgacggggacccgcacaagcagcggagcatgtggtttaattcgaagcaacgcgaagaaccttaccagggcttgacatccctctgacgtatcagataacgatgatattctcttcggagcagaggtgacaggtggtgcatggttgtcgtcagctcgtgtcgtgagatgttgggttaagtcccgcaacgagcgcaacccttgtcattagttgccggcattttggatgggcactctagtgagactgccggggataactcggaggaaggtggggatgacgtcaaatcatcatgccccttatgttctgggctacacacgtgctacaatggccggtacagagagaggcgaaatcgtgaggtggagcaaatctgataaaaccggtcccagttcggattgcaggctgaaactcgcctgcatgaagttggagttgctagtaatcgcggatcagaatgccgcggtgaatgcgttcccgggtcttgcactcaccgcccgtca

SEQ ID NO: 2216 - DNA, 1424 bp, Artificial Sequence; identical to SEQ ID NO: 1106
  Synthetic polymer

SEQ ID NO: 2217 - DNA, 1386 bp, Artificial Sequence; identical to SEQ ID NO: 333
  Synthetic polymer

SEQ ID NO: 2218 - DNA, 1312 bp, Artificial Sequence
  Synthetic polymer
  misc_feature (367)..(367): n is a, c, g, or t
  misc_feature (1267)..(1268): n is a, c, g, or t
  misc_feature (1270)..(1270): n is a, c, g, or t
  misc_feature (1301)..(1301): n is a, c, g, or t
gacgggtgagctaacgcgatgggcaacctgcctcacacagagggatagccattggaaacgatgattaaaacctcataatgcattttatccacatggatagaatgccaaagatttatcggtgtgagatgggcccgcgtctgattagttagttggtgaggtaacggctcaccaaggcagcgatcagtagccgacctgagagggtgatcggccacattggaactgagacacggtccaaactcatacgggaggcagcagtggggaatattgcacaatgggcgaaagcctgatgcagcaacgccgcgtgagcgatgaaggccttcgggtcgtaaagctctgtccttggggaagaaaaaaatgacggtacccnttggaggaagccccgggctaactacgtgcccagcagccgcggtaatacgtagggggcgagcgttatccggaattattgggcgtaaagagtgcgtaggtggttacctaagcgcagggtttaaggcaatggctcaaccattgtatgccttgcgaactgggctacttgagtgcaggagaggaaagcggaattcctagtgtagcggtgaaatgcgtagatattaggaggaacaccagtggcgaaggcggctttctggactgtaactgacactgaggcacgaaaggcgtggggagcaaacaggattagataccctggtagtccacgccgtaaacgatgagcactaggtgtcggggtcgcaagacttcggtgccgcagttaacgcattaagtgctccgcctggggagtacgcacgcaagtgtgaaactcaaaggaattgacggggacccgcacaagcagcggagcatgtggtttaattcgaagcaacgcgaaaaaccttaccaggacttgacatccttctgaccgcttcttaatcgaagctttccttcgggacggaagagacaggtggtgcatggttgtcgtcagctcgtgtcgtgagatgttgggttaagtcccgcaacgagcgcaacccttgtcattagttgccatcattaagttgggcactctagtgagactgccggggataactcggaggaaggtggggatgacgtcaaatcatcatgccccttatgttctgggctacacacgtgctacaatggtcggtacagaaagcagcaataccgtgaggtggagcaaatcttgaaaaccgatcccagttcggattgtaggctgcaactcgcctacatgaagttggagttgctagtaatcgcagatcagaatgctgcggtgaatgcgttcccgggtctnntnaaaaccgcccgtcacaccacggaagttgggngtgcccaaagt

SEQ ID NO: 2219 - DNA, 1475 bp, Artificial Sequence
  Synthetic polymer
agaatttgatcatggctcaggatgaacgctggcggcgtgcctaacacatgcaagtcgagcgagaaatcttcgaatgaagcttcggtagattttggagatggaaagcggcggacgggtgagtaacgcgtaggcaacctaccctttgcagagggatagcctcgggaaaccgggattaaaacctcataacaccttttaaagacatctttgaaaggtcaaagatttatcggcaaaggatgggcctgcgtctgattagttagttggtggggtaacggcctaccaaggcaacgatcagtagccgacctgagagggtgatcggccacattggaactgagacacggtccaaactcctacgggaggcagcagtggggaatattgcacaatgggggaaaccctgatgcagcaacgccgcgtgaaggaagaaggcccttgggtcgtaaacttctgttctaagggaagataatgacggtaccttaggagcaagtcccggctaactacgtgccagcagccgcggtaatacgtagggggcgagcgttatccggaattattgggcgtaaagagtgcgtaggtggttacctaagcaaggggtttaaggctatagcttaactatagttcgccctttgaactgggctacttgagtgcaggagaggaaagcggaattcctagtgtagcggtgaaatgcgtagatattaggaggaacaccagtggcgaaggcggctttctggactgtaactgacactgaggcacgaaagcgtggggagcaaacaggattagataccctggtagtccacgccgtaaacgatgagcactaggtgtcggggtcgcaaggcttcggtgccgcagttaacgcaataagtgctccgcctggggagtacgtacgcaagtatgaaactcaaaggaattgacggggacccgcacaagcagcggagcatgtggtttaattcgaagcaacgcgaagaaccttaccagggcttgacatctccttgaccggtcggtaaagcgacctttcttcggacaaggatgacaggtggtgcatggttgtcgtcagctcgtgtcgtgagatgttgggttaagtcccgcgacgagcgcaacccttgtcattagttgccatcattaagttgggcactctagtgagactgccggggataactcggaggaaggtggggatgacgtcaaatcatcatgccccttatgttctgggctacacacgtgctacaatggtcggtacaaagagcagcgagaccgtgaggtggagcaaatctcaaaaaccgatcccagttcggattgcaggctgcaactcgcctgcatgaagtcggagttgctagtaatcgtggatcagaatgccacggtgaatgcgttcccgggtcttgtacacaccgcccgtcacaccatggaagttgggggcgcccgaagtcggctaagtaataggctgcctaaggcgaaatcaatgactggggtgaagtcgtaacaaggtaacc

SEQ ID NO: 2220 - DNA, 1384 bp, Artificial Sequence
  Synthetic polymer
agagtttgatcctggctcaggatgaacgctggcggcgtgcctaacacatgcaagtcgagcgagaagctcatgacggacgcttcggttgaagtcacgagtggaaagcggcggacgggtgagtaacgcgtaggcaacctgccctttgcagagggatagcctcgggaaaccgggattaaaacctcataatgccgcagtgagacatctcacggcggtcaaagatttatcggcaaaggatgggcctgcgtctgattagttagttggtggggtaacggcctaccaaggcgacgatcagtagccgacctgagagggtgatcggccacattggaactgagacacggtccaaactcctacgggaggcagcagtggggaatattgcacaatgggggaaaccctgatgcagcaacgccgcgtgaaggatgaaggcctttgggtcgtaaacttctgttctaagggaagatagtgacggtaccttaggagcaagtcccggctaactacgtgccagcagccgcggtaatacgtagggggcaagcgttatccggaattattgggcgtaaagagtacgtaggtggttttctaagcacgaggtttaaggcaatggcttaaccattgttcgccttgtgaactggaagacttgagtgcaggagaggaaagcggaattcctagtgtagcggtgaaatgcgtagatattaggaggaacaccagtggcgaaggcggctttctggactgtaactgacactgaggtacgaaaagcgtggggagcaaacaggattagataccctggtagtccacgccgtaaacgatgagcactaggtgtcggggtcgcaagacttcggtgccgcagttaacgcattaagtgctccgcctggggagtacgttcgcaagaatgaaactcaaaggaattgacggggacccgcacaagcagcggagcatgtggtttaattcgaagcaacgcgaagaaccttaccagggcttgacatccctctgacagatccttaaacggattcttcttcggacagaggagacaggtggtgcatggttgtcgtcagctcgtgtcgtgagatgttgggttaagtcccgcaacgagcgcaacccttgtcattagttgccagcagtaagatgggcactctagtgagactgccggggataactcggaggaaggtggggatgacgtcaaatcatcatgccccttatgttctgggctacacacgtgctacaatggccggtacagagagaagccagaccgcgaggtggagcaaaactcaaaagccggtcctagttcggattgcaggctgcaactcgcctgcatgaagtcggagttgctagtaatcgcgaatcagaatgtcgcggtgaatacgttcccgggtcttgtactcaccgcccgtca

SEQ ID NO: 2221 - DNA, 1350 bp, Artificial Sequence
  Synthetic polymer
gatgaacgctggcggcgtgcctaatacatgcaagtcgagcgagaagtcacattactaattcttcggaagaagtaaagtgatggaaagcggcggacgggtgagtaacgcgtaggcaacctgcctctcacagggggatagccatcggaaacggtgattaataccccataaagtcaaaataacacatgttaagctgaccaaagatttatcggtgagagatgggcctgcgtctgattaactagttggtgaggtaacggctcaccaaggtgacgatcagtagccgacctgagagggtgaacggccacattggaactgagacacggtccaaacttctacggaaggcagcagtagggaatcttgcacaatgggcgaaagcctgatgcagcaacgccgcgtgaaggaagaaggccttagggtcgtaaacttctgttcttggggaagaaaaaaatgacggtacccaaggaggaagccccggctaactacgtgccagcagccgcggtaatacgtagggggcaagcgttatccggaattattgggcgtaaagcgtgcgtaggtggtaatttaagcgcaaggtttaaactaacggctcaaccgttaattgccatgcgaactgggttacttgagtgctggaggggaaagcggaattcctagtgtagcggtgaaatgcgtagatattaggaggaacaccggcggcgaaggcggctttctggacagcaactgacactgaggcacgaaagtgtgggtagcaaacaggattagataccctggtagtccacaccgtaaacgatgagcactaggtgtcggggtcgatagacttcggtgccgcagttaacgcactaagtgctccgcctggggagtacggtcgcaagactaaaactcaaaggaattgacggggacccgcacaagcagcggagcatgtggtttaattcgaagcaacgcgaagaaccttaccaggacttgacgtccctctgacaggaacttaatcgtttttttctacggacagaggagacaggtggtgcatggttgtcgtcagctcgtgtcgtgagatgttgggttaagtcccgcaacgagcgcaacccttgttgtcagttactaacattaagttgaggactctgacgagactgccgaggttaactcggaggaaggtggggatgacgtcaaatcatcatgccccttatgttctgggctacacacgtgctacaatggtcggtacagagagaagcaaagcagcgatgcggagcaaaacataaaaaccgatctcagttcggactgctggctgaaactcgcctgcacgaagatggagttgctagtaatcgcagatcagaatgctgcggtgaatgcgttcccgggtct

SEQ ID NO: 2222 - DNA, 1386 bp, Artificial Sequence; identical to SEQ ID NO: 652
  Synthetic polymer

SEQ ID NO: 2223 - DNA, 1438 bp, Artificial Sequence; identical to SEQ ID NO: 49
  Synthetic polymer

SEQ ID NO: 2224 - DNA, 1479 bp, Artificial Sequence; identical to SEQ ID NO: 473
  Synthetic polymer

SEQ ID NO: 2225 - DNA, 1521 bp, Artificial Sequence
  Synthetic polymer
aactaattgagagtttgatcctggctcaggatgaacgctggcggcgtgcctaacacatgcaagtcgagcgagaagtaaagaaatgaagcttcggtagattttcattatggaaagcggcggacgggtgagtaacgcgtaggcaacctgccctgtacagggggatagccacccgaaaaggtgattaataccccatgatgcaagagatacacatgtatcacttgtcaaagatttatcggtatgggatgggcctgcgtctgattagctagttggtagggtaacggcttaccaaggcaacgatcagtagccgacctgagagggtgatcggccacattggaactgagacacggtccaaactcctacgggaggcagcagtggggaatattgcacaatgggggaaaccctgatgcagcaacgccgcgtgaaggaagaaggccttcgggttgtaaacttctgtcctaggggaagaaacaaatgacattacccttggaggaagccccggctaactacgtgccagcagccgcggtaatacgtagggggcgagcgttatccggaattattgggcgtaaagagtgcgtaggtggcatcttaagcgcagggtttaaggcaatggctcaaccattgttcgccttgcgaactggggtgcttgagtgcaggaggggaaagtggaattcctagtgtagcggtgaaatgcgtagatattaggaggaacaccagtggcgaaggcgactttctggactgttactgacactgaggcacgaaagcgtggggagcaaacaggattagataccctggtagtccacgccgtaaacgatgagcactaggtgtcggggtcgcaagacttcggtgccgcagttaacgcattaagtgctccgcctggggagtacgcacgcaagtgtaaaactcaaaggaattgacggggacccgcacaagcagcggagcatgtggtttaattcgaagcaacgcgaagaaccttaccaggacttgacatcctcttgacagatccttaatcggattcttcttcggacaagagagacaggtggtgcatggttgtcgtcagctcgtgtcgtgagatgttgggttaagtcccgcaacgagcgcaacccttgccattagttgccatcatttagttgggcactctagtgggactgccggggaaaactcggaggaaggtggggatgacgtcaaatcatcatgccccttatgttctgggctacacacgtgctacaatggccggtacaacaggcagcgaacccgtgagggggagcgaatcccaaaagccggtcccagttcggactgtaggctgcaactcgcctacacgaagttggagttgctagtaatcgcggatcagaatgccgcggtgaatgcgttcccgggtcttgtacacaccgcccgtcacaccatggaagttgggggtgcccgaagtcggttatttaatctatcgcctaaggcaaaaccaatgactggggtgaagtcgtaacaaggtagccgtatcggaaggtgcggctggatcacctcctttct

SEQ ID NO: 2226 - DNA, 1477 bp, Artificial Sequence; identical to SEQ ID NO: 476
  Synthetic polymer

SEQ ID NO: 2227 - DNA, 1376 bp, Artificial Sequence; identical to SEQ ID NO: 798
  Synthetic polymer

SEQ ID NO: 2228 - DNA, 1380 bp, Artificial Sequence
  Synthetic polymer
agagtttgatcctggctcaggacgaacgctggcggcgtgcttaacacatgcaagtcgagcggggattacaggagagcttgctcaaatgtaattctagcggcggacgggtgagtaacgcgtgagcaatctgtcccaggcagggggataacacttggaaacaggtgctaataccgcataagaccacgaaatcgcatggttttgaggtaaaagagatatcggtttggggtgagctcgcgtcccattagctagttggtgaggtaacggcccaccaaggcgacgatgggtagccgacctgagagggtgatcggccacattggaactgagacacggtccagactcctacgggaggcagcagtggggaatattgggcaatgggcgcaagcctgacccagcaacgccgcgtgaaggaagaaggttttcggattgtaaacttctgtccttggtgacgaaggaagtgacggtagccaaggaggaagccccggctaactacgtgccagcagccgcggtaatacgtagggggcaagcgttatccggaattattgggcgtaaagagtgcgtaggtggttacctaagcagggggtgaaaggcaatggctcaaccattgttagccccctgaactgggctacttgagtgcaggagaggaaagcggaattcctagtgtagcggtgaaatgcgtagatattaggaggaacaccagtggcgaaggcggctttctggactgtaactgacactgaggcacgaaagtgtggggagcaaacaggattagataccctggtagtccacaccgtaaacgatgagcactaggtgtcggggtcgcaaggcttcggtgccgcagttaacgcattaagtgctccgcctggggagtacgtacgcaagtatgaaactcaaaggaattgacggggacccgcacaagcagcggagcatgtggtttaattcgaagcaacgcgaagaaccttaccaggacttgacatcccgatgaccggttcttaaccgaaccttctcttcggagcatcggtgacaggtggtgcatggttgtcgtcagctcgtgtcgtgagatgttgggttaagtcccgcaacgagcgcaacccttgccattagttgccatcattaagttgggcactctagtgggactgccggggataactcggaggaaggtggggatgacgtcaaatcatcatgccccttatgttctgggctacacacgtgctacaatggtcggtacaaagagcagcaataccgtgaggtggagcaaatctcaaaagccgatcccagttcggattgtaggctgcaactcgcctacatgaagttggagttgctagtaatcgcggatcagaatgccgcggtgaatgcgttcccgggtcttgcacacaccgcccgtca

SEQ ID NO: 2229 - DNA, 1366 bp, Artificial Sequence; identical to SEQ ID NO: 643
  Synthetic polymer

SEQ ID NO: 2230 - DNA, 1387 bp, Artificial Sequence
  Synthetic polymer
agagtttgatcctggctcaggatgaacgttggcggcgtgtttaacacatgcaagtcgagcgagaagctttcgagtagattcttcggatgatacatgagagtggaaagcggcggacgggtgagtaacgcgtaggcaacctgccccttgcagagggatagcctcgggaaaccgggattaaaacctcataatgccatctgtcgacatcttcggatggccaaagatttatcggcaagggatgggcctgcgtctgattagttagttggtggggtaacggcctaccaaggcagcgatcagtagccgacctgagagggtgatcggccacattggaactgagacacggtccaaactcctacgggaggcagcagtggagaatcttgcacaatgggggaaaccctgatgcagcaacgccgcgtgaaggaagaaggcccttgggtcgtaaacttcttttctaagggaagatagtgacggtaccttaggaataagtcccggctaactacgtgccagcagccgcggtaatacgtagggggcgaacgttatccggaattattgggcgtaaagagtacgtaggtggtttcctaagcatggggtttaaggcaatggcttaactattgttcgccccatgaactgggttacttgagtgcaggagaggaaagcggaattcctagtgtagcggtgaaatgcgtagatattaggaggaacaccagtggcgaaggcggctttctggactgtaactgacactgaggtacgaaagtgtggggagcaaacaggattagataccctggtagtccacaccgtaaacgatgagcactaggtgtcggcttcgcaagaagtcggtgccgcagttaacgcattaagtgctccgcctggggagtacgtacgcaagtatgaaactcaaaggaattgacggggacccgcacaagcagcggagcatgtggtttaattcgaagcaacgcgaagaaccttaccaggacttgacatccctctgaccgctctgataacgatgagctttcttcggacagaggtgacaggtggtgcatggttgtcgtcagctcgtgtcgtgagatgttgggttaagtcccgcaacgagcgcaacccttgtcattagttgccatcattcagttgggcactctagtgagactgccggggataactcggaggaaggtggggatgacgtcaaatcatcatgccccttatgttctgggctacacacgtgctacaatggtcggtacaaagagcagcaagaccgtgaggtggggcaaatctcaaaagccgatcccagttcggattgcaggctgcaactcgcctgcatgaagtcggagttgctagtaatcgtggatcagaatgccacggtgaatgcgttcccgggtcttgtacacaccgcccgtca

SEQ ID NO: 2231 - DNA, 1386 bp, Artificial Sequence; identical to SEQ ID NO: 348
  Synthetic polymer

SEQ ID NO: 2232 - DNA, 1478 bp, Artificial Sequence
  Synthetic polymer
agtttgatcatggctcaggatgaacgctggcggcgtgcctaatacatgcaagtcgagcgagatgttagcgcatgaaccttcgggggattatgctaacggaaagcggcggacgggtgagtaacgcgtaggcaacctgcccctgacagagggatagccattggaaacgatgattaaaacctcatgacaccgatgaagcacatgcttcatcggtcaaagatttatcggtcagggatgggcctgcgtctgattaactagttggtgaggtaacggctcaccaaggtgacgatcagtagccgacctgagagggtgatcggccacattggaactgagacacggtccaaacttctacggaaggcagcagtagggaatcttgcacaatgggcgaaagcctgatgcagcaacgccgcgtgaaggatgaaggccttcgggttgtaaacttctgttctaagggaagaaacaaatgacggtaccttaggagcaagccccggctaactacgtgccagcagccgcggtaatacgtagggggcaagcgttatccggaattattgggcgtaaagagtgcgtaggtggttacctaagcgcaaggtttaatttagaggctcaacctctacttgccttgcgaactgggctacttgagtgcaggaggggaaagcggaattcctagtgtagcggtgaaatgcgtagatattaggaggaacaccagcggcgaaggcggctttctggactgtaactgacactgaggcacgaaagcgtgggtagcaaacaggattagataccctggtagtccacgccgtaaacgatgagcactaggtgttgggcccgttaggctcagtgccgcagttaacgcaataagtgctccgcctggggagtacgctcgcaagagtaaaactcaaaggaattgacggggacccgcacaagcagcggagcatgtggtttaattcgaagcaacgcgaagaaccttaccagggcttgacatcctgctgacaggaccttaaccggtcccttcttcggacagcagagacaggtggtgcatggttgtcgtcagctcgtgtcgtgagatgttgggttaagtcccgcaacgagcgcaacccttgtcgctagttactaacattcagttgaggactctagcgagactgccgaggtcaactcggaggaaggtggggatgacgtcaaatcatcatgccccttatgttctgggctacacacgtgctacaatggtcggtacaatgggatgcaatactgtgaagtggagcaaatcaccaaaaccgatcccagttcggattgtaggctgcaactcgcctacatgaagttggagttgctagtaatcgcagatcagaatgctgcggtgaatgcgttcccgggtcttgtacacaccgcccgtcacaccatgggaagttgggggtgcccaaagtcggttaattaatctatcgcctaaggcaaaaccaatgactggggtgaagtcgtaacaaggtaaccgt

SEQ ID NO: 2233 - DNA, 1442 bp, Artificial Sequence; identical to SEQ ID NO: 997
  Synthetic polymer

SEQ ID NO: 2234 - DNA, 1359 bp, Artificial Sequence; identical to SEQ ID NO: 166
  Synthetic polymer

SEQ ID NO: 2235 - DNA, 1477 bp, Artificial Sequence; identical to SEQ ID NO: 916
  Synthetic polymer

SEQ ID NO: 2236 - DNA, 1517 bp, Artificial Sequence; identical to SEQ ID NO: 878
  Synthetic polymer

SEQ ID NO: 2237 - DNA, 1477 bp, Artificial Sequence; identical to SEQ ID NO: 493
  Synthetic polymer

SEQ ID NO: 2238 - DNA, 1379 bp, Artificial Sequence
  Synthetic polymer
agagtttgatcctggctcaggatgaacgctggcggcgcacttaagacatgcaagtcgaacggaaatttatcttaagtttactttagataaattttagtggcggacgggtgagtaatacgtaggcaacctgcctcaaagagagggataactgggagaaatttcagctaatacctcataagaccacactgcggcatcgcagaggggtcaaaggagtaatccgctttgagatggacccgcggcgcattagctagttggtgaggtaacggctcaccaaggcgacgatgcgtagccgacctgagagggtgatcggccacattgggactgagacacggcccagactcctacgggaggcagcagtggggaatattgcacaatgggggaaaccctgatgcagcaacgccgcgtgagtgatgacggtcttcggattgtaaagctctgtctttggggacgataatgacggtacccaaggaggaagccacggctaactacgtgccagcagccgcggtaatacgtaggtggcgagcgttgtccggatttactgggcgtaaagggtgcgtaggcggtctttcaagtcaggagttaaaggctacggctcaaccgtagtaagctcctgatactgtctgacttgagtgcaggagaggaaagcggaattcccagtgtagcggtgaaatgcgtagatattgggaggaacaccagtagcgaaggcggctttctggactgtaactgacgttgaggctcgaaagcgtggggagcaaacaggattagataccctggtagtccacgctgtaaacgatgaatactaggtgtgggaggactgaccccttccgtgccgcagttaacacaataagtattccacctggggagtacgaccgcaaggttgaaactcaaaggaattgacgggggcccgcacaagcagtggattatgtggtttaattcgacgcaacgcgaagaaccttaccaggatttgacatcctactaacgaagcagagatgcattaggtgcccttcggggaaagtagagacaggtggtgcatggttgtcgtcagctcgtgtcgtgagatgttgggttaagtcccgcaacgagcgcaacccctattgttagttgctacgaaagagcactctagcaagactgccgttgacaaaacggaggaaggcggggacgacgtcaaatcatcatgccccttatgtcctgggctacacacgtaatacaatggcggtcaacaaagggaagcaataccgcgaggtggagcaaatccccaaaagctgtctcagttcggattgcaggctgcaactcgcctgcatgaagctggaattgctagtaatcgtggatcagcatgccacggtgaatacgttcccgggccttgtactcaccgcccgtca

SEQ ID NO: 2239 - DNA, 1436 bp, Artificial Sequence; identical to SEQ ID NO: 888
  Synthetic polymer

SEQ ID NO: 2240 - DNA, 1370 bp, Artificial Sequence; identical to SEQ ID NO: 660
  Synthetic polymer

SEQ ID NO: 2241 - DNA, 1386 bp, Artificial Sequence
  Synthetic polymer
agagtttgatcctggctcaggatgaacgctggcggcgtgcctaacacatgcaagtcgagcgagaagcttctgatagattcttcggatgaaagaggaagcggaaagcggcggacgggtgagtaacgcgtaggcaacctgcctctcacagaaggatagccattggaaacgatgattaaaacctcataacgccggagagagacatctccctccggccaaagatttatcggtgagagatgggcctgcgtctgattagctagttggcggggtaacggcccaccaaggcgacgatcagtagccgacctgagagggtgatcggccacattggaactgagacacggtccaaactcctacgggaggcagcagtggggaatattgcacaatgggcgaaagcctgatgcagcaacgccgcgtgaaggaagaaggccttcgggtcgtaaacttctgtccttggggaagaagaactgacggtacccatggaggaagccccggctaactacgtgccagcagccgcggtaatacgtagggggcaagcgttatccggaattattgggcgtaaagcgtgcgtaggtggttctttaagcgcagggtttaaggcaatggcccaaccattgttcgccctgcgaactggaggacttgagtgcaggagaggaaagcggaattcctagtgtagcggtgaaatgcgtagatattaggaggaacaccagtggcgaaggcggctttctggactgtaactgacactgaggcacgaaagcgtggggagcaaacaggattagataccctggtagtccacgccgtaaacgatgagcactaggtgtcgggtccgcgaggaataggtgccgcagttaaagcattaagtgcccccgcctggggagtacgcacgcaagtgtgaaactcaaaggaatagacgggggcccgcacaagcagcggagcatgtggtttaatttgaagcaacgcgaagaaccttaccaggacttgacatccctctgacagatccttaaccggatccttcttcggacagaggagacaggtggtgcatggttgtcgtcagctcgtgtcgtgagatgttgggttaagtcccgcaacgagcgcaacccttgccattagttgccatcattcagttgggcactctagtgggactgccggggacaactcggaggaaggtggggatgacgtcaaatcatcatgccccttatgttttgggctacacacgtgctacaatggccggtacagaaagcagcaaagccgcgaggcggagcgaatctcgaaaaccggtcccagttcggactgcaggctgcaacccgcctgcacgaagccggagttgctagtaatcgcggatcagaatgccgcggtgaatgcgttcccgggtcttgcacacaccgcccgtca

SEQ ID NO: 2242 - DNA, 1434 bp, Artificial Sequence; identical to SEQ ID NO: 985
  Synthetic polymer

SEQ ID NO: 2243 - DNA, 1364 bp, Artificial Sequence; identical to SEQ ID NO: 192
  Synthetic polymer

SEQ ID NO: 2244 - DNA, 1506 bp, Artificial Sequence
  Synthetic polymer
gagtttgatcctggctcaggatgaacgctggcgacgtgcctaacacatgcaagtcgagcgagaaacttttaaatgaaacttcggtagattttagaagtggaaagcggcggacgggtgagtaacgcgtaggcaacctgccctttgcagagggatagcctcgggaaaccgggattaaaacctcataatgcctttgggagacatcttttaaaggccaaagatttatcggcaaaggatgggcctgcgtctgattagttagttggtggggtaacggcctaccaaggcgacgatcagtagccgacctgagagggtgatcggccacattggaactgagacacggtccaaactcctacgggaggcagcagtggggaatattgcacaatgggggaaaccctgatgcagcaacgccgcgtgaaggaagaaggcctttgggtcgtaaacttctgttctaagggaagaaaaggactgtaccttaggagcaagtcccggctaactacgtgccagcagccgcggtaatacgtagggggcaagcgctatccggaattattgggcgtaaagagtacgtaggtggctacctaagcacgaggtataaggctatggcttaaccatagttcgccttgtgaactgggctgcttgagtgcaggagaggaaagcsgaattcctagtgtagcggtgaaatgcgtagatattaggaggaacaccagtggcgaaggcggctttctggactgtaactgacactgaggtacgaaagcgtggggagcaaacaggattagataccctggtagtccacgccgtaaacgatgagcactaggtgtcggggtcgcaagacttcggtgccgcagttaacgcaataagtgctccgcctggggggtacgttcgcaagaatgaaactcaaaggaattgacggggacccgcacaagcagcggagcatgtggtttaattcgaagcaacgcgaagaaccttaccagggcttgacatcccactgaccggttcttaaacgaacctttcttcggacagtggagacaggtggtgcatggttgtcgtcagcccgtgtcgtgagatgttgggttaagtcccgcaacgagcgcaacccttgtcattagttgccatcagattagctgggcactctagtgagactgccgtggataacacggaggaaggtggggatgacgtcaaatcatcatgccccttatgttctgggctacacacgtgctacaatggtcggtacagagagaagcgaggccgtgaggcggagcaaaactagaaaaccgatcccagttcggattgcaggctgcagctcgcctgcatgaagtcggagttgctagtaatcgcgaatcagaatgtcgcggtgaatgcgttcccgggtcttgtacacaccgcccgtcacaccatggaagttgggggcgcccgaagttggtcgagaaatagattacctaaggcgaaatcaatgactggggtgaagtcgtaacaaggtagccgtatcggaaggtgcggctggatcacctcctt

SEQ ID NO: 2245 - DNA, 1488 bp, Artificial Sequence
  Synthetic polymer
ctgcagagaagagtttgatcctggctcaggatgaacgctggcggcgtgcctaatacatgcaagtcgagcgagaagcttggaaatgacgcttcggttgaatttccaagcggacagcggcggacgggtgagtaacgcgtaggcaacctgcccctgtacagagggatagccattggaaacgatgattaaaacctcatgacaccgtagtagcacatgctacatcggtcaaagatttatcggtcagggatgggcctccgtctgattaactggttggtgaggtaacggctcaccaaggtgacgatcagtagccgacctgagagggtgatcggccacattggaactgagacacggtccaaacttctacggaaggcagcagtagggaatcttgcacaatgggcgtaagcctgatgcagcaacgccgcgtgaaggatgaaggcttcgggttgtaaacttctgttctaagggaagaaagaaatgacggtaccttaggagcaagccccggctaactacgtgccagcagccgcggtaatacgtagggggcaagcgttatccggaattattgggcgtaaagagtgcgtaggtggttacctaagcgcaaggtttaaattagaggctcaacctctacatgccttgcgaactgggctacttgagtgcaggaggggaaagcggaattcctagtgtagcggtgaaatgcgtagatattaggaggaacaccggcggcgaaggcggctttctggactgtaactgacactgaggcacgaaagcgtgggtagcaaacaggattagataccctggtagtccacgccgtaaacgatgagcactaggtgttgggtccgttaggactcagtgccgcagttaacgcaataagtgtccgcctgggagtacgctcgcaagagtaaactcaaggaattgacgggcacccgcacaagcaggggagcttgtggtttaattcgaagcaacgcgaagaaccttaccagggcttgacatcctgctgacagaaccttaatcggttttttcttcggacagcagagacaggtggtgcatggttgtcgtcagctcgtgtcgtgagatgttgggttaagtcccgcaacgagcgcaacccttgtcgctagttactaacattcagttgaggactctagcgagactgccgaggtcaactcggaggaaggtggggatgacgtcaaatcatcatgccccttatgttctgggctacacacgtgctacaatggtcggtacaatgagatgcaatactgcgaagtggagcgaaacaccaaaaccgatcccagttcggattgtaggctgcaactcgcctacatgaagtcggagttgctagtaatcgcagatcagaatgctgcggtgaatgcgttcccgggtcttgtacacaccgcccgtcacaccatggaagttgggggtgcccaaagtcggttaattaatctatcgcctaaggcaaaaccaatgactggggtgaagtcgtaacaaggtacccgtagg

SEQ ID NO: 2246 - DNA, 1481 bp, Artificial Sequence; identical to SEQ ID NO: 1021
  Synthetic polymer

SEQ ID NO: 2247 - DNA, 1410 bp, Artificial Sequence; identical to SEQ ID NO: 678
  Synthetic polymer

SEQ ID NO: 2248 - DNA, 1478 bp, Artificial Sequence; identical to SEQ ID NO: 490
  Synthetic polymer

SEQ ID NO: 2249 - DNA, 1474 bp, Artificial Sequence; identical to SEQ ID NO: 857
  Synthetic polymer

SEQ ID NO: 2250 - DNA, 1475 bp, Artificial Sequence
  Synthetic polymer
gagtttgatcctggctcaggatgaacgctggcggcgtgcctaacacatgcaagtcgagcgagaagctgtttaatgaaacttcggtagatttaaaaagtggaaagcggcggacgggtgagtaacgcgtgggcaacctgccttacacagagggatagccattggaaacgatgattaaaacctcataacgcttttttagcacatgctgaggaagccaaagatttatcggtgtaagatgggcccgcgtctgattagttagttggtgaggtaacggctcaccaagacagcgatcagtagccgacctgagagggtgatcggccacattggaactgagacacggtccaaactcctacgggaggcagcagtggggaatattgcacaatgggcgaaagcctgatgcagcaacgccgcgtgaaggaagaaggccttcgggtcgtaaacttctgtccaaaaggaagaaaaaaatgacggtacttttggaggaagccccggctaactacgtgccagcagccgcggtaatacgtagggggcaagcgttatccggaattattgggcgtaaagagtgcgtaggtggttacctaagcgcagggtttaaggcaatggctcaaccattgttcgccttgcgaactgggctacttgagtgcaggagaggaaagcggaattcctagtgtagcggtgaaatgcgtagatattaggaggaacaccggtggcgaaggcggctttctggactgtaactgacactgaggcacgaaagcgtggggagcaaacaggattagataccctggtagtccacgccgtaaacgatgagcactaggtgtcggggccaaaaggcttcggtgccgcagttaacgcattaagtgctccgcctggggagtacgcacgcaagtgtaaaactcaaaggaattgacggggacccgcacaagcagcggagcatgtggtttaattcgaagcaacgcgaagaaccttaccaggacttgacatcctactgacggttccttaaccgggaccttcttcggacagtagagacaggtggtgcatggttgtcgtcagctcgtgtcgtgagatgttgggttaagtcccgcaacgagcgcaacccttgtcattagttgccatcattaagttgggcactctaatgagactgccggggacaactcggaggaaggtggggatgacgtcaaatcatcatgccccttatgttctgggctacacacgtgctacaatggtcggtacagagagcagcgaaatcgtgaggtggagcaaatcttcaaaaccgatcccagttcggactgcaggctgaaactcgcctgcacgaagtcggagttgctagtaatcgcagatcagaatgctgcggtgaatgcgttcccgggtcttgtacacaccgcccgtcacaccatggaagttgggggtgcccaaagttggacagtaaatagtttacctaaggcaaacccaatgactggggtgaagtcgtaacaaggtag

SEQ ID NO: 2251 - DNA, 1428 bp, Artificial Sequence; identical to SEQ ID NO: 991
  Synthetic polymer

SEQ ID NO: 2252 - DNA, 1386 bp, Artificial Sequence; identical to SEQ ID NO: 527
  Synthetic polymer

SEQ ID NO: 2253 - DNA, 1481 bp, Artificial Sequence; identical to SEQ ID NO: 2
  Synthetic polymer

SEQ ID NO: 2254 - DNA, 1532 bp, Artificial Sequence; identical to SEQ ID NO: 1033
  Synthetic polymer

SEQ ID NO: 2255 - DNA, 1464 bp, Artificial Sequence; identical to SEQ ID NO: 30
  Synthetic polymer

SEQ ID NO: 2256 - DNA, 1400 bp, Artificial Sequence
  Synthetic polymer
ttcccccttagagtttgatcctggctcaggatgaacgctggcggcgtgcttaacacatgcaagtcgaacggagagctattgaaggagttttcggacaacagaaatagtatcttagtggcggacgggtgagtaacgcgtgaggaacctgccttggagaggggaataacacagtgaaaattgtgctaataccgcatgaagcagttgagtcgcatggctctgactgccaaagatttatcgctctgagatggcctcgcgtctgattagttagttggcggggtaacggcccaccaagacgacgatcagtagccggactgagaggttgaccggccacattgggactgagacacggcccagactcctacgggaggcagcagtggggaatattgggcaatgggcgcaagcctgacccagcaacgccgcgtgaaggaagaaggctttcgggttgtaaacttcttttatgtaggacgaaacaaatgacggtactacatgaataagccacggctaactacgtgccagcagccgcggtaatacgtaggtggcaagcgttatccggatttactgggtgtaaagggcgtgtaggcgggactgcaagtcagatgtgaaaactatgggctcaacccatagcctgcatttgaaactgtagttcttgagtatcggagaggcaggcggaattccgtgtgtagcggcgaaatgcgtagatatacggaggaacaccagtggcgaaggcggcctgctggacgacaactgacgctgaggcgcgaaagcgtggggagcaaacaggattagataccctggtagtccacgctgtaaacgatcgatactaggtgtgcggggactgaccccctgcgtgccgcagctaacgcaataagtatcgcacctggggagtacgatcgcaaggttgaaactcaaaggaattgacgggggcccgcacaagcggtggagtatgtggtttaattcgaagcaacgcgaagaaccttaccagggcttgacatcctactaacgaaacagagatgtatcaggtgcccttcggggaaagtagagacaggtggtgcatggttgtcgtcagctcgtgtcgtgagatgttgggttaagtcccgcaacgagcgcaacccctattgttagttgctacgcaagagcactctagcgagactgccgttgacaaaacggaggaaggtggggacgacgtcaaatcatcatgccccttatgtcctgggccacacacgtactacaatggcggtcaacagagggaagcaataccgtgaggtggagcaaacccctaaaagccgtcccagttcggattgcaggctgcaactcgcctgtatgaagttggaatcgctagtaatcgcggatcagcatgccgcggtgaatacgttcccgggccttgcacacaccgcccgtca

SEQ ID NO: 2257 - DNA, 1400 bp, Artificial Sequence
  Synthetic polymer
agtcgaacggagacttatggatagaggtttcggccaattgaaataagtcttagtggcggactggtgagtaacgcgtgaggaacctgcctttcagagggggacaacagttggaaacgactgctaataccgcatgacatgtaaccggggcatcccggatacatcaaagattttatcgctgaaagatggcctcgcgtctgattagatagttggcggggtaacggcccaccaagtcgacgatcagtagccggactgagaggttgaccggccacattgggactgagatacggcccagactcctacgggaggcagcagtggggaatattgggcaatggacgcaagtctgacccagcaacgccgcgtgaaggaagaaggctttcgggttgtaaacttcttttaagggggaagagcagaagacggtaccccttgaataagccacggctaactacgtgccagcagccgcggtaatacgtaggtggcaagcgttgtccggatttactgggtgtaaagggcgtgtagccggagagacaagtcagatgtgaaatccgcgggcttaacccgcgaactgcatttgaaactgtttcccttgagtgtcggagaggtaattggaattcctagtgtagcggtgaaatgcgtagatattaggaagaacaccagtggcgaaggcggattactggacgataactgacggtgaggcgcgaaagcgtggggagcaaacaggattagataccctggtagtccacgctgtaaacgatcaatactaggtgtgcggggactgaccccctgcgtgccgcagttaacacaataagtattgcacctggggagtacgatcgcaaggttgaaactcaaaggaattgacgggggcccgcacaagcggtggattatgtggtttaattcgaagcaacgcgaagaaccttaccagggcttgacatcctactaacgaagtagagatacattaggtgcccttcggggaaagtagagacaggtggtgcatggttgtcgtcagctcgtgtcgtgagatgttgggttaagtcccgcaacgagcgcaacccctattgttagttgctacgcaagagcactctagcgagactgccgttgacaaaacggaggaaggtggggacgacgtcaaatcatcatgccccttatgtcctgggctacacacgtaatacaatgacggttaacaaagggatgcaaaaccgcgaggtggagcgaacccccaaacaccgtctcagttcggattgcaggctgcaactcgcctgcatgaagtcggaatcgctagtaatcgcggatcagcatgccgcggtgaatacgttcccgggccttgtacacaccgcccgtcacaccatgagagtcgggaacacccgaagtccgtagtctaaccgcaagggggacgcggccgaagg

SEQ ID NO: 2258 - DNA, 1388 bp, Artificial Sequence
  Synthetic polymer
agagtttgatcctggctcaggatgaacgctggcggcgtgcttaacacatgcaagtcgaacggaactcattggatcaagacttcggtcaagtgaatttgagtttagtggcggacgggtgagtaacgcgtgaggaacctgcctcggagtggggaataacagttagaaatgactgctaataccgcataatgcatattgatcgcatggttgatgtgccaaagatttatcgctctgagatggcctcgcgtctgattagctagttggcggggtaacggcccaccaaggcgacgatcagtagccggactgagaggttggccggccacattgggactgagacacggcccagactcctacgggaggcagcagtggggaatattgggcaatgggcgcaagcctgacccagcaacgccgcgtgaaggaagaaggctttcgggttgtaaacttcttttaagagggacgaagaatgacggtacctcttgaataagccacggctaactacgtgccagcagccgcggtaatacgtaggttgcaagcgttgtccggatttactgggtgtaaagggcgtgtaggcggagctgcaagtcagatgtgaaatcccggggctcaaccccggaactgcatttgaaactgtagcccttgagtatcggagaggcaagcggaattcctagtgtagcggtgaaatgcgtagatattaggaggaacaccagtggcgaaggcggcttgctggacgacaactgacgctgaggcgcgaaagcgtggggagcaaacaggattagataccctggtagtccacgctgtaaacgatgaatactaggtgtgggaggactgaccccttccgtgccgcagttaacacaataagtattccacctggggagtacgaccgcaaggttgaaactcaaaggaattgacgggggcccgcacaagcagtggattatgtggtttaattcgaagcaacgcgaagaaccttacctggtcttgacatccctctgaccggtcagtaatgtgacttttccttcgggacagaggagacaggtggtgcatggttgtcgtcagctcgtgtcgtgagatgttgggttaagtcccgcaacgagcgcaacccctatccttagtagccagcggccaggccgggcactctagggagactgccggggataacctggaggaaggtggggatgacgtcaaatcatcatgccccttatgatttgggctacacacgtgctacaatggcgtaaacaaagggaagcgaccccgtgagggtgagcaaatcccaaaaataacgtctcagttcggattgtagtctgcaactcgactacatgaagctggaatcgctagtaatcgcgaatcagaatgtcgcggtgaatacgttcccgggtcttgcactcaccgcccgt

SEQ ID NO: 2259 - DNA, 1523 bp, Artificial Sequence
  Synthetic polymer
agagtttgatcatggctcaggacgaacgctggcggcgtgcttaacacatgcaagtcgaacggagtgcccatgacagaggtttcggccaatggattgggttacttagtggcggactggtgagtaacgcgtgaggaacctgcctttcagagggggacaacagttggaaacgactgctaataccgcatgacatatattaagggcatccttgatatatcaaagattttatcgctgaaagatggcctcgcgtccgattagatagttggcggggtaacggcccaccaagtcgacgatcggtagccggactgagaggttgaccggccacattgggactgagatacggcccagactcctacgggaggcagcagtggggaatattgggcaatggacgcaagtctgacccagcaacgccgcgtgaaggaagaaggctttcgggttgtaaacttcttttgtcagggaacagtagaagagggtacctgacgaataagccacggctaactacgtgccagcagccgcggtaatacgtaggtggcaagcgttgtccggatttactgggtgtaaagggcgtgcagccggagagacaagtcagatgtgaaatccgcgggcttaacccgcgaactgcatttgaaactgtttcccttgagtatcggagaggtaatcggaattcctagtgtagcggtgaaatgcgtagatattaggaagaacaccagtggcgaaggcggattactggacgacaactgacggtgaggcgcgaaagcgtggggagcaaacaggattagataccctggtagtccacgctgtaaacgatcaatactaggtgtgcggggactgaccccctgcgtgccgcagttaacacaataagtattgcacctggggagtacgatcgcaaggttgaaactcaaaggaattgacgggggcccgcacaagcggtggattatgtggtttaattcgaagcaacgcgaagaaccttaccagggcttgacatcctgctaacgaagtagagatacatcaggtgcccttcggggaaagcagagacaggtggtgcatggttgtcgtcagctcgtgtcgtgagatgttgggttaagtcccgcaacgagcgcaacccctattgttagttgctacgcaagagcactctagcgagactgccgttgacaaaacggaggaaggtggggacgacgtcaaatcatcatgccccttatgtcctgggctacacacgtaatacaatggcggtcaacaaagggaggcaaagccgcgaggcagagcaaacccccaaaagccgtcccagttcggattgcaggctgcaacccgcctgcatgaagtcgggatcgctagtaatcgcggatcagcatgccgcggtgaatacgttcccgggccttgtacacaccgcccgtcacaccatgagagtcgggaacacccgaagtccgtagcctaaccgcaaggggggcgcggccgaaggtgggttcgataattggggtgaagtcgtaacaaggtagccgttcgagaacgagcggctggatcacctcctt

SEQ ID NO: 2260 - DNA, 1449 bp, Artificial Sequence; identical to SEQ ID NO: 1095
  Synthetic polymer

SEQ ID NO: 2261 - DNA, 1395 bp, Artificial Sequence
  Synthetic polymer
agagtttgatcctggctcaggatgaacgctggcggcgtgcttaacacatgcaagtcgaacggagcacccctgaaggagttttcggacaacggaaggagctgcttagtggcggacgggtgagtaacgcgtgaggaacctgccttggagtggggaataacagctggaaacagctgctaataccgcataatatatctgggccgcatggctctggatatcaaagatttatcgctctgagatggactcgcgtctgattagctggttggcggggtaacggcccaccaaggcgacgatcagtagccggactgagaggttggccggccacattgggactgagacacggcccagactcctacgggaggcagcagtggggaatattgggcaatgggcgcaagcctgacccagcaacgccgcgtgaaggaagaaggctttcgggctgtaaacttcttttgtcagggacgaagcaagtgacggtacctgacgaataagccacggctaactacgtgccagcagccgcggtaatacgtaggtggcaagcgttatccggatttactgggtgtaaagggcgtgtaggcgggactgcaagtcagatgtgaaaaccacgggctcaacctgtggcctgcatttgaaactgtagttcttgagtactggagaggcagacggaattcctagtgtagcggtgaaatgcgtagatattaggaggaacaccagtggcgaaggcggtctgctggacagcaactgacgctgaggcgcgaaagcgtggggagcaaacaggattagataccctggtagtccacgctgtaaacgatggatactaggtgtggggggactgaccccctccgtgccgcagttaacaccataagtatcccacctggggagtacgatcgcaaggttgaaactcaaaggaattgacgggggcccgcacaagcggtggagtatgtggtttaattcgaagcaacgcgaagaaccttacctggtcttgacatccggacgccgtatgggcaaagccatatttccttcgggacgtccgagacaggtggtgcatggttgtcgtcagctcgtgtcgtgagatgttgggttaagtcccgcaacgagcgcaacccctgtttccagtagccagcatataaagatgggcactctggagagactacccgggataaccgggaggaaggcggggatgacgtcaaatcatcatgccccttatgatcagggctacacacgtgctacaatggcgtaaacaaagggaagcgagacggtgacgttgagcaaatcccagaaataacgtcccagttcggattgtagtctgcaacccgactacatgaagctggaatcgctagtaatcgcgaatcagaatgtcgcggtgaatacgttcccgggtcttgcactcaccgcccgtca

SEQ ID NO: 2262 - DNA, 1493 bp, Artificial Sequence
  Synthetic polymer
agagtttgatcctggctcaggatgaacgctggcggcgtgcttaacacatgcaagtcgaacggagtgctcatgacagaggattcgtccaatggagtgagttacttagtggcggacgggtgagtaacgcgtgagtaacctgccttggagtggggaataacaggtggaaacatctgctaataccgcatgatgcagttgggtcgcatggctctgactgccaaagatttatcgctctgagatggactcgcgtctgattagctggttggcggggtaacggcccaccaaggcgacgatcagtagccggactgagaggttggccggccacattgggactgagacacggcccagactcctacgggaggcagcagtggggaatattgggcaatgggcgcaagcctgacccagcaacgccgcgtgaaggaagaaggctttcgggttgtaaacttcttttctcagggacgaagcaagtgacggtacctgaggaataagccacggctaactacgtgccagcagccgcggtaatacgtaggtggcgagcgttatccggatttactgggtgtaaagggcgtgtaggcgggactgcaagtcagatgtgaaaaccatgggctcaacctgtggcctgcatttgaaactgtagttcttgagtactggaggggcagacggaattcctagtgtagcggtgaaatgcgtagatattaggaggaacaccagtggcgaaggcggtctgctggacagcaactgacgctgaggcgcgaaagcgtggggagcaaacaggattagataccctggtagtccacgctgtaaacgatggatactaggtgtggggggtctgaccccctccgcgccgcagttaacacaataagtatcccacctggggagtacgatcgcaaggttgaaactcagaggaattgacgggggcccgcacaagcggtggagtatgtggtttaattcgaagcaacgcgaagaaccttaccagggcttgacatcccggtgaccggtgtagagatacaccttcttcttcggaagcaccggtgacaggtggtgcatggttgtcgtcagctcgtgtcgtgagatgttgggttaagtcccgcaacgagcgcaacccttattgttagttgctacgcaagagcactctagcgagactgccgttgacaaaacggaggaaggtggggacgacgtcaaatcatcgtgccccttatgtcctgggccacacacgtactacaatggtggtcaacagagggaagcaagaccgcgaggtggagcaaacccctaaaagccatcccagttcggattgcaggctgcaactcgcctgtatgaagttggaatcgctagtaatcgcggatcagcatgccgcggtgaatacgttcccgggccttgtacacaccgcccgtcacaccatgagagtcgggaacacccgaagtccgtagcctaaccgcaaggggggcgcggccgaaggtgggttcgataattggggtgaagtcgtaacaaggtagccg

SEQ ID NO: 2263 - DNA, 1398 bp, Artificial Sequence; identical to SEQ ID NO: 697
  Synthetic polymer

SEQ ID NO: 2264 - DNA, 1402 bp, Artificial Sequence; identical to SEQ ID NO: 550
  Synthetic polymer

SEQ ID NO: 2265 - DNA, 1362 bp, Artificial Sequence; identical to SEQ ID NO: 751
  Synthetic polymer

SEQ ID NO: 2266 - DNA, 1395 bp, Artificial Sequence
  Synthetic polymer
agagtttgatcctggctcaggatgaacgctggcggcgtgcttaacacatgcaagtcgaacggggtgcctttgacagaggattcgtccaatggataaggttacctagtggcggacgggtgagtaacgcgtgagtaacctgccctggagtggggaataacagctggaaacagctgctaataccgcataatgcagttgggtcgcatggctctgactgccaaagatttatcgctctgggatggactcgcgtctgattagctagttggtggggcaacggcccaccaaggcgacgatcagtagccggactgagaggttggccggccacattgggactgagacacggcccagactcctacgggaggcagcagtggggaatattgggcaatgggcgcaagcctgacccagcaacgccgcgtgaaggaagaaggctttcgggttgtaaacttcttttgtcagggacgaagcaagtgacggtacctgacgaataagccacggctaactacgtgccagcagccgcggtaatacgtaggtggcaagcgttatccggatttactgggtgtaaagggcgtgtaggcggggaagcaagtcagatgtgaaaaccacgggctcaacctgtggcctgcatttgaaactgtttttcttgagtgctggagaggcaatcggaattccgtgtgtagcggtgaaatgcgtagatatacggaggaacaccagtggcgaaggcggattgctggacagtaactgacgctgaggcgcgaaagcgtggggagcaaacaggattagataccctggtagtccacgctgtaaacgatggatactaggagtggggggtctgaccccctccgtgccgcagttaacacaataagtatcccacctggggagtacgatcgcaaggttgaaactcaaaggcattgacggggacccgcacaagcggtggagcatgtggtttaatccgaagcaacgcgaagaaccttacccggctttgacatcccgatgaatgtacagtaatgtgtacaggacttcggtacatcggagacaggtggtgcatggttgtcgtcagctcgtgtcgtgagatgttgggttaagtcccgcaaagagcgcaacccctgccctcagtagccagcaggtaaagctgggaactctgaggggactgcccgggataaccgggaggaaggcggggatgacgtcaaatcatcatgccccttatggccggggctacacacgtgctacaatggcggaaacagagggaagcagccccgtgagggtgagcgaaccccaaaaataccgcctcagttcggattgtagtctgcaacccgactacatgaagccggaatcgctagtaatcgcgaatcagaatgtcgcggtgaatacgttcccgggtcttgtacacaccgcccgtca

SEQ ID NO: 2267 - DNA, 1499 bp, Artificial Sequence
  Synthetic polymer
  misc_feature (722)..(722): n is a, c, g, or t
agagtttgatcatggctcaggacgaacgctggcggcgtgcctaacacatgcaagtcgaacggaggacccttgacggagttttcggacaacagataggaatccttagtggcggacgggtgagtaacgcgtgaggaacctgccttggagaggggaataacacagagaaatttgtgctaataccgcataatgcagttgggtcgcatggctctgactgccaaagatttatcgctctgagatggcctcgcgtctgattagctggttggcggggtaacggcccaccaaggcgacgatcagtagccggactgagaggttggccggccacattgggactgagacacggcccagactcctacgggaggcagcagtggggaatattgggcaatgggcgcaagcctgacccagcaacgccgcgtgaaggaagaaggctttcgggttgtaaacttcttttatgagggacgaagaaagtgacggtacctcatgaataagctccggctaactacgtgccagcagccgcggtaatacgtagggagcaagcgttatccggatttactgggtgtaaagggcgtgtaggcgggagtgcaagtcagatgtgaagactatgggctcaacccatagcctgcatttgaaactgtacttcttgagtactggagaggcaggcggaattccgtgtgtagcggtgaaatgcgtagatatacggaggaacaccagtggcgaaggcggcntgctggacagcaactgacgctaaggcgcgaaagcgtggggagcaaacaggattagataccctggtagtccacgctgtaaacgatcgatactaggtgtgggggggactgaccccctccgtgccgcagctaacgcaataagtatcgcacctggggagtgcgatcgcaaggttgaaactcaaaggaattgacgggggcccgcacaagcggtggagtatgtggtttaattcgaagcaacgcgaagaaccttaccagggcttgacatcctgctaacgaagtagagatacattaggcgcccttcggggaaagcagagacaggtggtgcatggttgtcgtcagctcgtgtcgtgagatgttgggttaagtcccgcaacgagcgcaacccctattgttagttgctacgcaagagcactctagcgagactgccgttgacaaaacggaggaaggtggggacgacgtcaaatcatcatgccccttatgtcctgggccacacacgtactacaatggcggtcaacagagggaagcaataccgtgaggtggagcaaacccctaaaagccgtcccagttcggattgcaggctgcaacccgcctgtatgaagttggaatcgctagtaatcgcggatcagcatgccgcggtgaatacgttcccgggccttgtacacaccgcccgtcacaccatgagagtcgggaacacccgaagtccgtagcctaactttcacgagggggcgcggccgaaggtgggttcgataattggggtgaagtcgtaacaaggtaaccgta

SEQ ID NO: 2268 - DNA, 1452 bp, Artificial Sequence; identical to SEQ ID NO: 883
  Synthetic polymer

SEQ ID NO: 2269 - DNA, 1493 bp, Artificial Sequence
  Synthetic polymer
agagtttgatcctggctcaggatgaacgctggcggcgtgcttaacacatgcaagtcgaacggggtacccttaacagaggattcgtccaatggagaggaatacctagtggcggacgggtgagtaacgcgtgaggaacctgccttggagaggggaataacacagggaaacctgtgctaataccgcataatgcagttgggccgcatggctctgactgccaaagatttatcgctctgagatggcctcgcgtctgattaggtagttggcggggtaacggcccaccaagccgacgatcagtagccggactgagaggttggccggccacattgggactgagacacggcccagactcctacgggaggcagcagtggggaatattgggcaatgggcgcaagcctgacccagcaacgccgcgtgaaggaagaaggctttcgggttgtaaacttcttttcttggggacgaagaaagtgacggtacccaaggaataagccacggctaactacgtgccagcagccgcggtaatacgtaggtggcaagcgttatccggatttattgggtgtaaagggcgtgtaggcgggattgcaagtcagatgtgaaaaccacgggctcaacctgtggcctgcatttgaaactgtagttcttgagtgctggagaggcaatcggaattccgtgtgtagcggtgaaatgcgtagatatacggaggaacaccagtggcgaaggcggattgctggacagtaactgacgctgaggcgcgaaagcgtggggagcaaacaggattagataccctggtagtccacgccgtaaacgatggatactaggtgtggggggactgaccccttccgtgccgcagttaacacaataagtatcccacctggggagtacgatcgcaaggttgaaactcaaaggaattgacgggggcccgcacaagcggtggagtatgtggtttaattcgaagcaacgcgaagaaccttaccagggcttgacatcctactaacgaggtagagatacgttaggtgcccttcggggaaagtagagacaggtggtgcatggttgtcgtcagctcgtgtcgtgagatgttgggttaagtcccgcaacgagcgcaacccttattgttagttgctacgcaagagcactctagcgagactgccgttgacaaaacggaggaaggtggggacgacgtcaaatcatcatgccccttatgtcctgggccacacacgtactacaatggcggctaacagagagaggctaagccgcgaggtggagcaaatctccaaaagccgtcccagttcggatcgcaggctgcaacccgcctgcgtgaagttggaatcgctagtaatcgcggatcagcatgccgcggtgaatacgttcccgggccttgtacacaccgcccgtcacaccatgagagtcggggacacccgaagtccgtagtctaaccgcaaggggggcgcggccgaaggtggattcgataattggggtgaagtcgtaacaaggtaacc

SEQ ID NO: 2270 - DNA, 1413 bp, Artificial Sequence; identical to SEQ ID NO: 38
  Synthetic polymer

SEQ ID NO: 2271 - DNA, 1382 bp, Artificial Sequence; identical to SEQ ID NO: 634
  Synthetic polymer

SEQ ID NO: 2272 - DNA, 1493 bp, Artificial Sequence; identical to SEQ ID NO: 828
  Synthetic polymer

SEQ ID NO: 2273 - DNA, 1394 bp, Artificial Sequence; identical to SEQ ID NO: 356
  Synthetic polymer

SEQ ID NO: 2274 - DNA, 1354 bp, Artificial Sequence
  Synthetic polymer
gatgaacgctggcggcgtgcttaacacatgcaagtcgagcgaagcaccttgacggatttcttcggattgaagccttggtgactgagcggcggacgggtgagtaacgcgtgggtaacctgcctcatacagggggataacagttggaaacggctgctaataccgcataagcgcacagtaccgcatggtacggtgtgaaaaactccggtggtatgagatggacccgcgtctgattagctagtaggcggggtaacggcccacctaggcgacgatcagtagccggactgagaggttgaccggccacattgggactgagacactgcccagactcctacgggaggcagcagtggggaatattgggcaatgggcgcaagcctgacccagcaacgccacgtgaaggaagaaggctttcgggttgtaaacttcttttgtcggggacgaaacaaatgacggtacccgacgaataagccacggctaactacgtgccagcagccgcggtaatacgtaggtggcaagcgttatccggatttactgggtgtaaagggcgtgtaggcgggattgcaagtcagatgtgaaaactgggggctcaacctccagcctgcatttgaaactgtagttcttgagtgctggagaggcaatcggaattccgtgtgtagcggtgaaatgcgtagatatacggaggaacaccagtggcgaaggcggattgctggacagtaactgacgctgaggcgcgaaagcgtggggagcaaacaggattagataccctggtagtccacgccgtaaacgatggatactaggtgtggggggtctgaccccctccgtgcccgcagttaacacaataagtatcccacctggggagtacgatcgcaaggttgaaactcaaaggaattgacgggggcccgcacaagcggtggagtatgtggtttaattcgaagcaacgcgaagaaccttaccagggcttgacatcccactaacgaagcagagatgcattaggtgcccttcggggaaagtggagacaggtggtgcatggttgtcgtcagctcgtgtcgtgagatgttgggttaagtcccgcaacgagcgcaacccttattgttagttgctacgcaagagcactctagcgagactgccgttgacaaaacggaggaaggtggggacgacgtcaaatcatcatgccccttatgtcctgggccacacacgtactacaatggtggttaacagagggaggcaataccgcgaggtggagcaaatccctaaaagccatcccggttcggattgcaggctgaaacccgcctgtatgaagttggaaatcgctagtaatcgcgaatcagcgtgccgcggtaaatacgttcccgggcct

SEQ ID NO: 2275 - DNA, 1454 bp, Artificial Sequence
  Synthetic polymer
gatgaacgctggcggcgtgcttaacacatgcaagtcgaacggagagcgtatgacagaggattcgtccaatggattacgtttcttagtggcggacgggtgagtaacgcgtgaggaacctgccttggagtggggaataacagttggaaacagctgctaataccgcataatgcagttgagtcgcatgactctgactgccaaagatttatcgctctgagatggcctcgcgtctgattagctagttggcggggtaacggcccaccaaggcgacgatcagtagccggactgagaggttggccggccacattgggactgagacacggcccagactcctacgggaggcagcagtggggaatattgggcaatgggcgcaagcctgacccagcaacgccgcgtgaaggaagaaggctttcgggttgtaaacttcctttgtcagggacgaagcaagtgacggtacctgacgaataagctccggctaactacgtgccagcagccgcggtaatacgtagggagcaagcgttatccggatttactgggtgtaaagggcgtgtaggcgggattgtaagtcagatgtgaaaaccaggggctcaacctctggcctgcatttgaaactgcagttcttgagtactggagaggcagacggaattcctagtgtagcggtgaaatgcgtagatattaggaggaacaccagtggcgaaggcggtctgctggacagcaactgacgctgaggcgcgaaagcgtggggagcaaacaggattagataccctggtagtccacgctgtaaacgatggatactaggtgtggggggtctgaccccctccgtgccgcagttaacacaataagtatcccacctggggagtacgatcgcaaggttgaaactcaaaggaattgacgggggcccgcacaagcggtggagtatgtggtttaattcgaagcaacgcgaagaaccttaccagggcttgacatcccgaggccagacctagagataggtccttctcttcggggacctcggtgacaggtggtgcatggttgtcgtcagctcgtgtcgtgagatgttgggttaagtcccgcaacgagcgcaacccttattgttagttgctacgcaagagcactctagcgagactgccgttgacaaaacggaggaaggtggggacgacgtcaaatcatcatgccccttatgtcctgggccacacacgtactacaatggtggtcaacagagggaggcaaaaccgcgaggtggagcaaacccctaaaagccatcccagttcggattgcaggctgcaacccgcctgcatgaagttggaatcgctagtaatcgcggatcagcatgccgcggtgaatacgttcccgggccttgtacacaccgcccgtcacaccatgagagtcgggaacacccgaagtccgtagcctaaccgcaaggggggcgcggccgaaggtgggttcgataattggggtga

SEQ ID NO: 2276 - DNA, 1494 bp, Artificial Sequence; identical to SEQ ID NO: 486
  Synthetic polymer

SEQ ID NO: 2277 - DNA, 1481 bp, Artificial Sequence; identical to SEQ ID NO: 622
  Synthetic polymer

SEQ ID NO: 2278 - DNA, 1401 bp, Artificial Sequence; identical to SEQ ID NO: 528
  Synthetic polymer

SEQ ID NO: 2279 - DNA, 1388 bp, Artificial Sequence
  Synthetic polymer
agagtttgatcctggctcaggatgaacgctggcggcgtgcttaacacatgcaagtcgaacggagtgcccatgacagaggattcgtccaatggattgggttacttagtggcggacgggtgagtaacgcgtgaggaacctgcctcggagtggggaataacacaacgaaagctgtgctaataccgcatgatacagttgggtcgcatgactctgactgtcaaagatttatcgctctgagatggcctcgcgtctgattagctagttggtggggtaacggcccaccaaggcgacgatcagtagccggactgagaggttgaccggccacattgggactgagacacggcccagactcctacgggaggcagcagtggggaatattgggcaatgggcgcaagcctgacccagcaacgccgcgtgaaggaagaaggctttcgggttgtaaacttcttttctcagggacgaagcaagtgacggtacctgaggaataagccacggctaactacgtgccagcagccgcggtaatacgtaggtggcaagcgttatccggatttactgggtgtaaagggcgtgtaggcgggatcgcaagtcagatgtgaaaactggaggctcaacctccagcctgcatttgaaactgtggttcttgagtactggagaggcagacggaattcctagtgtagcggtgaaatgcgtagatattaggaggaacaccagtggcgaaggcggtctgctggacagcaactgacgctgaggcgcgaaagcgtggggagcaaacaggattagataccctggtagtccacgctgtaaacgatgattactaggtgtgggggatttcggtcctccgtgccggagcaaacgcaataagtaatccacctggggagtacggccgcaaggctgaaactcaaaggaattgacgggggcccgcacaagcagtggattatgtggtttaattcgaagcaacgcgaagaaccttaccaggtcttgacatccgatgcatagctcagagatgagtgaaatcccttcggggacatcgagacaggtggtgcatggttgtcgtcagctcgtgtcgtgagatgttgggttaagtcccgcaacgagcgcaacccctattgatagttgctacgcgagagcactctatcgagactgccgttgacaaaacggaggaaggtggggatgacgtcaaatcatcatgccctttatgacctgggctacacacgtaatacaatggcgcaaaacagagggaagcaagaccgcgaggtggagcaaaaccctaaaaggcgtcttagttcagattgcaggctgcaactcgcctgcatgaaggtggaattgctagtaatcgcggatcagcatgccgcggtgaatacgttcccgggccttgcacacaccgcccgtca

SEQ ID NO: 2280 - DNA, 1442 bp, Artificial Sequence
  Synthetic polymer
acgctggcggcgtgcttaacacatgcaagtcgaacggagcacccttgactgaggtttcggccaaatgataggaatgcttagtggcggactggtgagtaacgcgtgaggaacctaccttccagaggaggacaacagttggaaacgactgctaataccgcatgacgcatgaccggggcatcccgggcatgtcaaagattttatcgctggaagatggcctcgcgtctgattagctagatggtggggtaacggcccaccatggcgacgatcagtagccggactgagaggttgaccggccacattgggactgagatacggcccagactcctacgggaggcagcagtggggaatattgggcaatggacgcaagtctgacccagcaacgccgcgtgaaggaagaaggctttcgggttgtaaacttcttttgtcagggaagagtagaagacggtacctgacgaataagccacggctaactacgtgccagcagccgcggtaatacgtaggtggcaagcgttgtccggatttactgggtgtaaagggcgtgcagccgggccggcaagtcagatgtgaaatctggaggcttaacctccaaactgcatttgaaactgtaggtcttgagtaccggagaggttatcggaattccttgtgtagcggtgaaatgcgtagatataaggaagaacaccagtggcgaaggcggataactggacggcaactgacggtgaggcgcgaaagcgtggggagcaaacaggattagataccctggtagtccacgctgtaaacgatggatactaggtgtgcggggactgaccccctgcgtgccgcagttaacacaataagtatcccacctggggagtacgatcgcaaggttgaaactcaaaggaattgacgggggcccgcacaagcggtggattatgtggtttaattcgaagcaacgcgaagaaccttaccagggcttgacatcctactaacgaagtagagatacattaggtgcccttcggggaaagtagagacaggtggtgcatggttgtcgtcagctcgtgtcgtgagatgttgggttaagtcccgcaacgagcgcaacccctattgccagttactacgcaagaggactctggcgagactgccgttgacaaaacggaggaaggtggggatgacgtcaaatcatcatgccctttatgacctgggctacacacgtactacaatggcgtttaacaaagagaagcaagaccgcgaggtggagcaaaactcaaaaacaacgtctcagttcagattgcaggctgcaactcgcctgcatgaagtcggaattgctagtaatcgcggatcagcatgccgcggtgaatacgttcccgggccttgtacacaccgcccgtcacaccatgagagctggggggacccgaagtcggtagtctaaccgcaaggaggacgccgccgaaggtaaaactggtgat

SEQ ID NO: 2281 - DNA, 1394 bp, Artificial Sequence
  Synthetic polymer
agagtttgatcctggctcaggatgaacgctggcggcgtgcttaacacatgcaagtcgaacggaggacccttgacggagttttcggacaacagataggaatccttagtggcggacgggtgagtaacgcgtgaggaacctgccttggagaggggaataacacagtgaaaattgtgctaataccgcatgatgcagttgagtcgcatggctctgactgccaaagatttatcgctctgagatggcctcgcgtctgattaggtagttggtggggtaacggcccaccaagccgacgatcagtagccggactgagaggttgaccggccacattgggactgagacacggcccagactcctacgggaggcagcagtggggaatattgggcaatgggcgcaagcctgacccagcaacgccgcgtgaaggaagaaggctttcgggttgtaaacttcttttgtcagggacgaaacaaatgacggtacctgacgaataagccacggctaactacgtgccagcagccgcggtaatacgtaggtggcaagcgttatccggatttactgggtgtaaagggcgtgtaggcgggagtgcaagtcagatgtgaaaattatgggctcaacccataacctgcatttgaaactgtacttcttgagtactggagaggcaggcggaattccgtgtgtagcggtgaaatgcgtagatatacggaggaacaccagtggcgaaggcggcctgctggacagcaactgacgctgaggcgcgaaagcgtggggagcaaacaggattagataccctggtagtccacgctgtaaacgatggatactaggtgtggggggactgaccccctccgtgccgcagttaacacaataagtatcccacctggggagtacgatcgcaaggttgaaactcaaaggaattgacgggggcccgcacaagcggtggagtatgtggtttaattcgaagcaacgcgaagaaccttaccaagtcttgacatcccactgaccaagtatgtaatgtactttctcttcggagcagtggtgacaggtggtgcatggttgtcgtcagctcgtgtcgtgagatgttgggttaagtcccgcaacgagcgcaacccctattcttagtagccagcggttcggccgggcactctagggagactgccagggataacctggaggaaggtggggatgacgtcaaatcatcatgccccttatgacttgggctacacacgtgctacaatggcgtaaacaaagggaagcaatcccgcgagggggagcaaatctcaaaaataacgtctcagttcggactgtagtctgcaactcgactacacgaagctggaatcgctagtaatcgcgaatcagaatgtcgcggtgaatacgttcccgggtcttgtacacaccgcccgtca

SEQ ID NO: 2282 - DNA, 1352 bp, Artificial Sequence; identical to SEQ ID NO: 630
  Synthetic polymer

SEQ ID NO: 2283 - DNA, 1362 bp, Artificial Sequence; identical to SEQ ID NO: 549
  Synthetic polymer

SEQ ID NO: 2284 - DNA, 1395 bp, Artificial Sequence
  Synthetic polymer
ttcgcccttagagtttgatcctggctcaggatgaacgctggcggcgtgcttaacacatgcaagtcgaacggagtacccttgaaggagttttcggacaactgataggactacttagtggcggacgggtgagtaacgcgtgagtaacctgccttggagtggggaataacagctggaaacagctgctaataccgcatgatatgtctgaatcgcatggttctggacatcaaagacttatcgctctgagatggactcgcgtctgattagctagttggcggggtaacggcccaccaaggcgacgatcagtagccggactgagaggttggccggccacattgggactgagacacggcccagactcctacgggaggcagcagtggggaatattgggcaatgggcgcaagcctgacccagcaacgccgcgtgaaggaagaaggctttcgggttgtaaacttcttttctcagggacgaagaaagtgacggtacctgaggaataagccacggctaactacatgccagcagccgcggtaatacgtaggtggcaagcgttatccggatttactgggtgtaaagggcgtgtaggcgggactgcaagtcagatgtgaaaattatgggctcaacccataacctgcatttgaaactgtagttcttgagtgatggagaggcaggcggaattccgtgtgtagcggtgaaatgcgtagatatacggaggaacaccagtggcgaaggcggcctgctggacattaactgacgctgaggcgcgaaagcgtggggagcaaacaggattagataccctggtagtccacgctgtaaacgatggatactaggtgtggggggactgaccccctccgtgccgcagttaacacaataagtatcccacctggggtgtacgatcgcaaggttgaaactcaaaggaattgacgggggcccgcacaagcggtggagtatgtggtttaattcgaagcaacgcgaagaaccttaccagggcttgacatcccggtgaccggtgtagagatacaccttcttcttcggaagcgccggtgacaggtggtgcatggttgtcgtcagctcgtgtcgtgagatgttgggttaagtcccgcaacgagcgcaacccttattgttagttgctacgcaagagcactctagcgagactgccgttgacaaaacggaggaaggtggggacgacgtcaaatcatcatgccccttatgtcctgggccacacacgtactacaatggtggttaacagagggaagcaataccgcgaggtggagcaaatccctaaaagccatcccagttcggatcgcaggctgcaacccgcctgcgtgaagttggaatcgctagtaatcgcggatcagcatgccgcggtgaatacgttcccgggccttgcactcaccgccc

SEQ ID NO: 2285 - DNA, 1488 bp, Artificial Sequence; identical to SEQ ID NO: 835
  Synthetic polymer
  misc_feature (1472)..(1472): n is a, c, g, or t

SEQ ID NO: 2286 - DNA, 1492 bp, Artificial Sequence
  Synthetic polymer
agagtttgatcatggctcaggatgaacgctggcggcgtgcttaacacatgcaagtcgaacggagccacctggaacaagttttcggacaagggaaaggtgtgcttagtggcggacgggtgagtaacgcgtgagtaacctgccttggagtggggaataacacatcgaaaggtgtgctaataccgcataatgcaacgagatcgcatggttttgttgccaaagatttatcgctctgagatggactcgcgtctgattagctagttggtgaggtagtggctcaccaaggcgacgatcagtagccggactgagaggttgaccggccacattgggactgagacacggcccagactcctacgggaggcagcagtggggaatattgggcaatgggcgcaagcctgacccagcaacgccgcgtgaaggaagaaggccctcgggttgtaaacttcttttattcgagacgaaacaaatgacggtaccgaatgaataagccacggctaactacgtgccagcagccgcggtaatacgtaggtggcaagcgttatccggatttactgggtgtaaagggcgtgtaggcgggactgcaagtcagatgtgaaattccagggctcaaccctggacctgcatttgaaactgtggttcttgagtgatggagaggcaggcggaattccgagtgtagcggtgaaatgcgtagatattcggaggaacaccagtggcgaaggcggcctgctggacattaactgacgctgaggcgcgaaagcgtggggagcaaacaggattagataccctggtagtccacgccgtaaacgatggatactaggtgtggggggactgaccccttccgtgccgcagttaacacaataagtatcccacctggggagtacgatcgcaaggttgaaactcaaaggaattgacgggggcccgcacaagcggtggagtatgtggtttaattcgaagcaacgcgaagaaccttaccagggcttgacatccctctgaccggtctagagataggccttctcttcggagcagaggtgacaggtggtgcatggttgtcgtcagctcgtgtcgtgagatgttgggttaagtcccgcaacgagcgcaacccctattgttagttgctacgcaagagcactctagcgagactgccgttgacaaaacagaggaaggtggggacgacgtcaaatcatcatgccccttatgtcctgggctacacacgtactacaatggcgcttaacagagggaggcaataccgcgaggtggagcaaacccctaaaaggcgtcccagttcggattgcaggctgaaactcgcctgtatgaagttggaatcgctagtaatcgcggatcagcatgccgcggtgaatacgttcccgggccttgtacacaccgcccgtcacaccatgagagtcgggaacacccgaagtccgtagcctaacagcaatgagggcgcggccgaaggtgggttcgataattggggtgaagtcgtaacaaggtagccgta

SEQ ID NO: 2287 - DNA, 1395 bp, Artificial Sequence
  Synthetic polymer
agagtttgatcatggctcaggatgaacgctggcggcgtgcttaacacatgcaagtcgaacggggtgccttagaaagaggattcgtccaattgataaggttacctagtggcggacgggtgagtaacgcgtgagtaacctgccctggagtggggaataacagctggaaacagctgctaataccgcataatgcagttgggtcgcatggctctgactgccagagatttatcgctctgggatggactcgcgtctgattagctagttggtggggtaacggcccaccaaggcgacgatcagtagccggactgagaggttggccggccacattgggactgagacacggcccagactcctacgggaggcagcagtggggaatattgggcaatgggcgcaagcctgacccagcaacgccgcgtgaaggaagaaggctttcgggttgtaaacttcttttgtcagggacgaagcaagtgacggtacctgacgaataagccacggctaactacgtgccagcagccgcggtaatacgtaggtggcaagcgttatccggatttactgggtgtaaagggcgtgtaggcggggaggcaagtcagatgtgaaaaccacgggctcaacctgtggcctgcatttgaaactgtttttcttgagtgctggagaggcaatcggaattccgtgtgtagcggtgaaatgcgtagatatacggaggaacaccagtggcgaaggcggattgctggacagtaactgacgctgaggcgcgaaagcgtggggagcaaacaggattagataccctggtagtccacgctgtaaacgatggatactaggtgtggggggtctgaccccctccgtgccgcagttaacacaataagtatcccacctggggagtacgatcgcaaggttgaaactcaaaggaattgacgggggcccgcacaagcggtggagtatgtggtttaattcgaagcaacgcgaagaaccttacctggtcttgacatccccctggatatccggcaatgcggataggcccatatgggacaggggagacaggtggtgcatggttgtcgtcagctcgtgtcgtgagatgttgggttaagtcccgcaacgagcgcaacccttatccttagtagccagcgagagagacgggcactctagggagactgccggggataacccggaggaaggtggggatgacgtcaaatcatcatgccccttatggccagggctacacacgtgctacaatggcgtaaacaaagggaagcggaccggcgacggcgagcgaatcccagaaataacgtcccagttcggattgtagtctgcaacccgactacatgaagctggaatcgctagtaatcgcggatcagaatgccgcggtgaatacgttcccgggtcttgtacacaccgcccgtc

SEQ ID NO: 2288 - DNA, 1431 bp, Artificial Sequence
  Synthetic polymer
gatgaacgctggcggcgtgcctaacacatgcaagtcgaacgaagaaccaatgacgaagttttcggacaactgatttggtttcttagtggcggacgggtgagtaacgcgtgagtaacctgcctcggagtggggaataacagctggaaacagttgctaataccgcatgatgcagcgagaggacatcctcttgctgccaaagatttatcgctctgagatggactcgcgtctgattagctagttggcggggtaatggcccaccaaggcgacgatcagtagccggactgagaggttgaccggccacattgggactgagatacggcccagactcctacgggaggcagcagtggggaatattgggcaatgggcgaaagcctgacccagcaacgccgcgtgaaggaagaaggccctcgggttgtaaacttcttttatcagagacgaaaaaaatgacggtacctgatgaataagccacggctaactacgtgccagcagccgcggtaatacktaggtggcaagcgttatccggatttactgggtgtaaagggcgtgtaggcgggactgcaagtcagatgtgaaaactatgggctcaacccatagcctgcatttgaaactgtggttcttgagtgatggagaggcaggcggaattccgtgtgtagcggtgaaatgcgtagatatacggaggaacaccagtggcgaaggcggcctgctggacattaactgacgctgaggcgcgaaagcgtggggagcaaacaggattagataccctggtagtccacgctgtaaacgatggatactaggtgtggggggtctgaccccctccgtgccgcagttaacacaataagtatcccacctggggagtacgatcgcaaggttgaaactcaaaggaattgacgggggcccgcacaagcggtggagtatgtggtttaattcgaagcaacgcgaagaaccttaccagggcttgacatcctactaacgaagcagagatgcattaggtgcccttcggggaaagtagagacaggtggtgcatggttgtcgtcagctcgtgtcgtgagatgttgggttaagtcccgcaacgagcgcaacccttattgctagttgctacgcaagagcactctagcgagactgccgttgacaaaacggaggaaggtggggacgacgtcaaatcatcatgccccttatgtcctgggccacacacgtactacaatggcggttaacagagggatgcaataccgcgaggtggagcaaatccctaaaagccgtcccagttcggattgcaggctgaaacccgcctgcatgaagttggaatcgctagtaatcgcggatcagcatgccgcggtgaatacgttcccgggccttgtacacaccgcccgtcacaccatgagagtcgggaacacccgaagtccgtagcctaaccgcaaggggggcgcggccgaa

SEQ ID NO: 2289 - DNA, 1394 bp, Artificial Sequence; identical to SEQ ID NO: 420
  Synthetic polymer

SEQ ID NO: 2290 - DNA, 1388 bp, Artificial Sequence
  Synthetic polymer
ttagagtttgatcctggctcaggacgaactttggcggcgtgcttaacacatgcaagtcgaacggagcgcttctgaaagagatttcggtcaatggatgaagttgcttagtggcggactggtgagtaacgcgtgaggaacctgcctttcagagggggacaacagttggaaacgactgctaataccgcatgaaacatttgggcggcatcgcttgaatgtcaaagatttatcgctgaaagatggcctcgcgtccgattagatagttggcggggtaacggcccaccaagtcgacgatcggtagccggactgagaggttgaccggccacattgggactgagatacggcccagactcctacgggaggcagcagtggggaatattgggcaatggacgcaagtctgacccagcaacgccgcgtgaaggaagaaggctttcgggttgtaaacttcttttgtcagggaagagcagaagacggtacctgacgaataagccacggctaactacgtgccagcagccgcggtaatacgtaggtggcaagcgttgtccggatttactgggtgtaaagggcgtgcagccggagagacaagtcagatgtgaaatccgcgggctcaacccgcgaactgcatttgaaactgtttcccttgagtgtcggagaggtaatcggaattcctagtgtagcggtgaaatgcgtagatattaggaagaacaccagtggcgaaggcggattactggacgataactgacggtgaggcgcgaaagcgtggggagcaaacaggattagataccctggtagtccacgctgtaaacgatcaatactaggtgtgcggggactgaccccctgcgtgccgcagttaacacaataagtattgcacctggggagtacgatcgcaaggttgaaactcaaaggaattgacgggggcccgcacaagcggtggattatgtggtttaattcgaagcaacgcgaagaaccttaccagggcttgacatggggatgaccggtctagagatagaccttctcttcggagcatcccacacaggtggtgcatggttgtcgtcagctcgtgtcgtgagatgttgggttaagtcccgcaacgagcgcaacccctattgttagttgctacgcaagagcactctagcgagactgccgttgacaaaacggaggaaggtggggacgacgtcaaatcatcatgccccttatgtcctgggctacacacgtaatacaatggcggtcaacagagggaggcaaagccgcgaggcagagcaaacccctaaaagccgtcccagttcggattgcaggctgcaactcgcctgcatgaagtcggaatcgctagtaatcgcggatcagcatgccgcggtgaatacgttcccgggccttgcactcaccgcccgtca

SEQ ID NO: 2291 - DNA, 1457 bp, Artificial Sequence; identical to SEQ ID NO: 998
  Synthetic polymer

SEQ ID NO: 2292 - DNA, 1399 bp, Artificial Sequence; identical to SEQ ID NO: 526
  Synthetic polymer

SEQ ID NO: 2293 - DNA, 1496 bp, Artificial Sequence; identical to SEQ ID NO: 856
  Synthetic polymer

SEQ ID NO: 2294 - DNA, 1397 bp, Artificial Sequence; identical to SEQ ID NO: 442
  Synthetic polymer

SEQ ID NO: 2295 - DNA, 1404 bp, Artificial Sequence
  Synthetic polymer
ttcgcccttagagtttgatcctggctcaggatgaacgctggcggcgtgcttaacacatgcaagtcgaacggagcacccctgatggagttttcggacaacagatgggaatgcttagtggcggacgggtgagtaacgcgtgaggaacctgccttggagaggggaataacacagtgaaaattgtgctaataccgcatgacgcagttgggtcgcatggctctgactgccaaagatttatcgctctgagatggcctcgcgtctgattagctggttggtggggcaacggcccaccaaggcgacgatcagtagccggactgagaggttgaccggccacattgggactgagacacggcccagactcctacgggaggcagcagtggggaatattgggcaatgggcgcaagcctgacccagcaacgccgcgtgaaggaagagggctttcgggttgtaaacttcttttatgagggacgaaacaaatgacggtacctcatgaataagccacggctaactacgtgccagcagccgcggtaatacgtaggtggcaagcgttatccggatttactgggtgtaaagggcgtgtaggcgggactgcaagtcagatgtgaaaattatgggctcaacccataacctgcatttgaaactgtagttcttgagtgatggagaggcaggcggaattccgtgtgtagcggtgaaatgcgtagatatacggaggaacaccagtggcgaaggcggcctgctggacattaactgacgctgaggcgcgaaagcgtggggagcaaacaggattagataccctggtagtccacgctgtaaacgatggatactaggtgtgcggggtctgaccccctgcgtgccgcagctaacgcaataagtatcccacctggggagtacgatcgcaaggttgaaactcaaaggaattgacgggggcccgcacaagcggtggagtatgtggtttaattcgaagcaacgcgaagaaccttacccggccttgacatcctcccgaatagagagtaatgtctttagcccttcggggcgggagagacaggtggtgcatggttgtcgtcagctcgtgtcgtgagatgttgggttaagtcccgcaacgagcgcaacccctgccgtcagtagccagcaggtaaagctgggcactctgatgggacagcctgggataaccaggaggaaggcggggacgacgtcaaatcatcatgccccttatggccggggctacacacgtgctacaatggcgtaaacagagggaagcgagacagcgatgtagagcaaagcccaaaaataacgcctcagttcggattgcagcctgcaactcggctgcatgaagccggaatcgctagtaatcgcgaatcagaatgtcgcggtgaatacgttcccgggtcttgcactcaccacccgtca

SEQ ID NO: 2296 - DNA, 1402 bp, Artificial Sequence
  Synthetic polymer
ttcgcccttagagtttgttcctggctcaggatgaacgctgcggcgtgcttaacacatgcaagtcgaacggggtgcctttgacagaggattcgtccaatggatagggttacctagtggcggacgggtgagtaacgcgtgagtaacctgccctggagtggggaataacagctggaaacagctgctaataccgcataatgcagttgggtcgcatggctctgactgccaaagatttatcgctctgggatggactcgcgtctgattagctagttggtggggtaacggcccaccaaggcgacgatcagtagccggactgagaggttggccggccacattgggactgagacacggcccagactcctacgggaggcagcagtggggaatattgggcaatgggcgcaagcctgacccagcaacgccgcgtgaaggaagaaggctttcgggttgtaaacttcttttgtcagggacgaagcaagtgacggtacctgacgaataagccacggctaactacgtgccagcagccgcggtaatacgtaggtggcaagcgttatccggatttactgggtgtaaagggcgtgtaggcggggaagcaagtcagatgtgaaaaccacgggctcaacctgtggcctgcatttgaaactgtttctcttgagtgctggagaggcaatcggaattccgtgtgtagcggtgaaatgcgtagatatacggaggaacaccagtggcgaaggcggattgctggacagtaactgacgctgaggcgcgaaagcgtggggagcaaacaggattagataccctggtagtccacgctgtaaacgatggatactaggtgtggggggtctgaccccttccgtgccgcagttaacacaataagtatcccacctggggagtacgatcgcaaggttgaaactcaaaggaattgacgggggcccgcacaagcggtggagtatgtggtttaattcgaagcaacgcgaagaaccttaccagggcttgacatcccggcgaccggcctagagataggctttcccttcggggcgccggagacaggtggtgcatggttgtcgtcagctcgtgtcgtgagatgttgggttaagtcccgcaacgagcgcaacccttatccttagtagccagcacttcgggtgggcactctagggagactgccagggataacctggaggaaggtggggacgacgtcaaatcatcgtgccccttatgtcctgggctacacacgtactacaatggtggttaacagagggaggcaaagccgcgaggtggagcaaatccctaaaagccatcccagttcggattgcaggctgcaacccgcctgcatgaagttggaatcgctagtaatcgcggatcagcatgccgcggtgaatacgttcccgggccttgcactcaccgcccgtca

SEQ ID NO: 2297 - DNA, 1442 bp, Artificial Sequence; identical to SEQ ID NO: 983
  Synthetic polymer

SEQ ID NO: 2298 - DNA, 1476 bp, Artificial Sequence; identical to SEQ ID NO: 906
  Synthetic polymer

SEQ ID NO: 2299 - DNA, 1400 bp, Artificial Sequence; identical to SEQ ID NO: 129
  Synthetic polymer

SEQ ID NO: 2300 - DNA, 1392 bp, Artificial Sequence; identical to SEQ ID NO: 676
  Synthetic polymer

SEQ ID NO: 2301 - DNA, 1393 bp, Artificial Sequence; identical to SEQ ID NO: 196
  Synthetic polymer

SEQ ID NO: 2302 - DNA, 1487 bp, Artificial Sequence; identical to SEQ ID NO: 76
  Synthetic polymer

SEQ ID NO: 2303 - DNA, 1496 bp, Artificial Sequence; identical to SEQ ID NO: 850
  Synthetic polymer

SEQ ID NO: 2304 - DNA, 1452 bp, Artificial Sequence
  Synthetic polymer
gacgaacgctggcggcgtgcttaacacatgcaagtcgaacggagtgcccatgaaagaggtttcggccaatagattgggttacttagtggcggactggtgagtaacgcgtgaggaacctgcctttcagagggggacaacagttggaaacgactgctaataccgcatgacacattgagggggcatccctttgatgtcaaagatttatcgctgaaagatggcctcgcgtctgattagctggttggtgaggtaatggcccaccaaggcgacgatcagtagccggactgagaggttgaccggccacattgggactgagatacggcccagactcctacgggaggcagcagtggggaatattgggcaatggacgcaagtctgacccagcaacgccgcgtgaaggaagaaggctttcgggttgtaaacttcttttgtcagggaacagtagaagagggtacctgacgaataagccacggctaactacgtgccagcagccgcggtaatacgtaggtggcaagcgttgtccggatttactgggtgtaaagggcgtgtagccgggaagacaagtcagatgtgaaatctggaggctcaacctccaaactgcatttgaaactgtttttcttgagtatcggagaggtaatcggaattcctagtgtagcggtgaaatgcgtagatattaggaagaacaccagtggcgaaggcggattactggacgacaactgacggtgaggcgcgaaagcgtggggagcaaacaggattagataccctggtagtccacgctgtaaacgatcaatactaggtgtgcggggactgaccccctgcgtgccgcagttaacacaataagtattgcacctggggagtacgatcgcaaggttgaaactcaaaggaattgacgggggcccgcacaagcggtggattatgtggtttaattcgaagcaacgcgaagaaccttaccaggacttgacatcctactaacgaaacagagatgtatcaggtgcccttcggggaaagtagagacaggtggtgcatggttgtcgtcagctcgtgtcgtgagatgttgggttaagtcccgcaacgagcgcaacccctattgttagttgctacgcaagagcactctagcgagactgccgttgacaaaacggaggaaggtggggacgacgtcaaatcatcatgccccttatgtcctgggctacacacgtaatacaatggcggtcaacaaagggaggcaaagccgcgaggcagagcaaacccccaaaagccgtcccagttcggattgcaggctgcaacccgcctgcatgaagtcggaatcgctagtaatcgcggatcagcatgccgcggtgaatacgttcccgggccttgtacacaccgcccgtcacaccatgagagtcgggaacacccgaagtccgcagcctaaccgcaaggagggcacggccgaaggtgggttcgataattggggtg

SEQ ID NO: 2305 - DNA, 1386 bp, Artificial Sequence
  Synthetic polymer
agagtttgatcctggctcaggatgaacgctggcggcgtgcttaacacatgcaagtcgaacggaggacccttgacggagttttcggacaacagataggaatccttagtggcggacgggtgagtaacgcgtgaggaacctgccttggagaggggaataacacagtgaaaattgtgctaataccgcatgaagcagttgagtcgcatggctctgactgccaaagatttatcgctctgagatggcctcgcgtctgattaggtagttggtggggtaacggcccaccaagccgacgatcagtagccggactgagaggttgaccggccacattgggactgagacacggcccagactcctacgggaggcagcagtggggaatattgggcaatgggcgcaagcctgacccagcaacgccgcgtgaaggaagaaggctttcgggttgtaaacttcttttgtcagggacgaaacaaatgacggtacctgacgaataagccacggctaactacgtgccagcagccgcggtaatacgtaggtggcaagcgttatccggatttactgggtgtaaagggcgtgtaggcgggagtgcaagtcagatgtgaaaattatgggctcaacccataacctgcatttgaaactgtacttcttgagtactggagaggcaggcggaattccgtgtgtagcggtgaaatgcgtagatatacggaggaacaccagtggcgaaggcggcctgctggacagcaactgacgctgaggcgcgaaagcgtggggagcgaacaggattagataccctggtagtccacgccgtaaacgatgaatactaggtgtggggggactgaccccttccgtgccgcagttaacacaataagtaatccacctggggagtacggccgcaaggttgaaactcaaaggaattgacgggggcccgcacaagcagtggagtatgtggtttaattcgaagcaacgcgaaaaaccttaccaggtcttgacatcgagtgaatgatctagagatagatcagtccttcgggacacaaagacaggtggtgcatggttgtcgtcagctcgtgtcgtgagatgttgggttaagtcccgcaacgagcgcaacccttacctttagttgctacgcaagagcactctagagggactgccgttgacaaaacggaggaaggtggggatgacgtcaaatcatcatgccccttatgacctgggctacacacgtactacaatggcaatgaacagagggaagcaatacagtgatgtggagcaaatccccaaaaattgtcccagttcagattgtaggctgcaactcgcctacatgaagtcggaattgctagtaatcgcagatcagcatgctgcggtgaatacgttcccgggccttgcacacaccgcccgtca

SEQ ID NO: 2306 - DNA, 1400 bp, Artificial Sequence; identical to SEQ ID NO: 1025
  Synthetic polymer

SEQ ID NO: 2307 - DNA, 1376 bp, Artificial Sequence; identical to SEQ ID NO: 125
  Synthetic polymer

SEQ ID NO: 2308 - DNA, 1452 bp, Artificial Sequence
  Synthetic polymer
gacgaacgctggcggcgtgcttaacacatgcaagtcgaacggagcacccttgactgaggtttcggccaaatgataggaatgcttagtggcggactagtgagtaacgcgtgaggaacctgccttccagagggggacaacagttggaaacgactgctaataccgcatgatatatttgaggggcatcccttggatatcaaagattatatcgctggaagatggcctcgcgtctgattagctagatggtggggtaacggcccaccatggcgacgatcagtagccggactgagaggttgaccggccacattgggactgagatacggcccagactcctacgggaggcagcagtggggaatattgggcaatggacgcaagtctgacccagcaacgccgcgtgaaggaagaaggctttcgggttgtaaacttcttttgtcagggaacagtagaagagggtacctgacgaataagccacggctaactacgtgccagcagccgcggtaatacgtaggtggcaagcgttgtccggatttactgggtgtaaagggcgtgcagccgggccggcaagtcagatgtgaaatctggaggcttaacctccaaactgcatttgaaactgttggtcttgagtaccggagaggttatcggaattccttgtgtagcggtgaaatgcgtagatataaggaagaacaccagtggcgaaggcggataactggacggcaactgacggtgaggcgcgaaagcgtgggagcaaacaggattagataccctggtagtccacgctgtaaacgatggatactaggtgtgcggggactgaccccctgcgtgccgcagttaacacaataagtatcccacctggggagtacgatcgcaaggttgaaactcaaaggaattgacgggggcccgcacaagcggtggattatgtggtttaattcgaagcaacgcgaagaaccttaccagggcttgacatcctactaacgaagtagagatacatcaggtgcccttcggggaaagtagagacaggtggtgcatggttgtcgtcagctcgtgtcgtgagatgttgggttaagtcccgcaacgagcgcaacccctattgttagttgctacgcaagagcactctagcgagactgccgttgacaaaacggaggaaggtggggacgacgtcaaatcatcatgccccttatgtcctgggctacacacgtaatacaatggcggtcaacagagggaggcaaagccgcgaggcagagcaaacccccaaaagccgtcccagttcggatcgcaggctgcaacccgcctgcgtgaagtcggaatcgctagtaatcgcggatcagcatgccgcggtgaatacgttcccgggccttgtacacaccgcccgtcacaccatgagagtcgggaacacccgaagtccgtagcctaaccgcaaggagggcgcggccgaaggtgggttcgataattggggtg

SEQ ID NO: 2309 - DNA, 1492 bp, Artificial Sequence; identical to SEQ ID NO: 471
  Synthetic polymer

SEQ ID NO: 2310 - DNA, 1381 bp, Artificial Sequence
  Synthetic polymer
agagtttgatcctggctcaggacgaacccttgcggcgtgcctaacacatgcaagtcgaacggagtcggccccgcaagggactgacttagtggcgaacgggtgagtaacgcgtgagcaacctgcctttcagtgggggacaacagttggaaacgactgctaataccgcataatgcattttgatcgcatggtcgagatgccaaagatttattgctgaaagatgggctcgcgtctgattagatagttggtgaggtaacggcccaccaagtcgacgatcagtagccggactgagaggttgaacggccacattgggactgagatacggcccagactcctacgggaggcagcagtggggaatattgggcaatgggggaaaccctgacccagcaacgccgcgtgaaggaagaaggctttcgggttgtaaacttcttttaccagggacgaagaaagtgacggtacctggagaaaaagccacggctaactacgtgccagcagccgcggtaatacgtaggtggcaagcgttgtccggatttactgggtgtaaagggcgtgtaggcggagatgcaagtcagatgtgaaatccccgggcttaacccgggaactgcatttgaaactgtatccccttgagtatcggagaggcaggcggaattcctagtgtagcggtgaaatgcgtagatattaggaggaacaccagtggcgaaggcggcctgctggacgacaactgacgctgaggcgcgaaagcgtggggagcaaacaggattagataccctggtagtccacgctgtaaacgatgaatactaggtgtggggggaactgaccccttcccgtgccgcagttaaacacaataaagtattccacctggggagtacgaccgcaaggttgaaactcaaaggaattgacgggggcccgcacaagcagtggattatgtggtttaattcgaagcaacgcgaagaaccttacctggtcttgacatccttctgaccggtccttaaccggacctttccttcgggacaggagtgacaggtggtgcatggttgtcgtcagctcgtgtcgtgagatgttgggttaagtcccgcaacgagcgcaacccctatctttagtagccagcatttcaggtgggcactctagagagactgccagggataacctggaggaaggtggggacgacgtcaaatcatcatgccccttatgaccagggctacacacgtgctacaatggcgtaaacagagggaagcagcctcgtgagagtgagcaaatcccaaaaataacgtctcagttcggattgtagtctgcaactcgactacatgaagctggaatcgctagtaatcgcgaatcagaatgtcgcggtgaatacgttcccgggtcttgcactaaccgcccgtca

SEQ ID NO: 2311 - DNA, 1477 bp, Artificial Sequence; identical to SEQ ID NO: 560
  Synthetic polymer

SEQ ID NO: 2312 - DNA, 1495 bp, Artificial Sequence
  Synthetic polymer
agagtttgatcctggctcaggacgaacgctggcggcgtgcctaacacgtgcaagtcgaacgaagctccccgatacaaggcttcggccaagttgaagggatgacttagtggcggacgggtgagtaacgcgtgaggaacctgcctttcagtgggggacaacagttggaaacggctgctaataccgcataatgtttctggaccgcatgatctggaaaccaaagctttatgtgctgaaagatggcctcgcgtctgattagatagttggtgaggtaacggcccaccaagtctacgatcagtagccggactgagaggttgaacggccacattgggactgagatacggcccagactcctacgggaggcagcagtggggaatattgggcaatgggggaaaccctgacccagcaacgccgcgtgaaggaagaaggctttcgggttgtaaacttcttttaccagggacgaaggacgtgacggtacctggagaaaaagccacggctaactacgtgccagcagccgcggtaatacgtaagtggcaagcgttgtccggatttactgggtgtaaagggcgtgtaggcgggagagcaagtcagaagtgaaatccatgggcttaacccatgaactgcttttgaaactgttcttcttgagtatcggagaggcaggcggaattcctagtgtagcggtgaaatgcgtagatattaggaggaacaccagtggcgaaggcggcctgctggacgacaactgacgctgaggcgcgaaagcgtggggagcaaacaggattagataccctggtagtccacgctgtaaacgatgaatactaggtgtggggggactgaccccttccgtgccgcagttaacacaataagtattccacctggggagtacgatcgcaagattgaaactcaaaggaattgacgggggcccgcacaagcagtggattatgtggtttaattcgacgcaacgcgaagaaccttaccgggatttgacatcctactaacgaagcagagatgcattaggtgcccttcggggaaagtagagacaggtggtgcatggttgtcgtcagctcgtgtcgtgagatgttgggttaagtcccgcaacgagcgcaacccttactgtcagttactacgcaagaggactctggcaggactgccgttgacaaaacggaggaaggtggggatgacgtcaaatcatcatgccctttatgacttgggctacacacgtactacaatggcgttaaacaaagagaagcaagaccgcgaggtggagcaaaactcagaaaaacgtcccagttcggactgcaggctgcaactcgcctgcacgaagtcggaattgctagtaatcgtggatcagcatgccacggtgaatacgttcccgggccttgtacacaccgcccgtcacaccatgagagccggggggacccgaagtcggtagtctaaccgcaaggaggacgccgccgaaggtaaaactggtgattggggtgaagtcgtaacaaggtagccg

SEQ ID NO: 2313 - DNA, 1441 bp, Artificial Sequence; identical to SEQ ID NO: 949
  Synthetic polymer

SEQ ID NO: 2314 - DNA, 1391 bp, Artificial Sequence
  Synthetic polymer
agagtttgatcctggctcaggacgaacgctggcggcgtgcttaacacatgcaagtcgaacgagaatcactggaaggagttttcggacaacggaaggtgaggacagtggcggacgggtgagtaacgcgtgaggaacctgcctttcagagggggacaacagttggaaacgactgctaataccgcatgacacatagagatcgcatggtttttatgtcaaagatttatcgctgaaagatggcctcgcgtctgattagctagttggtgaggtaacggcccaccaaggcgacgatcagtagccggactgagaggttgaccggccacattgggactgagatacggcccagactcctacgggaggcagcagtggggaatattgggcaatgggcgcaagcctgacccagcaacgccgcgtgaaggaagaaggctttcgggttgtaaacttcttttgtcggggacgagtagaagacggtacctggcgaataagccacggctaactacgtgccagcagccgcggtaatacgtaggtggcaagcgttgtccggatttactgggtgtaaagggcgtgtagccgggaaggcaagtcagatgtgaaatccacgggcttaactcgtgaactgcatttgaaactacttttcttgagtatcggagaggcaatcggaattcctagtgtagcggtgaaatgcgtagatattaggaggaacaccagtggcgaaggcggattgctggacgacaactgacggtgaggcgcgaaagcgtggggagcaaacaggattagataccctggtagtccacgctgtaaacgatgaatactaggtgtgcggggactgaccccctgcgtgccgcagttaacacaataagtactccacctggggagtacgttcgcaagaatgaaactcaaaggaattgacggggacccgcacaagcggtggagcatgtggtttaattcgaagcaacgcgaagaaccttaccaaatcttgacatccctctgaccggcgagtaatgtcgcctttccttcgggacagaggagacaggtggtgcatggttgtcgtcagctcgtgtcgtgagatgttgggttaagtcccgcaacgagcgcaacccttatcctaagtagccagcagttcggctgggcactcttgggagactgccagggataacctggaggaaggtggggatgacgtcaaatcatcatgccccttatgatttgggctacacacgtgctacaatggcgtaaacaaagagaggcgagaccgcgaggtggagcaaatctcaaaaataacgtctcagttcggactgcaggctgcaactcgcctgcacgaagctggaatcgctagtaatcgcgaatcagaatgtcgcggtgaatacgttcccgggtcttgcacacaccgcccgtca

SEQ ID NO: 2315 - DNA, 1520 bp, Artificial Sequence; identical to SEQ ID NO: 20
  Synthetic polymer

SEQ ID NO: 2316 - DNA, 1450 bp, Artificial Sequence; identical to SEQ ID NO: 60
  Synthetic polymer

SEQ ID NO: 2317 - DNA, 1357 bp, Artificial Sequence; identical to SEQ ID NO: 830
  Synthetic polymer

SEQ ID NO: 2318 - DNA, 1447 bp, Artificial Sequence; identical to SEQ ID NO: 947
  Synthetic polymer

SEQ ID NO: 2319 - DNA, 1388 bp, Artificial Sequence; identical to SEQ ID NO: 190
  Synthetic polymer

SEQ ID NO: 2320 - DNA, 1392 bp, Artificial Sequence; identical to SEQ ID NO: 455
  Synthetic polymer

SEQ ID NO: 2321 - DNA, 1389 bp, Artificial Sequence
  Synthetic polymer
agagtttgatcctggctcaggacgaacgctggcggcgtgcttaacacatgcaagtcgaacgagaatctgtggatcgaggattcgtccaagtgaagcagaggacagtggcggacgggtgagtaacgcgtgaggaacctgcctttcagagggggacaacagttggaaacgactgctaataccgcatgatacatttgggtggcatcatctgaatgtcaaagatttatcgctgaaagatggcctcgcgtctgattagctagttggtgaggtaacggcccaccaaggcgacgatcagtagccggactgagaggttgaccggccacattgggactgagatacggcccagactcctacgggaggcagcagtggggaatattgggcaatgggcgcaagcctgacccagcaacgccgcgtgaaggaagaaggctttcgggttgtaaacttcttttaagtgggaagagcagaagacggtaccacttgaataagccacggctaactacgtgccagcagccgcggtaatacgtaggtggcaagcgttgtccggatttactgggtgtaaagggcgtgcagccgggcatgcaagtcagatgtgaaatctcagggcttaaccctgaaactgcatttgaaactgtatgtcttgagtgccggagaggtaatcggaattccttgtgtagcggtgaaatgcgtagatataagaaagaacaccagtggcgaaaggcggattactggacggtaactgacggtgaggcgcgaaagcgtggggagcgaacaggattagataccctggtagtccacgctgtaaacgatggatactaggtgtgcggggactgaccccctgtgtgccgcagttaacacaataagtatcccacctggggagtacgatcgcaaggttgaaactcaaaggaattgacgggggcccgcacaagcggtggattatgtggtttaattcgaagcaacgcgaagaaccttaccaggtcttgacatcctgctaacgaagtagagatacattaggtgcccttcggggaaagcagagacaggtggtgcatggttgtcgtcagctcgtgtcgtgagatgttgggttaagtcccgcaacgagcgcaacccctattgttagttgctacgcaagagcactctagcgagactgccgttgacaaaacggaggaaggtggggacgacgtcaaatcatcatgccccttatgacctgggctacacacgtaatacaatggcggtcaacaaagggatgcaaagccgcgaggcagagcgaaccccaaaaagccgtcccagttcggatcgcaggctgcaacccgcctgcgtgaagtcggaatcgctagtaatcgtgggtcagcataccacggtgaatacgttcccgggccttgtacacaccgcccgtca

SEQ ID NO: 2322 - DNA, 1391 bp, Artificial Sequence; identical to SEQ ID NO: 255
  Synthetic polymer

SEQ ID NO: 2323 - DNA, 1398 bp, Artificial Sequence
  Synthetic polymer
ttcgcccttagagtttgatcctggctcaggatgaacgctggcggcgtgcttaacacatgcaagtcgaacggagtgcccctgaaagaggattcgtccaattgattgggttacttagtggcggacgggtgagtaacgcgtgaggaacctgccctggagtggggaataacgactggaaacagtcgctaataccgcataaagtgtctggaccgcatgatccggataccaaagatttatcgctctgggatggcctcgcgtctgattaggtagttggtggggtaacggctcaccaagccgacgatcagtagccggactgagaggttggccggccacattgggactgagacacggcccagactcctacgggaggcagcagtggggaatattgggcaatgggcgaaagcctgacccagcaacgccgcgtgaaggatgaaggccctcgggttgtaaacttcttttgccagggacgaagaagtgacggtacctggtgaaaaagtcacggctaactacgtgccagcagccgcggtaatacgtaggtggcaagcgttatccggatttactgggtgtaaagggcgtgtaggcgggattgcaagtcagatgtgaaaaccacgggctcaacctgtggcctgcatttgaaactgtagttcttgagtactggagaggcagatggaattcctagtgtagcggtgaaatgcgtagatattaggaggaacaccagtggcgaaggcgatctgctggacagcaactgacgctgaggcgcgaaagcgtggggagcaaacaggattagataccctggtagtccacgctgtaaacgatggatactaggtgtggggggtctgaccccctccgtgccgcagttaacacaataagtatcccacctggggagtacgatcgcaaggttgaaactcaaaggaattgacgggggcccgcacaagcggtggagtatgtggtttaattcgaagcaacgcgaagaaccttaccagggcttgacatccaactaacgaagcagagatgcatcaggtgcccttcggggaaagttgagacaggtggtgcatggttgtcgtcagctcgtgtcgtgagatgttgggttaagtcccgcaacgagcgcaacccctattgttagttgctacgcaagagcactctagcgagactgccgttgacaaaacggaggaaggcggggacgacgtcaaatcatcatgccccttatgtcctgggctacacacgtactacaatggtggtcaacagagggaggcaaagccgcgaggcagagcaaacccctaaaagccatcccagttcagatcgcaggctgcaacccgcctgcgtgaagatggaatcgctagtaatcgcggatcagcatgccgcggtgaatacgttcccgggccttgcacacaccgcccgtca

SEQ ID NO: 2324 - DNA, 1355 bp, Artificial Sequence; identical to SEQ ID NO: 193
  Synthetic polymer

SEQ ID NO: 2325 - DNA, 1391 bp, Artificial Sequence; identical to SEQ ID NO: 422
  Synthetic polymer

SEQ ID NO: 2326 - DNA, 1378 bp, Artificial Sequence; identical to SEQ ID NO: 771
  Synthetic polymer

SEQ ID NO: 2327 - DNA, 1397 bp, Artificial Sequence
  Synthetic polymer
ttagagtttgatcctggctcaagacgacctctggcggcgtgcttaacacatgcaagtcgaacggagtgctcctgattgaggtttcggccaaatgaaggagttgcttagtggcggactggtgagtaacgcgtgaggaacctgcctttcagagggggacaacagttggaaacgactgctaataccgcatgatgcatttgggtcgcatggcctggatgccaaagatttatcgctgaaagatggcctcgcgtctgattagctagttggtgaggtaacggcccaccaaggcgacgatcagtagccggactgagaggttgaccggccacattgggactgagatacggcccagactcctacgggaggcagcagtggggaatattgggcaatggacgcaagtctgacccagcaacgccgcgtgaaggaagaaggctttcgggttgtaaacttcttttgtcggggaagagcagaagacggtacctgacgaataagccacggctaactacgtgccagcagccgcggtaatacgtaggtggcaagcgttgtccggatttactgggtgtaaagggcgtgcagccgggaatgcaagtcagatgtgaaatctggaggctcaacctccaaactgcatttgaaactgtgtttcttgagtatcggagaggtaatcggaattccttgtgtagcggtgaaatgcgtagatataaggaagaacaccagtggcgaaggcggattactggacgacaactgacggtgaggcgcgaaagcgtggggagcaaaaaggatcagataccctggtagtccacgctgtaaacgatcggatactaaggggtgcgggggatgacccccctgcgtgcccgcagttaaccccaataagtatcgccccctggggagtacgatcgcaaggtgaaaactcaaaggaattgacgggggcccgcacaagcggtggattatgtggtttaattcgaagcaacgcgaagaaccttaccagggcttgacatcctactaacgaagtagagatacatcaggtgcccttcgaggaaagtagagacaggtggtgcatggttgtcgtcagctcgtgtcgtgagatgttgggttaagtcccgcaacgagcgcaacccctattgttagttgctacgcaagagcactctagcgagactgccgttgacaaaacggaggaaggtggggacgacgtcaaatcatcatgccccttatgtcctgggctacacacgtaatacaatgacggtcaacaaagggatgcaataccgcgaggtggagcgaacccccaaaagccgtctcagttcggattgcaggctgcaactcgcctgcatgaagtcggaatcgctagtaatcgtgggtcagcataccacggtgaatacgttcccgggccttgcactaagcgcccgtca

SEQ ID NO: 2328 - DNA, 1441 bp, Artificial Sequence; identical to SEQ ID NO: 1085
  Synthetic polymer

SEQ ID NO: 2329 - DNA, 1395 bp, Artificial Sequence; identical to SEQ ID NO: 731
  Synthetic polymer

SEQ ID NO: 2330 - DNA, 1449 bp, Artificial Sequence
  Synthetic polymer
gatgaacgctggcggcgtgcttaacacatgcaagtcgaacggggtacccatgacagargcttcggccaatcgattggaatacctagtggcggacgsgsgkgagtaacgcgtgaggaacctgccttggagtggggaataacarttrgaaacarctgctaataccgcataawatgtctgtgtcgcatggcactggacatcaaagatttatcgctctgagatggcctcgcgtctgattagctagttggtggggtaacggctcaccaaggcgacgatcagtagccggactgagaggttggccgagccacattgggactgagacacggcccagactcctacgggaggcagcagtggggaatattgggcaatgggcgcaagctgacccagcaacgccgcgtgaaggaagaaggctttcgggttgtaaacttctcttgtcagggacgatagtgacggtacctgacgaataagccacggctaactacgtgccagcagccgcggtaatacgtagagtggcaagcgttatccggatttactgggtgtaaagggcgtgtaggcgggagtgcaagtcagatgtgaaaactatgggctcaacccatagcctgcatttgaaactgtacttcttgagtactggagaggcaggcggaattccgtgtgtagcggtgaaatgcgtagatatacggaggaacaccagtggcgaaggcggcctgctggacagcaactgacgctgaggcgcgaaagcgtggggagcaaacaggattagataccctggtagtccacgctgtaaacgatggatactaggtgtgcggggtctgaccccctgcgtgccgcagctaacgcaataagtatcccacctggggagtacgatcgcaaggttgaaactcaaaggaattgacgggggcccgcacaagcggtggaktatgtggtttaattcgaagcaacgcgaagaaccttaccagggcttgacatggggaggaccgctctagagatagagctttcttcggggacctcccacacaggtggtgcatggttgtcgtcagctcgtgtcgtgagatgttgggttaagtcccgcaacgagcgcaacccttattgttagttstacgcaagagcactctagcgagactgccgttgacaaaacggaggaaggtggggacgacgtcaaatcatcatgccccttatgtcctgggccacacacgtactacaatggtggtcaacagagggaggcaaagccgcgaggcagagcaaacccctaaaagccatcccagttcggattgcaggctgcaacccgcctgtatgaagttggaatcgctagtaatcgcggatcagcatgccgcggtgaatacgttcccbrccttgtacacaccgcccgtcacaccatgagagtcgggaacacccgaagtccgtagcctaaccgcaaggggggcgcggccgaaggtgggttcgataattggggtg

SEQ ID NO: 2331 - DNA, 1393 bp, Artificial Sequence; identical to SEQ ID NO: 642
  Synthetic polymer

SEQ ID NO: 2332 - DNA, 1395 bp, Artificial Sequence; identical to SEQ ID NO: 115
  Synthetic polymer

SEQ ID NO: 2333 - DNA, 1446 bp, Artificial Sequence; identical to SEQ ID NO: 962
  Synthetic polymer

SEQ ID NO: 2334 - DNA, 1362 bp, Artificial Sequence; identical to SEQ ID NO: 305
  Synthetic polymer

SEQ ID NO: 2335 - DNA, 1391 bp, Artificial Sequence
  Synthetic polymer
ttagagtttgatcctggctcacgacgaacgctggcggcgtgcttaacacatgcaagtcgaacggagtgcctaagaaagaggtttcggccaatggattaggttacttagtggcggactggtgagtaacgcgtgaggaacctgcctttcagagggggacaacagttggaaacgactgctaataccgcatgacgcatgactggggcatcccggacatgccaaagatttatcgctgaaagatggcctcgcgtctgattagctggttggcggggtaacggcccaccaaggcgacgatcagtagccggactgagaggttgaccggccacattgggactgagatacggcccagactcctacgggaggcagcagtggggaatattgggcaatggacgcaagtctgacccagcaacgccgcgtgaaggaagaaggctttcgggttgtaaacttcttttaagggggaacagcggaagagggtaccccttgaataagccacggctaactacgtgccagcagccgcggtaatacgtaggtggcaagcgttgtccggatttactgggtgtaaagggcgtgcagccgggaaggcaagtcagatgtgaaatccgtgggcttaacccacgaactgcatttgaaactgcttttcttgagtatcggagaggtaatcggaattccttgtgtagcggtgaaatgcgtagatataaggaagaacaccagtggcgaaggcggattactggacgacaactgacggtgaggcgcgaaagcgtggggagcaaacaggattagataccctggtagtccacgctgtaaacgatcaatactaggtgtgcggggactgaccccctgcgtgccgcagttaacacaataagtattgcacctggggagtacgatcgcaaggttgaaactcaaaggaattgacgggggcccgcacaagcggtggattatgtggtttaattcgaagcaacgcgaagaaccttaccagggcttgacatcctgctaacgaggtagagatacgtcaggtgcccttcggggaaagcagagacaggtggtgcatggttgtcgtcagctcgtgtcgtgagatgttgggttaagtcccgcaacgagcgcaacccctattgttagttgctacgcaagagcactctagcgagactgccgttgacaaaacggaggaaggcggggacgacgtcaaatcatcatgccccttatgtcctgggctacacacgtaatacaatggcggtaaacagagggatgcaaatccgcgaggaggagcgaacccccaaaagccgtctcagttcggatcgcaggctgcaacccgcctgcgtgaagtcggaatcgctagtaatcgcggatcggaatgccgcggtgaatacgttcaccgggccttgtacacaccgcccgtc

SEQ ID NO: 2336 - DNA, 1388 bp, Artificial Sequence
  Synthetic polymer
gagtttgatcctggctcaggatgaacgctgacggcgtgcttaacacatgcaagtcgaacggagtgctcatgacggagttttcggacaactgattgggttacttagtggcggacgggtgagtaacgcgtgagtaacctaccttggagtggggaataacagtcggaaacgactgctaataccgcatgatgcatttgggctgcatggctctgaatgccaaagatttatcgctctgagatggactcgcgtctgattagctagttggtgaggtaacggctcaccaaggcgacgatcagtagccggactgagaggttggccggccacattgggactgagacacggcccagactcctacgggaggcagcagtggggaatattgggcaatgggcgcaagcctgacccagcaacgccgcgtgaaggaagaaggctctcgggttgtaaacttcttttaagagggacgaaacaaatgacggtacctcttgaataagccacggctaactacgtgccagcagccgcggtaatacgtaggtggcaagcgttatccggatttactgggtgtaaagggcgtgtaggcgggaaggcaagtcagatgtgaaaactatgggctcaacccatagcctgcatttgaaactgtttttcttgagtgatggagaggcaggcggaattccgtgtgtagcggtgaaatgcgtagatatacggaggaacaccagtggcgaaggcggcctgctggacattaactgacgctgaggcgcgaaagcgtggggagcaaacaggattagataccctggtagtccacgccgtaaacgatggatactaggtgtggggggtctgaccccctccgtgccgcagttaacacaataagtatcccacctggggagtacgatcgcaaggttgaaactcaaaggaattgacgggggcccgcacaagcggtggagtatgtggtttaattcgaagcaacgcgaagaaccttaccaggacttgacatcctactaacgaagcagagatgcattaggtgcccttcggggaaagtagagacaggtggtgcatggttgtcgtcagctcgtgtcgtgagatgttgggttaagtcccgcaacgagcgcaacccttattgttagttgctacgcaagagcactctagcgagactgccgttgacaaaacggaggaaggtggggacgacgtcaaatcatcatgccccttatgtcctgggccacacacgtactacaatggcggtcaacagagggaagcaataccgcgaggtggagcaaatccctaaaagccgtcccagttcggattgcaggctgaaactcgcctgtatgaagtcggaatcgctagtaatcgcggatcagcatgccgcggtgaatacgttcccgggcctgtacacaccgcccgtc

SEQ ID NO: 2337 - DNA, 1375 bp, Artificial Sequence; identical to SEQ ID NO: 891
  Synthetic polymer

SEQ ID NO: 2338 - DNA, 1398 bp, Artificial Sequence; identical to SEQ ID NO: 596
  Synthetic polymer

SEQ ID NO: 2339 - DNA, 1398 bp, Artificial Sequence; identical to SEQ ID NO: 233
  Synthetic polymer

SEQ ID NO: 2340 - DNA, 1491 bp, Artificial Sequence
  Synthetic polymer
agagtttgatcctggctcaggatgaacgctggcggcgtgcttaacacatgcaagtcgaacggggtacccatgacggaggcttcggccaactgaatggactacctagtggcggacgggtgagtaacgcgtgaggaacctgccttggagtggggaataacagccagaaatggctgctaataccgcataatgcagttgggtcgcatggctctgactgccaaagatttatcgctctaagatggcctcgcgtctgattagtttgttggcggggtaacggcccaccaagacgacgatcagtagccggactgagaggttggccggccacattgggactgagacacggcccagactcctacgggaggcagcagtggggaatattgggcaatgggcgcaagcctgacccagcaacgccgcgtgaaggaagaaggccctcgggttgtaaacttctttcgtcagggacgaagaaagtgacggtacctgacggataagccacggctaactacgtgccagcagccgcggtaatacgtaggtggcaagcgttatccggatttactgggtgtaaagggcgtgtaggcgggactgcaagtcagatgtgaaattccagggctcaactctggaactgcatttgaaactgtagttcttgagtgacggagaggcaggcggaattccgtgtgtagcggtgaaatgcgtagatatacggaggaacaccagtggcgaaggcggcctgctggacattaactgacgctgaggcgcgaaagcgtggggagcaaacaggattagataccctggtagtccacgctgtaaacgatggatactaggtgtgggggggtctgaccccctccgtgccgcagctaacgcaataagtatcccacctggggagtacgatcgcaaggttgaaactcaaaggaattgacgggggcccgcacaagcggtggagtatgtggtttaattcgacgcaacgcgaagaaccttaccagggcttgacatcccggtgaccggcctagagataggctttcccttcggggcaccggtgacaggtggtgcatggttgtcgtcagctcgtgtcgtgagatgttgggttaagtcccgcaacgagcgcaacccttattgctagttgctacgcaagagcactctagcgagactgccgttgacaaaacggaggaaggtggggacgacgtcaaatcatcatgccccttatgtcctgggccacacacgtactacaatggcggtcaacaaagagaggcaaacccgcgagggggagcaaatctccaaaagccgtcccagttcggattgcaggctgcaacccgcctgcatgaagttggaatcgctagtaatcgcggatcagcatgccgcggtgaatacgttcccgggccttgtacacaccgcccgtcacaccatgagagtcgggaacacccgaagtccgtagcctaaccgcaaggggggcgcggccgaaggtgggttcgataattggggtgaagtcgtaacaaggtaacc

SEQ ID NO: 2341 - DNA, 1451 bp, Artificial Sequence
  Synthetic polymer
gatgaacgctggcggcgtgcttaacacatgcaagtcgaacggagtgctctcgaaagaggattcgtccaattgagagagttacttagtggcggacgggtgagtaacgcgtgaggaacctgcctcggagtggggaataacagttagaaatgactgctaataccgcataatgcaattgtgccgcatggcactgattgccaaagatttatcgctctgagatggcctcgcgtctgattagctagttggtagggtagcggcctaccaaggcgacgatcagtagccggactgagaggttggccggccacattgggactgagacacggcccagactcctacgggaggcagcagtggggaatattgggcaatgggcgcaagcctgacccagcaacgccgcgtgaaggaagaaggctttcgggttgtaaacttcttttgtcagggacgaacaaatgacggtacctgacgaataagccacggctaactacgtgccagcagccgcggtaatacgtaggtggcaagcgttatccggatttactgggtgtaaagggcgtgtaggcgggactgcaagtcagatgtgaaaaccacgggctcaacctgtggcctgcatttgaaactgtagttcttgagtgtcggagaggtaatcggaattcctagtgtagcggtgaaatgcgtagatattaggaggaacaccagtggcgaaggcggattactggacgataactgacgctgaggcgcgaaagcgtggggagcaaacaggattagataccctggtagtccacgctgtaaacgatggatactaggtgtggggggtctgaccccctccgtgccgcagttaacacaataagtatcccacctggggagtacgatcgcaaggttgaaactcaaaggaattgacgggggcccgcacaagcggtggagtatgtggtttaattcgaagcaacgcgaagaaccttaccagggcttgacatcccggcgaccggcctagagataggccctctcttcggagcgccggtgacaggtggtgcatggttgtcgtcagctcgtgtcgtgagatgttgggttaagtcccgcaacgagcgcaacccctattgttagttgctacgcaagagcactctagcgagactgccgttgacaaaacggaggaaggtggggacgacgtcaaatcatcatgccccttatgtcctgggccacacacgtactacaatgacggtcaacagagggaggcaatactgcgaagtggagcaaacccctaaaagccgtcccagttcggattgcaggctgaaacccgcctgcatgaagttggaatcgctagtaatcgcggatcagcatgccgcggtgaatacgttcccgggccttgtacacaccgcccgtcacaccatgagagtcgggaacacccgaagtccgtagcctaaccgcaaggagggcgcggccgaaggtgggttcgataattggggtga

SEQ ID NO: 2342 - DNA, 1385 bp, Artificial Sequence; identical to SEQ ID NO: 670
  Synthetic polymer

SEQ ID NO: 2343 - DNA, 1395 bp, Artificial Sequence; identical to SEQ ID NO: 566
  Synthetic polymer

SEQ ID NO: 2344 - DNA, 1488 bp, Artificial Sequence; identical to SEQ ID NO: 801
  Synthetic polymer

SEQ ID NO: 2345 - DNA, 1381 bp, Artificial Sequence; identical to SEQ ID NO: 783
  Synthetic polymer

SEQ ID NO: 2346 - DNA, 1400 bp, Artificial Sequence; identical to SEQ ID NO: 601
  Synthetic polymer

SEQ ID NO: 2347 - DNA, 1362 bp, Artificial Sequence; identical to SEQ ID NO: 847
  Synthetic polymer

SEQ ID NO: 2348 - DNA, 1392 bp, Artificial Sequence; identical to SEQ ID NO: 171
  Synthetic polymer

SEQ ID NO: 2349 - DNA, 1455 bp, Artificial Sequence; identical to SEQ ID NO: 15
  Synthetic polymer

SEQ ID NO: 2350 - DNA, 1384 bp, Artificial Sequence
  Synthetic polymer
agtttgatcctggctcaggatgaacgctggcggcgtgcttaacacatgcaagtcgaacggaacttgtctgatagaggattcgtccaattgattacaagtttagtggcggacgggtgagtaacgcgtgaggaacctgccttggagtggggaataacacagtgaaaattgtgctaataccgcataatgcagttgggtcgcatggctctgactgccaaagatttatcgctctaagatggcctcgcgtctgattagctagttggtagggtaacggcctaccaaggcgacgatcagtagccggactgagaggttggccggccacattgggactgagacacggcccagactcctacgggaggcagcagtggggaatattgggcaatgggcgcaagcctgacccagcaacgccgcgtgaaggaagaaggctttcgggttgtaaacttcttttgtcagggacgaacaaatgacggtacctgacgaataagccacggctaactacgtgccagcagccgcggtaatacgtaggtggcaagcgttatccggatttactgggtgtaaagggcgtgtaggcgggattgcaagtcagatgtgaaaattcggggctcaacctcgagcctgcatttgaaactgtagttcttgagtgtcggagaggtaatcggaattccgtgtgtagcggtgaaatgcgtagatatacggaggaacaccagtggcgaaggcggattactggacgataactgacgctgaggcgcgaaagcgtggggagcaaacaggattagataccctggtagtccacgctgtaaacgatggatcataggtgtggggggactgaccccctccgtgccgcagttaacacaataagtatcccacctggggagtacgatcgcaaggttgaaactcaaaggaattgacgggggcccgcacaagcggtggagtatgtggtttaattcgaagcaacgcgaagaaccttaccagggcttgacatcccggtgaccggcctagagataggctttcccttcggggcaccggtgacaggtggtgcatggttgtcgtcagctcgtgtcgtgagatgttgggttaagtcccgcaacgagcgcaacccctattgttagttgctacgcaagagcactctagcgagactgccgttgacaaaacggaggaaggtggggacgacgtcaaatcatcatgccccttatgtcctgggctacacacgtactacaatggtggtcaacagagggaggcaaaaccgcgaggtggagcaaacccctaaaagccatcccagttcggattgcaggctgaaactcgcctgtatgaagttggaatcgctagtaatcgcggatcagcatgccgcggtgaatacgttctcgagtcttgtactcaccgcccgtca

SEQ ID NO: 2351 - DNA, 1450 bp, Artificial Sequence
  Synthetic polymer
gacgaacgctggcggcgtgcttaacacatgcaagtcgaacggagttccttggatagaggcttcggccaattgaattggaacttagtggcggactggtgagtaacgcgtgaggaacctgcctttcagagggggacaacagttggaaacgactgctaataccgcatgacacattcgaacggcatcgcttgaatgtcaaagattttatcgctgaaagatggcctcgcgtctgattagctagttggtagggtaacggcctaccaaggcgacgatcagtagccggactgagaggttgaccggccacattgggactgagatacggcccagactcctacgggaggcagcagtggggaatattgggcaatggacgcaagtctgacccagcaacgccgcgtgaaggaagaaggctttcgggttgtaaacttcttttaagtgggaagagtagaagacggtaccacttgaataagccacggctaactacgtgccagcagccgcggtaatacgtaggtggcaagcgttgtccggatttactgggtgtaaagggcgtgtagccgggtcggcaagtcagatgtgaaatccacgggcttaactcgtgaactgcatttgaaactgttgatcttgagtatcggagaggtaatcggaattccttgtgtagcggtgaaatgcgtagatataaggaagaacaccagtggcgaaggcggattactggacgacaactgacggtgaggcgcgaaagcgtggggagcaaacaggattagataccctggtagtccacgctgtaaacgatggatactaggtgtgcggggactgaccccctgcgtgccgcagttaacacaataagtatcccacctggggagtacgatcgcaaggttgaaactcaaaggtattgacgggggcccgcacaagcggtggattatgtgctttaattcgaagcaacgcgaagaaccttaccagggcttgacatggggatgaccggactagagatagtcctttccttcgggacatcccacacaggtggtgcatggttgtcgtcagctcgtgtcgtgagatgttgggttaagtcccgcaacgagcgcaacccctattgttagttgctacgcaagagcactctagcgagactgccgttgacaaaacggaggaaggtggggacgacgtcaaatcatcatgccccttatgtcctgggctacacacgtaatacaatgacggttaacagagggatgcaatactgtgaggtggagcgaacccctaaacaccgtcccagttcggattgcaggctgcaactcgcctgcatgaagtcggaatcgctagtaatcgcggatcagcatgccgcggtgaatacgttcccgggccttgtacacaccgcccgtcacaccatgagagtcgggaacacccgaagtccgtagcctaaccgcaaggagggcgcggccgaaggtgggttcgataattggggtga

SEQ ID NO: 2352 - DNA, 1401 bp, Artificial Sequence
  Synthetic polymer
ttcgcccttagagtttgatcctggctcaggatgaacgctggcggcgtgcttaacacatgcaagtcgaacgagaatcagtggattgaggattcgtccaaatgaaactgaggaaagtggcggacgggtgagtaacgcgtgagcaatctgccttggagtggggaataacggctggaaacagccgctaataccgcatgatacagttgggaggcatctctctgactgtcaaagatttatcgctctgagatgagctcgcgtctgattagctggttggcggggtaacggcccaccaaggcgacgatcagtagccggactgagaggttggccggccacattgggactgagacacggcccagactcctacgggaggcagcagtggggaatattgggcaatgggcgcaagcctgacccagcaacgccgcgtgaaggaagaaggctttcgggttgtaaacttcttttctgggggacgaacaaatgacggtaccccaggaataagccacggctaactacgtgccagcagccgcggtaatacgtaggtggcaagcgttatccggatttattgggtgtaaagggcgtgtaggcgggaatgcaagtcagatgtgaaaactatgggctcaacccatagcctgcatttgaaactgtatttcttgagtgctggagaggcaatcggaattccgtgtgtagcggtgaaatgcgtaagatatacgggaggaacaccagtggcgaaggcggattgctggacagtaactgacgctgaggcgcgaaagcgtggggagcaaacaggattagataccctagtagtccacgccgtaaacgatgaggaccaagtgttgggggtgaaacctcagtgctgaagttaacgcagtgagtcctccgcctggggagtatgcacgcaagtgtgaaactcaaaggaattgacgggggcccgcacaagcggtggagtatgtggtttaattcgaagcaacgcgaagaaccttaccaggccttgacatcctcctgacacggcatgtaatgtgccattccttcgggacaggggagacaggtggtgcatggttgtcgtcagctcgtgtcgtgagatgttgggttaagtcccgcaacgagcgcaacccctgcccttagtagccagcacgtagaggtgggcactctagggggactgccggggacaacccggaggaaggcggggacgacgtcaaatcatcatgccccttatggccagggctacacacgtgctacaatggcgcgcacagagggaggcgaggcggcgacgccgagcgaagcccggaaagcgcgccccagttcggattgcagcctgcaactcggctgcatgaagccggaatcgctagtaatcgcggatcagaacgccgcggtgaatacgttcccgggtcttgcacacaccgcccgtca

SEQ ID NO: 2353 - DNA, 1396 bp, Artificial Sequence; identical to SEQ ID NO: 224
  Synthetic polymer

SEQ ID NO: 2354 - DNA, 1442 bp, Artificial Sequence
  Synthetic polymer
gacgaacgctggcggcgcgcctaacacatgcaagtcgaacggggttgagaggagcttgcttttcttgacttagtggcgaacgggtgagtaacgcgtgaggaacctccctcaaagagggggacaacagttggaaacgcctcctaataccgcataagccccggggcccgcatggctctgagggaaaaaggagcaatccgctttgagatggcctcgcgtccgattagctggttggtgaggtaacggcccaccaaggcgacgatcggtagccggactgagaggttgaacggccacattgggactgagacacggcccagactcttacgggaggcagcagtggggaatattgggcaatggacgcaagtctgacccagcaacgccgcgtgaaggaagaaggctttcgggttgtaaacttcttttgtcagggaacagtagaagagggtacctgacgaataagccacggctaactacgccgcggagccgcggtaatacgtaggtgcagcgttgtccggattactgggtagtaaagggcgtgcagccgggccggcaagtcagatgtgaaatctggaggcttaacctccaaactgcatttgaaactgttggtcttgagtaccggagaggttatcggaattccttgtgtagcggtgaaatgcgtagatataaggaagaacaccagtggcgaaggcggataactggacggcaactgacggtgaggcgcgaaagcgtggggagcaaacaggattagataccctggtagtccacgctgtaaacgatggatactaggtgtgcggggactgaccccctgcgtgccgcagttaacacaataagtatcccacctggggagtacgatcgcaaggttgaaactcaaaggaattgacggcggcccgcacaagcggtggattatgtggtttaattcgaagcaacgcgaagaaccttaccagggcttgacatcctactaacgaagtagagatacaccaggtgcccttcggggaaagtagagacaggtggtgcatggttgtcgtcagctcgtgtcgtgagatgttgggttaattcccgcaacgagcgcaaaccctattgttagttgctacgcaagagcctctagcgagactgccgttgacaaaacggaggaaggtgggggacgacgtcaaatcatcatgccccttatgtcctgggctacacacgtaatacaatggcgggtcaacagaggggaggcaaagccgcgaggcagagcaaacccccaaaagccgtcccagttcggatcgcaggctgcaacccgcctgcgtgaagtcggaatcgctagtaatcgcggatcagcatgccgcggtgaatacgttcccgggccttgtacacaccgcccgtcacaccatgagagtcgggaacacccgaagtccgtagtctaaccgcaaggagggcgcggccgaaggtgggtctgataattggggtga

SEQ ID NO: 2355 - DNA, 1387 bp, Artificial Sequence; identical to SEQ ID NO: 675
  Synthetic polymer

SEQ ID NO: 2356 - DNA, 1374 bp, Artificial Sequence; identical to SEQ ID NO: 902
  Synthetic polymer

SEQ ID NO: 2357 - DNA, 1441 bp, Artificial Sequence
  Synthetic polymer
gctggcggcgtgcttaacacatgcaaatcgaacggagagccaatgacggagttttcggacaacggatttggtttcttagtggcggacgggtgagtaacgcgtgagcaacctgccttggagtggggaataacagctggaaacagttgctaataccgcataatgcagcgaggggacatcctcttgctgccaaagatttatcgctctgagatggactcgcgtctgattagctggttggcggggttacggcccaccaaggcgacgatcagtagccggactgagaggttgaccggccacattgggactgagatacggcccagactcctacgggaggcagcagtggggaatattgggcaatgggcgaaagcctgacccagcaacgccgcgtgaaggaagaaggccctcgggttgtaaacttcttttatcagggacgaaacaaatgacggtacctgatgaataagccacggctaactacgtgccagcagccgcggtaatacgtaggtggcaagcgttatccggatttactgggtgtaaagggcgtgtaggcgggcctgcaagtcaggtgtgaagctccagggctcaaccctggaactgcacttgaaactgtgggtcttgagtgatggagaggcaggcggaattccgtgtgtagcggtgaaatgcgtagatatacggaggaacaccagtggcgaaggcggcctgctggacattaactgacgctgaggcgcgaaagcgtggggagcaaacaggattagataccctggtagtccacgctgtaaacgatggatactaggtgtggggggtctgaccccctccgtgccgcagttaacacaataagtatcccacctggggagtacgatcgcaaggttgaaactcaaaggaattgacgggggcccgcacaagcggtggagtatgtggtttaattcgaagcaacgcgaagaaccttaccagggcttgacatcctactaacgaagcagagatgcattaggtgcccttcggggaaagtagagacaggtggtgcatggttgtcgtcagctcgtgtcgtgagatgttgggttaagtcccgcaacgagcgcaacccttattgctagttgctacgcaagagcactctagcgagactgccgttgacaaaacggaggaaggtggggatgacgtcaaatcatcatgccccttatgtcttgggccacacacgtactacaatggcggtcaacagagggaagcaataccgcgaggtggagcgaatccctaaaagccgtcccagttcggattgcaggctgaaacccgcctgcatgaagttggaatcgctagtaatcgcggatcagcatgccgcggtgaatacgttcccgggccttgtacacaccgcccgtcacaccatgagagtcgggaacacccgaagtccgtagcctaaccacaaggggggcgcggccgaaggtgggttcgataattg

SEQ ID NO: 2358 - DNA, 1386 bp, Artificial Sequence; identical to SEQ ID NO: 585
  Synthetic polymer

SEQ ID NO: 2359 - DNA, 1476 bp, Artificial Sequence
  Synthetic polymer
ctggctcagcattaacgctggcggcgtgcttaacacatgcaagtcgaacggggtgccttagaaagaggattcgtccaattgataaggttacctagtggcggacgggtgagtaacgcgtgagtaacctgccctggagtggggaataactgctggaaacagctgctaataccgcataatgcagttgggtcgcatggctctgactgccaaagatttatcgctctgggatggactcgcgtctgattagctagttggtggggtaacggcccaccaaggcgacgatcagtagccggactgagaggttggccggccacattgggactgagacacggcccagactcctacgggaggcagcagtggggaatattgggcaatgggcgcaggcctgacccatcaacgccgcgtgaaggaagaaggctttcgggttgtaaacttcttttgtcagggacgaagcaagtgacggtacctgacgaataagccacggctaactacgtgccagcagccgcggtaatacgtaggtggcaagcgttatccggatttactgggtgtaaagggcgtgtaggcggggaggcaagtcagatgtgaaaaccacgggctcaacctgtggcctgcgtttgaaactgtttttcttgagtgctggagaggcaatcggaattccgtgtgtagcggtgaaatgcgtagatatacggaggaacaccagtggcgaaggcggattgctggacagtaactgacgctgaggcgcgaaagcgtggggagcaaacaggattagataccctggtagtccacgctgtaaacgatggatactaggtgtggggggtctgaccccctccgtgccgcagttaacacaataagtatcccacctggggagtacgatcgcaaggttgaaactcaaaggaattgacgggggcccgcacaagcggtggagtatgtggtttaattcgaagcaacgcgaagaaccttaccagggcttgacatcccggcgaccggcctagagataggctttcccttcggggcgccggagacaggtggtgcatggttgtcgtcagctcgtgtcgtgagatgttgggttaagtcccgcaacgagcgcaacccctattgttagttgctacgcaagagcactctagcgagactgccgttgacaaaacggaggaaggtggggacgacgtcaaatcatcatgccccttatgtcctgggctacacacgtactacaatggtggttaacagagggaggcaaagccgcgaggtggagcaaatccctaaaagccatcccagttcggattgcaggctgcaacccgcctgcatgaagttggaatcgctagtaatcgcggatcagcatgccgcggtgaatacgttcccgggccttgtacacaccgcccgtcacaccatgagagtcgggaacacccgaagtccgtagcctaaccgcaaggggggcgcggccgaaggtgggttcgataattggggtgaagtcgtaacaaggta

SEQ ID NO: 2360 - DNA, 1448 bp, Artificial Sequence
  Synthetic polymer
gcggcgtgcctaacacatgcaagtcgaacgaagctctgcgatacaagacttcggtcaagttgaacggatgacttagtggcggacgggtgagtaacgcgtgaggaacctgcctttcagtgggggacaacagttggaaacgactgctaataccgcataatgtattctgaccgcatgatcggaataccaaagatttattgctgaaagatggcctcgcgtctgattagatagttggtgaggtaacggcccaccaagtcgacgatcagtagccggactgagaggttgaacggccacattgggactgagatacggcccagactcctacgggaggcagcagtggggaatattgggcaatgggggaaaccctgacccagcaacgccgcgtgaaggaagaaggctttcgggttgtaaacttcttttaccagggacgaaggacgtgacggtacctggagaaaaagccacggctaactacgtgccagcagccgcggtaatacgtaggtggcaagcgttgtccggatttactgggtgtaaagggcgtgtaggcggagaagcaagtcagaagtgaaatccatgggcttaacccatgaactgcttttgaaactgtttcccttgagtatcggagaggcaggcggaattcctagtgtagcggtgaaatgcgtagatattaggaggaacaccagtggcgaaggcggcctgctggacgacaactgacgctgaggcgcgaaagcgtggggagcaaacaggattagataccctggtagtccacgctgtaaacgatgaatactaggtgtgggaggactgaccccttccgtgccgcagttaacacaataagtattccacctggggagtacgttcgcaagaatgaaactcaaaggaattgacggggacccgcacaagcggtggagcatgtggtttaattcgaagcaacgcgaagaaccttaccaagtcttgacatccttctgaccggtacttaaccgtaccttctcttcggagcaggagtgacaggtggtgcatggttgtcgtcagctcgtgacgtgagatgttgggttaagtcccgcaacgagcgcaacccttatctttagtagccagcggttcggccgggcactctagagagactgccagggataacctggaggaaggcggggatgacgtcaaatcatcatgccccttatgacttgggctacacacgtgctacaatggcgttaaacaaagagaagcaagaccgcgaggtggagcaaaactcaaaaacaacgtctcagttcagattgcaggctgcaactcgcctgcatgaagtcggaattgctagtaatcgcggatcagcatgccacggtgaatacgttcccgggccttgtacacaccgcccgtcacaccatgagagccggggggacccgaagtcgatagtctaaccgcaaggaggacgtcgccgaaggtaaaactggtgattggggtga

SEQ ID NO: 2361 - DNA, 1472 bp, Artificial Sequence
  Synthetic polymer
gtttgattatggctcaggatgaacgctggcggcgtgcttaacacatgcaagtcgaacgagaatcatgtgaaggagttttcggacaacggatcatgaggaaagtggcggacgggtgagtaacgcgtgagcaatctgccttggagtggggaataacggctggaaacagccgctaataccgcatgatacagctgagtcgcatggctctggctgtcagagatttatcgctctgagatgagctcgcgtctgattagcttgttggtggggtaacggcccaccgaggcgacgatcagtagccggactgagaggttggccggccacattgggactgagacacggcccagactcctacgggaggcagcagtggggaatattgggcaatgggcgcaagcctgacccagcaacgccgcgtgaaggaagaaggctttcgggttgtaaacttcttttcttggggacgaagaaagtgacggtacccgaggaataagccacggctaactacgtgccagcagccgcggtaatacgtaggtggcaagcgttatccggatttattgggtgtaaagggcgtgtaggcgggaatgcaagtcagatgtgaaaactatgggctcaacccatagcctgcatttgaaactgtatttcttgagtgctggagaggcaatcggaactccgtgtgtagcggtgaaatgcgtagatatacggaggaacaccagtggcgaaggcggattgctggacagtaactgacgctgaggcgcgaaagcgtggggagcaaacgggattagataccctggtagtccacgccgtaaacgatggatactaggtgtggggggactgaccccctccgtgccgcagctaacgcaataagtatcccacctggggagtacgatcgcaaggttgaaactcaaaggaattgacgggggcccgcacaagcggtggagtatgtggtttaattcgacgcaacgcgaagaaccttaccagggcttgacatcctactaacgaagcagagatgcattaggtgcccttcggggaaagtagaggcaggtggtgcatggttgtcgtcagctcgtgtcgtgagatgttgggttaagtcccgcaacgagcgcaacccttattgttagttgctacgcaagagcactctagcgagactgccgttgacaaaacggaggaaggtggggacgacgtcaaatcatcatgccccttacgtcctgggccacacacgtactacaatggcggccaacaaagagaggcaagaccgcgaggtggagcaaatctcaaaaagccgtcccagttcggatcgcaggctgcaacccgcctgcgtgaagttggaatcgctagtaatcgcggatcagcatgccgcggtgaatacgttcccgggccttgtacacaccgcccgtcacaccatgagagtcgggaacacccgaagtccgtagcctaaccgcaaggggggcgcggccgaaggtgggttcgataattggggtgaa

SEQ ID NO: 2362 - DNA, 1442 bp, Artificial Sequence; identical to SEQ ID NO: 57
  Synthetic polymer

SEQ ID NO: 2363 - DNA, 1400 bp, Artificial Sequence; identical to SEQ ID NO: 609
  Synthetic polymer

SEQ ID NO: 2364 - DNA, 1445 bp, Artificial Sequence; identical to SEQ ID NO: 982
  Synthetic polymer

SEQ ID NO: 2365 - DNA, 1475 bp, Artificial Sequence
  Synthetic polymer
ggctcaggatgaacgctggcggcgtgcttaacacatgcaagtcgaacgggggacccctgacggagttttcggacaactgaagggaatccctagtggcggacgggtgagtaacgcgtgaggaacctgccttggagtggggaataacaggtggaaacatctgctaataccgcataatgcagcgaggccgcatggtcttgctgccaaagatttatcgctctgagatggactcgcgtctgattagcttgttggcggggtaacggcccaccaaggcgacgatcagtagccggactgagaggttggccggccacattgggactgagacacggcccagactcctacgggaggcagcagtggggaatattgggcaatgggcgcaagcctgacccagcaacgccgcgtgaaggaagaaggctttcgggttgtaaacttcttttcttggggacgaagaaagtgacggtacccaaggaataagccacggctaactacgtgccagcagccgcggtaatacgtaggtggcaagcgttatccggatttactgggtgtaaagggcgtgtaggcgggagcgcaagtcagatgtgaaaaccacgggctcaacctgtggcctgcatttgaaactgtgtttcttgagtactggagaggcagacggaattcctagtgtagcggtgaaatgcgtagatattaggaggaacaccagtggcgaaggcggtctgctggacagcaactgacgctgaggcgcgaaagcgtggggagcaaacaggattagataccctggtagtccacgctgtaaacgatggatactaggtgtggggggactgaccccctccgtgccgcagttaacacaataagtatcccacctggggtgtacgatcgcaaggttgaaactcaaaggaattgacgggggcccgcacaagcggtggagtatgtggtttaattcgaagcaacgcgaagaaccttaccagggcttgacatcccggcgaccggtgtagagatacactttcttcttcggaagcgccggtgacaggtggtgcatggttgtcgtcagctcgtgtcgtgagatgttgggttaagtcccgcaacgagcgcaacccttattgttagttgctacgcaagagcactctagcgagactgccgttgacaaaacggaggaaggtggggacgacgtcaaatcatcatgccccttatgtcctgggccacacacgtactacaatggtggtcaacagagggaagcaatactgtgaagtggagcaaatccctaaaagccatcccagttcggatcgcaggctgcaacccgcctgcgtgaagttggaatcgctagtaatcgcggatcagcatgccgcggtgaatacgttcccgggccttgtacacaccgcccgtcacaccatgagagtcgggaacacccgaagtccgtagcctaacagcaatgggggcgcggccgaaggtgggttcgataattggggtgaagtcgtaacaaggta

SEQ ID NO: 2366 - DNA, 1371 bp, Artificial Sequence; identical to SEQ ID NO: 698
  Synthetic polymer

SEQ ID NO: 2367 - DNA, 1344 bp, Artificial Sequence; identical to SEQ ID NO: 699
  Synthetic polymer

SEQ ID NO: 2368 - DNA, 1458 bp, Artificial Sequence; identical to SEQ ID NO: 63
  Synthetic polymer

SEQ ID NO: 2369 - DNA, 1357 bp, Artificial Sequence; identical to SEQ ID NO: 727
  Synthetic polymer

SEQ ID NO: 2370 - DNA, 1398 bp, Artificial Sequence
  Synthetic polymer
ttcgcccttagagttttatcctggcccaggacgaacgctggcggcgtgcttaacacatgcaagtcgaacggggcacccctgagggagttttcggacaacggatgggaatgcttagtggcggactggtgagtaacgcgtgaggaacctgcctttcggagggggacaacagttggaaacgactgctaataccgcatgatacatcgaagccgcatggctttgatgtcaaagatttatcgccgaaagatggcctcgcgtctgatcagcttgttggtgaggtaacggctcaccaaggcgacgatcagtagccggactgagaggttggccggccacattgggactgagatacggcccagactcctacgggaggcagcagtggggaatattgggcaatgggcgcaagcctgacccagcaacgccgcgtgagggaagaaggctttcgggttgtaaacttcttttaagggggaagagcggaagacggtaccccttgaataagccacggctaactacgtgccagcagccgcggtaatacgtaggtggcaagcgttgtccggatttactgggtgtaaagggcgtgcagccggagaggcaagtcagatgtgaaatccgcgggctcaacccgcgaactgcatttgaaactgcttcccttgagtatcggagaggtaaccggaattcctagtgtagcggtgaaatgcgtagatattaggaagaacaccagtggcgaaggcgggttactggacgacaactgacggtgaggcgcgaaagcgtggggagcaaacaggattagataccctggtagtccacgctgtaaacgatcgatactaggtgtgcggggactgaccccctgcgtgccggagttaacacaataagtatcgcacctggggagtacgatcgcaaggttgaaactcaaaagaattgacgggggcccgcacaagcggtggattatgtggtttaattcgaagcaacgcgaagaaccttaccagggcttgacatcctgctaacgaagtagagatacattaggtgcccttcggggaaagcagagacaggtggtgcatggttgtcgtcagctcgtgtcgtgagatgttgggttaagtcccgcaacgagcgcaacccttattgttagttgctacgcaagagcactctaacgagactgccgttgacaaaacggaggaaggtggggacgacgtcaaatcatcatgccccttacgtcctgggccacacacgtactacaatggcggccaacaaagagaggcaagaccgcgaggtggagcaaatctcaaaaagccgtcccagttcggatcgcaggctgcaacccgcctgcgtgaagttggaatcgctagtaatcgcggatcagcatgccgcggtgaatacgttcccgggccttgcactcaccgcccgtca

SEQ ID NO: 2371 - DNA, 1454 bp, Artificial Sequence; identical to SEQ ID NO: 518
  Synthetic polymer

SEQ ID NO: 2372 - DNA, 1401 bp, Artificial Sequence; identical to SEQ ID NO: 695
  Synthetic polymer

SEQ ID NO: 2373 - DNA, 1498 bp, Artificial Sequence; identical to SEQ ID NO: 944
  Synthetic polymer

SEQ ID NO: 2374 - DNA, 1378 bp, Artificial Sequence
  Synthetic polymer
agagtttgatcctggctcagattgaacgctggcggcgtgcttaacacatgcaagtcgaacgcgaaagggggcttcggctcccgagtagagtggcgcacgggtgagtaacgcgtggataatctgccctcttgttcgggataactgctggaaacggcagctgataccgcatatgcgcacagcgccgcatggcgcagtgcggaaagggagcgattccggcatgcgatgggtccgcgtccgattagcttgttggcggggcagcggcccaccaaggcgacgatcggtagccggcctgagagggcggacgaccacattgggactgagacacggcccagactcctacgggaggcagcagtgggggaatattgggcaatggacgcaagtctgacccagcaacgccgcgtgaaggaagaaggccttcgggttgtaaacttcttttaagggggaagagcggaagacggtaccccttgaataagccacggctaactacgtgccagcagccgcggtaatacgtaggtggcaagcgttgtccggatttactgggtgtaaagggcgtgcagccggagagacaagtcagatgtgaaatccacgggctcaacccgtgaactgcatttgaaactgtttcccttgagtgtcggagaggtaatcggaattccttgtgtagcggtgaaatgcgtagatataaggaagaacaccagtggcgaaggcggattactggacgataactgacggtgaggcgcgaaagcgtggggagcaaacaggattagataccctggtagtccacgctgtaaacgatcgatactaggtgtgcggggactgaccccctgcgtgccggagttaacacaataagtatcgcacctggggagtacgatcgcaaggttgaaactcaaaggaattgacgggggcccgcacaagcggtggattatgtggtttaattcgaagcaacgcgaagaaccttaccagggcttgacatcctgctaacgaagtagagatacattaggtgcccttcggggaaagcagagacaggtggtgcatggttgtcgtcagctcgtgtcgtgagatgttgggttaagtcccgcaacgagcgcaacccctattgttagttgctacgcaagagcactctagcgagactgccgttgacaaaacggaggaaggcggggacgacgtcaaatcatcatgccccttatgtcctgggctacacacgtaatacaatggcggttaacaaagggatgcaaagccgcgaggcagagcgaaccccaaaaagccgtcccagttcggatcgcaggctgcaacccgcctgcgtgaagtcggaatcgctagtaatcgcggatcagcatgtcgcggtgaatacgttcccgggccttgtacacaccgcccgtca

SEQ ID NO: 2375 - DNA, 1398 bp, Artificial Sequence; identical to SEQ ID NO: 201
  Synthetic polymer

SEQ ID NO: 2376 - DNA, 1492 bp, Artificial Sequence
  Synthetic polymer
agagtttgatcctggctcaggacgaacgctggcggcgtgcttaacacatgcaagtcgaacggagcacccttgacggagttttcggacaactgataggaatgcttagtggcggactggtgagtaacgcgtgaggaacctgcctttcagagggggacaacagttggaaacgactgctaataccgcatgacacatttgagcggcatcgcttggatgtcaaagattttatcgctgaaagatggcctcgcgtctgattagctagttggtgaggtaacggcccaccaaggcgacgatcagtagccggactgagaggttgaccggccacattgggactgagatacggcccagactcctacgggaggcagcagtggggaatattgggcaatggacgcaagtctgacccagcaacgccgcgtgaaggaagaaggctttcgggttgtaaacttcttttaagagggaacagtagaagagggtacctcttgaataagccacggctaactacgtgccagcagccgcggtaatacgtaggtggcaagcgttgtccggatttactgggtgtaaagggcgtgtagccggggagacaagtcagatgtgaaatctggaggcttaacctccaaactgcatttgaaactgtttctcttgagtatcggagaggtaatcggaattcctagtgtagcggtgaaatgcgtagatattaggaagaacaccagtggcgaaggcggattactggacgacaactgacggtgaggcgcgaaagcgtggggagcaaacaggattagataccctggtagtccacgctgtaaacgatcaatactaggtgtgcggggactgaccccctgcgtgccgcagttaacataataagtattccacctggggagtacgaccgcaaggttgaaactcaaaggaattgacgggggcccgcacaagcagtggattatgtggtttaattcgacgcaacgcgaagaaccttaccaggatttgacatccaactaacgaagcagagatgcattaggtgcccttcggggaaagttgagacaggtggtgcatggttgtcgtcagctcgtgtcgtgagatgttgggttaagtcccgcaacgagcgcaacccctattgttagttgctgcgaaagagcactctagcgagactgccgttgacaaaacggaggaaggcggggacgacgtcaaatcatcatgccccttatgtcctgggctacacacgtaatacaatggtggttaacagagggaagcaagactgcgaagtggagcaaacccctaaaagccatctcagttcggattgcaggctgcaactcgcctgcatgaagctggaattgctagtaatcgcggatcagcatgccgcggtgaatacgttcccgggccttgtacacaccgcccgtcacaccatgagagtcgggaacacccgaagtccgtagtctaaccgcaaggggggcgcggccgaaggtgggtccggtaattggggtgaagtcgtaacaaggtaacc

SEQ ID NO: 2377 - DNA, 1491 bp, Artificial Sequence; identical to SEQ ID NO: 468
  Synthetic polymer

SEQ ID NO: 2378 - DNA, 1487 bp, Artificial Sequence
  Synthetic polymer
agtttgatcatggctcaggatgaacgctggcggcgtgcttaacacatgcaagtcgaacggggtacccatgacagaggcttcggccaattgattggaatacctagtggcggacgggtgagtaacgcgtgaggaacctgccttggagtggggaataacaactggaaacagttgctaataccgcatgaaatgtctgtgtcgcatggcacaggacatcaaagatttatcgctctgagatggcctcgcgcctgattagctagttggtggggtaacggctcaccaaggcgacgatcagtagccggactgagaggttggccggccacattgggactgagacacggcccagactcctacgggaggcagcagtggggaatattgggcaatgggcgcaagcctgacccagcaacgccgcgtgaaggaagaaggctttcgggttgtaaacttcttttctgagggacgatagtgacggtacctcaggaataagccacggctaactacgtgccagcagccgcggtaatacgtaggtggcaagcgttatccggatttactgggtgtaaagggcgtgtaggcgggactgcaagtcagatgtgaaaaccagaggctcaacctctggcctgcatttgaaactgtagttcttgagtgttggagaggcaggcggaattccgtgtgtagcggtgaaatgcgtagatatacggaggaacaccagtggcgaaggcggcctgctggacaataactgacgctgaggcgcgaaagcgtggggagcaaacaggattagataccctggtagtccacgctgtaaacgatggatactaggtgtggggggtctgaccccctccgtgccgcagttaacacaataagtatcccacctggggagtacgatcgcaaggttgaaactcaaaggaattgacgggggcccgcacaagcggtggagtatgtggtttaattcgaagcaacgcgaagaaccttaccagggcttgacatggggatgaccgcgctagagatagcgtttcctcttcggaggcatcccacacaggtggtgcatggttgtcgtcagctcgtgtcgtgagatgttgggttaagtcccgcaacgagcgcaacccttattgttagttgctacgcaagagcactctagcgagactgccgttgacaaaacggaggaaggtggggacgacgtcaaatcatcatgccccttatgtcctgggccacacacgtactacaatggtggtcaacagagggaagcaagaccgcgaggtggagcaaatccctaaaagccatcccagttcggattgcaggctgcaacccgcctgtatgaagttggaatcgctagtaatcgcggatcagcatgccgcggtgaatacgttcccgggccttgtacacaccgcccgtcacaccatgagagtcgggaacacccgaagtccgtagtctaaccgcaagggggacgcggccgaaggtgggttcgataattggggtgaagtcgtaacaaggtaccc

SEQ ID NO: 2379 - DNA, 1452 bp, Artificial Sequence; identical to SEQ ID NO: 72
  Synthetic polymer

SEQ ID NO: 2380 - DNA, 1398 bp, Artificial Sequence
  Synthetic polymer
ttagagttagatcctggctcaggatgccttctggcggcgtgcttaacacatgcaagtcgaacggagtgcccaagaaggaggattcgtccaacggattgggttacttagtggcggacgggtgagtaacgcgtgaggaacctgccttggagtggggaataacgattggaaacagtcgctaataccgcatgatgcagttgggccgcatggctctgactgccaaagatttatcgctctgagatggcctcgcgtctgattaggcagttggcggggtaacggcccaccaaaccgacgatcagtagccggactgagaggttggccggccacattgggactgagacacggcccagactcctacgggaggcagcagtggggaatattgggcaatgggcggaagcctgacccagcaacgccgcgtgaaggaagaaggctttcgggttgtaaacttcttttatcagggacgaagcaagtgacggtacctgatgaataagccacggctaactacgtgccagcagccgcggtaatacgtaggcggcaagcgttatccggatttattgggtgtaaagggcgtgtaggcgggactgcaagtcagatgtgaaaaccagaggctcaacctctggcctgcatttgaaactgtagttcttgagtgctggagaggcaatcggaattccgtgtgtagcggtgaaatgcgtagatatacggaggaacaccagtggcgaaggcggattgctggacagtaactgacgctgaggcgcgaaagcgtggggagcaaacaggattagataccctggtagtccacgccgtaaacgatggatactaggtgtggggggactgaccccctccgtgccgcagttaacacaataagtatcccacctggggagtacgatcgcaaggttgaaactcaaaggaattgacgggggcccgcacaagcggtggagtatgtggtttaattcgaagcaacgcgaagaaccttaccagggcttgacatcccgctaacgaggcagagatgcgtcaggtgcccttcggggaaagcggagacaggtggtgcatggttgtcgtcagctcgtgtcgtgagatgttgggttaagtcccgcaacgagcgcaacccctattgccggttgccatcattaagttgggcactcaggcgagactgccggcgacaagtcggaggaaggtggggatgacgtcaaatcatcatgccccttatgtccagggctacacacgtactacaatggccatcaacaacgaggagcaaagccgcgaggcggagcaaatctccaaacatggtcccagttcagattgcaggctgcaactcgcctgtatgaagtcggaattgctagtaatcgcggatcagcatgccgcggtgaatacgttcccgggccttgcacacaccgcccgtca

SEQ ID NO: 2381 - DNA, 1392 bp, Artificial Sequence
  Synthetic polymer
ttcgcccttagagtttgatcctggctcagaacgaactctggcggcgtggataagacatgcaagtcgaacgagagaattgctagcttgctaataattctctagtggcgcacgggtgagtaacgcgtgagtaacctgccttggagtggggaataacagctggaaacagctgctaataccgcataatatgtctgtgtcgcatggcactggacatcaaagatttatcgctctgagacggactcgcgtctgattagctagttggcggggtaacggcccaccaaggcgacgatcagtagccggactgagaggttggccggccacattgggactgagacacggcccagactcctacgggaggcagcagtggggaatattgggcaatgggcgcaagcctgacccagcaacgccgcgtgaaggaagaaggctttcgggttgtaaacttcttttctcagggacgaagcaagtgacggtacctgaggaataagccacggctaactacgtgccagcagccgcggtaatacgtaggtggcaagcgttatccggatttactgggtgtaaagggcgtgtaggcgggactgcaagtcagatgtgaaaaccacgggctcaacctgtggcctgcatttgaaactgtagttcttgagtactggagaggcagacggaattcctagtgtagcggtgaaatgcgtagatattaggaggagcaccagtggcgaaggcggtctgctggacagcaactgacgctgaggcgcgaaagcgtggggagcaaacaggattagataccctggtagtccacgctgtaaacgatggatactaggtgtggggggactgaccccctccgtgccgcagttaacacaataagtatcccacctggggagtacgatcgcaaggttgaaactcaaaggaattgacgggggcccgcacaagcggtggagtatgtggtttaattcgaagcaacgcgaagaaccttaccagggcttgacatcccgatgaccggcatagagatatgcttttctcttcggagacatcggagacaggtggtgcatggttgtcgtcagctcgtgtcgtgagatgttgggttaagtctcgcaacgagcgcaacccctgcccgcagtagccagcacgttgaggtgggcactctgcggggactgccggggacaacccggaggaaggcggggacgacgtcaaatcatcatgccccttatggcctgggcgacacacgtgctacaatggcgccgacagagggatgcgaagcggcgacgcggagcgaaccccaaaaacggcgccccagttcggattgtagtctgcaacccgactacatgagccggaatcgctagtaatcgcggatcagaacgccgcggtgaatacgttcccgggtcttgcacacaccgcccgtca

SEQ ID NO: 2382 - DNA, 1394 bp, Artificial Sequence
  Synthetic polymer
agagtttgatcctggctcaggatgaacgctggcggcgtgcttaacacatgcaagtcgaacgagaaccattggatcgaggattcgtccaagtgaaggtggggaaagtggcggacgggtgagtaacgcgtgagcaatctgccttggagtggggaataacggctggaaacagccgctaataccgcatgatacagctgggaggcatctccctggctgtcaaagatttatcgctctgagatgagctcgcgtctgattagctagttggcggggtaacggcccaccaaggcgacgatcagtagccggactgagaggttggccggccacattgggactgagacacggcccagactcctacgggaggcagcagtggggaatattgggcaatgggcgcaagcctgacccagcaacgccgcgtgaaggaagaaggctttcgggttgtaaacttcttttgtcagggacgaagcaagtgacggtacctgacgaataagccacggctaactacgtgccagcagccgcggtaatacgtaggtggcaagcgttatccggatttattgggtgtaaagggcgtgtaggcgggaatgcaagtcagatgtgaaaactatgggctcaacccatagcctgcatttgaaactgtatttcttgagtgctggagaggcaatcggaattccgtgtgtagcggtgaaatgcgtagatattaggaggaacaccagtggcgaaggcggcttactggactgtaactgacgttgaggctcgaaagcgtggggagcaaacaggattagataccctggtagtccacgccgtaaacgatgaatagtaggtgtcggggggcctaagccctccggtgccgcagcaaacgcattaagtattccacctggggagtacgttcgcaagaatgaaactcaaaggaattgacggggacccgcacaagcggtggagcatgtggtttaattcgaagcaacgcgaagaaccttacctggtcttgacatcccgctgaccgtcccgtaacggggactttccttcgggacagcagagacaggtggtgcatggttgtcgtcagctcgtgtcgtgagatgtcgggttaagtcccgcaacgagcgcaacccctatctttagtagccagcattccggatgggcactctagagagactgccagggacaacctggaggaaggcggggatgacgtcaaatcatcatgccccttatggccagggctacacacgtgctacaatggcgtaaacaaagggaggcagaatcgtgagatggagcaaatcccaaaaataacgtcccagttcggattgtagtctgcaacccggctacatgaagctggaatcgctagtaatcgcggatcagaatgccgcggtgaatacgttcccgggtcttgcacaaaccgcccgtca

SEQ ID NO: 2383 - DNA, 1491 bp, Artificial Sequence; identical to SEQ ID NO: 483
  Synthetic polymer

SEQ ID NO: 2384 - DNA, 1340 bp, Artificial Sequence; identical to SEQ ID NO: 728
  Synthetic polymer

SEQ ID NO: 2385 - DNA, 1399 bp, Artificial Sequence; identical to SEQ ID NO: 167
  Synthetic polymer

SEQ ID NO: 2386 - DNA, 1373 bp, Artificial Sequence
  Synthetic polymer
ggctcaggatgaacgctggcggtgtgcttaacacatgcaagtcgaacggagagctaatgacagaggattcgtccaatggaattagtttcttagtggcggacgggtgagtaacgcgtgaggaacctgccttggagtggggaataacagttggaaacagctgctaataccgcatgatgcagttgagtcgcatggctctgactgccaaagatttatcgctctgagatggcctcgcgtctgattagctagttggcggggtaacggcccaccaaggcgacgatcagtagccggactgagaggttggccggccacattgggactgagacacggcccagactcctacgggaggcagcagtggggaatattgggcaatgggcgcaagcctgacccagcaacgccgcgtgaaggaagaaggccctcgggttgtaaacttcttttcttagggacgaagcaagtgacggtacctaaggaataagccacggctaactacgtgccagcagccgcggtaatacgtaggtggcaagcgttatccggatttactgggtgtaaagggcgtgtaggcgggatggtaagtcagatgtgaaaactatgggctcaactcatagcctgcatttgaaactgctgttcttgagtactggagaggcagacggaattcctagtgtagcggtgaaatgcgtagatattaggaggacacacagtggcgaaggcggtctgctggacagcaactgacgctgaggcgcgaaagcgtggggagcaaacaggattagataccctggtagtccacgctgtaaacgatggatactaggtgtggggggactgaccccccccggccgcagttaacacataaagtatcccacctggggagtacgatcgcaaggttgaaactcaaagggaattgacgggggcccgcacaagcggtggagtatgtgatttaattcgaagcaacgcgaagaaccttaccagggcttgacatccaactaacgaagcagagatgcattaggtgcccttcggggaaagttgagacaggtggtgcatggttgtcgtcagctcgtgtcgtgagatgttggggtaattcccgcaacgagcccacctcttattgttagttgctacgcaagagcactctagcgagactgccgttgacaaaacggaggaaggtggggacgacgtcaaatcatcatgccccttatgtcctgggccacacacgtactacaatggtggttaacagagggaagcaagaccgcgaggtggagcaaacccctaaaagccatcccagttcggatcgcaggctgcaacccgcctgcgtgaagttggaatcgctagtaatcgcggatcagcatgccgcggtgaatacgttcccgggccttgcacacaccgcc

SEQ ID NO: 2387 - DNA, 1391 bp, Artificial Sequence; identical to SEQ ID NO: 392
  Synthetic polymer

SEQ ID NO: 2388 - DNA, 1436 bp, Artificial Sequence; identical to SEQ ID NO: 992
  Synthetic polymer

SEQ ID NO: 2389 - DNA, 1385 bp, Artificial Sequence; identical to SEQ ID NO: 542
  Synthetic polymer

SEQ ID NO: 2390 - DNA, 1402 bp, Artificial Sequence
  Synthetic polymer
ttcgcccttagagtttgatcctggctcaggatgaacgctggcggcgtgcttaacacatgcaagtcgaacggagtgctcttgacagagttttcggacaatggatagagttacttagtggcggacgggtgagtaacgcgtgaggaacctgccttggagtggggaataacacagtgaaaattgtgctaataccgcatgatgcagttgggtcgcatggctctgactgccaaagatttatcgctctgagatggcctcgcgtctgattagctagttggtggggtaacggcccaccaaggcgacgatcagtagccggactgagaggttggccggccacattgggactgagacacggcccagactcctacgggaggcagcagtggggaatattgggcaatgggcgcaagcctgacccagcaacgccgcgtgaaggaagaaggctttcgggttgtaaacttcttttcttagggacgaagcaagtgacggtacctaaggaataagccacggctaactacgtgccagcagccgcggtaatacgtaggtggcaagcgttatccggatttactgggtgtaaagggcgtgtaggcgggattgcaagtcagatgtgaaaactggaggctcaacctccagcctgcatttgaaactgtagttcttgagtactggagaggcagacggaattcctagtgtagcggtgaaatgcgtagatattaggaggaacaccagtggcgaaggcggtctgctggacagcaactgacgctgaggcgcgaaagcgtggggagcaaacaggattagataccctggtagtccacgctgtaaacgatggatactaggtgtggggggtctgaccccctccgtgccgcagttaaccacaataagtatcccacctggggagtcgattcgcaaggttgaaactcaaaggaattgacgggggcccgcacaagcggtggagtatgtggtttaattcgaagcaacgcgaagaaccttaccagggcttgacatcccgatgaccggcttagagataagcttttctcttcggagacatcggtgacaggtggtgcatggttgtcgtcagctcgtgtcgtgagatgttgggttaagtcccgcaacgagcgcaacccctattgccagttactacgttaagaggactctggcgagactgccgttgacaaaacggaggaaggtggggatgacgtcaaatcatcatgccctttatgacctgggctacacacgtactacaatggcgttaaacaaagagaagcaagaccgcgaggtggagcaaaactcaaaaacaacgtctcagttcggattgtagtctgcaactcgactacatgaagctggaatcgctagtaatcgcagatcagaatgctgcggtgaatacgttcccgggtcttgcactcaccgcccgtca

SEQ ID NO: 2391 - DNA, 1489 bp, Artificial Sequence
  Synthetic polymer
gtttgattctggctcaggatgaacgctggcgtcgtgcttaacacatgcaagtcgaacggagcacccctgacggagttttcggacaactgaagggaatgcttagtggcggacgggtgagtaacgcgtgagtaacctgccttggagtggggaataacagttggaaacaattgctaataccgcataatatatctgaatcgcatggttctggatatcaaagatttatcgctctgagatggactcgcgtctgattagctggttggcggggtaacggcccaccaaggcgacgatcagtagccggactgagaggttggccggccacattgggactgagacacggcccagactcctacgggaggcagcagtggggaatattgggcaatgggcggaagcctgacccagcaacgccgcgtgaaggaagaaggctttcgggttgtaaacttcttttcttagggacgaagcaagtgacggtacctaaggaataagccacggctaactacgtgccagcagccgcggtaatacgtaggtggcaagcgttatccggatttactgggtgtaaagggcgtgtaggcgggactgcaagtcagatgtgaaaaccacgggctcaacctgtggcctgcatttgaaactgtagttcttgagtactggagaggcagacggaattcctagtgtagcggtgaaatgcgtagatattaggaggaacaccagtggcgaaggcggtctgctggacagcaactgacgctgaggcgcgaaagcgtggggagcaaacaggattagataccctggtagtccacgctgtaaacgatggatactaggtgtggggggactgaccccctccgtgccgcagttaacacaataagtatcccacctggggagtacgatcgcaaggttgaaactcaaaggaattgacgggggcccgcacaagcggtggagtatgtggtttaattcgaagcaacgcgaagaaccttaccagggcttgacatcccgaggcccggtgtagagatacacctttctcttcggagacctcggtgacaggtggtgcatggttgtcgtcagctcgtgtcgtgagatgttgggttaagtcccgcaacgagcgcaacccttattgttagttgctacgcaagagcactctagcgagactgccgttgacaaaacggaggaaggtggggacgacgtcaaatcatcatgccccttatgtcctgggccacacacgtactacaatggtggttaacagagggaagcaatatcgcgagatggagcaaatccctaaaagccatcccagttcggatcgcaggctgcaacccgcctgcgtgaagttggaatcgctagtaatcgcggatcagcatgccgcggtgaatacgttcccgggccttgtacacaccgcccgtcacaccatgagagtcgggaacacccgaagtccgtagcctaaccgcaaggggggcgcggccgaaggtgggttcgataattggggggaagtcgtaaaaaggtagcc

SEQ ID NO: 2392 - DNA, 1492 bp, Artificial Sequence; identical to SEQ ID NO: 822
  Synthetic polymer

SEQ ID NO: 2393 - DNA, 1390 bp, Artificial Sequence; identical to SEQ ID NO: 116
  Synthetic polymer

SEQ ID NO: 2394 - DNA, 1353 bp, Artificial Sequence; identical to SEQ ID NO: 472
  Synthetic polymer

SEQ ID NO: 2395 - DNA, 1434 bp, Artificial Sequence; identical to SEQ ID NO: 1089
  Synthetic polymer

SEQ ID NO: 2396 - DNA, 1399 bp, Artificial Sequence
  Synthetic polymer
ttcgcccttagagtttgatcctggctcaggatgaacgctggcggcgtgcttaacacatgcaagtcgaacggggcacccctgaaggagttttctgacaactgaagggaatgcttagtggcggacgggtgagtaacgcgtgagtaacctgccttggagtggggaataacagttggaaacagctgctaataccgcatgatgcagttgagtcgcatggctctgactgccaaagatttatcgctctgagatggactcgcttctgattacctagttggcggggtaacggcccaccaaggcgacgatcagtagccggactgagaggttggccggccacattgggactgagacacggcccagactcctacgggaggcagcagtggggaatattgggcaatgggcgcaggcctgacccagcaacgccgcgtgaaggaagaaggctttcgggttgtaaacttcttttctcagggacgaagaaagtgacggtacctgaggaataagccacggctaactacgtgccagcagccgcggtaatacgtaggtggcaagcgttatccggatttactgggtgtaaagggcgtgtaggcgggagtgcaagtcagatgtgaaaaccatgggctcaacctgtggcctgcatttgaaactgtacttcttgagtactggagaggcagacggaattcctagtgtagcggtgaaatgcgtagatattaggaggaacaccagtggcgaaggcggtctgctggacagcaactgacgctgaggcgcgaaagcgtggggagcaaacaggattagataccctggtagtccacgctgtaaacgatggatactaggtgtggggggactgaccccctccgtgccgcagttaacacaataagtatcccacctggggagtacgatcgcaaggttgaaactcaaaggaattgacgggggcccgcacaagcggtggagtatgtggtttaattcgaagcaacgcgaagaaccttaccagggcttgacatcccactgaccggtgtagagatacacttttctcttcggagacagtggagacaggtggtgcatggttgtcgtcagctcgtgtcgtgagatgttgggttaagtcccgcaacgagcgcaacccctattgttagttgctacgcgagagcactctagcgagactgccgttgacaaaacggaggaaggtggggacgacgtcaaatcatcatgccccttatgtcctgggctacacacgtactacaatggcggtcaacagagggaggcaataccgcgaggtggagcaaacccctaaaagccgtcccagttcggattgcaggctgcaacccgcctgtatgaagttggaatcgctagtaatcgcggatcagcatgccgcggtgaaaaggttcccgggccttgtacacaccgcccgtca

SEQ ID NO: 2397 - DNA, 1398 bp, Artificial Sequence
  Synthetic polymer
ttcgcccttagagtttgatcctggctcaggacgaacgctggcggcgtgcttaacacatgcaagtcgaacggagcacccctgaaggagttttcggacaacggatgggaatgcttagtggcggactggtgagcaacgcgtgaggaacctgccttccagagggggacaacagttggaaacgactgctaataccgcatgatgcgttggagccgcatgactccgacgtcaaagatttatcgctggaagatggcctcgcgtctgattagctagttggtgaggtaacggcccaccaaggcgacgatcagtagccggactgagaggttggccggccacattgggactgagatacggcccagactcctacgggaggcagcagtggggaatattgggcaatggacgcaagtctgacccagcaacgccgcgtgaaggaagaaggctttcgggttgtaaacttcttttaagggggaagagcagaagacggtaccccttgaataagccacggctaactacgtgccagcagccgcggtaatacgtaggaggcaagcgttatccggatttattgggtgtaaagggcgtgtaggcgggaatgcaagtcagatgtgaaaactatgggctcaacccatagcctgcatttgaaactgtatttcttgagtgctggagaggcaatcggaattccgtgtgtagcggtgaaatgcgtagatatacggaggaacaccagtggcgaaggcggattgctggacagtaactgacgctgaggcgcgaaagcgtggggagcaaacaggattagataccctggtagtccacgccgtaaacgatggatactaggtgtggggggactgaccccctccgtgccgcagctaacgcaataagtatcccacctggggagtacgatcgcaaggttgaaactcaaaggaattgacgggggcccgcacaagcggtggagtatgtggtttaattcgaagcaacgcgaagaaccttaccagggcttgacatcctactaacgaagcagagatgcattaggtgcccttcggggaaagtagagacaggtggtgcatggttgtcgtcagctcgtgtcgtgagatgttgggttaagtcccgcaacgagcgcaacccctattgttagttgctacgcaagagcactctagcgagactgccgttgacaaaacggaggaaggtggggacgacgtcaaatcatcatgccccttacgtcctgggccacacacgtactacaatggcggttaacaaagagaggcaagaccgcgaggtggagcaaatctcaaaaagccgtcccagttcggatcgcaggctgcaacccgcctgcgtgaagttggaatcgctagtaatcgcggatcagcatgccgcggtgaatacgttcccgggccttgcacacaccgcccgtca

SEQ ID NO: 2398 - DNA, 1388 bp, Artificial Sequence; identical to SEQ ID NO: 834
  Synthetic polymer

SEQ ID NO: 2399 - DNA, 1388 bp, Artificial Sequence; identical to SEQ ID NO: 606
  Synthetic polymer

SEQ ID NO: 2400 - DNA, 1397 bp, Artificial Sequence; identical to SEQ ID NO: 554
  Synthetic polymer

SEQ ID NO: 2401 - DNA, 1353 bp, Artificial Sequence; identical to SEQ ID NO: 712
  Synthetic polymer

SEQ ID NO: 2402 - DNA, 1393 bp, Artificial Sequence; identical to SEQ ID NO: 684
  Synthetic polymer

SEQ ID NO: 2403 - DNA, 1395 bp, Artificial Sequence; identical to SEQ ID NO: 206
  Synthetic polymer

SEQ ID NO: 2404 - DNA, 1489 bp, Artificial Sequence; identical to SEQ ID NO: 917
  Synthetic polymer

SEQ ID NO: 2405 - DNA, 1375 bp, Artificial Sequence
  Synthetic polymer
agagtttgattatggctcaggatgaacgctggcggcgtgcttaacacatgcaagtcgaacgggaactatgggaaagagttttcggacaatggaacatagttttagtggcggacgggtgagtaacgcgtgaggaacctgccttggagaggggaataacacagagaaatttgtgctaataccgcataacgcatgggtgccgcatggtaccaatgccaaagattttatcgctctgagatggcctcgcgtctgattaggcagttggcggggtaacggcccaccaaaccgacgatcagtagccggactgagaggttggccggccacattgggactgagacacggcccagactcctacgggaggcagcagtggggaatattgggcaatgggcgcaagcctgacccagcaacgccgcgtgaaggaagaaggctttcgggttgtaaacttcttttattcgggacgaagaaagtgacggtacccgaatgaataaggccacggctaactacgtgccagcagccgcggtaatacgtaggtggcaagcgttatccggatttactgggtgtaaagggcgtgtaggcgggagtgcaagtcagatgtgaaaactatgggctcaacccatagcctgcatttgaaactgtacttcttgagtactggagaggcaggcggaattccgtgtgtagcggtgaaatgcgtagatatacggaggaacaccagtggcgaaggcggcctgctggacagcaactgacgctaaggcgcgaaagcgtgggtagcaaacaggattagataccctggtagtccacgctgtaaacgatcgatactaggtggtggggggactgaccccctccgtgccgcagctaacgcaataagtatcgcacctggggagtacgatcgcaaggttgaaactcaaaggaattgacgggggcccgcacaagcggtggagtatgtggtttaattcgaagcaacgcgaagaaccttaccagggcttgacatcctgctaacgaaatagagatatatcaggtgcccttcggggaaagcagagacaggtggtgcatggttgtcgtcagctcgtgtcgtgagatgttgggttaagtcccgcaacgagcgcaacccttattgttagttgctacgcaagagcactctagcgagactgccgttgacaaaacggaggagggtggggacgacgtcaaatcatcatgccccttatgtcctgggctacacacgtactacaatggcggtcaacagagggaggcaaagccgtgaggtggagcaaacccctaaaagccgtcccagttcggattgcaggctgaaacccgcctgtatgaagttggaatcgctagtaatcgcggatcagcatgccgcggtgaatacgttcccgggcct

SEQ ID NO: 2406 - DNA, 1395 bp, Artificial Sequence; identical to SEQ ID NO: 425
  Synthetic polymer

SEQ ID NO: 2407 - DNA, 1474 bp, Artificial Sequence
  Synthetic polymer
ctcaggatgaacgctggcggcgtgcttaacacatgcaagtcgaacgagaatcagtggaacaaggattcgtctaagggaagctgaggaaagtggcggacgggtgagtaacgcgtgagcaatctgccttggagtggggaataacggttggaaacagccgctaataccgcatgatgtatctgtgtcgcatggcactggataccaaagatttatcgctctgaaatgagctcgcgtctgattagctggttggcggggtaatggcccaccaaggcgacgatcagtagccggactgagaggttggccggccacattgggactgagacacggcccagactcctacgggaggcagcagtggggaatattgggcaatgggcgcaagcctgacccagcaacgccgcgtgaaggaagaaggctttcgggttgtaaacttcttttaagagggacgaaacaaatgacggtacctcttgaataagccacggctaactacgtgccagcagccgcggtaatacgtaggtggcaagcgttatccggatttattgggtgtaaagggcgtgtaggcgggatagcaagtcagatgtgaaaactatgggctcaacccatagcctgcatttgaaactgttattcttgagtgctggagaggcaatcggaattccgtgtgtagcggtgaaatgcgtagatatacggaggaacaccagtggcgaaggaggattgctggacagtaactgacgctgaggcgcgaaagcgtggggagcaaacaggattagataccctggtagtccacgccgtaaacgatggatactaggtgtggggggactgaccccctccgtgccgcagctaacgcaataagtatcccacctggggagtacgatcgcaaggttgaaactcaaaggaactgacgggggcccgcacaagcggtggagtatgtggtttaattcgaagcaacgcgaagaaccttaccagggcttgacatcctactaacgaagcagagatgcattaggtgcccttcggggaaagtagagacaggtggtgcatggttgtcgtcagctcgtgtcgtgagatgttgggttaagtcccgcaacgagcgcaacccctattgttagttgctacgcaagagcactctagcgagactgccgttgacaaaacggaggaaggtggggacgacgtcaaatcatcatgccccttatgtcctgggcgacacacgtactacaatggcggccaacaaagagaggcaagaccgcgaggtggagcaaatctcaaaaagccgtctcagttcggatcgcaggctgcaacccgcctgcgtgaagttggaatcgctagtaatcgcggatcagcatgccgcggtgaatacgttcccgggccttgtacacaccgcccgtcacaccatgagagtcgggggcacccgaagtccgtagcctaaccgcaaggggggcgcggccgaaggtggattcgataattggggtgaagtcgtaacaaggta

SEQ ID NO: 2408 - DNA, 1398 bp, Artificial Sequence
  Synthetic polymer
ttcgcccttagagtttgatcctggctcaggatgaacgctggcggcgtgcttaacacatgcaagtcgaacggaggacccttgacggagttttcggacaacggataggaatccttagtggcggacgggtgagtaacgcgtgaggaacctgccttggagaggggaataacacagagaaatttgtgctaataccgcatgatgcagttgggtcgcatggctctgactgccaaagatttatcgctctgagatggcctcgcgtctgattagctagttggtagggtaacggcctaccaaggcgacgatcagtagccggactgagaggttgaccggccacattgggactgagacacggcccagactcctacgggaggcagcagtggggaatattgggcaatgggcgcaagcctgacccagcaacgccgcgtgaaggaagaaggctttcgggttgtaaacttcttttatgagggacgaaggaagtgacggtacctcatgaataagctccggctaactacgtgccagcagccgcggtaatacgtagggagcgagcgttatccggatttactgggtgtaaagggcgtgtaggcggggaagcaagtcagatgtgaaaaccagtggctcaaccactggcctgcatttgaaactgtttttcttgagtgatggagaggcaggcggaattccgtgtgtagcggtgaaatgcgtagatatacggaggaacaccagtggcgaaggcggcctgctggacattaactgacgctgaggcgcgaaagcgtggggagcaaacaggattagataccctggtagtccacgctgtaaacgatggatactaggtgtggggggactgaccccctcagtgccgcagttaacacaataagtaatccacctggggagtacgaccgcaaggttgaaactcaaaggaattgacgggggcccgcacaagcagtggagtatgtggtttaattcgaagcaacgcgaagaaccttaccaggtcttgacatccgatgcataacacagagatgtgtgaaatccttcgggacatcgagacaggtggtgcatggttgtcgtcagctcgtgtcgtgagatgttgggttaagtcccgcaacgagcgcaacccttattgccagttactacgttaagaggactctggcgagactgccgttgacaaaacggaggaaggtggggatgacgtcaaatcatcatgccctttatgacctgggctacacacgtactacaatggcgttaaacaaagagaagcaagaccgcgaggtggagcaaaactcaaaaacaacgtctcagttcagattgcaggctgcaactcgcctgcatgaagtcggaattgctagtaatcgcggatcagcatgccgcggtgaatacgttcccgggccttgcacacacagcccgtca

SEQ ID NO: 2409 - DNA, 1375 bp, Artificial Sequence; identical to SEQ ID NO: 569
  Synthetic polymer

SEQ ID NO: 2410 - DNA, 1399 bp, Artificial Sequence; identical to SEQ ID NO: 644
  Synthetic polymer

SEQ ID NO: 2411 - DNA, 1481 bp, Artificial Sequence; identical to SEQ ID NO: 826
  Synthetic polymer

SEQ ID NO: 2412 - DNA, 1393 bp, Artificial Sequence
  Synthetic polymer
ttagagtttgatcctggctcaggatgatcgctggcggcgtgcttaacacatgcaagtcgaacggagtgccttcgaaagaggattcgtccaattgataaggttacttagtggcggacgggtgagtaacgcgtgaggaacctgccttggagtggggaataacacagtgaaaattgtgctaataccgcataatgcagttgggtcgcatgactctgactgccaaagatttatcgctctgagatggcctcgcgtctgattagctagttggtggggtaacggcccaccaaggcgacgatcagtagccggactgagaggttggccggccacattgggactgagacacggcccagactcctacgggaggcagcagtggggaatattgggcaatgggcgcaagcctgacccagcaacgccgcgtgaaggaagaaggctttcgggttgtaaacttcttttcttagggacgaagcaagtgacggtacctaaggaataagccacggctaactacgtgccagcagccgcggtaatacgtaggtggcaagcgttatccggatttactgggtgtaaagggcgtgtaggcgggattgcaagtcagatgtgaaaaccacgggctcaacctgtggcctgcatttgaaactgtagttcttgagtactggagaggcagacggaattcctagtgtagcggtgaaatgcgtagatattaggaggaacaccagtggcgaaggcggtctgctggacagcaactgacgctgaggcgcgaaagcgtggggagcaaacaggattagataccctggtagtccacgctgtaaacgatggatactaggtgtgggggggtctgaccccctccgtgccgcagttaacacaataagtatcccacctggggagtacgatcgcaaggttgaaactcaaaggaattgacgggggcccgcacaagcggtggagtatgtggtttaattcgaagcaacgcgaagaaccttaccagggcttgacatcccgaggcccgctctagagatagagctttctcttcggagacctcggtgacaggtggtgcatggttgtcgtcagctcgtgtcgtgagatgttgggttaagtcccgcaacgagcgcaacccctattgttagttgctacgcaagagcactctagcgagactgccgttgacaaaacggaggaaggtggggacgacgtcaaatcatcatgccccttatgacctgggctacacacgtaatacaatggtcattaacagagggaagcaaagccgcgaggcagagcaaaaccccaaaaatgatctcagttcggatcgcaggctgcaacccgcctgcgtgaagttggaattgctagtaatcgcagatcagcatgctgcggtgaatacgttcccgggccttgcacacaccgcccgtca

SEQ ID NO: 2413 - DNA, 1491 bp, Artificial Sequence
  Synthetic polymer
ctggctcaggatgaacgctggcggcgtgcttaacacatgcaagtcgaacgagaatcacatgacggagttttcggacaactgattgtgaggaaagtggcggacgggtgagtaacgcgtgaggaacctgccttggagtggggaataacagttggaaacagctgctaataccgcatgatgcaattatctcgcatgggattgattgccaaagatttatcgctctgagatggcctcgcgtctgattagctggttggcggggtaacggcccaccaaggcgacgatcagtagccggactgagaggttggccggccacattgggactgagacacggcccagactcctacgggaggcagcagtggggaatattgggcaatgggcgcaagcctgacccagcaacgccgcgtgaaggaagaaggctttcgggttgtaaacttcttttattcgggacgaagagatgacggtaccgaatgaataagccacggctaactacgtgccagcagccgcggtaatacgtaggtggcaagcgttatccggatttattgggtgtaaagggcgtgtaggcggggctgcaagtcagatgtgaaaaccatgggctcaactcatggcctgcatttgaaactgtagctcttgagtgtcggagaggcaatcggaattccgtgtgtagcggtgaaatgcgtagatatacggaggaacaccagtggcgaaggcggattgctggacgataactgacgctgaggcgcgaaagcgtggggagcaaacaggattagataccctggtagtccacgccgtaaacgatggatactaggtgtggggggactgaccccctccgtgccgcagcaaacgcaataagtatcccacctggggagtacgatcgcaaggttgaaactcaaaggaattgacgggggcccgcacaagcggtggagtatgtggtttaattcgaagcaacgcgaagaaccttaccagggcttgacatcctactaacgaaccagagatggattaggtgcccttcggggaaagtagagacaggtggtgcatggttgtcgtcagctcgtgtcgtgagatgttgggttaagtcccgcaacgagcgcaacccttattgttagttgctacgcaagagcactctagcgagactgccgttgacaaaacggaggaaggtggggacgacgtcaaatcatcatgccccttatgtcctgggccacacacgtactacaatggcggaaaacaaagagaggcaagaccgcgaggtggagcaaatctcaaaaagccgtcccagttcggattgcaggctgcaacccgcctgcatgaagttggaatcgctagtaatcgcggatcagcatgccgcggtgaatacgttcccgggccttgtacacaccgcccgtcacaccatgagagtcgggaacacccgaagtccgtagcctaaccgcaaggggggcgcggccgaaggtgggttcgataattggggtgaagtcgtaacaaggtagccgtatcggaagg

SEQ ID NO: 2414 - DNA, 1446 bp, Artificial Sequence
  Synthetic polymer
ggcggcgtgcttaacacatgcaagtcgaacggagtgcccatgacagaggattcgtccaatggattgggttacttagtggcggacgggtgagtaacgcgtgaggaacctgcctcggagtggggaataacacaacgaaagctgtgctaataccgcatgatacagttgggtcgcatgactctgactgtcaaagatttatcgctctgagatggcctcgcgtctgattagctagttggtggggtaacggcccaccaaggcgacgatcagtagccggactgagaggttgaccggccacattgggactgagacacggcccagactcctacgggaggcagcagtggggaatattgggcaatgggcgcaagcctgacccagcaacgccgcgtgaaggaagaaggctttcgggttgtaaacttcttttctcagggacgaagcaagtgacggtacctgaggaataagccacggctaactacgtgccagcagccgcggtaatacgtaggtggcaagcgttatccggatttactgggtgtaaagggcgtgtaggcgggatcgcaagtcagatgtgaaaactggaggctcaacctccagcctgcatttgaaactgtggttcttgagtactggagaggcagacggaattcctagtgtagcggtgaaatgcgtagatattaggaggaacaccagtggcgaaggcagtctgctggacagcaactgacgctgaggcgcgaaagcgtggggagcaaacaggattagataccctggtagtccacgctgtaaacgatggaacaggtgtgggggggttctgaccccctccgtgccgcagttaacacaataagtatcccacctggggagtacgatcgtcaggttgaactcaaagggaattgacgggggcccgcccaagcgggtggagtatgtggtttaattggaagcaacggaaagacccttaccagggcttgacatcccaaggccgggcctagagatagccctttttattcggagacttcggcgacaggtggtgcatggttgtcgtcagctcgtgtcgtgagatgttgggttaagtcccgcaacgagcgcaacccctattgttagttgttacgcaagagcactctagcgagactgccgtggacaaaacggaggaaggtggggacgacgtcaaatcatcatgccccttatgtcctgggccacacacgtactacaatggtggttaacagagggaggcaagaccgtgaggtggagcaaatccctaaaagccatcccagttcggattgcaggctgcaacccgcctgcatgaagttggaatcgctagtaatcgcggatcagcatgccgcggtgaatacgttcccgggccttgtacacaccgcccgtcacaccatgagagtcgggaacacccgaagtccgtagcctaacagcaatgggggcgcggccgaaggtgggttcgataattggggtgaa

SEQ ID NO: 2415 - DNA, 1420 bp, Artificial Sequence; identical to SEQ ID NO: 968
  Synthetic polymer

SEQ ID NO: 2416 - DNA, 1454 bp, Artificial Sequence; identical to SEQ ID NO: 65
  Synthetic polymer

SEQ ID NO: 2417 - DNA, 1391 bp, Artificial Sequence; identical to SEQ ID NO: 347
  Synthetic polymer

SEQ ID NO: 2418 - DNA, 1453 bp, Artificial Sequence; identical to SEQ ID NO: 1053
  Synthetic polymer

SEQ ID NO: 2419 - DNA, 1398 bp, Artificial Sequence; identical to SEQ ID NO: 648
  Synthetic polymer

SEQ ID NO: 2420 - DNA, 1394 bp, Artificial Sequence
  Synthetic polymer
ttagagtttgatcctggctcaggatgatttctggcggcgtgcttaacacatgcaagtcgaacggagtacccttgaaggagttttcggacaactgaaaggactacttagtggcggacgggtgagtaacgcgtgagtaacctgccttggagtggggaataacagttggaaacagctgctaataccgcataatatgtctgtgtcgcatggcactggacatcaaagatttatcgctctgagatggactcgcgtctgattagctggttggcggggtaacggcccaccaaggcgacgatcagtagccggactgagaggttggccggccacattgggactgagacacggcccagactcctacgggaggcagcagtggggaatattgggcaatgggcgcaagcctgacccagcaacgccgcgtgaaggaagaaggctttcgggttgtaaacttcttttctcagggacgaagaaagtgacggtacctgaggaataagccacggctaactacgtgccagcagccgcggtaatacgtaggtggcaagcgttatccggatttactgggtgtaaagggcgtgtaggcgggactgcaagtcagatgtgaaaaccacgggctcaacctgtggcctgcatttgaaactgtagttcttgagtactggagaggcagacggaattcctagtgtagcggtgaaatgcgtagatattaggaggaacaccagtggcgaaggcggtctgctggacagcaactgacgctgaggcgcgaaagcgtggggagcaaacagggttagataccctggtagtccacgctgtaagcgacccataaggggtgggggggggacggacccccctccgtgccgcagttaacacaataagtatcccacctggggagtacgatcgcaaggttgaaactcaaaggaattgacgggggcccgcacaagcggtggagtatgtggtttaattcgaagcaacgcgaagaaccctaccagggcttgacatcccggtgaccgctgtagagatacagttttcccttcggggacaccggtgacaggtggtgcatggttgtcgtcagctcgtgtcgtgagatgttgggttaagtcccgcaacgagcgcaacccttattgttagttgctacgcaagagcactctagcgagactgccgttgacaaaacggaggaaggtggggacgacgtcaaatcatcatgccccttatgtcctgggccacacacgtactacaatggtggtcaacagagggaagcaataccgcgaggtggagcaaatccctaaaagccatcccagttcggatcgcaggctgcaacccgcctgcgtgaagttggaatcgctagtaatcgcggatcagcatgccgcggtgaatacgttcccgggccttgcacacaccgcccgtca

SEQ ID NO: 2421 - DNA, 1348 bp, Artificial Sequence; identical to SEQ ID NO: 763
  Synthetic polymer

SEQ ID NO: 2422 - DNA, 1344 bp, Artificial Sequence; identical to SEQ ID NO: 544
  Synthetic polymer

SEQ ID NO: 2423 - DNA, 1438 bp, Artificial Sequence; identical to SEQ ID NO: 942
  Synthetic polymer

SEQ ID NO: 2424 - DNA, 1395 bp, Artificial Sequence; identical to SEQ ID NO: 739
  Synthetic polymer

SEQ ID NO: 2425 - DNA, 1523 bp, Artificial Sequence; identical to SEQ ID NO: 31
  Synthetic polymer

SEQ ID NO: 2426 - DNA, 1395 bp, Artificial Sequence; identical to SEQ ID NO: 541
  Synthetic polymer

SEQ ID NO: 2427 - DNA, 1394 bp, Artificial Sequence
  Synthetic polymer
ttagagtttgatcctggctcaggatgaacgctggcggcgtgcttaacacatgcaagtcgaacggagaacccttgaacgagttttcggacaagtgataggaattcttagtggcggacgggtgagtaacgcgtgaggaacctgccttggagaggggaataacacagtgaaaattgtgctaataccgcatgatgcagttgggtcgcatggctctgactgccaaagatttatcgctctgagatggcctcgcgtctgattagctggttggcggggtaacggcccaccaaggcgacgatcagtagccggactgagaggttggccggccacattgggactgagacacggcccagactcctacgggaggcagcagtggggaatattgggcaatgggcgcaagcctgacccagcaacgccgcgtgaaggaagaaggctttcgggttgtaaacttcttttatgagggacgaaggaagtgacggtacctcatgaataagctccggctaactacgtgccagcagccgcggtaatacgtagggagcaagcgttatccggatttactgggtgtaaagggcgtgtaggcgggagtgcaagtcagatgtgaaaactatgggctcaacccatagcctgcatttgaaactgtacttcttgagtactggagaggcaggcggaattccgtgtgtagcggtgaaatgcgtagatatacggaggaacaccagtggcgaaggcggcctgctggacagcaactgacgctaaggcgcgaaagcgtggggagcaaacaggattagataccctggtagtccacgctgtaaacgatcgatacaaggtgtggggggactgaccccatccgtgacgcagctaatgtcaataagtatcgctcctggggagtaggatcacaaggtggaaattcaagaggattgatgggggcgtgcccaagcggtggtgtttgtggtttaatttgaagcaacgccaagagcctttccagggcttgacatcctgcttccgaggtagagctacattaggtgccctttggggaaagcagagactgttggtgcatggttgttgtcagctgttttcgtgagatgttgggttaagtcccgcaacgagctcaacccctattgttagttgctacgcacgagcactctagcgagactcccgttgacaaaacggaggaaggtggggatgacgtcaaatcatcatgccccttatgtcctgggccacacacgtactacaatggcggtcaacagagggaggcaaaaccgcgaggtggagcgaacccctaaaagccgtcccagttcagattgtgggctgcaacccgcccacatgaagtcggaatcgctagtaatcgcggatcagcatgccgcggtgaatacgttcccgggccttgtacacaccgcccgtca

SEQ ID NO: 2428 - DNA, 1391 bp, Artificial Sequence; identical to SEQ ID NO: 437
  Synthetic polymer

SEQ ID NO: 2429 - DNA, 1399 bp, Artificial Sequence
  Synthetic polymer
ttcgcccttagagtttgatcctggctcaggatgaacgctggcggcgtgcttaacacatgcaagtcgaacggaggacccttgacggagttttcggacaacggataggaatccttagtggcggacgggtgagtaacgcgtgaggaacctgccttggagaggggaataacacagagaaatttgtgctaataccgcatgatgcagttgggtcgcatggctctgactgccaaagatttatcgctctgagatggcctcgcgtctgattagctagttggtagggtaatggcctaccaaggcgacgatcagtagccggactgagaggttgaccggccacattgggactgagacacggcccagactcctacgggaggcagcagtggggaatattgggcaatgggcgcaagcctgacccagcaacgccgcgtgaaggaagaaggctttcgggttgtaaacttcttttatgagggacgaaggaagtgacggtacctcatgaataagctccggctaactacgtgccagcagccgcggtaatacgtagggagcgagcgttatccggatttactgggtgtaaagggcgtgtaggcggggaagcaagtcagatgtgaaaaccagtggctcaaccactggcctgcatttgaaactgtttttcttgagtgatggagaggcaggcggaattccgtgtgtagcggtgaaatgcgtagatatacggaggaacaccagtggcgaaggcggcctgctggacattaactgacgctgaggcgcgaaagcgtggggagcaaacaggattagataccctggtagtccacgctgtaaacgatggatactaggtgtggggggactgaccccttccgtgccgcagttaacacaataagtatcccacctggggagtacgatcgcaaggttgaaactcaaaggaattgacgggggcccgcacaagcggtggagtatgtggtttaattcgaagcaacgcgaagaaccttaccagggcttgacatcccacggctggaattagagatagttctttctcttcggagactgtggagacaggtggtgcatggttgtcgtcagctcgtgtcgtgagatgttgggttaagtcccgcaacgagcgcaacccctattgttagttgctacgcaagagcactctagcgagactgccgttgacaaaacggaggaaggtggggacgacgtcaaatcatcatgccccttacgtcttgggctacacacgtgctacaatggctgtaacaaagggaagcgactgggcaaccagaagcgaatctcataaaagcagtcccagttcggattgtgggctgcaacccgcccacatgaagtcggagttgctagtaatcgcggatcagcatgccgcggtgaatacgttcccgggccttgcactcaccgcccgtca

SEQ ID NO: 2430 - DNA, 1363 bp, Artificial Sequence
  Synthetic polymer
gacgaacgctggcggcgtgcttaacacatgcaagccgaacggagcacccctgaatgaggtttcggccaaaggaagggaatgcttagtggcggactggtgagtaacgcgtgaggaacctgcctttcagagggggacaacagttggaaacgactgctaataccgcatgacacatgaatggggcatcccattgatgtcaaagatttatcgctgaaagatggcctcgcgtcccattagctagtaggcggggtaacggcccacctaggcgacgatgggtagccggactgagaggttgaccggccacattgggactgagatacggcccagactcctacgggaggcagcagtggggaatattgggcaatggacgcaagtctgacccagcaacgccgcgtgaaggaagaaggctttcgggttgtaaacttcttttgtcagggaacagtagaagagggtacctgacgaataagccacggctaactacgtgccagcagccgcggtaatacgtaggtggcaagcgttgtccggatttactgggtgtaaagggcgtgcagccgggctggcaagtcaggcgtgaaatcccagggctcaaccctggaactgcgtttgaaactgctggtcttgagtaccggagaggtcatcggaattccttgtgtagcggtgaaatgcgtagatataaggaagaacaccagtggcgaaggcggatgactggacggcaactgacggtgaggcgcgaaagcgtggggagcaaacaggattagataccctggtagtccacgctgtaaacgatcaatactaggtgtgcggggactgaccccccgcgtgccgcagttaacacaataagtattgcacctggggagtacgatcgcaaggttgaaactcaaaggaattgacgggggcccgcacaagcggtggattatgtggtttaatttgaagcaacgcgaagaaccttaccagggcttgacatcctactaacgaagtagagatacattaggtgcccttcggggagagtagagacaggtggtgcatggttgtcgtcagctcgtgtcgtgagatgttgggttaagtcccgcaacgagcgcaacccctatcctcagtagccagcatttaaggtgggcactctggggagactgccagggataacctggaggaaggcggggaggacgtcaaatcatcatgccccctatgatttgggctacacacgtgctacaatggcgtaaacaaagggaagcgagatcgtgagatggagcaaatcccaaaaataacgtcccagttcggactgtagtctgcaacccgactacacgaagctggaatcgctagtaatcgcggatcagaatgccgcggtgaataaaatcccgggtcttgcaca

SEQ ID NO: 2431 - DNA, 1407 bp, Artificial Sequence; identical to SEQ ID NO: 118
  Synthetic polymer

SEQ ID NO: 2432 - DNA, 1394 bp, Artificial Sequence
  Synthetic polymer
agagtttgatcctggctcaggatgaacgctggcggcgtgcctaacacatgcaagtcgaacgaagcaggggggcggaatctctccggaggggaagcccccctgactgagtggcggacgggtgagtaacgcgtggacaacctaccccgcactgggggacaacagccggaaacggctgctaataccgcatatgcgcacggccccgcatggggccgcgcggaaagcgcatgcggtgcgggatgggtccgcgtctgattagcttgttggcggggtaacggcccaccaaggcgacgatcagtagccggcctgagaggttggccggccacattgggactgagatacggcccagactcctacgggaggcagcagtggggaatattgggcaatgggcgcaagcctgacccagcaacgccgcgtgaaggaagaaggctttcgggttgtaaacttcttttgacagggaagagcagaagacggtacctggcgaataagccacggctaactacgtgccagcagccgcggtaatacgtaggtggcaagcgttatccggatttactgggtgtaaagggcgtgtaggcggggaagcaagtcagatgtgaaaaccacgggctcaacctgtggcctgcatttgaaactgtttttcttgagtgctggagaggcaatcggaattccgtgtgtagcggtgaaatgcgtagatatacggaggaacaccagtggcgaaggcggattgctggacagtaactgacgctgaggcgcgaaagcgtggggagcaaacaggattagataccctggtagtccacgctgtaaacgatggatactaggtgtggggggtctgaccccttccgtgccgcagttaacacaataagtatcccacctggggagtacgatcgcaaggttgaaactcaaaggaattgacgggggcccgcacaagcggtggagtatgtggtttaattcgaagcaacgcgaagaaccttaccagcccttgacatcctgctggcagcccggtaatgcgggctttcctacgggacagcagagacaggtggtgcatggttgtcgtcagctcgtgtcgtgagatgttgggttaagtcccgcaacgagcgcaacccctgcttacagtagccagcagcaaggctgggcactctgtaaggactgccggggataacccggaggaaggcggggacgacgtcaaatcatcatgccccttatgggctgggctacacacgtgctacaatggcgccaacagagtgaggcaaacctgcgagggggagcaaagcacaaaaaaggcgtcccagttcggattacagcctgcaacccggctgtatgaagctggaatcgctagtaatcgcagatcagaatgctgcggtgaatacgttcccgggtcttgtactcaccgcccgtca

SEQ ID NO: 2433 - DNA, 1443 bp, Artificial Sequence
  Synthetic polymer
gcgtgcttaacacatgcaagtcgaacggagtgcctttgaaagaggattcgtccaattgataaggttacttagtggcggacgggtgagtaacgcgtgaggaacctgccttggagtggggaataacacagtgaaaattgtgctaataccgcataatgcagttgggtcgcatgactctgactgccaaagatttatcgctctgagatggcctcgcgtctgattagctagttggtggggtaacggcccaccaaggcgacgatcagtagccggactgagaggttggccggccacattgggactgagacacggcccagactcctacgggaggcagcagtggggaatattgggcaatgggcgcaagcctgacccagcaacgccgcgtgaaggaagaaggctttcgggttgtaaacttcttttcttagggacgaagcaagtgacggtacctaaggaataagccacggctaactacgtgccagcagccgcggtaatacgtaggtggcaagcgttatccggatttactgggtgtaaagggcgtgtaggcgggattgcaagtcagatgtgaaaaccacgggctcaacctgtggcctgcatttgaaactgtaggtcttgagtaccggagaggttatcggaattccttgtgtagcggtgaaatgcgtagatataaggaagaacaccagtggcgaaggcggataactggacggcaactgacggtgaggcgcgaaagcgtggggagcaaacaggattagataccctggtagtccacgctgtaaacgatggatactaggtgtgcggggactgaccccctgcgtgccgcagttaacacaataagtatcccacctggggagtacgatcgcaaggttgaaactcaaaggaattgacgggggcccgcacaagcggtggattatgtggtttaattcgaagcaacgcgaagaaccttaccagggcttgacatcctactaacgaagtagagatacatcaggtgcccttcggggaaagtagagacaggtggtgcatggttgtcgtcagctcgtgtcgtgagatgttgggttaagtcccgcaacgagcgcaacccctattgttagttgctacgcaagagcactctagcgagactgccgttgacaaaacggaggaaggtggggacgacgtcaaatcatcatgccccttatgtcctgggctacacacgtaatacaatggcggtcaacagagggaggcaaagccgcgaggcagagcaaacccccaaaagccgtcccagttcggatcgcaggctgcaacccgcctgcgtgaagtcggaatcgctagtaatcgcggatcagcatgccgcggtgaatacgttcccgggccttgtacacaccgcccgtcacaccatgagagtcgggaacacccgaagtccgtagcctaaccgcaaggagggcgcggccgaaggtgggttcgataattggggtgaag

SEQ ID NO: 2434 - DNA, 1490 bp, Artificial Sequence
  Synthetic polymer
agttcgattatggctcaggatgaacgctggcggcgtgcttaacacatgcaagtcgaacggagtacccctgaaggagttttcggacaacggaagggactgcttagtggcggacgggtgagtaacgcgtgaggaacctgccttggagtggggaataacaggtggaaacatctgctaataccgcatgatgcagttgggtcgcatggctctgactgccaaagatttatcgctctgagatggactcgcgtctgattagctggttggcggggtaacggcccaccaaggcgacgatcagtagccggactgagaggttggccggccacattgggactgagacacggcccagactcctacgggaggcagcagtggggaatattgggcaatgggcgaaagcctgacccagcaacgccgcgtgaaggatgaaggtcctcggattgcaaacttcttttgtcagggacgaagcaagtgacggtacctgacgaataagccacggctaactacgtgccagcagccgcggtaatacgtaggtggcaagcgttatccggatttactgggtgtaaagggcgtgtaggcggggaagcaagtcagatgtgaaaactatgggctcaacccatagcctgcatttgaaactgtttttcttgagtgctggagaggcaatcggaattccgtgtgtagcggtgaaatgcatagatatacggaggaacaccagtggcgaaggcggattgctggacagtaactgacgctgaggcgcgaaagcgtggggagcaaacaggattagataccctggtagtccacgctgtaaacgatggatactaggtgtggggggactgaccccctccgtgccgcagtcaacacaataagtatcccacctggggagtacgatcgcaaggttgaaactcaaaggaattgacgggggcccgcacaagcggtggagtatgtggtttaattcgaagcaacgcgaagaaccttaccagggcttgacatggagtggaccggcgtagagatacgcttttctcttcggagaccgctcacacaggtggtgcatggttgtcgtcagctcgtgtcgtgagatgttgggttaagtcccgcaacgagcgcaacccttattgttagttgctacgcaagagcactctagcgagactgccgttgacaaaacggaggaaggtggggacgacgtcaaatcatcatgccccttatgtcctgggccacacacgtactacaatggcggccaacagagggaagcaaaaccgcgaggtggagcaaatccctaaaagccgtcccagttcggatcgcaggctgcaacccgcctgcgtgaagttggaatcgctagtaatcgcggatcagcatgccgcggtgaatacgttcccgggccttgtacacaccgcccgtcacaccatgagagtcgggaacacccgaagtccgtagcctaaccgcaaggggggcgcggccgaaggtgggttcgataattggggtgaagtcgtaaaaaggtagcc

SEQ ID NO: 2435 - DNA, 1399 bp, Artificial Sequence
  Synthetic polymer
ttcgcccttagagtttgatcctggctcaggatgaacgctggcggcgtgcttaacacatgcaagtcgaacggagagctaaagacagaggattcgtccaatggatttagtttcttagtggcggacgggtgagtaacgcgtgagtaacctgccttggagtggggaataacacagggaaacctgtgctaataccgcatgaagcagttgtgccgcatggcactgactgccaaagatttatcgctctgagatggactcgcgtctgattagctagttggcggggcaacggcccaccaaggcgacgatcagtagccggactgagaggttggccggccacattgggactgagacacggcccagactcctacgggaggcagcagtggggaatattgggcaatgggcgcaagcctgacccagcaacgccgcgtgaaggaagaaggctttcgggttgtaaacttcttttgtcagggacgaagcaagtgacggtacttgacgaataagccacggctaactacgtgccagcagccgcggtaatacgtaggtggcaagcgttatccggatttactgggtgtaaagggcgtgtaggcgggactgcaagtcagatgtgaaaactcggggctcaaccccgagcctgcatttgaaactgtagttcttgagtactggagaggcagacggaattcctagtgtagcggtgaaatgcgtagatattaggaggaacaccagtggcgaaggcggtctgctggacagcaactgacgctaaggcgcgaaagcgtggggagcaaacaggattagataccctggtagtccacgctgtaaacgatggatactaggtgtggggggtctgaccccctccgtgccgcagttaacacaataagtatcccacctggggagtacgatcgcaaggttgaaactcaaaggaactgacgggggcccgcacaagcggtggagtatgtggtttaattcgaagcaacgcgaagaaccttaccagggcttgacatcccggcgaccggcatagagatatgcttttcccttcggggacgccggagacaggtggtgcatggttgtcgtcagctcgtgtcgtgagatgttgggttaagtcccgcaacgagcgcaacccttattgttagttgctacgcaagagcactctagcgagactgccgttgacaaaacggaggaaggtggggacgacgtcaaatcatcatgccccttatgtcctgggctacacacgtactacaatggtggtcaacagagggaggcaaaaccgcgaggtggagcaaacccctaaaagccatcccagttcggatcgcaggctgcaacccgcctgcgtgaagttggaatcgctagtaatcgcggatcagcatgccgcggtgaatacgttcccgggtcttgcactcaccgcccgtca

SEQ ID NO: 2436 - DNA, 1488 bp, Artificial Sequence
  Synthetic polymer
gtttgatctggctcaggatgaacgctggcggcgtgcttaacacatgcaagtcgaacgagaaccaatggattgaggattcgtccaaatgaagttgggggaagtggcggacgggtgagtaacgcgtgagcaatctgccttggagtggggaataacacaacgaaagctgtgctaataccgcatgaagtgtctgtatcgcatggtactgggcaccaaagatttatcgctctgagatgagctcgcgtctgattagcttgttggcggggtaacggcccaccaaggcgacgatcagtagccggactgagaggttggccggccacattgggactgagacacggcccagactcctacgggaggcagcagtggggaatattgggcaatgggcgcaagcctgacccagcaacgccgcgtgaaggaagaaggctttcgggttgtaaacttcttttctgagggacgaagcaagtgacggtacctaaggaataagccacggctaactacgtgccagcagccgcggtaatacgtaggtggcaagcgttatccggatttattgggtgtaaagggcgtgtaggcgggaatgcaagtcagatgtgaaaactatgggctcaacccatagcctgcatttgaaactgtatttcttgagtgctggagaggcaatcggaattccgtgtgtagcggtgaaatgcgtagatatacggaggaacaccagtggcgaaggcggattgctggacagtaactgacgctgaggcgcgaaagcgtggggagcaaacaggattagataccctggtagtccacgccgtaaacgatggatactaggtgtggggggactgaccccctccgtgccgcagctaacgcaataagtatcccacctggggagtacgatcgcaaggttgaaactcaaaggaattgacgggggcccgcacaagcggtggagtatgtggtttaattcgaagcaacgcgaagaaccttaccagggcttgacatcctactaacgaaccagagatggattaggtgcccttcggggaaagtagagacaggtggtgcatggttgtcgtcagctcgtgtcgtgagatgttgggttaggtcccgcaacgagcgcaacccttattgttagttgctacgcaagagcactctagcgagactgccgttgacaaaacggaggaaggtggggacgacgtcaaatcatcatgccccttacgtcctgggccacacacgtactacaatggcggccaacaaagagaggcaagaccgcgaggtggagcaaatctcaaaaagccgtcccagttcggatcgcaggctgcaacccgcctgcgtgaagttggaatcgctagtaatcgcggatcagcatgccgcggtgaatacgttcccgggccttgtacacaccgcccgtcacaccatgagagtcgggaacacccgaagtccgtagcctaaccgcaaggggggcgcggccgaaggtgggttcgataattggggtgaagtcgtaacaaggtatcc

SEQ ID NO: 2437 - DNA, 1383 bp, Artificial Sequence; identical to SEQ ID NO: 288
  Synthetic polymer

(The sequence listing continues in the following parts.)

1.-107. (canceled)

108. A method of manufacture, the method comprising:
selecting a bacterial strain for incorporation into a pharmaceutical composition for the treatment of a gastrointestinal disorder, wherein the bacterial strain is from a stool of a human donor, and wherein the bacterial strain is selected based on the presence of the bacterial strain in a microbial composition which achieved a therapeutically effective result when administered to one or more patients with the gastrointestinal disorder; and
incorporating the bacterial strain into the pharmaceutical composition.

109. The method of claim 108, wherein the microbial composition comprises fecal bacteria derived from stool of the human donor.

110. The method of claim 108, wherein the bacterial strain is enriched in the stool of the human donor relative to a stool of the one or more patients collected prior to said administering.

111. The method of claim 110, wherein the bacterial strain is enriched in the stool of the human donor by at least five-fold.

112. The method of claim 108, wherein the bacterial strain is enriched in the stool of the human donor relative to a stool of a second human donor, wherein administration to the one or more patients of a second microbial composition comprising fecal bacteria derived from the stool of the second human donor does not produce the therapeutically effective result.

113. The method of claim 112, wherein the bacterial strain is enriched in the stool of the human donor by at least five-fold.

114. The method of claim 108, wherein the bacterial strain is further selected based on production by the bacterial strain of a secreted product that treats the gastrointestinal disorder.

115. The method of claim 114, wherein the secreted product is a short-chain fatty acid (SCFA).

116. The method of claim 115, wherein the SOFA is selected from the group consisting of formic acid, acetic acid, propionic acid, butyric acid, isobutyric acid, valeric acid, isovaleric acid, and a combination thereof.

117. The method of claim 108, wherein the bacterial strain is a member of a genus selected from the group consisting of: Odoribacter, Faecalibacterium, Alistipes, Bacteroides, Eubacterium, Roseburia, and a combination thereof.

118. The method of claim 108, wherein incorporating the bacterial strain into the pharmaceutical composition comprises encapsulating the bacterial strain.

119. The method of claim 108, wherein the gastrointestinal disorder is Inflammatory Bowel Disease (IBD) or a related disease.

120. The method of claim 108, wherein the bacterial strain comprises a 16S rRNA sequence that is greater than about 97% identical to the 16S rRNA sequence of any one of the operational taxonomic units (OTUs) recited in Table 5 and/or any one OTU of a genus recited in Table 6.

121. A method comprising:
selecting a bacterial strain for incorporation into a pharmaceutical composition for the treatment of a gastrointestinal disorder, wherein the bacterial strain is from a stool of a human donor, wherein the bacterial strain is selected based on enrichment of the bacterial strain in the intestine of one or more patients administered a microbial composition comprising the bacterial strain, and wherein administration of the microbial composition to the patient treated the gastrointestinal disorder; and
incorporating the bacterial strain into the pharmaceutical composition.

122. The method of claim 121, wherein the microbial composition comprises fecal bacteria derived from stool of the human donor.

123. The method of claim 121, wherein the bacterial strain is further selected based on production by the bacterial strain of a secreted product that treats the gastrointestinal disorder.

124. The method of claim 121, wherein the secreted product is a short-chain fatty acid (SOFA).

125. The method of claim 121, wherein the bacterial strain is a member of a genus selected from the group consisting of: Odoribacter, Faecalibacterium, Alistipes, Bacteroides, Eubacterium, Roseburia, and a combination thereof.

126. The method of claim 121, wherein the gastrointestinal disorder is Inflammatory Bowel Disease (IBD) or a related disease.

127. The method of claim 121, wherein the bacterial strain comprises a 16S rRNA sequence that is greater than about 97% identical to the 16S rRNA sequence of any one of the operational taxonomic units (OTUs) recited in Table 5 and/or any one OTU of a genus recited in Table 6.
